United States Patent Application Publication US 2005/0208558 A1 - sequence listing, part 32

SEQ ID NO: 34024 - DNA, 5127 bp, DROSOPHILA
tacacaatgcgttccatctgcagcccaacgagccgaacgagcggacacaccttctcgtggacccggtgaaccatagtcctgcccttcgacggagcaactccgatggcctcagcaccgactacgcccactcccttcccaagaaggacgatcagaacgccctctccagactggtgcagaatactgcgatgtacgtagttgatagtgtatagggtccacatttggcactatcatatacaattccattgattggaatgctagcattttacagcgattgctatactatactatactatagtagtatacctacgtagttatagcgatggcaggatctagtatgtagtatggttatacccaagcatttatcgggatgttcaatgcaacaaagcaacacagccctaattatcgcttatctatattatatttgtattcgcttatacgctactttgctctccagaaacatgataaacgttggagccatggactgtcacagcctggagcaccaggagtacgccgatagaataagattgtactcgcagcggttgcatcaacagtggaacaacggccagcacgccagtatcgcaccaaaaggtttgcaatatagctagattgaaagggtgaatgatgactaacaattaaatgaacaacaggtctccttaaagatgtaccaagccatcagttctatctgtctaagccaacctatccagatgacactgctcaagtgagttttacttttcgcaaattgcttgttgcttaccaatttcgtatgtttttagatgaagctcttcaccgagaaggcacacatcagtgtctcgcacatacagatcgaccacaaagaggccgtggttgttcccttccggattccctgattatcgtatcttaagtgaaataaagtgataaatttatataaaatcaaaatctatattggtactaagtagcccttgaataaccaggtaatcgacttattttcattaagtgtacagaagcaaataaatacatactatattcttaacacggcaagacattttttttatttaggaaggcacacacacacacatatagctaaaatccaaaatgtcgttcgatcttaaccataaattttgggtctacacgcgcaaggaaattggtaaattaatcaagaagcagaaccgcctgaagaagattgagccgccagaggaaaaggcagtatcgtataaaatttacgcagagctctatgttttgtatgtggagctggtcaataagttaagtttcatataccacaatactttccaagtgcaaaagcgggcattggtacgtgttttggtggagaatgccactcagcagctaatgcaactcaaggaggagttaaaagacttggaaatgagcgaatacatttacatagataaggcgctgatcgctaggaagctaacaccacgggacctggtcgtatggaggtcaccacaattcctttaccgtcgcccgttggacattcaaaatatcattgccgacaaccgattgtacatgaacgatgaggaaaaggaagaaaaggcagcccaggattgggttccgatcagtgaggcggtcaagcttatccaagctcacgagagggcgcgccgagctcgggtttacaagtccaacataaagtacgacaagaaaaagttcctcaaggtccatcaaagaaagaaaataaattacaaattcacctttaagcctgatcaggcaatgagtattcccgtgaagagaaccattttttcagctgacttcttgaaggcggacgagtcctgcgaaaatcttatcaaaaaggatgatgtagcggataccgcaatagatggcaagtagctagatcgtttcaaaacaattaatttggtttttaattattttctagatgaggaagccttaagtgcaatacagaacaatgctgcttgtaaaatccaaagttgttggcgtggttacaagacgcggaaaatagttaagattaggaagcggttcaaggaggaattgtatggtatgaagaaaattaggaaactgaagcgacccaatcagacggcaaattctattatggaaatgtacaagaacgagatgctcaagaagaagctggatgaggacttcatcaacttgatcaacgatgagcgcacccgattgctgcaattccgaagtccatggatgatggaagatatatccgatcatatccgggcatggttcaaggaattgtgagttgtttttcattgaggcaaaaaaggcaaaaacgtataactcgtacttaacagctacgacgcgactgggaattttcatccttatcccgatcctgtaaaacaaggaacggtactggttgtcattgatgaaacaatgacgccaatggaatttcaggaaagccttggtaaaaagccgctgtcaaaagccgagttgaagaaacttcgcgataaggagaagaaagagaaaaggaaaaagaaggaaaagctaaaacaactgaaaatgaaggaagctaaacgtcggaagaaattgagagacgctggagtcatcgatattggctacgagctaactgcaagcaaggcaattggtagatagtttgacttaatggagaatgtttccattgtctccaaatactctcttcaattttagaaaacattgaagaaacaatgaagaagtactccaaggactggagaaatgtcgatgaatatctaaacaagaatcatgatcccatcaaggaatgggttactgaggagcaactggcaaagattcatcaggaagtgaggggcttggtcgacgaatacatgaggtaaatttatttatatttacaatgaaaatataacttttcaacttccagggttgagtatgagttgctgcgggaggccttggcgaaggataacgatgagaagtacaaggctctcaaggtgaagtatcctaagaagaagaaggagaagaggaagaagaagcccaaggacatgacaggcgatcggacactggaatccctgtacaatgagctcaaagatgccggcataatagaggaaattggtcatagggactttgatgagttcataacggacttcaactttgtggcagacgacactcgagatgaagatggcttaacgtatgttgtagttatttgttgaaagagctactaagcctaacaaaaaaaattaatatcgatttaaaattcagcacattgggcccagcaaagggtgacattaaaatggttatccaagagtcgatgctgggaatgggcgaattcgatgttccgaagccgaagtctcttttgctaattggacctctgaatagcggaaaacgattgctgtgtgaaatcattgcatccgaactaggtatagtaacattttgttgggaattgttccttttttttttttttttttttttgtcggagcacttaaaccttctgtctactccagatgcagtttttatgaacctaagtcccgagaatacctacaaatatgccaaagacttgaagtacttcctgcatgttattctaaaagtggctaaggcttttcagcccaccataatgtacatcgaggaagcgcatagactattttggaaaaaggttccgcctgaggcagtggagattaaccccagactgctgggcacctcgttagctagcaagatcttgaaaccactgaagaaaaatgacaaaattgtactagtcggcacgagtaacatgccctgggcggccaatggaggcatcaagcgagcgttccaaaaagtactgcttattccgaagtgcgattacggcactagcttcctgctgtggctggaactgatgaccgagaacgcgccagatgacatgaaggagtacgcctactcggcactggcacgcgtccttcaggcgtacaactccggcgacattgatgataacgttaaggagaccttgaacatcgaccgtaagatgcgactcaagaatgaggcattggatccgaacgagttccttgaatatttcctgagcaagaatgagcctcccattttccctccagatgagaaggtatacttgcttacttaatacatgtttagcaactaagtcatttaactgaaattctttttagataatggataagttcaataaatggttcggcagctcaaacaagctggaaaagctgagaaaatcgtatatggctcaaaagttggcgaaggcaagcaaaaagaaataaataaatcagtttaaaacttatttaaatatgcattttcatatataactatttgtaagtgtaaacttaccttggccttaaactaatgatactatggaagtgcagatgttctttgtgtcttttttattgaaaatatataaccaaagttttcctatggaaaatagtatctaacgaaatgaaataatttgtgtaaaatgtagttcttatatattaagcatgtcatttaattgtttgtttgttgttgtggtaaaaactcctccaactcagaatcttcaatttcacacagtcgaaccgaaatgttgctgttggatccaatttctccgacagtgcatggaaataggtatgcctcctctgaattttctgcataattagagagaatcgtgatatttgtaagatatgtaaaggcatttcccttgcttaccacttatcgtcctcctggtttttatttccatcctagaaatcggcccctcggtcatagagctttccccatcggtctcacttggaaaatgcatcgtcggtaaatacgaatcaggatgtcttaaatatactttgcctgtggaatagatcagatatggacattttgaagtaagattcttgtaacattttatgtggttaatatgcagtaacaaatatttttaatttaatacaggttcagtataaaaaaagcattgacctaaatttataaataaccattggactattacttataatgaatacaaaacttacacgaatgactaactttcgacggtaaaggcactgattgcatgaaatgaagtagtttaataggttagtatacaaagatgttatttgttagaaagtttaaaggaataacaaaattacttataagaggaaagagttagatattgtgtgcaatatgtattaaataaattgttgaaattataaaatgaaaaatgaactgcgattttgtaacagccaataagataaatcagcttgttatgaacataaacatgaaaacgtttagtgataataatcaattcccttt

SEQ ID NO: 34025 - DNA, 2642 bp, DROSOPHILA
tattcttaacacggcaagacattttttttatttaggaaggcacacacacacacatatagctaaaatccaaaatgtcgttcgatcttaaccataaattttgggtctacacgcgcaaggaaattggtaaattaatcaagaagcagaaccgcctgaagaagattgagccgccagaggaaaaggcagtatcgtataaaatttacgcagagctctatgttttgtatgtggagctggtcaataagttaagtttcatataccacaatactttccaagtgcaaaagcgggcattggtacgtgttttggtggagaatgccactcagcagctaatgcaactcaaggaggagttaaaagacttggaaatgagcgaatacatttacatagataaggcgctgatcgctaggaagctaacaccacgggacctggtcgtatggaggtcaccacaattcctttaccgtcgcccgttggacattcaaaatatcattgccgacaaccgattgtacatgaacgatgaggaaaaggaagaaaaggcagcccaggattgggttccgatcagtgaggcggtcaagcttatccaagctcacgagagggcgcgccgagctcgggtttacaagtccaacataaagtacgacaagaaaaagttcctcaaggtccatcaaagaaagaaaataaattacaaattcacctttaagcctgatcaggcaatgagtattcccgtgaagagaaccattttttcagctgacttcttgaaggcggacgagtcctgcgaaaatcttatcaaaaaggatgatgtagcggataccgcaatagatggcaattgttggcgtggttacaagacgcggaaaatagttaagattaggaagcggttcaaggaggaattgtatggtatgaagaaaattaggaaactgaagcgacccaatcagacggcaaattctattatggaaatgtacaagaacgagatgctcaagaagaagctggatgaggacttcatcaacttgatcaacgatgagcgcacccgattgctgcaattccgaagtccatggatgatggaagatatatccgatcatatccgggcatggttcaaggaattctacgacgcgactgggaattttcatccttatcccgatcctgtaaaacaaggaacggtactggttgtcattgatgaaacaatgacgccaatggaatttcaggaaagccttggtaaaaagccgctgtcaaaagccgagttgaagaaacttcgcgataaggagaagaaagagaaaaggaaaaagaaggaaaagctaaaacaactgaaaatgaaggaagctaaacgtcggaagaaattgagagacgctggagtcatcgatattggctacgagctaactgcaagcaaggcaattgaaaacattgaagaaacaatgaagaagtactccaaggactggagaaatgtcgatgaatatctaaacaagaatcatgatcccatcaaggaatgggttactgaggagcaactggcaaagattcatcaggaagtgaggggcttggtcgacgaatacatgagggttgagtatgagttgctgcgggaggccttggcgaaggataacgatgagaagtacaaggctctcaaggtgaagtatcctaagaagaagaaggagaagaggaagaagaagcccaaggacatgacaggcgatcggacactggaatccctgtacaatgagctcaaagatgccggcataatagaggaaattggtcatagggactttgatgagttcataacggacttcaactttgtggcagacgacactcgagatgaagatggcttaaccacattgggcccagcaaagggtgacattaaaatggttatccaagagtcgatgctgggaatgggcgaattcgatgttccgaagccgaagtctcttttgctaattggacctctgaatagcggaaaacgattgctgtgtgaaatcattgcatccgaactagatgcagtttttatgaacctaagtcccgagaatacctacaaatatgccaaagacttgaagtacttcctgcatgttattctaaaagtggctaaggcttttcagcccaccataatgtacatcgaggaagcgcatagactattttggaaaaaggttccgcctgaggcagtggagattaaccccagactgctgggcacctcgttagctagcaagatcttgaaaccactgaagaaaaatgacaaaattgtactagtcggcacgagtaacatgccctgggcggccaatggaggcatcaagcgagcgttccaaaaagtactgcttattccgaagtgcgattacggcactagcttcctgctgtggctggaactgatgaccgagaacgcgccagatgacatgaaggagtacgcctactcggcactggcacgcgtccttcaggcgtacaactccggcgacattgatgataacgttaaggagaccttgaacatcgaccgtaagatgcgactcaagaatgaggcattggatccgaacgagttccttgaatatttcctgagcaagaatgagcctcccattttccctccagatgagaagataatggataagttcaataaatggttcggcagctcaaacaagctggaaaagctgagaaaatcgtatatggctcaaaagttggcgaaggcaagcaaaaagaaataa

SEQ ID NO: 34026 - protein, 856 aa, DROSOPHILA
MSFDLNHKFWVYTRKEIGKLIKKQNRLKKIEPPEEKAVSYKIYAELYVLYVELVNKLSFIYHNTFQVQKRALVRVLVENATQQLMQLKEELKDLEMSEYIYIDKALIARKLTPRDLVVWRSPQFLYRRPLDIQNIIADNRLYMNDEEKEEKAAQDWVPISEAVKLIQAHERARRARVYKSNIKYDKKKFLKVHQRKKINYKFTFKPDQAMSIPVKRTIFSADFLKADESCENLIKKDDVADTAIDGNCWRGYKTRKIVKIRKRFKEELYGMKKIRKLKRPNQTANSIMEMYKNEMLKKKLDEDFINLINDERTRLLQFRSPWMMEDISDHIRAWFKEFYDATGNFHPYPDPVKQGTVLVVIDETMTPMEFQESLGKKPLSKAELKKLRDKEKKEKRKKKEKLKQLKMKEAKRRKKLRDAGVIDIGYELTASKAIENIEETMKKYSKDWRNVDEYLNKNHDPIKEWVTEEQLAKIHQEVRGLVDEYMRVEYELLREALAKDNDEKYKALKVKYPKKKKEKRKKKPKDMTGDRTLESLYNELKDAGIIEEIGHRDFDEFITDFNFVADDTRDEDGLTTLGPAKGDIKMVIQESMLGMGEFDVPKPKSLLLIGPLNSGKRLLCEIIASELDAVFMNLSPENTYKYAKDLKYFLHVILKVAKAFQPTIMYIEEAHRLFWKKVPPEAVEINPRLLGTSLASKILKPLKKNDKIVLVGTSNMPWAANGGIKRAFQKVLLIPKCDYGTSFLLWLELMTENAPDDMKEYAYSALARVLQAYNSGDIDDNVKETLNIDRKMRLKNEALDPNEFLEYFLSKNEPPIFPPDEKIMDKFNKWFGSSNKLEKLRKSYMAQKLAKASKKK

SEQ ID NO: 34027 - DNA, 2986 bp, DROSOPHILA
tcagtgctgccaggaggagacaataaattcacttaggcggcggaaacagaagaacaaactgaagggaaaactcaataaattagaccgtattggagagaaaaactgttttttaacggccatattaagttttaaattcttatgaatcttgaactttttcactctacgtaagatattcgaagaacatcagcccattcagaaaccccaatattacacattatgttattatggttttacatttttcagaggttcttcttgtggaaaggatagcaaaagctgtcagcactgccacacatgcccccatgtcatgcagcctcggcaatgaatttgcgtttccgcctcgccgctttcgccatcatggttaaccgcgtcgttgatttaagggcgttctccgttccttgcgagtagctggcgtactccgcatcctttgtccttactgctcgagcgacacaattaaaaatgtgcggcccaattcatttgattggcacgaaggaagcgacgagataagcaacttccgttggctgaaattttggcatcttcatcaatcaagaatgtgctcgttctcgtgggctggctgttggggaaaatgtcatataggttgatagaaaaaacagcaatataaatatttcaaattaataattgatgtctaccaaaagcagttaaattttttaatatcttcacaattattgccgatttccaataaaaatataacaaattaataaagtataaatttaaatcaacttaattcccaataaaaagtatttcataataaataaaacaaggataacgctaggaacagtaagtaataaactagtattcccttatgaaaacccatgaatttaatgtccgattaaaattgtaatatttagcgcctaatcgataacaagtatgtatacagctgttttaaactgtctggtagcactgatcttatcgaatatgtacaattccatccctagaaaaacttgcataaaaaataaagaacaattgaacaattgcatttagaatggagtatgtgcactctgtttggagctacctagcctcgatctgcaactgctggcaatgcaccgaagatccaggtgcgcaggtaatccgcacattcccctttccccgtcaacagaccgaatacacaatgcgttccatctgcagcccaacgagccgaacgagcggacacaccttctcgtggacccggtgaaccatagtcctgcccttcgacggagcaactccgatggcctcagcaccgactacgcccactcccttcccaagaaggacgatcagaacgccctctccagactggtgcagaatactgcgatgtacgtagttgatagtgtatagggtccacatttggcactatcatatacaattccattgattggaatgctagcattttacagcgattgctatactatactatactatagtagtatacctacgtagttatagcgatggcaggatctagtatgtagtatggttatacccaagcatttatcgggatgttcaatgcaacaaagcaacacagccctaattatcgcttatctatattatatttgtattcgcttatacgctactttgctctccagaaacatgataaacgttggagccatggactgtcacagcctggagcaccaggagtacgccgatagaataagattgtactcgcagcggttgcatcaacagtggaacaacggccagcacgccagtatcgcaccaaaaggtttgcaatatagctagattgaaagggtgaatgatgactaacaattaaatgaacaacaggtctccttaaagatgtaccaagccatcagttctatctgtctaagccaacctatccagatgacactgctcaagtgagttttacttttcgcaaattgcttgttgcttaccaatttcgtatgtttttagatgaagctcttcaccgagaaggcacacatcagtgtctcgcacatacagatcgaccacaaagaggccgtggttgttcccttccggattccctgattatcgtatcttaagtgaaataaagtgataaatttatataaaatcaaaatctatattggtactaagtagcccttgaataaccaggtaatcgacttattttcattaagtgtacagaagcaaataaatacatactatattcttaacacggcaagacattttttttatttaggaaggcacacacacacacatatagctaaaatccaaaatgtcgttcgatcttaaccataaattttgggtctacacgcgcaaggaaattggtaaattaatcaagaagcagaaccgcctgaagaagattgagccgccagaggaaaaggcagtatcgtataaaatttacgcagagctctatgttttgtatgtggagctggtcaataagttaagtttcatataccacaatactttccaagtgcaaaagcgggcattggtacgtgttttggtggagaatgccactcagcagctaatgcaactcaaggaggagttaaaagacttggaaatgagcgaatacatttacatagataaggcgctgatcgctaggaagctaacaccacgggacctggtcgtatggaggtcaccacaattcctttaccgtcgcccgttggacattcaaaatatcattgccgacaaccgattgtacatgaacgatgaggaaaaggaagaaaaggcagcccaggattgggttccgatcagtgaggcggtcaagcttatccaagctcacgagagggcgcgccgagctcgggtttacaagtccaacataaagtacgacaagaaaaagttcctcaaggtccatcaaagaaagaaaataaattacaaattcacctttaagcctgatcaggcaatgagtattcccgtgaagagaaccattttttcagctgacttcttgaaggcggacgagtcctgcgaaaatcttatcaaaaaggatgatgtagcggataccgcaatagatggcaagtagctagatcgtttcaaaacaattaatttggtttttaattattttctagatgag

SEQ ID NO: 34028 - DNA, 543 bp, DROSOPHILA
atggagtatgtgcactctgtttggagctacctagcctcgatctgcaactgctggcaatgcaccgaagatccaggtgcgcagcccaacgagccgaacgagcggacacaccttctcgtggacccggtgaaccatagtcctgcccttcgacggagcaactccgatggcctcagcaccgactacgcccactcccttcccaagaaggacgatcagaacgccctctccagactggtgcagaatactgcgataaacatgataaacgttggagccatggactgtcacagcctggagcaccaggagtacgccgatagaataagattgtactcgcagcggttgcatcaacagtggaacaacggccagcacgccagtatcgcaccaaaaggtctccttaaagatgtaccaagccatcagttctatctgtctaagccaacctatccagatgacactgctcaaatgaagctcttcaccgagaaggcacacatcagtgtctcgcacatacagatcgaccacaaagaggccgtggttgttcccttccggattccctga

SEQ ID NO: 34029 - protein, 180 aa, DROSOPHILA
MEYVHSVWSYLASICNCWQCTEDPGAQPNEPNERTHLLVDPVNHSPALRRSNSDGLSTDYAHSLPKKDDQNALSRLVQNTAINMINVGAMDCHSLEHQEYADRIRLYSQRLHQQWNNGQHASIAPKGLLKDVPSHQFYLSKPTYPDDTAQMKLFTEKAHISVSHIQIDHKEAVVVPFRIP

SEQ ID NO: 34030 - DNA, 2736 bp, DROSOPHILA
gtataccaatcacactgtagacacgcccatcctttccgagctcacacttttaaacaattttaaaatattttcttattttatcccccaatatctattgatttcacagaaaaatgatggaatttcgcattcgcattagcagctagtgactgggctactgatcctgatagaatataaattccttatggggccggaaacgcttccacctgttacatacttaagtaaatattatagctttgacttcattaattaagaaacaatcacaatagtaaatggattaataaaacaaataccagagctctcatgaagtaattgtgtgtatttattcaacaagctctcaagcttgttaattttgattttttgtttgtttctggtataaccagttcagtcaggatttagaatcctgattcatatggtcaataatattattgtgtataaaatattaacttttttgcagtgtggtctagtccagcgttgactgtgtgctgaagacataatgggacgatgattggacgtcgaggctgctgttggaggagcaggagctcattgatggcgcccgcgtggatcgggcagaggaggcggaagacgatccgctggaggaggaggaactgacccaggcgtggccactgcgccttcgccgctggcgcaccaggctcaaaaccgatccggccactggagtggagccagagctggccgacacttggcgccggatggcagcattcaaggcgataggaacgggttccggagcaggcgccgtgttcggccgttgtgcagtcgtctcggagccagactccagatcacttgatgccggggatgtggcctcctccatctccaccggagcaggttcaccgttcaacacccgtccatccaacagttgcaacgtgggcacactgcgcgccaggagcgagcggtagagcggtaaacgacacacgggattgccctgcaactccacctcctgcagctgcgggcacattcccaagaaggagagcaggcccagctcactgatccggttgttccttgccttgagaacgcgcaggtggaccagttcggccagcggatcaacccgctggatcatgtttccatcggcgatgagcacacggatggccggcagtccactggtgccgtcgaagctattcaggccgcagttgctgatgtccaaccgggttagctggaggagtccatagcccaggtcgcgcagggagctcagcacactgccactcaggtcgagggattggaggcgcggcaggaagagcgacaggcgggacaggctgactgtgtaagagatcacgcgcagacgcacttgctccaccgcctccagatccgtgcgttgcgtcactcggcgctaagcaaacaatattttaataccacttcatcacttttaattcgtcacaaggttaacgtgcacccaccagtagctcgtccagtgtcggttccgggccctgttggggtagcaccacgggcagcaggtggacgaaggccggaaggtgctgttcctcctcggcaatggccacatcccgatcgaaggagttccggcgacccagttggcggcggttgaactgcatccgctgctgctgctgctgtgcgggattctgctgattgagccgcacctcgggcggaggcatccggacctgggccaaggcggccggtcctggcggtgccagaaggatgggcagttccgcctgaagcgattgatccggagaggactccaggtagtccgcaggtgcctccagcagtggcattattaatatttcttagtgcaacacctacatatgtcttcagtgttctgctgtattttgtctgtccatattgacctaacaacccaagcgtatccactggcaacgctacttggtggcattgtcactttccatttttgttgttcattagatcactatttaacgcttaccggctgaatattataaactataataattttcattaatgagagcaagacattattctgttcacataacaagcaatcaaacaagtctttatctttttaattagctagtttatattgttaacttatagtcaacatgtttatggtcctaagaagtatgcaataaacttccaccattttaccttactaatagatcattgaatgtacatatgtaataattctgtcacataatttgtgtgccccatttttattaaaaaccattttggttaaatttaattgtttactagaagacttacaattcaataacgtctagctttaatcaatggaccttaaatattctttgtgcatgtactgtgtgaataaacttcttatttggccacgctatttcagtataaatttaacgaaaggacttagttttatatcgatctgccattttgcagcattccgtcgccctcattcattccgccgcaacagcgttttctttttggcaatacgcccactgacgtcagtgtgacgtcatggtcgtgacgttcgcactcaaactctttaccaccgaggttttttacattcctctttctgtcaaactcgctcgctctctctctctcttccaggatgtctgtctggcttgggagagcggtgagagtttcgcggttatttctgttcagaggcgaatgaacaggataacaattaattatcagttctagacatttatgtgtaaaatagtcacaaaatttaataacgcaaaatattgattttcaatcattttgttttctgcatattatgttatatggatatatattctggatccgcccgcatcacagacttttgccatttcaagggcc

SEQ ID NO: 34031 - DNA, 1209 bp, DROSOPHILA
atgccactgctggaggcacctgcggactacctggagtcctctccggatcaatcgcttcaggcggaactgcccatccttctggcaccgccaggaccggccgccttggcccaggtccggatgcctccgcccgaggtgcggctcaatcagcagaatcccgcacagcagcagcagcagcggatgcagttcaaccgccgccaactgggtcgccggaactccttcgatcgggatgtggccattgccgaggaggaacagcaccttccggccttcgtccacctgctgcccgtggtgctaccccaacagggcccggaaccgacactggacgagctactgcgccgagtgacgcaacgcacggatctggaggcggtggagcaagtgcgtctgcgcgtgatctcttacacagtcagcctgtcccgcctgtcgctcttcctgccgcgcctccaatccctcgacctgagtggcagtgtgctgagctccctgcgcgacctgggctatggactcctccagctaacccggttggacatcagcaactgcggcctgaatagcttcgacggcaccagtggactgccggccatccgtgtgctcatcgccgatggaaacatgatccagcgggttgatccgctggccgaactggtccacctgcgcgttctcaaggcaaggaacaaccggatcagtgagctgggcctgctctccttcttgggaatgtgcccgcagctgcaggaggtggagttgcagggcaatcccgtgtgtcgtttaccgctctaccgctcgctcctggcgcgcagtgtgcccacgttgcaactgttggatggacgggtgttgaacggtgaacctgctccggtggagatggaggaggccacatccccggcatcaagtgatctggagtctggctccgagacgactgcacaacggccgaacacggcgcctgctccggaacccgttcctatcgccttgaatgctgccatccggcgccaagtgtcggccagctctggctccactccagtggccggatcggttttgagcctggtgcgccagcggcgaaggcgcagtggccacgcctgggtcagttcctcctcctccagcggatcgtcttccgcctcctctgcccgatccacgcgggcgccatcaatgagctcctgctcctccaacagcagcctcgacgtccaatcatcgtcccattatgtcttcagcacacagtcaacgctggactag

SEQ ID NO: 34032 - protein, 392 aa, DROSOPHILA
LESSPDQSLQAELPILLAPPGPAALAQVRMPPPEVRLNQQNPAQQQQQRMQFNRRQLGRRNSFDRDVAIAEEEQHLPAFVHLLPVVLPQQGPEPTLDELLRRVTQRTDLEAVEQVRLRVISYTVSLSRLSLFLPRLQSLDLSGSVLSSLRDLGYGLLQLTRLDISNCGLNSFDGTSGLPAIRVLIADGNMIQRVDPLAELVHLRVLKARNNRISELGLLSFLGMCPQLQEVELQGNPVCRLPLYRSLLARSVPTLQLLDGRVLNGEPAPVEMEEATSPASSDLESGSETTAQRPNTAPAPEPVPIALNAAIRRQVSASSGSTPVAGSVLSLVRQRRRRSGHAWVSSSSSSGSSSASSARSTRAPSMSSCSSNSSLDVQSSSHYVFSTQSTLD

SEQ ID NO: 34033 - DNA, 6337 bp, DROSOPHILA
acggttactacgctacagctacattgaaacgtgttcgctctcaatggcgttccgaaaataccgttcgcttctcattgacgtctacgttgacgtcggcgtgggcgtcactgttacagttaacagtgcgccaggattaacataggttggagactgcgcttaagcatttgacactgccggtcaaaagtcgaatatgtaaaattttagatattaatgttttgaagggcgaggaaattcgtagacatcaaatgttaagaaccaaaatcgatttaattttaaacgtgtctggaagattgttatatcgagcctgtcaaccggtatttaaagcaaaacaatgaatgttgtatagtatttacaaatttttatcatgtgcttaaaccgtggtgtattgtatgctttatcgacgtaagttgagaaagtaacagtatattttgtccccgttaacagaggcagagcagtcggcgtcagagggtaatgttggctttaaagttgggagagctgcgtctatttaagcccctcgcaatgacaaattcgttgttattgcagaacagagtctcgaacgcggtgctttggtttcggttccgttcgcctcgtgaatatttttttaaggaatataagaacaatgcacggataacgcagtaatcgagtaaaaatcgaacgcagtaccgtaacaaagagattgatctatccgataagtgatcagttattcggtcgccaatgatatccgtatgtgcagagtgcgctgaagtggagccttgaggaaatgccaccagctcgcagctgagctgcattcgctgattgtcgttgtggtcgtgtcctctcgcggttgtgtgtgtgtgtgtgtgggtgtgcactgtgttatttgggtcaaaagctgcagcagcacaaagttcccactcccattcccgtttccgtgcccgttcccagggggtgtccacctgttatgcagctggcctagtggctcaactcggctcggatcggatctagcatcccacaagtccaaatggaggcaaaggtgcaccgccagcatcaacggcatcgtcgcacggaggcgcgacagcggcgcctggaacgggaggcggtggctacgggagcggcagctccaacgcccaccacgcccgagcgggcagaggccttggactgtgccacagccctcaacgagggcgtggtatccgcggatccgggcggcagcggcggtacgccaagcagtgcgggtcgcatcagtgcccagagctcggcggacagcatagagctggtgggttcgcccagccagacgtcgcagcaaacggtggtgctggtcaacggccacgccccgccgggccaggaggagggggaggaggagtcgccactgggcgcaggcaataccagggactcaccgccgccgcccaagcagagcgatggcagtcgcaactcatccggcgatgcgatgagtctgcgggagaccctgcagcaactaccggccacccatcaccatcggtccaggcgaactcactcacctgctgatcccgatgcgtcctttcatcgcggaatacttgggtacatggaccgggagctcaagcagagctctcccacgccctccgcccccgccggaaccggaaacggaactggaaacggaactagcacgggcgcatcgagaaaacagcagtccctctccgacccacaggccagtcccgcccagcgatccctgcgttcgaggagcagcttcgacaagagtccgcggcgcaaaaggagcaagtcggagtctcggcggagacgcgaacggaagctaatagccgccggagagatggaggtccggcaggccaacgaaaccctgatgcggtacctcaagcagtgctccgacatgcacgacgcctcgctttccggcgaactcgagatcgaccagagcctcgaggagagacgcgtccaccggaagaccaagtcgcaaagggacaagcggggccagctaatctgtgagtatattttgacttttcgcacttcagccatctctaataacttacttaatgtaagaaattaaacaagttatttgatgatgatgatagattaacatgaattagtttgtgttttgcgaccaaaaatgtataaaaatatgaattcatgttcgtattgcgcttggggtttcattgaaaatactaatgatgttaatatactggcttatttaaagcaatacaagttaaatgctagttttgaaactcttcaggtgaattaatatttaaattgatatatttttgcttgcgcttgaatttagtttgtttaaaagtaattgggaattcaaaatagtacccaatcccaacgataagttccgcaaaacgacctgactgatattttttgggtagaccctgtgtcacccacttccggatctcagtttccattcagtaaaaccatttgcagcaaaagctccacccatccacccatccacccatccacccatccacctgcacatccacccaccactttctcgattctgcgcactggctcgtttgataccatgataccatgccgtcttagacgagcttgtttgattattctttaaataaactaagtaaaacttgatacaccgattatttcacaaacaattacaatttatttgattcattttctgtttataacaaacttataacaaatggttctcataagaagctgagaatggaaaaacaaagtaacaaacaatagccgaatggaatccctctttctcccacagccaagttgtactcagcaggcggtatatcctcgattctgaaggagctggccgatgacatagctccggccgatggcgaggagatctacaacccattcacgccggtcgtctcgcccacggacgatgcgcccgcgcacatcgacaagatgttcctgcagacgtcatccggatatcgacccgtggagcacagctactacaagcgctccttcctgggggcggctgttcgtggatccgccggaatttcggcatccggcggcggaggtggatgtgcaggcggtggcggaggtcgcctcgatggcatctcggccgcggagcttggaggcgccggtcgcctcttccgctccagcggcagccacgcccacggcggcgacagaatgggcggaaatggaagtgggcgtggcagctacggtgatacccgctgtttgctggatgccgactttaatcggtgagttgcggaaaatagaaatgatacctcagacgtcagttatgcatatgaaactgtccaaatctaaggttatcacaaaacttttcctaatattctgctgaaaatactcatttaaattatttgtttttaactatttgagaatttaaatatatttaaacattcgcacaatagtgtagtgtagatgccagtgatgtcactctaatccagcaatttatttaattttactagcaatggtatcaccagcaacatacaactagcctgtgtagttcaacgaatctggctgctcatctcgaacatatgccacggcttgctagccggtctagctctggcccatctactcttcgtgctgagcagccaccccatggactgggccaaggttatcaatggcatgagtcttgcgggcgagacggtgtcatcaacggcccaacccccagccgcatcgacaccatcggcgatagacatcgattccggcgatcggggaacggagtcgggcgaatcctcatccccatccgcagcagcatccggactggccctgataagtgactacgccggatttgcggagatctacttaaataccttctactgcttggccataatctgtctggtttccgttttcgatcggtgagtttgggtgtaatggattggatcttggtgaaaaataagaaatgaattctataaagcataagtatagattacacacctttaagctagcttagctctttaggcgatggattttacaattttctagtcacttagtcaatttcaattgcgtcctttgggctttcgatgtcctttgacttgattaaaagccaatttggcctaccacgcaaccttcgtcaacgagcggctaaaaataggtggccaagaagggaatgctcagtggcagcgatggagtttcgccaccagaactcattgacctcagttggcgaaggattcgctgagagtttcattgagctggaagtcagctgaaggaagtgggtagttagccctcgcacctccggttctacatacttccttcatttttctttgtctagacacgaggatatcgttccacactgatagataatagtgtgcgtggaactgatggtgtggtggtggcgatggtgtgacctcaatttgggtacttgttcggcttcgtgctctcatagaaatacaaatttgcggcgctcgcattgcgtggccgctttcatcagccacaaaatattttaatgcccttaaactttgctctttttgcatgccaaagtcgctgcccacacacaagcaaaccaccctggctgcactcttgacctttaaaggctgcgccagtcgatggcacaagtgtgtgggtggttttgaatggcttgggtggtcgggtggttgagtggttgggttttaggtggtccaaaggaactgtctgacgttgtttgcccattcgaattgtgccattttcggctgcctggatggaagtgtgaaactgtgtatgacatttcgcttcgttatcccagcgccatttgatttatgcgctgctgtggctgggctaaatgttaagtatctccaggcagtggaagtggagtctgtgtcctgacctttgcccctctgacaaacggagtgctactgttaaatgtcaggtcatgcaggaatctgtaggaagtgcacaccatacgcagctgaactttcaggcaatatccatgattttgttcatgaataagttatttccagtgtgcgtatctaagagcgcccacttgatatggtaatagcctagaggaaaataaaatagatttttttagttattgactaaaaatctttcaaatttcaaatttgtaggatggacatctgtcgctggagcttctcgaatgccagcgaactgatctcgtttcggtggctcatcatcaccatgatctatgtggcgacaataatcctagccatctgctccgattccatcgacgagaagctgtacctgttcaacaacaatgccaacataacgctgacgcaacaggagatggtaagtgcaaggatcgtggtgataagtctgagttccatattcaatttactccatttcgagcagctgagcaacagtgtgcagagcgtgtggagcagcctgtcggtgacgaggagcattgccgccatatccgggtggattatgatcggactgacgccgcaggaggatatgctatatgagcacctggtggacctcaccaaatatcagttgacaaataattgaatttaaggcgacaagtgtaaatatcgaactcttagcagctgttgttcagttatcggctttttatatgtacggcataatcgaaacgcaatagaactcttatgcatacccaaatcttaagctttaaagtcgtctcttaaggattcacactgatgcccttcgctggccgctagaacaaacccaagggggaaccgataatatgacaaccagagaactcaatggttaaccttgaaactagttaactaagcaaatatagtgaatactcgtactgttaaagaggaaagaatatgaaatacctatatttaccagatagcagatagatgtattcatgtacttacgcatatatacaatatgttacctacatagatatacacataattgatatacattacaaacgcgagtatagaaatatttacaattattgaaatcattttactcacacatatcgtcttaagatacagaatcttttggttttttttaaatcgttgcggcacttttacggcaaaggcttcccaaattagatcctcagtcgattaggatcgcctagattaagtataattttagcgaatgtgttttgtacaatatttgcatcccgcaaacgtagaagtgtatattagttatttacattgttcaattcaagttttaggtaatgcctcttggttacattcttgattttgcagttagtaaaacatttgttacaccttctttcctttagatgcgtttacgtggcagtttaagcttctacctgagctgtatataaaccgagtgcaataaaataacgaatattaaagtttaattatacactaaccaatatacagaggcaaatgtaataaaaacatatagacaaacgaatcgatcaaagcggatgacaaggaaatctcattgtaaacttgtatataaaaaatataaacgcaaataaacaaaaataatgtataaaggcaagaaagaatacttgagtttttttttaaaggttgggcgaagtttaattatccttttttcataa

SEQ ID NO: 34034 - DNA, 1989 bp, DROSOPHILA
atggaggcaaaggtgcaccgccagcatcaacggcatcgtcgcacggaggcgcgacagcggcgcctggaacgggaggcggtggctacgggagcggcagctccaacgcccaccacgcccgagcgggcagaggccttggactgtgccacagccctcaacgagggcgtggtatccgcggatccgggcggcagcggcggtacgccaagcagtgcgggtcgcatcagtgcccagagctcggcggacagcatagagctggtgggttcgcccagccagacgtcgcagcaaacggtggtgctggtcaacggccacgccccgccgggccaggaggagggggaggaggagtcgccactgggcgcaggcaataccagggactcaccgccgccgcccaagcagagcgatggcagtcgcaactcatccggcgatgcgatgagtctgcgggagaccctgcagcaactaccggccacccatcaccatcggtccaggcgaactcactcacctgctgatcccgatgcgtcctttcatcgcggaatacttgggtacatggaccgggagctcaagcagagctctcccacgccctccgcccccgccggaaccggaaacggaactggaaacggaactagcacgggcgcatcgagaaaacagcagtccctctccgacccacaggccagtcccgcccagcgatccctgcgttcgaggagcagcttcgacaagagtccgcggcgcaaaaggagcaagtcggagtctcggcggagacgcgaacggaagctaatagccgccggagagatggaggtccggcaggccaacgaaaccctgatgcggtacctcaagcagtgctccgacatgcacgacgcctcgctttccggcgaactcgagatcgaccagagcctcgaggagagacgcgtccaccggaagaccaagtcgcaaagggacaagcggggccagctaatctccaagttgtactcagcaggcggtatatcctcgattctgaaggagctggccgatgacatagctccggccgatggcgaggagatctacaacccattcacgccggtcgtctcgcccacggacgatgcgcccgcgcacatcgacaagatgttcctgcagacgtcatccggatatcgacccgtggagcacagctactacaagcgctccttcctgggggcggctgttcgtggatccgccggaatttcggcatccggcggcggaggtggatgtgcaggcggtggcggaggtcgcctcgatggcatctcggccgcggagcttggaggcgccggtcgcctcttccgctccagcggcagccacgcccacggcggcgacagaatgggcggaaatggaagtgggcgtggcagctacggtgatacccgctgtttgctggatgccgactttaatcgccaccccatggactgggccaaggttatcaatggcatgagtcttgcgggcgagacggtgtcatcaacggcccaacccccagccgcatcgacaccatcggcgatagacatcgattccggcgatcggggaacggagtcgggcgaatcctcatccccatccgcagcagcatccggactggccctgataagtgactacgccggatttgcggagatctacttaaataccttctactgcttggccataatctgtctggtttccgttttcgatcggatggacatctgtcgctggagcttctcgaatgccagcgaactgatctcgtttcggtggctcatcatcaccatgatctatgtggcgacaataatcctagccatctgctccgattccatcgacgagaagctgtacctgttcaacaacaatgccaacataacgctgacgcaacaggagatgctgagcaacagtgtgcagagcgtgtggagcagcctgtcggtgacgaggagcattgccgccatatccgggtggattatgatcggactgacgccgcaggaggatatgctatatgagcacctggtggacctcaccaaatatcagttgacaaataattga

SEQ ID NO: 34035 - protein, 662 aa, DROSOPHILA
MEAKVHRQHQRHRRTEARQRRLEREAVATGAAAPTPTTPERAEALDCATALNEGVVSADPGGSGGTPSSAGRISAQSSADSIELVGSPSQTSQQTVVLVNGHAPPGQEEGEEESPLGAGNTRDSPPPPKQSDGSRNSSGDAMSLRETLQQLPATHHHRSRRTHSPADPDASFHRGILGYMDRELKQSSPTPSAPAGTGNGTGNGTSTGASRKQQSLSDPQASPAQRSLRSRSSFDKSPRRKRSKSESRRRRERKLIAAGEMEVRQANETLMRYLKQCSDMHDASLSGELEIDQSLEERRVHRKTKSQRDKRGQLISKLYSAGGISSILKELADDIAPADGEEIYNPFTPVVSPTDDAPAHIDKMFLQTSSGYRPVEHSYYKRSFLGAAVRGSAGISASGGGGGCAGGGGGRLDGISAAELGGAGRLFRSSGSHAHGGDRMGGNGSGRGSYGDTRCLLDADFNRHPMDWAKVINGMSLAGETVSSTAQPPAASTPSAIDIDSGDRGTESGESSSPSAAASGLALISDYAGFAEIYLNTFYCLAIICLVSVFDRMDICRWSFSNASELISFRWLIITMIYVATIILAICSDSIDEKLYLFNNNANITLTQQEMLSNSVQSVWSSLSVTRSIAAISGWIMIGLTPQEDMLYEHLVDLTKYQLTNN

SEQ ID NO: 34036 - DNA, 2472 bp, DROSOPHILA
ttactttaagatgcgattctcatgtcacctatttaaaccgaagatatttccaaataaaatcagttttcttacaaaaactcaacgagtaaagtcttcttatttgggattttacaattgtaaaaaacgtgaatcactaaatgtaaattcatatataattcacttaagaattactcaaaatttaattgctgtctttttactacccacaaaataggcaatattattgtaaggtaaatttaagtaacaagtatttgtgcaaaagagaaatgtggaatctacaccatataccctgtaaatgcagatgcagacacatattaaatgcgatgcctggtaagtcaacttgattgaatgctcataatcaacgatcttcgatctgggatgggatctctggaatgggaaccggacactgtttaccaatccaagtatcaatcaataaataattattagtttcagccacagactacatatgtagaaggtgtcagagtacaaatacctgttttcgagacgagtttatattgccaataaattcaaacttatttgcttggcgcccatcatagcgacatcttgagttaaaatccagaactcttaaaacacgatagttatcgtacaatacgaatggtgaataaataatgaatataataccccgcactcaaagagtatatctcttttatatatttttttcaaaataatgtgatgatatttatgaagactaacataaaagagatttcttttctaatctacaagctattccgagggtatcggattccaatattttcatatcaaattaattttttttagtttcctaaggtctttggcatcatataatgaaaagaccaaacgaagtggtttcaggtatttcggtaatgaagcgaatgaccatagcagggaaatgagaaaagcgtcgatgaagagttcttgaacttttctgcttacctcgcactctgaataatatatatttcgatgcactttggcccgagttgcacatttgcgcaaatttctagccatgggagacgacaaccagcgattccaattccaactgcaggcagtggcaacagttttcttgttgggtaaggtccacttgtaccccattaggcaaataatgtgattgaaatatataagatatttagttaaattgaaaaacaaaccttttgaccacagtttcacagctttgctttgccctgccctttgcatcttccaccggaaacgatatagaaaacgatgggaacattcagaattcggccagtggacgacctgtggattatcacacggtggtgggccacttcaaggacttcttcatgtacctgccggtgatgatgaccacgctgaaggagacgatgtcaggattccccaagttcgccgagggcatgcgcatcctgacttctggcaaaggacgagtggacggcgaggattgcaagtgcagccaaaatgcattggccagcggcgaactcttggacaccaattctcgcttcggttgacccagtctaatgtatgtaattgcccacgatcgcagatactttacatgatgcgcacatgacaaataaagacaacagaactacatgagaatcaaacaaacttgaagttctccattatacagcatctagatgcatacaaaatctgaagagaatatatctaaacagatagctagggttccaaatctagatttcagctaaggtaagtaaagtattaagaacgggaaacaaaaaacctataaattataattgcatagtcattaaacaaactgtcggccatattaagtccttaaaaaaaaagaactaatttgtttaccgaggcctcagtggcttagttagctaataggaaaatcaattctgggccgtaattggggaactcaagtatcccgtggaagccttcatgctcttgaaaggtgaaattggttcggcaatgacgacgcaatccaggcataacccattttcgctggacttgaactagatacataacatatataggacatatatttacatctattttcttaagctgttgtccagcttattagccagacccctgggaatggtcaccacctggcacccacccggcatggcgtccaatcaaagcctcgaatctgcatttcactcaccgaggttggggtggaagttgtggccccccaaaggagtcgcacgttccatgacccactgtcatgtttgcacttgtcattattgttaattgtatttgcggggtggccaagcgtacagggaccatatttacaaagcaatccgaatggccgaggcgggacaaatgtaattcaaagttaccactttccgtttcagtgaggcacgtggcgttgtggggaacgcaacagcggaatgtctaggaagcgcaaaaagtgaaattattagagttgcaaacacctaaagagtacagtaggcactcgtatcgatggccactggcatcgagctgctggtggccgccgccctctgtgtcgcctgtccgccgctgaacgattccccgccgacgaaccta

SEQ ID NO: 34037 - DNA, 381 bp, DROSOPHILA
atgggagacgacaaccagcgattccaattccaactgcaggcagtggcaacagttttcttgttggtttcacagctttgctttgccctgccctttgcatcttccaccggaaacgatatagaaaacgatgggaacattcagaattcggccagtggacgacctgtggattatcacacggtggtgggccacttcaaggacttcttcatgtacctgccggtgatgatgaccacgctgaaggagacgatgtcaggattccccaagttcgccgagggcatgcgcatcctgacttctggcaaaggacgagtggacggcgaggattgcaagtgcagccaaaatgcattggccagcggcgaactcttggacaccaattctcgcttcggttga

SEQ ID NO: 34038 - protein, 126 aa, DROSOPHILA
MGDDNQRFQFQLQAVATVFLLVSQLCFALPFASSTGNDIENDGNIQNSASGRPVDYHTVVGHFKDFFMYLPVMMTTLKETMSGFPKFAEGMRILTSGKGRVDGEDCKCSQNALASGELLDTNSRFG

SEQ ID NO: 34039 - DNA, 4649 bp, DROSOPHILA
tatatatatctgtatatatacatctgtgcgttccggttttgtcagtctgtttctaggattatcttggacacacgctgtggcactcataaagggcggcggcctgcccactctgattgatttatgtattcccccaaacctcctccacccctacaaaaagggggtaccgggataagaagaagaggagccgggggggggggggctaagggtggctctcgtcactagctgtttttttttttattattcctactacttcttggcccttttcttcccggctggctcatttcgcctttgactgttaatagctttaatgctgttttatggcatttcgtggagaagaaagggccacagtttagtgggccaaggggatggggatgggcctttgggggtggggatgctggtgctgttggagttgtacacattgggatctggaagtggaaccgaaacgcatgccagcgccaaatgttttacatgcgtgcctttcgaacacttcaagaaaatatatgtatgtaagagttacgcgtaaaatgacttactcaactgggcaagctgtgagcatttgtgttgaatgaatgttcctcccgttacctggccacttctcgcagtgcatctcggccgccacttagtgtggcaacaatgtttgcgcataaataaattggaatcgactgcgggtgcgggtcttggagctgtgcggtgctcataattccagcttttatttgtgggattttggcatggcatgtcagtcatgcatctctgcaacctccttacccgtctccctccgccttcgcctttgccttagcacttttctccccaatgctccttgggaccattgaccattcctcactttgcacgctgattaatggctttccgtactccacagatgatgctcgacttctctagctgctaaatacgccgaatttctcaccgagaaagcttaacagaccgaacgactccgtacgaatttgatattgaaaccacaatgtatccggccagcggcagtggaggaggcagtgcagcgaccgctgctaagttccagaatcgctgcggatcgccgcagtttgccagcgactatccgcatccacatccgcaccagcatccgcaccagacgacatcggtggcggtgcacagtgccccgcccggagtgagtggtggctccatagccagcggtgggtccatgtccatgcgtcacggccagcgggtggtggcctcagcccatcagcatcccagtcagatgaccctgaaccacggcggtatgggccacaaccacaaccacggcatgggcatggccatgggaatgggtcacaatcatggacatgcagcggccaccttgggccatccgcactcgcattcgcacaacaacagcagcggcagcagcagccacggacatgtgggctcgcatctgatcttccccgacgacatggacagcatcgagttctgcatgccggcggcgccctcctcctcgtccgcctcctcgcagaacggtctcggcgaccagttgctcttgggcagcagtcacggcgaggcgttcacggagcgccgaaggaggggtcacagccggcgcagcaatcacaagatggacgtggaacagcaggtatgtctcggggcgacgacgagggttggttttatagccctaatccacatattgctttcttaaaccaggttaagtggtctcgcaagaacatcgccgccaccatggaacgcttcgagcccacgcccaacacacagtcctcgtcgtccacttcatcgctggactatggatttgcagccggcgtgatgacacccagtggcagcagtgctacggcctcgcatggcggtggcgcctccaatccctcactgcacgtggccttcaacggaggcggcggagcagtgggcggtggctcatccgcggcatcaggcgctagtggtgtcagcggctcgggagcagctgcagcggcggcgcccttcaaccatgtctattcgtatgcttactacgaaccgggggcagccaagtgtcacaccaacgtgcctgccgcccaaggagctggtcctggacagggtcaggcccaccaggtccagtcgaagagcccgccgcgcaactcgatacgcgccctgctggccaagagcttccgctcgaagagcagcaccaaccatggcggacagtccacatccagttcgccgagtgccgaggagcgggatcgccacacatacaccactcgctacggcaccaccgagaacctgtacgaggaggtcagcgatcagaagattcgcaaggtgctgtccgacaaccggatcgctagtggctccagtgtgggcaatgttaaggaggagcagcggcgcgtacagcacaaccattttagggtgctcgacgagctaaatctctcgctggaggccctaataatgccgccgacaccgccggacgtcagtcccagtcacgccatgggcgccgatgagccaagcacctcgatgtccgctggtgcagtgggtggatcggcggtgtccagcgtggtggcgggaccaacgaagaccgcccagagacccagacgcggcggcctcctgggcggtgcggctggtgcagggggcacctcgaactcgagctccgcctcgcacgccagcctggagaacctatcgagcaccctgaacagcatggagctcaaggatcatggccacagtagctgcattaatccggagttcgatgagggcgaccttgactccggcttcagtggcagcggcagcagcagcggcgccagctacaacgagagtctgcggtactacaagtccgccacgcccaccggaccgctgcaccaccatcacaaccaccagcagcaacaggcgatgcaccatcacagcctgaacaacaacacgttgccgcacaacctgcgcagctgtcgatcctccacggcctcgggcacttccacatcgaaaagcagcatggccagctgcagcgaggatcagggcattggcatgaccttggctgtgggcggcggcggcggtggtggtggtggtgttggtgttggcggcatgatgacgcccatgcacgagggatccggcgtcgtgggcgccggttccttgtcgcccttcaactatccacgccgctgctcggcggaccagcagcgcgcttcgggcagatcgatggcctccgccgtgggcgttggacccggtgtgggcgtggccgttggcggcatgggcggcggcagcatgagcatgagcagcagcagcaacgtggccctgtccacgggcgcgaaacccaagaagaacttctggaccatgaaaccgtgatgctacaaaaaggcgctgcgtcacatttgcaagaaatggactattgttatggtaagtacaaacgcaattatttaaaaaaattaaatatttcaaaaaaaaatgtaaaaaatgtaatagtttactttcttgttactttgtataatagttcaacagattatacagtttttctcttttatcaatcaagagccacttgactcacaaaatcacattacccagaacgtccattttatccacatcgccgccgtgattgcgattgtgttaacccctttcaataattgattactttttatggccattttgtcatttaagatcatctggcatgattatcgccgtcgccatcacgatattcccaccccctccactcaatcccgaatctcaaatcccactgccaccatagcttccatatcccgactgcttttgggcatcaatttcaacttttcaactttaatcataataaatttgcggccccgttttccagccacggccatggccatagcttatagctccatttcacaatcaacgagatacttccgctggagaggaagcagatccgcgcgagatatatatacatatatacatatatgcgcggtagatggggtggacgcagggggcttgcggggtggcggttggttgggatgttgaggactatccgcattcccaagataataaatttattaactgagcggcccgacatcatcattatctgggagaagcgggcaaaatgttttcatcccttcgccgccgaaatgaatcaattaaaactgattgaacttcatagatttcctcccccaatatgtacatacatacatatatataatatgtgtatacttttttgtatcttgctctgaccgaaaaatacgaaaaattcatttataactgaaactgggctaatccgcatcgctcatcaattctttctctactcttctcttattttttttggctgtgggaagcgttgcggatactccggggccacatatgcccccatttttatactggtcacggggattaccccgaatacgccgatgaggatggttagcaaaggggaatatagtggattttcagggggggggggggacgatagccgaacaggggtgtggggtgtcgaacattaaggcgcctgttgaaatgtccgcagacctaaagatgcacccatgccacaccacatcgtagcatagcatctaacaccccctttaatccgctcactccactttcaccattactcggtgtgtgaataataccattattcattgcattttgttataaatctgtcaatttgcacaattgtgcgtacaagccagcgaatcactcgaaacagaaatcgagactgaaaacataatattgtcttgaaaattggaaaaaatttttaatatttctgaaactttagataaatgtagttt

SEQ ID NO: 34040 - DNA, 2244 bp, DROSOPHILA
atgtatccggccagcggcagtggaggaggcagtgcagcgaccgctgctaagttccagaatcgctgcggatcgccgcagtttgccagcgactatccgcatccacatccgcaccagcatccgcaccagacgacatcggtggcggtgcacagtgccccgcccggagtgagtggtggctccatagccagcggtgggtccatgtccatgcgtcacggccagcgggtggtggcctcagcccatcagcatcccagtcagatgaccctgaaccacggcggtatgggccacaaccacaaccacggcatgggcatggccatgggaatgggtcacaatcatggacatgcagcggccaccttgggccatccgcactcgcattcgcacaacaacagcagcggcagcagcagccacggacatgtgggctcgcatctgatcttccccgacgacatggacagcatcgagttctgcatgccggcggcgccctcctcctcgtccgcctcctcgcagaacggtctcggcgaccagttgctcttgggcagcagtcacggcgaggcgttcacggagcgccgaaggaggggtcacagccggcgcagcaatcacaagatggacgtggaacagcaggttaagtggtctcgcaagaacatcgccgccaccatggaacgcttcgagcccacgcccaacacacagtcctcgtcgtccacttcatcgctggactatggatttgcagccggcgtgatgacacccagtggcagcagtgctacggcctcgcatggcggtggcgcctccaatccctcactgcacgtggccttcaacggaggcggcggagcagtgggcggtggctcatccgcggcatcaggcgctagtggtgtcagcggctcgggagcagctgcagcggcggcgcccttcaaccatgtctattcgtatgcttactacgaaccgggggcagccaagtgtcacaccaacgtgcctgccgcccaaggagctggtcctggacagggtcaggcccaccaggtccagtcgaagagcccgccgcgcaactcgatacgcgccctgctggccaagagcttccgctcgaagagcagcaccaaccatggcggacagtccacatccagttcgccgagtgccgaggagcgggatcgccacacatacaccactcgctacggcaccaccgagaacctgtacgaggaggtcagcgatcatgtgggcaatgttaaggaggagcagcggcgcgtacagcacaaccattttagggtgctcgacgagctaaatctctcgctggaggccctaataatgccgccgacaccgccggacgtcagtcccagtcacgccatgggcgccgatgagccaagcacctcgatgtccgctggtgcagtgggtggatcggcggtgtccagcgtggtggcgggaccaacgaagaccgcccagagacccagacgcggcggcctcctgggcggtgcggctggtgcagggggcacctcgaactcgagctccgcctcgcacgccagcctggagaacctatcgagcaccctgaacagcatggagctcaaggatcatggccacagtagctgcattaatccggagttcgatgagggcgaccttgactccggcttcagtggcagcggcagcagcagcggcgccagctacaacgagagtctgcggtactacaagtccgccacgcccaccggaccgctgcaccaccatcacaaccaccagcagcaacaggcgatgcaccatcacagcctgaacaacaacacgttgccgcacaacctgcgcagctgtcgatcctccacggcctcgggcacttccacatcgaaaagcagcatggccagctgcagcgaggatcagggcattggcatgaccttggctgtgggcggcggcggcggtggtggtggtggtgttggtgttggcggcatgatgacgcccatgcacgagggatccggcgtcgtgggcgccggttccttgtcgcccttcaactatccacgccgctgctcggcggaccagcagcgcgcttcgggcagatcgatggcctccgccgtgggcgttggacccggtgtgggcgtggccgttggcggcatgggcggcggcagcatgagcatgagcagcagcagcaacgtggccctgtccacgggcgcgaaacccaagaagaacttctggaccatgaaaccatcatctggcatgattatcgccgtcgccatcacgatattcccaccccctccactcaatcccgaatctcaaatcccactgccaccatag

SEQ ID NO: 34041 - protein, 747 aa, DROSOPHILA
MYPASGSGGGSAATAAKFQNRCGSPQFASDYPHPHPHQHPHQTTSVAVHSAPPGVSGGSIASGGSMSMRHGQRVVASAHQHPSQMTLNHGGMGHNHNHGMGMAMGMGHNHGHAAATLGHPHSHSHNNSSGSSSHGHVGSHLIFPDDMDSIEFCMPAAPSSSSASSQNGLGDQLLLGSSHGEAFTERRRRGHSRRSNHKMDVEQQVKWSRKNIAATMERFEPTPNTQSSSSTSSLDYGFAAGVMTPSGSSATASHGGGASNPSLHVAFNGGGGAVGGGSSAASGASGVSGSGAAAAAAPFNHVYSYAYYEPGAAKCHTNVPAAQGAGPGQGQAHQVQSKSPPRNSIRALLAKSFRSKSSTNHGGQSTSSSPSAEERDRHTYTTRYGTTENLYEEVSDHVGNVKEEQRRVQHNHFRVLDELNLSLEALIMPPTPPDVSPSHAMGADEPSTSMSAGAVGGSAVSSVVAGPTKTAQRPRRGGLLGGAAGAGGTSNSSSASHASLENLSSTLNSMELKDHGHSSCINPEFDEGDLDSGFSGSGSSSGASYNESLRYYKSATPTGPLHHHHNHQQQQAMHHHSLNNNTLPHNLRSCRSSTASGTSTSKSSMASCSEDQGIGMTLAVGGGGGGGGGVGVGGMMTPMHEGSGVVGAGSLSPFNYPRRCSADQQRASGRSMASAVGVGPGVGVAVGGMGGGSMSMSSSSNVALSTGAKPKKNFWTMKPSSGMIIAVAITIFPPPPLNPESQIPLPP

SEQ ID NO: 34042 - DNA, 2931 bp, DROSOPHILA
tgttaaagtccagtccaccggacctctccgatattttgcggttaagtggggggagtggttccgggggccagcccctcctccacttggaggacgcccaataaaggcacatgcatgcaacaataaataaattagaacaaggtgcggtgtgacagggcccaagcccatataacgtgtacactgggagaaaggtggtcctgaaacaagggaaaagaactagacttttgcctcagataactggaagaacgtcataaaggattcaaatttgtctaaaagtatgcaacaatgtatttcaaatccttatacttttagacaccttcacaaaatataatgtgaataaagactctagtttggtctagtttataattataactgaaatataggttaactatttagttgagttgcattttttgggtaattcgcccagtgttgaagctgtcgcttaataacgggttagtcaggtggctggttgggtggcacttggatggggtgtggggtctgcagatagggctaccgttttgttgtctgcttggcagtcagatgcaatttattgataatatgcggggcacaggaaggacgacgagcagggagtacagaagggtacagaagtagaggcgtacgggagctggagtgcaggatacccctgaaagtcagcgccaactttatgagaatgcgacctttctgccattatgttggttatttacacacacacacactccacacacacttggccacagatgtcgaggcagtgcgccaaaagccaaaagcaaaagcaaacgctgaagcacaaaatttgttgcacaaattgtggcaacaaattttagcgcagacaatattcagttggttcaggagaagtcaaccgaagggaagtgggtacatactcgtagtgtatgggtgggattttggtggtaccggaagtggataaaagaagaagctgccaaaagtcaattgctggaatctcctcacttgactggaccaaaagaccgaacttgttgaaccttgtatggcatcacagttcaatcgtttgagctttgaattcgtactgaatgtctaaaccaaaatccagctaaataaatgctatgaaattcacaaaatgtagcaacatattacaggaaaaaaaaaaagaaaaacatcccatcaagggccactaacaaaatacgaaaggtatttaaatccagccccacacaagagaaaactaattttacagcagaatgattttgattcagagttttacccgaatagtttacggaatatttattttggcaaaccatggcttttatatttgaacagcacaaaactcaccttccttattttaaacattcgaataactaaattggctaatagtacagcttaaatatggcaaaaataaggaaccaaaactagtttacaacattctaatatttgtagttatgatgtatatgttatacaaacccttgataaaataaacaattgatttgaaagctaacaaattgttgcgctctcctttgcaggaatacaatacaaagactgcctcatgccatgccatccactattaccaccaacccaacagcggcagcagctatagcaactacagtagccgtcgtcaccatcagcatcagcagctgacgtcatcagcgtcaacgtcatcgtccacatcatcactgcagccgccccggaagcgctactccctcgcccaggatcgtctaaatcccttcgaactggatatctgcgatcccggagagatgggcagtaaggaggaggaggaggaggaggaggaggagaaagaggaaaatgaacaagaggagcaggaggaggaagaggaggagccagggagaagttactaccagaggagtcagatgaaccggaggcgccactacaagtacgacgccgtggaggagtgctgtcgtccgatttgccaggagcagcactacggctccatagcggatatgttgtaaggggggaggggatacgaatatatgcaaaaggggaaacgaaagaggatacggactcggaatcactttaaagcgaaacgcaaggtacctacaacaaagtaactaaaagagaaatgcatgaaataagaaaagagcatgaagcaaagagaattagcacatatatgaagagaaagaaggagaaatcccctcgaatgcagaaaataaacgattatagcgtttggcgataaacgataggcgataagcgatcatcgatatccgaggaacgagttgcgcatgttgaatagatgtataccgacgttttttttcctggcggccgatgaacattttaaactaatcgttactaagcacagaattgataaatatatatattcaaaatatatgtattattaaccatctggcagatctggcaccgctaattaactgtatgttaggcatatatccatatagaatatatgtaaccgcactcaccacacgcaaacacaagcacacacaaccacatacatatatataaagatatatatatatatttattcatgtacatacgaactatgttaaagccaatttttttttattgcatccgactagaaatacgtgagcgcgataattttttttgtggatgaacgtggagattagatctagaagattgcaccaccatgttgtctgcgcgtaaagcaaacatgatcattaattatatataaatctaaatatatacgattttttttttattatttataacctagcaatgcttgtacatagagtaaagattgtggattataactatacgaatattaatattaataaaaaaggaatatttaataaaacgtgttttttttttttggtaacctaagctctgagtgttaaatgaattgtaaataaatttggacacataaacaatttaattgacgcacaactcataaaagaacgggcaaaaacaaaagccaagaaatggatgaaaacaaaaacaaaatatatatgtcaatgcctgtcaactttttcaatgcgt

SEQ ID NO: 34043 - DNA, 480 bp, DROSOPHILA
atggcatcacagttcaatcgtttgagctttgaattcgaatacaatacaaagactgcctcatgccatgccatccactattaccaccaacccaacagcggcagcagctatagcaactacagtagccgtcgtcaccatcagcatcagcagctgacgtcatcagcgtcaacgtcatcgtccacatcatcactgcagccgccccggaagcgctactccctcgcccaggatcgtctaaatcccttcgaactggatatctgcgatcccggagagatgggcagtaaggaggaggaggaggaggaggaggaggagaaagaggaaaatgaacaagaggagcaggaggaggaagaggaggagccagggagaagttactaccagaggagtcagatgaaccggaggcgccactacaagtacgacgccgtggaggagtgctgtcgtccgatttgccaggagcagcactacggctccatagcggatatgttgtaa

SEQ ID NO: 34044 - protein, 159 aa, DROSOPHILA
MASQFNRLSFEFEYNTKTASCHAIHYYHQPNSGSSYSNYSSRRHHQHQQLTSSASTSSSTSSLQPPRKRYSLAQDRLNPFELDICDPGEMGSKEEEEEEEEEKEENEQEEQEEEEEEPGRSYYQRSQMNRRRHYKYDAVEECCRPICQEQHYGSIADML

SEQ ID NO: 34045 - DNA, 2180 bp, DROSOPHILA
ttttagccagcccatttccattcccactcccactttcccacttgcccacttgcccacttgcccgcaaaagtgtcaataacgtggccaagaaggaagaatcgagggagccggaggaggaggaggagctattactagctaggggccagaaggcagtggccaggatctttcgcccggggccagctggtgtccttagcctgggcaaacaataaaatattcaaagtttataatgtaaattaacccaaagttgcctgatgtcctgccgcgtcgtcctctgctctccactgccgccaggcgccatgaatacacaatacacatgtcccccggaaattggtggggtcgcaccgccctgccatcccgtttggccaccataatttctgatattcttggggcctcacaaggatttggcccggtcctcgtcctgtccatgtcgccgcgccgaactgtttggctaatcaaattttattgagccactgagtgctgggcggcgagacagccgaagtgggcgtggcatctagttaacatggcaccgagcccaatggtcaatagcaaactatagtttaatgagattaatttggacaaggactttgtgcctgtaactgcattagttgcacgcaaatttcgtatccaacttaaattggctgagtgctattttaatatattttcatataaagcatatagctaaagtttaacaatgcatttttgcaactgattaatgttgaacaaatcgtggcatatatgaagtctcaagggacttcagttcgcctacccacgtagctcatatctctaattactacgttgcatattaactgacgaatgacctactatttgatatataggccagatatcttggtcatgagtcagtcccggcttgtaaattgacctttgatcgcagccagcttcctcatctcgaaaccatcccactctcctggccatcttcagactatgctgatgcttaactagccgcttattcatcagagctccgaaagccgaaagccggggaatgatgaatgcccccagcaaatcggatgagatgcgagcaactggaagagccatctcggtggagctgctggtggagatggagatggagatggaagtggaagtggaagtggagacttcagtggtcacatgccacagcccgttcaagtgttgttgggacataaacatctccgggcccacatgaaatgtcatctttcattagattaacgattgttccagtggctggtcgttggatgctgggatgcttggatgttcgggaatgttggggaaggagtggcgtgggtgaggagtggcgtggagtggcaggggcagggcggcgtccagtggcaaagctctctgcccgaaatcaaatcttcaacaatctgttctgccaaatgcctccgcacacgcaaaaacgggctgagatgaaagggcggggaatcgccggcatatggctccccgcaaaaaagtgtcaaatgcgtggggacagaggcgagtgggagagggggggagaatgagcctatggcgccaggaacaaaaccaggactcaggactcaggatccaggacgactgtcaacttgagcctgacaaagtatttgcggcttgccagtcatttttcgtgtttgtggacaggggcagagattgtgtgtgtgcacttgcaaaaattctagttgacttcgttgggagttttttaatacacaacatgaaagtgatacgcattttcaagttccttttattcatgcttgcttttaattcactcatttaattcaatattaccaatttttttttttttttttttttttttttttaattttttattatttattgaatcttccctttgtgttaagagactaacaataagtgttcaaatcttaatctaacttaattaactttcacttagtgatagtttttttttttcattaatgccctaataagtttattgctgggctgggaggtcgttgcggtgcagccggctttgactgcatactcggattagttttcttgcgaggggatttgtatgggtggtcagcttttcgttatacttcgtttttttctcagctattacttcgattactaatttgatttttaggtctctgtgtatgttttcgtttcgaaggtaccacggcgctccagtgataattctcagaattcttgactgtgctcgctgaataatgtctatgttacttctggatgcgttgccccac

SEQ ID NO: 34046 - DNA, 180 bp, DROSOPHILA
atgatgaatgcccccagcaaatcggatgagatgcgagcaactggaagagccatctcggtggagctgctggtggagatggagatggagatggaagtggaagtggaagtggagacttcagtggtcacatgccacagcccgttcaagtgttgttgggacataaacatctccgggcccacatga

SEQ ID NO: 34047 - protein, 59 aa, DROSOPHILA
MMNAPSKSDEMRATGRAISVELLVEMEMEMEVEVEVETSVVTCHSPFKCCWDINISGPT

SEQ ID NO: 34048 - DNA, 2246 bp, DROSOPHILA
tttattcatttcgtaaccggcacaaaaacttcttcctttcctttcttttctttttttctttttttccattttttttgtattattttattttattttatttcagttcttgctggcccgctccttgtgtcttacaacatttttctaatcagtcagcgtccacgtccgcttcaaattttttgtagtcttccttcgattttcccttcattgtattccatccactttttccacatttcgatacgggtccacaaaaaaagatgccaaaaaaagatgctggcgggcggaaaatcgtggggaatgtacttgaattgggtggcgacttaagaaagaaaagcctaaaatcttttttttaccatactcacttggtggatcttcggtttatcgcagagagaaagacaatttttctatatctgagtggcaataaatcgatcaatattctgaagaagttggcttgaagaagggggtacttttcatagtgatacgaattaatctataacgagtaagtaatactataaaaccctttttagataatgtgagtgagtaaagagtgtgagtgctgtcaaaattaatattgcgaccagacatgtatacttgttcacttgaagggtttacaatcttaaaagataatagcaagagggatcgctatggtccagtgtatagacggttaaataccccttatattgttgacaacatgcatagccaaggattagataaaatagcctaatatttggaaaattggtttgatttaatttggtaatattggagaggagaataaaataaatgaaataatgcaaatcttttttaccgaacgagcgacatcttttggtgagtagaggagtgaaaagaggaataatcatttataatattgtagttaatcacaatgccattctgtcattctctccagcgaacacaacatatatttagtttaaagggtaaaactaaaagcgctttaaagttaatagaaccattcctatataaagcccaatataaagttttcaataagttattcgattacaatgcgagcggtttcggtgtcagtgctactcatccttgttgtctgggtgtcctgtttcggcgaatcaggcgcagattgctgctggacaaaggccaagctgctcttcacgatgggcacaggatcgtgcggaatggtcaatgccaagaccaccaaatacggatgcgaggccacagtttgcgcggatggaagagtgctcaagggcacatattgtggcgtgggttcgtgcaatatcattggatgcttttgtcgcggcggctgtctcactggaaactatggcgagtcatttgtggaaataaataataggtatcagatcaacttgataagcacccaaatgaggcttgccaatttaacagataccgaggcctaattttaattttattccattgaaatcaaaaaaaaaaaaacttaactttgagtaaaataaagcgtatcaaacagatgttatttttacgtggtaaaagtttcaagtttgctgattgttaatatacctaccagagcgattcgaagtgaatatgtttaaagattaattcagataccgtatacagtattaaaattataccttagataaatgattcaatttagtgatggaacttgccagcaaaaatattcattttaataacgcgttttcaggacatctcacataagcgcggttaggtttcaccattcaattcaagtggtcgctggagttatcactttaccatttagattgcattatcccctcactgggcaactgggcaactgggcaactggacgacctttcgaccccggaaagccaatcatccgtccatccaatcgctgtgctttcgggtataatccgtatatctagtgctgtatctcgttatgacgccctgtcgcgggaagcgtctcaaagttttggcccactgaatgggttcaaaaagtgccataaaacacccgctaaacagaagtttgcgtggggcgggggcggcggccaaagttggctttatgccggtggcataatcaaggatcagtgggggcaaggaccaggaccaggagaactacgtgtccacaaagtggcgctccgcgtgcaaacaggagtggatgtggcactgggcgtggacgtgggcgaaaagaaatgataataatgctcgggtcaaaacaatataaatgcaaatgcagcggcgctggctgctcagtcggcgtcgactcaacgccttttacagtcctgcaacgcattttaatcagttggcagtggaactccggcaccgaatccaac

SEQ ID NO: 34049 - DNA, 246 bp, DROSOPHILA
atgatattgcacgaacccacgccacaatatgtgcccttgagcactcttccatccgcgcaaactgtggcctcgcatccgtatttggtggtcttggcattgaccattccgcacgatcctgtgcccatcgtgaagagcagcttggcctttgtccagcagcaatctgcgcctgattcgccgaaacaggacacccagacaacaaggatgagtagcactgacaccgaaaccgctcgcattgtaatcgaataa

SEQ ID NO: 34050 - protein, 81 aa, DROSOPHILA
MILHEPTPQYVPLSTLPSAQTVASHPYLVVLALTIPHDPVPIVKSSLAFVQQQSAPDSPKQDTQTTRMSSTDTETARIVIE

SEQ ID NO: 34051 - DNA, 4007 bp, DROSOPHILA
agttttcattgccgttgttggttcgattgattttgggttgattacctgccttattggtttgagggctgagctttctttgatttggatgtagcgatcccatgccagtctgcacagtcgaaatcggacttctgcttttgttttgattcttctttacgtgcattattgttgttgcaaacggtcagtgctgctgaattatttacagctggcacagcgataattagttgggccgctgacgaagttgatgttgtggcagttgccagtgaggtcactgcactcgttattgcagtgttacagttacccgggacggtcgtttggcgctgcgagaggagcggggtaggagaggcggtctcttcgctccacgacttgtgagccgaagcaggcagagagggagagcaagaacgcggtctgtcgttcgctgagggcaaaagtttcgagttagttgaaggtgagggtgctcgatcaccgatttgcggtgagacgaaagaaaagtatgcattgttgcgttgtaaagagagccggcgctcgtcttgttcacattgtcgctgagaacgtatgtcgttttgattcattgttctaagtccacatataacaattaccagaacaatatggaataattatttattttagtaaataattactatagtcaataattgttagttgtgcaaactgcactttacactttgtgtttaactttcactatactgttgtagtttttagaacttgctattcgtagcttgaaagaaacacgtctccacccgaagactgtggaatgctactattaaaatactatttttcttgatctgtacctatttgttgactgaccaggagcgagaaagggaatgaaattggtagtgggtttgagttgaagagtcagcaggaataaaagcaaatgaggcttgaaccaaatgcaaattaatatgtggtgctgctgggcgggagattctcaaccataattctgccaaactgacctcttctctttcccaggcaccaaaagcagaaaatgtccgaagaaatggaaattactcctattaccggaatggatgaagtgtccgaaaaaactgcggagaaagtctttgctccaatgttcgaagcagaaatgtccgagaaaatggatataactcctgttaccggaatggatgaagtgtccgaaaaatctgcggagaaagtctttgctccaatgttcgaagcagaaatgtccgaggaaatggaaataactcctgttaccggaatggatgaagtgtccgaaaattatgaggagaagggcatcgcgccaatattcaaagcacatatgtccgaggatacggaaaatactcctgttaccggaatgggagaagtgtctcaaacttatgaggagaacgcaattgcgccaatgtctgaaatatgcgcatcaggtgacccagtatctccaatggatggagtagcccaggaagagaacacatttgcctccatcccagatggtataacccgactcaaggacattcttgctacgcagacattccttgtccagagaaatgaaactgttgttcccagaaatgaaatgtcccagatgatatcaccgttggtcgaaatatcacaaaacgaacaaaatatcaacgatccttccgtgaatgagaatccacaaatgatcatggatacgagcactttttccacgaacgatgcttccactaccaatgtcgtctatgtggaacaggagccaacatcggtggtgatggtggagcaaccaaacacaatcatcgagctggtggattattatgtgccaccagcgtccttgaacaacaggacaatccgcccgtttttccccatcccagtgcccatgtaccccgaatcctcgccggaaccccccgcccccaagccggcgacaaagggtaagcgtggccggaagccaggtcccaaacctaagccgcgagcaaccaagcgtcgtcgcccgccgacgcctcctccactgccgccggtaccgaacttcctggcacacgtcatcaatccgctggagaatgaaatatatcccaaggtcattgtccagccggtctatcagccctgggtgctgcgcagtgatgtggctcctaagccgccgccacccaaagtggcagtcaaggaggcgccgattcccgtcagccgtccggtgaccaacccccccagccgttcgcggcgcgtgctgatcagcgcccatctgcgcgagaaactgcgactctttggtccggatgtgaccatctcgctgatcgacgaccgggtatcaccgcacttcaaggcggtgagaagggaacccgatggcagccagcgtcaaatattattcaccgccccacagctgctctcctttaccgccgcccactttggcaattggccgcagatggtgcccatccagatgctgatgatgaagccttcgccggccatgttgtcccattactttcccggacccatgggtcaaactttggtcaagaaatggtttgccgatcagcagccgctcgataaggagccatcattgcccttcaagatgcccatcggcaggccaccgaagcccagcaaatccactacaaggcccagtaaaacatatttacatcctggcaagccccaagtatccaagcaatttgcagctccagctccccctgcagtgcctgctcctcgtccagctgctacatttgctccaccaccaggtgatgctcctacttcacatccagctggtgatccggctccagaatccactccaactccggctccggaatccaatccagatccggctcaaactcccactctggctcccactccagctccgccagttgcgcctactccagcacctactgtggcctctagccctacggatccatttgatgagagcatgtttccaccaatcattctgcccgctatcctcaagcgttcatcccaggagaggctgcgcaaatctataatggccaagcggatcaaggccatgaaggaggctgcagctgcggctgcggctgcggcagaaagtgccaagttgagtctgaacaatgatatgccggcgaaagagttttgactcgaataattgaaaatttgtgaaaacacaaaccaacgtcttcgaaacaaaacacacctcccgaattccaactaagaaatcaggaggacgagtcaaagaatttgaataaataaaccacataaaacataagaaaataatactgtaaaaacacaattgctcaattaaccagatgtgattcaaaagtaaaatctgatcattgaaaagtgaaaggacaagtcgaaggataagagggattcggacaactcaatgcaagaaaataaaatgtagaacatgttgaatgtaaaagaattcgaaacataaagaaattagccaaatgtccaaaaaatttatattttgtatgtaatgtatataaataaataaataaataaatgtatatatatgcaattaattcagacaactcaacactagaaaatataacgtagtgcaccttcgaaactgcaaaatcaagaatttaagaaataaaagaataattaagtaaaaattgaacttagaaatgcagaaggacgagtcgatggataagaaggattcggaaaacttaacgcaaggaaataatatgaacatatttcgaactgaaaaaatacacaacagcgaacgttgaaacacaaagaaaaatatccaaatgtgattcacaagggcgttccaaacattttgtgtaattccgtataacaatttggcattccattcgactcatcaaacaaaatttgtcatgctaattggccaaatgaaacgctttgcttcgtggtctgttgtattctttttgtcactaattgcccaccgatgtcaatatctcattattgactgcgataattgcacactggtcttcgcataaaatcaaatgaaacacaaaaaaagttcgtttgacagtcaagtttaacttatttattgcttacgcatagggaactccttaaattagtcacattaagttaacaaaaaaaaaaatatatctaaattaaagtttagtgctcgaattgttcctatgggcaaggaggtggcttcccag

SEQ ID NO: 34052 - DNA, 2007 bp, DROSOPHILA
atgtccgaagaaatggaaattactcctattaccggaatggatgaagtgtccgaaaaaactgcggagaaagtctttgctccaatgttcgaagcagaaatgtccgagaaaatggatataactcctgttaccggaatggatgaagtgtccgaaaaatctgcggagaaagtctttgctccaatgttcgaagcagaaatgtccgaggaaatggaaataactcctgttaccggaatggatgaagtgtccgaaaattatgaggagaagggcatcgcgccaatattcaaagcacatatgtccgaggatacggaaaatactcctgttaccggaatgggagaagtgtctcaaacttatgaggagaacgcaattgcgccaatgtctgaaatatgcgcatcaggtgacccagtatctccaatggatggagtagcccaggaagagaacacatttgcctccatcccagatggtataacccgactcaaggacattcttgctacgcagacattccttgtccagagaaatgaaactgttgttcccagaaatgaaatgtcccagatgatatcaccgttggtcgaaatatcacaaaacgaacaaaatatcaacgatccttccgtgaatgagaatccacaaatgatcatggatacgagcactttttccacgaacgatgcttccactaccaatgtcgtctatgtggaacaggagccaacatcggtggtgatggtggagcaaccaaacacaatcatcgagctggtggattattatgtgccaccagcgtccttgaacaacaggacaatccgcccgtttttccccatcccagtgcccatgtaccccgaatcctcgccggaaccccccgcccccaagccggcgacaaagggtaagcgtggccggaagccaggtcccaaacctaagccgcgagcaaccaagcgtcgtcgcccgccgacgcctcctccactgccgccggtaccgaacttcctggcacacgtcatcaatccgctggagaatgaaatatatcccaaggtcattgtccagccggtctatcagccctgggtgctgcgcagtgatgtggctcctaagccgccgccacccaaagtggcagtcaaggaggcgccgattcccgtcagccgtccggtgaccaacccccccagccgttcgcggcgcgtgctgatcagcgcccatctgcgcgagaaactgcgactctttggtccggatgtgaccatctcgctgatcgacgaccgggtatcaccgcacttcaaggcggtgagaagggaacccgatggcagccagcgtcaaatattattcaccgccccacagctgctctcctttaccgccgcccactttggcaattggccgcagatggtgcccatccagatgctgatgatgaagccttcgccggccatgttgtcccattactttcccggacccatgggtcaaactttggtcaagaaatggtttgccgatcagcagccgctcgataaggagccatcattgcccttcaagatgcccatcggcaggccaccgaagcccagcaaatccactacaaggcccagtaaaacatatttacatcctggcaagccccaagtatccaagcaatttgcagctccagctccccctgcagtgcctgctcctcgtccagctgctacatttgctccaccaccaggtgatgctcctacttcacatccagctggtgatccggctccagaatccactccaactccggctccggaatccaatccagatccggctcaaactcccactctggctcccactccagctccgccagttgcgcctactccagcacctactgtggcctctagccctacggatccatttgatgagagcatgtttccaccaatcattctgcccgctatcctcaagcgttcatcccaggagaggctgcgcaaatctataatggccaagcggatcaaggccatgaaggaggctgcagctgcggctgcggctgcggcagaaagtgccaagttgagtctgaacaatgatatgccggcgaaagagttttga

SEQ ID NO: 34053 - protein, 668 aa, DROSOPHILA
MSEEMEITPITGMDEVSEKTAEKVFAPMFEAEMSEKMDITPVTGMDEVSEKSAEKVFAPMFEAEMSEEMEITPVTGMDEVSENYEEKGIAPIFKAHMSEDTENTPVTGMGEVSQTYEENAIAPMSEICASGDPVSPMDGVAQEENTFASIPDGITRLKDILATQTFLVQRNETVVPRNEMSQMISPLVEISQNEQNINDPSVNENPQMIMDTSTFSTNDASTTNVVYVEQEPTSVVMVEQPNTIIELVDYYVPPASLNNRTIRPFFPIPVPMYPESSPEPPAPKPATKGKRGRKPGPKPKPRATKRRRPPTPPPLPPVPNFLAHVINPLENEIYPKVIVQPVYQPWVLRSDVAPKPPPPKVAVKEAPIPVSRPVTNPPSRSRRVLISAHLREKLRLFGPDVTISLIDDRVSPHFKAVRREPDGSQRQILFTAPQLLSFTAAHFGNWPQMVPIQMLMMKPSPAMLSHYFPGPMGQTLVKKWFADQQPLDKEPSLPFKMPIGRPPKPSKSTTRPSKTYLHPGKPQVSKQFAAPAPPAVPAPRPAATFAPPPGDAPTSHPAGDPAPESTPTPAPESNPDPAQTPTLAPTPAPPVAPTPAPTVASSPTDPFDESMFPPIILPAILKRSSQERLRKSIMAKRIKAMKEAAAAAAAAAESAKLSLNNDMPAKEF

SEQ ID NO: 34054 - DNA, 2546 bp, DROSOPHILA
gcatggaatggcgtcgtggaggttatggggatggggtggggtcagggccgttgccctcatgcagacaactggacaacgctggtgatggtaatggtaatggtcatggtaatgatgatgccgcaactcaaaacggaccatcgcgtggaccggcaattagtgtgtcaaacacgagcagactccacacagtgacattatttctccgtattgtggggaaatcactcaaaggcatatatgggaaatgccaatttaataattattatactttatttccctttagtgtacgatgtgaaaaactaaaaacaataggaaacaaatattatacaaagttattgtatataagctcagatacggggggaaattgaagtcttaaattaccataaaatcaataaaacatgatcgcgagattaaaagtagtactatcaactactatataaagttgtaaatatacaatttcaaaaggcataccagtcggtaatattcgtcaaaaatgtatgttaaagtatgtatttacctccttgacttttcgattaaagtgattactttagtgatttttattggagttgtttcattgcgctgaatacatcttaagtatatcttgctccgccaagagatggattaattagtgagtaaccatgccttgctgtccggtttggacgcgactcgacccactgtgcgccgcagctgttggggcagggcagggttaagtgagccaagctggttaccgagcatccgagtcgctggccataaaagcggcggccaaaacgctgcagaccacagtcgaagatcgcccttccagtccgacacagtcgcagttcttccgaagcaatcaatactctcaaacacgccaacatgaaggtgcgccaatcgcggattaacactttcacagaaagtgaaacccattcttcgaatatttttttatgtgtacccttttgtgagttcaactaacgcgtttcctgccaatctcttgcaggttttcgtctgcttgctggcggtgtgcagtatggcccatgcgggtttcctgggcggcggcggcgcaggaggtagtgccctcagctccggctggtcatccggcggaggaggaggaggatatagcggcggatacagtggtggccatggaggaggtggtggctacggcggtggtggctacggcggtggtggctacggcggcggtggccacggaggcggcagcacgattaagatcatcaaggtgatcaccgattccggagctggtggtggtggctacggaggtggctacgggggtggccatggaggtggctatggaggtggctacggaggcggctcctccggtggttacagtggcggccacggaggcggttggtcatccggcggtggatacggcggtggtggctacggaagcggtggcaacgtcaagatcatcaaggtcatctccgacgccggatcgagcggcgggtatggcggcggctacggcggtggtcacggtggtggatactcctccggcggtgcctccagctactccgccggcggttgggctcctcagggcggttgggcccagagcagttggtaaatgctctccgttggtcaacggatactaacttgttactgtttctcactgaccttaattgtaaatacttcccaacattaaccaataaaacagtgcggtatagaagagccatttccactatcaaaacagaaactaatgtttcttttttagtaataatccgatatagagattctcgatataaatccaccttgtaattccaagaaaattcgttttcaagattgtaagagctgctgatgcatcgcttacaatcagtcagctagcaaatgaacctatcaaaaggttacactaaaaatttgcaaaatgtacaataggtggatctcccatatatgatgccctgtcaggagttacgaggacatccccaaggacctcagtcccgcgccaggagccgtctaatgtcctcctgctcggcggcctccgcgtagctctgcccctcgggcgtgcgctccgtgcggctggctcccatccggagcaggaactcgacgcagcgtgtatgcccctcccatatggccgccaggagcggtgtgatgccgtacttgtccttcctgtccacctccgcgccgatccgcacaaagaactccagcagcttcagctggccaaagtcggcggcgtagtgcaaggggaaccggacgcccatctgatcgttcacattaagcgatccggctaggaaaattcgctccacctcgtcgtacacgccgttcttgattgtccagatgatgtcctcgattttgtgtccatcgcccatcgtgatccgtttgactcagtttttatccgtattttaagcaatgcgattcataaaatctaatgatttcaatagtagtacgtacgtatgctcaattctaaagttgacgtgctgggttactttgatgtttgtgttcctaaacaaaagtgcccttttacatcgttaaagctgcgttcggcaagcaattagaggcattaaaagtttgccgtttgtaggtgcttttaaaactataacaacatacatcccattgaatctgtcaaagtt

SEQ ID NO: 34055 - DNA, 546 bp, DROSOPHILA
atggcccatgcgggtttcctgggcggcggcggcgcaggaggtagtgccctcagctccggctggtcatccggcggaggaggaggaggatatagcggcggatacagtggtggccatggaggaggtggtggctacggcggtggtggctacggcggtggtggctacggcggcggtggccacggaggcggcagcacgattaagatcatcaaggtgatcaccgattccggagctggtggtggtggctacggaggtggctacgggggtggccatggaggtggctatggaggtggctacggaggcggctcctccggtggttacagtggcggccacggaggcggttggtcatccggcggtggatacggcggtggtggctacggaagcggtggcaacgtcaagatcatcaaggtcatctccgacgccggatcgagcggcgggtatggcggcggctacggcggtggtcacggtggtggatactcctccggcggtgcctccagctactccgccggcggttgggctcctcagggcggttgggcccagagcagttggtaa

SEQ ID NO: 34056 - protein, 181 aa, DROSOPHILA
MAHAGFLGGGGAGGSALSSGWSSGGGGGGYSGGYSGGHGGGGGYGGGGYGGGGYGGGGHGGGSTIKIIKVITDSGAGGGGYGGGYGGGHGGGYGGGYGGGSSGGYSGGHGGGWSSGGGYGGGGYGSGGNVKIIKVISDAGSSGGYGGGYGGGHGGGYSSGGASSYSAGGWAPQGGWAQSSW

SEQ ID NO: 34057 - DNA, 2477 bp, DROSOPHILA
cagacagcctgccgaagggcagccagcggggaaggggcgtggcaggtggacaggcatcggcgaggggagtcgggaaataggaggcgttggcagacagttgaaattgcaaattatgcttatgggaggaacagggtgccaaggggtaggagaaggaggagcattgaatcggcggcggggagtccactgtctgcgctctaattatgcaaactacctgctgttactcaattaatcttgattacgtttgtgttatccaaatacaattattttggtattaattacagtggccaggagccaccaaccactggccacccagccactggccaaaatggcaagaccaggcggaggaccacttttacgagcggaaattgtctgggtcgccgggtaaagcaatgtggagcaccgcccccactcgccagattgccttggaaaatgcacaccacgcattacggcaagtgttttagtccaattttttctcggcattttaggcaaaattcgcatttccattctgattccactgccattcgtatgcgattcgcatttgacgcgactctaccgacttttccaaagaaacacaaaatgtcggccggtaggtagtctaatttcctaattagcccagggaatgtgaactattggaatgccagtgtttcacccaaattttttggggtgagccgcagggagcgatgaccttaattagctgcctgcgagaatgagacttaagtgctctgaagtggacttatagggataagccaatgaataattgtaatagtgacccactgaactgaagtggctcctcagttaataaattgaaaagcatcagctttaggcctaatttgagccgaatatatttcaaatacgttcaaaactagctgaatattcatcagtaatatattgtagtatgcgtgcgatgaaccttgttctatagaactttaaactaaactagagccggcgagtgtttggattttttaattattgtattaagttaacatatgtagaagttttcttattcggggtggttgataatatattcgtagaccaggtgtgcacgatgcagcgccaggcccgtgatcactctcctcacatctttgagcttcaacttgggtgccctacgggagcggatcatggtggacacgaccactggtagcctgttccggagagggagtggtgattgcatcatcatgaacgttttatgcaccacattttgcatctgtaggttgatgaccttcacgatccgtgccgcatagtccatactctgcttttgggttagcgcttcgggattattgggcgctttggtcgctttgggtacaactgccgcaggcggtggatcttccttcgaaacagattgaccctcgaggttcttttcctcgccggcaatgtcgacatcattcggggtagccaattcagagagtgtgtcctcactgagcagctccttcaaagatagtttctccatattcgcgagttctttgttcatgttctccatccttctgggtttcggcagcaatcaatttagggttttcctcagtattcaatattcccagaagattgaaaagttggttttttaatttatttcgcaatagctcacttgaatcgtgtagaaagtaaaggataaagtgagaatcattcaacgaatagctgattaactggatctaaaagtctgggcatacttaaataccaattagtgtgcccgcatgtgtaaaaaaaaattcgaataggaacagagcttttgcaaagaacacttgactgtactcaatacaatgctaaaataatttaaaaaaaactatacacattctgttataaataatatgctctatgatcatttttatttccagtattaaaagttaagtaattcgatttttcgaatcgagtgttttatataataatccacatatttaatgtcagcagtagtaaaatcactcttttgatcatttgccttaaagtaacaaatatgtacttgcttttcgatttctagtactagtgttgcacaatgacgttaaaaggtgttaccagggtttgaaacaagttgcggtaagttaagccactcaacgccacgtggccattattatttcatttactcattgtagattgttgaaaactgtacaagaagtataaccatttcatacgccttaggcttctaaagaaaactgtttattttccttgcgtacatatgttgtaaagccaatcatttatagagtttaagattattatggcataacaaagttcaagctggcaactctaatttgtaccattcaacagatcagagattgcagtcatttcgtacgtacacttacaatgttaatagtgcagccataccattatagttgcgactaattcatttttctagatatgcaactttttgaaatcctcattggaaatcaagagtaaatgtccacccagtagccctccattatccttttaatgccttcgtgtggcccgtctgccacgagctgctcaataataaatacatgaatagataaactagg

SEQ ID NO: 34058 - DNA, 477 bp, DROSOPHILA
atggagaacatgaacaaagaactcgcgaatatggagaaactatctttgaaggagctgctcagtgaggacacactctctgaattggctaccccgaatgatgtcgacattgccggcgaggaaaagaacctcgagggtcaatctgtttcgaaggaagatccaccgcctgcggcagttgtacccaaagcgaccaaagcgcccaataatcccgaagcgctaacccaaaagcagagtatggactatgcggcacggatcgtgaaggtcatcaacctacagatgcaaaatgtggtgcataaaacgttcatgatgatgcaatcaccactccctctccggaacaggctaccagtggtcgtgtccaccatgatccgctcccgtagggcacccaagttgaagctcaaagatgtgaggagagtgatcacgggcctggcgctgcatcgtgcacacctggtctacgaatatattatcaaccaccccgaataa

SEQ ID NO: 34059 - protein, 158 aa, DROSOPHILA
MENMNKELANMEKLSLKELLSEDTLSELATPNDVDIAGEEKNLEGQSVSKEDPPPAAVVPKATKAPNNPEALTQKQSMDYAARIVKVINLQMQNVVHKTFMMMQSPLPLRNRLPVVVSTMIRSRRAPKLKLKDVRRVITGLALHRAHLVYEYIINHPE

SEQ ID NO: 34060 - DNA, 2706 bp, DROSOPHILA
cgactggtcaaaataactcctaatttgggtgggccgttgcttattgccaacatataagcagtattgccagtaacccgtaaccagtaaccagtgactcggcggctttcttgatgattggctagcaaaaagtttttgtggcagccgcaatgtcgcccaaggagttcgtgtgccatgtcctgcgtcctgcgtcctgcgtctttcgtcctgtgtactatgtactgtgtcctttgcactcgactgcgctgagtcgagttaatgaaaggccaagtcaaatgcctcactgattgcattgacatccttctggccctttttggccctcttggcccaaaatgtatttggccaaactttacgtatgatttgctgggaaaattgaaatttgccctgcatcctgtggggtcgactgggattcattattacgtccacacatccgccccatcaagtcggttctgcagttcacagtctgcgatttgcatttcaattatgttcaaattgcatcttccatatctgccatttcaaatattattcaagcagggggaaaattttgtgtttggcttcccagtccacccatatatgtacatatgtacatgcatacatacatatttggtcagcaaactgaaattttctgttatttatttggccatgtttcttgcgaattttcggaaaataaagactctgattgacttattattgcattatgtatttccaccagttctacgttactttgcataaaacaaatcaataaaaagcagacgagtttaaaacaatgcatgtctactattttgctctaatacaattattaatcactgtatacaaataataataatgaaaatcacacttatactaagcacaatcgtgtgtaatttccattagagggcgtttgatctgattagaagactcaacaatgaactgtgatgaagcccattgtgtctgtcatgtgtgtgtacatatatgtatgtagtaatgtatatatgtatactttattttttgtttatttggtaaattacgaggcgatagttccactctgcttgcccttaaaataacactggagaatcaggtatggatagtcgcacgtgtccagattggtgacgccatcgaactgctgcttacactgggacaaaatcacgtggtcctcttgagatcctcgctttcccaccttctgcagatcgattttcccatcatcaccgaaataatcctggatcagacaccggctatagcacttaacggccactggaacatccgcaacgggagtggatggagccactgcctgcacttgggcactggtcagattgtggtgctttaggcaaccctctgcgttaacgcggccagctgattgccactagaatagatggtattgttagatggacacataactatttcgttaagaactgaccatagttatcaagcaaatccatagtacagctatgctgcacacaaccttcatggcgaaaatctgtttcccaactaacaatgagcgcatcatcacagctctatatatataacccatcgatttgctaattcagctcaaaagtagacaggagattttaattaaataattggatgctactttacattcgccacacaccaacaaataaagtctataattgaaattttaagcgcagttcccgattatgagctacacgtatgtcgtatgcgcaatatctgcattacaattgccaatagtaaattaccaacttggttttcttcatatttattaagatagaaaacatacaatttttggcttttacactccaagcatctctgaagtttaaacaaaaaacatatgtgtagcctatctactgtattggactttattcgtatattttatatggttcattaatataggtataaatacaaattatattcacgctttgcgatttgcagcgaatatcacatcttatacacgatgtaaaaaaaaaaaaaatatttcgtcatgtttttaggttggccgcaggcagtgctcactgtaccgccacaatgtttatcgttttgcattttttttttctttgttttcttgcggtttcccctaattatctttagtataaacttagtctactgtcttttttggtaagtattttcgtgatgggctcgtctatgcgaattcccatttccaatgaataaataaagtaattagaacattaaaattagcaataaaacacgtacatttaaagctgacaacaaaaaaaaaaagtattcttatgttaaactgtagtatgtgcctatgcaatattaagaacaattaaataaaatagcatattaacttatggcagcactttgttgctatgtttatgtttatgtttatgcacgcagttaggccagggcggatgtaacatgatcacccactcgaaggcaaaaagtataagtgcatggtcagcattcacacgccgaccaaatacatattacatacgtacatacatatctcgctctcccgataagcctagatatataagatatacataagaacgccgctccgctgctggcgtacccggcagcgcagctacgcggattagcctaagtccaaatatattaaaaactgtaaaatcagagagactctgtagacgttgagctgacagaaccatttctgcctactctaaaatcaaaagaagaaattgaataaatatatgtcagcccgacggctgccttcaacttaaaacggacttgtgttctgaattggagttcatcattacatggcgaccgggacagtcgtcc

SEQ ID NO: 34061 - DNA, 354 bp, DROSOPHILA
atgaagaaaaccaagttgtggcaatcagctggccgcgttaacgcagagggttgcctaaagcaccacaatctgaccagtgcccaagtgcaggcagtggctccatccactcccgttgcggatgttccagtggccgttaagtgctatagccggtgtctgatccaggattatttcggtgatgatgggaaaatcgatctgcagaaggtgggaaagcgaggatctcaagaggaccacgtgattttgtcccagtgtaagcagcagttcgatggcgtcaccaatctggacacgtgcgactatccatacctgattctccagtgttattttaagggcaagcagagtggaactatcgcctcgtaa

SEQ ID NO: 34062 - protein, 117 aa, DROSOPHILA
MKKTKLWQSAGRVNAEGCLKHHNLTSAQVQAVAPSTPVADVPVAVKCYSRCLIQDYFGDDGKIDLQKVGKRGSQEDHVILSQCKQQFDGVTNLDTCDYPYLILQCYFKGKQSGTIAS

SEQ ID NO: 34063 - DNA, 2207 bp, DROSOPHILA
attgcatacttcataggtggtcgcgacgatcgatcgatgcatggatacgattcacttgattcactctggtgattcactgactcacctcgcgccttgattatggtttcgtatcgcattaatcgcacatttggccgatttatgaattatgcattatgaattattctggagcactagagttctgtggggtgaggtcatgtgtgtgggtgcggtgggaaaatgtgaaaaactatttgtatctggcagtcaatgtgcgtgtagttttatgagctaaacaaatcgccgagcgaattatttggttatatgcatctggaaatccggtccagatatcaaggaagtcttgccacacacacacgactgggccatctgcgatcattatttcattcactttttaatcaggctacaagtactttattgtttagctaaacaagacaaaaagacgcaaatgttttggcaatagaatgttaattgaatgaatgaattaaaagtaatcaatagtaagattctcacaattgtttcattcagcctttccagcagatgtatatagttcatatatatcattaaaacttgtcggacgattaatatatatgtatataccttgtagtaaaattactagaatgtctaaagttgaattagatgtttataatactgctattgaaacaattaaacttagtccgtttatttagagtaactcgttacgtaaatattatttcttttgcatatcttgattaaggtcataaaaactttcgaataaaagtgctcaagtattgtatattttccgaatacctcgctgtttgtttttcggtttcgatgaacattaattataccattgtttatttgggtatatcacttttagttcgtttttaacaaggcgcaacacaattgaacataccactgatcatatttttagacctgatatgaatgaatgattttttaaaaagttaatccgcgatcaatgttaaatggaatatcccatatcatatcatatcatatcattagattcttaaccctttttttcgccatgcttacaggtcttgagtccctggtagggcagggaggggggcggcgggatgtgaacggcgtgctgcgaggactggtgctgcggagtgagtgggaaggtctccgtggaggaggaggcctgtatgccacccgatcctggcgatccgacatgcaggcgggcgcggtgctgatgcggcgaggcaggatgcattgcagcaggacacgttctcggatcgtattggatgggagggatgcgatttccactccacgggtatcagacgttaactggtcgaactggagaactgcacgcgtccagcgcacgttttgaaatgagcacgccaagaacgaacacaaagccaaacgcagaggcgaagacaggaagtataaaactattccacataccaatcggtgtcccgactgctagataccatgtaaaagtgcactctaattttgcattttcatatttcatgcaaagtggaaattcgaattggaatcaatctctttgaagtttcctttcatatattctgaatatataccaaaatcgtataacaaaaataatctataatcttaatttttcttttaacaagaacattcaattcacaatggcatactcaaaacgaagcaccaattattatttaaaataaaagtttaattattaactaattattatgttgcattgatcaataaattatttgaatatttaatatgaataattccctaacgtttttatatttttaattaattgctgctaaaacttctcaaatctttgatatattaccaaattggttaacgaatgtttcataaatgcattataccctctgggtcctacactttattgggtatcataaactgtatcctagacagaggtgaaaacgctggcagcggcaatcgttcggctcatttcacacattttcgtggccgaacgattttcccgcttttccgaatttcccggcacacactaacacgcacgcggaatggatcgttttgttggcagtttagttctttttgtttaaattattgaaacgatccacgaacaacttcgcagatggagatcatttataaaccacttcatcgagagcattcggcagttcctcgcttgtcttccattatttcatagcttggttggaggttgcccatttgtaggtgggtgggttggtggctgcatggaggcagttcctcgttccccatttgtctaaatcaagacgcgagga

SEQ ID NO: 34064 - DNA, 207 bp, DROSOPHILA
atgcatcctgcctcgccgcatcagcaccgcgcccgcctgcatgtcggatcgccaggatcgggtggcatacaggcctcctcctccacggagaccttcccactcactccgcagcaccagtcctcgcagcacgccgttcacatcccgccgcccccctccctgccctaccagggactcaagacctgtaagcatggcgaaaaaaagggttaa

SEQ ID NO: 34065 - protein, 68 aa, DROSOPHILA
MHPASPHQHRARLHVGSPGSGGIQASSSTETFPLTPQHQSSQHAVHIPPPPSLPYQGLKTCKHGEKKG

SEQ ID NO: 34066 - DNA, 2540 bp, DROSOPHILA
agaaaaattcagaaatttcgcgttcgcattcacactagctgagtaaagggtatctgatagtcggggaacttgactatagcattctctctagttggcatttgaaacttttacatgttttctatacttccaattaagcatttgagtgtaccgaaaatggaatgtgtacttccataaaggaggaggagttcacttcttcatcatcagtaatacaggtaactccaactacttctactgttttgcccacacttgctacttttaattggttatagggcatctatacttatcgctgctaaatgaacatatggttttggccatccaggtggctcttcaatccatttcgctgtcggcaaatcatttactttgttaaaatctgagcattgcagttgcaattctcataccaaatgtatcgatcgggatttaattgtctttaaaaaagccgactggttttcgctgtaattaatacaattgagcgtctggttattcactggatgaatcgaaaggaaacattatgaatccaattgccattaaacattctctatggtcatctttttatttgacctcctgtgtccacaacatggttatgattccatttgactattagtgatccaatctaattcaagtcataccaagtggatgatattttaggaatcaacccaattggtgttcagattggaataatctgaacaccaatttgaacataccctgtaccttgattttgagaaacaaatgtgtttgtgccttaacaattcgttatttcgaaacattctttacaaaataatttgaattacttacaaacaataaaaaggataattttattttgaagcaaacttattgttacaagacaaaaacgaaaaaaaaaataaagtaatttaacttaaatactgtgagttgattcaagatcttttaacattttcttcatggatggataatgataatggataaagtcaatttggagatctgctccagttatattataaatcctcgggcttcggaggttttttcagtcctgtagcttcaggctcttaatgtagtcaatgagtagcttggggtgcacatgtttgatctcctgaacaggcacggcttccccccacttggatcccttccaggtgacaatgaagtagaccgtgtcaccaagcatatagctgtacataacattctcaattgctttgccgcggaccaggagcgcatccgtaggcggcacgttcaacggttgggactcattggaattgccgccatcgagattccctgacacgctgccaccgttggttgcatccagttctgcctgttgtaccaacaactcgacgagcagccgagccagctctgcccgagccgaattgtgaactcccatgtgctttggaggcggcgtcgaaccggcctccttggattcatcctttgtcggctcttcctgcacttcctcctgctgatcgttctccttctgctgatcgttctccttctgctgatcgttctccttctgcttttcctcctccgcggggaaaccacctgtgttcttgttgttggggctgttttctttgtccgccatcgtttagcaataaagttctcttgcaaaagtaaaccaaatgaattcacgtgcaatcgttaaatgaaaaatggcggcaagtttccgattgctgaagctgccagctagtgcgaattgcatttattaaaaaaaaaaaaaaaatgaataagacattaatattttcaaactctggcaacgccctagattcaaatcataggttggttttcggccaagcgtccagtgcgtctaaaactatgttatctgacttttctggcgattgcttaagttccggtggcgggcccatcaagtgggcatatttggccagatacggagtaagcagctccatgggcagaggaaagataatggtggagttcttctcggcggagatgctgctcagggtttgcaagtagcgcagctgtgatgacagaaaaattcgaatggctggtaatccgtgctcaacgattgatttcagcttttactaggacaacacccacctgcaaggccgatggactggcggaaatgacatcggatgcctccttgagcgctgtggcggacttcttctcaccctcggcggcgatcaccttggcacgagcatcacgagctgcctccgcttcggcggccatggcacgctgcatggaaacgggcagggagacatccttgctgtcagcgggtgaagtgcatacaacgtacagatgttaagaaatactgatctgatctgatggatgtcaaatgcctactaaatggctacttacatctcaacgcgctccaccatgacgccccacggctcggtggcctcgtccaacgtggcctgcatattgtgggccagggtttcgcgctcggttagcagttcggacaggttgcgagtgccgacgatatttcggagcgtggtggccgccaggaggcgagtggacatgctgtagtcctcgacctggatgaccgcataaaggggatcactgatgcgatagtagacaacggcgtccacagtgaccgtcacggaatccttcgtcagcatctcctgctgcgg

SEQ ID NO: 34067 - DNA, 540 bp, DROSOPHILA
atggcggacaaagaaaacagccccaacaacaagaacacaggtggtttccccgcggaggaggaaaagcagaaggagaacgatcagcagaaggagaacgatcagcagaaggagaacgatcagcaggaggaagtgcaggaagagccgacaaaggatgaatccaaggaggccggttcgacgccgcctccaaagcacatgggagttcacaattcggctcgggcagagctggctcggctgctcgtcgagttgttggtacaacaggcagaactggatgcaaccaacggtggcagcgtgtcagggaatctcgatggcggcaattccaatgagtcccaaccgttgaacgtgccgcctacggatgcgctcctggtccgcggcaaagcaattgagaatgttatgtacagctatatgcttggtgacacggtctacttcattgtcacctggaagggatccaagtggggggaagccgtgcctgttcaggagatcaaacatgtgcaccccaagctactcattgactacattaagagcctgaagctacaggactga

SEQ ID NO: 34068 - protein, 179 aa, DROSOPHILA
MADKENSPNNKNTGGFPAEEEKQKENDQQKENDQQKENDQQEEVQEEPTKDESKEAGSTPPPKHMGVHNSARAELARLLVELLVQQAELDATNGGSVSGNLDGGNSNESQPLNVPPTDALLVRGKAIENVMYSYMLGDTVYFIVTWKGSKWGEAVPVQEIKHVHPKLLIDYIKSLKLQD

SEQ ID NO: 34069 - DNA, 3620 bp, DROSOPHILA
ctatatctatactaatgtataactctgtcccgctccatttcgattccccatttccgattatgtgcctcactctctctttcccacacccccaagaatatgtacttccagtcgcatccgatccggttgcagactatattcatatattcatatatatatatatatatgcgctttatatataccgctcaccggctaatcttcaattattttgtccggcaaatggatggtcactttttaaaatgcaactttttacctttgcataactttttaggcgacacaacgtaagagaattaattaaaaatgaaatgcaaaacttaactatgaaatacatatgtaaactttgtagcttcctaattgaataaagataaatacaactcacacgaatttcgaaccatttcatcatcgtcttttcattttgatggaagcacttaagtatatttctcgttttcacgtactctgttaattatttacactttatagtaggtcattacacataagtgggcttctcaaggtgtgagagatgttttacatataatactagcacacgagtcaaaattccgaatgcggcgctgttcaatttgtggtcaagttggagtccgattcgggtctggacaaaagcgtgtggtggtcaggtcctgtatgcatgtatgtgctatatgtgctatcatatgcaggcggatgcgtggaagggagcatggtgggtgcgatgtgcttggttggttggttggttggttggacatggttcgtgggcggtgttagcgtttgtcttacaattaaaattcagtacaagtctaaaagctacgacggagacgtgagtgtgtaagtgggtatgggtatgcttaacaatgcctaacataaacacctgaacaaaggtgtgcggcgtctccttgtgcgcgtgcaaagaggctgtccttaagtctacgcggttcttgcgatttattgtaaatgttgctgttttactgttgctcctgtactgctcctgtgctgtactggccgtctatatctagtccggcagatcgatgctgacgaacggaaccaccggcttgagaatgtcattcttggcccccttcttgctcttcttgtcgtgcttgtggaactcgtgcagctgctcgctggccgccatgctcgtcgaggaggacgctgcgtccagcggcatggactgtgcagcattgctgtgggtttccgggtgatagctgatgttgccgtactcctgcaggaacggcatcgcggacaacaggaactggctgaaagacttgcggatgccgaaccaccacatgttgccgccctttgccgaggagctaagaactattagcgccagaatagagacgagcagcggtgagaagaccacgatgtacgggaacttaagctcgccgtccagcttgtcgcagatgaccacctggcggaatagatgggttagcgatgcacaatcttttggagggactagatgaggtctcacctgaaagcagagcagtgggagcaccgtgcagatgttgcccaccgctgcgtttaatgccgccttcttctgctgcagcgagacctccggcgtacgcatcatgatgccacagaagatgatgttatacaatacgctgaccaggctcaggcatatgacgatccacatgggcacaaacactacgtcccagttccagtagacaaagcgatccagctttagcggcagtgaaacaaactgaagcgcgttgaccgccaggaagagctccagctcgaaggagcgatcgtgcttgacggcccagacacaggcgcccacactaaccaccgagccgaagatcagcggaatgaagaccagcacccacaagtgacggtccgaggtcagcttatcgcaggccagcagctcaaacatcagcaggatcaggtgcagggccagtgagatgagcatcgctttgaactgcgtgtaggcatcgccctcgagacgataatgcggataccgacaccacacaatggctcctacgattgcgcccaggatggcggtgcatttccatatccatagcggtgtgaaaatcgcccagtagggccaatctgggataaggcattcgattagactaggctactaggccaattataaggttaatgccctacaataaatcttgttcagtaattaaaaatctaaatatttagcttagataagttatttaaaatagcgagagaactaatatcctcgttaagtgaccaaatttggatgatcctctatggtcagacgatttcttcgatattgctatatccaatctcatgatctgcttgctaacccttgtatacaataaatctggactattctctagaagaagcgatggtgcaccgtacacatatttgtgtatgggtcgtatatgcttgtattgttatatgattgtattttcttgcatccccgtgctattttaattctgggtgacgttgtgtattccagaactgccacagaaaagtacccaccaatgtagttgtcgaggcgcaaggcgaagagcgtgacaaagatgaacaggctgcagtggacgatgaacttgctgaaagggaacatggtcgattatgttttagattgggaacccatgtgatccggtcgtccgcagtcggaggcttctcaccagggattgaagtcgcggaacagagattccagattcatgttgctgaggacaccatagagctatgtcactggacacttggtacctggacactagttgctcgtgggcacccgccgcaccgcgtccgctccacgaagcgatcttcgcccgaacaaggctgtgtgttatgatggagtgggggggcgggggcagttagtactctacgcctggcgccgatctttcacccctttccctgtagatattctgttctttgttttatttacacacttttttgactggcatttctgtcccgagattcgatatcgataactcttgcctgctctggcgattggcttgactaaggactagccagatgtctggctacaattcgccagatttccggctacgctagcctgctatcgatagcctcgataggcacaggaaaatgttatcttatttggaagatttgaaggaaaacgaggaccagctgcgggattcagactgctgcggcaatggctgcaccaactgcatcctcgacaacaagccacggccaagcaaacgcgtcctgctggctggcaaacgcaacgtgatcctgagctacacgaagttccgcctgttgcggcgggaagcgctgggacccaatggacagttgctgctcctgcactttgctcatgcagcagaggagggggacggcgatggagcggtggacacggtgcttgacatcccgcccggccaccatgtgatgctgcgcgtcggctccctgctgcgtccgtattcgccctattggagcgactttgtggccaaagagttccgtatcctggtgaagctgcagccggaggggccaatgtctcggcacctgcaagccgtacagcccgacgatctgctggaattccgtggtcccatcgggcaatacgtacacgaaccgcagccggccaagtgcatctatattatcgcccagggagttgctattgcacccactctgccgctggttcggcaggtgctggacaacgaggaggatatgagtcgcctgtggcatttggtgtgcgctcacgacctgctgca

SEQ ID NO: 34070 - DNA, 1077 bp, DROSOPHILA
atgaatctggaatctctgttccgcgacttcaatccctgcaagttcatcgtccactgcagcctgttcatctttgtcacgctcttcgccttgcgcctcgacaactacattgattggccctactgggcgattttcacaccgctatggatatggaaatgcaccgccatcctgggcgcaatcgtaggagccattgtgtggtgtcggtatccgcattatcgtctcgagggcgatgcctacacgcagttcaaagcgatgctcatctcactggccctgcacctgatcctgctgatgtttgagctgctggcctgcgataagctgacctcggaccgtcacttgtgggtgctggtcttcattccgctgatcttcggctcggtggttagtgtgggcgcctgtgtctgggccgtcaagcacgatcgctccttcgagctggagctcttcctggcggtcaacgcgcttcagtttgtttcactgccgctaaagctggatcgctttgtctactggaactgggacgtagtgtttgtgcccatgtggatcgtcatatgcctgagcctggtcagcgtattgtataacatcatcttctgtggcatcatgatgcgtacgccggaggtctcgctgcagcagaagaaggcggcattaaacgcagcggtgggcaacatctgcacggtgctcccactgctctgctttcaggtggtcatctgcgacaagctggacggcgagcttaagttcccgtacatcgtggtcttctcaccgctgctcgtctctattctggcgctaatagttcttagctcctcggcaaagggcggcaacatgtggtggttcggcatccgcaagtctttcagccagttcctgttgtccgcgatgccgttcctgcaggagtacggcaacatcagctatcacccggaaacccacagcaatgctgcacagtccatgccgctggacgcagcgtcctcctcgacgagcatggcggccagcgagcagctgcacgagttccacaagcacgacaagaagagcaagaagggggccaagaatgacattctcaagccggtggttccgttcgtcagcatcgatctgccggactag

SEQ ID NO: 34071 - protein, 358 aa, DROSOPHILA
MNLESLFRDFNPCKFIVHCSLFIFVTLFALRLDNYIDWPYWAIFTPLWIWKCTAILGAIVGAIVWCRYPHYRLEGDAYTQFKAMLISLALHLILLMFELLACDKLTSDRHLWVLVFIPLIFGSVVSVGACVWAVKHDRSFELELFLAVNALQFVSLPLKLDRFVYWNWDVVFVPMWIVICLSLVSVLYNIIFCGIMMRTPEVSLQQKKAALNAAVGNICTVLPLLCFQVVICDKLDGELKFPYIVVFSPLLVSILALIVLSSSAKGGNMWWFGIRKSFSQFLLSAMPFLQEYGNISYHPETHSNAAQSMPLDAASSSTSMAASEQLHEFHKHDKKSKKGAKNDILKPVVPFVSIDLPD

SEQ ID NO: 34072 - DNA, 4538 bp, DROSOPHILA
taacatgaaggatggaatctttggattgggaaagtacatatgtgcgcgaaggtatataaataataagggaaagtgcaaaggcttatcaaagtcgatagagattatggaagaatataaatgattggcttgaagaaaacggttaatataatacgtgataaacagtgaaatatatatatatttagtatgtatgaagtatttagaatcaaaaagtcatgattttagaaatatggtatgctttgtctatgcgctccacctatgcaattttgagtcatctatctgcaatctagtggatatttttgaaccgataagcgcatatctacgttggagttcaacaaaaatgatacatgtactttccattaaaagcacgattcgtaagcgagatgagggtcaatcggaagcctgttgaccttgttaaccgttctgggcgaccaccacccaccaggtgtctgtcgatctaggtgtacagttgtatatgtagccatttatctgctccaactggcggccataaacataatccggcgctgacgccgctgcgcgctgactgaattgcaggcaaacgctttacatatctgacgttaatctcacggatacacggctttatggatacacggatacgtagatacgcagctgcgcagatacacttgtgcagtgtgtggacagagatatctctgtggtatatctgtggtatatcgtgataagaggcccgatgttatcagcctgcctctccggttctccgattctccgggtatggttactggtactggtactggtggtccgtaccgttcgtgtgtgctccatatgtgtgtgctagcgcccattatctaaacggtttttggggtttggtgaatgatgaatgccagcggctagacggagcgcacacaaaaattccaagcgcccagcgaacggatacggatcaaccttcccgagttagccatctagtcgtccatctagtccacatcgagcagagtccccgtagccgcacatcggtatagccagctagatggcaacctcagcgatcggcggggcgggcgtgggcgtggctgcctccggtccagtgcgacgacccactgccagagccaccgccggaatccagagacgcagggtggtcaagaagcacatccagcaaaagtatatgctctgcggcttcgccatacacgtaaatatatggtatatgccatcatgttgtctctctaatcccattgagatctaggctttcctggccacacccgcctatctgtacgggaacgtggtggagtccgacaaggatctggtgttgaggatatggccggcgatcgtttaccaggccacaggcgagctctgccgctcgatcatggagcacttggacacagagtacagtggcagatcgagggagacgacgcagtaccgacgggtcttcctcctggccacgctcattgcctgcgtatcgctgatggtcagcgggatcctgttctcctccgcctggatcgtggtcacaaccaccacacaggtggtagctattgtcttctacggattctttgcaggtaagttacctgggattcagtcatccgtaacaagttggggctaatcatctgtcatctgcaatctcaagtccaaaaaggcgggaagccttttgtacagttgtgcttataaacatagttgtgcctgcggagtttattatttgtgacagcacttttaaaagaaagtttaggatatttttcatacttattcaaataaaacgacagcttcgttgtgataataagtcgcttatcgtatacccaatatatcacatatcacgtatatatatatattagtgggtgtcattattacactgcacgccttatcagtccgattttgtttatgtattcaaatataaatggaattcaataatttcatagttctatgccgcaaggagttcgattaaagaatcaatgatgttaaactgtgcccaaactaaagttaaacttaagttcgacagaattttttattttcaaagcggaaaagcgacaaatttaacacaacattctatcgccttgtccaaggtatcggctccagcttgtacctgtggaagacgcacgtcattctggaggcagtgcgtccgcgggaggacaagtacgtccgcaagacgatccacctgtgcggcgaggccttctgccagctgttcctctcgttcgtgttcaccagcctgcgcaccttgtacggcaccgcccagtccatcgtactgatgtccgccctgctggtgaacctcatcccgctgagcctgatcattaccaagcatcgcgaggatgccttcaccacgaagcggatatcggtgatcaaggcggaaacgggattcgctgcactgccgctgcgagccgcactggcggccaacttggtggcggaccagctggacggattggacacgctctcatggcggaatccggccaccaccgaaatggccacgcccagtggtgccgtcgccgccgctgtggtggtggacacgcacagcaactacatgctggccaccgatgaggcgtatgtgacgtatgtgaatcccaacggggtggagattatggagatcatacccgaggaggacgagacggtgtccatgatgcggtcgagcaatgcgaccatcgacaattatgccatgtccgcctcgcagatgtcgcacaagtccctgtccaatggacgtctctatccactgacgccccagcatcctttgggcacaggaacgggaactggtacaggtagctcctcacccctacctcccgattatgccaacctggtgagtagtgcgcaggctttgtggaatatggtgaccggatgtgaaacctttccgtatgctcctcattttcagcgccgcatccggcggatgtcgcgtgcggtaaccacgcacctgtggtggaatctgctggacaagatcgccatgccgctgcagcaggcgctgctggtgccgcagctgtacgccaccacgctgctcctctcggcggacatctttagctacgtgatgtgcctgacggtgctacccggactggcggtcagccaccatgcgctgaagaacgccgagatcccgttcctcttctcgctgctggccttcccatggatgtgcttctccctgatgactccgcgcttcggcacgagcctctataagcggaagctccagtggcacacgctgggcagcatctgcaagtgcctggcgctgatctgtgagtcatgatacccgtttcaagctttccccgggccatcaatagatccatcttttgtttcgcttccagtcatcagcttctccacctccaagctgctgctcagtgtgtccgccgtgctgctgggatttggccaggtggtgaccgcctttctgcaggagctggtcttccagatgggcatgacgcgggccaactggacggccatccgccgtccggtgcacttcaccaacggcctgctggttctcctctggggcgcgctggcccactgggtggtggagcggtactccttccaggccaccgtgggactggccggcgccctttacggaactaccacgctgctctggaacttcctcttcttctgctgccagagcaaggattgagggactgaagaattcgcgcactctcacacaacaaggcatcgtgtatgtgtgtgtgtgtgtgtgctgctgtggctgacgttgttgttgtatttgtgcagtgatattaataaataaatatataaactataagcaagctacatacattttaacataagtcttaaaagtcttattacgtcaatttgaaaaaagaatggaatgctggcctttaaaatatccctaaagaactgctacagaagtagctatagccttttagctatttttccattaagctgtgctgactactgtactttggaaatgtggacagtttttttccgattaaaataagtttaaaagtataaaatgttgcgttcattctagagattggttcaattttttagaaatctgtcgcacactaaaaaaaatgcatgttcttacaaaattcgctgtgtaagaaatattgaaaatattgaaatattattggaaaatattgacgaaaaatttcccttttcaccgaatttgtcgtatttttacagtaagactaaatgccgttatttcctcagatatttctaggtaattacattcgctgcgtgacgaaagctgcctgctatgatgcggcagccagacccaacactgttggccgatatcgattggtttggtattatagagcaatatcttgtacggtcatactaaggcaccagtacgccaaaaccgaaattttctttctttactcaattttcatcgagctaagttgcgaaaattttctcaagtcacagtgaaaagtgtacattgtttaaaacctggccaaggggtaagtgtttgttgcaaggcgcttgtggtgtggcactcagtgcggtgcaatagcagcgtcggcattttccggcggccgcagaagtggcaccaagcaaagacggcgaaaaacagcgaaaaatgcgcaaaatcgggcttcctttttgccggctcgttttccttttttgcttattcttcttcttgcgattcttgaaagcgaatgcgtgtggaaaaa

SEQ ID NO: 34073 - DNA, 1845 bp, DROSOPHILA
atggcaacctcagcgatcggcggggcgggcgtgggcgtggctgcctccggtccagtgcgacgacccactgccagagccaccgccggaatccagagacgcagggtggtcaagaagcacatccagcaaaagtatatgctctgcggcttcgccatacacgctttcctggccacacccgcctatctgtacgggaacgtggtggagtccgacaaggatctggtgttgaggatatggccggcgatcgtttaccaggccacaggcgagctctgccgctcgatcatggagcacttggacacagagtacagtggcagatcgagggagacgacgcagtaccgacgggtcttcctcctggccacgctcattgcctgcgtatcgctgatggtcagcgggatcctgttctcctccgcctggatcgtggtcacaaccaccacacaggtggtagctattgtcttctacggattctttgcaggtatcggctccagcttgtacctgtggaagacgcacgtcattctggaggcagtgcgtccgcgggaggacaagtacgtccgcaagacgatccacctgtgcggcgaggccttctgccagctgttcctctcgttcgtgttcaccagcctgcgcaccttgtacggcaccgcccagtccatcgtactgatgtccgccctgctggtgaacctcatcccgctgagcctgatcattaccaagcatcgcgaggatgccttcaccacgaagcggatatcggtgatcaaggcggaaacgggattcgctgcactgccgctgcgagccgcactggcggccaacttggtggcggaccagctggacggattggacacgctctcatggcggaatccggccaccaccgaaatggccacgcccagtggtgccgtcgccgccgctgtggtggtggacacgcacagcaactacatgctggccaccgatgaggcgtatgtgacgtatgtgaatcccaacggggtggagattatggagatcatacccgaggaggacgagacggtgtccatgatgcggtcgagcaatgcgaccatcgacaattatgccatgtccgcctcgcagatgtcgcacaagtccctgtccaatggacgtctctatccactgacgccccagcatcctttgggcacaggaacgggaactggtacaggtagctcctcacccctacctcccgattatgccaacctgcgccgcatccggcggatgtcgcgtgcggtaaccacgcacctgtggtggaatctgctggacaagatcgccatgccgctgcagcaggcgctgctggtgccgcagctgtacgccaccacgctgctcctctcggcggacatctttagctacgtgatgtgcctgacggtgctacccggactggcggtcagccaccatgcgctgaagaacgccgagatcccgttcctcttctcgctgctggccttcccatggatgtgcttctccctgatgactccgcgcttcggcacgagcctctataagcggaagctccagtggcacacgctgggcagcatctgcaagtgcctggcgctgatcttcatcagcttctccacctccaagctgctgctcagtgtgtccgccgtgctgctgggatttggccaggtggtgaccgcctttctgcaggagctggtcttccagatgggcatgacgcgggccaactggacggccatccgccgtccggtgcacttcaccaacggcctgctggttctcctctggggcgcgctggcccactgggtggtggagcggtactccttccaggccaccgtgggactggccggcgccctttacggaactaccacgctgctctggaacttcctcttcttctgctgccagagcaaggattga

SEQ ID NO: 34074 - protein, 614 aa, DROSOPHILA
MATSAIGGAGVGVAASGPVRRPTARATAGIQRRRVVKKHIQQKYMLCGFAIHAFLATPAYLYGNVVESDKDLVLRIWPAIVYQATGELCRSIMEHLDTEYSGRSRETTQYRRVFLLATLIACVSLMVSGILFSSAWIVVTTTTQVVAIVFYGFFAGIGSSLYLWKTHVILEAVRPREDKYVRKTIHLCGEAFCQLFLSFVFTSLRTLYGTAQSIVLMSALLVNLIPLSLIITKHREDAFTTKRISVIKAETGFAALPLRAALAANLVADQLDGLDTLSWRNPATTEMATPSGAVAAAVVVDTHSNYMLATDEAYVTYVNPNGVEIMEIIPEEDETVSMMRSSNATIDNYAMSASQMSHKSLSNGRLYPLTPQHPLGTGTGTGTGSSSPLPPDYANLRRIRRMSRAVTTHLWWNLLDKIAMPLQQALLVPQLYATTLLLSADIFSYVMCLTVLPGLAVSHHALKNAEIPFLFSLLAFPWMCFSLMTPRFGTSLYKRKLQWHTLGSICKCLALIFISFSTSKLLLSVSAVLLGFGQVVTAFLQELVFQMGMTRANWTAIRRPVHFTNGLLVLLWGALAHWVVERYSFQATVGLAGALYGTTTLLWNFLFFCCQSKD

SEQ ID NO: 34075 - DNA, 4291 bp, DROSOPHILA
attctatttgcaattgctttagtgaggaactattgtagttaacttcattgaataataccatcgtctaccatttaagttgtgtcattacttcagcttcggattcattccattgaattccatttcccatttcgccatcagtcttgtggcttgcaccgaatccgcagacactcgaaaccatctagaatctgaaattggctggaattcaaattttgcccaaacgtagatcgaatctggagcactacggaatacagaatcgaactactgataagtggacatcttacggaccagacaccattgaccttgggcaggggaatcgctacgctcaatcatcacacacaaaaaaatactctaaagaaatgtttaatattcaaataggttttgatgatgcaaaatgagccattgttacacttggttctatctgacacaaattgtatcttttaatcgtagtttttgactgccagaagatgcatatttcatagatatgacattcctcattagaccatcaaccacatttagcatctttctgtgtgcgtagaggacataaatatgattcacaatttgcgcgctaactttggttttggtctgcgtctctgggtggaaatctgtcacatgacgccgctgataaggaaagctgctgctggtggagaggtagagggtgagaaggcattggaaaaccggagatttcgaatgtcagatttggtattctcgtttcttggtacccaatcgtgaacccgggttctgatcagatggcaacaacactgtgccaccgatctgcctgctggcggcgactgggatggcatctttataacccgtatgcggttaattgtgacaagtgatcgttaacgtattgcgccaagtaattgccgtaaatcatttacgaactcggccagctgccttcaatggaatttttcccatatcacttccctatttgcatttgttttcagggttacggacatgccttttaatacaatatttctcactgattcgcttacagttggccatggagaagaaggtctatcaggacacaacgcgaccgctgcccagggtctcccgtgcacggtactataacaagcacgacaagagcgatctgggcgacgactttgtggcgcccgacgcgggatgggcgtggatcgtttgcgtcgccgctggcgtttcaaatgtaggtaaaactaagccaatttcatccatttccatgtcaaatatattttaagtgaatgttaggtgaacataagcatatagttactgtttcctattgaagtcctatcactcggaagaactctaatagatttgctttacagctctccatttacccctgcctgcaacagtttggctttctattcagggagcgcctgtccgatctgggcatgtccagttcccagattacagccatcattaacgcaaatccggccgtatcggcctgcacgggtctgctcaatggaccgatgttccggaggttcacctttcgccaggtggccatggccggttctctgctaatctccgggagtctcatactaaccgccttctgtgaaacctttctcagctacatggtggcctacgccctgttgtttggtgagtacaaaggcatctcgatgcactcaagatgtcgttcaaaactatcctttgacattataattaatgaattgcaaagttaaattatactttattggatatttttgttttgaaagcaattgtgttagcttgtctactaacttttgaacaatccacaggctttggcatgggcattagtgtgtcggcctcctcgctggcgatcaacacgtacttccagaagaagcgtcgtcgggcggccgggttttcgtggaccataacgggtctgggaccgatctttctgccgcatctggtcacctttttgctgaccatttacggggtgcaggggaccacgctactcttcgccgccatctcgctgcactcgttcgtttgcgccctgatctatcagccggttcggtaccatgtgaagccaccggtggagcagctggcggatcaggagcagcaggcggaggcgttgtgtgcccactgctcgtggcagcagaaacgcgagccgggcggcatattctccagtcagtatctatgccaggacgacgatgcccagcgaccgggctacgagatctgtgagcccggcacaccgatgctctcgcgcgccaacgatggctggtatggatcccggctatcgctgacctcgggccgccttcgctttcgcaccatctcgagctccaaggatctggagcagacgcagcgactgcattgtcccattagcgaggagcagaaccacgagagcgatgagttcctgcgccccaataactttcgcagggagcgggtggagtccaacctggaggccaagctgtgttgccagtgttcggccaagcgggaggagcacaacaataaccgaaaggagaaggaagccgaggctgaggaggcgggaatggagtcggctccactgcacgatccgcagatgagctttctggccaaggtggtgaccttcttcgatctggacctgctgcgcgacttcaccttcgtcaatctggtggccggactgaccatcataaactttggggagctcaacttctccatactgacgcccttcattctggtggactttggcttcgatactccacagattacgctggccatgtcgctgctggcgggactggacatcaccatgcgcttcatggtccccttcctcactgagaagattccgtgggacaaccgggtattcttcctcatcggcgtggtgggcatcgctctcggccgcacagtggtggcctgcacgcgttcctacagcctgatcctctgcagcttcgtgtggatcggtctctgcaagggagtgcgtaccatcttctggccactgatcatacccggctatgtgcctctgaaccgcctgccaggcgcctcgggactgcaactgctgatctcgggactattcaccctgatcggtggtccatttgtcggtgagtgcctatagaatctgatacattacctttgttgttcaatgtggatgtaaaaaaggatactgtcataagtatcatcatttgttcatatatctacatgaatatgaatccgtatatctccttgataatataatgaaatatcttatccatggatgcaaatttagttatgttaatatttcccttgtttttaggcctggtgcgtgaccgttacgactattcggttaccctgcactgtctcaatatgatgtcctttgtggcagcaacatcctggtccttggaggccctcatccggcggcatcgccgcaaacagcgcctggtgaacagctgaggagctcctcggaaagctgtacccccaactcaaagacattgtagcgtagggagaactctttttttttgttagacttaaggaaaagttttgtataataaatgtgaccgataatttttgcattcagtttcgaaaagtatacttttgggatgctttgaaaatcagtcaacaaactacattagcaatccattcgtgctgcttttatacaatatattaaaagtccgatgataatttatttatattacgagtaggtacattaaaatgactttgcttggtttaattttattcgatcgtttgtttgttcatatttgctatattttggttgcacatcgattataacgttgtcaatcgcctgacaacccattcttcggatagattgaaatagatataataggtattttatacatagaactacaactagcaaaggaagagccagaacgaaaaaaacacagaggttactaaaaaaaaaaaaaagcaaaaaagagaattgtgaatacaaatcctttttcaaatatatatatatactacgcgtagctccactcctttggttctctgatcctcctcatttgttcataaagctaccaaatgcgaaaatactctaactttgattcgggatctccactcatcgtcatagcgcttccaaggactttgctctatatctaggccgtatcctcgctccacattgcgatcggggggcctggaggggcggctggggtgaaatatattacaacaggatggggggctgtgcggctccgggcgccttgaccttgcttcgacctctatctgggcgagggggacatcgtgggcctcgctgtgggtcgctgaagtgccgccgccgtcggcgctgctgtcactatcgtgttgacctgcggtgtgcgatgtatggcgggtggtgggtggtggtgcgtgtttgttgatgggttgtgcatggtgtgtggtggtgcaattttatggatggatcagtgtggatgaatcagtgttcagtgtgtggtgaagacaagag

SEQ ID NO: 34076 - DNA, 1803 bp, DROSOPHILA
atggagaagaaggtctatcaggacacaacgcgaccgctgcccagggtctcccgtgcacggtactataacaagcacgacaagagcgatctgggcgacgactttgtggcgcccgacgcgggatgggcgtggatcgtttgcgtcgccgctggcgtttcaaatctctccatttacccctgcctgcaacagtttggctttctattcagggagcgcctgtccgatctgggcatgtccagttcccagattacagccatcattaacgcaaatccggccgtatcggcctgcacgggtctgctcaatggaccgatgttccggaggttcacctttcgccaggtggccatggccggttctctgctaatctccgggagtctcatactaaccgccttctgtgaaacctttctcagctacatggtggcctacgccctgttgtttggctttggcatgggcattagtgtgtcggcctcctcgctggcgatcaacacgtacttccagaagaagcgtcgtcgggcggccgggttttcgtggaccataacgggtctgggaccgatctttctgccgcatctggtcacctttttgctgaccatttacggggtgcaggggaccacgctactcttcgccgccatctcgctgcactcgttcgtttgcgccctgatctatcagccggttcggtaccatgtgaagccaccggtggagcagctggcggatcaggagcagcaggcggaggcgttgtgtgcccactgctcgtggcagcagaaacgcgagccgggcggcatattctccagtcagtatctatgccaggacgacgatgcccagcgaccgggctacgagatctgtgagcccggcacaccgatgctctcgcgcgccaacgatggctggtatggatcccggctatcgctgacctcgggccgccttcgctttcgcaccatctcgagctccaaggatctggagcagacgcagcgactgcattgtcccattagcgaggagcagaaccacgagagcgatgagttcctgcgccccaataactttcgcagggagcgggtggagtccaacctggaggccaagctgtgttgccagtgttcggccaagcgggaggagcacaacaataaccgaaaggagaaggaagccgaggctgaggaggcgggaatggagtcggctccactgcacgatccgcagatgagctttctggccaaggtggtgaccttcttcgatctggacctgctgcgcgacttcaccttcgtcaatctggtggccggactgaccatcataaactttggggagctcaacttctccatactgacgcccttcattctggtggactttggcttcgatactccacagattacgctggccatgtcgctgctggcgggactggacatcaccatgcgcttcatggtccccttcctcactgagaagattccgtgggacaaccgggtattcttcctcatcggcgtggtgggcatcgctctcggccgcacagtggtggcctgcacgcgttcctacagcctgatcctctgcagcttcgtgtggatcggtctctgcaagggagtgcgtaccatcttctggccactgatcatacccggctatgtgcctctgaaccgcctgccaggcgcctcgggactgcaactgctgatctcgggactattcaccctgatcggtggtccatttgtcggcctggtgcgtgaccgttacgactattcggttaccctgcactgtctcaatatgatgtcctttgtggcagcaacatcctggtccttggaggccctcatccggcggcatcgccgcaaacagcgcctggtgaacagctga

SEQ ID NO: 34077 - protein, 600 aa, DROSOPHILA
MEKKVYQDTTRPLPRVSRARYYNKHDKSDLGDDFVAPDAGWAWIVCVAAGVSNLSIYPCLQQFGFLFRERLSDLGMSSSQITAIINANPAVSACTGLLNGPMFRRFTFRQVAMAGSLLISGSLILTAFCETFLSYMVAYALLFGFGMGISVSASSLAINTYFQKKRRRAAGFSWTITGLGPIFLPHLVTFLLTIYGVQGTTLLFAAISLHSFVCALIYQPVRYHVKPPVEQLADQEQQAEALCAHCSWQQKREPGGIFSSQYLCQDDDAQRPGYEICEPGTPMLSRANDGWYGSRLSLTSGRLRFRTISSSKDLEQTQRLHCPISEEQNHESDEFLRPNNFRRERVESNLEAKLCCQCSAKREEHNNNRKEKEAEAEEAGMESAPLHDPQMSFLAKVVTFFDLDLLRDFTFVNLVAGLTIINFGELNFSILTPFILVDFGFDTPQITLAMSLLAGLDITMRFMVPFLTEKIPWDNRVFFLIGVVGIALGRTVVACTRSYSLILCSFVWIGLCKGVRTIFWPLIIPGYVPLNRLPGASGLQLLISGLFTLIGGPFVGLVRDRYDYSVTLHCLNMMSFVAATSWSLEALIRRHRRKQRLVNS

SEQ ID NO: 34078 - DNA, 2403 bp, DROSOPHILA
gcccgtattaaaatggtgattgagtgtaccaaggatacagatacagcgagagagagagaatgaatgtcgcctagttaactcttcagaaaaacagatttgcggctcgagcttgaggtgggacatatttaacgaggatgttggccccatttttgcccagacgatggcttcatcttatggagcttcgcactgagccattcaattcaattgagccaccctcttacagtcgtttgcgcaaaattaggagaacatttaacgctccgttgcaggcgtttggatggctgggggatggatggtaaatggaggtccttgtggacctgtgggcgtcgacaaatgctttaatactgaatacttgaataagaagcccaactacgcacagcttattacttagtgtcgtctggcatgccgcttctgaccattgttgtttgtcttagcgtggtaacactgataccataccctaaactccctgcttcctcacccactcccggtattattttttcgtccatttcccctttccgatgcgaatatcaaaggagcgccgtctagacgcgacaaatggctgtcgcagctctcgaagctctccggaacttcaaagctctgtggcaacagcgaaacttcttgctcctcgccagcactgaataggtatacactgagagaaacggtgcggtgtcatttagagaagcaagtgctatacatactatactatacataatattttaatacaaagtaagtgattgtatttagtagtgctatttttcttgctaagttaattcgctaacgacttacgggtacacgtatttttctctgtgtatcccaacgtggattgcactcaaggcaagtttgcccatgcctgcgattcgtgatactgcttttctttcagtgcacggccagccagttaggcgagccagaactgtgaagctaacctctaagcccctgacgcaagccacttgtgtcactttcctgccttgccccgaccaaaccagcctcaggctcagtcccagcttcagctgtccccagtcccagtcccagtcccatcctcatcctcatcctcatcctcatcctcatcctcatcctcatcctcatcctcatcctcatcctcatcctcatcctcatcctcatcctcatcctcatcctcatcctcatcctcatcctcatcctcatcctcatcctcatcctcatcctcatcctcatcctcatcctcatcctcatcctcatcctcatcctcatcctcatcctcatcctcatcctcatcctcatcctcatccccatcctcattctcatcctcaaagcagtaaaaaataagtgcttagaaaaaatggcaatttactttggttttacatggcgacaaggcacgattgtccccatccttgccacatccccacaccaccgccatccatttcgcccatttcagtgctgcgcacggcaaagaggaaaaaacttggagcagaactaaaattttatgccataaaaattattgtctcgagatttgagcacacaaaaggtggaggcagttgtggagcgacggttgtggagtcgagcgtcggccaaaacggttagctccgcccctttatgtatgtacgctcctcctcagagtgaagtgtaacaaatgcgaggggggggaggggggtcggacctaacaactataaaatgactttcaagaaaattaagacgttctgtctcacaagagggggggaggtggggggtgggggagcgcggctacaggaagtgtgtgagttcgccaagggagccagcgaatggtactatgttggataataacgtaaatatctcaagggttgtcaagggatgttaaggtattagaagcaaggtacgtccatggcgctgtgttgaccaaactgaagcttgcgatttcgattgtcatcgaaacaatcgatattgtttggatatcgataagcatcaagaatagaattctaatggatttaacacgtttatttcactgttcttaccactaaatgtgaagtaattgagaatctatagctatattagttttcaaacaggcctttaatatcggttggttatcgacaattccgataacaactgcaaccccaaatgctatcgaatgctgtaacactcagccccgtctatttaatcaattcttcaaacaaaaaatgaacttgctctcctctgtcatgaaaactgcgtgtttgaatcgaggaaactgacagtttcttggtacaagtgaaaatcggtagatgggcggcgcccggacattgggcgacaactctggtgtctggtgcccactccacacagttgcatctattgctctttctggccagggacaagtttgatggcgaacagcgaactgcaaactgcaaactgcaaaaccacccacatccggtctccagtgtaaaccgaaccaggggtgccaaaaacttgcttattgaacag

SEQ ID NO: 34079 - DNA, 303 bp, DROSOPHILA
atgggcgaaatggatggcggtggtgatgagaatgaggatggggatgaggatgaggatgaggatgaggatgaggatgaggatgaggatgaggatgaggatgaggatgaggatgaggatgaggatgaggatgaggatgaggatgaggatgaggatgaggatgaggatgaggatgaggatgaggatgaggatgaggatgaggatgaggatgaggatgaggatgaggatgaggatgaggatgaggatgaggatgaggatgaggatgaggatgaggatgggactgggactgggactggggacagctga

SEQ ID NO: 34080 - protein, 100 aa, DROSOPHILA
MGEMDGGGDENEDGDEDEDEDEDEDEDEDEDEDEDEDEDEDEDEDEDEDEDEDEDEDEDEDEDEDEDEDEDEDEDEDEDEDEDEDEDEDEDGTGTGTGDS

SEQ ID NO: 34081 - DNA, 2504 bp, DROSOPHILA
gcattggattgtttgtgcttagtgcttggcccatttacatacgtacacaatacaatttgtaacatgttagcaatgggtatcccgcagtcgggacacacgccgtccatcctactttttttcttgcgaaaaagcggacaagcaagctgagcacaaaactcgacagtagcaacaatgtagttgcaaagaagtagacagtcgggcgaggcagaaggagctgctgccctgccgaggaagcgcacaactatatctgaaaattggacagcttgacaggcaaagaccttttcataaacaagcgtagcttctgtgtcccgagattaggacaacacagcacggtcgaaaggagcgccgcattaaggtgcagatccaatacaaatctctaaatccctttttgtcatcatcctaagctaaaaactattttgtaagctacaaaattgtgcgagataaaaactaaatccttgtgaggaattcacccagctctgttgtcagtggcaaattgaaagctggacacttgacaattttacatattgcaatattcagttaaaataagcagcgcagcttgagcaacgacgacctattgtgtagctggctaactaacaggcatacgtagttatcaaatcccatatttcgtatccgataatttattctataaattcattctttcaacaatttgattaaaatggaaatttcccggcggcttcaatgccaattgaacggggcataattgattttaattaaaaattccattgttttggcccaaaaacgaaatatttttggtgggaaatccgaatacagatttccgcccaacatttttcagtgcgttttttttttttcattgtaacatggctgaagggtccctcaattaaagaaagcaaatgtttttcataacatttttgttgatttccaaaggggacaggccaaaagttaatttgtttagcaatttttcaatatgttaaattaaatatgtttttttttttataattaaatacgtttattcagacgattacttgttatttcgacactgctttttgtggcgcagaatgtcgatcgttgtcagtcgcaactccctcttgcaggagttgcagtaatagccgccggaggagtgcgaactggagctactggctacctccgttgaggactctgtgctcgttgttttcgccgtgcggctttcctgcgccttgcgacgcttgcatttggatcggtgcaccagctgctccagcacatcgaactcctccagctcgaaatcgcagcgcgtacactgccatggctctgcccgtagagtcgcatccatggccgtcgtccactgctgttcggccaagcagctgtacaccacgtgctccgatacgttgaggccgcccttttcctcgttcggtgtcatgggaaagtcgacggcaaaggggttctccttgagctccgcgagtcgcgcggaaggtgcctgatgagtgtagagcctcttgatgtcggcgggaagcagtcggcgtatcgcatacgccacatccagcgccatatagtccacaagatcttgccacagcgcgctgctcctatcgtcacttgaatgggaaggtgattcctgtttgcttttgaggtctgcaaattggacagcattaagtacatacgtattagataactaagctccatttactaagaatgccaagaacaacaagcattttctataactgaacagttcaaatatcgacaattgtatatgtaaatacctaaaaaaaaaaacgtttttaagcatatgtcgttcccatcatttgattgttacaataataactgctttaaaatattatggtgaaaaatctttgaacctgaatacaccacttgcaggaaaggtgtggtgaacagattgcaaggcgagagtgttctcacccggcagagtggccagaccgctgaggtaagatccgttagccccattcggatatctaaatcacaattgtttaagaagaaaacttgcaaggcgaggaaaaaaacatatattggtcactatgtttcgagtgcattgcaacaagtgtttccgtcatcgcaaaactgatccagccgtgcccttccacttgacccagtgccggcacgtgatctgcggcccctgtttgggccaatcctcgctagaaaagaactgcccgctatgcggccaggtgctcaaagcgatccagatcaaccgggatatgccaactagcgtggccaactacttcgcggatcccctgcgattccagcagatctaccgcaagatctccaagttccaagcggaccagcgagcatcggacaacctgggtttctaccgtcagttgcagcagctggagcaaaacaagcgccagctggagggcttttgcaagatggaggcgcagctgaaccagaaggtcgtggaggaaaagaagcgaatcgctgaattgcgcacctacatcgcttaccacgagaatgcgcagaggatgacgaggcgccggcacagtgcaggtgagagattccatacgccggagttcaaggaggcctggaacacctctatcagcact

SEQ ID NO: 34082 - DNA, 504 bp, DROSOPHILA
atggcgctggatgtggcgtatgcgatacgccgactgcttcccgccgacatcaagaggctctacactcatcaggcaccttccgcgcgactcgcggagctcaaggagaacccctttgccgtcgactttcccatgacaccgaacgaggaaaagggcggcctcaacgtatcggagcacgtggtgtacagctgcttggccgaacagcagtggacgacggccatggatgcgactctacgggcagagccatggcagtgtacgcgctgcgatttcgagctggaggagttcgatgtgctggagcagctggtgcaccgatccaaatgcaagcgtcgcaaggcgcaggaaagccgcacggcgaaaacaacgagcacagagtcctcaacggaggtagccagtagctccagttcgcactcctccggcggctattactgcaactcctgcaagagggagttgcgactgacaacgatcgacattctgcgccacaaaaagcagtgtcgaaataacaagtaa

SEQ ID NO: 34083 - protein, 167 aa, DROSOPHILA
MALDVAYAIRRLLPADIKRLYTHQAPSARLAELKENPFAVDFPMTPNEEKGGLNVSEHVVYSCLAEQQWTTAMDATLRAEPWQCTRCDFELEEFDVLEQLVHRSKCKRRKAQESRTAKTTSTESSTEVASSSSSHSSGGYYCNSCKRELRLTTIDILRHKKQCRNNK

SEQ ID NO: 34084 - DNA, 2664 bp, DROSOPHILA
atctctgcgctcgttgcgccagtcccgatgctcttgtcgctgtcctcggtccttgtgctccttaaaacgatccatttggtcgttatgccgccctctgtcctcctggtaccgctgcctgtgctgcgtttgctcgttgtgccgccattggtgctcctgaaaccgctccgctggcttatcgcgtcgtcccttgtgatcctgttgccgctccgtttgcgtcctttgctgggattgctcaacataccgtccgcggtgctcctgtcggtcgacttgcttatgatgccgcccgccgtgctcctgttcccactgcttctccagcgcctgcatctgcaggctgactagctggtgcagctcctcgttgagcgtgggcttgctcttgcggtggcgccgatgattcttttgctgacgccgggtttcgcccaccacctcggcgaaggcggtgttgtcctggaactgcgggtgcttcttggtgtgctttagaacgtgctcgtagatgagcagccgctgactcgcgtcgagtcctgcctgcagatcatcaaaggaggcagcaggaaggaggcgtcgtgctctttcggtgcccacaatgccctgaatagtcgagtcatcgagctggatgctaaagtcgggattgttgctgcatgacgccggcaatggcaatggctctaacacctccgatttagttgcgccgtttttgtcctgtggtctgtggctacccgcccccatcaccccgcgctcgctccaaccgaagcgctgcaggatgacgtggagacgcctcctgctggctgtcacaaaaagacgcagctgttctcgcttctcgtccacatcttcgccagacatttttagccagcgcgaaacagaacagaacagaacagcaagtgttgggaaagcccgaaatgtgcggccagtgctgcagaacgcagcgtgtatttacagtcctagaaagtttggaatatctaatctatggtgccattcggctcctggaggggatgcgggatgcaggagctcagctccaaaagagaacggtgaaggccatgatcaggcaggcggctcctacccacggcgacttgcgctccccaatccttgccagcttccagaaggtgcccatgaatctgcaaacagacagcagacgagtgttgagtgtggtaacaatcagtggactggtcagggcgggaacgggcacctacccggtcttgttgcggtctatcaagctggggaagagcgagcgcaggtaggcacaggtgcagatcagcagcaggatgaccgacagcaggctgtggaagttgaacagggcgctctgtggagggaaacggtgctaagtgtacgacggaggagtatcggttaggtgagcgtttcaaaccatgatttagcaaatcgaaatccgtgcttggcgatagaataacaacaagcggtaaactagtgacgtgccagccgctcggcgcaggcgaactggttccaaaactggaatctcacgtttcgactgattcgataggtggttaatcaactgttagaatgataaggaatgttacaatgtttaggagttaatataagaatatatttatattaaatacatattttggcgacctacttccattatctgggatggacattggataaatattttacaatagaaagtaacaagctcttagccaagttcccacagggagcataaaaacgccataggaagtattgaaaagtgcaagagtttacaaaagacatcgtatacaaaaaaacgtaagcttaatttcgatagtatcggaacttgtattgcaatccaaccgtgggtcaagtaaatgaaataagataagactttgtttcaattaacgttggcagtggagcttcccccaattgaaatatgtgccaatggaatcgggctattaggtcaagtgaattcaatcgactggcgcggaacagcaatcgatgggtccacacttatcgcacatagtatcgcataaacatcgacgcagtgggccacctctagcaatttgtctgcaacttctaattcgctgcgggtattttttttgtgtttgttgttacatataatccgatcaatttcgatcgcccgcttggcaaatcagtgtcttgctgttccgattggtgagctttggccaattctcggcgagcgtcagtaaatcgttcgatttggctttaagtccgcccgtgcttttgcgttttccttggctcttttcttcatttttgtggcccgttttcgttttccacttggtatcgcgaggggatgaaggaggggagcaggagcggagaatcccgaccgagtgcatccccaatgtgtgtgcgtgtacgtctgtgaatacgatggtgctgccaatgcaattgtaactgagcgcgctcataaaaatcaaaagtatatttagatatacatgtacatatatataataatcggatacgttttctcattgccccccctgtcggtgtgtgtgcgtgtgtatttaaatcagtaatacagtgtgtgtgtgacgagcgcgctgggttttgttgttaagtgcgagtgagtaagagagagggaacacgagcgagacagcagcccggagcaacagagaggcaaacaggaactgcaacaagaaaaacaataacattctgtggcagcagcagcagcgatgacttccagtcgctgcactggcaaagcggtaagttcccgactgcaatattaag

SEQ ID NO: 34085 - DNA, 225 bp, DROSOPHILA
atgctccctagcgccctgttcaacttccacagcctgctgtcggtcatcctgctgctgatctgcacctgtgcctacctgcgctcgctcttccccagcttgatagaccgcaacaagaccggattcatgggcaccttctggaagctggcaaggattggggagcgcaagtcgccgtgggtaggagccgcctgcctgatcatggccttcaccgttctcttttggagctga

SEQ ID NO: 34086 - protein, 74 aa, DROSOPHILA
MLPSALFNFHSLLSVILLLICTCAYLRSLFPSLIDRNKTGFMGTFWKLARIGERKSPWVGAACLIMAFTVLFWS

SEQ ID NO: 34087 - DNA, 9287 bp, DROSOPHILA
cctatctagatttacacaatacacaccttctcctgtaaatggagaagtcctggcttgattgattcaatgtgattagttacccctggcttcacatgcaggcggttggcataccgcatgctgagtgctccagccactaaaaacttgattgattctaacgctgtatacttaaatgtgctctaatctaattcgttgtctattttttataaccgttttgagcgaattttatagctaagcgagaggataaactcacggattccatttgccaactctgtttaactgaaaccacttgcccgacacactttttagcctatgtatatgttgcttgtaaatgtatgtgtggaataaatattgtaactacaatacataaatactatttcaaataatcaacaataaatacaatttatcaaaagaacccatgctcaaatgcatcaaatgtttcattcccgttagaagaaaaaaaaaaaattcaaattgatagaggaaaagtaatacgagggtaaatgtaaactttacatacgatattctttaaattattatttgaaattatttaataatacgttttaaatactaatagctaacataatttacaatcggttgacaataacaaagttaatttatttaaatacatacatatatgcatatgtatgtaagttaggatatctttcccaattaagtaccaaagttttctgttaagcacgtgtcattaaaaataccaaactgaaccaaagattccgatagataaaaatcggttccagacgcgatctagttagctcgcaaaatttgactttttcgctagttaaaattttcgcatgtcaggggacggaagtttctagcaaatttcttaattttcaattcattcaattgggtttcagctgccgggaagtgttttgtggtgtttcttcatcctcgtctgctaggattaattatatcactgagtgactacgcaccggcaattccagaagaaatcgcaggccaaggatagccttgaattctcgggaccatgccgcgctttcgcaacgagacgccggaggagtcgcagtacaccgatggcgaaatcgtttgggtaaagatccacaacaccgagatctggtggcccggcgaagtgacctcgtcgcaggactttcgtttcgtcaacaccacgcgcccgccgtacgcagttgtggcgtttttcaacgagaaaaccttgtgagtttgcccatttcaactttagcgtgacatgctttttcttattctttttctttcttcattgtccgcagcgagcaagtgagttccgcgaagcttatttatcccttcgaatgcgagcacaaggaggagttcattaagcgcggcaaaagtaagtcatttctttttatatttggcgatattgtacgtacatgcgtccaaagtgacgcgccacacgaacgtgcatgcttagtctatttcttgctctcttcgtcttccacatctcgacgttcatacgcacgaacagaaagatagagcaagacaactatatatgtactttatatggaaggggaacgctttattctgttacactcttttgcaggaatctacatggtaatgctttgtaaaagtattttatatatgtatgtatgtgtgtacatattactttgctttaggatttttgaccaaaatataaccataaaaaagtcgacttctattgggaaaatcattttgatatgcgcattttctggcttttgctaaactatacatatacacatgcaaacataacctaaaaagcaaaacacaataaatattgcgcaaaataattaaaaacgacaatttatcaacaatttagccttatttcgaatttctagtttttcttaaatagtttttgttttttgtacgaaatataacttttttattattatctattgccttatctattaccattttcaaaaaaaaattttataaagtaggcgacaaaattaatgtcatttaatgttggagttgtaacccgagacttcagaaattcagacttcaatttgtttgcatttaacattcgggaatagaacaaatatcctaagaaacattacatagtatttgaatttgaaaattcgaaaacacacagcagaagaaatagcgcagatttgtctctgttataagattcctgggttagtttctgatacctctgcatatgctaagcgtccaatatctgtttcacttgcagagaaagccgaaggaatccacatggccgacaagttctcagaggacgtggcgatcgccgaatcgcgtagcggtcgcatccatcgctcgtcgacatcgtccttagcggaggtctgcagcggacccgccgcccgtccggaaagcctcatcaaggcctgcctttcgagcaatagcaacagcagcggcgtgctgagcagcaatgcgtgcagcagcggagtgccttcggcagcgggtcgagtaagtagctcggcaacgctacatgccaatgataaagccgtattccgacagcaggagtccacgttccgcatcatggacatcgggggcggcgccacgattccgccccgtgacgctgccttcgagtgcaccatgtgcaactttcacaccaacagtatgagcgtcctgctcatccaccggcgcaaccacatggagtcgagcaacaactttggcagcagcaacagcaccacctatacggtcaccagtacggccaacagaacgaccagcagaacggccagcagaacgaccaccagtccggccaccagtccacgacgagcgtcgcgtcgttcccacaccaccatcgtgcatgaagtgaacggccaaaagagccggaacaacgaagtgcgctgcaactcgcgccacgtgtccattatgattgacgtaccgctgacaaacgaggagcatgagaaggtgatgagcatcgttgacaaaacgttggccagcatcgagctcgttgttggctccaatgcgggcagctccccgggctccgcttccgcgtctgttcccacacgaaagagctcctccgcgtcgtcgcaggcgcccgctgcggtgaacccgcgacgcagaactgcgacatctcgagatccgggtagccagcgctcaaaccaactgcgagccaccatgcccgctccacagtcgccgccggcaaagcaacgtcgtctcacacgctccatgagcaggcgcctgcaaggtgtttcgccaatggccgtccctacggagattctgccgccacctgtgcaggtaaattcgcgtcgtaattcacgcagacgctgcacactggctgccaccactagtgagccagttatttcgcccagaaggggcaatcccttacggaaaacgatgacgacatcgccatcgagcatcgtctcgcctcgaagcgcaggtcggcgcaagcaaccgatctctaggaatagaacgacgaccgtaactggtgatgcgcatatatcttctgcgctcctcacatcgcctttaatcaatcgtccggctggggacaaacatgaatcggaaaaacaggtggcagagccgaatctgcccatcagtccatcgccagagccaacgacatcaatggctgacatcgcacagccgaatcagaatctccagcatatgcagaggagcattgacgcctccaagcagctgcagctaagtctgatggcggaatggggcgacgacgagacggacgagtcgatggaggagacaccgcagccggttgagaaggataccggaatcgtgaaatcaccgccggcgacagagcaacatgcggatgagaaagaacaggagcaggagaagactgatggcggtgctgccaagaagcgcatacgcaacataccaaagaaggatcggcgcgacgtagtcgtgcaggaattcgacgtgcaggacagccagcaagaccccgatgacgcggaggttgacgagccgattttaattcaggatagcgatgctagctccaatggcagcgtcgtattcgtagaagacgagccgaggcagcgcggccggggagcttattcgcaatccaatggcaatgtcaatgtcagtgataaggccgcgtcctcgtcgaagatggccagcaacataccgtcctgctttgacttcgaggaggaggaggatgtacagcagcaggagggccagaatggtttgagctataggcgccgaacgaataccaatcgtcctgatgtcaacggcaaaggacccgctgaggaggacacactcgagaggaatgaggaacctgtggatgagaacgaacttgacgacaacgtgtcctacgataacgccttcaagggctttgaagatgtccacaaaccgacaatcaaggaaggcatacagactctggaggaggaggtacaccgtgagcctgacgtggagcccgagccgtggcagcaggtagcagcctatgccgtagagtctgaagaagcgattccccaggacgcacctgagggcgaggcgggagatcacatgttcctgcccatcaaggagccgcaaaagcgcatctttaagtcacgaaacaaatcaacaaatcaaatggcatgtccaccagacgaggatctgctaccagcctccatgacttccacgttgccaagcgccaacgaagaggagctgactgcgcccaggacttatagtcctctccaggaggcgaattgcgtcggtacactgctatccaatcacgaaccgagcagggccatcagcgtcaaaaacagcaacaaatatagcagcaagggagtgctgggtggcagcatgacgaggaagcgccgcaacaaatccaagactgaatcatcccgtcgcccgttacagcgttccaggccaatgacacgtcagaagaatccctcacccaagcacgaggagttgagcaaccacagcagccgaagcagcagcagcagcagcagcaacaacagcagcagcagcagcagcagcagcagcggcagtagtagcagcaacacgagcagcagtagcagcaacacgagcagctcaagctctagctcggactcgcacggcatcggaacactatccccggagccgggctccagcaacagctgttccatagcctccaacattgcagtgatatcggcagaagaggcacgcgagctgcagcgttccgcctcgggcgccggactcatccacgccgccatcgttgacgccacgcaaccggtgcagcgtggtggcgtgcttatcctagaggatattaggctgccgaatttgtatcaaccctctagccttcactcaacggacagcaatggcagccaccggacgatctcacactcgccggatgagggcgacgaacagtcgcaagacccggctgatcagccgcaaacaaacgatgaagaccaagatgtgaagcatatgattgatgacgccgagccaatggagcaaggggcggaagaggacgaccaggcggcagaggacgaccagccggagaaggagcaggagcaggatcaggagctgggacaaaagtcgaaggataagccagtgtccgaggcagacaacgaattgggccgcttctcaccgatccccgaaatccgttaccagttgcagcctggcgagttgctgcttaatgagcgcgaacgggagatgttgcgccggtacaaggccgtcgtggccagtggtcgcagtgcagagaagtttcgtcaggtccgcgcgcgctggaaccgaaacatgccatccacatcctcagacagcaatggcagccgccacacaaactcacacctgcctgatgagggcgatgaacagtcgcaagacccgccagatcagccgcaagcaaacgatgaagatcgagatgtgaagaatatgattgatgacgccgagccaatggagcaaggggcggaagaggacgaccaggcggcagagaatgaccaggcggcagagaatgaccaggcggcagagaatgaccaggcggcagaggaagaccagcaggagaaggagcaggagcaggagcaggagcaggagcaggagctgggacaaaagtcggaggataagctagagtccgaggtagacaacgagttgggccgcttgtctccgatccccgaagactgttaccagctgcagcctggcgagttgctgcttaatgagcgcgaagaggagctgttgcgccagtacgaggccgatgtggccagtggtcgtagtgcagagaagtgtcgccaggcccccgcgcgctggagccgaacaatgccattccccgaagaatcaggcgtacacgaatcagagttggatggcatgccgttggccgcgtcgtcatcagaggatcaagaacgggacggggaagagaaggagactggggtcggctccgaaggtgaacagcccgcaatggctacggatgaagaagaagtatctgacgacaggaggttccagatggcaatggacatggacatcgcactggatgccgtggagctggtgatgccggtttcattgctgcaaacctcgcgccgccctgccagctacccgcaagtcactccgatggcgaccacccagtcggccattggcctaaatcgacccaccaggcatttaagctgtgcccgagccctgagcgatgcggacatggccagggcccaccagcagctggtggatctgcgcgagcagcagcgcctctgcttcaccccgccatcgccgccagcggtcctgactcctcctgcaacactgctgcaggccagtggacagaaaaggcagcgtcgccgctcgaagaacgctccaagtgaccacgcggagagcgggtcacgcagcgaaggcggcgaggaatcgtcaagcgacgccaaggatggtcaggagagtcccgagaacgtaagtcattccatggatgcacgcagaaatgttggcatgaacacccactcccaatacagccgtgcatcttaaaaaatcgattttaaatattatatattctgttcttccaaggctaaaagtatcaaatataattgaactttcatctctgtcgtatattttattatttgtatggtattttagtttttgtatatgtgttgtattgactttcgagaccaggactatataactgaaggagccattccttgtttccttgtttcctcgtttgcagccgccacaactgtgcgctggacgcatctgcgcggtgatgactcgaccgatcccgggctacagtcacaccttcatgctgtgctcgctgaacaacaacaactttacgccgctgaacaacgtggcgctgtacctggacaacgaaaagaaccacctggtgccggtgccgcgggagacactgctggagccgccgcgtcttgccgacggccatccgctgtccgccgtctttgcggacattgactttctgggcgaagacgcggtggcccaggtggtggagccatcggaggcggaggcggaaatggagatggagatggagatggaaatggagactgagcaggaactcgtccaggatcaggtgtcgccgcgccaactgtcgccgcaaatgttgctaagcgaggccgataatgattacaataacgagaacgacgttgagtctgtggacgcgatgggcatcatgacaccactcagccaggtggccgagggaggcgccttggcagccgccggtagctacgtgaacgaagaggaggaattgtctctgcacggcgaacaactaattgggcagataatgcagttaaacgtgaacgggttccacttgcagctggataccgcgatgctattcagcatggcagaacagccggacacttgcatcgaggtgaacgtcacggatggggggggatccagcacatctgctgccggtggcagtatgacagccgtgcttaatgctcgcgacattctacatgcggcagaggcatacctacaggagcgcgatctgcagctggtcaacgtggaggacatgacgctggacgacagggatggcgatgtgtcaacagccgatctggctgtgccccccgcccctgatctgctctcccaggcgctggtcggcagccaggtcgtggacgattcggaattcgtgaacgcagccaacgctggcgttggaatgcttcacatcgatactcgcaacggccctggtctactgcatgtgggcaacgacgagccgggcagcgtggtgttcatttcgcatccgatgcctacgcagaatgtccacctcacgccgccgatcacggcgcgcaccaacgagacaaacgcgctgctcgaccagacgcccatcatgtccacgctggagagtcccagtggcatgcagctgcggcgcgtttcgccgctggtcgagggcaacctggaggatagtctggccgtgatcggcgtgacgaacggcagtggcgtacccacctcgctggaactgcccattaccgtgaccaatccggccatcgcatcccgtatgggggcgcccgtcgccgaaatgctgcagtttgctccttttcagtaggagcggaggaggaaggagcgaaggagcagcgcagtccatgaacagttcaatttattatttttttttttttaatacacctaaggagttgcagtaaggatttagaagatgcagcatatgcattttagtttgagcggcacggaagcccaatgcctatttgttagttgaattgacacgaaaatggacgacgacgacgacgacgatgacattgcgccacggccaatgtaaatattatttgcttaattaacctaagttagattcgtgaactttcacctatctcttgcattgcaaatgtacgatagacaggcggagttcctttacatgtaaggatgtaaggataaccatagcatacacgcgaacagaacgcaacagaccaggataagctcgatcgcgaatcgatgcccggcaccaaagcaacaacataatacgacacccaacagaatatatatgtacggatacctgtgtgcaggaaggaagcagaacttacgtaagatgaccataccacagatgaccatacgccagtccagtcgctaaacctaatgaatgtgtaaagagacccgcaaagcaggcgggctgggcagaccgcagaccaagctgcccagctgctgggcagctatttgaataaatgcaacatgtgcaacagggaggatcttggtgtatttggacggagccactgcagcagcagcacactcactcaagctcatgccagtgcctcatcatacgtagagatagttgtagtcgatcgatcatctgtacagttttcattctcaagaacacgtaatatataggaatttatgaaagagggatatacatattgaggcagaaaatgtatgctaatgaaaataaatttttgataacagttgtttttttttttttttcttgtaggaaaacgaaaacgatacctaaagaatggaacgaattgtcaaaaaacgattttacttttgtcaaataatacccccgttttaattaagaaacatcaacatcattttacttttgtcaacaa

SEQ ID NO: 34088 - DNA, 6114 bp, DROSOPHILA
atgccgcgctttcgcaacgagacgccggaggagtcgcagtacaccgatggcgaaatcgtttgggtaaagatccacaacaccgagatctggtggcccggcgaagtgacctcgtcgcaggactttcgtttcgtcaacaccacgcgcccgccgtacgcagttgtggcgtttttcaacgagaaaaccttcgagcaagtgagttccgcgaagcttatttatcccttcgaatgcgagcacaaggaggagttcattaagcgcggcaaaaagaaagccgaaggaatccacatggccgacaagttctcagaggacgtggcgatcgccgaatcgcgtagcggtcgcatccatcgctcgtcgacatcgtccttagcggaggtctgcagcggacccgccgcccgtccggaaagcctcatcaaggcctgcctttcgagcaatagcaacagcagcggcgtgctgagcagcaatgcgtgcagcagcggagtgccttcggcagcgggtcgagtaagtagctcggcaacgctacatgccaatgataaagccgtattccgacagcaggagtccacgttccgcatcatggacatcgggggcggcgccacgattccgccccgtgacgctgccttcgagtgcaccatgtgcaactttcacaccaacagtatgagcgtcctgctcatccaccggcgcaaccacatggagtcgagcaacaactttggcagcagcaacagcaccacctatacggtcaccagtacggccaacagaacgaccagcagaacggccagcagaacgaccaccagtccggccaccagtccacgacgagcgtcgcgtcgttcccacaccaccatcgtgcatgaagtgaacggccaaaagagccggaacaacgaagtgcgctgcaactcgcgccacgtgtccattatgattgacgtaccgctgacaaacgaggagcatgagaaggtgatgagcatcgttgacaaaacgttggccagcatcgagctcgttgttggctccaatgcgggcagctccccgggctccgcttccgcgtctgttcccacacgaaagagctcctccgcgtcgtcgcaggcgcccgctgcggtgaacccgcgacgcagaactgcgacatctcgagatccgggtagccagcgctcaaaccaactgcgagccaccatgcccgctccacagtcgccgccggcaaagcaacgtcgtctcacacgctccatgagcaggcgcctgcaaggtgtttcgccaatggccgtccctacggagattctgccgccacctgtgcaggtaaattcgcgtcgtaattcacgcagacgctgcacactggctgccaccactagtgagccagttatttcgcccagaaggggcaatcccttacggaaaacgatgacgacatcgccatcgagcatcgtctcgcctcgaagcgcaggtcggcgcaagcaaccgatctctaggaatagaacgacgaccgtaactggtgatgcgcatatatcttctgcgctcctcacatcgcctttaatcaatcgtccggctggggacaaacatgaatcggaaaaacaggtggcagagccgaatctgcccatcagtccatcgccagagccaacgacatcaatggctgacatcgcacagccgaatcagaatctccagcatatgcagaggagcattgacgcctccaagcagctgcagctaagtctgatggcggaatggggcgacgacgagacggacgagtcgatggaggagacaccgcagccggttgagaaggataccggaatcgtgaaatcaccgccggcgacagagcaacatgcggatgagaaagaacaggagcaggagaagactgatggcggtgctgccaagaagcgcatacgcaacataccaaagaaggatcggcgcgacgtagtcgtgcaggaattcgacgtgcaggacagccagcaagaccccgatgacgcggaggttgacgagccgattttaattcaggatagcgatgctagctccaatggcagcgtcgtattcgtagaagacgagccgaggcagcgcggccggggagcttattcgcaatccaatggcaatgtcaatgtcagtgataaggccgcgtcctcgtcgaagatggccagcaacataccgtcctgctttgacttcgaggaggaggaggatgtacagcagcaggagggccagaatggtttgagctataggcgccgaacgaataccaatcgtcctgatgtcaacggcaaaggacccgctgaggaggacacactcgagaggaatgaggaacctgtggatgagaacgaacttgacgacaacgtgtcctacgataacgccttcaagggctttgaagatgtccacaaaccgacaatcaaggaaggcatacagactctggaggaggaggtacaccgtgagcctgacgtggagcccgagccgtggcagcaggtagcagcctatgccgtagagtctgaagaagcgattccccaggacgcacctgagggcgaggcgggagatcacatgttcctgcccatcaaggagccgcaaaagcgcatctttaagtcacgaaacaaatcaacaaatcaaatggcatgtccaccagacgaggatctgctaccagcctccatgacttccacgttgccaagcgccaacgaagaggagctgactgcgcccaggacttatagtcctctccaggaggcgaattgcgtcggtacactgctatccaatcacgaaccgagcagggccatcagcgtcaaaaacagcaacaaatatagcagcaagggagtgctgggtggcagcatgacgaggaagcgccgcaacaaatccaagactgaatcatcccgtcgcccgttacagcgttccaggccaatgacacgtcagaagaatccctcacccaagcacgaggagttgagcaaccacagcagccgaagcagcagcagcagcagcagcaacaacagcagcagcagcagcagcagcagcagcggcagtagtagcagcaacacgagcagcagtagcagcaacacgagcagctcaagctctagctcggactcgcacggcatcggaacactatccccggagccgggctccagcaacagctgttccatagcctccaacattgcagtgatatcggcagaagaggcacgcgagctgcagcgttccgcctcgggcgccggactcatccacgccgccatcgttgacgccacgcaaccggtgcagcgtggtggcgtgcttatcctagaggatattaggctgccgaatttgtatcaaccctctagccttcactcaacggacagcaatggcagccaccggacgatctcacactcgccggatgagggcgacgaacagtcgcaagacccggctgatcagccgcaaacaaacgatgaagaccaagatgtgaagcatatgattgatgacgccgagccaatggagcaaggggcggaagaggacgaccaggcggcagaggacgaccagccggagaaggagcaggagcaggatcaggagctgggacaaaagtcgaaggataagccagtgtccgaggcagacaacgaattgggccgcttctcaccgatccccgaaatccgttaccagttgcagcctggcgagttgctgcttaatgagcgcgaacgggagatgttgcgccggtacaaggccgtcgtggccagtggtcgcagtgcagagaagtttcgtcaggtccgcgcgcgctggaaccgaaacatgccatccacatcctcagacagcaatggcagccgccacacaaactcacacctgcctgatgagggcgatgaacagtcgcaagacccgccagatcagccgcaagcaaacgatgaagatcgagatgtgaagaatatgattgatgacgccgagccaatggagcaaggggcggaagaggacgaccaggcggcagagaatgaccaggcggcagagaatgaccaggcggcagagaatgaccaggcggcagaggaagaccagcaggagaaggagcaggagcaggagcaggagcaggagcaggagctgggacaaaagtcggaggataagctagagtccgaggtagacaacgagttgggccgcttgtctccgatccccgaagactgttaccagctgcagcctggcgagttgctgcttaatgagcgcgaagaggagctgttgcgccagtacgaggccgatgtggccagtggtcgtagtgcagagaagtgtcgccaggcccccgcgcgctggagccgaacaatgccattccccgaagaatcaggcgtacacgaatcagagttggatggcatgccgttggccgcgtcgtcatcagaggatcaagaacgggacggggaagagaaggagactggggtcggctccgaaggtgaacagcccgcaatggctacggatgaagaagaagtatctgacgacaggaggttccagatggcaatggacatggacatcgcactggatgccgtggagctggtgatgccggtttcattgctgcaaacctcgcgccgccctgccagctacccgcaagtcactccgatggcgaccacccagtcggccattggcctaaatcgacccaccaggcatttaagctgtgcccgagccctgagcgatgcggacatggccagggcccaccagcagctggtggatctgcgcgagcagcagcgcctctgcttcaccccgccatcgccgccagcggtcctgactcctcctgcaacactgctgcaggccagtggacagaaaaggcagcgtcgccgctcgaagaacgctccaagtgaccacgcggagagcgggtcacgcagcgaaggcggcgaggaatcgtcaagcgacgccaaggatggtcaggagagtcccgagaacccgccacaactgtgcgctggacgcatctgcgcggtgatgactcgaccgatcccgggctacagtcacaccttcatgctgtgctcgctgaacaacaacaactttacgccgctgaacaacgtggcgctgtacctggacaacgaaaagaaccacctggtgccggtgccgcgggagacactgctggagccgccgcgtcttgccgacggccatccgctgtccgccgtctttgcggacattgactttctgggcgaagacgcggtggcccaggtggtggagccatcggaggcggaggcggaaatggagatggagatggagatggaaatggagactgagcaggaactcgtccaggatcaggtgtcgccgcgccaactgtcgccgcaaatgttgctaagcgaggccgataatgattacaataacgagaacgacgttgagtctgtggacgcgatgggcatcatgacaccactcagccaggtggccgagggaggcgccttggcagccgccggtagctacgtgaacgaagaggaggaattgtctctgcacggcgaacaactaattgggcagataatgcagttaaacgtgaacgggttccacttgcagctggataccgcgatgctattcagcatggcagaacagccggacacttgcatcgaggtgaacgtcacggatggggggggatccagcacatctgctgccggtggcagtatgacagccgtgcttaatgctcgcgacattctacatgcggcagaggcatacctacaggagcgcgatctgcagctggtcaacgtggaggacatgacgctggacgacagggatggcgatgtgtcaacagccgatctggctgtgccccccgcccctgatctgctctcccaggcgctggtcggcagccaggtcgtggacgattcggaattcgtgaacgcagccaacgctggcgttggaatgcttcacatcgatactcgcaacggccctggtctactgcatgtgggcaacgacgagccgggcagcgtggtgttcatttcgcatccgatgcctacgcagaatgtccacctcacgccgccgatcacggcgcgcaccaacgagacaaacgcgctgctcgaccagacgcccatcatgtccacgctggagagtcccagtggcatgcagctgcggcgcgtttcgccgctggtcgagggcaacctggaggatagtctggccgtgatcggcgtgacgaacggcagtggcgtacccacctcgctggaactgcccattaccgtgaccaatccggccatcgcatcccgtatgggggcgcccgtcgccgaaatgctgcagtttgctccttttcagtag

SEQ ID NO: 34089 - protein, 2037 aa, DROSOPHILA
MPRFRNETPEESQYTDGEIVWVKIHNTEIWWPGEVTSSQDFRFVNTTRPPYAVVAFFNEKTFEQVSSAKLIYPFECEHKEEFIKRGKKKAEGIHMADKFSEDVAIAESRSGRIHRSSTSSLAEVCSGPAARPESLIKACLSSNSNSSGVLSSNACSSGVPSAAGRVSSSATLHANDKAVFRQQESTFRIMDIGGGATIPPRDAAFECTMCNFHTNSMSVLLIHRRNHMESSNNFGSSNSTTYTVTSTANRTTSRTASRTTTSPATSPRRASRRSHTTIVHEVNGQKSRNNEVRCNSRHVSIMIDVPLTNEEHEKVMSIVDKTLASIELVVGSNAGSSPGSASASVPTRKSSSASSQAPAAVNPRRRTATSRDPGSQRSNQLRATMPAPQSPPAKQRRLTRSMSRRLQGVSPMAVPTEILPPPVQVNSRRNSRRRCTLAATTSEPVISPRRGNPLRKTMTTSPSSIVSPRSAGRRKQPISRNRTTTVTGDAHISSALLTSPLINRPAGDKHESEKQVAEPNLPISPSPEPTTSMADIAQPNQNLQHMQRSIDASKQLQLSLMAEWGDDETDESMEETPQPVEKDTGIVKSPPATEQHADEKEQEQEKTDGGAAKKRIRNIPKKDRRDVVVQEFDVQDSQQDPDDAEVDEPILIQDSDASSNGSVVFVEDEPRQRGRGAYSQSNGNVNVSDKAASSSKMASNIPSCFDFEEEEDVQQQEGQNGLSYRRRTNTNRPDVNGKGPAEEDTLERNEEPVDENELDDNVSYDNAFKGFEDVHKPTIKEGIQTLEEEVHREPDVEPEPWQQVAAYAVESEEAIPQDAPEGEAGDHMFLPIKEPQKRIFKSRNKSTNQMACPPDEDLLPASMTSTLPSANEEELTAPRTYSPLQEANCVGTLLSNHEPSRAISVKNSNKYSSKGVLGGSMTRKRRNKSKTESSRRPLQRSRPMTRQKNPSPKHEELSNHSSRSSSSSSSNNSSSSSSSSSGSSSSNTSSSSSNTSSSSSSSDSHGIGTLSPEPGSSNSCSIASNIAVISAEEARELQRSASGAGLIHAAIVDATQPVQRGGVLILEDIRLPNLYQPSSLHSTDSNGSHRTISHSPDEGDEQSQDPADQPQTNDEDQDVKHMIDDAEPMEQGAEEDDQAAEDDQPEKEQEQDQELGQKSKDKPVSEADNELGRFSPIPEIRYQLQPGELLLNEREREMLRRYKAVVASGRSAEKFRQVRARWNRNMPSTSSDSNGSRHTNSHLPDEGDEQSQDPPDQPQANDEDRDVKNMIDDAEPMEQGAEEDDQAAENDQAAENDQAAENDQAAEEDQQEKEQEQEQEQEQELGQKSEDKLESEVDNELGRLSPIPEDCYQLQPGELLLNEREEELLRQYEADVASGRSAEKCRQAPARWSRTMPFPEESGVHESELDGMPLAASSSEDQERDGEEKETGVGSEGEQPAMATDEEEVSDDRRFQMAMDMDIALDAVELVMPVSLLQTSRRPASYPQVTPMATTQSAIGLNRPTRHLSCARALSDADMARAHQQLVDLREQQRLCFTPPSPPAVLTPPATLLQASGQKRQRRRSKNAPSDHAESGSRSEGGEESSSDAKDGQESPENPPQLCAGRICAVMTRPIPGYSHTFMLCSLNNNNFTPLNNVALYLDNEKNHLVPVPRETLLEPPRLADGHPLSAVFADIDFLGEDAVAQVVEPSEAEAEMEMEMEMEMETEQELVQDQVSPRQLSPQMLLSEADNDYNNENDVESVDAMGIMTPLSQVAEGGALAAAGSYVNEEEELSLHGEQLIGQIMQLNVNGFHLQLDTAMLFSMAEQPDTCIEVNVTDGGGSSTSAAGGSMTAVLNARDILHAAEAYLQERDLQLVNVEDMTLDDRDGDVSTADLAVPPAPDLLSQALVGSQVVDDSEFVNAANAGVGMLHIDTRNGPGLLHVGNDEPGSVVFISHPMPTQNVHLTPPITARTNETNALLDQTPIMSTLESPSGMQLRRVSPLVEGNLEDSLAVIGVTNGSGVPTSLELPITVTNPAIASRMGAPVAEMLQFAPFQ

SEQ ID NO: 34090 - DNA, 3815 bp, DROSOPHILA
gctttggatttctgtgcatttcgggtctatggtggtcggttggcggtggtagtggtgggtccgggatgcagtgggtcagtagggagtgggtcagtggggagtgggagcaggagttgctatatgtacgtcgtatgttgagtaagctatattagtgagtagtgagcaggcaatgaaaagtcggtagaagcaaccaaagagttgccgcatggagcccggagctaggagctagaagctaggagtagatccaaccagaccggatcggatcagatcagatcagactgggctccactttccacgattttcacgttttccacatcttccacgtctgccattgggaaggggccaagcaacctgacttatgctatcgctagtacatattttagtatatttatttaaatttatatatgcgcctgatgcgcgcgtttacttttactttttataatgccacgataaaatctcaatacacaatttgcttagttactatgactagttgcctattacataatccacttccattcgcatttgtttagctccgactctggctctatgtaccatcccatatctctacctttacgaattacctttaccccattattattcgatttggatctggttgtccaaaaaaaaaaaaaaaaaagaaaaaacagaataatatcaacaagtcttatgagtaaatcccgcccagagctgaacgatggcgctcctccattcattcattcactccgatccttatcccgatccgatctgatcttgatcctgatcctgatcctgatcctaatccgatggtgcatccggaatgggctgtagactaatgactggtatatatactatgtacatatgtatatacagtgatatatatatatatatgcatagatatagacagagagatttgtgactgctgctggtggacatcgattgacgcactccatcctaaaacaccgcgccccaaaaagggccattagggcgcgatcttttaaaagaagtcgtcaaaggtctttgattatgtctggtactgcagcatgggggcggacaggttgggatgatgcgacgagttcatccgcagggcggacaggctcttgttgtaccactcgtcctccggtgacatgcctgcagggaagatggggaaacgaaaatgccatttagtcaattaccttgcacaacgactattacacaatctcaattcattcattcagacgccttgcatttccgtggtgcggaaacaccgaggagatacacatatcttcacatgaacccggaatttcatctcactgcgctgcttcttcatatccggcaggtcaccttgaaggcgccacctccatacctccatacatccgcaccccgtccccaaccactcaacgctcatcagccagattgcgtgaaatcagccgagtaacccaatatgcgaaggcgcctctggcctggccaccgaccgataaagaacgtcggacatcagcggaaatttccttacgcaccatggacttggagggggccaatcggctcgggggagcacacccttgcactcgacatgagcttctgtcgcgaagacagaagactcggttccgcgaacatgccgagctcgaagcctcgggaatcgggaattgggaatcgggaattggctagaatcgatcgatcaaggtgcgatctacgatcagcagcctgatcatttcaagtcaggccgcggccagaagcggttggccaagtggccaagtggctcagtggctcagtgcagtgaaagtccgagatcaagtggaagtgcaagtgcaagtgagtggcaaggagtcttgtccgaggatatggataaaagacatatcgtaccgtggaactcacccatcgagtcctgacgcaccccaacggagcccatattcgtgctgtgcgccatggagaacggctgagtcatgcccggatacgaggaggcgcccatttggaacaggtcctgcaagagatcataggtcatatgtggtgtgatcagtgctataaggtaggtggcccaactggcctccatgtaatgtcactcacctggggatagcgattcatggtgttgtggtgcggatacggctgatagccgcgcgagacgctgtagccttggatgttgcgcatcataccgttgcaggatgggatcacagacggtgccagcgccttctgcagctgtttctcctgcttgcggtacttggcgcgacggttctgaaaccagacctgcaagttgatgaaggaaagcaaatggatgctattttattcgcagaaaattctgtgtctatgtgtgtgtgtgtgagagtgtagagtgtgtgtgtggggggggaatctctagccaaaggaccctttcacgattcgctttgcgaaaaaaacactcgggcgggcagagccgtaatgatggcatataagaaggcgaggctaaatggaaaacccaactcctccgccttggacccaggacccaggcagctcctcctactcctgccactccactccttctgccacccactttgccgctggctgaggacgacgacgacgttgatgatggcaacgtcttatgagtgaaaaaatctactaaattgaaattgaaaataagttgacgacgctgtttgctgcgagggtctctggtcctgagtctccggtcctgggtcctcagtcctcagtccagagtcctcggtccccgcaccttggttctgtttcttggatgctcgatgctggatgtcttccccgctttctaagtgagtgggcgttagatggtgtgggccgcctgctctgtttagatattattaaagacagtcctcggcgtccccacgatgatgaaggtagccccatggccccagccccacatcctgtctcccttttttcttttttttttttccatgatggcgaaaagaaattgccaagatgaaagcagggctctgcactaggcagccaagacggccacgacggatggcataagacggtacaaggtggccagggatggtgtgtagaaatttccgacattttggaagctgctgcaagcttgctttgagttacttagcggagtggagcggggcagaatgaaggatggaggatggtggatgcaggacgggggatggcggatggcgatggtgtcctggtggatggcagggggggggggggcgaggaggaggggctagctgtaatggcggcgcacagacttcacgacgttctttcgatttttttctcctttcattttcttatttattttatcattattattatctttgtccatgactatgtaacacgtacatatttgctggcttttctggcgccaagtggaaagtgggggcggcgcatggatggcaataagatggtcttttcccagaagttggagcctttaaacgaaaagcattgcctttcgggggttgttttcagcgcccacttgatgatggctcgttcggtttcgtttggttggctggcagtaccactaccattaccatcaccatcaccactgccactgccactgccagcataaaaatgccaacaaggacaccctgcaacataatgctcttaaccatcggccatgtaaggatacggcatactatgggatactacggcttcggttcgagggtggaaaatgcgttgtctgaatgattcgatggagctctgtctatctgtcgttcaatttcagcaccagctgtgtgtgtgtgtgtgtgtgtgtgtgtgtgctttgggtgtgtgtgtgtgctttggatgggtggagaaactcaattaaggatacatttgatggcacactctcatccgtacatatgtatgtatgtacatactatacccaagcaagaacaaacaaaatcgaagggaaattcgattttagccaatgatgggga

SEQ ID NO: 34091 - DNA, 702 bp, DROSOPHILA
atgtggggctggggccatggggctaccttcatcatcacgttgccatcatcaacgtcgtcgtcgtcctcagccagcggcaaagtgggtggcagaaggagtggagtggcaggagtaggaggagctgcctgggtcctgggtccaaggcggaggagttgggtctggtttcagaaccgtcgcgccaagtaccgcaagcaggagaaacagctgcagaaggcgctggcaccgtctgtgatcccatcctgcaacggtatgatgcgcaacatccaaggctacagcgtctcgcgcggctatcagccgtatccgcaccacaacaccatgaatcgctatccccaggacctgttccaaatgggcgcctcctcgtatccgggcatgactcagccgttctccatggcgcacagcacgaatatgggctccgttggggtgcgtcaggactcgatgggtgagttccacgccaattcccgattcccaattcccgattcccgaggcttcgagctcggcatgttcgcggaaccgagtcttctgtcttcgcgacagaagctcatgtcgagtgcaagggtgtgctcccccgagccgattggccccctccaagtccatggcatgtcaccggaggacgagtggtacaacaagagcctgtccgccctgcggatgaactcgtcgcatcatcccaacctgtccgcccccatgctgcagtaccagacataa

SEQ ID NO: 34092 - protein, 233 aa, DROSOPHILA
MWGWGHGATFIITLPSSTSSSSSASGKVGGRRSGVAGVGGAAWVLGPRRRSWVWFQNRRAKYRKQEKQLQKALAPSVIPSCNGMMRNIQGYSVSRGYQPYPHHNTMNRYPQDLFQMGASSYPGMTQPFSMAHSTNMGSVGVRQDSMGEFHANSRFPIPDSRGFELGMFAEPSLLSSRQKLMSSARVCSPEPIGPLQVHGMSPEDEWYNKSLSALRMNSSHHPNLSAPMLQYQT

SEQ ID NO: 34093 - DNA, 3608 bp, DROSOPHILA
aagtttaaacaaagaaatgcttaaaggaccaaaaaccattgtatagattgtatattgtcatgattgatgttcattttggacactgcctttataagagatcttaacgatactctaaatgaatcgatcgaaatcaaaaagtttagcacttgaccctcttcgttagtgcaacattcaacatttggcattcaatgtcatcattgcccatttagcattcgtcacgaaacaggcaacagccagcgaagccgcacccacaacaaggtcaattgcattagacggcggtcggagatttttggaggctgtgaaggtttcgagggtttcgaaggacgcgagagtccttgcttaacataaataacgctattcgcatcgttttatttgcgcctgtgattcaattaggacagccgtatccgtcattttctacatagtttacatttcgttaacgagctaagcgcgtcaattaagcgcccagagagccgaaaatgccctactttgacctttggcccttgcttattaggtcgacctcagccgccgccagccacctttttcgtcctggcgagtggcgattgcctggtaggtcctggcgcgtcctggcgcgtcctggcgcgtcctggctcgtcctggagcacagccagccagagcggataaccaggactacctcgattaatgtgccagaaatttgcataaattatcccatattgcatattcatgcgaccgacgacgtgccgctggagtgctccaagtcgaaacttttcaccttgtcaccttgccacctttttttttgcgacaatggcaacgtcttgtggccgcaatgcggtgctgtcctcgctgtcccagctatcccagctatcccagctagcccaggatgtccttgctgtcctggcaattatgcaacattttgcgggggcttggccactcgacttaaacgccacacgcatattaagcaggaagctaatatggatacactcatattttgaatggcaacgtgtgtgtgtgcccgttactcatgcaaccacatttacgtattccaacagcggaaggcgccttcaagaagctcaagccggaacccaacagcggcctgtcgacggtttccgccggcatcacctcgcccggaagcggattatcatcgctcagccagcacgccggccacaccccaaccacagcgtcctgccccacgcccgccaggcggagacaccgcaccacattcacacaggtcagtatcggtgggtggaaagggatgggaaggggggaggggcgacggggggagctccttctgctggaggatccggcaccggcaccgccgtagtggcgcccattttccattccatgggcgaaatcttaattggattctgtgaaggttactcgtaattaaaaactttgaggccacaagagcaccaaggagccaacaacaaaagggggcacagcaaaccgagttgcaacacaaaaaaattgaaagttgaaaagccaggtgcttaatcaccagacgaggcagatacgagtacttaagttgttgggattaggattggggattacgaaactggaaaccgagtcaagttaaattactaagataaaaggattttaatgtagtttatactatattatatcatatcattttatatcatatcatataagtttaagtttatacctgaagtatagagaagcaatcttattagtttaattaaatagtagacttttgtgggtaaaattattgaattattcaattgcttttaacttcttctattcacttattgttctgaaagaactacttcagctgggataaaactttttatattttttacacaagtttgattttgctcaaattgtttccatactttttatagaacttaaacgtttagaccttaaaatcaaatgagaaatatgacatctcatattgtattgtattatttaatttaccactattgtaactatttcgctacaaaactctaacttccatttgtctttcggacattaacattttcgtttaatttaattagatgattgctttttttaacttaattgttattcgttattcgtattctgaaagtcatagcagtcactaataccattatttacaatataagggatttggcaaaccaattgtgacgccaaattgaaactgtagattctggaacgaatccatgaagttcgcagcctggcagtcgaaatagattcacattggcgcttagctagcaattcaaatgaattggccaaaaggctatgatctgatgcggatatatataatatcgtaaatgggccaggggaaaaaagagggaaaaaagatgaaaaacaggattccgcacatcgcatacgcctaattaaaatccgcttaatttcaggaacaattagcggaactggaagcggcgttcgccaaatcgcattatccggatatttactgccgcgaggagctggcgcgaaccaccaagctgaacgaggcgcggattcaagtgagtagattgtgttagcccctccaccggatcctccggatcacccagttccatcagttccaacattgaccgccaaccactcacattcaagtgttgctcttgtcgaacgtagccaattacctcaatttcgattgcaatttcaacagttgttcacgccggagtcacaataatcccccaccccccaccccccgccatatacacgtccgtgtcccgctgatggaccgccgatgatggtggtgatcttggtcaccgattagtgtccgattattccggccgactggctcacagtggtgttgtacccggcatgtaagtcgggaaatgctcgcttgagctggaaagcccgctgatccgtctggctgaatccaagaattccgaacccagaattcagaatcccgaatccagagcacaggcatcccctggtgctttcaagtgcgccgcggtaataattaatttatagttttatcatgacggcgcgacaagtgagtgcgacgggtggtgcacaattgcagggcagactctgggtgggattggtattttcggcagggtggatatgcccatctatagctatatgacaggttcctgcgagtcctgcggcatcgagttaccaggcatccggcgaccttgccaaagtgatttttcagcaagtgctggcaattgaaaaacaaatcagataaactcttaagattgtcatcgaaaggaagttgtatccatcaaatgcaacatttgtggcacattttgattttgattatgaagtatgaagtattggtcttaagtcttaactattggctaatacaaaaggtattaccgattcttgaggacggaagcaaccttacctgtgtattgaccacattgatctttatcatactttatcgtaccaatcaaatgcgaatacaatatacatatgtatataatgtgcccgatcggaattactcgagattgttgcaatcgttacgagggcactgaggcatgccaccttcagattggtggcacaactgttcccgctcaaattggacactgtaaaacggagcagggagtctattatcgccgcataaaccatatttttcggcaaatgttcaaatatttagcaatgcaacccccttccgggtgcagaccaccccataccacatgcatcatacacgcagatagatggatggatggatggatggatgg

SEQ ID NO: 34094 - DNA, 339 bp, DROSOPHILA
atgcaaccacatttacgtattccaacagcggaaggcgccttcaagaagctcaagccggaacccaacagcggcctgtcgacggtttccgccggcatcacctcgcccggaagcggattatcatcgctcagccagcacgccggccacaccccaaccacagcgtcctgccccacgcccgccaggcggagacaccgcaccacattcacacaggaacaattagcggaactggaagcggcgttcgccaaatcgcattatccggatatttactgccgcgaggagctggcgcgaaccaccaagctgaacgaggcgcggattcaattgttcacgccggagtcacaataa

SEQ ID NO: 34095 - protein, 112 aa, DROSOPHILA
MQPHLRIPTAEGAFKKLKPEPNSGLSTVSAGITSPGSGLSSLSQHAGHTPTTASCPTPARRRHRTTFTQEQLAELEAAFAKSHYPDIYCREELARTTKLNEARIQLFTPESQ

SEQ ID NO: 34096 - DNA, 3884 bp, DROSOPHILA
ctgtcgctctctcgctctggcaggcggttcattattttttgaaaattattagtacgactaacgattcgtggtctccgcaggacacgcacacacaaacaccaacagatgctcacacgcaggaacggcgagagggagaggcaccaacacagagccagagttaaccaccaatcgttcgcgcgcagcccgcaaatgtccccgcagcaggacacgcacacacacacacgcgggcagcatggaacggatgtggatatagagggagccaccaccaggacactgtgtgtgtgtgtgtggaatagcagcagcagcagcagcggtggcagcagcggcagaaggacgagcagcgacggcgacgtctctgttgtcgagcacatgatccttaatttcgttataattttgtatgttgcctgaaattgtatatcattttaagtttgatcggccgagaatacgtatcgccgtgcctgcgttaaccagccagcagcagcagcaacaacaacaacagtaacaggataacaaaggagcggagaatagaatacaaaatacgaaacacaaaaaaaaaaaaatacgcaagaaggacgaaggacgaagcagccagcaagtggagacggaatttgttatcatcttgaactcgcgcacactcacacacacacgcacgcaggcactcacaaacacacagacgcacatagaaggagtgctcctccgctgctgctccttctgcttctgcttcttcttgctacgtgctccttgctcctggggagcaaaggacgaaagcaccgcagttgaaaaacaaacagccatagttgctgcagcggctcccggcacagcggtacaccaacaattgtccagcggacggaatacgcacgcacgccaaaacgccatcccgatgatccgcggtaccggtaccgcatcctgatccagatccacccagatccgatccccagatacatatatatatatacgataaatactattagcaaatgttgtcgtatttttttttttttgaatgtgtcgtgttgaagtgctcatccctttaccgtcgggcagtgctagctagtggctaaccaagtgctaaaacgaaatcaccgaacagcagattgaacatctgagcagcatatatcgatcggatatataagatatatatagccacatcctgtgcgttatccacgaggcctctccgctcgccgaaggccccgtcgcaccgccacaaaattcgatcaatcaaaacgggagcgcgttcgccgcgagacagcttccagttggattactcaatcgacttcttcaagacgtatatcgatacgcagcgtttctacgccggccacaagttggatttcaaacatcagagttgcgccggcggccctggttccggtggtgctggtggtcctggtcctggtggtggtggtggcgcctccggagtagtcgtcgtcggcggcactagcaacagcaacaatccagcagcggcgcaacagcagcagcagcagcagcaacaacaacagcagcagcaacagcagcagtccggcggtaataatcccagcaacggcagcaactccgccgtcgccttgtcccttgcccatccgcacgcccacgccagccacgcgcacagcagccacgcccacggcagtcacgcccacgccctagcgatagcccacggtcatcacggtctgctgccgtcggtggtcccgcaacagcagcagcagcagcagcagcagcagcagcaacaacagcaacagcagcaggcgcaacagttgccgccgggcgttggagttgccagtccgctgcagcagcagcagcaacaacagcaacagcaacagcagcagcaacagcagcagcagcagcaacagcagctgatcaacaacggaggcgtctccgccggcacacccacgctgcttatcggcaacggacccagctcgtccggagcgggaacaggatcggtttcggccgcagcagcagcagcagcggcagccgcagcagcctcctcctcctcctcgtcgctgccgcacgtggcgccgcacagcctgggcctgagtccgcagtcgagcgccgactcgcagcagttcaacatctttccggcgatcttcagccgccagctgaacttctcggccggcgggcagggcggcaagctaagcatggacgagctgcgtccgaacctggtcggcggactgctgggtctgcaacagggcctgctggaggatcacgcgagcatgcagcacggcggcgtggggcaggacaccaagttcatgtcgttccaggaccagcgcctaatgggcatcggcggctcgcacgagaaccggctgctcagcctggccagctccgtgcaggatacgcgttcgccaattaccacgctggagaagtcgtcatcctcatcgcttaatcaccagcgcaagtgtagcagcacgccggaggatttcagcgccctctactccggcctgcccacgcccggcatggactcgtcctcgcaccaccatacgccggcccacacgccgccgtcgcgcctctccgatcacacgatctcgggtgagtgtggcccgatcgcatctgggctcctaatctggccacaatggccattagccattagccattgcccattagcaggaaattatcctttggcaccagcaccagcacccctttcacttccacaccccccccccttggccactgagtcctttgtcctttgacccgtgtcctttgtcatccgcttgtttgttgatgctcgtttgcagcttcctattaccggcttgtcctcgcttctttgttcctggcttatcgccagccagtaccgactcctgtgtcctgtgtcctctgtgtcctgctccggtcgccccaccactcgtggcatggattagtctgcggcacagctggtcagcctctaatccaagtgatttcccattgaacacatcacacttaagtcacataaaagccagtgaattgtcaggatatccacatgtacatatatatttgagagtaaggacgcgattatctccgcccaagaatcaatgtatgtttggtttattgaacgatgatgatggtttggaaattgctacaggctacttaattaaccatcatcattagccaaagaagtcgcttacatcactgtgcacggcagttcacgtagtgacgaagcgcatctgcataatcattttgtcaaaactttttgccgccaaatattatgacgtatttagtgtcctgttgatctagaagctcatttcccaattaggtttaaatggcaataaggattttctaattgcacaatattaaatattttcacggtgggtggtgtcattattctattctattattttgggagtaatggagttgaagataaaggataaactttcccgcaattagtcacttaaatttatatagggagtatttaagagaagaaagaagatcacatttccgatatccattttctatttaacaaacttttactttctgcattatgacaatggattatggcaactattttttagtagaaaaaatttgatacatttgaatacaaatataagtgacgattgatgcctcaactttaaagttttcaattatagctggaaagaggcttcctctttaaaagcgcttaaaatataattagcataaccttttaatgcctaatacttattgcatttaccaaactaatgaaatctttagaagatttcacttgaagagaaaataaatatcttacaaatattcatttattaccaatcaaagtcacaggcatcttttcaaatgtttggggcaacttttttaagttcattactagtgttagatattaaaaaaaaactagtactattagcaaggccatgacatatttagagatacgttgggaaagtatctaacaaatgaacttactttcataggtttctatctcaatttacacataacttgttagcatt

SEQ ID NO: 34097 - DNA, 1509 bp, DROSOPHILA
atgtgtcgtgttgaagccccgtcgcaccgccacaaaattcgatcaatcaaaacgggagcgcgttcgccgcgagacagcttccagttggattactcaatcgacttcttcaagacgtatatcgatacgcagcgtttctacgccggccacaagttggatttcaaacatcagagttgcgccggcggccctggttccggtggtgctggtggtcctggtcctggtggtggtggtggcgcctccggagtagtcgtcgtcggcggcactagcaacagcaacaatccagcagcggcgcaacagcagcagcagcagcagcaacaacaacagcagcagcaacagcagcagtccggcggtaataatcccagcaacggcagcaactccgccgtcgccttgtcccttgcccatccgcacgcccacgccagccacgcgcacagcagccacgcccacggcagtcacgcccacgccctagcgatagcccacggtcatcacggtctgctgccgtcggtggtcccgcaacagcagcagcagcagcagcagcagcagcagcaacaacagcaacagcagcaggcgcaacagttgccgccgggcgttggagttgccagtccgctgcagcagcagcagcaacaacagcaacagcaacagcagcagcaacagcagcagcagcagcaacagcagctgatcaacaacggaggcgtctccgccggcacacccacgctgcttatcggcaacggacccagctcgtccggagcgggaacaggatcggtttcggccgcagcagcagcagcagcggcagccgcagcagcctcctcctcctcctcgtcgctgccgcacgtggcgccgcacagcctgggcctgagtccgcagtcgagcgccgactcgcagcagttcaacatctttccggcgatcttcagccgccagctgaacttctcggccggcgggcagggcggcaagctaagcatggacgagctgcgtccgaacctggtcggcggactgctgggtctgcaacagggcctgctggaggatcacgcgagcatgcagcacggcggcgtggggcaggacaccaagttcatgtcgttccaggaccagcgcctaatgggcatcggcggctcgcacgagaaccggctgctcagcctggccagctccgtgcaggatacgcgttcgccaattaccacgctggagaagtcgtcatcctcatcgcttaatcaccagcgcaagtgtagcagcacgccggaggatttcagcgccctctactccggcctgcccacgcccggcatggactcgtcctcgcaccaccatacgccggcccacacgccgccgtcgcgcctctccgatcacacgatctcggcttcctattaccggcttgtcctcgcttctttgttcctggcttatcgccagccagtaccgactcctgtgtcctgtgtcctctgtgtcctgctccggtcgccccaccactcgtggcatggattagtctgcggcacagctggtcagcctctaatccaagtgatttcccattga

SEQ ID NO: 34098 - protein, 502 aa, DROSOPHILA
MCRVEAPSHRHKIRSIKTGARSPRDSFQLDYSIDFFKTYIDTQRFYAGHKLDFKHQSCAGGPGSGGAGGPGPGGGGGASGVVVVGGTSNSNNPAAAQQQQQQQQQQQQQQQQQSGGNNPSNGSNSAVALSLAHPHAHASHAHSSHAHGSHAHALAIAHGHHGLLPSVVPQQQQQQQQQQQQQQQQQQAQQLPPGVGVASPLQQQQQQQQQQQQQQQQQQQQQQLINNGGVSAGTPTLLIGNGPSSSGAGTGSVSAAAAAAAAAAAASSSSSSLPHVAPHSLGLSPQSSADSQQFNIFPAIFSRQLNFSAGGQGGKLSMDELRPNLVGGLLGLQQGLLEDHASMQHGGVGQDTKFMSFQDQRLMGIGGSHENRLLSLASSVQDTRSPITTLEKSSSSSLNHQRKCSSTPEDFSALYSGLPTPGMDSSSHHHTPAHTPPSRLSDHTISASYYRLVLASLFLAYRQPVPTPVSCVLCVLLRSPHHSWHGLVCGTAGQPLIQVISH

SEQ ID NO: 34099 - DNA, 4905 bp, DROSOPHILA
gcaactggacaatggttagcaactctcgtttgcaattcgcattcgcatcggaattgggtgaaaaaccagtttagaccttcgattttccgaaagttttgaccaaagttttgacacttgctgcctgagttctgcatgtaaattagattttgactgctgtaccggttgttcaggtcttttcaaataggcaactatgcataatctaatttaagtcatagttacttatatacatatataaaagtaccattcaaaacactaactttcgcgttggcaatgctgggtatctgatagtcggttcggttgcatttggcgttccttctcgctgtaaccttgatgtattgctgttgcataaccaaaaaatgcgaatctggtccaaaattcatacgaaaaccagtcggtgccacacccctccacttttggctgggaacctagacgaaagtgaaaactcgttcgaatttccattttccagcaaaagctgggaaaacctggaaaacacaggatatcgagaaataagtattgcatgtcaaaatcaaaaactggacaaatctctgtcccgaaaaatgtcggaattgcagacacaaaaaaaaaaaaaaacgacagacaactgagcaacaatttgctgaacatttcgtttgaataccattagtcatgttgtatggaaagccaaatcgccttttaatcagcagctaagttaagttaagtattctcgggaaattcgacaaggtagagatgctaccgaaacagccaaatccagcggcttatctttccgggtattcatccgaatcgcaatagtattagccacgttaagagttcgctgccctgattaccaagggtagctatgcctccgattattggtaactattctattgtcggaggcgcagataatgagataatgaattctcgatttcgaatgggaaatgcacagcaggatttgcctgtgtataaatgggccagggaagggtgattcgctaaacagtcgtaaactaggagctccaggcgaaagatgatcaagctattggctatattgcttgccatgggaatggcgatggtccaaggagcgctgccgacccaactatcaaataatcaatggacacaacacgatgtgtcctccatggcggattacgaacggctcctggatctgcgctccctggcaatggagttctatcgcgaatttcggaacatttcaacggcggatgtgcatcttctgggtgagcggattggatcacaagatctacagtgcctggccgatatggcccagtttatgagtgcgcttagtgcgcccaaggcgtgggccctaaaaagtgggtattacaacatcttcaactttgatgccatttgagtttatcccttctatgcgaagtgctcgacgcgtggggcaccattccatcgggatatctcattggcaaccgcgtcgacatgggcaactacagggagtgcctgtccgagggcggaatgctcacctcatcgcaggacatccagggaaagtactgcttcatggagctgccggttgccaagtggttgggtttcacttctgagctgctggcggtgaccaacataaggactgctgtgtgcctgccttcctcttgctcggcgggcaccatggagctgttcctcaagcaactgctcaagcggctgcttggcgtcagtgatccgaccaatttgttttccatcagcgagacgtcgtgcagaatcaaggagaaagcaccctgggatgggctcaccatattcacagtgtgagtagtgtcttgatacatcctagctgatctatccatactaactgactaccatcagcgttctactgtccgtatttggtgtcacggttatcctgtgcaccctctacgactacttcttgtgtccggagcagggtaagtagctgacataaatcggataacagcctatatgtatgtatatgtaccatatatccatgtctacccgcagaaaagctaccccgtcccatcggcgccttctcagcccgtgccacttcgcgttcgctgttcaccattgtggagaacacggcgaatccgaatgtaatccactgtctcaatggcatgcggtgcatgtccctgatctgggtaatcttgagccatgagtacattatcaacatgaagggtcccgccatcaatccagcggacaacctgcgatgggcgacgcaactcttctcgagcttcatactctacggtaccttgtcggtggacacgttcttcttcatcagcggcttgctgctggtttcaattggcctgcgaagcatagaaaagtgagtcaacttgtacagggattaatccgatctgtaggcaggctaacattctcaatggctccagaaacaagggaaagctaaatgtgccgctgatgtatctgcaccgatatctgcgcctcactccgatcgtagccgttgccatactggcattctacaagatgatacccctcatcgcagacggcccaatgtacgatgatatcggctttttcgactactccgggtgcaagatgacctggtactggactctgctctacgtgcagaactacgcaacatccgatgtggtgagttgaatgtccaagttgatcaggagaggtggacaagcccatctagtccgtccgtatcaggatggatctgtatcaaccttatataccttagaagttacaataattaaaagtgtttagtggctttactgcgaataggagatcacttcgatagatggcgcctgcagcactagaattgatcgttggcgccatctatgtaagttcggtggtaccattgccattgcagttggagctcttgactatatctgtatatttatctatctaattatttgattgttggttgctccttagtgcgtgccgcatacctggtacttggcggtggacatgcaactgtacatcctgtccccgatcctgctgatcgccctctacaagtggggcaagaaggcggccggaggtatcctggtggtcactttgttgctctccgcctgcctgtttgccaccataatggtgaatgacttccctgtgatgttcaagtaagccagtcgcgcccgccgttttgtgtcccccaatgctaattgcaattactaacaggaatggaattcaggctcaggtggttcagaggaagatctacaccgctacgcatacccatgcggcgccctggttggtcggtactatgttcggttatctcctgcacctgatgcgcggccgaagattcaagttaagcctcctggctacctgggcaggctggctgctctgcctggccccgctcttcacctcgatcttcgccttgtatccgtactccaagctgctgggcaaatcgccctcagtgttgcagggagccctctactatacactggtccggatcgcctggcccctcggtctctgctgggtggtctttgcgtgcatgcagggctatggtagtctggccaacagcttcctctcctctccactttggcagccgttgtccaagctctcctacggcgcctacatctggcacatctttgtcgtggaagtcgccaatagaagcgttcagaccaatacgtacttctccaactatcaagtggtaagtgtgtggcaggcagggtcactcgacattcctattggacttgaacgcttcatttccaactccatagatgctcaacttttggtccacctttggctttaccctgctgatgtcctacgtgctctacgttttaattgaggcgcctctggaggccttggaaagaattatgtttcccaatcgcagaagcccgccagcagcaaaggatcagctgcatatcgagtcccgaacggaagtcgtggaccagatggaccagatggatcacatggacgggatggatcaggtggtgcagcacgagaagcgcagtgatatccagcctgacctggaaacgagtgccaacaaaacagagactgacctcgagttatcaaattagacttatcagctcctatttagcctttattaaaacgaactacttgtaatctaggcacaattaacttaaccacgggtctagagttacgatggaatgaatggtccttgagttgaaaagtcttgcacttaagacgatatcagtcgttatctggttgcgacttttgcgaccaggtgggtttcgaattagtcatgaaggtgattcccgactttggcttgctgtaatgggcacacaaagatttcaattctgactcacagaggcgatgcacgccccattcagttacagaaaaaaagaaaagaaacacaaaaaaaaaacagaaggaacgactttgtctagtgtctcgactatcagatatgtatgcaccaaagcgtttacaagtttttcagtttgataagagccaaatctgttgataatttacattccatagattacgtatttgtatttgtatacttgacttccccactttgctgaccatgtgtcttgactttcatctgcgtagtgacgaaatgctatgtttatagtcaggaaattggagaatttgctctgataaaacgataaaatcaatcgattgacaaaccaatcgaaacgtatttattaacattttaaacttgtattttggatgcttaaagtgggcggggccaacatgttgtgggcagatcgacagaaatgggcaagccaaataataaaagtaggcgtatctgcgttcatatggatggacatggaagtatcgactcgtccagtgattctgatcaagaatatcggaatcgcttaccgtacaatgaatttcgaacacagttttaatactttacgtaacgcatgaaatcatatattttaaatgtaattatactaaaacgttgctcttttcgggagcagcctgaataacttcgtcgggtatcgtggatatcgcttccgcaggcttacctactggagattcttcgactgatgccttcacctccgacatcctgggctccaccaccgcggccggcttggcatttggcctctttgc

SEQ ID NO: 34100 - DNA, 2232 bp, DROSOPHILA
atgatcaagctattggctatattgcttgccatgggaatggcgatggtccaaggagcgctgccgacccaactatcaaataatcaatggacacaacacgatgtgtcctccatggcggattacgaacggctcctggatctgcgctccctggcaatggagttctatcgcgaatttcggaacatttcaacggcggatgtgcatcttctgggtgagcggattggatcacaagatctacagtgcctggccgatatggcccagtttatgagtgcgcttagtgcgcccaaggcgtgggccctaaaaatgctcgacgcgtggggcaccattccatcgggatatctcattggcaaccgcgtcgacatgggcaactacagggagtgcctgtccgagggcggaatgctcacctcatcgcaggacatccagggaaagtactgcttcatggagctgccggttgccaagtggttgggtttcacttctgagctgctggcggtgaccaacataaggactgctgtgtgcctgccttcctcttgctcggcgggcaccatggagctgttcctcaagcaactgctcaagcggctgcttggcgtcagtgatccgaccaatttgttttccatcagcgagacgtcgtgcagaatcaaggagaaagcaccctgggatgggctcaccatattcacagtcgttctactgtccgtatttggtgtcacggttatcctgtgcaccctctacgactacttcttgtgtccggagcaggaaaagctaccccgtcccatcggcgccttctcagcccgtgccacttcgcgttcgctgttcaccattgtggagaacacggcgaatccgaatgtaatccactgtctcaatggcatgcggtgcatgtccctgatctgggtaatcttgagccatgagtacattatcaacatgaagggtcccgccatcaatccagcggacaacctgcgatgggcgacgcaactcttctcgagcttcatactctacggtaccttgtcggtggacacgttcttcttcatcagcggcttgctgctggtttcaattggcctgcgaagcatagaaaaaaacaagggaaagctaaatgtgccgctgatgtatctgcaccgatatctgcgcctcactccgatcgtagccgttgccatactggcattctacaagatgatacccctcatcgcagacggcccaatgtacgatgatatcggctttttcgactactccgggtgcaagatgacctggtactggactctgctctacgtgcagaactacgcaacatccgatgtgtgcgtgccgcatacctggtacttggcggtggacatgcaactgtacatcctgtccccgatcctgctgatcgccctctacaagtggggcaagaaggcggccggaggtatcctggtggtcactttgttgctctccgcctgcctgtttgccaccataatggtgaatgacttccctgtgatgttcaagaatggaattcaggctcaggtggttcagaggaagatctacaccgctacgcatacccatgcggcgccctggttggtcggtactatgttcggttatctcctgcacctgatgcgcggccgaagattcaagttaagcctcctggctacctgggcaggctggctgctctgcctggccccgctcttcacctcgatcttcgccttgtatccgtactccaagctgctgggcaaatcgccctcagtgttgcagggagccctctactatacactggtccggatcgcctggcccctcggtctctgctgggtggtctttgcgtgcatgcagggctatggtagtctggccaacagcttcctctcctctccactttggcagccgttgtccaagctctcctacggcgcctacatctggcacatctttgtcgtggaagtcgccaatagaagcgttcagaccaatacgtacttctccaactatcaagtgatgctcaacttttggtccacctttggctttaccctgctgatgtcctacgtgctctacgttttaattgaggcgcctctggaggccttggaaagaattatgtttcccaatcgcagaagcccgccagcagcaaaggatcagctgcatatcgagtcccgaacggaagtcgtggaccagatggaccagatggatcacatggacgggatggatcaggtggtgcagcacgagaagcgcagtgatatccagcctgacctggaaacgagtgccaacaaaacagagactgacctcgagttatcaaattag

SEQ ID NO: 34101 - protein, 743 aa, DROSOPHILA
MIKLLAILLAMGMAMVQGALPTQLSNNQWTQHDVSSMADYERLLDLRSLAMEFYREFRNISTADVHLLGERIGSQDLQCLADMAQFMSALSAPKAWALKMLDAWGTIPSGYLIGNRVDMGNYRECLSEGGMLTSSQDIQGKYCFMELPVAKWLGFTSELLAVTNIRTAVCLPSSCSAGTMELFLKQLLKRLLGVSDPTNLFSISETSCRIKEKAPWDGLTIFTVVLLSVFGVTVILCTLYDYFLCPEQEKLPRPIGAFSARATSRSLFTIVENTANPNVIHCLNGMRCMSLIWVILSHEYIINMKGPAINPADNLRWATQLFSSFILYGTLSVDTFFFISGLLLVSIGLRSIEKNKGKLNVPLMYLHRYLRLTPIVAVAILAFYKMIPLIADGPMYDDIGFFDYSGCKMTWYWTLLYVQNYATSDVCVPHTWYLAVDMQLYILSPILLIALYKWGKKAAGGILVVTLLLSACLFATIMVNDFPVMFKNGIQAQVVQRKIYTATHTHAAPWLVGTMFGYLLHLMRGRRFKLSLLATWAGWLLCLAPLFTSIFALYPYSKLLGKSPSVLQGALYYTLVRIAWPLGLCWVVFACMQGYGSLANSFLSSPLWQPLSKLSYGAYIWHIFVVEVANRSVQTNTYFSNYQVMLNFWSTFGFTLLMSYVLYVLIEAPLEALERIMFPNRRSPPAAKDQLHIESRTEVVDQMDQMDHMDGMDQVVQHEKRSDIQPDLETSANKTETDLELSN

SEQ ID NO: 34102 - DNA, 4762 bp, DROSOPHILA
aaaattgagctcgtttttgtctcgaaatcaagaagatttcttctcatgagaattgagttctcggtttttgttctatattatgttttatcctagattataaagaccatatatttgttatcgtgaaacagagttattaattatggagatattatggattatgaatattaagttatacagagaattcttatttttagcaatgtaactggttatatgattgttcagtcaccaaatttctttctactttttccaaagttagttttttttttttagaaatgtacgaatttcaattccgtgaagaatcctttggtttgattagcacaagtgcccaaatctgtttagataatcactttttgtcaaagccagaacgggtgctatctattagttttgtttaaaatccacttgaatattatatttcgccataatgagctaaataagcgaatgcttagccatatgctcttagcttggttaattcagttttttttttagttggcaaagattatagagattgtaatttaagcgcgtctattcgaattttggatcacaatctagaagttggcttgaaaggatcttaatcgatcgtttccaagcgatagcccacaaaatagtgacttttcaggtgccgccaaaaaaagcacttcaaacgtgttttcgtccaaacaatttttgcacaaaagcggcccgcgtcgtctagactgttttattgggtttggaataatcgccgactaagtctgatccagtcggttactattcgaagataatttttgattaggtcgaactttgctcgtagtggggacattcccacaaaaccaggtgctgaccatggcaatgattgaggtagttgcacaaataaccatttgggactggtcgtgaaaaagattatggaacgataactaggttctctcagtgcccatgataacactactgaagccctactcttatcgaagtctcgacctcgtataaataagatcgttcgaagtgctgccacaaccaaagcgctgattactaccaacccatcaagatggtcaagcatagcacagggccaatcgtttcgctcctggtcatgtccttggcactgaccagtgccagtatacgtgtggagcatccaaagaactccaccttgaacgtaggcaatccagagtggcagtcacaatcctaccacacaatttccagactcagacgccttgcagtcgagttctttgcccagtaccagaacataacgatatccgatctgtatcgggataaggagattcgactacccaccaccgacgatttgaggtgcctggcagatctgcagactcttgcgaaagatgtgtccgatagaaaattgtgggccctaagaagtaagttcatagtcgatacagaaaaatatgacttattgtccgacattaccgattaccatcatcgtttacagtgattgactcttggggcacttttccttcgggcatcctgtacggcaatgtgatcgatctgggcaacttcgacgagtgcttgggcatagaccacgctgtgacctccactcacaatgtccagggcaagtactgcctcagcaagcttcagttggcatcgagtattcccacctttttggcactcaagacagcggtgtgctttcccgcctcctgctcagccgaccacatggacacaatgctccgaagattgctgcagaacctcctaagcattgagctgaatccagatgtgcctctagtgagtgagggcacctgcaagactgccgatcgggaaccttacgatgctctaaccattttcacaatgtaagtgttcttaaaagcattatggtaatgttatcgtacatcaaatcaaatcatgcaaaatttccattagagtcgtgctatcgatactgtgcgttctcatggtgctggccactgtctgcgactacttggtctgccaggatgaccgtgagtattgccaaagctatgtgcaaatctcttccagatgctaatgtgatatacgtttcggcagaaccgctaaataagtggattaaagctttctccgcgcgcgccaactgccggattctcttcaggttggtggcacccaggagcaatcccaatgtgatcgactgccttcatggcattcgggtactgtccttcatctgggtcgtctatggccacatatacctcgtatctttctttggccccaacatgaaccttgtcaaattggacacggtaagctcacccaactttccaaactcgaaaaaatccatatctaatgatgtacatacattttcgcgatgcagtggcgcagatcgccgtacagtatgctagtgcaacatgcagcatactctgtggacacgttcttctttttgagtggcctcctgatggtggtgatagctctaagagcaatggaaaggtacgactctttggacttaagcaacatgcacggtgtcatttagacgggttttggaaacaaagattattacttcctattgacccatttgcagaaccaaaggaaagctcaatgtgtccctgatgtatctgcatcgctatctgcgcctcactccggtcctggccttggccatcatcgtctacatgtcgattctgccacgaatgggcgatggcccactgtacgggaaggtgaacttcgatgactactccaaatgcaaggacacctggtactggaccctcttgtacgtgcagaactatgccactgatgaaatcgtaggttatcccactcaattctaactggcatttcgttgcttatcacacaccgaacttcgactaacagtgcctaggccactcttggtacctggcggtggacatgcagctctacatcattgcacccatactcctgatctgcctgtacaagtggggaaagaaggcggccgccgggattctggtcgccatgctgctccttgccgcatgtctcttcagcatcatggtgatcggggacgtttctctgtaagtgcagacagatatgaatgaatatggatatggatatggatatggatatgatcgtaactaacatacccttgccttactgtcttgccttcttatcctgcagcattgctatcagcgagggggcaatggaaaagatatacttctctacacacaccagggcatccccgtatctgattggtattctgttcggatactttctgcacgtcaaccggggcaagtccttcaagctcagccccattacagtcgtcctgggttggctgaccagcctggcgttgctcttcagctgcttgtttgccgtctacggttatgccgcggatgcggaaataccacccattgtggaggaggccttctatctgaccttcacccggatcgcctggcctctcggtctctgctgggtggttttcgcctgcatgcacggctacggaggactggccaacagcttcctttcctctcccctttggcagccgctgtccaagctatcctactccgcctacatcttccacatgttcatggagagcctcaacgccggcattacgcgcaccaacacctacttcagtgattaccaagttgtaagttcaaagccacatatgcgttggtagttcgaaacactaattgggaatgggaatccttgcagatgcttcgtttctggtgcgattttggctttaccgtgctcctcgccttcgctgtgtacattctgatcgaggcgccgtttggaaatttggaaggcctcctgcttcccgacaagaggccctgtccaccacgcccagctgtggaggagtcgaaggaggccccagtggggggatgcagtgcatctgcgccaacactggaaaataaaacgcctcttccggcataaggatctcgaaactatttatgagcaaagatatcaattataggttaaggacctttttttactaatgttagttcatttaagacatacatatattctttaaaactacaaaggtagatcataaatatgaatataccaaagaaatacaatattatcgacaattcaatttgtatagaacttttttttaatatttttataagtagattagctttcttaattttcccatatgacacactatgggatattaacattaaaaaattattttctttgaaaaattctttgatttgccctctaatcaaaatgtgattttaatgaaatgtaatttacaaagaaacatctttcaagagcagattttaatgacttactgaacatactgacgtcatataatcgatatatatataatatatatatattatataatcgatataaaaaaatttttcttaagtttaatagtgcatactttggcttgtaataatttacgcttcgaatttcgaatttaaagtgaacgggtaatatcttttatcttatacaacttatacaacgaacataatgaatctacgtagcttttttatagttagatgcacattactggtggcgaagtgaaacgcatttcggataagtttcgaatgctgagttccctataaaaaacaatcgcagaacttgatgaaatagaagccaaagtgactgaaaactatgaaagtatgaactattcaggcactggttccaaaacgggtatcaattcatgcataaattgtaacgtgtaacgaaataagtttatggacaagggcaagggagaaacctgtacttgcgggtgcacgctttaaagtccggctctagctcatggtgtggcggtcttgcttgtacaaataccttttccctacaggcattaataattaaaatcaagaattgagcgtgctttcaacaacggaatagaggagctagtatacaaaatcggaggaagaaaattaatattttcgaaaggaggaggaagttctagaacaggagg

SEQ ID NO: 34103 - DNA, 2121 bp, DROSOPHILA
tactaccaacccatcaagatggtcaagcatagcacagggccaatcgtttcgctcctggtcatgtccttggcactgaccagtgccagtatacgtgtggagcatccaaagaactccaccttgaacgtaggcaatccagagtggcagtcacaatcctaccacacaatttccagactcagacgccttgcagtcgagttctttgcccagtaccagaacataacgatatccgatctgtatcgggataaggagattcgactacccaccaccgacgatttgaggtgcctggcagatctgcagactcttgcgaaagatgtgtccgatagaaaattgtgggccctaagaatgattgactcttggggcacttttccttcgggcatcctgtacggcaatgtgatcgatctgggcaacttcgacgagtgcttgggcatagaccacgctgtgacctccactcacaatgtccagggcaagtactgcctcagcaagcttcagttggcatcgagtattcccacctttttggcactcaagacagcggtgtgctttcccgcctcctgctcagccgaccacatggacacaatgctccgaagattgctgcagaacctcctaagcattgagctgaatccagatgtgcctctagtgagtgagggcacctgcaagactgccgatcgggaaccttacgatgctctaaccattttcacaatagtcgtgctatcgatactgtgcgttctcatggtgctggccactgtctgcgactacttggtctgccaggatgaccaaccgctaaataagtggattaaagctttctccgcgcgcgccaactgccggattctcttcaggttggtggcacccaggagcaatcccaatgtgatcgactgccttcatggcattcgggtactgtccttcatctgggtcgtctatggccacatatacctcgtatctttctttggccccaacatgaaccttgtcaaattggacacgtggcgcagatcgccgtacagtatgctagtgcaacatgcagcatactctgtggacacgttcttctttttgagtggcctcctgatggtggtgatagctctaagagcaatggaaagaaccaaaggaaagctcaatgtgtccctgatgtatctgcatcgctatctgcgcctcactccggtcctggccttggccatcatcgtctacatgtcgattctgccacgaatgggcgatggcccactgtacgggaaggtgaacttcgatgactactccaaatgcaaggacacctggtactggaccctcttgtacgtgcagaactatgccactgatgaaatcctctacatcattgcacccatactcctgatctgcctgtacaagtggggaaagaaggcggccgccgggattctggtcgccatgctgctccttgccgcatgtctcttcagcatcatggtgatcggggacgtttctctcattgctatcagcgagggggcaatggaaaagatatacttctctacacacaccagggcatccccgtatctgattggtattctgttcggatactttctgcacgtcaaccggggcaagtccttcaagctcagccccattacagtcgtcctgggttggctgaccagcctggcgttgctcttcagctgcttgtttgccgtctacggttatgccgcggatgcggaaataccacccattgtggaggaggccttctatctgaccttcacccggatcgcctggcctctcggtctctgctgggtggttttcgcctgcatgcacggctacggaggactggccaacagcttcctttcctctcccctttggcagccgctgtccaagctatcctactccgcctacatcttccacatgttcatggagagcctcaacgccggcattacgcgcaccaacacctacttcagtgattaccaagttatgcttcgtttctggtgcgattttggctttaccgtgctcctcgccttcgctgtgtacattctgatcgaggcgccgtttggaaatttggaaggcctcctgcttcccgacaagaggccctgtccaccacgcccagctgtggaggagtcgaaggaggccccagtggggggatgcagtgcatctgcgccaacactggaaaataaaacgcctcttccggcataa

SEQ ID NO: 34104 - protein, 700 aa, DROSOPHILA
MVKHSTGPIVSLLVMSLALTSASIRVEHPKNSTLNVGNPEWQSQSYHTISRLRRLAVEFFAQYQNITISDLYRDKEIRLPTTDDLRCLADLQTLAKDVSDRKLWALRMIDSWGTFPSGILYGNVIDLGNFDECLGIDHAVTSTHNVQGKYCLSKLQLASSIPTFLALKTAVCFPASCSADHMDTMLRRLLQNLLSIELNPDVPLVSEGTCKTADREPYDALTIFTIVVLSILCVLMVLATVCDYLVCQDDQPLNKWIKAFSARANCRILFRLVAPRSNPNVIDCLHGIRVLSFIWVVYGHIYLVSFFGPNMNLVKLDTWRRSPYSMLVQHAAYSVDTFFFLSGLLMVVIALRAMERTKGKLNVSLMYLHRYLRLTPVLALAIIVYMSILPRMGDGPLYGKVNFDDYSKCKDTWYWTLLYVQNYATDEILYIIAPILLICLYKWGKKAAAGILVAMLLLAACLFSIMVIGDVSLIAISEGAMEKIYFSTHTRASPYLIGILFGYFLHVNRGKSFKLSPITVVLGWLTSLALLFSCLFAVYGYAADAEIPPIVEEAFYLTFTRIAWPLGLCWVVFACMHGYGGLANSFLSSPLWQPLSKLSYSAYIFHMFMESLNAGITRTNTYFSDYQVMLRFWCDFGFTVLLAFAVYILIEAPFGNLEGLLLPDKRPCPPRPAVEESKEAPVGGCSASAPTLENKTPLPA

SEQ ID NO: 34105 - DNA, 2934 bp, DROSOPHILA
aagttagaaccttcgcgtctactaacagattacttttcgccccgatatccactaacctgtggctgccccagtcgaaacttggggtctgggcggtggcgcccattatcctgctgcataataatgctaattcctaaagtttgtctatcccgggagctgtattgttttacagctttagtgttaaacctacagattctcagagaacagatggctactcattcgttgactagaagggagggcggagggcctttgctgagagactctcaaaattgaaagttttacctggttcgtcgtaaaactttttttgttttgagttcaaattaatgttttataaatgaaataataaataactaaataataataataaataaataataaataaataagcttatataataagatccattttaattgttttttcataaaacaaaatgagtgattttttttataattacaaatgaaacacttgaattaccgaaacaaaaacgcttaactgtgccatcactaatacttattggcaataaataagtgcgattttatgacaacaaagacgtatcgataagatgcatgtgcaaaatgcggtgtgtgtattaacttaatacttggcctaaggcttatcgataaggatatcgatactaaaaagtccggcaccattgtcgctatcgaatgcccaagtatacaagacaagctatgagaacgaatataaggtggtcagttttaagtaattcaaaaaattctaagtcaaaatgtgtcgcaagtgtagttacttgatttaatcgcgaaatttactcgtggattatgtcttaagataatatcgatatattgccggcgtcatcgattgctgacacatatcgaaaggtccggccacactgctcaccgtcttcttcttgtcatcccttccgtttccctttcttttcgtcttcacgtttccggtgagtgcgtgtgctccgcgaatttttaagcaaaactccctattaaatacctccaattctcttttttacttgcagcgggagtattacgatacgttcgcgttcgtgtaactttgtgtttgcaaatcaatccaggtaattgtcgccgaaaacccccattttcaagcggccgcaccgggaaaatatgcgcccaatgttgttcccgaatgcatgtgtacattttttttttgtgtggacaaagaagcgagtctttcagactcaataaacaatgtgtgaattggataccacatggatgatctgtagatatatcctggcaatgaaccgaatctaattgctattttttttttttgttgtttgtgcagaatgtttatgccaaaggcccatcgtgtcgcgatctacgagtacctcttcaaggagggcgtgatcgtggccaagaaggatttccatgcccagaagcacccggaactggagtcgatccccaacttgcacgtgatcaaggcgatgcagtcgctccactcgcgcggactggttaaggagcagttcgcctggcgccactactactggtacctcaccaacgagggaatcgaggagctgcgcagctacctccacctgccgcccgagatcgtgccctcgacgctgaagcgccctgcccgctcggagaccgtccgtccccgtcccgccgttggcggcccacgcggacccggtgacgcctccaagaccggagaggatcgctccgcctaccgacgtgctcccggcggcagcggagtggacaagaagggcgatgttggacccggtgccggagaggtcgagttccgtggcggattcggacgcggatcgcgcaactaaacaacccaggcgcttcagtttttttttctaatgtataaaaaattactcagtaaaatgttcaactgaagatccatacccttaacaatagaagaaaccaacatctgaaaaatgtgtgtgtgttttatgatatgacgatcaattataaagcaaacgcaagtgaaattccgtgctcccctctattttttttttttgttttgtttttgttgtttggtccagtgattgtggtgtgcaaatcggacgtggattcagatcccaagcgtggctaaatagtatagtaaacccgatgcccggccaaactgaaactgctaacccaacacatttttgcaagaagctcttcagataactttagaagtaggattttgcagataattcagtttattttgcgaggttctgtcgagaggaaagaaggaattctagcgtaaatacgtttttttgaatacaatacatgcattcaattttggtaatttcaaaagattgttgtatatagatttggatatttgtcgatttgtagctctttattataaaaatatgtgcagaaattcatcgcattcgtttatagctgtgtgccaaaacatagtagacttgggttggaataaaccagttggctcgaaatactacattcaaatatttaaataacattagaatccaattgctcataacaaaaacggcatgaattgcaaggacatagattaaatttgatttaccatcaaaggaaatggtatattttctaaacgataagccaaaatcttcgtatgtggaggaacgtaacttaaatgctcaatttcgttttatttgttcacgctacttaaacgttcacaattagttaaataactagtttacttaaatagtcttcttttgctcacgagcatccttttgttgttctgtagctgccttttacttatatattaattctaattttataaatacactagtttcacatttcccaaagttaggttttagttaaatcttatgtgtctactaatattatttaaaagcttatgtgcttctccatttaacgttgattactttcaactaatattttatgtaaacaagtaagtatgctgctatgctcggaccataaagaattcgaatcgcttagattatttatttaggccgaccaaaagaactacaacaatatacgacgaatggcattattctaggt

SEQ ID NO: 34106 - DNA, 934 bp, DROSOPHILA
gcagcgggagtattacgatacgttcgcgttcgtgtaactttgtgtttgcaaatcaatccaggtaattgtcgccgaaaacccccattttcaagcggccgcaccgggaaaatatgcgcccaatgttgttcccgaatgcatgtgtacattttttttttgtgtggacaaagaagcgagtctttcagactcaataaacaatgtgtgaattggataccacatggatgatctgtagatatatcctggcaatgaaccgaatctaattgctattttttttttttgttgtttgtgcagaatgtttatgccaaaggcccatcgtgtcgcgatctacgagtacctcttcaaggagggcgtgatcgtggccaagaaggatttccatgcccagaagcacccggaactggagtcgatccccaacttgcacgtgatcaaggcgatgcagtcgctccactcgcgcggactggttaaggagcagttcgcctggcgccactactactggtacctcaccaacgagggaatcgaggagctgcgcagctacctccacctgccgcccgagatcgtgccctcgacgctgaagcgccctgcccgctcggagaccgtccgtccccgtcccgccgttggcggcccacgcggacccggtgacgcctccaagaccggagaggatcgctccgcctaccgacgtgctcccggcggcagcggagtggacaagaagggcgatgttggacccggtgccggagaggtcgagttccgtggcggattcggacgcggatcgcgcaactaaacaacccaggcgcttcagtttttttttctaatgtataaaaaattactcagtaaaatgttcaactgaagatccatacccttaacaatagaagaaaccaacatctgaaaaatgtgtgtgtgttttatgatatgacgatcaattataaagcaaacgcaagtgaaa

SEQ ID NO: 34107 - protein, 158 aa, DROSOPHILA
MPKAHRVAIYEYLFKEGVIVAKKDFHAQKHPELESIPNLHVIKAMQSLHSRGLVKEQFAWRHYYWYLTNEGIEELRSYLHLPPEIVPSTLKRPARSETVRPRPAVGGPRGPGDASKTGEDRSAYRRAPGGSGVDKKGDVGPGAGEVEFRGGFGRGSRN

SEQ ID NO: 34108 - DNA, 8011 bp, DROSOPHILA
aatcttagctcagcatagagatatttaaatttacatatgtatatatgacatatatttttctgcgtgtatttgggccgccaacgttctccacccacccggtctaatattgggatttatcgattcgcacaatgggcggaattggctttttgatttaaggtcttaatgatgatgagctctgggtgtaagtaaccccgcgaatatggacaagatatcgtgggccatcacgccatagatgttctattttaggacgatggataatgccaacccaccgcaggacggaaaatgcactttccaccaatgtgcaactctctctctctctctctctctttctctctataccgaagatcatttcccaaaacggtaggaagcgttgatcggttaaccggttaactcaacacgactcatactcacactttccactcgcactcacagcacacaaatgctgaaccagatgcaattggaatcacagttcgaggaactcacttccatgactgaatggctcccacgcgagaagttttaagcatacttatcaagatcaagttgatcatcaactaattaattgttgctaattgaacacttgttcctagaaagttttttaggagctttgaaatgtgttatgttatttcattgcatttatgaattactagcttattaacggaaaataaatcatggcttccttgttttcggtcattttgtataaaccaaatttgtcttacaactattgtttcacttctaaatgtgttccccgtgcgtcattatttccataaaatacaaaatcaatacagcgaatatagtgttttgggtggtccgctaacgattagtggttaaagtacgcttaaacaattccctttgcggatagaagttctttttgatccaatggcaatagaaacataatcaaatccgcaaatcgatgactaaatgcggcttcatcggtctatcgatatcgccacactgctgcgcagcggcaatcgaagtacaatcggtacgaaagctataaaagcaaagacacactgtgaatgcaaaacagttcagaaattgaaacgcggctatctgtgcgatacgtccaaccgaaatcacacacttgaacgtcttgagtttcgaatacatatagaaaacccatcgagttccctttttttttggttgctccgtcgattagcaagtgaacaagctcgaaagcgcgttgagcagaacagaacagaacagagaataatagaacggtatacagtatatacagtatatacggtatacagtgtacagcgaagagattggagattccatctagcgaagcaaccaccaaataaaccaccacaaacagcacaacaatggccgaggctaacaagaggaatatccccatcaagctgggcgacttcagcgtcatcgacacggagttcagcaacatccgcgagcgcttcgactccgagatgcgcaaaatggaggaggagatggccaagttccgtcacgagctgatgaaccgcgaggcgaacttcttcgagtccaccaggtaagcgtaatagtgatacaagtgggatcccaacactgggataattccacatagcctgattctaccgggtgtactgcgatggaacccaatcccgaatcgctcgactcatcgcctcgttgttggctcctctaaatataggcgcacatcttgccacatcgcccactggtctggagctcttcacccacagattctcctacgtatgtacatatgtacatacgtgcatacatacatatgtatgtactaaacagtgggcctcataggaggcgagcggcccgcttcaattctcgccccagatacactatgtgtatttctttgccgtcgctctgggggaggatgagtcaccagttctaaattctccgccgctgtctccggccaagaaacacatgtgtatctgctgcccgccacccgctagtaaatccccctcccccgccccggcacatggctagccagcgtcttgtgccctcccctttcgctcgatctcgagtcccatacggtttatgcaaccgttatgtagggcataacggaatttttcgaactttgagaatcacctgtgccaagatattccgttatatgtgtgtgtgtgtgtgggtttctagctgagcagaaaaatgtaattgttgataatgagataagatattaaaatctggtctctgcgagcaaaattaaatatttgaaaacgcaaagcattgaaacgatcggtggcacacatgaataatgttcattaaatctctaactatttccatttgtagttacttgtttttaaagcatacataagtgacaaacgcgtttacctagcaatctatttccatttgcaagtcaattaagtgattcggcggtattttaacaccctcgcatattcatacgaatcagagagagggagagagagaaattccagttgaatgttacgagtggcattttcaatgaacataggtttattgcccaaatcagcgattaataaacaaacaatgccccaaaggcgaatggcaaatactatgtcgccgacgccgtcgcggttgcgcgtctcgttagcctttccattggagttgcgttgcgtgggcgccagttttggttgctattgggacgacctcgccgtatgacgcaatcgaaccgatggactctatttgttgttgccttcgccatggtcgccactgcatttgcatggccacaacagaaatgttacgactccacccccctcccccccaccagacttccgtctgtttcagaacttggtagcgctcctctccacaactttgcccattcaacgtcaaagttggcagtgaaaggaaattaacccaaattggtattgtgccctcctggctgcaaatttaattggaaatgaagggaaactcacagtggcggcataagttgtgcgccagggcttgcttcgggcgattagcctaataatcgccacagattggccacgtagtttagtagcttagtagtagtattggatatatacttgccaaataattcaatcattcgcccataactgcccactgtccgcaacctttgacctaagcggcttggctgtggctgtggcgtgttgtcaattgaagcgctgcgtgatatctgaatgactcagcacggaataaacgcacgccccatatacagggcaataaatccatacaggtaggtgtatctatgccctaccgaagttgccacttgaagcaatagtttatgcttttaactggatacattcccaacaatgtatattttattattatggcataagaaaaacatgtttacaaacatgcaattcctgcgtagctgccaaaagctgttcaggccatttgcacattttaaataaaactttcttgaacatatgtatgtatatacatacatatgtgtatgtatgtacgtactgtcacatactaacgatagattgtgtgtagtgcagggcctcatttaaccaacttggccataagcaaagaccgcacatcaatgctggcgccttcagatatgaacaatgtgcggattcagatggatttggatgcggttcccagtaaaatagattggtgcgattatctcatgcaaatgcatggaaattgtattggccagatcggatcggatgggatgggatggctaccaaacataggcaatgccaacggtttgcctaatttatagactcattgtgtgtgcgcacagtttaaacaaataagtgcgctaggatcgtacatacatacatacatatgcacatatttaaccagcaaatagatctgtgcgaaaagctttcgcacacacggacagttttcagttgcgatgagcacacgctgcggcgatttagttgccaatattgttggctggatgctgataattcaaatgagcagcgaactgcgatgatatcatgtcaatttttagctattgcgctgcgcttcgactcgatgctattcaattcgatttcaatcgatgacaaaacgccgatcgtcgtcgataatcgatattttaattcgacatttgttcacacacacacgcacacacgcgtacaccgcaaacaactaaagagagccattttgtttgcgcttgttctggttttttggccgcctctcgcgcccgtgtttattttcgttcttctttggtttcctttcgtttggcttttcaataacgaaaaaatatgcatgacatcattgtcatcagatgccagcgagatattgtagtcgcaccacacacacacaactcacacacatgtaaaaacgtgggctggccggagagggtgggagtgagagcggctgccagagtgggagggcaggtgcctcttcatgctgtccaaagaaactttggccaggcggctaacggttattggtacttatcattagcgcgctattgatttctctcttcgaggggcgatcaacctcgcaaagcacattgcaaggtcgccaataagcccacgcacgttcacgtttcggctccgattgataagctttctctgcctctgctcagaatttgcggagtgccaattgatggccgcttatcaacgactctcgctcgcatgcacacacacacagatacacacatacattttggcttcatcgccgacacgcacagcggcttaacggtcaatcaaatcccgtaagctaagaatgcaaattaaggtgaaccataaaaaatatttaaaaaaaaacgacttacctatcaattgatgtgagagtgaagtgaagaatacaatattatttaaaatgaaatcacaaaattttaataagtgtagatttactaatttgaactaaaaataaaaattattgtgaaaaagcagtgcgacaaaatgtaatacaaagtgaacaattatggaccaatgaattatttcctgggtaaatatgtaaatattttatgcatactttcctctattgtaggtaatatacatattctttttttttagatgctatgcttgaaacacttggatcttaatagataaacttgcattctaaaggaaattggggactggaagtgcggaaaacaaaggagttatcattaatatatgtacatatgcataagaaacatgtaccaaaaatgattaaatattaattacaagaaaacatatgaatggcttgaaattttcattgatcattgttaaaaattccagaactttaatatcgagtcaaggctgtacctttataaaatagttaaaaaattgctcacccttgtacgataatgtgtagttatctttttgtctaactcattataaacaatttctatctatttttctctttcttgccgcttggaaatattaaacaaccgcaataatttccacataataataatctcctctcctctctcttaaaacaaaagctctactaaaaaaacaacaactaccaggtacaataacgtagaaagtttacaacctaaacttttattttctgtttatcctcaatgtttttttcattcactcaaccccttattgtttggtaactaatgtattggtttaatgttattgcaatccacacagactaaactagaaactcgttaccagatgcatcgcatgttaatcgccaaatatacactataacatttatttataaacaattttgagcccggtatagacgcaaatacataactagaaatgcatacagttcgtttaaaactaaaagataaaattataaaagttgtaagtataggcagtttttcataatagaaaaccgttttgatgcgatccatacatacatatgtacatacatagatacatatgtatgcatacaatttcaaggaagcaaggaatagttttatttgtagtctagatacatgaagccttaattctcaattcccttatgggtagttccttaaaatagaaattattacagacatatggggagatttatgtttcgagggtgacagctgctgcccccagatccgtacacatgtacatacatacatacgtacatcgctttcaagcggaagccagatctattattagacaggcgtcgagcatcgcggcttcatttaagttgggttcgttacgtccggatcagtttcatcccggagaagcatcagcatggaggcctttacgcgcacactgcaaaatacctttcgcagcactaggaccaccagaaccactactacaacaaccacaaactcctccaccaggttcctacctcacctacgcaaccctaacacctttggttttatttcgagtctacttgttcttaagtttcgcttcaacactcaactgcaatactcatgtacaatatgttcgtctcaacttatttgcagctcaacgacaaactcggcgctgccatcccgaatcccaaagcaacagaactacgtctccgacattagctcacccttgatccaggtaagcaatgcaaggaatctactcttggttgccaaaggataacacttatatatccccctttgcaggatgagggcgataacaaagtgctgaagctgcgtttcgatgtcagccagtatgcgcccgaggaaattgttgtgaaaaccgtcgaccagaagctattggtaagtctctgctcaggatggttatgttttgcagagtttatctaacatggatatctgattcctttcgactaggtgcacgccaagcacgaggagaagtcggacacaaagagcgtgtacagggagtacaatcgggagttcctgctgcccaagggcgtcaatcccgagtccatccgctcgtccctcagcaaggacggagtcctgaccgtggacgcccccctgccagcactcaccgccggcgagacactgattcccattgcgcacaagtgaaggccagcccagttgtccagttgtccagctatccagtcaccatggtcccaagccggttgaggagcaataggcgcaggaggagcaggaggagtgcgagctgctgccgatcagattaaatccatacacacattgagtttaatccaatcctatctaaatgattaatttttttggttctgacttaaagctaaactatgttactgacgtactactcattaacttaaatataattgaaattattattaaatttgattaatttaattcatatttataattttcgcattaaacgtaatcaattttgccgtagttgccccccattggttttcctttccttccatcgaaaataaattaaatatatatccaactgagcggattttgatcagcggatttgtgcatcattgactaattagctgctgctgagccattttcactttttaaacgctgaattgaaatgatgatgtgcctttccctttagggaatcgtgaggcttgaataaagtatatggatttcatttatatttgactgtggtgaatgatattatttatgatacaatacaacttttctttgcaatcgaatatacggggatattttaaatggggaaaaaatccatcatacgggcttggcttgacgtttcagttcaacattcaatatttcttttccacttaaagttcgttccgaaaaaccttcgactcagatagcttgtgtgcaacacaagctaaccaaattgttgacgctgctcagggatgtcttccctggagaccggtggtcctgtctagttgcaattaaccaaattgtgaggcgacatctcgccggaaatactcaaatccgattttctaaatcgcctttcaaagcaaatacaaaacgaaaagatgccgccgcagctaatgtcccagatggaaaatggcggcgaggaggaagggtgtcgtttggagtgcaaggaaatggatccgctgcggctaaccacgctgatcctgagtgcggatccacggtatcgcatcaagccaatgcagcaagtcgtgtccgccctcgttggcggtctcatcacgacatttgtgggtgagtttgtcggttagatttggtcactccgagacgtaatctaaactacctactacactcggccgtagtgacgcccttggaggtggtgaaaacgcgcgtccagacgcagcacgcgatccgccagcgaccgactgtttcgaagctctgctacgtctatcacaacggcctgatgacccacgtgtgccgctccagtgatatctgtgtcccgaaaccaggccgtgatccgcaaaatcttcggccgctacgcgg

SEQ ID NO: 34109 - DNA, 1176 bp, DROSOPHILA
caaagacacactgtgaatgcaaaacagttcagaaattgaaacgcggctatctgtgcgatacgtccaaccgaaatcacacacttgaacgtcttgagtttcgaatacatatagaaaacccatcgagttccctttttttttggttgctccgtcgattagcaagtgaacaagctcgaaagcgcgttgagcagaacagaacagaacagagaataatagaacggtatacagtatatacagtatatacggtatacagtgtacagcgaagagattggagattccatctagcgaagcaaccaccaaataaaccaccacaaacagcacaacaatggccgaggctaacaagaggaatatccccatcaagctgggcgacttcagcgtcatcgacacggagttcagcaacatccgcgagcgcttcgactccgagatgcgcaaaatggaggaggagatggccaagttccgtcacgagctgatgaaccgcgaggcgaacttcttcgagtccaccagctcaacgacaaactcggcgctgccatcccgaatcccaaagcaacagaactacgtctccgacattagctcacccttgatccaggatgagggcgataacaaagtgctgaagctgcgtttcgatgtcagccagtatgcgcccgaggaaattgttgtgaaaaccgtcgaccagaagctattggtgcacgccaagcacgaggagaagtcggacacaaagagcgtgtacagggagtacaatcgggagttcctgctgcccaagggcgtcaatcccgagtccatccgctcgtccctcagcaaggacggagtcctgaccgtggacgcccccctgccagcactcaccgccggcgagacactgattcccattgcgcacaagtgaaggccagcccagttgtccagttgtccagctatccagtcaccatggtcccaagccggttgaggagcaataggcgcaggaggagcaggaggagtgcgagctgctgccgatcagattaaatccatacacacattgagtttaatccaatcctatctaaatgattaatttttttggttctgacttaaagctaaactatgttactgacgtactactcattaacttaaatataattgaaattattattaaatttgattaatttaattcatatttataattttcgcattaaacgtaatcaattttgccgt

SEQ ID NO: 34110 - protein, 183 aa, DROSOPHILA
MAEANKRNIPIKLGDFSVIDTEFSNIRERFDSEMRKMEEEMAKFRHELMNREANFFESTSSTTNSALPSRIPKQQNYVSDISSPLIQDEGDNKVLKLRFDVSQYAPEEIVVKTVDQKLLVHAKHEEKSDTKSVYREYNREFLLPKGVNPESIRSSLSKDGVLTVDAPLPALTAGETLIPIAHK

SEQ ID NO: 34111 - DNA, 4098 bp, DROSOPHILA
tttcgatgtcagccagtatgcgcccgaggaaattgttgtgaaaaccgtcgaccagaagctattggtaagtctctgctcaggatggttatgttttgcagagtttatctaacatggatatctgattcctttcgactaggtgcacgccaagcacgaggagaagtcggacacaaagagcgtgtacagggagtacaatcgggagttcctgctgcccaagggcgtcaatcccgagtccatccgctcgtccctcagcaaggacggagtcctgaccgtggacgcccccctgccagcactcaccgccggcgagacactgattcccattgcgcacaagtgaaggccagcccagttgtccagttgtccagctatccagtcaccatggtcccaagccggttgaggagcaataggcgcaggaggagcaggaggagtgcgagctgctgccgatcagattaaatccatacacacattgagtttaatccaatcctatctaaatgattaatttttttggttctgacttaaagctaaactatgttactgacgtactactcattaacttaaatataattgaaattattattaaatttgattaatttaattcatatttataattttcgcattaaacgtaatcaattttgccgtagttgccccccattggttttcctttccttccatcgaaaataaattaaatatatatccaactgagcggattttgatcagcggatttgtgcatcattgactaattagctgctgctgagccattttcactttttaaacgctgaattgaaatgatgatgtgcctttccctttagggaatcgtgaggcttgaataaagtatatggatttcatttatatttgactgtggtgaatgatattatttatgatacaatacaacttttctttgcaatcgaatatacggggatattttaaatggggaaaaaatccatcatacgggcttggcttgacgtttcagttcaacattcaatatttcttttccacttaaagttcgttccgaaaaaccttcgactcagatagcttgtgtgcaacacaagctaaccaaattgttgacgctgctcagggatgtcttccctggagaccggtggtcctgtctagttgcaattaaccaaattgtgaggcgacatctcgccggaaatactcaaatccgattttctaaatcgcctttcaaagcaaatacaaaacgaaaagatgccgccgcagctaatgtcccagatggaaaatggcggcgaggaggaagggtgtcgtttggagtgcaaggaaatggatccgctgcggctaaccacgctgatcctgagtgcggatccacggtatcgcatcaagccaatgcagcaagtcgtgtccgccctcgttggcggtctcatcacgacatttgtgggtgagtttgtcggttagatttggtcactccgagacgtaatctaaactacctactacactcggccgtagtgacgcccttggaggtggtgaaaacgcgcgtccagacgcagcacgcgatccgccagcgaccgactgtttcgaagctctgctacgtctatcacaacggcctgatgacccacgtgtgccgctccagtgatatctgtgtcccgaaaccaggccgtgatccgcaaaatcttcggccgctacgcggcgccatggtaagaagtggcatggctactaggaggatgatcccttatatgctcatattaatcattattatgtacatatcatatttttcgtgctcaggatgcctttgtcaagatcgtgtgcacaagtggattcagtggtctgtgggcgggtctaagtcccactttagtttcggccctgccctccacgattatctactttctgacgtacgagtatattaagaattcgctatcccacatctacttggtctcgcagaagtttgaggaatccggcatgaaggaccaagtgcctggagccgacggcggagatcccctggaccaggcaaccaggggaataaatgtgagcgccaccgcaccggtatccaccgcatcgctgccctactacgtgcccatggcctcgggcatttgctcgcgcaccattgtggtcacggccattacgcccatcgaaatggttcgcatcaagatgcagtcggagtacatgacctacgccgagctgtggcgtgtgctgcgctcgttgatccgccagcacggcatcctgggtctttggcggggctggccgcccaccgtgatgcgggacgcacccttctccggaacctattgggcagtctacgaggcgattaagcgggccttcagcgtcacggagccgactttcctctttagcttccttacgggcgccatctccggagcggtgggtgagggtgagcagtgctctgccacacaccgaaaaccatagctttgcctcgagtgtaatcgagttctggaaacgtcatcccgcaggtggctacctttgtgaccatgccctttgacctgatcaccacgcacacgcagattgagctgggtcaggacgttctgtacgaggagattggagcgggaacaggagcgggaacgggaacaggagcaggagcacgaccaaagacaccgcaaagtgccgtcgccaattccaggccatcggtgctctcgcgaatgcgtcaaatttacaggctgcagggagtgcggggcctctatgtcggggtgatgccgcgcatgctacgtgtggtgcccgcctgtgccatcatgatctccaccttcgaatacagcaagtcgttcttcttccactacaatctggatctccaggaggcaggtacgtactatgtgaaatgtcaatgatgaagcaaggtacataaatgcgagcacttcagttgagcgcattcaattgaatcaattgagtcctaactatgtagttccctacgcaacgcttatttggtttatatttcgttgactaaactatcactatttcttgtaaatcatttgtatttctatggctttatttaacaaactaaagtttactaattaacgtaacgttagtatgtgcaacttaaaaatatcttacatttcatgcgaaggctaaagatagttgcaaattgagtaaaaagaatatgatggtaaatatacttttgaattcaagcgaacaacaagaacgattttcgatagcaccgcgatagcatttccgttccgacttcactgtcgatagcgcccagcggcaacagctgatcgtcgtggaatggaatggaaatggtacaactcggatgagcactgagcacggtgttttcttttgggatccgtaaattatttcacaatgatcggagagcttgactaatagcacagctctgaacatcgtcaacaaacacgccgtagcacacgattcgccttctcatctcatctcacatcaccgtttgccgccaccagcttaccggcgctcccagtgaagcaaccgccaatcgcgtggaagaggagcaagtgcatctgtcatggctacgagggaggcctgcggccagtttgctgctgccagtgcggcaatggcggctgcttccagtcaaaatccgtcgaaggccacgatgacggacccccgttttcggatccgacccctgcagcaagtggcatccgcctgtaccggcgccatggtgacggcctgctttagtatgttgcccgccacacagcgtcgaatggcgtagtgtcagtgcttgactgataggtttaccattgcagtgacccctctggatgtgatcaagacccgcttgcaggcacagcagcaggcgctgctctcaaacaagtgtttcctctactgcaacggcctcatggaccacatctgcccctgcggcccggacacgcccaacccagcagccgccaagcccgctccccgtttttctggcaccattgtaagtggtaagcgttgggaaaaccgggacacttaatacttaacccagcctctctccaggacgcattcatcaaaatcagccgcactgagggcatcggctccctgtggtcggggctcagcccaacgctaatctcggccctgccctcgaccatcatatacttcgtggcttatgagcagttcaaggcccgtttcaccgatatccactacaaatacacgcgacgcccggataccattgcccacgacattccacacccgattccatttctggtgccgctg

SEQ ID NO: 34112 - DNA, 1529 bp, DROSOPHILA
ttccgaaaaaccttcgactcagatagcttgtgtgcaacacaagctaaccaaattgttgacgctgctcagggatgtcttccctggagaccggtggtcctgtctagttgcaattaaccaaattgtgaggcgacatctcgccggaaatactcaaatccgattttctaaatcgcctttcaaagcaaatacaaaacgaaaagatgccgccgcagctaatgtcccagatggaaaatggcggcgaggaggaagggtgtcgtttggagtgcaaggaaatggatccgctgcggctaaccacgctgatcctgagtgcggatccacggtatcgcatcaagccaatgcagcaagtcgtgtccgccctcgttggcggtctcatcacgacatttgtggtgacgcccttggaggtggtgaaaacgcgcgtccagacgcagcacgcgatccgccagcgaccgactgtttcgaagctctgctacgtctatcacaacggcctgatgacccacgtgtgccgctccagtgatatctgtgtcccgaaaccaggccgtgatccgcaaaatcttcggccgctacgcggcgccatggatgcctttgtcaagatcgtgtgcacaagtggattcagtggtctgtgggcgggtctaagtcccactttagtttcggccctgccctccacgattatctactttctgacgtacgagtatattaagaattcgctatcccacatctacttggtctcgcagaagtttgaggaatccggcatgaaggaccaagtgcctggagccgacggcggagatcccctggaccaggcaaccaggggaataaatgtgagcgccaccgcaccggtatccaccgcatcgctgccctactacgtgcccatggcctcgggcatttgctcgcgcaccattgtggtcacggccattacgcccatcgaaatggttcgcatcaagatgcagtcggagtacatgacctacgccgagctgtggcgtgtgctgcgctcgttgatccgccagcacggcatcctgggtctttggcggggctggccgcccaccgtgatgcgggacgcacccttctccggaacctattgggcagtctacgaggcgattaagcgggccttcagcgtcacggagccgactttcctctttagcttccttacgggcgccatctccggagcggtggctacctttgtgaccatgccctttgacctgatcaccacgcacacgcagattgagctgggtcaggacgttctgtacgaggagattggagcgggaacaggagcgggaacgggaacaggagcaggagcacgaccaaagacaccgcaaagtgccgtcgccaattccaggccatcggtgctctcgcgaatgcgtcaaatttacaggctgcagggagtgcggggcctctatgtcggggtgatgccgcgcatgctacgtgtggtgcccgcctgtgccatcatgatctccaccttcgaatacagcaagtcgttcttcttccactacaatctggatctccaggaggcagcgaacaacaagaacgattttcgatag

SEQ ID NO: 34113 - protein, 443 aa, DROSOPHILA
MPPQLMSQMENGGEEEGCRLECKEMDPLRLTTLILSADPRYRIKPMQQVVSALVGGLITTFVVTPLEVVKTRVQTQHAIRQRPTVSKLCYVYHNGLMTHVCRSSDICVPKPGRDPQNLRPLRGAMDAFVKIVCTSGFSGLWAGLSPTLVSALPSTIIYFLTYEYIKNSLSHIYLVSQKFEESGMKDQVPGADGGDPLDQATRGINVSATAPVSTASLPYYVPMASGICSRTIVVTAITPIEMVRIKMQSEYMTYAELWRVLRSLIRQHGILGLWRGWPPTVMRDAPFSGTYWAVYEAIKRAFSVTEPTFLFSFLTGAISGAVATFVTMPFDLITTHTQIELGQDVLYEEIGAGTGAGTGTGAGARPKTPQSAVANSRPSVLSRMRQIYRLQGVRGLYVGVMPRMLRVVPACAIMISTFEYSKSFFFHYNLDLQEAANNKNDFR

SEQ ID NO: 34114 - DNA, 3645 bp, DROSOPHILA
tctccggaacctattgggcagtctacgaggcgattaagcgggccttcagcgtcacggagccgactttcctctttagcttccttacgggcgccatctccggagcggtgggtgagggtgagcagtgctctgccacacaccgaaaaccatagctttgcctcgagtgtaatcgagttctggaaacgtcatcccgcaggtggctacctttgtgaccatgccctttgacctgatcaccacgcacacgcagattgagctgggtcaggacgttctgtacgaggagattggagcgggaacaggagcgggaacgggaacaggagcaggagcacgaccaaagacaccgcaaagtgccgtcgccaattccaggccatcggtgctctcgcgaatgcgtcaaatttacaggctgcagggagtgcggggcctctatgtcggggtgatgccgcgcatgctacgtgtggtgcccgcctgtgccatcatgatctccaccttcgaatacagcaagtcgttcttcttccactacaatctggatctccaggaggcaggtacgtactatgtgaaatgtcaatgatgaagcaaggtacataaatgcgagcacttcagttgagcgcattcaattgaatcaattgagtcctaactatgtagttccctacgcaacgcttatttggtttatatttcgttgactaaactatcactatttcttgtaaatcatttgtatttctatggctttatttaacaaactaaagtttactaattaacgtaacgttagtatgtgcaacttaaaaatatcttacatttcatgcgaaggctaaagatagttgcaaattgagtaaaaagaatatgatggtaaatatacttttgaattcaagcgaacaacaagaacgattttcgatagcaccgcgatagcatttccgttccgacttcactgtcgatagcgcccagcggcaacagctgatcgtcgtggaatggaatggaaatggtacaactcggatgagcactgagcacggtgttttcttttgggatccgtaaattatttcacaatgatcggagagcttgactaatagcacagctctgaacatcgtcaacaaacacgccgtagcacacgattcgccttctcatctcatctcacatcaccgtttgccgccaccagcttaccggcgctcccagtgaagcaaccgccaatcgcgtggaagaggagcaagtgcatctgtcatggctacgagggaggcctgcggccagtttgctgctgccagtgcggcaatggcggctgcttccagtcaaaatccgtcgaaggccacgatgacggacccccgttttcggatccgacccctgcagcaagtggcatccgcctgtaccggcgccatggtgacggcctgctttagtatgttgcccgccacacagcgtcgaatggcgtagtgtcagtgcttgactgataggtttaccattgcagtgacccctctggatgtgatcaagacccgcttgcaggcacagcagcaggcgctgctctcaaacaagtgtttcctctactgcaacggcctcatggaccacatctgcccctgcggcccggacacgcccaacccagcagccgccaagcccgctccccgtttttctggcaccattgtaagtggtaagcgttgggaaaaccgggacacttaatacttaacccagcctctctccaggacgcattcatcaaaatcagccgcactgagggcatcggctccctgtggtcggggctcagcccaacgctaatctcggccctgccctcgaccatcatatacttcgtggcttatgagcagttcaaggcccgtttcaccgatatccactacaaatacacgcgacgcccggataccattgcccacgacattccacacccgattccatttctggtgccgctgctggccggcgtgtcgggccgcattctggccgtaacctgtgtaagtcccgtcgagctaatccgcaccaagatgcaatcgcagcgcatgacgcacgccgagatgtttggcaccattcgccaagtggtgcagtcgcagggcgtgctgggcttgtggcgcggtctgccgccaaccatcctgcgcgacgtgcccttctccggcatctactggacctgctacgagtacctcaagagctcctttggcgttgtggagccaacgtttagcttcagctttgcggcgggagcgatatccggatcggtaagactaagacaactgcgctacaaatcaattgtgtcgactgtcggtaacccctcatgtttccccttccaggtggccgccaccatcaccacgcccttcgatgtggtgaaaacgcacgagcagatcgaattcggcgagaagttcatattctcaggtaggcccaatgtggttcagcttgctgcaaccaactcccgtagcagcattgacaatggttcggtttgcattacggcagataatccacccaagcaagtggccaccaagtcggtggcgatgcgcctggccagcatttaccgcatgggcggtgtgcccgccattttctctggactggggccccgactcttcaaggtagcgcccgcatgtgcgataatgatttcgtccttcgagtacggcaagtcattcttctatcactacaacatcgaccagcacaatcggagcaatcaggcgacaaaggggcccggctcctgaacgcgctcccaatgcggtgaccacagcatgtcgacgtgaatctttgtacatatgtagattaatgccaaagttgccaggaaatcggtgggcaggtgggaaatcgtctgctgctgggtttggcgagccccattcgaaattgttaaattgtagtgaaataaaattcttgtttttcttggttcgaaaacaaacatgagcttacttatcaactttgcttttgagcttcgaattctaataatctgtatttgatttcaacaaatttacgacgcacattaaacaatattgtgtactttgttcctagtttaacgaaatatttaatttttgctattggaaaatcaaaacgatgttgttacaataaaatcgcaaaataagcaatgtaactgtttgttggagaaaataataattcctattaaaaccgaaatagggaacatgtgaaaagataatactatctataagtttacacatttcgtttctgtgtatgccgtagaatttaccttcgactcacaagataagatgtagttttacacatctttatagtcaagtggcaagggtagataggttggggtaaggacgattagagtgttaaacaaatgttttcctagtcatagaaaatacatatatttgaaatcataaaagacgagcttttatcttcggttagcaacactcgtgtgcaccaaagcatttgaaacgtttatgaaatggcgcccaatgacttgtaatcgaaagcaacaccccgatcaccgatggctttcacaaacatatgttgcgtgctatcgatagacggtggaaacaacacgtgcactcgtgttttgtatttgtgttgtttgcatttgatttcatattagactaaaccgaacgcaaaatgagtgaatccgcaccggaaactgtgccagccaagaagccggcaaaggccaagaaggcggcaaagccggagaacagcataccacgcggccagcccaagtcgaaccggccgtggaagacgcccaagcagaagtaagtggtg

SEQ ID NO: 34115 - DNA, 1445 bp, DROSOPHILA
ttttcttttgggatccgtaaattatttcacaatgatcggagagcttgactaatagcacagctctgaacatcgtcaacaaacacgccgtagcacacgattcgccttctcatctcatctcacatcaccgtttgccgccaccagcttaccggcgctcccagtgaagcaaccgccaatcgcgtggaagaggagcaagtgcatctgtcatggctacgagggaggcctgcggccagtttgctgctgccagtgcggcaatggcggctgcttccagtcaaaatccgtcgaaggccacgatgacggacccccgttttcggatccgacccctgcagcaagtggcatccgcctgtaccggcgccatggtgacggcctgctttatgacccctctggatgtgatcaagacccgcttgcaggcacagcagcaggcgctgctctcaaacaagtgtttcctctactgcaacggcctcatggaccacatctgcccctgcggcccggacacgcccaacccagcagccgccaagcccgctccccgtttttctggcaccattgacgcattcatcaaaatcagccgcactgagggcatcggctccctgtggtcggggctcagcccaacgctaatctcggccctgccctcgaccatcatatacttcgtggcttatgagcagttcaaggcccgtttcaccgatatccactacaaatacacgcgacgcccggataccattgcccacgacattccacacccgattccatttctggtgccgctgctggccggcgtgtcgggccgcattctggccgtaacctgtgtaagtcccgtcgagctaatccgcaccaagatgcaatcgcagcgcatgacgcacgccgagatgtttggcaccattcgccaagtggtgcagtcgcagggcgtgctgggcttgtggcgcggtctgccgccaaccatcctgcgcgacgtgcccttctccggcatctactggacctgctacgagtacctcaagagctcctttggcgttgtggagccaacgtttagcttcagctttgcggcgggagcgatatccggatcggtggccgccaccatcaccacgcccttcgatgtggtgaaaacgcacgagcagatcgaattcggcgagaagttcatattctcaggtaggcccaatgtggttcagcttgctgcaaccaactcccgtagcagcattgacaatggttcggtttgcattacggcagataatccacccaagcaagtggccaccaagtcggtggcgatgcgcctggccagcatttaccgcatgggcggtgtgcccgccattttctctggactggggccccgactcttcaaggtagcgcccgcatgtgcgataatgatttcgtccttcgagtacggcaagtcattcttctatcactacaacatcgaccagcacaatcggagcaatcaggcgacaaaggggcccggctcctga

SEQ ID NO: 34116 - protein, 413 aa, DROSOPHILA
MATREACGQFAAASAAMAAASSQNPSKATMTDPRFRIRPLQQVASACTGAMVTACFMTPLDVIKTRLQAQQQALLSNKCFLYCNGLMDHICPCGPDTPNPAAAKPAPRFSGTIDAFIKISRTEGIGSLWSGLSPTLISALPSTIIYFVAYEQFKARFTDIHYKYTRRPDTIAHDIPHPIPFLVPLLAGVSGRILAVTCVSPVELIRTKMQSQRMTHAEMFGTIRQVVQSQGVLGLWRGLPPTILRDVPFSGIYWTCYEYLKSSFGVVEPTFSFSFAAGAISGSVAATITTPFDVVKTHEQIEFGEKFIFSGRPNVVQLAATNSRSSIDNGSVCITADNPPKQVATKSVAMRLASIYRMGGVPAIFSGLGPRLFKVAPACAIMISSFEYGKSFFYHYNIDQHNRSNQATKGPGS

SEQ ID NO: 34117 - DNA, 2486 bp, DROSOPHILA
ctggggccccgactcttcaaggtagcgcccgcatgtgcgataatgatttcgtccttcgagtacggcaagtcattcttctatcactacaacatcgaccagcacaatcggagcaatcaggcgacaaaggggcccggctcctgaacgcgctcccaatgcggtgaccacagcatgtcgacgtgaatctttgtacatatgtagattaatgccaaagttgccaggaaatcggtgggcaggtgggaaatcgtctgctgctgggtttggcgagccccattcgaaattgttaaattgtagtgaaataaaattcttgtttttcttggttcgaaaacaaacatgagcttacttatcaactttgcttttgagcttcgaattctaataatctgtatttgatttcaacaaatttacgacgcacattaaacaatattgtgtactttgttcctagtttaacgaaatatttaatttttgctattggaaaatcaaaacgatgttgttacaataaaatcgcaaaataagcaatgtaactgtttgttggagaaaataataattcctattaaaaccgaaatagggaacatgtgaaaagataatactatctataagtttacacatttcgtttctgtgtatgccgtagaatttaccttcgactcacaagataagatgtagttttacacatctttatagtcaagtggcaagggtagataggttggggtaaggacgattagagtgttaaacaaatgttttcctagtcatagaaaatacatatatttgaaatcataaaagacgagcttttatcttcggttagcaacactcgtgtgcaccaaagcatttgaaacgtttatgaaatggcgcccaatgacttgtaatcgaaagcaacaccccgatcaccgatggctttcacaaacatatgttgcgtgctatcgatagacggtggaaacaacacgtgcactcgtgttttgtatttgtgttgtttgcatttgatttcatattagactaaaccgaacgcaaaatgagtgaatccgcaccggaaactgtgccagccaagaagccggcaaaggccaagaaggcggcaaagccggagaacagcataccacgcggccagcccaagtcgaaccggccgtggaagacgcccaagcagaagtaagtggtgtttctccattgtgcattgtgcattgtcatctaatcaattggcttcgcctgcagatttagcaagattaagaagaccgttaaccgactgtccttcgaaaagaagacggccctgcgcgacgagctgcgctacatcaaggagcgctccaaggagatcaaggacaagcgcaaggaggatgccgtccaaaagcaccagcgccgcgtggagaatgccgagcgccggctggcgaacgagcgccgctcggaggtcgtccaggtcatcaagaatcccgccaagctgaagcgcatgaagaagaaacagatgcgcatgatcgagaagcgggacgtcagccaggtgaaggtggtctgaggtggctccattagattaacttgtattttttgataaataaatctagttttaatgccaagaaagcgttttgtaacacatatgtatgtatgtatttaggtcgctacgtacacaattgtgtggcatacaaacgaatttagcttatcttagcctagtttaacaaatttacatagtaatccaaggcgtcgccctcaacatcgccgtctatctgtttgccgccgatctctgtgcggaatttggtcaatatatccttgcgcctactgttcagtgtttggcccgccaagcgcttgtcctccccttgtctcagtccatcgagcaacgccccaatgcgcgtccgcaggagcaaatccaggcggtgcaccagagactgatcttgtcgtagtcctcttgctaccgccggtggcaagtccaacgtcgtctccattgcgggcaaatcgagcagagatgcaataaaagcaagcaacgcagatcccgtggtatccatatcgaggccattaagtgtgagactgttgcgttcccaggcttccgaagtgtctggcacctctagacgctcgttcatctgccgcaccacgtccaccggcactcgagtggcatcgctcctaagtgagtttgcctgcagacaggagtccagcgaactggccatgtatatctgtccgaagatgcagccagagtctcgacacagctggtagagcttgtagcgcatgctgcggtaatagaagttatcgtcgcacaggatcagatgccttccgctgttgtagtcgccgctggaggaaatgcggcggacttgaggcggccaatcggtgtcttcttgaatggcggaaatgagtttttcaattactttaaaaatgcggccgcgctgctccttgtaggccaggtcggccgagggggtagcgtcgaggaagtcgtcgtagcacagatgaacgatgtggcggacgcggagggcagcctgttgacccagcagccaggagcacagcgaggatttgccggctgctggcaggccgat

SEQ ID NO: 34118 - DNA, 423 bp, DROSOPHILA
atgagtgaatccgcaccggaaactgtgccagccaagaagccggcaaaggccaagaaggcggcaaagccggagaacagcataccacgcggccagcccaagtcgaaccggccgtggaagacgcccaagcagaaatttagcaagattaagaagaccgttaaccgactgtccttcgaaaagaagacggccctgcgcgacgagctgcgctacatcaaggagcgctccaaggagatcaaggacaagcgcaaggaggatgccgtccaaaagcaccagcgccgcgtggagaatgccgagcgccggctggcgaacgagcgccgctcggaggtcgtccaggtcatcaagaatcccgccaagctgaagcgcatgaagaagaaacagatgcgcatgatcgagaagcgggacgtcagccaggtgaaggtggtctga

SEQ ID NO: 34119 - protein, 140 aa, DROSOPHILA
MSESAPETVPAKKPAKAKKAAKPENSIPRGQPKSNRPWKTPKQKFSKIKKTVNRLSFEKKTALRDELRYIKERSKEIKDKRKEDAVQKHQRRVENAERRLANERRSEVVQVIKNPAKLKRMKKKQMRMIEKRDVSQVKVV

SEQ ID NO: 34120 - DNA, 3867 bp, DROSOPHILA
tttcgggcgctactgggttgatatcgtatcaattcatatctatatgttccagtcgtacaggctgcgtgtacggtatgaccgactttttgttgacgtccctggataaggcctttctcatgtctgcaaagtgggtaaagcatcgattgttaggcgcctcttagaagtcaatgcaaattctgtgcgctctcaccgtacgcatcctcgtcctggtcgccggagtagtactcaagtatggtgcggtatatgatgtagccaaggttcgtgtacatgtttattgccacctggttgctcttcctcacaaaaagatccacaaagtatgctcgctttctgggggcgagaaaaagtagtcgtttagtctgtattgatatccaacgaattggggctggaattacttctccgaaatgtcctccaggaaactcatgagcagcgcagccagaccaaggcgccggtagtcgggcgagacggtcagcgcagtcacgtgtccgtgccagttgtccaggtgtccctccaccttgcccatgactagagaatgtagagcacacttgataggggaactcgtgcacacagtgaaatgcagtacttactgtagcccattatttgtccgctgggcgactccgcaagctgaaagtactccggccacttggccaggtactgggtgtagaaggacagcccgtaggtctccgtaagtgggtcaaagtttctggcggagcacacggcggtattggtattagcctcggatatgcgcatgtggatatccactgtactcacacattgttgaacttaaagaggtcgtcgcaggtgaagggtcgcaacgtggtcatcttatcacttaatctcggctaatccgatcctttttattgctcctataaaattgctatactcgccggcaatagagatgcgccgcggtcgatggcaagttatcgatagcctggaagcgagctttcccacaaatcggttaccgcgcaatgcagccgcggtcacactactagcacttccatttccacgctaggtcctgtcctcgctcttcttcttcctctgcctccagctggtatctgttgcctggccatggaacagtctcagtctcaacggcaggcgtggccttcgtcctccgcggggggtggcaaggcccaggactccggggtgctgacgcgcgaggacttcgacggcggaccggtcagcatcgacgaggtggacacaggcctgtttctaggtaagcatatagctctaatccttgtgatcgatgcatttctcaacccttccttacaccaccaggcaacctgaccgcggcgacgcacatggagacgctgcgctccttcaagatcacccacatcctcacgctggattcggtcccgctgccgcagcacattctggaggccagctttctgaccaccaaatatatacagagtaagcacacagatcggtagcttcgtgaatgtgcaacaacttcactggcgttaatccctgtttcagttgccgacatgccgcgcgaagatattctgcagcatctggagggctgcgttgactttatcagctcggccctggcccagcagggcaatgtccttgtgcactggtgagcatcttacctaggctgaccggcccacgatttggccactgactctttgtgccttccaacagctacttcggcgtcagtcgcagctcatccactgtgatcgcttacatgatgaagcgacacaatctggacttcctgcccgcctacgagctggtcaaggccaaacggcgcttcgtccagccaaacgctggctttgtcagccaactaaagctcttccggcgcatgggctgcaagattgaccccaactgccagcgctacaagatccatcgcctgcgcctggctggcgagcagatgcgcaaggccaagatcctgccgcaaagcttccacagcgtggtccgtccggatccagatataacgcgcgagaacccggagcccatagtgttccgctgtcgtcgttgccgccgcgtcctcgcctccaagtcgcatgtactggagcacaagccgcgtgacaggccgccgcaggaggtggtacccaaggagaaagaagaagtcgctgcagctaagctgccggctcagtcacatgatcaggccgaaaatcatcatggtgctcgcatgctggagcagctgtccgagcgcatccgccagtcatcactcggttcacccggccacgaaagcacgccaaactattgccgcagcatactgtttgtggagcccatcgcctggatgcaccgcatcatgctgaacacccagggccgcctgtactgtcccaagtgcgagcagaaattgggaaactttagctggatcaacggttggctatgctgctccaccagccgataatcccgccccccactcattcctcctaatttattgcagcctgcaagtgtccgtgcggggagacgatgacgcctgcattttatctgataccttccaaggtggagctctcgaaggccgtgcagaacgtgcagaccacggtttaggtgcagcgtgctggaaatagagcgagatggcatcatcagagacgggacaattggactcccttgtcggctggcaaagaacggcaatcgcccacctaaacaaaaagcaatggaggcttggattgattgatcagtgcttatcagtgctggccaacattgatgtcctacatatatacatatatgggcattaagttatgtttctatgggtcattggagaagttgggcttcggttacgctgttgaaacataagttaattggtcccattgctgaatagctcctccaccaagctgagatttttgaaacgcaagcagttagcttagttagttccctcttgggaatccgatctcgtatcggatataaactgattgccaggtttacaatatcaaaacttccgcgcgaagcaaacgtaatttaatcacaaactaacttcggattccatttggtcagtcagtaaatatttactcaattcttaagaataagaaataatcacagagtatctcatccgatcgcaacattgatatgtgaatccccaaaagctgaaagagatacgttgattgtttccagtagtggtatatggtatattgtttcattttatatagttagccaatgaattcgcccatgtagctaaattatacacttacttatgtacgtgcgatatagtgcacccatatttgttggaagccatacaagtatgtatattgatctttgctgttccatatgcatttgcatagctttttgcatgttaccaacacacacacacacacacaaactatgaatgtattttagatatttaaacctttttggaaaatattttatgcaacggaaaacgaaacaacatttttcaatgacaatatctaaaacttatgcgatatacatacatataatacacacattatattataattacaacattgtcggccaaacggacacgtcggtcgcatggtcgatggaacgaagatcccccccagcttccatgggacttcgtgcaccttcggatattggcgctaccttatcgatattgatgtgctttgttcacccatatctactgtactgtttaaacgagtgtgtgcattgatattaaagtcaaattgtttgttttccacaccaaaatgtttgcaatttcgagaagcctccggttgagccgttgcctttcgcccttcggacgcggtctgagcgcatccagttcgcctggaccgcgcaccctagtcgccatcgacttcgacaggaccatcgttgagcaggactcctatttggcggtgagccaactactgccgaccagtcagcgcaaggagctgcaggaccagatccccaagtgcggctggctgagcttcataagccaagtgttgcagcgcctgcatggcgagcacaaggtgaactccgcgt

SEQ ID NO: 34121 - DNA, 1609 bp, DROSOPHILA
ccacgctaggtcctgtcctcgctcttcttcttcctctgcctccagctggtatctgttgcctggccatggaacagtctcagtctcaacggcaggcgtggccttcgtcctccgcggggggtggcaaggcccaggactccggggtgctgacgcgcgaggacttcgacggcggaccggtcagcatcgacgaggtggacacaggcctgtttctaggcaacctgaccgcggcgacgcacatggagacgctgcgctccttcaagatcacccacatcctcacgctggattcggtcccgctgccgcagcacattctggaggccagctttctgaccaccaaatatatacagattgccgacatgccgcgcgaagatattctgcagcatctggagggctgcgttgactttatcagctcggccctggcccagcagggcaatgtccttgtgcactgctacttcggcgtcagtcgcagctcatccactgtgatcgcttacatgatgaagcgacacaatctggacttcctgcccgcctacgagctggtcaaggccaaacggcgcttcgtccagccaaacgctggctttgtcagccaactaaagctcttccggcgcatgggctgcaagattgaccccaactgccagcgctacaagatccatcgcctgcgcctggctggcgagcagatgcgcaaggccaagatcctgccgcaaagcttccacagcgtggtccgtccggatccagatataacgcgcgagaacccggagcccatagtgttccgctgtcgtcgttgccgccgcgtcctcgcctccaagtcgcatgtactggagcacaagccgcgtgacaggccgccgcaggaggtggtacccaaggagaaagaagaagtcgctgcagctaagctgccggctcagtcacatgatcaggccgaaaatcatcatggtgctcgcatgctggagcagctgtccgagcgcatccgccagtcatcactcggttcacccggccacgaaagcacgccaaactattgccgcagcatactgtttgtggagcccatcgcctggatgcaccgcatcatgctgaacacccagggccgcctgtactgtcccaagtgcgagcagaaattgggaaactttagctggatcaacgcctgcaagtgtccgtgcggggagacgatgacgcctgcattttatctgataccttccaaggtggagctctcgaaggccgtgcagaacgtgcagaccacggtttaggtgcagcgtgctggaaatagagcgagatggcatcatcagagacgggacaattggactcccttgtcggctggcaaagaacggcaatcgcccacctaaacaaaaagcaatggaggcttggattgattgatcagtgcttatcagtgctggccaacattgatgtcctacatatatacatatatgggcattaagttatgtttctatgggtcattggagaagttgggcttcggttacgctgttgaaacataagttaattggtcccattgctgaatagctcctccaccaagctgagatttttgaaacgcaagcagttagcttagttagttccctcttgggaatccgatctcgtatcggatataaactgattgccaggtttacaatat

SEQ ID NO: 34122 - protein, 387 aa, DROSOPHILA
MEQSQSQRQAWPSSSAGGGKAQDSGVLTREDFDGGPVSIDEVDTGLFLGNLTAATHMETLRSFKITHILTLDSVPLPQHILEASFLTTKYIQIADMPREDILQHLEGCVDFISSALAQQGNVLVHCYFGVSRSSSTVIAYMMKRHNLDFLPAYELVKAKRRFVQPNAGFVSQLKLFRRMGCKIDPNCQRYKIHRLRLAGEQMRKAKILPQSFHSVVRPDPDITRENPEPIVFRCRRCRRVLASKSHVLEHKPRDRPPQEVVPKEKEEVAAAKLPAQSHDQAENHHGARMLEQLSERIRQSSLGSPGHESTPNYCRSILFVEPIAWMHRIMLNTQGRLYCPKCEQKLGNFSWINACKCPCGETMTPAFYLIPSKVELSKAVQNVQTTV

SEQ ID NO: 34123 - DNA, 2214 bp, DROSOPHILA
atggaggcttggattgattgatcagtgcttatcagtgctggccaacattgatgtcctacatatatacatatatgggcattaagttatgtttctatgggtcattggagaagttgggcttcggttacgctgttgaaacataagttaattggtcccattgctgaatagctcctccaccaagctgagatttttgaaacgcaagcagttagcttagttagttccctcttgggaatccgatctcgtatcggatataaactgattgccaggtttacaatatcaaaacttccgcgcgaagcaaacgtaatttaatcacaaactaacttcggattccatttggtcagtcagtaaatatttactcaattcttaagaataagaaataatcacagagtatctcatccgatcgcaacattgatatgtgaatccccaaaagctgaaagagatacgttgattgtttccagtagtggtatatggtatattgtttcattttatatagttagccaatgaattcgcccatgtagctaaattatacacttacttatgtacgtgcgatatagtgcacccatatttgttggaagccatacaagtatgtatattgatctttgctgttccatatgcatttgcatagctttttgcatgttaccaacacacacacacacacacaaactatgaatgtattttagatatttaaacctttttggaaaatattttatgcaacggaaaacgaaacaacatttttcaatgacaatatctaaaacttatgcgatatacatacatataatacacacattatattataattacaacattgtcggccaaacggacacgtcggtcgcatggtcgatggaacgaagatcccccccagcttccatgggacttcgtgcaccttcggatattggcgctaccttatcgatattgatgtgctttgttcacccatatctactgtactgtttaaacgagtgtgtgcattgatattaaagtcaaattgtttgttttccacaccaaaatgtttgcaatttcgagaagcctccggttgagccgttgcctttcgcccttcggacgcggtctgagcgcatccagttcgcctggaccgcgcaccctagtcgccatcgacttcgacaggaccatcgttgagcaggactcctatttggcggtgagccaactactgccgaccagtcagcgcaaggagctgcaggaccagatccccaagtgcggctggctgagcttcataagccaagtgttgcagcgcctgcatggcgagcacaaggtgaactccgcgtcggtgggcaagcgtgtgcgcagtctcacagccgtgcctggaatgctgcgggtgatgcgccaattagccaggatccctgagctcgaactgtgcatcgtcagcgacgccaactccttcttcatcggcgagtggctgcaggcgtacgccattgagtgcctctttgccggcggcgtgttcaccaatcccgcatgcgtccaagcgagcggcgaactgctggtgctgccctaccaagagcagactgactgcgatctctgcccctccaacatgtgcaagggctccgtgatggacgagctgacgtgcagcgggcgatacgagcgcttgatctatgtgggcgatagttgcaacgatctgtgcgccattaagcggctgcggcaaaaggatgtcgcctgcatccggcgcggattcgagctgcacggtaagatgaccgcccatggccaggaactggcctgctccgtgctcacatggcgcgacggccacgagctggaggagctcctgatgcccaaaatcgtggcgtagagtttgtggtaaggccaggttattaatgctgctgttttattcgacttaaaaataaatctttcagtatgtatacataagaataattccacttaatatgaaggacttaagatttacttttcgcataaagtggattacccagctctctccagccgaggtttgcagctgggcccgtctgtggatccactctgtcttaagtagatcgaaaacttagagctacctatcctgcggcggtattagaactgttgcctaacaatatttcacacatggttcttccacacttccacttcctcctacctaatcctcgctagccacatctgtatctgttcttgtgctttaatcttatagctacagctagtatatctatatatatatatatacatatatatatgtatatataaatatatatgtttgtttgtgtgtgtgtg

SEQ ID NO: 34124 - DNA, 789 bp, DROSOPHILA
atgtttgcaatttcgagaagcctccggttgagccgttgcctttcgcccttcggacgcggtctgagcgcatccagttcgcctggaccgcgcaccctagtcgccatcgacttcgacaggaccatcgttgagcaggactcctatttggcggtgagccaactactgccgaccagtcagcgcaaggagctgcaggaccagatccccaagtgcggctggctgagcttcataagccaagtgttgcagcgcctgcatggcgagcacaaggtgaactccgcgtcggtgggcaagcgtgtgcgcagtctcacagccgtgcctggaatgctgcgggtgatgcgccaattagccaggatccctgagctcgaactgtgcatcgtcagcgacgccaactccttcttcatcggcgagtggctgcaggcgtacgccattgagtgcctctttgccggcggcgtgttcaccaatcccgcatgcgtccaagcgagcggcgaactgctggtgctgccctaccaagagcagactgactgcgatctctgcccctccaacatgtgcaagggctccgtgatggacgagctgacgtgcagcgggcgatacgagcgcttgatctatgtgggcgatagttgcaacgatctgtgcgccattaagcggctgcggcaaaaggatgtcgcctgcatccggcgcggattcgagctgcacggtaagatgaccgcccatggccaggaactggcctgctccgtgctcacatggcgcgacggccacgagctggaggagctcctgatgcccaaaatcgtggcgtag

SEQ ID NO: 34125 - protein, 262 aa, DROSOPHILA
MFAISRSLRLSRCLSPFGRGLSASSSPGPRTLVAIDFDRTIVEQDSYLAVSQLLPTSQRKELQDQIPKCGWLSFISQVLQRLHGEHKVNSASVGKRVRSLTAVPGMLRVMRQLARIPELELCIVSDANSFFIGEWLQAYAIECLFAGGVFTNPACVQASGELLVLPYQEQTDCDLCPSNMCKGSVMDELTCSGRYERLIYVGDSCNDLCAIKRLRQKDVACIRRGFELHGKMTAHGQELACSVLTWRDGHELEELLMPKIVA

SEQ ID NO: 34126 - DNA, 3582 bp, DROSOPHILA
acgggcaacactcgactctcggccgcagtaggcactactcgcacgcacacatcggcggtgcacacgcatgcacacacacacacacaacagcaacagaacggcacacacacacacacgctcagtcgtacgcacacaaaggcagcgacacagagacaagcgcaacgagctctctcagtcgccgttgtcccactttccgtgtattggtttcgattcgtacacttttccacgcacttttaacgattcaaattcgatggtacagaaggcagggcgacacgagagtgcattggaaactggcgcaaacctcaaaaaaatatatccaacacgctggccgcacgcacgactcgtatgcagactggttctcggcgcgcgtcgaacgttcttatgcattcattattgaacggaatgctctgtttcgcctgtctgcttatgtttttttcttttcgattccgaggtactcgtcacgacaaatgaaaatcagtgtggccgttttgcggctgtcagctagatacccggctggcggggaatgtgctaagaaataccacaaaatcgacggggatagccgggatacaaaccagtcggtgcacttgactaccgctaaatgcgtctttactaaattgcatttttagcttttagcatgcaaattatgaactataacctaattaaaatacccattatggttattacttttgatcaatgtaatcatcggtcattcgcaatcacgcgctcacgtccattcattatttctttgcaatgtcatcctttttcaaagatatcaagcctattttcttcaaaattgtagacttttgcattttgcaccaacaaagcatgcgcaagcagttgtatttggcaaatcatgtttgatttcattcagactttgtgttttcgtacggcgggaagtttctctgaaaatttaaatttatgtacatatttacatcgacgctggaaaacaaatagcgcgcttgcgtttcaccaatttccagcggcatttgcgcggttctggccacactgttcggcacacaacataatcctggttgtcgccacttgttttcgatcattttagacttaaaccaatgcaaaaggaatttcctgctaacgttatcgataatcgcaatagacgccaaatcgccagttttacctcttcctttttcgcaggccccgttccgttcagcgaattctcgcccgagctaagtctattgcaagcgtccggctatagaaatcgacgacaaatcgctagttccacctcttccttttcgcaggccccattccgttcagcgaactctcgcccgatctaagcgtccggcgataggaatccacctcttccttttcgcaggtcccgttccgttcagcgagttctcgccgacactaagtgcattgcaagcgtccggcgacagttcttacccagatcttgtcaagttaacacgatgagtgctcaaccgagtccgcatatgaatcctcagcagcagcagcagcagcaacagcagcagcagcagaccgagcaggagaaggtaagccgatgtcggcaagaacgcgtgctagctttaacttatcgcccgccaggtgtaccagtggatcaatgagctggcccatccggacacgcgtgaaaccgctctgctcgagctaagcaagaagcgtgagacggacctggcccccatgctgtggaacagcttcgggaccgcctgcgccctgttgcaggagattgttaacatctacccatcgataacgccgcccactttgacggcccaccagtcgaaccgcgtgtgcaacgccctggcgctgctgcagtgcgtcgcctcgcacccggagactcgcacggccttcctgcaggcccagataccgctgtacttgtaccctttcttgtcgaccacgtccaagaccaggcccttcgagtacttgcgcctgaccagtttgggcgtgattggtgctctggtcaaggtaggttaagccgaaggccagtggtcatctaatgcactaatgcacttgttgtcttcttattactgctatcgacagaccgacgaacaggaggtgatcacctttctgctgaccaccgagatcgtgcccctttgtctgagcatcatggacagcggatcggagctgagcaagactgtggccactttcatcatccagaagatcctgctcgatgagtcgggtctgtcgtacatctgccagacctacgaacgcttttcgcacgtggccatcaccctggtgagtgtccgtttcccgaagccttatgcattgtctaagggtctttatcgatttcagggcaaaatggtcatccagctggcgaaggatccatgcgcccggctgttgaagcatgtggtgcgctgctatctgcgtctttcggacaatacacggtaagtcttggcgggcgagtaaattatcgctcggcttttcagtctagccttgactctttcagcgctcgcaaggccctgggacagtgtctgcccgatcagctgcgtgacggcacctttgcgctgtgcctgcaagaggacaagtcgaccaagcagtggctgcagatgctgctcaagaacctggaactcggcgccactccgcagcagatcggcatgtcgccactgggctcctagggagtggaagcgacagcacacccagcactatattatcaattctaacgtccaaccatcgatgatgaataatccacgctgttaattacatagctgctcgaccgaatatacataaacatgcatacatacatacatacatatttcataagcgtgcacgagattgcctgtgtcgacttaagcggagctgtaatatacctacataaattacaaataaattaatgttaatactaagattgtcactgacacccaataaagaacctcgagcagacgatacgatataaatatttatgcgtgtttgtttttttttttaatatcaatattctaacagaggatattaacaatcccgcaaaagttcataatcatcttttcgctgcatacttttgggctactgtccggatttgctatatttgctatttgctgtgtatatttgatagtagggggtgtccccgaacgaatcttataggttctatatacatatgtaagttctgaccatcacaatcaatcactctactgaatgcaaatggctcatcctgcgaggtgtgtaaacaaaagtcgagaaaattgcgcagaaagcgcatctgctgctatccccgtcccgctcctggccacgcagctggcatgctgctgtcccgctctaggtcgcgtggtgtgcaccaagagcacccagtgctccagaccagcccagcccaacccaggaaaaaaaggtagtgcagcgggtgcagtaacggcaaaacacacattcaaatgcatataatatggacactcatatacagcgcttgcaatagcttcaattacaacaggtttaaatatagacacatggaataaacactaacagccgcagcacaaattgacgcctcaagtcctgggcacacctccgaagttgtactgtttggatttccacaaattgttttgcaggtaaagtcccggcacacagatataaatacagatccacccagtacacttggcacggccagtgcagcgaagtggcgagcggatcaaataa

SEQ ID NO: 34127 - DNA, 1336 bp, DROSOPHILA
ccacactgttcggcacacaacataatcctggttgtcgccacttgttttcgatcattttagacttaaaccaatgcaaaaggaatttcctgctaacgttatcgataatcgcaatagacgccaaatcgccagttttacctcttcctttttcgcaggccccgttccgttcagcgaattctcgcccgagctaagtctattgcaagcgtccggctatagaaatcgacgacaaatcgctagttccacctcttccttttcgcaggccccattccgttcagcgaactctcgcccgatctaagcgtccggcgataggaatccacctcttccttttcgcaggtcccgttccgttcagcgagttctcgccgacactaagtgcattgcaagcgtccggcgacagttcttacccagatcttgtcaagttaacacgatgagtgctcaaccgagtccgcatatgaatcctcagcagcagcagcagcagcaacagcagcagcagcagaccgagcaggagaaggtgtaccagtggatcaatgagctggcccatccggacacgcgtgaaaccgctctgctcgagctaagcaagaagcgtgagacggacctggcccccatgctgtggaacagcttcgggaccgcctgcgccctgttgcaggagattgttaacatctacccatcgataacgccgcccactttgacggcccaccagtcgaaccgcgtgtgcaacgccctggcgctgctgcagtgcgtcgcctcgcacccggagactcgcacggccttcctgcaggcccagataccgctgtacttgtaccctttcttgtcgaccacgtccaagaccaggcccttcgagtacttgcgcctgaccagtttgggcgtgattggtgctctggtcaagaccgacgaacaggaggtgatcacctttctgctgaccaccgagatcgtgcccctttgtctgagcatcatggacagcggatcggagctgagcaagactgtggccactttcatcatccagaagatcctgctcgatgagtcgggtctgtcgtacatctgccagacctacgaacgcttttcgcacgtggccatcaccctgggcaaaatggtcatccagctggcgaaggatccatgcgcccggctgttgaagcatgtggtgcgctgctatctgcgtctttcggacaatacacgcgctcgcaaggccctgggacagtgtctgcccgatcagctgcgtgacggcacctttgcgctgtgcctgcaagaggacaagtcgaccaagcagtggctgcagatgctgctcaagaacctggaactcggcgccactccgcagcagatcggcatgtcgccactgggctcctag

SEQ ID NO: 34128 - protein, 304 aa, DROSOPHILA; identical to SEQ ID NO: 28683

SEQ ID NO: 34129 - DNA, 2992 bp, DROSOPHILA
tatgccacgaatggtgtccctaatgcgcgcctccgacacctgttgctcgtgcagcaagcgaaacacctcggccatgtactccgtccagcagtcgttttcaaccagctcgttgaccttggcgctcgtcacctccgtgggcagcaggtcgcgcaccacggtgtccgtgttctgggaaacgatcgtgtggtcgaagtcgaaggccgccagtcgacggcgctgctgtttccttagcctgcagctggccacggccgcggccactgcggcgggtgactgctcctggttcgaggacatcgtgtgctccgctcctgctccggctatggatgcgctcagagcgcgcggagagcaagttcgagtgcgagttttgtgcgaggaccagtgtgtccgcgccgcccacgatgctaaatgccaggtcgcctgggcgcaaacaccgttgtgcgtgcgcttggatgtgcaaaataccgattatataccacaaaaatgcaatagtgcaagtcctgtcttgttcttattattatctctatttctaattggaattaggttttgcttcaatataaatataatgttgttaatataatatgttgttgtaaatattatatttgattaaaaatgaaataatataacgcgctctattagttcgattaaatctgtagttctttgtttgaaattcatccagttaccttacttatgtaaagattggtgtgaagcattaaagcattgtgaactcacattttttcaactagttaacgatataatatggttactccccaacgagtaaaaatagttaaggaatgtgaacaaaaattcaactttgaatataataaaattaggctacaaattagctaacgtttggagcattccaaagctttcatagcatccagctgcaaaatagccaagctggcatccctgccaccactgacagctcggccccagtgtagcgtagccctggcgtttgacagccgacgtggagctgtcatcggcaaacacatacgaataacggggtctacgcggcagtcgacgattgtatctcatttagttggaaattctgaattaaagcggaggtatgtgtgtttgcttatttgattttcagctgcgctcgcacagtttttcaattaaaatggtttgaatggctatcaagcacacgcagcagaggtttatttgccctgcgcgccgttctttgcctgtggaccttgcactttttcccgtttctttaccaaatcctgctgatttggtgaatcgaagcgattgggttggtggtggcacagacattaatggtgatcttcagccactgacccctgttggagctgtgatagctggataacttgttgggcgaatttgtggaaatgggcaacgcgatttcacctgtgccgtcgccaaccatttgccacgtcgcagctgacgttgctgtgaaagcgctgaataccttttactgattagcactttccttcgctttcgttgcagaatcccaaatatctgacaagacatggacaaggttgttaagtttgccgagcctggacgcgccttcgccaaggactcgatccgcctggtcaagcggtgcaccaagcccgaccgcaaggagttccagaagatcgccatcgccactgctgtgggcttctgcatcatgggcttcatcggcttcttcgttaagttgatacacatccccatcaacaatatcatcgtgggctcttaaatgcgctgagtggcaaggaaaccaccaatcatccaatcatccattatagcatacatcagatcaacgtctttttttttcgtttagttaacatgcattatatgtatggaccatgtgcattcagcgaatgcctttctaacaaaattctacacaaacgtacgaaaacgtattgtaatgtttcgatattccattcatgaacaagttagttaataagattcaaatgtaaaaaggaatcacccgtcttcatagcatttgtttggggtgcgcatccccgctaataaatgttaaattgattttccgtgtacaaatgagattcttttaactctgagagacgcaacgttacattgcttgaagaaagtaaagttgtaaatgaagctgataaaccgacatcatcattagaaccaagaataaatgtccagaaaacgtacaagcaatattttgtttaaagctcgttagcctatatttcgtaaatatttaatacctatatattacagaataataatcaagagtatgttagtacgcgtaaccagtaaagcgccgaagcgtacatatttccatcttccgggactgccctcgagtctacgagcctgtcggcctattatcgcacaggttgctccagtcgggaacgtgctcgctctttagatacgtctccttgaccagcgatcgtgtctggatgagatccgtcgcgccgcacaaggcgccgcccagccaggcagtaaagttttgcttgccgacagcattgaaaaacttgaactgcagctcgccatggaagcgttcggcgtagaacggatcctcggtgagcagatgctgcagctcctggcggaggcgggccagcagaccctggaccattgagccgccgcccacgaggaacacactctcgaccagggcacgtcgcacgtctagtgtgcagtcgagaatggagcgcaggatgagatgcggcaggctgtcccgctcgttgctggcctcgaacatgatctcgtaggcagactcccgcaggaggccgggcacctggatgaccgcatcgttgtcgctgacaatgtagtccacgtctggcgcgggagtcggctgattctcgtcgccgttggcgcgggccttggctctttccatggtggtcacaaagcaggttcgcaccttgatgtcctccagcacgctttctgttagcaggctctccttaacgccactctcaaccagctgccgcttgatctccgcgtggatggcgctgcctccgtagctctgatccttgaaggcggccatgatttgcaccccgctgaagacgggcataacgctggtctcgctgtagccaacgtc

SEQ ID NO: 34130 - DNA, 570 bp, DROSOPHILA
ctacgcggcagtcgacgattgtatctcatttagttggaaattctgaattaaagcggagatggacaaggttgttaagtttgccgagcctggacgcgccttcgccaaggactcgatccgcctggtcaagcggtgcaccaagcccgaccgcaaggagttccagaagatcgccatcgccactgctgtgggcttctgcatcatgggcttcatcggcttcttcgttaagttgatacacatccccatcaacaatatcatcgtgggctcttaaatgcgctgagtggcaaggaaaccaccaatcatccaatcatccattatagcatacatcagatcaacgtctttttttttcgtttagttaacatgcattatatgtatggaccatgtgcattcagcgaatgcctttctaacaaaattctacacaaacgtacgaaaacgtattgtaatgtttcgatattccattcatgaacaagttagttaataagattcaaatgtaaaaaggaatcacccgtcttcatagcatttgtttggggtgcgcatccccgctaataaatgttaaattgattttccgtgtacaaa

SEQ ID NO: 34131 - protein, 68 aa, DROSOPHILA
MDKVVKFAEPGRAFAKDSIRLVKRCTKPDRKEFQKIAIATAVGFCIMGFIGFFVKLIHIPINNIIVGS

SEQ ID NO: 34132 - DNA, 9031 bp, DROSOPHILA
cgggcgccatgtgctccacttacctctgcttgcccctgcccaccgctcgaaacccaaatctcgcctagcctctcgatctccgccgcgatcccctcgtgcgttgtctgtgaccaatgcttttgtggagccagccaaccagccagcgagccagacaacgttttggaagattaaaagagctgccgctacctgtgtgcgtgtgtgctatgtgctatgtgctgtgtgttgtgtggtctgttccgtgtgcgaaatgcggaatgcgtgagctgggattgtggtgtgttggtgttctggttgggattgcctgtgggcaccgatgatcgccctgggtagcgcctattgcctggaacacagcctctggtcaggtctctcacatttgagtcgcatatagaagtagaccactactgaaaccgcttttccggctgggttgttttagaacaatgtgcagcaaatcgcacgggacagggttgacaagcggcgcacgaaagttgccagatagtattgttgctattgtatgtactaagagcttgactcggagctatatatgcctgaattgagtgatacaaggcattacgcttcaaggttgctactatctgtgttcattcggacttcaaatgcaaagccagccggttgagttccttatgaaattcgcgcaatattttcgcaattctgcagcgttgccagtctgctggtgttgaagttgccaggctgcaagtgccggcttctagtcttttcttcaaatgattggcttgcctctcagttacaaacttgtttaagcatgtatatagaaaaaattgaaaatgtacagaaatatatggtaactagtaactcaagtccttgccatcgctaaatttgcgaatctctgtcggacgttagccagcactgggccactcagcgtgcatacacgacaagcaaaacaacggtttttttgtatgccaaatcgaggcggcaacgccaggccgctcaggcactcacacactcacgcacacacaaaacatacacgccgatcaatcggtgcaagagcgctgtatttataattttatttttatttgcaagcggccggcattgatgaaatagagatggagtggcacgaagtggagttggacggtagccgcacgattgcgttcccggagcgcatagtacccggatttggccgggagccgtcggcacatttggacgccggtaagtgtgcacaaaatacggcgtgtgccgaaaccgattcaccaagaatctccgctatccctttacagccgaatacctgggcggcatcatacgcgacgggcaatggggctgggtgacctggcggtatggaagcgatgccactttgctggtctgcagcatgtccaccggcgattacctttcttggcactgcttctggagcgaatccgatgatctggggccgcgcaaaagcattcgctgcgtggaggagctcttccccggcgaacacgaacgccccgctatgctagccatctgcctggagtcatggaacagcggcgatcagagacccatcgactgcccgttgagcacgcaggtgctcatctatgccattcgcaacagtcaggtgctccgccgcttcgaccttcacggtataacgtgcagcgcgctgacgttcctcgataaaagaatctatggactcacgcgactgagacggtttaaaggctgtctggccgtggccaccgaggaaggcactgtgctgttggttgatctgaacagcgacagcctgcaggcgagtacccaaaggcgcagcctttgctcccccagttccaaagatgagccgtcggacgggaacctatactttgtatcctccgaggagtccaagaggcaactcagctccaagctgacccattgtcgctccaaaggggctcacttggctgtgcggatggacggtgagtctgtcactgccagtgtgccatggtagctaggttaaccttcaatttaccaacagtggcatccattggaatcagttgccttatgggcattagcatggcgcccggctatgctgctggtctagaagacggccgaatcctgatctacgacctaatcaacttcgacgtgaccactgatctgaattcgccagtaaaaaggaaaggggtcaatagagcagtgaagcgaatgtgcctcattatgccaccggatgaccccaaaccctgtttctacatctgtgcattgtaccaaaatatcgacgtcctgcaaatgatgctgcactcggtctgctacaggggctcgtaccgggaccgggaaacccacacgatccgttttaaggtgagaaatcttgagccgtcacgcacagaccaatattgacttcttgcttcgcaggactaccgttctagaaccgtgcgcaaccgccaaatcttggacggaggcatctgctccgtgatcggctgcgccacggcgtctactttcagttttgccggcgacaacggaacgctgctgattgtcatctcgtggcactcaagtgcagataaaaagaacaagctagtcctgttcgacattaatcagtggtacaaggatgagatgcccacatccgttcacaaaaacgaagttcctaattacatgtccggctacatactcagtggtctacagacgggactggcattggatttgcgttccaccaccatattgcactttgtctcactgcagcgctacgatgagcacttttatcccaactcactaacctttggtaagtgacagcggtgattgaagccagcgccagtaagattaatagccaagtaataccgtctatttccagattgctcactgttaactccaactggcaaacggtactacgcccaggacggagtgcagcatcggtttctgaacgcacttcgctgtgatcgtgccacgctctttttgcgtcctcagatctaccacgaggacatcgttcgcctgcgtctcctgccacaattttgtgagcttaaccctaacgccacattctctaaggtgagctacacactaggttattattatcagttatccggaaatcttctggtatcatatagtaccacagtctttggggaaatgaatcatgctcgttatactcgttttaaagtaacattgcattatcttgctctctagattgccatgtacgagttgatactgtcggtggccctggagcacaactgcggagctttgcttaacgactgcgcacggagttggatggatggcagcttcttgtgcaacatgattgataacacgcaactctccttgtccacgctgaccaactggatcttgaagcgcgccggacagatcaagacgaggtgctcggaactttgccatggcatctttgattacggcggctatccactggaccagcgggaacggcgcgagtttcaagtgctatccggtcagctgcgtgaattggtacgattgcagtcctacattgtcgagcagggacggcgcaggctaacctcctcaattttggacgattgccgtgccaacgagagggcgctgaaaacggttctcgagtaccaaagagtgctgctttggtttatcgatcacggcctcctgccggagggtcagcacatggataatctggtacccggcgagcaggccttcgttcgcctgcaacacgagtactcggaaaaacgagcgcagggaaagatcctctacattgattctctgggaaaacgcgcctcctttccggaaccctatccgccggactcgctgcatgcgtatatacacttgatgctcagtcccgacatagaactctgtcacaaacatgctcttatcctctacctgctgatggacctgaaccaacagctggtcgggcgctttcagattgcctttcagctggacaaagatctggccacgtcattgcgctgcttctggtacttggaccacggcgattacgaggtgagttcggatcggttaatataagcgaaagtgttatattcattcgttttgtgatgtatttgattacagcgaggcgtagaggagctatacaaggagcctgcccccgctaagaacttgaaatcgtggcagatgcggctgttaatagataaactgctggctgaaggtgccgtcaaggcagccaagaaggtggtcagtcgaccacccggtccattgtcctcggcgctgcacatgaaagtgctcctagccaacgaaaacataacggaagcattccaaatcgctcgcctcgacgacgacgaggatggacagccgctgctggagcgcttcttccgccactgcattgaaatcagacgcttcaaagttttggccgagctgtacctgcgagagccagaggaacggctgttgtacagtctactgcgccagtgcagatcgcgtcagacggattgcgtgcaattgataatgctgcttcaaaagagcaagttcatcgaggccgtgtcctttatggatgaggtggccgccgagcgggagcgagatgaatcatccaatacaatactcccagcatacagcgctacaatgggaccagttacacagaacatcgccggcacgtatcttcgcatcagagacaccttggagccctaccaaaagaccggtcccttggagccattcagctgccagctggtcaaacagaacgccagcggccaattgggcggcatctttcagagttctgccgtcagtgcccactgggcaacgcaatgcgagtcccctccaaagatgactcccgtttcgatccaatcaaaaataggctacaccaatgtgccattcctgcggcacgcgcaatacggacattcggagcttccacttcctcggcgcatagtaaagccggtaccacaccaggtggtggagaaacgacagcgggagctagaggatcagcgtaccaatctacaggaccagaggcagctaggcacggagcgtcccaataagcgtccttgtctgatggttgaacgaatggtggaggatgttaaagactatgtgagatccattcgagaaaaaagttcgaaccaaatggagcaggaagaggtcaagcaaaacgaggcgaccaatctattgcagccgccaaatttcctccaggcgcgacagtcgacgacgatacgccagagcagcagttcgccacagccgattccaccgatcctgaagggaagcggggccgtggatgccgttaagagagctccgccggtggctacattcacagcgctggcggggccaaaaagatttcgctttgtgccgcccattcctctgcgaactgataaatctgataaatcgacggagatgggcagcgaaggtgcggctgagggtgaggaggaaactgacgagatcattgtggagatcgagtcaagaagcgaaccaaggagcgcctgcagctatgagtccgacgaggaggatgagttcctctcgcctttagtatcggccaatgtgtctttggtggatccggtaccatcgcggaattctcctcattatttcgccccaccagcaggaccacagccccgaaactcattgctacatgggggaaatggaagcggtagcaagattggtactgcaacagggagcgagagtagtagtggattcggtagcttcagcactgtccagccggctcagacgtcatcacattcccagtttgtgcccaccgtctgctcgtccaagatgggcgagacgcagtcacaggtcttctccagcggcagctgtgggattaagatttccgagcgcactaccatctgtggcgaaatggaatccaccgatcttggtgcagaattgacggccgcacccagcgcacagtggtctctgccatcagcaaggccggctatacaggggcaccaccagatgatggacaccacgctgggaatgtccacttacgatgtggcgtcacttgagcagcaagatactcaggatgtggagaacgaagaggaactgaagctgggtgacacaaaatcgcttgaggagcaacagaatccacaggacgagcagaagccggagcaagagcaggatcaggatgaggatcaggcgcaggagcctttggcgaccggtggtcagctggcgttcctaagcaactcagaaggaacggcccaggagcccctctcctcgcccatctacagcctcagtagcgaagactcgaacgtgtcctcggccggcattcggaatcccatgctgccaacactgcacaccgatgacccaatgtactccatcgttgttgagtcgccgggctccataaccacatcccgatcggttacgcacacgcccacctcattcctgcccagcgacacgaacgtatcacagacatctagtccgcaggcacctcatggcgaggatggagatggcacgccgatctcattgtaccgcgccaatagtctggaaacggttgacgacctggacaccaccaagggctcgctggaggaagaggaggagtacgacgatgatgattgcgtcatagcgctggatggaacagaagtgcgcggctatgtcgcccgaccccagcaatcggcggcctccagcagtgcggagctgttcgccttcaaggacgaatgtcaggaggaggcggctggtgtccccagtccattcctttcgctgggcgccacggtcaacagcgactcggatgtggccgacaccattgtcctagatagcgatgaggagacggcgaaggaaaaggatactcagccggagcagcgaaaggattggccaatggaggaggagaccccgagcaacgagtcagtggccacagttgagtttagcgagcaaaagcagccacgtgccgatatggatatcgggatggaagtggatgcggtgccggacgtgctggaggtgctggaggtgccggagatggaacccttgccagtactttccgatgtggatatcgagatggcggtggatgaggtgccgaacgtgctggaggtgctggaggtgccggagttggaacccttgccagcagggcaagcaacgcagtctagtggtcttggggaaattccagaagaggatgtcgacgcagaagccgaagagcaggtcgttgtgaaggtcgaacatgtggcggatgagcagcccaaagaaggagacaagacggagagcaaggaagcttccgaggaggaaacccaacataatccagaaccactattgcccgaagaggaggattcaagacacagcctgaagctgattttctccggtgatgaggatgaggaggagcaagatgtgccaacacgggcgattcatacattgcgaccgcgtcgcagcttcacggagcaccaggacagtccgcgaactctgcgacctcgtcgcgtctcccaggagcatcgcgatagtccgactccagtcgctggtcgcacgatgtctttgcgcagcaccgacgccccaactttatcgcccgcatccaatccaccagtctcgactcccaagcgtcgtgggttgcagcacaaatatctgctggaggtgatcgacgagcatagtccctcggacctttcgttaccgcgcacccgctcgcgaacgcgcctcagcgtggactcggaggcaacgagctccagacccggcacgcccacaatgaccaaggcacgcggcaagagggccacctcgcaggcaccgccgacggcgagtccctctgtccggcgatcattgcgcggccacagcgaaccgcccgctgcgttgagtgcgcagttggtgcgcaaaccgaagactgctcgtgcgggggtcagatcgcgcaagacgagctcaggcgtccagtcaccagtcgccgtctctccgactccgatcgatgctcccatagatgtacccgattcaactgcaccagaggaggagcagccgcgtctccgtcgcaccgctaggcgacgcatctcggaactgagcgatcagtctgcgaatggcacaggtgaccttcgctcggaagcctccagttctaggaccggctctaagtccaactctgccgccagcacgcagaaccgggagctacgtccgcgcttgcgtcgcacctccaagtcggagcattagttatgcacccggatcaccggatcagcagactcagaatcggctcggaaggcactgtatttttattttttactttgcttacgtttaatatttttaattttagtttggcattagtttgagtgtttaaataaattgaagttaatgtggaattgatagcatccacccaacacttttgagttttataagcagacggatttttcaaaataaagattattattattgagctccgatccgaatcctttcggatctgaagttaaggaggagcacaaacgggttacttacatttcatgataatggcgatgcagttctttagcttacaaagatgtattcgttagatggttcggagtcatacatatgtacaggtatttacaatggtcgttcttacagctaggattcggcaagagatgcgggcgtgcggtggatatcgtctgtaagtctgtgcgcagtcaagtccgcagcttaagcggatctagacgagcgtggagagctcgtgtaggaggacggtgatgttgctcatgtccagcgttggcggaatgcccgggctgaccgatccgctggcctcgcgacctgctgttaggcagctgctattcgccagtgttctgggcgtgggcgtcggtggtgtggcagtggctggacgcaccagaaatgaggagttaacggcacccagtgctccgcctccgccgccccctccaccaaggagaagtgggttaaagctgccgtgggagtgattcggcgagaccgccgtcacggagggcggcaccaggtggctctggtgcccctgatgagcggcctggtacgtgtggaacgggcccggtggcagtggcatggacacaggcagcgtcgccggcagctggccagccgagatcaccgacaagttgtgggacagcggtgctccacggtagctaatggtcttctcgcgctgccacacgaacacgttgtgcaccatggcgccgccgcagaatactatgcccactccaatcagcaggctggtcacgatcgccggcgtcgagtggaagtgactaaaggtgtacaggatcaggccggtcagaaagaccggtatggagatgaagaagccgctgacagcgcacgtgcggctggcactggacttgaccaggtattggttatcgcgaccctcgaaggccggctcgcgcagcttgacggcgaacag

SEQ ID NO: 34133 - DNA, 6505 bp, DROSOPHILA
ccgatcaatcggtgcaagagcgctgtatttataattttatttttatttgcaagcggccggcattgatgaaatagagatggagtggcacgaagtggagttggacggtagccgcacgattgcgttcccggagcgcatagtacccggatttggccgggagccgtcggcacatttggacgccgccgaatacctgggcggcatcatacgcgacgggcaatggggctgggtgacctggcggtatggaagcgatgccactttgctggtctgcagcatgtccaccggcgattacctttcttggcactgcttctggagcgaatccgatgatctggggccgcgcaaaagcattcgctgcgtggaggagctcttccccggcgaacacgaacgccccgctatgctagccatctgcctggagtcatggaacagcggcgatcagagacccatcgactgcccgttgagcacgcaggtgctcatctatgccattcgcaacagtcaggtgctccgccgcttcgaccttcacggctgtctggccgtggccaccgaggaaggcactgtgctgttggttgatctgaacagcgacagcctgcaggcgagtacccaaaggcgcagcctttgctcccccagttccaaagatgagccgtcggacgggaacctatactttgtatcctccgaggagtccaagaggcaactcagctccaagctgacccattgtcgctccaaaggggctcacttggctgtgcggatggacgtggcatccattggaatcagttgccttatgggcattagcatggcgcccggctatgctgctggtctagaagacggccgaatcctgatctacgacctaatcaacttcgacgtgaccactgatctgaattcgccagtaaaaaggaaaggggtcaatagagcagtgaagcgaatgtgcctcattatgccaccggatgaccccaaaccctgtttctacatctgtgcattgtaccaaaatatcgacgtcctgcaaatgatgctgcactcggtctgctacaggggctcgtaccgggaccgggaaacccacacgatccgttttaaggactaccgttctagaaccgtgcgcaaccgccaaatcttggacggaggcatctgctccgtgatcggctgcgccacggcgtctactttcagttttgccggcgacaacggaacgctgctgattgtcatctcgtggcactcaagtgcagataaaaagaacaagctagtcctgttcgacattaatcagtggtacaaggatgagatgcccacatccgttcacaaaaacgaagttcctaattacatgtccggctacatactcagtggtctacagacgggactggcattggatttgcgttccaccaccatattgcactttgtctcactgcagcgctacgatgagcacttttatcccaactcactaacctttgattgctcactgttaactccaactggcaaacggtactacgcccaggacggagtgcagcatcggtttctgaacgcacttcgctgtgatcgtgccacgctctttttgcgtcctcagatctaccacgaggacatcgttcgcctgcgtctcctgccacaattttgtgagcttaaccctaacgccacattctctaagattgccatgtacgagttgatactgtcggtggccctggagcacaactgcggagctttgcttaacgactgcgcacggagttggatggatggcagcttcttgtgcaacatgattgataacacgcaactctccttgtccacgctgaccaactggatcttgaagcgcgccggacagatcaagacgaggtgctcggaactttgccatggcatctttgattacggcggctatccactggaccagcgggaacggcgcgagtttcaagtgctatccggtcagctgcgtgaattggtacgattgcagtcctacattgtcgagcagggacggcgcaggctaacctcctcaattttggacgattgccgtgccaacgagagggcgctgaaaacggttctcgagtaccaaagagtgctgctttggtttatcgatcacggcctcctgccggagggtcagcacatggataatctggtacccggcgagcaggccttcgttcgcctgcaacacgagtactcggaaaaacgagcgcagggaaagatcctctacattgattctctgggaaaacgcgcctcctttccggaaccctatccgccggactcgctgcatgcgtatatacacttgatgctcagtcccgacatagaactctgtcacaaacatgctcttatcctctacctgctgatggacctgaaccaacagctggtcgggcgctttcagattgcctttcagctggacaaagatctggccacgtcattgcgctgcttctggtacttggaccacggcgattacgagcgaggcgtagaggagctatacaaggagcctgcccccgctaagaacttgaaatcgtggcagatgcggctgttaatagataaactgctggctgaaggtgccgtcaaggcagccaagaaggtggtcagtcgaccacccggtccattgtcctcggcgctgcacatgaaagtgctcctagccaacgaaaacataacggaagcattccaaatcgctcgcctcgacgacgacgaggatggacagccgctgctggagcgcttcttccgccactgcattgaaatcagacgcttcaaagttttggccgagctgtacctgcgagagccagaggaacggctgttgtacagtctactgcgccagtgcagatcgcgtcagacggattgcgtgcaattgataatgctgcttcaaaagagcaagttcatcgaggccgtgtcctttatggatgaggtggccgccgagcgggagcgagatgaatcatccaatacaatactcccagcatacagcgctacaatgggaccagttacacagaacatcgccggcacgtatcttcgcatcagagacaccttggagccctaccaaaagaccggtcccttggagccattcagctgccagctggtcaaacagaacgccagcggccaattgggcggcatctttcagagttctgccgtcagtgcccactgggcaacgcaatgcgagtcccctccaaagatgactcccgtttcgatccaatcaaaaataggctacaccaatgtgccattcctgcggcacgcgcaatacggacattcggagcttccacttcctcggcgcatagtaaagccggtaccacaccaggtggtggagaaacgacagcgggagctagaggatcagcgtaccaatctacaggaccagaggcagctaggcacggagcgtcccaataagcgtccttgtctgatggttgaacgaatggtggaggatgttaaagactatgtgagatccattcgagaaaaaagttcgaaccaaatggagcaggaagaggtcaagcaaaacgaggcgaccaatctattgcagccgccaaatttcctccaggcgcgacagtcgacgacgatacgccagagcagcagttcgccacagccgattccaccgatcctgaagggaagcggggccgtggatgccgttaagagagctccgccggtggctacattcacagcgctggcggggccaaaaagatttcgctttgtgccgcccattcctctgcgaactgataaatctgataaatcgacggagatgggcagcgaaggtgcggctgagggtgaggaggaaactgacgagatcattgtggagatcgagtcaagaagcgaaccaaggagcgcctgcagctatgagtccgacgaggaggatgagttcctctcgcctttagtatcggccaatgtgtctttggtggatccggtaccatcgcggaattctcctcattatttcgccccaccagcaggaccacagccccgaaactcattgctacatgggggaaatggaagcggtagcaagattggtactgcaacagggagcgagagtagtagtggattcggtagcttcagcactgtccagccggctcagacgtcatcacattcccagtttgtgcccaccgtctgctcgtccaagatgggcgagacgcagtcacaggtcttctccagcggcagctgtgggattaagatttccgagcgcactaccatctgtggcgaaatggaatccaccgatcttggtgcagaattgacggccgcacccagcgcacagtggtctctgccatcagcaaggccggctatacaggggcaccaccagatgatggacaccacgctgggaatgtccacttacgatgtggcgtcacttgagcagcaagatactcaggatgtggagaacgaagaggaactgaagctgggtgacacaaaatcgcttgaggagcaacagaatccacaggacgagcagaagccggagcaagagcaggatcaggatgaggatcaggcgcaggagcctttggcgaccggtggtcagctggcgttcctaagcaactcagaaggaacggcccaggagcccctctcctcgcccatctacagcctcagtagcgaagactcgaacgtgtcctcggccggcattcggaatcccatgctgccaacactgcacaccgatgacccaatgtactccatcgttgttgagtcgccgggctccataaccacatcccgatcggttacgcacacgcccacctcattcctgcccagcgacacgaacgtatcacagacatctagtccgcaggcacctcatggcgaggatggagatggcacgccgatctcattgtaccgcgccaatagtctggaaacggttgacgacctggacaccaccaagggctcgctggaggaagaggaggagtacgacgatgatgattgcgtcatagcgctggatggaacagaagtgcgcggctatgtcgcccgaccccagcaatcggcggcctccagcagtgcggagctgttcgccttcaaggacgaatgtcaggaggaggcggctggtgtccccagtccattcctttcgctgggcgccacggtcaacagcgactcggatgtggccgacaccattgtcctagatagcgatgaggagacggcgaaggaaaaggatactcagccggagcagcgaaaggattggccaatggaggaggagaccccgagcaacgagtcagtggccacagttgagtttagcgagcaaaagcagccacgtgccgatatggatatcgggatggaagtggatgcggtgccggacgtgctggaggtgctggaggtgccggagatggaacccttgccagtactttccgatgtggatatcgagatggcggtggatgaggtgccgaacgtgctggaggtgctggaggtgccggagttggaacccttgccagcagggcaagcaacgcagtctagtggtcttggggaaattccagaagaggatgtcgacgcagaagccgaagagcaggtcgttgtgaaggtcgaacatgtggcggatgagcagcccaaagaaggagacaagacggagagcaaggaagcttccgaggaggaaacccaacataatccagaaccactattgcccgaagaggaggattcaagacacagcctgaagctgattttctccggtgatgaggatgaggaggagcaagatgtgccaacacgggcgattcatacattgcgaccgcgtcgcagcttcacggagcaccaggacagtccgcgaactctgcgacctcgtcgcgtctcccaggagcatcgcgatagtccgactccagtcgctggtcgcacgatgtctttgcgcagcaccgacgccccaactttatcgcccgcatccaatccaccagtctcgactcccaagcgtcgtgggttgcagcacaaatatctgctggaggtgatcgacgagcatagtccctcggacctttcgttaccgcgcacccgctcgcgaacgcgcctcagcgtggactcggaggcaacgagctccagacccggcacgcccacaatgaccaaggcacgcggcaagagggccacctcgcaggcaccgccgacggcgagtccctctgtccggcgatcattgcgcggccacagcgaaccgcccgctgcgttgagtgcgcagttggtgcgcaaaccgaagactgctcgtgcgggggtcagatcgcgcaagacgagctcaggcgtccagtcaccagtcgccgtctctccgactccgatcgatgctcccatagatgtacccgattcaactgcaccagaggaggagcagccgcgtctccgtcgcaccgctaggcgacgcatctcggaactgagcgatcagtctgcgaatggcacaggtgaccttcgctcggaagcctccagttctaggaccggctctaagtccaactctgccgccagcacgcagaaccgggagctacgtccgcgcttgcgtcgcacctccaagtcggagcattagttatgcacccggatcaccggatcagcagactcagaatcggctcggaaggcactgtatttttattttttactttgcttacgtttaatatttttaattttagtttggcattagtttgagtgtttaaataaattgaagttaatgtggaattgatagcatccacccaac

SEQ ID NO: 34134 - protein, 2087 aa, DROSOPHILA
MEWHEVELDGSRTIAFPERIVPGFGREPSAHLDAAEYLGGIIRDGQWGWVTWRYGSDATLLVCSMSTGDYLSWHCFWSESDDLGPRKSIRCVEELFPGEHERPAMLAICLESWNSGDQRPIDCPLSTQVLIYAIRNSQVLRRFDLHGCLAVATEEGTVLLVDLNSDSLQASTQRRSLCSPSSKDEPSDGNLYFVSSEESKRQLSSKLTHCRSKGAHLAVRMDVASIGISCLMGISMAPGYAAGLEDGRILIYDLINFDVTTDLNSPVKRKGVNRAVKRMCLIMPPDDPKPCFYICALYQNIDVLQMMLHSVCYRGSYRDRETHTIRFKDYRSRTVRNRQILDGGICSVIGCATASTFSFAGDNGTLLIVISWHSSADKKNKLVLFDINQWYKDEMPTSVHKNEVPNYMSGYILSGLQTGLALDLRSTTILHFVSLQRYDEHFYPNSLTFDCSLLTPTGKRYYAQDGVQHRFLNALRCDRATLFLRPQIYHEDIVRLRLLPQFCELNPNATFSKIAMYELILSVALEHNCGALLNDCARSWMDGSFLCNMIDNTQLSLSTLTNWILKRAGQIKTRCSELCHGIFDYGGYPLDQRERREFQVLSGQLRELVRLQSYIVEQGRRRLTSSILDDCRANERALKTVLEYQRVLLWFIDHGLLPEGQHMDNLVPGEQAFVRLQHEYSEKRAQGKILYIDSLGKRASFPEPYPPDSLHAYIHLMLSPDIELCHKHALILYLLMDLNQQLVGRFQIAFQLDKDLATSLRCFWYLDHGDYERGVEELYKEPAPAKNLKSWQMRLLIDKLLAEGAVKAAKKVVSRPPGPLSSALHMKVLLANENITEAFQIARLDDDEDGQPLLERFFRHCIEIRRFKVLAELYLREPEERLLYSLLRQCRSRQTDCVQLIMLLQKSKFIEAVSFMDEVAAERERDESSNTILPAYSATMGPVTQNIAGTYLRIRDTLEPYQKTGPLEPFSCQLVKQNASGQLGGIFQSSAVSAHWATQCESPPKMTPVSIQSKIGYTNVPFLRHAQYGHSELPLPRRIVKPVPHQVVEKRQRELEDQRTNLQDQRQLGTERPNKRPCLMVERMVEDVKDYVRSIREKSSNQMEQEEVKQNEATNLLQPPNFLQARQSTTIRQSSSSPQPIPPILKGSGAVDAVKRAPPVATFTALAGPKRFRFVPPIPLRTDKSDKSTEMGSEGAAEGEEETDEIIVEIESRSEPRSACSYESDEEDEFLSPLVSANVSLVDPVPSRNSPHYFAPPAGPQPRNSLLHGGNGSGSKIGTATGSESSSGFGSFSTVQPAQTSSHSQFVPTVCSSKMGETQSQVFSSGSCGIKISERTTICGEMESTDLGAELTAAPSAQWSLPSARPAIQGHHQMMDTTLGMSTYDVASLEQQDTQDVENEEELKLGDTKSLEEQQNPQDEQKPEQEQDQDEDQAQEPLATGGQLAFLSNSEGTAQEPLSSPIYSLSSEDSNVSSAGIRNPMLPTLHTDDPMYSIVVESPGSITTSRSVTHTPTSFLPSDTNVSQTSSPQAPHGEDGDGTPISLYRANSLETVDDLDTTKGSLEEEEEYDDDDCVIALDGTEVRGYVARPQQSAASSSAELFAFKDECQEEAAGVPSPFLSLGATVNSDSDVADTIVLDSDEETAKEKDTQPEQRKDWPMEEETPSNESVATVEFSEQKQPRADMDIGMEVDAVPDVLEVLEVPEMEPLPVLSDVDIEMAVDEVPNVLEVLEVPELEPLPAGQATQSSGLGEIPEEDVDAEAEEQVVVKVEHVADEQPKEGDKTESKEASEEETQHNPEPLLPEEEDSRHSLKLIFSGDEDEEEQDVPTRAIHTLRPRRSFTEHQDSPRTLRPRRVSQEHRDSPTPVAGRTMSLRSTDAPTLSPASNPPVSTPKRRGLQHKYLLEVIDEHSPSDLSLPRTRSRTRLSVDSEATSSRPGTPTMTKARGKRATSQAPPTASPSVRRSLRGHSEPPAALSAQLVRKPKTARAGVRSRKTSSGVQSPVAVSPTPIDAPIDVPDSTAPEEEQPRLRRTARRRISELSDQSANGTGDLRSEASSSRTGSKSNSAASTQNRELRPRLRRTSKSEH

SEQ ID NO: 34135 - DNA, 2787 bp, DROSOPHILA
tcgcaagtgccaagcaatgcgacccactgtgccgcaaacctgcttaactcacaacacacgcgatgcggcggctgctgctgctgctggttgtggtgccgctggtggcgatggtgcttctagtcctcctgcctcactccacacacaggtaaagaatggaggcaacggctccaagttgctcagccgcattccacgagctccaaactgaaaggttgttgtcggttactactgcggttgcctatgcgcttgggacggcgaaattcgccattgggtgttgcaagccgctttcaattcaagttcaaattcgcgctttagtaacaaaattcacttatagttagattaactcagttttggcgcttttcgtatccaaattcacttcggttggattcaaaaataagaattgaccgccaacgctgccagactgcgtcgaactggtcgacagtgttgaaaagttcgtaaactggcggcaagaaatcgatataactagttgaaagtgtcaatagtagtggagctggagtccagaaaaatatttcgaatttaaaatagatttaataaattggaattattcgatataacattgatattaaccagggggagcccttttttatgctaagggtagtatgagatatttcattttatacaagttgcaggattataaatacgttttaagacattacgataggtaattgccagctgttagtttgatcatatttaatgctgcaggactcctcgaactttaattatgttaagtagctatgtatgttatgtatttgtttggccaaaaatgtttcaaaaactcgaggcttttacataattagttttaaatattccgtactaattatcagttgttataacgtatattttttttaggttttttgaatattttgaacgtgaagtcaacgtgttcaattaaacactgcagaattttttaaatcgcgtgttttcagattaacacgttaaatgtatgttcgtgaatatatcgtatcgatattcgtgctcgtggttttgccatcccatctccaatttgatgaacatatttttcgacgactgcgattgcaacgcactgccaaagagaaagagacatgactgatcctagcaagctcgccgtcgccgtagtctgttcctcgaacatgaatcgctcaatggaggcgcacaactttctggccaagaagggtttcaatgtgcgctcctacggcaccggcgagcgcgtcaagctaccgggcatggcgttcgacaagccgaatgtttacgagtttggcaccaaatacgaggacatctaccgcgacctggagtccaaggacaaggagttgtgagttattcgtttttccggcctaccgttggctaatccctgccctttcgtcctgtttacagctacacacagaacggcctgctacacatgctcgaccgcaatcgtcgcataaagaagtgcccggaacggtttcaggacaccaaagagcagttcgacatcatcgtcactgtggaagagcgcgtctacgacctggtggtgatgcacatggagtccatggaatccgtggacaaccgacccgtgcacgttctcaacgtggatgtggtggacaacgctgaagatgcgctaatgggcgcctttgtcatcacagacatgataaacatggtatgatcatctgtcgtccattccctcaattcgcccaacgattcttgtgcctttgcagatggccaagtccacggacctggacaacgacatcgacgaattgatccaggagttcgaggagcgccgcaagcgggtcatcctgcactcggtgctcttctactgacgaccgacgtctgctaacagttcgtgtccagctccagcaccaacaccagactcccgtagccccgacgcgctccagccgagtcactcgatcttgtaccccaggggctgcgatcgcagagcataggacgtcgggcattgcgcgcagcgcgtgcggatcctgggttccggattggtagcctagcatataagaatactgtaaatagagaggggccatcgctgcagcgaaagcacatccaacaacgaccagcacccacacactcgcatactccaaacacctgattcgtaatccacatcaacaccacacatgcaagcaactggctaatgaattggaatataacacacaaccaatgacgaccatttccacacggctgccccccaaaacccctgtagtagtatgtgtacgtgtccgtattccttgtaatttcgcccgtcgactgggggtcttatcacaggctctcgcttccctcagctggcgaaggcgccgaccatctgactccgacccgttctcccgttcggccgctctgccgctctcttcgcccggctttgagtccgattcggactcagattcggattcgattcacataaagtgaaatctcgcatcgtgattgtgtgaatgagcatgcacgccagagagccacacaggggcggaacggtctgggccctcgcgggcaggggccgcgttttttaattttacacagttttaccaattgttcagacagggcaaacccgaccgaccttggttggggctgtgcgttttaaaccaaaggcaaaggcccgcaacgggcgctagcttgcaatagaaaataaacaacaggggagttgtgttcactaaggattggaataaaagtgcacgccaatttatgccggtttcttgttgacggcctgtgtcacatttaccctgcgacctcaaacctgcctaggtcttctcttcgacggaaataccattgattacgtctcatcccactgctacctcggagttcaccttgatcggacgctgagtt

SEQ ID NO: 34136 - DNA, 667 bp, DROSOPHILA
ttttgccatcccatctccaatttgatgaacatatttttcgacgactgcgattgcaacgcactgccaaagagaaagagacatgactgatcctagcaagctcgccgtcgccgtagtctgttcctcgaacatgaatcgctcaatggaggcgcacaactttctggccaagaagggtttcaatgtgcgctcctacggcaccggcgagcgcgtcaagctaccgggcatggcgttcgacaagccgaatgtttacgagtttggcaccaaatacgaggacatctaccgcgacctggagtccaaggacaaggagttctacacacagaacggcctgctacacatgctcgaccgcaatcgtcgcataaagaagtgcccggaacggtttcaggacaccaaagagcagttcgacatcatcgtcactgtggaagagcgcgtctacgacctggtggtgatgcacatggagtccatggaatccgtggacaaccgacccgtgcacgttctcaacgtggatgtggtggacaacgctgaagatgcgctaatgggcgcctttgtcatcacagacatgataaacatgatggccaagtccacggacctggacaacgacatcgacgaattgatccaggagttcgaggagcgccgcaagcgggtcatcctgcactcggtgctcttctactga

SEQ ID NO: 34137 - protein, 195 aa, DROSOPHILA
MTDPSKLAVAVVCSSNMNRSMEAHNFLAKKGFNVRSYGTGERVKLPGMAFDKPNVYEFGTKYEDIYRDLESKDKEFYTQNGLLHMLDRNRRIKKCPERFQDTKEQFDIIVTVEERVYDLVVMHMESMESVDNRPVHVLNVDVVDNAEDALMGAFVITDMINMMAKSTDLDNDIDELIQEFEERRKRVILHSVLFY

SEQ ID NO: 34138 - DNA, 10317 bp, DROSOPHILA
tatatatatatatatatatattatatcatttttgttataacaaacaaaactaaattaattgtaaacaaaatgaatctttttgcgttttaatatttgcggggatttataataattttggccataaaacttattgtacagcaagtaaaataataatagatcgtttatttctcatttcatttaaaaaatacttttatttgaatcaaatcgaatcgagtcaaagtagaaaaacataacgtaaaccgaaattgttgaacctaacaacatgcaaaaatggcaatcgatgtgcgcctgaactgaactgctgaactgatcgcagccccgccgccgtctatcaattgaaaataacatttataaccgagtaaataattcaaacccgagcgcgaaggccaactgaatgatctattttcgcgagttttaacaaataatacacacctaattactttcgtgacatttttgcagcgcgatagcacaaatatataaatggttaacaaatcaaaattgtgtgattgattcagttatccggtaataatatcaaattagactttaatttaaacactttgcatatcaaagttttttgttgatctttgcttgcttgtttgtttgttttcttgtttgttgtgttattgtttgtgtatgacatttatgcttacatatataattatttatttatttatgtttgtttttttctttgtttttgattgatcttgtattaaatggtttcaaatgttagtatcttgttgccacctccgatcgagtttcctttaatacaaaactattgcagctttagcttgttgtaacttttagaaaatacttgggttctcatgttttcctaagcaaccaatccgataattgatcgcacgcatgtgtgttttgggttgtgtgtcgtgtgtcttctttctagttcctacaaaaacattgctagctagccatgactgtttctgctgctattgtttttgctgctctattgatgtcttagcggcgatttctgttgcttgtgtcgggctctagttgttgctgtcgcactgttggctttataatttccattaaaattgaagtagttcatattactaaacacttgttgtgggggttggcattgttgttgtctatgctatagcgaaccagccggaaaacttgttgaactattgctatgggctaaactaatcattgaaccagacagacttccctcctcatctgcataggcttctcgggatacctcaatcagagataaagtgctgcaggaagaacacattataacgattacatctgaatcatagcatagatgagcgatgtgatgttctttacctgaaacctagggcaattgattcgttatcaaatgcttccaattctttagtatgcttctcgtgtttcatgcgcaagcgctcggcgcgttcctggttgaattgctgcaactcggcgtccatctggggaatagagaatgtcgatgaggtcagacactatgctccacttgtccagcggacacggcaaacgcccaccttattctcgagcaggccacgccgcacgctgacgcgattctcgagctcacgacgctcgcgatcgcgctgctcctgtgcctgcttcttgttcttgttctggtaggcagtgagcatctccagctcgtactccagctgctcgtgggtacgttggcactcaatcacttggctttcgtctagtttgtagctctgactttggaacatgtccgcaatgctttgctcgtactgcaacgaaatggattaggttagaacaattgagcttgctcaggctagtgtccatacaacgcacctgttcaccgagcagcgtcagcttgcgatgcttctcttccttcagctgcttaatgacctccttctgttgctcctttggtgtcgtctgcagtacttgggccttgtagcgtttgtattgcttcgtctgcgtcttgcatgtttcccggaactgcttgcgtatctggagctccttttgctgttttgttttgacaaattacttagactttactccatattcctctttgccactgtgcatgcagtacataccttcaagctcttcggctgttgcctcagctcaaccgcatgcttgcgtaccagctccttcttgatgcggtccatgtagtctttttgattatgcaactcggtatcgtgttgcttgtttatctgcggtgggcggcaatggtacatgtgttcatgtgcattatggctgggcatttgagttactcacctgctcctcgcgcaactggtgcacgctcttctgctggcggtactccagctcctgtgtcttttcgtggtgcttaagaagcatggcgtgtgcctgctgcagttgctgctccttctttccgagctcctggaaaagcaaaagggttagatcaggccaaaaactgactgacccaccatgtggggttctcttacgtcgcgcagctgctgatcctcgtgctcgtgctgcatgatcatccgtttgcgcttgaacttgcgcatctccagctcgatgtactgcttctgggcctggagcatgcgctgctcctcctgcgcctcgtgctgcttgaggttgtccttctgcgattgcagggtaagatcgcgctgccgcttgggcgtcgactcatccatggagagctcccgcttccagcgctccttgttcgccttgtactccttcttgcggttcaggtcgtacaccttgcgatcgttctcctgctttagcgtaatctctttgtgtagtttcttctcggcggcgctcgtttgcttagcgcgcctctccacatcctgctgatgcttcgtctgccagcggtcagtggttaatgaaagtggcctgcagtcaatctaattcatcgcacactcacctcaagccgatcgaggtccctcgtaaagttgtggagcagcgtgtcatactccttgtccagggccgtcttgtgcgcctccatgtccaccttgcacttctcctccagtttgaccaggtgcgcctggtgctcgcgccgcatccgcttgtagccggacatctgttcgtgcatctcctcctgccggatcgcggatggtggtgatggcgcacagtggggcaaagaatgcacacatggttagaggcgtggaaatgcgaatagcagcagcgggaccactacggcaaattgtacactacttttgcgactaactgtaacttacaaaaccgctgccgaactccagctcaaccataacctcaacgggcgcaaatctcggccaaaacattggctcctcggccttctaggcttccggcacgccaacggattctaagttctagctatgtacgtattattgggttttggcaaaagagttgttcaagcggaatgcgcaatatagttctactagctctccaaacagccaacttaagcttaagccattcgaaaagcctggtttcgtctagtgtgaccttggtcctttcgggaataacggggctcttgtggatcgccgtcaacagggtgacccttaccaagcttaacaaggcgatatcgatattcacagtcagactggaaggacggacggtgatggcgaactggaaggtggtactgttactgttacattcaaataacagatttgtgcattccaaacagaaatgacaagtgagttggacagtgtacaatatatgcatgtattgttgttgttcaagtgtatttccatgccagctcgttcattgttttttttttttttaataagtacatgatattgcgccaacgcatcaatgaataataatccatttcaaattattgccaaatgacttggatagcgcatatcagttcctaggattctccaaaatagcgctacccttagaaagtgtttaaactattgagaatatactttgaaatgaagacatcattgcactgcgatgattgtttcttcagcaaaatgatgtgaaatacagggaaatagaatttgtgacaatgaggatcaagaaaaagatgagcactagggtttgattaatcaattaacaactactttcaacaagtaaagtctatgtttagtgctaattgtcatgagctgactaaattccagctccacacttgccattgctactgtggcgaaaggtgcggatgaattgctttagcctggctaacaagcgtagaacgaaccaattgataaattgagtgtgcttacacttgagggacacgggaaacagatgcattctaagccatgagggcgtggcaatggccagggactgtggggtggttggccgacgagcgggggggtaacgagtacagtacaggtggaggctggcgagcatgggattcggttagaatgtgatgacggatgcaactgcagatgcaacagcaacggctaactacagtaagtacatggtaccggcagcgactgcttttaaaacttttatttctcaattgattggcgcctccgctctggctaggaaattacacagggacagtggcgtttcgggtctttcttgctgccggccttttgctggccctcgttccgccggctgccgtcgcggcattcgctgttgatgtggtcgccaccacacagctgcgaacagaagttatagcgcgcctgttcgaggatgcgggaggagaacaataaacacaacaaagagcttgtagtagagggcaaaagttagaagacacgtggatggcggaagcgtagcagcgagctgggagggggaatggattggctgattgcctagccggcggatgactgccgaccattgatgctgacaggacgggttacacacaaaggccgcgcgatatggaatgcaaacggtgctgggaccgccactggcaattggactcgggcatgatcccttatagtgcccatggaggtggattatctatgctgcagccaggcgacttccctggactcaccccaacgagagagcgcacacagaaatctacggccaaggcaggagtattgataaacgaatcgcgacaacgcacctgcatgtgctccttttgctgcttggtcacgatactggtggtccgtatggtggcaaagttgttgggcccgtgatcgttgactgcattggagatggcctgttgcgaggacgcggagctggccgcatacacggccgcttgggcggcgggcgtcgtcagatagcgcggctgaacgggctggatgcgatccgccaggggtccaccggatgctggagaccctccaccgctgccaccggtcccagtgcccccgccgcccacgtggcccatcgcactcagatgcggcagcacggaaataggcggtgggagtactggagcaggcgctggtgccggcaccaccgatgccgagttagttggcgtcacattgttgttcatgctgtgcattatgtttggcagcggcggccggtttcgatggcgcgacgagttgcgggacacggctccaggcggtaccggctgtccttgctggccgcttggccagctgggcggcggctgctggtgtggatggtgatggtggtgcattgccgccgccacagcggcgctagccgcctgctggtggtggtgcgcagcgatatggtgatgattctgtgccgcagccggtatggaattggatgaggagctctgaaaggtcaaaaatgaaaataaaacgaaatgtggggtggctttaaacgaaggacagctcatgctcacctgactactggctgccgatacacccaccgagtgtatggagtgttccgaagtaatactattgctcttgctgctgtcgccgccggcatggtcgtcctgttggtcgtcggtgtcgcccacggcgctctccgtctcgcaggtgtccaccatgagtatcttcttcatcttgcggtaattgaggttgtccagctcgcgcaccgctgacttggtgcgcgcgatcagctccagcagcacggtgtcggaacgcggtcgggtcacgtaggcgtgggtcaacagcttggccgacgagggtcgctctgctggcatcttcttgaggcacagttcaacaaagctgcaaaacgcatccgaccagtcgttcttctgtcgggttgaaatcgaataggtttgataattgtttataacattcaaattgcacttacttagtttactttaaaattgctttacaaagttctgaatcataaacacttttttaagcagaatctggaggctctactatacaaatgggtaaaatataacttgccccagccccaaaagtgggaaataaaacaataacactagggacacatgagagcgatacgtaaataaatacattggcatacttcagttttgctatcaaaacagactcctaccaagaaattaaaacttcgattgctactcaccggaagagtcggcgactcattctgcgcaatgtggtagagcgccgacatggcgttcatgttaaagtagggaggcttgcgctctgccagttcgatgcaggtgatgcccagcgaccacacgtccaccttgccgtcgtattggccctcgtccatggccaggatcacctcgggcgccatccaatagggcgtgccgacaaaactgttggccggacacttgatggcagcgctaccgaaatcggccagcttgacgacgccgttgtccgtgagcaggatgttgcccgccttgatgtcacggtggatgcggcccagcgagtgcagatagctcaacccactgagcacgcccagacagatggcggcgatctcgtcctcgtgcagcggcttcttgtgcacctcgatgatgtccgaggcggagcccacgcagtactccatcaccagccaggcggttgattcgcgcaaatagcatcccttgtattctatggtgttcgggtggttcaattggcgaaggaagctgttgtgtacacataaattgattagaagtcactcgggcgaacgcaagtgtcagccagtgctcaccgtatctctttgagaatatcctgccacttctcctggctctgcttgccggtgtacgacatctttttgatggccacgatctccctggtgaggttgcatcgcgcataatagaccgcgccgaaagacccatggccgatttcgcgcaggtcctcgaagattttctccgggtcatgcttgttgaataggtcggctatttccggatccttgagactaccaggtcgtgccgaaggcatggctgtctttcatgctctagcccagctctctcagtggtcgacctgcgtgcttctcctcgcagcttgcagctccagctggctactctgctgtcttgaagttctgtgcggatcgggtggggcgaaaaaaaggcgattccggttagtcagtcacattcacagcctgcgccagtcacttagtcatgttcaaagggtcgacatttttgggggatttcaggctgaaacgctgagactgcggaccaattgaattgggcggcacggggcgtagcgggaatggctgggccagtggacagtgggcactgtgctttggtcagcatttgcatggggagacggtcaaacggacggacggatgggaacagctaaaagccgactatcatcaaatcgatcaagtgattcatgctcgcacatactgtacgaatcattcaaaactccgaattccgcacgcagcacggccttatcgcaaatatattcactgttggcaccgtcttttatggccaggctattttcctcagcttgttaccaacttgtcagctgctttttggccagattacgacagctggggtgtaagtggtctagggcatttggcagtcggtatgactaacgccgttaagttcatttgcttggatttcgaacaagtaatgagtggagtggatgcgcacgtgcagtagggcggtatttgtggtcaagctggactaactagctaggtgtagggtatgcacacgtgctgcagggtaatcaaaggtcgttacgactgacacacaaacacacgcgagctgccaaggagtaacggcaccaaaggggtgcatttatcgccgttgcgaatccaaatacacacacacacatgcatacattggagtatgcatgtctgtgcatgcggaggcgttttgcgggcgtctgcggatatccgccggctaaagacgcggattttggcccccgtcggagctccggctttcgcctatcgccgcctggcaaaaattctcaatacaattagtccgctgtggtgcggcgactgcaattctttgcctgcgacgcgaaacagaaacacgcctatttttcatagccaccacactattgcacaaagagcagccatgtcgctcacacacactcacgcgcgcgctctatatgtatatgtgcggtgggattgcttgttgttttgcatttcgggcgacacaaattcaattcaattcgtgccttttccgtggcttgcactgtgctgtggcgctccgtcacagggaattgtagtagaataccaaagagttctgcgattcgaattgattttcagttgggttggcttttccttgggtgcggactaggcacacaccgaaggagccgaaaaagaacgcacgaaggcggtgatgctgcgccagttgttggttttcttcgttgactgaccacttattgactgattaccatggttgatctatgtgttgcgattaaaattggcttatttcgctgcattttgcaactgttttgaatcgcctaattttgttttgcttgcacacacacacactcacgctcgtcgggggagcagacaaatacacacacattcgtatggttcgactggtgctatcccgttctcgcgcgttgagggagtcgtcgcaccgaaatcagatgtagcactcagaacccgcaaatgcgctgtatttgattgaaatttgtgggatcaatgataataccacattgttaattcaatgggcagatggcacacaagaaattcgcatttattggccaaaacgcaaacgcgaaaaagaacagtatgcacatacacacacgtacacgagcatacgcattcacacacacaggcacacacgcacacagggatggagagacagtggaaaatgcataaatctggcgaggcgaaaaagaaaaaacgtttgaactttttccactgcgttcgagggcttacatttggcaatcaattagtgcttgcttgtttatcggcgcaactgggtctcgcttttcgcatctgtatgcatttttccctttcatacgtcgctttccctacgaccgctgctgctgttattggccctgctgcgactgggaacgggaatcggaatgggactggtagtggtagtgatactgctactgggaatggcaactattgccctgcactgcacacgcgttgcgttcacgaatccgcactggctacacatctcgagtgccaagcaccgaattcgggggatcgttacgtcgcagatgcacccatctacggcatggaaaattggcagcgattgtctatttgcaacttttcttcacccgtttctctaattaaattccgtaaagttcacgttcacacagcacacagtgttaccagatcagccgagcggcttgaaaccaaaaactaccactgaccgctttttactaaaaaatcccgattttaggcgatatatttaaaattaacttatttttttcaatatgtttgcgaagttaactcttgcagaggcgtttttatagttgaattcgctcaattcaattagttttaagagaaaaggttcgttttttggtctctatcgatagtctatcgaacgtgcaccgggtggtgatgtccgtggttacgctatcgttttggaattattagtttttttttttaatgtttgaaaatcaataatttaacttatacagaattctgcagaattacagctcacgaaatcgcagttgggtatctatgttagaagaacacatatatgtatcaaatttttaataactttttaatagctcagttcgctaagtcaaataccgatactcatcgcaacaagtttggcgcactttttgaaaacatactgataatttcatgatacggtatttacttagctatttaacgccctcctagttaatataaattacggggaacttacattattactttatttgatatgttatttacaactatgcaaactgggaatacaaaaaaatggatgcttatatttaaaatagtttatgttcaattttaagcacactgcaacacataagctatacatatgtacatacacataatatatcaagctgcgaagttaattttattgcccacgttggaaaaatgagaaactctaccgcttaattatagaagtactgctgctgattgaaagttgggaagcgattcgtgttgccaagctcgaggggcgggaagtagccttgggatgatgcgggaataccagaagcacccgctgaaccctgatcctgacccccatcctgacccgcatcctgagcccgctgtccagcaaacggctgcccaaagtcgtcatcgctctcgtagttgaccaaaaatcgcgaagcacttggtgggggagaagcaggttgg

SEQ ID NO: 34139 - DNA, 4028 bp, DROSOPHILA
ctgtgtgaacgtgaactttacggaatttaattagagaaacgggtgaagaaaagttgcaaatagacaatcgctgccaattttccatgccgtagatgggtgcatctgcgacgtaacgatcccccgaattcggtgcttggcactcgagatgtgtagccagtgcggattcgtgaacgcaacgcgtgtgcagtgcagggcaatagttgccattcccagtagcagtatcactaccactaccagtcccattccgattcccgttcccagtcgcagcagggccaataacagcagcagcggtcgtagggaaagcgacgtatgaaagggaaaaatgcatacagatgcgaaaagcgagacccagttgcgccgataaacaagcaagcactaattgattgccaaatacagaacttcaagacagcagagtagccagctggagctgcaagctgcgaggagaagcacgcaggtcgaccactgagagagctgggctagagcatgaaagacagccatgccttcggcacgacctggtagtctcaaggatccggaaatagccgacctattcaacaagcatgacccggagaaaatcttcgaggacctgcgcgaaatcggccatgggtctttcggcgcggtctattatgcgcgatgcaacctcaccagggagatcgtggccatcaaaaagatgtcgtacaccggcaagcagagccaggagaagtggcaggatattctcaaagagatacgcttccttcgccaattgaaccacccgaacaccatagaatacaagggatgctatttgcgcgaatcaaccgcctggctggtgatggagtactgcgtgggctccgcctcggacatcatcgaggtgcacaagaagccgctgcacgaggacgagatcgccgccatctgtctgggcgtgctcagtgggttgagctatctgcactcgctgggccgcatccaccgtgacatcaaggcgggcaacatcctgctcacggacaacggcgtcgtcaagctggccgatttcggtagcgctgccatcaagtgtccggccaacagttttgtcggcacgccctattggatggcgcccgaggtgatcctggccatggacgagggccaatacgacggcaaggtggacgtgtggtcgctgggcatcacctgcatcgaactggcagagcgcaagcctccctactttaacatgaacgccatgtcggcgctctaccacattgcgcagaatgagtcgccgactcttccgaagaacgactggtcggatgcgttttgcagctttgttgaactgtgcctcaagaagatgccagcagagcgaccctcgtcggccaagctgttgacccacgcctacgtgacccgaccgcgttccgacaccgtgctgctggagctgatcgcgcgcaccaagtcagcggtgcgcgagctggacaacctcaattaccgcaagatgaagaagatactcatggtggacacctgcgagacggagagcgccgtgggcgacaccgacgaccaacaggacgaccatgccggcggcgacagcagcaagagcaatagtattacttcggaacactccatacactcggtgggtgtatcggcagccagtagtcagagctcctcatccaattccataccggctgcggcacagaatcatcaccatatcgctgcgcaccaccaccagcaggcggctagcgccgctgtggcggcggcaatgcaccaccatcaccatccacaccagcagccgccgcccagctggccaagcggccagcaaggacagccggtaccgcctggagccgtgtcccgcaactcgtcgcgccatcgaaaccggccgccgctgccaaacataatgcacagcatgaacaacaatgtgacgccaactaactcggcatcggtggtgccggcaccagcgcctgctccagtactcccaccgcctatttccgtgctgccgcatctgagtgcgatgggccacgtgggcggcgggggcactgggaccggtggcagcggtggagggtctccagcatccggtggacccctggcggatcgcatccagcccgttcagccgcgctatctgacgacgcccgccgcccaagcggccgtgtatgcggccagctccgcgtcctcgcaacaggccatctccaatgcagtcaacgatcacgggcccaacaactttgccaccatacggaccaccagtatcgtgaccaagcagcaaaaggagcacatgcaggaggagatgcacgaacagatgtccggctacaagcggatgcggcgcgagcaccaggcgcacctggtcaaactggaggagaagtgcaaggtggacatggaggcgcacaagacggccctggacaaggagtatgacacgctgctccacaactttacgagggacctcgatcggcttgagacgaagcatcagcaggatgtggagaggcgcgctaagcaaacgagcgccgccgagaagaaactacacaaagagattacgctaaagcaggagaacgatcgcaaggtgtacgacctgaaccgcaagaaggagtacaaggcgaacaaggagcgctggaagcgggagctctccatggatgagtcgacgcccaagcggcagcgcgatcttaccctgcaatcgcagaaggacaacctcaagcagcacgaggcgcaggaggagcagcgcatgctccaggcccagaagcagtacatcgagctggagatgcgcaagttcaagcgcaaacggatgatcatgcagcacgagcacgaggatcagcagctgcgcgacgagctcggaaagaaggagcagcaactgcagcaggcacacgccatgcttcttaagcaccacgaaaagacacaggagctggagtaccgccagcagaagagcgtgcaccagttgcgcgaggagcagataaacaagcaacacgataccgagttgcataatcaaaaagactacatggaccgcatcaagaaggagctggtacgcaagcatgcggttgagctgaggcaacagccgaagagcttgaagcaaaaggagctccagatacgcaagcagttccgggaaacatgcaagacgcagacgaagcaatacaaacgctacaaggcccaagtactgcagacgacaccaaaggagcaacagaaggaggtcattaagcagctgaaggaagagaagcatcgcaagctgacgctgctcggtgaacagtacgagcaaagcattgcggacatgttccaaagtcagagctacaaactagacgaaagccaagtgattgagtgccaacgtacccacgagcagctggagtacgagctggagatgctcactgcctaccagaacaagaacaagaagcaggcacaggagcagcgcgatcgcgagcgtcgtgagctcgagaatcgcgtcagcgtgcggcgtggcctgctcgagaataagatggacgccgagttgcagcaattcaaccaggaacgcgccgagcgcttgcgcatgaaacacgagaagcatactaaagaattggaagcatttgataacgaatcaattgccctaggtttcagcactttatctctgattgaggtatcccgagaagcctatgcagatgaggagggaagtctgtctggttcaatgattagtttagcccatagcaatagttcaacaagttttccggctggttcgctatagcatagacaacaacaatgccaacccccacaacaagtgtttagtaatatgaactacttcaattttaatggaaattataaagccaacagtgcgacagcaacaactagagcccgacacaagcaacagaaatcgccgctaagacatcaatagagcagcaaaaacaatagcagcagaaacagtcatggctagctagcaatgtttttgtaggaactagaaagaagacacacgacacacaacccaaaacacacatgcgtgcgatcaattatcggattggttgcttaggaaaacatgagaacccaagtattttctaaaagttacaacaagctaaagctgcaatagttttgtattaaaggaaactcgatcggaggtggcaacaagatactaacatttgaaaccatttaatacaagatcaatc

SEQ ID NO: 34140 - protein, 1039 aa, DROSOPHILA
MPSARPGSLKDPEIADLFNKHDPEKIFEDLREIGHGSFGAVYYARCNLTREIVAIKKMSYTGKQSQEKWQDILKEIRFLRQLNHPNTIEYKGCYLRESTAWLVMEYCVGSASDIIEVHKKPLHEDEIAAICLGVLSGLSYLHSLGRIHRDIKAGNILLTDNGVVKLADFGSAAIKCPANSFVGTPYWMAPEVILAMDEGQYDGKVDVWSLGITCIELAERKPPYFNMNAMSALYHIAQNESPTLPKNDWSDAFCSFVELCLKKMPAERPSSAKLLTHAYVTRPRSDTVLLELIARTKSAVRELDNLNYRKMKKILMVDTCETESAVGDTDDQQDDHAGGDSSKSNSITSEHSIHSVGVSAASSQSSSSNSIPAAAQNHHHIAAHHHQQAASAAVAAAMHHHHHPHQQPPPSWPSGQQGQPVPPGAVSRNSSRHRNRPPLPNIMHSMNNNVTPTNSASVVPAPAPAPVLPPPISVLPHLSAMGHVGGGGTGTGGSGGGSPASGGPLADRIQPVQPRYLTTPAAQAAVYAASSASSQQAISNAVNDHGPNNFATIRTTSIVTKQQKEHMQEEMHEQMSGYKRMRREHQAHLVKLEEKCKVDMEAHKTALDKEYDTLLHNFTRDLDRLETKHQQDVERRAKQTSAAEKKLHKEITLKQENDRKVYDLNRKKEYKANKERWKRELSMDESTPKRQRDLTLQSQKDNLKQHEAQEEQRMLQAQKQYIELEMRKFKRKRMIMQHEHEDQQLRDELGKKEQQLQQAHAMLLKHHEKTQELEYRQQKSVHQLREEQINKQHDTELHNQKDYMDRIKKELVRKHAVELRQQPKSLKQKELQIRKQFRETCKTQTKQYKRYKAQVLQTTPKEQQKEVIKQLKEEKHRKLTLLGEQYEQSIADMFQSQSYKLDESQVIECQRTHEQLEYELEMLTAYQNKNKKQAQEQRDRERRELENRVSVRRGLLENKMDAELQQFNQERAERLRMKHEKHTKELEAFDNESIALGFSTLSLIEVSREAYADEEGSLSGSMISLAHSNSSTSFPAGSL

SEQ ID NO: 34141 - DNA, 3108 bp, DROSOPHILA
aatgggactggtagtggtagtgatactgctactgggaatggcaactattgccctgcactgcacacgcgttgcgttcacgaatccgcactggctacacatctcgagtgccaagcaccgaattcgggggatcgttacgtcgcagatgcacccatctacggcatggaaaattggcagcgattgtctatttgcaacttttcttcacccgtttctctaattaaattccgtaaagttcacgttcacacagcacacagtgttaccagatcagccgagcggcttgaaaccaaaaactaccactgaccgctttttactaaaaaatcccgattttaggcgatatatttaaaattaacttatttttttcaatatgtttgcgaagttaactcttgcagaggcgtttttatagttgaattcgctcaattcaattagttttaagagaaaaggttcgttttttggtctctatcgatagtctatcgaacgtgcaccgggtggtgatgtccgtggttacgctatcgttttggaattattagtttttttttttaatgtttgaaaatcaataatttaacttatacagaattctgcagaattacagctcacgaaatcgcagttgggtatctatgttagaagaacacatatatgtatcaaatttttaataactttttaatagctcagttcgctaagtcaaataccgatactcatcgcaacaagtttggcgcactttttgaaaacatactgataatttcatgatacggtatttacttagctatttaacgccctcctagttaatataaattacggggaacttacattattactttatttgatatgttatttacaactatgcaaactgggaatacaaaaaaatggatgcttatatttaaaatagtttatgttcaattttaagcacactgcaacacataagctatacatatgtacatacacataatatatcaagctgcgaagttaattttattgcccacgttggaaaaatgagaaactctaccgcttaattatagaagtactgctgctgattgaaagttgggaagcgattcgtgttgccaagctcgaggggcgggaagtagccttgggatgatgcgggaataccagaagcacccgctgaaccctgatcctgacccccatcctgacccgcatcctgagcccgctgtccagcaaacggctgcccaaagtcgtcatcgctctcgtagttgaccaaaaatcgcgaagcacttggtgggggagaagcaggttgggagtcaggcccatctgcagtgacaggaaatgcagccgcatccggatcggcaactgagtccgggtcctgggagtcaactaagtctccgctgtctgggtcagccgccgccgtcgcctccgccacggctcgcgacctaaagaaggtatctgcaaagtgtcggagagaacccaattgtacggcagttagttaagaggtttcgtattttaccagtaggttgtgcgtactgatagataaggcggtcgcccagctgggcgggacgccgctgttgaggatcgggctgctggggtcgtgggcgcggccgtggccttgggcgtggcggagctgtgggcggcggcggaggaggtggaggcggtggaggttcagctggcgccgctggctgcgcatcatagtcatagtcgtagtcatagttcggcggaggaggcggtgccagtgtcgttgggcgtggacgtggtcgcacctgcggtcggacgcgtctaggtggctgtgtagtgggcggcgcaggcgctggaggtcgtggtgccggaggatcagcgtagtccacatcgaaggccccgggcaggaaaccggaactgaagaacggatgccagatgggcttacgaatgcgtatcggagcaggtggtggtggcggaggcggcgtcgtcgtggtggtcgtcggtggacgacgtgtggtccgcgccagattggccttagccgaggacagctgggcgctcttgagcagcaggttacgcaggagcaggccaaagtccagggtgatggtgcctcgcttttctcgcgccacctccgtgtcctgcggcccaggatcggctgagatcagcgccaggagcaggcccaccaacagcagggccatcaactgcagacgtaacatcctcatcctgacggatcaaagagtatgtgtgtaccgctcgaaaggccgttccaatcagaactggcgctggtcagcgctggagtcgcctgcctgtactccaacggagtggtgccacgcgggcctgggcgtcgcggattaagtgcccccccaaagtcaactagttagacgggttagctgcgaccgtccgcctggatctcgtaatcgcagaccccgccgactgccggcggttatcaacgagttcagtgcgtggcaacaattacttttgcactacttttgcgccagtttatagatcgtaagtgcagctcgaactatgcataatgcttagcggcgagtgcattttaagaggctaaacaacacgcaccgtgggactagaactccatatacccacctatatatataccatacatacacatagcatataccatatagtagagctgcctccaacataagggattgatatacacaagggaactaactatctgcaagctcattaagtatctatactatttagattgttctgtgtcgagtacgaatctacatgttttaaaaccctaacaaaatatcaataattcacagataagtttcccataagatagggaaatcattcatagattgcttgttttataattgtaaactcaagtggttatataccatatacaaacgtatgtatgtacatactaccaatttcacttgaacttgtgtcaaatctcattcctcaaaacagttcaaatgttcaacaatgaagattatctgaatattataggtgtattcgattgggaaagattttacgaacagtgggcgcttactaattcgttgactaattcgtcaagtttgtaccactgtgccgaaaaagaggggctgtcacgatttgctctcataataatatgaatttcaatttcggtttggctgcggctgttgcatttgattttcaagatatatttaatcatttccagagtaattaacagcttttggtttttcaagcattggcgcaactggacaa

SEQ ID NO: 34142 - DNA, 1047 bp, DROSOPHILA
atgttacgtctgcagttgatggccctgctgttggtgggcctgctcctggcgctgatctcagccgatcctgggccgcaggacacggaggtggcgcgagaaaagcgaggcaccatcaccctggactttggcctgctcctgcgtaacctgctgctcaagagcgcccagctgtcctcggctaaggccaatctggcgcggaccacacgtcgtccaccgacgaccaccacgacgacgccgcctccgccaccaccacctgctccgatacgcattcgtaagcccatctggcatccgttcttcagttccggtttcctgcccggggccttcgatgtggactacgctgatcctccggcaccacgacctccagcgcctgcgccgcccactacacagccacctagacgcgtccgaccgcaggtgcgaccacgtccacgcccaacgacactggcaccgcctcctccgccgaactatgactacgactatgactatgatgcgcagccagcggcgccagctgaacctccaccgcctccacctcctccgccgccgcccacagctccgccacgcccaaggccacggccgcgcccacgaccccagcagcccgatcctcaacagcggcgtcccgcccagctgggcgaccgccttatctatcagtacgcacaacctactgataccttctttaggtcgcgagccgtggcggaggcgacggcggcggctgacccagacagcggagacttagttgactcccaggacccggactcagttgccgatccggatgcggctgcatttcctgtcactgcagatgggcctgactcccaacctgcttctcccccaccaagtgcttcgcgatttttggtcaactacgagagcgatgacgactttgggcagccgtttgctggacagcgggctcaggatgcgggtcaggatgggggtcaggatcagggttcagcgggtgcttctggtattcccgcatcatcccaaggctacttcccgcccctcgagcttggcaacacgaatcgcttcccaactttcaatcagcagcagtacttctataattaa

SEQ ID NO: 34143 - protein, 348 aa, DROSOPHILA
MLRLQLMALLLVGLLLALISADPGPQDTEVAREKRGTITLDFGLLLRNLLLKSAQLSSAKANLARTTRRPPTTTTTTPPPPPPPAPIRIRKPIWHPFFSSGFLPGAFDVDYADPPAPRPPAPAPPTTQPPRRVRPQVRPRPRPTTLAPPPPPNYDYDYDYDAQPAAPAEPPPPPPPPPPPTAPPRPRPRPRPRPQQPDPQQRRPAQLGDRLIYQYAQPTDTFFRSRAVAEATAAADPDSGDLVDSQDPDSVADPDAAAFPVTADGPDSQPASPPPSASRFLVNYESDDDFGQPFAGQRAQDAGQDGGQDQGSAGASGIPASSQGYFPPLELGNTNRFPTFNQQQYFYN

SEQ ID NO: 34144 - DNA, 4690 bp, DROSOPHILA
cagctgcatatcgagtcccgaacggaagtcgtggaccagatggaccagatggatcacatggacgggatggatcaggtggtgcagcacgagaagcgcagtgatatccagcctgacctggaaacgagtgccaacaaaacagagactgacctcgagttatcaaattagacttatcagctcctatttagcctttattaaaacgaactacttgtaatctaggcacaattaacttaaccacgggtctagagttacgatggaatgaatggtccttgagttgaaaagtcttgcacttaagacgatatcagtcgttatctggttgcgacttttgcgaccaggtgggtttcgaattagtcatgaaggtgattcccgactttggcttgctgtaatgggcacacaaagatttcaattctgactcacagaggcgatgcacgccccattcagttacagaaaaaaagaaaagaaacacaaaaaaaaaacagaaggaacgactttgtctagtgtctcgactatcagatatgtatgcaccaaagcgtttacaagtttttcagtttgataagagccaaatctgttgataatttacattccatagattacgtatttgtatttgtatacttgacttccccactttgctgaccatgtgtcttgactttcatctgcgtagtgacgaaatgctatgtttatagtcaggaaattggagaatttgctctgataaaacgataaaatcaatcgattgacaaaccaatcgaaacgtatttattaacattttaaacttgtattttggatgcttaaagtgggcggggccaacatgttgtgggcagatcgacagaaatgggcaagccaaataataaaagtaggcgtatctgcgttcatatggatggacatggaagtatcgactcgtccagtgattctgatcaagaatatcggaatcgcttaccgtacaatgaatttcgaacacagttttaatactttacgtaacgcatgaaatcatatattttaaatgtaattatactaaaacgttgctcttttcgggagcagcctgaataacttcgtcgggtatcgtggatatcgcttccgcaggcttacctactggagattcttcgactgatgccttcacctccgacatcctgggctccaccaccgcggccggcttggcatttggcctctttgcgggcagcaaaaggctttccagaccggcgaatggcgcttcgattaggatatgcatgaggtacgagaacagaatcgtaaagccaaagtccgtccagaatcgaagcatctggagatagggggattcttagaatggtcaactccgcgtacaagggaacatggtacctaccacttgatagtcactaaagtaggtacttgtgtgcgtgattccaccgttcaagctctcgatgaacatgtgaaagatgtaggcggaataggatagcctggacagcggctgccacaggggagaggatagcaagctgttggccagtcctccgtaaccgtgcatgcaggcgaaaaccacccagcagagaccaaggggccaggcgatcctggttaggcttacgtagaaggcctcctccacaatgggcaacgtgttctgaccatagatcgaaaacaggcagctggctatcagtgacaacgcaatcagccatcccaggaggacagccaggcggttcagcttgaaatccttgccccggttggtatgaagaaagtagccgaacagtatgccaatcaggtagggagaagcacgagtctgtgtggcatagtagagcttcctcatcgaatcaccgccgcttcctctgcaaataagagaattgttctgaatatcttacatataagtatccctaacatccacttacagcgataaatcattgatgaccatgatgctaaaaagacagccggccagcaggagcatcagaacaaagattccggcagccgccttcttgccccacttgtacaggcagatcaggaggaatggtgcaaagatgtacagctgcatgtccaccgccaggtaccaggaatgacttaggcactgcgagaaaccgtgggtgatataaggtgatacaaaatgtcgtcatcgaaggaccctaccaggctatcagtcgcatagttctgcacatagagtagtgtccagtaccaggtgctctcacatgctgagtagtcatcaaagcttattgatcctttaagtggcccgctttcccacagcggcaggatcttcatgtagaagagtatggcaatggccaggatgggcgtgagtcgcagataccgatgcaaatacattaggggtatattcagctttcccttggttctggacggagtaacaacacaatgtaagtgagtaattgagtaattcaaatgatatccctatcattcaagtcacaactcacctatccattgatcgcagggcaatcaccacgagcaacagaccgctcaggaagaaaaatgagtccaccgcatagaccgcatgttttacaaacagactgtagaatgagttgatccactaaataatgggtaattatatagaacttttacgtttttcttttactcgcccaacttaccgtcagaaggtaacccatattaatgttgggcgacgtggcaagcaccatatagtcatgaccgtagaccacccagatgaaggaaaggcatcggatcccatgaagacaatcgatgacgttgggattcgccttggtgtccacaatgcggaatagggcacgcgagttagctcgtgccgagaaggcttctaccactggatggatggtttctacaagcacggacgattactacggattcaaggatcgcattcgcgaagaactcactctcatctttgcaaaagaaataatcgaaaatagtgcagacgcccactatagcacccaagatcgaaacgatcactctgaaagtttacgtgttaaccaaatcttagaccatcgtcgcatccatcatctctttatgattatgatctctacttacatggtgaatatggcgaggccatcgtacggtttcttcactgcggtctggcatgtctcctcggcgacgatctgcacatctgcatcaatctccacggtgagcagcttctggaagagccttcggagcatcgtatccatgttagcggcggaacaggtggccggaaagcagacagctgacttgagagctaatatgggcagcagacttggagctggtgtcagtttggtgatgcagtacttgcccttgatactgtgactgctggtcacagcatggtcaattgcaatgcactcgtcgaagttgcccaagttccaccagttgcccgccagcattcccgaaggcagcaggccccaggagtcaatcactgcaacggaatcgaaacgaaactgaggtacagagagcaccttgggtacgcaagcctcactactcactcttcagggcccagaatttaaaggacgataggtccttggacaggagcgctagatccgctaggcactcgagatcctgcaacgagggtatcctcgagttcgagttcgccgtgagatcctctagagttacattggcgtagtgctcaaagaactccactgacaagcgtctggtgttgaaaatactcgaataatgatccccaccagcaatgtgctcagtgagcagtttcgtattggtcatggcaaatatgttggtcatctgtgcattaacacttttggccaaagccaaaaggcccaatcccaggataaacgccaacctaaccatgttgctctgtctggtggcgaaatgaatttgatcggattgccaacgcgcctgggggcttatattcgcggcacttcatggtccgtcattctgcgattaatccataaccataaccatggaacgcaaagtgttttaaaatacgccccacacgttcagcgctgataatcaattcttatctatagtctccttttggtgttaacttatggtgctgatttatttaagtataatctacacatgcctgtcactaacttgaatcaattttagaagatataaaagtaaagtattaaagtaattacaaccggaataattgagaaaacttcttgatttcgagacgaaatcgatctcaatgttgatatttgcaggcacatgattcgatcttggctagattttgagatcgaagctatcaaagattatcattccagttacgcattgtaaatcctaaggactgttaatcgttttattgtttgaccatcttgattaaccacacaaaaaacactttgcataaactttgcacaattcattgttaagatataaggatttatgaaaaaaaattccttgaaattctaacctattgtatattcggttcaggatcagcgactccaagaatagaaacttgcgttgaaaaataaacggttttgaataaccaaacacttagtgataacggcctaatgggttccagctgaattatgaggagcacttgtgaccacgcaatcagatcgggtattaggtgactcgtacttggcacttgaggtgtatgtattcaagccaaatgtctggtcctatcaatgagtaattcgaagaaggccgtctgacttgattggcatcgcgttaggagcatcgaatttgtttgtaatgatcccaaaacaaagttgttattcgcacgttatcagtcgatttcaggcgattccgcttaaacgattctggcttattattcggggaagtgatattgtcatgcacggctattttcatagtcatataaaccagcaaaagagataaaacaaag

SEQ ID NO: 34145 - DNA, 2175 bp, DROSOPHILA
atggttaggttggcgtttatcctgggattgggccttttggctttggccaaaagtgttaatgcacagatgaccaacatatttgccatgaccaatacgaaactgctcactgagcacattgctggtggggatcattattcgagtattttcaacaccagacgcttgtcagtggagttctttgagcactacgccaatgtaactctagaggatctcacggcgaactcgaactcgaggataccctcgttgcaggatctcgagtgcctagcggatctagcgctcctgtccaaggacctatcgtcctttaaattctgggccctgaagatgattgactcctggggcctgctgccttcgggaatgctggcgggcaactggtggaacttgggcaacttcgacgagtgcattgcaattgaccatgctgtgaccagcagtcacagtatcaagggcaagtactgcatcaccaaactgacaccagctccaagtctgctgcccatattagctctcaagtcagctgtctgctttccggccacctgttccgccgctaacatggatacgatgctccgaaggctcttccagaagctgctcaccgtggagattgatgcagatgtgcagatcgtcgccgaggagacatgccagaccgcagtgaagaaaccgtacgatggcctcgccatattcaccatagtgatcgtttcgatcttgggtgctatagtgggcgtctgcactattttcgattatttcttttgcaaagatgagaaaaccatccatccagtggtagaagccttctcggcacgagctaactcgcgtgccctattccgcattgtggacaccaaggcgaatcccaacgtcatcgattgtcttcatgggatccgatgcctttccttcatctgggtggtctacggtcatgactatatggtgcttgccacgtcgcccaacattaatatgggttaccttctgacgtggatcaactcattctacagtctgtttgtaaaacatgcggtctatgcggtggactcatttttcttcctgagcggtctgttgctcgtggtgattgccctgcgatcaatggatagaaccaagggaaagctgaatatacccctaatgtatttgcatcggtatctgcgactcacgcccatcctggccattgccatactcttctacatgaagatcctgccgctgtgggaaagcgggccacttaaaggatcaataagctttgatgactactcagcatgtgagagcacctggtactggacactactctatgtgcagaactatgcgactgatagcctgtgcctaagtcattcctggtacctggcggtggacatgcagctgtacatctttgcaccattcctcctgatctgcctgtacaagtggggcaagaaggcggctgccggaatctttgttctgatgctcctgctggccggctgtctttttagcatcatggtcatcaatgatttatcgctaggaagcggcggtgattcgatgaggaagctctactatgccacacagactcgtgcttctccctacctgattggcatactgttcggctactttcttcataccaaccggggcaaggatttcaagctgaaccgcctggctgtcctcctgggatggctgattgcgttgtcactgatagccagctgcctgttttcgatctatggtcagaacacgttgcccattgtggaggaggccttctacgtaagcctaaccaggatcgcctggccccttggtctctgctgggtggttttcgcctgcatgcacggttacggaggactggccaacagcttgctatcctctcccctgtggcagccgctgtccaggctatcctattccgcctacatctttcacatgttcatcgagagcttgaacggtggaatcacgcacacaagtacctactttagtgactatcaagtgatgcttcgattctggacggactttggctttacgattctgttctcgtacctcatgcatatcctaatcgaagcgccattcgccggtctggaaagccttttgctgcccgcaaagaggccaaatgccaagccggccgcggtggtggagcccaggatgtcggaggtgaaggcatcagtcgaagaatctccagtaggtaagcctgcggaagcgatatccacgatacccgacgaagttattcaggctgctcccgaaaagagcaacgttttagtataa

SEQ ID NO: 34146 - protein, 724 aa, DROSOPHILA
MVRLAFILGLGLLALAKSVNAQMTNIFAMTNTKLLTEHIAGGDHYSSIFNTRRLSVEFFEHYANVTLEDLTANSNSRIPSLQDLECLADLALLSKDLSSFKFWALKMIDSWGLLPSGMLAGNWWNLGNFDECIAIDHAVTSSHSIKGKYCITKLTPAPSLLPILALKSAVCFPATCSAANMDTMLRRLFQKLLTVEIDADVQIVAEETCQTAVKKPYDGLAIFTIVIVSILGAIVGVCTIFDYFFCKDEKTIHPVVEAFSARANSRALFRIVDTKANPNVIDCLHGIRCLSFIWVVYGHDYMVLATSPNINMGYLLTWINSFYSLFVKHAVYAVDSFFFLSGLLLVVIALRSMDRTKGKLNIPLMYLHRYLRLTPILAIAILFYMKILPLWESGPLKGSISFDDYSACESTWYWTLLYVQNYATDSLCLSHSWYLAVDMQLYIFAPFLLICLYKWGKKAAAGIFVLMLLLAGCLFSIMVINDLSLGSGGDSMRKLYYATQTRASPYLIGILFGYFLHTNRGKDFKLNRLAVLLGWLIALSLIASCLFSIYGQNTLPIVEEAFYVSLTRIAWPLGLCWVVFACMHGYGGLANSLLSSPLWQPLSRLSYSAYIFHMFIESLNGGITHTSTYFSDYQVMLRFWTDFGFTILFSYLMHILIEAPFAGLESLLLPAKRPNAKPAAVVEPRMSEVKASVEESPVGKPAEAISTIPDEVIQAAPEKSNVLV

SEQ ID NO: 34147 - DNA, 3349 bp, DROSOPHILA
gctgtgtgccaaaacatagtagacttgggttggaataaaccagttggctcgaaatactacattcaaatatttaaataacattagaatccaattgctcataacaaaaacggcatgaattgcaaggacatagattaaatttgatttaccatcaaaggaaatggtatattttctaaacgataagccaaaatcttcgtatgtggaggaacgtaacttaaatgctcaatttcgttttatttgttcacgctacttaaacgttcacaattagttaaataactagtttacttaaatagtcttcttttgctcacgagcatccttttgttgttctgtagctgccttttacttatatattaattctaattttataaatacactagtttcacatttcccaaagttaggttttagttaaatcttatgtgtctactaatattatttaaaagcttatgtgcttctccatttaacgttgattactttcaactaatattttatgtaaacaagtaagtatgctgctatgctcggaccataaagaattcgaatcgcttagattatttatttaggccgaccaaaagaactacaacaatatacgacgaatggcattattctaggtttatgccatggcacatcggagtagaaacatggtttgggtagttaaggttatgtacattcctccatttagcataaatccgaagatacctggagactatcattgccttaacatggttaaaagaagctggttatggacctatgtttcccgcaaaaacgttctgcgcatcgcaactggggcgcactgcgctggaaagtgtattcgcttgcaacaataaaaaaaaaatcgctttgtatacaaaataattgtggtttcattatttacaatgtgcaatactcgtttagaaaaatgtacacctaatctagtgctacgtctgtatcaataattttatgaaagtacgtctcttgaccgaggaaacggggcgggcgtgatgtggagacgcccggcccgacggcggagctatcggcgctttatcgagatcttgcccttggccagatgggacatgttgatcttaaccttggtctcgttggtgcgcttcacccaaacctgcaagagcgaatcatggttagaaactgttccgctggacttgtgaccccccaatcggggaaagttgaactcaccacctcgttgccaatggccgtaatggtggccgcgaacttgctcatctccttgccctcgacatagacctgctggccgcggcagaaccatcgccgctcgtacagcagcttgttgtcctcgatgcgagtctccaccaggccgctattggaggtcggctcggccagaacgtgcatcgattgctgctgctgggagccactgccgtaggagccgctgccgttctgctggggaactggattcggtctgccacgctggatgatctttaggtccgactcgatttccttatcatccagctggtagacgagcagctggccggtggccggcttgcggcgcttctcgatcaccggaagcggttcgttggggcgacgacgcagcttgcgcgtgatcgtcgtcttgatctccatggaatcgttggtcagctcgatgctgaagcgctcgttctcgatctgacgcttgcggtcctcgaagtccgagatcaggttgtctttgaggtccatcatcttttcgtcgtactccttctgggcggccatcttctccagcacatagtcccgttcgacgcactcgcgcatgtactccttgtagacctcgttcatgcgtcggcgctcctttagctggctgtccagcttcttcacgcgcttcaagtactccggatgcaccagctggcccagttcctccatctgcttctgcaggttgaacagcttgtgctggtacattctacggcagtgaaatgattatggatcgaagataggagttaagaatgagccactacttactgctccttcagttcgctgttggtgcccatgttgttgctgttggaggtcccattcatggcgccgtagcggctggggctgcggaactccgtctcgctggcgtcgtccgtgtctggaagggagtggaagtggtagggggaagaggagagcgttggacgcgggacgtgagtgaagcctcctccaggaacgtcgtctgcgtactggtactcaccttcttcgctacgctcgtcgcctatcgactcgtcgtcgtaggtgtccgcttgtagtagtagactgtagtagttggacatggtcgtgttggtgggttcagaactcgcggctttgaaacttgatacccaaaatcaacaatttggtggcaattgtttattattatttatttttttcgctgcgatgccagatatacacacgcatacagtgaagcaaccacggcagtatcgatatatcgagcacgagggctatcgatcgttgtccagctctatggacttttggcggcagggttgtctatctaccgataacattactcatcggatatcgtgattatatgcgcgcgtagttcaaacttttgattttgaaatggccattgttacagccatttctgtgctaaaccaaaaaattatatatatatatataaattccatttcagtaatatgaacataaattattttattacctaaaaattcttcaaattctattaaatttccttttgtatttataaattgcttagctgtaaatttatcaattaaacagacaaccaaaccaaaatgttctgtatatgcatatgtaggaaaattgtggtaattgcttcatttattagtccattgttattgaatttaaattttgatgacgcactatccatgacatcagcggatatatttcaaaaatatgtcaccgggctagaatggaattgaattacagctacagctttgtgggtgtaatttaattgagcaactcacggctctggtgctaaacaaaaatgatttaagccgtgaacggcttacggtttcgaacaataaatagccgactgtcgtttttgcgcttcataaagtttaatttgtgtatctgcccgcctataattaaatagtgcccgcacaggcgctgcactcgtacgtatacgtaatacgcgtttacacttatgtacataaatatgtacatacatgtccaacaatccaacaatccgcatgggcgaaagcatactttgtttgaataccacgacggctgacatatattccgatgctgtcgtcaagcagaagccatccactggccgccagtggatgagtctgcccacgcaggagtagatcgctatttggtcgagctgaaaaattagtgagcgctcatcgtcgaccaaaaattccatgctaaatcatcgcgagtaaattttgattgatttctgactgcgagggggtggctaggtggctgctggctc

SEQ ID NO: 34148 - DNA, 1117 bp, DROSOPHILA
ttgcttcactgtatgcgtgtgtatatctggcatcgcagcgaaaaaaataaataataataaacaattgccaccaaattgttgattttgggtatcaagtttcaaagccgcgagttctgaacccaccaacacgaccatgtccaactactacagtctactactacaagcggacacctacgacgacgagtcgataggcgacgagcgtagcgaagaagacacggacgacgccagcgagacggagttccgcagccccagccgctacggcgccatgaatgggacctccaacagcaacaacatgggcaccaacagcgaactgaaggagcaaatgtaccagcacaagctgttcaacctgcagaagcagatggaggaactgggccagctggtgcatccggagtacttgaagcgcgtgaagaagctggacagccagctaaaggagcgccgacgcatgaacgaggtctacaaggagtacatgcgcgagtgcgtcgaacgggactatgtgctggagaagatggccgcccagaaggagtacgacgaaaagatgatggacctcaaagacaacctgatctcggacttcgaggaccgcaagcgtcagatcgagaacgagcgcttcagcatcgagctgaccaacgattccatggagatcaagacgacgatcacgcgcaagctgcgtcgtcgccccaacgaaccgcttccggtgatcgagaagcgccgcaagccggccaccggccagctgctcgtctaccagctggatgataaggaaatcgagtcggacctaaagatcatccagcgtggcagaccgaatccagttccccagcagaacggcagcggctcctacggcagtggctcccagcagcagcaatcgatgcacgttctggccgagccgacctccaatagcggcctggtggagactcgcatcgaggacaacaagctgctgtacgagcggcgatggttctgccgcggccagcaggtctatgtcgagggcaaggagatgagcaagttcgcggccaccattacggccattggcaacgaggtggtttgggtgaagcgcaccaacgagaccaaggttaagatcaacatgtcccatctggccaagggcaagatctcgataaagcgccgatag

SEQ ID NO: 34149 - protein, 327 aa, DROSOPHILA
MSNYYSLLLQADTYDDESIGDERSEEDTDDASETEFRSPSRYGAMNGTSNSNNMGTNSELKEQMYQHKLFNLQKQMEELGQLVHPEYLKRVKKLDSQLKERRRMNEVYKEYMRECVERDYVLEKMAAQKEYDEKMMDLKDNLISDFEDRKRQIENERFSIELTNDSMEIKTTITRKLRRRPNEPLPVIEKRRKPATGQLLVYQLDDKEIESDLKIIQRGRPNPVPQQNGSGSYGSGSQQQQSMHVLAEPTSNSGLVETRIEDNKLLYERRWFCRGQQVYVEGKEMSKFAATITAIGNEVVWVKRTNETKVKINMSHLAKGKISIKRR

SEQ ID NO: 34150 - DNA, 2629 bp, DROSOPHILA
aaacgaatttagcttatcttagcctagtttaacaaatttacatagtaatccaaggcgtcgccctcaacatcgccgtctatctgtttgccgccgatctctgtgcggaatttggtcaatatatccttgcgcctactgttcagtgtttggcccgccaagcgcttgtcctccccttgtctcagtccatcgagcaacgccccaatgcgcgtccgcaggagcaaatccaggcggtgcaccagagactgatcttgtcgtagtcctcttgctaccgccggtggcaagtccaacgtcgtctccattgcgggcaaatcgagcagagatgcaataaaagcaagcaacgcagatcccgtggtatccatatcgaggccattaagtgtgagactgttgcgttcccaggcttccgaagtgtctggcacctctagacgctcgttcatctgccgcaccacgtccaccggcactcgagtggcatcgctcctaagtgagtttgcctgcagacaggagtccagcgaactggccatgtatatctgtccgaagatgcagccagagtctcgacacagctggtagagcttgtagcgcatgctgcggtaatagaagttatcgtcgcacaggatcagatgccttccgctgttgtagtcgccgctggaggaaatgcggcggacttgaggcggccaatcggtgtcttcttgaatggcggaaatgagtttttcaattactttaaaaatgcggccgcgctgctccttgtaggccaggtcggccgagggggtagcgtcgaggaagtcgtcgtagcacagatgaacgatgtggcggacgcggagggcagcctgttgacccagcagccaggagcacagcgaggatttgccggctgctggcaggccgataagtgcaacaagacaaatgcgccgcatcgcgtgtggttggttggttcgttttttttttttttttgttttggggttgtttgtaggaagagtacgtgtggtcgccgactgcgggtgtggagggcggtctggactctgcgattagctatctaggatcgagaacagcagctgcggcgttgcatgccactgctgctacatggacagattgccggcgacaggcggctggacaggtgtaagtactgccgtggcggccgcctctttcagtcgctccttctcttgctccctctgctgctgctcggccttgcgggcgttctcctccatttcctccatgcgcttggcgttgattgtggtctgcacatccacgtaaactttcatcatattctggttgaagcgcgcgaacttggtaacgcacctgtccacacagaggtcctgtcgtgtgaagcggcatttagtgacgaatacctccgtggattccccagccttatacatacctcatggccgcccaggtcgcgctggctgagattatccacgcatcggctgaaacacagttccgtcactttgttgtataatgtgaaaaagtctttgagctgaaaggcgtggccagtgagtaaggttcagcgggagttcagcacactcttttacttacgttgcgcagattggaatccatcggtcgatagcaagttgcgtttagctagtgttttaatacaacaattatacaatttaattttacaaaccgtcacgttcgtgacgagcggaacagctgattagtctgtgcttggtaaaacgatagtcgatagcacggcaagcagactaatcagtgtgcgttatcgagtttaaaatacagatacccaaatttttcgcattgtgttcgtttttactttttatttgagagcaactaaagtgttcatctccccaggggggcagaaagtaaaataggacgcgaattggttcataatatacgataccgcaatccctaataattgattttaaaattataattgattctgataaaagcttacgtttaaattgaaaaatttacacggtatatgcaatattcattaatttgctgtataatttttaaaagattgccgtcaagggtaatttaatattatagtattataatcataatatttcggaatggagcagtacttttgaatggaactagggcatctatgtggcctgcgaagcgtcgggattggcgccatccgctgtggcaggacgactctcgcagctgtcctcgccactgctcgtggtggaggcgccttcctccggcgaggtcttcaccgcttcttccgcctccatctgcgcatccgccggtccggcgtccgccttgccgctctcctcgggatcgccgccctttttattctgcaacggaatcaacggaagtgagctggaatgttctccccaaatcagcgacggccttaccttcttgcgcttcttgggcttctccgtcttgacggcgtgcagttcctcctcctcctgcagcgcagacttgtagttggcgggaaagaactgtgtggcctcctggtggcccaccaccgagttggcgctaacgtagctgggaccgtaggccatcagcgtgggaatggtcggactgttcaccttgttcaccttcagtacaatcttgtcggtactgcaaggtacagcacaagatcagacagatattacatatgtaactcatcagccgttggccagtggatcgttggcagcacttacggaacatacggcttggcattgtacttctccacggagtttgc

SEQ ID NO: 34151 - DNA, 508 bp, DROSOPHILA
ttccgctcgtcacgaacgtgacggtttgtaaaattaaattgtataattgttgtattaaaacactagctaaacgcaacttgctatcgaccgatggattccaatctgcgcaacctcaaagactttttcacattatacaacaaagtgacggaactgtgtttcagccgatgcgtggataatctcagccagcgcgacctgggcggccatgaggacctctgtgtggacaggtgcgttaccaagttcgcgcgcttcaaccagaatatgatgaaagtttacgtggatgtgcagaccacaatcaacgccaagcgcatggaggaaatggaggagaacgcccgcaaggccgagcagcagcagagggagcaagagaaggagcgactgaaagaggcggccgccacggcagtacttacacctgtccagccgcctgtcgccggcaatctgtccatgtagcagcagtggcatgcaacgccgcagctgctgttctcgatcctagatagctaatcgcagagtccag

SEQ ID NO: 34152 - protein, 117 aa, DROSOPHILA
MDSNLRNLKDFFTLYNKVTELCFSRCVDNLSQRDLGGHEDLCVDRCVTKFARFNQNMMKVYVDVQTTINAKRMEEMEENARKAEQQQREQEKERLKEAAATAVLTPVQPPVAGNLSM

SEQ ID NO: 34153 - DNA, 4190 bp, DROSOPHILA
gcggcgttgcatgccactgctgctacatggacagattgccggcgacaggcggctggacaggtgtaagtactgccgtggcggccgcctctttcagtcgctccttctcttgctccctctgctgctgctcggccttgcgggcgttctcctccatttcctccatgcgcttggcgttgattgtggtctgcacatccacgtaaactttcatcatattctggttgaagcgcgcgaacttggtaacgcacctgtccacacagaggtcctgtcgtgtgaagcggcatttagtgacgaatacctccgtggattccccagccttatacatacctcatggccgcccaggtcgcgctggctgagattatccacgcatcggctgaaacacagttccgtcactttgttgtataatgtgaaaaagtctttgagctgaaaggcgtggccagtgagtaaggttcagcgggagttcagcacactcttttacttacgttgcgcagattggaatccatcggtcgatagcaagttgcgtttagctagtgttttaatacaacaattatacaatttaattttacaaaccgtcacgttcgtgacgagcggaacagctgattagtctgtgcttggtaaaacgatagtcgatagcacggcaagcagactaatcagtgtgcgttatcgagtttaaaatacagatacccaaatttttcgcattgtgttcgtttttactttttatttgagagcaactaaagtgttcatctccccaggggggcagaaagtaaaataggacgcgaattggttcataatatacgataccgcaatccctaataattgattttaaaattataattgattctgataaaagcttacgtttaaattgaaaaatttacacggtatatgcaatattcattaatttgctgtataatttttaaaagattgccgtcaagggtaatttaatattatagtattataatcataatatttcggaatggagcagtacttttgaatggaactagggcatctatgtggcctgcgaagcgtcgggattggcgccatccgctgtggcaggacgactctcgcagctgtcctcgccactgctcgtggtggaggcgccttcctccggcgaggtcttcaccgcttcttccgcctccatctgcgcatccgccggtccggcgtccgccttgccgctctcctcgggatcgccgccctttttattctgcaacggaatcaacggaagtgagctggaatgttctccccaaatcagcgacggccttaccttcttgcgcttcttgggcttctccgtcttgacggcgtgcagttcctcctcctcctgcagcgcagacttgtagttggcgggaaagaactgtgtggcctcctggtggcccaccaccgagttggcgctaacgtagctgggaccgtaggccatcagcgtgggaatggtcggactgttcaccttgttcaccttcagtacaatcttgtcggtactgcaaggtacagcacaagatcagacagatattacatatgtaactcatcagccgttggccagtggatcgttggcagcacttacggaacatacggcttggcattgtacttctccacggagtttgctataaattgcgccgtcagcggattgtcaccgttaaagaagccatagagcggaatgtcctcgcgacacgtctcgagcagaatagcgagatccttcttcttgtaggcgtcgaagatcatcacgatgtgcggtggctccggcacgggatccggcggaaggaaggtcgtggtctgggcacggaagtacgtgtagattagcgctgcatgggtgcgctggtcactgggcacccaaatcggcggtatccgaatagtcttggttctcttagctgcaaccggagcagttttggcctctggtgccgcacctgcctccgcctctgtctccgtctcttcctcagcctccgctacattttcgctcctaatctcggccagatgcactgcgtccggctgcacctgactattctccgttgatggctctaaccagagagtaaatagagtaaaactcgtgaatagatcaagttagcaaggatgacaggcgtctcacctggatcagatatctccacggtcacctccagcggcacaatcatgggcggcacggtgatctcctcctcgttgaactcgtccggcggcttaatggtctccttggtcagctcgtgggcatattggcggagcacggtcggtggcgtgccgagcacctcgtccaccttccagaagcacatcagcagctccttgtcgtagagctgctcgataacctccggtgacagtggattctccgcagcaaagttgacggtggcgatgtcgctaggcagaatggtaaataccttgcggtccttgcactgaatcttgagcggatcagccggctccgagagtttcttgaacatgtcgcgattaacctgtggcccgaagaccgtgatcccgatgtccggcaggttggccatgatgcagtcggtgacgctgtgaaggtactccagccgcttccgacggctctccgccagctcgatctcctcggccaggcgcagcgccttgttgcgcacctccagctgctccagctcgatcggctggagctcggtgatctcgtagctcaggtgcgtttccttggccatcgtcgactgcagcattcgggtgatcatggccaccagcttgggcacatccgtgccgaacatgatattgatggccttgccgctctaatggtccataaacataaacatagaggaaagacaatacatattcacctggcattatgttcccatgggatcactcaccgtgacaaacatccacgtgggctcgctcttcttgttgaatcgcttcagataggatatggagcccgccttgcactggcatatattggaaaagatggggatgttagtgcgctacgcctcggtgcttccgactgtgtgatcttacgatggccaactgcaggttgtcgcctcctagctcgagcttgatcttccgcaggctacccaccatgccgaggcagggaccgcaccattcggagtatatatcgagcactgaagcactcagggattagagcgagattactgggtggactaatggctaaccatcgcatcgagaacgtacccagcaatccggatcgctgcaggaacttctcgaactcctcatccgaggcgaggtcggcctgaagctgctggactcctcccttcttcgccattttttgcgcactgaatgggccatcaatcagataccgaactaaacacccaaccagctattgatcaaacagtggttgccaggacttaaaaggtcactcagtattttggcacaatcaatcaatcaacaatcccagttcccaaatggggtaacaaatgcgcaggagctgctgagtcgagctaggaagctacccatataatacagggtatttattataaacccgaaaacttttctatccttctgctagcactaaaaaaaaggacatcaccacaaggacattattataaggtgtgttgaaagtcagctttcctccaatcaatcaatcaaatacagattgaactttatatgccagggggtttattttctttttattctcaaaatggttttctatgcagcagcacattagtaaatgggaatcggtcgataaagcacatggcgatggcgatggcgatggctgtggctatgcccacatccgccgcgaatcgttccacttagtgatcgtgtcgcatttgtctgcgcagctcgcgcattgtgatctgcaaaaaaaaaactggatatggtcagaggatcgtgtgcgggctagatgggtggtcatagcgttggcgttagatactggttgtcatttacgatgatgaagtaatcaagttgcttacgttatttaccttcagaactgtggaacaatctttgtgtttgtggttatttacgcatcggcttacgaaatctttaaataatttcaaagtcaatagaattatcgagaatttgtgctgaatttggtaacggagcggtcatgtaacttaattacaggcttagtttcggttgggaaataatgcacgcaaatactggcgccgggggattggttcgcaagcgggatgggaatccggtcataatcgaatcgcatgttatcaccgggcagatcacgggattatgggttatttacattgctaaattaactagaattcaatgggctgcgaagtgatgcgctcgcgcccatttcaaatggtgga

SEQ ID NO: 34154 - DNA, 1821 bp, DROSOPHILA
atggcgaagaagggaggagtccagcagcttcaggccgacctcgcctcggatgaggagttcgagaagttcctgcagcgatccggattgctggtgctcgatatatactccgaatggtgcggtccctgcctcggcatggtgggtagcctgcggaagatcaagctcgagctaggaggcgacaacctgcagttggccatctgcaaggcgggctccatatcctatctgaagcgattcaacaagaagagcgagcccacgtggatgtttgtcacgagcggcaaggccatcaatatcatgttcggcacggatgtgcccaagctggtggccatgatcacccgaatgctgcagtcgacgatggccaaggaaacgcacctgagctacgagatcaccgagctccagccgatcgagctggagcagctggaggtgcgcaacaaggcgctgcgcctggccgaggagatcgagctggcggagagccgtcggaagcggctggagtaccttcacagcgtcaccgactgcatcatggccaacctgccggacatcgggatcacggtcttcgggccacaggttaatcgcgacatgttcaagaaactctcggagccggctgatccgctcaagattcagtgcaaggaccgcaaggtatttaccattctgcctagcgacatcgccaccgtcaactttgctgcggagaatccactgtcaccggaggttatcgagcagctctacgacaaggagctgctgatgtgcttctggaaggtggacgaggtgctcggcacgccaccgaccgtgctccgccaatatgcccacgagctgaccaaggagaccattaagccgccggacgagttcaacgaggaggagatcaccgtgccgcccatgattgtgccgctggaggtgaccgtggagatatctgatccagagccatcaacggagaatagtcaggtgcagccggacgcagtgcatctggccgagattaggagcgaaaatgtagcggaggctgaggaagagacggagacagaggcggaggcaggtgcggcaccagaggccaaaactgctccggttgcagctaagagaaccaagactattcggataccgccgatttgggtgcccagtgaccagcgcacccatgcagcgctaatctacacgtacttccgtgcccagaccacgaccttccttccgccggatcccgtgccggagccaccgcacatcgtgatgatcttcgacgcctacaagaagaaggatctcgctattctgctcgagacgtgtcgcgaggacattccgctctatggcttctttaacggtgacaatccgctgacggcgcaatttatagcaaactccgtggagaagtacaatgccaagccgtatgttcctaccgacaagattgtactgaaggtgaacaaggtgaacagtccgaccattcccacgctgatggcctacggtcccagctacgttagcgccaactcggtggtgggccaccaggaggccacacagttctttcccgccaactacaagtctgcgctgcaggaggaggaggaactgcacgccgtcaagacggagaagcccaagaagcgcaagaaggtaaggccgtcgctgatttggggagaacattccagctcacttccgttgattccgttgcagaataaaaagggcggcgatcccgaggagagcggcaaggcggacgccggaccggcggatgcgcagatggaggcggaagaagcggtgaagacctcgccggaggaaggcgcctccaccacgagcagtggcgaggacagctgcgagagtcgtcctgccacagcggatggcgccaatcccgacgcttcgcaggccacatag

SEQ ID NO: 34155 - protein, 606 aa, DROSOPHILA
MAKKGGVQQLQADLASDEEFEKFLQRSGLLVLDIYSEWCGPCLGMVGSLRKIKLELGGDNLQLAICKAGSISYLKRFNKKSEPTWMFVTSGKAINIMFGTDVPKLVAMITRMLQSTMAKETHLSYEITELQPIELEQLEVRNKALRLAEEIELAESRRKRLEYLHSVTDCIMANLPDIGITVFGPQVNRDMFKKLSEPADPLKIQCKDRKVFTILPSDIATVNFAAENPLSPEVIEQLYDKELLMCFWKVDEVLGTPPTVLRQYAHELTKETIKPPDEFNEEEITVPPMIVPLEVTVEISDPEPSTENSQVQPDAVHLAEIRSENVAEAEEETETEAEAGAAPEAKTAPVAAKRTKTIRIPPIWVPSDQRTHAALIYTYFRAQTTTFLPPDPVPEPPHIVMIFDAYKKKDLAILLETCREDIPLYGFFNGDNPLTAQFIANSVEKYNAKPYVPTDKIVLKVNKVNSPTIPTLMAYGPSYVSANSVVGHQEATQFFPANYKSALQEEEELHAVKTEKPKKRKKVRPSLIWGEHSSSLPLIPLQNKKGGDPEESGKADAGPADAQMEAEEAVKTSPEEGASTTSSGEDSCESRPATADGANPDASQAT

SEQ ID NO: 34156 - DNA, 2889 bp, DROSOPHILA
tgcgcactgaatgggccatcaatcagataccgaactaaacacccaaccagctattgatcaaacagtggttgccaggacttaaaaggtcactcagtattttggcacaatcaatcaatcaacaatcccagttcccaaatggggtaacaaatgcgcaggagctgctgagtcgagctaggaagctacccatataatacagggtatttattataaacccgaaaacttttctatccttctgctagcactaaaaaaaaggacatcaccacaaggacattattataaggtgtgttgaaagtcagctttcctccaatcaatcaatcaaatacagattgaactttatatgccagggggtttattttctttttattctcaaaatggttttctatgcagcagcacattagtaaatgggaatcggtcgataaagcacatggcgatggcgatggcgatggctgtggctatgcccacatccgccgcgaatcgttccacttagtgatcgtgtcgcatttgtctgcgcagctcgcgcattgtgatctgcaaaaaaaaaactggatatggtcagaggatcgtgtgcgggctagatgggtggtcatagcgttggcgttagatactggttgtcatttacgatgatgaagtaatcaagttgcttacgttatttaccttcagaactgtggaacaatctttgtgtttgtggttatttacgcatcggcttacgaaatctttaaataatttcaaagtcaatagaattatcgagaatttgtgctgaatttggtaacggagcggtcatgtaacttaattacaggcttagtttcggttgggaaataatgcacgcaaatactggcgccgggggattggttcgcaagcgggatgggaatccggtcataatcgaatcgcatgttatcaccgggcagatcacgggattatgggttatttacattgctaaattaactagaattcaatgggctgcgaagtgatgcgctcgcgcccatttcaaatggtggatcgggattagttagacataaatgcgttttcgggcgctactgggttgatatcgtatcaattcatatctatatgttccagtcgtacaggctgcgtgtacggtatgaccgactttttgttgacgtccctggataaggcctttctcatgtctgcaaagtgggtaaagcatcgattgttaggcgcctcttagaagtcaatgcaaattctgtgcgctctcaccgtacgcatcctcgtcctggtcgccggagtagtactcaagtatggtgcggtatatgatgtagccaaggttcgtgtacatgtttattgccacctggttgctcttcctcacaaaaagatccacaaagtatgctcgctttctgggggcgagaaaaagtagtcgtttagtctgtattgatatccaacgaattggggctggaattacttctccgaaatgtcctccaggaaactcatgagcagcgcagccagaccaaggcgccggtagtcgggcgagacggtcagcgcagtcacgtgtccgtgccagttgtccaggtgtccctccaccttgcccatgactagagaatgtagagcacacttgataggggaactcgtgcacacagtgaaatgcagtacttactgtagcccattatttgtccgctgggcgactccgcaagctgaaagtactccggccacttggccaggtactgggtgtagaaggacagcccgtaggtctccgtaagtgggtcaaagtttctggcggagcacacggcggtattggtattagcctcggatatgcgcatgtggatatccactgtactcacacattgttgaacttaaagaggtcgtcgcaggtgaagggtcgcaacgtggtcatcttatcacttaatctcggctaatccgatcctttttattgctcctataaaattgctatactcgccggcaatagagatgcgccgcggtcgatggcaagttatcgatagcctggaagcgagctttcccacaaatcggttaccgcgcaatgcagccgcggtcacactactagcacttccatttccacgctaggtcctgtcctcgctcttcttcttcctctgcctccagctggtatctgttgcctggccatggaacagtctcagtctcaacggcaggcgtggccttcgtcctccgcggggggtggcaaggcccaggactccggggtgctgacgcgcgaggacttcgacggcggaccggtcagcatcgacgaggtggacacaggcctgtttctaggtaagcatatagctctaatccttgtgatcgatgcatttctcaacccttccttacaccaccaggcaacctgaccgcggcgacgcacatggagacgctgcgctccttcaagatcacccacatcctcacgctggattcggtcccgctgccgcagcacattctggaggccagctttctgaccaccaaatatatacagagtaagcacacagatcggtagcttcgtgaatgtgcaacaacttcactggcgttaatccctgtttcagttgccgacatgccgcgcgaagatattctgcagcatctggagggctgcgttgactttatcagctcggccctggcccagcagggcaatgtccttgtgcactggtgagcatcttacctaggctgaccggcccacgatttggccactgactctttgtgccttccaacagctacttcggcgtcagtcgcagctcatccactgtgatcgcttacatgatgaagcgacacaatctggacttcctgcccgcctacgagctggtcaaggccaaacggcgcttcgtccagccaaacgctggctttgtcagccaactaaagctcttccggcgcatgggctgcaagattgaccccaactgccagcgctacaagatccatcgcctgcgcctggctggcgagcagatgcgc

SEQ ID NO: 34157 - DNA, 624 bp, DROSOPHILA
ataggagcaataaaaaggatcggattagccgagattaagtgataagatgaccacgttgcgacccttcacctgcgacgacctctttaagttcaacaatgtaaactttgacccacttacggagacctacgggctgtccttctacacccagtacctggccaagtggccggagtactttcagcttgcggagtcgcccagcggacaaataatgggctacatcatgggcaaggtggagggacacctggacaactggcacggacacgtgactgcgctgaccgtctcgcccgactaccggcgccttggtctggctgcgctgctcatgagtttcctggaggacatttcggagaaaaagcgagcatactttgtggatctttttgtgaggaagagcaaccaggtggcaataaacatgtacacgaaccttggctacatcatataccgcaccatacttgagtactactccggcgaccaggacgaggatgcgtacgacatgagaaaggccttatccagggacgtcaacaaaaagtcggtcataccgtacacgcagcctgtacgactggaacatatagatatgaattgatacgatatcaacccagtagcgcccgaaaacgcatttatgtctaactaatc

SEQ ID NO: 34158 - protein, 175 aa, DROSOPHILA
MTTLRPFTCDDLFKFNNVNFDPLTETYGLSFYTQYLAKWPEYFQLAESPSGQIMGYIMGKVEGHLDNWHGHVTALTVSPDYRRLGLAALLMSFLEDISEKKRAYFVDLFVRKSNQVAINMYTNLGYIIYRTILEYYSGDQDEDAYDMRKALSRDVNKKSVIPYTQPVRLEHIDMN

SEQ ID NO: 34159 - DNA, 3811 bp, DROSOPHILA
ccctcggacctttcgttaccgcgcacccgctcgcgaacgcgcctcagcgtggactcggaggcaacgagctccagacccggcacgcccacaatgaccaaggcacgcggcaagagggccacctcgcaggcaccgccgacggcgagtccctctgtccggcgatcattgcgcggccacagcgaaccgcccgctgcgttgagtgcgcagttggtgcgcaaaccgaagactgctcgtgcgggggtcagatcgcgcaagacgagctcaggcgtccagtcaccagtcgccgtctctccgactccgatcgatgctcccatagatgtacccgattcaactgcaccagaggaggagcagccgcgtctccgtcgcaccgctaggcgacgcatctcggaactgagcgatcagtctgcgaatggcacaggtgaccttcgctcggaagcctccagttctaggaccggctctaagtccaactctgccgccagcacgcagaaccgggagctacgtccgcgcttgcgtcgcacctccaagtcggagcattagttatgcacccggatcaccggatcagcagactcagaatcggctcggaaggcactgtatttttattttttactttgcttacgtttaatatttttaattttagtttggcattagtttgagtgtttaaataaattgaagttaatgtggaattgatagcatccacccaacacttttgagttttataagcagacggatttttcaaaataaagattattattattgagctccgatccgaatcctttcggatctgaagttaaggaggagcacaaacgggttacttacatttcatgataatggcgatgcagttctttagcttacaaagatgtattcgttagatggttcggagtcatacatatgtacaggtatttacaatggtcgttcttacagctaggattcggcaagagatgcgggcgtgcggtggatatcgtctgtaagtctgtgcgcagtcaagtccgcagcttaagcggatctagacgagcgtggagagctcgtgtaggaggacggtgatgttgctcatgtccagcgttggcggaatgcccgggctgaccgatccgctggcctcgcgacctgctgttaggcagctgctattcgccagtgttctgggcgtgggcgtcggtggtgtggcagtggctggacgcaccagaaatgaggagttaacggcacccagtgctccgcctccgccgccccctccaccaaggagaagtgggttaaagctgccgtgggagtgattcggcgagaccgccgtcacggagggcggcaccaggtggctctggtgcccctgatgagcggcctggtacgtgtggaacgggcccggtggcagtggcatggacacaggcagcgtcgccggcagctggccagccgagatcaccgacaagttgtgggacagcggtgctccacggtagctaatggtcttctcgcgctgccacacgaacacgttgtgcaccatggcgccgccgcagaatactatgcccactccaatcagcaggctggtcacgatcgccggcgtcgagtggaagtgactaaaggtgtacaggatcaggccggtcagaaagaccggtatggagatgaagaagccgctgacagcgcacgtgcggctggcactggacttgaccaggtattggttatcgcgaccctcgaaggccggctcgcgcagcttgacggcgaacaggaactggatggcgcaaaccagtaggcagcacaggttcagcgatagggagagggcgcccagtgccagggtgacgtcgtaaactacaataaagtcctcgccaccggcgccccgacccacggcgtcctcgcgtccattcggtgatatccttaggaggaaaatcagcgagagcagcgccagaagcagggaaactgcagaaaaaaaaaaaaacaggcattacttgacgctctcccgtcaccatatcggatgaacttactaaggcagagcagacccaggctggtgagggcctcgcgcggtgatgggcccgacttgggcagcttgtggcgcacaggattcgtgctcgggtggctgaagttcctgtagttctgcggcaactggctaagattgtgtgtctggctttgagcttgcgcatggttcgtttgttggtgttggtggtggtggttgtggtggttgtggtgttgctgctgctgatgatgatgttgatgctgctgttgctgctgctggtggctggccaggatgtgctggttggtgtaggtgtgatgatgcacactcccgttgcccagaaagtgcccgttgggcgtcaactgcgtgagcggggtgagcggcttgagcggcgtactgggcgtggcaatgtttagcagcgttgaattggcattgcccacgcaaccccgtcccgcacctactccgccagcaactcctccgcccatggcacctgtgccctcgttgagcagcgtgctcgaaacggacgcattcagggcggatatattcagcggctgcggcggccgcaggtgaatgttgcgcgcggtgctggccacagcagctgctgctggggtcggtgagccaccattgccattggtggtgccggccgtgcctgctgtggtcgcggtggttgcaactccaattccaataccgatgctcgcttccgcttccaccgttgggggtgtgttgtggccactgccactgcctcctgtgtggttgttgctgctgctgctgttgctgttcgggttgctgttgcagctattgaccagtagagtggacagcgggttgatggccactgcagcgctggtggcgctggtcgcagcggtgctgctcgtcgtcgaggcgtgcttcagcatttccggcggattggtcctccactccggtcacatgctgaactgggcgtcacggatcagttgctgttgctgcagcaggactagtcgacctgcgaagtgcattgctggcattagatgtgtttcagtaaagtggaaagttcaagagattaactgtgttgcatattagctatgtgttggtaactgcaaactgcaacggtattaacggtatttgtctgcagagagagaaaaaactgcgccccatcataagcactttcatttcgccagtggctgcgcatgcgcaaaactttcccatcatttatatatacatacatatatattatatacaaatgtatgtacatgcatttatgtggaaattgtgcatcgcatgtattgtgcaattaacggatggcgaagaactttccaccagcgtctaatggcgggaataaaagcaaaagcaagcgaggctcgaaaaaataaatctaaagtactaagtacttaatcttacctagaagcacttttaaattagatgtgaatttgatagaaaaagcatcttatttcgtaggaaaacttcttcaggatcaaaagatactcgctactaggcttttcctattgcagtttcttaatggtgctttagatcttgtgactgaactgacaatatcgatctgcatatatgtacatacatatgtgtctttgaagatatctgttctacttttggtttcaaggtccgtgatccgatagataggttcccatggttcatggctggttcctcggaaacctggttgttactcggaaaagctttttgagctgagcaaacagttttccatagccccaagaaaatgcacttaaaggtgtcatcaaagcggagacgacttcttcaaggtattcaaaactatttttaaacgaatgtaactgctttaaagacccgttttgtcccaaaaaaaaaaaaaaaaaatggaacgttgagtgtaattatgtacgtagatagtccacattaagaaccgataatgaattaactacttttgcc

SEQ ID NO: 34160 - DNA, 1746 bp, DROSOPHILA
atgctgaagcacgcctcgacgacgagcagcaccgctgcgaccagcgccaccagcgctgcagtggccatcaacccgctgtccactctactggtcaatagctgcaacagcaacccgaacagcaacagcagcagcagcaacaaccacacaggaggcagtggcagtggccacaacacacccccaacggtggaagcggaagcgagcatcggtattggaattggagttgcaaccaccgcgaccacagcaggcacggccggcaccaccaatggcaatggtggctcaccgaccccagcagcagctgctgtggccagcaccgcgcgcaacattcacctgcggccgccgcagccgctgaatatatccgccctgaatgcgtccgtttcgagcacgctgctcaacgagggcacaggtgccatgggcggaggagttgctggcggagtaggtgcgggacggggttgcgtgggcaatgccaattcaacgctgctaaacattgccacgcccagtacgccgctcaagccgctcaccccgctcacgcagttgacgcccaacgggcactttctgggcaacgggagtgtgcatcatcacacctacaccaaccagcacatcctggccagccaccagcagcagcaacagcagcatcaacatcatcatcagcagcagcaacaccacaaccaccacaaccaccaccaccaacaccaacaaacgaaccatgcgcaagctcaaagccagacacacaatcttagccagttgccgcagaactacaggaacttcagccacccgagcacgaatcctgtgcgccacaagctgcccaagtcgggcccatcaccgcgcgaggccctcaccagcctgggtctgctctgccttatttccctgcttctggcgctgctctcgctgattttcctcctaaggatatcaccgaatggacgcgaggacgccgtgggtcggggcgccggtggcgaggactttattgtagtttacgacgtcaccctggcactgggcgccctctccctatcgctgaacctgtgctgcctactggtttgcgccatccagttcctgttcgccgtcaagctgcgcgagccggccttcgagggtcgcgataaccaatacctggtcaagtccagtgccagccgcacgtgcgctgtcagcggcttcttcatctccataccggtctttctgaccggcctgatcctgtacacctttagtcacttccactcgacgccggcgatcgtgaccagcctgctgattggagtgggcatagtattctgcggcggcgccatggtgcacaacgtgttcgtgtggcagcgcgagaagaccattagctaccgtggagcaccgctgtcccacaacttgtcggtgatctcggctggccagctgccggcgacgctgcctgtgtccatgccactgccaccgggcccgttccacacgtaccaggccgctcatcaggggcaccagagccacctggtgccgccctccgtgacggcggtctcgccgaatcactcccacggcagctttaacccacttctccttggtggagggggcggcggaggcggagcactgggtgccgttaactcctcatttctggtgcgtccagccactgccacaccaccgacgcccacgcccagaacactggcgaatagcagctgcctaacagcaggtcgcgaggccagcggatcggtcagcccgggcattccgccaacgctggacatgagcaacatcaccgtcctcctacacgagctctccacgctcgtctag

SEQ ID NO: 34161 - protein, 581 aa, DROSOPHILA
MLKHASTTSSTAATSATSAAVAINPLSTLLVNSCNSNPNSNSSSSNNHTGGSGSGHNTPPTVEAEASIGIGIGVATTATTAGTAGTTNGNGGSPTPAAAAVASTARNIHLRPPQPLNISALNASVSSTLLNEGTGAMGGGVAGGVGAGRGCVGNANSTLLNIATPSTPLKPLTPLTQLTPNGHFLGNGSVHHHTYTNQHILASHQQQQQQHQHHHQQQQHHNHHNHHHQHQQTNHAQAQSQTHNLSQLPQNYRNFSHPSTNPVRHKLPKSGPSPREALTSLGLLCLISLLLALLSLIFLLRISPNGREDAVGRGAGGEDFIVVYDVTLALGALSLSLNLCCLLVCAIQFLFAVKLREPAFEGRDNQYLVKSSASRTCAVSGFFISIPVFLTGLILYTFSHFHSTPAIVTSLLIGVGIVFCGGAMVHNVFVWQREKTISYRGAPLSHNLSVISAGQLPATLPVSMPLPPGPFHTYQAAHQGHQSHLVPPSVTAVSPNHSHGSFNPLLLGGGGGGGGALGAVNSSFLVRPATATPPTPTPRTLANSSCLTAGREASGSVSPGIPPTLDMSNITVLLHELSTLV

SEQ ID NO: 34162 - DNA, 6888 bp, DROSOPHILA
attacgtctcatcccactgctacctcggagttcaccttgatcggacgctgagttggaaagcccttatcacggctcctggaaactgaaaaagctggactgggttttccactcaagcaaactccatatggcaactaaggctctcttaataaaagccatatccaagtgtggggaacagagtattagagtaagacaatcgggagcggcacgacatgcatctgggctacatgtggtatgtgagcaatagagttattgaaggggacttaaaaggtgtcccattggggtaccaaataaacttccatagcagccgatatgccgacagacttagcgcccacttaaacacgttagcgaatgatcttgtcgaccctatttccctccgatgtctgaagagaatacatccccatgaactccttacacgtaatatagcataatctctcctcggtacatttgtatacactataattaaggaacagaatccataatatcttttaagctacacattaggttaacttcagaaggaactgatcgattcctactgactaatgaataataataaatgatttaaactctaaaaagaaatgttgacgtttgctcgttttcactgaccaaatacgacgtgattctaggtaggattagaaattgtaagggtgttgtttagtaatgtgggaatcataattctagcataatttcatcattaaactcatcaacgcatcagatcaatgctctcagattaaacagttttatttccatgttatactatgatatcgtattatttgtatatttatgtgttatccatcaattccattcacatgtaaatccagatcgaatgggcccccgcgcgcactgaatccgctcctgtctgcgatcagctgcgcagtcggggttacaaagcgtctgctgctttagctgttgttgctggtgtgttggtgttgttgccattggcagtgcttgcttgggcgtttgtttgctgcggcggttcgcgccgcgcttcagtcagtcagggaacgatcgtgcttatcttcattactactaccgcttccaccgaggcttcgcgactccgtacccgtactcgctttgttttacgtttgcgctactagttagtgaatccgacgacgacgacctgcgcgtgcgattaaagcgccgcaactctttgtaattacacagccagagccgcagaggttgctcaaaatccagcgactggagaaatcgtatatcgagttggaaatccgaatcgaaaggcttgcgtatacatagttgtcacacttttgcttttaaacagaaaaatccattcacattcgggtcaagatggcaacgcaaaaggaaggtgagtatcgcagctttgggcaattggtatcgaattggattccacaccgcgtactgttaccaattcgattttcgggcgcgtacttgccgcgatcactgtcgcgccaggtggactggctttccaatcggaatccgattgcgagtgcgagagccagtgccagtgccagtgcccgtgccagtgcgcccttcaaatgtgctcttcgcctggcactgggggtcacctacaaaaagcagaggacgcggactcggccgactgtcttcttatcacaggagaggccacaccgctgctccgctcccgcacccgcaccgctctctatcatactttcatacttccactctccactaccactggccactctccacctgtcactcttactctcactcctccacgcctactactcactcccccaactacccatccagccgagcgatgacgtgtgggcgccgctcttggccatcggacgggcttggatccgagcggccagctaaaacaaacactcgctgcgtgctccaagattagaacccggcaatagcaataacctttggcggcagcgcgaactctccagtccccagtccccaatctccgttctccactctgtggcaatgacattggaacgcatgcatgtgtacattctacgcacggttaattagctgcccacctgcgttctacacgagaagcctttccaaacagaaaccaaaaaaaaaaaaaagaaaacaaaaacaacagcggacaacaaatgcaaactcgcttggcgttaataatattcaaacgcgttaccttgctcaccgcctattactttctcccttctccactcgccctctacattcggctgctctccattctccaatctccattctccttgccccaatgccttcgcttcgtctgtgtcaatgtcaaatgcgatgcggccgagattacagtcgagcttcgataagtgaaaccaagctgagtcaagcaaaaatgcgaagacttgagcaagcaaggcaaaacaaacgggaaattaagacatatggcaaactcaaaaaaaaggttaaagtcatttatgttcctgctaggcaaacaccactgtcggcttgtgactcacaatctcggcatttgaaggagctcgctagcctcttagtcaccatccatccatccaccagcaccatccaactcactggctgtgtaatctttcgaagctcctacagccgaaaagtatgcattaccggcgttcgcagagatcggcctcggaattagggttaaattccagctcaactcatatcttcggagagcccaggtagcccgccgtagaatcacgtgattcaccgagacccatccacttcgacatttaaacgactcacaatgattctcaaaaacgaacgcagtgccccatgatgtttccagaagctcatattatcgaaatctatattttatgacaccgtgacagtgcctgcattagtggctcgcaaccctttttaaacgacacacaatgattctcaaaaacgaacgcagtgcccctcctccattcattttccaaaagctcattatatcgaaatctatgttatgacaccgcgacagtgcctccattattggctcacaacctttttgaaacattttccgaatgattttcctatgacctctaagatacgaacgtgcacacattcaaaatcggggagctttaggttttcaagattttgagatttttgaacttttgaaaaagtctatctacatactcgtagttatttttagagatatactacagaggtttactaaaggctagttactagtttgcaagaacagtatccctagtagatcacatagcagcagatcaagtatatatcatccattaagcatacaacactgtaatctcttccgatctgtgcgggaagtgatgccatcgtgggttcatctgatcatccgaccgatcgcattcccgccacgcgatcgactgatgctgcccgttccgaagccaagtttggatatacggtgaatagtgatgtatgtacatacatacgtccggagcacttggcttgcactttgtgcccaagttcgcctcgccgtcgacgtcgctgccgggttcatcgcttacaccttgttaaagtcgaccgcagcgcggcgatttattcgttttgtgcaaccgcatcggaagatacgcgcgtgcacctgctccaccttttacacctggccaagcttccgccacctaacccagttccacctggcccagcccacagctatccgggcatcaattagcgcccgctgcggaggttgacctctggcggattctttggccagtcatcgggatcgaatcgaatcgaatcgaatcgaatcggatcggatcggatcggagttgattagacaacggaccccggtcttatcgagtgcttatcgctcccccttcccttgacattgaataggccttcaaatagtctgcattcgggcccagaccatcagttgcctccaggccctcggtgagtcctcacgcagctcattctgaccaaccaatcaccaaccatacggagtcgatgagtcccccggtgatctatgcaagccaaagggcaaggtcactgaaaattcccgcacatcctaaagctgatagcattttttttgtttttctcactgtgcaactaacaactaagaagtagagaacccctataccattctcactttatagtttagcagtaaaagcaatgcatttaaggaagctataactatttctagttcatttagttccctttgataaagttttgacagttgaaaaaagttacttagtgaaaaaaacaagtagaaattcctggatatccacagagccacagagtaatagtcttaagtggaattcaaagccagagtaagcctaaccagatccgcctttcatatgtgcccacagatcacaccgccctggatctcataatcaagtcactcaagtcgcctacaatggtctgcgagggaacccactttgacggcaagattccgcacacgttcgtcatctttggggcgtcgggcgatctggccaagaagaagatctaccccacgctctggtggctctaccgcgatgacctgctgcccaagccgaccaagttctgcggctatgcccgttccatgctgaccgtcgatagcatcaaggagcagtgtctgccgtacatgaaggtgcgttcgggatttggtcataggccatttgcatcgcattaacccaacccattgccacacaggtccagccgcacgagcagaagaagtacgaggagttctgggccctcaatgagtacgtgtccggcagatatgacggacgcactggcttcgagctgcttaaccagcagctggagattatggagaacaagaacaaggccaaccgcatcttctatctggccctgccgcccagcgtcttcgaggaggtgactgtcaacatcaagcagatctgcatgtcggtctggtgagtataagatcaagatcaagatccagatgcatttaatttgaaacccgatacttatgtacacctataacccgttcgcttgcagcggttggaaccgcgtgattatcgagaagcctttcggccgggatgacgcctcctcgcaggcgctgagcgaccatctggccggtctgttccaggaggatcagctgtaccgcatcgatcactacctgggcaaggagatggtgcagaacctgatgaccatacgcttcggcaacaagatcctcagctcgacgtggaaccgcgagaacatcgcctccgtgctgatcacgttcaaggagcccttcggcacgcagggtcgtggcggctacttcgacgagttcggcatcatacgcgacgtgatgcagaaccatctgctgcagatcctctcgctggtggccatggagaagccggtgagctgccacccggacgacattcgtgacgagaaggtcaaggtgctgaagagcatcgaggccctgacgctggatgacatggtgctgggccagtacctgggcaatccgcagggtacaaacgatgatgcgcgcacgggctacgtggaggaccccaccgttagcaacgattcgaacacgcccacctacgccctcggcgtgctcaagatcaacaacgagcgctggcagggagtgcccttcatcctgcgctgcggcaaggcgctgaacgagcgcaaggcggaggtgcgtatccagtaccaggacgtgcccggcgacatcttcgagggcaatacgaagcgcaacgagctggtcatccgcgtccagccgggcgaggccctgtactttaagatgatgaccaagagccccggcatcacgttcgacatcgaggagacggagctggacctcacctacgagcaccgctacaaggactcctacctgccggacgcgtacgagcgtctcatcctcgacgtcttctgcggctcccagatgcacttcgtccgctcggacgagctgcgcgaggcgtggcgcatatttacgcccattctgcaccagatcgagaaggagcacattcggccaatcacctaccagtacggatcgcgcggtcccaaggaggcggaccgcaagtgcgaggagaacaatttcaagtactccggctcctacaagtggcacggcggcaaggcggccacgtccaatcactgagcgtttggagcacaccaatccccgggctgggttcgcaggatactcctctctgtccgcacgtacatgtacatacatacatatatatgtatatatacatatatgcattctttggttatttgtaattcggtctgtacaagatttttttttattaaatatacaaaatagtgtttagctggagcagaacgatcttctaactcataatcccggctagttcgatgtgtatgtggtgatgccgatcgcatgcgtgtcgatgtacataaatagatccttcataggatggcagatgggtggcaaacgtaaccctacggttgtaatactaactaaataatgagtatgcttctggtcagtgggcttcggtgctgagccgggctagttactagcggctcctctcgaatatagatttacaggcgaactacaacaagagcgggcagcaatcttcccgagagatttcagcgcacgggtggcggcttgatgtacccatcgccgcagggcgcgcctattgcgctcatggacacatactgattggttacgtacgcatcggcctggggcacgggctgtggtctgggcacctcctgcagctctatctccggccacctcgtgggctcctcttccgcaaatgtcacggttttgcgcactgtgccgtagaacttctccggcggaacattggcgggatagaacaggcgtacatcgccaagtggatttgctgtgggctcttcgctcatcactggcagttcaacccggatgtccgccatttggcgcagcttctgaatggccaagacgagcgacccaagcaccagcagagcgatggtgccctccacgtaccgcaagatctttggcttctcgggcacctcgctgtcaccggaccaccagcgcatcccggtggtcaggccgtcgctgtagttggccgccacagccatccggatcacgccctggattccggagaaattgtacgccgtctcgcgggcgtaggtcgtctcgatggaggaactatcgtcgcaggc

SEQ ID NO: 34163 - DNA, 1878 bp, DROSOPHILA
aacgatcgtgcttatcttcattactactaccgcttccaccgaggcttcgcgactccgtacccgtactcgctttgttttacgtttgcgctactagttagtgaatccgacgacgacgacctgcgcgtgcgattaaagcgccgcaactctttgtaattacacagccagagccgcagaggttgctcaaaatccagcgactggagaaatcgtatatcgagttggaaatccgaatcgaaaggcttgcgtatacatagttgtcacacttttgcttttaaacagaaaaatccattcacattcgggtcaagatggcaacgcaaaaggaagatcacaccgccctggatctcataatcaagtcactcaagtcgcctacaatggtctgcgagggaacccactttgacggcaagattccgcacacgttcgtcatctttggggcgtcgggcgatctggccaagaagaagatctaccccacgctctggtggctctaccgcgatgacctgctgcccaagccgaccaagttctgcggctatgcccgttccatgctgaccgtcgatagcatcaaggagcagtgtctgccgtacatgaaggtccagccgcacgagcagaagaagtacgaggagttctgggccctcaatgagtacgtgtccggcagatatgacggacgcactggcttcgagctgcttaaccagcagctggagattatggagaacaagaacaaggccaaccgcatcttctatctggccctgccgcccagcgtcttcgaggaggtgactgtcaacatcaagcagatctgcatgtcggtctgcggttggaaccgcgtgattatcgagaagcctttcggccgggatgacgcctcctcgcaggcgctgagcgaccatctggccggtctgttccaggaggatcagctgtaccgcatcgatcactacctgggcaaggagatggtgcagaacctgatgaccatacgcttcggcaacaagatcctcagctcgacgtggaaccgcgagaacatcgcctccgtgctgatcacgttcaaggagcccttcggcacgcagggtcgtggcggctacttcgacgagttcggcatcatacgcgacgtgatgcagaaccatctgctgcagatcctctcgctggtggccatggagaagccggtgagctgccacccggacgacattcgtgacgagaaggtcaaggtgctgaagagcatcgaggccctgacgctggatgacatggtgctgggccagtacctgggcaatccgcagggtacaaacgatgatgcgcgcacgggctacgtggaggaccccaccgttagcaacgattcgaacacgcccacctacgccctcggcgtgctcaagatcaacaacgagcgctggcagggagtgcccttcatcctgcgctgcggcaaggcgctgaacgagcgcaaggcggaggtgcgtatccagtaccaggacgtgcccggcgacatcttcgagggcaatacgaagcgcaacgagctggtcatccgcgtccagccgggcgaggccctgtactttaagatgatgaccaagagccccggcatcacgttcgacatcgaggagacggagctggacctcacctacgagcaccgctacaaggactcctacctgccggacgcgtacgagcgtctcatcctcgacgtcttctgcggctcccagatgcacttcgtccgctcggacgagctgcgcgaggcgtggcgcatatttacgcccattctgcaccagatcgagaaggagcacattcggccaatcacctaccagtacggatcgcgcggtcccaaggaggcggaccgcaagtgcgaggagaacaatttcaagtactccggctcctacaagtggcacggcggcaaggcggccacgtccaatcactgag

SEQ ID NO: 34164 - protein, 524 aa, DROSOPHILA
MATQKEDHTALDLIIKSLKSPTMVCEGTHFDGKIPHTFVIFGASGDLAKKKIYPTLWWLYRDDLLPKPTKFCGYARSMLTVDSIKEQCLPYMKVQPHEQKKYEEFWALNEYVSGRYDGRTGFELLNQQLEIMENKNKANRIFYLALPPSVFEEVTVNIKQICMSVCGWNRVIIEKPFGRDDASSQALSDHLAGLFQEDQLYRIDHYLGKEMVQNLMTIRFGNKILSSTWNRENIASVLITFKEPFGTQGRGGYFDEFGIIRDVMQNHLLQILSLVAMEKPVSCHPDDIRDEKVKVLKSIEALTLDDMVLGQYLGNPQGTNDDARTGYVEDPTVSNDSNTPTYALGVLKINNERWQGVPFILRCGKALNERKAEVRIQYQDVPGDIFEGNTKRNELVIRVQPGEALYFKMMTKSPGITFDIEETELDLTYEHRYKDSYLPDAYERLILDVFCGSQMHFVRSDELREAWRIFTPILHQIEKEHIRPITYQYGSRGPKEADRKCEENNFKYSGSYKWHGGKAATSNH

SEQ ID NO: 34165 - DNA, 4261 bp, DROSOPHILA
ggtgcagctcagattaaagtcgccgccgatgagctgctccaccttggagggaatcacccagccaggatccaagatggcgttggcgccaccccggcagccggcaagcagcatgagcagcaggacgagctgctcctgggccaccatcttcctggtcctggttctgctcccaatcctaatcctaatcctaatcccctccttcccttgctgttaaggtttactctggctctctctctctctctctcccactctgtctctctgtctttagctcttttcctctctttctgtctctctctcgctcttacacacgcgcgcacaccaaaacggcgctctctcacacacacaagagcaccttgctgttggcctcgcacttgttggctgtgtattggtggccagttctcggaaaccgtttatacgctgcgttcctggaagtggctcttaaacatttcactgcccaggtgtgggcttcttgtccggggcttcactacgactaaattacgaatagggctatcagggccttgcaatgccaattgctcgcttcgagcaactgtggtaccgtgttactgttttgtctctggctctctcgcaaatgcagaatcctcagttggctaaggcgatcgctctcctccctgcccccgctcgcgatgctgacgatatatgttgtcgacgagttgcttgtccgcagtgtgaccgcttatcgaaagttatcgcagtccgatatgcgatatcactggggctacctgtcgacgaacggccccactaaatgcgataggtgccaaacatcgcatttcagccgaaattcgaattctaggccacccgttgcttgtatctctagaacgccctctgccgaatacgttttcaagcagagcaaactacttggcagcggttttggacgcgttcaaagcgttcaattggccgctatcgattcatcgattggtggttgatacgtcagccctggcgtgtgtaagagtcaaaatcgaaatccatcgtgagtgtgtgtgtgtccgtgtgagtgagaaagtgacgaattacttttcatcaaatgggaaataatttagggtgaaaacacgtatatattcggaacacatttaaattacagacgtgataacatctcgaaagaaccagctacatcggtgcaaattaagctaaacgagaacaccgcaaatacaccatcgaaatggcggaaggcggcagcaagcgcatcaacgtggttgtaaaaacgccaaaggacaagaaaacggtcgaagttgacgaagattctggaataaaagatgtgagtacggagcacgtgacccgcctgacttggttgctggtaccccaaacccttctggacccttccattcatagcgatggaccacctccctccctccctgctctttgcccacacccccgaaagtattgggaaattagtgcccgtaatcgcggtacagtgcactttgcctaagccgcacacaacacgcgcagctggtacagtgcactttgcacagtgattggtcttcttcccattaacacacataaattgaagcagaggcatgggagcgaacatttaattgaaaggggaaactagaccatgggcacataataatgacaacaatcacaccattctcgccccacagttcaaaattctggttgcacaaaagttcgaggcggagcccgagcagctcgtgctcatttttgccggcaaaattatgaaggacacggacacccttcagatgcacaacatcaaggacaacctgacggtgcatctggtgattaaggcgccgacgcgcaacaacgagcagccggcccgacagccggctgacgtgcgccaaacgccctttggcctcaatcaattcggtggcctggccggaatggaggcacttggagccggatcgaacacgttcatggatctgcaggcgcgcatgcagaacgagctgctcaacaatggcgacatgctgcgctccctgatggacaacccgatggtgcagcagatgatgaataatccggataccatgcgtcagcttatcacgtccaatccgcaaatgcatgacctgatgcagcgcaaccccgagatctcgcatatgcttaacaatccggacctgctgcgccagacgatggagctggcccgcaatccctcgatgttgcaggagctgatgcgttcgcacgaccgcgccatgtcgaatctggagtcggtgccgggcggctatagcgccctgcagcgcatctaccgcgatattcaggagccaatgatgaacgcggccacggaatcctttggtcgcaacccctttgccggcctggtcgacggcggcggttcaggagccggcaacaacccgcagcagggcaccgagaaccgcaatcccctgccgaatccatggggcggtgccaattcgggaaccaatggaacagtcggtggctccggcgccggcaatccgacgggggatctgccgccgaacaatgtgctcaacacgccggccatgcgaagcctgctccagcagatggccgacaatccagccatgatgcagaacctgctgaacgcgccctacacgcgttccatgatggagtccatgtcacaggacccggacatggccgcgcgcttgctgagcagcagtccgctcatgtctaacaatcccgccctgcaggagcaggtgcgtcagatgatgccgcagtttatggcccaaatgcagaaccccgaggtgatgaacatgctgaccaatccggatgcaatgaacgctatcctgcagatccagcagggcatggagcagctgcgcagcgcggccccaggtctcgttggcaccctgggcattccaccgccaccaccgggtgccggcaccggaacgaatccagccagcggcgatgggagcgggggcaacagcggtgccagcaccaacaatgtttcgccaagcagcggcctcaacgccggcaccggcactccaaacctggccccgggcggtggtcccaacgcgcagctcttcaacgacttcatgatgcgcatgctcaacgggatgtcgaacaacgcggacaacacacagccgccggaggtgcgctaccagtcgcagctggagcagctgaacgccatgggctttgtcaaccgtgatgccaacttgcagggtgagtgtcctagtgggtcttggtgggtcgcctgccctgtgcgatgattctaatccgctctcttgtgtttggtttgcagctctgatcgctaccttcggggacatcaatgcggcggtagagcgactgctgtccctcaaccagttgtccttgagttaacaaggctaagccatagccataaccaaactgtacacaacctgtctatatatctacgaactacaactactatatataccactacggccctggagaacgcgaatgagaacacgactagttaggaggacaggtcctaaacccaaacacacaccctccgccaaaaaattccacggtcagcgctgctgatcgcttgtttccccatcaagccggaaatgtcaggaatccatcatagccacatgccaacataccaacacccccaagacacaaaaagatggctccaaacgagcatagttgcctcgagatcggagagatactagatataggtgggtgatatgaatgacgccggtgagaatgttagatagggatcgcataccaaagtgttagcactttcgtagttgatatcagattttttttttttttaaataatttacatttcgtgagctcggagaatcctttaagcggaaatgcgttagccgaaaaccaacttgaatatgcatactttgctcacgtaatgcatagttttgcacgcccaacaacttcaatcgaaatacttaacgcatttctttatcggagaacttcgttaattttcaataaagttaagcgggaatgtgcacttttgtcattgataatgtaataactattttgtcgccaacagatgcgaattccagttttgtgtttaagaaaaaagaatcggtacagagatcagaggcgtagtatatatcctgtgttctggtcaggcagtttagttttagtcgggtgctagtgggcgtgggctatagccgcagtccttctgactcccccccccctccatttctcgcgatcggaaaacgttctggaaattgcaaacaactgcaaacaggacaaacgtacagtagatatcggctatatgcaaagacgacactgtcttgggggaatcctaacatacgcgcgagtatgctgtagtcaatcaaaatgtttatcgattcgttaatataagagcaatctccaagcgttatttatcccacatcccgttcagaggaataca

SEQ ID NO: 34166 - DNA, 1839 bp, DROSOPHILA
tccgtgtgagtgagaaagtgacgaattacttttcatcaaatgggaaataatttagggtgaaaacacgtatatattcggaacacatttaaattacagacgtgataacatctcgaaagaaccagctacatcggtgcaaattaagctaaacgagaacaccgcaaatacaccatcgaaatggcggaaggcggcagcaagcgcatcaacgtggttgtaaaaacgccaaaggacaagaaaacggtcgaagttgacgaagattctggaataaaagatttcaaaattctggttgcacaaaagttcgaggcggagcccgagcagctcgtgctcatttttgccggcaaaattatgaaggacacggacacccttcagatgcacaacatcaaggacaacctgacggtgcatctggtgattaaggcgccgacgcgcaacaacgagcagccggcccgacagccggctgacgtgcgccaaacgccctttggcctcaatcaattcggtggcctggccggaatggaggcacttggagccggatcgaacacgttcatggatctgcaggcgcgcatgcagaacgagctgctcaacaatggcgacatgctgcgctccctgatggacaacccgatggtgcagcagatgatgaataatccggataccatgcgtcagcttatcacgtccaatccgcaaatgcatgacctgatgcagcgcaaccccgagatctcgcatatgcttaacaatccggacctgctgcgccagacgatggagctggcccgcaatccctcgatgttgcaggagctgatgcgttcgcacgaccgcgccatgtcgaatctggagtcggtgccgggcggctatagcgccctgcagcgcatctaccgcgatattcaggagccaatgatgaacgcggccacggaatcctttggtcgcaacccctttgccggcctggtcgacggcggcggttcaggagccggcaacaacccgcagcagggcaccgagaaccgcaatcccctgccgaatccatggggcggtgccaattcgggaaccaatggaacagtcggtggctccggcgccggcaatccgacgggggatctgccgccgaacaatgtgctcaacacgccggccatgcgaagcctgctccagcagatggccgacaatccagccatgatgcagaacctgctgaacgcgccctacacgcgttccatgatggagtccatgtcacaggacccggacatggccgcgcgcttgctgagcagcagtccgctcatgtctaacaatcccgccctgcaggagcaggtgcgtcagatgatgccgcagtttatggcccaaatgcagaaccccgaggtgatgaacatgctgaccaatccggatgcaatgaacgctatcctgcagatccagcagggcatggagcagctgcgcagcgcggccccaggtctcgttggcaccctgggcattccaccgccaccaccgggtgccggcaccggaacgaatccagccagcggcgatgggagcgggggcaacagcggtgccagcaccaacaatgtttcgccaagcagcggcctcaacgccggcaccggcactccaaacctggccccgggcggtggtcccaacgcgcagctcttcaacgacttcatgatgcgcatgctcaacgggatgtcgaacaacgcggacaacacacagccgccggaggtgcgctaccagtcgcagctggagcagctgaacgccatgggctttgtcaaccgtgatgccaacttgcaggctctgatcgctaccttcggggacatcaatgcggcggtagagcgactgctgtccctcaaccagttgtccttgagttaacaaggctaagccatagccata

SEQ ID NO: 34167 - protein, 547 aa, DROSOPHILA
MAEGGSKRINVVVKTPKDKKTVEVDEDSGIKDFKILVAQKFEAEPEQLVLIFAGKIMKDTDTLQMHNIKDNLTVHLVIKAPTRNNEQPARQPADVRQTPFGLNQFGGLAGMEALGAGSNTFMDLQARMQNELLNNGDMLRSLMDNPMVQQMMNNPDTMRQLITSNPQMHDLMQRNPEISHMLNNPDLLRQTMELARNPSMLQELMRSHDRAMSNLESVPGGYSALQRIYRDIQEPMMNAATESFGRNPFAGLVDGGGSGAGNNPQQGTENRNPLPNPWGGANSGTNGTVGGSGAGNPTGDLPPNNVLNTPAMRSLLQQMADNPAMMQNLLNAPYTRSMMESMSQDPDMAARLLSSSPLMSNNPALQEQVRQMMPQFMAQMQNPEVMNMLTNPDAMNAILQIQQGMEQLRSAAPGLVGTLGIPPPPPGAGTGTNPASGDGSGGNSGASTNNVSPSSGLNAGTGTPNLAPGGGPNAQLFNDFMMRMLNGMSNNADNTQPPEVRYQSQLEQLNAMGFVNRDANLQALIATFGDINAAVERLLSLNQLSLS

SEQ ID NO: 34168 - DNA, 5324 bp, DROSOPHILA
acgccctcggcgtgctcaagatcaacaacgagcgctggcagggagtgcccttcatcctgcgctgcggcaaggcgctgaacgagcgcaaggcggaggtgcgtatccagtaccaggacgtgcccggcgacatcttcgagggcaatacgaagcgcaacgagctggtcatccgcgtccagccgggcgaggccctgtactttaagatgatgaccaagagccccggcatcacgttcgacatcgaggagacggagctggacctcacctacgagcaccgctacaaggactcctacctgccggacgcgtacgagcgtctcatcctcgacgtcttctgcggctcccagatgcacttcgtccgctcggacgagctgcgcgaggcgtggcgcatatttacgcccattctgcaccagatcgagaaggagcacattcggccaatcacctaccagtacggatcgcgcggtcccaaggaggcggaccgcaagtgcgaggagaacaatttcaagtactccggctcctacaagtggcacggcggcaaggcggccacgtccaatcactgagcgtttggagcacaccaatccccgggctgggttcgcaggatactcctctctgtccgcacgtacatgtacatacatacatatatatgtatatatacatatatgcattctttggttatttgtaattcggtctgtacaagatttttttttattaaatatacaaaatagtgtttagctggagcagaacgatcttctaactcataatcccggctagttcgatgtgtatgtggtgatgccgatcgcatgcgtgtcgatgtacataaatagatccttcataggatggcagatgggtggcaaacgtaaccctacggttgtaatactaactaaataatgagtatgcttctggtcagtgggcttcggtgctgagccgggctagttactagcggctcctctcgaatatagatttacaggcgaactacaacaagagcgggcagcaatcttcccgagagatttcagcgcacgggtggcggcttgatgtacccatcgccgcagggcgcgcctattgcgctcatggacacatactgattggttacgtacgcatcggcctggggcacgggctgtggtctgggcacctcctgcagctctatctccggccacctcgtgggctcctcttccgcaaatgtcacggttttgcgcactgtgccgtagaacttctccggcggaacattggcgggatagaacaggcgtacatcgccaagtggatttgctgtgggctcttcgctcatcactggcagttcaacccggatgtccgccatttggcgcagcttctgaatggccaagacgagcgacccaagcaccagcagagcgatggtgccctccacgtaccgcaagatctttggcttctcgggcacctcgctgtcaccggaccaccagcgcatcccggtggtcaggccgtcgctgtagttggccgccacagccatccggatcacgccctggattccggagaaattgtacgccgtctcgcgggcgtaggtcgtctcgatggaggaactatcgtcgcaggcatcgtgcactttgctggatagcttgcaccaatagactatgtagccagtgaagtttcccagctcctccggcccttgccagctgagtctggagctcgtcttattgtagctctccaggtaaatccgtcgatcccggatgtcgctcagtctgggcacctccagctggctgctctccagcgatcgaccgacgacattgctgctccacacagacactgtggccggttgcgtgtcatcccagtcggtgaagatcgcgagcatgctgccctgggtggtggccactttggttctgaaatgaaaagcatttagtctttcctgctggctagtttattgtaaataatattatcggtagtgacgaaacccgcctagaaataactgggatgaacatataactttcaatactggagcaaaatgaactaatttaatcctttaggattatttcgattattattttaacccaatttaagttgaagatcactagaaactgctttatttaccaagaacacaactacgaaactactactttagagtgggcgtggcaagaagtttgtggcaaatagaaatttacaatacgatagaaatttacaagactaaaaaaattttgaaaaaatatcaacacatttttgaaaagtgtgggagtggcagttctgaacgatttgtgggcaaacatgcgctgctatctatttcactagaatctgtatgcttaatcttctagctttaacttctagcttttatagttcctgagttggagattgccagatcgactcggttattgatcctgaacaagaatatatatactttatgtggttggaaacgcttccttctgctttttacatacgtattcaacgaatctagaataccctttttgctctaccagtaacgggtataaaacgaggtatatatcgagcattctaaacatatttcggcatatgctaatggcaaaaaaatacatagttccacttttgggaggttcaaatctgtcaggtgacctaaataagttgtgaaataagtccttgttttgcccatcaatactataaaatgctataaagtgccgaaagttcttcaaatcggatacatgcattaaaaagttatgagcgagcctttttgcaaacgtaacgcacgacttgccgtatgtaaggtaatgggtatctgatagtcgaattcgcggagatctcttgttgtatgtaaatagggcgcttaatgtgccaaagattctaaaatgatttactaggctttcggtttttaaagctcaatatgtttttgaaaaactctttttaggtctcgatggtaatctcatggtaatctagtgcatgtagtgcttacccgtacctagtgctcgccacgtatgtctgctcggctccattgaactccagctcgtccagcggcaaccagtagactttgagctcccttttagcacggtcgtgggagaagccattggccaggaaccgtggcggacgggcgggcaaggatgcattcgtggtgagttcgaactcggggtacctttccgaccagggggatccatggagacgacggcttaggctaacatagaacaactgattgccctccggtggatttccaaagcagacctggtcgaaaacactgacagctcgcatctgcgaaacggtgagattcctcgacaagttgggcagcttggagtggcggaactgcacgttcagttcaaacgttcgattcgggtaaatgaagggtccgttccactccagacaagtctggttgggcgtttgtatcatgttgtgcttgccgcgtggccattccagcacctccatttcggcttgcgttagcctcagcaccttgctctggttgcccaagtcgtcgctcatgatcagcctgaaatccctccattccggtgcacggctgttcggatcaatgggcacggagcactccactttgcccctgctgcgttcgtcctccgacttcctgcagtcgattggcttggccctgcccatggccagctggtagtgggttttgttctcgaaattgccgttctccatgcggctgaaggtgcacctcaagtaatagaccacgtcgcggcatacgaaatccttcaaattcagcagggcatagactcggacgcacacatgactctggatgacgccatccagaaggcactcataccttcgttcccactcgttggctggatttgcatccacgtgcaccacggtgccgttgtacgagtccgttgattctattgtgccctgccttcgcacagacatcttcctaccctcaccaccgtcacatttgcaggacaccttgccgatggtgccggaacgccagctaggtccgccgagggactgcatctcgcagttcgcctgcggcatatgcaacgcattctccgccagcgcacgggccatgagcgtcgccagcaatgtcagcgaaagcaggcggcttatacgcgtcctccagcccatgggtgctcctttctccgcagtgactcctaatcgcaacttccgatgcttctaaagctaggcgctggaattagaaattggatacagcccgattacggaactatgtatgtacatatttcaaacatccactcgacgaggagaaagcaaatgagttgagtgcaaaatgcatgggcatgctgataagaccgcaagactttacgatcttgaatccgtggtggtgtccagtgtggaggcaagcgtacctccagctcgtgggatccgactgctcgagagcgatctgtgcgactgagctcaatcgcgagacccaaacgccagcttggatggagcatatcgatagggacagccaggcgcgcatatacgtccatatatgtatatatgaacaagtatatgtatgtatgtatgtatagctaacttatcgccaaagctcgcgagagaatcaaaaagccaatttgaaatcttatttaaaattagctttatattgaaatacagcgatgtgcgtattgtgtaaatagggtattaatagtataagctcgatccgctcgacgcgtggatggttaagtgggtaagtaagtgtacagtacgaatatatataaaaaaatactattgcgttacaaatactttctgcctcacacgcatcgcaaagaatacaaaataaattacaaacgtaaaactacattcgtccgaggagttttcactaattactataaacagctgcccgacagtggtttctagtttccagattccagattctagtttacaggttctgggttctgggttcctcgtcctggattttggttgctggggcgatccggtgaccagatcatggcgttggaaggatatgcggctgaagatgagttgatgaattatcgatgcgaacgcgaggaaacgataaaatgatgcacacccgtgcataaatgatgagcgctccggtatcttagaggacgtgccgattgtgggccatggcgttcagatcctgcggcgttacgtagccattgatttgcggctggaggcgagagtgctggttgccgcctcccggcgccccaccagcggcgtgcgtcggcgatcccacggtggcggccagaggtggctttatcagcccagtgagctgcaactgctccatggtggtatagccgatgtcagccattttgggcgtggcggcagctggacttgcggcgtgaaccggcggtagctgtagcggtggcgaagttgctggcgaagatcccgcaaaggctggtcctccggtttgcgacaacggagctgcgacgagcggcttcagcttgtgcagatccgaggcctgcacgtagttgtccatgttgagcaagtgggccggtgggaaaaaggtcgacgcagcggct

SEQ ID NO: 34169 - DNA, 2142 bp, DROSOPHILA
atgcgcgcctggctgtccctatcgatatgctccatccaagctggcgtttgggtctcgcgattgagctcagtcgcacagatcgctctcgagcagtcggatcccacgagctggaggtacgcttgcctccacactggacaccaccacggattcaagatcaagcatcggaagttgcgattaggagtcactgcggagaaaggagcacccatgggctggaggacgcgtataagccgcctgctttcgctgacattgctggcgacgctcatggcccgtgcgctggcggagaatgcgttgcatatgccgcaggcgaactgcgagatgcagtccctcggcggacctagctggcgttccggcaccatcggcaaggtgtcctgcaaatgtgacggtggtgagggtaggaagatgtctgtgcgaaggcagggcacaatagaatcaacggactcgtacaacggcaccgtggtgcacgtggatgcaaatccagccaacgagtgggaacgaaggtatgagtgccttctggatggcgtcatccagagtcatgtgtgcgtccgagtctatgccctgctgaatttgaaggatttcgtatgccgcgacgtggtctattacttgaggtgcaccttcagccgcatggagaacggcaatttcgagaacaaaacccactaccagctggccatgggcagggccaagccaatcgactgcaggaagtcggaggacgaacgcagcaggggcaaagtggagtgctccgtgcccattgatccgaacagccgtgcaccggaatggagggatttcaggctgatcatgagcgacgacttgggcaaccagagcaaggtgctgaggctaacgcaagccgaaatggaggtgctggaatggccacgcggcaagcacaacatgatacaaacgcccaaccagacttgtctggagtggaacggacccttcatttacccgaatcgaacgtttgaactgaacgtgcagttccgccactccaagctgcccaacttgtcgaggaatctcaccgtttcgcagatgcgagctgtcagtgttttcgaccaggtctgctttggaaatccaccggagggcaatcagttgttctatgttagcctaagccgtcgtctccatggatccccctggtcggaaaggtaccccgagttcgaactcaccacgaatgcatccttgcccgcccgtccgccacggttcctggccaatggcttctcccacgaccgtgctaaaagggagctcaaagtctactggttgccgctggacgagctggagttcaatggagccgagcagacatacgtggcgagcactaggtacggaaccaaagtggccaccacccagggcagcatgctcgcgatcttcaccgactgggatgacacgcaaccggccacagtgtctgtgtggagcagcaatgtcgtcggtcgatcgctggagagcagccagctggaggtgcccagactgagcgacatccgggatcgacggatttacctggagagctacaataagacgagctccagactcagctggcaagggccggaggagctgggaaacttcactggctacatagtctattggtgcaagctatccagcaaagtgcacgatgcctgcgacgatagttcctccatcgagacgacctacgcccgcgagacggcgtacaatttctccggaatccagggcgtgatccggatggctgtggcggccaactacagcgacggcctgaccaccgggatgcgctggtggtccggtgacagcgaggtgcccgagaagccaaagatcttgcggtacgtggagggcaccatcgctctgctggtgcttgggtcgctcgtcttggccattcagaagctgcgccaaatggcggacatccgggttgaactgccagtgatgagcgaagagcccacagcaaatccacttggcgatgtacgcctgttctatcccgccaatgttccgccggagaagttctacggcacagtgcgcaaaaccgtgacatttgcggaagaggagcccacgaggtggccggagatagagctgcaggaggtgcccagaccacagcccgtgccccaggccgatgcgtacgtaaccaatcagtatgtgtccatgagcgcaataggcgcgccctgcggcgatgggtacatcaagccgccacccgtgcgctga

SEQ ID NO: 34170 - protein, 713 aa, DROSOPHILA
MRAWLSLSICSIQAGVWVSRLSSVAQIALEQSDPTSWRYACLHTGHHHGFKIKHRKLRLGVTAEKGAPMGWRTRISRLLSLTLLATLMARALAENALHMPQANCEMQSLGGPSWRSGTIGKVSCKCDGGEGRKMSVRRQGTIESTDSYNGTVVHVDANPANEWERRYECLLDGVIQSHVCVRVYALLNLKDFVCRDVVYYLRCTFSRMENGNFENKTHYQLAMGRAKPIDCRKSEDERSRGKVECSVPIDPNSRAPEWRDFRLIMSDDLGNQSKVLRLTQAEMEVLEWPRGKHNMIQTPNQTCLEWNGPFIYPNRTFELNVQFRHSKLPNLSRNLTVSQMRAVSVFDQVCFGNPPEGNQLFYVSLSRRLHGSPWSERYPEFELTTNASLPARPPRFLANGFSHDRAKRELKVYWLPLDELEFNGAEQTYVASTRYGTKVATTQGSMLAIFTDWDDTQPATVSVWSSNVVGRSLESSQLEVPRLSDIRDRRIYLESYNKTSSRLSWQGPEELGNFTGYIVYWCKLSSKVHDACDDSSSIETTYARETAYNFSGIQGVIRMAVAANYSDGLTTGMRWWSGDSEVPEKPKILRYVEGTIALLVLGSLVLAIQKLRQMADIRVELPVMSEEPTANPLGDVRLFYPANVPPEKFYGTVRKTVTFAEEEPTRWPEIELQEVPRPQPVPQADAYVTNQYVSMSAIGAPCGDGYIKPPPVR

SEQ ID NO: 34171 - DNA, 9388 bp, DROSOPHILA
gatcaatgggcacggagcactccactttgcccctgctgcgttcgtcctccgacttcctgcagtcgattggcttggccctgcccatggccagctggtagtgggttttgttctcgaaattgccgttctccatgcggctgaaggtgcacctcaagtaatagaccacgtcgcggcatacgaaatccttcaaattcagcagggcatagactcggacgcacacatgactctggatgacgccatccagaaggcactcataccttcgttcccactcgttggctggatttgcatccacgtgcaccacggtgccgttgtacgagtccgttgattctattgtgccctgccttcgcacagacatcttcctaccctcaccaccgtcacatttgcaggacaccttgccgatggtgccggaacgccagctaggtccgccgagggactgcatctcgcagttcgcctgcggcatatgcaacgcattctccgccagcgcacgggccatgagcgtcgccagcaatgtcagcgaaagcaggcggcttatacgcgtcctccagcccatgggtgctcctttctccgcagtgactcctaatcgcaacttccgatgcttctaaagctaggcgctggaattagaaattggatacagcccgattacggaactatgtatgtacatatttcaaacatccactcgacgaggagaaagcaaatgagttgagtgcaaaatgcatgggcatgctgataagaccgcaagactttacgatcttgaatccgtggtggtgtccagtgtggaggcaagcgtacctccagctcgtgggatccgactgctcgagagcgatctgtgcgactgagctcaatcgcgagacccaaacgccagcttggatggagcatatcgatagggacagccaggcgcgcatatacgtccatatatgtatatatgaacaagtatatgtatgtatgtatgtatagctaacttatcgccaaagctcgcgagagaatcaaaaagccaatttgaaatcttatttaaaattagctttatattgaaatacagcgatgtgcgtattgtgtaaatagggtattaatagtataagctcgatccgctcgacgcgtggatggttaagtgggtaagtaagtgtacagtacgaatatatataaaaaaatactattgcgttacaaatactttctgcctcacacgcatcgcaaagaatacaaaataaattacaaacgtaaaactacattcgtccgaggagttttcactaattactataaacagctgcccgacagtggtttctagtttccagattccagattctagtttacaggttctgggttctgggttcctcgtcctggattttggttgctggggcgatccggtgaccagatcatggcgttggaaggatatgcggctgaagatgagttgatgaattatcgatgcgaacgcgaggaaacgataaaatgatgcacacccgtgcataaatgatgagcgctccggtatcttagaggacgtgccgattgtgggccatggcgttcagatcctgcggcgttacgtagccattgatttgcggctggaggcgagagtgctggttgccgcctcccggcgccccaccagcggcgtgcgtcggcgatcccacggtggcggccagaggtggctttatcagcccagtgagctgcaactgctccatggtggtatagccgatgtcagccattttgggcgtggcggcagctggacttgcggcgtgaaccggcggtagctgtagcggtggcgaagttgctggcgaagatcccgcaaaggctggtcctccggtttgcgacaacggagctgcgacgagcggcttcagcttgtgcagatccgaggcctgcacgtagttgtccatgttgagcaagtgggccggtgggaaaaaggtcgacgcagcggctgcggtggcggcggaaggtactgctggcgacccaaacggttgaactggagccggattgaaccgagattgtggaatgggaacgggcacgtagccgctgagcggaatctgggacagcggctgggacatcggagcggtcattgcagtcgaaggaactgagaacgtgtgatcattatccgagggaccgttgccgccccagctcttcatctgtgtgggcttgatgtaaccattggtgcaactctgctcccgatccatttcgctctcgcgctgctgttgctgctgctcccgctccctctcctgctcacgatccctctccctctcgcgctccctgtcgttctggacgagaaggccatgccgcatggccaggtagctggtgggcggaccaactgcgctaattggccctgtctcgtgattgtcatcgtatccatcgcgatccacgcagccgccgccaccagaggaggacgctgtgcgcagcagcagtttcgagctctcactgccgcagctactgaagtcgtgcggcagatcctgcggcgtgtatggcggcgagtcgtccacccgtgtgcacacgatgcctccgctgacggacgagtctggacccaggcccaatcccaggccacccatgtctatgggcttcttcatggtctccatgattccctgcggcagcactagaccgatatcggacatcttgcggtatttcttgtacacgaggtagaagatgacgcccagcacgagaatcgccacggtcacctcaatggtctggtacatggccttcacgctgtgcgtgtccggtgtacagatgaatccgtagatgccccaatcggatctgtagagccggtaggcggtcatgttggcagcgtaggcctcgaactgcagccgctcctcttcgccgagcgcatcggtgcgtgcctcgcatcccttgccgttggtcgacataagcaaaacggcaccttccgctgcatccgctccgttcaactgcggatgctgctccacgttgatggcacgcaccgctagctggaagggattgtggctggtgcagcgcggcgtggccatcacataggataggttcctgcccggcagaatggtgcttgtcaggcagctggcgttgttgtcgcgcagcgagatctcgtagaaatcaatgcgtccggccggcgtccttggcggttcccagtcgagacgtgagctctgatccggattgttgatcacgtacagttgtggcggcgagggaactgcgcaaaggattacacggataagtatacattgcctatttacactggcttcaatgctagcgaaaccatcgatagcacttacctccgatggccgtgctgaagaggatcacattgctgggctccgatggatagacggtccgcgcacgcacgctaatctcgtacttggtgaatgcggtgagattgcccagccggtaggtgatgggcttctcgttgttcaccagctcgtcggcggaggcgcttacgcggaatgtatcggtcacgttgtcatgtagcgagcggaaggtgccctcgtaggcgcgcaccacgccgttggccagcagcggtggcttccaggcgagctccacgctgtcgctggtcacgcggattagctgcaactcccgcggctggctaggcgccgcctctccggtgcggttgaccagctcgtcgctgtacttgctgacccgcgagtccgaatacatcagcatcttgacactgtagtccgtgtagggcaccagattctggatgacgtgcttgttcgtatagcgatcgatggtcaccgtcgtgcaattgtccggacggccggccgagcgctggcagtaggtcagattatagccggccaggatcactgcgcagacgcgctccgaccaactgaccgtcagtgaggtgctggtggccacatcgatcgacggctccatcttggccaaatcgtccttcttgtcgctactgcagatcgcccagtgtaggcccgtattatgcgattggtagttggccgacacggccatgtgcagcgtgagcagttggtccggtgacgtggtgaagtgatgcagaccgcttgcgacctccgcgaagcgtatcgaaccctcgcattccgactgcaggcccggcttgggcacgcaccagaaaacggtgtagttctgcagttcccgctgatcgctcggcggatcccagctgagcgtgtagctcttgttggtcggatgatagacgctgcgtatgttcctgggctcgcgcaccttgaagtcccgattgctaatggggccgatcgtcatcggagtggcgttcacagacagaccctggctattgctgctgcggatgaggaagtgatggacggcactcatgctccagtgatcgatcatcgccgagttggactccaccttgatgaggccaggatccctgaacgagtcgaggtataatcatattagctaatgtatggtaatgaagatatgcatcttactaaactagacaattgaagagtgtctcgactaccagctaccctgtactcacataacaaatttttcaaatatgtaagtgcgcgtgggcgccatctgttggcggagaacagcattgttttgctatctgtgtttaggttcacaaaaaaaatgtttatgtaatttgtgataagaaacttttttccaattaaataatatcaatgaaattaacaaaacatactgattaataattcaagcgaagctgggtttaatagttgaactgcggtcaataattgtatatattataccgaaatttatatttttcttggtaaatattaatgtgataaaccaagcaaaaaaaaaaaaaaaacaataataaaaacatatagtgattagcaaggtagcaaaagtatccattgaattctttatattttcagtcaaacggcactcgcaattcttaggaatacattttttttctgggtaaggatcatttgggagagttcacatggatcacgtggatccaaaatacccgatgtaaaatcgttactgttgcacaacgtatatgtaagtatggtttatttttgaaacaacagtataatctttactcagaatatttaattccaaggaacagcagttctcggaatcgcaatcctatttgtcatggaaagacgagcatttatctacgcaagttgtcatttattgagggaattttccaaaagctatcattccactgaaatgggaattgcgttttgcaaccccaagatttccatgaaaccaattcgatccatcccttcttttgttttcacttttctaactcattttacggcattttaacaatatttatttcattggaaaattaattagccagattggcgtaaatatttttaaatattgccaatgaacatatgtttgtgtatagagataatcttattcttatcgttacttaagccagtggagaaattgttcaaaaatgtctgttagtaaaaaaacccttttgaaacttcaaagagaatccgctttttaaaatctggatttgaaatttgctttgcatatagtgcttacaactgagcggacattttaaagtcgaaatctataaaatcccaaaaatacaaaatttttgtagataacacaataactaatcgactcttttttttccttcgcttgtatttaataataaatgcgaaccaatgacgttgaattttgatataaaaaatgaaaacgatttgaaaaagctcggatttgtgttttgaactcaatatttatttttcgtttttgataagaaccgataattttcccacatgtatttaatctgtgcaaattgcttttgcgtatcaaatttatatgaatttatttttagaaccatatatttgaaaagggtttttagaaaaacaacactacgccgacgcgttaatttcgaagtaatttaatgtgcaaaaggctaaaatatcacacctaatttggtaaaaaaattgcctagcaaatgggttttatactctgaaaatattcattaatcttggcgcattttgaagcattttttttacgctagatagctctcgaataaatccatattttgttcttcaaatttcaaactcaatttgtttgttttcctttgaacacttttcgaatgattctatgaaaatacgagaagactgtgttgtgtttgtttacacacgaaattgtaatcgcaagtcgtcagaaaacttttgatatcatagatgtttggcctcgaaattgccattgtcaccggctgggcttgttatctagccaagattggtattgctcgagtctttggatgccagagacatcattcatccatatatgtatgaatgttcgcatgtaggttgacactataaatatatatgtgtttttttttagcacgtctattgaatgttgctgtcttctgatcaagagaatcgtctggagaacccttcagttttgccatggttgacaaagatttggcaacgattacagccacgccttgcaatccgaagacgcctgttgtctgctgtataccttatgtatacagactcctggcgattctgggggaaatggtgggtctgcctcctccgatttccgtggaagtgcattcgcccagaatgccgccgcccatctgccgtcttcccattaatgaacgtgtttctgccctcgccgcgccactggcgtgcatgtgtgtacatatgtatgtacatcggcacttcggacgaattgttaaaaataaacattttcagcggaaccccttgaatggaaatgtggctcccggcgtgtgtgcttgtgcaaatactacgccgtatggctctatgtggctcgccctaacgtattcgcaagaagtcgtcgttccggcgaatctctccggtgactcgagacaggtttgccaatgccccaataattagctgccaagcagcttacggcgcatattcatattcacatataggtactaaccaccatcccagttcccctcctactcacactgctgttccgttgatgcggtactcgctgatggagtaccgaaagtccggtccgttcagctcgtgctcctccaggggctcccagtagaagcgcatagccttctccgacgagtagacatagaagctgccgtaggtgacgcgaggagggcggcgcggcggcgccggagcggtggcgaacgcataaatcatgggctcgctccagagcgtgttgttttggttggcgcgcacgcgcacccggagcgtgtagttgtagccggcgaagggcagctccgtgaggcagagcgtgtccttgatggtcagcgtgtggtttcgccagctgggccgcgtgatgggctcaaagttttgcggcgtgacgcgcacctgccacaccaggccgcgattgtagttggaccgacggggcatctcccacgacaggcacacggagctctcggtcctgttgagcagggtcaggttctggccaggtcgcgccggcaccagacgctcaaagtgattgatcgtgatcggctgcgtctcgtggcccagggcattggagatggacagtcggaagtagaaggtctcgctgaagcgcttgtagttgtcgtcggttaggttacaggtgaccactggcgccgagtcgaagttgcagtccagtgtgttgctatatcgccagtcgttgttggtgttgtagctgatgttgtacttggtgatgaccgtgttgggcggctgggtgaagttgcacaccataaactggaagtcgtagtccaggcagttgaagtcgcgcaccaggagcggcctggtgcccacgtagacctttgacttgttgatcacatactcgtcgcacatgcagtggtagtcgttctcttgctccacggcattcgtgtcgctaaacaggatggtggtgttgttcaggattcggatgtgcttggaatcgcggtagacgcggccgccgcctgtaaagtacagcttctccaccgggcagtcctcggcgctcttgccgttaaagtagtcttcgttgagggtgcagctcagattaaagtcgccgccgatgagctgctccaccttggagggaatcacccagccaggatccaagatggcgttggcgccaccccggcagccggcaagcagcatgagcagcaggacgagctgctcctgggccaccatcttcctggtcctggttctgctcccaatcctaatcctaatcctaatcccctccttcccttgctgttaaggtttactctggctctctctctctctctctcccactctgtctctctgtctttagctcttttcctctctttctgtctctctctcgctcttacacacgcgcgcacaccaaaacggcgctctctcacacacacaagagcaccttgctgttggcctcgcacttgttggctgtgtattggtggccagttctcggaaaccgtttatacgctgcgttcctggaagtggctcttaaacatttcactgcccaggtgtgggcttcttgtccggggcttcactacgactaaattacgaatagggctatcagggccttgcaatgccaattgctcgcttcgagcaactgtggtaccgtgttactgttttgtctctggctctctcgcaaatgcagaatcctcagttggctaaggcgatcgctctcctccctgcccccgctcgcgatgctgacgatatatgttgtcgacgagttgcttgtccgcagtgtgaccgcttatcgaaagttatcgcagtccgatatgcgatatcactggggctacctgtcgacgaacggccccactaaatgcgataggtgccaaacatcgcatttcagccgaaattcgaattctaggccacccgttgcttgtatctctagaacgccctctgccgaatacgttttcaagcagagcaaactacttggcagcggttttggacgcgttcaaagcgttcaattggccgctatcgattcatcgattggtggttgatacgtcagccctggcgtgtgtaagagtcaaaatcgaaatccatcgtgagtgtgtgtgtgtccgtgtgagtgagaaagtgacgaattacttttcatcaaatgggaaataatttagggtgaaaacacgtatatattcggaacacatttaaattacagacgtgataacatctcgaaagaaccagctacatcggtgcaaattaagctaaacgagaacaccgcaaatacaccatcgaaatggcggaaggcggcagcaagcgcatcaacgtggttgtaaaaacgccaaaggacaagaaaacggtcgaagttgacgaagattctggaataaaagatgtgagtacggagcacgtgacccgcctgacttggttgctggtaccccaaacccttctggacccttccattcatagcgatggaccacctccctccctccctgctctttgcccacacccccgaaagtattgggaaattagtgcccgtaatcgcggtacagtgcactttgcctaagccgcacacaacacgcgcagctggtacagtgcactttgcacagtgattggtcttcttcccattaacacacataaattgaagcagaggcatgggagcgaacatttaattgaaaggggaaactagaccatgggcacataataatgacaacaatcacaccattctcgccccacagttcaaaatt

SEQ ID NO: 34172 - DNA, 4805 bp, DROSOPHILA
gagagcgatcgccttagccaactgaggattctgcatttgcgagagagccagagacaaaacagtaacacggtaccacagttgctcgaagcgagcaattggcattgcaaggccctgatagccctattcgtaatttagtcgtagtgaagccccggacaagaagcccacacctgggcagtgaaatgtttaagagccacttccaggaacgcagcgtataaacggtttccgagaactggccaccaatacacagccaacaagtgcgaggccaacagcaaggtgctcttgtgtgtgtgagagagcgccgttttggtgtgcgcgcgtgtgtaagagcgagagagagacagaaagagaggaaaagagctaaagacagagagacagagtgggagagagagagagagagagccagagtaaaccttaacagcaagggaaggaggggattaggattaggattaggattgggagcagaaccaggaccaggaagatggtggcccaggagcagctcgtcctgctgctcatgctgcttgccggctgccggggtggcgccaacgccatcttggatcctggctgggtgattccctccaaggtggagcagctcatcggcggcgactttaatctgagctgcaccctcaacgaagactactttaacggcaagagcgccgaggactgcccggtggagaagctgtactttacaggcggcggccgcgtctaccgcgattccaagcacatccgaatcctgaacaacaccaccatcctgtttagcgacacgaatgccgtggagcaagagaacgactaccactgcatgtgcgacgagtatgtgatcaacaagtcaaaggtctacgtgggcaccaggccgctcctggtgcgcgacttcaactgcctggactacgacttccagtttatggtgtgcaacttcacccagccgcccaacacggtcatcaccaagtacaacatcagctacaacaccaacaacgactggcgatatagcaacacactggactgcaacttcgactcggcgccagtggtcacctgtaacctaaccgacgacaactacaagcgcttcagcgagaccttctacttccgactgtccatctccaatgccctgggccacgagacgcagccgatcacgatcaatcactttgagcgtctggtgccggcgcgacctggccagaacctgaccctgctcaacaggaccgagagctccgtgtgcctgtcgtgggagatgccccgtcggtccaactacaatcgcggcctggtgtggcaggtgcgcgtcacgccgcaaaactttgagcccatcacgcggcccagctggcgaaaccacacgctgaccatcaaggacacgctctgcctcacggagctgcccttcgccggctacaactacacgctccgggtgcgcgtgcgcgccaaccaaaacaacacgctctggagcgagcccatgatttatgcgttcgccaccgctccggcgccgccgcgccgccctcctcgcgtcacctacggcagcttctatgtctactcgtcggagaaggctatgcgcttctactgggagcccctggaggagcacgagctgaacggaccggactttcggtactccatcagcgagtaccgcatcaacggaacagcagtggatcctggcctcatcaaggtggagtccaactcggcgatgatcgatcactggagcatgagtgccgtccatcacttcctcatccgcagcagcaatagccagggtctgtctgtgaacgccactccgatgacgatcggccccattagcaatcgggacttcaaggtgcgcgagcccaggaacatacgcagcgtctatcatccgaccaacaagagctacacgctcagctgggatccgccgagcgatcagcgggaactgcagaactacaccgttttctggtgcgtgcccaagccgggcctgcagtcggaatgcgagggttcgatacgcttcgcggaggtcgcaagcggtctgcatcacttcaccacgtcaccggaccaactgctcacgctgcacatggccgtgtcggccaactaccaatcgcataatacgggcctacactgggcgatctgcagtagcgacaagaaggacgatttggccaagatggagccgtcgatcgatgtggccaccagcacctcactgacggtcagttggtcggagcgcgtctgcgcagtgatcctggccggctataatctgacctactgccagcgctcggccggccgtccggacaattgcacgacggtgaccatcgatcgctatacgaacaagcacgtcatccagaatctggtgccctacacggactacagtgtcaagatgctgatgtattcggactcgcgggtcagcaagtacagcgacgagctggtcaaccgcaccggagaggcggcgcctagccagccgcgggagttgcagctaatccgcgtgaccagcgacagcgtggagctcgcctggaagccaccgctgctggccaacggcgtggtgcgcgcctacgagggcaccttccgctcgctacatgacaacgtgaccgatacattccgcgtaagcgcctccgccgacgagctggtgaacaacgagaagcccatcacctaccggctgggcaatctcaccgcattcaccaagtacgagattagcgtgcgtgcgcggaccgtctatccatcggagcccagcaatgtgatcctcttcagcacggccatcggagttccctcgccgccacaactgtacgtgatcaacaatccggatcagagctcacgtctcgactgggaaccgccaaggacgccggccggacgcattgatttctacgagatctcgctgcgcgacaacaacgccagctgcctgacaagcaccattctgccgggcaggaacctatcctatgtgatggccacgccgcgctgcaccagccacaatcccttccagctagcggtgcgtgccatcaacgtggagcagcatccgcagttgaacggagcggatgcagcggaaggtgccgttttgcttatgtcgaccaacggcaagggatgcgaggcacgcaccgatgcgctcggcgaagaggagcggctgcagttcgaggcctacgctgccaacatgaccgcctaccggctctacagatccgattggggcatctacggattcatctgtacaccggacacgcacagcgtgaaggccatgtaccagaccattgaggtgaccgtggcgattctcgtgctgggcgtcatcttctacctcgtgtacaagaaataccgcaagatgtccgatatcggtctagtgctgccgcagggaatcatggagaccatgaagaagcccatagacatgggtggcctgggattgggcctgggtccagactcgtccgtcagcggaggcatcgtgtgcacacgggtggacgactcgccgccatacacgccgcaggatctgccgcacgacttcagtagctgcggcagtgagagctcgaaactgctgctgcgcacagcgtcctcctctggtggcggcggctgcgtggatcgcgatggatacgatgacaatcacgagacagggccaattagcgcagttggtccgcccaccagctacctggccatgcggcatggccttctcgtccagaacgacagggagcgcgagagggagagggatcgtgagcaggagagggagcgggagcagcagcaacagcagcgcgagagcgaaatggatcgggagcagagttgcaccaatggttacatcaagcccacacagatgaagagctggggcggcaacggtccctcggataatgatcacacgttctcagttccttcgactgcaatgaccgctccgatgtcccagccgctgtcccagattccgctcagcggctacgtgcccgttcccattccacaatctcggttcaatccggctccagttcaaccgtttgggtcgccagcagtaccttccgccgccaccgcagccgctgcgtcgacctttttcccaccggcccacttgctcaacatggacaactacgtgcaggcctcggatctgcacaagctgaagccgctcgtcgcagctccgttgtcgcaaaccggaggaccagcctttgcgggatcttcgccagcaacttcgccaccgctacagctaccgccggttcacgccgcaagtccagctgccgccacgcccaaaatggctgacatcggctataccaccatggagcagttgcagctcactgggctgataaagccacctctggccgccaccgtgggatcgccgacgcacgccgctggtggggcgccgggaggcggcaaccagcactctcgcctccagccgcaaatcaatggctacgtaacgccgcaggatctgaacgccatggcccacaatcggcacgtcctctaagataccggagcgctcatcatttatgcacgggtgtgcatcattttatcgtttcctcgcgttcgcatcgataattcatcaactcatcttcagccgcatatccttccaacgccatgatctggtcaccggatcgccccagcaaccaaaatccaggacgaggaacccagaacccagaacctgtaaactagaatctggaatctggaaactagaaaccactgtcgggcagctgtttatagtaattagtgaaaactcctcggacgaatgtagttttacgtttgtaatttattttgtattctttgcgatgcgtgtgaggcagaaagtatttgtaacgcaatagtatttttttatatatattcgtactgtacacttacttacccacttaaccatccacgcgtcgagcggatcgagcttatactattaataccctatttacacaatacgcacatcgctgtatttcaatataaagctaattttaaataag

SEQ ID NO: 34173 - protein, 1282 aa, DROSOPHILA
MVAQEQLVLLLMLLAGCRGGANAILDPGWVIPSKVEQLIGGDFNLSCTLNEDYFNGKSAEDCPVEKLYFTGGGRVYRDSKHIRILNNTTILFSDTNAVEQENDYHCMCDEYVINKSKVYVGTRPLLVRDFNCLDYDFQFMVCNFTQPPNTVITKYNISYNTNNDWRYSNTLDCNFDSAPVVTCNLTDDNYKRFSETFYFRLSISNALGHETQPITINHFERLVPARPGQNLTLLNRTESSVCLSWEMPRRSNYNRGLVWQVRVTPQNFEPITRPSWRNHTLTIKDTLCLTELPFAGYNYTLRVRVRANQNNTLWSEPMIYAFATAPAPPRRPPRVTYGSFYVYSSEKAMRFYWEPLEEHELNGPDFRYSISEYRINGTAVDPGLIKVESNSAMIDHWSMSAVHHFLIRSSNSQGLSVNATPMTIGPISNRDFKVREPRNIRSVYHPTNKSYTLSWDPPSDQRELQNYTVFWCVPKPGLQSECEGSIRFAEVASGLHHFTTSPDQLLTLHMAVSANYQSHNTGLHWAICSSDKKDDLAKMEPSIDVATSTSLTVSWSERVCAVILAGYNLTYCQRSAGRPDNCTTVTIDRYTNKHVIQNLVPYTDYSVKMLMYSDSRVSKYSDELVNRTGEAAPSQPRELQLIRVTSDSVELAWKPPLLANGVVRAYEGTFRSLHDNVTDTFRVSASADELVNNEKPITYRLGNLTAFTKYEISVRARTVYPSEPSNVILFSTAIGVPSPPQLYVINNPDQSSRLDWEPPRTPAGRIDFYEISLRDNNASCLTSTILPGRNLSYVMATPRCTSHNPFQLAVRAINVEQHPQLNGADAAEGAVLLMSTNGKGCEARTDALGEEERLQFEAYAANMTAYRLYRSDWGIYGFICTPDTHSVKAMYQTIEVTVAILVLGVIFYLVYKKYRKMSDIGLVLPQGIMETMKKPIDMGGLGLGLGPDSSVSGGIVCTRVDDSPPYTPQDLPHDFSSCGSESSKLLLRTASSSGGGGCVDRDGYDDNHETGPISAVGPPTSYLAMRHGLLVQNDRERERERDREQEREREQQQQQRESEMDREQSCTNGYIKPTQMKSWGGNGPSDNDHTFSVPSTAMTAPMSQPLSQIPLSGYVPVPIPQSRFNPAPVQPFGSPAVPSAATAAAASTFFPPAHLLNMDNYVQASDLHKLKPLVAAPLSQTGGPAFAGSSPATSPPLQLPPVHAASPAAATPKMADIGYTTMEQLQLTGLIKPPLAATVGSPTHAAGGAPGGGNQHSRLQPQINGYVTPQDLNAMAHNRHVL

SEQ ID NO: 34174 - DNA, 3063 bp, DROSOPHILA
ccccccctccatttctcgcgatcggaaaacgttctggaaattgcaaacaactgcaaacaggacaaacgtacagtagatatcggctatatgcaaagacgacactgtcttgggggaatcctaacatacgcgcgagtatgctgtagtcaatcaaaatgtttatcgattcgttaatataagagcaatctccaagcgttatttatcccacatcccgttcagaggaatacaaatgtaaaaagttgttgcacacaagcgatttgcatgctaacgatatctactgtaagttaatgtgtgtatataggtatatatatatgtatatacatatatatatatatatcaaaatattccaaggtgttaacaaaagacgtaaaactataaaacaaaaaaaaaaaaaaaaaaaaaaaaacaactccttagtaaagagaggaagccccaataataacttgtaatgtaatttactctaagctttcgtatataaaacctataaccgaccatttgggttcccatttccgatcaatcacacacacacacactttcgaaaagctttccttcgcgcgctcaccgtttatataagatatggattcagtgtataccctgtaagtgctaccaccacatagcctcgctcgtccgctgtgggattggctggtcggccggctggctggctggccggctggctggctggccgggttgttggttggtcagttgggctagtggactagtggaactacgtttatttgtttagtgaaggaagtgaggcaaagtaattaaatgtaaatgatcacatgtttgaaaacgtaataaagctactttggttttagattatagccaacctcgtctattactctctactatctcatttacttccaaaggcatccgaaataaagcagctcacccactctggcttagttttagtaagcagtactttctaattgctattccaaatctttactgcagcttaaacgtttataataacttatacacttataacttataacttatgtcctcatgccgacaagttaaccagagcatcccagatccagtccatgtagaaagtcacattggtgcagacacttaggcccgcacaggagctcaagccgaagatgatgatgccaaactggaaggtgcgatacgtgcccccgtagagaatttttgcgctaaaggggccaccggaatcccctttgcatgcgtggctcgtctcggtgtggacgcatatctgcgactcgtccacctgctgctggaacttcaaggtgcagagttcgcgatcgatacgatccccaacggaatgcttcagcacccgtggtatgctgcgaaagtcttctgcagtggtgccccagacggtcaactggaatcggtcgatggccgccactggctcattgatgagcaggcaaatggggcgcacgaagtctataggggaaaggcagttctggttgagactttcgagggcaacgactggatatctcccactcaattacctgaatactgcaccgcatgctgcatccggagtaggccaatgtcgtactgttgggcttgtattttgccgaatccggcgtgcacgatcttcttgtcgatccgaacgcagtatgcgtttgataagcgagcacccgagctgcaattttgtccaggattccaggcgtcgaaatcacccaagtgcacctgcctacagggagagattgggtaatgggctgatgaccaccacatatgctggcgaatgggcaggacttacatggcttctctaaatacgcaatgtgctgctgtcaaaacaaatcctggaatggttaaaatttagccttgcgtgagctaaataagacactcatcatttggcacaaacactcactatgattgatgagcgatccactgcatttggccttgccattcactatcaccgaaacaatccaaggattggcctgtatgtcagtgctgctatcaaagtaattccaccaagttagcttagcgttagttggaagcgaccttccacattccgcgtcgagcaggaaagccgatccctctcgggatccgagaaatagagaggcaaagaggatcaggagtgccgctatgactttcttcattgtagctcgaggcccgaatggaaaccgaacttcgtgccattgggtttttattatataaatttgacactcacttatcgcaagttcctcacttctgcgaaagttgcaaattgggctgtgttctacgcgtgcttcaatgaaattttggctggaacacatgccacatctatatccatacatttaatcacttttatttcttataaaaaattgattaattttggatttttgattcactcaattaaatggaatagcagaaatcaatatggataacatacattttcatttgaactatgacatttcgtttatttaatatctaatattaagtttttaccgttatttaaactttaaataaagttctcttattataattactccgcgtaataacggaacataacaaggtgtatagggtagaaacaccctttgaagatcttgaattagacaaagatacactgatggtgcgaacgagtccggagtactcttcggatctgaaaccctatacctttgaatgatccgtctatcatatcgagtgggaaatttcctttaacgccgtgcacgccaagttaaaggattaagtacccttgcagttaaacgttaggcataatctatagtctacaggtacatacatatctatagtcagattcaattaaaatgcaattcctttgtctgaaatcttgaaaaattataataaataaatagaaatccaatcgtttaatttgcgccactttatttttttagctataggatacactgcaggaagacagcattttcgttccgatttgcatagttgtatgtatgtatgtacatatgtacatatgtatttaaacgagctgacagaaaatatatggcaacagaactaagagaccatggaatcggatggacatccacagtctctgggataacatccgtaaaccgaccacgctcagcggaataggagggagcttcaagaatatcgtaattaacattcagacttaactagaacaaatccgtgcctgcagttccagtc

SEQ ID NO: 34175 - DNA, 684 bp, DROSOPHILA
atgaagaaagtcatagcggcactcctgatcctctttgcctctctatttctcggatcccgagagggatcggctttcctgctcgacgcggaatgtggaaggcaggtgcacttgggtgatttcgacgcctggaatcctggacaaaattgcagctcgggtgctcgcttatcaaacgcatactgcgttcggatcgacaagaagatcgtgcacgccggattcggcaaaatacaagcccaacagtacgacattggcctactccggatgcagcatgcggtgcagtattcagacttcgtgcgccccatttgcctgctcatcaatgagccagtggcggccatcgaccgattccagttgaccgtctggggcaccactgcagaagactttcgcagcataccacgggtgctgaagcattccgttggggatcgtatcgatcgcgaactctgcaccttgaagttccagcagcaggtggacgagtcgcagatatgcgtccacaccgagacgagccacgcatgcaaaggggattccggtggcccctttagcgcaaaaattctctacgggggcacgtatcgcaccttccagtttggcatcatcatcttcggcttgagctcctgtgcgggcctaagtgtctgcaccaatgtgactttctacatggactggatctgggatgctctggttaacttgtcggcatga

SEQ ID NO: 34176 - protein, 227 aa, DROSOPHILA
MKKVIAALLILFASLFLGSREGSAFLLDAECGRQVHLGDFDAWNPGQNCSSGARLSNAYCVRIDKKIVHAGFGKIQAQQYDIGLLRMQHAVQYSDFVRPICLLINEPVAAIDRFQLTVWGTTAEDFRSIPRVLKHSVGDRIDRELCTLKFQQQVDESQICVHTETSHACKGDSGGPFSAKILYGGTYRTFQFGIIIFGLSSCAGLSVCTNVTFYMDWIWDALVNLSA

SEQ ID NO: 34177 - DNA, 4884 bp, DROSOPHILA
ttgaaaaattataataaataaatagaaatccaatcgtttaatttgcgccactttatttttttagctataggatacactgcaggaagacagcattttcgttccgatttgcatagttgtatgtatgtatgtacatatgtacatatgtatttaaacgagctgacagaaaatatatggcaacagaactaagagaccatggaatcggatggacatccacagtctctgggataacatccgtaaaccgaccacgctcagcggaataggagggagcttcaagaatatcgtaattaacattcagacttaactagaacaaatccgtgcctgcagttccagtcaccgacttttaatcggtaaatcaccgctcttttaaaaatgttgagcgcttaaacaccgcacaatttgcacgaaagctaccggtgattttaacattggcatgttttaggaaatcatcggtatgaaaaaaaaatcccaaaaacatcgctattaatcaccgttgtttaagcgcattttaacgggccaatcgtcctttgattcagcgttttttcatcgctgctttagcggttttgggttttgcggtttatggtttttcatctttgggagagagatcgctcgcgagagagtcggtgtcggtgagagagtgtgatgtttctcaagatcgatgaattggggaactgcagggaaggtatcaacacactgacaaagtcaaaagagcgccaaatcttcgctattgatcaccgttgtttgagcgcattttaatcgtcctttgattctgttttgcggtttattagttttcatttttggaagagagagatcgcgttcgagagagtcggtgtcggtgagagggtgtgatgtttctcaagagcgatgaattgtggaactgcatggaaggtgttgaatatcttctaccgaaaataacggtatctaatcgcccatctactttatgaatatttttcgtgcgtaagtgaatgtaaaatcatatatgtacatatgtatgtacatatgtacgtttgcaattggtttattacagcagcggcttgagcgaacaatcgaaaaacattaaatatagtatgttatagtaggatatagtacaactacggttaaggcactcatacactctagcacgcgcacaggcacacacgccaaatcgtaacgtatcgtacagctagatggggtattagtcatgtcggcggatgcgggggtgaggggggagtaggtgacggaggaggcggaggcggaggaggtcagagctcctcgaagaaggcgacacgcgccttggtcgagccggacttgagtttcttgagcgtggagtatttattttcgccggccttgatctgcgcctcgctgaggatgtccaggttgctctggttctcctcaatcttgtgcggcgcgatctcggagcgcagtgtctgcagttgactttgcacctgcttggagttgcgcaggtagtcgaggtggttgcgctccatctcattggtgatctgctccatctcgttgtcggtgagtatgaactccttgggctcgaagtcgtccgaaatgccgctggagttgtcaccttggaccaggtagtgtgacgagtgggtggtcagctcggcgccgccggcggtctccaaatcattggttgagctgcttgtgatcagggagggtgtgctgatggccgccatgctggacgccgtattcgccgcgtgcgacacactggaggcggtcagcaggctatccgtggaggacttgcggccgctgttgaggaattcgagcaggcgagcggtggcctcgcgctccgccattttggcgcagatcagctccttgcgcagcttctcagtctcggcctcccgcttgtcgttctccaccgtcagctggtggacatagaagtcggcgtcgcgaatcttcttctccaggtcgtgcttctcccgctcgattttcatttgtcgctcgcgcagccggtccatttccgtcttgaagtggtttgccttgcactcggtcagctgcatctgctcctcgttgacacgactcttttcgaagtacagctccttggtctcttcggaacgccgctgggatacagggagaaactcaatattatagatcagaagccactgggcggagtgagtcttacaagtgcatcgttggccatgcgcatttcgttttgcaggtgctccatgctcttctccagctcgtagcgctcgtgctccgccttttcgcgcagcttcttttccctgatgaactttttgcgttcgatctggcggcgttgcttctcctccttggcttgggccttcatctgctggatttccatggtgtcgggtttgcggcggcgcatatatagatcgtgattgcccttgcacaggtcaagaatctgcaaagcacacgatgcaagtgtagtatgaatatgggaacatgaacatagtgaaaatacatatacatatttcagttgtcacaactgccctccttaccattttgttgatgtggaggtcctgcgagtaaaagatgaaattcgaaaccttggcatccaccaggcgaatggtgaacttcttgtcgtcgaagctgacgtgccgtatctcgttccactggaacgttgtctttggcgttagcttatcgcgctcatcgtagatgtttaggcccacggaggtgacgcccagccacaatttggttttgttcttattctggtggggaacacaaacgataagattcagatgcgccacgtgaaaatcaaggctctcaccgtaataggaaagtagtttactccgtacatgtccaggtcctgagcaatcttcaggtactccatctccacctcgtcgcgcgtcatgggctcatggtccatgtaccatgtcttgatccgttcctcccacatttcgggcgtcatctggtactgatcggtcactcccttgggcagaagctcacccccggccagcataccgtccttgtaggtctcgtagtcgtacggaccgtattgcacgtgcaccgcgtaggaggccagcagcacggacgcctccgggcggcagtagatgtccatggagaggatgctctgcttgacctgcaggaagaacaggtgctgcgtgatctcctggatcagctcctcgctgacgttctccggaaagaacttggcgtagaagctaaacacatacacattattgctagcgtgcagctcaacgcgctggtcgcgcacccgcttctccattttcagccaggacacgttgctgcgggtgtcgacgtactgcagcccaaagtaccaagactcgcgcagcccgatggtgcggcacaccaggtcgaacagatcctggccggaggcgcgcggctccagcttgaactccagctccgagtcgaaggtgctcacccgcaccgacagggatcggtttttcttggagccgaaggggctcatcgcgattatgtgatgtgttttgattagattcgacgcaatgtgatgtgatgcgttagatgcaattggattggagtgggaactgagtgctcttgtgggcaattcgtgataacctgttgcgtgcaaaggacttgttgctcctgctaatctgattcttggtccttctggtgctcctgtgccatctagtggcacgattccttgttgctgctcctgcggtcctcgcctatcgcggactgcctcattttgcagccaattcggtgctccgggcaatggcaatggcaatttgggctgatggctgtgagcggaaagaaagaaagagtaaggctcttcgtttatgcggcgctgcgatttaagaactgcgtggccacggcatcctggcgcccactattcaaccgctcacccagctcctttggcgtggaagctgattgagggtcggcagaagggtctccacatcgaccaagtacgagaataggcaacttactcgattgtttgcaccgcgaatcgcaattgtacgacaaattcccgatatgcgcgacataaacatagacagtgtgaccagccgttagatgcagaaaaatcagctttggcagacgccttgtatatttagtagggtgattccatttcaattttatggaggaatcataatgcttaaattaatccatctcaaacgacataaagcattgaaatgtcaatatatgcacatgaaaacatattaaataccttaaaaatatattaactttccattttccaaaagttttcaaaaactggcaaaacagtggtagtccaaataccaaaatataccgcaatatgttttttcaaattgtacactcatttttagttatacgaatttttgaatgctgcgaaatagatttgatcagctatttgatgaaagatgaattaactaaaataacacagtgctatatagagttgccaccctgtcaatggtcacgaattgggaaaatgaagtccttgagcgcaatatttgttttaaagatttgtctaaggatgagatgtattactatgtaaatgtttattggacgtattcttgtattgcaggtccatgcttaaattctcggaataagcaaaatgaccatgtcagcagatgcgtatataaacaatgaataagtccagctttcgttttatcaggtccctgtagcttattttccatctccaccgactcagcaatgaacttgtacccccctggatatcgtatttcatcgaaataggaaaatataaagatatggaggttttcttacattattcttagaataaattatacatgcaggattataaatacatattgaagggatggtaaccgatgaacatagtttatatatattcatgtgcgtgtttgggggactcttagctcaatttatactactattattatgtgtatgcatcaggggtgatgctaatgccatgcaagtaaacaatgcttatcacacaaacgcaagtgactccagacacggatatccgaatccgtgcgcagagaagactgaacggaggcgaattactttgaacct

SEQ ID NO: 34178 - DNA, 2480 bp, DROSOPHILA
ggaatttgtcgtacaattgcgattcgcggtgcaaacaatcgaccatcagcccaaattgccattgccattgcccggagcaccgaattggctgcaaaatgaggcagtccgcgataggcgaggaccgcaggagcagcaacaaggaatcgtgccactagatggcacaggagcaccagaaggaccaagaatcagattagcaggagcaacaagtcctttgcacgcaacaggttatcacgaattgcccacaagagcactcagttcccactccaatccaattgcatctaacgcatcacatcacattgcgtcgaatctaatcaaaacacatcacataatcgcgatgagccccttcggctccaagaaaaaccgatccctgtcggtgcgggtgagcaccttcgactcggagctggagttcaagctggagccgcgcgcctccggccaggatctgttcgacctggtgtgccgcaccatcgggctgcgcgagtcttggtactttgggctgcagtacgtcgacacccgcagcaacgtgtcctggctgaaaatggagaagcgggtgcgcgaccagcgcgttgagctgcacgctagcaataatgtgtatgtgtttagcttctacgccaagttctttccggagaacgtcagcgaggagctgatccaggagatcacgcagcacctgttcttcctgcaggtcaagcagagcatcctctccatggacatctactgccgcccggaggcgtccgtgctgctggcctcctacgcggtgcacgtgcaatacggtccgtacgactacgagacctacaaggacggtatgctggccgggggtgagcttctgcccaagggagtgaccgatcagtaccagatgacgcccgaaatgtgggaggaacggatcaagacatggtacatggaccatgagcccatgacgcgcgacgaggtggagatggagtacctgaagattgctcaggacctggacatgtacggagtaaactactttcctattacgaataagaacaaaaccaaattgtggctgggcgtcacctccgtgggcctaaacatctacgatgagcgcgataagctaacgccaaagacaacgttccagtggaacgagatacggcacgtcagcttcgacgacaagaagttcaccattcgcctggtggatgccaaggtttcgaatttcatcttttactcgcaggacctccacatcaacaaaatgattcttgacctgtgcaagggcaatcacgatctatatatgcgccgccgcaaacccgacaccatggaaatccagcagatgaaggcccaagccaaggaggagaagcaacgccgccagatcgaacgcaaaaagttcatcagggaaaagaagctgcgcgaaaaggcggagcacgagcgctacgagctggagaagagcatggagcacctgcaaaacgaaatgcgcatggccaacgatgcacttcggcgttccgaagagaccaaggagctgtacttcgaaaagagtcgtgtcaacgaggagcagatgcagctgaccgagtgcaaggcaaaccacttcaagacggaaatggaccggctgcgcgagcgacaaatgaaaatcgagcgggagaagcacgacctggagaagaagattcgcgacgccgacttctatgtccaccagctgacggtggagaacgacaagcgggaggccgagactgagaagctgcgcaaggagctgatctgcgccaaaatggcggagcgcgaggccaccgctcgcctgctcgaattcctcaacagcggccgcaagtcctccacggatagcctgctgaccgcctccagtgtgtcgcacgcggcgaatacggcgtccagcatggcggccatcagcacaccctccctgatcacaagcagctcaaccaatgatttggagaccgccggcggcgccgagctgaccacccactcgtcacactacctggtccaaggtgacaactccagcggcatttcggacgacttcgagcccaaggagttcatactcaccgacaacgagatggagcagatcaccaatgagatggagcgcaaccacctcgactacctgcgcaactccaagcaggtgcaaagtcaactgcagacactgcgctccgagatcgcgccgcacaagattgaggagaaccagagcaacctggacatcctcagcgaggcgcagatcaaggccggcgaaaataaatactccacgctcaagaaactcaagtccggctcgaccaaggcgcgtgtcgccttcttcgaggagctctgacctcctccgcctccgcctcctccgtcacctactcccccctcacccccgcatccgccgacatgactaataccccatctagctgtacgatacgttacgatttggcgtgtgtgcctgtgcgcgtgctagagtgtatgagtgccttaaccgtagttgtactatatcctactataacatactatatttaatgtttttcgattgttcgctcaagccgctgctgtaataaaccaattgcaaacgt

SEQ ID NO: 34179 - protein, 635 aa, DROSOPHILA
MSPFGSKKNRSLSVRVSTFDSELEFKLEPRASGQDLFDLVCRTIGLRESWYFGLQYVDTRSNVSWLKMEKRVRDQRVELHASNNVYVFSFYAKFFPENVSEELIQEITQHLFFLQVKQSILSMDIYCRPEASVLLASYAVHVQYGPYDYETYKDGMLAGGELLPKGVTDQYQMTPEMWEERIKTWYMDHEPMTRDEVEMEYLKIAQDLDMYGVNYFPITNKNKTKLWLGVTSVGLNIYDERDKLTPKTTFQWNEIRHVSFDDKKFTIRLVDAKVSNFIFYSQDLHINKMILDLCKGNHDLYMRRRKPDTMEIQQMKAQAKEEKQRRQIERKKFIREKKLREKAEHERYELEKSMEHLQNEMRMANDALRRSEETKELYFEKSRVNEEQMQLTECKANHFKTEMDRLRERQMKIEREKHDLEKKIRDADFYVHQLTVENDKREAETEKLRKELICAKMAEREATARLLEFLNSGRKSSTDSLLTASSVSHAANTASSMAAISTPSLITSSSTNDLETAGGAELTTHSSHYLVQGDNSSGISDDFEPKEFILTDNEMEQITNEMERNHLDYLRNSKQVQSQLQTLRSEIAPHKIEENQSNLDILSEAQIKAGENKYSTLKKLKSGSTKARVAFFEEL

SEQ ID NO: 34180 - DNA, 2385 bp, DROSOPHILA
tgattccatttcaattttatggaggaatcataatgcttaaattaatccatctcaaacgacataaagcattgaaatgtcaatatatgcacatgaaaacatattaaataccttaaaaatatattaactttccattttccaaaagttttcaaaaactggcaaaacagtggtagtccaaataccaaaatataccgcaatatgttttttcaaattgtacactcatttttagttatacgaatttttgaatgctgcgaaatagatttgatcagctatttgatgaaagatgaattaactaaaataacacagtgctatatagagttgccaccctgtcaatggtcacgaattgggaaaatgaagtccttgagcgcaatatttgttttaaagatttgtctaaggatgagatgtattactatgtaaatgtttattggacgtattcttgtattgcaggtccatgcttaaattctcggaataagcaaaatgaccatgtcagcagatgcgtatataaacaatgaataagtccagctttcgttttatcaggtccctgtagcttattttccatctccaccgactcagcaatgaacttgtacccccctggatatcgtatttcatcgaaataggaaaatataaagatatggaggttttcttacattattcttagaataaattatacatgcaggattataaatacatattgaagggatggtaaccgatgaacatagtttatatatattcatgtgcgtgtttgggggactcttagctcaatttatactactattattatgtgtatgcatcaggggtgatgctaatgccatgcaagtaaacaatgcttatcacacaaacgcaagtgactccagacacggatatccgaatccgtgcgcagagaagactgaacggaggcgaattactttgaacctagagagagtgttgctgcagataactcgtgttggcacttaaatggctgtgccaggacttggactcgcacaccggaatccatgatcactagctactggctgctccgcttgatgcgctcgacatgcaggtcgtacagcatcttgttcttctcgtagtaaaatgggttttgttcggctcccagttctgggttgtattcgtatccggccgccacaccgtttccggctgcatcggacccgccggatccaccagtcgctcctcctcccgacagtggcggaatgctgcagctgctgctgctgctgctgttcccatcctcgtagttcagattcaggttgttgatgcgcttcgaaaggggcgactcgcaggccagttcatcctcccggctgcgctttctgtggaggaatggtgtgcgtttgattagcgctgggacctcactaccttggtcaaggtgattaccttgtcttcaggaatccagccattccgatcccggggccagtgcagtgtgttggtttcggttcctattggtcaattgttttgtcctgccccgtttcacagcagcgacatccaccagtgtgactgcctcgaagttcgaaattggctgtgggatataccaatgggttgtgctaaatataccgctaatcgaggtttgttttttcttaaatggaaatcacaaatagccaacccaaacagcagatattgttaagaaaaccgagattatattgtatccaaacaaatagaatatttttgggagggagggataaagtgaatctaaaagttgtctcagtgacaaatagcgccaagtgagaatattttatacccaacaattacttcacgatgacacgatgaatacagctgcggttaaaataataacactactgcaggtggaaagttgatttaccaaaaaaaataattaaatgttttatttttttaagtcagattgcatgaataataagaaccatatgttgtctctctgagcaagaaatttttactctctcaatgtaacggttctttttgtttttgggcacttgctgtggtaacaaaaatagcaccgatcacgtatttgctgaatacaattaataggagtgattgctttgggtttttttttcgacaaattttgaaaaaaggagttgcaataaaggttttaattgaattttttccaaacgaagacaaaaaattctctagtcatgggtcgcggaaagcattgtaccgtcgaaaaaagaaatttgattaaaaacatgatttctgaacgtaaaacctacgctgaaattggtcgcattgtcggttgttcaaacaaaatgatccgcaaagcactgctgtttgtcgaaaagaaggaaacacggcgaagagagccctcaatgtccaacgtggagatcaagcgcttggtttggcaaagcaagaaggagtcttttaagccggcgacggaactgaagaaggagcttcagatagctgcaagcgtggaaacagttcgcaaacgcttaa

SEQ ID NO: 34181 - DNA, 321 bp, DROSOPHILA
atggctggattcctgaagacaagaaagcgcagccgggaggatgaactggcctgcgagtcgcccctttcgaagcgcatcaacaacctgaatctgaactacgaggatgggaacagcagcagcagcagcagctgcagcattccgccactgtcgggaggaggagcgactggtggatccggcgggtccgatgcagccggaaacggtgtggcggccggatacgaatacaacccagaactgggagccgaacaaaacccattttactacgagaagaacaagatgctgtacgacctgcatgtcgagcgcatcaagcggagcagccagtag

SEQ ID NO: 34182 - protein, 106 aa, DROSOPHILA
MAGFLKTRKRSREDELACESPLSKRINNLNLNYEDGNSSSSSSCSIPPLSGGGATGGSGGSDAAGNGVAAGYEYNPELGAEQNPFYYEKNKMLYDLHVERIKRSSQ

SEQ ID NO: 34183 - DNA, 4163 bp, DROSOPHILA
agatcaaaattgtgttgtttggtgggaaaggctctcggtcttatgttcggcgtccaccacgacgtccaccactaaatataatcctcgcttcacctttaagtcggtaaaaaacgggggatcaagcatcatggtatgggcgtgcttttcatggtatggagtagttccaatccattggattcaaagcatcatggatcagcacatttactgtcatatgccgaggatgaaatgccgttggtttggacatttcaacaggataacgacccaaaacacacgagcaagaaagctcaaagtggtttgagcagaagtagatccgagtaatgaaatggcctgctcagtcacccgacttgaatccaatcgaaaacctttgggcggacgtgaaaaaagggtttctgaagccagacccaataataacgaggaattttggggtgtggtcaaggattcaggaagcaaaattcctcaaaaacagtgccaggacttggtggagtccatgccaagacgatgtccagctgtcattaccagcataggtcacgcaaccaaatattaagattctttaaacatagtttttaagatataatccgtttgtttaaatttttttaaaaattttttaaaaaatttttttatttagttttggcaaactacaagaaacagtgctatttttgttaccgcctaaatttgaaggtttttttttgttttaccaattattttatccattagatctgttactaatttttttatttcgattgaaaatcattgtagtatttaagtttagtgagtaaaatgatgaaaaagtgtcagaaaatacagaaacactgggacaaacacgaaatccgcttattattgttaccgcaactgtatgcagtatattggtcccgctctgcccgatcggtcggatatatagcccttacagtgacagagaacttccaccgaaaataccaacataccgattgcgatgcaagccgggtgggagtactgcgacgggatggcaacgccgcgctagtcactcgcacgcaaagagctcgctggagagagagaacgctaacacaaaaggaaatagtagttttccgtacgtatcgagcccagcccagaaaagcggaaaactaaacggattcgacagcggttgcaaattttaaataactgtaagtaaggcggaaaaggtgcccgcaacgagcatccgccgtatagatcgcaacgcgtttcaatttgcccagtgaaaagtgaatgaaaaccaaatgtcgatgacgggcctgcctgcctgtgtgtgtgtgtcatatgtgcgtgtggtccgtgccgcagtgtgcgtgtgtgataaataattgcttccaaatttctttagttttttgtctgcaaatctcgtctaaaatccgactatagctaaaaacagggggcagctccagcagctgactgggcggccagtcccgtgaccaaataaaccatcataaagccagtaatagtgcagcaaaaactgcattagaccaagtgaacacgcaccgcacacacacaaccgcaagctgccgtactcgctgcgcccctgcgcgcaagtgtttgcgtgtatgtgtgtccaatcagaattttctgatgcccgtccggcttatctgtgtgcgccgttgctttccattctttccgttctttcttcggcttgagtcatcgctcattctgcccagatatgtacatatgtacattgcacacacactgccgccccgctctcctgggctccgctcctcctcgttgataaggcgccgctggcgaacggtcactctggcaggagtacgagcaggagcagggaagccgcacccactagtcatccccccagtgtaatccggcaaactaacccccactaatccgcaggagtcatcacccctctgcacaacatgcaaaccatcaagtgcgtggtcgtcggcgacggagccgtgggtaagacatgcctgctcatctcgtatacaaccaacaagttcccgtcggagtacgtgcccacggtgttcgacaactatgcggtcactgtgatgatcggcggtgagccctacacactgggcctgttcgatacggccggacaggaggactacgatcggctgcgtccgctctcctatccgcagacggatgtcttccttgtctgcttttcggtggtcagtcccagttccttcgagaacgtcaaggagaaggtacgtacaagactattctacgccatggcgagactgtaagtgagtcattttgcatttgcagtgggtgcccgagattacacaccattgccaaaagacgccgttcctgctggtgggcacacagattgatttgcgcgacgagaacagcacgctggagaagctggccaagaacaagcagaagcccatcaccatggagcagggcgagaagctggccaaggagctgaaggccgtcaagtacgtggagtgctcggccttgacacagaagggcctgaaaaatgtattcgacgaggccatcctggccgccctcgagccaccagagcccacaaagaaaaggaagtgcaaattcttataattctgctttcctcacacgcggtatccctttcattctggctttctactatcgcaatgactccttcccagcctcccgtcgtcgagaagcattcaatatatagccgtatatatatatatataacatatatatatatatatgtatatatattggtcttgatttacgttattctgcattagcccagtactccatgagctatttctcctcgccgccatccgcctgtgtccccactcccactctactctttttgtctcacacaccgtctgtgtctccacttacgcgcgtccgcgtatctgtgtcagtagtgtccgtgctccagcctccagagctctaatccctacccggtattttggtcggtttctatgtttggtccactgtgaccaggcggctgggcagttgcccccaactcgggacagtcttccgccccacaagcttcagctccaatccccgccaggatccaatcgcagccaatcgaatcgaaacccagccgacttcatttctgctcccaaacatgtttttggcgcaattttcgaattaagtaaaaagaggaaccacaatatcaatatagcgaaaacaaatgatttatatataaatatatatatatatatatgtatatatatatatatttctttatatatatatacaaagattaaggagaggcaaaaaaaaaaaaaatatacatttacgataaacaaaaaaacaatccagaacagaacagaatgtggggcgattcgaaaagaaccatgcacttattcgttttgcctcagtcgatgaaatccgcgggaatccacgtcgatattgtcccgaaaggagcaacgtgcgagaattatattaaatatttatgataactgatcgcgtaatgtttaaacagcggaggtcggatggaattcgctagcatgcagatatgaaagtgaagcttattatgtaataaaactaagcgtatgagtattgaaatatgattaaaagtaaattaaatgaacctaaaggaggagataaaggatcagcaagagatgcgagaaccgaactaggcgttgcaaccacaacacaaacacacatctgaaatctacaatctatataaaagtatatacatatatatatatatatttaaatatgtataatccataaagtataacaaacaataaaacaacggcaacagcaacaaacatttgtattgtagttcagcaaaaaaacaaaaacgacaaaagatgaaaggaaaataagaactaatgcattttttaatatttttatatgtacacattatcaatttttacattttttttctagaccttagtgatttaacattattgatttcagataatatcttataataaaacgaaatccaaaacgaaaccactcactgtcttgcctgaaatgaaaaaaaaaaagggaacatcccaccaaagatgcacaagcgaaaatgtactttttatatgtataaaattacataaattcaatgcaattgtgatttttatatagcatttgtgattcatttgtggttgtttatttctatatcgattcgcgtgataaagacctgtcgtcatatcagttattacgttcctggaaaagtggccaacaggtggaggcaaagcttttccattactataaactatattttgattatctggccatgtcctattgttcgtcagcataaacgtcgagat

SEQ ID NO: 34184 - DNA, 1393 bp, DROSOPHILA
ctcgcacgcaaagagctcgctggagagagagaacgctaacacaaaaggaaatagtagttttccgtacgtatcgagcccagcccagaaaagcggaaaactaaacggattcgacagcggttgcaaattttaaataactgagtcatcacccctctgcacaacatgcaaaccatcaagtgcgtggtcgtcggcgacggagccgtgggtaagacatgcctgctcatctcgtatacaaccaacaagttcccgtcggagtacgtgcccacggtgttcgacaactatgcggtcactgtgatgatcggcggtgagccctacacactgggcctgttcgatacggccggacaggaggactacgatcggctgcgtccgctctcctatccgcagacggatgtcttccttgtctgcttttcggtggtcagtcccagttccttcgagaacgtcaaggagaagtgggtgcccgagattacacaccattgccaaaagacgccgttcctgctggtgggcacacagattgatttgcgcgacgagaacagcacgctggagaagctggccaagaacaagcagaagcccatcaccatggagcagggcgagaagctggccaaggagctgaaggccgtcaagtacgtggagtgctcggccttgacacagaagggcctgaaaaatgtattcgacgaggccatcctggccgccctcgagccaccagagcccacaaagaaaaggaagtgcaaattcttataattctgctttcctcacacgcggtatccctttcattctggctttctactatcgcaatgactccttcccagcctcccgtcgtcgagaagcattcaatatatagccgtatatatatatatataacatatatatatatatatgtatatatattggtcttgatttacgttattctgcattagcccagtactccatgagctatttctcctcgccgccatccgcctgtgtccccactcccactctactctttttgtctcacacaccgtctgtgtctccacttacgcgcgtccgcgtatctgtgtcagtagtgtccgtgctccagcctccagagctctaatccctacccggtattttggtcggtttctatgtttggtccactgtgaccaggcggctgggcagttgcccccaactcgggacagtcttccgccccacaagcttcagctccaatccccgccaggatccaatcgcagccaatcgaatcgaaacccagccgacttcatttctgctcccaaacatgtttttggcgcaattttcgaattaagtaaaaagaggaaccacaatatcaatatagcgaaaacaaatgatttatatataaatatatatatatatatatgtatatatatatatatttctttatatatatatacaaagattaaggagaggc

SEQ ID NO: 34185 - protein, 191 aa, DROSOPHILA
MQTIKCVVVGDGAVGKTCLLISYTTNKFPSEYVPTVFDNYAVTVMIGGEPYTLGLFDTAGQEDYDRLRPLSYPQTDVFLVCFSVVSPSSFENVKEKWVPEITHHCQKTPFLLVGTQIDLRDENSTLEKLAKNKQKPITMEQGEKLAKELKAVKYVECSALTQKGLKNVFDEAILAALEPPEPTKKRKCKFL

SEQ ID NO: 34186 - DNA, 4184 bp, DROSOPHILA
tgttcggggtttccggggaactgcttctcagcgtacagctgtggaacgagtgtaagcgttagaagggccaagttaatggtacaggagctggcatgcaattgcctgagaactgggtcatgaccccttttcaatggcagacagcgcagccaaggccgagcacccagtaattatcatgcattatttagcacaacaacaggtgcagagggccgggccggtgtgttgttgaaaaaatcgatgggctaccttaaactgctggtaagtctgcttgttgagtgcgtcctgcagctggcggcgctgcagctcctccttgtaaccctcctcgagcagctcctgctgggcgttctcctgccgctcgcgtgcctccttcttctcctccatgaggcgcagctccttgcgcagcgtctcgtcgcggtcctgccgcacggcctcaatgtacggccgaaaggcgctgcacattgtgtccagcaggtcgacgaacccctccatcgcctgctcgcgcgttatctcaccgagcagctgccagtgctgctgccggtcgcgtccgatcacgtccaggacgcccagcgccggggcgcgactcgtgttgaaggggcccagcgccgcctgctgcttgaaggcgatcagcttgaggttgtcctcgtacgacaagtggatggccttgccggagttccctgcaatatgtgagattagccgttattggtgcgctagtgccgggatctctgctcttacgcttgtagaacgtgaatgccaggcggtagagctcaatcaaagggaagccccacttctcggccgatgatggtgccatgtccgtcgactgggccgtttcactgctgcttgtgccgcttgtcccgctcgccatgctgccgttgtttgtgggctagtccacgattgctggcctgcaaacttttcgcacaaaacaaaacaaaataatagaatttattgtgacgtctgctgccagtgtgaccagccagctgcgcacctaaagtaattgtattgctcgccttgcaacactgaccgatggggattatttttgtctaacttaatgtatttgcctatttacaaagttgctaaataaatttgaaagctggtttagtgttgcttggacttgttaaaaacctgtataaagcaattgggaattggaattgtggctatatttaagtgtaagtttttatctgcccgcggtcacactggcccacagcaattcttgccgggatttggattctacacgtgcattgcaagcgtaaacataatatgggcagcactcggttcttcctggcggatctgccgaccaggacctcggagtcggacctgcagatcctgttccaggactacggtcacgtagagcacgtggatctgaagcgcaaggagcaggatggggccactaaggtgattgccttcgtcaccgtgcagacggatgatgcccagtactgtaagttatccgcggaagatcacagccagacggaaggagtaaccatagcttggttttgtaggcgtcaacgagctcaaatggcagaagttgcacggcgaaaagctaagagtttctcttgccaaagaatcgtttttggatcgactgaagcgcgaacgcgaagagaaccagcgccgggaacagggcgagccagacgagtccgaggtgcgtgcgccgagctctcagctcctggtgcaaagtggccaaaacaagcgcagggtattcggagaggatgaggagattggtgatgatgaggtcgctccagagctgctgattaccaagaagcgcgccgccaattccatgcacaatggccgggtatgcacgcactcattgttcccaagctcattgtcagctaaattcctttcctttcctttcccacagattgtcatccagcaggagcacgacgtgaagccactccatgtcatcgaacagcaccgcaaggcagccaaacagaagccggacgccaatgtcagccaggcggaacagaagcgcaaggagtcgctcaacaagatgcgtcagggacaccaacaaaagaagtcagccatccagcaggcgctatctgtgatatcagtcgaaggcagtcaggcaaagagaataaaattcagcgacgccgaggaggaggaggcgtccaagcccgtccagaaagccaagatacaaaagcgggatctgttcgagaacgacgacgatgaggaagaggagcagatcgtcctgccgcagcataagggcaagaagggcgagcgtctggtggagatgcagagcaaacagagtatagatccccgcttccgcatcacatcgaactttgtgaacgaggaggaagaggcggagctggaggatcagcctgagccggaggagagtgagcgcaaatggcacatgaacattctggagcaggttgtgggacacgcgatcaccagtgcgaacgataaggacggtaagtcgccaaagaacaaaaagatgctgcgcttcgatccggccaaggagggccatcagaagctaatgcgccaaaagcagcccaaggaggaggaggagaagaaggaggagacttccagtacgaaagccaagaccgccgacgcgggcaacagtcaagcttcagccgtctcgaagacggccttttacattgtcaccgacacgttgagggattcgctgaacacgcgtggagagggtttcagcctgctggacatgttcggcagtgcaccggagaaggaggtggccaagcgccaggaccagttggagaagctgggccatgagaagatcctggtgggcaagacgtctgccaataagctcggactggccactctcaatccgttctcctacgactcgtccgacagcgaagacgaaaccgaagtaaagccgaagcaagagcaggagcaggagcaggagcttgaggtcagcaaggagaacaaggcccagccagccgaagaagtcgggtcaaaagaggaacaaaaacaaattggagtccttcttcatacccagaaacgatcctcgtctcaagggtaagaacgtgaatctgtgcgtattttttcattctcaacaagcgatcgtcttttctttgcagagggcgccaagtttttcaagtccacgaaggcggtggttgaccatgccgaatatgaccaagtgaagaaccgcctgaaattgctgatcaccaaaaagatcgccaaggcgaagaagagcctgcccagcaaggatatcaagctgcagcggaataaaaagggaaaaaactgatctaggttaaattatacccttagtcttaagcataatcctgtgtaaaataaaccaatattgttcttttttttttttgtaaatggtacatgtattcatctagattacaaaaaaaaaaaatgaaatgtttgtgctttagttactgcacaaatgcatttgagccccgttgcagctccaactagattatcgtagcggtgtgaatccggctctgttgagattcattcggcatccgctggtgggattccgcctaactaaaagctaattaagtgaattaagattatcgcttcaacaaaaattgcggcgcttaatattcaacattgcaattaagtttcattcgtccgctaagcacttgtgtaggctctctaagtaaaaatggcaatctcaactgaaattcgagacatggctcttctttggcactgtatcctctgccgccatccggtgagaggagtggcggtagggaagggttatatatatatatatgtatgtaggtagaagtcttaagtagatctagcgagtagtggatgcattatattctacgtctgcctgccatccgtccgttcatcgccgccagcctttggtgtcagcttggccagcttgtccttcacctgaacatcgtcaccgctatcgccgtcgtctggcacctcaatggcggcatcctgattcgcgacgggaatggtgccgctcctgcctgtcgcaatgccgttgcgttccggactggtgggctgctcctgcgtagctggcggcgctgcaaactgagcctctggtggtggcggagacaacggtctggctgtcgctggcgcgttctctttggttggattaactggaaacgtaagtgcccgctttacggccagcgtttcaatggccacaaccgtgcgctccagcaggttcatcagccggtcctcgcgcgcatccatccgcttgaggagctcctcgtcccgcttctcgcgccgcttcagatactcgatcagctcgtaattggtgctgtcgccgtcggtcgaggtgg

SEQ ID NO: 34187 - DNA, 1949 bp, DROSOPHILA
ccttgcaacactgaccgatggggattatttttgtctaacttaatgtatttgcctatttacaaagttgctaaataaatttgaaagctggtttagtgttgcttggacttgttaaaaacctgtataaagcaattgggaattggaattgtggctatatttaagtgtaagtttttatctgcccgcggtcacactggcccacagcaattcttgccgggatttggattctacacgtgcattgcaagcgtaaacataatatgggcagcactcggttcttcctggcggatctgccgaccaggacctcggagtcggacctgcagatcctgttccaggactacggtcacgtagagcacgtggatctgaagcgcaaggagcaggatggggccactaaggtgattgccttcgtcaccgtgcagacggatgatgcccagtactgcgtcaacgagctcaaatggcagaagttgcacggcgaaaagctaagagtttctcttgccaaagaatcgtttttggatcgactgaagcgcgaacgcgaagagaaccagcgccgggaacagggcgagccagacgagtccgaggtgcgtgcgccgagctctcagctcctggtgcaaagtggccaaaacaagcgcagggtattcggagaggatgaggagattggtgatgatgaggtcgctccagagctgctgattaccaagaagcgcgccgccaattccatgcacaatggccggattgtcatccagcaggagcacgacgtgaagccactccatgtcatcgaacagcaccgcaaggcagccaaacagaagccggacgccaatgtcagccaggcggaacagaagcgcaaggagtcgctcaacaagatgcgtcagggacaccaacaaaagaagtcagccatccagcaggcgctatctgtgatatcagtcgaaggcagtcaggcaaagagaataaaattcagcgacgccgaggaggaggaggcgtccaagcccgtccagaaagccaagatacaaaagcgggatctgttcgagaacgacgacgatgaggaagaggagcagatcgtcctgccgcagcataagggcaagaagggcgagcgtctggtggagatgcagagcaaacagagtatagatccccgcttccgcatcacatcgaactttgtgaacgaggaggaagaggcggagctggaggatcagcctgagccggaggagagtgagcgcaaatggcacatgaacattctggagcaggttgtgggacacgcgatcaccagtgcgaacgataaggacggtaagtcgccaaagaacaaaaagatgctgcgcttcgatccggccaaggagggccatcagaagctaatgcgccaaaagcagcccaaggaggaggaggagaagaaggaggagacttccagtacgaaagccaagaccgccgacgcgggcaacagtcaagcttcagccgtctcgaagacggccttttacattgtcaccgacacgttgagggattcgctgaacacgcgtggagagggtttcagcctgctggacatgttcggcagtgcaccggagaaggaggtggccaagcgccaggaccagttggagaagctgggccatgagaagatcctggtgggcaagacgtctgccaataagctcggactggccactctcaatccgttctcctacgactcgtccgacagcgaagacgaaaccgaagtaaagccgaagcaagagcaggagcaggagcaggagcttgaggtcagcaaggagaacaaggcccagccagccgaagaagtcggcgatcgtcttttctttgcagagggcgccaagtttttcaagtccacgaaggcggtggttgaccatgccgaatatgaccaagtgaagaaccgcctgaaattgctgatcaccaaaaagatcgccaaggcgaagaagagcctgcccagcaaggatatcaagctgcagcggaataaaaagggaaaaaactga

SEQ ID NO: 34188 - protein, 565 aa, DROSOPHILA
MGSTRFFLADLPTRTSESDLQILFQDYGHVEHVDLKRKEQDGATKVIAFVTVQTDDAQYCVNELKWQKLHGEKLRVSLAKESFLDRLKREREENQRREQGEPDESEVRAPSSQLLVQSGQNKRRVFGEDEEIGDDEVAPELLITKKRAANSMHNGRIVIQQEHDVKPLHVIEQHRKAAKQKPDANVSQAEQKRKESLNKMRQGHQQKKSAIQQALSVISVEGSQAKRIKFSDAEEEEASKPVQKAKIQKRDLFENDDDEEEEQIVLPQHKGKKGERLVEMQSKQSIDPRFRITSNFVNEEEEAELEDQPEPEESERKWHMNILEQVVGHAITSANDKDGKSPKNKKMLRFDPAKEGHQKLMRQKQPKEEEEKKEETSSTKAKTADAGNSQASAVSKTAFYIVTDTLRDSLNTRGEGFSLLDMFGSAPEKEVAKRQDQLEKLGHEKILVGKTSANKLGLATLNPFSYDSSDSEDETEVKPKQEQEQEQELEVSKENKAQPAEEVGDRLFFAEGAKFFKSTKAVVDHAEYDQVKNRLKLLITKKIAKAKKSLPSKDIKLQRNKKGKN

SEQ ID NO: 34189 - DNA, 3656 bp, DROSOPHILA
acccagccgacttcatttctgctcccaaacatgtttttggcgcaattttcgaattaagtaaaaagaggaaccacaatatcaatatagcgaaaacaaatgatttatatataaatatatatatatatatatgtatatatatatatatttctttatatatatatacaaagattaaggagaggcaaaaaaaaaaaaaatatacatttacgataaacaaaaaaacaatccagaacagaacagaatgtggggcgattcgaaaagaaccatgcacttattcgttttgcctcagtcgatgaaatccgcgggaatccacgtcgatattgtcccgaaaggagcaacgtgcgagaattatattaaatatttatgataactgatcgcgtaatgtttaaacagcggaggtcggatggaattcgctagcatgcagatatgaaagtgaagcttattatgtaataaaactaagcgtatgagtattgaaatatgattaaaagtaaattaaatgaacctaaaggaggagataaaggatcagcaagagatgcgagaaccgaactaggcgttgcaaccacaacacaaacacacatctgaaatctacaatctatataaaagtatatacatatatatatatatatttaaatatgtataatccataaagtataacaaacaataaaacaacggcaacagcaacaaacatttgtattgtagttcagcaaaaaaacaaaaacgacaaaagatgaaaggaaaataagaactaatgcattttttaatatttttatatgtacacattatcaatttttacattttttttctagaccttagtgatttaacattattgatttcagataatatcttataataaaacgaaatccaaaacgaaaccactcactgtcttgcctgaaatgaaaaaaaaaaagggaacatcccaccaaagatgcacaagcgaaaatgtactttttatatgtataaaattacataaattcaatgcaattgtgatttttatatagcatttgtgattcatttgtggttgtttatttctatatcgattcgcgtgataaagacctgtcgtcatatcagttattacgttcctggaaaagtggccaacaggtggaggcaaagcttttccattactataaactatattttgattatctggccatgtcctattgttcgtcagcataaacgtcgagatctcggaagccaccagagctagcaaggtggctcttagcaagtaggaactctgcagcgccaaagaactcacacactcaaaaatattatgaatatattattaatttgtaaatcagacaaacaggattcaacaacgaacaaggattcatctgtaactttatgtaagaatgtataaaacacaacaggggctagtgatcaaaccagtggctgtatccacttgcattttatggccgccgcagcgacagcttcctcgtgcgactcggcgaatcccgcgctgccctggatatcaatgctgtcgtagtcgtagcgcgtgctggcctctttatcctgcagcagttgctcaacgccgtgccaggcgatcatgacgccgttgtcggagcagtaccgcttcgatggacggaagctcctgcagccatactgcgcggccagatgttcgatgttggcgtatatggcatcgttgttggccacaccgccggacatgaccagtgtgggcggggtgtcaccgaagagctgcctgtgcggcaggaggcagtactcaattgcccgctgcgtgcggtgcatcaggtgccggctgacagagcgcagcaggccggcgcagaagtcgccgtagttgctgatgactccgtccggaggtgtccgctctgcccgctcgcgcgctcggatggcccggaaggagttgttcttgatgccggcgaagctgaagttgcagttccgctgctgggcaagtggcagcggaaactcgtaggccagcggatcgctggccagctgggcggcatgctcaatggcccgtcctccgttccacaagcggtactccggcagaatgtgcaggcgtagtcgccgaccgatcttgtcaaaggcctcgccgggcgcatcatccagtgtttggccaagaagcgtaaggcgaccggggccgttagccaccaccaactgacagtggccgccgctggccagcaagcagaggaaggggtagccgatctgctccggatgttccatgcgggcctgcagcgcgtgcgcctccatgtggtgaacgggcagcaggggcttctgcaggcgacgggccaggtgccgtgcaaagcgcacgcccaccagcaaactcagcggcagtccgggacgcgtggtcaccgcgatggccgtcagttggtccggcttcaattgcgccgcctccatgcagcgctggtaggcggactcgatgcgggcgcggtgaaggtcctgggccctgggcggaataatgcctccatagctgcaatcgattcagttcatcattgggcaccgcatgcggagatgtgagcactcaccgggtgtggaactcctgttgcgactccagcacattggcaatcactcggcccgtggtgtccacgatggcgatgcccgtgtcgtcgcaggaggtctcgatgcccaggacatagctgagccggcgcctgatcccacagccaaatacatttgctattccattgccggcaaaattacgaagtgcatgcataatggccagtgtgaccaggcaccgatagaaaccacaaccagcaaatcgtgggaccgttagtgttagggccccttacacgagccaaattcttaactatactttaatgcaatttttatttaatataaaataataataatagttgtttcaatgcccaaaattggtaatagcaattgtgtcgtatgaagaagtttcctaagtgaattttacgaataatttattcttcattaagaagcaaagagatttcgaaaagtgattatttacagttgtctttatattgtttattagtttcaaattgaattttggacttgtcttcgtcggttacaactaaataataaataatattggtttagtctgaaatcggcatggtcttttcccgccgcttgtttcccggaattgcagcaacgcacacgtaaaaccaaaacctcacgcacacgcacatacagattattccggacttgcacattagccgttcgtacggagataggattcatctaagttagtggtaagtaaatacattttggcctcttaacgctcgtagtagacgcggtagtacagcgtcttattgcgccagatgctgtagctgttgtcgaacttcagcaaatagacgccctcgcccggataggagtgggagcccacgtagacctcgttgtagcactcccgtcgatagatcggtacgataatggaaatgggtgccttgggggcagcagtcgggttgttaactgcgccgcgctcctgcgacagcgagccggactccaggtcctcggtggtggataggtagtcctcgtccacgcaatcctcgtcctcgtcggagtcgctcacatgcacggtcacctcgttggtcacgggcttggcccactcgaagtagatgccgaagccgatgtcgtagctgtccgtggcgaactcccagaagatgcacttgccgttcatgttggtgggcacacggacctgcaaaattgtgccggtcaatatgggccttgtttcgtcattagttgattgccac

SEQ ID NO: 34190 - DNA, 1601 bp, DROSOPHILA
atgcatgcacttcgtaattttgccggcaatggaatagcaaatgtatttggctgtgggatcaggcgccggctcagctatgtcctgggcatcgagacctcctgcgacgacacgggcatcgccatcgtggacaccacgggccgagtgattgccaatgtgctggagtcgcaacaggagttccacacccgctatggaggcattattccgcccagggcccaggaccttcaccgcgcccgcatcgagtccgcctaccagcgctgcatggaggcggcgcaattgaagccggaccaactgacggccatcgcggtgaccacgcgtcccggactgccgctgagtttgctggtgggcgtgcgctttgcacggcacctggcccgtcgcctgcagaagcccctgctgcccgttcaccacatggaggcgcacgcgctgcaggcccgcatggaacatccggagcagatcggctaccccttcctctgcttgctggccagcggcggccactgtcagttggtggtggctaacggccccggtcgccttacgcttcttggccaaacactggatgatgcgcccggcgaggcctttgacaagatcggtcggcgactacgcctgcacattctgccggagtaccgcttgtggaacggaggacgggccattgagcatgccgcccagctggccagcgatccgctggcctacgagtttccgctgccacttgcccagcagcggaactgcaacttcagcttcgccggcatcaagaacaactccttccgggccatccgagcgcgcgagcgggcagagcggacacctccggacggagtcatcagcaactacggcgacttctgcgccggcctgctgcgctctgtcagccggcacctgatgcaccgcacgcagcgggcaattgagtactgcctcctgccgcacaggcagctcttcggtgacaccccgcccacactggtcatgtccggcggtgtggccaacaacgatgccatatacgccaacatcgaacatctggccgcgcagtatggctgcaggagcttccgtccatcgaagcggtactgctccgacaacggcgtcatgatcgcctggcacggcgttgagcaactgctgcaggataaagaggccagcacgcgctacgactacgacagcattgatatccagggcagcgcgggattcgccgagtcgcacgaggaagctgtcgctgcggcggccataaaatgcaagtggatacagccactggtttgatcactagcccctgttgtgttttatacattcttacataaagttacagatgaatccttgttcgttgttgaatcctgtttgtctgatttacaaattaataatatattcataatatttttgagtgtgtgagttctttggcgctgcagagttcctacttgctaagagccaccttgctagctctggtggcttccgagatctcgacgtttatgctgacgaacaataggacatggccagataatcaaaatatagtttatagtaatggaaaagctttgcctccacctgttggccacttttccaggaacgtaataactgatatgacgacaggtctttatcacgcgaatcgatatagaaataaacaaccacaaatgaatcac

SEQ ID NO: 34191 - protein, 409 aa, DROSOPHILA
MHALRNFAGNGIANVFGCGIRRRLSYVLGIETSCDDTGIAIVDTTGRVIANVLESQQEFHTRYGGIIPPRAQDLHRARIESAYQRCMEAAQLKPDQLTAIAVTTRPGLPLSLLVGVRFARHLARRLQKPLLPVHHMEAHALQARMEHPEQIGYPFLCLLASGGHCQLVVANGPGRLTLLGQTLDDAPGEAFDKIGRRLRLHILPEYRLWNGGRAIEHAAQLASDPLAYEFPLPLAQQRNCNFSFAGIKNNSFRAIRARERAERTPPDGVISNYGDFCAGLLRSVSRHLMHRTQRAIEYCLLPHRQLFGDTPPTLVMSGGVANNDAIYANIEHLAAQYGCRSFRPSKRYCSDNGVMIAWHGVEQLLQDKEASTRYDYDSIDIQGSAGFAESHEEAVAAAAIKCKWIQPLV

SEQ ID NO: 34192 - DNA, 3817 bp, DROSOPHILA
cgcgtgcgcctccatgtggtgaacgggcagcaggggcttctgcaggcgacgggccaggtgccgtgcaaagcgcacgcccaccagcaaactcagcggcagtccgggacgcgtggtcaccgcgatggccgtcagttggtccggcttcaattgcgccgcctccatgcagcgctggtaggcggactcgatgcgggcgcggtgaaggtcctgggccctgggcggaataatgcctccatagctgcaatcgattcagttcatcattgggcaccgcatgcggagatgtgagcactcaccgggtgtggaactcctgttgcgactccagcacattggcaatcactcggcccgtggtgtccacgatggcgatgcccgtgtcgtcgcaggaggtctcgatgcccaggacatagctgagccggcgcctgatcccacagccaaatacatttgctattccattgccggcaaaattacgaagtgcatgcataatggccagtgtgaccaggcaccgatagaaaccacaaccagcaaatcgtgggaccgttagtgttagggccccttacacgagccaaattcttaactatactttaatgcaatttttatttaatataaaataataataatagttgtttcaatgcccaaaattggtaatagcaattgtgtcgtatgaagaagtttcctaagtgaattttacgaataatttattcttcattaagaagcaaagagatttcgaaaagtgattatttacagttgtctttatattgtttattagtttcaaattgaattttggacttgtcttcgtcggttacaactaaataataaataatattggtttagtctgaaatcggcatggtcttttcccgccgcttgtttcccggaattgcagcaacgcacacgtaaaaccaaaacctcacgcacacgcacatacagattattccggacttgcacattagccgttcgtacggagataggattcatctaagttagtggtaagtaaatacattttggcctcttaacgctcgtagtagacgcggtagtacagcgtcttattgcgccagatgctgtagctgttgtcgaacttcagcaaatagacgccctcgcccggataggagtgggagcccacgtagacctcgttgtagcactcccgtcgatagatcggtacgataatggaaatgggtgccttgggggcagcagtcgggttgttaactgcgccgcgctcctgcgacagcgagccggactccaggtcctcggtggtggataggtagtcctcgtccacgcaatcctcgtcctcgtcggagtcgctcacatgcacggtcacctcgttggtcacgggcttggcccactcgaagtagatgccgaagccgatgtcgtagctgtccgtggcgaactcccagaagatgcacttgccgttcatgttggtgggcacacggacctgcaaaattgtgccggtcaatatgggccttgtttcgtcattagttgattgccacctaccgtcaccgtgtcgccgtgtccaatggtgatgacgccgtccccatcgccggcggacacctcagtcttaaactgctcgatgtcgggacgagtccagatcttggccgggcagatcataacgtagtcgtcgtactcttcctcgccgtgctgttcctgcccaacgccctccaacgtctgctctacatgcccgtcttgctgctcggccagctgctggtgctgctgtgtctcgacctcaccgagcttcagtccctccatggcgttgggcaagtcggttgagctgttgttgttattgccagggacgtgttctgcttcctggtgtcccttgtcctccgtgttctgattctgattctggttctggttctgcagatgaagctgttgcatgtactggtgatagtgctcccgctgcagctggtggataagcacggcctgctgttcggggtttccggggaactgcttctcagcgtacagctgtggaacgagtgtaagcgttagaagggccaagttaatggtacaggagctggcatgcaattgcctgagaactgggtcatgaccccttttcaatggcagacagcgcagccaaggccgagcacccagtaattatcatgcattatttagcacaacaacaggtgcagagggccgggccggtgtgttgttgaaaaaatcgatgggctaccttaaactgctggtaagtctgcttgttgagtgcgtcctgcagctggcggcgctgcagctcctccttgtaaccctcctcgagcagctcctgctgggcgttctcctgccgctcgcgtgcctccttcttctcctccatgaggcgcagctccttgcgcagcgtctcgtcgcggtcctgccgcacggcctcaatgtacggccgaaaggcgctgcacattgtgtccagcaggtcgacgaacccctccatcgcctgctcgcgcgttatctcaccgagcagctgccagtgctgctgccggtcgcgtccgatcacgtccaggacgcccagcgccggggcgcgactcgtgttgaaggggcccagcgccgcctgctgcttgaaggcgatcagcttgaggttgtcctcgtacgacaagtggatggccttgccggagttccctgcaatatgtgagattagccgttattggtgcgctagtgccgggatctctgctcttacgcttgtagaacgtgaatgccaggcggtagagctcaatcaaagggaagccccacttctcggccgatgatggtgccatgtccgtcgactgggccgtttcactgctgcttgtgccgcttgtcccgctcgccatgctgccgttgtttgtgggctagtccacgattgctggcctgcaaacttttcgcacaaaacaaaacaaaataatagaatttattgtgacgtctgctgccagtgtgaccagccagctgcgcacctaaagtaattgtattgctcgccttgcaacactgaccgatggggattatttttgtctaacttaatgtatttgcctatttacaaagttgctaaataaatttgaaagctggtttagtgttgcttggacttgttaaaaacctgtataaagcaattgggaattggaattgtggctatatttaagtgtaagtttttatctgcccgcggtcacactggcccacagcaattcttgccgggatttggattctacacgtgcattgcaagcgtaaacataatatgggcagcactcggttcttcctggcggatctgccgaccaggacctcggagtcggacctgcagatcctgttccaggactacggtcacgtagagcacgtggatctgaagcgcaaggagcaggatggggccactaaggtgattgccttcgtcaccgtgcagacggatgatgcccagtactgtaagttatccgcggaagatcacagccagacggaaggagtaaccatagcttggttttgtaggcgtcaacgagctcaaatggcagaagttgcacggcgaaaagctaagagtttctcttgccaaagaatcgtttttggatcgactgaagcgcgaacgcgaagagaaccagcgccgggaacagggcgagccagacgagtccgaggtgcgtgcgccgagctctcagctcctggtgcaaagtggccaaaacaagcgcagggtattcggagaggatgaggagattggtgatgatgaggtcgctccagagctgctgattaccaagaagcgcgccgccaattccatgcacaatggccgggtatgcacgcactcattgttcccaagctcattgtcagctaaattcctttcctttcctttcccacagattgtcatccagcaggagcacgacgtgaagccactccatgtcatcgaacagcaccgcaaggcagc

SEQ ID NO: 34193 - DNA, 1495 bp, DROSOPHILA
gcgaaaagtttgcaggccagcaatcgtggactagcccacaaacaacggcagcatggcgagcgggacaagcggcacaagcagcagtgaaacggcccagtcgacggacatggcaccatcatcggccgagaagtggggcttccctttgattgagctctaccgcctggcattcacgttctacaagcggaactccggcaaggccatccacttgtcgtacgaggacaacctcaagctgatcgccttcaagcagcaggcggcgctgggccccttcaacacgagtcgcgccccggcgctgggcgtcctggacgtgatcggacgcgaccggcagcagcactggcagctgctcggtgagataacgcgcgagcaggcgatggaggggttcgtcgacctgctggacacaatgtgcagcgcctttcggccgtacattgaggccgtgcggcaggaccgcgacgagacgctgcgcaaggagctgcgcctcatggaggagaagaaggaggcacgcgagcggcaggagaacgcccagcaggagctgctcgaggagggttacaaggaggagctgcagcgccgccagctgcaggacgcactcaacaagcagacttaccagcagtttaagctgtacgctgagaagcagttccccggaaaccccgaacagcaggccgtgcttatccaccagctgcagcgggagcactatcaccagtacatgcaacagcttcatctgcagaaccagaaccagaatcagaatcagaacacggaggacaagggacaccaggaagcagaacacgtccctggcaataacaacaacagctcaaccgacttgcccaacgccatggagggactgaagctcggtgaggtcgagacacagcagcaccagcagctggccgagcagcaagacgggcatgtagagcagacgttggagggcgttgggcaggaacagcacggcgaggaagagtacgacgactacgttatgatctgcccggccaagatctggactcgtcccgacatcgagcagtttaagactgaggtgtccgccggcgatggggacggcgtcatcaccattggacacggcgacacggtgacggtccgtgtgcccaccaacatgaacggcaagtgcatcttctgggagttcgccacggacagctacgacatcggcttcggcatctacttcgagtgggccaagcccgtgaccaacgaggtgaccgtgcatgtgagcgactccgacgaggacgaggattgcgtggacgaggactacctatccaccaccgaggacctggagtccggctcgctgtcgcaggagcgcggcgcagttaacaacccgactgctgcccccaaggcacccatttccattatcgtaccgatctatcgacgggagtgctacaacgaggtctacgtgggctcccactcctatccgggcgagggcgtctatttgctgaagttcgacaacagctacagcatctggcgcaataagacgctgtactaccgcgtctactacgagcgttaa

SEQ ID NO: 34194 - protein, 480 aa, DROSOPHILA
MASGTSGTSSSETAQSTDMAPSSAEKWGFPLIELYRLAFTFYKRNSGKAIHLSYEDNLKLIAFKQQAALGPFNTSRAPALGVLDVIGRDRQQHWQLLGEITREQAMEGFVDLLDTMCSAFRPYIEAVRQDRDETLRKELRLMEEKKEARERQENAQQELLEEGYKEELQRRQLQDALNKQTYQQFKLYAEKQFPGNPEQQAVLIHQLQREHYHQYMQQLHLQNQNQNQNQNTEDKGHQEAEHVPGNNNNSSTDLPNAMEGLKLGEVETQQHQQLAEQQDGHVEQTLEGVGQEQHGEEEYDDYVMICPAKIWTRPDIEQFKTEVSAGDGDGVITIGHGDTVTVRVPTNMNGKCIFWEFATDSYDIGFGIYFEWAKPVTNEVTVHVSDSDEDEDCVDEDYLSTTEDLESGSLSQERGAVNNPTAAPKAPISIIVPIYRRECYNEVYVGSHSYPGEGVYLLKFDNSYSIWRNKTLYYRVYYER

SEQ ID NO: 34195 - DNA, 8586 bp, DROSOPHILA
gaactttgtgaacgaggaggaagaggcggagctggaggatcagcctgagccggaggagagtgagcgcaaatggcacatgaacattctggagcaggttgtgggacacgcgatcaccagtgcgaacgataaggacggtaagtcgccaaagaacaaaaagatgctgcgcttcgatccggccaaggagggccatcagaagctaatgcgccaaaagcagcccaaggaggaggaggagaagaaggaggagacttccagtacgaaagccaagaccgccgacgcgggcaacagtcaagcttcagccgtctcgaagacggccttttacattgtcaccgacacgttgagggattcgctgaacacgcgtggagagggtttcagcctgctggacatgttcggcagtgcaccggagaaggaggtggccaagcgccaggaccagttggagaagctgggccatgagaagatcctggtgggcaagacgtctgccaataagctcggactggccactctcaatccgttctcctacgactcgtccgacagcgaagacgaaaccgaagtaaagccgaagcaagagcaggagcaggagcaggagcttgaggtcagcaaggagaacaaggcccagccagccgaagaagtcgggtcaaaagaggaacaaaaacaaattggagtccttcttcatacccagaaacgatcctcgtctcaagggtaagaacgtgaatctgtgcgtattttttcattctcaacaagcgatcgtcttttctttgcagagggcgccaagtttttcaagtccacgaaggcggtggttgaccatgccgaatatgaccaagtgaagaaccgcctgaaattgctgatcaccaaaaagatcgccaaggcgaagaagagcctgcccagcaaggatatcaagctgcagcggaataaaaagggaaaaaactgatctaggttaaattatacccttagtcttaagcataatcctgtgtaaaataaaccaatattgttcttttttttttttgtaaatggtacatgtattcatctagattacaaaaaaaaaaaatgaaatgtttgtgctttagttactgcacaaatgcatttgagccccgttgcagctccaactagattatcgtagcggtgtgaatccggctctgttgagattcattcggcatccgctggtgggattccgcctaactaaaagctaattaagtgaattaagattatcgcttcaacaaaaattgcggcgcttaatattcaacattgcaattaagtttcattcgtccgctaagcacttgtgtaggctctctaagtaaaaatggcaatctcaactgaaattcgagacatggctcttctttggcactgtatcctctgccgccatccggtgagaggagtggcggtagggaagggttatatatatatatatgtatgtaggtagaagtcttaagtagatctagcgagtagtggatgcattatattctacgtctgcctgccatccgtccgttcatcgccgccagcctttggtgtcagcttggccagcttgtccttcacctgaacatcgtcaccgctatcgccgtcgtctggcacctcaatggcggcatcctgattcgcgacgggaatggtgccgctcctgcctgtcgcaatgccgttgcgttccggactggtgggctgctcctgcgtagctggcggcgctgcaaactgagcctctggtggtggcggagacaacggtctggctgtcgctggcgcgttctctttggttggattaactggaaacgtaagtgcccgctttacggccagcgtttcaatggccacaaccgtgcgctccagcaggttcatcagccggtcctcgcgcgcatccatccgcttgaggagctcctcgtcccgcttctcgcgccgcttcagatactcgatcagctcgtaattggtgctgtcgccgtcggtcgaggtggacatcttgcgcttcttcttcagcgttgtcgatgaggagcagtcggacaggatgtccgtgtcgacgatcacatcggggtgcagtatattcgcatccatgcccggcgaatagtagttctgcgctctgtgcaagcatggatttgatcaatggaatcggtttcgaagaaggtggcttccgtcgccgccggcactcacccattgtagttcgtctgcatcagctggatgtcgtccggattgaactcgccctccgaaagtggctccgacctgtgggcggcagagaagcgagagtcttaggcgggatctcgagaacggggcaacccgataatcgatctggactttccccattaacaattaaatggacaccattacttttgaactgataattgttgagtaaaaaggatttatttcttaactttgtttgtttgatgaagtgaagtcagtctatcagtgaagtgaagtatcttttaggtttgtagtttgcagtatatgtaagtaatccctagaggatcggaatcggcatcgaaatttagattttacacttaaagtaacatctttaaattgaatggaagaaacataaagtaatctatattctcaatttcactacgattttcaatcttgcaacgaacttttttgtcttttgattgcgaaactgttggtgggcgtaagactgggcgtggcaacgttctgagatttagttacggaaatatcgacggacagacaagagcctataaacaattatattttggagattgaaaacccttcctctgtctattacatagtttaccagaaatctattacaacttttactcacttcattgatatgtggttctcgttgtgattgttgttctggtggtgcatgttgagtgctccattgcagtccttttcgaagtcgggtgcttcgccagagtcgtccattggcgcgtggcccaagccgaggccgtggccatgacccaggacgtgaaggtggtttttaaatgctggccgctggggctcatcctcgtcgtcgtcttcgggcgtcatttgaacgccgccaacgctggccatctggagctcatgtcgcttatgggcggccacggcggcagcggcagcagctgcctgaaccatctgcatctggaggggattctcgtcgaagccgccggcggacatgccggatacaccggatgcggagccaccgaccgggccggccacctcgctgagctgcgcctccacaaagtgattgggcaggaagcggtccagcttgctcccgctctgcgaggagtccgtggagtgggcgtgcgagtggctctggctctggctctggctgaggctctgcagtaggctgtgctggtgcggggtgaggttgtccttgttgagcagcactcccagctcggccgcctgccgtcggcgctggtagtaggatagctcgttgtggtttttggttatgagcgccagacgcttgccattcgatccccagcactcgccgcgctgctcctcgatctccttgaagaggaacatgtacggccagttgcggcgcacatggcgctcgggattctttttcagctgcgtgtagatcttcttgaggttctcgtaccgattgcagcactgcttggccgttcgcttccgcgcactgaagcggttgagcacctcggcgaccatctcccacacgctggcatggttctttcggttcgactggaacgcgctctggatgcgctccgacttgacgatgttcagcagggccaccgactccggcacgttgaagtacgattccggcgtccgcggcgcccgctggtggtgatagctgctcgtcaccggcgggggattcttcgtatcctgcaaggatatccaacaggataatttaaggaaaataagaaacaattgctactaacaataagatacaaaaaaaaatatatagatatgatgataatagtgatgtgttaaattcattattattatttagttttaatagttaataaatcgtacaggcgtttacaacgttgaaaagctcataaaaaccaagttgtttcgttaagatttttatatagtatgtatgtatgtacatacataaggcatcttaaatatgattcatatggtaggtaaattataatccaatccaatgtacaaaataaatgattaaataattagaaataactatggaccgatgtatcgtatatatcataaatatatatatattaattttgatatcaataatcataaatattttttaataaatttattacggttaatggtcaaaacatatgcagatacttatatgtatttacataaatcttttataaatagctacatctgtgcagttaaagtttgtcacaattatttcaatgtacacacatacatatatttcatttcaattgtatatttcaaacgcatggtatgtaaatataccatataatatatgaactacaaacattgtctactagatccaagaaaatcagtaagattatgtttatctatatctctagctcaaaacatcgataatatctcctgagttttccaagagatacatagatggacatgccattatgatcttgaccagaagtttttgtgcatcatcgtgctgatggccaaagctcattcatgccgtctagattctacgaaatctttcctcccgcggcagagatgagctgccgatgatgactaagcgcggcgaaatttgtttcgcagatattcacggattgtccactaccgcagatagcgatccgtgcggaggctgtggcgttcggatcggatctgctgcacttccgtatctgggagaatctatgtacatgcatgtacatactatatgtacatacagtttgtcaagaaactgtttacacactgtaagataagttgaatttttgactttaaagctaaaaataaagggttttttgcttaattaaacggcaatttttttataaaatataattaaacaatatttattttacttataaatcaaaaaacaaattaaaaatattaaatatcccccaaaataaacaacaaattccaagtttacacacttttgggactgtcaagaaactcttacacaaaacactaaatcaaagtttaatcctaaattttaaaattattttattaaaattttaaaagttttggtatgtagtatgtgccctattggctttagctacaagttgaagcctttttttcatggattggacaagtttttgcaggtcatattcaaacgggatcttttcacactcttcgactattacagtcataagctgttgttgtgttttaggtccctttttgccaccttcttctttaagtaggtccacaaattttcaatggggttcagatcaggactctgagggggcggtatcgatcactttaccacagttacaaaggcgccaggtgcgtacattccactctttgtttctgatcatgtcctggtaaaacttaagatttggcttgttgttgctaactagaccgaatttttctgcactggccttcaaatttgttttttaagattcctagatattgcacggcatttattgtgctctcaattaaggctagttttcccactccactgctggatgatacagccccaaaccatcagtgacatttttccaaatattatcgttggaatgatattttgtttttctagcgcactcaacggtttgcgccatactcttcttggcccgtcgttataaaagagcatcatatttgtttcgtcacaaaatatgacgtcatcccagtactcttccgcatgatccatcatgctcacagcgaattaatgacgcttttccatattggcatctgatagcaaagggtttttccttgcaactcttgaagagtacctatggcgtaggatgacttggcgcacagtttcgtgtgacacagttaggtgacattcttgcctgatatccagagcaagtgatctgaccgagattcgggggttcgcaatcactattcgcataataaagcggtctacacggctttttaattttaattttccgcccaccaccgctcttaggttcaagcctgccctctttttccgagccttttaaaacattgtagacggtcttacgggatacaggaaacatttatactaattctggaaaagattttcccaactggtggttatagtttattaattgggtaacttcaaaagttaatctctttccaggcattttattaaatttaataattcgctttaagcacgtttgatcagcaaaatttcacaagcaaagtcaacaaatttcaatagaagcgttgtaaaaagcaatgcaaagccaaaaataacggaaaaatcgagttcgttctaagaaaaagaacaaaacaaagtaggaaaacaaaatgtgtaaagagtttcttgacagtcccaaaaagtgtgtaaacttggaatttgttgtttattttcttgtatatttaatatttttaatttgttttttgatttataagtaaaataaatattgtttaattatattttataaaaaaaattccgtttaattaagcaaaaaaccctttatttttagctttaaagtcaaaaattcaacttatcttacagtgtgtaaacagtttcttgacaaactgtatgtatgtatatgcatgtatcttctcgcccccactgcttggatatgcagcgctatttgcctggaagctaatctctcacattgcttaccatttgggaattctgtggtgtcagcagcttctggatggcccgattctgctgagcaggcgcaatgctggacggtgatattgtctaatttctgctgctgctatcctcttctccgatccgctgcagattctttcgagtgtttcaattgtggactctccggctctgctcgttgttgttgttgttgttattgcttatgtttttgtgtttgtttttgcggatgctgcgttggcctggcggcgtttgcatttcaaatgtaactagtgtgaacgcaatgtaacctttgtgacacttaacgtctagagcgtggcgattgtgcgtgtgtgtgcctaaaaaaataataaaaatcgaatcacaacaaaaacaacatttgttagaccacaaaataacgaaacggaaacaagagccgaaacaaaatcgaaatcgaattcgaaatcaacgaacgtacttgttctttgttgtattttgttttacgttactcgaattttgttgttgacaacaaaccgacaacgactattaatatttagaagttaaccttttagccttagacggcggctcatcggctacggcaacgtcgacagaaaacgcgaaaaaaaaacaaactaaaaaaaaaagaatcacaaaaaaaaagtgaaaacacaaatcacgaaatcagatgcacatgtgcctttctgcgttctcactcacgaatatccgtgcgaacatttacagttggcgggcactttgacagttatgcagagctgccactattctttccgccaaagctcttttatttgctactgttgcagttgttgttattgtttgcgcgtccctgctcacttgttgttgttcttttttctgtcattcatccttgttacgcgctctcactcacaccgccactctctgggctctctccatcactcacgcacgagaagctttcgctgacctgcatttgcactgagcgaaaagtagagtggagaagaaaggtggaaagaaaacgcgagcgcaattctcttcctccggacaacgctgcacgcgatttaccgttctccgtagtccgccgtcctgagattccaactaaccaactaaaactaaccaaaccaaacaacaacgaaactgaaactgaactttttgcttgcgatcccgttgccgatactaacggcagtcgcgcacacacccatgcgcgcacgcacacagacgggtgagctcccacatagacacacacatacatatggaccgctacgatcgttaggcggacgatcgctcctcgggcacggaacaccacggaacactgctctaacctggtagattgcggcggagaggcgatggcgatgccttctggggtgcacatgtgttctgcacacacacacggacttcgggtatataaatatatatgtatacacgaacgtgtacatacaagtgtgtctacttatagattcgggcagagacagagactacgtcgaaagaggagagggaggaggaggaggaggcagtggtggtggcggtggcggtcgcagcggcagaggagcaaggcggagacagcagatccatccgatcagagcaagcatgattccaacgatgcccacgatccgaagagggaagcagttactccgattccgattccgattcctactctacagatcacgcacactaccgtgtgcctgtgttcgggtttggatttggattcggttctattcgattcgactcggctcgactcgacccgactcgatacgattcggatgcggatggaatggtaggagatggtatggtatggcataggacggaggtgaacctatgtggatctatgaagggccaaatgggaaaagtcgtagcctaaaaatagatacgagtatgttgtgcagtatggcgggcatgggcaccccaagtggaagtggatgtggatgtggtatggatgcaaacgtttggcgttgcttctgtttgccgtctctttgcaacagcatcttgagcactggccaaaacgcaacaggatactaaatgccgcagtattccaacctattcttcgttatcatctactataaattagaatgtggaatctatgtttgaaaatagaacatacaatc

SEQ ID NO: 34196 - DNA, 2474 bp, DROSOPHILA
ttagttggaatctcaggacggcggactacggagaacggcacacacacgcacaatcgccacgctctagacgttaagtgtcacaaaggttacattgcgttcacactagttacatttgaaatgcaaacgccgccaggccaacgcagcatccgcaaaaacaaacacaaaaacataagcaataacaacaacaacaacaacgagcagagccggagagtccacaattgaaacactcgaaagaatctgcagcggatcggagaagaggatagcagcagcagaaattagacaatatcaccgtccagcattgcgcctgctcagcagaatcgggccatccagaagctgctgacaccacagaattcccaaatggatacgaagaatcccccgccggtgacgagcagctatcaccaccagcgggcgccgcggacgccggaatcgtacttcaacgtgccggagtcggtggccctgctgaacatcgtcaagtcggagcgcatccagagcgcgttccagtcgaaccgaaagaaccatgccagcgtgtgggagatggtcgccgaggtgctcaaccgcttcagtgcgcggaagcgaacggccaagcagtgctgcaatcggtacgagaacctcaagaagatctacacgcagctgaaaaagaatcccgagcgccatgtgcgccgcaactggccgtacatgttcctcttcaaggagatcgaggagcagcgcggcgagtgctggggatcgaatggcaagcgtctggcgctcataaccaaaaaccacaacgagctatcctactaccagcgccgacggcaggcggccgagctgggagtgctgctcaacaaggacaacctcaccccgcaccagcacagcctactgcagagcctcagccagagccagagccagagccactcgcacgcccactccacggactcctcgcagagcgggagcaagctggaccgcttcctgcccaatcactttgtggaggcgcagctcagcgaggtggccggcccggtcggtggctccgcatccggtgtatccggcatgtccgccggcggcttcgacgagaatcccctccagatgcagatggttcaggcagctgctgccgctgccgccgtggccgcccataagcgacatgagctccagatggccagcgttggcggcgttcaaatgacgcccgaagacgacgacgaggatgagccccagcggccagcatttaaaaaccaccttcacgtcctgggtcatggccacggcctcggcttgggccacgcgccaatggacgactctggcgaagcacccgacttcgaaaaggactgcaatggagcactcaacatgcaccaccagaacaacaatcacaacgagaaccacatatcaatgaagtcggagccactttcggagggcgagttcaatccggacgacatccagctgatgcagacgaactacaatggagcgcagaactactattcgccgggcatggatgcgaatatactgcaccccgatgtgatcgtcgacacggacatcctgtccgactgctcctcatcgacaacgctgaagaagaagcgcaagatgtccacctcgaccgacggcgacagcaccaattacgagctgatcgagtatctgaagcggcgcgagaagcgggacgaggagctcctcaagcggatggatgcgcgcgaggaccggctgatgaacctgctggagcgcacggttgtggccattgaaacgctggccgtaaagcgggcacttacgtttccagttaatccaaccaaagagaacgcgccagcgacagccagaccgttgtctccgccaccaccagaggctcagtttgcagcgccgccagctacgcaggagcagcccaccagtccggaacgcaacggcattgcgacaggcaggagcggcaccattcccgtcgcgaatcaggatgccgccattgaggtgccagacgacggcgatagcggtgacgatgttcaggtgaaggacaagctggccaagctgacaccaaaggctggcggcgatgaacggacggatggcaggcagacgtagaatataatgcatccactactcgctagatctacttaagacttctacctacatacatatatatatatataacccttccctaccgccactcctctcaccggatggcggcagaggatacagtgccaaagaagagccatgtctcgaatttcagttgagattgccatttttacttagagagcctacacaagtgcttagcggacgaatgaaacttaattgcaatgttgaatattaagcgccgcaatttttgttgaagcgataatcttaattcacttaattagcttttagttaggcggaatcccaccagcggatgccgaatgaatctcaacagagccggattcacaccgctacgataatctagttggagctgcaacggggctcaaatgcatttgtgcagtaactaaagcacaaacatttcattttttttttttgtaatctagatgaatacatgtaccatttac

SEQ ID NO: 34197 - protein, 553 aa, DROSOPHILA
MDTKNPPPVTSSYHHQRAPRTPESYFNVPESVALLNIVKSERIQSAFQSNRKNHASVWEMVAEVLNRFSARKRTAKQCCNRYENLKKIYTQLKKNPERHVRRNWPYMFLFKEIEEQRGECWGSNGKRLALITKNHNELSYYQRRRQAAELGVLLNKDNLTPHQHSLLQSLSQSQSQSHSHAHSTDSSQSGSKLDRFLPNHFVEAQLSEVAGPVGGSASGVSGMSAGGFDENPLQMQMVQAAAAAAAVAAHKRHELQMASVGGVQMTPEDDDEDEPQRPAFKNHLHVLGHGHGLGLGHAPMDDSGEAPDFEKDCNGALNMHHQNNNHNENHISMKSEPLSEGEFNPDDIQLMQTNYNGAQNYYSPGMDANILHPDVIVDTDILSDCSSSTTLKKKRKMSTSTDGDSTNYELIEYLKRREKRDEELLKRMDAREDRLMNLLERTVVAIETLAVKRALTFPVNPTKENAPATARPLSPPPPEAQFAAPPATQEQPTSPERNGIATGRSGTIPVANQDAAIEVPDDGDSGDDVQVKDKLAKLTPKAGGDERTDGRQT

SEQ ID NO: 34198 - DNA, 6647 bp, DROSOPHILA
tcccccgcgagattaacgtccccccgaaggaccagtggggtgaccttctctgctgctgtcattgcagttgctcatccactcgcccctggcacttgcacgccattaatatcgccaaattgttggaaacgcagcggaaaggggtcctggaagaatggcatccttgggcagtggtatcctagctgacaactgatgtctttttggcctattcagcgtaaatttggtgttgaatgaaataactgagacggcttggtcttgatctttggcaaatcctgttcagacgtaataacgtagcatactcttagacacctgttttcaaaaaaggatttgcattttcgagcaattgttgcgtgttgttcgatgcgatgtgagaattttaaaacagtgcagtacaaaactaaaacgccatcggcaaggttataagtatttggggtagcatgatactcttcattgaaatacaaagggtggagcatgggtagttgtccttcgaccacaccacaccacaccacaccgcacatgtggatgtggatatgtgggatgtgggatgtgggtgcaacgggcaacggaggccactgcctggatggttacccagtgcggaaacgagccaaggcgcccacgcatccactttgaatgccactggaaatggtcatggaggcggagatggaggcactcgtggtggagacacatctgcggtcgaccgcctgcccgctgaaatgccatttagctgggaaactggggagcaaataatgtcggccactgcagctgacatcaaaggctcttcctgaaatgtatgcaacgaggtcctctttacgagccatttcctcaaaacttgaatcagtggtggtggtggtggtggtggttgtgggaagcgtggtgaagctgtttttgttccaggcaatccaaataattgcttgattctcacttcagctgatggcggttttaattaaactgtccttacgtttttatttgatgcgcgtaaaaaaacatccacggagattaaaatatgattgcgtgtgtatgcttatctatctatacataccatttaaatggacataagcaatatttgtcgattcaaataaatcaagttacagctaaaagcactcgcaattgattttaaatttattttatgtttgtacaaataacaattcagcacattggcgtaatatcattcaatgggtttggattggatactatttcattcatttaattaccatttatatactcttacgcaaatatatataacatatatataaaaggaaacatgatactatctgattttttctcacgaagtaaatcacagtaacagtttaggaaacttgtgacggcagaaaaagatatgttccggagataatacgttcggaatatgagttcttttgcgagtgtgcaagtagtggtcacaggacttgttgcaaatatcgattgccaggaccttgccacaagcacatcctgctattcatattccgctgctcatagctgacatcagttatcagtggagagcactcgctttccgtgtgggtgactgggagactggataactgggtgactgggtgacttggtggttggggaggctgtggtcctcgatggcactcatctttcaatagcagctgctcgaacgttggtcctcgaattaattgtgctgctggtggtgctctgctccgcttcgctccgattgcaggtcaagttcagggtgcccctgccgccaggagtcagctcgacgacgcttctgcccaagctcatccgcaccaaggacgtgaagcagctgcaggatggcaacgcacagccacagaagcccaagctaacggtgagtcagtggaggcatacgcccttcgagcacaaaataaccccaatgcccgtgtacatgtacagaaatgtcttaacacgctggacctgacctcgctgggcatcggatcctgctgcggcacgggcatgtacctggtggccggcatggtggcccagaagatagccggacccggagtgattattagttttattatagccgccatagcgagcattttctcaggtgagtcagctcagattgtttggactaatttctacaaaggtgatgaaagctatgtgctttcaagtgtgctttacaacactaaaccattgaaaatgtgatgttgcactacttgttgtcacctatctcatatgtctcacttactatagaatgctgtggcattatgagcactaagatccttctttcatccacatctttgtgatccctatattaattcattgatccacaggcgcctgctatgcagagtttggcgttcgtgtgccacacacatccggctcggcctatatgtattcatatgtggcggttggagaatttgtagcttttataattggttggaacatgatattggaatatctaataggtgagtgcatcctccgaattgtctcaatgttcatgctaacgctttgctttgaatttcggatttcgacaggaacaagtgcctgtgcctgtgcgttaagttctagtttcgattccctgactggcaatgccattgcgcggacgataagcgagtccatcggcacgatattcggtgagtattggctgctccagtctcctggctccttggtcccggcaatactgattaaaatcttctacactcacaggcaaaccaccggactttattgccttcggcatcacgctgctcatgacctgcgtcctggcgatgggtgccagcaagtcggtcatcttcaaccattcactcaacgccgtcaacctggccacgtgggtcttcgtaatggccgccgggctgttctatgtggatacgaagacgtggtccgagcaccagggattcctgccctacggctggagtggtgtaagtacccattctaccttgcaacttgcaaatcgggcaaatgggcaaacaaggctgcgtatcagatactcaaataataactctacgatgcatggacttacaggtgttttccggtgctgcaacctgcttctacgcctttatcggtttcgacatcatcgcgacaaccggcgaggaggcacacaatccacagaagagtataccgaaggcgatcgttggttccctggtcgtcgtgctaatcgcctacgttagcgttagtctagtcctaactttagtgggtgagtatcttagtgataggtgaatgtaacccacaatctaatgggaatcctaagattaagccccaattactatatataataatattaagccccaattactatatataatataccatataccatgatgacagatctagatcgaacatgatattatcaggaagatattctcttttcttgatgaatattgatgatgattagtaagaaggcgcctttggtgcacttttaagatatatgatatctatctaactacactgatgtaatgctttccgtttccccagttccctacgaccacatcaacacgggagcggcgctggtccagatgtggtcgtacgtgaatgccccgaagtgccgggcggtggtggccatcggtgccaccgcaggactttcggtggccatgtttggctccatgtttcccatgccacgagtcatctatgcgatggcccaggacggcttgatattcaggtgagtgattcatcgcctatttacattcatagtcattctggagcttgaaatgggatttctatttcgtgcagacaactatcgcagctgtggcaccgcaccaatgtgcccggactggcgaccattggcagcggactggccgccgccctggtggcgctcactgtgcgcctggagatcctcgtcgagatgatgtccattgggacgctgttggcctatacgctggtgtccacttgcgtcctggtgctgcgctatcagccgcacagcacctcgcttgtggagctgctcccagctcagttgcgcaccccggtggcgcacgggacggccagcgattcccgctcccacgttacgcccgccgaggtgctggaggtgcctggcaagctgaccatcaagcgtgtcacgcgcggcatgtccgattcggacgactccttcattgacgacagtccggagggtttcctgggcggtcgcgacgaccagtttctcgtgtccgatcgctccgagaacaagttttacggcagtgtacatggcgcaccaaccgggccaactggccaggcgaccgccttcgatgccatgggcctgaacttcgtcacccggaagatccatgactatgcgtacctgtgcccaggcttctttccctggatcaatcccggccaggccaccgccgagagtggtatgttgacctagaataataaatatttatggtgcttctggttgatccaaaactatacacacatccgttgttggttcctgctgaatatccatagacgaactagaaaaactgcgattgaaattgactctttgcttttgcttttccaatccaatacgcaccaccgtatccaccgtatccaccgatccatcgaaatcgatccaccaggcatgtacgtcaccaagctagtgggcatcatgttcggtctcatattcttcctggacctgttcgcggccattggctggtccggtggcctcgccgccttcatttatttcattttgtttatcggcatatttgtgatattattgattatatcgaggcagccgcagaataggtaattcaatccatctgctcccccagcagccccagcatccccggctaatccatctcctcctgctccattctcgtccagatatgcgctggccttcctcacgcccggactcccgttcattccggccatcgccatcacagtgaacatctacctgatattcaagctgagcatcctcacgctggtacgcttcaccgtatggatgtcgctgggattcattatgtacttctactacggcatcacgcacagcagcctcgagcaggccagcgacgacctggagttgcatgtcgactacgtgagtgctcttccgattggcttagcattagcatttacttgtcccatcttacttaagtcccttccgctctcctttccagagcaaaaacgtcgaggagaaggccgtgtgggatcagcaatcgtacaaccagacccacgaacccgtctgggccagcaaggaggtgaagcagccgtcgagtgagtctcatttgtttgtcccccttgattgcaagttcctttcctttagtaagacattattgaaaatgtgaccaaagaatatatatcttgcgaatgcgttatgcatccacaaccatttcgaactagtatatatatattctcccagttaagttaagttaagcaaatccccttgaacaacatggcggatgagtaatttttataaaaagtaaacggaacttaatcaagaaatcacgatttcatgatacttggtaggaagtctatcctcaaagcccatctataagaagtgataatcgtattacttgctaatataaccataatttgtccagcagagcagcgctataactacggaaagaccacgtcatcttcgtcgtcggcccagggcagttcgagaagtggccagggcagtgcgccggagaagccagctggcaggagcactgcgggcttaaaccgacctgttccaccaccgccgatcgccggacaggcgaagggatcgggatcgggcagcggtcctccgatggaacgccagtacactggccagttcagcatgttcgtggacgagggccagttccccacgtgggatgactaagcacagagacccagttgcagtcccagtccctgtccctgtcccagttaccattccaattccaattccagtcccagttccccaaaccctatacccgctaattcccgagtgatgctccatcaacgaaagacaacccactcacatcggctacgatctcaatggcagtcagttcgctggatccggaccagtagctggatccggtcagccggatgcagctcactcacttgtaaatacgattagagatgttaagtttaaccatatggatggcgaggtgtgttgttggcggttcgcagatgcatgccgtatacaagcctggacggtggagtcattgttcacagcactccgctggaccaacagcgaggtcaccgttatacacatataccatatacaatacataatatacactcatatatatattgatatatatatatatatatgtattgattatacaagcaaatatatatttacatatatagcgatgggttattagttcagcaagagttaaagtgcaaagtttgccgaattcaaattacccaaaccttgataccaaaccgaccgattagcgatagacgataagcaaagccacggacaaccgattaaacataacaaataacagataatagataactgataaatgatataaccaacaaccgataaccgataaccattgaacgattgtgctcaactccgattggctggcgttttgggtgacgttggtcaatcggctttcagcacaggcatcaggaaggcagacacaatactattcgggcgtgtgtctgatccagttcagatatgtaccacaccacatggcagtgaggtggtcgggtcgtcggggtgctaccatgcacaactgtacattttaggcaccatcacccccacactcgcaaccgcactcactcactgacacgctccaataccagagacaaacttgaaatcctgtgcttgtggatggatccctctagcaggtcagaggtcaccgttcgtaaccccaaatgatattggc

SEQ ID NO: 34199 - DNA, 2415 bp, DROSOPHILA
atgattgcgtgtgtcaagttcagggtgcccctgccgccaggagtcagctcgacgacgcttctgcccaagctcatccgcaccaaggacgtgaagcagctgcaggatggcaacgcacagccacagaagcccaagctaacgaaatgtcttaacacgctggacctgacctcgctgggcatcggatcctgctgcggcacgggcatgtacctggtggccggcatggtggcccagaagatagccggacccggagtgattattagttttattatagccgccatagcgagcattttctcaggcgcctgctatgcagagtttggcgttcgtgtgccacacacatccggctcggcctatatgtattcatatgtggcggttggagaatttgtagcttttataattggttggaacatgatattggaatatctaataggaacaagtgcctgtgcctgtgcgttaagttctagtttcgattccctgactggcaatgccattgcgcggacgataagcgagtccatcggcacgatattcggcaaaccaccggactttattgccttcggcatcacgctgctcatgacctgcgtcctggcgatgggtgccagcaagtcggtcatcttcaaccattcactcaacgccgtcaacctggccacgtgggtcttcgtaatggccgccgggctgttctatgtggatacgaagacgtggtccgagcaccagggattcctgccctacggctggagtggtgtgttttccggtgctgcaacctgcttctacgcctttatcggtttcgacatcatcgcgacaaccggcgaggaggcacacaatccacagaagagtataccgaaggcgatcgttggttccctggtcgtcgtgctaatcgcctacgttagcgttagtctagtcctaactttagtggttccctacgaccacatcaacacgggagcggcgctggtccagatgtggtcgtacgtgaatgccccgaagtgccgggcggtggtggccatcggtgccaccgcaggactttcggtggccatgtttggctccatgtttcccatgccacgagtcatctatgcgatggcccaggacggcttgatattcagacaactatcgcagctgtggcaccgcaccaatgtgcccggactggcgaccattggcagcggactggccgccgccctggtggcgctcactgtgcgcctggagatcctcgtcgagatgatgtccattgggacgctgttggcctatacgctggtgtccacttgcgtcctggtgctgcgctatcagccgcacagcacctcgcttgtggagctgctcccagctcagttgcgcaccccggtggcgcacgggacggccagcgattcccgctcccacgttacgcccgccgaggtgctggaggtgcctggcaagctgaccatcaagcgtgtcacgcgcggcatgtccgattcggacgactccttcattgacgacagtccggagggtttcctgggcggtcgcgacgaccagtttctcgtgtccgatcgctccgagaacaagttttacggcagtgtacatggcgcaccaaccgggccaactggccaggcgaccgccttcgatgccatgggcctgaacttcgtcacccggaagatccatgactatgcgtacctgtgcccaggcttctttccctggatcaatcccggccaggccaccgccgagagtggcatgtacgtcaccaagctagtgggcatcatgttcggtctcatattcttcctggacctgttcgcggccattggctggtccggtggcctcgccgccttcatttatttcattttgtttatcggcatatttgtgatattattgattatatcgaggcagccgcagaatagatatgcgctggccttcctcacgcccggactcccgttcattccggccatcgccatcacagtgaacatctacctgatattcaagctgagcatcctcacgctggtacgcttcaccgtatggatgtcgctgggattcattatgtacttctactacggcatcacgcacagcagcctcgagcaggccagcgacgacctggagttgcatgtcgactacagcaaaaacgtcgaggagaaggccgtgtgggatcagcaatcgtacaaccagacccacgaacccgtctgggccagcaaggaggtgaagcagccgtcgacagagcagcgctataactacggaaagaccacgtcatcttcgtcgtcggcccagggcagttcgagaagtggccagggcagtgcgccggagaagccagctggcaggagcactgcgggcttaaaccgacctgttccaccaccgccgatcgccggacaggcgaagggatcgggatcgggcagcggtcctccgatggaacgccagtacactggccagttcagcatgttcgtggacgagggccagttccccacgtgggatgactaa

SEQ ID NO: 34200 - protein, 804 aa, DROSOPHILA
MIACVKFRVPLPPGVSSTTLLPKLIRTKDVKQLQDGNAQPQKPKLTKCLNTLDLTSLGIGSCCGTGMYLVAGMVAQKIAGPGVIISFIIAAIASIFSGACYAEFGVRVPHTSGSAYMYSYVAVGEFVAFIIGWNMILEYLIGTSACACALSSSFDSLTGNAIARTISESIGTIFGKPPDFIAFGITLLMTCVLAMGASKSVIFNHSLNAVNLATWVFVMAAGLFYVDTKTWSEHQGFLPYGWSGVFSGAATCFYAFIGFDIIATTGEEAHNPQKSIPKAIVGSLVVVLIAYVSVSLVLTLVVPYDHINTGAALVQMWSYVNAPKCRAVVAIGATAGLSVAMFGSMFPMPRVIYAMAQDGLIFRQLSQLWHRTNVPGLATIGSGLAAALVALTVRLEILVEMMSIGTLLAYTLVSTCVLVLRYQPHSTSLVELLPAQLRTPVAHGTASDSRSHVTPAEVLEVPGKLTIKRVTRGMSDSDDSFIDDSPEGFLGGRDDQFLVSDRSENKFYGSVHGAPTGPTGQATAFDAMGLNFVTRKIHDYAYLCPGFFPWINPGQATAESGMYVTKLVGIMFGLIFFLDLFAAIGWSGGLAAFIYFILFIGIFVILLIISRQPQNRYALAFLTPGLPFIPAIAITVNIYLIFKLSILTLVRFTVWMSLGFIMYFYYGITHSSLEQASDDLELHVDYSKNVEEKAVWDQQSYNQTHEPVWASKEVKQPSTEQRYNYGKTTSSSSSAQGSSRSGQGSAPEKPAGRSTAGLNRPVPPPPIAGQAKGSGSGSGPPMERQYTGQFSMFVDEGQFPTWDD

SEQ ID NO: 34201 - DNA, 5389 bp, DROSOPHILA
caaatgaaatgaaaatgatgttaaaatataagaaaacaaaacattttttaattcaatactactcttgatttgttttatgtgttaataacttattaaatgatatttcttgagaatattaaaaaataaaattgttaggatattcaattatgtttatttcaatgggggatcacggaagtctcggtttttgataaggcatcgaacaattaaaaatttctattaaaacattcgtacataatgtactttcctttcagacttaaaggagcgcattttattgaaataaatattctatttcatgttactgccgtctttcattctaatttaatattgaaaaaggatattgacatcaattttaggtgaagatattgaactttttaacataaataatttgtaaatacaattgaaaattaaattttgtataacattattataaataacaaagttagcctgttgcttttacgatccgttacttttcagatgtaatatagccatctcactctaattcgctatattgctctctggtgagagcgtcgacttcgtttttcattgagatttcagtttacttcattggctgtcctttattttatatctggaaaaatcttctgcatgattttcctaatctgagctcttttacgagtaggatatgttgaccttgatcaacaccaatttccaaaaaaaaggaatttaatgcacccacttatttaaaaatgtttcgataataacacaaaacatcagtttgcgataaaatcgcaaaaactaatcgatttatcaaaatactaaacagaaaaaataccagcgcttcgacaagtcactcccctgtaaacggtcgcactaattgcagatagaagagaaaagctaacaaatctttgtgcccgaaaatcaactatttgaaaggtaattaaaagcaagctgcgttggcagaagtctccccaagtgggcataggcgcagtccaactgagggcttctttttcccctggccagttctgagtcatcccgaaaatcgggccccttttgagacgtgttcaagctgcgataggggcgaatgtgttggtattcggatgattccgcccccaagatgtggtgtggtgttgtgaggggggattgcaatcaataatcgcacttcttgtgccggaaactccacgttcccctctctaaactcaatctcgattccaatttcagtacgcagctaggagcagcagccacgatgactgattccaagtacttcaccaccaccaagaagggcgagatcttcgagctcaagtcggagctgaataacgacaagaaggagaagaagaaggaggcggtgaagaaggtgatcgccagcatgaccgtgggcaaagacgtgtccgccctcttcccggacgtggtcaactgcatgcagacggacaacctggagctgaagaagctggtctacctttatctgatgaactacgccaaatcgcagccggacatggccatcatggcggttaatacgttcgtgaaggactgcgaggactccaatccgcttatccgggcgctggccgtgcgcaccatgggctgcattcgggtggacaagatcaccgagtacctgtgcgagccgctgcgcaagtgcctgaaggacgaggatccgtatgtgcgcaagacggccgcagtgtgcgtggccaagctgtacgacatttcagccacaatggtggaggaccaaggctttctggaccaactgaaggatctgctatctgactcgaatcccatggtggtggccaatgcggtggccgctcttagcgagattaacgaggcaagtcagtccggccagcccctcgtggagatgaactcggtcaccattaacaagctgctgacggcgctcaacgagtgcaccgagtggggccaggtctttatcctggactcgctggccaactacagcccgaaggatgagcgcgaggcgcagtccatctgcgagcgaatcactccgcgtctggctcacgccaacgccgccgtcgttttgagcgccgtcaaggtgctgatgaagttgctcgagatgctgtccagcgacagcgacttttgcgccacgctcaccaagaagctggctccgccattggttacgttgctctcctcagagccggaggtgcagtatgtggccctgcgcaacatcaatctgattgtccagaagcggccagacattctcaagcacgaaatgaaggtgttcttcgtgaaatacaacgatcccatttacgtgaaactggagaagctagacattatgatccgcctggccaaccagagcaacatcgcccaggtgcttagcgagctgaaggagtacgccaccgaggtggacgtggattttgtgcgcaaggcagtccgcgccatcgggcgatgcgccattaaggtggagccctcagccgaacgctgcgtgtccacgctgcttgatcttatccagaccaaggtcaactacgtggtgcaggaggccattgtggtcatcaaggacatcttccgcaagtaccccaacaagtacgagagcattatcagcacgctgtgcgagaatctggacactctggacgagccggaggcacgcgcatcaatggtttggatcattggcgagtacgcagagcgcattgacaacgcggacgagctgcttgacagcttccttgaaggattccaggtaagtttttctctggatttgccaacattatcaggactttgaattgctattttctctttcgccaggatgaaaatgcacaggtgcagttgcagctgctgacggccgtggttaagttgttcctcaagcgcccgtcggacacccaggagctggtgcagcacgtactatcattggctacccaggattcggacaaccccgatctgcgtgaccgtggcttcatctactggcgtctcctgtccacggacccggccgccgccaaggaggtggtgctggccgataagccactcatctcagaggagaccgaccttttggagccgacattgctggacgagctcatctgccacattagctcgctggccagcgtttatcataagcctcccaccgcgttcgtggagggtcgcggagccggtgtgcgcaagtcgctgcccaaccgagccgctggatctgcagctggtgcagagcaagcagaaaacgcagccggctcagaggcaatggtcattcccaaccaggagtcgctcattggagatctgctctccatggatatcaacgcacccgccatgccatctgctccggccgccaccagcaatgtggaccttctgggcggcggtcttgatatactcctcggtggaccgccagcagaggcggctcccggcggtgccaccagcctgctaggcgacatttttggactgggcggagcaacgctatcggtgggtgttcagattcccaaggtcacatggctgccagcggagaagggcaagggactcgaaatacaaggaacgttctcacgccgcaacggcgaggtgttcatggacatgactctgaccaacaaagccatgcagccgatgactaacttcgccatccaactgaacaagaacagcttcggcctggtgcccgcgtcgcccatgcaggctgctccccttccacccaaccaatcgatcgaggtcagcatggccttgggcaccaacggacccattcagcgcatggagccgctcaacaacttgcaggtggccgtgaagaacaacatcgacatcttctacttcgcgtgcctggtgcacggcaacgtgctgttcgccgaggatgggcagttggacaagcgcgtgttcctcaacacctggaaggagatccccgccgccaacgaactgcagtacaccctgagcggtgtaattggcactaccgacggcatcgcctccaagatgaccaccaacaacatcttcaccatcgccaagcgtaacgtcgagggccaggacatgctctaccagtcactcaagctgaccaacaacatttgggtgctgctggagctaaagctgcagccgggcaatccggaagccactctcagcctcaaatcgcgctccgtggaggtggccaacataatcttcgccgcctacgaggccatcatccgttctccataagcgttccatggcgcacatccgatggcataggataagcacaaagcaattggagctatcgatttgcgtgtgttgaagattagctcaacaataagttgtaaatttacgtattattattatattgtgtattggccgaatcgccacctacatatattatttatgcatatgcacacatataaaatccaatcgggttcgtcgagagatctgttaattgttaatcggagctgcttgtcactcagtgtactaacgtgtaatagcaacgttgcataaccgcattccaaaactctgtaaccccatatgtcctatggtcggcatctatgtatatgtttgtgtcctagtaaaatgcgaaacactaaataattgtgacattgttttcctcgacggcagttgcactaagcacagtttctattcgctttcaatggtcatttctacaaggttccaaatacgcatgattatgatttatgattttagtattataattaaaactgtgtattataatatttgtccgttcgtaagcctgaaagatttttatactttcagctcaaagtcaaagtgcatcaaagtaagttttctaagtcgaagatctgagaaaataattgcatcagttaggttaaaagtcaatatattgatcaatatttaggatcattaaaatccaaaactaggcttgaaactcaaaagttagatttgaaatatcatatttacttgaaaattcgttaaggagaaagaggttttcctgctgcaaatatagaatccatcagataggagttgcaaagcgcttttcccgcgcagatcaactttgcgtcaaactatggccacgcccacattggcccacgtatgtaagtggagcattctgtagcgatttgtacagacacccaaagctatcgaagctaccgaggagtcaaaccatatcccaaagctttgcttccatgtttacagggataaccatgttgtatgcaaaggatatacatatatatatatatataatggattcccaactgatcatgctggtcagtggaaagattgcagcaattggtactaactgaggcacccacttagcaatggttgtaatgggctcatcaagacagcagtggaccagttaagggtataagcggaatgtggtatacctggtcagggatgcgaaggatgggtggtggcgtcgagcttcggcgcctgagctttcgaagctttcgcgcgaacccttcgggggttgtttggatgcctgtgcgaccaacgagagcgcaagagaggacaggcttgcccatcgaggacgtggacgtgtagccatccctgtcgtggccacaggacacactgactgtttgcctgctccactgttttcctgttgtaccacaagctattctgg

SEQ ID NO: 34202 - DNA, 3222 bp, DROSOPHILA
aaacggtcgcactaattgcagatagaagagaaaagctaacaaatctttgtgcccgaaaatcaactatttgaaagtacgcagctaggagcagcagccacgatgactgattccaagtacttcaccaccaccaagaagggcgagatcttcgagctcaagtcggagctgaataacgacaagaaggagaagaagaaggaggcggtgaagaaggtgatcgccagcatgaccgtgggcaaagacgtgtccgccctcttcccggacgtggtcaactgcatgcagacggacaacctggagctgaagaagctggtctacctttatctgatgaactacgccaaatcgcagccggacatggccatcatggcggttaatacgttcgtgaaggactgcgaggactccaatccgcttatccgggcgctggccgtgcgcaccatgggctgcattcgggtggacaagatcaccgagtacctgtgcgagccgctgcgcaagtgcctgaaggacgaggatccgtatgtgcgcaagacggccgcagtgtgcgtggccaagctgtacgacatttcagccacaatggtggaggaccaaggctttctggaccaactgaaggatctgctatctgactcgaatcccatggtggtggccaatgcggtggccgctcttagcgagattaacgaggcaagtcagtccggccagcccctcgtggagatgaactcggtcaccattaacaagctgctgacggcgctcaacgagtgcaccgagtggggccaggtctttatcctggactcgctggccaactacagcccgaaggatgagcgcgaggcgcagtccatctgcgagcgaatcactccgcgtctggctcacgccaacgccgccgtcgttttgagcgccgtcaaggtgctgatgaagttgctcgagatgctgtccagcgacagcgacttttgcgccacgctcaccaagaagctggctccgccattggttacgttgctctcctcagagccggaggtgcagtatgtggccctgcgcaacatcaatctgattgtccagaagcggccagacattctcaagcacgaaatgaaggtgttcttcgtgaaatacaacgatcccatttacgtgaaactggagaagctagacattatgatccgcctggccaaccagagcaacatcgcccaggtgcttagcgagctgaaggagtacgccaccgaggtggacgtggattttgtgcgcaaggcagtccgcgccatcgggcgatgcgccattaaggtggagccctcagccgaacgctgcgtgtccacgctgcttgatcttatccagaccaaggtcaactacgtggtgcaggaggccattgtggtcatcaaggacatcttccgcaagtaccccaacaagtacgagagcattatcagcacgctgtgcgagaatctggacactctggacgagccggaggcacgcgcatcaatggtttggatcattggcgagtacgcagagcgcattgacaacgcggacgagctgcttgacagcttccttgaaggattccaggatgaaaatgcacaggtgcagttgcagctgctgacggccgtggttaagttgttcctcaagcgcccgtcggacacccaggagctggtgcagcacgtactatcattggctacccaggattcggacaaccccgatctgcgtgaccgtggcttcatctactggcgtctcctgtccacggacccggccgccgccaaggaggtggtgctggccgataagccactcatctcagaggagaccgaccttttggagccgacattgctggacgagctcatctgccacattagctcgctggccagcgtttatcataagcctcccaccgcgttcgtggagggtcgcggagccggtgtgcgcaagtcgctgcccaaccgagccgctggatctgcagctggtgcagagcaagcagaaaacgcagccggctcagaggcaatggtcattcccaaccaggagtcgctcattggagatctgctctccatggatatcaacgcacccgccatgccatctgctccggccgccaccagcaatgtggaccttctgggcggcggtcttgatatactcctcggtggaccgccagcagaggcggctcccggcggtgccaccagcctgctaggcgacatttttggactgggcggagcaacgctatcggtgggtgttcagattcccaaggtcacatggctgccagcggagaagggcaagggactcgaaatacaaggaacgttctcacgccgcaacggcgaggtgttcatggacatgactctgaccaacaaagccatgcagccgatgactaacttcgccatccaactgaacaagaacagcttcggcctggtgcccgcgtcgcccatgcaggctgctccccttccacccaaccaatcgatcgaggtcagcatggccttgggcaccaacggacccattcagcgcatggagccgctcaacaacttgcaggtggccgtgaagaacaacatcgacatcttctacttcgcgtgcctggtgcacggcaacgtgctgttcgccgaggatgggcagttggacaagcgcgtgttcctcaacacctggaaggagatccccgccgccaacgaactgcagtacaccctgagcggtgtaattggcactaccgacggcatcgcctccaagatgaccaccaacaacatcttcaccatcgccaagcgtaacgtcgagggccaggacatgctctaccagtcactcaagctgaccaacaacatttgggtgctgctggagctaaagctgcagccgggcaatccggaagccactctcagcctcaaatcgcgctccgtggaggtggccaacataatcttcgccgcctacgaggccatcatccgttctccataagcgttccatggcgcacatccgatggcataggataagcacaaagcaattggagctatcgatttgcgtgtgttgaagattagctcaacaataagttgtaaatttacgtattattattatattgtgtattggccgaatcgccacctacatatattatttatgcatatgcacacatataaaatccaatcgggttcgtcgagagatctgttaattgttaatcggagctgcttgtcactcagtgtactaacgtgtaatagcaacgttgcataaccgcattccaaaactctgtaaccccatatgtcctatggtcggcatctatgtatatgtttgtgtcctagtaaaatgcgaaacactaaataa

SEQ ID NO: 34203 - protein, 921 aa, DROSOPHILA
MTDSKYFTTTKKGEIFELKSELNNDKKEKKKEAVKKVIASMTVGKDVSALFPDVVNCMQTDNLELKKLVYLYLMNYAKSQPDMAIMAVNTFVKDCEDSNPLIRALAVRTMGCIRVDKITEYLCEPLRKCLKDEDPYVRKTAAVCVAKLYDISATMVEDQGFLDQLKDLLSDSNPMVVANAVAALSEINEASQSGQPLVEMNSVTINKLLTALNECTEWGQVFILDSLANYSPKDEREAQSICERITPRLAHANAAVVLSAVKVLMKLLEMLSSDSDFCATLTKKLAPPLVTLLSSEPEVQYVALRNINLIVQKRPDILKHEMKVFFVKYNDPIYVKLEKLDIMIRLANQSNIAQVLSELKEYATEVDVDFVRKAVRAIGRCAIKVEPSAERCVSTLLDLIQTKVNYVVQEAIVVIKDIFRKYPNKYESIISTLCENLDTLDEPEARASMVWIIGEYAERIDNADELLDSFLEGFQDENAQVQLQLLTAVVKLFLKRPSDTQELVQHVLSLATQDSDNPDLRDRGFIYWRLLSTDPAAAKEVVLADKPLISEETDLLEPTLLDELICHISSLASVYHKPPTAFVEGRGAGVRKSLPNRAAGSAAGAEQAENAAGSEAMVIPNQESLIGDLLSMDINAPAMPSAPAATSNVDLLGGGLDILLGGPPAEAAPGGATSLLGDIFGLGGATLSVGVQIPKVTWLPAEKGKGLEIQGTFSRRNGEVFMDMTLTNKAMQPMTNFAIQLNKNSFGLVPASPMQAAPLPPNQSIEVSMALGTNGPIQRMEPLNNLQVAVKNNIDIFYFACLVHGNVLFAEDGQLDKRVFLNTWKEIPAANELQYTLSGVIGTTDGIASKMTTNNIFTIAKRNVEGQDMLYQSLKLTNNIWVLLELKLQPGNPEATLSLKSRSVEVANIIFAAYEAIIRSP

SEQ ID NO: 34204 - DNA, 4395 bp, DROSOPHILA
ggagttgcaaagcgcttttcccgcgcagatcaactttgcgtcaaactatggccacgcccacattggcccacgtatgtaagtggagcattctgtagcgatttgtacagacacccaaagctatcgaagctaccgaggagtcaaaccatatcccaaagctttgcttccatgtttacagggataaccatgttgtatgcaaaggatatacatatatatatatatataatggattcccaactgatcatgctggtcagtggaaagattgcagcaattggtactaactgaggcacccacttagcaatggttgtaatgggctcatcaagacagcagtggaccagttaagggtataagcggaatgtggtatacctggtcagggatgcgaaggatgggtggtggcgtcgagcttcggcgcctgagctttcgaagctttcgcgcgaacccttcgggggttgtttggatgcctgtgcgaccaacgagagcgcaagagaggacaggcttgcccatcgaggacgtggacgtgtagccatccctgtcgtggccacaggacacactgactgtttgcctgctccactgttttcctgttgtaccacaagctattctggcttggccccgattgtaacgaatccgtatcgcacgtcgcagtgcgaaaatgtgtgcaaatactgcaatgtacccgcagtaaattggccgcaggatcgcttgacactcgctgcaaaaggacatccaggtgctacgccctatttcgcagtcaatccagccaggtggtagtataggtgtacaggcataggtgtaaccaaccatgcccctgcgaacggtgcaggaatgcggagtccttttgtgccagtgaagagcaaccaacacgaaacaacgccacgaagaggacaatccgccagtgctgtgtagaagaacaagaaccagaacaacaaggacaagaccaagagcatcgagtacaccagatcgcagattccgttgagaagggtccgccaaaaattagtccgccggaatgagggtggcggcggacatggtgtatgactacggcagcgaggactccatgagcaccacccacctggactggccctttctcatcaaggttcgtatcagcagcccctcgcaaccgcccttgtccatcaacccctcttcccaaaccctcgacatatttgcacgctttttaggttaagtcgagactacaatatgcaaagtgtcgagtataatgtgtataagtggggtttgtgtgtcaacagctttgtcactgcgaggacgcgaatgtatgtagagcttcatgtgcatccctgtcaggctcccgaaggcttattccaccttgtaatcggatctggggagggtaaaactccgccagctgtaaacaatccgtagtccctttaaatacaatatgtgtacatccttagatcatatttcgtattattttataggttgctcattgcttatgtttctatgtttatactttctaaactatgcttgatatagaactactatgaactactactactacttcaactataatccttaattgatattctaatgtaaatttagtcaaatagggtttttttaggagagagttcttttcgtcaagttctttaaggattataacgattccttttccccttttaattaattctatagcgatttcattggataatattcaatatgaaatattacagaacttataggctttaagttaatcagtcccgctgattccaaccgatttaatactagttataggagatatatcccgtgtttttatgtgagccaagtggttatgcctgccaccgtgcaatgcgttggctaagtggctgcaaaatggccaatttgaagccacctgaagtaggttgaagtgagttactgctcactgctctggccagtgaccagaagtgagcagggtggtgtgctgggcgagtagtggcgtcagcgcacggcccttgcttgataagtgtgtcgtgtccttggtcgcattacggtgacacgcccccgataaccagtgacctcctcccgcagggcatcctggaggggcagacgtgcacgcccactgcgccggagccgctggccgccatcctgtgggccatcttcgccgtgtttggcatcgtgtacgcgctactcggctaccgatgcctgcgcgccgtgggctttctcagtggactgctggtgggcgccaacgggatcttcattctgcaggacttccagatcaccttcctgggcaagccggcggactcggcgctggccattgtggcgggtttgctgggcgcggtgctcggctccacatatccggtggcctctgtcctcattagcgcctttgccggcgccctgctctccggcgcagccatggccgtctgcgtggccacctttccggacaacgagtttggggtaagttcctcccctctttgttttgcttgcaccagatgcttatatcgattcccctaccgcagtaccgcgagatctatgtggccgtggtgggtggagccgtcatctgctccgtgctgaccttgtgctgcgtgaagtacgtgaccattctcacctccagcattgtgggcacggccatgatcctcagcgccatcgacttcttcacgcacggtctggagaccatcaattgggtgagtcatgtctgctccacatgtccaccattggctggttcgatgtgaagctgtctgtttagttgatacggagggtggagaaagcattgatggaattatataactctctgcagataatcggcatgcggccgcatccctcgccgccaccttgctacggtggcctcctgatcgccgcctggcccgtcaccattgtgctcagcatcatggtgcagtgcttcattaccgcctggcgcgtggatcaccgcaagcgggtgtacatgcggcatcacaaccatcctggccacgcgcacggcgcccatctgccgcacagccagcagcaggcgggacccaaccacggcatcgctcccgtccggcgatcccaatcccgcacccgggagacgcgcgaggaggccaggcagcgcaagttccgctatctgtaccaggtgcgcacggcccgtggtgacatcatatcgcaggtgagtggtttgctctcatatggacccggaaatgcgagtaaaggtgtccaaaagtatgcaacagtatatgatgtatgcatacctaggcaccttagcgcgtgactactgcgtcgtagcagaccaagctgatcctgtgggcatctcttgtttgcagaacttcgtgtcggctctgcagaagcgcatccagctgagcggcacggagacgccgtcggagagatcgataaagagcagctcaaacgaacgaaacacgttccggagcgaccgcacgcacttcaccaccatccacgatccggactcggagctgtgcgacaagatcgagatcgtccgtgacattggataacaaacaagcaatagctacatgtaactatacccgtaggggggctacgggctgcggtacttgggcgcggatgtggtcatggtcgggggacacaactgtatggttggatagttaaacgggattgggggctctagggagccgccacgtagagcggcggaggactcacacaagtacggttgcatgtagactttttaagacgaggcaccaagtgccggacacaacacaaacggaagcggaaatggtggcacagaaccgagtggatggtcattggaagctttaaatatcagaggatatacgacggatctttagctggtttcgcatggaagccttggagctggcgccagccacagatcagggggacgagatagtctagactaagattaatcgcatcgtgcacagctagagtctaagatgatggacagcacggaaggaagctggcaggaagcttttgttctcttcacttaatcgaatgttactacagataggaatacctacactacatatgtatgtagcgatgggctgcgtgatgcatgattgtggtggtggatcatgggtgcctgagattcctgtaactacactatacccaacgcagtactcgtagcttctccctttttcgtatatagccaggcaattgcaattactaatccggttcatatctgtgttataactctacgattataatgggatgcatcccagctgcaggagttccatttcaactatctagcatgatatttatatatataagcattacgttgtaaactccaaacactcgatcatcgcacagcagtttctcggaggctcaaggcaggcgaaaatacaatacaatacctattaagtacaataagagagggtggggagggggagggggaagttggagccatagccatctagactagtagtagactagaactaggattagccagttacccggatgagccaaagccactaagccacttaattgtcgataccagtaaatcacaatccgctgcaaggggcgcacttg

SEQ ID NO: 34205 - DNA, 1146 bp, DROSOPHILA
atgagggtggcggcggacatggtgtatgactacggcagcgaggactccatgagcaccacccacctggactggccctttctcatcaagggcatcctggaggggcagacgtgcacgcccactgcgccggagccgctggccgccatcctgtgggccatcttcgccgtgtttggcatcgtgtacgcgctactcggctaccgatgcctgcgcgccgtgggctttctcagtggactgctggtgggcgccaacgggatcttcattctgcaggacttccagatcaccttcctgggcaagccggcggactcggcgctggccattgtggcgggtttgctgggcgcggtgctcggctccacatatccggtggcctctgtcctcattagcgcctttgccggcgccctgctctccggcgcagccatggccgtctgcgtggccacctttccggacaacgagtttgggtaccgcgagatctatgtggccgtggtgggtggagccgtcatctgctccgtgctgaccttgtgctgcgtgaagtacgtgaccattctcacctccagcattgtgggcacggccatgatcctcagcgccatcgacttcttcacgcacggtctggagaccatcaattggataatcggcatgcggccgcatccctcgccgccaccttgctacggtggcctcctgatcgccgcctggcccgtcaccattgtgctcagcatcatggtgcagtgcttcattaccgcctggcgcgtggatcaccgcaagcgggtgtacatgcggcatcacaaccatcctggccacgcgcacggcgcccatctgccgcacagccagcagcaggcgggacccaaccacggcatcgctcccgtccggcgatcccaatcccgcacccgggagacgcgcgaggaggccaggcagcgcaagttccgctatctgtaccaggtgcgcacggcccgtggtgacatcatatcgcagaacttcgtgtcggctctgcagaagcgcatccagctgagcggcacggagacgccgtcggagagatcgataaagagcagctcaaacgaacgaaacacgttccggagcgaccgcacgcacttcaccaccatccacgatccggactcggagctgtgcgacaagatcgagatcgtccgtgacattggataa

SEQ ID NO: 34206 - protein, 381 aa, DROSOPHILA
MRVAADMVYDYGSEDSMSTTHLDWPFLIKGILEGQTCTPTAPEPLAAILWAIFAVFGIVYALLGYRCLRAVGFLSGLLVGANGIFILQDFQITFLGKPADSALAIVAGLLGAVLGSTYPVASVLISAFAGALLSGAAMAVCVATFPDNEFGYREIYVAVVGGAVICSVLTLCCVKYVTILTSSIVGTAMILSAIDFFTHGLETINWIIGMRPHPSPPPCYGGLLIAAWPVTIVLSIMVQCFITAWRVDHRKRVYMRHHNHPGHAHGAHLPHSQQQAGPNHGIAPVRRSQSRTRETREEARQRKFRYLYQVRTARGDIISQNFVSALQKRIQLSGTETPSERSIKSSSNERNTFRSDRTHFTTIHDPDSELCDKIEIVRDIG

SEQ ID NO: 34207 - DNA, 5342 bp, DROSOPHILA
atatctggctaagcggcttagttaagcggctgcaatcaacgcaagttactaaatactggcttttagattcatggccaacatctggccaaggaccaaaatccggtcagcaaagtaacattttcaaattataccggccagcaatcgaaaatcgatgcgaaatcgttcccgaacgggaagcgatctggcagcctgctcgcagctgtgatcgataccagaccgttgcgagttgcgcgcgcaaccgcgacaattcaaatagcacagcgttcagaaaattactaaggtttgtttctcaatcaattcgagacgctcgaaagaacttacatgtgaataggatggaagctggcgtttgtgagtgctgcagccccagataaattttgcgccttggaactgtttaaaatagaataacacatatgctattggcaatatttattgatttttctgatccaaatttttaacgtacacaataaaatttttttttaagacttttccgtaaacttctacatttacagcgttaaaatctgatctgtgacataatttgcaaaagctctgtgtgatctaaaggcacaatctcggttattgtgttcaaataatgtattaatacaataaattcacttagtaacaactacaacgtctggcacgtgagtaagacaagttaacaactggccgccggattttgggtttgggttagctctgctctgctctgctccttcctgttccgagcaatctgaatctggagcagatcgcagtggttagacgtacgacacataaatatatatatatatatataaacattccttgggctgattatacgcgacgcagcatttagttgtggttttgagagttaggatcagtaagctttaaccgctgcatcgcctacaatcagtttcgagaacgcacataaattaggcgtgtaaacactatcaaaaagttaatataaaatgtaaaattggcgccgcttgttgctcctgcaacccgctggctcgttccatccgggtttcactcaggcgaagtccctgaacatggtgaacaggctgtataggacgcgcagggtggacttgaggtccatgttcacgatgtcctccggccgcgcctttggtttgggcaggcccacgtcctgcatcaggtcgaaggcgaaggccacgttgctgaccatctgatccacgtcctgcggcgtcaaatggaactcgtgcagcggcacaaagaatccaccgagcaggcccatcagcaggcacaggtatacgccgtcgcgaaagtccgtgttcagatcgctgatctcaaagttcagcttggccaggtgcttgttcacgaacgtgatcaaggacttcttcaccacggccagcttgtccggcgcacagtcgatcagcgtgtcgaaggcgtccttttcgcagcgcatgcccaggtcgtcgtactcggacgttatctgctcctggaacttctgcgcgttcagcacgcccgcattcttctccgcaatcacgacggtcacgaacacgttctctggcaggcgaacgggcgcccggaagtgacgcaccagtgccaccagcagatgtaatatggccacaatgttcttcgagtgcacgctggccaccgaccacttgggaatcttttggtgaaagccgagtgtctgtgggtgtgggcaaggataaaatttattcttatatcgcgagaaaagggaatgttaattgtaaatcgaataaaaattattctattcgactttaagaatggataaataattaaatgttggtaactccgatttttaaatcctgcaaaacataaactactactacttacatggttgacggccttcaggacgatgttgagcttctcgtgctggccctgctctgactgggtgacctcaggaacgtccagcttcttgccggtgagcttctcccacagcttgtgcagcacctggccgtcatacatgtcctcttccaggtgctgaacaattatgcgctgctcggccagctcgtcgttgatccagtcgacgaggatgcgctgcagctttatcacctggggatcactgatggactgtggatcgatgacggcgcgctgttcgtgctcgcctgtaggatcaaatgtgatgagttgtgggaaatgcgatgggtatacgaggagatgccccttcaaaacgaatgcacttacgcagggcatagtcctccggcgggatgtcatactggctgggcgatccaggcgagtcgatggcgtacttgccctcctcttggaccttcttcactgcaaatggagcaagcggatgcgtatttagggtatcaacaaggtaaacaaaaacggtgacgacacaaggccatctcacacaaacgcacacactctcgattatcagcgccgtttgcttgtgtgggtcaacagtgacgcaatgttctgattaatcagcgcatccgcacatctgttcccagaagagcttccagtgcgcagggggaggatccattgggtcattttgggccacttttcggaggttcaggggtccaagaatggaatactctgggatacccatcaattcctggccgacaatagccatctggagagctccaatcatcaagtggacttaccttcgcgggtgccgcgtttgcggcccaaagtgctgaacttgtcccagaagctgtcctccttctcgccctttttaatggcggtgggcgtgtgcggggatttagggcggttcagtgtggacatggtgctgctggattccaagaattccggactaagtgaacagtttgtgttattgtttcgattcgtttcgggcggagctgagcaatcagtttcccttggggctgccacctgatcgcaggcccaccacacatgttgtccaacactggcgttcggactcaagagaaacttccaaaaaaatcgaataaaaactaaattgccaattataaaaattgtttaaaaagaccttagattaaattaaaacaatgagcttaaatgttatttttcatttataatttaaaaaaaatgtggcttttgacaacaacagctagaagaaattcatatcagcttaatagtttttgaatttgtacatcaaattaaattgttggaaattttaaaaaaattataatgcgtagatcattagatcattgattaaaaagcacaacaacatatgtatgtatgtatgtccttcataccgaatcagatcagatataattcgtatatattagatatgctatatccagaaagataaatttcgtaccgcttaaaaattattgtaccacattgcgtatacagataactaccaatccaatgatttaaaggctttcagaatagttacatatatgtataatacggaactagggctatactacgtctatggtttagatggagttgggcaactggcaggcgcgcacagccacgagctgcaacagaacgaagatcggcgagaagacctccgaatactcgaggcccgtcttgctggatagcttcaggcagagcaggtacttgaagatggcgatgagcaccaggaaatacgtgctccacatgaagcgatgcagggctttgcgcttgttgttagagtccaggtacatgcggatgcccacaatgacgcaaaagtacgcgttgcagatgtcgatgaagaacagggggctgaagacggtgaaccagtcgcccatgggctccgggagtatgccaccgggtccggccctggcctgcagatggagcttgacggtcagcgtgatggtgaacaccagcaggccgcacagattgaccagaatctcgaactcggtgagccccagccagcgcaccagctccgagagtttgaacatgctactgcctggccttcgccttgcctcggaactggcccagggactgggcttgcgtctgggactgcgacggttgcggcacggcgatgtcgaagagactgttattgaggatcttgatgtgcagggccgagttgttgcgctggcggaaggttatgtcctcggcatcgcacagcgggtgcagttcgtccaccagctgaacggtggaggtgttgatggcgtagctaagggcgccgtcagaattctggacgaggcgtagggcgatattgaggccgcgggttacggagaagcccatgcaatgcagaaagatctcgtgggcgccggagttaatcagctcctcgcagcggcgctgctgggcctgtcaaggagatggactctgtcacttagcacatgggcgattcaccatccagcatgagttcagttctacttgccttaaagtctgtcttgctggtgatgtagatgttgtggcggtcgctaacagcgggacgcggcggctgcttgcgcaccactcggtggttctgttgtttgtggtatttggcggatctcggcttggtcccgtgctcgggataattgcttcccatcatcagcggcggaggaggcgacttgtgttttccatttacctgcgcgtgtcgcagtttcggactcgcgactccattccgaatcgcacgctggccaacactggccaactctagcgaacactaggcaatagctgagcgatctggcagcctggctctagctgtcaccgtgacagctctcgatagttttgagccagcccatcgctatagctatcgccaggctcgtgagattctcgccagttgaaaatttttcgtcgtactctcgtaacaacaaaggtatgtttttcgttttggcaccttatcaagtacaccagaccgtaagccaaggcaccgatcgatgccatccaaagcaagaattaacttggccgcgcggcgccacttcgccactccaaatcgcaacactcgcacacacacacacatacactagcgcacttacacacttccgctggcgaattcctcgggcagcaggaaaagaagaaagaaaaaagtacaagttacataactcgctgatgcactcggggtagtcatgtctgtcggggtgagttgtttgatgaggggcgggccgggtctgcatcttcctgcgtaagttggcccccaccaaatggatccgtaaccgaatgggcgtacggatccccagggttacataagtcaccgcccgccaccgaggggttgcaacggaaagcgaacagaaacagtccccttaacgtagccactattttgtagccagaaagaaaactcaactcaaatcagatcagatcaaaccccctgcacagcgcgtcctggttcgagtaacgttttgtattcatgcgttcaagtcatttttccatgcaggcgaatccgaaaatccgatacgtttcagagtcgcaaacagtcaagagttaagcacaaatcgccactaaaagctaaaaggctaacaagctgaatcgcactgattcgcacgtagccagccaaacggaaggactcctccgcatccacagcagcagcaacggcgagcagcacgaacaacatc

SEQ ID NO: 34208 - DNA, 2079 bp, DROSOPHILA
atgatgggaagcaattatcccgagcacgggaccaagccgagatccgccaaataccacaaacaacagaaccaccgagtggtgcgcaagcagccgccgcgtcccgctgcccagcagcgccgctgcgaggagctgattaactccggcgcccacgagatctttctgcattgcatgggcttctccgtaacccgcggcctcaatatcgccctacgcctcgtccagaattctgacggcgcccttagctacgccatcaacacctccaccgttcagctggtggacgaactgcacccgctatcctcaataacagtctcttcgacatcgccgtgccgcaaccgtcgcagtcccagacgcaagcccagtccctgggccagttccgaggcaaggcgaaggccaggcagtagcatgttcaaactctcggagctggtgcgctggctggggctcaccgagttcgagattctggtcaatctgtgcggcctgctggtgttcaccatcacgctgaccgtcaagctccatctgcaggccagggccggacccggtggcatactcccggagcccatgggcgactggttcaccgtcttcagccccctgttcttcatcgacatctgcaacgcgtacttttgcgtcattgtgggcatccgcatgtacctggactctaacaacaagcgcaaagccctgcatcgcttcatgtggagcacgtatttcctggtgctcatcgccatcttcaagtacctgctctgcctgaagctatccagcaagacgggcctcgagtattcggaggtcttctcgccgatcttcgttctgttgcagctcgtggcttttctcttgagtccgaacgccagtgttggacaacatgtgtggtgggcctgcgatcaggtggcagccccaagggaaactgattgctcagctccgcccgaaacgaatcgaaacaataacacaaactgttcacttagtccggaattcttggaatccagcagcaccatgtccacactgaaccgccctaaatccccgcacacgcccaccgccattaaaaagggcgagaaggaggacagcttctgggacaagttcagcactttgggccgcaaacgcggcacccgcgaagtgaagaaggtccaagaggagggcaagtacgccatcgactcgcctggatcgcccagccagtatgacatcccgccggaggactatgccctgcgcgagcacgaacagcgcgccgtcatcgatccacagtccatcagtgatccccaggtgataaagctgcagcgcatcctcgtcgactggatcaacgacgagctggccgagcagcgcataattgttcagcacctggaagaggacatgtatgacggccaggtgctgcacaagctgtgggagaagctcaccggcaagaagctggacgttcctgaggtcacccagtcagagcagggccagcacgagaagctcaacatcgtcctgaaggccgtcaaccatacactcggctttcaccaaaagattcccaagtggtcggtggccagcgtgcactcgaagaacattgtggccatattacatctgctggtggcactggtgcgtcacttccgggcgcccgttcgcctgccagagaacgtgttcgtgaccgtcgtgattgcggagaagaatgcgggcgtgctgaacgcgcagaagttccaggagcagataacgtccgagtacgacgacctgggcatgcgctgcgaaaaggacgccttcgacacgctgatcgactgtgcgccggacaagctggccgtggtgaagaagtccttgatcacgttcgtgaacaagcacctggccaagctgaactttgagatcagcgatctgaacacggactttcgcgacggcgtatacctgtgcctgctgatgggcctgctcggtggattctttgtgccgctgcacgagttccatttgacgccgcaggacgtggatcagatggtcagcaacgtggccttcgccttcgacctgatgcaggacgtgggcctgcccaaaccaaaggcgcggccggaggacatcgtgaacatggacctcaagtccaccctgcgcgtcctatacagcctgttcaccatgttcagggacttcgcctga

SEQ ID NO: 34209 - protein, 692 aa, DROSOPHILA
MMGSNYPEHGTKPRSAKYHKQQNHRVVRKQPPRPAAQQRRCEELINSGAHEIFLHCMGFSVTRGLNIALRLVQNSDGALSYAINTSTVQLVDELHPLSSITVSSTSPCRNRRSPRRKPSPWASSEARRRPGSSMFKLSELVRWLGLTEFEILVNLCGLLVFTITLTVKLHLQARAGPGGILPEPMGDWFTVFSPLFFIDICNAYFCVIVGIRMYLDSNNKRKALHRFMWSTYFLVLIAIFKYLLCLKLSSKTGLEYSEVFSPIFVLLQLVAFLLSPNASVGQHVWWACDQVAAPRETDCSAPPETNRNNNTNCSLSPEFLESSSTMSTLNRPKSPHTPTAIKKGEKEDSFWDKFSTLGRKRGTREVKKVQEEGKYAIDSPGSPSQYDIPPEDYALREHEQRAVIDPQSISDPQVIKLQRILVDWINDELAEQRIIVQHLEEDMYDGQVLHKLWEKLTGKKLDVPEVTQSEQGQHEKLNIVLKAVNHTLGFHQKIPKWSVASVHSKNIVAILHLLVALVRHFRAPVRLPENVFVTVVIAEKNAGVLNAQKFQEQITSEYDDLGMRCEKDAFDTLIDCAPDKLAVVKKSLITFVNKHLAKLNFEISDLNTDFRDGVYLCLLMGLLGGFFVPLHEFHLTPQDVDQMVSNVAFAFDLMQDVGLPKPKARPEDIVNMDLKSTLRVLYSLFTMFRDFA

SEQ ID NO: 34210 - DNA, 5763 bp, DROSOPHILA
tgcccacaatgacgcaaaagtacgcgttgcagatgtcgatgaagaacagggggctgaagacggtgaaccagtcgcccatgggctccgggagtatgccaccgggtccggccctggcctgcagatggagcttgacggtcagcgtgatggtgaacaccagcaggccgcacagattgaccagaatctcgaactcggtgagccccagccagcgcaccagctccgagagtttgaacatgctactgcctggccttcgccttgcctcggaactggcccagggactgggcttgcgtctgggactgcgacggttgcggcacggcgatgtcgaagagactgttattgaggatcttgatgtgcagggccgagttgttgcgctggcggaaggttatgtcctcggcatcgcacagcgggtgcagttcgtccaccagctgaacggtggaggtgttgatggcgtagctaagggcgccgtcagaattctggacgaggcgtagggcgatattgaggccgcgggttacggagaagcccatgcaatgcagaaagatctcgtgggcgccggagttaatcagctcctcgcagcggcgctgctgggcctgtcaaggagatggactctgtcacttagcacatgggcgattcaccatccagcatgagttcagttctacttgccttaaagtctgtcttgctggtgatgtagatgttgtggcggtcgctaacagcgggacgcggcggctgcttgcgcaccactcggtggttctgttgtttgtggtatttggcggatctcggcttggtcccgtgctcgggataattgcttcccatcatcagcggcggaggaggcgacttgtgttttccatttacctgcgcgtgtcgcagtttcggactcgcgactccattccgaatcgcacgctggccaacactggccaactctagcgaacactaggcaatagctgagcgatctggcagcctggctctagctgtcaccgtgacagctctcgatagttttgagccagcccatcgctatagctatcgccaggctcgtgagattctcgccagttgaaaatttttcgtcgtactctcgtaacaacaaaggtatgtttttcgttttggcaccttatcaagtacaccagaccgtaagccaaggcaccgatcgatgccatccaaagcaagaattaacttggccgcgcggcgccacttcgccactccaaatcgcaacactcgcacacacacacacatacactagcgcacttacacacttccgctggcgaattcctcgggcagcaggaaaagaagaaagaaaaaagtacaagttacataactcgctgatgcactcggggtagtcatgtctgtcggggtgagttgtttgatgaggggcgggccgggtctgcatcttcctgcgtaagttggcccccaccaaatggatccgtaaccgaatgggcgtacggatccccagggttacataagtcaccgcccgccaccgaggggttgcaacggaaagcgaacagaaacagtccccttaacgtagccactattttgtagccagaaagaaaactcaactcaaatcagatcagatcaaaccccctgcacagcgcgtcctggttcgagtaacgttttgtattcatgcgttcaagtcatttttccatgcaggcgaatccgaaaatccgatacgtttcagagtcgcaaacagtcaagagttaagcacaaatcgccactaaaagctaaaaggctaacaagctgaatcgcactgattcgcacgtagccagccaaacggaaggactcctccgcatccacagcagcagcaacggcgagcagcacgaacaacatccacggatgataacgtaacgtagccgcaacgttggagcaacaccaccttccacatccacttccaccgcagcggacatcgcaaacaagtaaattaccatttctcattttatcaaacagaaatctgccagccaagtaccaatccaatcaaatcgaatcgaatcaaatcaaatcgagtccaaatcaaatcaatgcatccaaatccaagtctgagtatccaaattgcataagagtcgcgtctgcgcagtgaagcattacttgtcgcgagcattacttatcgcccgtccacttggttggagttccggctcccgaatccgtacccaatgtcacccaagtcaacccgattttgattctgattcggcccggtcaaggagccagcgccagccaagtcaagacagtgctcgaaaataatgctagattctcgattatcgattcttggttctccattcaagattctgacacgcgccaaaccgaacagaaaagaatagaatcgaaccgtaccgaaccgaaccgagacgcagatccaaaaaaagaacaaaacgctaactgattacaaagtatacagatcttgtgtataggtatttcgtaaacgcgcctctgtcaactgctcgatttaacgcggcacagtttcgatttgcagatcatcactacatccacacccgacatgtcggcggcccgcctgccctactatcagcgggatcaggaggacggccaccagcggcgcgccgcacgcggccatcagcgcggctactacgagcgtggctctggttccggatcctccagacgagagcacagtcgctacagtcgcagccgttcgcgttcccgcagtcgcagccgctccgccgaacgctttggccagcgtcgccgccaccagaaacggcagtcatcccgttaccacagagaccgcgactccagagatcgctcccgagatcgctcccgagatcgctctagggatcgcgaacgtgatcgcgatagggaccactcaaggcgctccagccactatcgacgctcggaatcgccgtcctcttctgacattggccatggatccaacaacagtcaacgaagaggccaccatgcatcatcatccagtaaatcggagctaagcgccgtacagaaggcagccgctgcagctgccgccgccacaaatcaagtccagttggctggcaagagcagtgccgcgtccgcggtgggcgcctactacaacctggacaccgacgagccctttgacaaggagcgcatccaccgcgaaatggagcagaagctgcgcgaagcactggccagggagggcaaagtgtatccgccgccaaagcctgagccaccatcgcatcctgtcttcgccaacgacggctcgttcatggagctgtttaagaagatgcaggagggccaaaagcagcaagcgaccagccagttgatgcagccatcggtcaaagaggtcctgcagcagcagttggttccgccggaggcggcctccacagggcctgcactgccggccattgcattgggagctgccagcagtgctgcggcgccgtacattgctgccgcggcggccggaaagctggcgccgccgccacccatcgtgggacgacgtcgcggcggaaaagttctcaaaactggcgtagtggccaaagtgaagacgcccaatgagagcgacgtggacccgaaggacttctggtcgttgtacctggccgaggtcaacaagtacaagagcaacgcctgcgatacggacaacggcaagcggccgctggtcaagtagtcgccgaaatagtcgcgctttccatagaaacatgaacttgaacgcaaaaagagcgagaaacgtatactgcccagacgcagtactgcagattcgattttgattcgaccatacccctgttcccgagacaccatcacatagcgatcccttcccggcccctttgaaatgttttgtacacgaaaacaagcgagcagagatgcgtagcttatagttttagtcgagagtgggtgggcttatgagctgcaagcgcgagcagtgtaatttgtatttttttcacacgaatcgatataatataatataatatgatatataccgctcattaagcaaacgcaaactgaagaactaaccattgtgatttatatatctatctcttccttcccgtttatgcactgaaattgtatttacgtttgatttcgattcggttgtgtaccgcctcacatcccatcccaccccattgtgttcatctctttctttttcatttggacaacgatccatctgtcccggtcttcgttttggtttactatttggttgccttaccgtttcgtttcgttatgtttttattttcctttgccaactaaagtctatatgcaatttttcatgtccaaaaacaaaagcagcgacaaatcgtcagacagcagcaacatgtccgcctacaagctggagaccgccccgttcgacccacggttccctaaccagaacgtgacccgctactgctaccagtcgtacatcgacttccaccgctgccagaagaagcgcggcgaggacttcgcgccctgcaactacttccagaaggtctacaagtcgatgtgccccaacgcctgggtggagaagtgggacgaccagcgcgagagcggcacattccccggccgcatctaagctgcgccagagacgcagcaacacagtaaacccagcaatccagcacccaaacacacaggacacgatcgatggacggacggaggtagaggagcgtggtaaccagaatccggcaattgcaacagagactagtttgtgtttgtgctttccccagcggtgaatgcagaccatcatcggcaaatacaaaaaaaaaaatacacaaatgttcaattacttgaattctgaaccgatcgtttgtgtttgtttcttcttgatccttgatccttgatccttgattcttggtcctgccgttgctggccgaactggcatccgaatcagatcgacgccacgccactgtattccgatgtgttattattaataaacaattagacacaaagagtccggtgtttcgtcatttgatccacttgttgtgagtggatgagaggttctgtaacttaaagaagaaaaacgcacatgtggcctgcatcgtttatttaatattacttttctgtttgctcattacaagttgtttaatctttggcagcccgtcgtctcaagacttgatttcattcggaaatcggattctttctggttataatcgcttttggcctttttgttatattagtttttaattggatttcattagtggtgtatacatgtgtgcaactctttttatgattttcactactttagtttgcagttattatcctttttttttatatatatattttattaaaccgaattgagtgtgtcgtacaaaacgtctactgtttgccgaagttaaatgcattatcgtgctgcattagacattgctgttgaacattagaacgacaggaggatagagtgaacaactaataggaatcaaagtataagcacttgagtttgagaacaaaattcggaaatataaagtctatagtcttcgatagtaataaatcaacaattgcggacggcagccattcctagaaactaattgctaatcaacttaacaggaaactcgagttgtatttagtataggtgtttgcgacttggaaaccaaccgattcgacatggaagttcctgcccggcaatgtccaatccttctttgcggcttggagaaagaacccttccagttctagttcttcccctaaacgcatcactttatctatttattggttgtaggtgtgtccagctaaaagggcttaatccgtactgtggattgagaaatacgtccgtactttgaaatgaaatgtaatgttgcttggaaacaaaagcggatggaagacgaccacaagacttctgaaaaccagatgcacggactcatttcgctctagtaacccgattaagccccataatcagaccgtttaaaatgctttata

SEQ ID NO: 34211 - DNA, 687 bp, DROSOPHILA
catcgctatagctatcgccaggctcgtgagattctcgccagttgaaaatttttcgtcgtactctcgtaacaacaaagatgtccaaaaacaaaagcagcgacaaatcgtcagacagcagcaacatgtccgcctacaagctggagaccgccccgttcgacccacggttccctaaccagaacgtgacccgctactgctaccagtcgtacatcgacttccaccgctgccagaagaagcgcggcgaggacttcgcgccctgcaactacttccagaaggtctacaagtcgatgtgccccaacgcctgggtggagaagtgggacgaccagcgcgagagcggcacattccccggccgcatctaagctgcgccagagacgcagcaacacagtaaacccagcaatccagcacccaaacacacaggacacgatcgatggacggacggaggtagaggagcgtggtaaccagaatccggcaattgcaacagagactagtttgtgtttgtgctttccccagcggtgaatgcagaccatcatcggcaaatacaaaaaaaaaaatacacaaatgttcaattacttgaattctgaaccgatcgtttgtgtttgtttcttcttgatccttgatccttgatccttgattcttggtcctgccgttgctggccgaactggcatccgaatcagatcgacgccacgccac

SEQ ID NO: 34212 - protein, 92 aa, DROSOPHILA
MSKNKSSDKSSDSSNMSAYKLETAPFDPRFPNQNVTRYCYQSYIDFHRCQKKRGEDFAPCNYFQKVYKSMCPNAWVEKWDDQRESGTFPGRI

SEQ ID NO: 34213 - DNA, 2924 bp, DROSOPHILA
tgatacgtgcgacgcgcaaaagccagcaggcaactaactgtagtgcgatgtgcgctagtgttggctaccacgacaatgtgcgggcagcggcgctgcgggggcagctatttcgccgccaaatctggctatttctgaacgaagagctatcgaacaagttatcaccgataattatgaatcgaaaatatcgttcatctaaatttgaggtattaaatattttaaattagccaaatttaaatttccccgcttaaactacctaaactattgctgagcaatcatgttatataagtaaatcatataatggcttactcttacgaaaattccactaatttttatatctcttatgttaagcatattaaaatgttaaatgaataaaatgttaatgtttcgttgattgcaaaaaaaaattaagttaaatattaaaaaatataaccagagcagacaaattttaagacctttagtcctttaggtattatagaaaggaaatctaaaaactatataagtatcagccaaatcccctaatttcgaaccaactaagcattgtattccaactccgctttagatctttccactcccatcttatcgaagtggaaagcatttgccttccccattctaatctaataaacgccagtcggcagattagagattgcgatatctgcagggccagtgagaaggcataatacgggtcctcaacataatgtgtatattctaatggagttcatagccagcaaatcatttaacaatggaccttcgatgtgtcgctctattacaacataactcaatttaatgtcacgctgacgcaggttccgactggtgggcatggcctctggccagaaacagggcacagtttcgggttggcggcggtacaccgccgagcaggagtcccgtgttccgtggttgtagttgtgggccagccgagcaaaatgtgggacaaagtctggtcaacatggcaacctgcaacgggcgggagacggggcttctcggcgctggttagctgcggcgcctagtcgcaggagccgtctagccagccgtcgcgccacctctcgttcaccttggtgcaatcgaagagcggtttgcccagtttgtcgttcactcggttgtggaacttgcacagccacagtgctagctccttttgggagttcacattgatggggttgacgtccaggctgcaacagaggtccagctaaagtgtcagcgttttcaaatggattgaagatgcacttactcggtgcgaaagtccttggcgcaaaactcgcaggggtaaaggcgcgacagaacctcaaaaaaggtcttcatgtcgcgcttctcggtgtccgtggggttgtccgagtaaaaggcggccatggtgtggagcagtccccaggtggaaattcccagcctcaccttgtccagcgggcagtcgtcgcggggcagcggatcttcggcggcgttgacggtcagcttttcggcggcggccatgtgcttcacctggaggagtatgaaagtgggagattcttgtgttatcgtcctgcttgcgaaggcgaagtggccaacgcgatcacgtcaccttggcgctctgcacgttggagatgaggcgttgctgcttggaccacgacttgaaatcgttgcaggtgcggcagttcgagtcctgtttgccggcgccgctggcaccggccttgcggttcgctgcgaatggggactcgtggtgctccttatccatctcgggattcgcctcggcagacatgatgaagtccgggtcacggatcaggcggagaacggtgcgctgcagacggcgaattaccaggcgagttgcttcccggctgagttcgatgtgcgtggggctgatgtagtcgtagccgtagttgtgggactggcggcgcagcagaagcgttggtgtggtgggtagttctagaatcttgaaacttcgctcggctattgtgaaaatcataaaaagcatgcgcatggttgccacctttgtttcgaaacgaaacacataacattaggacatatctggctaagcggcttagttaagcggctgcaatcaacgcaagttactaaatactggcttttagattcatggccaacatctggccaaggaccaaaatccggtcagcaaagtaacattttcaaattataccggccagcaatcgaaaatcgatgcgaaatcgttcccgaacgggaagcgatctggcagcctgctcgcagctgtgatcgataccagaccgttgcgagttgcgcgcgcaaccgcgacaattcaaatagcacagcgttcagaaaattactaaggtttgtttctcaatcaattcgagacgctcgaaagaacttacatgtgaataggatggaagctggcgtttgtgagtgctgcagccccagataaattttgcgccttggaactgtttaaaatagaataacacatatgctattggcaatatttattgatttttctgatccaaatttttaacgtacacaataaaatttttttttaagacttttccgtaaacttctacatttacagcgttaaaatctgatctgtgacataatttgcaaaagctctgtgtgatctaaaggcacaatctcggttattgtgttcaaataatgtattaatacaataaattcacttagtaacaactacaacgtctggcacgtgagtaagacaagttaacaactggccgccggattttgggtttgggttagctctgctctgctctgctccttcctgttccgagcaatctgaatctggagcagatcgcagtggttagacgtacgacacataaatatatatatatatatataaacattccttgggctgattatacgcgacgcagcatttagttgtggttttgagagttaggatcagtaagctttaaccgctgcatcgcctacaatcagtttcgagaacgcacataaattaggcgtgtaaacactatcaaaaagttaatataaaatgt

SEQ ID NO: 34214 - DNA, 786 bp, DROSOPHILA
atgattttcacaatagccgagcgaagtttcaagattctagaactacccaccacaccaacgcttctgctgcgccgccagtcccacaactacggctacgactacatcagccccacgcacatcgaactcagccgggaagcaactcgcctggtaattcgccgtctgcagcgcaccgttctccgcctgatccgtgacccggacttcatcatgtctgccgaggcgaatcccgagatggataaggagcaccacgagtccccattcgcagcgaaccgcaaggccggtgccagcggcgccggcaaacaggactcgaactgccgcacctgcaacgatttcaagtcgtggtccaagcagcaacgcctcatctccaacgtgcagagcgccaaggtgaagcacatggccgccgccgaaaagctgaccgtcaacgccgccgaagatccgctgccccgcgacgactgcccgctggacaaggtgaggctgggaatttccacctggggactgctccacaccatggccgccttttactcggacaaccccacggacaccgagaagcgcgacatgaagaccttttttgaggttctgtcgcgcctttacccctgcgagttttgcgccaaggactttcgcaccgacctggacgtcaaccccatcaatgtgaactcccaaaaggagctagcactgtggctgtgcaagttccacaaccgagtgaacgacaaactgggcaaaccgctcttcgattgcaccaaggtgaacgagaggtggcgcgacggctggctagacggctcctgcgactag

SEQ ID NO: 34215 - protein, 261 aa, DROSOPHILA
MIFTIAERSFKILELPTTPTLLLRRQSHNYGYDYISPTHIELSREATRLVIRRLQRTVLRLIRDPDFIMSAEANPEMDKEHHESPFAANRKAGASGAGKQDSNCRTCNDFKSWSKQQRLISNVQSAKVKHMAAAEKLTVNAAEDPLPRDDCPLDKVRLGISTWGLLHTMAAFYSDNPTDTEKRDMKTFFEVLSRLYPCEFCAKDFRTDLDVNPINVNSQKELALWLCKFHNRVNDKLGKPLFDCTKVNERWRDGWLDGSCD

SEQ ID NO: 34216 - DNA, 2156 bp, DROSOPHILA
tcatgacttggatcggtgtcagaaggtcaacgaaattctcctggctggagtatacaaggctcttagtgatcaccacgtttttctcgagggaactcttttgcaacccagcatggtgatgcctggattgcagagcaacaaaaatcatccgccagcggatattggagtggctacagttctcgccattaggcgaagtgttcctccggccgtaatgggtatggatgtctgtaactaatatatggggcttctctaatctatgcatccttttctgcaggagtacttttttgtggtggcgctcaatcagaagaggaggccacggtccatttgaatgcaattaacaatgttccgctttgtaagccttgggccatgacctttgcctttgatcgggctcttcaaacatcgattttgcgaacttggggtggcaagaaggagcagattagccatgctcaaaatgaacttatcaagcggtgcagggtcagtataaataactaagaatataacctcaaaactcaagtattcttttaaaaaatattttaggccaatggtcttgcaagcattggaaaatatgtaattggctctgtggaaagttcagcggccactgaaagactcattcaagaagccgtcgaattctaaggaattctaatcagttaaataatcaaaatcttaaatttaatggaaccaccttcgatctttgtagagtaacagttaattggtctgaacaattttaatttttgtgttcgtcacaacgtgggactagtattctggaattcctagcgagtaaagtgctccttggtgacttctggccaccacttgaccgcaggccgtttatgtgatgccagccagtcggggcgaacaagtcgaaatatggttaacaagcctgcaaagagcaacatgactcttggagcgaagtgtcggcttaatccgcggagattaccagacgaccgcgcgacacgcagctgcgttcagagttccagctacgcagcagcttaattaacgcaggcgcatgccaaaaaccaaaccgttggccatgtgcaacagcaacggcaacaagagcaacaacagcagcggcatcaggggcaacaacagctacagcagcaacatcaacaacaacagcagcagcaacaacataggcaagcccgggttgagtgtttcgacttaatcaggcggttccgagccgctcaagtcggtgtcatgttgttggcaaattagtcagactgccaccaggaatcatggtaaggtgaggagagggttgcacgcaaatagcaataattaaaattaaagcagccactaacttatagcctcgcctttcgctgcaaagtcagctcctcccagttgtcacgcgcagtattttaaaacaagcaaccagccacatttgcttccgagtgcaaggactcaaatgtacttggggaaaataagagttaatatagttaatatagaaattcaatagaattaaataaaatattttaacttaacttacaatatattttgatttggtttatacatttaaatatttttgaacacatagtaaatcaagatctgatataatcctggatacgcagttcctctttaagtttgtgtcgcttcacctgcagattgtagcgaaggtttgtcgttaatgcaatcgtcgtgtatcacagagccgcgggattgaatccccgtgatccaacacctcccctcgcccgcactcgaatttaattctgagtcccaatcaggccaacgcgtacgacatgtcatgttaattgggccccgcatatacgtatacagctgcgagtgtattcgccggttgtgcatgtgtgtaaattgccattatgctcatgtttgcttaatatgtggcacacaacacccaccgagttccgctcgattccaggctataaagcggcggctatatagccatagccactcgactatagcaacggcagcacgcgacgcgtcaagccaattaaagccaaattatggcagcgcttttttaatcacatgcatcgctcttcgccgctcagtcgctcacaatcagttactcggtttggccgcctattcaatcactcattcattctctcattcacttactcaatcagcggtttcaatttgccgctgaagatttatgggcgtgccaggcgctaaagtggcatgggaaatactgccacttagcaaattgcgaacta

SEQ ID NO: 34217 - DNA, 156 bp, DROSOPHILA
atgccaaaaaccaaaccgttggccatgtgcaacagcaacggcaacaagagcaacaacagcagcggcatcaggggcaacaacagctacagcagcaacatcaacaacaacagcagcagcaacaacataggcaagcccgggttgagtgtttcgacttaa

SEQ ID NO: 34218 - protein, 51 aa, DROSOPHILA
MPKTKPLAMCNSNGNKSNNSSGIRGNNSYSSNINNNSSSNNIGKPGLSVST

SEQ ID NO: 34219 - DNA, 3107 bp, DROSOPHILA
gatctttttgtctttctgtttataagtgtgttttttatgaacatactttagttctcatttagtttactttctacgcatttgtttgccaagttcatggccaagttccttaggttttgactgcttagatatagcataataaatgaagtcaataaacgaaatggggctgctattctaagctagaaacatctatttattccaatcgtagcattgaacaaaatctactttgagaacacctttggctttcattggttcgccctttacggggataaccaatatctttaactagctttagtatctgtgattaagaataaaaatcctgactagttgttgtaccagatttcaagtcgaaacaatccagaaaacgtttatttcagcagtaagcctaataatatacaacatttctacaataggctacttgtatatttttctatttaggtttaaagcaacaaaagttatacggtcttttctctctattagatgactacaccggcttttatctgcggattttcattttccttcgacgcaccaaaaaatcatactataacatcaaataataaattcttgtccaggttccatctttcagtggtgggtcgtcctaatccttcagcattttccgttcttacttgcccgcatcgttcatgttcttgggcagactcaacaaggagttgattagctccgagttgcgcttcctgatgggcacggatgggcccaaggagttctcgaggatcagcggatagcgacagagagtggccacttggccgggactgaactgtcccacgcccacgttgttgaaccagtcgaggagatcccgattgtactccttgcgcacatagcgctcctcatccggcatggccatggcgccgcagtatccccactggcagcaaatggccagaagcacaagggcgacaaggtacgtgtagcgagccattagtccgaggagctggaaggatggccaggagcaggaactgagcacggaacacctgcagcaggagacttgcgaatgaacgtcggttggcgcatcctcgacttatatagcaacctggactggataacccactgcgggagaccgcccgaccacgcaacccaagagcgtcagtatcggtgtcatccgcaggaccaatacatgtcatccgcaggcagcggcggtcctttagcccaggcaaatacggagtcgagttggagccacgcaaatatttggttatgcagtgttttatgtgccaacatgcaggcaccaaatcccattcaagtccagcgatatttgtacgggaaggcagctcactggcgactccatgtggcactcaaaaaaaaggaggatacccaatttaggcacttctttaaaccaacttatttattggatttaaataatatacgattgcagacaaaattgctgaccttccattaaaacgaaccttatttgtgaataatattttgctcaattcgttttctctctgtgtaattgtgtgattaattttagaacgaagctcgtaaaaataccaatcttaaatatatataaaacttaatagctagctcggcagttgggccgttttgcgaaattccagcttgttcctttgtttgatcaccaaactgtgtaaatatggccaaaaaatttcgcgcggacgtaattggcgagagcaaaatgcaaatatttgctgagaaattccgccaattgtcttggtcacatataaaactcccagcctccgaagtggtagttcatccgagcaacggcatcaccgagcacaccatgaagacaggacaactggcactccgaatcctagcgataagcctatgcatttgggcaaccaacgcctcatcgccaaccaccacggagactacgacgaccacgacggacagtgacaccaccaccacgacgacagcagccaccacgaccaccaccaccgcgtcctcctcctcctcctcctcctcctcgaaggtccatcgcaagcggttcaggatcaagaacctcaagtactcgattaagcgcagggtgcgcgtctaccgtgacaccagtgccagttccacttccaggaacaggaccaggaatcgctccggaaggcgggtcagtgtgcgcagcctcaataggctgctgcgacgccgcaatcagggctaggttccaaaatccacatcaagtcatatccatacatgcaataaaagcaattttccaaaaaaaaaaaacatctgagtatttaaaaccataaggataatagaaaggtcagtactagaacgtgtgaaaagcgaaggattccccaatggttgttgcacatgtcgtatgcgtaatatatgccaaattacttaccttatttgaaattttctttgttcccatcaacaggttgccccttctagcatggctgtgcccagtcacacaacgcacatcatcctttatttatgcctgttcaatgacttcacgtgcggcaaaaacattgacccaactccgccccccaaccaatgggcaaacatcggatatatctcgacggggtaggtttacgatgactataactttccatgcagccacattacccagcagtttgatggccaaggctcggcgtcgttcactccgacgatttgtttgcactgcatttgtggccagacccaaaatccggtgggtggaacgcggactccgcgtttatcgtccaccgtttgccgtcttaaaagtcagctgaagcatttaatggtcgtggtgtgacttggaggcacacataagtgaaacacgcatgggttcgatttcggttgggaagacatttccaggagcgtcttggtcacatcagagtatagaaagtaaatgaaacttaatttcccatatattaaaatggaaaaaaaaggttttaaaatatattaagaaagttattattagctagaatttatttaagatccatattttttactctctccttactatgaagaatctttacttttcggtctgcagttcgtccctggacaagccgaagatgattcgtcctgaacgcacacacaggacatcgggacgggggtccgtggccattcaccaattacgcgccattcgcggctgtgtccttaatttcttaaaaagcgtttaaacatctaatgaaagcatttgggaccccgcgatttctgctgtcagttgcgtttacctt

SEQ ID NO: 34220 - DNA, 588 bp, DROSOPHILA
atgaacgtcggttggcgcatcctcgacttatatagcaacctggactggataacccactgcgggagaccgcccgaccacgcaacccaagagcgtcagtatcggtgtcatccgcaggaccaatacatgtcatccgcaggcagcggcggtcctttagcccaggcaaatacggagtcgacctccgaagtggtagttcatccgagcaacggcatcaccgagcacaccatgaagacaggacaactggcactccgaatcctagcgataagcctatgcatttgggcaaccaacgcctcatcgccaaccaccacggagactacgacgaccacgacggacagtgacaccaccaccacgacgacagcagccaccacgaccaccaccaccgcgtcctcctcctcctcctcctcctcctcgaaggtccatcgcaagcggttcaggatcaagaacctcaagtactcgattaagcgcagggtgcgcgtctaccgtgacaccagtgccagttccacttccaggaacaggaccaggaatcgctccggaaggcgggtcagtgtgcgcagcctcaataggctgctgcgacgccgcaatcagggctag

SEQ ID NO: 34221 - protein, 195 aa, DROSOPHILA
MNVGWRILDLYSNLDWITHCGRPPDHATQERQYRCHPQDQYMSSAGSGGPLAQANTESTSEVVVHPSNGITEHTMKTGQLALRILAISLCIWATNASSPTTTETTTTTTDSDTTTTTTAATTTTTTASSSSSSSSSKVHRKRFRIKNLKYSIKRRVRVYRDTSASSTSRNRTRNRSGRRVSVRSLNRLLRRRNQG

SEQ ID NO: 34222 - DNA, 4395 bp, DROSOPHILA
agaacgtgtgaaaagcgaaggattccccaatggttgttgcacatgtcgtatgcgtaatatatgccaaattacttaccttatttgaaattttctttgttcccatcaacaggttgccccttctagcatggctgtgcccagtcacacaacgcacatcatcctttatttatgcctgttcaatgacttcacgtgcggcaaaaacattgacccaactccgccccccaaccaatgggcaaacatcggatatatctcgacggggtaggtttacgatgactataactttccatgcagccacattacccagcagtttgatggccaaggctcggcgtcgttcactccgacgatttgtttgcactgcatttgtggccagacccaaaatccggtgggtggaacgcggactccgcgtttatcgtccaccgtttgccgtcttaaaagtcagctgaagcatttaatggtcgtggtgtgacttggaggcacacataagtgaaacacgcatgggttcgatttcggttgggaagacatttccaggagcgtcttggtcacatcagagtatagaaagtaaatgaaacttaatttcccatatattaaaatggaaaaaaaaggttttaaaatatattaagaaagttattattagctagaatttatttaagatccatattttttactctctccttactatgaagaatctttacttttcggtctgcagttcgtccctggacaagccgaagatgattcgtcctgaacgcacacacaggacatcgggacgggggtccgtggccattcaccaattacgcgccattcgcggctgtgtccttaatttcttaaaaagcgtttaaacatctaatgaaagcatttgggaccccgcgatttctgctgtcagttgcgtttaccttttcgccgtgtgcggttcgcttcgtcggttcgggtcgatttggtggtattcctcggtcctgattatccgagctgcaggaagcgagcacgagaggattatgtcattgcagccatggccaagataatctcgacgatcaaggccatcctcacgaggatcatcttcagtgcgcacagcctgctggccatttggcaggtggtggctttaaagagtgatatcatatactgggcactatgtggaccactgctgttgctgctgctcgagggcatcttcaccatcatgatcaagaagacgcaggagtggcgctggtaaggatgaaacccacggatcctggctaccccaggcatctgattaaaactcccaactcgaaatgtaaacaacagtcagtcgatgctgacgtcatgccgcggggttttgattttcaattaaaagtgaaatcatgtgtttaatgtgtgcctaacctggccacccactttcatagaaaccaccaacactgcggccgcacccccacactcaaaaaaaaagtagccacgatttccaaacaacacaatgtagtttacataggatttttggataaaaatatgcatatgaattgaatctagaaataggaaatcctatgaattttgtatcttaaagccaatttgtattatcatttcggggtgtactttttttcaagtgtaagctgtccacctcacactttgtactagtaaaaactttaatggaatttcgtgggggatggagtctttttgactcttgtttacctttcgtcgcatcactcagacttgttgtttgttttggccgttcggctgtgccacctcatttgtgtcctttgtccgcaggttctgcccctcggttttcctctacctgagcagcattgtgccggcgatatggctgctggagctggacaaggtagcacgtcgggtgggcaacatgacatcgaccaactcgacggtctacagtccgagcaactacagcattcccgtgggcaacaccaccatcttcatcaccagcaccaacagcagtggcgtgccaccggtggccactctgctgggtcaggccggggtcaccctctcggtgaccccggacacttggacaaccctcatcgagcagttcctcatgctcatcctgatcgttggtcgctggctgctgcccaagggcgatctaaccagggatcagctcagccagttgctcctggtctacattggcacggcggcggatattattgaatttttcgattcctacaaggatgactcgatagcaaagattggattcctggtcttccttacactgggcatatggtcctggagcctcatgcagttcaccatcgtgctgtccgccactcgaggacgacgaccacgaggcagtggatcgcatcacaaggaggagtgcgtatatttaatcattttattattaaaatgtaaatgatcatgggaatctttattctgcagacatacagactgttgccagaactgttgctgtggcattgatgtttggggcatcgtactcaatgtgatcctgcaggatgcgcccttcctcacctttcgcctgctgattatcttccagtacaaaatcattaactacatgaacgtcttctttacatgtacgtattataaatatttttatgcgtaattttattacttacatatatgttattaggcaaaaactcgttggtgatcatcctgcagctttatcggctatatgtggtcaacgccgagttctggaaaaatcggcgtgaaagtcgaatggccaagtcacgtcagtttcaatctcgtcgaaaagtgcaggatgctgatcagaacagcatttacatgatatccaacgaaaggggtggtgatgtcaaaaagaagatcaaaaggtaggtgtggatgtaatttagatccttaatgaactgcatcaactatttatagggccaaggacaaggactatgcggagcaggaggcggtatacagtaaaaagaagaaggacaagaaggacaagtgggtcttgagctcaactgtgacattaaaaagagaatttagattaacccactgattccaggaagaagcgcaaacgcaaggatactggctactccacggccagctcgcagaatctgtactccacgaaggcgagtggcacggacaaggacactcgccgcaaggacaagaagggcaagaagtccaagcgcacctgcagcagttcacccagtgactgcgacttggccaaaaagcagaagcgcaagaacgcggataaaaacgataagaagtaggtaatatctcgggacttggctggttatcctttgacttatgatccgatttcccgcagaaaatcccgcaaaattgaggcagtcgtggaggagtcgagcagctcgagcagcagcagctccgattccagcaactccactctgcccagctacgaggtcatcgacgagaagaaggccaggcgcaggaagcaccgcggaagtagtagcgacaccagttccggggacagcagctcctccagctcctcgtcctccagctcggactcgtcgtgaatgaggcacttttttggcactaacgccagacgttagggaatcgatttttttggcagtcacttgccagcattcaagtggctgcgccgctgctccgggagctcagatttgtaagaccccaaggggcaggtctataatttgattgcaaacacaccgagcgttaatcatgaaaataccacatgcttacgcttttacattaaaatgttgtgagatacaaaagaaactgcagtgagttttaaatacttttgaaacatttatctcttcgcatttctgcattatctcttctgcattttgcacaacatttttattacaaatttgatgtataatttaatagtgctgaaactctgtgctcctttgaatattttatattaattaacatgacatctgcacgaaaatattttaaggctgtttgtaggcttccaaataagctagcatttgctattttcttgattagtgctcgatatattttgatatatttgtataagctacactatggcatatttgaatggataataaatacgcgggctccacagcgataagttggcagctccgttggcattaaaatggagctctcttgattaaattttcaacgtggggaaattctcttaatgctttctctttgccgcatgaaaagcttagcaacgcgaactgctgctaaacttttgttgacacacagttagctgtgatatttgccgtgagtgtgtgtatgtgtgtgtggggtttggggggtgggagggctctagttggagatttctcgagagcgtgtatttttgtaatagcacaatagttgctgccgagcgtccaaacgctgcggacgcgattttcgcttcgctcctctcggattcgcaacgcttttcgaaaaaacctcgcgtaacgccagaagctttgttgttgtcgagtgtgtaagttcaagagtgtgtatgcgaatgagtgtgtgtgcgagtgagcgtgctttgtcggatccatcgcatatatacttgatatatagacgcacgataaatgc

SEQ ID NO: 34223 - DNA, 1572 bp, DROSOPHILA
atggccaagataatctcgacgatcaaggccatcctcacgaggatcatcttcagtgcgcacagcctgctggccatttggcaggtggtggctttaaagagtgatatcatatactgggcactatgtggaccactgctgttgctgctgctcgagggcatcttcaccatcatgatcaagaagacgcaggagtggcgctggttctgcccctcggttttcctctacctgagcagcattgtgccggcgatatggctgctggagctggacaaggtagcacgtcgggtgggcaacatgacatcgaccaactcgacggtctacagtccgagcaactacagcattcccgtgggcaacaccaccatcttcatcaccagcaccaacagcagtggcgtgccaccggtggccactctgctgggtcaggccggggtcaccctctcggtgaccccggacacttggacaaccctcatcgagcagttcctcatgctcatcctgatcgttggtcgctggctgctgcccaagggcgatctaaccagggatcagctcagccagttgctcctggtctacattggcacggcggcggatattattgaatttttcgattcctacaaggatgactcgatagcaaagattggattcctggtcttccttacactgggcatatggtcctggagcctcatgcagttcaccatcgtgctgtccgccactcgaggacgacgaccacgaggcagtggatcgcatcacaaggaggaacatacagactgttgccagaactgttgctgtggcattgatgtttggggcatcgtactcaatgtgatcctgcaggatgcgcccttcctcacctttcgcctgctgattatcttccagtacaaaatcattaactacatgaacgtcttctttacatgcaaaaactcgttggtgatcatcctgcagctttatcggctatatgtggtcaacgccgagttctggaaaaatcggcgtgaaagtcgaatggccaagtcacgtcagtttcaatctcgtcgaaaagtgcaggatgctgatcagaacagcatttacatgatatccaacgaaaggggtggtgatgtcaaaaagaagatcaaaagggccaaggacaaggactatgcggagcaggaggcggtatacagtaaaaagaagaaggacaagaaggacaagaagaagcgcaaacgcaaggatactggctactccacggccagctcgcagaatctgtactccacgaaggcgagtggcacggacaaggacactcgccgcaaggacaagaagggcaagaagtccaagcgcacctgcagcagttcacccagtgactgcgacttggccaaaaagcagaagcgcaagaacgcggataaaaacgataagaaaaaatcccgcaaaattgaggcagtcgtggaggagtcgagcagctcgagcagcagcagctccgattccagcaactccactctgcccagctacgaggtcatcgacgagaagaaggccaggcgcaggaagcaccgcggaagtagtagcgacaccagttccggggacagcagctcctccagctcctcgtcctccagctcggactcgtcgtga

SEQ ID NO: 34224 - protein, 523 aa, DROSOPHILA
MAKIISTIKAILTRIIFSAHSLLAIWQVVALKSDIIYWALCGPLLLLLLEGIFTIMIKKTQEWRWFCPSVFLYLSSIVPAIWLLELDKVARRVGNMTSTNSTVYSPSNYSIPVGNTTIFITSTNSSGVPPVATLLGQAGVTLSVTPDTWTTLIEQFLMLILIVGRWLLPKGDLTRDQLSQLLLVYIGTAADIIEFFDSYKDDSIAKIGFLVFLTLGIWSWSLMQFTIVLSATRGRRPRGSGSHHKEEHTDCCQNCCCGIDVWGIVLNVILQDAPFLTFRLLIIFQYKIINYMNVFFTCKNSLVIILQLYRLYVVNAEFWKNRRESRMAKSRQFQSRRKVQDADQNSIYMISNERGGDVKKKIKRAKDKDYAEQEAVYSKKKKDKKDKKKRKRKDTGYSTASSQNLYSTKASGTDKDTRRKDKKGKKSKRTCSSSPSDCDLAKKQKRKNADKNDKKKSRKIEAVVEESSSSSSSSSDSSNSTLPSYEVIDEKKARRRKHRGSSSDTSSGDSSSSSSSSSSSDSS

SEQ ID NO: 34225 - DNA, 2880 bp, DROSOPHILA
tatcttcaaaattttatcttcaaactcaaattcctattaggttttgctcttagtttgccatatttaatttttaattggtttcgaatgagctttttaaatattcccaacgacccacttctaaccgtgttccacgttcccttttaagcccatttcactcgaattttccgtgcgctaaaagcttaggcccatttcgtgtctttttaattggtgtagagcataattaattaacctttgtggaggtgaccaaaggcaacaatgaccgaaaaaggcaaaggcaaagaaaaaggcctgtggcaaagaattaatgtgattacatttctctcgtttgcttttagcacacttctattgttgtgtcgttttaaatatttaaaactaaacaacgtggccctgccgaatgcgaaacttaacaaggttgaaaggtggccaaatctgaggcgacaatatgtacatatataccatacatacatatgtatgtatgtaagtgtgaaatggttgcagttgtcgccaagaggcgtttgctgactgggcaaattgtgagtttcattgattttcagtttcacacttggctcgcacagcatcgcttttcggtacgaatatccttggcatcctgacggcatgccatggttgcatttttaatgcgcattgcagtgaccgagtcgagcaaatatttaataaaatttttaaattgcgcatacgccgcttgtgactgaggtcaaggcgcatccgaatcgggagactccggatttcgttctcctttttcaatatacttctctttggttaactccgcgaatacacttaaagaacatttcactgccttgttaaagtttttataatagaaattttcaagattttcaagatttaacagatttatgtaagaaaaacagaacttgtcttaattaacaaatagaatgtacaataactgagtattatttttatatgcatatctatttttcgaaaacttcttgcactgactttcgatttgccgctggcagttgaccaattacggacgagcggcgcgagcccccagcatgttgcttaggggtcgcactgtgaaatagtagacaaactcgatggcactgaggatgctggcccccaggaaaagacccagcatgccgcccatggagaccacgacatccagaggcgtgcgaagggactgccggcgatactgatccgtcggcaggaagggcatgtccagagttccgttgtagtacttgtttggattccgaacactgccggaagtgggaatttatgcaaataagcatcatgctcggactaagagcccaaatataataaacttacaataagagtggctcgtagatggtagtaatgtcgccatcattgcaggacggcaggcagccgcaacttgcattgttgcccttgttgttgttcaccagcaccctggaatctggcttgatcatacgagtcttctccagacacaagaatccctcaagatcgcagtccggataccgtggatcggcattgggattgtacaggaatgacgtgcagttgcaggccttcatctgcaaacgcctaatgcactcggtgatgcagacgctgaagctgtaggacttgtataagctgtcagctggtatctcctctgggaaaaaacagcttcggatcttcggatctatatctttaacatccggatcgttcttcatggcgacctggttaaattgcatatatttgctcaagccctcggtaattagaggaattccgggaggaaagaaggccgtgtgtggaatatcttccgcatttatcacgcttatttgcacatccaagcgggtgatcacatttatcactgccttctgatgggcaggatccaactcgttgggcagccagtgtttcgagccaggttcattgtttagcagcgaattgagcatataacagcggccaaatggcgttaaaaggggcagaaaatgccggcagcaatcgaagggttcatgggatagtttgcactccacgaacagatccgagcagtttgctccatactagtagatagtagtagaatacagtagtgatatatgtattaagaatcacgttttcttgatttcttttggaagtttattttattttattttatttaagacttactcacccaggttagtatttgccgatagttatcagaaggacactttgcacacgcatccgtgcaattcttgtgtactgtgccacactttcccttaagcccgttctcattgtataaagcaggaaagagaaggatcgatacaccggtctccacatcatatgggtaatcccccgtcacgtcaacgcccaaactaaaaaagtaagaacctcttattactagacctgaaaactcttgtcaatcgcaaccttgttatatattcctcgaatttgggaaacagatttccacggtaggccagttcacagacgctgacagcgggaaatttccatttggaaaatggcggcagactttcgtatacaatgctcacagctcgtgtgggaaaactgcgctgatatcccatgatcagttgatagcagcccaaggacgacatgaacacacaaatcaaccagaaaatgcgttccataaaatgcaatctacacagtcaatggaaacaattaaatgtttggagattataccttcggaagctggacaactcacctcgaattggcgatgtaagcgaatcctgcgagtgtacaattggtgcagtaatccttgatgttggtaacaaagccgaagcctctcttcttacgcaggacttggcccttggcattttcagttccacccatatctgctcaccgtagacgcttaataacccgatcttcgaactccaggacctcgtgccgtactgaccgggccatataaattggtcttgaccaagcacgacacggtcagctaccatttgtgtaaatttgtttgtc

SEQ ID NO: 34226 - DNA, 810 bp, DROSOPHILA
atgctcaattcgctgctaaacaatgaacctggctcgaaacactggctgcccaacgagttggatcctgcccatcagaaggcagtgataaatgtgatcacccgcttggatgtgcaaataagcgtgataaatgcggaagatattccacacacggccttctttcctcccggaattcctctaattaccgagggcttgagcaaatatatgcaatttaaccaggtcgccatgaagaacgatccggatgttaaagatatagatccgaagatccgaagctgttttttcccagaggagataccagctgacagcttatacaagtcctacagcttcagcgtctgcatcaccgagtgcattaggcgtttgcagatgaaggcctgcaactgcacgtcattcctgtacaatcccaatgccgatccacggtatccggactgcgatcttgagggattcttgtgtctggagaagactcgtatgatcaagccagattccagggtgctggtgaacaacaacaagggcaacaatgcaagttgcggctgcctgccgtcctgcaatgatggcgacattactaccatctacgagccactcttatttgttcggaatccaaacaagtactacaacggaactctggacatgcccttcctgccgacggatcagtatcgccggcagtcccttcgcacgcctctggatgtcgtggtctccatgggcggcatgctgggtcttttcctgggggccagcatcctcagtgccatcgagtttgtctactatttcacagtgcgacccctaagcaacatgctgggggctcgcgccgctcgtccgtaa

SEQ ID NO: 34227 - protein, 269 aa, DROSOPHILA
MLNSLLNNEPGSKHWLPNELDPAHQKAVINVITRLDVQISVINAEDIPHTAFFPPGIPLITEGLSKYMQFNQVAMKNDPDVKDIDPKIRSCFFPEEIPADSLYKSYSFSVCITECIRRLQMKACNCTSFLYNPNADPRYPDCDLEGFLCLEKTRMIKPDSRVLVNNNKGNNASCGCLPSCNDGDITTIYEPLLFVRNPNKYYNGTLDMPFLPTDQYRRQSLRTPLDVVVSMGGMLGLFLGASILSAIEFVYYFTVRPLSNMLGARAARP

SEQ ID NO: 34228 - DNA, 2663 bp, DROSOPHILA
aggacttcgatgagccccagcagctggagcgtgtgtcctctgccctgaacaaggccctgcgcgttgtcttcatcaagggacccgagaaccgtggcctggagaacgccgccctggccctcgccaagcaggctgcccagcaggagaccgccatctatgtcctgaacaagcaggccgatattggagatctggccaacaagctgaacgccatccgcagcaacaacaacaacaagcccgaggtgcacttcgtcaagtaccgcactcccgaggacgctgccaacgcccagcgcgccatccagggtcagtacgaccagctgggaggatccagccaggcccacaacggtggtgttgcccccgtcctgaacttcgcttccgccgctccagtgcgtcaggccgccgcccagagccccgacaactcctacctgccatcttcggtcttccgtcgcgtctaagtcgctcgtttcactcctttcggaatcgaaaacgccagcgatttttgactgatattaaatcgtagtttttgttgactaatgcttaaataaattcaattcttaaattttaaaaccaatttgacttgttgtagtgcatttgtaaaaaccaaaaaactttgcaggctgagttcattgggaacgaaacttcgcaagttcggatttatttgcagcgaaatattttcttgcaaactttgaaagcgcacataagtagaagcacttatatatttcttaggaactagtttatactttaaccatattcaaaatttaataccagtttatggctgctgagatcttgggttttgaacaagtatttttatttcttctttcttctttctttctgtttttattcgattatcgctgctataaataggtatacaatttattttgaaaactgttgcatacttatgttgctttcgtcaatttttaaaggaattaaccaaatgaaaatacaataatttacataaccaaattagataacttttattcgaaaacaacgtttaacaatcgattttctagtgacgcaggcgactcaggatgttggcgggtaggtagttgctctggggcacctgttgaggagtaacgcgtgctggagcagctccctgggatgcaaagttgatggcattagccacgccaccgttgatggactggctggagccgccgagttgatcgtactgcgattggattgcccgctgggcattggcagcatcctcaggtgtcctgtacttgacgaagtgcacctcgggcttcttgttggcattctggcgcacggcattgaatttctgggccagctcgttgatatcagtctgtttgtgcagcacatatatggcagtctgctgctgggccgcctgtttagccagggccaaaacggcattctcgtagccacggttctccggcgacttgatgaagatgacgcgaatgttcttcttgaccgaggcaagagccctctggagagcagccttatcctcgaagtcgtcatcgttggcatagaagctgtagaactccttgtgaactgacgcctggggagcggcactatagctaactggtcccgccagtgcagggactggggatacaccactgcccccaatactggttgtcgcaccttgtccgtaattatatccggacaagctaccggcacttgccgctgccacaatgcttagaataatgagggcacgcatattgacccgatgcctacgagatattctagacgaatgaataatatagcattcattatctaccttttataccgccaacgcgacgacgtttaaaattagactagaaaatctagtcaattgagccgtctagtcactttggggtccctctggcggaacacggcgatcatcgatctccgctcacgaatcgtgactcgcgaatggccagtggctattggccatcgggttttcggaatgctgttaatctgctaacataatttcgctcttaacacatttaacacattgttgtgggcaaaagacagcttcaatcgtgccgccgactgagatgagattccgaatcgaagtccgagtccgagctaagatccgattgcgagtccagtcgttttccgaactatcgtgattcacccataattggcttataatttatgcacaaataaaagaaaaataaccgatctcttggctgtttcaatcggattgttttgttatatttgcttgaatatgtatacagaaccgcttatttgttaatgatttcaacaaaaaagtgatcgtcagcttaataaaattaatgattagactttgtttttatggctaatcaggtttcgattgggcataaatcttcattgccttcgtatgtgggttgcacttgagattcctttctaattgtacgtgacacacgacgggcctcggaaaccaggtcatctaacagttgttggcatcttcgcgaccttgagctgtcgtcgggaaagaaccagttcctcgttggccgggagtccggtattaatgcttcccgctggccaagtgggtggatctaatcttgtagtcaattaatttggcggcatgcgagttggctatgtcagataattagtccattgatttgtatggaaagtctaggtgaatatgattcgacgagggcttaaactcataaaggaaacctgctccgaactgcctttcctgatcttgatgtcgtcaattcgagatatttatagtttgaagggcactttttata

SEQ ID NO: 34229 - DNA, 663 bp, DROSOPHILA
atgcgtgccctcattattctaagcattgtggcagcggcaagtgccggtagcttgtccggatataattacggacaaggtgcgacaaccagtattgggggcagtggtgtatccccagtccctgcactggcgggaccagttagctatagtgccgctccccaggcgtcagttcacaaggagttctacagcttctatgccaacgatgacgacttcgaggataaggctgctctccagagggctcttgcctcggtcaagaagaacattcgcgtcatcttcatcaagtcgccggagaaccgtggctacgagaatgccgttttggccctggctaaacaggcggcccagcagcagactgccatatatgtgctgcacaaacagactgatatcaacgagctggcccagaaattcaatgccgtgcgccagaatgccaacaagaagcccgaggtgcacttcgtcaagtacaggacacctgaggatgctgccaatgcccagcgggcaatccaatcgcagtacgatcaactcggcggctccagccagtccatcaacggtggcgtggctaatgccatcaactttgcatcccagggagctgctccagcacgcgttactcctcaacaggtgccccagagcaactacctacccgccaacatcctgagtcgcctgcgtcactag

SEQ ID NO: 34230 - protein, 220 aa, DROSOPHILA
MRALIILSIVAAASAGSLSGYNYGQGATTSIGGSGVSPVPALAGPVSYSAAPQASVHKEFYSFYANDDDFEDKAALQRALASVKKNIRVIFIKSPENRGYENAVLALAKQAAQQQTAIYVLHKQTDINELAQKFNAVRQNANKKPEVHFVKYRTPEDAANAQRAIQSQYDQLGGSSQSINGGVANAINFASQGAAPARVTPQQVPQSNYLPANILSRLRH

SEQ ID NO: 34231 - DNA, 4124 bp, DROSOPHILA
cgcccagatccccgagaactcgtacctgccctcgtcggtgctgcgtcgtctgcgttaccgccactaggaagtgccatagctttcagctgccctatttgttgactttttgtgttatctattgatttgtcgaacgaaccgctccaatacaatacttttttaaattaatgatcgggctatttctgtcctgtgtgtgggaactgagctaaccataaagctgtcgggaatttttgacgattgagccactcactgcggggcagagtgagaaattgcaaagctcggcgtttattacacgcccggagtggcaataaaaattccaaagcgatggcgccaaatggaatacaagtggaaatcaataaaaatttacatgttttgggatgcagagagaaaaaaaaacaatcgacgaaaattttttatcataattaaaatgttaatctgcgtgaagtaaaaggttagacaaactattagcgctcaaatttatggcaactgcaagacggaaccaagacggcatacataatgtatgagtgataacatgagtggccggatgaatggccaataacaaagagccaaagtggtcagcgacagatcttttcaagagcacccactatacgctcgattagcataagcagaaaagtggctaaagtttgttgtagaaaaatcataaaaattatgctcagcaccacaatgactaagctgaaaaccaaaatcgaaagaagccaactccaaagttaatagataacagcagaaaaagaaacggtgacaaaaaagcgaattgggaattggccaaactgcagattggctgatgagggagcaatgggcgaaatgctcggtttgaggtgcaaaatcaaagacagccaattaaaaaaccaaatgatggccataaacaaagagttgcaatctgcagtgatttcgcataaaagtcgtgggcgtcgtggagttggacatacttgccttcgatccagcaatccgagcggagttatccacctacacaccaaaaatcaagatgcgcgtccttattgtaagtaatttggaatcaaggatctctaatcagtagcttatactgactggtatatatttttaggctctgtgccttgtggctgccgttagtgccagaagtggctataactaccagcctgcagcttctgccccagctgtcgcatcctttgctccttccggacccagttactctccttccgtggccgctagccaggatgcccccgccgagacctatgcacctgcttctgcccccgaagctgctccttccgcggttgccaccaactatgcggctccccaggccgagctccaaaaggagttcttcacgtacaccgctgatgagcaggacttcgttgaaccagctggctctcagcaggtatccgcctccttgaacaaggccctgcgtgtgatcttcatcaagggacccgagaacactggcctggagaacgctgctgtggctctggccaagcaggctggacagcaggagaccgccatctatgtcctgaacaagcaggctgatatcggagatctgagcaacaagctgaactctatccgcaacaacaacaacaacaagcccgaggtgcacttcgtgaaataccgcaccaaccaggatgccctcaacgcccagcaggccatccagtcgcagtacgatcagctgggaggatcctccaccattctgaacggaggtgtggctcccgtcctgaacttcgcatctcagccagctgcccagcaagtggccgctccctcggctcctggtagctcctacctgcccgcttcggtcctccgttttcgccaataagcagtgactgacctcagactgacccatgacccatcaacgattcctacgcactcgctgcgacccactttgcttagtttgtaaatctctcgaatttcgatatgtgtccccaataaaatattgttaatataaaatagtgttgtaatagttggttgggaatagcgaattttgtaatacgttttcgagcgacattgaactatttaccctataaggttggccgtattcccgatttggatacattcatccaaccacatttgagggcaaaatattataaaatgctttgccctcttgcgattgtcagttaaatgttttttgctcttcacattggttatatcatgctggggatagtggtgagtttatccgaaaatttgcaagacttgcataagatcataaaatctgtcctagtttcttacgttgttggccggcagctctgccgaactgggctaccagtatcagcaaaacagttatggaggacctgtgaatagctatggaaacgaagcagttttgggtgatgaacgataccacagtcaaccgggaaatcattaccaggagaacgcagactttcacaagcacttttacgccttcgaggctccttacgattccgtggaggaggtggatttagcggaaactaagttatcatcccttgcccagaaaaacctgcaagtggtgtttatcaaggctccggaaaataaggcggtggtgggtgctctaaacgccttggcgaagcaaaccagtgaggataagacggccatctacgtgctcaacaaacagacggatgtcaatgagctggcaagccaacttagtgcccttaaggcacaccacaaacataagccgcaggttcatttcgttaagtacaagacggaggaggaagctgctcaggcccaacaatatattcaggcccaatacggcggaggatcttcgattccccagccgggaaaagcatcctccttgggatattaccctgagcagcagccacagtatgagcaggatgccccatctgaagagtatccagctggccaagtaggttatctgccatcccctcaacagtccgcctatcagccgcagtccggatatctgccacccttgcccagttactcctccatttcacagggctacaatgctgctggatcttcagctggagtttccaccattggacagattgatctgccacctgttcccgaggctcagcaggatctaaccggaaactataataatgccggtgtggactaccgctctgcgagatcaaggcgcgttgactttcgggccaacgagcgacataggcgtggaagtaggatggtctttccctcggccaaccctgggaaacgactgcggctctgaataggccaccttctgccaaattaagacattaaattagtgccataagactgccccaaggggtaactagttatagctgcgaataaagcccattatctatcaatgaatttgtgtttcttctactcggcctacgatctcagctgaagttgttaatttcggtaagcggcttatcagcgatgcgagactctaggcttgaagaaaaaaatgaacagacctgcaaaaacatcaaaatgacgtgtaaattaacaaatcagtagccataaaacgtcggtcgtaaaaatacctggcgagtgaaagtggagctgcgaaggtgtaagtcgttggtagtctaaacaaatggctttgactatgacaggcgacaacaatggggacccaatagtatatgaaaatattttataactaattcaaattgggagctcatttgtaaattttatgcgaattaaattcaagttcaagccgggcatcaggtcaaacgcacaacaaaactcttaagtggggtatatggagttcgcttttgtttcgggtcttgcaaagccagaaaattagcatttcaaaattgaacgacattaacatggataatcggagcaggcaaacaaacacacaaaaccagagcaaacgtttgcagaaatcttttataggaaaacagatgcaaaaatgcgaaataaaataaaatcataacgagaggcgacgcggccgagaagtcagcttactttcgaactgctatttgtttgtgtcgtatataaggatggttttgttgctgggactggattataaccaaacagcgcttcaagcggtaaaaatggctaaaaacccattgccagtgcggaatatcgcagccatgctctccttgttggtaagtttgaaagtggaaaagtggtcttaactgaagaataattaactgaatttcttatagttactatggacttttcttggattttgccatggtttgggagaagtctacctgccggctgaaaacgaagtgtcatctggaggaaaactggcc

SEQ ID NO: 34232 - DNA, 1638 bp, DROSOPHILA
atgcgcgtccttattgctctgtgccttgtggctgccgttagtgccagaagtggctataactaccagcctgcagcttctgccccagctgtcgcatcctttgctccttccggacccagttactctccttccgtggccgctagccaggatgcccccgccgagacctatgcacctgcttctgcccccgaagctgctccttccgcggttgccaccaactatgcggctccccaggccgagctccaaaaggagttcttcacgtacaccgctgatgagcaggacttcgttgaaccagctggctctcagcaggtatccgcctccttgaacaaggccctgcgtgtgatcttcatcaagggacccgagaacactggcctggagaacgctgctgtggctctggccaagcaggctggacagcaggagaccgccatctatgtcctgaacaagcaggctgatatcggagatctgagcaacaagctgaactctatccgcaacaacaacaacaacaagcccgaggtgcacttcgtgaaataccgcaccaaccaggatgccctcaacgcccagcaggccatccagtcgcagtacgatcagctgggaggatcctccaccattctgaacggaggtgtggctcccgtcctgaacttcgcatctcagccagctgcccagcaagtggccgctccctcggctcctggtagctcctacctgcccgcttcgtttcttacgttgttggccggcagctctgccgaactgggctaccagtatcagcaaaacagttatggaggacctgtgaatagctatggaaacgaagcagttttgggtgatgaacgataccacagtcaaccgggaaatcattaccaggagaacgcagactttcacaagcacttttacgccttcgaggctccttacgattccgtggaggaggtggatttagcggaaactaagttatcatcccttgcccagaaaaacctgcaagtggtgtttatcaaggctccggaaaataaggcggtggtgggtgctctaaacgccttggcgaagcaaaccagtgaggataagacggccatctacgtgctcaacaaacagacggatgtcaatgagctggcaagccaacttagtgcccttaaggcacaccacaaacataagccgcaggttcatttcgttaagtacaagacggaggaggaagctgctcaggcccaacaatatattcaggcccaatacggcggaggatcttcgattccccagccgggaaaagcatcctccttgggatattaccctgagcagcagccacagtatgagcaggatgccccatctgaagagtatccagctggccaagtaggttatctgccatcccctcaacagtccgcctatcagccgcagtccggatatctgccacccttgcccagttactcctccatttcacagggctacaatgctgctggatcttcagctggagtttccaccattggacagattgatctgccacctgttcccgaggctcagcaggatctaaccggaaactataataatgccggtgtggactaccgctctgcgagatcaaggcgcgttgactttcgggccaacgagcgacataggcgtggaagtaggatggtctttccctcggccaaccctgggaaacgactgcggctctga

SEQ ID NO: 34233 - protein, 545 aa, DROSOPHILA
MRVLIALCLVAAVSARSGYNYQPAASAPAVASFAPSGPSYSPSVAASQDAPAETYAPASAPEAAPSAVATNYAAPQAELQKEFFTYTADEQDFVEPAGSQQVSASLNKALRVIFIKGPENTGLENAAVALAKQAGQQETAIYVLNKQADIGDLSNKLNSIRNNNNNKPEVHFVKYRTNQDALNAQQAIQSQYDQLGGSSTILNGGVAPVLNFASQPAAQQVAAPSAPGSSYLPASFLTLLAGSSAELGYQYQQNSYGGPVNSYGNEAVLGDERYHSQPGNHYQENADFHKHFYAFEAPYDSVEEVDLAETKLSSLAQKNLQVVFIKAPENKAVVGALNALAKQTSEDKTAIYVLNKQTDVNELASQLSALKAHHKHKPQVHFVKYKTEEEAAQAQQYIQAQYGGGSSIPQPGKASSLGYYPEQQPQYEQDAPSEEYPAGQVGYLPSPQQSAYQPQSGYLPPLPSYSSISQGYNAAGSSAGVSTIGQIDLPPVPEAQQDLTGNYNNAGVDYRSARSRRVDFRANERHRRGSRMVFPSANPGKRLRL

SEQ ID NO: 34234 - DNA, 2747 bp, DROSOPHILA
gctggagtttccaccattggacagattgatctgccacctgttcccgaggctcagcaggatctaaccggaaactataataatgccggtgtggactaccgctctgcgagatcaaggcgcgttgactttcgggccaacgagcgacataggcgtggaagtaggatggtctttccctcggccaaccctgggaaacgactgcggctctgaataggccaccttctgccaaattaagacattaaattagtgccataagactgccccaaggggtaactagttatagctgcgaataaagcccattatctatcaatgaatttgtgtttcttctactcggcctacgatctcagctgaagttgttaatttcggtaagcggcttatcagcgatgcgagactctaggcttgaagaaaaaaatgaacagacctgcaaaaacatcaaaatgacgtgtaaattaacaaatcagtagccataaaacgtcggtcgtaaaaatacctggcgagtgaaagtggagctgcgaaggtgtaagtcgttggtagtctaaacaaatggctttgactatgacaggcgacaacaatggggacccaatagtatatgaaaatattttataactaattcaaattgggagctcatttgtaaattttatgcgaattaaattcaagttcaagccgggcatcaggtcaaacgcacaacaaaactcttaagtggggtatatggagttcgcttttgtttcgggtcttgcaaagccagaaaattagcatttcaaaattgaacgacattaacatggataatcggagcaggcaaacaaacacacaaaaccagagcaaacgtttgcagaaatcttttataggaaaacagatgcaaaaatgcgaaataaaataaaatcataacgagaggcgacgcggccgagaagtcagcttactttcgaactgctatttgtttgtgtcgtatataaggatggttttgttgctgggactggattataaccaaacagcgcttcaagcggtaaaaatggctaaaaacccattgccagtgcggaatatcgcagccatgctctccttgttggtaagtttgaaagtggaaaagtggtcttaactgaagaataattaactgaatttcttatagttactatggacttttcttggattttgccatggtttgggagaagtctacctgccggctgaaaacgaagtgtcatctggaggaaaactggccacggaatactttacctatgcggctccgccggaggatgatcaggtggctccatggcaatcagccagggaattggccaaggtgctctccccaccacaacaggtggtgtttattcgaaccccggagacgaatatctttacactgactgctaagcaactggcggtgaataatccactggacatctttgtgctccaccggcaggcagatgcagatgctctggccaaacagcaggctgcgatacaacagcaggtatctgaaaagccgtcagtacatttcgtaaaatatcgaacgccggcggatgttactagagcactaagcgctttaagaagcgattatgatcggttgccaggaaacagtattagccatgctatagaaaaagccgatgttgtgcaactaaaaccacaaacgactgagaccccagtgatcttcaagattaggccaaaggacagcgattactacgagacgcatgagccggcaagcgaattggaaacggccaagttgcaggcgctatttcgggaatatctgccaccgggtaaacgacgttagttaacctatgacctataggcttgtcccaaagattgtttaaaggttatttaaattaattgttaattagttaaaatcaattgaactgttcctgaacattaaatagataaatatagccacaaagttgtggaaactttatgtttattaatcattccatttcattaaatactcatggaaattgatactcagaaatttactacgtcaatggaaagtttaattttaataatttagtagacgttagaagcagaaactgtttttttgtttggttagccttttgatttcgcttaattttgtcggttattattttgaatttctgcaattttactgatttctattaattctacccaatagtgagctaagagcttttcatttaataggataaattatttctgataattattattcggaaatatatcatagctgctcataaataactcaacaacttggtactcggaattcttgtaaacaaatttaatttaaatttcaatcaaaaaacattttgttgttatggcgaaggtggttgtttatctatagcctgctattatgaataattaattactcagcccaagagcggaacactttacttctgagcttctgtcccacacactttgtggattattttcaaagtatctcttagataatcattaaggtgttgttaaccgactcccgactcccgacgccaaatgttttcttaagcaaatgtcgccgacgccgttgtcactcgcaaactttttaatgagctgcgcgcggagttttcccaccgctccacccactcggaatcgctgttcctgcattgccccaccaggacgcaggattctacgacaggcggtactttaagaatgtttcaactaaattacgccactagtcggcaaacaacagtgatgtggagaaggggtcggagatgacaggacactggggctgacatcatttcgctttgcaaattgttttagtgtcaaaggtcaaacacacacttacacccgagtgccagcgccatatgacacgg

SEQ ID NO: 34235 - DNA, 687 bp, DROSOPHILA
atggctaaaaacccattgccagtgcggaatatcgcagccatgctctccttgttgttactatggacttttcttggattttgccatggtttgggagaagtctacctgccggctgaaaacgaagtgtcatctggaggaaaactggccacggaatactttacctatgcggctccgccggaggatgatcaggtggctccatggcaatcagccagggaattggccaaggtgctctccccaccacaacaggtggtgtttattcgaaccccggagacgaatatctttacactgactgctaagcaactggcggtgaataatccactggacatctttgtgctccaccggcaggcagatgcagatgctctggccaaacagcaggctgcgatacaacagcaggtatctgaaaagccgtcagtacatttcgtaaaatatcgaacgccggcggatgttactagagcactaagcgctttaagaagcgattatgatcggttgccaggaaacagtattagccatgctatagaaaaagccgatgttgtgcaactaaaaccacaaacgactgagaccccagtgatcttcaagattaggccaaaggacagcgattactacgagacgcatgagccggcaagcgaattggaaacggccaagttgcaggcgctatttcgggaatatctgccaccgggtaaacgacgttag

SEQ ID NO: 34236 - protein, 228 aa, DROSOPHILA
MAKNPLPVRNIAAMLSLLLLWTFLGFCHGLGEVYLPAENEVSSGGKLATEYFTYAAPPEDDQVAPWQSARELAKVLSPPQQVVFIRTPETNIFTLTAKQLAVNNPLDIFVLHRQADADALAKQQAAIQQQVSEKPSVHFVKYRTPADVTRALSALRSDYDRLPGNSISHAIEKADVVQLKPQTTETPVIFKIRPKDSDYYETHEPASELETAKLQALFREYLPPGKRR

SEQ ID NO: 34237 - DNA, 2762 bp, DROSOPHILA
ttaagcagatacagataaaagtcatccccttatagtaagattattatccttataccagctgaactgtcaaacgaagattgtaattattaatttctttcttgtatctttggtgacccgtcgacccacacagatgctattccacaatttaaattcttatttcgccgtggccatcaaacgatgccgaaaaagtttaaattagttaaagaacttcattaactgaaccgtcgaaaaagattgacgttttcgactcgtgctgcgcagtggataacgcgagctcgtggaaaattatgaaaattataattaccagcttaagctggccaacccggagcaccaactgccgactggtaactggcaactggcaactggcatcccatccagtgagcagtgaccgccagccaccagatattatcgccaaagccagtagctgtttattttccgagcatttcaacacagtggctgccgtttggtccgtctctgcagcatccagattgtgttttttatggcctgtcgtagccaacacaaatcaattagataatgtagcagtgtcgttggcgtccgccgcatttgcaatcacagtccctgatatcccatgcatatttataaccgtcgcagagtgcattaaaatcaaagccaagacaaacgatcgcgggctggcgataggcctaggtcggggaatacgcttgcatatttaaacggtggggcattttaatgactgtcgaatagcatcgaaatcaaatcaacagcgctgcgacagcaaggtcgttcgttaacaggggatttctctatctaccttggccaaaaactgggtctatttcgtgggaggggtaaatgcagtgccgcgtcttcaactataaaagccagattgtgctgaactcccagcattagttcctcctgtcagctccatttgtacacagcttccagtcaccatgcgtgcttttatcgtaagtgtctagaaaataagggaatcgaataatacagtataaaactaatatttaacatcatgcaggtcctctgtctgttggccgtgagctgcagtgccgataaactgggctacaactaccaacccgtggcacatgccgatgagggtctgtccttcctgcccggaagtggtcaggtgattggagaacttccgtcgcaggtgctgcccgtgcagagtggcgaagcagtcctctcccagcccattgaagcacctgttgctccccagattgcacctttggtagaggagttccagaaggagttctacagctacgccgcccccgaggaacagtacgatgagggtgccagcaaccagcagatcgccaactccctgaaaaagaacctccgcgtcgtcttcattcgcactcccgaaaatcagggcttcgagcgcgctgccctccagttggccaagcagtctgctcagcaggagaccgccatctatgttctcaccaaacagtccgatgtgtccaacctggctaagcaactgaatgccctgaagacgagctccaccaacaaaccagaggtgcacttcgtcaagtaccgcactccagaggatgcggctaatgcccaactggccatccagaaccagtacaaccaattgcccggcgtgtctcgcatctccaacgagggtcgtgctcctgtcctgaactttgcctcgtctccagcccaggctgctgccatcccagccgttgctgcagctgctcccagctcggagtacctgcccgccaatgtggtggctggccaggattacctgccacccaatctgcgtcgtttccgcgtcaagtaaatggtctcaagtgaaatttcaacggtaacgcttcctatcccagaatatcgcatcgaaaaaagaaaacacctagctactcccatcacgtgcaagttaactagcttttaagtatccatgtagaggaataaaatttgttttgctgacaaattcccgatgtgaactgaaaaactcatttgcagcctaattgcaggattcggccatttccatgctgcggaaccgaacctttccgttgtgcgagtttctctttttgccgggcaaatcctgtctgcgcattcgtgcgttgtcctttcacataaaatcccagaaataatagcctggataaagcggctggcatgtcataaagtccagcaacaagttgagccacccacatgacacccactcatattgcctcccgggaactgaaacgaaaccgcacccgcacagtcatggattctccggcatatgcacaatggttttatcccatccgccatttgtaattggagttattagattcgaaatgaagtggttgcaaaatggcccggtctagacccggttacagtatccgtccactctttgtaagcctgctcgtaatcggtgtctctcagtgatgggaaaactaggtgagtgctaggtacaaggaaactttccaaactattatgggtatatgctatatgaaaagcatttgctatgtacaatatatattagctggtggtccccaagtttgcaagcttaatttcatgctaattgtatacaagtacgcttcaggttttcaaagctaataatcaactaccactttcccagcacgtcactggtacttattgttgccagctcagccgctctgcccgttgcggtttgaataagtggcaacgtcctgttgcaggtgaaagctgcctgtattcctgatctgtgtcctgccggctggcgacactcattgagtgtgattgtgtaccctttttgcggggtgtgagcagattttaccgtgtgagtgtgtgtgcgccttgatggcttcctgcttccgtga

SEQ ID NO: 34238 - DNA, 762 bp, DROSOPHILA
atgcaggtcctctgtctgttggccgtgagctgcagtgccgataaactgggctacaactaccaacccgtggcacatgccgatgagggtctgtccttcctgcccggaagtggtcaggtgattggagaacttccgtcgcaggtgctgcccgtgcagagtggcgaagcagtcctctcccagcccattgaagcacctgttgctccccagattgcacctttggtagaggagttccagaaggagttctacagctacgccgcccccgaggaacagtacgatgagggtgccagcaaccagcagatcgccaactccctgaaaaagaacctccgcgtcgtcttcattcgcactcccgaaaatcagggcttcgagcgcgctgccctccagttggccaagcagtctgctcagcaggagaccgccatctatgttctcaccaaacagtccgatgtgtccaacctggctaagcaactgaatgccctgaagacgagctccaccaacaaaccagaggtgcacttcgtcaagtaccgcactccagaggatgcggctaatgcccaactggccatccagaaccagtacaaccaattgcccggcgtgtctcgcatctccaacgagggtcgtgctcctgtcctgaactttgcctcgtctccagcccaggctgctgccatcccagccgttgctgcagctgctcccagctcggagtacctgcccgccaatgtggtggctggccaggattacctgccacccaatctgcgtcgtttccgcgtcaagtaa

SEQ ID NO: 34239 - protein, 253 aa, DROSOPHILA
MQVLCLLAVSCSADKLGYNYQPVAHADEGLSFLPGSGQVIGELPSQVLPVQSGEAVLSQPIEAPVAPQIAPLVEEFQKEFYSYAAPEEQYDEGASNQQIANSLKKNLRVVFIRTPENQGFERAALQLAKQSAQQETAIYVLTKQSDVSNLAKQLNALKTSSTNKPEVHFVKYRTPEDAANAQLAIQNQYNQLPGVSRISNEGRAPVLNFASSPAQAAAIPAVAAAAPSSEYLPANVVAGQDYLPPNLRRFRVK

SEQ ID NO: 34240 - DNA, 2246 bp, DROSOPHILA
gccgaaatatataaattgcttttgttattactttcttaagacaagtgcacttaaagatttagcatcttatgtataaaatatttacgagcattatcattgaaacaaaatatttccagtgaaggcagccagactgtccaaaatagtttgcaatcaatgatgccaatatttttaataatgggcagcattaaaacgcttggcgcgtaatttgaatttcatgatattcataaattccatttttttttatgaaaaatatgaaaataataaagttctaactttaatgttaaagtttttagttatataacctaactttggttattttgtaagtccattttatgattcctttttcctttttgaacttttccagtattcattttttttggtttatcaatggacaaccaacaaaataaacaacattcgacagaaaccaatgacagtgacttgcgttattccagccactggtagtgtgtgtgtggtgttagccggaaatgcatttggcatgtcctgcgaaattggccagtgaagaagaagaagaatgaagctgctgttttgctgcccttccgccttttacttgctcccattttctcgttactttgcactgccaattgcattgaagttcccagctaaatctcgtttgggacacatgtcttttgtcttggcattgtcaccctaggaattccacccccccccccccccatcagcttagtccgaccaagtgggatgggcaaacaagcgacgacctcgagcagcgcatcgaactcgaatcaatcaagagcgattgataagaatggccacttgaggggccggactgcttgtataaaaaccatctgcaacagcaggaaaattaaccactttcactaaaaccatgcatccgcaaggtgagtatatgccctcgctattcgtcgcaattcgaaggactaaagctgattatatccgattagctttttcctggtcactggcatgctgccttgtgctgctcctgcttccgtccggaatccgctcgatgtgcaacgactccactgagccgggatgcctccacccggcggagctgcaaatcccccagcgttattgtttggaccccaccaagtactggctctgcagcgccatcaactcgcaggcgcaccttcataagtgccagcccaacaccggattcgatcaggacctcaacgcctgtgtgccatggaccgcctgggagtggaagccatgccaggagccgcccagtcgtcctcctggatggagtggatgctaaaagagtgagcaagtccgtgttgcttggccacaataatggatttaggcttaaactaaaaattatgtttcacagtttaaattttggtcatttctctgataaatgaaaatttccttactcttctttattacaattaaaaaattgttgtgttgggtataataaaaagcataaaaaaaaagggaaattaacacgtataatttgcatttcagtatagaaaaactatattaaatacatgctaatttattagatttgtataacaatatccgtttgcagaattcaggaggtttttttcactgcaaagattaaacaatatgtcacgctctttaacataatttaagcaaataataacgaaaatataggtaagccaaatttaagtagataggaacttgataatctatttatttatttttcattacaagtgacagaaatatcatgaagctgttgtaatgccgagaataaaccaattatttctagtaatgcctttgaagagcatccaaagctaatgaagaatgcatcgagatgggtgccaaaaatgtttgaggcaatacgtctccatgtccccaagtttcccccgtcatcttatctggccaatgtcaagagcacgatccgcgagagcgataagtcgcatatctcagtgcgagtctcgatgatgatatctcaatgaatcatattaacaggcacactcttttctctcagtgtcccggatggcggagatttgggtattgcattgggtatttttatgccagccgtgtgatgatgatccgccgatggccagttgcaattacggttgccattgttaacgcgcggcttctgacgccagttaagcggtcttgactgacgggccacgcccccttttcggtgggcatttgtcataaatcaatatgtgggcgcaaccgccatcgagccgatccctttgctccctggctgcctggcaataagttgcactatttttgatgcactcgcccatgtagttggtgcgagaattttatttcatttcacagtt

SEQ ID NO: 34241 - DNA, 246 bp, DROSOPHILA
atgtgcaacgactccactgagccgggatgcctccacccggcggagctgcaaatcccccagcgttattgtttggaccccaccaagtactggctctgcagcgccatcaactcgcaggcgcaccttcataagtgccagcccaacaccggattcgatcaggacctcaacgcctgtgtgccatggaccgcctgggagtggaagccatgccaggagccgcccagtcgtcctcctggatggagtggatgctaa

SEQ ID NO: 34242 - protein, 81 aa, DROSOPHILA
MCNDSTEPGCLHPAELQIPQRYCLDPTKYWLCSAINSQAHLHKCQPNTGFDQDLNACVPWTAWEWKPCQEPPSRPPGWSGC

SEQ ID NO: 34243 - DNA, 2312 bp, DROSOPHILA
aatatatttaattgcatttctgcctctttgttttccattccgtttaataccgctgcaagtatgtttttaaaagtgagacgagagtgaacaaaaaagtgcgtcacataattgggtttcggcatttcggagtggtcgaatgaattttaaatcagtgaacggtgagccctacctgcgctgtctaaaataatggccttgtctttgaaaatctgaaaatactcggggaaatgctacaaatgccacacgaattagcataaatcactgtggcaaggacaacggcggcaggaagtgggcattttgcagccagccaagtgccgttcctcccggtggcttcacttaatggcagacattaataacccgatttaatttatggcccaaaactaacaaaagcccaatccgcaaaactgagcaacaaaggccaaggaggccttttcccaactcccgactccgactgcactgtgcagtgcactggggcaattactcaagtgcgccaggaggacgaaggacgttgtgtggcttaaggcgtactcctcctcccaccgcgcagccaggtgaaatttgttggcccagccccaaaaatgcctttgaggcagtgttttgaattaattagccagcgtatccagccgaggcaacatcgttgctactccgcttgtttgcggcctgcctcggctatctctgaaaataatttacagctgccgttgatgtcatgaatatgcaagcaggccgaccgggatgggtacccacctggacccaactggccagctcctatccagctcggctcgagcggaagaaacagcaatcgggcaaacaaacagcgctataaaatgcgaaaacagagtgggttgctggggggtggcaggaaatactagatgagcttatcgcgaccacagacagcatcacacctcagttccgctcgataagatttcggctattcgtggagtgtataaaaagctcgccaccgattagcataggtcagtccaacgaaagccacccctagttcaagatgaagttcctgcctctgttcgcctttttcctaatcctcggctactcctccttctgcagcggagctgctgtggccaagcccactggtcaacccggttgccaaacggccgaggagctggaggtggcattctatgcccacttctacctgaagagctcctactgggtgtgctccacccagggcgttcccgccaccctcgcccagtgccccattgcctccgcctggttggactccgccaaggcctgtgttccctggccccagtgggtgtggtcgcccactgtccagccgcccagccaacccgaagttgctgcatagaattggagatttgacataacaaaataaaacaaatatgcagtaatattaactattttcttttaatatttccttgtcatgcattcaaaaatcaaagaaatgaaggagaaatgaagtaagctagcaatctctagtaaaagtaaatatttagtaaatatctttgataaataacttagtaactgagcgcatgtgagataagcacaaagactttgcacaaataaatatttttgctgtaacgtcagggcacgattaatcagtcagataaataatggaaatttttcttaagcacttaattcacaaaaaaaaaataaagaaaatttataaactcttttagcttaatggttaactgtgtttttgcgggcattaaactaaagcacttaaaacaacgtaaacacatttgtcgccgcacttttctgtttgtttgttgacaataaatagtttattttaaaaaatatttgcgtatgctacgagtgcaaaaaaatcatacttacatcgcgaactttttaaatgcgcttttacaaggctgtaaaatattgttaaaaatacatttatttatgtacaactacgcagcttcaactatattgagttacacaactgttgggactaaattatttgggcccaaaggaaatgactttaatatatccgtgtttgatagccaaaattgaatgtccttaaattcgtgtcctctcactttcagccatgtccggtcgggactacaacggagagccaggctgtcgcagtgccgaggaactgggccagagctaccggcatttctgggatcccaccgcctactggcagtgcggcggaaaatcaatggaggaggagcgggagcgggatagggattgggaacgggaacgacccgcccagctgcagcgttgcccggccaacgagctgttctacgaccgggagcggcggtgcgtaaagtggaagcactggcagtggaccgaaccgcaggatccgcccacaaagccgcgcaaataaaacaggacgcgcgcgttcgcat

SEQ ID NO: 34244 - DNA, 312 bp, DROSOPHILA
atgaagttcctgcctctgttcgcctttttcctaatcctcggctactcctccttctgcagcggagctgctgtggccaagcccactggtcaacccggttgccaaacggccgaggagctggaggtggcattctatgcccacttctacctgaagagctcctactgggtgtgctccacccagggcgttcccgccaccctcgcccagtgccccattgcctccgcctggttggactccgccaaggcctgtgttccctggccccagtgggtgtggtcgcccactgtccagccgcccagccaacccgaagttgctgcatag

SEQ ID NO: 34245 - protein, 103 aa, DROSOPHILA
MKFLPLFAFFLILGYSSFCSGAAVAKPTGQPGCQTAEELEVAFYAHFYLKSSYWVCSTQGVPATLAQCPIASAWLDSAKACVPWPQWVWSPTVQPPSQPEVAA

SEQ ID NO: 34246 - DNA, 2282 bp, DROSOPHILA
cctgcctctgttcgcctttttcctaatcctcggctactcctccttctgcagcggagctgctgtggccaagcccactggtcaacccggttgccaaacggccgaggagctggaggtggcattctatgcccacttctacctgaagagctcctactgggtgtgctccacccagggcgttcccgccaccctcgcccagtgccccattgcctccgcctggttggactccgccaaggcctgtgttccctggccccagtgggtgtggtcgcccactgtccagccgcccagccaacccgaagttgctgcatagaattggagatttgacataacaaaataaaacaaatatgcagtaatattaactattttcttttaatatttccttgtcatgcattcaaaaatcaaagaaatgaaggagaaatgaagtaagctagcaatctctagtaaaagtaaatatttagtaaatatctttgataaataacttagtaactgagcgcatgtgagataagcacaaagactttgcacaaataaatatttttgctgtaacgtcagggcacgattaatcagtcagataaataatggaaatttttcttaagcacttaattcacaaaaaaaaaataaagaaaatttataaactcttttagcttaatggttaactgtgtttttgcgggcattaaactaaagcacttaaaacaacgtaaacacatttgtcgccgcacttttctgtttgtttgttgacaataaatagtttattttaaaaaatatttgcgtatgctacgagtgcaaaaaaatcatacttacatcgcgaactttttaaatgcgcttttacaaggctgtaaaatattgttaaaaatacatttatttatgtacaactacgcagcttcaactatattgagttacacaactgttgggactaaattatttgggcccaaaggaaatgactttaatatatccgtgtttgatagccaaaattgaatgtccttaaattcgtgtcctctcactttcagccatgtccggtcgggactacaacggagagccaggctgtcgcagtgccgaggaactgggccagagctaccggcatttctgggatcccaccgcctactggcagtgcggcggaaaatcaatggaggaggagcgggagcgggatagggattgggaacgggaacgacccgcccagctgcagcgttgcccggccaacgagctgttctacgaccgggagcggcggtgcgtaaagtggaagcactggcagtggaccgaaccgcaggatccgcccacaaagccgcgcaaataaaacaggacgcgcgcgttcgcatgtattgaaacaaattgtcgaaaatataattaaaaagcgcttttcgatttttcccggttgagtgctggttaatttatgcgcgccctgctgctccaaggacatgggcgtggaggtggtgctggtgatagtgatggtggtggtgttggtggtggggccaggacataagccgctttcgggtggccgcctcccatgttgatgctggcggggatttgctgttgtttttcgatgccgccgaaacgccatacgtgcaacaattacgaaatgtacgtgcgtgtgtgtaagtgtggaatggaatggagtgtccttggtgcttcaacagtatggttgtgccccctgtttgtttgcccaatttggtaaattgacatgacggcaatttcccatggtcggcgagcactcgttgagctgcacggacttaacttcgcgcgctagttttaataatttttaattagctgcagcggaaatctctcaaatggacaaacaaaatgtgtagccagctttgcggcacattcgggtattatttccgccccgatcgccccaatgaattttccacagccgccgcctaatgtaattgcgaaatttgttttgtgccccaattaaattgggaatcaagcggcgctaaagcggccaacagcatttaattaattgtatttgaatttagagctcacatatacataagtgtgtgcgcggccattggcgttcgatcaatattaagcgattcgtgtgatccagattttcgtttttcctcctgttgcagctgcggcaaagcggtaatctttgtttttccgcttttgtttggctttcagctttgcgtgagtgtgtgcgcgctttttccttctcttattcgttcattttgttttttgtttgaagccccacaatttgatatacacaaatcgatttacttgcgcatgcaaataactttatttgcttagtgggtgtttggaagggggaaggggcaagcaacagcacaaaggactcgcac

SEQ ID NO: 34247 - DNA, 282 bp, DROSOPHILA
atgtccggtcgggactacaacggagagccaggctgtcgcagtgccgaggaactgggccagagctaccggcatttctgggatcccaccgcctactggcagtgcggcggaaaatcaatggaggaggagcgggagcgggatagggattgggaacgggaacgacccgcccagctgcagcgttgcccggccaacgagctgttctacgaccgggagcggcggtgcgtaaagtggaagcactggcagtggaccgaaccgcaggatccgcccacaaagccgcgcaaataa

SEQ ID NO: 34248 - protein, 93 aa, DROSOPHILA
MSGRDYNGEPGCRSAEELGQSYRHFWDPTAYWQCGGKSMEEERERDRDWERERPAQLQRCPANELFYDRERRCVKWKHWQWTEPQDPPTKPRK

SEQ ID NO: 34249 - DNA, 2528 bp, DROSOPHILA
caacgtgactcaacaacaaaaacggctaagaagtttttctttttcccttttttttttttgtttcagcaggttatgggctggcttcgtgtcctggccgcaaagtgacttctttccaggcagcgccagctgtgctcctccatttgggcgctctaagccaaatcaattagaacttttgacggcagctgggcctgcaactgaatactcatacaactgaagccattcgaaaatgctccattatctcggcagtggagcgtaattaaatttcgaactgatttctgcagtaataatttccaatttggcttcatttaaaaggcaattaatgtctctactctgctatcgcttagataagcgatgtgcatgtgtgtgtgtcagctcgttttcggtagtcgaaaatcgtaatggcactctgattcattcggcccagttagcaaagggaaattctgacaatcgaacaacgatgagagtaggaaatttttggccagctgctgattgaaatcttttgctctcgtgccattaatttccagaacttatcgaccggagagcacagaactttaaaccagtccgtcttatctaatcaacaaaatgctgccaaaagagagtgacgacgtcacttaagaccaaaataaaaatgcccgaaaaatccaatgcccggtgccccatgcccgatgaaaaatgactgtaaaaatagctgcgataaggtttgcagggaacatggaaagtcatgcaatgagcatgggtataaaagcgaaagacaatggcgatgacatcaatcagtcgactcgggtttttcagcaggaagcacacacataaatttattaacgaacccagcttatggccaaatgatgagaagcgagtgaaaaaatatctgaatttatcacccaactgcagttcgtaaaaaaaaaaaaaaaaacaaagaaaagaaaagtaaaatcagagcgaacgcgaactttgtgtgtcataataataaatgctccgttggctgttcgtgatgaaattatttatgaaaaataaatggagtaacttcccccggattctgctcctgatcctgatcctgaccatgctgcagctgctgcagcagggtgtggcagccaccaccgaccctgacacaaccacgaatgcaacatgcagacatgccacggacatgtggggagatccggaccccaacatattctacgtgtgctccgatggcggacaaccgctgcagctggagtgtccgcctggccggggatttttcagcggtctcggttatctgggctgtttgccctatgaccactggccagcctgccgcccctcggaggagcaggtggccgcccaattgtcagctggctgtgacaccactaccggcatcgtgccatcgccctgggcctcgccggatcccaaccgattctacctgtgtcccagcataaatgccacacctctgctgctcaactgcgccgccggtagtggattcgtgtccagttccgaggtggtgggctgtgcggactggtcacaatggcgccgccagatggagtgcgaggcgtactactgatccggcggatggttaaccatgtacaagctatatcaataatcacatcaaatggccgggttttgcctaccccaagctcgaatattcattaatttattgggtagtcatactgcgccatttcactcactagttttatctgtaaataaagtaaaaagtttcttactgatgtggatgtttttgttcaaaacactgataagcgtaacaagcgattgataatgaaattgatttaaaaaaaaaagaaattctggtatagttgtttgctgcaaatattttttagcaaagtttaatgcttttgatttataaataattgcgatatttagcacaaatctcatcaatatccaattgtatttagcatacagtatatttttggattgtattgtttcgtgtcattatatatttagagcacttcattgtttggatctacttatgggattagtgaattctaaataatacctcacacgctttgtgaactgcagttattgctcatttgagcatattaaatgacgatgtgctccagagtgcggcgcatggggcaaatccttttagttcccacacttccgcaaagccacgcattatcctttgccattactctcctttatgccgtcctctgtctgctggcaactgaaggtctgaaggcctgaagttccagaggtctggaggtcagcttcccgcctttgatgtgcctttttactttgccccacccataggtggggttatattttttacggtgcgccatggcagcagctgctctgatccgtgcgggcctggctctaaccgactctcaggcccgtttacaggtttaagcctttgtccttgccggcataaagcatggcccaggtaaacggcataagaataatgacacatgcagctgggcggcgcataaaaaagagcggaccgaactccaccgagctccccaacggaaattgcattttgctttgagcgcgtccagatgcaggaaattactgtcaactgttaacgcccggtgtaggatcacgaccccgtc

SEQ ID NO: 34250 - DNA, 528 bp, DROSOPHILA
atgaaaaataaatggagtaacttcccccggattctgctcctgatcctgatcctgaccatgctgcagctgctgcagcagggtgtggcagccaccaccgaccctgacacaaccacgaatgcaacatgcagacatgccacggacatgtggggagatccggaccccaacatattctacgtgtgctccgatggcggacaaccgctgcagctggagtgtccgcctggccggggatttttcagcggtctcggttatctgggctgtttgccctatgaccactggccagcctgccgcccctcggaggagcaggtggccgcccaattgtcagctggctgtgacaccactaccggcatcgtgccatcgccctgggcctcgccggatcccaaccgattctacctgtgtcccagcataaatgccacacctctgctgctcaactgcgccgccggtagtggattcgtgtccagttccgaggtggtgggctgtgcggactggtcacaatggcgccgccagatggagtgcgaggcgtactactga

SEQ ID NO: 34251 - protein, 175 aa, DROSOPHILA
MKNKWSNFPRILLLILILTMLQLLQQGVAATTDPDTTTNATCRHATDMWGDPDPNIFYVCSDGGQPLQLECPPGRGFFSGLGYLGCLPYDHWPACRPSEEQVAAQLSAGCDTTTGIVPSPWASPDPNRFYLCPSINATPLLLNCAAGSGFVSSSEVVGCADWSQWRRQMECEAYY

SEQ ID NO: 34252 - DNA, 4256 bp, DROSOPHILA
cattcgggttacggtactgctggctcctaaactcaattgccctaatcttagcctaccctcagttagccacatccctatatccctatccgttggactagcccaagcgctacaataccgtaaaaaatatgtttcctttgagtgttttttgtaattcgatttggtatgcactacagcactaagatcatgcattttaggtacaagcttcgtagcgactgctttgaaacgcctaaaaacgatagcctcaatcaattctggctacttgggatttgaatttctctgggttttttttgtttcttgttttttttttttttttttggtgcaggatggggctgtgccttctcccaagcatctgacaaggttgaaatcagtgggcgaagcaccacgcccttgacgcactgaccttgacagagcgcaaaaactttggtttctttgttctgagttgcagtcgcctcctatcccgaaacttatgttcaattagctatacaaaattctcctcggactacaaacaagtggccgatggccggactgaaagcattctaccccatttcccgtccgactgcaacttaattacaaaaatttctctttggcattgcggccacacaaaaaatagggagaaaatccacgcccgcttttctcggtcatctgcagttatttacatgtgaactatttaaattggccgaccaaggcgagcacaaatgctaaaaatgttctcttagtccattgttggttttttcttttgccctctttgagctgcactaatttagctgctcgatcgagctcatgctggggaaatagattaaaaatgcggtgtacaatttacaaaaaatccaacttgtttttttttccctgctgctgctttttctgctgcttttgtccttgatgggatggggatggtgatgatgtggttgcccttggttttgcattaacaataccttctgtgcgagtatgtcggtggtcttctcctctcctccgttcgcttgcattccccatttggtgccatctagtagctgaggggcagcaggacgagcagcatgagctgggctagcgaccacaagtgcgtcactaccgtaccatgtgccctccgtccggcggaggtctcgttgccatgtccgttgccattgcccagcgccgccattccgatgctcggcgaagccgtcgacgtagaggaggccaattgtcgctccacctcaactgcaaaaagttgatgaaaagacacgtacacttttaaaatgtgagacatataacagggaatacttaaataaaatacttaaagtatcaggtaaggttttttgtacataattattttattcactgtttatttgattagtatatactgtatatactgaatgtaaactttttagatcataccaagcaattaagaaaacagagtgtcactaaaataacatgaataaccctgacaatataagaggtcacagacaaagcaaaaaatcaatttggtaagcaaagtttgtgcccacaaaaatgaataattcagagcactgataagtctcgcaagttatctagccgaaatggtttaccgtcgaaaacgaggcacgaaaccgcagaaaaggtcgccatgttgatcgggccaaaaaacaaaactgaagaagtcttgagcgctaaaaacttttcgcataagcgaactgatggcagccccttagggcggcataagaaacaattacagagtgaagcattcttggctgcgaagtggcagtggcccaaacaaatgacgcacttcacgcaacataaataacacgcatacgccccttggtacaagtgacagttggcagccactcggccggcaaagaggtcgaaggacaagactgcgaagctgccgctggccaagtgcgatggggctgagaggggaaaacgaccaacgaccatcgtgagtcatggggcctggtaatgtgtaaattattttgtacaattcggggcaatttacaacttaaggcacaatgacttggctggctgggacgttagtgttaacaaccggctcgtaggcaaacaaagccgacaaaaatatataaattaacctttgtttggcctgctgttcagttaccaaagaggagtaaatggaaattaaacgtagacaaaacggcaaacatatgacgcccccctttttatgtgcgacatcagtttggcaaacgagcaaatccatgaacgaaatacctaatctgccagttgagagaaaggcaaagcaatggcttttgttttaaaattccttgttggattttgctttccgacagtcgggcaaataacaatgcccctgcacattatcatactaatttattttgcgaaaattcatcagtgattccatttcgtggcgccgaggacatttttgatgagctcactggtcgtaatttcaggcgagtgtgtttcgaaacaaatatttgcctggtgtagaattacggaatatcaaataaaaaagtaaatatatatgcacaggaaaacaggaatacaatgtagagtcagccgctttattcaaatcacgcatacgcaccgtgatcaggtgaaaatataaagtttaatcaatgtaagagctatctcttgtttataaatatataaaccttctaaccttctcactgtttataaagaaattagaaatttcataaaattaaaaattttaataaatttggtctccaacatctccaacactcacctttcactgagtaagtcttgtagtcggcgtactgctcaccctggcccacagtcgccggtatcgtggacaggcaggtgatctccatgcgactgttgctgcccacgtgctcctcggtgagctcgatgttcagctggctgatgctgaacatgcccttctcctgctgggcggcagtaactgcggccgctgcagccgccaccccgcttcctccgcctggatgcgaaagcggtcgctggtagcccgctgccagctggttcatgggtccagcgtttgatgggatgcccagctccttgttcatgttgggagcctgaggaccgaagccgccgctgttcagggtgctgcgaatgatgcccagggcgttctcgtttatgtggcgccgatacttgcggttgctgttcctgcaacataaagtgagagtgtgggtttaatgtgccgtgtgcctggcaatttgcacacaaataaaatcgtaaatatttgcattttatgattgatgtgtgcaaacgtgaaaagcaaaataaaagcccggccaagttagaggagctttcacatgccgggcacgcacatctgattcccatacaatgcctcatggatacaacccatatagctgtcttcattttcgccaagacccctgagtaattgatagccgtacaacaaacttcacaagtctgaatggcccctggattgcaaaagaggctcattcggtttccgagaaagaaaataccatgtcagagattattgggcatctgagtgcgggttttttttttttttttttgcctttctgctgattggtaaggctttctaatggcttgcctgcattcagaccagattagtttgcattattcagccgtatcgcacattgtgagtctaattagcttttacgactttgcttcatatttgataagaagcctgaacggcatacaaatgaacccggatctgcggataagcggttgtgtggctttgtggcttccagatcccttcccctgtaattactctggtgcttgttcgtttgttcgtgtacggggcgacatgttggtttattacaaattcaaaatgacagcgaaattacctttggtattgccaggatacaggcatatacttacacacacgctcgcagatccttgaagaactaatgtcgaggccataaactttaatgctgtctaaccaattgtccgcagtgctagtttatggccatcatttacatatgcaggatgtatcgaaattcgtatgacaaaatcgcctttaaattggagtgaaaagcgtttactttcgtcacatttaaacaattatacaatttgcatatctcttgtccttgctgccgactttcctgcttatgcaaattgcaaagtaaatgccatagaattttagcacaattatatttaaataatattcggcttaaagtgcactggctgcaaaactcagagtctgagaggagggctacgaatgccgcaggcactcgcactgataaagcaaggtgtcagcaaaaagttgcctttccatggagtgtttgcttctctttcaatcttttccgatgtgtatgtatatatgtatgttccaaaatatcctctgtgcaactagagcacttggcaacttagaagtaaaa

SEQ ID NO: 34253 - DNA, 639 bp, DROSOPHILA
atgggttgtatccatgaggcattgtatgggaatcagatgtgcgtgcccggcatgaacagcaaccgcaagtatcggcgccacataaacgagaacgccctgggcatcattcgcagcaccctgaacagcggcggcttcggtcctcaggctcccaacatgaacaaggagctgggcatcccatcaaacgctggacccatgaaccagctggcagcgggctaccagcgaccgctttcgcatccaggcggaggaagcggggtggcggctgcagcggccgcagttactgccgcccagcaggagaagggcatgttcagcatcagccagctgaacatcgagctcaccgaggagcacgtgggcagcaacagtcgcatggagatcacctgcctgtccacgataccggcgactgtgggccagggtgagcagtacgccgactacaagacttactcagtgaaagttgaggtggagcgacaattggcctcctctacgtcgacggcttcgccgagcatcggaatggcggcgctgggcaatggcaacggacatggcaacgagacctccgccggacggagggcacatggtacggtagtgacgcacttgtggtcgctagcccagctcatgctgctcgtcctgctgcccctcagctactag

SEQ ID NO: 34254 - protein, 212 aa, DROSOPHILA
MGCIHEALYGNQMCVPGMNSNRKYRRHINENALGIIRSTLNSGGFGPQAPNMNKELGIPSNAGPMNQLAAGYQRPLSHPGGGSGVAAAAAAVTAAQQEKGMFSISQLNIELTEEHVGSNSRMEITCLSTIPATVGQGEQYADYKTYSVKVEVERQLASSTSTASPSIGMAALGNGNGHGNETSAGRRAHGTVVTHLWSLAQLMLLVLLPLSY

SEQ ID NO: 34255 - DNA, 4256 bp, DROSOPHILA
gtaatttgtcaacccactcggccaatcgaattggaagggttgggctgagtgctcaggtgctagttgctaggtggttgctagtacaatagctgccaggctgacgggtcatggatatggctcctgagtgctctgcattcaacttgtttgcaggaccatttctatttcaagcggcttaaaccccagccctcgagtttcgacccctaacctccaatccaccaatccatgaccccccaagacgtggcacgtggcgtatgtgcaatgccgacatcaaagaacagctacttcgtggaagcaccaggcgactcgtggctttcattaagctgacacctcgccctacgcccacgcccaccccaatccgctcttggccagctcccctactcctgcccctgctcctgctcctggcccaccgcacccggatcatatacagtatgctacctcgtccttacactcctccaaaagttaaggggccaaaagttgttatattggaaaagtttcttcccttgatttttaatatcacaggtgaacgtaaataatttattgcattcatttacgtttcacatccaatcgcgccacgtaaagatttcgaaaatccagccaagtaaggggtaccaaccacaaggagccacaaaatgtatttatgcgttatacaacaaaaggcacaagacgccgggcaaggcaaccaactctaacaatgtgccaacagcagttggctttagccgggcaaaatccttttagaccatagataaggaaactttaataaacacgccacacacgcaacctgggaaattgataagaatatgaaaagtttgcggtgctggcggtgcgaaaacttttcatgccctttggttacctatgtacatagtacatctaagctgccttctaaaagttgcagctttttaatttgtatagcccataaatacagttcagggtccatccaagtctatccaggtaacggtcgaggtcgacatgattaatgtccttgcattcctgcccccgccactcacctgtgcttcttcatctccatctgctgctgcttcttcagctccatgttcttcttgttgctgtcgtagttgcgctgatgcacctcgtggaactcgcccacgtcatggtagttggccagcgatccaaacggattgttgtacaggctaccgtggtgaccgtgcccctcatggtggtgcgacaaaaagtgcgggaactcatctgcaatgccgaggaatagattggcaaaagaggcacaggtcagcaatcaaactaattaacgtaaacgctgcagaccctcgtttggagctcaaacagcacagaaatgccgcattagccagtggtgattcacagcttattgtcttgccaattgcagatacacggagagaatagtttatttttgttttttaggcataaaaaatgagccagattatctaacaattacttgaactactagtgttcaaacatttcttgcaattaatatcaaaataattactgcatttgatactgatatcttataatttgctgtcccgtttcctgacttttttctggcagtctactgttctccgtggacaatggctactcacccgctcgtgctcctgctggccatcgtaggcttttgtcgtagcgatccatgaattggccaacggggatgtgatactgctgatggtactggttgaagtactgctgctggaaatactgctgctgcagctgctgctgactcagctgcgtctgctgctgctgctgcgtgcgacgctggtgctggtgcttcccattgaaggagaacacgtggtgggtgcgcacgtacctgtcctccacctgtcgatacacaaaggagcccgaaagggcgatgagtcagtgggcgagtgaattgtatggatggacagcacatgacgcggccagctcaacaataacaattacatttggctgcgcacagaagtcacttgaatgtcaaatcccattgcccattccagtggcacatctggacacgagcgtccggcttaaattaaatatggatcaggccccgaagggctagtcccacatctgctcatctgctggccacacagtgctgcagttgttgccatttcccatagccagcggcgcgcgtttatgaataaatttcattttagagttgcccgggcagccataatgaatttatataaatttcatttcctctcgccgccaacagcagctggccaacgggcatgtgcaattaaaatgaaagctgtcctggccgcccatgtaggccataattataaaatggcttaaactgatgttaatcttaatgcactgcatgccacatccacatccaaattcacatcccctggcagtcgtttgccactgattaacctcccgcccggcggcatttttcgcacatagctgccttgccgtaaataatccattgcaattggactctgattacgccaaacaattgaattgcgcaatcgtcgaattggctgcttcaaatatcacgcatacgcacctttttcccattgattagccacgtgatgtgcggcgcaggccggccgcgggtggtgttgcacagggcgaaaagtttctcgcccaccgcgaagggcgttcgcttgcgaaacttaatggtgggcggacccgtctggggcactgcaagtgtacaagtgtggggaatggtataccataattagaggaactgttcgccgctggtggttggataaagtaaattgttacgcacagaacacgctcatcagctcatcggcgctggccttggtaaaaatgggggtgtccgtggagacctcgcagtagaattggccggatagatcgaactggacatccttcagtgtcacctgctgctcgttggaattgtcccactgttaattgaagggggcgtggaatggacaaattagaaaagtgcagggacacaaaaagcacattaacaaatcaattgatcagcaggacatctcgcatgtgcagcaagtgccttccaattagcttcaatttacggacttatttaaacatgtcaaattgtagaatgattaccaaaatcgcgaagtgacagcggtaatgacgattaagtaaatagttggccgaaacactggcatcatttggtacttacgtcgatttcggctccctcgatggttgagttacggaatggcggatttcgtccgtttatgaattcaaagaacttgcccttgtcaaccttcagccatgtaacctgcaaaacaaagaacatttaccaatattaaaagaaagcaagccatgattacccggccgcccccacaatcagattcggtttccgattcattcgattcatttgccgaattgctgcttctgacagtgattgaatgcgtcggctttgatggctgtcctcggcccaaggatcacttaatactgtagtgggacattaatatatggcttaaatggtgttgcacaatttcgaacgttacgcaatccgaccaaaaaacgcctcaattccctgccaactgcagaggattttaacttggcaacaagttgcgctaactgaataatttcgacggcgagttgttgttagcgcgttaaaccgtaaactgtaaataataaaacgtttttatcggaatggcaatggcactgccattccacagaataagtggggtgttggcgcatgtcaccccatgcaattaaaaacaaaatctacaagcgaaacttgcactgggacacaaaaagttgtttcctgcttttcgtggggcgcggggcgtggtacgtgggggcttacgacaacgacaaatatgaataatgaaaatggaaattaattttcatgcgcaagttttccacattcaacttaaaactagccgcgctgacaacgcttttctggccggatatgcggctcttgtcgaccatttttaattacgcccagcatttatttattatgcatattttttaacgcccgcatttatgtgcttactttaatcacatttcagcggggaatttcagcggcggattaaagttgaaaagtaatttatttttcttgtggcaacagtactttgtctctaataactgccgatgtccaattactctttaaaaacgaggcatttgcatataaagtaagataatataattaatatagtataaaaaccatattaaatgggaaatttggtcactgcaccctgttgacctacaccagctcaggtgactctagacgtctggtgatggaccgattgacacgcgtgggataaattgcattgattgcacgcaacttaataatattaatgtgcttattgaatgtgtccgcggcaggcaaggcgtatgcgtaatttgtgccccgaatg

SEQ ID NO: 34256 - DNA, 828 bp, DROSOPHILA
atgaatcggaaaccgaatctgattgttacatggctgaaggttgacaagggcaagttctttgaattcataaacggacgaaatccgccattccgtaactcaaccatcgagggagccgaaatcgactgggacaattccaacgagcagcaggtgacactgaaggatgtccagttcgatctatccggccaattctactgcgaggtctccacggacacccccatttttaccaaggccagcgccgatgagctgatgagcgtgttcttgccccagacgggtccgcccaccattaagtttcgcaagcgaacgcccttcgcggtgggcgagaaacttttcgccctgtgcaacaccacccgcggccggcctgcgccgcacatcacgtggctaatcaatgggaaaaaggtggaggacaggtacgtgcgcacccaccacgtgttctccttcaatgggaagcaccagcaccagcgtcgcacgcagcagcagcagcagacgcagctgagtcagcagcagctgcagcagcagtatttccagcagcagtacttcaaccagtaccatcagcagtatcacatccccgttggccaattcatggatcgctacgacaaaagcctacgatggccagcaggagcacgagcggatgagttcccgcactttttgtcgcaccaccatgaggggcacggtcaccacggtagcctgtacaacaatccgtttggatcgctggccaactaccatgacgtgggcgagttccacgaggtgcatcagcgcaactacgacagcaacaagaagaacatggagctgaagaagcagcagcagatggagatgaagaagcacaggtga

SEQ ID NO: 34257 - protein, 275 aa, DROSOPHILA
MNRKPNLIVTWLKVDKGKFFEFINGRNPPFRNSTIEGAEIDWDNSNEQQVTLKDVQFDLSGQFYCEVSTDTPIFTKASADELMSVFLPQTGPPTIKFRKRTPFAVGEKLFALCNTTRGRPAPHITWLINGKKVEDRYVRTHHVFSFNGKHQHQRRTQQQQQTQLSQQQLQQQYFQQQYFNQYHQQYHIPVGQFMDRYDKSLRWPAGARADEFPHFLSHHHEGHGHHGSLYNNPFGSLANYHDVGEFHEVHQRNYDSNKKNMELKKQQQMEMKKHR

SEQ ID NO: 34258 - DNA, 2890 bp, DROSOPHILA
cttctatttttgtgtgcttttatatcgcgttccttggaaattacgccaccgcatacatagctaatgccaggacccacggcaattgttattgaatccgtctaaataaacggagaaggaaacccgagaatgtgtaagaagatctcttcccccatgggagtgtgcgagctggaaagcagacccggagaacaggaaatttcttggctataaatagagcaggcagagggtatttaaaattcaagtctagccccctctgtatttttacctataccacctgccactcgccgccaaatggcgccctaattacccttaacgacggaacatattttatattttatcaatccttgaccacggtgcccatgggcatgggaaactgtaaattgttttcaatactcgaaattattattatattattaaattattcatgagtgtgggctctggttgccatctgcccgagggcacttaaaatatgaaatatgacagaaacatgcgagataggaatcagagtctcgttgtcgtcctcgcaaaggaaagcagggcaaggaaaagtaaggcacatgacaggatccctctggcctccagtcataatgctcagcggacggatggcgggaagagggagctcttgagtggccaggaagtggatgggagggaaacagctggttcctgccccttgctgcatattgtatttgcacgataatcgcctttaaggtttcatgttaaagctgtcactgctcttggttagaagtctgtcaatgacatttccgtttacatcccttctctttcaatttagcagtgcgaaaagggcaaactttagtggatcacaagtgttcagttcgttaagctgttaatatgtttccacatactgaaacctcttctcgttccgaatggcggttctagtaatatttaaaagtctgtgggcgcttattttcgttgttatactttgtatttctagatgcataaaactaactcttaaataagtataatcaataatatagatatcaaactacttgttgcgcagcaatgccgctggcaaatactttgtgagaggagttactgcctgaacctgattttgggcctcattctgctcctggacgcttatggccgctggtgctgagctaaagtccaaaacgggggcgacaccctcgtccgagctgcgggagctgccgcccaaggagtcgaactgctgctgaatgagctgctgggcacgcaccgcatcctccggggtgcggtacttgacgaagtgcacctccggcttggggctttgggcctgattctcattggccaggcgctgcgccaactgactcacatccgcctgcttgctgagcacatagatggccgtccgctgctcgctggcctgtttggccaactggagggctgcgttggtgagaccttggtgttccggcgacttgatgaacagcacgcggagattgcgtttcagcatgctggcgatgtgctcggtagcctcctgatccgcaaactcctcctccggtgcagcgtaggtgtagaactccttgctgaactcatccgcagcagctggaatctgttgttgcgtgttctgctgcacaagctcctgttgcgcttgttgctgctgctgctgctgcgtagatgtggagctgaatcctgtggcctccgcatcgatgagtcccgcaaaacgacggtcgccagcagcagcttggtaattgtagcccaattttgctgccgaaacggaagcaatgagtaagagtaactggaatttagaaaattattttgtttagaaagtagttacatgatacatggatatacactcttaattgatatacggatttgaaaactttgttaattaagttcactttagtttgtgtttcacttatgttcttgtctttgattttaatttctcaccagaaatcctcgcatcttgagccgatatatatttgatgtctagtgcaaaggatctgtttaccactcttttagtttgctaactgacgtttgttgtttgcattccgatgatatttatacaagcccgcgaaatgggaaattggaaatatgacaaatgatgggcctgcaatgtgccagcgttttttgatttgacttggctatcgggatcgggatcgcatcggtttccgtttcatcttcggttgctgcaaccatcgaacttcgcacattggcaacagttaatcagagataaatgagcttttaagcgttgacacaaaaccccggctcaagttacgggttacgggaattggggataccgctcggaaccagtttgtttttttttatcttttcaccaaaccatgcaacctttgggcgttgcttgtcttacataaatctgcggaactactcgtgtttgggcggacgaacatcaaagccgcatacttccacaaaaactatgcaaaatatgcataattaattaattagccgagcgattgcgatttgcatcttttgcggcaggttatgaacccggttcaaagctcgctttcaaccacatcgtagagtcgagtccatcaatatcgtcagtcatcgcttgagtatcgacggcaattgtggtttttgctgcacgtcaaggagtgtttcagtggacttaaccaatattggaatatccccctagccggccaagaaatatccgtccgtaatcttcacacattgctgctgtttatccgagcattgggtttcctggtttctagccaacaacaaatgccttcaattaggcataaatgaaacagcaagacacagacgcagacattgcataaacaatatttaacaataaatagacacatgcacacactcagattcaaatgcgaaacggctcacttccttcgacgtagcacattttgggccagttaattgttctgattgtttcacataaatctccagagtgtttatctgtgggtggttgggtgtttggttttctgtgtgt

SEQ ID NO: 34259 - DNA, 738 bp, DROSOPHILA
atgcgaggatttctgttactcttactcattgcttccgtttcggcagcaaaattgggctacaattaccaagctgctgctggcgaccgtcgttttgcgggactcatcgatgcggaggccacaggattcagctccacatctacgcagcagcagcagcagcaacaagcgcaacaggagcttgtgcagcagaacacgcaacaacagattccagctgctgcggatgagttcagcaaggagttctacacctacgctgcaccggaggaggagtttgcggatcaggaggctaccgagcacatcgccagcatgctgaaacgcaatctccgcgtgctgttcatcaagtcgccggaacaccaaggtctcaccaacgcagccctccagttggccaaacaggccagcgagcagcggacggccatctatgtgctcagcaagcaggcggatgtgagtcagttggcgcagcgcctggccaatgagaatcaggcccaaagccccaagccggaggtgcacttcgtcaagtaccgcaccccggaggatgcggtgcgtgcccagcagctcattcagcagcagttcgactccttgggcggcagctcccgcagctcggacgagggtgtcgcccccgttttggactttagctcagcaccagcggccataagcgtccaggagcagaatgaggcccaaaatcaggttcaggcagtaactcctctcacaaagtatttgccagcggcattgctgcgcaacaagtag

SEQ ID NO: 34260 - protein, 245 aa, DROSOPHILA
MRGFLLLLLIASVSAAKLGYNYQAAAGDRRFAGLIDAEATGFSSTSTQQQQQQQAQQELVQQNTQQQIPAAADEFSKEFYTYAAPEEEFADQEATEHIASMLKRNLRVLFIKSPEHQGLTNAALQLAKQASEQRTAIYVLSKQADVSQLAQRLANENQAQSPKPEVHFVKYRTPEDAVRAQQLIQQQFDSLGGSSRSSDEGVAPVLDFSSAPAAISVQEQNEAQNQVQAVTPLTKYLPAALLRNK

SEQ ID NO: 34261 - DNA, 2555 bp, DROSOPHILA
cattcccgaattggaggaagtattcacgaaggcattcctcatcgtggttatccttaagaccgcctacgaacagcttcttcacggatatattggtctcgcgcgattcgcgttcgggacggggcagagcacgcttggcttccacagttctggaagcgaaaggcctcatggtatagatctattcttggtacgatatgatcccccaccaagtctatactcacttgccgtcgatgatgtgcggacggttctcctgggccctgtcgaccatgagagactttgtgtaggtgatgaagccgaagccgcgagatctcttggtggcagcatcgcgcatcaccacaacatcgaccaccttgccccactggccgtagaacaacttcaggttctcctcggtggtgtacggggccagcccgccgatgaagagcttacgcaagtgctccagctcgcatatgtcctaccggtgcagaggtggtaagtgggttagccaagtgggttggcatgtggtgaagggtggtatgtgtgaagggaaacaaatataggtgcgtcacttgccaagccgcatacatgcacagaaaggtacgcgtatgtacttacatcttcctcgcgatctgcaagcacaatcacatcggcggactcgtccgataggggctcatccttcaccattgtgttagcaaattaattatcactaaatttaaccgaaattaagaaacgaaaacgaccagtttgcacgtcgaacggttgaagcgaagtgaaaattgtgctgtcaggaagcgaatcattgattcgatacacccactctctctgtttgttatcgataagttggttaggggtattcttgaaatttctaaagtgccaagtttctttactatcgtaataataaatacatacacgaattggatatgcgatagctgtcaaattgtaatatagtttttcagaagcaaagcgaaaaccgccaacgtatactagcccctttatgcattcaattgagtattcaacttaagttctaatgtcggattcgccccatgaggagcaccgcttgtgcggtctggggaatcacacgctgaggtccccgtaccgcgtaatcagaaatccgcacctgctgaagtttggccagctgataaactcggagctgcggtctcagccactgtgcctctcgtgctacacgcaactgatccagctctaccggctgaagaacaacaatgcgaagagacacctggcaaatagacaggcagccagtgctattctctcgaggagcagtagtgagaaatctcatgagtccgcggctagtgtgtccacaacacaatcctcggaggagcaagaatcaaccactagcgcagcgccggcggcggcggctcaaagagcaggaagccagttggttgagtccaattcttccgacgatacacttttctccgatgactacgatcccagctcgaatctgagtttgaatgccgtgaatggaacgcggctaccgaatgtccaaccaattccgaaaaggcgccagtttgtgcatctaaatcgtgaagctatggccatttatctggcgggaactactgggggataatgtttgtttcatttaggatattttcataaattaaatttgaaataacactgttaccatctatgtaaccatctatcgatagtttccgccatgttattagcagcagaaacagctggctgagcaccagggctgcattattgtttgttagttttgctgtttggtttttaacaaatttcctggttttccctcaaaaaccctctcttatataaataaatcaagtgcaaaatgctgagtccataacaacacacgtaagtttgttggcaagcagtgagtgatttcttcgaaaagtgcaattcctgcaatctgttatgttttcacaatgacttttattcgatcttaatctaaacagtttaaagctcaaataaatgtaatcaattagcaagtattagcaaatgttaataggcgttgttgtttctcgacgtcgctgctgctgctgctgttgttgttgtttttgttgttgctggcgctggaactggtcatcgatgtcgatgaaattggcatcctgcgtgttatccttgggcagcgctgccggcgtcgctgccgcggcatagtagtttaggcccacgcccaccgccacgcccccagtgacgcctccggggggcatggtcgtggcagcctgacccattatagagctcataaaaccattggccacgacaaagtttctgaaaaattgattacatcaatgtacaaaataatttcgagcaaccccctccggcccaaaaaaaaaaaaaaaaaaaaaaaaaaaatatggaaaaaaatgatatcgtctaattgggtctgtgtgcgcataaatgtcgtaaaattaatttcgtgttaatttcatgttggccatcaattaaactagtgacatttcactaaattacttccgtttcgaaaatgcaggtataaatacccagttaaaatcctcttcacgagctattcatcaaccattaatttatgttcatttaatattatttaactcaatcaaaatcgatgatatctttgtacatatgaaacagaaaaa

SEQ ID NO: 34262 - DNA, 555 bp, DROSOPHILA
atgtcggattcgccccatgaggagcaccgcttgtgcggtctggggaatcacacgctgaggtccccgtaccgcgtaatcagaaatccgcacctgctgaagtttggccagctgataaactcggagctgcggtctcagccactgtgcctctcgtgctacacgcaactgatccagctctaccggctgaagaacaacaatgcgaagagacacctggcaaatagacaggcagccagtgctattctctcgaggagcagtagtgagaaatctcatgagtccgcggctagtgtgtccacaacacaatcctcggaggagcaagaatcaaccactagcgcagcgccggcggcggcggctcaaagagcaggaagccagttggttgagtccaattcttccgacgatacacttttctccgatgactacgatcccagctcgaatctgagtttgaatgccgtgaatggaacgcggctaccgaatgtccaaccaattccgaaaaggcgccagtttgtgcatctaaatcgtgaagctatggccatttatctggcgggaactactgggggataa

SEQ ID NO: 34263 - protein, 184 aa, DROSOPHILA
MSDSPHEEHRLCGLGNHTLRSPYRVIRNPHLLKFGQLINSELRSQPLCLSCYTQLIQLYRLKNNNAKRHLANRQAASAILSRSSSEKSHESAASVSTTQSSEEQESTTSAAPAAAAQRAGSQLVESNSSDDTLFSDDYDPSSNLSLNAVNGTRLPNVQPIPKRRQFVHLNREAMAIYLAGTTGG

SEQ ID NO: 34264 - DNA, 3462 bp, DROSOPHILA
tcgcttcttttgctttgcggcattgctctgcaacgttcctactaaaaaatagaaagcaatcggaaaatgcatagttcgaataactcccattcatcacttcaggcaacagtttaagtccacaacacaatatctgccacgaaatatctaaagtttaaaacctgtattatctatatctatatctatacttatgattgtcaagtactttgtgttgttcgcacacctttagatcctaagtgaatcaatctagcactaagtgaaccaaaaatctattttgtagtcgatccaatcaagggacttaatggtcctggaaggaaactgagcatgggaagataatgaaactgagtgtccttagtacatggtttaaattgtttgctaaagcaagagtagtacacaacacacaacacacaagtaatatatttattcatgtacgcgtgtaactattatgtattttgtaaagcccaacacaaaaatacttgtattgctgctgcacaaccatgtaaataagttttaaagcttacactaaacacttaaataaactatgtatttacgtaattttattcaaaactcttctttaattactgcttataaactttgatttattttgggagttttgaatttggcggttaagaagaaattaaatcaactgcttatgcggccctgaaattcagtattttcaacagaatggtcacactttataaatatatgaataaattgcacttgatggcaaccctaaacattggttttcaagaattttctgggtttcataaaacggtcttactatcaactaaatttttgtaaacaaatattaacacagcttgtatatttgaaaaagtaagtatataacgaaattagcaacaaaataagacaaattaggttacctaataaatagcagacctcatctttgacttttgtggtatcaatcagtcgaatactttggtgttttcctgacacccgagatactaggctttgttttgaaatccctagttcaaactcaaactttatgcaatttcatctagtgagcagaaggaaatgggacgcttccgaagaggacagattcatcgacatctggatccacaacttgcatctgtttgagcctggcaagaaactgacagaaacctatgcggaactggagccctattttcgagatgttggcgtagagatcaatgttcaaggcataaagtcgaaaatggaatccctgaagcggaagtatttcaagtcagtacacaactttcagatgaagaatcggtttgataatctctgggatttcagtttgttacactccgaccaggaagaccaagctatcacctggaggcacttcgatgcgatggctttggtggtgagagcatctgccaacgaggggaaggattcggaatggaaggactatacgcagccatcaaagacgcctcgtaagagtccattgaattccaacaaggaaaatgtatctaatcaaagacttcgaaatttcagataaaacgcgctcttctgtttatatgaacaatcccgcacaacgtatcaaatatggttcgaaattcataaaagtttaaattgtatacattctaagcggttttcatttctttatagagacaccattcaaaaccgtcttcgtggatgaaagtgctgtgaactattttgacgatgaggaaatgcccaacgccaaaagagttaggaaaagattcggcaaaaccagcaatgtcagagtaaaggcgcgaagagtttggcagccggcggaggaatgcatattcgttgatgtgtgggaaaagttcgccagtcacatacagagtgataggaaaaaaatggatgtctacaaggatatgcataatgaactgcagctgcgtggtgttggcatattaccgggcgatatcaaatccaaaattgaatcacttatgcgcacgtttaggtaagaactttataagcttattatgctgttataatacattaccaataattgcagagcacagcgagattcggtgggagataagtccgagtggattcattattcgaagattttaaagatccagactcctattgatttcaccaagctggatgtattttccgagcacagtagcagctacgaagacgatgcgtcctggttcaaagaattggagccgaaaccggatcccgatcctatcagccatccaccgagctctagcgattccgttgtcaatcagtttgacaataaaactcagccgagctctcccgcgtgcagtgaagactgtttttggtctgatactgaacctagccactgcaaggtgtctattgaagtgttggaccaagatgaatcgacaaagccgttcgaatctccctccattgaaaagcataaggctgctgaagaatttagtcaatttgtaacaaaagagctagccgtcttgaatgatgatttgctaatcgaagcaaaacgccaaatatacaatatcatatgtgtcttgcagaagaaacagaatgaagtaaataaaaaagcatagtgaccaattaaacgtatcttttttcgtacttgaaattaaaaaaaaaatcaaaggttctaccgagatttgaactcggatcgctggattcaaagtccagagtgctaaccattacaccatagaaccgcgttggcagcctggcgcaaaacaaaacatttactgccgccagataacacgaaacaattatcctattttggacactaaaattttaaataaacatttatccgtgatatttatttttaaagaaaagtttctaagcatcaaatctttatatgaaaaaaaaaaataaaaattaattcgagcaggttctaccgagatttgaactcggatcgctggattcaaagtccagagtgctaaccattacaccatagaaccttgatacgagccacgctgctaaatgacacttttgtgctgcgggcacacttatctttggttctttggtgtgtcaagaagggggttgaagataaggaaacgatagttgattcaaaatagagtgttttaatttggttcaatacgttcagttaagtatttagaacatttttaaaacaagctaaaccttaaacttacattggcattttaagggtatcgaatgagcacagatgtttgttgccaagcaagccggtaaaagtttgtttgatcgatatacacaatattgaattaaaacatcgagctgctcctttatttatttgatattgtaaagccgaaaaatggaaaaggaaaaaaagaaatctcttttggaaagatacaacataccaattcactatttggacttcgcccacgtggaaaagtgcacaaatgctcgcgaaatggagaaaatcgtccaaatcctgcgctccggcgaggaaggacattatccggacttgcaacgctgtgcggaggaaaaactgaaggcactgaaaccggatagcaagctatttcgctatgaggaacagataaagcaaagcactgacctggacaaaaccgaactaaagcccattctggtaggttgtctacttcatttcaa

SEQ ID NO: 34265 - DNA, 1233 bp, DROSOPHILA
atgcaatttcatctagtgagcagaaggaaatgggacgcttccgaagaggacagattcatcgacatctggatccacaacttgcatctgtttgagcctggcaagaaactgacagaaacctatgcggaactggagccctattttcgagatgttggcgtagagatcaatgttcaaggcataaagtcgaaaatggaatccctgaagcggaagtatttcaagtcagtacacaactttcagatgaagaatcggtttgataatctctgggatttcagtttgttacactccgaccaggaagaccaagctatcacctggaggcacttcgatgcgatggctttggtggtgagagcatctgccaacgaggggaaggattcggaatggaaggactatacgcagccatcaaagacgcctcagacaccattcaaaaccgtcttcgtggatgaaagtgctgtgaactattttgacgatgaggaaatgcccaacgccaaaagagttaggaaaagattcggcaaaaccagcaatgtcagagtaaaggcgcgaagagtttggcagccggcggaggaatgcatattcgttgatgtgtgggaaaagttcgccagtcacatacagagtgataggaaaaaaatggatgtctacaaggatatgcataatgaactgcagctgcgtggtgttggcatattaccgggcgatatcaaatccaaaattgaatcacttatgcgcacgtttagagcacagcgagattcggtgggagataagtccgagtggattcattattcgaagattttaaagatccagactcctattgatttcaccaagctggatgtattttccgagcacagtagcagctacgaagacgatgcgtcctggttcaaagaattggagccgaaaccggatcccgatcctatcagccatccaccgagctctagcgattccgttgtcaatcagtttgacaataaaactcagccgagctctcccgcgtgcagtgaagactgtttttggtctgatactgaacctagccactgcaaggtgtctattgaagtgttggaccaagatgaatcgacaaagccgttcgaatctccctccattgaaaagcataaggctgctgaagaatttagtcaatttgtaacaaaagagctagccgtcttgaatgatgatttgctaatcgaagcaaaacgccaaatatacaatatcatatgtgtcttgcagaagaaacagaatgaagtaaataaaaaagcatag

SEQ ID NO: 34266 - protein, 410 aa, DROSOPHILA
MQFHLVSRRKWDASEEDRFIDIWIHNLHLFEPGKKLTETYAELEPYFRDVGVEINVQGIKSKMESLKRKYFKSVHNFQMKNRFDNLWDFSLLHSDQEDQAITWRHFDAMALVVRASANEGKDSEWKDYTQPSKTPQTPFKTVFVDESAVNYFDDEEMPNAKRVRKRFGKTSNVRVKARRVWQPAEECIFVDVWEKFASHIQSDRKKMDVYKDMHNELQLRGVGILPGDIKSKIESLMRTFRAQRDSVGDKSEWIHYSKILKIQTPIDFTKLDVFSEHSSSYEDDASWFKELEPKPDPDPISHPPSSSDSVVNQFDNKTQPSSPACSEDCFWSDTEPSHCKVSIEVLDQDESTKPFESPSIEKHKAAEEFSQFVTKELAVLNDDLLIEAKRQIYNIICVLQKKQNEVNKKA

SEQ ID NO: 34267 - DNA, 3278 bp, DROSOPHILA
cgcttcgtatctatatgtgtataaatgagtcggtggccggccgaaaagcagaaaaacattccgcttaatgcgttcaaagcacttggggcatgaaatctgcggcagcagctcatgatctattctctatatagatgggcgaacttgtaaaatacagctgtccattatgaaccataaaatggaatggtaacataacattttccccttttttgacaggttccgccatgggacttttattatgcacaccgagcatagtcgtatatttatccacgaatctgtttgttgactctgccagcgaattgttttctctttatttcgaacaatatgcgggaatatttgcatcaattgaaatgaattttattgggaggcagtcacggtatcgacgtcatctgaaaatgtttcgtaccgactcgttaaccgagctctacaacatttgccatgatatcataccgccgatagaaactcacacaaaagcgttaatatacgaagaccagttcacagttagcggattcttacacaaaacaaacaaagtcaggccgaacataactagaaagccataaattatcgaatgtctaaccttcaatcactggtgttttccattctcataattccgaaatccattgttcgcaacagtgcgtatacttgatccacggctcctggcggagccataaatagttgattttccaaatgcagccatgtctatttgcgatccattaatttcaaattcaaatttgtcagcggtccgtttgatagaacaacatgtttgcaatgctaaagcgtgctagaggttaaaagtatgatttcattgtctaatttttacgtctgtgtgccatattcaaaatgcaaaatctaaattcaataagagaataaaatggaaccaaagaaaattcagactttgaatttttgtccagctgtccatgtatttaaaaattttaaatttttaaattactaatgttattataaacttttttttgttttttattcagatatagtaatatgtctcatggtcatgatagcagtattctccatactatggaacataacgctgatcatgatatcgggtgatctgtacgagggaatagtcagtgccaaacttatcttccgggagcgcagcgttgataaaatggatgagtccagcaaggagatccttcatcgggatttcatcaaagccacccagtatgcctatggaaggcagtactccgtgcaggatgtcacacctgaatcgctgaagagcgagagccgtaagatagcctaagaatgtacttgtactttataatcaaattaaacacttcttaatagaaatctttaagttaccgcatatctacgaatctatcgagaatcgaccgaaattggagcgtctcattgctgaaaataaagtggaggttatttctaccacgacgactcctccaccgaagatcactttcaatgctgaggcggatcgccactttttgagcacaagtaagagtaaagcagcaaattttatttaatttgttaataatatatattcttttatcacagtgtccatcgatgttatggccactgtctgggaaagaggaccaggagctcagtttgtctacgtatttcccctcatatcagagatcgtggccattatctggacagccatgtgtttgatttaccagacaggcagcaaaaagagctcgtgagtaaataggtttaatcaggtaacttatgctcataatcatttaataaccgaataatatttttcagagttttgccgaagccgtggcgcattgtggtgccctccatcgttatcttctcggtgatgagtttgtgcagtgtaatctacacaatcctgaccaatggccaccttaagcacctctgtggccaactgagggagaatctcacagatcccactgccatcacctgcggcgatgccatcgccctgttgcgtcccatcattcacgaccacaacgtatcccatgatacttatctggagctcttccgcttcagctacttgatcggaatggtactgtggatagtggctctgctggtcatggtgctgcgttatgtattcgccgtggacttccagctggtggacattgatgatatgttcgatagcggacgaaatggctctgcacaagttcagattcaaccggtatacactgaggtagtgcagcagagcagtccacagcaccagacgcagatgcgtccgagatcggaagatgactatcagagtgccaggtcgcacttgagcgatcttgcagttccacttctggaggtgcaaagccagtcccagattccgccaactagcttggcctaatcctgcgggtagccaacagatcagcaatctcaggtttatttttatacgttgtgttagtgtttagtatatctaacgactaaggaatattttatcaactaacacaatttaggttaagttttaggggaccctctagtcgagagtcttcgatcaatcgatatttcattgatagttttcactatcctagcttagtgaactcgtgcctcgatatcaaatatctaaaatgtggtttaatcaaggctatagaaaatactacaataccattattgttgcatactcttgggcttataagttcaatctgagcttgaaatatgcctggttaggccacattgtccagtcgattcctttgactataacctctggtaacttaaatccatgagttttatttaaaatgcaacataaaaccgaaaacaagtgcgaataaaatacaaatattgtgtatacgagacaggaaacacttcaagttccagcttaaagaagtttcatggtgatggtcttggtttccagatagttatccaggccatccttgcccaattccctgccaatgccagagtgcttgtatccaccgaacggggtggagggcagcacggcatcatagcagttgatccacacggagccggcatccacattgttggcgaatttcagtgccttgttgatgtcattggtaataacgccggcggccaggccatattgcacattgttggcccgatcgatcatctcctccagggagctgaacttgaagatcgactgaacggggccaaagatctcctcctgggcaatccgcatatcatccttcacgtccgagaagacagtgggctcaacgaagaaaccgacattgccgatcctcttgccaccagcctgcaacttggcaccctccttcttgccactctcgatgtagcccaacaccttggtcagcatgtcatcgtcgatctggggaccctgctgcacattctgctcgaaaggattgcccaccttgcgggcctttgccttggcagctgccttg

SEQ ID NO: 34268 - DNA, 1092 bp, DROSOPHILA
atggtcatgatagcagtattctccatactatggaacataacgctgatcatgatatcgggtgatctgtacgagggaatagtcagtgccaaacttatcttccgggagcgcagcgttgataaaatggatgagtccagcaaggagatccttcatcgggatttcatcaaagccacccagtatgcctatggaaggcagtactccgtgcaggatgtcacacctgaatcgctgaagagcgagagccaaatctttaagttaccgcatatctacgaatctatcgagaatcgaccgaaattggagcgtctcattgctgaaaataaagtggaggttatttctaccacgacgactcctccaccgaagatcactttcaatgctgaggcggatcgccactttttgagcacaatgtccatcgatgttatggccactgtctgggaaagaggaccaggagctcagtttgtctacgtatttcccctcatatcagagatcgtggccattatctggacagccatgtgtttgatttaccagacaggcagcaaaaagagctcagttttgccgaagccgtggcgcattgtggtgccctccatcgttatcttctcggtgatgagtttgtgcagtgtaatctacacaatcctgaccaatggccaccttaagcacctctgtggccaactgagggagaatctcacagatcccactgccatcacctgcggcgatgccatcgccctgttgcgtcccatcattcacgaccacaacgtatcccatgatacttatctggagctcttccgcttcagctacttgatcggaatggtactgtggatagtggctctgctggtcatggtgctgcgttatgtattcgccgtggacttccagctggtggacattgatgatatgttcgatagcggacgaaatggctctgcacaagttcagattcaaccggtatacactgaggtagtgcagcagagcagtccacagcaccagacgcagatgcgtccgagatcggaagatgactatcagagtgccaggtcgcacttgagcgatcttgcagttccacttctggaggtgcaaagccagtcccagattccgccaactagcttggcctaa

SEQ ID NO: 34269 - protein, 363 aa, DROSOPHILA
MVMIAVFSILWNITLIMISGDLYEGIVSAKLIFRERSVDKMDESSKEILHRDFIKATQYAYGRQYSVQDVTPESLKSESQIFKLPHIYESIENRPKLERLIAENKVEVISTTTTPPPKITFNAEADRHFLSTMSIDVMATVWERGPGAQFVYVFPLISEIVAIIWTAMCLIYQTGSKKSSVLPKPWRIVVPSIVIFSVMSLCSVIYTILTNGHLKHLCGQLRENLTDPTAITCGDAIALLRPIIHDHNVSHDTYLELFRFSYLIGMVLWIVALLVMVLRYVFAVDFQLVDIDDMFDSGRNGSAQVQIQPVYTEVVQQSSPQHQTQMRPRSEDDYQSARSHLSDLAVPLLEVQSQSQIPPTSLA

SEQ ID NO: 34270 - DNA, 3298 bp, DROSOPHILA
ctattgttagttccatatgcaatgagacaacattgaagcttaatgatacttaagaatgagtagaaataattataaagaaaaatactaaagctgaaagcataataaacctgcaactttgttttacaaatttactaagttacacatttaatgtatacttggcttaatgtcctagcacaacacgttgttttcgtatttcccgttcactatttagattccttgctaatcatgcgaaaaaatggattatcccttgactggattgccggggaatcacatgacccggctgtcgaggaagtacaaactggacaaacaagttcctcgaggcgtcacatgaatgaagttcatcaatgggactcggtcgagtgtgtaatcgtgggtcactttcgatttcgagccagcaatttaagtgcgctccaattgtgaaaataacacttggcgcacttggccgaaggttgcggctgctgcatctttcagatgcgagatatgagatacgagctacgagctacgagctacaagataccagatacgagatactcagcggagagtgttacacataacgatttgggcaaacattttttcgcgttggcccagggcattgattgtggactatggggttgccccctcctgggagattcgttttgcagacgggtttgctccaatttctcgcttgtgaacccaaaagacacgtgtcgcagacttctctctgcatccgtatccgtatctttgctctgcgccgccttctactcgcttttggccaagttcatccgaagctcttcgcgtctcttttgatgcttaattaaattcattttttcgtttatttcgtttaccttttgtaatgagactttgagcactcggagctgcggacatcgaatcatataaattcggaccgcggcggccaagtcagcatcagtcgagcatcgagcttctccatcgaagcatttcatcgagccaaaggattacgggcttactaagcagcaaaggatttccgattaccagaagcaaaatgcgtgtctcctcgctgttcgttgtgtgcgtggcctccctggtggccaccactttgggtcgtcctgagcccccatccccgtactcctaccacggattgcctcagcagcagagccagcgggctttgccactcaatggtaagtgggcggaggatgaaatagaaacattataggaaattaaagcgaaaaagattaaagctatttatgtgacacagatttttgctaaagtcttatgagcatgacaactattaaagattagattaaacattgattatagtaatataattcagcaaatgtagatatattaactccatatatttatcttaatcttattaatctttctttttggacagctcaccccgttcccccgcagatttaccagcctctgccccaggagcagtcgtttgccaactttgcaccgccccagcagacctacttgccaccccaaatgcatctggatgccatcgagcaagtggctcccactgccgccgccgctgagcccctgaatgcctacgatgacagctacaacatggcccaccgcctgtccggagtgcagcatgccagtggctacaacaatggcccccaggagaccaaggtgcacaagcacatctacgtccatgtgccgccaaaggacttcgaggaggaggatgccatccagacccgagttcaccaccagcagggacccaagcagaagcactacaagatcgtgttcatcaaggcaccatctgctccggctatccgtcagccagttgtgccaccaccaccccagaatgaggagaagactctgatctatgtgctgcacaagaagcccgagcaggagcaagatatcgtgatcccgacgccaccacccaccaagccatcgaagccagaggtttacttcatcaagtacaagaccaagaaggacgaggcccccgtctatggacccccacctgcagagatggagccccgtcaggccaccgccgaggatttcgctccattggctgaggtcgccgatgtcctgccacccaccaccctggctcctgctcccgagccggaagtagagcagccagccattccctccgcggtctacggaccacccactgcagctgcctatactggtgaggaggttcagaccaccttgtccgctcctgccaaccagtatctgccccctgccaccgctcccgccgccctggccattgaggagccctcaatggcgcccatcgtggtggaggaacagcccgagcagcgactggctccttcccatgtgcctgccaccagctacggtcctcccaaccgctacttccttaagaagctgaagtgaagcccgctgctttgagatggtgatgccttagccaatttcacagtttgtcatagtctaatgtccattggatgcacctcttcccaatcccctgttcccaattcacacatgcacacgtgccaaacctccccacatgcacatctcgttgtttgttcgtttgtataacttgttacatttgttttaataaagagtagataataaatatcaaatttataaaaaaaaaactaaatggccttttagtgtggaatattcctcaaaagttttatacactttctttaagcttagtaaatggtccagttaattcggataaaacacagtggaacaacaatggatttcgcatttcaatgatttaatgatggctcatgccgcctaatatgataattgaccctgtgtgaagtcgtgaccttggcaaatttacagcctgcttaattgcgttacgttttgttgatttcggctgtaggcccaatttcgacggctttcctcattgctgtgctcatagaaaaatcgtaaagtaatggccaaaatggcaaagcacttagagggaagaggccggagcaacatgttgctgagacttcccgccaaaagcaacagttgctgcctgcgcagagctatgttgcaacatgtggatggaaaagccgggaaaaggagtacgaggaactgcctttcgggttcgtgcccgagtttcgtggccgtttgatcagtcagtccggatgaaaaatccggctgcacactcagttcgctttctgtgctcgcgcgagtcgcatcgtaggtgggcgtgttccttcactttatgtcggtcgtctccgtctggttagcgtattcaacgtattcaaacttataagcccattgaaaacactcggtccattcaatttagcgagtggtcataagcagcgaaaacactatcggtaaacggtaaacaattaatgaattgcgactttaatcacgcgtccaacagtgcgtatacgcaatacgaaaagtgagtgattgcaagtgaaattgtggg

SEQ ID NO: 34271 - DNA, 1083 bp, DROSOPHILA
atgcgtgtctcctcgctgttcgttgtgtgcgtggcctccctggtggccaccactttgggtcgtcctgagcccccatccccgtactcctaccacggattgcctcagcagcagagccagcgggctttgccactcaatgctcaccccgttcccccgcagatttaccagcctctgccccaggagcagtcgtttgccaactttgcaccgccccagcagacctacttgccaccccaaatgcatctggatgccatcgagcaagtggctcccactgccgccgccgctgagcccctgaatgcctacgatgacagctacaacatggcccaccgcctgtccggagtgcagcatgccagtggctacaacaatggcccccaggagaccaaggtgcacaagcacatctacgtccatgtgccgccaaaggacttcgaggaggaggatgccatccagacccgagttcaccaccagcagggacccaagcagaagcactacaagatcgtgttcatcaaggcaccatctgctccggctatccgtcagccagttgtgccaccaccaccccagaatgaggagaagactctgatctatgtgctgcacaagaagcccgagcaggagcaagatatcgtgatcccgacgccaccacccaccaagccatcgaagccagaggtttacttcatcaagtacaagaccaagaaggacgaggcccccgtctatggacccccacctgcagagatggagccccgtcaggccaccgccgaggatttcgctccattggctgaggtcgccgatgtcctgccacccaccaccctggctcctgctcccgagccggaagtagagcagccagccattccctccgcggtctacggaccacccactgcagctgcctatactggtgaggaggttcagaccaccttgtccgctcctgccaaccagtatctgccccctgccaccgctcccgccgccctggccattgaggagccctcaatggcgcccatcgtggtggaggaacagcccgagcagcgactggctccttcccatgtgcctgccaccagctacggtcctcccaaccgctacttccttaagaagctgaagtga

SEQ ID NO: 34272 - protein, 360 aa, DROSOPHILA
MRVSSLFVVCVASLVATTLGRPEPPSPYSYHGLPQQQSQRALPLNAHPVPPQIYQPLPQEQSFANFAPPQQTYLPPQMHLDAIEQVAPTAAAAEPLNAYDDSYNMAHRLSGVQHASGYNNGPQETKVHKHIYVHVPPKDFEEEDAIQTRVHHQQGPKQKHYKIVFIKAPSAPAIRQPVVPPPPQNEEKTLIYVLHKKPEQEQDIVIPTPPPTKPSKPEVYFIKYKTKKDEAPVYGPPPAEMEPRQATAEDFAPLAEVADVLPPTTLAPAPEPEVEQPAIPSAVYGPPTAAAYTGEEVQTTLSAPANQYLPPATAPAALAIEEPSMAPIVVEEQPEQRLAPSHVPATSYGPPNRYFLKKLK

SEQ ID NO: 34273 - DNA, 2914 bp, DROSOPHILA
ccatacaaaaaccagaatgaatatcgtctatgatacgtaaatgtaattaagctaaactatgtgtatatcgtctaagctatagattgtctctgatatgtaatacctaaggtacctacagatttatgcagacacactcatctactctgtatgcgtatgagtacattaaatctaattgtatatgaaaaacacatacaacgcaaataaaatatattttaaaaatttaaacccttgagatattacatttttaatcccaaccaaggcaacagaagggtaagatattcgtatatattgttttagattttattatgtatacacttaaaattgtacactcagccgttttaagtgtggctcgccttattgaactaaaaacaactcaagacacaaacataaatgtaagtacagattgccttagagtaaaatacaaatcgtttcaaaggaataccactaacaagctgcacttgaaagttttaaaaatgaaatcacatcttttatggaaggaaaaagctgctgcgctatactggttatacattttggcgtcagcgaaaatacgatttaagcaattgtcctttgcaattctctggcgaatgcaggccgcatttaactatagctataggtacgggttaggttggggattctcctttacatacgaagggtatataaaatatataatgtgtatatatgtatggttccggtaattggttttcgtaagtcgtcgttgtagcctacgcgtattgtacagtttatatcagcagttcgcccccctcttatcgctacttgtctactacggttttctttagttttcaattggtttgtttagctcacaatcagttccagttttcagtaatgtcttctttggtgtcctatgttactcacattgggatctctcgcgactttaactagctacccccgctccttcccaccaccatctgtcccccatcagcctcatcatcctaatggcaaagaaggcgtcccacgacgacttggcttagattgggcccacctaaagcagcatgtcgtcatcgctttcggtgaactccccattgggttccaatagcaggttggcctcctcattggattgcacctgcaaatattaaaaaaaaaaaaaaataaacaaaagaattcaaaaacatgttttcgaatgttcagcaatgtgtattctaggaaaaatctgtaggtatttgcaaaatgtaacagcaacaatgaaactcttcgcttaagcacacacaaaattctgaggaatttatcaattttctggtgacttacccgggagtatcgcaccgcggagttgctgcgccggaagaggcggcggatgcgctgccttcgtgccggcgaaaaggccaacaggcccaggcacgtcacgcagaaggtcaccgagagaatggcccccaggatggctgaaaagagcggagacaacgaaagggtggataagtgacggattaaaggggggtgaccgttcgggccagctgcacttactgcccacggacgccgttggcccaatgggagtagccgccggatcgggaccaactgttgttgtcgttgtcgacgtggccgccttagttggcttacccgctggcgatgcctgggtagtcgtgctggtggtggtggatgtgctgctgctgctggtgctactgctcgtggagccattgctttcaaaattctgctgcgttgcgccgagggaaaggaactcgcagatgctcggcgttcgttgcacataaagcaaattgcattgctggtcctgcaagaaagcggattcgtgtaattagaaactttcttcattaagggctgggcacaaaataaataaataaattgatatgggtatgggggcataaattccaagtaaaatacgactggactccggcgtaaattcgtggcgcaacaactgctttgctgcttgctgcttgtttccgccggcatccggctgccttggtggacaacaaaaaaaaaatgcaacgaaaggaaaggaaaacccttgctgctgtgtaacactttcacccaaagaccatttccggcgcgaccagcgactgcaaaatgaaacagcaaatgtgcgcataatttaaaaacttttgcggcgcaactgaaactgggaactgcaagtggcaaggcaaaaacgctcgctggctggctggctgaatggcgagttggctaaaactttgccgtcacggcgaggcgccgcaccagacacgaacatgtccgcgaggagaatcgtgtgactaggtgggtgggtggtgaggttggatccgggaacagggacgagggacaaacgaggcggaaagggggcaacgcattaaaaagtttgcagccatttaaaatcccatttcattgaatcgctaattttccaacagcgcccctgctgccagttgcagtgccaggaaccatgtacacagatcctctttgttgctgccccaaaagttgtccttcgttgtgcatatatacagtttgctataaatgcacacttacactgcaaacgaaatcgtatttctactgactgctgtttaaaaaaacaagttttaagccaaacgcaaacgaatttatcaattaaagtttaaatgctcaagggaaacaaataaaataggatgtaaatacaaagcagattgctgcttttaaaaatattgtttataagcttgtatttttagcaaatcacggtagcattatttgcaaagtgtagcagcaaacgctattttccgctttgcagttcaaggattaaagcgtgttgtgctcttgcagcgattagcttttcttttaccccacttcaacttccctgccaagctgaccagaacatcttgttcggcttaacctgttgagtaagctaaattagtcggatgtattagctgtctggggctcggagctcgaagcttggaaatggaaatattaaagatcccggagagcgtgtcaagcaattaacatcatcggataa

SEQ ID NO: 34274 - DNA, 543 bp, DROSOPHILA
atgccggcggaaacaagcagcaagcagcaaagcagttgttgcgccacgaatttacgccggagtccagtcgaccagcaatgcaatttgctttatgtgcaacgaacgccgagcatctgcgagttcctttccctcggcgcaacgcagcagaattttgaaagcaatggctccacgagcagtagcaccagcagcagcagcacatccaccaccaccagcacgactacccaggcatcgccagcgggtaagccaactaaggcggccacgtcgacaacgacaacaacagttggtcccgatccggcggctactcccattgggccaacggcgtccgtgggcaccatcctgggggccattctctcggtgaccttctgcgtgacgtgcctgggcctgttggccttttcgccggcacgaaggcagcgcatccgccgcctcttccggcgcagcaactccgcggtgcgatactcccgggtgcaatccaatgaggaggccaacctgctattggaacccaatggggagttcaccgaaagcgatgacgacatgctgctttag

SEQ ID NO: 34275 - protein, 180 aa, DROSOPHILA
MPAETSSKQQSSCCATNLRRSPVDQQCNLLYVQRTPSICEFLSLGATQQNFESNGSTSSSTSSSSTSTTTSTTTQASPAGKPTKAATSTTTTTVGPDPAATPIGPTASVGTILGAILSVTFCVTCLGLLAFSPARRQRIRRLFRRSNSAVRYSRVQSNEEANLLLEPNGEFTESDDDMLL

SEQ ID NO: 34276 - DNA, 3126 bp, DROSOPHILA
ttgtctgatcgtttgcagattgcgcattgtcgtcccacaatggcgaaacagtttgtgtgccgcacacagtgttttaaaataataccattttacgggcagggctgcagacaatggaaatgtgtcataattaaatcgtcgtcagttttatttgtcaaaataaaaactttttgttttaatagcaaagttttaagtgccatgcaatggctcgaataaaaatcattgtgcgaacacaagccagctaaccccgatggctcgggggaaatctcggcagagcaagcctcatgcctctaaagcccccacagagaaaaaaaaaagccccaacagccacctccagtgcgatccaactgtctgcgctctgcatgcattaaatattcatgcagtagtatcacatcaaccaaacacaaaaaaaggtatagaaaaaacaggaaaagccccagagaaaaagagagattttcccaagtgcagcaagattattttaccgcattatctcgcagacagtttttttcgttcgcttgattttttttgtataattcgttgttcttgtataatttcaagcactttgcttgcagacgaacaaaaagaatcttagtcggaaggcaaactgctgcccaaaaatgttgctgttgcaagaacggcgccgctgtgaaaaaaaaaagcgcgagtgccagcgacaaaaattacgcgataaaatgccgcgaggatccaactggagtggtgctgtgatggaggagcagcaagaagtgcccggcacgaaaagtgcattgggctgtacgccaaatctaatgcgattcctacgttttcacacaaaacagccaaaagcataccaaaaacaagggaaaatgaagggagagcgcaaggcaaacaaaatggcggcaatgcgcgcgtgtttcgccagcggaaagggaagcggaaccgggaccggaaacggaagcgactagcgacaacgcggattctcccgctccttgagccggccgtagagcaccagattatgtaaatcgaattagccggactgcataaaaagaacccaatgcacacactcgaactcaccttcccgaccgcaattaggcgactcgtgtgtgaagaatatgttgaccagcgcctgcgaatagtccgtcattgccttgcgatgcgctccgcaaatgtttaccgacatcttcgtggcgttgtagtcaatctgcaggcggaaaagtgcaatttagagtgctcatttgacgaccattcattcagtgcgactcacctcaatcttgccatccttggtgaacggcgcactcttgaagttgaaacgacgacccagctcgtcgtgcaccagatcgcaggtgtccgcactgaaggtgcactcgtgcggcggacagaagacattggtctcccactcgaaccgataggcacagtcctcaaccgaacgtagcacgggctgtccctaaaaaaaaaaaaggaagaagagaaaggaggcggagccattaggtgcatgcagcaatttgctacagaaatgggtccactggccatgaaataatcgtatatatgctgccacgcagtcagttaatgtccacagaaagtcctgccaaatggcgattccttctacaaaaagtcctgaatgtgcaattttccgtaacggagtacacaaataaaattttgaaacaaactaccgactatgttatatatctcttggaatcagtaattccaaaacatatcaaattgaaagaaaagaaaacgactttagtagctactaatttatgtataatttaaggcgaacgttgcagcatataatgcgtttttctgacagtgtacttacccgaccggcacgcatattacagttgaaaaggatgtgcgttgagagctccgaggtgttgtctgtgggacaggggtctcccttcaagtaagccagctcggcgaaggtgcgattccgttgcgtcagtgacaccagaggaaagcccatgctctgcggacgagaagtggtaagaggagcttgaatcaacctcggaaagagcgaaatgtttaactttatgtctgagattgcggcaaataactcgaaatccctgtctgagccacgcacacgtttctatgtcgcctgcccctggcggtttcagcttgttgctatcgttgtcgtcggtctccaggccaaccaacatcgaatcagtaggattcagtgtggagtggccggcacatcgatgcgatgataactggcatggccaagagccagcaggacatgctggttccagtcagcacaaacgacaatttaatggatagttcaatggcactgagcacccgaccaaaacgtactaaaattacttcctacgaaaataaggtatactttttataaaattcacaaaaataatatcataattaaagtgaagatctctcaggcaagtatggatttgaagtagtttgcagactttggtttatacaccatctaaaatggtatgtttaaatactagtagatataagattgctatgttttttaatgaccttaagatcgataaggctttcgaccagcgtgtcgcctgtacagctgttgctgctgctgcccccatcgatgcagcacgctaactgctgctattggcaatcaggctgcttaaacgctgccagctatccaactagccggccaacgacgtgagcttaatgcgcaaaaagctggggataccaggtcctgctgtagagtatctagtggggtgggcagcagtcggcaggcggcgagtgcattggcgttcgagtggcacaagatttatgctcgggtcaacaaggtcgatggcggcaagcgttgcacatgttgtcgtctcatcttaaacgtattaggggcagaaaggagttccagtgccaagctcttctgcttcgaactcatttcgtatgcagctcaggcgatgttttagcagtttgctctattatttattgctggccgtttcactgaccagttcgtcccagtgtgtacccttttggagaatccatttgaaaatcaaaatcgcagctaatgcgccatcagcaaatacacaacgagattgcgatggggatgagtaccgtggcctgaccttcagccgagaaatctcattagcattgctggctatacggggggatctgaggaactgatggggagccagaggaaaatgggccacatcgaggggactttgtcggcgc

SEQ ID NO: 34277 - DNA, 603 bp, DROSOPHILA
atgttggttggcctggagaccgacgacaacgatagcaacaagctgaaaccgccaggggcaggcgacatagaaacgtctcctcttaccacttctcgtccgcagagcatgggctttcctctggtgtcactgacgcaacggaatcgcaccttcgccgagctggcttacttgaagggagacccctgtcccacagacaacacctcggagctctcaacgcacatccttttcaactgtaatatgcgtgccggtcggggacagcccgtgctacgttcggttgaggactgtgcctatcggttcgagtgggagaccaatgtcttctgtccgccgcacgagtgcaccttcagtgcggacacctgcgatctggtgcacgacgagctgggtcgtcgtttcaacttcaagagtgcgccgttcaccaaggatggcaagattgagattgactacaacgccacgaagatgtcggtaaacatttgcggagcgcatcgcaaggcaatgacggactattcgcaggcgctggtcaacatattcttcacacacgagtcgcctaattgcggtcgggaaggtgagttcgagtgtgtgcattgggttctttttatgcagtccggctaa

SEQ ID NO: 34278 - protein, 200 aa, DROSOPHILA
MLVGLETDDNDSNKLKPPGAGDIETSPLTTSRPQSMGFPLVSLTQRNRTFAELAYLKGDPCPTDNTSELSTHILFNCNMRAGRGQPVLRSVEDCAYRFEWETNVFCPPHECTFSADTCDLVHDELGRRFNFKSAPFTKDGKIEIDYNATKMSVNICGAHRKAMTDYSQALVNIFFTHESPNCGREGEFECVHWVLFMQSG

SEQ ID NO: 34279 - DNA, 5949 bp, DROSOPHILA
attgcacaccgttaattagtcagctgaaccataaataataattgcggccagcaattaactttcaattattttttgccactgttttattatgtttctgcttatgcaatcccaaaacgaagaacaatatttattttgattaatcagtgcatttgtatgcagattgcaactggccaattgtttgggccatggctagggcaattaatgcattgtataagatatcccaacatatttggccagtcataatggaggttgcgccatcgcggggagaaaggctgccaattcaattaatatttttcgaggcggttccactttaagccaaatagaaaaaactaatttaaaacgcatttgtcaaaaatatcaataaagcttgttcaacatttccccatcgaaatctggttcaattttaagataatatttcacaaagcttataagtggattgcacaaatcaatggccaaaaataaggccagcgtattatcataaaaatataaagcaatttaatggaaggaaatgattactactcacgaacatttatggcgcttaacgaaaacgtggaggaagaaagagatatacatttacttgatgaaaatgatatcaacgctccggaaagccaattatatgattatttaattttcattttcctaaaccacttttttcttaatcacttaaacgttttttattcactgactacaattataaattgttatattcggataagagttataaagttgtaatcaaaaaactatggaattaatcaattaactattacgcacaattgcaataacaattcccaaagattaagtagattccacggcgcattagcctcaattgcaattagcatattggcaggttgatggagcatgaaacggctgcgaatgccgcaagtcaaagcaacgttttagcttccctcttggccaaattgattatgaccattaccgcccatccacccccgccaattagcccagtccgctcaactgtaaaccgagtaatatgggggtaaggatgcggggtctggttttagtgggtttgcgtacgcagatcgaggattacgagttacattttgtatatcggcggtaagtggcagattatgattgcacaccatgtgtgcgtgtgtgtaactgttgacaaatgagtgcacagatgtggcaagcggacaaaagccgcaacaaaaaagcgatggtggtgcaacagctctgcagagacacatttcggcaattgaatttccttgtcgtctacagcttttgttggagctgtcatgtaaattttgaatagactaccaaagatattgcaaaatgtactcgcagcttacaaattgggtgctctatttttgtatatattttttgaataggtacttgagttttagccaaatttgttaatttgtttaaccacatttaggtcttcagcctaagtcttttgctggtggccgccctccctctgatgtgccacgcccttccagctagcgataagtccctttccctggaagacacagatctggacaacgaaccgggcgagagtgtaaaggagtcccaggtgcaaaagcggtccggcagcttcgactacgtggcgcacctgaagtccggcctgctgtcgggaattggccaggcctccgcctcaatcgcctccggcagttccggcggaagcagcggtggcggtgacagctacaaatcccacgagatcgttgtccatgtaagttgacatggttgactatgaagttgcctttttttcagctaaatcaattaaatgttattgatccatctaatatcttcttcatttccagggcaactctgtggactacgatccctggtcttttaagaaatccgtgctgaacactatcttccaggcggtcaaggccatcaccggcggagtcaccgcactcaagggtcagctgatcaagggcagcggctacgcgctgagtgcgggtggcaatctggtggccgccggcggcgacaaggtcaccgatgtgggcaagtccatcatcaactcggcgcacatcaactcgcacacctacgccactagtcactcctcctccggcggcggtctgttcgccaagctgacctccttgtcgggcgcctcctccggcggcagcagtgggcacaagaccgtctccgcacctggacccgttgtgcatcacgagagtaagtacatttagaaaaagcacaaggtactaagaacttcctcatgcgtttataagattaacccatgaagcaaccaaaacatatatagttacatgtgttcaatctccttgtagttcagcagacaaattggactaggtcgcgatactacaaataatatttattccaatgcatatgccattgtccattgggccatgaaatcaaaacatattgtctttcgcttacgtaactcggttgctgaactagatgcatgacaattaagccgcctaataaccaacacagccgcacctggccaaaacggaagaggcaactcccagctccgatttggctgcagatccaatggccaaatcggagcatggagcgtgcaatgaacctggccaggccggtaactttcgttttcgccagcaacccgttccgtcggcatctgcgactgcgtaccactttacccaactgaatgtcttcgcatttgtctcgttgcagcgatcaccacgtacgagatacccactggccacgccagctacggtccgccatcgaagcccccgacctacagcagcgccacccatcagtaccttccgccggtgggcggggctagctacggcggcggggcgcccttcagcgttagccacccggcggccttcgagtcgccgccaagcaactatctgccatcggcctatggacaagatggtgcgtagttaggggtctggacaaacagaaccttctaaacaatctccactgtacatacaatgctttgctaacagaatttggtgtcggttctttatatgattatccatcataataatattattatgaatcaatttgtaatatattatctgtaaatacgattatttgataatcttatgtttgtatatattttctttgactaaagtgtacttgatatgctttccccttttgaaagacataaataagcaaagtaattgataaatttctagaagtgtatcttaaagatggcttgtcccatcaacttgcaatcgcaaatcactcagctctatttgcatactcagccgccccgcccccgtaatccaccgcccttttggcggccctcatcttatttccgcacacagcaaacaacgagtagaaagtgaaagcaccatcatcagttgctcatggctggtgaagacgaggcagaaaccgagatacattgtaaatactgtaaatattaacaccgccagtcgaaatctctccttgtgcgccaactgatgtatggtcaggcccatggaacttgttccaatggcacatttcctaggctaagtttattcgattttttaacacattgcgcaagcgaacattaatcgattcattgtacataaagacatgtgaacatgtttcaataatttatcatatcttatatatatatccgttactatcatatacgttaactaccagtagcacttaagtgagttgtacagatagtaatggggccatttgcagtggccacatgtcgcatacttgataaagttgcgcatacgtatttagccagtggcccattaaagagtccagcgaaaccgtcaatgaaacgcggactatcgactatcctcattcagctaaccaaaactaaaatcggaattcatctacgatcatcatgcaaatcatcctgaagctgcgcagaaatgtacaaaatgtgtaaagtaaaccaatcattttgtataaaaaaatctaaactcatctaacacaacaagaactgttaacagagaaatccaaatttcttaaaaagtattaaaccttttcacatcttgcacactttttatttcctaatttgttaattagcaaaagtattttaaaatttcgtaaagcaagataatgaaaagtttttatacttattgaaatacgcccaccaactcttacataagcagaccaagccatgtgtaaatacccaaacaaaaaaacacgcaaatatttaatttggtaaatctaatgaaatctcattgcatacacacctcgacaacaacaacaccaccacaacaaacaaccacatcatacacccacaaactcaaaacgacaaccacaaaacggcagcgaccagcgcaaatagcaatgactttaacatctatggccgccactcaaagctaacggatgaggaagcccgcaaggcggcggcacagctccaggagatcctcagcttgttgcccaacgggaaaactgagtacacggcctccaagacagtggctttggataccagtttgccaacgggtacgggtttggaacaggcagaggtttataacagctatggcataccgctgcccagtaacctgggcaccttggagtccctgtcgcacacagagtccataacagctgcctataatcccgcctcaaagaatccggcggatgtataccaccagatggccaagcgcccgtccgccgaggaactctacatccagaagcatcccaatgagggctacgattactcgccacccgcagctgcggccccgccaccgcaagctgctgcagattacagagtggagaactaccacgccaccaagagcaatgcgctcaaggatctgacgcccattatagccgccttggaggtggccaagcggaagggtaacaaccacggcagcggacccgtctactccatcgagaagcaggtgcacaagcagtcgccccacttccagtatctgccgccggtggtgcaaaagtccaagtacgtgtacagtgcaccaccgcaccaccaccaaggacacagcggtggctacaaggtgcgacgccaggtggcgggcggcaagcacacgaagcgcgtcttccggccgcaggattacgagatacaggatccactgatgttcaaccgcctgctggaggtctaatgggatcgcccgcagttcttagcttatagtcctctaagtcatgtgcagcatttacctaaatctataacttatttatgttctcgttatcgcaatgctaatcgcaatgctaatcgtaattaattatttattgagcttcccagcgatggttggcaataaagcgcgccattgatattgcatccgaatgtctcagcacagcatgcttcaaaagatccccagcaccaccaatcagtcacccactctctctctctctctctcttttcccgcacacccactttcctgcgctgctgcaccaccacacacattgaatcgggaacccttttctcacctctcaccgatctctttgcagtctaccatcagtagaggacgataaggaagctgtggaccacgcccagttcgttaacagcaccgtccatctccacgtatcctagagttagtcaaaccgttcctgcctattccgaatctatctgctgtcactccccccattctatatacatttccgaattcgaagaacctctttaagggccacccagaaacttcagttggcattaattgaacttccccatcttacgtttaagtatttaaattaaataaatcgttgattaaacacgaagacttttatttggttggtacatttaaatttggccgaaaagtatgctacgcactagtcgcgaaataccatgtaaagtttttgtaaaagagtcttaatttcatgtagagtgctgtatatagcaaatgtatttctagatgtaacaatcgcaataagaaaaatattttatatgtgtaattatggacaagttcttttaccccgcaaagatgttgtgttgatcttagcctgaaagaaggctatgatttataccattaacttttcgtttaactattgaactaacgcagtaaaatctcttcgaacttattgtagttaaatttattacagggaatttttaatatcgcttagaaaatctgaggacagggtacacctgtgcgattaggacctagaagcaag

SEQ ID NO: 34280 - DNA, 1791 bp, DROSOPHILA
atgcggggtctggttttagtgggtttgcgtacgcagatcgaggattacgagttacattttgtatatcggcgcctaagtcttttgctggtggccgccctccctctgatgtgccacgcccttccagctagcgataagtccctttccctggaagacacagatctggacaacgaaccgggcgagagtgtaaaggagtcccaggtgcaaaagcggtccggcagcttcgactacgtggcgcacctgaagtccggcctgctgtcgggaattggccaggcctccgcctcaatcgcctccggcagttccggcggaagcagcggtggcggtgacagctacaaatcccacgagatcgttgtccatggcaactctgtggactacgatccctggtcttttaagaaatccgtgctgaacactatcttccaggcggtcaaggccatcaccggcggagtcaccgcactcaagggtcagctgatcaagggcagcggctacgcgctgagtgcgggtggcaatctggtggccgccggcggcgacaaggtcaccgatgtgggcaagtccatcatcaactcggcgcacatcaactcgcacacctacgccactagtcactcctcctccggcggcggtctgttcgccaagctgacctccttgtcgggcgcctcctccggcggcagcagtgggcacaagaccgtctccgcacctggacccgttccgcacctggccaaaacggaagaggcaactcccagctccgatttggctgcagatccaatggccaaatcggagcatggagcgtgcaatgaacctggccaggccgcgatcaccacgtacgagatacccactggccacgccagctacggtccgccatcgaagcccccgacctacagcagcgccacccatcagtaccttccgccggtgggcggggctagctacggcggcggggcgcccttcagcgttagccacccggcggccttcgagtcgccgccaagcaactatctgccatcggcctatggacaagatgcgaccagcgcaaatagcaatgactttaacatctatggccgccactcaaagctaacggatgaggaagcccgcaaggcggcggcacagctccaggagatcctcagcttgttgcccaacgggaaaactgagtacacggcctccaagacagtggctttggataccagtttgccaacgggtacgggtttggaacaggcagaggtttataacagctatggcataccgctgcccagtaacctgggcaccttggagtccctgtcgcacacagagtccataacagctgcctataatcccgcctcaaagaatccggcggatgtataccaccagatggccaagcgcccgtccgccgaggaactctacatccagaagcatcccaatgagggctacgattactcgccacccgcagctgcggccccgccaccgcaagctgctgcagattacagagtggagaactaccacgccaccaagagcaatgcgctcaaggatctgacgcccattatagccgccttggaggtggccaagcggaagggtaacaaccacggcagcggacccgtctactccatcgagaagcaggtgcacaagcagtcgccccacttccagtatctgccgccggtggtgcaaaagtccaagtacgtgtacagtgcaccaccgcaccaccaccaaggacacagcggtggctacaaggtgcgacgccaggtggcgggcggcaagcacacgaagcgcgtcttccggccgcaggattacgagatacaggatccactgatgttcaaccgcctgctggaggtctaa

SEQ ID NO: 34281 - protein, 596 aa, DROSOPHILA
MRGLVLVGLRTQIEDYELHFVYRRLSLLLVAALPLMCHALPASDKSLSLEDTDLDNEPGESVKESQVQKRSGSFDYVAHLKSGLLSGIGQASASIASGSSGGSSGGGDSYKSHEIVVHGNSVDYDPWSFKKSVLNTIFQAVKAITGGVTALKGQLIKGSGYALSAGGNLVAAGGDKVTDVGKSIINSAHINSHTYATSHSSSGGGLFAKLTSLSGASSGGSSGHKTVSAPGPVPHLAKTEEATPSSDLAADPMAKSEHGACNEPGQAAITTYEIPTGHASYGPPSKPPTYSSATHQYLPPVGGASYGGGAPFSVSHPAAFESPPSNYLPSAYGQDATSANSNDFNIYGRHSKLTDEEARKAAAQLQEILSLLPNGKTEYTASKTVALDTSLPTGTGLEQAEVYNSYGIPLPSNLGTLESLSHTESITAAYNPASKNPADVYHQMAKRPSAEELYIQKHPNEGYDYSPPAAAAPPPQAAADYRVENYHATKSNALKDLTPIIAALEVAKRKGNNHGSGPVYSIEKQVHKQSPHFQYLPPVVQKSKYVYSAPPHHHQGHSGGYKVRRQVAGGKHTKRVFRPQDYEIQDPLMFNRLLEV

SEQ ID NO: 34282 - DNA, 2958 bp, DROSOPHILA
tttcacaaacaaccagttaagtaggatccaatttatataaaataaattgccaaaatccccaagccacattcaaaacaaacacagttgtcaacctacattataatactgaatttattccatttatttcgggggatttgcattcatctatctgaaatcacattctacactgtgcaaaatacaccaaataacaagtcatatagcatattcatcaaataataatgcagaaccacagattttcaggtctcactgtggcaaagaataaaaatgtatgcgtatttaaaataagaaaattcccatgatacataattcataattagttgttttctgtgtaggtacttatgtcaaaaccacaagttcgttaacccaagaaccgcagaccttggtcatggttgcatgcagataaatacattcgcttggcttcttttcctcacttgagtatgcatatatgcaaagatagtttgctagaattgtcgcctataattaattggaatatatattcttaagagagatctactaaactaaataaatccgtcagcattacagtcgtcgcatcttaatgatcttgtagaaccagttcggctccagcgaaagtgagatagaatatatagaatagaatatatgtctaagtatctagatatatgtattatgacagtactttacaactggaaatggagtcgccggcgaggcaaaggctaagtaatattataaaaattaatgcattttcgagctagggtatcgcatcagatgaatcgaaagatttgggcaccctgtacgaccacaacaagtctaatgcggccaaactcgtttacttactaattgtaccgaaataaataaaataaatatatataaatcggcaaaacaaagaaatgattttaaaagttatacattcgagcggtccatttcgaataaaattaccggcggccagacagaatcgtcatttcaatcagagcattcaaagaaaacggttctagtcatcacattttggaataaaattatcaagatgcttattaaagttgccaagttcctgagtattgtagccgtactcctttcagcagtcgaaggagctaaatatctggcagagaaacgtaataaacatttaatacaacatattttggttgagttaagttaataatattcttaaatgtacaactttcagccgacttcctaatcccatgtatcgtgggcgatcccaactttaatgtctgtctgaccaaaaacttccagagtttcttccgtcagtggaaggacggaattcccggctacaatgccgtgggatcctttgatcctttttacatcaagagagtgaaatttacccaggatgccagcaggtctatagctatcaatgccgatctgaaggaagtctatgtagcaggtgctggtcaagcattagtcttggaatccaggtaacctatttaaagattctgacgaaatcaagtttgaccattaaaaattctcagctgggatccaaatcactatgtagccaggactttgatttccgtgcccaagttgcgtttcaatttcgattacaaagtcaaaggacacgtctcagcgctgaatctcaatggtcatggcaagggatacttcgaagctggtaagatgcaatctacaatttatgcgaattactatcttaaagccggttttattcagaaaatgctctgttattgttggaattggctgtcaaaccgctggccacctcagatggttatttcgctgatgtgcaaagtgtaaaggtaaatttccgcgagatcaagcaattccgcatcaagctggaaaatctctttggcggcaacaaggatctggaggatactgcacacattttgttcaacgaaaactggcgcgacttctttgaggtactgcgtccggcggtggagcaaacagttggcggagtgcttttggatcggttcaagaagacctttgtctatgtaccagctacctatttgattaaagactttcactaaatgctaaattagcatataatccggtacttctatgttattttaatgggttcgtgtgctctgtcgttttgtattaaatgggtagtagtgtatgcttgatttattttttggtggcactgtattagaattatattacaaattattttcatatctttgcattcaaagtgcttctattatattttcatctttagatacttttctcactgtatactcgctattaagtcaggaaataggtgaattaaaatgatattatattcagcaacatgagttgctcttggccccggcatcgttaggttgctgtaagtcgttaccatatatgagaacccaaatctcgaatcttggcagttgagaataaaacgccggatcacagcaagtcgccggctagtcggtttcaaagcgtgacactgtttgatgtgactgagcagcggctgcctagaccgcgatacgtctacagtactattcgctgagctacttagatacttaactacttgattaataaacagttgccaaaacgacaccatgagcagcacgcgctacggccgcactttgctcggcatttggagtggattattggccattttgtgcctgaatgaaatcgccatggataggtcgttggtttcagccgttgcctactactccgaaaaacgtaagtagatgtcctcagagtcgcagttcttttcaatgttagcaaatcgtgttgctcagctgcctttctgccatcttgtcggatctacgaaccgggcttcaccaagtgctctacgaatagcattcagaagcttcttgatcagttgaacattggaataccagaggtgctcgagcggttcggtccctttgatcccatgagagttagggatatagttttcaagcaggataacaacgaggtggccaccatcagagccaatctgactgacctggtggtcaagggttttgccaacacaaaggtcaaggagagtcggtgagtacaaagaatatgaaagtcctacagataaattatgtatattta

SEQ ID NO: 34283 - DNA, 777 bp, DROSOPHILA
atgcttattaaagttgccaagttcctgagtattgtagccgtactcctttcagcagtcgaaggagctaaatatctggcagagaaacccgacttcctaatcccatgtatcgtgggcgatcccaactttaatgtctgtctgaccaaaaacttccagagtttcttccgtcagtggaaggacggaattcccggctacaatgccgtgggatcctttgatcctttttacatcaagagagtgaaatttacccaggatgccagcaggtctatagctatcaatgccgatctgaaggaagtctatgtagcaggtgctggtcaagcattagtcttggaatccagctgggatccaaatcactatgtagccaggactttgatttccgtgcccaagttgcgtttcaatttcgattacaaagtcaaaggacacgtctcagcgctgaatctcaatggtcatggcaagggatacttcgaagctgaaaatgctctgttattgttggaattggctgtcaaaccgctggccacctcagatggttatttcgctgatgtgcaaagtgtaaaggtaaatttccgcgagatcaagcaattccgcatcaagctggaaaatctctttggcggcaacaaggatctggaggatactgcacacattttgttcaacgaaaactggcgcgacttctttgaggtactgcgtccggcggtggagcaaacagttggcggagtgcttttggatcggttcaagaagacctttgtctatgtaccagctacctatttgattaaagactttcactaa

SEQ ID NO: 34284 - protein, 258 aa, DROSOPHILA
MLIKVAKFLSIVAVLLSAVEGAKYLAEKPDFLIPCIVGDPNFNVCLTKNFQSFFRQWKDGIPGYNAVGSFDPFYIKRVKFTQDASRSIAINADLKEVYVAGAGQALVLESSWDPNHYVARTLISVPKLRFNFDYKVKGHVSALNLNGHGKGYFEAENALLLLELAVKPLATSDGYFADVQSVKVNFREIKQFRIKLENLFGGNKDLEDTAHILFNENWRDFFEVLRPAVEQTVGGVLLDRFKKTFVYVPATYLIKDFH

SEQ ID NO: 34285 - DNA, 3122 bp, DROSOPHILA
atgtagccaggactttgatttccgtgcccaagttgcgtttcaatttcgattacaaagtcaaaggacacgtctcagcgctgaatctcaatggtcatggcaagggatacttcgaagctggtaagatgcaatctacaatttatgcgaattactatcttaaagccggttttattcagaaaatgctctgttattgttggaattggctgtcaaaccgctggccacctcagatggttatttcgctgatgtgcaaagtgtaaaggtaaatttccgcgagatcaagcaattccgcatcaagctggaaaatctctttggcggcaacaaggatctggaggatactgcacacattttgttcaacgaaaactggcgcgacttctttgaggtactgcgtccggcggtggagcaaacagttggcggagtgcttttggatcggttcaagaagacctttgtctatgtaccagctacctatttgattaaagactttcactaaatgctaaattagcatataatccggtacttctatgttattttaatgggttcgtgtgctctgtcgttttgtattaaatgggtagtagtgtatgcttgatttattttttggtggcactgtattagaattatattacaaattattttcatatctttgcattcaaagtgcttctattatattttcatctttagatacttttctcactgtatactcgctattaagtcaggaaataggtgaattaaaatgatattatattcagcaacatgagttgctcttggccccggcatcgttaggttgctgtaagtcgttaccatatatgagaacccaaatctcgaatcttggcagttgagaataaaacgccggatcacagcaagtcgccggctagtcggtttcaaagcgtgacactgtttgatgtgactgagcagcggctgcctagaccgcgatacgtctacagtactattcgctgagctacttagatacttaactacttgattaataaacagttgccaaaacgacaccatgagcagcacgcgctacggccgcactttgctcggcatttggagtggattattggccattttgtgcctgaatgaaatcgccatggataggtcgttggtttcagccgttgcctactactccgaaaaacgtaagtagatgtcctcagagtcgcagttcttttcaatgttagcaaatcgtgttgctcagctgcctttctgccatcttgtcggatctacgaaccgggcttcaccaagtgctctacgaatagcattcagaagcttcttgatcagttgaacattggaataccagaggtgctcgagcggttcggtccctttgatcccatgagagttagggatatagttttcaagcaggataacaacgaggtggccaccatcagagccaatctgactgacctggtggtcaagggttttgccaacacaaaggtcaaggagagtcggtgagtacaaagaatatgaaagtcctacagataaattatgtatatttatactgctgcttttggagtcaataaatctctgcaactttgcggaacaaatatataaatatcttttttcgaccaccagtgtgagcaagaaagactttagctggcagaccaaaatatatcttccgaaaatgagactggatggaaggtatgaaatggctggacgaatactccttataccactgagtggctctggcaaaatatttattgagattggtaattagatttctatcgatatttaaatgcgggtgcaaatgggcagctaacacttttaaattcccgcagatgatcttgacattttgctactaacaaaaatacgtctgtatgaaaagggtggcttcaccttcgacaacgtgaccgctgtgcaggttcaactgaatctgtccaaagtgcgcacttatctggacaatctattcaatggacgtagcaaggaggtggagcgcagtacgaatgagtttttcaatgaaaactggcgggatttctacgaggccctgaaaccactcatcgttgagacggtggaaaatatcctttatgatgtaatgtctacggtttttcatttaataccagccaactttttcgttgaggacataccaacgccccagcaactttatggtccaaaggagatacttggcaaaaaagaatagttgagtgatatctattattgttaacttgtagtacgccatccccaaattctttcaatatttgtaataaaaatcattaacgaatatccatttttcattttatcagtaacttttattgtataatgagaatattgctgacttcccgctaaagctcaggctcgaatgatatcaaccttattgggagagaaatatacaccgaactccctctctgaaaacgagaaaaatcattaagttattcaaaaactgtttgaaacatggcttaccattcttgtccacgtgatatgagcgtttcctaaatatataaataatcagcatggtggttattattgccaagatgaaggccatagaaacaatcgttataaatacccacttcaagtgtctttcactcttttcatggcctgtaagggacccaagtgaatccatagattggcatgagtatccatctatcggactctcaccatcccagcagacacaagaacccggaaattcgcagagcccattgaggcactcgggttcgcaaatcggaagacagatcaaattgttgtcgtcctcattcctatgcagcttatattgtttactacaagtacaaattccttcgacgcaggttccatttcggcagttcttatcacaatctgaataatccccaagtagctccttgtcaagctggcaacttttactttcttcaacgaaaatgtaaccgtcatcgcacttgcaaaaatctggagaaacgcaaagcccgttgacacacccgtccttacaaaaaggtgcacaactgatttccgtttccttgctgtatccttcatcacaggaacactttcctggtgcaacacagaatccgttcttgcatccacctgagcaaactggagaacatctgttttcaccgtccatttcatatccatcattgcaggaacacttttctggtgcttcacaaaatccgttctcacatccttttgagcaaattggtttgcaactgtttcctgtttccttgctgtatccttcatca

SEQ ID NO: 34286 - DNA, 870 bp, DROSOPHILA
atgagcagcacgcgctacggccgcactttgctcggcatttggagtggattattggccattttgtgcctgaatgaaatcgccatggataggtcgttggtttcagccgttgcctactactccgaaaaacctgcctttctgccatcttgtcggatctacgaaccgggcttcaccaagtgctctacgaatagcattcagaagcttcttgatcagttgaacattggaataccagaggtgctcgagcggttcggtccctttgatcccatgagagttagggatatagttttcaagcaggataacaacgaggtggccaccatcagagccaatctgactgacctggtggtcaagggttttgccaacacaaaggtcaaggagagtcgtgtgagcaagaaagactttagctggcagaccaaaatatatcttccgaaaatgagactggatggaaggtatgaaatggctggacgaatactccttataccactgagtggctctggcaaaatatttattgagattgatgatcttgacattttgctactaacaaaaatacgtctgtatgaaaagggtggcttcaccttcgacaacgtgaccgctgtgcaggttcaactgaatctgtccaaagtgcgcacttatctggacaatctattcaatggacgtagcaaggaggtggagcgcagtacgaatgagtttttcaatgaaaactggcgggatttctacgaggccctgaaaccactcatcgttgagacggtggaaaatatcctttatgatgtaatgtctacggtttttcatttaataccagccaactttttcgttgaggacataccaacgccccagcaactttatggtccaaaggagatacttggcaaaaaagaatag

SEQ ID NO: 34287 - protein, 289 aa, DROSOPHILA
MSSTRYGRTLLGIWSGLLAILCLNEIAMDRSLVSAVAYYSEKPAFLPSCRIYEPGFTKCSTNSIQKLLDQLNIGIPEVLERFGPFDPMRVRDIVFKQDNNEVATIRANLTDLVVKGFANTKVKESRVSKKDFSWQTKIYLPKMRLDGRYEMAGRILLIPLSGSGKIFIEIDDLDILLLTKIRLYEKGGFTFDNVTAVQVQLNLSKVRTYLDNLFNGRSKEVERSTNEFFNENWRDFYEALKPLIVETVENILYDVMSTVFHLIPANFFVEDIPTPQQLYGPKEILGKKE

SEQ ID NO: 34288 - DNA, 2779 bp, DROSOPHILA
atatataaattgctaatcatccgttttaataaaatgaaaaaccttcagaaaatttgagtcaaattcaattaaattacctaattaatagcttatttaagctaacgaaaagttaagtaccacactgatttaagctcattgtttggccattgatccgtgggtgacttccaattatccaacaagcttcaagccacttcttccagtacctgcagtccccacacccaaaagacaaaggcagttgagccaccacccagcaccaagtacatagaccatagaccatagaccatacttatggccaacagcttatggccaactggtcggccgttggtggcagtgcatttgaaagtggtttggggccagcacattgcataagtgcaccaaattccagtcaacagcaaatccactttggttttcaatctgaatcggccacaatgcttgccttttttttgtagttttttgttgttttggctcgatcattctgtgttgacgtaatggcctaacgattattggccacttgctgggctctttgcctttatttcaatcggctggattttgctacaatttctgctgtggggcggcttaattgaagcggaacctggtagttggctaaattgaatgccaaagcagatatttcaaatacttctgagcactgagaataattacttagcagtaaatgacagcgaaaagggtagcgtaaattgattgaatgtttactagttgtctttaacaccctaattgcctttgattttcatagcaattaccaaaacatttaatgatttcagaacactttcgttttctctgtaaacgcttcaggtttcaaaactcgatttattacacacattcaagaacatatataaacaggtacagtaatagatacatgtgtggggtgtgcggagtgactgatttatttggcagtaacaagttgacattgtcctcggacacttcagtccctgactctctggcccaactcagaggtgatccccccatcaaaaggtcctccttcctacttccggcccgtatagtcgatgctataggaaccggtgtagaggttgagatttcgcagggagggatgatgttgctccggcaaccccctgtatggctgttgctgctggggattatagtagttctgggccggaggctggtagtaacggggctgcggagccgggggattgtagtattggggtgtgggattgtagtagggcgtttgtggggcgggctgccgaggtggcggggcatacgcctgctgctggccgcggccgaaatcgttcagactgaatttactggccggtgaaagggggcgattgaacttctggtccttgtagtacaccgaggggtcctcacgatactggccatcgtccaattcgttgggtcccaatggatagggattgctgttggtcagcgtaggtggtggcacattgatgtgactgccagcgggctcaaagccacgcttactggctccatactctatttcccgcacttttccctggtcatccacataaccgtactttccatagacctctccattcgcgtacttggtttcgatcttgaagctcttatcggccgcttcgtatccatatgtgtaggaaccatcgtcgttgtgcttgtcgatctgcttgagaatgggcaccggtgtggtgtagtcctggtgttgcgcatacgcactgtgggccgccagaagcagaagacccaagctcaaggtctgcaaattgaaaaacaaagagttgagtgaaaaagtgactcaaatcgtttgtatcattaaatcaccatttcggtcacacccatctgtaaagtcagcaattatacatgaactttgcctttattgccttacttttggctaaataccttaattagctgctctgattatcagttcacaaacattcactcaaggacatggctgagtaatgaaccaccaattaagttactctttatcatagacaccgatctgatcaaaccggttggctaaattgcattctaaaaattcactgcgcatattctgaaaacaccttttgcataccgatatgaatatcgagctttggagatgtaacactataaaccaccttgctgaatcttaccaatttcaacatgctgccaagcttagaaccaattgtcaatgtcgaaccgttttcaccaatctcccaaagtagttatgcactgcgaaaatggaaaatgtgttctgcacttgcactcgagactctgcgaatcgaaacgacaaactcaaaagaaaatcagggcgtgcaacgctttttataccgcagtcaacatttcgcaaaagcgggccaagaggggaaaaaaccatggcagaaactaaagcttcaagccgaagtctctggatctggcgatcagctgcgatcagaaaacgaaaacgaatacgttaaccgaggcccgagctcccgatccgatccgagaaccgattcgacttggcttggaatgcagcatagaaatcgaaagcggtcgtcggccagctgtacttacgtccgatcgatatgcccactcactcacctctacaggtaattcacttaccagcagcaagccgacgcgcagcaatttccaatcaggttgttaatgtcgtctactcgaattcttggccagcaatttatgcttccagaccgcaacactcacgcatacgcaatgagatcagagcagcaacagtgatgagaactaggtacacttggtacacttacactccatatcctactcatattggcacactctagtttgaggtacaaagtgcgatgtaaaatagttttcaagtgccatctaaaaacttttacaattcacatcg

SEQ ID NO: 34289 - DNA, 714 bp, DROSOPHILA
atgggtgtgaccgaaatgaccttgagcttgggtcttctgcttctggcggcccacagtgcgtatgcgcaacaccaggactacaccacaccggtgcccattctcaagcagatcgacaagcacaacgacgatggttcctacacatatggatacgaagcggccgataagagcttcaagatcgaaaccaagtacgcgaatggagaggtctatggaaagtacggttatgtggatgaccagggaaaagtgcgggaaatagagtatggagccagtaagcgtggctttgagcccgctggcagtcacatcaatgtgccaccacctacgctgaccaacagcaatccctatccattgggacccaacgaattggacgatggccagtatcgtgaggacccctcggtgtactacaaggaccagaagttcaatcgccccctttcaccggccagtaaattcagtctgaacgatttcggccgcggccagcagcaggcgtatgccccgccacctcggcagcccgccccacaaacgccctactacaatcccacaccccaatactacaatcccccggctccgcagccccgttactaccagcctccggcccagaactactataatccccagcagcaacagccatacagggggttgccggagcaacatcatccctccctgcgaaatctcaacctctacaccggttcctatagcatcgactatacgggccggaagtag

SEQ ID NO: 34290 - protein, 237 aa, DROSOPHILA
MGVTEMTLSLGLLLLAAHSAYAQHQDYTTPVPILKQIDKHNDDGSYTYGYEAADKSFKIETKYANGEVYGKYGYVDDQGKVREIEYGASKRGFEPAGSHINVPPPTLTNSNPYPLGPNELDDGQYREDPSVYYKDQKFNRPLSPASKFSLNDFGRGQQQAYAPPPRQPAPQTPYYNPTPQYYNPPAPQPRYYQPPAQNYYNPQQQQPYRGLPEQHHPSLRNLNLYTGSYSIDYTGRK

SEQ ID NO: 34291 - DNA, 3312 bp, DROSOPHILA
tataaaatactagaccatgacataattcaactatgtaggactaaaatttatagttagatgagagtcatgaaaatctttgtaaataaataccggaacaatccctctctcacattttttgtgactttataactatctaacacccactcaatggatactcagatacacacagcaatctcaaaaatatatgacatcattcgagcgatttttgaagtttgatccatgtatttatacttattgcagttattagataaataacacattgtgttcaatttgaaagatgctccatttaatgtttttattatggcatctaaactttttattgcacctcagttcaagcaattaagttctcccagatcaaaacagagccgaatacagagatacaaacagtgtttcgttcgtgccatagttgtcagcgtattttccagatagatattaaattagcttaccggttcggttgcaaggtaaagtcgctacagtttcagagtcgcataacaacagcaatgatagtagctacacagcgagaaatgctgctcataaagaatatttatgtatttatttcttcgatccggcaaaacatttttatacgcactctatttactactaagttaaattaccctaaatatgaattggaaataaaatttttatatactttttatatactttcttaaaaaaaaacctattgataatttttcattatgtgatttttctgtactctcgtgcaataaatgtggaataaatttaattttgcattgcgagcgaatgaaaatggattgattctggtattacccagagactccagattcaattcatcaattgcagtcgccgagtcatcagcagcggctatatatattgtccagataaaaactagcgccactacgagttgtatctcattcgcagctcgtgcgtagttaactcgattaaggatctccgcttgttgtgtctgcgattcccgccgtgacagtgacgcaagctttccaccatgctcctaattggattactaatgctactccatgccggcctccaaggagcccagtgtgttgccttctacacggaaaaacgtaagtccacaaaaggactttaaaattatgaggaaatggaaaatgctgaacaatttgaaagagctatcaaaagtgaacaaaatactgtatataataatcgatatgatttcattgtagcctcctatattgagtcctgcaagatttatgaaccggagttcaccaagtgctcaactcgttcaatacaggcatttatgaaccagctcgtcaaaggtgagatatcaccatgataaccacgacttgtgcgactgacttcctttgttatcctttaggtgtgcccgaaatagaggaatcctttggacccatcgatcccatgaggcaggaacagctggtgttcaagcaggataacagcgacgtggccaccctttccgccaatcttacggatatgctgatcaggggctttggcaaaatgctgatcaaggagagcaagtgagtagctatcgattccacatagccgtcaagagcaatcaaaagttgctccattgaggtcgttgagctcctctataggcaaacatctctgatgggaaacacccggacataaatttgttcataccaatttaatagcaaaacgcgatttagactatttaatattatttcacattgatctatcaactagtttcgcgcacatggtattgtcagtcttaataaattggctattaaatgagctggcttataggagtaaagcatttgtatctttatttgcccaccagagtcagcaaaaaggatttcagctggctaactaagatctacctgccccaaatgcgaatagatggtcactacaaaatggtcggtcgcattttgctggtgcctctgcagggaaatggaaaaatagtcatggaaataggtagttgctaatgataattgttactaaatgaatgtaaaccggattttttgccactgacagatgatctggacatactgatgaccaccaaaacacgcctctacgagaagggcggctatacattttacaacgtgacatccgtgaaggtaaaagtggacgtcggcaaagttcgcaccagattggataacctcttcaacgggcacagcaaggaggtggaagatagcaccaatcagttctttaacgacaattggaaggatgtcttcgaggcactgcgtccgctggtggttgaaaccgtggaaagaacgctactagatctactccacaagacatttgccctgtttccggccagcttctttgtggaggacatacccacctccttaaccttgtatggtcgcaagtcacacatgatcacttgaaaggtgttccattgaaatttaatcccacttccttcaaactgccttggaatctgcatcttctctatgaaaatcttactgaaattaatatagaaatatttcgaggcaatcaaaacaatttgatagttctaagaacttttttcatttgttcattgctgtcttttgatgagtttagatttttgtttttaacgcttttattatctgtgagtgcctagactaaatgttagtgtaacttattaaatgcttagtttagaggtatcctaatatgggatggcacagtgctccacatccggctgccagttcgagtcgatagatcagtagaaccagtcgtacttgagatattcgccctcgtgcttcaatgtggcaatcgaggtgtgacgcacgtgtccagtgcgcgcgaagatcctgcgattgcccaccggctgcagggtcctgaaattgtccaccaacgcaccatcctgcgtgtccgacagctgacggaatcgggagatctgcttgggtgaaatgggtatgggatcgggaaacagtatccaggtgacggcctccgaacagggcggcgtggtcagggaacctggagagtcaaaatataatacttagttgagtgacatcatagataaacatcgcttgtagacatcgattccgatgtcagttaatcagtgagtacttatagcttatagatcaaagcgctcactgaatacgaatggcaaatggaaaactatagtaataaacatatcttattggttgagactagaatatcttagtgtacttacccttgtacgtgtagaacttgtccacatccacgccagcaatcagcgaggagagcgagaaagtgacgttcagcgtggcctcctgattggcatcggcaatcagatgcaaatgtcggttaatggtcaccaggccagcaccctcatcctcgtcgagctgtattagaaacataaataggtttataaatcactcgcaaccagctcaaccactaaaccactcacattgaagaagaaaccca

SEQ ID NO: 34292 - DNA, 795 bp, DROSOPHILA
atgctactccatgccggcctccaaggagcccagtgtgttgccttctacacggaaaaaccctcctatattgagtcctgcaagatttatgaaccggagttcaccaagtgctcaactcgttcaatacaggcatttatgaaccagctcgtcaaaggtgtgcccgaaatagaggaatcctttggacccatcgatcccatgaggcaggaacagctggtgttcaagcaggataacagcgacgtggccaccctttccgccaatcttacggatatgctgatcaggggctttggcaaaatgctgatcaaggagagcaaagtcagcaaaaaggatttcagctggctaactaagatctacctgccccaaatgcgaatagatggtcactacaaaatggtcggtcgcattttgctggtgcctctgcagggaaatggaaaaatagtcatggaaatagatgatctggacatactgatgaccaccaaaacacgcctctacgagaagggcggctatacattttacaacgtgacatccgtgaaggtaaaagtggacgtcggcaaagttcgcaccagattggataacctcttcaacgggcacagcaaggaggtggaagatagcaccaatcagttctttaacgacaattggaaggatgtcttcgaggcactgcgtccgctggtggttgaaaccgtggaaagaacgctactagatctactccacaagacatttgccctgtttccggccagcttctttgtggaggacatacccacctccttaaccttgtatggtcgcaagtcacacatgatcacttga

SEQ ID NO: 34293 - protein, 264 aa, DROSOPHILA
MLLHAGLQGAQCVAFYTEKPSYIESCKIYEPEFTKCSTRSIQAFMNQLVKGVPEIEESFGPIDPMRQEQLVFKQDNSDVATLSANLTDMLIRGFGKMLIKESKVSKKDFSWLTKIYLPQMRIDGHYKMVGRILLVPLQGNGKIVMEIDDLDILMTTKTRLYEKGGYTFYNVTSVKVKVDVGKVRTRLDNLFNGHSKEVEDSTNQFFNDNWKDVFEALRPLVVETVERTLLDLLHKTFALFPASFFVEDIPTSLTLYGRKSHMIT

SEQ ID NO: 34294 - DNA, 2798 bp, DROSOPHILA
cgggaatttttgcgtgttggcgaatgtaatctcattgatctcctgatactgctttaaaatcgtgatgagttcatcgggaggcactgcatccgccaccagccagtgctggatggcgtagtttagagcatagaccgggagtttcattaaactgggttcgtggatcaatgatgcgccttcctctatgattttctaaaggataactaactaaattaaggctccattttatattccaatctactaacctcgatgcaaacgcgctccacatcgatgatgttatgccggaatgctaggtcgaaggcaggaaagatgccatccagaggcaattcctgctcctttagtttctcagcaaaggagcgaaggagctccggcatgttgtacgcgcaggacaggatgaacatatcccccaccagcttcagctggaccagcggcgaggtcacctcgaaggtgtatatgaactccaggaagatctccacgctctcgggcgaaaccccattgatctggagtacgccgttccagtccttgttctggtacacgtcctgctccagtttgtcggaggcagtggccaggaagatccgatggcagccaaatttcttgtagcacacactgaccgccggctcatcggattgggggcagttgctcaggacgtgcacctggcaatcggcatcggctccactgcgaaagtattccagtctgcggtttctactcgtagcgcgtttggacccatcactcggagaacccaatggtaaattctcctcaacatccgatgcagctgtggttctgggcacaacgagttccggcctcaagttctggatccctccctggtcgttcgcctcaccctcctcctcctcctccaggtcggaccaccgattgttgcttcccaggtgggctttgccggcggcctccttctcagagtctgacattcctgccagggaaaccctaatttcgaattccaaattttgtgctatgtgagagcaaagcctccaaaaaatccccagtcactatgaactgcaagctacgccgcctggacctgttgcggaatggccaaaagtcggactgcgagctccatgtctcgcaaccggacaagttgaaggagggcaagcgttgtccatgcattttccgctgccaccaggtgatgctcatctccgcctccgcggagttcgagcgcctgatcagggatcccgagttccagaagaacaagcgagtgatcagcgtggacgacgcctctcccaccgcctacgaggcgttgctcctctacatctacacgtacgaggtgtgcaatgcggtgaccatcgacatgtgcggtgacctcatgctgctggccgagcgctacgagatgctggacttcatcgactgctacatcgacaagctggcccaccaggagtggcccatggaggtggttctgcaggtcttccacctggccagcgagcaccaccatccggcactgatggatctcgtggcgaaagtatgaatttccgcacttttatctcgcttaatccccataccattccagaaaatcctccccgtagccacgcaggtgctcatggacaactcgttcctcaagctgagtgttaaggagctaaaggctctgatgataatcctgaaaaaggatggagatctctccgatcacgaactgctgacctcgctgaagaactaccaggatgtgaacaacctgcgctacgaggacatggagcagttccagcagctcgttgaggtaacccagttgttcggtcacgttctcttcgaagtggatggcaccatagttgtgcccgaagaagaaaaaccttcgccggaggaatagataggtttgcttaccacccaaggaaatagacaggatggtgtacatatctagagggatcatttattggattagggatcgaaaaacaaacaaaatcgaattcatatcggcttaaagaataaatactacctataaacataatacccgaatgggccgaggccggtgcaacaaaataatcttataaatcaatcaacggaagcggatgcctggtatccggagtcctaagaggacgtgcgcaagggcgtgcgcacttccatcggcaccatcgccacatcgccgtcggattcacaatcgccatccccatcggcgtcctcgtcaatgaccaggcagctcggcttaacgctgagaaagtcatcgctgtcgagcatcacatcctcgtcgtcatcgtcgtccccgctctcggacagctcctggtcgtgatccgtcttgtagccgttggtttgggactgctccggcagctgttttatcgcagaaacaggtgtatccatctccctctgaatcggaccagcagtattgctctccagttcgatgttttttgaatcaaacttgcagacgaccgcgatgcgcagattcagaatcagggagtagagcttcacggccgggcccaccttgagtttcaggtacgtatccaactccttgcgccccagcatcagcaacgccctgccgtcgatgtcctgctcgaagatcaccttggcaatgtcagtggaatccagggcacgctctatgtactcgcacacatcccagctggtccagtggagtggattggttcgcacgtcgtccaatttgaaggcgctgttgagctgccagaggcgatagtttggcaggaactgtggtccatagtccttcacaaaggacctggctatggccagggagcgttcatccggcacctgctccgcatcctcctccttctgcatctgtttctgctttttcacaaccttctcctcacaaggagacgtctttcgcttggcttgcaccacttccgcgaccttcgggtagacaatct

SEQ ID NO: 34295 - DNA, 750 bp, DROSOPHILA
atgaactgcaagctacgccgcctggacctgttgcggaatggccaaaagtcggactgcgagctccatgtctcgcaaccggacaagttgaaggagggcaagcgttgtccatgcattttccgctgccaccaggtgatgctcatctccgcctccgcggagttcgagcgcctgatcagggatcccgagttccagaagaacaagcgagtgatcagcgtggacgacgcctctcccaccgcctacgaggcgttgctcctctacatctacacgtacgaggtgtgcaatgcggtgaccatcgacatgtgcggtgacctcatgctgctggccgagcgctacgagatgctggacttcatcgactgctacatcgacaagctggcccaccaggagtggcccatggaggtggttctgcaggtcttccacctggccagcgagcaccaccatccggcactgatggatctcgtggcgaaaaaaatcctccccgtagccacgcaggtgctcatggacaactcgttcctcaagctgagtgttaaggagctaaaggctctgatgataatcctgaaaaaggatggagatctctccgatcacgaactgctgacctcgctgaagaactaccaggatgtgaacaacctgcgctacgaggacatggagcagttccagcagctcgttgaggtaacccagttgttcggtcacgttctcttcgaagtggatggcaccatagttgtgcccgaagaagaaaaaccttcgccggaggaatag

SEQ ID NO: 34296 - protein, 249 aa, DROSOPHILA
MNCKLRRLDLLRNGQKSDCELHVSQPDKLKEGKRCPCIFRCHQVMLISASAEFERLIRDPEFQKNKRVISVDDASPTAYEALLLYIYTYEVCNAVTIDMCGDLMLLAERYEMLDFIDCYIDKLAHQEWPMEVVLQVFHLASEHHHPALMDLVAKKILPVATQVLMDNSFLKLSVKELKALMIILKKDGDLSDHELLTSLKNYQDVNNLRYEDMEQFQQLVEVTQLFGHVLFEVDGTIVVPEEEKPSPEE

SEQ ID NO: 34297 - DNA, 2405 bp, DROSOPHILA
cccttgttgttgccgttgctccaattgctgttgctgttgtgccagttggagttgctgccgtggcggactttgcagacttgcctacttgttgttgccccgtttgaggcgccttcttggcagccattgttcctgacgacaatgacgtcgcgctgcccgatgttggcgttttcactgcacttctcaagggcttcgagctgctgccgctggcacttgatcctgttgcaaggctgctcgacttgatgcgaccgctgccgctggtgctgctgaggttgttgttgttcgccgacgacaacttggtcctttttgtatcctcgacaagtccacgcatttcgctgctgcttcaaagtacgcctgagtagtgtgtgtgtgtgcgtgggcgtccataaaaatacagatatatacatatatcgatattagctgttcaataagttccgagtttcctttgctgccgctttccctcaactgttttttcattaccttagaggggttttttccttttgtaaacctcttttccagagggttttacttctgaaattaacaaaataaccgaaagttctcgccgctttgattttgcaccgttatcctgttgtgtacgcgttgagtaagactggcaaaaagttctttatcctattgatttgtccagtgcgccaagctcgcaagctcctcgcgagctttcgttgggggtgttctcgatggtcacgctgtgtgtggtgcgcaaatcacctttgacactttcccaatgcacttttaagttatttttaatcatattatttatacaagtaccgaaatatttcaacgacagtttcgcacagcccacgaaattgctaatactaattaataaatacattttagaatagttttgagtacctaaattgttatattaaatatatatgtgtatatatttatatatattatatataatatattttatatatgcaacattattacttaacatattattattagcgcacaatggaaatttggtttccattgctgcttatcatcgaatgaataataattcggactcaccgcgtttcagtcgctttgctttcagtttcgatggcgacggggatgaagcactggcgctcgccaccgtgtccggcgcaacaggtacaacaggtggtgcgggctcgtcgggatacgggtacgtggtggtgccatcgattacctcggaagaggcggctgctgcggccgcattcgagaactgtgtggatatgtggctgaagatctgcgaggagatgctctccgtgcgccggaaggtgttccgcaggcggtccagcgatgacgtgggggcgctgggcgcaggcgcggcacctccggtggtgggcgtaaccggaatggagacactcgaggattgggagtcttcactcctttcgcggcgcaccagcagatcgtccgtgctcatggcgaatcacttgcttcgcggcgattatcaggacactgtgcggagtcacatgaatcaaaatgacgcgattacagccgctaatttcgcttgttttgcgcttgaacgcgggtaaacaaaaaagtttgtcaatacaaaattaaaacagctgttgcactgcgattggggatgggcgataacaatcactggttacagatcacggttatcgcagctcgatgggagctgttatgttattgaactgactatgcttatcgataagaaaactcaagcaggtgttaaaagcatcatagggtggcaacactgtgcccacttttaccgccaaaataaattgctaggtttatttacgaaaattaaacgcccaacgaaaggacaacgaatggaggaggaattgaagcagcagttcgacgagatgggcgtggagccagcggacgcagttctgggcaggtgtgcggagctggccattacctacaacatccacgacgccaccgagttcgtggagcagtggatggccttcagtttgtcgcacctccaaggcgaggatcctgcgatcgagaatctgggcgactttgagcgcaaggtgttgcagctgcggaaggacaaggcgggatacaaggcaactggccagaaggcgaaatcatatggttcgccctctgtacaggatacgagctcactggccacctatggcgtcatggaggacgatcccatgctggatgactatgtcagcgaatcggcagtggactcctccgctctgcacacgcccaaggccaagaagcagtcggatcggaccgccaatctcaagggcgccgcactctttagccccgccagctatacaccccaatcggcaaagaggaaagcaggtttagaaacaccatccaactcagtggccggcaagccgggcgatatagttgacaccttcggacatcccaaactcctggctggctccagctggcagtcacaaatggagcacacggttccggtgactcaaaaactgctgcacaacgac

SEQ ID NO: 34298 - DNA, 405 bp, DROSOPHILA
atgagcacggacgatctgctggtgcgccgcgaaaggagtgaagactcccaatcctcgagtgtctccattccggttacgcccaccaccggaggtgccgcgcctgcgcccagcgcccccacgtcatcgctggaccgcctgcggaacaccttccggcgcacggagagcatctcctcgcagatcttcagccacatatccacacagttctcgaatgcggccgcagcagccgcctcttccgaggtaatcgatggcaccaccacgtacccgtatcccgacgagcccgcaccacctgttgtacctgttgcgccggacacggtggcgagcgccagtgcttcatccccgtcgccatcgaaactgaaagcaaagcgactgaaacgcggtgagtccgaattattattcattcgatga

SEQ ID NO: 34299 - protein, 134 aa, DROSOPHILA
MSTDDLLVRRERSEDSQSSSVSIPVTPTTGGAAPAPSAPTSSLDRLRNTFRRTESISSQIFSHISTQFSNAAAAAASSEVIDGTTTYPYPDEPAPPVVPVAPDTVASASASSPSPSKLKAKRLKRGESELLFIR

SEQ ID NO: 34300 - DNA, 2992 bp, DROSOPHILA
gactttcgctgtacgtttgtttatatagacatgaaaactgcaacaaaaggaaaacaaacaacaaatggttagggctcgtctatcgataacattcgcggcgcggcggactatcggctggccagggccccacaccattgccgcctaaaatgtgtacacacacacgcacaggcacaccgacgcacacacacacacactgagcccacggtacagtgcacgaaaaaacaaaacatgcgcctccagagaacaaaaaaagtggggaaaaaaggaggagtgtgtctgtatgcgccgctctgccaggcaattaatattactgcacttgcattatcttttttggccgcgttgcatgggcggcttttccgtactttttttgctgccttgccgtacggtacttcgataatccgcaatccgagcgccgactttttttttcggacagcacgagtttgttgtggtgagcgcgtctccacaggcgaattaactgcctttcaccgctgcgcgtgcgggcacatcattaacggtcggttcacggtacgcgcaaaacttttcatcaattaccaaacacctttttgcactgtgcaatttctcgctttctggccactgtgtgaattttcggctttatgcgagtaaaatggcgcactagtgtaccaaatgcggccctcgcataacgcgttcgcttcttggctggtatctgccggaaaataccgaaaatggcgcataagaaaataccggcgtgagtggtgcaaccggttggcagcactgctcgtttatctttttgaaaaatgcttctaaagtttggatcgcttttgatcaataggaaattattgaaaactacaacttaaatatagactgtctttcatctaagcttccccttagatgagcttccagtttgccatatgcaaaagatacccaatacaatgctaatgagaactgatattttattggcttattttttttaaatttttgggttttatgcgcgaagcttttgggaattccaagtagttttctagttttgattgatgaatccctcggcgtccagaagaacattggggaaatacttgataattttggtgaagtgcgggaatttttgcgtgttggcgaatgtaatctcattgatctcctgatactgctttaaaatcgtgatgagttcatcgggaggcactgcatccgccaccagccagtgctggatggcgtagtttagagcatagaccgggagtttcattaaactgggttcgtggatcaatgatgcgccttcctctatgattttctaaaggataactaactaaattaaggctccattttatattccaatctactaacctcgatgcaaacgcgctccacatcgatgatgttatgccggaatgctaggtcgaaggcaggaaagatgccatccagaggcaattcctgctcctttagtttctcagcaaaggagcgaaggagctccggcatgttgtacgcgcaggacaggatgaacatatcccccaccagcttcagctggaccagcggcgaggtcacctcgaaggtgtatatgaactccaggaagatctccacgctctcgggcgaaaccccattgatctggagtacgccgttccagtccttgttctggtacacgtcctgctccagtttgtcggaggcagtggccaggaagatccgatggcagccaaatttcttgtagcacacactgaccgccggctcatcggattgggggcagttgctcaggacgtgcacctggcaatcggcatcggctccactgcgaaagtattccagtctgcggtttctactcgtagcgcgtttggacccatcactcggagaacccaatggtaaattctcctcaacatccgatgcagctgtggttctgggcacaacgagttccggcctcaagttctggatccctccctggtcgttcgcctcaccctcctcctcctcctccaggtcggaccaccgattgttgcttcccaggtgggctttgccggcggcctccttctcagagtctgacattcctgccagggaaaccctaatttcgaattccaaattttgtgctatgtgagagcaaagcctccaaaaaatccccagtcactatgaactgcaagctacgccgcctggacctgttgcggaatggccaaaagtcggactgcgagctccatgtctcgcaaccggacaagttgaaggagggcaagcgttgtccatgcattttccgctgccaccaggtgatgctcatctccgcctccgcggagttcgagcgcctgatcagggatcccgagttccagaagaacaagcgagtgatcagcgtggacgacgcctctcccaccgcctacgaggcgttgctcctctacatctacacgtacgaggtgtgcaatgcggtgaccatcgacatgtgcggtgacctcatgctgctggccgagcgctacgagatgctggacttcatcgactgctacatcgacaagctggcccaccaggagtggcccatggaggtggttctgcaggtcttccacctggccagcgagcaccaccatccggcactgatggatctcgtggcgaaagtatgaatttccgcacttttatctcgcttaatccccataccattccagaaaatcctccccgtagccacgcaggtgctcatggacaactcgttcctcaagctgagtgttaaggagctaaaggctctgatgataatcctgaaaaaggatggagatctctccgatcacgaactgctgacctcgctgaagaactaccaggatgtgaacaacctgcgctacgaggacatggagcagttccagcagctcgttgaggtaacccagttgttcggtcacgttctcttcgaagtggatggcaccatagttgtgcccgaagaagaaaaaccttcgccggaggaatagataggtttgcttaccacccaaggaaatagacaggatggtgtacatatctagagggatcatttattggattagggatcgaaaaacaaacaaaatcgaattcatatcggcttaaagaataaata

SEQ ID NO: 34301 - DNA, 939 bp, DROSOPHILA
atgtcagactctgagaaggaggccgccggcaaagcccacctgggaagcaacaatcggtggtccgacctggaggaggaggaggagggtgaggcgaacgaccagggagggatccagaacttgaggccggaactcgttgtgcccagaaccacagctgcatcggatgttgaggagaatttaccattgggttctccgagtgatgggtccaaacgcgctacgagtagaaaccgcagactggaatactttcgcagtggagccgatgccgattgccaggtgcacgtcctgagcaactgcccccaatccgatgagccggcggtcagtgtgtgctacaagaaatttggctgccatcggatcttcctggccactgcctccgacaaactggagcaggacgtgtaccagaacaaggactggaacggcgtactccagatcaatggggtttcgcccgagagcgtggagatcttcctggagttcatatacaccttcgaggtgacctcgccgctggtccagctgaagctggtgggggatatgttcatcctgtcctgcgcgtacaacatgccggagctccttcgctcctttgctgagaaactaaaggagcaggaattgcctctggatggcatctttcctgccttcgacctagcattccggcataacatcatcgatgtggagcgcgtttgcatcgagaaaatcatagaggaaggcgcatcattgatccacgaacccagtttaatgaaactcccggtctatgctctaaactacgccatccagcactggctggtggcggatgcagtgcctcccgatgaactcatcacgattttaaagcagtatcaggagatcaatgagattacattcgccaacacgcaaaaattcccgcacttcaccaaaattatcaagtatttccccaatgttcttctggacgccgagggattcatcaatcaaaactag

SEQ ID NO: 34302 - protein, 312 aa, DROSOPHILA
MSDSEKEAAGKAHLGSNNRWSDLEEEEEGEANDQGGIQNLRPELVVPRTTAASDVEENLPLGSPSDGSKRATSRNRRLEYFRSGADADCQVHVLSNCPQSDEPAVSVCYKKFGCHRIFLATASDKLEQDVYQNKDWNGVLQINGVSPESVEIFLEFIYTFEVTSPLVQLKLVGDMFILSCAYNMPELLRSFAEKLKEQELPLDGIFPAFDLAFRHNIIDVERVCIEKIIEEGASLIHEPSLMKLPVYALNYAIQHWLVADAVPPDELITILKQYQEINEITFANTQKFPHFTKIIKYFPNVLLDAEGFINQN

SEQ ID NO: 34303 - DNA, 2177 bp, DROSOPHILA
gagggttaaacgtttaaatttcaattaagccaaaagccctcacgcctggcagcacaaacccaaacccaagcacacacatggacccatggactgagtcctggtcctggccctggaccccatccccatcgccactcagcagcaccagccaacaacgttacagctcataaatttcttgacttgtgtcaggatgtgttagtttggccgacattccactcgtcctagcagcgaaagccagaaaaaaaaacacccagttaccagttcctagtcgtcgtggaacgtcaaaggcagtcagcaactactggtggtaaccggaggggtttctagttttcagggatcacgggcttggaggagcaggagcatcccagggaggagagcatcccaagtaacccctgctaaggcggccagtcacttaaatgccccagaaataaactgaaattgcacacagtgtgctcaagttaagacaacttttggcagctgcatttgaacactcacaaagggccaaatgttgctgccgagaagcgaacttggcatgctcctcatcatcagcagctgattggcaagggattcgctctgtgcttatcacgaatgcatcaaggatatctaaagcgatatcaagataaatctaaggcttttttataaaaaaaaaatgtatgtatgcctgtaattattcaataagaacacttaaaaaaacctctatagaattacttgaacttgaacattttctccctgattttcgaacttgtgatctttacttgtttggtccgcttgcagtttgtacagtcttttcttttctgtccacgctcgaggcgtggccaaagctcggaacccctaattaaagtaggtctacagcggtgcaatctagaattctctgtcttctggaggctcacctccacccattccgtgtgcggcgtgattatctggctgcccacctgccatcgccttgcccacacatatgtatgcgtgctgcggcttatgcatttatgcgactgaacttggcagctcattgtggacccttgttctgcaactcgcactcgcactcgtagtcgtactttgtgtacttgttgatgatgtccttgccggtgctgctactggtactgctccatttgcatgtcggcggtacgagctggacgaccaggaccagaagcaggagcagaacatgagcataagccacccgcatgcacgacctagtgagaaggctccatttgtttgtttgctctggcgatccaaactgctaaacgggccaactgctgctggctctgctcaggctggtgaatgcgagcaatggactttggactggaagttccaagacccggtgcctccgccggtcctgtcaacttgtcagttgctgggctcacgaacagagctgtgccagctatgactgtgtggatgacttaaaagccctgacaggtgcactcaggcacgcacttgccacatgcatactcaaactcatacgcgcagcccgctactttgttgtgctaatcctattggcatggtgttggcgaactccatcggatacattgttgccccagccggagcagcacatgccccattaatacctagacgagcaaaaaaaaaacttagttccaacttaaaaaggcctgagtgcaaaagcaaaattgaaaggttacccaaacttatatcaaaaaaacattctgtgaaatctcgatttatttctagtttatctggacacttgaataatagtagatgacctgcttaagcaaactttctaatgtgttcattaaactggtataaataagtgcccgcaaagtggcaactcaatgggatcacagtcgcacagacaacaaactcattttccattgcccctaattgaaatcgataagtggctcgtcctaattaatacaaaggagggtgtgacaggtatcggcagcttaaatattaattatccattatatgcacacatcctgattggaccagtcctcctatcaccttctccaatcttcccttagcatcgcattgagaattccccagtcaatagcaagtgctgaattcacttaattgccgacaccttttcattgccgctggccaactgagaacatcctggaccgaactgcagcgcatccgtatccctttggcgacacacaattaattcgtcctggcaggcatcagagcttaatttttatttcattaacgcaacatcaccacccaaccaggacacc

SEQ ID NO: 34304 - DNA, 177 bp, DROSOPHILA
atgcgggtggcttatgctcatgttctgctcctgcttctggtcctggtcgtccagctcgtaccgccgacatgcaaatggagcagtaccagtagcagcaccggcaaggacatcatcaacaagtacacaaagtacgactacgagtgcgagtgcgagttgcagaacaagggtccacaatga

SEQ ID NO: 34305 - protein, 58 aa, DROSOPHILA
MRVAYAHVLLLLLVLVVQLVPPTCKWSSTSSSTGKDIINKYTKYDYECECELQNKGPQ

SEQ ID NO: 34306 - DNA, 2651 bp, DROSOPHILA
caaaaagtcgctgctgtcgaactgtacgcaatactcaatgtcgggcaatttcacatcaaatttggcgtcaatatcaattaccaggacgaaaggcacgccaactggccggaaatgaaggcatttgtcagagctcacaatgcctggcgaataattgcaaaactagcaacatgacaattcgatggccggcaagggggtaagttcatgaggaatgaaggacgaaaggcttccgaggacatgaccaggctcctttggctcccagaaagtagtccttgaaaatttatctgcgttcaattaaaaacttttcaaatttcaattaaatgtgaaattggcatatttaggcgcttgatgaacggccgaggacacccggacgagcgaacgaatgaaggaccagtcgaaacggaatcaaatgatggtcatgatgggccaaaaggagcaaggagcgaggatgagtgaaagaaggaccatttagcattcaccattcgaccggcataactaagcttgggggattattttgtcaattttaaatgtcctgccatttacagcattcaaattcaactcgcctttgttgtgccagcccagcctgttgtagaaatgtttatgaagcaattaggcgctctgaactgtgaacaatgcgccgaaatgactgcaacggaaatttaaagaccccccatttccacaccctctctcatacttttagagatctcgaaagggttttccttttggctttaagctttctgccggctcatcgtgactgcagaaagattagaatcttgctacgcctttgccccgatttgtgcctttgtcgtcgaccaaaaaggatgactggatttgtttttggtttttttttttttttgtttttttggcagccaaagaggcgcggacctggaagaagtcaacttgtcatgcttggaccgcctcggcttagccattatcctttatggtggccgacaagtcctgttccattacacactcgcagttggcttgttgttctccttggattttacacgtgttgtaatgcgagagtgtagggtatctgaatagtttcagagcttgcacttaaaactataaaaggatattaaaaagatagtttgttgtagttaacttatttcaaaacataacaagcaagaatgaataaaggttatctagaacttaaatttaatattaattgcagcacaagtaactatggttttcttaaagtgcatttccatcttaccttttcgcgcatttgggccaacacttggacaatgtcgcctcgctgacaggcgtacataagactggtgcagccctcggcgagacgccttcttgcaacggtggatgaggactgcgactgtgacactgtgagctgggcaggatctgggtctgtttctggcacgtccactgctgcttccgctgccgcatccgtatcctggctgctgcccggcatagcaatgactttgtctgctgcctcttgcctttgctgttgctgctgctgctgctcctgcttttcctgctggggaggatggtcgttgtcctgctgctgctgctgctgcatggtgcgtgtccttcgcggcagcggactctcgaactgcaactgctttttggcggccttcagacgaggcggcttggccggccccctcactcgtttcacttccgctttcggacgcttctgcatcctctaatgtggttagtatctgacccgctttttgtcctttttttctgcctggctttgtgcttgtgtttgtctttgttgttgcactgttggctttcgctggatttttcactcattttacgccgctttgatgcattttttcgcgtttaatgatggtggaggcgggctgggctgggctgggtggccacggcactgtctatgtataattaaacactaatttgtttgctcacaactggcttggttaagggcttctctgctgcgggtccttcttaccgccgatagtttgcggttgccgttgacagtttcgctagttcaaagcaaacacattttatgtgcttttaagcggaaacggaagtgcggagtgcgagtgtggcggtgtgcgcttctttcagtcgaacgccttttaaattttcaacgggcgaacgcaaaggcagcatccgcggcaatgttctcgtcaataattaatttcggtttttatcaaagagtgagcaacgcacacacatacacacacacacattcgtggcatctcgggaataggttgatgcttggcaaaagagcgaagtagacagctagaagctgggatcctgctgccaaaccaaaccaaacacagcaaagcccagcccaagccaaccaccccccgctgcgcacaagggcgttgacaggacctccgcgctcgctgtgaacgctaaagtatgctatgaaaaattcactgtctctgcatttgatttaaatttcccttttcacacataagcggcgcacatttcacgcgatatcaaagtgagcttcgttgttaaatcgcgtggaaaatagtttttgaaaaacgccaccgcaggcggaaacggaaattccttgcttatttttagccacaaataataatcatgtggatgctcaagctaaatccgcgtgcgcatgaaaaagaaaaaatgaaaataaaaaacctgggaaatctgcgaaaacctatcgagctgattgcaactcgaaattaaattatataaacacaaga

SEQ ID NO: 34307 - DNA, 471 bp, DROSOPHILA
atgcagaagcgtccgaaagcggaagtgaaacgagtgagggggccggccaagccgcctcgtctgaaggccgccaaaaagcagttgcagttcgagagtccgctgccgcgaaggacacgcaccatgcagcagcagcagcagcaggacaacgaccatcctccccagcaggaaaagcaggagcagcagcagcagcaacagcaaaggcaagaggcagcagacaaagtcattgctatgccgggcagcagccaggatacggatgcggcagcggaagcagcagtggacgtgccagaaacagacccagatcctgcccagctcacagtgtcacagtcgcagtcctcatccaccgttgcaagaaggcgtctcgccgagggctgcaccagtcttatgtacgcctgtcagcgaggcgacattgtccaagtgttggcccaaatgcgcgaaaagataccctacactctcgcattacaacacgtgtaa

SEQ ID NO: 34308 - protein, 156 aa, DROSOPHILA
MQKRPKAEVKRVRGPAKPPRLKAAKKQLQFESPLPRRTRTMQQQQQQDNDHPPQQEKQEQQQQQQQRQEAADKVIAMPGSSQDTDAAAEAAVDVPETDPDPAQLTVSQSQSSSTVARRRLAEGCTSLMYACQRGDIVQVLAQMREKIPYTLALQHV

SEQ ID NO: 34309 - DNA, 2622 bp, DROSOPHILA
tattcgtgtgcatgtgcgtatgatacgtattatatacatgagtcacgtcgagcatatcaacatcaatggtcacaaagcgcatcatatcaatgtacataagtacagtttgtcctcggggaaacggacaggatgtacgttaaatgaataaataactttggttgagattcttacagcaatttaaggcactaatgtttctgacgactcaaaataagtgggaaatttttaagttattaaataagtttttacactgcaattgccttttggcaacccactgtctccagtcgcctctctcgcttccgcttttgtctctttctaatgcttctttatttgtcagaagacgaatgtcaccatcacgcatatttctcgtttctttttttttcactcccgctttttgcgcctccctggcgtttcgatggagaaatgaaggagcaacaatgtttctcatactcacatacatacatacatacatacaaccatttccaaggatatgatgtgtgcatatgtatgtgagtacgcaactgaaagaacatgtgaacaatataggtgggttcctaaatgtatgcgccacatagtctcgccgtattgctttcgagatgataaacttcttaccaagcgtattttgcattcaaagggagttcgccagaaactcgactatcagatacctgttactcggactttttatgcgctcgaattgttgatggatttcgatggtcgaggtctccgatttggattggcaatgggaatgagtactgcaaatggaaagggactcggaatggggcagcttgatggcttttggcttttggcttttgccttttgccttttgacttgcgtagtccttcaacttgttgctttttattgcagcccgtgcgacggcggtgggtcatgcccatttcatttctgagcgtaactttaacccttcaaccttggagcaacaacaaaagcaatcaagctaaccgattcagtgcactcgaatggtgcccgttaaattaaagtcttgcccttttttttttctttccaaattgtcttgctgccccagaccgcaaataaattgaaagtgcctttggaatatttttcatgcaataaccatagccgggaatatattaaattggcgatcccgaggatcaacagagagtgttggaaaaaaaaaaacgttgaaagtcctgtctaggccggaatgggtggattcagtggattcaagtggattctagtggattcccccacccccctccaatcgcggtttccagtctaacccctgttgcgcctgcgctgggcgcgcctgcgagcggcagcagcacgtctcctgcgtgcggcacgacgcctcctgcgagcggcacgcctccttctggcggcagccttcttcttggatgaactgctggagctagaggacgagctgctggaactggtggacgaatcgctgctgctgctgctggcctcggtggtgtccgaggatgaggaggaggtgctggccgaggttgtcgaagtgcttgagcccgtagcggtggtcgactcggtgctggtgctggtttccgtggtggggctggtgcccgtagcgctgtacagggcacagatcagtacgactgctaatagcagccagtggagcttcatattgagtcaaagttaatcgaaagactggatggtctaatccaggcgccgtttaccctatttataggtgccaatgggcctctctgcgtcattgaggcctaacaatattaacaaaacaaaacaacatacgttagaacgaattcggatttttttgtttgtttttcattttttttcaattatttttttttttttttatttcggtgacactcgctctttaacagctacaatatttgcacaaatgccgaatatttgcccagccaaaagtcgcaattatattaggcaagccatattacgctagccaacatatttcgcattgcccgcttactatttactaattttgttctacggggaatcttcattcatcgatttcattgttcattgatcaaatttcattgtgagcaggtgaacatctatctgccaatgttgggtctgacttcaaagcaataggcgttgtcaaacaaaaaggcaaatttacgcggcattgaatgtgaactttgtttgaaattcaacaatgttatattagacgaatgaaacgtttcgaggtgccaccacatgtgttttaatattctctttgaagattaaatattggtctttaaatatttatatacacaaacatccaccaattaagttaacggagttccaattgaaaccaatcaatatagtcttaaaaacgttttaaaaactatcgatttcagaaacataaaagttaacttaagctgttgcaaaaaaaaaaaaaaattgagactcattcaactttatctgaacatttcggtgcgcttgccattttttttcccagatttataaaatactctgaagtaaacaattaaatatttagctacagctcttaatagcttcgttcgcgtttgctttttgctttttatgcgcatgttagtaagtgttccttgcaaaatcgatggaaacggaaacggaaatgaaaatattgtagaaatggaaaaatgacactctacattgcctgtactcaactcgtcactgcaactttaactttaacgataacgaact

SEQ ID NO: 34310 - DNA, 566 bp, DROSOPHILA
attaactttgactcaatatgaagctccactggctgctattagcagtcgtactgatctgtgccctgtacagcgctacgggcaccagccccaccacggaaaccagcaccagcaccgagtcgaccaccgctacgggctcaagcacttcgacaacctcggccagcacctcctcctcatcctcggacaccaccgaggccagcagcagcagcagcgattcgtccaccagttccagcagctcgtcctctagctccagcagttcatccaagaagaaggctgccgccagaaggaggcgtgccgctcgcaggaggcgtcgtgccgcacgcaggagacgtgctgctgccgctcgcaggcgcgcccagcgcaggcgcaacaggggttagactggaaaccgcgattggaggggggtgggggaatccactagaatccacttgaatccactgaatccacccattccggcctagacaggactttcaacgtttttttttttccaacactctctgttgatcctcgggatcgccaatttaatatattcccggctatggttattgcatgaaaaataaaaaaaaaaa

SEQ ID NO: 34311 - protein, 119 aa, DROSOPHILA
MKLHWLLLAVVLICALYSATGTSPTTETSTSTESTTATGSSTSTTSASTSSSSSDTTEASSSSSDSSTSSSSSSSSSSSSSKKKAAARRRRAARRRRRAARRRRAAAARRRAQRRRNRG

SEQ ID NO: 34312 - DNA, 2339 bp, DROSOPHILA
aggttttttgaaatgttggagaaactggagtgtctcagttttgttacaatggctgcaaaaactttgagtttattcttgcatatccaaagggtcgttttcaaccagtccgcaaactatgctttaataaaatgacaataattaattgcggaatggcaactcacaagagttttagctgcctgtttgctcagtagtggtcttcgtgctcgaaaatattctgggcaccacctgactcgcctcttttgttatggaattcgtggctgttgttttccgtttttttctcttaatgtttttcctctcacatacatacatacatacatatatgtacctatatatatatatatgtgtgtgagtgtgcggtatctatggcaacagcttttcgaatttccccattcgcttttttgggctgaaaagtttttgcttacgagtattttgccgcttgcacaaattttccttttggggcttttgcgggtttcctcgagttcggttttgtgctaatggatttcaatggaaacgcaacttttgaggcccagaaaagccttgacgaataaatgtttaatgctcgtctgcattttaatcaacttattaaaaaggatttcagatttcgcattcacattcagatgatcatgaataaaatatttgttctgaaaattaatataaaatgattagctaaatcactatagatgttaaaaaaaatatacaagaacttacacatttatgcgcatcatatatttatttataaagtaaaggcatttcaaatgtttaaacaattgtgcaaaacaactagttgctaaattttgtttggccaataactgaataaataacatttgactgacatgtcacaaaatatgtatatttttttatgatttcttaattgacttgtaaaagaattattgtagtgttagttaagcttatggactaagaaataaaaaaaaaagaaaacaattggttcctggggttcagcattgagagtggcgtggattttctattggtcctggatctcttattcttccgatctgcggtttctactgctgcgaccattgcggctcctgagaccccttctccttgtgattttcctgaccttctttggcctcttgacctttcgcttatagtgagtgacagtcttcttttttgagctcgaggaaggtgaggctgttgttgtggtggccgaagcggaagtggtggtggtggccgaagcggaagtagtggtggtcgccgaagcggaagtagtggtagtggccgaggcggaggtggacgtggtggttgtggacgcctccgactcgtggatcatcacacagccgaggaaggtggcgagaagtacgagtaccacggtgatcttcatggtgagcaaatgctacaatagatgccttgctactgatgctgtcttgaagaacgaaagccagcttttatagtagtcttctctactgggtttatcctcttcggccaaactgtgtcagccaaagaaaagatgttatttttggccaaacaaaaattcgctatttttcgtattggcacaattgtttaaacagataaaatttgcacatgtacaagaggcatgataatctatttttgtatggagcttgtcattttgcgaaaatttattaactgttattataaaaatcacttaagccactaatgccaacggaagtctagttttgtcaaccgttacttggtttttaaataaatgcaaatgacttaggttaaatctatatacgataaacgcattgtaaaaactgcagaaaaattcaactttatatactatactatatatatagattctttactatatatatactatatactatactatattcaactatatattctgccacttaaataatttcccctaaaaagtatactacggcttttaaaacacggaacacatcagctttaaacttattctcttaagcaaataatggaaaaatattaaccaattaaaatgattttgccataaattgtttactttcatttgtagcttgtctgaattatagacaaacaaacacattgtgtacgtagcttaggaaagcgctattattaactatattaaataacgtctggggtagataataatacttaagattataatatatagcatttattgtaggagtatgccctttatattttttctgaaagtaactatttgatcaaaatttcaatggttaattatacgttgtaacgaacttgacatacactttaaacaacaagtgatgcttcttatctcgatctgttttgtaaagtaaatgcataagtaaaagcataagtaaatgctttaagcggcattgataagcagaatgaactaatatcgaaatattcattttatttgccttaagtgttttgaacgg

SEQ ID NO: 34313 - DNA, 339 bp, DROSOPHILA
atgaagatcaccgtggtactcgtacttctcgccaccttcctcggctgtgtgatgatccacgagtcggaggcgtccacaaccaccacgtccacctccgcctcggccactaccactacttccgcttcggcgaccaccactacttccgcttcggccaccaccaccacttccgcttcggccaccacaacaacagcctcaccttcctcgagctcaaaaaagaagactgtcactcactataagcgaaaggtcaagaggccaaagaaggtcaggaaaatcacaaggagaaggggtctcaggagccgcaatggtcgcagcagtagaaaccgcagatcggaagaataa

SEQ ID NO: 34314 - protein, 112 aa, DROSOPHILA
MKITVVLVLLATFLGCVMIHESEASTTTTSTSASATTTTSASATTTTSASATTTTSASATTTTASPSSSSKKKTVTHYKRKVKRPKKVRKITRRRGLRSRNGRSSRNRRSEE

SEQ ID NO: 34315 - DNA, 13362 bp, DROSOPHILA
acttcgcaaatatccgaatgcaaaaattttggtaagcaataaagattgctatgttttcgaggtcaactggcgtcgtctacaattgaatactattgtatatttgaaccattgcaaatgggttttctgtcaattgtttaaatatttgaatatttttgcttgattatatttaaatgcaaaaatgtatgcgaactttctctttcacttgttcaaagatgttttgtctatgtggcgtcgtataaatttagctggtctgtacaattattttctataataacccagtctatgaccattttggtctttcccacaagtctgtttaaataataataggctgatgataggatcatgtttttgctaaacaattgtttgattaatatttacgattaatctttacgttttaaatccattgattatttaccctttaaatccaacgattaatatttacgttttaaagccattgattaatatttaccctttaattatgttttcaatttgattacttaacttgagattttttaatttgaacgcacagataaatgcaaaccaaacttgagcaagatcatgtttttcaacatgacgttccaattttgcccattagtttatcatagatatattcgcttaattaatattcaacatacacaacgctttattcaagactttttaacaaacaaaaaaaaaaattaaacaaaaaggaaacaccagcatactctcaatactgaaagtagtcatgcttctgaaagtcggtgaaggaatcgatgtagtcctcgggatgatagtcaatgctttggtaagcgacatcaggctccgtaaagtcctcgaccttataaaaaattttacatacgagcagccagggcaggactattagcagcagtttccattccattatctctctcgcccaaaataacagcggtttctgcgatgaccgacgaagtactaattaaggggaagctaaagtgtataaagcttccatatagccatatagctatatagccacacagccaggatgtgggtcagtttgtgcagctggcgtctgtccctgtacaagctcaaatatgtgactaacccactttcatccgcacagccagccgccaggtggaatactttcaggcgggcgaaaaaaaaaaaagaatcgaaaatgggggaaagtaagtggccaagcgctatggccaagtcgaaatgcgaatttaaacgctaattgacatagaaatgcgtcggggaatgtaaaacttaacggaatattaaacaaaattgtcataaagaaactatttgagcgagaattgcagttaaggaagtggatgtatatgtatatagagtaaggtatagtaggtacttagttatttaaaatctttaaaatatttcttatttagaataaattatatttgtagcaactgtttcctaattcgcttttttctccattctttctttacagatctcggcttgatagaaaaaaaaaatgttttcgcgcaacagatagctcccaaccgaagtgggaatgatgcgattggcgcgatttacgcagggtttctcgtttaacaagaatgtggccaaggtggtgggggaaatgggcttcaaaacagccgtttatatgctctttttcaatttttaaactttggttcttgccaagaaatatacaatagaacacgtttaaaggccaaatcatgtgtagatgaagaattgtatattttgtgactaaaccactcttgaatatgatagaaaaaaaaaggaaatttatattgatataagtatttggtttctctgcatttttagcatcgcggcagtggcagtagcaacggcaccggaaacggaagcgggaccggaaacggccagggattaggtggcagctgcagtgccaacggcctggcagccactggcggcgttggagggggcggtgggagtggcaacggcggcggtgggtgtggcagcgggagtggcagtgggagtggcaagcggaaatcaaaggcaagaacaaagtgcttcggtggcacagtgtttcggtgttgcctcccttgtcgcgggggcggctccgcagcccccgccacaagtccgccccaaacaccagcccagacgccggacgagctcaaggtcattccggaggattgtaatctggaaaagtccgcggagcaaaagcgcgacttactggagcggaacaacaaaggaggacgatctgctgaaccgcaccgtatccggatctgagctggatctatacggcggcgccggcggcggtacgaaaaagcattcgctggcagacaccatcgatacatcggtgaccaccccgatttccctaaagaccctgatcaacgacgtcgacgaggagctggaccagcaactgagtgcggcggatatagcggccgccagtttggccagcggtctggttgcccgccgagcggaaccagaaacactgagcgacgccagtgtctcacccaccgcggtggtgcagcagcagcagcagcagcagcagcagctgcagcaaccactcttgcaatcacaaccacattttgtgcccagcagcggcaatatccttagccaggtcaccctgtacagcggcagcaatccctcgacaaatccctgccagagtgcagtgcagaatcaaggccaaaactccaatcccaatcccaatcagaatccaaacacaaatccgaaccagaatcaacagcgttgcagttgccagccgcagacttccccattgccgcatatcaaagaggaggaggaatccgatcaggccaactttaaacaccagacgagcctgaaggagcatcagcctctcccgccaccgatcaccatagccactggctactgcggcagctgcgagagcgttcatcactcatccgcaacctcgtcttcggcgggcacagtacctccggggggtcagcaaactcaggagtatattgccggtaggttggttgcattcaattaagatgcaaatattcaaatatatttaccaatatatgtatatccgtgattaatgtttatattgtttttattgccgataggtacctcttcgacgccctcgccgcgcatcaaactaaagttccgcaagccgcacaagtcctgctggtcgcgaatcgtccttgcgcccattggatcggcgggtggctcctcatcggccaccactgtcattggcagcaattcgaacgagactttggcctccagcagcaccaccggcggcaccgccaccaccacccagaacagcagcagcgttagcgttgccgcacaccaccggctaacctcgtcgtcggcctccgccctcgccacctcgcaccccagcaactcgcagctgctgcccaccagcaagatgcaggcggagcagggatccatcggtgacctgcagaagtaccatagtcggtatctcaagaatcgtcgccatactctggccaatgttcggtgagttctgatccttatatgtgaatatgatatacccaattgaattcgttttcatgtctgaatataatatataatgaatataatataattatatatgaatataatgacacaggttttaccacaagtttattttggtgatttttcgattgaaaatcccatttaaaatctcataggttttctttttccgattttccgactatgaatggtcagtatttatgccataattttattaaaaattgaccaaatataaaatcttatacctcggctgattcggtatcaaatttccaaacttttggcattcaaaattaaaaattttaatttttttaaattttttgcaaattttgtcgatgttaccccttacaaaaaatgcgaaaatttggccaaaaatttatttcacaaaatccgctagaaagtcatagagatagttaaaattggtaataagtagtataaattggtaattcgctttgctttttgaccatttttagtcaagttatgcttaaaaacccagcctaaatattgaatattttggacagaattttttcaagcttaaaattaatgaggatctttagatttcggctacagtggtccaaaagaggatttttttttcgggtaaaaaaaaaactagtgtgtaaaggatattctatagttttcgatattatctatcttcttagcaatatgatttgattatgattgatatgattgcatactcgcgtatgatttaaattctgcgtgcacattttttacattctcgtgcgaatgaaatagtaatagaattaaaaactagaaagctactttcaactatcacgcattttatatacgcccagccctttgaagctcttaatcagcgcaattaaaatacaatggaaacttttcgaacgggggaatatacaaaacagttggccttcaagtgggtcgacagcaaagtgaattagagcaaaagccgcaaaaataaaaaaaaaaattaaattttggcgcgcttggagagcaaagcccgactaattattttactgtttcgcaatgtttgtacaactgtttgcttaaattaacgtatcaaaaccccaacgtgacccatggcgtcatacaaaccgactagtggcaaccaattttaagcggaccaacttaaaagttaggccaatgaagtcggccaattagcgacttacaatgaaatcaatttgcagttagtcaacttaatcgaattagaaaagttaaagtgacagaaactttgagttaccgcaggaagttggccaacggagaaaagctgttgattttcattttccccggaccaaagtgtgcgtgcgtgcgtgtgtgtgtgtgcctgtgtctgtgtgtgtgtgtgtgtgtgtgtgtcagttgggcctgaataacttatatagcctggataattgagtagattgtgaacggtttgaaagctccagcttgaaagccagccatcgataagtcatcgacacctgttgagattttgacaggcattttcctccacaccaacgcacaccaacgcacaccacaccacaccactacacacagcacattgttgtaaaaatattgttgcctagtttgcagcacattcaatgtgcattgtgtccataatattttgtgatttcaaattgaagctcgtcgatgggcacctattgttctcgtttagagtgtaacacatatttgttttggttttgttatgtctgcttttgttgaaaagtgcttgtccattggaaataatgcctgtattgttacacttcaaatgtatgtatctctttaatatgtgagagcatagtctttaaatagtcatcagcattttttgtctcaaatttttcgtgtttacccacacgaattggtcatgcagattgcatttgttaatttcaaccgaatggggtttcctcggaattttttcgatcaccaaaaaaaaaatacagtgtttttcgtgtgtgtgttttcgaatcagaccaatgcaccaatcaattattgaatcatgaacaaaaaaaatatttattatgcatatagtccacatgtagttgttgtttcaaccattttcgctctaaccacgcctcctggaattgttgttcctgcgcctgtgctgttgttgttggatgccttctttttattgttgttgttggacgccctccttttgcgattgttgttgctgttggccctcttcttgttgtggtgttgttattgttggccttcttcctattgttgctagctctcttcttgttattgttagccttcttcctattggccctctttttaacaactggagctgtagtaggtgtatcataatccgtatcggatccagaatcagtatcatcatcggaaccatcgtccacatcggaactactgccagaagcatcatctgaggaaccggaactgttcgtggcactggactccgtggttgaggttactatcgatccggatgcggttgtattctcatcggaatcggcggatgaatccgaatcggcggatgaatccgaatcggcatccgagtccgtatcggcactcacaaccagggtaacgaaaagccccaggcacacaaaaagcaaccataactttgtcaacttcatttcgacactatattctatttgactctgagggatccgataatgctatgtcgcaatttatagtaaaagctccagaccacgttttatttacccaagcgaaggccaaaattaagtcaaatatcaaatctctcagaacaaaaaaaaaatggttgaaaacaatagagctggtgattggtctccgcgatgacggcaattggttggaaaaatgtgtatctaattggcaaatgacagggtaactggaatgatcctagttgagtcttgtctatgtctaaccatcgccacaagtaataaaatttgtttaccttagtaaacgatttgagcaaaactatttgatttgctcacacaactagtacacgcaatttttccacaactcgattcagtcaaaaaaaaataaataaataataaacaaaataataaacaaaaccacgatcaatatggaagactgcaacagctgcggttaagtaaactaaagctggtgctcgagataagttggtttaagccaacccgccggtccaaaaatggaaaacatacctttctattctgtaaatatttgtgaaagacaagttcgaggcacccgcactgtcctacacttcacgaacatattaataataatttttgattccatatatattgaatttaatattaaaatcattaaacaaatgggctttaattacaatgcgcaaacaatttcaacaagtttatcatgattcagcatacccttagctgaattatatttgtatatcgcttacttttagtttcttcattttaaaccgtagaaattgttatttttttgttgagtgtatcttaaattgttcgatgtgtcgatggcaaaatgcagtgggtatataaagcgcatcacgcggtattgaattccaaagtcaagatgcgcttggagttgttggttgtgttattggtggggctggctgcacttgccccgtcaggttctacatgctgtaaaactgaaccaccgagatgcgaaaccgaaccaccgagatgcgaaaccgaaccgccaagatgcgaaaccgaaccaccaagatgcgaaaccacgccacccacatgcaaaactgagccacccacatgcaaaactgagccacccacatgcagaactgagccacccacatgcaaaactgagccacccacatgcagaactgagccagccacatgcaaaactgagccacccacatgcagaactgagccacccacatgcaaaactgagccacccacatgcagaactgagccacccacatgcagaactgagccacccacatgcaaaactgagccacccacatgcagaactgagccacccacatgcaaagctgagccacccacatgcagaactgagccacccacatgcaaaactgagccacccagtgaaaagcactgcacgaaacgcatcaagcgacaccgcacaaaaagaaccaagcgatcgaaatccaccaaaaagatagtacatcatcataaccgtccaggaacgacaccagaatcgggatgtggctgtggatcgaaaaacgaatcgggcggtggaggaagcggatgtattttgaaggacctgctaacaccgaagtgccccgattccaaatcgaagtctcaagcttcgtgcaagcctgcacccaagtgtaaatccgacccgaaaccgaaagccgcatcgaaagccacatctaagccaaagccaaaggcgtgtgattcaggcaagaagaacaccaccaagaaaccgcggaagactcagccacaaaaaggtggttgctaaacagcaaacttgactcaaatgtcgttgaatatgaataaaatcacttttttttttttgaatattatattatttgaatatattattattgatttcactagaaatggaatgtgtcacttaaagcgaatcgccatttccttagtgtctgatattttctgctttattgtgcgaatccgctggccatttctactttcagggtttccagagccagagttgcacctgaaattcttttgttcggctcacttaacgggatttggggtcatgtaatttatttccagaccactaaacacaaattacacatgcaattgtcgctgtccaaactccctgaatgctgacaatcccacagatcctgtggcaccacattcacatcgcgtgcgttaatgttgcccatcaacgagagcacatatctgcgtctcttttagtgccgttgctgggcctctctttcgcacccattgtcttcgcattttgcacgccattttgtgtgaccacagcggaaatgaacttgctgacaatgcagtcaaagatacacaaaggaaatttcatttgaaggcgattacaagtgtgttgaaaaaactaatctaaaacatttgttatttttaatttatctgtttttataaatttaatcgacgatatttgaatgtctgcgagtctgttcgaaggaagtttaaggaagctctgatccattttgttcagtgtattagcccatccatatgtgtgcttgtatgcactttgtgtgtgtactagtgagtggaaagtggtgtattaatttatcacggtagaacccttgaggtgactcgtactcaatcattccatgcgaattcaaaagtacacatttttaattctattaaaatcgtgactctcttgcaaaagttacaagaaaatctgccagtataacctgcgtccttctttcaactttcaaatgtctgttcgtttttttttttttttttgtagggttgcgttcgtgcgaattatgtcaattgggatgcaatggttcgaaagtacataatgacttggcattttgccaagagcccccaattgcataaatgtgcataaattttccccattttaattgcttccatttgatgggaaattcttctattacaatttgatttacataatcttccccgatggcaatcaactgttgcgcgcacaaccctatgcgccccaaaccccaaagctccaagcatgcattatccaactcttttgtgacattatgggtattgggttcgggttttgaattggtattgggatcgagaatgaaaatgggaatagggatggatggggtctctcgcaataattcacgcctgagtggagctgcgctgttgctagtcattgaacttcagggaaatgtgggcacatgggtgttgggttaatattatttataaataagggagaagcctcgagcctggccatcctgaaatagctcacaattaatcaataagcaagcagctcttgagtgctggtcatttttcggcaattgaaccgaaatttcggaattgaatcgtattaatagggaaaatctgaaaaaattgccaaataatttggttgaaatatagtggcattatgttagaactgcattaaaagccataaaaggagttaatttaaatgtataaacacattggaatttaattttaaagctaaagctaagctcaataatttacaaataacccgcacaacctttgccgctaaactgaattcgtattgaacatcaagtatacgccatgttgcagctttaaaatgtgcacaaaaaaaaagctttggcataaaagcaacgacgcaagttgttggaaagcttgataaataggtgctttcgaatattcaacattataaaagcacaactttcacgcgaaataagctttcaccatgacccggtgcttgtagcaattaattcaacccgtaagaagctcgtgagcttttatgctgcttttcaactagccaaatatatcctgtgatcccctggcgattcccgagaatcggaagtaagttgcccttgacatttgccgtatacttaagctcagcacaatccctgcacttgacatctttggctgcaataagacatatctaaagacccctaggttcctttcttaaccttcgaccacgaagcctgtcaggaaaatagaatcttgcctggaaattgtaaacagttgtgttcgagttattaggaatagcagatgagatggcaaatatttaatatgtaaatattaaacaatgttctcgcatttcctacagttattttttttttattcaatatgaatctattatgctttaatctgaatcaaatatatatataaattgataattttgatgcagtcgtttgttttcaatacattatatttgattcagatctaatacttcagtcactgctgtgccgactgcccacactcggtctcgaccaaaggttactcacaggaagtgtgggatatttaactccgtttgtgcccactttttgagtggacagtcagcactgcggttgtcagctgccaggtaacttggctagtacaggatattgtggtcggtaacgcctcctttcaagatatattttatgcaaaatcagttcaagttcaagtttaactcaacagtagccgtgcattttgtgtaaacggagaaagtgctctggcgtcaatagccggaaattgttgctgctcatgttttatgttaatctgcagcacaattatactgaaaatcttcttcaagtttaccccttaagcagtaagcccgcacttcaaatacatcggaaaggtttacttacaaaagcattctgaatgaaaattctgtttgcttatcagtttcattttttctaaaaaaaaaaaattataagagttttcaggatttccaagtaaaagtcagtgcttttcatatgaatatatcattcatgactcaattatctaacatttctatttgtttatcctcatcttacacacatacgtaaagacgtctgaggatgaagagaatatatttttcgtattccatatgaatttcttaagaaataatgtgccttacaccgccaagtgaattaataaccattattttctttcctttcttccaggtgagttctccatgttttgacagtattttaatatctataatgcgctgtataaatcgtaagtaaggtaaattacaaatagttgtcacatctgcgtaaacaatttattgcaatttgaagagctagctcatgtttaattcatttactgtaagaaacagtctgatgtggttatgctctataggttgggcattaactatgtacatacttaccaatcaaggctgtcctttatcgagcatatagcacttttaatttaccaaaaaaaaaaaaagaggacatttgccgtgttcatcggggactcggtggctctgctttaatttttaccccaactcttttatttttttttttttcttctcctcctttccatgtgcatcgcacaactgtcagtccgtcaataattgagggcggcgagggataatgccggcaaataggcgtggatggggttaaaggtcctttctcgacatgttcaatcaatttaactggcattttctatcgcgaatacttatacttatatgcaacgttgcatataactaacgtataaaagaaagcaattataacaaaaatgtttcattttgctgcggctgcaaaaactaaataatgcatcgtttctcgcttgaaacataactaagccaatcaaaagaagtgcaattgcaatcaatgaagatgaagcgaatcggacaagttatgcatataaagcagatccgtgcaagttttcactgagtggtatacaccgaacattttttggcatattgacgtctcaggtatttgccaaaaaaaaaaaaactgtttcttttatattgtttgtctggtgataaatggttttctcaaatattgctgttgttcgatgtgcaagagaaactataaaattcgttagacaactgcaatgttttcgaagttgaaaactaattttctttcaatacgatcgaaaattatgaattacttagtgtttatgttaaatatcacaatactcttgcataatcgcacaagttagcttaagttcattacgaaactttgcccaactggccaagttaattgccattaaacaaaacgaaacacttgcacaaactcaattggaaatggaaataaaagaaatgaaaaggaaccagagccaacaaagaaggcaaacaaactgcataactttaactccataatggtaggtggaaaattgttggcggaagtgggccagtagctgtgacaagcacacactttcaatttcattccaaatggcttgcaagtgtattatttgattttagattctctgctgcggctgcggctaaatgtttgctaatttcgttaatcatacgccatgttgcccatcttcacaaagggaagcaaagcgaagcgaaggcttacgtccattgttgtctgccgatactcggggggaatccttgccatggttaggcattcggaggcagctagctttccatcaaaaacacgaatcctatcaccatttgcagtttcggccgtatttctagcctttgttaccacattttttttcgacttttccgtgagatttgaaagcccagccggcgaacatgttagccatgttaattcattgccaacatgttggctcggtcccgggctatttgaactggcacagtgtggcaaggcatacaaaactaaaggcacataaaatattaaaaaaaaaaaaggttgaaaaagaagtgaaaaagaaactctcattttatatgtgcaatatccttatatttggtagattcatttaaattttagcattaaaaagttcaagaaagatttaaaagattgcaatatcgatttaatcttgtgttttaagctatatttcgtaatattttcgttttggccccactacttcgctgatttttatttgtttaattgcccttacaaattgcctgccaatttttggccaccaaatcggtggttaatgtttcccgctcttgtccgcaacaagtttgaatcgaaccaccatcgtgtttggtggtgcgttggtgcgcggtgtttcgtgccgcaaccgattgccagtcggaagcggcttatcgcgtcgccagctgccagttgcgaatcagacctctgagcagcaacaacagcacagcggcagtagcaacaacgcagtaacagaagcagtagcagcagcaacagcagcagcaacagcaacagcaacatcactgtggcaaccgcaacagcacagcagcagcaacatcagcacgtgtgcgtgccccaaagtgcgtttccattgcaaaagcagtcttttctgtttgttttcttttttttttacaagtgttactactttttgttagtgtgcgcaacgacgaaagtgctcgagaaatcgtaagaataaatacaaaataattgcgaaaataatggcttttgccacacaaaaaaaaaaaaaaaaaaatagtacacgcaaatcaaagtgcacaactgttaagtgaagtgaagtgatcgccgtagaaacacttgagactcggactataactaaaccagaatgcttgctgcagggccaacccgccataaaaccttaaaaggtagcaaataaaaaaagtacgggggcgtcgagtttgtcaaagccagatcaagaatagccaaatgacaaaatgccataaatagcacaccgacatatgtatgaaaataagaaatgaaattaatcgcttttcaagatagttatcatcggtttc

SEQ ID NO: 34316 - DNA, 3167 bp, DROSOPHILA
atgtgggtcagtttgtgcagctggcgtctgtccctgtacaagctcaaatatgtgactaacccactttcatccgcacagccagccgccagtggcagtagcaacggcaccggaaacggaagcgggaccggaaacggccagggattaggtggcagctgcagtgccaacggcctggcagccactggcggcgttggagggggcggtgggagtggcaacttcggtgttgcctcccttgtcgcgggggcggctccgcagcccccgccacaagtccgccccaaacaccagcccagacgccggacgagctcaaggtcattccggaggattgtaatctggaaaagtccgcggagcaaaagcgcgacttactggagcggaacaacaaaggaggacgatctgctgaaccgcaccgtatccggatctgagctggatctatacggcggcgccggcggcggtacgaaaaagcattcgctggcagacaccatcgatacatcggtgaccaccccgatttccctaaagaccctgatcaacgacgtcgacgaggagctggaccagcaactgagtgcggcggatatagcggccgccagtttggccagcggtctggttgcccgccgagcggaaccagaaacactgagcgacgccagtgtctcacccaccgcggtggtgcagcagcagcagcagcagcagcagcagctgcagcaaccactcttgcaatcacaaccacattttgtgcccagcagcggcaatatccttagccaggtcaccctgtacagcggcagcaatccctcgacaaatccctgccagagtgcagtgcagaatcaaggccaaaactccaatcccaatcccaatcagaatccaaacacaaatccgaaccagaatcaacagcgttgcagttgccagccgcagacttccccattgccgcatatcaaagaggaggaggaatccgatcaggccaactttaaacaccagacgagcctgaaggagcatcagcctctcccgccaccgatcaccatagccactggctactgcggcagctgcgagagcgttcatcactcatccgcaacctcgtcttcggcgggcacagtacctccggggggtcagcaaactcaggagtatattgccggtacctcttcgacgccctcgccgcgcatcaaactaaagttccgcaagccgcacaagtcctgctggtcgcgaatcgtccttgcgcccattggatcggcgggtggctcctcatcggccaccactgtcattggcagcaattcgaacgagactttggcctccagcagcaccaccggcggcaccgccaccaccacccagaacagcagcagcgttagcgttgccgcacaccaccggctaacctcgtcgtcggcctccgccctcgccacctcgcaccccagcaactcgcagctgctgcccaccagcaagatgcaggcggagcagggatccatcggtgacctgcagaagtaccatagtcggtatctcaagaatcgtcgccatactctggccaatgttcggtgagttctgatccttatatgtgactccatgttttgacagtattttaatatctataatgcgctgtataaatcgtaagtaaggtaaattacaaatagttgtcacatctgcgtaaacaatttattgcaatttgaagagctagctcatgtttaattcatttactgtaagaaacagtctgatgtggttatgctctataggttgggcattaactatgtacatacttaccaatcaaggctgtcctttatcgagcatatagcacttttaatttaccaaaaaaaaaaaaagaggacatttgccgtgttcatcggggactcggtggctctgctttaatttttaccccaactcttttatttttttttttttcttctcctcctttccatgtgcatcgcacaactgtcagtccgtcaataattgagggcggcgagggataatgccggcaaataggcgtggatggggttaaaggtcctttctcgacatgttcaatcaatttaactggcattttctatcgcgaatacttatacttatatgcaacgttgcatataactaacgtataaaagaaagcaattataacaaaaatgtttcattttgctgcggctgcaaaaactaaataatgcatcgtttctcgcttgaaacataactaagccaatcaaaagaagtgcaattgcaatcaatgaagatgaagcgaatcggacaagttatgcatataaagcagatccgtgcaagttttcactgagtggtatacaccgaacattttttggcatattgacgtctcaggtatttgccaaaaaaaaaaaaactgtttcttttatattgtttgtctggtgataaatggttttctcaaatattgctgttgttcgatgtgcaagagaaactataaaattcgttagacaactgcaatgttttcgaagttgaaaactaattttctttcaatacgatcgaaaattatgaattacttagtgtttatgttaaatatcacaatactcttgcataatcgcacaagttagcttaagttcattacgaaactttgcccaactggccaagttaattgccattaaacaaaacgaaacacttgcacaaactcaattggaaatggaaataaaagaaatgaaaaggaaccagagccaacaaagaaggcaaacaaactgcataactttaactccataatggtaggtggaaaattgttggcggaagtgggccagtagctgtgacaagcacacactttcaatttcattccaaatggcttgcaagtgtattatttgattttagattctctgctgcggctgcggctaaatgtttgctaatttcgttaatcatacgccatgttgcccatcttcacaaagggaagcaaagcgaagcgaaggcttacgtccattgttgtctgccgatactcggggggaatccttgccatggttaggcattcggaggcagctagctttccatcaaaaacacgaatcctatcaccatttgcagtttcggccgtatttctagcctttgttaccacattttttttcgacttttccgtgagatttgaaagcccagccggcgaacatgttagccatgttaattcattgccaacatgttggctcggtcccgggctatttgaactggcacagtgtggcaaggcatacaaaactaaaggcacataaaatattaaaaaaaaaaaa

SEQ ID NO: 34317 - protein, 502 aa, DROSOPHILA
MWVSLCSWRLSLYKLKYVTNPLSSAQPAASGSSNGTGNGSGTGNGQGLGGSCSANGLAATGGVGGGGGSGNFGVASLVAGAAPQPPPQVRPKHQPRRRTSSRSFRRIVIWKSPRSKSATYWSGTTKEDDLLNRTVSGSELDLYGGAGGGTKKHSLADTIDTSVTTPISLKTLINDVDEELDQQLSAADIAAASLASGLVARRAEPETLSDASVSPTAVVQQQQQQQQQLQQPLLQSQPHFVPSSGNILSQVTLYSGSNPSTNPCQSAVQNQGQNSNPNPNQNPNTNPNQNQQRCSCQPQTSPLPHIKEEEESDQANFKHQTSLKEHQPLPPPITIATGYCGSCESVHHSSATSSSAGTVPPGGQQTQEYIAGTSSTPSPRIKLKFRKPHKSCWSRIVLAPIGSAGGSSSATTVIGSNSNETLASSSTTGGTATTTQNSSSVSVAAHHRLTSSSASALATSHPSNSQLLPTSKMQAEQGSIGDLQKYHSRYLKNRRHTLANVR

SEQ ID NO: 34318 - DNA, 2761 bp, DROSOPHILA
gactaccgttcggcgttgcagttgctgtctctttcttttgatttctgaaggatatatggcaggatggccaagtaataattagtcccaagtgagtttcgcagcaagcagcttaacgattgcagaaaccgaaaaaccggtagatgggcgatgcgagtgttcgaatcattgaggataatggtcagcaggatgatacaatattatccgcctgattggaatgccttgagtcaaacatttgatggcaaatctactcgtaattgagttagttcattaattcacatattcattcgataattgcttaacttgcaacccttcacatctgtgcagtcttcaagcaatagagatgcgcaaaaatcgattgtgattaaagatatcgaagtatcccaaagtgggctttttcatgaacatgaaaattgaacaacacatgctctgattgatcctcttggatttttcatactctgcatcgcatgcgccagcagatcatgtgagctaccaaaattgcctgcaatttgaacgtagtttttttttcactctttgctgatttctctgttcgcttttgttgtctttttttttgctgttagataagcttcgctttgaatggggactcggtcatgctttattaaacaaatggcacaactcgcgggtagatgtatagtttatgaatagaattctaacaacttaattatagatatcgctgaagagagagatccccagggagaatggaatggaatcagcactgaatatgctataaaaagcattgaaaaattattggtgtatgcacttataatcggctaatgtcctattctgatgatttgtacaacttcatctatgaaaaagatcgctcatgtttcgataagttatcgatattatcgtaagaaagtcaactttccagttaaatattatgtggctaagcgctttaaagattctgcgaataaaatgaaaaaaaaaaaaaattatcgcaaatcgcgataaattgcgatttattatcgataggcgcgacttctcacctagacggcgaattgcgaaagttgtagcaacagcagcaaaacgagcacaccatatacaccaggaagttgatgctgccgcaccacgtcgacgtggaagtattgccgctgctgccggtgagcgtaccgctcgagttttgctcctcgctggcggtcgctgcgcagctgctgctgttattgttgtgcaaaccagcagcgcccgctgccgctgcgattatcgatgccgccgacgatttccggcgtcctgtttccgcttccgtttgcactgccgccgctgctgctgacgttgcagcgctgttagtttcgctgctcttttgccgcagaaagcgccccaaccgcggcggtacgttgctctcgagggcgggcggggcgctgctggtggagcgtttgcgctccgccgacgtcgctgcttgcttcaagcgttgctggtcgtcgacgaaggagatttgcttccactttttcttcttcttcactttggcggtggctttcagcagattccgcgatctatatgttgttgttatcgctgttggtgttggggctgttgtaactggtgtggttgttgctgccctggtggctgttgttgttgttgttgtagttgttgctgctgctgctgctgctgcggaggcggcgactgcggctgaggcagaggcagcgacggcgtcgtcagttttggtcgccagttcagaagctcacacgacacacatgagtactaggcgcacgcacacaatcacgcactgcgtcgacgtcgcggcggcggcattctagaactttacgaaagtttgtttattttttttttgtaagagattgagcgattttcgatactctgttatattgggcgaatttttatttaaaacttgattttagaattagaaataatttatttgaaatcttttatttttatttattaaaatttttgaatttattttaaaatacttttttttactttgagaactgttgaagaattaattaaattttttaagaagacattaggaattttttgaattttttttattaaatttatctattaaattcgcgctgcaatttttagttcattcgaaaatagattttaaattcaacataattaggtttctaaattgttctctctctttcttaaaaaacaacattttctagcccaattacacagtttttagcaatttgaattataatagttgaatagtttcgttcatatcagactgaatatgaaagtcgtttggattgtttttgagtttttggtattatatattatttgtctagtgagctttctttggacaagatatttatcactaatttaaattggtttcgttatacacatatattaagatcagtttttgcggtggtttatgtttattatattggttttctatttgttttgcattttcacatatttacttcgttttgcgtcaacttcggctatagattccaactatgttgttatttaactatagttattcagtacgaattttagtatttcttctttttttggtggctaccactcttgaatattttctttagttccaatatggaattgtacctatttcttgagaatcttatatatttgctttgattaataacatgtgttgaatactcactcgcatttactattatctttcttgttttcaatttttcttttgaatatggactatttatccaaatacaattttctgtttattattattattattattggtttaatattttgtttattagtcaacaacttgatttcagtttgttattattgttcgttattcattagttttgtt

SEQ ID NO: 34319 - DNA, 663 bp, DROSOPHILA
atgccgccgccgcgacgtcgacgcaccgcagtcgccgcctccgcagcagcagcagcagcagcaacaactacaacaacaacaacaacagccaccagggcagcaacaaccacaccagttacaacagccccaacaccaacagcgataacaacaacatatagatcgcggaatctgctgaaagccaccgccaaagtgaagaagaagaaaaagtggaagcaaatctccttcgtcgacgaccagcaacgcttgaagcaagcagcgacgtcggcggagcgcaaacgctccaccagcagcgccccgcccgccctcgagagcaacgtaccgccgcggttggggcgctttctgcggcaaaagagcagcgaaactaacagcgctgcaacgtcagcagcagcggcggcagtgcaaacggaagcggaaacaggacgccggaaatcgtcggcggcatcgataatcgcagcggcagcgggcgctgctggtttgcacaacaataacagcagcagctgcgcagcgaccgccagcgaggagcaaaactcgagcggtacgctcaccggcagcagcggcaatacttccacgtcgacgtggtgcggcagcatcaacttcctggtgtatatggtgtgctcgttttgctgctgttgctacaactttcgcaattcgccgtctaggtga

SEQ ID NO: 34320 - protein, 220 aa, DROSOPHILA
MPPPRRRRTAVAASAAAAAAATTTTTTTTATRAATTTPVTTAPTPTAITTTYRSRNLLKATAKVKKKKKWKQISFVDDQQRLKQAATSAERKRSTSSAPPALESNVPPRLGRFLRQKSSETNSAATSAAAAAVQTEAETGRRKSSAASIIAAAAGAAGLHNNNSSSCAATASEEQNSSGTLTGSSGNTSTSTWCGSINFLVYMVCSFCCCCYNFRNSPSR

SEQ ID NO: 34321 - DNA, 2138 bp, DROSOPHILA
gtgcaaatgcggagaaagttgaataaagaaaacgcgcagccacacacaaaaaaaaaaaaaacgcaaagtttttaattatcagccgttgattaaccgaggcaggcagaatttaacaaaactaaaaggaaaccccttttgccaaaaggtcctaaatgttcatattccctgaaggagtacggggtgtttattcactatctggttctacaggcagatttctttcttcctcggacagatgcattcgaaggcgtctttcaggggccagctgtaactttttcccttaaatttcttgctttttttttttatatttttttatattttttattttgtatatatgtacgtatgtatacagctcctttgtatgggggttcgaatgtcacataaccacataactggtctggatggacgaggatatatacgcaagagcaaaccatctcgttaaactttcaacgcactgccctccttgtgcgtgctttttccttttaattatgtatagatttcggtggcttgcagcttgcgcgattctcgcaaagagggcttaatggtaaagggggggggggggtgttgaggtcggggttgcaacaggtgcaattcgtcgatcgttgaagttaacagtgttgaaatgaaggcgaattaacattgtacccttccacgaatgcgggcctttaagtttggaacataaaccaaaaccatcgacttcgatttcaagttctttaataattttctaataatttcgacaattttgtgctttaaataagagaagctataaaacatataaaggtgcaacttcgatgactttttttttgttttttttttttcatttttgtcgggtagaaagagtatctataggggcaacgggtagttaagaagcaacacgaacactgattagggcgagatgtagtgcgtgccgccggcaacctaattgggcttaatgcaggttgagttgcaattatgccggccctgcacctttacttaatgatgacattcggcgtcgttccgttcctcaaatgatacgcagcgagtgctcgacgtgctcgccgagcgccaactcgaaaacgctcttcacgcagcaaaccatcgcgacgaagatcacatgcaaaacgagcgacagcagcgtctgcggatcgagcggcaaacggccggtcaatacgtcgaaggaccaaaggaagcactccatcgttaggacgatgctggtcaccagaatccatggcgacatggcgtagggggagatctgcagttcgacaaagggaaagatatcataaatattcgtaacaatcgatgtatctaaagctaatgtatctaaagctaatgtatctaaagctaaagctgagctaaaaccaaaaggagtgcattagtatacccaccgttacgattccgtaaataagcattagccaagcgatcaggattatggccaagctcaaaagtcgagcctttcgcagcgtccaatgttttaggacatagaagtgccgttggcgccacatggccaatttggtgcagggacatgaccaaactttcatcagttcatagcaattggaacatgttccaaagacactgagcagcaccaccagccaaaagacaatgggaaatgattcgacgcggcacagattgcaggattggagcacgggtttaagctggttccaattggtcatcgggcaaaaggtccaaatcgaatacgtgtcataattgctggacaggtgaaaggttctacgcaaaagtgtgcgaatccgagtggtaatatgctgcagttcgaacattttggtgtggaatttagtggaatttgacaaatctaatttttggagtacgattttggtagtttaagtttgtgtttacttatttttcgaactctagctgtttcgattcgaatgacggctctgcaaaagggaaagagatggggaaattttttaaaaatgacataaagttttgcagtttctaattactcgagaacatgtgcattaatttaatatacacattttgaactcaggaagtacattttatgggtgccaaaggtaaccataacatattgtgatgaacacaaaacacttatattttcaatctagcaaactgttagaattttagtgctctctttccatagccactacctgcgagggtttcaagtttcaagccgatcgttacgatcagaa

SEQ ID NO: 34322 - DNA, 513 bp, DROSOPHILA
atgaccaattggaaccagcttaaacccgtgctccaatcctgcaatctgtgccgcgtcgaatcatttcccattgtcttttggctggtggtgctgctcagtgtctttggaacatgttccaattgctatgaactgatgaaagtttggtcatgtccctgcaccaaattggccatgtggcgccaacggcacttctatgtcctaaaacattggacgctgcgaaaggctcgacttttgagcttggccataatcctgatcgcttggctaatgcttatttacggaatcgtaacgatctccccctacgccatgtcgccatggattctggtgaccagcatcgtcctaacgatggagtgcttcctttggtccttcgacgtattgaccggccgtttgccgctcgatccgcagacgctgctgtcgctcgttttgcatgtgatcttcgtcgcgatggtttgctgcgtgaagagcgttttcgagttggcgctcggcgagcacgtcgagcactcgctgcgtatcatttga

SEQ ID NO: 34323 - protein, 170 aa, DROSOPHILA
MTNWNQLKPVLQSCNLCRVESFPIVFWLVVLLSVFGTCSNCYELMKVWSCPCTKLAMWRQRHFYVLKHWTLRKARLLSLAIILIAWLMLIYGIVTISPYAMSPWILVTSIVLTMECFLWSFDVLTGRLPLDPQTLLSLVLHVIFVAMVCCVKSVFELALGEHVEHSLRII

SEQ ID NO: 34324 - DNA, 2573 bp, DROSOPHILA
ccggcttttttaaccgactgagtcactcgctctgcaggtttttgaacttgcgcagtcacattcggtgtacaatattcgtctcgatgcaataatattcttggcttctatgttcttattgaatttgtgcgaattttgtgattggttttttttgttgcatttttgtaaaaatggatgtctgttgaatacagctagtcccttgaaatgcaaatgacgacatgattagcgccaaagggggggtatataaccgatctccgatctccgaacgctcagagccatcataaaaacctggcaacggggtcccgcaactggcaattaattaaaatgcataaattattaaccattcgccgagttcgcagctcttttccgctgttttttgttgtttggttttaatggccccggtattttagcatttagcctacgagattgacgcgtcccggctcccaaaagtaggccacatttatttggtcatgtccttgactcgctcccggaaatacagacatatgtatttcccggttcttatcaactggttgggatattattttaaatgaatttttgatttttgctggaagaacaaaatccatttatgatcatgcatcttggtatttaagtgtatatattaagagcacgtccatcttaactcaagccttgttttttcatttttttttttttggttttgaatggggatcagctcatttggctcatttggcgctcgccgctgacgttgtaaattgaagctaaaatgttatccacagctggatctctctggatctttggatgatggagatcgtgtgctggcgctggcgacaaaaaggggcagacaaaagagagatgtagacacttaagttttttggtcgtgctgcgaatgtgacaaaacaattaatgtttatttttgcattttaatttgccaacattaattgcaagtttattgagctgaaagccaacgaacctaaccgctggccttgaatgcggataggttatattctgggaggtctattggtcttcatttcgccgaaagggtcatcgtcatcagtaggacaaacatggagtgggccagtagggtgaattcggcacctaatcccttccagtagtagtcgagaaaagcggaaccgtatcgagcaccaaaagcgatggcagccaagatgccgtacatattattcgactcgttgacgcccaaaaagagcatggacacaacgttgcccaacagtgttagttccttaagggtctccgttacggtatcctcggtgtcaaccactttggccaacatatcgtagactaatggcaccacaaaacatgtgtgcgccaaagccaagcccggattggtggacttcagatacagctccatattggtcaggggcagcggtactatctccatgatgcccgacgtaatcaatcgcacccgattgcattcgtcatcgtcgttgctcgccgctcgcaccattcccaaaattccatggaccaggctcaaggccgctgttgcatagccatagggtgtttccattggatggagagtgtagatcgcatagccggaactgaccaccaataggctgttaaacaatgcgtccatgaccagcataactagttttcaattcaattagtgcgttcaaatctgttactcttcaactgacccttctgacatagtttgtcccctctgattttcgattttcgattttcgagagcgacgaaacgaacgaaaaattttgagctagtcaactcgcttttagcccatttgacagaagtggcaaagctaacctaacagcctgctaaaaacttaagaatcagcttgaagtcataagctataatggctagatcgcctaagatgtcagtatgataagtacatacataaatatatggtctagtcggagctcttgctcgctcgtcttcaatgggctcgctgggatgcgatgaaccagaccggtcaacttctcatctggctgagcacagagcagcgagcacctagcccaatgtccccgttgatttatggcatcaagggtgggcagcttaatccgctcgcatccacctgcaatccacctgccggcggcagatggctcaaagtctcgtgactccgggcccaaagtccaaagacttagggccccagacgattgaaaacggaccggggaccacaaccacaagctcgctttaattattaatttaaatcgcaccgtttatatgataaagacactgggacgtgccgttgagcattagtgcatgttgcaagtgaagtggcaagtgcaacagccgagccaggagcggatcaggggccaagttgcaagttctatctgtaaagagcaatcattttgtttgttcaattgcaattatcaactttacttgttttacttctattctatttctattgatttgatcataaaattctcacaatcataacgcttgagaatataaagtatatatagttttgaagatatcggtagcccgattcgctgaaccgctcctcatttcaactacactgagtggcgtgacgaaagttgttgctcgagtgcctccccctttgcaaaactcgccgctgaccccggctacgcccctttttgggcccccacctctgttcgcacagacaatat

SEQ ID NO: 34325 - DNA, 573 bp, DROSOPHILA
atgctggtcatggacgcattgtttaacagcctattggtggtcagttccggctatgcgatctacactctccatccaatggaaacaccctatggctatgcaacagcggccttgagcctggtccatggaattttgggaatggtgcgagcggcgagcaacgacgatgacgaatgcaatcgggtgcgattgattacgtcgggcatcatggagatagtaccgctgcccctgaccaatatggagctgtatctgaagtccaccaatccgggcttggctttggcgcacacatgttttgtggtgccattagtctacgatatgttggccaaagtggttgacaccgaggataccgtaacggagacccttaaggaactaacactgttgggcaacgttgtgtccatgctctttttgggcgtcaacgagtcgaataatatgtacggcatcttggctgccatcgcttttggtgctcgatacggttccgcttttctcgactactactggaagggattaggtgccgaattcaccctactggcccactccatgtttgtcctactgatgacgatgaccctttcggcgaaatga

SEQ ID NO: 34326 - protein, 190 aa, DROSOPHILA
MLVMDALFNSLLVVSSGYAIYTLHPMETPYGYATAALSLVHGILGMVRAASNDDDECNRVRLITSGIMEIVPLPLTNMELYLKSTNPGLALAHTCFVVPLVYDMLAKVVDTEDTVTETLKELTLLGNVVSMLFLGVNESNNMYGILAAIAFGARYGSAFLDYYWKGLGAEFTLLAHSMFVLLMTMTLSAK

SEQ ID NO: 34327 - DNA, 2576 bp, DROSOPHILA
agggtggtgcgaatcgagggcattgagagcaacatgtgctgcggcacccacgtcacgaatctctctcaactgcagtgcattaagctgctctacgccgaagaaggtgaaggcgaatgttctggtgcactttgtcgtcggcgagagggtgctcgtaaagcttggcgaggtctttcagcgcgaacagcagctaacacaggctttaaagtgagactctcaaggatgtgggccaattgtctgtaaataatcatctgcatttcacagaggtggacccggtcagcacttggagcttgtccagaagctacagcaaaatgtgaagggcagtcgaaagtacttccagcagctgcttaaacgttacgccaccgccgaagccgagcgtctctgcgatttgcccaaaaaggatcgtccgaaatatttctctctccatcgacgcgatggcatcgaggtggacttcatcaacacattcttgcgggcggctccggaaggaatcttctactttctcactgtttccgagagcgtttttgctggcagcagtgccaaaggacatctggtgctgcgcggagatccagaaattgtcgggaaactcggtccccaatttatggaaattctcgagggcaagggaaacggcaaagaggacaatttccagggaaaaatcaacaacttggctagactgcaggaatgccaagagctgctggaggcggagtttaaaccaaagaggatcatcgaagccgctcctgcaaatggagctcaactggaggcagaggaatgaagtatttttgtagtgttcgaatatacaatatttgtatgcgctacgaaaattcataaaataaatattgcctagttttataacaaatagttagccatatcgtaatccgatgagaaagaagtaaacacatgttcatgtactaaaaacatacatatattggtatattctccctcgattgacttaagcagcaaacacggtcttaaggataacgaaagcgttaagctttgtggtgtgggatcacaggtagttgacatcatagttgcgcatcttccatttgagtcgccagtattgattccaaaatcccacatcgatgatccgttcgtggaagttgaagacgcccacgttggtatattcacagatggccggataggtgcagtcgtcctcgtcgtatagatccacccaaaggatcgtgcagatgccgagagaaaggagacgcagtttcttttgattgatcgccctctccaaggttagcagatagtcggcggacacgggattctgaagttctaccggcactgtgatcattcgatttgtggcaccccttagcagagtcataaaggcctcctcgccgggattcttcagattggcttggtacatgaacagcattcccgttccatagagaagcgcctttttcggcttcgtgtaggattctcgcacaacacccactgccacctctgtgtagtccctgaccaggccgttccaatactgcacccacttctccacgaacgtgcccttgaagcgctccggcatctgaattcgatcggtcaatctctgacgcagtgccgttatacgaccacccacgcggaggaactgcatctcctggcgggttttcagtgatcaatttggaaaaagccgaaaaaccaggtggaattaaagtgctagtgttatcaaatcaaaaaaacagctgttcagtgtgactgtgcgccggaaaaaatatcatcgacgcgacgatgtgtatatcgatatcaaccgaatagtggaaaataattagctttaactgtatattatcaaatatgtgtgactccattttaaaatattgtgcgtttaacattattttgaaaacatacatacattttattatttttttttatgggaaatctcaattggagagctctgatacacggccacattgtgccatcgatagttccaggcagattatcgatgacaaaatatacaaaataattgtttttatcgcgaattgccaacgctctgtacaagtgatgtacaacacgagttaaatacaaaacaaaacgaacggataaaagttgcacgctgggcgaatcgtgacaaagagggcgtggcaaatcgaaatatagtatagatcaaatccccagaaggcgcggcataaacgtaatatgcgaaaatcgctgccatgaaaaagggcaagggatcaagctcccttggatcgaaggaatcatcggggagaccatccacggcagtcctggtgttcaagaagtgcgctagatttgcggactcttcagaatcggcggagatccagcaggacggcaaggagcaactgcctgagaggcaagactcgctggatgccaaggaatgtaagtacgaagcacttccccttccaacgcgatacaagtgctcattcccatgcaaacacagtggtgggcatactaatagaagcacaggacgtgtggttagccatcccgctgacgcattaaacggaatatttaacttctagctgtgataaggaaattggtaaacgtaaatataaaaaataaaagccgattccttcctattcctagagaagtccaccgtagtcctaaatatttcacaaaacacaacgaaacacagaaagaatatt

SEQ ID NO: 34328 - DNA, 576 bp, DROSOPHILA
atgcagttcctccgcgtgggtggtcgtataacggcactgcgtcagagattgaccgatcgaattcagatgccggagcgcttcaagggcacgttcgtggagaagtgggtgcagtattggaacggcctggtcagggactacacagaggtggcagtgggtgttgtgcgagaatcctacacgaagccgaaaaaggcgcttctctatggaacgggaatgctgttcatgtaccaagccaatctgaagaatcccggcgaggaggcctttatgactctgctaaggggtgccacaaatcgaatgatcacagtgccggtagaacttcagaatcccgtgtccgccgactatctgctaaccttggagagggcgatcaatcaaaagaaactgcgtctcctttctctcggcatctgcacgatcctttgggtggatctatacgacgaggacgactgcacctatccggccatctgtgaatataccaacgtgggcgtcttcaacttccacgaacggatcatcgatgtgggattttggaatcaatactggcgactcaaatggaagatgcgcaactatgatgtcaactacctgtga

SEQ ID NO: 34329 - protein, 191 aa, DROSOPHILA
MQFLRVGGRITALRQRLTDRIQMPERFKGTFVEKWVQYWNGLVRDYTEVAVGVVRESYTKPKKALLYGTGMLFMYQANLKNPGEEAFMTLLRGATNRMITVPVELQNPVSADYLLTLERAINQKKLRLLSLGICTILWVDLYDEDDCTYPAICEYTNVGVFNFHERIIDVGFWNQYWRLKWKMRNYDVNYL

SEQ ID NO: 34330 - DNA, 2715 bp, DROSOPHILA
ccagaatatagtaaaattagcctaaagccacgaagcgttcagaaaacggagtttcgaagacgaaatcgatttttttttttttagtttttttttagtttttcgttgaagagttacgtaagatcccgatccacagatccattgagtaaaaaccacaatcatcagtaatatacggctcgactttgactctctctttctcgccccctgaacccgcactatctatatatatctctttctgtctttagtgttagtcgaaattcggattgtacgcgcatttccaaaatgttcaactccttgctaaagtattccaaatggttttttataagcatatacataaacgtatacatacttcttatacactaccctaggctaacgttgaataaattctgaatgattcgaacagcactcaccattcgcatttattgggtatatttgattaacttggttaatgggatgtgtagatagtaagattttgaataaataaaatagattaatcaacgtacgttggtaaacgttttattgcttccgtattatttttgaggggcgggggagtttacataatacactccagataggcacagaatgaataaattcttaaagaaaccaagcagcactaacaatttacattttctgcgcctaccaaggtgggatttttcattggattttccattggatttttcatttgattttccattggattttcctcctcgttttcttcttgatgaaattctccatttgcgttgtagagtatatttttatatgatcaccaagtaaagtgcgttccattatgcctttcccattattccatgaactgttttctaattgataaaaatataattcgatcgtttttttgtttgtccttttgcttctagagttttcagctaatcccctttacttctttttgttctggagtaagttttgtttcttctggttttgaattccttccccgcctcgatatattttcttaatccgacttgtgaatatgacttttcttcagcaggtcctacttattctcggtgattattcccgcaggaccgcacacgtacagctgctgttggtcccgattcctgatgggcttgaagcccaactcgtcagtgggcacaccatattgcttgagcttgcactcgtaggtttccagtagatcgtcgtgtgcctttcgcgccttagttacctcatagcgcaggtcaaggattatcttgttcttctcatcgatgatgttgcccacccgttcatccaagctggttaacttttcggcgaaattgggagcgcaggtggcaatcgtttcgtgtaggacaatgctgcgcttctcatcctcgcgcatcaatgcggcaatcttgcgctccagaaggacattctttagtcctgtcttctgctgcagctcgacgatcacgtcgttgaaacgctccttcaggccctcccgttctgccaccagcgagtcgttgcgcaggatcagagtttccgcctcccaagtgagacccttcaccttcttttccagccgagtgttgcgcgtcttgaggcgactcaattgctgcttatcccgctcgtagaactccagtttgcgacgatactcgttcaactggatattggcatgctccaaaggctccttcagtcgccgattctcagctgccgtgtctgcggcgattctatcggatctctcggcctgcttgcgcagatgctctagctgctccttcatgctgccaattagcgccaggttgttaagcgtgatatcgttgtaatagttcttcatatcgttaaaggctaggtcatggtggtcctgtaggtcctttatctgctggttctttcgctcctctacctcgaacatttgtgtgccgtagaaaaggtctagcttggccttctgctcgatcattttctcctcgtgcagcatctcgttgtccttgcgctcgcgttcgaaggtgatgcgctgctctctgccagcgcacgaaaacaatgggaaaaaaaaaacgtgagaatatgattcatatttctgcgataataatacctacagcagtttctcattgaaggtgagcctccatttggcgcagctgcatctcgctcatctccattctttcgcgcagcattcggcgcaactgtcgcttgtcccgctgaagctcgttttcctgcagaacatggtgctcctgcgccagctttagttgggtcatcgcctcagcccgaacctcaccgagcctattgtggttctcaaactgcagatgcttcatctgctgcatcacatgcttggtatcgatatccgccagatcctgcgtggcctcgatctccttgtccttctgctgcagctcgtagcgggtctcatctaaaaacaaaacaaaaaaaaaaaaaaaatggaggaaaggtggcaaaatcccctggtattcactcacccagctgctggcgcgtgatctcccagaaagtgcgaatcttgtcccgctccaactggaagtagttacgctcctcccgctcacgatccatttccgcttttagccggagagcaaatgcctccagctggtcgcgagtcatcgccgaggtgtccacgccatcgatgagcactaagcaggaatataggcagacgaaaatttagctaaatgatttgaaatgaaaacaaaggatacgactagcccttttaaagctaattaccaaagggaattgtaaaatcccaaataagaagactttactcgttgagtttttgtaagaaactgattttatttggaaatatcttcggtttaa

SEQ ID NO: 34331 - DNA, 1402 bp, DROSOPHILA
tgcttagtgctcatcgatggcgtggacacctcggcgatgactcgcgaccagctggaggcatttgctctccggctaaaagcggaaatggatcgtgagcgggaggagcgtaactacttccagttggagcgggacaagattcgcactttctgggagatcacgcgccagcagctggatgagacccgctacgagctgcagcagaaggacaaggagatcgaggccacgcaggatctggcggatatcgataccaagcatgtgatgcagcagatgaagcatctgcagtttgagaaccacaataggctcggtgaggttcgggctgaggcgatgacccaactaaagctggcgcaggagcaccatgttctgcaggaaaacgagcttcagcgggacaagcgacagttgcgccgaatgctgcgcgaaagaatggagatgagcgagatgcagctgcgccaaatggaggctcaccttcaatgagaaactgctagagcagcgcatcaccttcgaacgcgagcgcaaggacaacgagatgctgcacgaggagaaaatgatcgagcagaaggccaagctagaccttttctacggcacacaaatgttcgaggtagaggagcgaaagaaccagcagataaaggacctacaggaccaccatgacctagcctttaacgatatgaagaactattacaacgatatcacgcttaacaacctggcgctaattggcagcatgaaggagcagctagagcatctgcgcaagcaggccgagagatccgatagaatcgccgcagacacggcagctgagaatcggcgactgaaggagcctttggagcatgccaatatccagttgaacgagtatcgtcgcaaactggagttctacgagcgggataagcagcaattgagtcgcctcaagacgcgcaacactcggctggaaaagaaggtgaagggtctcacttgggaggcggaaactctgatcctgcgcaacgactcgctggtggcagaacgggagggcctgaaggagcgtttcaacgacgtgatcgtcgagctgcagcagaagacaggactaaagaatgtccttctggagcgcaagattgccgcattgatgcgcgaggatgagaagcgcagcattgtcctacacgaaacgattgccacctgcgctcccaatttcgccgaaaagttaaccagcttggatgaacgggtgggcaacatcatcgatgagaagaacaagataatccttgacctgcgctatgaggtaactaaggcgcgaaaggcacacgacgatctactggaaacctacgagtgcaagctcaagcaatatggtgtgcccactgacgagttgggcttcaagcccatcaggaatcgggaccaacagcagctgtacgtgtgcggtcctgcgggaataatcaccgagaataagtag

SEQ ID NO: 34332 - protein, 143 aa, DROSOPHILA
MTRDQLEAFALRLKAEMDREREERNYFQLERDKIRTFWEITRQQLDETRYELQQKDKEIEATQDLADIDTKHVMQQMKHLQFENHNRLGEVRAEAMTQLKLAQEHHVLQENELQRDKRQLRRMLRERMEMSEMQLRQMEAHLQ

SEQ ID NO: 34333 - DNA, 2785 bp, DROSOPHILA
gataatggaaaattaaagtacaataacctaaaaagaagcacaatgcgagcgtagaaagtagccagatttgcttggtgtggcaatcgtttcgatgttatcttagtatttgatttatcaatcagagttattgcccgctcttgagcgacgaattttatctcgttcggccttcgggcaacctgcccactcctccccattcaactgattcacctcctatccactcatttttttcagcgaatgccctgcaatgctacagttgcgttggaaacgagtgccatgtggaaacggttccgacggttacttgcactctagatgatgtctctgccgcttttggcttggatacgaacgccgccttcaatccgttcaagcggtctcttctttccgtgatgccacgagctgcagacgatgtacgttgtattttgaaaacgcattctaatcctatttgtattaaaatatccacgctttacacatacgcaggactcaacaacgggatccactacaattgaggattcttcaacaaccgcttcagcttctacaacagattcatcaacagcttcatccaccacaattggagaatctagcagcagctctttgggttcttccacgtcagattcctcaacctccgattctacaacagattcgtcgactgcttcctccaccacaattggagattctagcagcagctctttgggttcttccacatcagattcatcaacctccgattctacaacagattcgtcgactgcttcctccaccacaattggagattctagcaccagctctttgggctcttccacgtcagattcttcaacctccgattctacaacagattcgtcgactgcttcctccaccacaattggagattctagcagcagctctttgggttcttccacatcagattcctcaacctccgattctacaacagattcgtcgactgcttcctccaccacaattggagattctagcaccagctctttgggctcttctacgtcagattcctcaacttcagattctacaacagattcgtcgactgcttcctccaccacaattggagattctagcagcagctctttgggttcttccacgtcagattcttcaacctacgattctacaacagattcgtcgactgcttcctccaccacaattggagattctagcagcagctctttgggttcttccacgtcagattcttcaacctccgattctacaacagattcgtcgactgcttcctccaccacaattggagattctagcagcagctcattgggttcctcaacgacagattcttcgactgtttcctccaccacaaatgcaggttcaaccgccagttctacaacttcttcgccatccataagcacttcaacttcttccccaacaaattacaagattgcggcctgttacagcatctacaaggacggaggtgagcacacggcgttgtttggaactcgattgttatacaagattttaaatttaaatgtttctcttttgaccagagttaaaccgtggttgtgttaaggtgcccgagaaacattccggctgccaggctgttcgaaatgagcttggcataacagaagactctgccgatcagtgcgatatctgtttgacgaatctatgcaatggaagcactagcctgaaggtttcacttggcgccatgattcttctcttggcgatgggacttaaaaacgtgctgtaggagagagccggagaatactatgaatgatgtacatatatatttgttagtaatttgaatacattattaaataataaacggttaccttatatcacttcacatactttggcactcgacgctttttttataatgctttatcatagagcttaaattgtttcatttcaattgattgatggattaatccccaaacagctgtctataaggaaatgaacatgacttaaaatattaaactatattactttcgtgagcgggaaagaaccttagcctcttatctaaggtaaagattcttgaacggaagtcaaagcttgcaaaattaagtatttgtgactttatccaattacacagtctcttcaaaaactataaattaatagtatatctcaataaacaaaatcccctcttagcaattaaaaaaatccttacaccccttaaacttgtatgacgaatatggttttacacttaactaaataaaaaaaaagagaacactatagtaacccgcagactgagtatgagtaactggtataacaattccacaaaacgtaagaaatgaagcgttacgtgaactagataacgtataacaatagaactacgtgaatgaatggttgtagattaggaacagagaaaatatttcatttattttttaaggcacatctttgctcttagtgaatgtttaataaatacaaatagtagattaaacaaaggtttcctatacagtttttaagttacatatataaagtttttaacacacacacacggaaaaacatatatacattcacacaaaataacacattcaaaaacattatgattacttaaactatgattagccagctaaagattcggtgacaaacacataatagctgattctcacgaggaaagactgtgattctgcctgttttcgaatgcctgtaatcaatttgtaaagtatttagcattatttctttttcgtgtgctaaacgaacgaattaaaacgaaccttttgggcgattttcagcagactctcataggtggcgtgacccgtttgcttcaccataccgtggaacaccttagaatccgccagcgtcagcagttcatagggcgttccaaactccaccgctcgaccag

SEQ ID NO: 34334 - DNA, 713 bp, DROSOPHILA
gaagtgatataaggtaaccgtttattatttaataatgtattcaaattactaacaaatatatatgtacatcattcatagtattctccggctctctcctacagcacgtttttaagtcccatcgccaagagaagaatcatggcgccaagtgaaaccttcaggctagtgcttccattgcatagattcgtcaaacagatatcgcactgatcggcagagtcttctgttatgccaagctcatttcgaacagcctggcagccggaatgtttctcgggcaccttaacacaaccacggtttaactcctccgtccttgtagatgctgtaacaggccgcaatcttgtaatttgttggggaagaagttgaagtgcttatggatggcgaagaagttgtagaactggcggttgaacctgcatttgtggtggaggaaacagtcgaagaatctgtcgttgaggaacccaatgagctgctgctagaatctccaattgtggtggaggaagcagtcgacgaatctgttgtagaatcggaggttgaagaatctgacgtggaagaacccaaagagctgctgctagaatctccaattgtggtggaggaagcagtcgacgaatctgttgtagaatcgtaggttgaagaatctgacgtggaagaacccaaagagctgctgctagaatctccaattgtggtggaggaagcagtcgacgaatctgttgtagaatctgaag

SEQ ID NO: 34335 - protein, 83 aa, DROSOPHILA
MDGEEVVELAVEPAFVVEETVEESVVEEPNELLLESPIVVEEAVDESVVESEVEESDVEEPKELLLESPIVVEEAVDESVVES

SEQ ID NO: 34336 - DNA, 2851 bp, DROSOPHILA
agatgcttcagtttttcccgcctcctacgcccgcttatcaatagctcgacctctgtcgctccatcatgctttccctgtctctcgcatttaatttgaaagtctgggccgatgctatcgtatgtcgtatgtagtttttttttcctgcttcccgtgaactacatgtttcaccagccccgcaaatcatgtgtcaaccccccacaagtccaccaaacccacatttatggctatgaaattcagtttttgatgaagcaaacagcagactccggaaggttctttgtgccagttcaatttgaattttcggtagctgacacgacgacgttggagcggtgaaaaaataaataaatttatagaaaatatatccatagaaggctgctcaatctgggcaagttgcatgctctgacactttgacgtttggcaaattgaaagttttaaactccccattcaccaccccatcataaacctgcccggaatgcgctccttgtggcttctacttctagtggctttcgttggctgcggcccatgtgtttcaggtatgtcataaatcatcgagtggtgtaagccctacaccgtatgctaattgattgaccccgaagcgagttacaaaaagttgcgcatacgcaacgttgaaccaaacagaggggtgcgcttattgcttgggtaatccagctgataaggtgaagctgataaggcgcaccctcacgggtgcccttttaaggtcataggttcatgtttccttttgtgaatttccactgtgaattaaaccttattttgcatttcatattatgcatatagttatgttattggcataaaactaacaaaaatattaaaatgatttaaagatccatattaaagatgatattatgagcaaggtggcatatttttatttttacttaatatttatttaaaatctcttctttgcccagctttgcgttgctacaaatgtgaagactgcgatgaaaatacgcagctaagtgaaatggaagtgtgtgagagtccactgatgggcggcaactccagcacgaaaccaaatcctgctccttctccatcaccagctgaaacgaataatacaaatagtgctcctggctccttctcctcctccgatgccagcgaagaggaagaggactctgaaagcgaagaatcggcgaccataggcatcatgccagcaggatccggaacagctgctgtaggcggaggagcagctggaggagcaaccggaggagcagctggaggagcagatggatcagcagcggaagaagttgtaagcgaagaggaggaagaggacgaagatgaggaggatgaggagcgacgcaggcggagatcgaatgcacgacaggtcgatctcgatgtgccaattgccttctgttacacagtgaggctccaacgtaagcaactgccgcccattcccatgggtgtgcatcataaaaatcataaaaacgccgcctggtgtgatgctcccccacccatggcgataagttatctacgactgagtcatgcgaaaatagcacacagtgcaaactgaaatgcactagatgtaatgatttgtatatagataggaaaatattattattattatgatttattcaaaccttattcaaacccacctgctccacagttaacgaatcgacgatcaccaagaggggctgcaccaccgccaggaggagcaatcagacgggtggatgcgatggtctcttcgagaactggacggtggccggatgccagctgtgccaggacgatggatgcaaccagcccatggccatcggatcatccagtagaaacaatgtccaattctggacactgctggctggactcatgctaatggcatttatgacccgccgccatccgatatggtagaaaatcagcagacacggcgtgggggctcgatcgatatgaaatatagaaatacaagatatatggccgccacaacttcgatttcgactttggtgtctgagttcattgttttttgggagcgcttgccgatttagcgcgggcacatgatgtgtctatttataccttgcttaccactcgaaacgtctattgtctggtggtcatgagcacacctgagctattttcgcataattgtttaattggcatcgataaggaaggcattgtcccttttttttccaaattctaccagctagggaaagtgctcgctcattgagtagaggcgtttcattcaagttgcaaccgtatcgcaatcaaatcaattagtcgctggcgataagagtgatgacgaggtataccgtattcggtatgagtcgtgtgctccatgacttccatgacttcatgcgacccgaaaaaagtctgataatactgtttgatacagcgatcaactaactgggcaactggccaaagcgtttaggccgataagcgttaggaagtcgagtggcaattgctgcctaaagcttttaccagatttatggtattattatttcgcggcccggaattaagtaaagttcttaataaagcgatgaggaaacgcgaccgacaaccgggcagcagcactttaaggaaacttgctctaaacggctaaaatgcaattgccaaatttgttagcctgatgcggacaatgtgtgatatatatatataacttctcgatttgtgggctcgcttttgggggaattttaaaacacttccccgttttattttcgtcagcttccgggacggtaaagtaccttgtgtatgacgatcatgcccaaaagccagcgattcgaaaagcccggctttcaagcgattctcgaagagaatcaacacagagaattcgcatgagaaagagcatcaatatcgcatttagcactctacgtgatatcgtcgacactttgaaagatatatgcaacttttcccatcgactttt

SEQ ID NO: 34337 - DNA, 648 bp, DROSOPHILA
atgggcggcaactccagcacgaaaccaaatcctgctccttctccatcaccagctgaaacgaataatacaaatagtgctcctggctccttctcctcctccgatgccagcgaagaggaagaggactctgaaagcgaagaatcggcgaccataggcatcatgccagcaggatccggaacagctgctgtaggcggaggagcagctggaggagcaaccggaggagcagctggaggagcagatggatcagcagcggaagaagttgtaagcgaagaggaggaagaggacgaagatgaggaggatgaggagcgacgcaggcggagatcgaatgcacgacaggtcgatctcgatgtgccaattgccttctgttacacagtgaggctccaacgtaagcaactgccgcccattcccatggttaacgaatcgacgatcaccaagaggggctgcaccaccgccaggaggagcaatcagacgggtggatgcgatggtctcttcgagaactggacggtggccggatgccagctgtgccaggacgatggatgcaaccagcccatggccatcggatcatccagtagaaacaatgtccaattctggacactgctggctggactcatgctaatggcatttatgacccgccgccatccgatatggtag

SEQ ID NO: 34338 - protein, 215 aa, DROSOPHILA
MGGNSSTKPNPAPSPSPAETNNTNSAPGSFSSSDASEEEEDSESEESATIGIMPAGSGTAAVGGGAAGGATGGAAGGADGSAAEEVVSEEEEEDEDEEDEERRRRRSNARQVDLDVPIAFCYTVRLQRKQLPPIPMVNESTITKRGCTTARRSNQTGGCDGLFENWTVAGCQLCQDDGCNQPMAIGSSSRNNVQFWTLLAGLMLMAFMTRRHPIW

SEQ ID NO: 34339 - DNA, 2964 bp, DROSOPHILA
taccaaaactactgccaagcactttaattaaaaccattaaaaaataaatatcaagagaacatagtttcaaagcttttgggatatgaaaaagaagtttccagactcttaagtggtctagaattttcttctgcttagttaaacgtttttgacatcggaaaataactttttttattcttttcttaagttaatgaatcactaaatcaagttggtaaaactacaactgttaattgatttatttccacaaaaacaataactttcctagaacatcgaaaaaaaactcagtgtcaaactcgctgaaagtcccgtgcgactttcttatcattgctggaaatgatagccaaatttgtttttagagacgtcaagtaaattcttaaaatttatttcatttgtcaaatcagagatgtgaataatcagccacaaaacagccaaatggcgcaaaatgttctgattattaatggcctgaattattaattacggaaatcttatcttgtattgtgagcgaaactcaattttgtgtcaaaataaataattcaaaatcaaattagatgcgccaaaataatcccctcaatttatgtgtctgatcgtattgaagattttaaatcgcaaaaagaacaacaaatgtgacaatgtcatttagttattcctattaaatggagcacttaaggtgtttatccactttatcgctgaaaacttaaatggggttttcccctttctcggtaaaaaaaagctgataccttaacgcctaagcctttccaagaatcgttttatttcacttcttatctgggctaaacaaatagagttcaagtggtcttggtctggataccaaggccattcggaaaacgcatcgttaacgatatggccgaatgattcgtcgataagattaataacttacgcatcgagtgcaatggcaattaatactttgattaaccaaacaataggcattcgttgttccccggattaaattgctgataatattttttaggaatgcactttggacaaaatgaaatcgctggacacctggctatttgacttgaataagttctcatatttcgataatggcgccaacaaaagtccgctcatgaattgccaaaaagttgtggccaaagaccgtgagtatttttttaggaagtataaaatatcaaatatattcaaatataatttaatatttttaacatagatttaaattcacttgagtaatggtatcacatttttacagcaacttgactcattcttatggctaataagcgattcttatcaaatggttagaaataaagctgcaatttgcagtgcgactattgtagaatgtcaataaaagaagccctaaagataacgaaaaattttatagttcacatgacacagattgtttattcaaagcacttactttttatgacaatagcaattaagtttatttgttacattcctttggcaatattaaggattctaaaacatcaatacttaaattaaattacgagaactttacttgtactacagtcattttaatttatgagcaaatcacttgaattttcaattaagattttaaccttttaaatatagttgtatatatagatgtattgtatataaatatttaaatcaagtgaatttaagtaaacccaactaagttgagctagttcttaaatttcgatatcttgctatttttcgcagctgatacaaggaaagtggtgacggcgcgcttctgccaactggacaccggcgactcggatgcctgcgagatcctgcgtaccaagcttcgcatcccgagccccgaggagcgggagcagcggaatcgcaaccaaaacaagcgaaggaagggtcacggccaggatgcggaggaggatgacgaaatctccgcagaggatgcgttcttctgcggcatctgtaaatcgcatcgctgcaatggtgcggcggccgtaacgctttccttggctacgattctggccatgattgcgctccaattgggctgctaagccagttggatggtgtgtgagggatatggacagataaccgtgaaacgagtggtggcatgatggttgcatttaggttttgattactttgtaaatatttgagtgcaatgtcgctgattcgtacaggttgcttcaatggcacacactacttaaccccattaaccccctactcccttaaccctagaaatgtaagcacagcacagacacacacacgatacaccgatacagtacatacaagaggaaggaaaacacacacggaaaagttcgctttgattcaaaacaaatatgaaactttcgattttcaaaataaataccggcaaaataaagagtagggatatgtgttaaccatacatcctatatatcaatataaaaatggcattctatgccattagctcttgttgttcagctttattatgttactattcagattgttagttttaatggcttggagcgatgtgcataggaattcaccaattgcctttaattctcatataatttcttaggtaaattgaaaagtgctaaatgattccaaagtgcttatatgtcctagtcaatgaattcgtgttagaatattgaaaatttgatagtacgtaaattgactgtaaaagccgcaagcaaaaacaatcaacttaatgcaagacgcgaatttaggaatcacgtgaaacaaatgcaataaatgttagtaaatgtgcaattagatgaaaatgtcaacgaaaagcaatgcaacaattattacgtgagcttcaaatcggctaaaaacaaacaacaactatatagtaccatatgttttttgcgacgcgtcgagctctcagttctgcttagtttgtaagcgttttttgaaatggaaactaaattgaacattccgagcacacaataaatgctgtatgacagtataaaagattttggagtgcgaattttttaatagccgataacgatgacttttataacagtcttggcatcaagataaagggtatctgggttactggagcttggaaaaaagtat

SEQ ID NO: 34340 - DNA, 411 bp, DROSOPHILA
atgaaatcgctggacacctggctatttgacttgaataagttctcatatttcgataatggcgccaacaaaagtccgctcatgaattgccaaaaagttgtggccaaagaccctgatacaaggaaagtggtgacggcgcgcttctgccaactggacaccggcgactcggatgcctgcgagatcctgcgtaccaagcttcgcatcccgagccccgaggagcgggagcagcggaatcgcaaccaaaacaagcgaaggaagggtcacggccaggatgcggaggaggatgacgaaatctccgcagaggatgcgttcttctgcggcatctgtaaatcgcatcgctgcaatggtgcggcggccgtaacgctttccttggctacgattctggccatgattgcgctccaattgggctgctaa

SEQ ID NO: 34341 - protein, 136 aa, DROSOPHILA
MKSLDTWLFDLNKFSYFDNGANKSPLMNCQKVVAKDPDTRKVVTARFCQLDTGDSDACEILRTKLRIPSPEEREQRNRNQNKRRKGHGQDAEEDDEISAEDAFFCGICKSHRCNGAAAVTLSLATILAMIALQLGC

SEQ ID NO: 34342 - DNA, 4990 bp, DROSOPHILA
ggattccatttggactgtgttttgcattcgggttaagaaccaagctgaaaccaaccgaagctggagcttatcaatgcggcgtggaaactaccttgtgtagcatccccctatatagtcgcacatatatgtatgtatttaacatacataggtatatatgttgatataaaacgaccccgtaaagacgatcgagtgacggaagttttcacatattttccatttgctgcctttagggccgatctcgctctcttcgctctcccgaagccaatctgctcggctcggctctcagttcgcaatgagctggctttttgaaaaatcaacgtttttcgaaaagtcaaatacaagttttcagattcatctcgacggtgctcgcgtccagttgtccgttcgcattaatcaacaatatattaattgtgtgctgtaacttcttatgatcataaagagttgtttagcattttattgaaaatatcaaaggtgattgaatgcatacgaataacattttgaaagggcttaaattgtttgtgaaaaacgacttcgattgtaatctgtaatggatataagctaattgggtagaaaacaaattttaatttaatttttttgaactgtgcacaactcactggatgtacacaacatttaaattaaatttacatattcgcagctacttgttgcaatccgcctcgttgaatattcaaatttaaaaaaaaaaatccaaaagttgcatcagcacaccacttgcacttgtcacgtttaatagccacgttctgataccggtttacgagtgtaaataagagtagtatacaaagaattatagattattaatattaccagagcaatgctaattaaacaatgcgctgcttctagtgctaatcaaattacaaacaaacctcaatgcaaaaaagagagaaaaatctgataaataaaatgcgaaaatctaatactacttacagcatcagcgttggagaagtctactggaaatctagtaactgcaatcaaaaaccacaaaatggcaatcacaacctacgtctatgccatgtgccttgttttggccgccaatttgttaacaggtaagttcttatatctatcagaaaaatgtataatatttaggaaatggaatagatttaaattgaaactaataaaattaataaaaattaagttagaattatgtgcagtgtaggtagtgttctatgtttcaaagtaatcagctagcttttattcagctaatcaattgaaaatcactttcaatgtagtgtaatacaaaaggccaattggttggccaacactttagtgattgtcaaaattggtttttcgccaattgattgatttttccctactcgaaatcatttaaaccaatcacaaaacaagaagccatataatcagcggggtggaaactgatgccaaacgcattcgtgactcaccaaaacttatcaagaaaattgatgctgcccattcaagcgccaaatttaaatgtgtttatccagattgagcttcaaataatcgaaaagtttttattttctacagcaaagaaaactatactaaattcataaatgacgggggattttaataaggatgataaatggccaaacctattgatttctgaaatgaatagcgctagatattggcatttatcgtactaagttatgatgaattcatattacaagttttttaaataatatttgcttcactgaatagaaagataatattctaaaatattttatttgttaatttatgtttcgtttaattttatttgctagaacttttttgattttccttatacgttcaataattaagcgatgcccactgcgtttgtagcaattacctcatcattcgacatatcacttcgggcaaataattgtttaaaaaaatccgagagtttaaactaattatacccgcgatgctcacacgcacacacaattgcccgaatccgtttgtaatccaccgcttggagtaaattgattgtccaagcaattcggcgactcgcactcactcgttaagggaacattaaatggcgttaaataatattgaatgtatttgcacgcgaacaaatgtgtggttgtttatattatattattgagtacatatatataccctcgatccattaatcggttgggcaaatatgcacgtttgtgggcgcattccagtggcgagtgaatagcacacaaccttttccacggcaaactgaagagcgcgtttcattagcgaacaattgtcaggcgaaaagttgcaacagttgagagatattgcgctcgactgcctcgatttccacccgcttttccgattttccgcacttgccacaagttcaccggtgagccgcatgaatatgcaacaaatgtaaaatgcaaatggcaaatgctagaaatgcaaattcagttcagtttcccctaccactactcttactactgatttttatggcaggtgactttttattactgaatttttgtttgcactaccctggattcgtttaattgcccaagtaagtggttagtaaccaaagtgttataatattactcatacgacccgttcgacatttgtaatcctgacaaaagcttagacatatttcgagtttataataacgagtttcaggttactgttcctccaagttagcatgtccttgccctttggcaaatgtagtttttcttttcaccggattcaatgggaaaaattctcttctgagtgacggcttcaagtttacccatcgtattgctaaccaaattggatggagactgtcaaatcagctgaaaggaaaattgatatggtaataggagcaatcgtaccaatggaaaggctaatttcctaattcaactagattttaaatgagctaattatttcattagtacagcaagttggtttgatatctatcgaaattatacctatcaaattaaagaagggttaataaatttctgatatttctgatataaatatggatatttatagaaaatatcacttaaaatgtaagaaacgcttgaaacaaaagacttaaccttaatcataaatttgtgtactttatgttttatttaacacatgcatattctatattttttatattcctattgcattttccatatctcttagttagggttactgcacttcgcatcaatttaggcccagcgatttgaagcccagtttttgttgagttcttgacggtttgcgtgccaaagtctggatgtttcggcatttatttgttggccccaagcagttgacatgcaattattcaggttactgcagttgaaaaggactcggtttgtcagtcagagaacggcctcccaatgttttttcctattactttttttggggtggcgttgggtggttgtaataaaacaatttctgtcagtgtgacgaggactttgaaaagggcgaatcgcgaggcatttgaatgccattagtggctgcacgtatccaattactgtcgacgaggataaaagtagtttaattaaagcggaggctttacctaatcgtaatacaaggcacaaatgcatacattttgaaatttcttaagtaattaattaataaatgaatttctatactaattcatggaattgtttttgaatatattacacgattacgaattaaaagcaattaatcaacgtatatgattggtttgtccttgcagtgaatgccattcggtgccatcagtgtaattcgcatgacaacgaggattgcggtggcctggtggtgaacactcctcgtgcccagagggacaaccagtacctgacggactgcgtcccgcccagcggtgaggtggccttctgccgcaagacggtgatcaatttcgagcagaacgacgagcgcagaatcgagagaagctgtggtttcattccggagaagatccaaaacgcttgcttcaccgccgacaacgagggctacaagcagatcatttgcacctgtcccgacgagggatgcaatggagccagctccctgctgggtgtccgccagttgggctacagtctggttggatctgtcgtcagtctggcactggccagcatgctcaggcattaggtcatcgatcagctcaccttcagctcctgcatcctgttttctccattcaaaacgtacctaatcctaactggttaagctaagtcttaaatattttgcactaagttctttgctgtttgccatatttagttatgtatacgtggcagctatttcgcgtttagtcttgtattctgtatttttatatttaattactataaaaatataagcatcgtatttaaaagaaatctatgatgtttaatttatttgcattcttttattctgaacttgtcgccaaatgtataaaatcgaatttttcatggcaaatgaggaggacgaacgcttaaattgaccaaggactcgcccacgcactccgtctctctctctcacacacttcctgtgctctatctctgtctatcgtccagttacttgctgccaaaatgtctgcagaaattgttttgtggcccagagtcaaagtcactgtctacgcaggccaaaaataatagggcaactttgttagttttattgttgaggatgagcatgaaaccctgacatgttggcccattaagtcaaacacaggattacactgaaaacggaaaacgaggacgttctttcaaatgtgtgaaatgagaatataataagcttactaataagcttaagctaataatatatgtaacatatttttagttaggggaaggatcttttgctgcaataaagggcattattaagttttttttttacttaaaatcctatatttagtatttcaaaatatttgcaaatttatatgattgaacttaaccttcatataaattgatttcttagcgtgccgctcatttatttgattttaatgcgccgcagagcgttgttgtttgttcttcgcagacacgcacacagatataaaaatacgctcacacagatacgcgcaaggagatacaaatacaaatacaaatacaacttctggtcgacctacatgcgttagcatttgtgttctgtcgtcgccaactcaaatgctcaactgctcaaatgg

SEQ ID NO: 34343 - DNA, 447 bp, DROSOPHILA
atggcaatcacaacctacgtctatgccatgtgccttgttttggccgccaatttgttaacagtgaatgccattcggtgccatcagtgtaattcgcatgacaacgaggattgcggtggcctggtggtgaacactcctcgtgcccagagggacaaccagtacctgacggactgcgtcccgcccagcggtgaggtggccttctgccgcaagacggtgatcaatttcgagcagaacgacgagcgcagaatcgagagaagctgtggtttcattccggagaagatccaaaacgcttgcttcaccgccgacaacgagggctacaagcagatcatttgcacctgtcccgacgagggatgcaatggagccagctccctgctgggtgtccgccagttgggctacagtctggttggatctgtcgtcagtctggcactggccagcatgctcaggcattag

SEQ ID NO: 34344 - protein, 148 aa, DROSOPHILA
MAITTYVYAMCLVLAANLLTVNAIRCHQCNSHDNEDCGGLVVNTPRAQRDNQYLTDCVPPSGEVAFCRKTVINFEQNDERRIERSCGFIPEKIQNACFTADNEGYKQIICTCPDEGCNGASSLLGVRQLGYSLVGSVVSLALASMLRH

SEQ ID NO: 34345 - DNA, 6985 bp, DROSOPHILA
agctttcagcttcatctagcagattccggaaaagctgtagtcaaactcggtgttcttctcgtttaggcgacccaaatactgggagtgcttgatcccaaagctgtaggcgggcacatgggagaggtttacctatcgtgaagagtaattggaaggcagaaacaacccattgattatgatgtgttgaccaaatgaatttaatggcaaaatacattctcaaatattatcgtagggcttgtccgcccgattctccaacaaagagcgaacacaacgctgcggaacgttgactggcaatggtttcttgatatagggggagtgcaggatgccaaaggatatggcaggaggcgaacgtttctcccagtactgtgggagggtttaggatgaggtgaaatctatttgcacggagtgatgtcccacaggtaagagccgttttatggtaattatcaaaggatattggttaaataactgacctttccaatttatcgcaaacggcacattacccttacccaccaaaaatacttttaatacagggcaaatttgtttctgaatctcaataatcttacgaactctttcaggacgtaaggacgagatctgactcaccttctccggacagtgcgctccgggtccgggcttcgagtcctcgctgcccatcttgtacttgccgcgcatggagaagactggtggctttggtttgaccaccgtgtactcgccgtcgtagtaaccgggtccggggaagatcatcaccggaatcagcggaggcttctcccgacccgtaatcgtataagccggagccgaacgaatcttgccctccttgctgctgcccatgacggtcggtattttgtagacattaggagctgtcaatgatggcaaaatgtgtgtaaaaagttagttgagaatagttaattcatttgctggttaattcaatggcttgtctcttgggctggtgtttgaatggttcgggttagtttcgggttggattgggtgatcttggtcttgacatgacgtgcctgcaaataaacacacgaaacggaaacggacaccaagcaattgggagtactaatatcagttaacattcgaaagagttctatatttgtagttcttaaaaaacataataacaaagtaaaatattgaatgggttataagtatcatcatatattctgtttgtaatctaaaatattactcatacgacatgtgttgagtacaaggtaaacatcgttttcttgtctcaaaattaacttttatatatgttatgtcaataaagttgttgtttcatttcatgaatgcaaattgggaatatttacgctgaagattaatgagtaaatgcaacgttgcgtatgagtgattttactctttaaaatccctctggttacctgataatcttctcctgcacgctgctcgcctccacagcgtacttgaccgtctgcatcctcgaggattggccactggtcacaatggcgccatctgcctgcaccactgtctggtggctcacggccgccgctttggtggcactagcatccgacttaccgctggccaccaccttcagattgccactctccttttggccgtgggcaacttcctgaatcctggtggttgtgctgaccatcttcgagtggttgccattcgaaacgatattgccattgcttagtggtgcttgtggtgcggacttaagctccttgtgggtgccattcacctgcttggtggtttccttcttctgcagctccggctgctccactccgtttatgaaggtctttgtggttgtggtggtggtggttgttgtggtggtgctgctaccagcattgttgttggtgtggttggtggttgtggtggtgcattccgcattgttgcgtactaagttttggtatttgtgtaaaatcataaattgacaagaaagaattccaacaatgagatggtgcaggaatataaatacaaaaagcacaatttattctacatgaagaaagcgattcaagtagatcagattttgaaatagtttttatatctatatatcaaagggcatcattttaatgattgaatgatcttgaggattcttaccgggactggccagacggcgttctcgtctctggacaatgcgatcttctatgtacgcgcctctgggttctggtgatttgtgggtatttacagggggattcgaaacggatgagagcatggccagaataccaaagaatgtgtgtgcgaacaaacatggaacaaaaaacaaataggcacaaaaacaaaaacagatcgtatggatccggacggagtctgcggaatccggcaccaagaaaagcggaaacggatttcacctacctggtagcgatgcagtgggcactgtcttcaggccaaagctataggctggcgagctgtccagcttgcactgctcgggatgatagtgaccaggggctaaatgggtgaacggtggaaaacaaacaaaaaagcgggagacatgcaatacacacaacagcaacatgcaacaccgatggcggccactatttacctggagcatcggtggtcacgcggatatcggacttggtaccaaagctgtaggcgggtgtggagtgtagtgagtgcttctccggctcataggcggagggtgctgcaatggtactgatgctcgttaggataattgaggatataaccctagacatcctttaaggaactaatcctaatgcggcttccttttggaagttacttgcctggcgtatcggatatgcgctcccttcccagtcgcatgccgaaggtgaacgctggtgtgctgtccacctggcactgctccggatggtaatcgcagggtgccggcgtctggctcacgtgatcggcggctggacgacctgcaatggtgtaggcgggtgtatggtcgagacgaactttctcgggggcgtagtcgcatggcgcgggatgaaggtgctccgtcttggggtcgtgcttgccgccaaagctgaaagcgggtgcatggtccagtcgcaccttttcggggctgtagtcgccgggagcgggggattcactcagtgatctcggatcgtgtttgccggcgaaggtgaacgccggattgaagtcctgcctgaccttctccgggaagtagtctccgggtgcgggcgtttcgctgggcttatgcaggtcatggcgaccggcgaaggagaaggcgggattgtgatctagcctaactttctcgggatggtaatccccgggagctggagtgtcatgggttacctttggatcatgcttgccggccattgtaaaagcaggattatggtcctgcctaactttctcgggggagtaagctccgggggcaggagtctcattgggcttgtggagatcatgacggccggcaaaggaaaatgcgggaacatgatcttgcctaaccttttcagggtgataatctcctggtgccggtgtattgttctccaccttgggatcattcttgcccccaaatgtaaaagctggagtgtgatctaagcgaaccttttcgggacagtagtcaccaggagctggggtgccattggtaatcttctcaatgtatttaccagccattgagaatgcgggattgtgatcttgcctcaccttctccggtgagtatgctcctggagcaggagtgtcgctgggcttatgaagatcgtgacgaccggcgaaggagaaggcgggattgtgatcttgtctaactttctcgggatgatagtcacctggagctggggtatcgttttctactttaggattgtttttaccagcaaaggtaaaggatggtgtgtaatctagacggaccttttcgggactgtagtcgccaggggcaggagtatcattggaaaccttagggtcatgctttccggccattgtgaaggcaggattatgatcctgtctgactttttcaggagaataggctccaggtgctggagtgtcgctaggtttttgaagattatgacggccagcgaaagagaatgctgggttatgatcttgcctaactttctcgggatgataatcacctggagctggggtgttgctctcaactttgggatcgttctttcccccaaaagtataggcaggtgtgtgatctagacgcaccttttccggactgtaatcgcccggagctggagtgtcgttggctaccttttgggtgtacttacccgccattgagaaggcaggattatgatcctgacggaccttttccggacaataggcaccaggggcgggagtatcattcggtttgtgaagatcatgacgaccagcaaaggagaaagctggattatgatcttgcctgaccttttcgggatgataatccccaggagcgggagtattgttctctactttcggatcgtttttgccaccgaaagtgtaggctggagtatgatttaagcgtactttctccgggctgtagtctccgggagcgggagtaccattagttagcttttcaactggcttgcctgccattgaaaatgctgggttatgatcttgacgtaccttctcgggagagtaggctcctggagcaggagtatcacttggcttttgaaggtcgtgacgaccggcaaaggagtacgctggattgtggtccaacctcaccttctccggatggtaatctcctggtgccggagtgttattctctactttaggatcattctttcccccaaaactgtaagcaggtgtgtggtctaatctgcacttttcgggactatagtctcctggtgccggagtgccatttaaaatcttctgatcgtgcttgccagccatcgtgaaagctggattgtgatctaatctcactttctccggcgagtaagcacctggagcgggagtctcgcttggcttgtggagatcatggcggccagcaaaggagtacgctggattagtatcttgcctaactttctcggggctataatcaccaggagcaggtgtatcgttggtaaccttggcatcatacttgccggccattgagaaagctggattgtggtccagtctcactttctccgggaagtaggctccaggagcgggagtgttgtctggtttctgaaggtcgtgacgaccggcaaacgaatatgcgggattgtgatcctgcctaactttttcgggatgataatcacccggggccggagtgttattctctactttaggatcactcttaacgccaaaactgtaggcgggagtgtgatccaagcggaccttctcgggacaatagtccccaggagccgggctatcgctggtcaccttttgactgtgtttcccggccatcgagaaggcaggattgtgatcttgtcgcaccttctccggggagtaggcgcccggagcgggtgtttcactgggtttgtgcagatcgtggcgcccggcaaaggagaaggccggattgtgatcttgccggactttctcggtgtcgtaggctcccggtgctggtgtgtcgcttggcttgtgcagatcgtggcgaccggcgaatgagaaagcgggattgtgatcgtgccgcactttttcgggacagtagtcgcccggtgccggagtggagctctcgagtcgctgctcgtgcttaccgccgaaggtgaaggccggcgttcgatcgttgcgatacttttccggggcatacgaaccgggcgccggagtctcgctcacggacctcgtctctgggcgtccggacagggtgaatgcgggcgtgtggtccagccgcaccttctccggattgtaggtgcccggcgctggcgtgtcactcgacttggccagctcggcacggtggccaaagctgaaggcaggcgtcctgctcaggacgcacttctcgggttcgtatgctccgggtgctgcaagagattgggtgaagataaggtgtaaaaagagttgggttttggtgtgcgggtcgcacgctaagactaagatccattgaaatgcgattctagaactcaccaggtgtgcaatcgaccacgtcctgcgaagcctttccggcgattgagtaagcgggtgcggagtgcaaccttgacttttcggggctgtaggcaccgggtgctggtcataaggacataaaagtgtgcgctataagccaagttactacagcccagctgagcgggaagccttacctggagtatcgctgacctggatgtgtttggtcttcaagccaaagctgtaggcgggaatgtgttcgaggacaacctgctcgggcttgtaggtgcctggcgctaatgaaagtgtcgtcgtggtgaaagcatcaagcagctatattaacgtggctcaaacctacaaggcatactgtttacaaacctggagtgtaatctggtcgctgttcatggtgcttgatgccgaaactgaactctggcgtcttgttgagcttcaccttctctggacaatatgcgccaggagctgcggatgggatgggatatcagtattaagttggccaaaagtcacgggaatagaaaaggaaagcgctatagatactgtccaattgggtacgcttgagcaagtggtgcctcgattggggtagatacggatacaattacagatgcagatacagttacttgggggggaggctgggatttattacctggtgtgccctgatcgtgttcgattttagttcgtctaccgaaagtgtagcgtggcgcattcttttttgattgcgtgaccttttcagggcaatagctattcggagctgttagtgttaataaaacattcgatttttagtctactcgaatcaaaactaaaggtctacactaggtgagctacgactaagtgtgggtgaattacaaatagatagatatgtatatacggatagaaagatacattatttcgggaattagtgatgagttggggattaattgatcgggttagaagttagagagcggagctagaccaacaccaacactaaaacgcaacgtggacgaagtttggacagttagttgggttacctggattgttaaccaaatacacgttaaccttaatgcgaaaggagtagcgtggggctcgccgcttgacgacatcaagtggcaccacttgataatagttgggacctgagtctcgattttgccacggcaatcattca

SEQ ID NO: 34346 - DNA, 3921 bp, DROSOPHILA
cgcacacttttatgtccttatgaccagcacccggtgcctacagccccgaaaagtcaaggttgcactccgcacccgcttactcaatcgccggaaaggcttcgcaggacgtggtcgattgcacacctgcgtgcgacccgcacaccaaaacccaactctttttacaccttatcttcacccaatctcttgcagcacccggagcatacgaacccgagaagtgcgtcctgagcaggacgcctgccttcagctttggccaccgtgccgagctggccaagtcgagtgacacgccagcgccgggcacctacaatccggagaaggtgcggctggaccacacgcccgcattcaccctgtccggacgcccagagacgaggtccgtgagcgagactccggcgcccggttcgtatgccccggaaaagtatcgcaacgatcgaacgccggccttcaccttcggcggtaagcacgagcagcgactcgagagctccactccggcaccgggcgactactgtcccgaaaaagtgcggcacgatcacaatcccgctttctcattcgccggtcgccacgatctgcacaagccaagcgacacaccagcaccgggagcctacgacaccgagaaagtccggcaagatcacaatccggccttctcctttgccgggcgccacgatctgcacaaacccagtgaaacacccgctccgggcgcctactccccggagaaggtgcgacaagatcacaatcctgccttctcgatggccgggaaacacagtcaaaaggtgaccagcgatagcccggctcctggggactattgtcccgagaaggtccgcttggatcacactcccgcctacagttttggcgttaagagtgatcctaaagtagagaataacactccggccccgggtgattatcatcccgaaaaagttaggcaggatcacaatcccgcatattcgtttgccggtcgtcacgaccttcagaaaccagacaacactcccgctcctggagcctacttcccggagaaagtgagactggaccacaatccagctttctcaatggccggcaagtatgatgccaaggttaccaacgatacacctgctcctggtgattatagccccgagaaagttaggcaagatactaatccagcgtactcctttgctggccgccatgatctccacaagccaagcgagactcccgctccaggtgcttactcgccggagaaagtgagattagatcacaatccagctttcacgatggctggcaagcacgatcagaagattttaaatggcactccggcaccaggagactatagtcccgaaaagtgcagattagaccacacacctgcttacagttttgggggaaagaatgatcctaaagtagagaataacactccggcaccaggagattaccatccggagaaggtgaggttggaccacaatccagcgtactcctttgccggtcgtcacgaccttcaaaagccaagtgatactcctgctccaggagcctactctcccgagaaggtacgtcaagatcataacccagcattttcaatggcaggcaagccagttgaaaagctaactaatggtactcccgctcccggagactacagcccggagaaagtacgcttaaatcatactccagcctacactttcggtggcaaaaacgatccgaaagtagagaacaatactcccgctcctggggattatcatcccgaaaaggtcaggcaagatcataatccagctttctcctttgctggtcgtcatgatcttcacaaaccgaatgatactcccgcccctggtgcctattgtccggaaaaggtccgtcaggatcataatcctgccttctcaatggcgggtaagtacacccaaaaggtagccaacgacactccagctccgggcgattacagtccggaaaaggtgcgtctagatcacacacctgcctatacttttgggggaaagaacgatcccaaagttgagagcaacaccccagctccaggtgattatcatcccgagaaagttaggcaagatcataacccagcattctctttcgctggccgtcataatcttcaaaaacctagcgacactccagcacctggagcctattctcctgaaaaagtcagacaggatcataatcctgccttcacaatggccggaaagcatgaccctaaggtttccaatgatactcctgcccctggcgactacagtcccgaaaaggtccgtctagattacacaccatcctttacctttgctggtaaaaacaatcctaaagtagaaaacgataccccagctccaggtgactatcatcccgagaaagttagacaagatcacaatcccgccttctccttcgccggtcgtcacgatcttcataagcccagcgacactcctgctccaggagcatactcaccggagaaggtgaggcaagatcacaatcccgcattctcaatggctggtaaatacattgagaagattaccaatggcaccccagctcctggtgactactgtcccgaaaaggttcgcttagatcacactccagcttttacatttgggggcaagaatgatcccaaggtggagaacaatacaccggcaccaggagattatcaccctgaaaaggttaggcaagatcatgttcccgcattttcctttgccggccgtcatgatctccacaagcccaatgagactcctgcccccggagcttactcccccgagaaagttaggcaggaccataatcctgcttttacaatggccggcaagcatgatccaaaggtaacccatgacactccagctcccggggattaccatcccgagaaagttaggctagatcacaatcccgccttctccttcgccggtcgccatgacctgcataagcccagcgaaacgcccgcacccggagactacttcccggagaaggtcaggcaggacttcaatccggcgttcaccttcgccggcaaacacgatccgagatcactgagtgaatcccccgctcccggcgactacagccccgaaaaggtgcgactggaccatgcacccgctttcagctttggcggcaagcacgaccccaagacggagcaccttcatcccgcgccatgcgactacgcccccgagaaagttcgtctcgaccatacacccgcctacaccattgcaggtcgtccagccgccgatcacgtgagccagacgccggcaccctgcgattaccatccggagcagtgccaggtggacagcacaccagcgttcaccttcggcatgcgactgggaagggagcgcatatccgatacgccaggcaactttggtaccaagtccgatatccgcgtgaccaccgatgctccagcccctggtcactatcatcccgagcagtgcaagctggacagctcgccagcctatagctttggcctgaagacagtgcccactgcatcgctaccagaacccagaggcgcgtacatagaagatcgcattgtccagagacgagaacgccgtctggccagtcccgtggagcagccggagctgcagaagaaggaaaccaccaagcaggtgaatggcacccacaaggagcttaagtccgcaccacaagcaccactaagcaatggcaatatcgtttcgaatggcaaccactcgaagatggtcagcacaaccaccaggattcaggaagttgcccacggccaaaaggagagtggcaatctgaaggtggtggccagcggtaagtcggatgctagtgccaccaaagcggcggccgtgagccaccagacagtggtgcaggcagatggcgccattgtgaccagtggccaatcctcgaggatgcagacggtcaagtacgctgtggaggcgagcagcgtgcaggagaagattatcagaactacaaatatagaactctttcgaatgttaactgatattagtactcccaattgcttggtgtccgtttccgtttcgtgtgtttatttgcaggcac

SEQ ID NO: 34347 - protein, 86 aa, DROSOPHILA
MTSTRCLQPRKVKVALRTRLLNRRKGFAGRGRLHTCVRPAHQNPTLFTPYLHPISCSTRSIRTREVRPEQDACLQLWPPCRAGQVE

SEQ ID NO: 34348 - DNA, 2626 bp, DROSOPHILA
taccgacgtggccaaaagaagcagacctgcgttgcaattattacctattcctctttgattaacttgtattttattagtttacttacacaaatgcttcattttaaccgtcgatcgagattaagaacaaattagaaattacggattatatatagtctgcattataatcaaattagactcgccagcgcgatataaaatttatgcgcttcggttggatttcattaagccattcttaaagaatataaatgaatggcattacacaattaaacttaaatgtataaattccataacaacatatgtaatttgtcgaatctaatttgattagtaaaccaagtataaatagtctacttcgttttaaagatcagtaataatgaactaattttctaatagttttaaatactcaataaataaatcaggttgttttaaaaaacagaccaacttttgctacaaaaatggtatgattatttgtcaaacatccgtgtcgcaacattttaatcaattgcatgccatttaaagccccaacttcgcattcaatcatatctgcggctaacaaagcagtgacatggcatacaagtaacaagagtgatggccacttatcaattacagaaaacagattttaacggactcctgatgagtccgattttagccacattcatatggtttcgaatgcaaacacattcacattacgggagatcaagagatcaaactccagcgacacgctaggaacacaaacaataacatgtcgtgggtgtaattaaaattggatgaccacaaagttccataatatttccgacatttagagcggtctaatggatgaccgtctggccagtggagtttgagcaatcaattgagccgaacgatcactgatcgctgcagccaaataccgcttaatgcgcaaataattgtggatttcgggggaaacgaggccagcgaaagttccgtataaataggggttgagccgtccaggagtttacaaattcatccaaaacgcggagtgaacataatgttgcgtctgatttgcgtgttcctgctcagctgcgttggcttccaggcagccttggcttgcgtaagtatggcaggagctccgtggaccagatctataagctatcttttgcccagaatggctacaaagccaagctggtcaagttggagaactgtgccggcgaggatgccattatgacggtgggcagtgacttcagcctgaagctaaacaagaagtgtgaactggtaccctcgggctgcatcatgaacaagccgttcagtaccgcggtggctaagttcaaggtccagaaggatggcatcgtaatgaaggagggcaagatcgatctatgcgccgccattgatcaggcctcctccgaaggtaaggacatgctaaagcttttcggagcaccttcctcctgtccggtgggcgaggagaaggtgtgcgccaacgatcactccgtggatctgagcaagtacaaggccatgttgggcatggctcgtggtcacctcatcatcgattctgaggtcaagcatgacacggtgagtttatttccaatatatatgatagatatttcgatgacaccttgttgtattttcctccagggcaagtcctgcattcatgccgaaatcgagatcaccaagaactagtgacggaatccgatcgttggtcttatgtttgtattatgagtcttgcaaatcatgtagttgtaaatacgagggcaaaaaaaaattggtaatgcggtgcacacacagtgattaaatatacagaaaataccgaattgaaattatcacaatgctctctataagttatttcaaatatctgcgggaatttaattaaattgatcttttttgtgtccgatcctgaagatcacgctgcagctggcgtttcagctgctggagcgtctcctggcgctccggaggcacctccaggtgcagaagtcgtaccattttggggtggtggcggacttggttcagccatgtggtagtgacatgcatctctgcacgattgcaaactatggaactcattcctcctgtagatcttgcggcaatttgtggtcaccttaaatgatcaaaggacctaaaggatatgctcgtgatcgtttctcgcttctacctttatgcagtcgaatagaactcggtgaaaggcaaagaattcccgatgcgatgatctacaagaagattcggggggatatttgtttttcaccagacaggagctgttcttagctagaaaatcggtaattgagtgaatggttgagtattaagttcaatcttactcctggtcttgccagcctctataagaagccaagcgagggcaacaatcaccgccaacagcagtagcttcatgacggatcatcagatggttggcggctaagtggacatccaactggcaaagcattaatacttaacacggcattaagcatgaaaattgccatttgccataaaagtaaatgctatatttgtgtggattaccaaatgaaggctgagctctctaagaaaaaaacatcgtggctaaatatattagtaatatctctttatatatcagtgtatacaattgtaacattccacaacactttcggcttacaaatacgtttgagaaacaattaaaacttatggttagtccgatacgagtagcgaaggtagtgtagtt

SEQ ID NO: 34349 - DNA, 510 bp, DROSOPHILA
atgttgcgtctgatttgcgtgttcctgctcagctgcgttggcttccaggcagccttggcttgcaatggctacaaagccaagctggtcaagttggagaactgtgccggcgaggatgccattatgacggtgggcagtgacttcagcctgaagctaaacaagaagtgtgaactggtaccctcgggctgcatcatgaacaagccgttcagtaccgcggtggctaagttcaaggtccagaaggatggcatcgtaatgaaggagggcaagatcgatctatgcgccgccattgatcaggcctcctccgaaggtaaggacatgctaaagcttttcggagcaccttcctcctgtccggtgggcgaggagaaggtgtgcgccaacgatcactccgtggatctgagcaagtacaaggccatgttgggcatggctcgtggtcacctcatcatcgattctgaggtcaagcatgacacgggcaagtcctgcattcatgccgaaatcgagatcaccaagaactag

SEQ ID NO: 34350 - protein, 169 aa, DROSOPHILA
MLRLICVFLLSCVGFQAALACNGYKAKLVKLENCAGEDAIMTVGSDFSLKLNKKCELVPSGCIMNKPFSTAVAKFKVQKDGIVMKEGKIDLCAAIDQASSEGKDMLKLFGAPSSCPVGEEKVCANDHSVDLSKYKAMLGMARGHLIIDSEVKHDTGKSCIHAEIEITKN

SEQ ID NO: 34351 - DNA, 2502 bp, DROSOPHILA
ccaaaatggattttttcgaaatggaaaagtactatagattagttatctaataaactagaaaaattgatattagttacaaacaattctgcacgtcaaagaagaaacatttcttatcatgtttcagatatcaaacataattttatatttcattaattcttatataattccttattaattcttcaaaaaatatggttttctgtatgatttcctatgcatggaatatactttttctattcccacactctccattgaccaactggcatcactgtctcccaagaaggggaactggacaggagtcgaactggtagtatttacaacaaaacagccacatcaggccgaaatgaaaacgttatcaagcgacagacgcgcttttgcagtaacaagatggaacggggacataggcaaaattagctgcgttcgccagtgaatttgcaggccaatcagtgagtgtgccacaatttggccaaccaaacgggcaacagcaaactggtcaagtcgcagatgccatcggagctgttcctgctggtcacctccttctccttctccgccggcaacgtgcaaccagcaacatgcaacttcgatctgctgacgttgcacttgtcgcgatttcacatcagtttttttttctgctgttacggctgctatacgtttgctttttgctcgttgcctacttttcaacgtcttgtactttcgattggttaattgttaaacaaatttgaaatgtttctgctttgcagtcacctggcctcacccccttaaccacctcctccttctttcgtttgcgaatgcaaatcgcatgagctaacaagctgcaatcgttgcacatcccacatgcaattggcaacttataacaaccgacatgctctcagtttgaggcaagttaacttggtagaccacattttcgcctgcctccataaggctggcgattaccaaataatttcggttattaatcattaaaaatgtgatcgttccggaggaataactagccgcatgtcgcaaattatttaaatcgagctaaagcaatgtgagatttaaatgggatatagctacccacataatcacagacagtgtctgttttatgggcaagtccgagtcgtaaattcccaaaaacttatcgccaaaacttgtttgaaaataaaaacaatgcgattacggtatttaaaaccaataataaagctgggcccccaagaattcaagtggtacttactcatggactcgttttgacccaacatcgttgggctatctccatccaccacgagagcctcattttcggaatcgatttccgtctgctggacacaggttgctcctggcacataggtttcctggctgagagtgggatgattgctgtccgtgccaacactcgaggctgatgacgtaatgcccacgtcgatgaagtcctcctccgtttccaactttatgcgctttgccgccgaactgcaactgggcacatcgtcatcggggttttgggtagccgatgtggccgctatggtggtgccacccatatttacatcctaagacaataaaaacaatatcattaaaaagttataccttaattcccaaatgtaacaatcaaatcaattagcattttaatgggcaacggaaatgagatatatctgctggtcttttttttttttttgttttgaaaacggttgcttatcgttcgtatcttctaactggcccaagaattctcccctttagaccatttataatttatgccaagttatcttgcaccccctctccctagtgtatggcataaaaatcattcatgccaaacttgaacaaaactaagactgggctggtcaagcggagggatagtgttaaaaatgggacgtattcgggaggcgaggtgggcctgtggtaattgccatgcttgaggaaattgttcggaagtagggtaaagagttttgcatacatttcgcccagattttgatagtcaattgctgggaaaacagtagcaattttcctacatgcactcagctgcttggtaaatcgctcaaaaattaatgatattcattgttaaagtttagggcgaaatgggtaaagagttgtgggagaagttgttctggacaaaataattgaaaagttaaattataatacccattgcgaatggctaaacgactttacataacaagaagtagacaatataattgtatagcacgcaatatagtgatccgggttttttttttacttaagtatcatgaaatataaattcattgcactcattcattaaaatcgaatcaaagaagttctcaatttgataatttaaatttccccaccaataaaactaacccgcccgcaaagtacttgctcgaataatatatcattatatctgtaacgaaaataaaccgtttctataataaacaactgcgacacaaatcttgcagagcagaatcggttccaattgaatgcctccctccaatcgaaaggcccaaaggaaggaagacgatggctgcacttaacctgaaaacatgaaaagtaccattcgcgcattggaaacttgaa

SEQ ID NO: 34352 - DNA, 309 bp, DROSOPHILA
atgggtggcaccaccatagcggccacatcggctacccaaaaccccgatgacgatgtgcccagttgcagttcggcggcaaagcgcataaagttggaaacggaggaggacttcatcgacgtgggcattacgtcatcagcctcgagtgttggcacggacagcaatcatcccactctcagccaggaaacctatgtgccaggagcaacctgtgtccagcagacggaaatcgattccgaaaatgaggctctcgtggtggatggagatagcccaacgatgttgggtcaaaacgagtccatgactcgatttaaataa

SEQ ID NO: 34353 - protein, 102 aa, DROSOPHILA
MGGTTIAATSATQNPDDDVPSCSSAAKRIKLETEEDFIDVGITSSASSVGTDSNHPTLSQETYVPGATCVQQTEIDSENEALVVDGDSPTMLGQNESMTRFK

SEQ ID NO: 34354 - DNA, 5686 bp, DROSOPHILA
cgcttggccatttacacattggttttggccctgtttcactgctaagaccatggccaggcggatgctgttggcgctaattagtatttgttgcttcagttattggctaaattacgagtagatgagcttcagcttggctagtcttaagtgggcaaaggattatcaaggatcggagagttgaaggttccgaagatatatgtccctggattgaattacttcagcaaatattactcaagttcaccgaaggtttggcaagtttttcaagttggctttttttgtaggtcatccttccgtttttacgctgaaagtttggtaacgtttttttttttttttagtttttaagttttgaagctaacgttaaatacacaaaggtaaaagtatcttaaagttgtttgagttaccagctttgtatgtaaagaaaaaatgattgtttcaatacgaagttattcgatttttccctccatcgatggtttttaaaaaattataaaatagtacgattatagggaaaaatcttaaaaattttaattattagtttagaaaacaaacgtttaatttttttttaagtaattattgttacatcgatttaactagtatttatctttactgattgtagcttccccatatttaggacatccacctaaatgaagcaaacgtgtatcaatttcaaggtctttgcggtggccccaacccgcgatgtgggcgagttgagaaccgctcctggctcaccagccagaagccatcaacgcaaccaacgaaatatggcccagagcaggtgctcgagccctgcgagtgacattgagagcacggcaaagagcgaatgccgcggggaaaagcgaaccgcagaagggtggcgccgaagagaggcaagtggctttccactcgtccgggaaattcactcgacaaggactcgtgcgtgggcggtgacgaggctcaagttgagtggcgggaaaagtgcttaaaagacgagcgcaaaccgctcaacgcttcagtcgagtttgaaacttacactcaagcggagttgtaaatagttgttcgagttgttggctcgtactcaaacgtactgtaacacctttatgcatttaagataatccagcccttgagaaaatacaagcgaaatatacttttacaagaaacgaaattcaatataaatgtcaaaatgatttccaaatgacgcgtgtgctattacatgacttgtgacatgaaacggtttaaaattgtgtagaaaaactgttgacgaaacccaggcccacaaagccaaatccccacgaaatttgagttgaaaaggaaaatctgtgtgtgcggaaaattgcttctttacggctccgctctgttgctcttcattacctttacgctgtacctacccaccagccagtactcccccaattttctcggattttttgtacgtttttgttttttttcctttaagcctaggcctcgttagtcttgtcccgcttccatgattcacgttgcgtatacgccgtgtggcgtctggtggttagggtgtgcgagagtgtgtgtgtgtgtgcgaatatcggtggtgtgcgtgtgccttgaataacaacacgcagttgttgattgttcccaacttccttgggctcttgttgccgcgtcgggcccaccctatagtccctagcttctggcttttctggctgctgttaaattatgcattaagaaccccaagcccgcacaaaggcgaaagtgaatgcaaagaaatggaaatggtttaaaaatactggctgcgaaattctggcacatttctgtttgggtgtccacagtaaattatgcaaattaatgtttgtttgtgatttggtcgctctttttttggtggttcgctttgggccaaggtggccgggaaaaagttaagatttagtgttctgctaagtttttctggcttgtctggtttttattcatgtttgtggaatttacatcttttaaaattctcaatcagaagtttggccttattggtgtataaattgccgaaacaaaagcaaaaaacactgtactaaagcagttacatgaaaaagtgcaacttgaatatttttataaaataattttcactaataacaactttgtttcattgtcttaaagaagtatgctgctctatgctaactgaaatacctatatattctttccaaattatatgaagaaacttatacgtaatggtataacaacattatgtcttgaaattcttttctttaagttttatcaataattcttcattccaatgtatatttacaatgctttttaacaaatgccttttcacacttaacctgatgctctttttacctttacctccatagcttctcattcgagcaatttgcgccgaattatttggccatttggcgccgtggccataatttactttacttttcctgctgctctctttgctgcggatttcctctggccttctctatttgtctgtgagtctctggtggcttatatttactatttggctaacgtgtctttagagccaaatgcccgccgattcgactcgagtaaagtgtcattgtgtttgtgcgtattttcggcgcaactgtcgcagtcggcgtttttagatgcttattaaatcggtggagccaagacagaagtttcattttcagtctattaaagaattttatgtccttcgtttttgtatttatttcctgagctggtggactgagtgtagtttatgtcttcctgggaattgtcagaagattttacggcttaattccctggcggctgatgagcaggcaaaaagttgagcttccgactgtgaaaatttcctttggcttttttcgaaaagcataaaattaaagtcaatctaagctttatagtttggcttagcaaaaacttttatattgcgttgaaaagagcggactttttaacaccaaacttatcactcagccaagctgtgctctgtggaattactaatttgggtaaatattttgttaattattcaatgctcaaggccgttaggaaaactgctgactccagctgtgactgaagactaattaaaaaccttggcctgaccgacacttttgcattctgtctttatattttcccttctcaaaattcaaagcccgagtttcgttgtattttgtcgtgtgtccatttttgattgccccaaaaagtatgccagaaagttacgccactttttcacttcttcaacttttgcttacacaaagaaaaatgaacaaaaacggtagggttaacttggctataattaaaggttccccactgtctggaccttttttgctcctaccactttcgactgccatttcattttttggttacacgcggcgtatgtgttttgggtgctcaagagagtcattaagagtcgctcgagtgtgtgagtgctgaaaatccatctaaaaattatacgaaaagggttgttcaactttttattccctgatacggcggacttttacttgcccagctcccgaaaataaaacaaccaagggaatttgggagaggaaaagttaaagttcgttaagttgattagatggcagtgtgtcaagttgctgtggcatgtaaattgcctcttggagacatctttgcataatcccaagcacaattggggtcgatgtgtttcttaagggctatattgagtaatatagcctaaactggaaaattatttaggctgtaagaatttgagaaagcttcgaaaaatactcacagatataccacatttatggtgttattcgaatatagttgtgaattaaaaacaaaatcaatgctttgaaaacatttagaatgtaatgtcagagtcatagtaactaatagctaacgcatcagagaaagtaattaaaagttgtcataaaatctgaaacatggaaatgattttaaaaccaaatgttgtgcttgaaagttgaaagcaaactactttttaatttcataaaaataaaactcgtaatgaacttttcaaatttttctcttatcttttcagtgtagaaaaatgtaaaaagtcgactaaaaacatatatctatatacacacatataaatatttgtttgctgcaaaattattttcaactttaatttcaacgaaacgaaaataaaaacaaaccaacaacaaacgaaatcgaaacaaaccaactaaccaaacgaaaaaaaagcaaccaaacgggttaaagcttgcatgtagtccccaaaaccaagtagtaaacgataaggaaactatatagaaccgatcgatatagaaatatagaatcgggaagaagttgcagctaatttctggttcgtataactccattagaaggcgattagcatattgaaggacgagcggagtaagcggcgggaaacccgctgcagtggctgaagtgccaacgataattcaatcaaagggctggaaaaagttgcccggaaaactgcttctgagcgaagtagggaaggaaactacaaaactccatcaaaacactcggataaagtggaaaacgtgtgcgtgcgcgtgtgaaaaacttttatcatcaggccgagggtcttaatttccacactttataagttccgccagccagcggtatatgtccttcctggcaatggaccaccaccatcatcatcatcatcagcagccgcgtcagcaccacctcagcatgtggccatcattcgccgtctgtctgctcctcctgcagaccaccacgaccaccatggccatcgatttgagtcgtttgtacgggcacatggccaatcccatcgtgaagcggagcggtaagtaatcggccgcagcgccggcattttccatatattggtagctcattaggggagcacctggcgtatacgcaatatccgaattgggtccgtgctcaccattttcgttttcagttttttgtttgggccaatttccattcactcagtatgctgtttggactttcagccatttttcttttctggctttcctcttagtttcccctgctctagtttacttattgcccatactcagcctgcaatagagcacaggaattcgccacttttcttttattttagtttaatttactttttatttatttgcactattgcagttggcaggtgagctgcataattaatgtgcacgtactttttatttatgttattttttcagttttccctgcttttctacggattttccattcgcgtgatatggttggtggccaacgatggaaatctttggctttccgtttaaagtttatgtaaatgatttttgtatttttttaggtagctgaaagtttttcctaggctgggtttttccgcgccaccgttcgtgcgggaattttcactggttttttccaatgctgcttaaattgtttaattaaggtccgcaggcgttcgttgatttgtggcatttgaagcatgtcagaaataatgcaaaacctaattaaattattcatttgatgttttgtgagccctctaacgaaataagtaattaacttaagccaggacaataaattggcgaacaagtgtatttccaacttaatttgcggcattttggtttcgggccacgaatagacttcaattagttagttgctcaatcggtcattaattgcagccatttcatgaatatgcaaagcaaatttattctattatacttatttctgcgaacgctccattgaacgctctatgccgatttgaccggtaaaccagaaattttacatttcactccttctaaattccttgcattcgacattttggcagctttatgtgctcatcgtgatgggggaacacaatttcctcgattccctt

SEQ ID NO: 34355 - DNA, 818 bp, DROSOPHILA
tacactcaagcggagttgtaaatagttgttcgagttgttggctcgtactcaaactgtagaaaaatgtaaaaagtcgactaaaaacatatatctatatacacacatataaatatttgtttgctgcaaaattattttcaactttaatttcaacgaaacgaaaataaaaacaaaccaacaacaaacgaaatcgaaacaaaccaactaaccaaacgaaaaaaaagcaaccaaacgggttaaagcttgcatgtagtccccaaaaccaagtagtaaacgataaggaaactatatagaaccgatcgatatagaaatatagaatcgggaagaagttgcagctaatttctggttcgtataactccattagaaggcgattagcatattgaaggacgagcggagtaagcggcgggaaacccgctgcagtggctgaagtgccaacgataattcaatcaaagggctggaaaaagttgcccggaaaactgcttctgagcgaagtagggaaggaaactacaaaactccatcaaaacactcggataaagtggaaaacgtgtgcgtgcgcgtgtgaaaaacttttatcatcaggccgagggtcttaatttccacactttataagttccgccagccagcggtatatgtccttcctggcaatggaccaccaccatcatcatcatcatcagcagccgcgtcagcaccacctcagcatgtggccatcattcgccgtctgtctgctcctcctgcagaccaccacgaccaccatggccatcgatttgagtcgtttgtacgggcacatggccaatcccatcgtgaagcggagcggtaagtaa

SEQ ID NO: 34356 - protein, 63 aa, DROSOPHILA
MSFLAMDHHHHHHHQQPRQHHLSMWPSFAVCLLLLQTTTTTMAIDLSRLYGHMANPIVKRSGK

SEQ ID NO: 34357 - DNA, 3416 bp, DROSOPHILA
atgctgctctttcgtcgcgcgccattgtcctggatatggggcgtatgagtaatatgccaattacacattttgtgcattctcctgttgcttgttcgcgcagctgcttacatttttatgtttccccttctttttcgcgtcagcgctataaaaatactgttgtatttttaaatttttttttggtgtcgcctgttacttttctgtttctttagccatcagcagcgacgttgcgtatacgaggtggtggctggaagcggctttgatccgtataaagttgttgcttgccagacgatttagaaaagcaaaagtagtaaaaattttaaagctttttgaataaagccgtaactgacgtcggcataaatataaaatcaaaatcttagggtggtgatacatatgtagaaaacggtatgtcatgaatggctatcacgtttacagtcctcttaattctgaataagtttggcgatgttcaagttttatcagctcttgcaacaatattttgcattaaccttggtctgtgaattccatatttcattaaaatatgcatggctgtttttcataggggtatgctgatcatataaaaagtttgcactacttatttatgttcatttcaacaccggttaatcaaaatgaagtggctcaatttttcagtgcaattaatttgttggatgcccagttttttggctacttttaatccttatagaacaaatgtggagttgcttaatcacgaaccggtattaggaatatgttcaaaaaacgagttggcttctgtggaggaactttggttggaccaaaaagtggatcattttgacaaaaacaacaatagaacctggaaaatggtatcattttatcacacaattattttgaatatgaaaaaaacaatgttatgttttagcgttattatcgtaatgccaagtatttcaagccccatggacccatttacatatttgtgggaggtgaatggaccattagcccaggattattgagcactggattaacccacgacatggcagtggaaaactcgggaatgcttttctacaccgaacaccgctactatggactgagtttaccttttgggtgagttagaattaaatcaaaaaagggaataacttgaaatattacacatatttaaaccaatagcaatgaaagttaccgattgagcaacctcaagcaactgagtcttcatcaatcattggctgacttggctcacttcatacgccaccaaaagtcaaatgaccccgaaatggaggactccaaagtcattttggttggcggctcttattcgggcagcttggtggcatggatgactcaactgtatccggatttaatagctgccagttgggcctccagtgcaccattattggcgaaagcggatttttttggtaagacggatgttttacatagacaatctctgatatttcatctttagaatacatggaaatggtcggcaaatcaatacaattgagctacggcaacaactgctctttgcgtattgaaaagggtttcaaattcttggtaaagctatttgatggtgatgaaattcaggagctgctctataatcttaatggctgcgtgggctatagtccaaagaatcctttggatagggcagctttcttcaatggactgggaaactattttgctttagtggtacaaagttataggtgagtgataaaatattcttataagtatcatatttatatacatattgtttgttaagtgcttctataccgcggctttgtgagactttgatgagcttagattcaagtgatgagctggcatttatagaattcttgaaactgctttattcggaaggaaggcgctccagtgattgccaggactttggctactcatccatgctagaacttttcaccgaggattcagttcaaagttcagaaagtaagtaagaaaaccgcaggaaattatatttgtaatcgcatttcgttttccagctcgtgcctggttttatcaaacctgcaatgagtttggctggtacacaactacaaaatccaaatcatccgcgtcccaagcctttgccaatcaggtgccccttggctacttcgaacaactttgccaggatgcgtttggagcggagcagactgcccaccaattggcccatggcgttgagcagacgaatagcaaattcggcggattcgggttcaatcagagcgagcgttatgctcaggtaatcttcacgcatggcgaactggatccgtggagtgctctgggccagcaaaagggtgaccaggctatagtcctgacgggtaagtccttggcaaatgattgaaagaccccgcttagttttgtgccacgtgccacaggctactcgcacgtcgaggatttgtccagcatccgggtgatggacagcgtgcagatgaatctggccaagctgcgtgttatgtcctttctgcgacgccacatatgaatcataccggatccacatccagatccactcgaataaattattaaactaacaaatgcgtcgtgtgatgagcccatttgaaaatgtcatgggagcagctcctcgtgtcctttggcaaacaaagtgataaatggagtgatgcttggacactaagtgatatgtctggtccgttggcttgcgtaaacaattttcccgaatgcggcattcttgttgattaggaaattgcacttgtcctttggcttttgcattttcccctgtttgtttgtcttggcttgattggttgattaaggaacccattgagtggacacctacgcctccacttatataggtggtgtttgtgaaaactttcttgacatggagtaaagtctcaaggtatttcaaacagccgcctgggtaagatgtaatttatcatcaaggaagtctcttatacttagccatttcgatagctaactagaacatgtatattgctattactacattgataaccaaatcctaataaaaaaattcaccatttggcggaatgaagctttatttatttattaatttatttatttaggaaagctacatttattttctagagtaaagaatcatttaattaagtgattcaaccaggaacgcgtaataccagatgtcgggaaagttgagccgcatttttgtttattatccgccctcggaaaagctttttactgccgcttttcgcatttgagtgcaacgccaacgctccgaggacatcgtcgaatcagcgtcacctgctggtctgcgtgggcgcccaggaaagtcgcccggttggtaccagaaactattggatacattcgctggagctacgggatttggggggcttacggggtatatgggtggcactacgggtggttgcgtgggccgaccaaatggggcgggccggcattcggagctcttgctctctcctgatggctctcattcactccgaagttcgtatttacatttgtaccactgttgcgcttggccatttacacattggttttgg

SEQ ID NO: 34358 - DNA, 813 bp, DROSOPHILA
atggcagtggaaaactcgggaatgcttttctacaccgaacaccgctactatggactgagtttaccttttggcaatgaaagttaccgattgagcaacctcaagcaactgagtcttcatcaatcattggctgacttggctcacttcatacgccaccaaaagtcaaatgaccccgaaatggaggactccaaagtcattttggttggcggctcttattcgggcagcttggtggcatggatgactcaactgtatccggatttaatagctgccagttgggcctccagtgcaccattattggcgaaagcggatttttttggaaggcgctccagtgattgccaggactttggctactcatccatgctagaacttttcaccgaggattcagttcaaagttcagaaactcgtgcctggttttatcaaacctgcaatgagtttggctggtacacaactacaaaatccaaatcatccgcgtcccaagcctttgccaatcaggtgccccttggctacttcgaacaactttgccaggatgcgtttggagcggagcagactgcccaccaattggcccatggcgttgagcagacgaatagcaaattcggcggattcgggttcaatcagagcgagcgttatgctcaggtaatcttcacgcatggcgaactggatccgtggagtgctctgggccagcaaaagggtgaccaggctatagtcctgacgggctactcgcacgtcgaggatttgtccagcatccgggtgatggacagcgtgcagatgaatctggccaagctgcgtgttatgtcctttctgcgacgccacatatga

SEQ ID NO: 34359 - protein, 270 aa, DROSOPHILA
MAVENSGMLFYTEHRYYGLSLPFGNESYRLSNLKQLSLHQSLADLAHFIRHQKSNDPEMEDSKVILVGGSYSGSLVAWMTQLYPDLIAASWASSAPLLAKADFFGRRSSDCQDFGYSSMLELFTEDSVQSSETRAWFYQTCNEFGWYTTTKSKSSASQAFANQVPLGYFEQLCQDAFGAEQTAHQLAHGVEQTNSKFGGFGFNQSERYAQVIFTHGELDPWSALGQQKGDQAIVLTGYSHVEDLSSIRVMDSVQMNLAKLRVMSFLRRHI

SEQ ID NO: 34360 - DNA, 4177 bp, DROSOPHILA
agtgcgcaattatttatagttatttttatatttttttgccaaacgccaacgacaagtggcggcagctgggagttgtcggtttccagttggcagttaccaactgtgcataatcataccaattgcaattgcagtgtagctggcgtttgacgttcgtcgcagcagcaattaacaatttttaaccttgttgtgcatgatgcatgtggctgtgagagcactccgatcctcccatgatccgtcggcgatgatgatgatgatgatgattatagcgagtggaggtgatggtggtgacgctgaaatgcagatgctggcgcataaaaagctgctaaatgttttcgagtgctcttctatttcgcaattaaatcgatttcagtttcgatgcattccgtgtttgcaatttgcgagacatcatcgacctcaatttgcataatcgattggtgattgcagcgactgactgaatgtcgttaggcattattaattatgaaagtgttattcgactttcagtgatggccccacggagactatcttaatttatagatcgttgctgcaatccgatattctcgttagcatttagcgcagcttcacgaaactgcgactgcaaatggattgtgcatttcgcaagtgcattttccataatctgaaatggcgttcagcactcggcacatttaattactcatttaaaattaacacaagttccccaagagcttgctcaaatgcctcgcataacatttaccctgttacccactgcaactgccgacgtagcagcaacatcacaagtgcaatcagaggaccgtgacttcgttgtttgattgttgctgcaaaagtgaaggttgaaaaagctggaaaggcgacaattaatgctctgataaagccaaagaaagatgcaacacgagcagcagcagcggtggatgcagcaactgacgcagcagcaacatgcgacagcagcaattttcagccgcaagtgcaacatctgccacagtcgccgcgcgaatttccgttaataatgttgtcaaagcgttccgatgcgttgataagcgctttcgttttgacgctctattatgtgggcgtggccgatgggaacgaagcatccgactttgtgacaatgggcgatctgcggagaagcaggcgtatccagacgcatttctcgcgtcccggtggcatgataatggagggcattggattccagtacagcatgcgatatcagccgggattccacctccacaaattggcccagcagcaggcggatgatgggggaatgggcggtatggaaaatccacctgagacggaagcaccaatgcccatgcccacgcccggaacaccaccacctgaaccagctcccaccgagccggaggaaccagagcccacgatacccatgcgtccgacgaccattccagtggaggtatgccatacgataagggtgttttcaagactttagtgcaactcactgtataatcaaagtgtctagaaaattacagtgaacaacataaagaacatatatacataagtgaaatttctttcttaatgttaagtgacaaataaagacatcgtgtgcccgttcgtttccatgtttccataaactttgccaaatatcttcctttactttctaggaaccttcaccacaaccacccacaatgatggtgcccacaccgagtgcttcaccagggatgcagcctagttctaagcccaggccaactgggaagccctcaatgagtccgccagtgccgacgataccatccagcaccaagagctccataatgcagccccatcagaccctgaagaacatcctcttcggctcgcccatcaaggcgaatctcatcctgaagaaacccaatgcaccgcgctcgaagggcaagggctttctcagtctgttcgaggtgatcaagttccccaacacgaagtgcagcgtgtccatgggcgacatccggagcatggagggcgtctgctaccacgagttcgagtgcaagagtctcggtgggattcccaccgagagctgtgccgagggcgtgggcgtctgctgtgtgtgtgagtgaaagtacagcgatcgatttgcatgatatcgaaacactcacatctatctaacttcattcacttgcagtcgtcaatggatgtggcgatgtcaccagccagcagatcctctacttcgaaagtcccaactatccaaatgctgtgcgcgaaatgatgatctgcgtcctaatcatcaatgtgaagaagggagtgcagcaattgcggctggattttcaaatgttcgaggtgggtgttgcaatctcaaatgcgtagtccttagcttaattgattttccacaatcttcagctaagtcgccccagcaatggtgattgtgtagacgatcaatttatagtctccggccacaataccaatttccagatacccattctgtgtggcatcaacacgggccagcatagtaagtggattcacatggacttattcaaatggggatcaaacttacttatctttcagtttatatccatgttggtgactcaaacgagggcaaagtgtatctctcggtctttatgaaggtatcgggaggaggacgttccttcaatataaaagtcactcaggtggacgacaatttggcacccaataattgtttgcaatatttccacgatgctgagggcgtaataaagtcatttaactatgatacggatggctcaattgtggataaccgagaggctacatattttgtaagccaaatgccttctaatttaactaactttaataagttcttattgatctagaacaatttgaactatgccatatgcctggcccgcttgaaaaacgtttgcagtgtggcctataataccgaacaacttggcggtgatcaacccgactttcaaatcatcaacaaagatgaaggtaagattcaagatattgtatttcaaagtagcctacttaaactaatactgtgcaatagctgagaacgatttgatctccgatggccaggcgggagctggcatcttcaactgtccggacgacttcatagccatcaactccgttccactttgcggagaacggtttaacgatggccgagagagcgacgactataccatccatgccaccgtcagggataccgccgcgggtcccatcatcctgcccttccgtaccgattccgagtatgtgggtcgcggctttcgcctgctctacaaacaggaactgtgtgcctgagatcccgctgcgatgtgcatgtcgatcactggttcacaagatgcatatgttccgccgtctttgggtctgacttgaatgttccgttgtttggcttagatgcacagtggtaaatctttacttatttgtttttaattttctgtaagataacttatatgttctctatagtttcaaaagatagttaatgaaacagttgtaaaacacttctcagattatatatttattgaatttaacatgcctatttatatctagaaaagtctaacctcattcagattaaaccgactttgcaaacattaaggtgtctttagtgagaaatacattttttttctcagtgcacatatggaatttagcacgctttggtcaactggagggcatctgagttggcaacttcggattgggattgcgcgatgcggtgctgggtcgatgggaacgacagtttccgttcccgttcccagtgctgcccccgtgttaatgtgttttgtgtgattcgaagcgatttggtggcttagtcttggcgccgcccacccaccgactgggcggtccgcgagttcgtagttcacacaacatccgagccaccaaaacgcaagggacccgatcgagtcgattggcgttggtgtttgttgacaggtttatttcaaattttcacgtctcgccagggcagtatatatgtatccgaaagatactatgacgaaatctataacttgccgcatcaccatcgtcgccgttccgttccgttcgctcgattcgcggtctctatgcttaaatttgtaataaatttgattttttcctttcgattgcgattttcccttggctcggattcgtttgccccgctgctgcatgataaagtcacaattaacccacgcctttttcgtagcggtactcttacatatatttgcatatcattttgattgtttggattcgggctgaactctctatgccgccgctgacatggtgatgactaaaagtgtgcaccaccagcaccactagcaccaccggcaacaac

SEQ ID NO: 34361 - DNA, 1668 bp, DROSOPHILA
atgttgtcaaagcgttccgatgcgttgataagcgctttcgttttgacgctctattatgtgggcgtggccgatgggaacgaagcatccgactttgtgacaatgggcgatctgcggagaagcaggcgtatccagacgcatttctcgcgtcccggtggcatgataatggagggcattggattccagtacagcatgcgatatcagccgggattccacctccacaaattggcccagcagcaggcggatgatgggggaatgggcggtatggaaaatccacctgagacggaagcaccaatgcccatgcccacgcccggaacaccaccacctgaaccagctcccaccgagccggaggaaccagagcccacgatacccatgcgtccgacgaccattccagtggaggaaccttcaccacaaccacccacaatgatggtgcccacaccgagtgcttcaccagggatgcagcctagttctaagcccaggccaactgggaagccctcaatgagtccgccagtgccgacgataccatccagcaccaagagctccataatgcagccccatcagaccctgaagaacatcctcttcggctcgcccatcaaggcgaatctcatcctgaagaaacccaatgcaccgcgctcgaagggcaagggctttctcagtctgttcgaggtgatcaagttccccaacacgaagtgcagcgtgtccatgggcgacatccggagcatggagggcgtctgctaccacgagttcgagtgcaagagtctcggtgggattcccaccgagagctgtgccgagggcgtgggcgtctgctgtgtgttcgtcaatggatgtggcgatgtcaccagccagcagatcctctacttcgaaagtcccaactatccaaatgctgtgcgcgaaatgatgatctgcgtcctaatcatcaatgtgaagaagggagtgcagcaattgcggctggattttcaaatgttcgagctaagtcgccccagcaatggtgattgtgtagacgatcaatttatagtctccggccacaataccaatttccagatacccattctgtgtggcatcaacacgggccagcatatttatatccatgttggtgactcaaacgagggcaaagtgtatctctcggtctttatgaaggtatcgggaggaggacgttccttcaatataaaagtcactcaggtggacgacaatttggcacccaataattgtttgcaatatttccacgatgctgagggcgtaataaagtcatttaactatgatacggatggctcaattgtggataaccgagaggctacatattttaacaatttgaactatgccatatgcctggcccgcttgaaaaacgtttgcagtgtggcctataataccgaacaacttggcggtgatcaacccgactttcaaatcatcaacaaagatgaagctgagaacgatttgatctccgatggccaggcgggagctggcatcttcaactgtccggacgacttcatagccatcaactccgttccactttgcggagaacggtttaacgatggccgagagagcgacgactataccatccatgccaccgtcagggataccgccgcgggtcccatcatcctgcccttccgtaccgattccgagtatgtgggtcgcggctttcgcctgctctacaaacaggaactgtgtgcctga

SEQ ID NO: 34362 - protein, 555 aa, DROSOPHILA
MLSKRSDALISAFVLTLYYVGVADGNEASDFVTMGDLRRSRRIQTHFSRPGGMIMEGIGFQYSMRYQPGFHLHKLAQQQADDGGMGGMENPPETEAPMPMPTPGTPPPEPAPTEPEEPEPTIPMRPTTIPVEEPSPQPPTMMVPTPSASPGMQPSSKPRPTGKPSMSPPVPTIPSSTKSSIMQPHQTLKNILFGSPIKANLILKKPNAPRSKGKGFLSLFEVIKFPNTKCSVSMGDIRSMEGVCYHEFECKSLGGIPTESCAEGVGVCCVFVNGCGDVTSQQILYFESPNYPNAVREMMICVLIINVKKGVQQLRLDFQMFELSRPSNGDCVDDQFIVSGHNTNFQIPILCGINTGQHIYIHVGDSNEGKVYLSVFMKVSGGGRSFNIKVTQVDDNLAPNNCLQYFHDAEGVIKSFNYDTDGSIVDNREATYFNNLNYAICLARLKNVCSVAYNTEQLGGDQPDFQIINKDEAENDLISDGQAGAGIFNCPDDFIAINSVPLCGERFNDGRESDDYTIHATVRDTAAGPIILPFRTDSEYVGRGFRLLYKQELCA

SEQ ID NO: 34363 - DNA, 2426 bp, DROSOPHILA
aattttgctagttgttgacgtgagttaagtgcactcttttaaattgacttacatttgaaatgccatttcaatcgaaaccctctgactttgcgacactaaatttgtatacccactgatccgaattcgcaatgagaaacgatttccctaactttactcatgcaaaatccatttcctcttttttacttgtgctccacagaaccatcgccatcgccatcgccatcagcattatcagtgcgcataatggaaatggcgctcctaacaatcatgtaaaattggtgtaaaatgcagacgagatggagacccggaatgaaggaaatgggagtcgtgcgaaaggcaataacacatcaaattggtattagaagttgttacaccgacgccccacgccaactacatttatatatataaaaagggggcggcagctgggcgtggccacggtgatacaaattgcaggagcaggatccgtaacatttcgcctgcctgtcgctggttgcaacataaaagtcaattaatgtacaattacaacaacatcaggaccaccagcaacaggagaagcaaccggcttcaaaaggcaccgaaagattagggggcgaagtgaggaggtgaggaggagcagaaattactgcaaattacacgcaacgagtcctgaaagctgcggtccaagttggagcaagagccggaagccgagtggaccgaggaggaggagtcggtgtaccagaacctagagctggtcccatcaacgccaccacagcctccctgtcgccagcctcagcctcagccccatacccatacccatacccatacccatttccattcccatcaccatcatcgccatcagccactccactgccatctattgtccagcggtggcggcgacaacaacagcgatagcgatagcgaaagggacgacgaaggcggcggcaacaaaatgactttcgttaacaagctgagcaaaagcttccgctggctgcgctgctcgacattgtgcgcaattttgttttatatgttcttcattggcctgatcctgcacagcaccagccagaagttgcagcagcagctaaaggagcagggaaccagcagtagcagcagcagcagcagcagcagtagcagtagcagcagcagtagcagcagcagtagcacgcaggcagacacaaaaatggcgcccaacgtggggcataatggcgcccaacgttggccgaatacgctgcaggaactggagcagcagcaacaaaaacacgagcaaagcatgagactccagcctgtggcaaacaatttggattcgaggaacgagaataaccatcgccaaccccatccacagtcgcaaaaagtgcaaaatgccagcaaatcccctaaccagccagaaacagttattttagcggccagcaatgtgaatgagaagcaaatactggcaaaagctttcaaacggtaagttttcccccattcgcctctgagttatggccttggcaattctgggcctcggtttgttcggtttgttcggtttgttcggttgataatttggcactagttcgctggctcctttattgttgcgccggacgatgttgcctgcggcttttatcgccccaacactctgactcctcccaaagaaccaaccctcccctccccgcattcagtgcccttctccataactgtgtgtacgacaaattgtaaaaattagtggcaatagcaacagcagctggaattgatggatgctcagtcgctggcaaggttggttgggtcagattcgatcaataaggacacggtatgagatttgttcactgccatggttttgattcattccaagcaatcagagtaatcgagttacaagcttgccgcaaagcgaagataataaacgttgattgaaaagtttacttgtctagtattgaattaaatgagtcccaagtgggttagagaatccaaggacacgggcaatgttttatcaggagccttatgcatgtatttaataatcaccatatttaataacccctttgccaccaggcttttgccatcttgtaattggtttgccggaaggcctccagatttctatccggctgacttgcactattcgcctaattacttaaacatggtatataaaacgttctcggctcctgcacaagcgattaggcaattggccaattacttggcttcactagaggtcgtaatagattacttgatggctgccagtgtttttggggcgagaggtggtcagacggaaactgaaaagtttccagtcatggtcctgagcgaaattgcaatttgatgctctggggttttttgggggtaatcaagcagtcagtatgccaggaatttcccaaaccaaaatccaacagcaatgggaaaatacgaaaataaaacttgaggtgttgaaaagaatttcagagaaaatacatttttgagggggggcaaataacggatggaaatcaaactgtcac

SEQ ID NO: 34364 - DNA, 426 bp, DROSOPHILA
atgttcttcattggcctgatcctgcacagcaccagccagaagttgcagcagcagctaaaggagcagggaaccagcagtagcagcagcagcagcagcagcagtagcagtagcagcagcagtagcagcagcagtagcacgcaggcagacacaaaaatggcgcccaacgtggggcataatggcgcccaacgttggccgaatacgctgcaggaactggagcagcagcaacaaaaacacgagcaaagcatgagactccagcctgtggcaaacaatttggattcgaggaacgagaataaccatcgccaaccccatccacagtcgcaaaaagtgcaaaatgccagcaaatcccctaaccagccagaaacagttattttagcggccagcaatgtgaatgagaagcaaatactggcaaaagctttcaaacggtaa

SEQ ID NO: 34365 - protein, 141 aa, DROSOPHILA
MFFIGLILHSTSQKLQQQLKEQGTSSSSSSSSSSSSSSSSSSSSSTQADTKMAPNVGHNGAQRWPNTLQELEQQQQKHEQSMRLQPVANNLDSRNENNHRQPHPQSQKVQNASKSPNQPETVILAASNVNEKQILAKAFKR

SEQ ID NO: 34366 - DNA, 2882 bp, DROSOPHILA
caagcttcaatcattgttttgtgtttgttgggttttattggcggcaaattaattaagttacttaattacaggtacaagacggtcaaaggtcgattcccgcttacctttcgcaagttctcctcatccgaaaacaggttgacttgtgccaaaacttaattttcgaaagcttttcgattgtccattagtgggagttttgcaagtagttcctttcggtattcgccaacgagcataccctgtacgaaaatatagtatctacttatataactgatacacactaatcctagagggtatcaataaatgcagcataccctacctttcgtttagataaatttgcgttagaagagacataatgattgatcgtgtgccaattgtagacgaaccaaaagtggaaccgttttttagagaaatgggaagggaggggcggggattgttgggggagaccattaggaatttttttttatttttgctgccttttgttcactgccaaataaatttcatttttatttgccttctttatttgtttttgttgctgtcggtacgcaatttaagtgaatattcggtttctagtcaaaccggttcgtattggacagactttttgggaatttgtaattcagcgtactgatatatcttatgtatgtatatttgtagataagaaccaatcaatttggcagcgagtaagtaattttacattttatgctggacttttatttcgcaagaaaactgttattcggttatttaactatattcaagcaaagaaacaatctaacaaagaattaagattctgctaagccaaggcttataaatgcaatacaaaaatatttaaattagcccatattgtaatatttcaatactgtattaagttaaagggattcttttcgtagaatcccagtaaactgatagaaaattctactaaagatcaaaagtaaagattcacactgaaatatatatgctacatacatctatttgttgtgaaaatattctacccaattaatccttaaaaatgttggccggctgccccgatgagctgcccaatccgcacaagaactgcctgcacgagatgctccaggcgttgatctgcaacgacaacgatgtgaagcgcttgaacacggagctaaggaatctgaatctagagctaaaggcggagctggccaagattaacaaggcgaaccagaagtgcgggcacgagaagaagggcaaggtagtttgcgagagcaccgaggatgtgacgaaattcgcccagcggatcaatagcctggaagaggtgacagcgcacttcacccagcgtagtgaggagattcgaaagaggcgggacaacatcatcatctatgcccgccagtgcctgtatgcctacaacgaggagaagtgcaagttcaagtcgttccacgagaacacggtggactacataaagcggacggcgacactctcccaggatgcggaggttatccgggcatgcggaaaggaggtgtgcgagctgcataagcgcttcgtgcgtgaggtggccaagctgaagagctgcgaggcggagctgctgccctttttcaaactgctcaaggattccgatccgaagacctactgcgagtgctgctgtttcaagggatacgactggatgcccaagagcaagaatctggaggccgtggatgcaatggctggcgagatcaaggaacagatgggcgacgtactggtcagggccttcgctcaactgcacattcattcgccgcaggatccacgcgcctttattgccgcctatctgatgaatcttgatcgtaacgagcaggaaatgaaggagaagctcgtgattttccaagcagatccagcagtgcaaccccaggagctttcggatcccacattcaattgcgaggatatttgtccgaagcctgaatgatatcattattaatccacgattgtattcgaataataactttaaattggcgagctaagtacacagaatttattgccaccagcggaaaaatttaaatgaaaagcggctttcttcaaacattttattaattcaaaataaacacgcaatacattttgggacatatggttttctacgtagtagtagttatatttaatccttaggttttcgttatacaaaggaaatcacatatagagctgttataaaccttatatactcggtttgcatagccatctaagatcgggtaaacaatgcagcttggatataaagacggcgtacggtggctatgatttatttcttgcgacgattacggcgccgggtgttgggatccggttccttctctgcaatgcctgtaacggtgccacccgctatctcggtgttggccaacttttgctgattgtccaaaaagaacataatgtcgcgaagctgttcctttaattcggtcacctcggcgtcgtgggtttgcttgaactcgttgtactgctgttccaagagtttgtatttgccgtgccaggagctctggttgctctgcagtgccttggacaactcacgctcttcgttcagctgcttctgtacatcctttagcctacaagagcacgaaattggttaatatttggttaattaggaaaggcgatgtgaatgtatttcttacttagctgtatgctgggccaacttgcgctccaaattgaccttttctttctgcatgttctgctgaagctgttgaagctcggaaacctctgtcttggcgtcgttggcagtcgccttgtggttctgccactcctgctccaatcgttccatgcgctcctcatagtacttgcgctgtgtgtccagctgagaggtcaacaggtatgtgaactccatctgcatggagtcaatcttttcctcgcgctcatctttctcggtttgcgatgccaccagcttgccgtcggatttgttttgaaataagcgatgcacaaagttgtcaccg

SEQ ID NO: 34367 - DNA, 882 bp, DROSOPHILA
atgttggccggctgccccgatgagctgcccaatccgcacaagaactgcctgcacgagatgctccaggcgttgatctgcaacgacaacgatgtgaagcgcttgaacacggagctaaggaatctgaatctagagctaaaggcggagctggccaagattaacaaggcgaaccagaagtgcgggcacgagaagaagggcaaggtagtttgcgagagcaccgaggatgtgacgaaattcgcccagcggatcaatagcctggaagaggtgacagcgcacttcacccagcgtagtgaggagattcgaaagaggcgggacaacatcatcatctatgcccgccagtgcctgtatgcctacaacgaggagaagtgcaagttcaagtcgttccacgagaacacggtggactacataaagcggacggcgacactctcccaggatgcggaggttatccgggcatgcggaaaggaggtgtgcgagctgcataagcgcttcgtgcgtgaggtggccaagctgaagagctgcgaggcggagctgctgccctttttcaaactgctcaaggattccgatccgaagacctactgcgagtgctgctgtttcaagggatacgactggatgcccaagagcaagaatctggaggccgtggatgcaatggctggcgagatcaaggaacagatgggcgacgtactggtcagggccttcgctcaactgcacattcattcgccgcaggatccacgcgcctttattgccgcctatctgatgaatcttgatcgtaacgagcaggaaatgaaggagaagctcgtgattttccaagcagatccagcagtgcaaccccaggagctttcggatcccacattcaattgcgaggatatttgtccgaagcctgaatga

SEQ ID NO: 34368 - protein, 293 aa, DROSOPHILA
MLAGCPDELPNPHKNCLHEMLQALICNDNDVKRLNTELRNLNLELKAELAKINKANQKCGHEKKGKVVCESTEDVTKFAQRINSLEEVTAHFTQRSEEIRKRRDNIIIYARQCLYAYNEEKCKFKSFHENTVDYIKRTATLSQDAEVIRACGKEVCELHKRFVREVAKLKSCEAELLPFFKLLKDSDPKTYCECCCFKGYDWMPKSKNLEAVDAMAGEIKEQMGDVLVRAFAQLHIHSPQDPRAFIAAYLMNLDRNEQEMKEKLVIFQADPAVQPQELSDPTFNCEDICPKPE

SEQ ID NO: 34369 - DNA, 2380 bp, DROSOPHILA
cgttacgaaattatatttgtgtttttatctcggtagaaccttgaaaaccatgttgtgtcaagatgcagcgaaagcagcgggtggcaacttttggcaggcagtgtgcgaaagctaaggtcaggcccatctctaggttgcttccgcacacagacacgcacgcacacagcgatggggaaatgccaacgatagcacaggtctaatccatttaattctggcttttaaccgatttctgctaatactatttatttacccgtttggttttggcgactgctctctctctctccctccgttcttattgccgtgtggccataatccaattatgcttgtgtttgtgtgtatgtgtctgctctctattgcaattgcagttattcgcatccgccgtgatatgcaaccaacacattcgcactcgcgcactcacacgcacccgcagacatcacaaatgcgaggaccgaaaatcctgagcgtcaacaaaataaatatagctctggtgttttaaaataggttttcactcgattctgcgtttgctgtctcgtcttgtttatgtgcattcgtcgttggttgtgtgtacttgtttttttttttttttgttagacgcgactgtccattcaacattaccactcagccgacgcagagcgagattataattcggtaaccgattcactggcactgctctaacgggctatagcctatgatccagtctggaatggagctaaagatatgttgctttcatttatgtctgcactcgcgaaaaagcgtccacaaattaacagttcttcgggagcgacgcgcagctagacgtccgactttgttttccgactcgattagagtgaccgttgtgggatggtggaaaaaagtggagggcccatgctgaaaccgataacaaaaataccagatgtgcgatatacactatcgataacgagcacaatttcttaattctaatttaaaacaattatataacgggctttcgtgttttatttaacaaatagtgaataaaatgcggctacttctttttgatgtacttcatgtacttcttggcgttgaagttgtcctccacctcctccatgatcttgaccttcttgcgcggcttgcgggcctccaatctcgctctgcgctccgcatcggttaaggtgctcagatccaagggaagctagtagatggtactcgttaattatggtttcgttaagttatagtaactaacgttaccttgataatcttcctgggctcgtgatagcggatgtttatcgtggatccatcgggttgcaccacaactgtgggatatagccggcagtaaaccgagcgatgcagcctggtaaccgccgtcgtggccgatgagatgcagcgtatctgctgaacagcctggggcaactgtttcagcaacattttaattgataatcacaatatttacactaaataagagctacacttaaatcgtgtttttgctgccaggcagctgatagtgtgaccgacccgagggtaagatttaaagactcctaaattagttattaagaatctgtggtagccctggttcagtttccacattatgtggtattttccccagctctggtcacattcgtactcaaagtgtaagtgttggttgcagaggcagaaattcttatttttctccttgaaaatataagtacgttacgttaaacactgcaaaaataataaaaaaaaagcgcacggttgggctacaacagcgattagtctgcaagcctcgaggaaaggactgcaaacgcgtttttagtttgaaggaacattgaggattgaaaaaaattacataatttttgcgagcataactcgccgtgcattatgtcgataagtctgcaactaaagaagcagagattacatttcaactaataagaatatcgctgcacagttccaggacacctagaaatcacttaccacctctataaacccaaaaacctaacctcatccccgcttttgttgttgtcttgcagtatctgtgcagaatggccgcccgccgtatcgcccaatcctcgatcaactggtccgctctcgccgagcgcgtgcccgccaaccagaagagcagcttcggcgccttcaagaccaagtcggacatctatgtgcgcgccgtgctggccaatcccgagtgcccaccccagatcgattgggccaactacaagaagcttgtgccagtggccggactcgtcgatagcttccagaagcagtacgaagccctgaaggtgccctatccccaggacaaggtgtcgtcccaggtggatgccgagatcaaggcgtcgcagagcgaaatcgatgcctacaagaaggcctcggagcagcgcattcagaactaccaaaaggagatcgcccatctcaagtctctgctgccctacgaccagatgaccatggaggactaccg

SEQ ID NO: 34370 - DNA, 324 bp, DROSOPHILA
atgttgctgaaacagttgccccaggctgttcagcagatacgctgcatctcatcggccacgacggcggttaccaggctgcatcgctcggtttactgccggctatatcccacagttgtggtgcaacccgatggatccacgataaacatccgctatcacgagcccaggaagattatcaagcttcccttggatctgagcaccttaaccgatgcggagcgcagagcgagattggaggcccgcaagccgcgcaagaaggtcaagatcatggaggaggtggaggacaacttcaacgccaagaagtacatgaagtacatcaaaaagaagtag

SEQ ID NO: 34371 - protein, 107 aa, DROSOPHILA
MLLKQLPQAVQQIRCISSATTAVTRLHRSVYCRLYPTVVVQPDGSTINIRYHEPRKIIKLPLDLSTLTDAERRARLEARKPRKKVKIMEEVEDNFNAKKYMKYIKKK

SEQ ID NO: 34372 - DNA, 3848 bp, DROSOPHILA
caaactcaaacgatttgtgcaactctaatttattagtaatctattgttaagtcattaatctaaacgaatatttatatatcactattcgaggacgaaaagttgtatacttcataagatggcaactatctatgggtatgccaacaatttgattagcaaaactaaactttttggtgtttgaacaaatacatacatgcatatatggtaaacataaataaaatacagtctaaataaataaatggaaaactaaaacccagagcttttattcttcagaataaagataatcatatttcgcttcaaagaaaatacgtacctcgcataatcagcgatcgaatgttcaaattttctgatgcaattttttatacttataaacttaaattttgcaattgaaaattgtttgtcagctgaattggcgtcaagaaaacagctgattagataaaatattcgctcgataacttactctctttcgaacaattgttttgaacctatgccaataaatttgaccaatcccatcagcgataatacttattattcgattcaaataactatgggtattttcgatagtgggctttaactatcatgtgtcagaaaaactatgatattaatggtcataccacatatgtcgatatttattacatatgtaatatgcatatattatgcacttgtcgatcttttttttaattctccaccactatttaatgcttagttcctatctattaaagatatatcttaaagaaaaggtatattctagtcggtactaattcccagaaatatacatatgtatattttaatgaccgaatgtttgccatatgttttcgttagcaattctcaaatacacgcgaacctgttcgttgctctctttctcttccaaagtatcttttaggttgctgttttcctcaaatgtatagtaaagctcgcccggccccacagaaatataaagcttataaaacgaacaactggtatgagtagtttcactttgaccgtgaattaggcagcgtgcaaaatgttgaaagggcgtatcgcacttaatatacttcagtcgcaaaaacccatcgtcttctctgcaagtcaacaggtaaacaaataataaggttttggtataaaaacagtggcaatttacgaataaattgaaatgagaatatacaataatgtgtatatgtttatgtttacatgaaaaatacataactcttgattggatcattttccagcgttggcagacaaatgtgccaacagctgagatcagaaacgatccggaatggctgcaggccaagcccttcgaagagattccgaaggcaaatatcttgtccttattcgccaaaagcgcactgcccggtgggaaatacaagaacttggagatgatggaaatgattgatgccttgcgccaggattacggaaacataatctttttgcccggaatgatgggaagggatggcttagtgatgacacacaacccaaaggactttgaggtggttttccgcaacgaaggtgtgtggccattcagaccgggcagtgatatactgcgatatcatcgaacggtttacagaaaggactttttcgatggtgttcaagggatcattccctcgcagggaaaatcctggggagactttcgatccattgtgaatcccgtgctgatgcagcccaagaatgtgagattgtacttcaaaaagatgtcgcaggttaaccaggaatttgtggagctgtaagaacataaaacatttctcaattttctgcatttaaatattttacattagcattaaagaaataagggatgccagcactcaggaggtgcctggcaatttcttggaaaccattaaccgctggactctagaatccgtatccgtggtggccctggataagcagctaggtctacttagggaatcggggaagaacagcgaagcaaccaagctcttcaagtacctggacgagttcttcttgcactcggccgatctggagatgaagccctctctctggagatatttcaagacaccactgctgaagaaaatgctcagaacaatggatagtgttcaggaagttactctaaagtacgtggatgaggcgatcgaacgcttggagaaggaagccaaagaaggtgtggtccgtccggaacatgaacagagtgtcctcgagaaactactgaaggttgacaagaaagttgccaccgttatggccatggatatgctcatggcgggagtggatactgtaagtgatcatacaaatttatggagtgtataatatatttgctgccatccagacttcgagcacctttacggctctcttgctgtgcctcgccaagaatccggagaagcaggcccggctcagggaggaggttatgaaggtgctgcccaacaaggattccgagtttacggaagcttcgatgaagaacgttccctatctgcgtgcctgcataaaggaatcccagcgtgtctaccctcttgtaattggaaatgcccgcggactgactagggattctgtaattagtggttatcgggtaccagctggcacgattgtgtccatgattcccataaattccctgtacagcgaggagtacttcccaaagcccacggagttcctgccggagagatggctgcgaaacgccagcgattctgccggaaagtgcccggccaacgatctgaagaccaagaatccattcgtatttctgcccttcggctttggaccacggatgtgcgtgggcaaacgcatcgtggaaatggaactggaattgggtaccgctcgtctgattcgcaatttcaacgtggagttcaaccattccacaaagaacgcttttcgctccgctctgatcaacctgcccaatataccactcaagtttaagtttacagatgtgcccaactaatacgttttacaatatattagatatctgttgtgataagataataagtattgttaaacgaatgctttttctacatatatacatcattgcaatgaaatgtttataagtccctctgtttgcaaatattacaaataaaagatgaaaatattttaaatataactattgcacagatttcaaaataaaaggctttgaaattttactaatgaatatctagagagaatgtagctatggccatacatttccccagcatgaaattattattaatagtcatggtgaaaaaaaaattgctggcattgacactgaccgatatgaaagggttaacggccatgttatttgtgtttgttctattgttataaagttccatttaaacatgttaatttaacagttattaattctacatacttgctctatccttttaaatttgattaaaaactaacgaactctttgctcaattattaattgaataaatgttttttttttataaactaccaaataagctctctggaacctgtttatatgcccgttgtctgtggggtcgctatctctctgtttgtgtgctcttatcaaccaattaagcggcaaagctcgcgcggccttaggatttaaagccagtagaacgaactctcgtttcacagttttgtttgggcggtgagccggaaaagttctaatcatcgcaaaaatgctaaaagttcgcagtgctctatcattaattcagtcgcaaaaagcgactctctcgctcgccactcaaaaggtgaatacttgtatttaatataaacaactaatctaggaactataagcccgtttatcaagagctggttttgcttcatatgtttattttgttgtttaattgctcagcatacggagtacttcaaaatattactatatatttatatcaataaactatattaccagcgctggcaaactaatgtggcgactgcagaagctagagaggattcggaatggctgcaggctaagccatttgagcagatccctcgactcaaca

SEQ ID NO: 34373 - DNA, 1611 bp, DROSOPHILA
atgttgaaagggcgtatcgcacttaatatacttcagtcgcaaaaacccatcgtcttctctgcaagtcaacagcgttggcagacaaatgtgccaacagctgagatcagaaacgatccggaatggctgcaggccaagcccttcgaagagattccgaaggcaaatatcttgtccttattcgccaaaagcgcactgcccggtgggaaatacaagaacttggagatgatggaaatgattgatgccttgcgccaggattacggaaacataatctttttgcccggaatgatgggaagggatggcttagtgatgacacacaacccaaaggactttgaggtggttttccgcaacgaaggtgtgtggccattcagaccgggcagtgatatactgcgatatcatcgaacggtttacagaaaggactttttcgatggtgttcaagggatcattccctcgcagggaaaatcctggggagactttcgatccattgtgaatcccgtgctgatgcagcccaagaatgtgagattgtacttcaaaaagatgtcgcaggttaaccaggaatttgtggagctcattaaagaaataagggatgccagcactcaggaggtgcctggcaatttcttggaaaccattaaccgctggactctagaatccgtatccgtggtggccctggataagcagctaggtctacttagggaatcggggaagaacagcgaagcaaccaagctcttcaagtacctggacgagttcttcttgcactcggccgatctggagatgaagccctctctctggagatatttcaagacaccactgctgaagaaaatgctcagaacaatggatagtgttcaggaagttactctaaagtacgtggatgaggcgatcgaacgcttggagaaggaagccaaagaaggtgtggtccgtccggaacatgaacagagtgtcctcgagaaactactgaaggttgacaagaaagttgccaccgttatggccatggatatgctcatggcgggagtggatactacttcgagcacctttacggctctcttgctgtgcctcgccaagaatccggagaagcaggcccggctcagggaggaggttatgaaggtgctgcccaacaaggattccgagtttacggaagcttcgatgaagaacgttccctatctgcgtgcctgcataaaggaatcccagcgtgtctaccctcttgtaattggaaatgcccgcggactgactagggattctgtaattagtggttatcgggtaccagctggcacgattgtgtccatgattcccataaattccctgtacagcgaggagtacttcccaaagcccacggagttcctgccggagagatggctgcgaaacgccagcgattctgccggaaagtgcccggccaacgatctgaagaccaagaatccattcgtatttctgcccttcggctttggaccacggatgtgcgtgggcaaacgcatcgtggaaatggaactggaattgggtaccgctcgtctgattcgcaatttcaacgtggagttcaaccattccacaaagaacgcttttcgctccgctctgatcaacctgcccaatataccactcaagtttaagtttacagatgtgcccaactaa

SEQ ID NO: 34374 - protein, 536 aa, DROSOPHILA
MLKGRIALNILQSQKPIVFSASQQRWQTNVPTAEIRNDPEWLQAKPFEEIPKANILSLFAKSALPGGKYKNLEMMEMIDALRQDYGNIIFLPGMMGRDGLVMTHNPKDFEVVFRNEGVWPFRPGSDILRYHRTVYRKDFFDGVQGIIPSQGKSWGDFRSIVNPVLMQPKNVRLYFKKMSQVNQEFVELIKEIRDASTQEVPGNFLETINRWTLESVSVVALDKQLGLLRESGKNSEATKLFKYLDEFFLHSADLEMKPSLWRYFKTPLLKKMLRTMDSVQEVTLKYVDEAIERLEKEAKEGVVRPEHEQSVLEKLLKVDKKVATVMAMDMLMAGVDTTSSTFTALLLCLAKNPEKQARLREEVMKVLPNKDSEFTEASMKNVPYLRACIKESQRVYPLVIGNARGLTRDSVISGYRVPAGTIVSMIPINSLYSEEYFPKPTEFLPERWLRNASDSAGKCPANDLKTKNPFVFLPFGFGPRMCVGKRIVEMELELGTARLIRNFNVEFNHSTKNAFRSALINLPNIPLKFKFTDVPN

SEQ ID NO: 34375 - DNA, 6366 bp, DROSOPHILA
agaaacttgtgtatttagttgttggatatttggaatgcatttgattgttcttcgattcttggcacgttgcaattgtgttggaagctgcactggaagcgctcgcagttggaagtctgaaagaaatgcaggcaatagttaaaaagttaataaaattcaatcaaactcgtcgctgctctaatgaaatgtaaacaaatgcgtctatagataggtatatatttgctcgaaaaaacagcgaagcgggccgcgtgatcaacatttctgtgtttattccttttttatgaggtgcaaattaaaatacttcaaagaattcgccttattttctgttgtcacgcgccactcaaagtaatatcccagtgtcagcaataaattctagaatataggaacataagatatttaaaaagtataaaaggggcagaaatcaagacaatgcaaatttattcaggcctaataagagctaaaagtttaatattttaaatggtgtagataggaatctgattcttactcggaagaagctgataagttttttcgaagaaacttaagcctcttcatcacgaaatcgtttcttcatttaatactcaaacagcggccttatttatttatcattccagtttttcgtagacattttgcattagcacatggcgaaaaaaaacatcgcaagctaacaaaactaacaagaatgaattaatcgaccccgctggaaattgctaataaatattcagggtcaaagtcgacaaaattggcaaagttttgcttatcagcgggctcttgcggtgtgatagccgcttaatatatgtacaggtatttgttgccgtttgataaggcggcctttttaagtgcgataaagcacacaacccatcaaatgtccccaaagccagcagacttcattcagcatttgcttttttttcgaactaacaatgtaatttagcagcaattttgttatcattacgcttacttttgtcgtcgtcgtttgtttttcgtcgttgtcttgagaggggggcaaatgagttcagttcatcagcaaataattgagataaacacgatcactaaaaccttggccttgcgccttgaaaactacgtctgttttgagtggcttcaaggagttagttacattcggcaagggaggtcgctgaagagttccacaatcggaaaaacaccaccacccaccgcgaagtactcagtttcagttttttgagataagttcggaaatgatataaccaaatattttgctgcttgctattagaccggcgaacaatggcaacaggttggaattttttgatttgccattccttatcgcaataaccacatatatattcggcgataagatactgagaaatagcttttgggcgacacaacaaaattgaatttggctcgtaaaggatcatgcgagtggccaaaaggcgatcatgcccacagagataacagctcaaagccacaaagctcacaattaaaactataacaaaataattacaccaaatttcgacataatgataatgatagcagcgaacggacacagagctctcacttttccgctgctggccaaagtcaaaataaaactcaaattaccaagcacatttttgcactcggcaaataaacggggaagttatgcgaattgggatttgctatttgctatttgccgttttggcattttgtgtgtgtctttccttctcttgcgaaatctgtccaaatagccagttgaagtcaaagccggcagcaggccataattagggtcaattgcggctaaccgccgccaattgacgacaacgaaagcttttggccaaatgaagcggccggggaaaaagtgctacacttcattaggtgccatgacaaacgaagagctgcagcaaaaagtgggcttgtggcttcgacttaatagcacccaaggatcgttttcgcgcccaccacgcccccagaatacagttgtccaattacaggcaggtctttgtcaaattatctcgttttgagctgtgaaatgaatacgtgctatcttcaccagtcagctgtgaaagtttccatacaccctaatgagtggcaaacttaaatatatttttaaaaaaaaattgtaaacattaaactcggctatcatggtgaagagttagctggggagagagtgcctatcatcgatgaagaggaaaatccatttcgtggcccacaaaaatgagtttagcacgctccgcgaaactaagtcaaggccccaagcaacgattttcgttaccgatttgggtgagcaaatctatcgagtcgagaaaaacacttaagcggtcgcttttatttcgactcttgcatacatttattttcccatcacgtttcaaactatatacacatgtattccgcgtggaaagccgcagcagtaaagcatcaaaatatttatgtttcaataggaatggcagccaaacaaatgtcagtccgcatccgtggttgttgccaaacatatggaaaatagatgatgagccccacaacaccggaatgctgcaatcttaaaagtcagcagttccacgaagattaaatgccctaaaggcattgaagcagctgaatataatttaaaaatctaaaaaaaaaaaaggcggaacacgacgtgcaataaatttaggcaattttagaaaatacatcttgtggtgtcgcaagaactcaaaactaaagaaatcacgttcaaaacagcagataataggtatttctacatcaacaagttgacttaggcaagaaagtttctatatctgaaagttggtgggattctgcaccgacttaagaacaacttttctccaaatattaactctactaatcgttcaaaatcgaggctatttaattaatacatttcctaatatgtttgctagagagaaaccaatgaaattaatttcagcacaccacttatcgccgtttgctttcgatggcgtttatggcattttccaaaacgaatgttaaaccgttaaccgccacaaggttcgagtcaataaaccgctgtcgactgcggtgactttgttgccgtgctgtgagatcaagttgcatttttatggggccaagggtcgtcgcggccaccaccgtctgcatcatcatcatcatcagcagcagcatcatcgtggtatcttcgcctacgtagacgcgtgccaggagaattgtgtgcaatgcacactgcatcgtttcagctgggccattaaagaggcataaatcttggttatgaaattggaaatgatttgctgttcaggcacattcaagtagggagcaagtaacgcaccgagaagtgatgcgttcaggaagcgtcttgcgtttagagtccgaaaaaagcgttaatgaaaaggaaagttggtcagcggcagaaaaaatgccacttcattgccgtgtagaaagaaaaacaaagacgaggagacggcgaaaagaagccaaggcagctcaagaagaagaaatttctataaacaaagagatgagacgccgaggcagagcaaaattatcaaagaacaacaaaaaccgagaaacacaaaaaaaaaagaagtggaaaatgggacatggcacactcttgggcccacagaaacaacaaagactgaatgaaattcatgtcgttgtcgcgctcataaattcttctacgcctatatatcgctggctatctgagagatacagatacacccacacttggaaaaactaccaactcattcagccggggaggtgctggctgcatccgctctctacctatatgtatgcctacttatgaaaaagaatctatgtatgtaaatttggtgtattttgaataaattccaagcccatcgaaggtgtgaggtgccagttatcgttagttttttattctcttgagtttaaagtttagactccagaggccgtacaacaagtgattcacgtaacgaaatggaaagcgaggagaaatatgtgtgtatacaaatctaccaaataaattcaaaggcaatggaattttcgactgaaagcataagataagcttaattagccgggcagacaaaaatttcactttcctttggtacagaaccgtcgttttctaaactatttctgaatgtccaacgatcactgcgccatttagacatttcgactaattggcagccagtcggctttcggggggagggcactcacgtgccgcccatcgatctgcagcaaaactatacgtaaataaactttaggatcgaagaaatccaacaagaacgtcaacaaaaacgaaaaccaaatgggtttattttcagcctcaagtgcaagtcctataagaagatcgaacaaaacaaaacacttgatgaatgcaaccgaaggaggtgcaaaaatcgaacaataacaaatacaataggaagggcgcgtagagtgagcacaaatcgtttcgtttattttatttattttattcccctctatgcggacacacacaaatgaaaacaaattagcttaggcagcattaacagccagctgccaagggcggaagtacgggggagtttactgttaattttataaacaccacgaaagaccacaacgaaaaaaaaaaaaacaccacaaaaatgcagcagtagcaacagccaacaaccaccaaaccggcaaaatcccaatagggcagctgcatttcgggaggaaacccaagtggaatgtgcattcgaattgggagctatagcttctcgatccccggataatgagccgtgaacatctgtcgcagttttacgtggaaaactgtctttccgctgaatcgaccgaatcggaaaaaaagggagaaactgagactaaggagagagcgaatgctgggaaaaccagcaccaacatcggaagcatcttcatcataacttgcaaatgtgtttgtgttatttttacatttccgctgcttacgaaaatatttacgctccccttcgcacaaaaccttccccatttcgaatttcaaatttcgaattccagacgctcgcacacacgcacgtgttagagatgagccagatttccgagtgcatcgcatggtgacaacaggttcgattcaaatgaatatggaaatgattctgctgagctcacaaaaaatttaagcatttgcttttcaaattagatcatatggctatgctattcgaaacagatgtgaaaaagtaacaagttttagctctacaatgtttactttaaatttagcatttacgaagtataaatagacacattatttacgcattatgttttattatatttaagacaaaatacaatcaacgtaagttaaaatataagattgcaaacctatttaccctcaattctaaatgtttaaatatacaatagtacatgacaattttgcatttcccgttacgaaattatatttgtgtttttatctcggtagaaccttgaaaaccatgttgtgtcaagatgcagcgaaagcagcgggtggcaacttttggcaggcagtgtgcgaaagctaaggtcaggcccatctctaggttgcttccgcacacagacacgcacgcacacagcgatggggaaatgccaacgatagcacaggtctaatccatttaattctggcttttaaccgatttctgctaatactatttatttacccgtttggttttggcgactgctctctctctctccctccgttcttattgccgtgtggccataatccaattatgcttgtgtttgtgtgtatgtgtctgctctctattgcaattgcagttattcgcatccgccgtgatatgcaaccaacacattcgcactcgcgcactcacacgcacccgcagacatcacaaatgcgaggaccgaaaatcctgagcgtcaacaaaataaatatagctctggtgttttaaaataggttttcactcgattctgcgtttgctgtctcgtcttgtttatgtgcattcgtcgttggttgtgtgtacttgtttttttttttttttgttagacgcgactgtccattcaacattaccactcagccgacgcagagcgagattataattcggtaaccgattcactggcactgctctaacgggctatagcctatgatccagtctggaatggagctaaagatatgttgctttcatttatgtctgcactcgcgaaaaagcgtccacaaattaacagttcttcgggagcgacgcgcagctagacgtccgactttgttttccgactcgattagagtgaccgttgtgggatggtggaaaaaagtggagggcccatgctgaaaccgataacaaaaataccagatgtgcgatatacactatcgataacgagcacaatttcttaattctaatttaaaacaattatataacgggctttcgtgttttatttaacaaatagtgaataaaatgcggctacttctttttgatgtacttcatgtacttcttggcgttgaagttgtcctccacctcctccatgatcttgaccttcttgcgcggcttgcgggcctccaatctcgctctgcgctcc

SEQ ID NO: 34376 - DNA, 327 bp, DROSOPHILA
atgagttcagttcatcagcaaataattgagataaacacgatcactaaaaccttggccttgcgccttgaaaactacgtctgttttgagtggcttcaaggagttcgagtcaataaaccgctgtcgactgcggtgactttgttgccgtgctgtgagatcaagttgcatttttatggggccaagggtcgtcgcggccaccaccgtctgcatcatcatcatcatcagcagcagcatcatcgtggtatcttcgcctacgtagacgcgtgccaggagaattatgcagcgaaagcagcgggtggcaacttttggcaggcagtgtgcgaaagctaa

SEQ ID NO: 34377 - protein, 108 aa, DROSOPHILA
MSSVHQQIIEINTITKTLALRLENYVCFEWLQGVRVNKPLSTAVTLLPCCEIKLHFYGAKGRRGHHRLHHHHHQQQHHRGIFAYVDACQENYAAKAAGGNFWQAVCES

SEQ ID NO: 34378 - DNA, 3010 bp, DROSOPHILA
attttgtaaacattacattttttaaccatgcacaaacgaagaaccgccaaatcgattaataagccaccgccaatccagggagcaatcaagaagcccacgccggtggcagaacctccgtccatcgacgccgaccttgtcacccagttcgaagtggagctctgctggtgtgtgcagcagttgcaaactgctctcgacagcggaaaactggcgcaaaaagtggccgaagatactgccaagaacataaaggtactaaccagttcaacagcgccgctcatcaggaagcggcaggtgatgaagctagccctgggcgactaccgagcgaagatgcagcaggaggagcagaagttgctactagcctccaggcaaatcaaattcacacctacggctgaatcatccaaaaagtctagctttgtaaagaagtcggcgcttctgtcatctggaaaggacttccgcttcaactttccctcgcccgccgaagacaccagctcaaaagagcctcaaccagtccaggacttcgatcccagcagccttcaaccagctgaagccggaagtccgttcaagttcaacttcaccatcgcggaggattcggccaatgacattagtttcagcggtctgaacttgaataagtaatcaatcacaaaagcctgaatgatcttagattttctaattcctactctttatacaaataaaaagcatttaaataaaaactcgtaggcataaatttatggccattcaaaactatcaacaatttcagtgacaacggtcatgattattgattttaaaatatttatattcactgtattactttctatttgttgcatatttaaggagatatattttaaaaagaagctaagtgagcacttatttttaccacgcagtgtgatctttggttttatttatagctttgcagagagtatttccatgctatatttacgtacattgatgaagtcaaaagaccacggatgagaagtgatttactcagtccgattcaaatcagcaaatggccaacaacgcccgcatcgagcacacgtcctccgagggtcatgaaggggacgccacatgcgtggcgtacttcgatggacagctgttctccggaggcgctgacggtaaaatacgagtgggtatctaccggtttcccacattgctctcttagctaatatatattccccttcagatctggtcaccggaactgcaactattggccactgtaaacgctcacgaggcgtacatatactgcatggccattaatcagcacggaaaggtctactcgagcagctgtgatggccaggttcacttcatgctgcctccctatggagacgagtcagtgcaggaactattccgctgcgacgacgccatccaggccatgtactgcgacggatccgtgctttacacgggcgatgacaagggtgtggtgaccacttggaccaacgatcgcatgctcttcaagtacagcctggtggaggaggtcaagtcactggccggcgagcagaatctcatttacactgttcgcgacctggacgtggtggtgtctcaggtggcggagggcaagtctggaaagtacagcaacaaggcggtgattccaggtaagtctccgctccatcttctcgggcccatggtggatggcaagcggagctatctggcctttcccgatcgctctgggatgggtttgcaactggtcaacaatctttcgcagcaacagtactccaaaatttggcacttgccggtgagtttcctgcatatgtcgatccaagctgtaatatacgacttttgatctaattttaggactgccatgagttgatcataaacgccctttgcggagatgagacctatttgtactccggcggctatgacaaaaaggttaagggatggaccgatctggaagcaggaaagccaaaagccctgggcgaggtggaggtgggcagttgtgtgaacagcatttgctgtggagccaacgacacggtatacatagcaagcagcgacggattcattcgcagtgcgaagttcgtataattttattggccatcttgtcgtctcagagaatagaaaacccttgtaacaattaaacagaatttattaaaagctttacaaactggccttatactgttgcgagtgctctaggctgtcgaattccacctgcgcctctatccatcgtgccactgtgagcagtaactgctcgttgaggctgttgctcatcagctgaaggctcaagggcaatccggcctgggacaggcgaatcggtatagacacggcgggaattccagccatgttggctggctgagtgcaaaagtcctgcacggcacactgatccctgttggtcagggaggcgaagtccttgtacagcggagcctctgtaagagttgtcggcgtgagaaggatgtccacgcgctcctctttggccgaggaatcaaacacccttgcaaagtcctctgcaataaggcggcgcacccgcaaagccttctcaaagtagtgatcatagttctttttcagcagcagaaagtttccagtgagtatgcgtgtcttaaccacatcgttgaatccctcggccctggatagggcatacaattgctccgtgctgcgctcgtctgttgcccgatggccgtactcgattccatcgtaccttgccatgttgctggccacctcgcactgattaagaatggtgtacacgaatatacttgctgccgtattgggcagggaaacctgtctgacggaggcaccgctacactccagcaaatcggccaccttagaccacgtttccagaacttcggcggaaagaccgtggcaatggtattcctttggtattcctatgcgcacagtgctcaggtcaatttgcccaacttccggcagatgtaacctggtaaaaggctgcctgatggttgtggagtccagtttatccggccctgccactgtattcagtaccgccacgcaatcgctgacggagcgggcaaaaatgccgggcacgtccatggaattgaccagcggaataagaccgtggcgggagacgaggccgtag

SEQ ID NO: 34379 - DNA, 894 bp, DROSOPHILA
atggccaacaacgcccgcatcgagcacacgtcctccgagggtcatgaaggggacgccacatgcgtggcgtacttcgatggacagctgttctccggaggcgctgacggtaaaatacgaatctggtcaccggaactgcaactattggccactgtaaacgctcacgaggcgtacatatactgcatggccattaatcagcacggaaaggtctactcgagcagctgtgatggccaggttcacttcatgctgcctccctatggagacgagtcagtgcaggaactattccgctgcgacgacgccatccaggccatgtactgcgacggatccgtgctttacacgggcgatgacaagggtgtggtgaccacttggaccaacgatcgcatgctcttcaagtacagcctggtggaggaggtcaagtcactggccggcgagcagaatctcatttacactgttcgcgacctggacgtggtggtgtctcaggtggcggagggcaagtctggaaagtacagcaacaaggcggtgattccaggtaagtctccgctccatcttctcgggcccatggtggatggcaagcggagctatctggcctttcccgatcgctctgggatgggtttgcaactggtcaacaatctttcgcagcaacagtactccaaaatttggcacttgccggactgccatgagttgatcataaacgccctttgcggagatgagacctatttgtactccggcggctatgacaaaaaggttaagggatggaccgatctggaagcaggaaagccaaaagccctgggcgaggtggaggtgggcagttgtgtgaacagcatttgctgtggagccaacgacacggtatacatagcaagcagcgacggattcattcgcagtgcgaagttcgtataa

SEQ ID NO: 34380 - protein, 297 aa, DROSOPHILA
MANNARIEHTSSEGHEGDATCVAYFDGQLFSGGADGKIRIWSPELQLLATVNAHEAYIYCMAINQHGKVYSSSCDGQVHFMLPPYGDESVQELFRCDDAIQAMYCDGSVLYTGDDKGVVTTWTNDRMLFKYSLVEEVKSLAGEQNLIYTVRDLDVVVSQVAEGKSGKYSNKAVIPGKSPLHLLGPMVDGKRSYLAFPDRSGMGLQLVNNLSQQQYSKIWHLPDCHELIINALCGDETYLYSGGYDKKVKGWTDLEAGKPKALGEVEVGSCVNSICCGANDTVYIASSDGFIRSAKFV

SEQ ID NO: 34381 - DNA, 2603 bp, DROSOPHILA
gaccccaccgccaagtgaacttccgcttgcggccgcagttcctgattgttgctgggtcatctggttcagctcctgctgcaagttgagtacccgagtgcgtagcccagcgttgtcttcgctgagacgctgcatgtgggccgcttcctgctccgcccgcacgaatgtgggctgcggcaggcactggtatacggtggtcaggaagttgcgcagcgacagaagcaacgtatcctgccattgcttggtgaagaacagggcaaaagtgggcgactcctcggcattcttgcaaaacggaaagtctaaagagattcaggggttattgaaagaggttattggtaagtattcttaaacgatatttacagaaccaatccttccactcgctttgctgctgcagatcgcccgccaacttgttaaagaactcggacaccttctcaggtcgattgctgctgtaggcggtcaccaggtagtattttaggaggctgttttccagtttcttgacagctggatgtcaaatagtaattaaattgaaggcatcatgtgggagaaaaagaacttaccaacggcatacgtatgctccagcttggaaaatatgttgttgtccaggtgaaaccacaaactcctgagagcctgaaggtcagacgcttgcacagcattattgaattgctccagaattcgttccgcacggaagtgctggtccttctcagtgcgctgctccaagtcgagggccttcaaggtgctggagaaacctcgaaaaactaggtactccctaagcaggttgtccagaaaagcgacttgtgccatcgtttgattctttatttaataacttattaatttttatacaagtttcacaataaagtttgaagaaagaagaagacgaacagctggtggggcagagttgccagactgaagatttcggtgtcaggaaaatatcgagaggcacagcttttcatgttcatctctaactgtcgaagagcacattttgtaaacattacattttttaaccatgcacaaacgaagaaccgccaaatcgattaataagccaccgccaatccagggagcaatcaagaagcccacgccggtggcagaacctccgtccatcgacgccgaccttgtcacccagttcgaagtggagctctgctggtgtgtgcagcagttgcaaactgctctcgacagcggaaaactggcgcaaaaagtggccgaagatactgccaagaacataaaggtactaaccagttcaacagcgccgctcatcaggaagcggcaggtgatgaagctagccctgggcgactaccgagcgaagatgcagcaggaggagcagaagttgctactagcctccaggcaaatcaaattcacacctacggctgaatcatccaaaaagtctagctttgtaaagaagtcggcgcttctgtcatctggaaaggacttccgcttcaactttccctcgcccgccgaagacaccagctcaaaagagcctcaaccagtccaggacttcgatcccagcagccttcaaccagctgaagccggaagtccgttcaagttcaacttcaccatcgcggaggattcggccaatgacattagtttcagcggtctgaacttgaataagtaatcaatcacaaaagcctgaatgatcttagattttctaattcctactctttatacaaataaaaagcatttaaataaaaactcgtaggcataaatttatggccattcaaaactatcaacaatttcagtgacaacggtcatgattattgattttaaaatatttatattcactgtattactttctatttgttgcatatttaaggagatatattttaaaaagaagctaagtgagcacttatttttaccacgcagtgtgatctttggttttatttatagctttgcagagagtatttccatgctatatttacgtacattgatgaagtcaaaagaccacggatgagaagtgatttactcagtccgattcaaatcagcaaatggccaacaacgcccgcatcgagcacacgtcctccgagggtcatgaaggggacgccacatgcgtggcgtacttcgatggacagctgttctccggaggcgctgacggtaaaatacgagtgggtatctaccggtttcccacattgctctcttagctaatatatattccccttcagatctggtcaccggaactgcaactattggccactgtaaacgctcacgaggcgtacatatactgcatggccattaatcagcacggaaaggtctactcgagcagctgtgatggccaggttcacttcatgctgcctccctatggagacgagtcagtgcaggaactattccgctgcgacgacgccatccaggccatgtactgcgacggatccgtgctttacacgggcgatgacaagggtgtggtgaccacttggaccaacgatcgcatgctcttcaagtacagcctggtggaggaggtcaagtcactggccggcgagcagaatctcatttacactgttcgcgacctggacgtggtggtgtctcaggtggcggagggcaagtctggaaagtacagcaacaaggcggtgattccaggtaagtctccgctccatcttctcgggcccatggtggatggcaagcgg

SEQ ID NO: 34382 - DNA, 603 bp, DROSOPHILA
atgcacaaacgaagaaccgccaaatcgattaataagccaccgccaatccagggagcaatcaagaagcccacgccggtggcagaacctccgtccatcgacgccgaccttgtcacccagttcgaagtggagctctgctggtgtgtgcagcagttgcaaactgctctcgacagcggaaaactggcgcaaaaagtggccgaagatactgccaagaacataaaggtactaaccagttcaacagcgccgctcatcaggaagcggcaggtgatgaagctagccctgggcgactaccgagcgaagatgcagcaggaggagcagaagttgctactagcctccaggcaaatcaaattcacacctacggctgaatcatccaaaaagtctagctttgtaaagaagtcggcgcttctgtcatctggaaaggacttccgcttcaactttccctcgcccgccgaagacaccagctcaaaagagcctcaaccagtccaggacttcgatcccagcagccttcaaccagctgaagccggaagtccgttcaagttcaacttcaccatcgcggaggattcggccaatgacattagtttcagcggtctgaacttgaataagtaa

SEQ ID NO: 34383 - protein, 200 aa, DROSOPHILA
MHKRRTAKSINKPPPIQGAIKKPTPVAEPPSIDADLVTQFEVELCWCVQQLQTALDSGKLAQKVAEDTAKNIKVLTSSTAPLIRKRQVMKLALGDYRAKMQQEEQKLLLASRQIKFTPTAESSKKSSFVKKSALLSSGKDFRFNFPSPAEDTSSKEPQPVQDFDPSSLQPAEAGSPFKFNFTIAEDSANDISFSGLNLNK

SEQ ID NO: 34384 - DNA, 3156 bp, DROSOPHILA
ccattggctgtttgtctttgcgcagcttatctaatggcccggctaaaagataaacaagagacgacggcgacgacgacgacgacaaagaaggattcggagaccaaatgggtcgactgcgcggagcgcgttagctcaaattaactgaaattttctgatagcacatcgaattactaggcgaaataaacgaagaaaatctccttaatacctaaatcttttttatcaatgcaaattgctggcgactaaattgtttggtggataaggataatctaatcctgttttcaattaagtgatactttttaaatggattcaaccacgatttaagagccacacctaaaaatgctatacttgaacctttaattaccacccaaaagctttctggtttttagtaccaagactgattgccaatttaatatagtttcccactgtcttacataattaccccagcagtgtctaattaagatgccccaattaaactgccaagattcaatggatttgtccagcccaagcgcagactgcaaaatcttccctaacgactgcatcatagtttgccaagcgacgatggcgtgggtcgtcagttgggcaattaaaacgagtcaactaactcgaaatgatttgcagcgccgttgatggagtcatgccatgagctgctcctcgttggccattagcaaactgcagataggcgatgtttgatggagttgtgaccgaggcgtgtgtgtggtctttgttcccgttgccgttctgcccgtcatcatcatcatcagcaccaaagagccatgacaatgattgggtggccgtgcggtctatgtggagcaaatgtttggacgacagttggccggcgatagcaaaaagggggggttttaggcattagctttcagaggcaaaccagctggtgaatggaaggaagtgccagccgcacagccgcacagagaccacacacatgaggtcgtcgtagtttgattttttttggggtggtcgtcgttccgttcagcaaacgtattatttatgcatgatgcataactgcggatggtgttacctgcagccagaaactagccactaacggttaccagttaacttggaaaccaaaaccagttaacccggaaaaatgcttggttaaaatactcaccagtcggatctcgatctcggcatcgatgcgcgtgcgcagcttgcggttggcattgccaaagtccgacacgcacagcagatgatcctccgtgtccgtggatccatttagttgtagaacttcgtgatcgctggacagaacctcaccgttgaaggagatggaacgggacgggatcagcgactgcgagtgcgccaaggaggcgagggcagtcgcagtggctccggtggccaccggcagctccttaccagcctccgtgtaaagctgccggacgctcagaggtctggtctcgcctgtaaagagctcctgctggaatgacttgtccgtctcgaagtggtgtttgcgctgtgcgaaggtgagcaggtcgctttcagctgaaatcgaaaagaaagaattcaaattacaatgggcatgtttcgaatgttattaactaaatctaattgctcgaattctttcagtgtggtctctttatagaattcctatacaaagtgctttcgtcttaaattcagatttccgttcttgcagccttttcccgagtgcaactaatctgttttcattaatccacgacgagatcagagacggctctcatctcatgttatttaattccggcatcgatcactatcatcagcagataatcaaagagcttttcatgtaatctaatagaaacagcatgcccgcccatctgcgtgcttgttcgctccagtttgtccatccactggatgtgccccaaaggggaaatggaaaatggccaagcccattccacccatcgattcagtttcaatttagcccacatggcgatcgtatttttcgcctccgattttgcagtctgtaaacaaaggaagcaaaaacaaggcgatgccgcaaataaatcaacgcgaaaattaatagagtggaaaaatcggcacagagcaaggacacagcacttaactggtgaaaaaaaatcagaattatcattacgagaaaaaatgaatgccaggaagaattgtaattaactttaataacccggccacatgccacgaagctggtgctcctgcaacatgcatattttattctctcggcactggtgaccagtttgtggacatgaagggagtgagtttggaaggccccggcgaccgtttgtctttctggctgtctgcactttttgcatttaataggccgccatgtggacttggtcggtaatgaaaacaaagcccggggagcagcaactaccaggaagcagaagtagcagaagctgcagcagaagcatccactcgtagattaacaagcccagagcaaagtcacttgacatggccatagaatggagacggtgcaagcggggtatggacttacagagttggaggagacatggctggaccgctgccaggaaaaaaaaaacaaaaaaaaactggagatggtctagagaaacggcggcaacctagcgctaaattcaggcaattttatggcattgggtccgcattttgacgttctgtgcgccactggaagacgcatggttctgaatctctcgatccgagattcggggggacagaaagcaatgccagcagcaatgcgccgcctctttccccattagccatttcaagtgcgcagacattggcacgcacagaatctccatccccatctcagcaccaatcccgctgacccctgccagccgagatgcgaaaataagaggcactcaaaataaacaaaaactcctcggcattggctgttaatttcggccaaatgcgaaattcaattaagcatgctcaggtgcaactcgggctgcaactccttttattccctgcctgtcggccaaacggaagctgacagcagccgtcgccggaaatggcaaattaacttggcaaaaattattattttcctcaaaatacgctcggagggccaaggatgccaagggaaaccgggggcgtcgtcacgtctgggtgacgaccatggtcatggctgccattgcacattatttgtgagtcatgtgcgcaggaatgtctgtgtacataaacttatgtacacaaagccatgccatgtaggctgggccagatagcaatcgttgc

SEQ ID NO: 34385 - DNA, 438 bp, DROSOPHILA
atgttgcaggagcaccagcttcgtggcatgtggccggctgaaagcgacctgctcaccttcgcacagcgcaaacaccacttcgagacggacaagtcattccagcaggagctctttacaggcgagaccagacctctgagcgtccggcagctttacacggaggctggtaaggagctgccggtggccaccggagccactgcgactgccctcgcctccttggcgcactcgcagtcgctgatcccgtcccgttccatctccttcaacggtgaggttctgtccagcgatcacgaagttctacaactaaatggatccacggacacggaggatcatctgctgtgcgtgtcggactttggcaatgccaaccgcaagctgcgcacgcgcatcgatgccgagatcgagatccgactggtaacaccatccgcagttatgcatcatgcataa

SEQ ID NO: 34386 - protein, 145 aa, DROSOPHILA
MLQEHQLRGMWPAESDLLTFAQRKHHFETDKSFQQELFTGETRPLSVRQLYTEAGKELPVATGATATALASLAHSQSLIPSRSISFNGEVLSSDHEVLQLNGSTDTEDHLLCVSDFGNANRKLRTRIDAEIEIRLVTPSAVMHHA

SEQ ID NO: 34387 - DNA, 3797 bp, DROSOPHILA
acctgcgttgcgtattacaaattgcagtttcgttttttgtagcgaatgattagtttgaaatttcgatagagcaatcagatcagatcagttcgaattgtagagcagattggaaatcaccagatagcgttgaaaatagttatatttgttattgaagtagagagaaggtgtggaaagattagaatttgcagtgtcgataggtgaataaataaagcttaaaatagcacacaaaacgaacaaagccagtgaataggtgggttcaagcacatacaattagctgacaaatgctatttgcccgtggcagccattttgtgatgccctaataagtaggctacacttttcggtgagcatgatgctccgaagagcatcacaaaatggctgccagggtgggcagaactgaaacgataaacatagtttgtaacattatagatgtttgacaatacttacgtataaaatctaatttaacaaaactctcgctaaattcataaattcctttaaagccacgattttgggtatttgcggtgcgcgataacgtataaaaatgaacaaaaaggctcgactcgctcgaatacaaaactaagtttctttgctgcccgcaatatgtaccgattaatgctgacgaattatctggaccatcgtacactttcacatagtcaaatgggcagctgtttaatttggtttggtttgcagttgtggtggtgatgttgttgaaatttggttgtagacgaattgcgcagattggaatagcagattggatagagaagagttggtttttagagacattcggatgagggtaaattcggtttagatagttcacagattgtgtgtgtggtagtgtgtgggctgccaatcagagcaagttttggccaaaagccagccaaaagccagcacttgctttgatcttgacttgttaccggttgtgtgtttgtgtttttttttttttcatttcgctgtgtgtcttttgtgtgtgtttttttttttaactgtgcagcattagaggtactcactgtggtccaccaaaaaatagatcaaaatcccgaaactctaatctaaccctctgattcgattcaccaagaaactgatatgtgcatgacatatccttcggataggcacctggataggttggcgatatgagcgcaccagttttgttgacgctcatgctgggcgttatcgtgtaggaacatggcgatcccgcaatgggtatgccaatttcatattccgcttttcggatggaatttggaaaggaaatcataagacagtcagtagtcaataatggtggtggcggctcgggtaatgccccataactccctctactcacatgcatttataaacctaaacgtgccctcgaacaggtccgtggtcacgttcttgttgctaaaaaaagaaatcgcaactgcacgatacatggaaatgcgacgacgcggcggaatggtgccgcagtagcggccaccgaatggcgaattgatcagttccgctggctccgacgactgcacctccgagtagatatccatgtactcatgaacacaactgaaacgtggagacaacattatggtggtattcaacttgagtgaactgtttcgcatttaccttggtaattcaccgacggccgaaccgctgcgaaatgggcagaaataagcagagagaagaaaatatataagtgtctggtaacttttgttccactcattcaatttgcactcactctggcggacttcctcttaaattaaacgatttaaaaactacttcgacacgctgaccaggtcctgctaggaaggtgtagaggcattggcgcgagtgattgcgatggttgtgcagcagcggggccgagaagctgccattctggggtccgccgatccgcgacacgaatgtctgatcacactctgtgaaaaaggatgagaaaagtggagcggcgatgttggcacacaccacatggccatcggtaagttcaaaggatgtttacggcgggctgtttagactagacattgacacacacagcaatacagaacacatacacagaacgtagtagcggaacacgagctgttaacaaggcatgtcaatgtgtgggtgtgtatggcgttgtgtgcacagagagaaatgtcagcaattgtctttaattatcgcatttaagctgggtatttttggaagttcaagtacatttaatataatttatatccacaattattttaacttttagttttaagataattctgatttacaatatatattttattcaattttttttattcataaccatagtgtatttatgagtcctgttaaactgcgttattatcattctttcgaatgaatactttttcattaatgtcagcacataagcaagattacaatatttagatgattagatatctatagttattggccataattcacgaaatttatttggcaccacagatctaatctcttgacttcttctctgttgggtgtttggttgttgtttgatttgtgtacaactaggaagcgatttgagttggtcaactagggcaattggcactacgggtggacagtaaaacgcaactgttaactacgggcgcgcattgcaggcactcgcacaccaaaaaacaaacacacacgcgcgcggcccaaggcgcacacacacacatcgagagcggggatttgaacttgagagggtgtgtgtgtgtgtgtgtgaatggtgggtgggtgttggatgggtggttagctgtttgtgggggagagaggagaagagagaaagggcgagatgccgccacctacttggcgatttcgtgggtcgcgacgacacctccaaataggccaccaccggctgcatccaaggctctccgtcggcgccgttcgactttaaatgagcaccgcctgcacggtgggtgagtggttggtggtggtgtttggcagagtgggtgtttgttttgggggttggtttgaaaacggggggtagacaaatagacagcgttaatgatttcgatatgcttggatatgggggctcctgctctgcttcagtcacaacttgacgcccaacatggaaatgcgcttctcgactttatgacaagctgtccgactgtctgtccatttgtttgtccgctcacacgctccgcatctatctatctatctatctatcaaaatggctttcagctttggccatgggtgtgggtgctagtcgtacgataagcgaatccaccgatagtgcagctgggaaaggaaattcatgtactcgacgtgcgccggctgccatggcgtatacgcaacgtaaaataagagtgcctgtctgtgtgtgtgtgccaaagccagcggaaattattaagagctttccaaaacacaagctcacacacactagcaaacactgtgctgcattgttcaaggtgttttgggcagcatccacttcctttaacttccaaagccccgtaagccttttattagactctcccatagataacactctctgttatatttttttaattagtttaaatgaaatctaactacgccggctttaactagatgaactttaaattgctagaaaatgcaaattagtgtagaggcaactattgccttccgtgtaacttgaactttggactggcgtaagtttagaagaagttgcgttcaaggaaataacaagtcaggactattaaatatttttcaatgtatgtcctttttgcttcaaatatattacttcgtttgcaatttgcatatatttttataagtctaagatatgattattgatccaaactggttataactaacagctctgaattcctcataaatggccacatcggttagaaattaaccaaagccttgtgggtgtgccgcttgtaatt

SEQ ID NO: 34388 - DNA, 660 bp, DROSOPHILA
atgcagccggtggtggcctatttggaggtgtcgtcgcgacccacgaaatcgccaaagtgtgatcagacattcgtgtcgcggatcggcggaccccagaatggcagcttctcggccccgctgctgcacaaccatcgcaatcactcgcgccaatgcctctacaccttcctagcaggacctggtcagcgtgtcgaagtagtttttaaatcgtttaatttaagaggaagtccgccagattgtgttcatgagtacatggatatctactcggaggtgcagtcgtcggagccagcggaactgatcaattcgccattcggtggccgctactgcggcaccattccgccgcgtcgtcgcatttccatgtatcgtgcagttgcgatttctttttttagcaacaagaacgtgaccacggacctgttcgagggcacgtttaggtttataaatgcatcggaatatgaaattggcatacccattgcgggatcgccatgttcctacacgataacgcccagcatgagcgtcaacaaaactggtgcgctcatatcgccaacctatccaggtgcctatccgaaggatatgtcatgcacatatcagtttcttggtgaatcgaatcagagggttagattagagtttcgggattttgatctattttttggtggaccacagtga

SEQ ID NO: 34389 - protein, 219 aa, DROSOPHILA
MQPVVAYLEVSSRPTKSPKCDQTFVSRIGGPQNGSFSAPLLHNHRNHSRQCLYTFLAGPGQRVEVVFKSFNLRGSPPDCVHEYMDIYSEVQSSEPAELINSPFGGRYCGTIPPRRRISMYRAVAISFFSNKNVTTDLFEGTFRFINASEYEIGIPIAGSPCSYTITPSMSVNKTGALISPTYPGAYPKDMSCTYQFLGESNQRVRLEFRDFDLFFGGPQ

SEQ ID NO: 34390 - DNA, 3584 bp, DROSOPHILA
tttccatttgcctattccgctttttcactttgttgttgttgttgttgttatttggccagaggatgtggtgtgttgttggtgccaggattccttcgataaggactatttaccgagccaagtttcctttgagccgccgtcgctctcgagtcgcaaattcacactgagccggagttttggattcggttttggatgctggttgcttcgcactcggatgctgctggttgtgctgctttggtcttctgccgccgcggccaaggactcaggcgcaggctgtcggcgcagaaaccatcgccccaattctcttcgccttggtccttttaagagagccggaagagcgcgtattaagtgaagagcggaagcgcgtggtggattaaccacttgaaaaccgtggcgcccgcacttcagcaaatgcgttgcaaatgcacacattacgtccacttgtaattagcgggcttaatgcacatcaagcatccgcttttcggcggatatagggagggaagtccctgcgacaagcctatcgagattgcaaatcgagtcgagtgttgcagcgatcagtatatgcctgacaccgatcaagcgcttcaatgactttcaacgatagtgtaatatatcggtataacttacaggattttaaatgaaaaagcaacaagattaaactcgttttagaatagcaattaaatgtttaattttcgattgactttataaatatttaagttaatattaataatgtaatataaatatcaatatactagatttcttgatatttatgcgtagagctttgaaagcattgtattgttttacactgtttacaatgctagaatatttttttgttataaatattttattaataaaagtcttagcatagtgcctgggcacaaatttgcccaactaaaatattgctgaaggttatgttaaccacttttcaaaaaaagatttaaaacctatcgcattcgcttcattcgacgtccatctctaagtgtgacccttggatgtggcgattgtacgggctatcgataactccgacgcgacagcgacgcggcagagaaaactcgttgatgcctttcgtttgactaattttatataactttcggagtgacaacacggccgacacataaacaaaaaatatatcctagcttgtgaatatttaggcacacacttcacacacctgcaacgcggcctgcagttccaaattcttcgtgttttcgatcaaggtgttccaggcggtaaacaaacaacagcaacaacagctggcaccacaaaaacaacaacaacacggcgaacaacctgtaagaccttgaggggatttttttcggatttatattgcgcggcaatggcaatctaatctaaattattccaccaggtgcgcttctgattaacatttctggtcagatatattcaattagcaaagcggtagcatcatgtcgatcaggagagctatgtccacaacggcctcaaaggagtggcgggattactttatgaggtctgtttgttggttatcaattggccttatatgacttattgtaaatattgctttttatatccacagtacccacttctggggcccggtggccaactggggtattccggtggctgctctcgccgacacacaaaagagtcccaaattcatctccggcaaaatgacattgggtaaggatatccccccttgggttttggcctccatctggcatccatacacgcgcgactggcatcgaaagttttcgcttaagatgtcgtaatcagagccgctgtgatatgttctaaacaaatcactctataatgcctgataagccagatacggaaactgtcgaaacgtctgccgataagattgcacagagaaaaaactaagcacaatttgtccattttactccataatccgattccatcggaataagatgccagcgaggcaatatgcacataatgtaatggaaattatgacaaattttgcttataatttgtcctgtgcctttgcctatgtaaataagtctcccagaaatgcttatcctcgatcttttccagctctgaccctgtactcgtgcatctttatgcgatttgcctacaaggtccagcccaggaattggctgctcttcgcctgccacgctaccaatgccaccgcccaatcgatccagggtcttcgcttccttcactacaattacgggtctaaggagcagcaggcgtaaatgtaatccttgccccgaaatccacttccccgagacgcgacgcgcgaagccacttcaaatgtttacccaacagcagcagctatcgcaatttactgccaccacacgcaacgaagatctagcaaattgcactgccgcaatcccattcaaatcaaatccaagtggtggagtaattgccgtgaatcacacccgcacaatcggctgaatctcgaatcgcgaagttgtcgtgccccagtagccgttttcgctggggtcaaattccaattccaattgagtctatacccaacttgttactttgcccatttagttaattccgttaggcagttgatcaaaattttaagtcggtgcaatgcttagattacgattatatgaatatggtttaaaatccaataaaagatatcaaaatctaattttgtctagtgtctgtcaatacaaaatggttgtaataaaattgtaacatttaatcattaaaatgaagaacgttatagaacccattcaaatatacaaagttagttgattttgtcacgtttattgaaacatgctttttattcaaacaattacggttatataagttgatatctgtaaaatatacatttcaattgttcttaacaatagcatatttttttgttgacattttttaaacttttttttgttcatcaatggggttaaaacatacgaactcgtaatcatttttttgttgtgctttttttttttttgattacgctttggacgaaaaacatatccgtgggtataaaaattttttagttttctcaaacataataaaagtaaaattaaagttaaacactcctcgcgcactatgggcgccatcactatgcctaataagtggcttaactgatgtccacatggaaatggaaatttgatttctgcttctcgacttcttcaacgacaacttaactaactaaacaattggatgacgacgataggtactatgacaggcttatgctccgcaatttctattctatggctacgagaatctcagtcctgctcctgcttaacgtaagtgctcttctgccgctggcgctccatcaggtacttcttgaacttccgttcccgggaggccacttcgtcggcccgggcacgcagtcgcagattctcggccaatagcgtgtcctcggcgcgcttctcctcctcttcgcgcaccttcgtcttccggcgcgatacgcggctcgcttcgttgttcttgagtctgtcctggtaggccttcctctcctcctcgcttttcatgcttgacatgagcacgggatcgggaccgtcggcatgatccttggcagggcgaccgcgcttccgcttgccgctgattccgctggctggcgaagggctgaacacggacgtactggctgttgaataggcgggcgaggtgggagcagtgaggaagccaccatagccggt

SEQ ID NO: 34391 - DNA, 1075 bp, DROSOPHILA
gtacgggctatcgataactccgacgcgacagcgacgcggcagagaaaactcgttgatgcctttcgtttgactaattttatataactttcggagtgacaacacggccgacacataaacaaaaaatatatcctagcttgtgaatatttaggcacacacttcacacacctgcaacgcggcctgcagttccaaattcttcgtgttttcgatcaaggtgttccaggcggtaaacaaacaacagcaacaacagctggcaccacaaaaacaacaacaacacggcgaacaacctgtgcgcttctgattaacatttctggtcagatatattcaattagcaaagcggtagcatcatgtcgatcaggagagctatgtccacaacggcctcaaaggagtggcgggattactttatgagtacccacttctggggcccggtggccaactggggtattccggtggctgctctcgccgacacacaaaagagtcccaaattcatctccggcaaaatgacattggctctgaccctgtactcgtgcatctttatgcgatttgcctacaaggtccagcccaggaattggctgctcttcgcctgccacgctaccaatgccaccgcccaatcgatccagggtcttcgcttccttcactacaattacgggtctaaggagcagcaggcgtaaatgtaatccttgccccgaaatccacttccccgagacgcgacgcgcgaagccacttcaaatgtttacccaacagcagcagctatcgcaatttactgccaccacacgcaacgaagatctagcaaattgcactgccgcaatcccattcaaatcaaatccaagtggtggagtaattgccgtgaatcacacccgcacaatcggctgaatctcgaatcgcgaagttgtcgtgccccagtagccgttttcgctggggtcaaattccaattccaattgagtctatacccaacttgttactttgcccatttagttaattccgttaggcagttgatcaaaattttaagtcggtgcaatgcttagattacgattatatgaatatggtttaaaatccaataaaagatatcaaaatctaa

SEQ ID NO: 34392 - protein, 107 aa, DROSOPHILA; identical to SEQ ID NO: 27612

SEQ ID NO: 34393 - DNA, 3575 bp, DROSOPHILA
ttcacaccggtgcagggcaaaaagggggtggcttaaactgtagctggctggctggcttaaattagccggccgatgattcattttgggggttgtccacttacataagatgagctcacccaatgtgaaaactctttagtcgctggaagaaactgcgcatttcgacacagaaaagcctaaacaagcagaacgaacatttgttttgtagatttataatttttcaaaacatacaatcgcattgcactttgcgattggccttgacaccctgacgtggttccatttggcgacactgttcctgcttttatcttctccatggcgcaagataaaatcagaaagtacaacgtgttgatcacctaatggccagagtcatgcaaaccaaactcttggtgatttaaatctatttccatgtctgtcacaaaagaatactgcttattattatatggcgggttataatttaccaaagtacacaaaatgttacaatacaatacagttgaatatatactagttaaatgtacatatgttttataacagctcattggctgtgttttaatggtttataaatgtaaagtgtttttaaagcattttaaatttcaaatgaaacattttttttgtggaagtgctgttttttatactgttcagatatatctcactgatatttatgatgattctttaatcgtatgactgtacagtaccctcacactttagttctctgtatggtgtgttgactgtagtcaaaccgctcccaaagaaagtcgggcaaagtgaatgtacctaggcgcgctcccgctgagcatttgttgtgttgatgagattaaaactggaactgggaatggaattgaatgcgtcttaaacggagaacggagaaatgagaggctttgtggacacttaaaagtatgcggctctcttgagccgtacttcagtacgctgacgtcgactgaagaatcgctttgttctgcgctctcaaatatatttaatttggatttggaactggatttatgtcaacatgcaatttctgcagtggatttttacactatggctaattgctggttgctccgctggcccgcagaatgtcctgctgcttctggctgacgatgccggcttcgaatcgggcgcctatctgaacaaattctgccaaactcccaatctggacgcactggcaaaacgcggattgcttttcaacaacgccttcacctcggtaagcagttgcagtcccagtcgctcgcagttgctcaccggccaggctggtcactccagcggaatgtatggactccatcagggcgtgcacaacttcaatgttcttccggataccggatcgctgcccaatttaatccgtgatcaaagtggcggacggatcttgagcggcatcattggcaagaaacatgttggggccgccaacaatttccgtttcgatttcgagcaaacagaggagcagcattccatcaaccagattggcagaaacatcacccggatgaaggagtatgccaggcagtttctcaagcaggccaaggacgaaaagaaacccttcttcctgatggtcggcttccatgatccccatcgttgtggccacatcaccccgcagtttggagaattctgtgagcgttggggcagcggagaggagggaatgggcagcatacccgactggaagcccatctactacgattggcgtaacctggacgtgcccgcctggctgcccgacacggatgtagtgcgtcaggagctggctgctcagtacatgaccatctcgaggttggatcagggagttggtctaatgctgaaggagctagaagcagccggcgtggcagatcagacactcgtgatctacacctccgacaatggaccaccgtttcccggaggcagaaccaatctctacgagcacggcatacgatcgcccctgatcattagctctcccaataaggaggatcgtcatcatgaagccactgctgccatggtcagtcttttggatatataccccagtgtaatggatgctcttcagattccccgaccgaatgacaccaaaatcgttggcagatcgatactcccagtactgcgggaggaacctccgatcaaggagagcgattcggtgttcggtagtcacagttaccacgaggtgaccatggcctatcccatgagaatggtgcgcaataggcgctacaagcttatccataatatcaactactgggcagacttccccatcgaccaggacttttacacttcacccacattccagcagatattgaatgccactctcaggaagcaaactctgccatggtatcgttccttgttgcagtactaccagcgacccgaatgggagctgtacgacattaagacggatcccttggagcgtttcaatctggccgataaggccaagtacaatggcaccctgaagcagttacgcgagcaactgttcgactggcaggtagccaccaaggatccctggcgatgtgctccgcacgctgtgctccaggagcagggcgtctacaaggatcagcccgtctgtctgaccttgggccacgaggcgttgcagcggcccaagcgcaggattctcggtcagtatgaggagtatgtggtcttctcgtaggtctgactaagagtattcaatagattgggtgtgttgtcttatcgcatgtccaatggttgataactcaaccatgccaatgtttttcacttcacatgccgttacagttgcggtcatacaaataggaattgcaaaaggtagaaatgataatattatattaatgtatattcttattaaaataataaaaaaaaagtaacatacaatactttcaataataaactttgtttaactttgaagcgagctgctaatctttaagcatggctaataaaaagatcaatgttttcaaaagcaatggtaatcataagaattaagcatttgtttagagtatgtacatatgtatgttctttgaacaaatttccaagtttacattaagggaaaactttaattgctttttacaaacaaacagataaaaatatattgccttgattttcacctgcgcaatgccaaaaaaatagccaacagaattggcaaagaaagaagactgaagattcccccactgactgaattggttgcatcagcccagactggcaaacactcgtgtcctggcagcatgacctcacccactttttggactggaggcgtgggcatcaggggttggatgctgcgtcacgtttcaatgtcatgcccactgggtcagtgggataggggaggggagggtgtgctggcggctgcctgtgtctgtgtgtggaaaatcgaaaatttcaatgcttctgttgtagtttattggtggcgcctccggattcccacatcgcccaccaccacccattcccagcagcattcgagtctctgtgttacacaacaggcagcacgttttatggttttaaggtcagatgggaaatatcaaagagtaaacgacgtttgcttgtttttttttttgttgtttctcagttatgactttgaacgaaagacacattaaaaattaaattttattaattttggtttgcataaattagggtcttcagttttagcatagttattattattatgtatatgccttgtaata

SEQ ID NO: 34394 - DNA, 1575 bp, DROSOPHILA
atgcaatttctgcagtggatttttacactatggctaattgctggttgctccgctggcccgcagaatgtcctgctgcttctggctgacgatgccggcttcgaatcgggcgcctatctgaacaaattctgccaaactcccaatctggacgcactggcaaaacgcggattgcttttcaacaacgccttcacctcggtaagcagttgcagtcccagtcgctcgcagttgctcaccggccaggctggtcactccagcggaatgtatggactccatcagggcgtgcacaacttcaatgttcttccggataccggatcgctgcccaatttaatccgtgatcaaagtggcggacggatcttgagcggcatcattggcaagaaacatgttggggccgccaacaatttccgtttcgatttcgagcaaacagaggagcagcattccatcaaccagattggcagaaacatcacccggatgaaggagtatgccaggcagtttctcaagcaggccaaggacgaaaagaaacccttcttcctgatggtcggcttccatgatccccatcgttgtggccacatcaccccgcagtttggagaattctgtgagcgttggggcagcggagaggagggaatgggcagcatacccgactggaagcccatctactacgattggcgtaacctggacgtgcccgcctggctgcccgacacggatgtagtgcgtcaggagctggctgctcagtacatgaccatctcgaggttggatcagggagttggtctaatgctgaaggagctagaagcagccggcgtggcagatcagacactcgtgatctacacctccgacaatggaccaccgtttcccggaggcagaaccaatctctacgagcacggcatacgatcgcccctgatcattagctctcccaataaggaggatcgtcatcatgaagccactgctgccatggtcagtcttttggatatataccccagtgtaatggatgctcttcagattccccgaccgaatgacaccaaaatcgttggcagatcgatactcccagtactgcgggaggaacctccgatcaaggagagcgattcggtgttcggtagtcacagttaccacgaggtgaccatggcctatcccatgagaatggtgcgcaataggcgctacaagcttatccataatatcaactactgggcagacttccccatcgaccaggacttttacacttcacccacattccagcagatattgaatgccactctcaggaagcaaactctgccatggtatcgttccttgttgcagtactaccagcgacccgaatgggagctgtacgacattaagacggatcccttggagcgtttcaatctggccgataaggccaagtacaatggcaccctgaagcagttacgcgagcaactgttcgactggcaggtagccaccaaggatccctggcgatgtgctccgcacgctgtgctccaggagcagggcgtctacaaggatcagcccgtctgtctgaccttgggccacgaggcgttgcagcggcccaagcgcaggattctcggtcagtatgaggagtatgtggtcttctcgtag

SEQ ID NO: 34395 - protein, 524 aa, DROSOPHILA
MQFLQWIFTLWLIAGCSAGPQNVLLLLADDAGFESGAYLNKFCQTPNLDALAKRGLLFNNAFTSVSSCSPSRSQLLTGQAGHSSGMYGLHQGVHNFNVLPDTGSLPNLIRDQSGGRILSGIIGKKHVGAANNFRFDFEQTEEQHSINQIGRNITRMKEYARQFLKQAKDEKKPFFLMVGFHDPHRCGHITPQFGEFCERWGSGEEGMGSIPDWKPIYYDWRNLDVPAWLPDTDVVRQELAAQYMTISRLDQGVGLMLKELEAAGVADQTLVIYTSDNGPPFPGGRTNLYEHGIRSPLIISSPNKEDRHHEATAAMVSLLDIYPSVMDALQIPRPNDTKIVGRSILPVLREEPPIKESDSVFGSHSYHEVTMAYPMRMVRNRRYKLIHNINYWADFPIDQDFYTSPTFQQILNATLRKQTLPWYRSLLQYYQRPEWELYDIKTDPLERFNLADKAKYNGTLKQLREQLFDWQVATKDPWRCAPHAVLQEQGVYKDQPVCLTLGHEALQRPKRRILGQYEEYVVFS

SEQ ID NO: 34396 - DNA, 2717 bp, DROSOPHILA
caacaattttcaacggcactaagccactggagctgcgggactatcgataattctgttaaaaaacattcagtgtgaccggtggttcgtaaaataccaaaatcattcgcatacaacaacggacatacacgggatacgctcatctctaggcatatgttaaagatgtgaggtacaacttaacattttcatttaatttctttgcaggggggtattagatagttatatatatatatcaaaacaatattaaaaattaaagtaatatatatattttatattaagaagccagaagcacataaacagttaacataatatcttacatttaatatctaatacttataatgttaatgcattataaatttgaatttgaaatctatgttgattggcagaattattagactagaataaatatggtcggtcccactgtcggtctctgtatttgctctgtccttgtacatgctgttaatcgaatagctgttagattagaataacagtttggcgcgtaaaattctaacattacaatacataaatatattatattgatagaaaacgtactcagcaaaaataaagctgtataactgctgatgaatgttacgctaagataaaaatggaatgactcagaatggataagaaaatatcatgtttatcctgtttaccaaaataactgtgcgcaaaataaccagtagcacagcagtcaattttatctttctagaaggtggcaaatatatcccaggcaaaaattaaaccccatttgcatcgtaaaaaccagtgacgttcacagcatgaagtagcaattttaccaccttttttttttttatatattctggctctatctgaacagataacccccgagaggtacttagcaccaccgaacaaacaatgaacatgtaaatcagttcaatcgcagtagtaatagttgagatatcagagataagatctccctgccgtgtttttaatggcgtataaaagccgcaagccgttgtgcttttggcaattagtctagacgaaacccaacgactgagaaccaagtgaactcagataaattaaaagaaatgaaattcgcaattgttctactggcggccagcattgcctgcatcagtgcacaggtgaggagttgtggatatgggcccccccattaagtggattattatgtaaccgaattatcataatttactcgtaagggccctggagctactgttggaaatccccttgccggaaatccctttgccgccgccaatccgtatgcggctgcctttaatcccttcctaaatggaattttcggaggtgctggcacaggagctgccgccggtgtagccgctcccgtggcaccgtctgctccctttggaggcgcctcgatttcctcattcttccagtcgatagtcctgcaacgcgaagccgagcgtctgctctcccagcctgactttcccgccgacctggcggagcgcgtcctggatgtggtggccacctcggaggagtcgatcagtggctgcaacaacgccactttgccctggctgcagatacgctgtgtcaagcctctgctgaccacggccaagaaccagctgaaggccatcgatgacgagtggcaggcccgtttggccgccaccgccagtcccacaggagcagctgctgcctaggattctagtcctgtcctccggctgccttagtgtccaatacttcctagcttagcaatcgaccaacatagatgcaataaaatttaaataagcctaatgccggaatttcctatgctggtttaaggggtgcaaaggtgtgtgtgtgtgtgtgtgtggtaagggggggagggggggggaggccaaaggactcctgacctaggacatgctttgatgtggccggccgagctttgcattccgctgctttattaaatttcccatcgggaattacaaattttggcgtttgccttcttgacgcttttcggggcgcaaatacttggctgctcacgtcaccgtcacgaaaatcctggttcgacctcgactaaaaggatgcttatgctttggaaagttagtgttgtcattatgggggaaatatgctaacttaagttctaagcaaataatttttataaattaatagttttaatatgctaacttgcaggattaaaaaagttactatagcttagctttaagtagcttaatccaataataccaaaattaagctaaatcgtaatatttcattaaaaaatatatgcaactgaagtgacttaattttcagtgaaatatataatggccaagtcgtcatcacttcgacgcacacttgaatcgttttggccatcgcatggaacttgacgcattttggtcaaatatttgtactgagttcctctgctttgtttccctgacctccctggcccagctcattttgcggggttatgacagcccttttatgcacttttccattggcgccatcaattgtttccagtgcatgatttgcttctcaattggagccctttgagttgagggtcgggagtcagctcgcttgagttgcgtccagttgcggcggcaatgttgatttatgtgccagtgcagctccaattatccaatgtcctcactcaaattgccggccatcctgcccttcgattcgatgtgaatcgaatcgattcgatttgatatggcttttggatttgcatttcaattcgaattccgggcttaggacctgtggttattaaatggcttggcttaacgagccaaggaccggccacaaatgaccaaatgacc

SEQ ID NO: 34397 - DNA, 642 bp, DROSOPHILA
aaacccaacgactgagaaccaagtgaactcagataaattaaaagaaatgaaattcgcaattgttctactggcggccagcattgcctgcatcagtgcacagggccctggagctactgttggaaatccccttgccggaaatccctttgccgccgccaatccgtatgcggctgcctttaatcccttcctaaatggaattttcggaggtgctggcacaggagctgccgccggtgtagccgctcccgtggcaccgtctgctccctttggaggcgcctcgatttcctcattcttccagtcgatagtcctgcaacgcgaagccgagcgtctgctctcccagcctgactttcccgccgacctggcggagcgcgtcctggatgtggtggccacctcggaggagtcgatcagtggctgcaacaacgccactttgccctggctgcagatacgctgtgtcaagcctctgctgaccacggccaagaaccagctgaaggccatcgatgacgagtggcaggcccgtttggccgccaccgccagtcccacaggagcagctgctgcctaggattctagtcctgtcctccggctgccttagtgtccaatacttcctagcttagcaatcgaccaacatagatgcaataaaatttaaataag

SEQ ID NO: 34398 - protein, 168 aa, DROSOPHILA
MKFAIVLLAASIACISAQGPGATVGNPLAGNPFAAANPYAAAFNPFLNGIFGGAGTGAAAGVAAPVAPSAPFGGASISSFFQSIVLQREAERLLSQPDFPADLAERVLDVVATSEESISGCNNATLPWLQIRCVKPLLTTAKNQLKAIDDEWQARLAATASPTGAAAA

SEQ ID NO: 34399 - DNA, 2554 bp, DROSOPHILA
ccgggcttaggacctgtggttattaaatggcttggcttaacgagccaaggaccggccacaaatgaccaaatgaccaaatgacgaaggggccattggatgttggataagccacgaacaatgcctaaatgggggcgagtttgaattcagattgaaatatttaattaaatgtaaatttccaacatacacaacatccgccgcttcacaagatggggagtgcaaaagttttgggccaattaataaaagtatttcggtattgaaattcgagtttgttcgtcgtcattacaacaatgcgggccaaacttggccaactttggtgtagtgttagccgcgaactgatcgaccaaccctccgtaactaaacctcaaccgaatgaaccgccttaagctctgttttggtaatgcaaaagttgcggcatttgaaattcaggcagcagcagcaaaacaaaaaatggtaatttcgagcacagaatgaaatccagccgcaactgcccaactaagagtatatataaatccgaaattggttagaggaaaaaattaaaaaacaaaaaaaaaagaaataaaagcaaaatgcgacacatacgaagggattctacggaaagtgcatgtatggaaatttgttttcggtttgcggctttttttgttttgatgcaaaagttgtgtgtgccccccaaagtaggcaacaaaatttctgcggctttggactgtgtcaaagttcgttagttcgtttgttattcgacgatattgtgggtcgcaaaaattagtgcaaaaactaaatccgttcacgaccaaagttccaatccaatagtgaatcatcccacaaactgaatggtgttcatccgtagtttgctattagcacttgctactgttatttgattcccgagtgccacttccgctgataaagttatctaattaatccagcaaatatacgcttatggaccaacataaaacataatggggttgaggctatcgtttcgtattgcactcagatagatggtgagataatggaggctgtaaactctatcaaagcgcaaacagaagataagtttgaatgtctttcgagtttttcaaattgtgcttcagtcggtcattgaaagtttccagaaaatgtcgagtgcagtgctgatagctttctgcgtcttggttgttttggtaattgaaaataatactaaacacaaaaaaaaatctttaaaaataatctattttttcatatatatgcgctcaatagaccggacaatcggttggccaaaatgtggccgtgcaacagtcaattgattgggccaatgaacagttcaaaatcgctcaagttgtggcccaaggaaagctacccaacagtgttgaggcccggaacgatgccaatgaccaattggacactctgaaattggctttatcccattgcgaggctgagctgaaatccacccaaggtgtcgatcttcacaagacttgtgttaaagccgtcttcgctggcttttatactgccttggatcgcttggccgcggaacactggcccatttatggagccacctctggtgccgcccgaattggcttcttctgctaattaacgtaatcatcttacaaagtttaaccacatagaggaatatttaggaatctcatagaagtctaatatgttatacagatttggaatatgttcggaataataaaaagttattagggttggatggatttgttttactatgttgtatttcgtgcttgtgtttaaggaattttacttttgtatagagatgtcaaggtgtgtactgcctatgacagccatttattctaaacagaatcacaaaattttttagttcgaaccacttagtgtacaatgagttggctgtcaaccattttcggtattattttgataacacttttgtgtacgatatggatagcagcgcatccgcgatgggagcaaatggccaaagctgtggcctccaagatgaactacgacgaccagcatagaatccacaccgcatctagggcagccaaaaacgtggatgcgcagatccacgatttctacgtcaagctggagaatcagaagaaggttgctgcccgtgaagtattggatagtgcatacactgaaacgaccaaatgcatcgaggtattctacagtggtgagctggagcaaacgtttaaggactgcatcgagcacgtcacccgtctgcacatggaaaggctgaggtcactcctccaaattaccactaagcgacaggcgagcggagcaagcagacttaaaatctggcactgataataccctggagtcttcccaggatcgctggcaggcaacgagtctgttttctttgcacccagtgctttctgatgtactttaattagacagtcaactcgagacccgtcagtgcagcttttcatctcaatctgggtgggtgtgatttcggtgggaggggatggcattctagtgctcattaggcaaatgagtggtgtgggttgtgtaggaggctggaggccgtgggtggtggctgtttcgtaattataatcattagacgcgagacaaaaccctcacaaagcaaatagcgacattagctgcgtggaaatgtgtgtca

SEQ ID NO: 34400 - DNA, 339 bp, DROSOPHILA
atggaggctaccggacaatcggttggccaaaatgtggccgtgcaacagtcaattgattgggccaatgaacagttcaaaatcgctcaagttgtggcccaaggaaagctacccaacagtgttgaggcccggaacgatgccaatgaccaattggacactctgaaattggctttatcccattgcgaggctgagctgaaatccacccaaggtgtcgatcttcacaagacttgtgttaaagccgtcttcgctggcttttatactgccttggatcgcttggccgcggaacactggcccatttatggagccacctctggtgccgcccgaattggcttcttctgctaa

SEQ ID NO: 34401 - protein, 112 aa, DROSOPHILA
MEATGQSVGQNVAVQQSIDWANEQFKIAQVVAQGKLPNSVEARNDANDQLDTLKLALSHCEAELKSTQGVDLHKTCVKAVFAGFYTALDRLAAEHWPIYGATSGAARIGFFC

SEQ ID NO: 34402 - DNA, 2333 bp, DROSOPHILA
ttaatccagcaaatatacgcttatggaccaacataaaacataatggggttgaggctatcgtttcgtattgcactcagatagatggtgagataatggaggctgtaaactctatcaaagcgcaaacagaagataagtttgaatgtctttcgagtttttcaaattgtgcttcagtcggtcattgaaagtttccagaaaatgtcgagtgcagtgctgatagctttctgcgtcttggttgttttggtaattgaaaataatactaaacacaaaaaaaaatctttaaaaataatctattttttcatatatatgcgctcaatagaccggacaatcggttggccaaaatgtggccgtgcaacagtcaattgattgggccaatgaacagttcaaaatcgctcaagttgtggcccaaggaaagctacccaacagtgttgaggcccggaacgatgccaatgaccaattggacactctgaaattggctttatcccattgcgaggctgagctgaaatccacccaaggtgtcgatcttcacaagacttgtgttaaagccgtcttcgctggcttttatactgccttggatcgcttggccgcggaacactggcccatttatggagccacctctggtgccgcccgaattggcttcttctgctaattaacgtaatcatcttacaaagtttaaccacatagaggaatatttaggaatctcatagaagtctaatatgttatacagatttggaatatgttcggaataataaaaagttattagggttggatggatttgttttactatgttgtatttcgtgcttgtgtttaaggaattttacttttgtatagagatgtcaaggtgtgtactgcctatgacagccatttattctaaacagaatcacaaaattttttagttcgaaccacttagtgtacaatgagttggctgtcaaccattttcggtattattttgataacacttttgtgtacgatatggatagcagcgcatccgcgatgggagcaaatggccaaagctgtggcctccaagatgaactacgacgaccagcatagaatccacaccgcatctagggcagccaaaaacgtggatgcgcagatccacgatttctacgtcaagctggagaatcagaagaaggttgctgcccgtgaagtattggatagtgcatacactgaaacgaccaaatgcatcgaggtattctacagtggtgagctggagcaaacgtttaaggactgcatcgagcacgtcacccgtctgcacatggaaaggctgaggtcactcctccaaattaccactaagcgacaggcgagcggagcaagcagacttaaaatctggcactgataataccctggagtcttcccaggatcgctggcaggcaacgagtctgttttctttgcacccagtgctttctgatgtactttaattagacagtcaactcgagacccgtcagtgcagcttttcatctcaatctgggtgggtgtgatttcggtgggaggggatggcattctagtgctcattaggcaaatgagtggtgtgggttgtgtaggaggctggaggccgtgggtggtggctgtttcgtaattataatcattagacgcgagacaaaaccctcacaaagcaaatagcgacattagctgcgtggaaatgtgtgtcaatgaagatgaatctgcccgagacgccagggagttgaactctgcgactggcattgttgattttgcaacgctggagggtccgccttcgtggaagttcaaaattacgagagttttgggtttgggggactaatgagaatgcaatgagtgagtggcaaaatgcatgcatatttccattcacaagttcaatcatttgctgtgatttaattgcgttcgtaggagatgtcgctgaatactttgggtatatggaagtcagcattgaatggtgcagctttttagaacttaatgggtttaaaattatagctatatatatatagctacatatatgtgtacgagaaatttgtataattaatagtttaaacacaaactagccattggtaacaagatttacaactttacaatatttaatactattagaaataagtaagtttcaaaacaatttgcaaactaactttattttgtaaagttttaggaaactactttttgttatactgaggtttattccattttttttttacatttttgtatcactttacgatattgcatcactttttttaaacttttctgtgccctttgcaggcaattgcgttggttttttttcacgatttaagcctttgaatccgcctcagatgtagtttccgtatcggaagcgggtgcatccggtttcggctcatccgtattgccaaacacac

SEQ ID NO: 34403 - DNA, 333 bp, DROSOPHILA
atggccaaagctgtggcctccaagatgaactacgacgaccagcatagaatccacaccgcatctagggcagccaaaaacgtggatgcgcagatccacgatttctacgtcaagctggagaatcagaagaaggttgctgcccgtgaagtattggatagtgcatacactgaaacgaccaaatgcatcgaggtattctacagtggtgagctggagcaaacgtttaaggactgcatcgagcacgtcacccgtctgcacatggaaaggctgaggtcactcctccaaattaccactaagcgacaggcgagcggagcaagcagacttaaaatctggcactga

SEQ ID NO: 34404 - protein, 110 aa, DROSOPHILA
MAKAVASKMNYDDQHRIHTASRAAKNVDAQIHDFYVKLENQKKVAAREVLDSAYTETTKCIEVFYSGELEQTFKDCIEHVTRLHMERLRSLLQITTKRQASGASRLKIWH

SEQ ID NO: 34405 - DNA, 4202 bp, DROSOPHILA
tatataattctgttaaatgttttcttggcatttaacaaatttattatcaacacaagttgcatggctttcaattcaatggttttcttcatacgtaaatatatatgtatcttgtgtatatcattcctaaacgtacgagtatatatatgtatatacattcgtatgtatatcgtgcatagctgtatgccaacatgagactattttgaatcattttatcggtttgccgtcgaatgtttattattatctcgttaaatatataaatatttgatctagagttgcggttggtaaacgcgttagtaggttcgtaagtgttgctatgcttcgattgacttgactggattttgcttacgtttaaagttattattatcaacatttttgtggaaatcgtttaactagtattatgcttgttggttggtattgtttaggaggattctgttacatttacttgccgctagtactttttatctgttatcatcgtttaaatattcattatattgtttacgttgctgctcagtataatttataataaatacataataataaatatacatgtagataatacgcttaataaatatatttatacatatatttgatttcatttaatatatatatatatagttgttatgtatataattaacaaacaaaaaaaacaacacacataaaaaggagcaaaaagtaggatacaaatttcgcttgtttcatcctcgaaaaattgaattgaattattctttacattgaacaacgaacatcaagaacggtattccgtatgccttttagaatagagtgtggggagtattgtttttgcacaaatatacgtaggtagagtaggtatatgtaggtattttcgggtatataataaatatgtatatgcatgtgggcgggcgtatggtgtggatacgtagctttagcctataaagggacatttgcatagagagcgcattggcgtaggttggtttaaattacaacgatgagaccggataaaaagacctccgaaaactggaggctagaagaactcaggtggaaagacaaaagagacgcgcctccatgggcgtgattaagattacacgggtaatttagttaattagctagagtgtttttctgtttgcttctgccgccggaccaactgttctaatacgtgatcgatctattgtgtgaagtagtactaaatgttcgcaacttgcaacgaacaacaaagctgacgtttgagaatcaaaggtaaaaacgcaaggaagtggcattgcgcgcgtaacgtcttgtaaatttagttagttaatacgtacattaatttaactcgtagttaatttgttaattattgtgttgccaactggtataattttgcacataaaatttagttagcttgctctatggccaccatgaatttagcctgctgtgtgctgctagctaagccgtatcgtaatatccgtaatcgtagtaacccgctcatctaattcaactatatatatatatttgcatttatgtgctgctgctgctgcttctgctgctcctgcttctgcatcggcttgggctgcccaatttcgcgcctctggtggcgaaaccaacaattaaggttattgttctccaatcagcgatctacgtacgtcttcagccagtttgataggatgggattggtttagggatcgggattaatacgaggaacaggatgaggaatagcctagttgccattgggcaggggcacctgcacctgaacatacgactgcgggaagtaaccggtgcggccattcaccgcgccctcgaaccaattgtcgtcgacgcgattcaacagggtgataatgtcgttctccttgaaggccagttcgccgggattctccggctcgaagtcgtagagggcctggcagcagggctgctgctggcgctgcggcgttacggccatcgacttggcgggcgaacgcatcggcgagggcaacggcgaggcgctcgaactaatgtgagacggcgtgccatcttcgttgaggccgccgccaccgccgtccaagttcagatcgagcagcgtcttgggcacgaactcgttgcgtggccggctctccgcctcggagcgcttctcctgcagtgtctcctgcaggcctcgaaggacatccgcgcattgcgaatgaaaatcgtatagtgcctcggcaaaggtgaccagctgggagacatgctccgtatcgttctcgagcaaattgaacatgcccacctgggccagctggagcgattcaccgaacttgtcctcggcaccacgaatctcatcgtccttggcctgtcggcgacgcttgcagtcaaagtctagccgccggccctgcagcttcttgcgatgatgcattacctccttgaggtctttggtctgcatatgatgcagtggctccaaaaagttctgcttgatgttgtcgtccagcgaatacttgacgtcggccatctgtttcagcgcttcgccgaattcgacgagcgcctgcgcgaacacgctgttgtcctcgccgagcttcttcccataagtcagcatgcattccgcgagcaggccctccggttgcggatacgtattggacttggcctgtccggacagcttcgagatgcccttgaccgctgccattttggcccgtgccgttggattcggctgcaggaactccttcgtctttagctgcagctcctccactagctccacggtgacgtccgtcttgcgttccatctccatgaagtccatgtccagtttggtgccctcggcaccgcccatcttctccgtcatatactggttggccttgttgatctgctttttgagtccggcgaaagccatggctgctgctgtctcttctggttttcttcctctgattaaattggtcttggggcgctcgacgcagttgctgtgaacgggttggttgggttagtcgagactcgatttcaaattcaatgtcaatatcatcaagtcaacaatttcatcaatggactggatggctgcctcactgactgcccgactgcctggctggctggctggctggctgagtgtgtctatttttaaaacgtttacgtttggaagacttacgcgtactgcacttttctccgttccttctccgctgggggtgctactttccggggctcttctgctcgctcagtggaggctgcgagtcgggaaactcgaattggcttggtgaactgtagcccgagttcgagttctacttttgctgaccactactgcgggcactttcactcgcttcgcttgctctgcacgttctgccccgtttttttttttgttgctctgctcgtaatcttcgattttttccagaaccttgggctgcgtaatgtttgaaggaccgtgagtcgttactactactactggtcgcgcacagggggcgggggctgtggggtcgcgttttcctctcggctcgcaaaaatcaatatcttgactgtgtacaacaattttcaacggcactaagccactggagctgcgggactatcgataattctgttaaaaaacattcagtgtgaccggtggttcgtaaaataccaaaatcattcgcatacaacaacggacatacacgggatacgctcatctctaggcatatgttaaagatgtgaggtacaacttaacattttcatttaatttctttgcaggggggtattagatagttatatatatatatcaaaacaatattaaaaattaaagtaatatatatattttatattaagaagccagaagcacataaacagttaacataatatcttacatttaatatctaatacttataatgttaatgcattataaatttgaatttgaaatctatgttgattggcagaattattagactagaataaatatggtcggtcccactgtcggtctctgtatttgctctgtccttgtacatgctgttaatcgaatagctgttagattagaataacagtttggcgcgtaaaattctaacattacaatacataaatatattatattgatagaaaacgtactcagcaaaaataaagctgtataactgctgatgaatgttacgctaagataaaaatggaatgactcagaatggataagaaaatatcatgtttatcctgtttaccaaaataactgtgcgcaaaataaccagtagcacagcagtcaattttatctttctagaaggtggcaaatatatcccaggcaaaaattaaaccccatttgcatcgtaaaaaccagtgacgttcacagcatgaagtagcaattttaccaccttttttttttt

SEQ ID NO: 34406 - DNA, 1351 bp, DROSOPHILA
caagcgaagcgagtgaaagtgcccgcagtagtggtcagcaaaagtagaactcgaactcgggctacagttcaccaagccaattcgagtttcccgactcgcagcctccactgagcgagcagaagagccccggaaagtagcacccccagcggagaaggaacggagaaaagtgcagtacgccaactgcgtcgagcgccccaagaccaatttaatcagaggaagaaaaccagaagagacagcagcagccatggctttcgccggactcaaaaagcagatcaacaaggccaaccagtatatgacggagaagatgggcggtgccgagggcaccaaactggacatggacttcatggagatggaacgcaagacggacgtcaccgtggagctagtggaggagctgcagctaaagacgaaggagttcctgcagccgaatccaacggcacgggccaaaatggcagcggtcaagggcatctcgaagctgtccggacaggccaagtccaatacgtatccgcaaccggagggcctgctcgcggaatgcatgctgacttatgggaagaagctcggcgaggacaacagcgtgttcgcgcaggcgctcgtcgaattcggcgaagcgctgaaacagatggccgacgtcaagtattcgctggacgacaacatcaagcagaactttttggagccactgcatcatatgcagaccaaagacctcaaggaggtaatgcatcatcgcaagaagctgcagggccggcggctagactttgactgcaagcgtcgccgacaggccaaggacgatgagattcgtggtgccgaggacaagttcggtgaatcgctccagctggcccaggtgggcatgttcaatttgctcgagaacgatacggagcatgtctcccagctggtcacctttgccgaggcactatacgattttcattcgcaatgcgcggatgtccttcgaggcctgcaggagacactgcaggagaagcgctccgaggcggagagccggccacgcaacgagttcgtgcccaagacgctgctcgatctgaacttggacggcggtggcggcggcctcaacgaagatggcacgccgtctcacattagttcgagcgcctcgccgttgccctcgccgatgcgttcgcccgccaagtcgatggccgtaacgccgcagcgccagcagcagccctgctgccaggccctctacgacttcgagccggagaatcccggcgaactggccttcaaggagaacgacattatcaccctgttgaatcgcgtcgacgacaattggttcgagggcgcggtgaatggccgcaccggttacttcccgcagtcgcgcgtctcttttgtctttccacctgagttcttctag

SEQ ID NO: 34407 - protein, 368 aa, DROSOPHILA; identical to SEQ ID NO: 26298

SEQ ID NO: 34408 - DNA, 3410 bp, DROSOPHILA
tgcacatggaaaggctgaggtcactcctccaaattaccactaagcgacaggcgagcggagcaagcagacttaaaatctggcactgataataccctggagtcttcccaggatcgctggcaggcaacgagtctgttttctttgcacccagtgctttctgatgtactttaattagacagtcaactcgagacccgtcagtgcagcttttcatctcaatctgggtgggtgtgatttcggtgggaggggatggcattctagtgctcattaggcaaatgagtggtgtgggttgtgtaggaggctggaggccgtgggtggtggctgtttcgtaattataatcattagacgcgagacaaaaccctcacaaagcaaatagcgacattagctgcgtggaaatgtgtgtcaatgaagatgaatctgcccgagacgccagggagttgaactctgcgactggcattgttgattttgcaacgctggagggtccgccttcgtggaagttcaaaattacgagagttttgggtttgggggactaatgagaatgcaatgagtgagtggcaaaatgcatgcatatttccattcacaagttcaatcatttgctgtgatttaattgcgttcgtaggagatgtcgctgaatactttgggtatatggaagtcagcattgaatggtgcagctttttagaacttaatgggtttaaaattatagctatatatatatagctacatatatgtgtacgagaaatttgtataattaatagtttaaacacaaactagccattggtaacaagatttacaactttacaatatttaatactattagaaataagtaagtttcaaaacaatttgcaaactaactttattttgtaaagttttaggaaactactttttgttatactgaggtttattccattttttttttacatttttgtatcactttacgatattgcatcactttttttaaacttttctgtgccctttgcaggcaattgcgttggttttttttcacgatttaagcctttgaatccgcctcagatgtagtttccgtatcggaagcgggtgcatccggtttcggctcatccgtattgccaaacacacacatagggcactaaagggcgagaaaggattagtgaataacattagaatggctaaaaaggtataccttttccttgagaactatgcggtacttgggatggctaaggaagttaagaaacatataaattagatatagatatcaaacggaaattgttttttttttaaacctatttattcactcacctaatgccgtacacaatcggattgtagactgcgctcgttttggcgaaagtcgctccccaaatggtcgtcagtggggtcaatccgtcgattttgaagagtccgaagtagcaaatgacaaggtatggtgtccatgccataaaccatagggagatggtagttagagccaccttggccagttttccctcggcacttttgtcgcaatcctcagagctccgcagggatttcacattcatcttcttggcctgttcccgcatcgctttttcatgtgctgccacggcggcaatgatgaaccagtaggagtagcagatgagaaacagtggagtgtagtaaacgaagagggagtaggtgattaaataagatcgcgggttccacatacgcgtcatatagtcaatgctgcaggcagtcagattgccctcgggcacataggcgctccatccaatcaatggcatgacagtccaaaagacagccatcatccagatgaaaagtatcttcattatagacgtcttgatggtcatgggtgtgccattgatacccttcactatcacattgtaccgatcgaaggcaatcatgcacatggaccagatggacacacagccaaagagcgagccacatcccgcgtagatgtcgcaccacagcggacccagcacccaagtctcgtagtagaagttaataatcatcaccggcgactgggaggccatcatacagaagtcggagaaggccaggttgagaacgagcaaatttgccggcgtgcgcagcgactttgttccaccgaaaatgtagaccaccactccgttgccgcagcacgagatgatcataatggccagggtgaacaatcccagaattttgctcatcatgggatccatgggcgcaaagcggctccagtaggggttcaccaggtgcgccatgtcgggcagcacctgcgggattgcaagaaggcaataagttgaagtgccaccacaaaggattacaattaaaactagaactaacataaatcatttcccccaatcactcacattgtccagcacggaaccattgccactcgactgggcctgaaacctgggcccagaatgggccaggtcgaatggcgtctccggcaaatgactgcgctccatgctcagctacccgcaacccctttgactagacgatggctcatcgaagtggatctgtgccaagaggccgaattcccagccctttatagatgtttgctaacccaattagccgctcatcaaaagaggcgcagaagacttatagacggcggacagctgccagataaaagtcaattttatttaatttcatacgctacataatctaagcgcaaggttaatttgccgcctttgaatattagttcttgacactaaagggcagccagaaatttctgtccacatttctggcacagttttcgctgcactccttggctgcaggatggcatcgaggtcttcgagttggatgggtcggtcgacgaggacatcagtccaccggaggatcttatctccgtgtttagcagatatatgccactgttgttatggcttgtttccgtcaagtgattcgccttggccgagtcctgcggcgcattatccttgccagagtagtagagctcatcatcatcagtgctgggtagctcgtacttgacaatgtccactttttggctaaggatgagctgcttgcagcactctttgatttggtaataggcggatcgaaagttctttagcttgtgggtctggatggattgcaattgttcgacatatacaagtgggttgcttaatgctcaaattaactcactggggataggctgtctataaaggccggcagtccattcttgccaaacgaactcagaagaagtacctgacagtgtttgccagccctgttgtccgcagcccagaggagcagttctttgaacacggcctcatccattgccacaacataatcaaagtacagaaaatcattcacggtgaactatagaagtaagaatctatacatatgtggagttcataagttggcgctaggataagttcacctgacgacaaaagtgatcggatcgcagtccgtgctctcgcagaatttgcaggcatcgcttgttcggtcgccgtccagtgttccatgtcctcagaccggcactatccacctcccagtagagactcgtcttg

SEQ ID NO: 34409 - DNA, 1178 bp, DROSOPHILA
cgtctagtcaaaggggttgcgggtagctgagcatggagcgcagtcatttgccggagacgccattcgacctggcccattctgggcccaggtttcaggcccagtcgagtggcaatggttccgtgctggacaatgtgctgcccgacatggcgcacctggtgaacccctactggagccgctttgcgcccatggatcccatgatgagcaaaattctgggattgttcaccctggccattatgatcatctcgtgctgcggcaacggagtggtggtctacattttcggtggaacaaagtcgctgcgcacgccggcaaatttgctcgttctcaacctggccttctccgacttctgtatgatggcctcccagtcgccggtgatgattattaacttctactacgagacttgggtgctgggtccgctgtggtgcgacatctacgcgggatgtggctcgctctttggctgtgtgtccatctggtccatgtgcatgattgccttcgatcggtacaatgtgatagtgaagggtatcaatggcacacccatgaccatcaagacgtctataatgaagatacttttcatctggatgatggctgtcttttggactgtcatgccattgattggatggagcgcctatgtgcccgagggcaatctgactgcctgcagcattgactatatgacgcgtatgtggaacccgcgatcttatttaatcacctactccctcttcgtttactacactccactgtttctcatctgctactcctactggttcatcattgccgccgtggcagcacatgaaaaagcgatgcgggaacaggccaagaagatgaatgtgaaatccctgcggagctctgaggattgcgacaaaagtgccgagggaaaactggccaaggtggctctaactaccatctccctatggtttatggcatggacaccataccttgtcatttgctacttcggactcttcaaaatcgacggattgaccccactgacgaccatttggggagcgactttcgccaaaacgagcgcagtctacaatccgattgtgtacggcattagccatcccaagtaccgcatagttctcaaggaaaagtgccctatgtgtgtgtttggcaatacggatgagccgaaaccggatgcacccgcttccgatacggaaactacatctgaggcggattcaaaggcttaa

SEQ ID NO: 34410 - protein, 381 aa, DROSOPHILA
MERSHLPETPFDLAHSGPRFQAQSSGNGSVLDNVLPDMAHLVNPYWSRFAPMDPMMSKILGLFTLAIMIISCCGNGVVVYIFGGTKSLRTPANLLVLNLAFSDFCMMASQSPVMIINFYYETWVLGPLWCDIYAGCGSLFGCVSIWSMCMIAFDRYNVIVKGINGTPMTIKTSIMKILFIWMMAVFWTVMPLIGWSAYVPEGNLTACSIDYMTRMWNPRSYLITYSLFVYYTPLFLICYSYWFIIAAVAAHEKAMREQAKKMNVKSLRSSEDCDKSAEGKLAKVALTTISLWFMAWTPYLVICYFGLFKIDGLTPLTTIWGATFAKTSAVYNPIVYGISHPKYRIVLKEKCPMCVFGNTDEPKPDAPASDTETTSEADSKA

SEQ ID NO: 34411 - DNA, 3118 bp, DROSOPHILA
taagatcgcgggttccacatacgcgtcatatagtcaatgctgcaggcagtcagattgccctcgggcacataggcgctccatccaatcaatggcatgacagtccaaaagacagccatcatccagatgaaaagtatcttcattatagacgtcttgatggtcatgggtgtgccattgatacccttcactatcacattgtaccgatcgaaggcaatcatgcacatggaccagatggacacacagccaaagagcgagccacatcccgcgtagatgtcgcaccacagcggacccagcacccaagtctcgtagtagaagttaataatcatcaccggcgactgggaggccatcatacagaagtcggagaaggccaggttgagaacgagcaaatttgccggcgtgcgcagcgactttgttccaccgaaaatgtagaccaccactccgttgccgcagcacgagatgatcataatggccagggtgaacaatcccagaattttgctcatcatgggatccatgggcgcaaagcggctccagtaggggttcaccaggtgcgccatgtcgggcagcacctgcgggattgcaagaaggcaataagttgaagtgccaccacaaaggattacaattaaaactagaactaacataaatcatttcccccaatcactcacattgtccagcacggaaccattgccactcgactgggcctgaaacctgggcccagaatgggccaggtcgaatggcgtctccggcaaatgactgcgctccatgctcagctacccgcaacccctttgactagacgatggctcatcgaagtggatctgtgccaagaggccgaattcccagccctttatagatgtttgctaacccaattagccgctcatcaaaagaggcgcagaagacttatagacggcggacagctgccagataaaagtcaattttatttaatttcatacgctacataatctaagcgcaaggttaatttgccgcctttgaatattagttcttgacactaaagggcagccagaaatttctgtccacatttctggcacagttttcgctgcactccttggctgcaggatggcatcgaggtcttcgagttggatgggtcggtcgacgaggacatcagtccaccggaggatcttatctccgtgtttagcagatatatgccactgttgttatggcttgtttccgtcaagtgattcgccttggccgagtcctgcggcgcattatccttgccagagtagtagagctcatcatcatcagtgctgggtagctcgtacttgacaatgtccactttttggctaaggatgagctgcttgcagcactctttgatttggtaataggcggatcgaaagttctttagcttgtgggtctggatggattgcaattgttcgacatatacaagtgggttgcttaatgctcaaattaactcactggggataggctgtctataaaggccggcagtccattcttgccaaacgaactcagaagaagtacctgacagtgtttgccagccctgttgtccgcagcccagaggagcagttctttgaacacggcctcatccattgccacaacataatcaaagtacagaaaatcattcacggtgaactatagaagtaagaatctatacatatgtggagttcataagttggcgctaggataagttcacctgacgacaaaagtgatcggatcgcagtccgtgctctcgcagaatttgcaggcatcgcttgttcggtcgccgtccagtgttccatgtcctcagaccggcactatccacctcccagtagagactcgtcttgaccatcagattctgcataatcacctcggccatcggagagctgcacgagttgccttcgaaatgacgtaagtttttcatgcaaaatggcaaagaaattgaaaagaaaatctcatttcttacccatgcacacaaatagtattttcttgaaagtcatttttatttttctctttatacgttttacttggctaaattctcccactttcaactataatttaaactaattttcctaacttctttttcgagacttatgttgtatttgactgagtttttaaattgcctgaaatacatgtcgaacggaacaaatgacacggcttactgggtggacttcctttgcccattcaatctactgaatggcctgctccgtttagcccaatgaactcgacgccatggttggagtaaatgaccatttgctaagataatcattcccactaatgcactttttacaccacttgcagttctctcaacccattgaggtcctttgtcaggacaatgcttgttctgtgctcgtgtgccacgcccacaaacccattattctgccagaaaggggcgggtggcaagatagtgtcacgtggctgtcaggtgttggcccacgtacagtcttgtcgcgagatgcattcgaaattagtcaacaggttcagcgaacttccagcaaaggtaaggaaaattggacgagaagagggccaactccagtcatgtatgttaaatgggcagaagacatgcactaaacttaaagcagtttggcttttaagatgcatgattatagtaatacaacactaaagtcatagtccaatacaaatttattaaatatgaaatttaatcttttcgctacttccgagattaaagacaatttgtttttccgtgtagtaatgattgacccaatccctgcttatactgatgtcatttcacgatgacacttcagcgcacaatacagttggaattcattttaattcagtctcaattaaacgacttctgtgtgaactctcggatcaattttgaacatttcagatggcgaaacactatgccagcatttttttttttactctttatttttatttcgatttaccttgccccttgttgagacgagtggagcgatggggtggttggcttgtaacttggccattggcaatatccaattggaattgcattgaacgactaaattgaaaatgcagctgaaaaagcatatttcacttatcacttttcacacaaaacacacaagcaaaggccaaaacaaagggcactctggccaaaaggggtggccggccagttggtgccaggaaaagcgggccaaatgaaattgtaagcgcaaaagtaaagcacaacagcaacatg

SEQ ID NO: 34412 - DNA, 928 bp, DROSOPHILA
ggaagtccacccagtaagccgtgtcatttgttccgttcgacatgtatttcaggcaatttaaaaactcagtcaaatacaacataagtctcgaaaaagaagttaggaaaattagtttaaattatagttgaaagtgggagaatttagccaagtaaaacgtataaagagaaaaataaaaatgactttcaagaaaatactatttgtgtgcatgggcaactcgtgcagctctccgatggccgaggtgattatgcagaatctgatggtcaagacgagtctctactgggaggtggatagtgccggtctgaggacatggaacactggacggcgaccgaacaagcgatgcctgcaaattctgcgagagcacggactgcgatccgatcacttttgtcgtcagttcaccgtgaatgattttctgtactttgattatgttgtggcaatggatgaggccgtgttcaaagaactgctcctctgggctgcggacaacagggctggcaaacactgtcaggtacttcttctgagttcgtttggcaagaatggactgccggcctttatagacagcctatccccaacccacaagctaaagaactttcgatccgcctattaccaaatcaaagagtgctgcaagcagctcatccttagccaaaaagtggacattgtcaagtacgagctacccagcactgatgatgatgagctctactactctggcaaggataatgcgccgcaggactcggccaaggcgaatcacttgacggaaacaagccataacaacagtggcatatatctgctaaacacggagataagatcctccggtggactgatgtcctcgtcgaccgacccatccaactcgaagacctcgatgccatcctgcagccaaggagtgcagcgaaaactgtgccagaaatgtggacagaaatttctggctgccctttag

SEQ ID NO: 34413 - protein, 250 aa, DROSOPHILA
MTFKKILFVCMGNSCSSPMAEVIMQNLMVKTSLYWEVDSAGLRTWNTGRRPNKRCLQILREHGLRSDHFCRQFTVNDFLYFDYVVAMDEAVFKELLLWAADNRAGKHCQVLLLSSFGKNGLPAFIDSLSPTHKLKNFRSAYYQIKECCKQLILSQKVDIVKYELPSTDDDELYYSGKDNAPQDSAKANHLTETSHNNSGIYLLNTEIRSSGGLMSSSTDPSNSKTSMPSCSQGVQRKLCQKCGQKFLAAL

SEQ ID NO: 34414 - DNA, 3138 bp, DROSOPHILA
ttatgcatttgattggcatttgtttgtgcacagcaatcaagccattttcgcccagcctgctggcctggccaaaacaaaggcctgtcaaatcggacatatgccggcagtgcaattaatgctgttccagatagcccgacctggtcaacaggtaacgcaggcgagatgcgagtgtggatctttttaattagccgtaagtcgatagcagcaaaaaagggataaagatgacggctctttgatgtgcaaaacatcggacacctggtgggatgcggcatgtggtgtggcaacccactttccttgacaaagtccagccgcatcagtgggtggagtacgtcagcagcgatgagtatgaggcaccaggagcccgcggaatgggtggcagtccacgtcttggcgacaatgtcaatccgatgtcagggggccatttgatatgccactgacaggtagcacatttggcgcattttttccgcaggccctctttattctattttatttcattttatttcagttttgtttagcttcttttcgtctttttatacagccctgacagtgaacaaagtgccgatccaacgctgacagcttacaacatttgtgtgtctatttttgggcggcatttagtcaaaatccgtgtgatcaaaggtaaaaacacttaaacacttgagtgtttggtgcctgcacttagagtttaaacgaaaagtgtaaaaaaaaactcgaaaatattatggaaattacattttttttttaaatttttatttagatttgtagtaaaagcatttaactcttaaaataaaagttgagggagatgtgaaaaaaatcatattttaatgtatgaattgtaagtaattgtgcaaagtgcttgagttttaaagtatctagtaaataacgttttttttttctttaagttcgaaaagatctctaattgctaaacatacgcgtacaaacttatcgcctaggtaagatgtatctatatatctatatagtacgatgtatccaccgatgtcaatcaatcgccgcagcgtgcatcgcagctttcctgcgagcagaagcgattgcgattgccgttgcatcctttatagttgaagggcttgcagacgcccttgtcgaagtaccagcgtgtaacgaccttggtctgatccttcctgctgcaaaagttaccctcgttgcggcccacatagcagttgaaattgtctgaaaaaaaggcggattcattggttaatcaccgcctggaaatgctccattcgcttccacgattcggtcggcagactcgactggcctcattaagtgcaattacgtttgtttatttatacggcgctcgaggcggacgacaatatacaatatttcataattccctggccacgttgtagtcataagcggaaaaatagaacaatttcgcagacaaaattgactttggccggcaagaaggtaaaaaaaaaaaaacacagcatgtggacaaaacttggcaagtaccaaattgtttcattcttagagcgtgtgctctaattgccatttgcctacaatattcaataaactgtgtaatttaattattattacgcggcaaaaatgatagccaatgaaattgtttgagacgattttaattgacttctttcgagaggaatcttttaaacgagctgctgttaatgcaatcaatgtttttataagagcaatattaataatttaaagtaaagaactgcaaatgacacttcttcggtaatatgtgtgttttatattgaatagaaactctgagacaaatgtaacatacaatattattcagctaagaacacagctttgaactagttattgcagtttctgttcatggaaatcacgcacttaaaaagtgtaaaagtattaatatgtttggataaagaactttgcttgtaaagattttttattttatatgttctgtcgatgagataatctttaaatctccacgcaaacatggtagatcatcaagttctttagaaaatattcagcggcattccgagacacttactcagctctttgcacgacaccactgccccattgccagaagagctgcctccgcttccaaaggcctcgatatgcgcggtctgtgtcaggaggatgatggacaggagaccgacgagtgtcgcacggaggaacgtcagattgattttcaatttcatgtttttagcgcggccaccgacaacggaatgaggatgggaatcgaagcaccaatggtagcagctgttcgtggtactcgcaccagatgcaaacgcggaatgccggatcggagagtcggaatatttgaaaatatccgaaactgagaaactgccgccgacagaggctgttccaatttttcggtttttggtatttttaagtaatctgcgctactttcgttggcaaaaacgtgccgccgactaacgaatccaaacgaaccgatgcgaactcactgaatgtggcgcattttcggtctacagtttatatacgaaatgccggaaattgttgctaactcgaacgcaaagtattcgttctcatttggctgatagtttctttcgagtattgccagcttgacaatcttctagtacgcgtatccgtccatccaacttagcactcatacatttatcccttcatccatcccagccatcatgccatcagttacgccaatcggccaacggaccgtgtccatcaattttgagaagtgtgagaagatatttttggtcaacaaaatgctcgatgctccccaaatggccgacgaaggggcgatattgcacttagttttatctttggggcgtttactttgcgctcgtttgcataatttccaacttattgaatattttccacataattaattttaattatttgtgtttctttcaggcatttgaattaatttagataagagaggaccgcgaggtggagctgttttatttttttttatttttgggaggctaaaaggcgaaaagggtcgcgcattgcagtcacaagggatggctcttccattgtctctaattacaatggagggcatttgttttgggctccccttttttattctttggtttatttcacttttggtttcttggcaagtggctttggcatgggctctcgcctttttccacttttccctctcggcttttatttgctctcggcttctattgctgcgggtcgggcgcaaaaatcaatcttcat

SEQ ID NO: 34415 - DNA, 336 bp, DROSOPHILA
atgaaattgaaaatcaatctgacgttcctccgtgcgacactcgtcggtctcctgtccatcatcctcctgacacagaccgcgcatatcgaggcctttggaagcggaggcagctcttctggcaatggggcagtggtgtcgtgcaaagagctgaacaatttcaactgctatgtgggccgcaacgagggtaacttttgcagcaggaaggatcagaccaaggtcgttacacgctggtacttcgacaagggcgtctgcaagcccttcaactataaaggatgcaacggcaatcgcaatcgcttctgctcgcaggaaagctgcgatgcacgctgcggcgattga

SEQ ID NO: 34416 - protein, 111 aa, DROSOPHILA
MKLKINLTFLRATLVGLLSIILLTQTAHIEAFGSGGSSSGNGAVVSCKELNNFNCYVGRNEGNFCSRKDQTKVVTRWYFDKGVCKPFNYKGCNGNRNRFCSQESCDARCGD

SEQ ID NO: 34417 - DNA, 10199 bp, DROSOPHILA
ggccgaaagccgtactacgtgaagcacgaggaggagtccggactgaatgggcggagcagcagtgactcctcggccacgacaaccacatgcaaggcggagaaggtgaatcacggctacgagtcctcgccggaggacaaggagaagagcagtcccatcgccgtggtattcaccacctccgagggaacgggatcagcaggggatcagcagtcgatatgcgacagcagtaggatccaattggacattgtgccgggcgagggcgaaacgggagtgtatcgccaactggccgggcgatctgcgctctgagggttaactatgttgcatacgtagatagtctgaccctaaaacttagtccgtagtacgtaagctaagccgtagaatagagcaagttagttagccaagtgtttcatgtctataaagatgctgtgattttctgtgcgcgactgttgttgagcaattgctcgcgcatttcattcgcatgtacttaacgcatatgtgtgtgcgtgtcagcatgcaataaataaagacaaataaacgtattttttataaaaaacaaacacaaagaattacatttctaacgtcaatttttacttttcgcgcgctgaaactttctaaacttggccagtgctgcccatcaaattggtctatcgataactgcgatgaccagggcaacgagagtgcagcgtgagtcacgactgttacgtgacgtaagttaagcggggaatgaagtggatttgtaattagatatccaaagtataagcatgaatataaaaatataaaataagctgtttaggtattttaccaagcattgtatttgacataaacatgaattttaaagcagctttatttactcgtgagccatcgtgactgctcccagctgttctccggtttctcccatcactattatatttatgggtctttttgtttggcgtttttgcggccccccaaagaatgcgaaaataaaacgcaaaaagtctgatccctaagcaatcaaacgtacaacatggccacgttggagaagcccaaaaaggaggtgagtcgtgggcagtaaaaagtaacgaacctaataatgaaattgcagaagagcaaaaagtctcgcaacagagtgccgatcgaaaaagaggaagaggaacctgctgagttatcaacaagtgaagaacaaagaccagcggagaatgtgtctctgttggaggaattcgagcgcgttgcgaccttggccagcagttccagtggcgaggcaatcataagccacgagtgctgcatttccagcgatgtaggagtaacgtcgcaagagccagaaggaacacaggaacccacagaaacggaggcccaacccagtgctccaagtgccccgccctcgacgaccgttcacgtcgttcagtatcccaacctgcagcccatgcagctgtccaacgcccaagtggaggagcattccgctaagatcgtgtaccgacaggcggagtcgcccaccggtttcgcgctagccaggagtcacattaagctattgagcacggaggaactgcggcaaatttacgattgtcccgagctggagctggccaagcaatttgagttggagtttctaatgaactcattgctggagaccagcgaggcggatcccctgtatgcggctgttatggaatactatgaactgcagggaaagatcacctccaatctgcacgatgtagagaagctgcgcaagggctgcgccgagtcccaaaaacaaatctgggtccgacagccagttacacgcactttcagtggaacctgcggcgatggcaatgtggtccaggaatgcgtcacctacgagtgagtcaagtcttacctccatcatggaattgcttaccgaaatgtcttttccagtgtgatacaggtggatcccattaaactagaagtggccaagacgtctttaactggcctatatgacctggtgtgccacgcgtatacgaataactcgattacagccaagataaccaaagtaaaggttgaccaaatcatcaatgatctgctgacctatcccaatttggatggccattcggtggtttcattacatcacacacaatctggagaggcactgcagtgcgtttcccaactaaggcgagctatatccatacttttcagcttcgttcgcagacccagtccaaatgcagtaaatcaatactttaaagttaagagtgagagaacatatctaatatctttttaccctctcagaatttcgacaaagacctcaaggaatggctgcgcaagctgattgctctgcaattgttgctggcaacgagagaggatcactggttccttctatttaacatcctgcgctgtcccaatggagtcggctcctgggctgcccaattcctgcaactgccgggaacgcgagcagtgcgccgtggttcccaacagaacgaactgccacttgacctaaactcgcccgaacttaaccactgcatggctgtgctgcagattttgctgatgcccgtgaaaaaacgaaacgaatatctcaagagtcaggctcaagctcaccgcgaactttccgatacgccgggagccactgatcgctggatagtggtggattccgatggcgaggactcgcacacacccgccggcgaatgcgtaggtctgaaggaaagtgacctggtcgccctgctcaaccagatgcctttcgagaagatctttacgtgagttcgattgtctgcatgtgtaatttgattaggttctaaaaaatctaatccttagctcggccctgcgcattgaaaaatttctagacgactacattatcgaaccggatatgatcacggcccagcaaatgctcgccgtggtagtgtttttttcccaactggtcaagacaatcggtgaaggattgctgacctacaataacgagcgatataagcagctggccaaacgacttggtcgtctggtccgacatactctgcaatacgtgtttgattacaacgaactgttcatgtgagtagagtagatcacctaatgttaatttattatttcttatctacttaattaccgcgcagtaacaacaacctttataaatcctccgagatgtacgagcgcatccaagtggaattacaagccctacttgtacgtgcttgtggctacatctaccgcacccgaaacctgggcacatggcaatacttttccacgctgcccttcggcaccttggatgcagaggttatctggcacttgttttactatctaaatgtgggtttccccacggatttggccaacgatttagtgagcaatgcggaagcagcctttcaagcggaagatttctggcggaaattcgatctagcgaatgccgatgtggcgcccgaggatatgtactaccttctgcagacattctttgagatggccaatgaacgaaatcgatctaaggatggaagtctcgtcaaggcaatctgcctacacatcttccacattggatatatacataagtctacgagggaaatttgctataaaactgcgcgtgatatgctggccaacttaatggatgaggatctctttggttgtgtgttggtgcagctgaagatgcgatacggagaagtagatcaagcggcttatcttttcaaagctctgcctctagaaaactggcaccccagcatggatacctttgaggtgctctctaactggctccttcattttgactaccaatcgtcggagagtcaattagctcgcttgattatcagccacttaaactggggattagattgcgagggtcggctctttctgccgcacaacatacacgtgagaatggctcacctggtgaatgaagcactgaataaatatgctccggaggttattggtgcctccggcatttctgagagcgtccgtcaagtgtcttccctcattgattccacgcaatcgagccgagagcagtttacgaactggtgctggcgcatggtctccgttttgcggcttcatctgatggatcagggtgtggagtccgttaggcgcactctccaacatccgacggagccactactttttattcccgaactagaacgaatggagatgatattccagggcgtaaatgagaacagacccctcgctttgtatgtgggcatgttggtcagcctccatggccattcgattccgctgatctgccagcacggatttatccttcttcagcaactgctgttggatcatcgtcacgcggccacaattcgctgcttggagttaatagtaccattgtttttggaaacgcccgaaactctggccaattgtgaaaggttcgttgtcgaatcgagtatttgtattgtttattttagaaacattttgaattctagttttcagagacttatcaccactctcttaaacgcggatcgtacctatttgaagctggctaaggacatggtctatgcaaattcaattggccccattctggaattgctagacaacatgttgcaccatcagattatttcatatacaaggtaaacacatattttatcgtctatattttattaattacatagctgtatcattatatttcggcagctatggcctttgttcaccgctcaatcttctcaacatctggctcaactgttttaccacactgccaggatggtcccagaactccaatttattgtatctccttgacagaatgctacgtatttcgtaccagtttcccgactgccgtgctcaggcagttgaatttttctacaattactacaaggtaaatgttctaatcaaggatacatatggaaattctgattaactaatgttcatttggtctacacaacaggattgcacagaatggaagtcagcacctaagggatcagccttaaaagctttcttcggtggacagtctgtgtctcgcattcccctaatctcgccccaaaactgctggttgaatttagtgatactcgagattgagttccgtctagtggacacgcgtatctttcccgagcttttgcgacagatttccgctcaacctgtggaagcggctctcaaaaaaaccatctcattaagcaaaactagtgcctttcccgccagccaattggtgatatttaaatacgctcaactgcttgctagcatggaaagcactcacgctttatttcccatcgtttgccaaaaatttttcgaactctatctgtggcgagtgccgacagagaacgaatcgcttaactttagtcacaatttcggtgtatccgacaagttttatgaatacaatgtgcctttgatgaagagtattaagtcccaattgaagtctgctgagtcgtactattcagcgctagcaaccaaaaacgctaacgatgatgccatggcccacttctatcgaaattgttgtaagcttatgcaaaactgcgcgctttggctggaggatacacaaataaatcgctttaccagtgatgcagagcacctgcctgcccagtataattctgagaagctccgcgagctactaagtggtcatgtcaatcactggacggagttcctatgcctcgcttcgttgcgcaaggagcaacgccatcaggctgatcagtggggccgaaaagtgatgagactttccaaccaaaaggccccgaggacaccagtacaaccgaagcaacgacaaccgcctgctcaacacattaaaagcctgctaaaaagttacgaaaagattgttgagaatccgcttcatattcgtgtggaacctatcaagacgccgccgatcgatggagttattgttgctcagattcagaaaaaaatgaccacgttgaactcaacggccaagtaagaagctaacttttatagtattacaactcaacattactgattaattatattaattttagcaactatcattataagacgtccgagttaaattccctggacctcaactatttggaaagagtgccaacactgtactcaatgattccatatgaagaaaccaggcgaaaagagtgcacatccctgctattcaagcgaaattgtactgctcctgcccaaattaaactcacgccggagcatatacgaatcaatgacgttatatcccgaaaacaagcgcagaatcgggaaaggcatgataaaattattgaggacattttgttggccatgagtgtagagagttttgctcaagccattgaggagttgggcgtctgtatcggtgcccttctggttgccccgttggagtcaagcgtcacgcaaattggcgttcgagtcttctacgatatagtggataacctaaacgaggtgacaatgaaattccaaccaacacatgacctgtattttcaggtgctggaaaagcttggggtaagtaacaaatttctgactgctaagatctcatttaattcatggtattgctcaggtgtttctagaagcagaccaggccgcccagggattggctattcttcgtttggcgctcaaacgacccgatcttttagaactgctcgccggagtctttgtgcccagtcgcactgacgtggatcactttctgtccatgtacgaatttcttattgactcgcatctcaagcactgcgatacacagactctgttcgtacttttctcaaaattcgatcttttgggatggatggaggcctatcagccgaaattgagcgagatcaaccgtctgctgttactggttctgcagggactggaggcatggtctcagcccgatagcagtcttttacaagatctgttccgcaggcatctagtgcatattttcggttatgattttccacaacactacggcgaggtaatgcagctcgttctggatcgcacgtcggatcagaaactgatgccagttgttcttttggaccttctaaatgcattgtttgtccgatccaactgtgcggagttgtctttgcagcaaagcgaagtgcgggtccacgaacttgccttggactttgcccgacgtcagaagctattcaccctgaaggcggcaacggacaccctgctgctcttgtcccgacactttcaaaaggagcgtctccatcacggactccatggactgtatcccaagcacaaggattattgccaggcgttggtcctttggtttacctctttcggtcatacgcttctcgcttccgccatttgcagctatcaggagctattggctgatcaaagtgagttaagcaccatttccgcaatatcattattgttaactatttcgtctttatatttagtcagcgatattgtctttggttccattgtggagacatatagcccctggctaatcccatataccgaagaaacggttagtggcgtagcccactggatccgccagctgactcctggacagagcaaagtgcttctaccgtggagcgagcagcatgttagcagctgcaaactgatgatccgttccttcgttgccaccataatacaagtactgcagtatctgccttcgtcgaacaagattctggagcacgtattcgcctggtacgtgcatcactttgcccaatccagcacaacaggtcacgtgctggcgcccattcacgagggattggctcagttgccctgggaacgtttcctaccaccagcacaacacgtagagttgctttatgatagcctgcagaaatttctgccagaatcacacgccatgctgggacacatattcattcgaattgaatggaacaattggtttgcccagatgccccagccagtgtcgattctctctcgacttttcaccatattcgttaagatcgccttcgaacccaacattcacattcatcccaatacgagcaagatactagaggatgccattcgttatccatggcatttggtggaatgcagtgagctggagcagctgctcaagtggttcgtggccagcgtggagccagccattgccctaaagatcccagccgagagtaactatgcggaccgcgctgttttggagtacgttaaaaaggggtaaatgtaaagtggccttaaatttatctaagctgttcatttttgcagactccttcgcctggcgtgtgccatgttgccggaacgctctgcacaggatgctgtagttctgggtaccgccaagcgaatgctctacacccgctccatggtccgcatgcagcgcgcatgcggggccaagcaccaaaagttgttggccaccaaggagggcgagcgtgcgtttagtaacgcattcctagagctgctggatagcatcgatggggccatcagcagctgcagtgagcatcgtacaatggaggaacagcgtagagaagcactcaatctgatgctggagctggttgcgcccacccagacgcagagccaggaagtgtccaagtataatttccttgataactattaaattttaagcctaatggcccttaatggttttcagcatacacattaaggctctggtttggtggcagcagcgttgttctcccggcaacctggtcatgtgctccacgctgccggccatcggtcacctcaacacatacatcgccagcatttactcgctgttggaggccagcatagagaactactttcgcacctcgccagagatcgcatcctggcatgcgcccagctggcaaggtctaatggaggcactgagtatgtcgctgccgaaactggaccttatgccgataatgcagggtagctacttcttctcactgcacgttttcgtgctctacaagatggaggagatcgcgacggatggggataaggtgacctttttgcaggacctatcccagttactcgagaatttgaaaaccagcccacagacggaaccgcgaatggccctagtttggggcgtgatcatcgcacggggctgtcaaattgcgcaagtcaaccagcaggtgaaaaagccacttcacatgctggcgaggcacctgcagattgcatccactaaggcagaaggctggggcgatggtctgttgggagtgattggtctcaaatcggaggttataaccaacaggttcgtttttccgatttatgaagattgaacaaagaaaatacgcgtggtttacatttcagacgaaaggtgttaactcgttgcttggcttgtgtgatcttttcgctgtttccggccaatcgggaccttcgcataccgtcagaagagtacgaaagtgcgctccgggagctgtctatgctgctggccaacaagaagttcaccgacatcaagcccttgatcgttcgggccgttagcctgctcaaggaatccacatttcccgatatccgggccgtacctcatatggtctgccgactcatcagcatcttctacgaggagagctacctgacaaccattccagaggtctgggactttgaattcaagttaatggccacgtagcttaccgaccaagtgaaatattctaaacatcctaacagccagttgtgttattttccaggtgttatatatcatctaactaggtataggttaaataaagtgataaattttaagcaattttcaaaattgcataaaatgtataaaagtgaacatttatttatacatactttttagcataatacaaacatggggccaaacactgaaactttgttttaaatcttgtagactataactttatttgatatacatgtctcgaaagtgcatacttgaagctatttgtttaagcgtagttacaataacaaaatcgacatcagtacctgtatataaactcttcactgaccatgatcatcgacaatcatgacagtaataatccactaaatgtacacgaaaatataatgatacacttgaatgaactttaaacaaaatataaatacgtagggctacacgaacgataacagatgaacattaagggtctactcttaggtattgctacatgaaaatataaataacgataatacagtgctcggtacgagcacgctgacacggaggcagccgggctccgcttggcaatcattcttctagggcaaaattggacagctgcaggtgctgaagattgttgcgcgcatcgaaatatcccgtatcagtgggattgtctggtgtcgggacaaatgggggctcggtattgcctatattctcccagtcgatgcaagcaaagtgacgcatttgttgcacttcctttgcggccggtcgctcattgggatccatggtcaggagcagttccacagcctccatggattcgacggataatgcctcatcaccttctggccattcgatgtctgtgaggaattggtaacaaaaatataggtataatatttgcaagaaaactcttgaaataacaaaactcactcttattcagaatgttgtcaaatactttctgaggtgtctcgtcgttaaagggtggaatgccggtcatgaactcgtagaaacagacgcccagagccca

SEQ ID NO: 34418 - DNA, 7215 bp, DROSOPHILA
atggccacgttggagaagcccaaaaaggagaagagcaaaaagtctcgcaacagagtgccgatcgaaaaagaggaagaggaacctgctgagttatcaacaagtgaagaacaaagaccagcggagaatgtgtctctgttggaggaattcgagcgcgttgcgaccttggccagcagttccagtggcgaggcaatcataagccacgagtgctgcatttccagcgatgtaggagtaacgtcgcaagagccagaaggaacacaggaacccacagaaacggaggcccaacccagtgctccaagtgccccgccctcgacgaccgttcacgtcgttcagtatcccaacctgcagcccatgcagctgtccaacgcccaagtggaggagcattccgctaagatcgtgtaccgacaggcggagtcgcccaccggtttcgcgctagccaggagtcacattaagctattgagcacggaggaactgcggcaaatttacgattgtcccgagctggagctggccaagcaatttgagttggagtttctaatgaactcattgctggagaccagcgaggcggatcccctgtatgcggctgttatggaatactatgaactgcagggaaagatcacctccaatctgcacgatgtagagaagctgcgcaagggctgcgccgagtcccaaaaacaaatctgggtccgacagccagttacacgcactttcagtggaacctgcggcgatggcaatgtggtccaggaatgcgtcacctacgatgtgatacaggtggatcccattaaactagaagtggccaagacgtctttaactggcctatatgacctggtgtgccacgcgtatacgaataactcgattacagccaagataaccaaagtaaaggttgaccaaatcatcaatgatctgctgacctatcccaatttggatggccattcggtggtttcattacatcacacacaatctggagaggcactgcagtgcgtttcccaactaaggcgagctatatccatacttttcagcttcgttcgcagacccagtccaaatgcaaatttcgacaaagacctcaaggaatggctgcgcaagctgattgctctgcaattgttgctggcaacgagagaggatcactggttccttctatttaacatcctgcgctgtcccaatggagtcggctcctgggctgcccaattcctgcaactgccgggaacgcgagcagtgcgccgtggttcccaacagaacgaactgccacttgacctaaactcgcccgaacttaaccactgcatggctgtgctgcagattttgctgatgcccgtgaaaaaacgaaacgaatatctcaagagtcaggctcaagctcaccgcgaactttccgatacgccgggagccactgatcgctggatagtggtggattccgatggcgaggactcgcacacacccgccggcgaatgcgtaggtctgaaggaaagtgacctggtcgccctgctcaaccagatgcctttcgagaagatctttacctcggccctgcgcattgaaaaatttctagacgactacattatcgaaccggatatgatcacggcccagcaaatgctcgccgtggtagtgtttttttcccaactggtcaagacaatcggtgaaggattgctgacctacaataacgagcgatataagcagctggccaaacgacttggtcgtctggtccgacatactctgcaatacgtgtttgattacaacgaactgttcattaacaacaacctttataaatcctccgagatgtacgagcgcatccaagtggaattacaagccctacttgtacgtgcttgtggctacatctaccgcacccgaaacctgggcacatggcaatacttttccacgctgcccttcggcaccttggatgcagaggttatctggcacttgttttactatctaaatgtgggtttccccacggatttggccaacgatttagtgagcaatgcggaagcagcctttcaagcggaagatttctggcggaaattcgatctagcgaatgccgatgtggcgcccgaggatatgtactaccttctgcagacattctttgagatggccaatgaacgaaatcgatctaaggatggaagtctcgtcaaggcaatctgcctacacatcttccacattggatatatacataagtctacgagggaaatttgctataaaactgcgcgtgatatgctggccaacttaatggatgaggatctctttggttgtgtgttggtgcagctgaagatgcgatacggagaagtagatcaagcggcttatcttttcaaagctctgcctctagaaaactggcaccccagcatggatacctttgaggtgctctctaactggctccttcattttgactaccaatcgtcggagagtcaattagctcgcttgattatcagccacttaaactggggattagattgcgagggtcggctctttctgccgcacaacatacacgtgagaatggctcacctggtgaatgaagcactgaataaatatgctccggaggttattggtgcctccggcatttctgagagcgtccgtcaagtgtcttccctcattgattccacgcaatcgagccgagagcagtttacgaactggtgctggcgcatggtctccgttttgcggcttcatctgatggatcagggtgtggagtccgttaggcgcactctccaacatccgacggagccactactttttattcccgaactagaacgaatggagatgatattccagggcgtaaatgagaacagacccctcgctttgtatgtgggcatgttggtcagcctccatggccattcgattccgctgatctgccagcacggatttatccttcttcagcaactgctgttggatcatcgtcacgcggccacaattcgctgcttggagttaatagtaccattgtttttggaaacgcccgaaactctggccaattgtgaaagttttcagagacttatcaccactctcttaaacgcggatcgtacctatttgaagctggctaaggacatggtctatgcaaattcaattggccccattctggaattgctagacaacatgttgcaccatcagattatttcatatacaagaatgctacgtatttcgtaccagtttcccgactgccgtgctcaggcagttgaatttttctacaattactacaagtctgtgtctcgcattcccctaatctcgccccaaaactgctggttgaatttagtgatactcgagattgagttccgtctagtggacacgcgtatctttcccgagcttttgcgacagatttccgctcaacctgtggaagcggctctcaaaaaaaccatctcattaagcaaaactagtgcctttcccgccagccaattggtgatatttaaatacgctcaactgcttgctagcatggaaagcactcacgctttatttcccatcgtttgccaaaaatttttcgaactctatctgtggcgagtgccgacagagaacgaatcgcttaactttagtcacaatttcggtgtatccgacaagttttatgaatacaatgtgcctttgatgaagagtattaagtcccaattgaagtctgctgagtcgtactattcagcgctagcaaccaaaaacgctaacgatgatgccatggcccacttctatcgaaattgttgtaagcttatgcaaaactgcgcgctttggctggaggatacacaaataaatcgctttaccagtgatgcagagcacctgcctgcccagtataattctgagaagctccgcgagctactaagtggtcatgtcaatcactggacggagttcctatgcctcgcttcgttgcgcaaggagcaacgccatcaggctgatcagtggggccgaaaagtgatgagactttccaaccaaaaggccccgaggacaccagtacaaccgaagcaacgacaaccgcctgctcaacacattaaaagcctgctaaaaagttacgaaaagattgttgagaatccgcttcatattcgtgtggaacctatcaagacgccgccgatcgatggagttattgttgctcagattcagaaaaaaatgaccacgttgaactcaacggccaacaactatcattataagacgtccgagttaaattccctggacctcaactatttggaaagagtgccaacactgtactcaatgattccatatgaagaaaccaggcgaaaagagtgcacatccctgctattcaagcgaaattgtactgctcctgcccaaattaaactcacgccggagcatatacgaatcaatgacgttatatcccgaaaacaagcgcagaatcgggaaaggcatgataaaattattgaggacattttgttggccatgagtgtagagagttttgctcaagccattgaggagttgggcgtctgtatcggtgcccttctggttgccccgttggagtcaagcgtcacgcaaattggcgttcgagtcttctacgatatagtggataacctaaacgaggtgacaatgaaattccaaccaacacatgacctgtattttcaggtgctggaaaagcttggggtgtttctagaagcagaccaggccgcccagggattggctattcttcgtttggcgctcaaacgacccgatcttttagaactgctcgccggagtctttgtgcccagtcgcactgacgtggatcactttctgtccatgtacgaatttcttattgactcgcatctcaagcactgcgatacacagactctgttcgtacttttctcaaaattcgatcttttgggatggatggaggcctatcagccgaaattgagcgagatcaaccgtctgctgttactggttctgcagggactggaggcatggtctcagcccgatagcagtcttttacaagatctgttccgcaggcatctagtgcatattttcggttatgattttccacaacactacggcgaggtaatgcagctcgttctggatcgcacgtcggatcagaaactgatgccagttgttcttttggaccttctaaatgcattgtttgtccgatccaactgtgcggagttgtctttgcagcaaagcgaagtgcgggtccacgaacttgccttggactttgcccgacgtcagaagctattcaccctgaaggcggcaacggacaccctgctgctcttgtcccgacactttcaaaaggagcgtctccatcacggactccatggactgtatcccaagcacaaggattattgccaggcgttggtcctttggtttacctctttcggtcatacgcttctcgcttccgccatttgcagctatcaggagctattggctgatcaaatcagcgatattgtctttggttccattgtggagacatatagcccctggctaatcccatataccgaagaaacggttagtggcgtagcccactggatccgccagctgactcctggacagagcaaagtgcttctaccgtggagcgagcagcatgttagcagctgcaaactgatgatccgttccttcgttgccaccataatacaagtactgcagtatctgccttcgtcgaacaagattctggagcacgtattcgcctggtacgtgcatcactttgcccaatccagcacaacaggtcacgtgctggcgcccattcacgagggattggctcagttgccctgggaacgtttcctaccaccagcacaacacgtagagttgctttatgatagcctgcagaaatttctgccagaatcacacgccatgctgggacacatattcattcgaattgaatggaacaattggtttgcccagatgccccagccagtgtcgattctctctcgacttttcaccatattcgttaagatcgccttcgaacccaacattcacattcatcccaatacgagcaagatactagaggatgccattcgttatccatggcatttggtggaatgcagtgagctggagcagctgctcaagtggttcgtggccagcgtggagccagccattgccctaaagatcccagccgagagtaactatgcggaccgcgctgttttggagtacgttaaaaagggactccttcgcctggcgtgtgccatgttgccggaacgctctgcacaggatgctgtagttctgggtaccgccaagcgaatgctctacacccgctccatggtccgcatgcagcgcgcatgcggggccaagcaccaaaagttgttggccaccaaggagggcgagcgtgcgtttagtaacgcattcctagagctgctggatagcatcgatggggccatcagcagctgcagtgagcatcgtacaatggaggaacagcgtagagaagcactcaatctgatgctggagctggttgcgcccacccagacgcagagccaggaagtgtccaacatacacattaaggctctggtttggtggcagcagcgttgttctcccggcaacctggtcatgtgctccacgctgccggccatcggtcacctcaacacatacatcgccagcatttactcgctgttggaggccagcatagagaactactttcgcacctcgccagagatcgcatcctggcatgcgcccagctggcaaggtctaatggaggcactgagtatgtcgctgccgaaactggaccttatgccgataatgcagggtagctacttcttctcactgcacgttttcgtgctctacaagatggaggagatcgcgacggatggggataaggtgacctttttgcaggacctatcccagttactcgagaatttgaaaaccagcccacagacggaaccgcgaatggccctagtttggggcgtgatcatcgcacggggctgtcaaattgcgcaagtcaaccagcaggtgaaaaagccacttcacatgctggcgaggcacctgcagattgcatccactaaggcagaaggctggggcgatggtctgttgggagtgattggtctcaaatcggaggttataaccaacagacgaaaggtgttaactcgttgcttggcttgtgtgatcttttcgctgtttccggccaatcgggaccttcgcataccgtcagaagagtacgaaagtgcgctccgggagctgtctatgctgctggccaacaagaagttcaccgacatcaagcccttgatcgttcgggccgttagcctgctcaaggaatccacatttcccgatatccgggccgtacctcatatggtctgccgactcatcagcatcttctacgaggagagctacctgacaaccattccagaggtctgggactttgaattcaagttaatggccacgtag

SEQ ID NO: 34419 - protein, 2404 aa, DROSOPHILA
MATLEKPKKEKSKKSRNRVPIEKEEEEPAELSTSEEQRPAENVSLLEEFERVATLASSSSGEAIISHECCISSDVGVTSQEPEGTQEPTETEAQPSAPSAPPSTTVHVVQYPNLQPMQLSNAQVEEHSAKIVYRQAESPTGFALARSHIKLLSTEELRQIYDCPELELAKQFELEFLMNSLLETSEADPLYAAVMEYYELQGKITSNLHDVEKLRKGCAESQKQIWVRQPVTRTFSGTCGDGNVVQECVTYDVIQVDPIKLEVAKTSLTGLYDLVCHAYTNNSITAKITKVKVDQIINDLLTYPNLDGHSVVSLHHTQSGEALQCVSQLRRAISILFSFVRRPSPNANFDKDLKEWLRKLIALQLLLATREDHWFLLFNILRCPNGVGSWAAQFLQLPGTRAVRRGSQQNELPLDLNSPELNHCMAVLQILLMPVKKRNEYLKSQAQAHRELSDTPGATDRWIVVDSDGEDSHTPAGECVGLKESDLVALLNQMPFEKIFTSALRIEKFLDDYIIEPDMITAQQMLAVVVFFSQLVKTIGEGLLTYNNERYKQLAKRLGRLVRHTLQYVFDYNELFINNNLYKSSEMYERIQVELQALLVRACGYIYRTRNLGTWQYFSTLPFGTLDAEVIWHLFYYLNVGFPTDLANDLVSNAEAAFQAEDFWRKFDLANADVAPEDMYYLLQTFFEMANERNRSKDGSLVKAICLHIFHIGYIHKSTREICYKTARDMLANLMDEDLFGCVLVQLKMRYGEVDQAAYLFKALPLENWHPSMDTFEVLSNWLLHFDYQSSESQLARLIISHLNWGLDCEGRLFLPHNIHVRMAHLVNEALNKYAPEVIGASGISESVRQVSSLIDSTQSSREQFTNWCWRMVSVLRLHLMDQGVESVRRTLQHPTEPLLFIPELERMEMIFQGVNENRPLALYVGMLVSLHGHSIPLICQHGFILLQQLLLDHRHAATIRCLELIVPLFLETPETLANCESFQRLITTLLNADRTYLKLAKDMVYANSIGPILELLDNMLHHQIISYTRMLRISYQFPDCRAQAVEFFYNYYKSVSRIPLISPQNCWLNLVILEIEFRLVDTRIFPELLRQISAQPVEAALKKTISLSKTSAFPASQLVIFKYAQLLASMESTHALFPIVCQKFFELYLWRVPTENESLNFSHNFGVSDKFYEYNVPLMKSIKSQLKSAESYYSALATKNANDDAMAHFYRNCCKLMQNCALWLEDTQINRFTSDAEHLPAQYNSEKLRELLSGHVNHWTEFLCLASLRKEQRHQADQWGRKVMRLSNQKAPRTPVQPKQRQPPAQHIKSLLKSYEKIVENPLHIRVEPIKTPPIDGVIVAQIQKKMTTLNSTANNYHYKTSELNSLDLNYLERVPTLYSMIPYEETRRKECTSLLFKRNCTAPAQIKLTPEHIRINDVISRKQAQNRERHDKIIEDILLAMSVESFAQAIEELGVCIGALLVAPLESSVTQIGVRVFYDIVDNLNEVTMKFQPTHDLYFQVLEKLGVFLEADQAAQGLAILRLALKRPDLLELLAGVFVPSRTDVDHFLSMYEFLIDSHLKHCDTQTLFVLFSKFDLLGWMEAYQPKLSEINRLLLLVLQGLEAWSQPDSSLLQDLFRRHLVHIFGYDFPQHYGEVMQLVLDRTSDQKLMPVVLLDLLNALFVRSNCAELSLQQSEVRVHELALDFARRQKLFTLKAATDTLLLLSRHFQKERLHHGLHGLYPKHKDYCQALVLWFTSFGHTLLASAICSYQELLADQISDIVFGSIVETYSPWLIPYTEETVSGVAHWIRQLTPGQSKVLLPWSEQHVSSCKLMIRSFVATIIQVLQYLPSSNKILEHVFAWYVHHFAQSSTTGHVLAPIHEGLAQLPWERFLPPAQHVELLYDSLQKFLPESHAMLGHIFIRIEWNNWFAQMPQPVSILSRLFTIFVKIAFEPNIHIHPNTSKILEDAIRYPWHLVECSELEQLLKWFVASVEPAIALKIPAESNYADRAVLEYVKKGLLRLACAMLPERSAQDAVVLGTAKRMLYTRSMVRMQRACGAKHQKLLATKEGERAFSNAFLELLDSIDGAISSCSEHRTMEEQRREALNLMLELVAPTQTQSQEVSNIHIKALVWWQQRCSPGNLVMCSTLPAIGHLNTYIASIYSLLEASIENYFRTSPEIASWHAPSWQGLMEALSMSLPKLDLMPIMQGSYFFSLHVFVLYKMEEIATDGDKVTFLQDLSQLLENLKTSPQTEPRMALVWGVIIARGCQIAQVNQQVKKPLHMLARHLQIASTKAEGWGDGLLGVIGLKSEVITNRRKVLTRCLACVIFSLFPANRDLRIPSEEYESALRELSMLLANKKFTDIKPLIVRAVSLLKESTFPDIRAVPHMVCRLISIFYEESYLTTIPEVWDFEFKLMAT

SEQ ID NO: 34420 - DNA, 2347 bp, DROSOPHILA
tgctgcctcttctttggtatttatattggtcaagtggcctggcgcttggggcgtttgaagctccgataccaaagccaaacaaagccacaaagagacaaacagttaacataaatgcaaaatacttttgcaaaatgacaaaacaaaaataagcaacataaaggaaaaaaatgaagaaaaaaaaaactcaacctaaagacagtccgcaattaattaatggaggggccgatagtcttaaatgttgcaaactttaaacgaattcagatttcagcatttgtttaccgcactatggaaatatcccattatgaatttgacacgccagctgggcttacaactcacaagctgtcaataaatagtcatggttattatgctcgatgactgttgactgaataaaatgctgggttgtttgatttaattggatgcagaacatgtgttgttgattctaaaacgaaatgaatcaaattcacgggaatcaaaccaatcaaccaatcatttgtttggcgataatatggtaaatatctgtgcacataaatattagtttttcctagtaaatgaaacggttagcccatacatatatatcaaataattttgcttaaattatatcgaatttatgggctgggttcgaattcattttggatattttgggtgctacaagaagaatccattaaaaatgcacttgcttgtgtagctccttccttcctgatgctgcattaaataaatgcttcaatttatttgttatctttccacatgcgccgccccccggggggagcccatatattttcctacccatcttgataaagatgctgttttcagctacttttcgctctgctcccttgataataatcgacggatgtgtgtgtcaaaatgtcaatacttttattattcttgtttgcacatcgtttttttttcggtcacaattcgccctcgaaagtataaaagttgcgttctcgaaacgtgagcgtctcagttggtcccttctatcgagaaactttcacagctaaaaatgaagtctggtgggtgtgaggttgaattttaatgttgtttctccgtttgataactttttgattccccaaagttgttgccctgtttgccaccgttttggccattattttggtggctggagtgagtgcggatgcgggtcgctccgcctgcaaggatgagtccgagattggacagacctatacgcatcacttcgatgccgctaagtactggctgtgcgagacccttggcgttccggccaccgaggtggactgccccgcgggactggcctacatgcatctgctcaaggagtgcatcccatgggccagttacatctggaagaagcccgagatgccaccaactgtggcctgaaaataaatgacccagctcttgaacgttcacaactgcaagattatttggttattgattgattgggtgccggcgggatttgttagcaaaggttgagaatattgtgcatatgaaactgattctacaaacataattattccaactattcctacataattcgacagatttactttgaaattgcctcacagtattactgttgaaatatgtaagttggttaaaacaagttgaaagtcactgtattggtaggaagttgtatatcactcatacgcggtgttgcctttgtcttcttagcttggaatatacgttgcttacttcaagaaattaaaactgtttttcaaaccttaaaaggcaaacaatgcgtaatttaaggttcaagcttaaacccttttaatagtccaatttagctggaaaccaagtatgattaatccataagacataagacacagccgatgacagccgatgttgccactgaacttggcaacggatcgaagtggatttatcagtgcaaaaacaaaagcaaatgccaaaagcttcacgatcgcagtagcttgttgttgctgccgctgtctttgttattttgttgttgcatgttttctgtggcagatgcgcagctttggacgcgaagtcgcgcatgcgccgtggtggacgcttctgccgctttggttgttggtggtttctgtggtggctttgtctttaggttgtttggtggctccgacgaagagtgagtgcatttgaagtgttacataaagtaccaaactcgaagacatgccgctgccagcgtcttcttcgcattgtgttttttggcttggagcttttgattttcgtctgtccgcattgttattgctttttctgctggttgttttttattttttgttggtttgtgtctttatttttgcggctttgcctggttatgattttgtataaaagtgcatgctgcgcatcaggcagcagtgtagttcgcattcgtccatcggcagagcatcgtctgcaaagtgcccccaaa

SEQ ID NO: 34421 - DNA, 285 bp, DROSOPHILA
atgaagtctgttgttgccctgtttgccaccgttttggccattattttggtggctggagtgagtgcggatgcgggtcgctccgcctgcaaggatgagtccgagattggacagacctatacgcatcacttcgatgccgctaagtactggctgtgcgagacccttggcgttccggccaccgaggtggactgccccgcgggactggcctacatgcatctgctcaaggagtgcatcccatgggccagttacatctggaagaagcccgagatgccaccaactgtggcctga

SEQ ID NO: 34422 - protein, 94 aa, DROSOPHILA
MKSVVALFATVLAIILVAGVSADAGRSACKDESEIGQTYTHHFDAAKYWLCETLGVPATEVDCPAGLAYMHLLKECIPWASYIWKKPEMPPTVA

SEQ ID NO: 34423 - DNA, 3360 bp, DROSOPHILA
agtccttcttaagtataaatactattaaaatatgcttaaaatgtatgtaaaatgttaagaaatttacgaattattgaatatttaaagctgctctcgattagaatcgcgaactgaggtccgtccgtataaaagtcatgatcacatagaactttaagacttataaatctggaactaagcatacagtatctaaacgcctacgcaaggaagtttgttgaaagctaaaatctgtctgaagcacccacgcatctatttggatatgtgtaaatgtaatttgggtcagattaccaatattcactcacgtgacaaaagttggtaaaatcttaaaaaaaaaattaactaaaagttcactagaaaaagcagtctccttggtaaacgcattcgatgtttgtttgatttcaaattgcctaccgagattttcaagaccaaagcttatttagcatggggccgtgtgaaggaagcagagcggaattgcaacctcaaaatgcatcaagtttgttagcttaagcaacaggtactacttatgcgctcaaagcccagtcatgcttaattaaaaaaaaagtataaaacaatacatttttattgagcaattaccgcaacgttctcgagttggtggcagatcttttctcactgcaaaagaagcggcaaggtcagccacaaaaacggcaacaaccgcacgaatcttgtcatctgaagcagccataacattaatctgcacaatcaactgccaaaacgaacagcttcatacacttggaataaagtttccggaaaatataaatcatccacacagaatacgtattcccaagacaatccaaattcagtattttcttatcgtgtaagagaacaattgttgcagcaccaaaaacgaatcttagagctcaaaagcgggtcagatacatctgaggttaaaggtaaacccgacggctactgactcattaactggattagggagtggtttatgtaccatcaagcaaattaagtttgtatcttgacattaaggccaatgattggcatcgccgctaattgtagtacatagactttaatgtttttccccctcgacgaaaccttgaactttgcagatttgtttacttcgactaattggttgtgttattttcttgcagattgccatgaaacagttcgttccaagcgagccaaacgcccacgagctccggaaccggtaaactttgagccggagccgcagcaggatctggagaacgatgagaatggcagtcaggagaaggatcttccggagataccggacaactttcttagcccctcggttcgggagtatctcgagctgggcaaatccattcccggtgggtaatggatttttggaatttccaaacatactaatactttgctacttaaatggttcatcccaatgcgagtatgcatgcccggagagtccatcaattaaacatgacacaacatcgaaaacaatggcaatggtcctttggcggagtggaatattcttcttgatcatttttttttttcggagtagtcggtctgaagatggggcagcgaaatgcatttcggtgccatcagcgacaggccagaaaaaagtgcacgattttaaattattttcggacgagcgcgaaatggatatttggcacagaagtgcatctactcgtaaattcatttattagcgccagagaggcgactgaaaccggtcgaggatttgtttatgcccggttttatttttgtttccattttttttttcggttgatggggggagagcttcagttttttttggtgaccccggggcagcgcgcctgcagttgacacttctgggaggtaggagtggcttttttctgcagttttctttcaagtaaggttggatgaagtgaaattgattggaaaccccacggactgcgtgacatgcagtttgttttggtttcggtgactcggcggcggcacactaattgcaataacaaaatcatttgcaggtcgtcctggcgttgactatcccatactgtcggcggtgccgtacaccaacttttactgcgacgagcaggagtatcctggattctttgccgacatggagacaaggtgtcagggtgagttatactcaaacaaagatattttcaaattaaaaaatatatatatatataataatctgtactatatgctctacaggctggcattactgcgacatcgatggacgacaggccacgttcctctgcccaaatggcacacagttctcacaggcggtcttcgtctgcgactggtggttcaatgtgcgctgcgatctctcaccccggctgtatgccattaacgcccggctctatcagcgccccaaggtgaatcccactcgaccacatcgcatcatcaccaaacaactggtcgaggacatcttcacctgagcaccgagtgatcttcccattaataaatgtatcttaagtttgcctattagttaatacattactatttgcttttattatgcggtaaattcagacatagaatctaatggttaagtgaccatttttgaacaagttaatgcgctatagtcctaagtcggatgatttgtacaggttttctttcttgctgtaaagactttgatatatttccaatagtttcaaaagacttgtaagaaacgcgtatacaatgcattcaacaatccaatgttctgcaatttgtgtgctctattttaaaaataaatataactttcatcagctctacgagaaacatttaagttactttaagctaaaataaacattcatttgaagtttaaaaagtttgttgtacacttcatataaatttttgcatacattccattagtaaaatgcatttcttttagcgtaaaaattgaaaatttctcatttaagttttgtatatatattaaagtttcagtaccagatctaaaataaaattatttttagaaaacgaaacatctttttgtttgctaatatgcagattaggcgaacacgccatatctggtagcctaaagccaggttccagtgcctttatccttcatggttccctttttttcgtcgtgcttataaaatagggattaaataattgatacagccagctaagcaagttgtattgagcagttaaaatgctcgatgctcttcgaggttcatggtgttattttcatcttggaacatccacatacaagtaagattagaaatttaaacaaatcaattgttaagagagttcttgcttgcattaaaatcagtaaaaagcagcttttatcttctttgaggtttgtactcattctcatttataatagactgcctagttttaggagtagagtataaatctgaatcaaggtgtaaagtgtggcatacttttcttccctgcaagcagctgtgatgcaagccaaaccaaaaacacgccagacaaaagctgacgccgcaaaca

SEQ ID NO: 34424 - DNA, 558 bp, DROSOPHILA
atgattggcatcgccgctaattgtaattgccatgaaacagttcgttccaagcgagccaaacgcccacgagctccggaaccggtaaactttgagccggagccgcagcaggatctggagaacgatgagaatggcagtcaggagaaggatcttccggagataccggacaactttcttagcccctcggttcgggagtatctcgagctgggcaaatccattcccggtcgtcctggcgttgactatcccatactgtcggcggtgccgtacaccaacttttactgcgacgagcaggagtatcctggattctttgccgacatggagacaaggtgtcagggctggcattactgcgacatcgatggacgacaggccacgttcctctgcccaaatggcacacagttctcacaggcggtcttcgtctgcgactggtggttcaatgtgcgctgcgatctctcaccccggctgtatgccattaacgcccggctctatcagcgccccaaggtgaatcccactcgaccacatcgcatcatcaccaaacaactggtcgaggacatcttcacctga

SEQ ID NO: 34425 - protein, 185 aa, DROSOPHILA
MIGIAANCNCHETVRSKRAKRPRAPEPVNFEPEPQQDLENDENGSQEKDLPEIPDNFLSPSVREYLELGKSIPGRPGVDYPILSAVPYTNFYCDEQEYPGFFADMETRCQGWHYCDIDGRQATFLCPNGTQFSQAVFVCDWWFNVRCDLSPRLYAINARLYQRPKVNPTRPHRIITKQLVEDIFT

SEQ ID NO: 34426 - DNA, 2341 bp, DROSOPHILA
ctgttgtcgggcgtgtctgagctgcacaagcatggcattgtgcatcgcgacatcaagactgctaacatattcctcgtggacggcagcaacagcctaaaactgggcgatttcggatcagcagtgaagatccaagcgcacaccactgtgcccggtgagctgcagggctatgtaggcacgcaggcctatatggcgccggaggttttcacaaagaccaacagcgatggccatggcagggcggccgatatctggtcggtgggctgtgtggttgtcgagatggcctcgggcaaggtgagtgcttcgcattgtagataagcaattcgatgtatggggcggggtatacagtccatttcacaatgttggattattagtgcttttctttgggtgaaattttgaaatgtttaacatttaatatatatttatggtttctttacagcgtccttgggcccagtttgattccaacttccagatcatgttcaaagtgggcatgggcgagaagccgcaggcaccggagagcctatcccaggagggtcacgacttcatcgatcattgtctgcagcacgatcccaagaggcgtttaacggcagtggaactgttggagcacaatttctgcaaggtgcgtatgcctgtggttagctcgctgccaaatgttgctaattgattttcgtttccatgtgcagtacggtcgagacgagtgcagcagtgagcagttgcagatgcaggtgcgaggctctttccggcgaaatgtggcgaccagcagcagctaggtgcaacgtggtgtctacttaactagcttgcggttttttttaggcgcacccctacatatgatgcatatgtacatcggtgtggattttgtttagtgtctaatttatgtgaatgtcgattatttgaatgccctcgtctggttttatgttggacaatatataacccgtataaaataatcaaatgcctttccgtaccgtaacccccacaattcattcgatgcaagtgaaaattacacgtattttaatatatttgcgattcagtttttaattcatcaatcgatgatgactatccgtaaatgggatagatggtcgacgtttctggcgtggcatttgtggtctcagcctgcggcggaccagagaatcccgtgctagtcgtaccatcgacgggagcaccagttggcggagttggctccggggtggcaagactggagaaagccgacacccacgaggtgcacagcatgaaggccagacagaggctaaacagcaggttgaagactgcaacgaattgagccggttactcgaatggtccacggattgcgttggcggttactccttgtacggtacttacatttcatgttgacggcgttttagagactgttgaagtgcccagaacggccagggccttttatggagaaccacttggccatgggtatccattggtattttatttaattaatttattaaaacactatttatctggcattggcttatcattatttatttatttatttgttatcgtatttaccacttggatattaagaagtgcgcagctcggattttcatgactgtttcaagcggaagacgacttatctattcttagaagtcactgaaaaatacgtggccaatttgaccgtgcgccttatccaaatccatatacgtatggagtattttcattcaccagcagatcaattgtaggtcaggaatgatggtggtcttggtttgtaatgcatttatttcaatttattcggttcgtgattatttatgcatacattaattgcggctcttggccatatggaaacgagtcaaacttaacgacagtacagaacagtatggtaacgtaatgattgatacacagatcgaataatacaggtaagatagatagttagttggatagtacgtagtgatagttcggttaacagtttagaagataatcatacatatagtacatatatagcaacaatgaacacagcaactagtttgatataagtatctggttgtcctttaacgtttctcatatattttccattgtaaataacatacgtatagtatttatgtatataatatattctttgcagattattgacagctttggtggatcgccatcgaaacatcttttttttttgctaacggctcgaacagacaaacaaacacacataggttatatatgtatctatatcattctaaatcgtcctgcgccgtggggcatcatttgccttcctgggatgtatataaatttattgatatgtattgttacgtctcaagtctatacgcgtattctatatattcctctacattcatttcattattcatttacgggttgtacatacatatattattatatatatatgtatatatatata

SEQ ID NO: 34427 - DNA, 268 bp, DROSOPHILA
tcaacatgaaattcttcaacctgctgtttagcctctgtctggccttcatgctgtgcacctcgtgggtgtcggctttctccagtcttgccaccccggagccaactccgccaactggtgctcccgtcgatggtacgactagcacgggattctctggtccgccgcaggctgagaccacaaatgccacgccagaaacgtcgaccatctatcccatttacggatagtcatcatcgattgatgaattaaaaactgaatcgcaaatatattaaaa

SEQ ID NO: 34428 - protein, 57 aa, DROSOPHILA
MLCTSWVSAFSSLATPEPTPPTGAPVDGTTSTGFSGPPQAETTNATPETSTIYPIYG

SEQ ID NO: 34429 - DNA, 7232 bp, DROSOPHILA
gtttagttcgcattaagtttattcatttatcttatctatccacgcctagaagagcatactagttaatttaagttagccgaaattggtcttaaaactttcgagtttttccagaacttgagcacattctaagcgaagggcacatacacagaaaacgaacacccatctaacaacttgttatataatttgtatttttctaattgaagagaaaactctctgccagcaatcgaacgtaagcgaacacaactgtcatattggataacaaatttcgatgtacgtagcatatttttgatttatagtagttgcaacttctctaggctattttaaaggattgtttcaatggtttattgcagcattagttaaaatttgtagctctaagtgaacccaacattaagtataaataaaatttcacaatacatgcgtacatgcatcataatacgaaaacaaacaaatgaaaacaaaacaattttaaaatatttacaacttacgataaagatttcaatgagaactaatggaaagaatcccattctatgaaggaaataaattcaatttatggataattacaaaacaatcaacgccttttattgattcttttgcgggactggttgctggacgactgacaccactgataacagcacaaatcagttcaaacttcaagaactttatcaaaaaaggatgacattaaattttaataagcctatttcgtgttttttataacatctgaaacttaaaatatgaagtaatacatacatattcatttatgtagcataggagtagtaaactaattaataaatacgaactgaaaatggcttacatcatatgtggctttagccgtagccttaatgacattaaattcgaataaacatatttcgtgttttttataacatctgaaacttaaaatatgaagtaaaacatacatattcatttatgtagcataggagtaaactaatgaataaatagaaactgaaaatggcttacatcatatgcggctttagtcgtagccttatgattttttcaggaacatccaattttcacataaagattgatacactagctttttttcgtgcctgttctcgtaaagttccacttcgatgagatcagcgtcgcaattagggcggttggggtaatagttgagaggatagtgtacccgggcgaaaaccagcggatgctggcagaggcaagcctgcagtgcctggcgcaccgatttttctttaaaactcttgtttctcttaatgccgtgcaatttgacgcagaacgatcgcaacgggaacatgaacaactgactgggcattacttttaggtggttaaacgaaactttttcggtgtcatggaaatcaatgtagaatactgtgacttgctcactggttggagacaggattggtgaaatctccttgatattggccctgtaccactgcttgtctctcgaatagcgggccagacacaagtcgcctaccttcggctccatcagcggttccgcgtccttgatcaaagtgctcgtctcctggatcaggctgatttcatgctttgtgaactccgagagacatggggctatctgcaactccgtgtccgacagtacattgtccactgtgcagtagaactcttttactccgttcggaaggctcagggtcttgaagctcgcactggcatcgtaaaaagacctcaccgacgaggtgtcaataggtgaaaaggtaatgctgtcctttatttccttgaaaaatataatacaataataataattattatttcaatgattatataaatagtatttttagtatttacctgttgacgcagtgcaatacggcggatcaactgttcggtggcgaatgaatttaggggctccaactgactgtcattgacgttcgcaaagacttccatatcaatacttttagaggaattcgagtggggctcatcctcatcccgagcggttgtttcatcagcgtacttaccaaagtcgccgagataaaaattattgttaaggtgcattttctgtgcggcttgctggcaatcaaagtcctgatcacactcaaacgcctctacctcctcctgatctaccaggaatttcttagtgggtggttgctgaaccgatgaaatgctatcgtgtttacgttgggtgggaggcgcttccttgtctgatagttctccctccccggcggccaggtggtcaagctcatcaaagactttaaagtcctcgagaaatttttgggaaggtaaatattttgtgttattcttgatcgtctgcttttcgataggtacagacatgccagaatctatcatcatggtggcaatgtcaacattaccaaccttaatctggcatttgggtatcttatttgggccaactgtttcgtcatccacaatacgcacaccgcttagtttcatgaccaaattcaggtggaccgtatccatttcctttaaagaatactttccttgtttagatcgcacgccgtgtaattccaccaggaagcacattgcgtttaggtccgggaacggagcatatggaagcatttcatccgccttgaccagctccatgttgccataatcaacataatagactgtgtactcattatgattgttctccaggcgctgcactatacctcggtagatcatgttgtccatgtgataggtaaccaccaccgcttgtcccactttgtaagtataggaggtagagcgctccttttgcttatccattagtggcttgtattcccgtaccagcaggttgcccatatgctcgatgaagggcttatcgctggccaaagtcaagtagatgcagcattcgtaggtcacattagtagcaattgccgtgaatacggacttatcgcactttcgtcgtgtagtccaaccagcaggtggtgttgtctctccagttgtattcttggtatttcctaaatcctcgagcagagctagtggaggcatgtcctcgttgtgctcaaagccgactgtcacgcttcgtgattcaatgagattcaatgagtcgtttgtcttagaagttccatcaattttgcttaaacaggattcccagtcgttggcttttgcagcttcttctgagttaacgcttacattttccggcatcgattgctggtcgtcttcgctatccgaattgtgatccttttctgccattccggccatcagaagagccttgttgatattaacgtactttatagtagctggcgaaaatggtccagtgagtatggaaagggagccccataggatgacgctcaaagagttttctgtacgcccacgccccgtcacgtggatttcgttatatgccttcaactgatccataaagaaatcaatggcgtctttggaccattcatcaccaattggacgaatcccgtgtaaatgacaacgctttgcgctgcttgaaatacgcatgtccgcctcatcgatgttggccagggaagaactgtgcacatcatcgatcagctcacccaaatcccgcaaatgcacttggtatcgtacaattgggcaagtaataccaggtggtatgactcctgttacgactccacgataccataaagcctgcgaatcgcaattggcctgaacccgtgcgtaacacatatcgcccacctgccaatcggttctgggcaacatattctggtacattgcggcagctgctttttgcaccgacttctgcaagttattgatggctttctggaaatggggcaaggtcacgtaaaactcatccggctttcgaacataaagaatattgacagttgttcgtttgttgcgctcggtattatcgggcatccggtaaggcgacaattccaccggccggaccttctgctgtgcaataaactttttggtttcctcatcaaaacgtacagaacgattggatacggttggtgtgatcattctactgctttcaccacttgatgtacaatgtccatgggccactagttgtactccgacacttgtggtttccgagttggagcgctcgaaatgtaatgacacgtagaccagatcctccgtgcaactaataacatccatgtaaagccttggattcgaggtaagctgtttaaaaagggtcgtcccttctggagtccaagtataggagtgctctgctctggtctccacatccgccaagcagcacttaatggctagccctgtatcccaaaatttctgagggaggacaaataattgatcccagaaaactttctgacttggaccttcgtccaccaggtgcacgagaacataacctgtaaaaatgcataatttttaaaaaaagaaaaactcaaaataaatttaatggtattagttgcgtctactttttattgtgttgtcccaatattgttgtcataactcaccgtcgggaaggatctgctcaatgctagctcgcttccactgtccacccgactgcaggacgcaaccgagatgcagctgtccaagaaagatgttttgcaattggctaatgttaatgcgatccatggcttcctgcagactgaattgcaaccataagcgctttttctcgtagtcgtggcgcatgacgtaaaactcctgtgggtcctccacgtgcagcatctgaaccatgtagacgtctccgaatcggaagcttattctgggtagacgaagcgcagtaggggcaggcggcagccatagaggggcaccgtcgcgggagatcgccaggccacagtataagaaagaatctcgcacggagatgttagtatcgtaattgctggtgatcaggtccaccccatgcagttcataggtaagagctttcttgacgatcacgcgcacggggttgctaagaatcaggaagatttctacattttattttacattttttaggtcgctttgagtaacttacttctgcactatctgcttaaggaacgcgctggctttactatcccactcggattcaccatttttaggcatcaactcacttaaactgcagtgcactgcggagtacggcaggtgggatatacgttccggcaccacacggaagctgaaagggattgcattgcagtaggaatttgacaaattcatgcagaaaactcactccgaacaacgaacatgcaaatgaacgcctatatccgtcaaaaaaacattgtacaaattttcattggtcagcttttggctgaccagggcgcgatagtatcgatccttatctttgtggtggataatgtagttctggcccaccacgatagtcggcggaactgaggaactgtccgaaagtgtgtgcgcaaatgtatccagctcctcacgcaatcgctgggcggcatggatgccttgaacatagaaatcctccggggattgtacggagcgcaccctaaccagtgtatcggtcttgaaccaatcgctgctgtcttcagtcgtcttattgcgcttggtgatgtccaatgaagagaagttgtggagaaaatctagatccttagctgggaactcatcgataatggcggcagttgaatttagactggattgggcgacctccgtagcatttttaccccgtttcttttggctttgcgacacttgggtggctttctttagtttcgaattttgggctaataaaagtttgcgtgaatgtggatcaaagttttccttgctactactggaagacgttaaaaaagtgatttctcctttgggcgaggatgaaaggcttcgactaatctcgaggtcggtcttgaaacaaacttgtatattggggttcacgaattcacacttgaatatgttggatatgtccatgaatcgactacaggtcacgctagaaaataaaaataaaattatattatgcttttatagagcttttaaataaagtttgtttaccgataaggattttcgtcgactttgctgacctgcacagttgtgggaatcttctcaagatgttcgcaaatgagcttgagcagccatcttagcgacacgtctctgggtacggccatgtcgttgccgactccactgtttaaactctttgttaatcgctaagtaaaggagtaaatgattttcaaaaaaggactggaaataccaactgaattcagacacccacctcgatgacagtttcgtagccactcagctggcccatggcttcgttgagtttcaattgtggtggcaaactggactcgcgcagcttctcaatgacctgcagctcggccacctggagaaggccgtgcaggtgggaaaatcgcttcgaaatgctggccaacgtttcggtggcatagtcgtttagtttttgtttggcccgttgaaccacctgcgaatgcaagaagtagcggaaattatctgtggttagctggacgaagatagccatgcagattaatccgttgcacattctaatgactctgcgttgctacctaattttttgccacttgccacctaaaccagcgacctcacctatccacctctctaggtgaatggcgagcgtcttggattttagttgccaattgaagaacgtcggtggccacttctcagatcagcttcagttcggtttgttttcatataatgattacgttcataaactttagataagttttagttttaagcaaatatatttatataaaatatacagccactcaataatttgaaagctagcagtttcgaggaatacttattaatttttctaatttaaagctgttctcatttaaaatcgatttttgaaatatattaacatacccacaatttctcgtttataccattaaacccctattgctgcccgtttcctttctaaacggtatgggcaacgctgctccttccgatggtcttgatcgcaatcatcttcttcattcaccgcctgtcaagtggcaatgatcattatcaaagattgtgtggctgttagttgggtttttgaaagtgattgtaacaatcgccgaaataatgctgcccgactcacattggatcggatcggatccgattggatcggacttatgacagctgatttgtagcagatgacaggcaagttcgcgccagcgggctgttctgccataaaagggcatccatcgagcgatccaatcgcaagagttgtcgtgtaaatgaaaccatgtaggagcccaaatctggcacatcattaaaacgaaactcggatcgttttgccattcccgtcgctcggggcaatatgatttcaattcagctgaccttgtcaagggtttggcatcgcatttgagagccaaccgaatatcataggcaaagaaatgtttattgtttaacttgtctatcaaaagtcccagttgcccaattgatacttgtgagcttcaatccagtctttgccaattaagttttcttactcactttttaagagatgagcaagaattgag

SEQ ID NO: 34430 - DNA, 4632 bp, DROSOPHILA
atggctatcttcgtccagctaaccacagataatttccgctacttcttgcattcgcaggtggttcaacgggccaaacaaaaactaaacgactatgccaccgaaacgttggccagcatttcgaagcgattttcccacctgcacggccttctccaggtggccgagctgcaggtcattgagaagctgcgcgagtccagtttgccaccacaattgaaactcaacgaagccatgggccagctgagtggctacgaaactgtcatcgagcgattaacaaagagtttaaacagtggagtcggcaacgacatggccgtacccagagacgtgtcgctaagatggctgctcaagctcatttgcgaacatcttgagaagattcccacaactgtgcaggtcagcaaagtcgacgaaaatccttatcgcgtgacctgtagtcgattcatggacatatccaacatattcaagtgtgaattcgtgaaccccaatatacaagtttgtttcaagaccgacctcgagattagtcgaagcctttcatcctcgcccaaaggagaaatcacttttttaacgtcttccagtagtagcaaggaaaactttgatccacattcacgcaaacttttattagcccaaaattcgaaactaaagaaagccacccaagtgtcgcaaagccaaaagaaacggggtaaaaatgctacggaggtcgcccaatccagtctaaattcaactgccgccattatcgatgagttcccagctaaggatctagattttctccacaacttctcttcattggacatcaccaagcgcaataagacgactgaagacagcagcgattggttcaagaccgatacactggttagggtgcgctccgtacaatccccggaggatttctatgttcaaggcatccatgccgcccagcgattgcgtgaggagctggatacatttgcgcacacactttcggacagttcctcagttccgccgactatcgtggtgggccagaactacattatccaccacaaagataaggatcgatactatcgcgccctggtcagccaaaagctgaccaatgaaaatttcttccgtgtggtgccggaacgtatatcccacctgccgtactccgcagtgcactgcagtttaagtgagttgatgcctaaaaatggtgaatccgagtgggatagtaaagccagcgcgttccttaagcagatagtgcagaacaaccccgtgcgcgtgatcgtcaagaaagctcttacctatgaactgcatggggtggacctgatcaccagcaattacgatactaacatctccgtgcgagattctttcttatactgtggcctggcgatctcccgcgacggtgcccctctatggctgccgcctgcccctactgcgcttcgtctacccagaataagcttccgattcggagacgtctacatggttcagatgctgcacgtggaggacccacaggagttttacgtcatgcgccacgactacgagaaaaagcgcttatggttgcaattcagtctgcaggaagccatggatcgcattaacattagccaattgcaaaacatctttcttggacagctgcatctcggttgcgtcctgcagtcgggtggacagtggaagcgagctagcattgagcagatccttcccgacggttatgttctcgtgcacctggtggacgaaggtccaaggctagccattaagtgctgcttggcggatgtggagaccagagcagagcactcctatacttggactccagaagggacgaccctttttaaacagcttacctcgaatccaaggctttacatggatgttattagttgcacggaggatctggtctacgtgtcattacatttcgagcgctccaactcggaaaccacaagtgtcggagtacaactagtggcccatggacattgtacatcaagtggtgaaagcagtagaatgatcacaccaaccgtatccaatcgttctgtacgttttgatgaggaaaccaaaaagtttattgcacagcagaaggtccggccggtggaattgtcgccttaccggatgcccgataataccgagcgcaacaaacgaacaactgtcaatattctttatgttcgaaagccggatgagttttacgtgaccttgccccatttccagaaagccatcaataacttgcagaagtcggtgcaaaaagcagctgccgcaatgtaccagaatatgttgcccagaaccgattggcaggtgggcgatatgtgttacgcacgggttcaggccaattgcgattcgcaggctttatggtatcgtggagtcgtaacaggagtcataccacctggtattacttgcccaattgtacgataccaagtgcatttgcgggatttgggtgagctgatcgatgatgtgcacagttcttccctggccaacatcgatgaggcggacatgcgtatttcaagcagcgcaaagcgttgtcatttacacgggattcgtccaattggtgatgaatggtccaaagacgccattgatttctttatggatcagttgaaggcatataacgaaatccacgtgacggggcgtgggcgtacagaaaactctttgagcgtcatcctatggggctccctttccatactcactggaccattttcgccagctactataaagtacgttaatatcaacaaggctcttctgatggccggaatggcagaaaaggatcacaattcggatagcgaagacgaccagcaatcgatgccggaaaatgtaagcgttaactcagaagaagctgcaaaagccaacgactgggaatcctgtttaagcaaaattgatggaacttctaagacaaacgactcattgaatctcattgaatcacgaagcgtgacagtcggctttgagcacaacgaggacatgcctccactagctctgctcgaggatttaggaaataccaagaatacaactggagagacaacaccacctgctggttggactacacgacgaaagtgcgataagtccgtattcacggcaattgctactaatgtgacctacgaatgctgcatctacttgactttggccagcgataagcccttcatcgagcatatgggcaacctgctggtacgggaatacaagccactaatggataagcaaaaggagcgctctacctcctatacttacaaagtgggacaagcggtggtggttacctatcacatggacaacatgatctaccgaggtatactggtcaaggcggatgaaatgcttccatatgctccgttcccggacctaaacgcaatgtgcttcctggtggaattacacggcgtgcgatctaaacaaggaaagtattctttaaaggaaatggatacggtccacctgaatttggtcatgaaactaagcggtgtgcgtattgtggatgacgaaacagttggcccaaataagatacccaaatgccagattaaggttggtaatgttgacattgccaccatgatgatagattctggcatgtctgtacctatcgaaaagcagacgatcaagaataacacaaaatatttaccttcccaaaaatttctcgaggactttaaagtctttgatgagcttgaccacctggccgccggggagggagaactatcagacaaggaagcgcctcccacccaacgtaaacacgatagcatttcatcggttcagcaaccacccactaagaaattcctggtagatcaggaggaggtagaggcgtttgagtgtgatcaggactttgattgccagcaagccgcacagaaaatgcaccttaacaataatttttatctcggcgactttggtaagtacgctgatgaaacaaccgctcgggatgaggatgagccccactcgaattcctctaaaagtattgatatggaagtctttgcgaacgtcaatgacagtcagttggagcccctaaattcattcgccaccgaacagttgatccgccgtattgcactgcgtcaacaggaaataaaggacagcattaccttttcacctattgacacctcgtcggtgaggtctttttacgatgccagtgcgagcttcaagaccctgagccttccgaacggagtaaaagagttctactgcacagtggacaatgtactgtcggacacggagttgcagatagccccatgtctctcggagttcacaaagcatgaaatcagcctgatccaggagacgagcactttgatcaaggacgcggaaccgctgatggagccgaaggtaggcgacttgtgtctggcccgctattcgagagacaagcagtggtacagggccaatatcaaggagatttcaccaatcctgtctccaaccagtgagcaagtcacagtattctacattgatttccatgacaccgaaaaagtttcgtttaaccacctaaaagtaatgcccagtcagttgttcatgttcccgttgcgatcgttctgcgtcaaattgcacggcattaagagaaacaagagttttaaagaaaaatcggtgcgccaggcactgcaggcttgcctctgccagcatccgctggttttcgcccgggtacactatcctctcaactattaccccaaccgccctaattgcgacgctgatctcatcgaagtggaactttacgagaacaggcacgaaaaaaagctagtgtatcaatctttatgtgaaaattggatgttcctgaaaaaatcataa

SEQ ID NO: 34431 - protein, 1543 aa, DROSOPHILA
MAIFVQLTTDNFRYFLHSQVVQRAKQKLNDYATETLASISKRFSHLHGLLQVAELQVIEKLRESSLPPQLKLNEAMGQLSGYETVIERLTKSLNSGVGNDMAVPRDVSLRWLLKLICEHLEKIPTTVQVSKVDENPYRVTCSRFMDISNIFKCEFVNPNIQVCFKTDLEISRSLSSSPKGEITFLTSSSSSKENFDPHSRKLLLAQNSKLKKATQVSQSQKKRGKNATEVAQSSLNSTAAIIDEFPAKDLDFLHNFSSLDITKRNKTTEDSSDWFKTDTLVRVRSVQSPEDFYVQGIHAAQRLREELDTFAHTLSDSSSVPPTIVVGQNYIIHHKDKDRYYRALVSQKLTNENFFRVVPERISHLPYSAVHCSLSELMPKNGESEWDSKASAFLKQIVQNNPVRVIVKKALTYELHGVDLITSNYDTNISVRDSFLYCGLAISRDGAPLWLPPAPTALRLPRISFRFGDVYMVQMLHVEDPQEFYVMRHDYEKKRLWLQFSLQEAMDRINISQLQNIFLGQLHLGCVLQSGGQWKRASIEQILPDGYVLVHLVDEGPRLAIKCCLADVETRAEHSYTWTPEGTTLFKQLTSNPRLYMDVISCTEDLVYVSLHFERSNSETTSVGVQLVAHGHCTSSGESSRMITPTVSNRSVRFDEETKKFIAQQKVRPVELSPYRMPDNTERNKRTTVNILYVRKPDEFYVTLPHFQKAINNLQKSVQKAAAAMYQNMLPRTDWQVGDMCYARVQANCDSQALWYRGVVTGVIPPGITCPIVRYQVHLRDLGELIDDVHSSSLANIDEADMRISSSAKRCHLHGIRPIGDEWSKDAIDFFMDQLKAYNEIHVTGRGRTENSLSVILWGSLSILTGPFSPATIKYVNINKALLMAGMAEKDHNSDSEDDQQSMPENVSVNSEEAAKANDWESCLSKIDGTSKTNDSLNLIESRSVTVGFEHNEDMPPLALLEDLGNTKNTTGETTPPAGWTTRRKCDKSVFTAIATNVTYECCIYLTLASDKPFIEHMGNLLVREYKPLMDKQKERSTSYTYKVGQAVVVTYHMDNMIYRGILVKADEMLPYAPFPDLNAMCFLVELHGVRSKQGKYSLKEMDTVHLNLVMKLSGVRIVDDETVGPNKIPKCQIKVGNVDIATMMIDSGMSVPIEKQTIKNNTKYLPSQKFLEDFKVFDELDHLAAGEGELSDKEAPPTQRKHDSISSVQQPPTKKFLVDQEEVEAFECDQDFDCQQAAQKMHLNNNFYLGDFGKYADETTARDEDEPHSNSSKSIDMEVFANVNDSQLEPLNSFATEQLIRRIALRQQEIKDSITFSPIDTSSVRSFYDASASFKTLSLPNGVKEFYCTVDNVLSDTELQIAPCLSEFTKHEISLIQETSTLIKDAEPLMEPKVGDLCLARYSRDKQWYRANIKEISPILSPTSEQVTVFYIDFHDTEKVSFNHLKVMPSQLFMFPLRSFCVKLHGIKRNKSFKEKSVRQALQACLCQHPLVFARVHYPLNYYPNRPNCDADLIEVELYENRHEKKLVYQSLCENWMFLKKS

SEQ ID NO: 34432 - DNA, 7736 bp, DROSOPHILA
ctgggccgatatcgtttcctgcagcttccggcgaaaggcaaacttgcggttacgctgatcctccagcaatttggtcaagttactgtcatcgaaaggcatcttggcattcatcatgatgaacagaatgactcccaaggaccaggcgtccgctagctttggatcatatggtcgtccacaaactacttcaggtgcagcataagcagctgatccgcagtatgtctcagatttcatctcccggccattatcgtcgcgacaatagcgagcaaatccgaaatcggccagcttgatgttgagccgcttggagagaagaatgttctcgcacttgagatcccgatgggcaatgtccaggttgtgcagatacttcagtgccttggacatctgaaagaaccagatcttcgattgcttctcatcgatgggacccgacctcttgatgtgcgacaacaaatccccattctctgcgtaacgcataaagatgaagatcttgggaccgcgctgaaggatgctatggatctgaataatgttggaatgatcaatctttgtcaggatctccagttcgcgcggaaagaacttgttcacgaaatcagtgggcgccttggctttgtcaatgattttacaggccaaatgtactccatgtccatgatcatcggcataaccggcggttataacagtggcataagacccctcgccgatcttgtgacccacattgtagccccgctgtgccagtgcatccacatccgaacttcgagtacccaactgacggatcccagcgctagaattgtatttggacatggctcttgtttcctcggcgtgcgtgtagtgtagttttccgagagtttgcaactaggtgatttggtaatggcatcaagcgaatgattcttttctaaacagcggacataattacccttaagttggttgatttcacaaacaataattttatgccacttgtgtattttacttactaaattcgaatccagaaattttgacaaaacctacaaacgttatgaggtgtgaaagaaatataaaaaagggtaatgcacagccttctaccataactgacaaatctgaaccaaagtataaggttactacgtcccaaatattattatgctagcatgcgaaatgctaataagagggcataaaaataatatataatatatggataaggaaaaactgtttaaagttgagtatttgttttgagacattttaaaagccttaaattgataaattaagtaaaaaaaaaaaactgtgttctgaaagcaactaaagttttaatatttctatattacagttgccattcttgtttcctcgagccaagccactggctctgcgtcccaaccagctccaatcaatagaaatccccgaggcagccacaacagcagtggcattggcgactctgagctaagtgcctcagagcgaagtcgacgattgataccctacatggccttctatctgccggcgcccgagttgcccattaatcagcagtatgccaccaagcactcgtcgtcggctggcggagcacagctgcaggcaccgctgccaggtcctggaaggataccagtgccggtggcctacatgccgcagcagaagcaccatccccaccaccatggaccaccgcatccgccaccagggccgcattatcagtcgggagcaggcgaggtctatcactcccttgcgattggaggccaccagcatcagcatgcgcccccacatccgccacctggtcatgtcaaggagcagcaggcgatcaccaattcgggtgccacgtatattgcatacaagccattaaacccgacgcataaggcaagtatttgaataataagtgtttttaaaaaggctatgtcgccttgggaaagaatatatatcaaatggagctaaattagtgctgaatcggtttagattgcttccttctaaagtccatcaatcgtgaaataccagcaatattgcgaatattggaatatgaaacgtcgagggtattgaaaaagcacttggatacctatccactctccttcattacaattgatttcatgggtcataaataagcagaaataatcacgtaattcataatttacacgcacgcagcacaagacagtgcagcattttccgccactaccgccgtcgcccaaggagcaagtgcagcagcagcatccacagcagcaccaccaccttctgcaccaccagcagcagcagcagcagcagcagcagcaaccacagcaatacgagatcctatcatcgagcttagtggcatcccaggcgcagcgacagcggggcaaacaatcaaaaatcaatttaacaccatttacagcgcagaacacattgccgggacagtttatacccattatttatacgccagtgagcagcagcaaaccgggctcccccggcgatgccatcaattacaataacatccaaagcaacctgaagcagccagaaattgtctataaaaattcccatcaaacacaaatcgttacggattatgcagccggagcggctgcctccgccgaacagccaccactatcgtcatctggcgaggaggtggatgagacgaatggcgagaagatggtggagcagcagcaggaggaccatagagcccaggaggaggcggtggagcagcagcagcagcagccgcaactacaccagcaagtgcaaaacaatccaaggtaagatttcttgtcactcttgtgactctcatgcccaaacggaaaacagagcgctggcgcgaaagcccaaaagtaagccaggtctgatctttgatctcatggaatatccaaagcctcgtctgcttaataggcagttctcacagccacgcccacttatatatcgtgaggtagttgcaatatcgcatgtagaatacaaattaaaatgttgccactatggctgtctttaaaacagtttcatgtcatccatacatttttaacaactttacacaacgaacctttaattggtcttaaaaaaaaaatgctatacagattacttttaagacacaacccacttaattaacttacgttacgaaaggttgctaaacttattgtttcgccatccaaagatgtcaataattaattgggaacagccagttatcaacaaactgcagtccaattcaatattcgataatgcaacagcgactttaatatgcttctgtttaaaacgcatgcaattgggatttctgagtctgagacggatactgctgttgcaacgctatgcccttgggcagaaaaatcaattgcatttcatgcaccagcccagtccactccaatgtccggctgcgacacagaccgcgtccgctcttctccatctctgaatccggtcgtccacatcgtcaccatctttgcaactgcactggtgacgtaagatccatgacgacaacgattgcgactccaattgccgttcgatgtacagcaggaggcacagccagtgggcaacaaaaaggtgggctgaggagacttgacctggccggccagtgtctcatgtatgtatgtacataactcctctccacattctcatgtagtaattgtcaaatggcaaattcatgtcataagtagccagcgggctcaggtcaaaaatttgtcatacaatgcttatcagatgaggagtgggaaatggaaaaacatgccaatcagcgaagatttttacaaccaccacacttcagttgaacacatttcgatgctgcacctttgtttttcggttaaaatcattcaataagttacactttaaggtgcaaacgaaataaattatgcttaataggcatattacgatttcaagagtagggaaagtcaggatataaaggaatacaatttgtcaaattatttggctgttatctactagtcatggatagataatcagatacaaattaaaacttcttaaggaataatgaataaatttgaaaatatcacaatgaaatagggcaacctaacgtacactctcatgacatttatgcttgaaaccgaaatcataaccgctttgcatgattaacctccaacagcatcggctacgcttctgtgtcggttcccgattcgagcgcaattaccgcgaccacatcctccaaaaacgcattgataatacatcagaaatcaccggctttcgggcacgttagcaaatacgaaagctacttcaatatggccccgccctcgactagtcttggtcattctcctcatcagcagcattcacacatgacgccgcaggagaaatatgtgctttacttacaacagcgcatgaaacaccaaaaacatcagcaacatctgcagcagcaggagcagcaacagcaacagcattacgacttttcacatccggtggtgccggcacaaagcaatacattggctggtagccaccattcgcaacacacccatctgcatccccatcatccccaaaccaagacccatcatccaaacaagtacgatgccctctacgtaagaccggatgcgactgctggccaacaggtgctgcatatcccgctgcgcgcactcatggcccacgtccaagagcagtcgcactcccagtcgcaattacaagcggagtcgcaggcacagtcgccacgtcacgatttcgccaaggatgagccacttgggtaagttctttgcttgggaggaggagcaaggatcgttgagaggaaacaagttgcttaggtcttaccaacgcaataatgattctcccttctcaagaaaaaagtattctacgagtttatttaataagaaaaactatctaaattgatagtgatggtctaaagataatccacattactaagatatataaaactgcttagtaagtacacaaagtactcaatacgtccttcaaaaactaatcatttctaagtaacaagtgcatcatgaaatcataatttagcctcccaaaagaccttactttagatctgaacatttcttttagttccccagcaccaccgcagtttatagactatctaattgatgggccaagacaatcgctggaggaagagcagcagcactcccagcatgagcgaccatcggctcatcagccgccccagcatgcctacatcctggtgaccacgacagctccacatatcgagcatcagcctgcaccgcaaatgcatccagagatttccacaccgcgtccaccgattctctataaccaacagcccacacttcgattacgtcccgtgcatacttacaaggccaccaggcgtcccatttacgtgaccacacccgcacccgcagtgtcgccgacttcaagtcacacggtagagattacgcccaaatttgtttacgtttcggggaagcctcctactggccaaaacccagagttaccgcttagagaaccatctacggtaacgcctattaaacttaagcccgtttacaaatacgcccatgagcgccctccattaacgcctgcatacgtaccagaggatcaggatcagctaccagatattcgcacctcatcactggccgaaatccttcacaagcttcaagcgagcaatcatcttccgcaaaccctaacacccgacaacatcgacaactccatcaaaacattgatccgcatactgcaaaatctaaagcaaacccaaaccattgtggctaatcctccgcagcatcacgacgagcacaagtccagtgcccaggattatgattacaatacgggcagcgaagaggaacaccattctcaatcagaggaagcgattgccagacccaagggaccaagtgagtagcctttactttattatgtttccctattttatttccatttgaatagataaacatccaggaccaagcactggaagacctggcatcgattatccgaactatgcggagatccctcaaaccagttttgagtgcaccaagcaacgctacaagggattctttggcgatccggagaccaattgccaggtctggcattactgtgatctcaatggaggaaaggcttcgttcctttgccccaatggaaccatatttagtcaggtaaatgggcgaacttatgttatacacatgttaagaattaaacaattaaaaacatatataaaaacagattgccttaacttgcgattggtggttcaatgtcaaatgttcaacaaccgcacaactttatgtgctgaacgaacgactttacaagtacattctgccttttaatccaaagttccccgaggactacaacggacctattgtggataagtaagacactcttatatgattcgaaagtattaattaacaaacgtgtcatttacttaaggtatctggcaatgaaattccaggaaatggaggagaagatgcgcctggagaaacaacgcaaggcggcccaagaggcacagaagcccgaagaagcaccatctactctacctgcgttgcccaaaaatcacaagccagaaccgaaacatggtagcggaataaatgcccaggtctatgagcaaagctctgagaaaaacttgctgatcgatgatgagatagatgatatttcggagcgtgggacctacgatacgtacgaccagaccgcacccacaactataatggcacccacgagcacccaggacacgcagtcctttgtccttaaaccaatcgtagtttcctccactccacaaccgctgccagagattgatttcgaagttgagccaacagctccaggcagcagcgaagaggaggatcacctgcaaagtctaagggaaactaaggaagctgagaagaaaacgcgtgaatccacaaaggtgagcgtggaaaagctggaagtaatcgagatcaaaaccgatggaaacaccggacaactaatgcccatcaagagcagtagcaaatgagcattttgtggagaggatgaatagctcttgccatatttgtaatgagaaatttgtttgcgacttggttgtataatccctaaattattcttagcgagcaagtactgtaaatagctagctgtaaatgcaactgtatacatacctatagctatagtgaaataaaatctgacaagtaagtaaaaacgatcatagcacttacctgtttgccattgaggacatgaatatgagccatgttgagtgagtttaaagtcgtgggaatctcggaagcatagctttgattctgtggaagaaatcaattaatattaggtggattattattattagattaatcacgatatttcaagttgctagtgcgcaacgtaatggatttataagtacaatgccacaatttatgtgtacctcatagatatgtaaattctaaagcatgtacgttttgtaagctagcatttgaaaccatattgtagatctcaaaactaacgtgcttaaaatcttattcagaacatttaaataagcaattacatatacaaatatggcagggaaatgtttcaatatttcaaaaattatactaacaatctcgattagcttccgtatgcgatgcccgctatgatgcacggtggagcaaatttggcagtgggatcggtaacacttcatacagtacttgtctttgggcattcggtgatggatgcaaaggttctgactcggcaatgtgaagtactgatcccccactctgagtttcttgctgaaactactgtcctgttccgtagaattgcgaaaaatatgcgactttagtacgcgactacgtttgtggacagcatcaaagcaacggcggcagtagaaggcattgcattgcctgcactctccgctggcagtggcattcccgcactcgctgcacttgacggtctggacaatctcgctgatcgaactggggctcagcgattggtttgccgagtccttggcaaatggcagaaggtagctgaggctactggtcctacccagcacgtgg

SEQ ID NO: 34433 - DNA, 3585 bp, DROSOPHILA
atgaggtgtgaaagaaatataaaaaaggttgccattcttgtttcctcgagccaagccactggctctgcgtcccaaccagctccaatcaatagaaatccccgaggcagccacaacagcagtggcattggcgactctgagctaagtgcctcagagcgaagtcgacgattgataccctacatggccttctatctgccggcgcccgagttgcccattaatcagcagtatgccaccaagcactcgtcgtcggctggcggagcacagctgcaggcaccgctgccaggtcctggaaggataccagtgccggtggcctacatgccgcagcagaagcaccatccccaccaccatggaccaccgcatccgccaccagggccgcattatcagtcgggagcaggcgaggtctatcactcccttgcgattggaggccaccagcatcagcatgcgcccccacatccgccacctggtcatgtcaaggagcagcaggcgatcaccaattcgggtgccacgtatattgcatacaagccattaaacccgacgcataaggcaaattgcttccttctaaagtccatcaatcgtgaaataccagcaatattgcgaatattggaatatgaaacgtcgaggcacaagacagtgcagcattttccgccactaccgccgtcgcccaaggagcaagtgcagcagcagcatccacagcagcaccaccaccttctgcaccaccagcagcagcagcagcagcagcagcagcaaccacagcaatacgagatcctatcatcgagcttagtggcatcccaggcgcagcgacagcggggcaaacaatcaaaaatcaatttaacaccatttacagcgcagaacacattgccgggacagtttatacccattatttatacgccagtgagcagcagcaaaccgggctcccccggcgatgccatcaattacaataacatccaaagcaacctgaagcagccagaaattgtctataaaaattcccatcaaacacaaatcgttacggattatgcagccggagcggctgcctccgccgaacagccaccactatcgtcatctggcgaggaggtggatgagacgaatggcgagaagatggtggagcagcagcaggaggaccatagagcccaggaggaggcggtggagcagcagcagcagcagccgcaactacaccagcaagtgcaaaacaatccaagcccagtccactccaatgtccggctgcgacacagaccgcgtccgctcttctccatctctgaatccggtcgtccacatcgtcaccatctttgcaactgcactggtgacgtaagatccatgacgacaacgattgcgactccaattgccgttcgatgtacagcaggaggcacagccagtgggcaacaaaaaggtgggctgaggagacttgacctggccggccagtgtctcatcatcggctacgcttctgtgtcggttcccgattcgagcgcaattaccgcgaccacatcctccaaaaacgcattgataatacatcagaaatcaccggctttcgggcacgttagcaaatacgaaagctacttcaatatggccccgccctcgactagtcttggtcattctcctcatcagcagcattcacacatgacgccgcaggagaaatatgtgctttacttacaacagcgcatgaaacaccaaaaacatcagcaacatctgcagcagcaggagcagcaacagcaacagcattacgacttttcacatccggtggtgccggcacaaagcaatacattggctggtagccaccattcgcaacacacccatctgcatccccatcatccccaaaccaagacccatcatccaaacaagtacgatgccctctacgtaagaccggatgcgactgctggccaacaggtgctgcatatcccgctgcgcgcactcatggcccacgtccaagagcagtcgcactcccagtcgcaattacaagcggagtcgcaggcacagtcgccacgtcacgatttcgccaaggatgagccacttggttccccagcaccaccgcagtttatagactatctaattgatgggccaagacaatcgctggaggaagagcagcagcactcccagcatgagcgaccatcggctcatcagccgccccagcatgcctacatcctggtgaccacgacagctccacatatcgagcatcagcctgcaccgcaaatgcatccagagatttccacaccgcgtccaccgattctctataaccaacagcccacacttcgattacgtcccgtgcatacttacaaggccaccaggcgtcccatttacgtgaccacacccgcacccgcagtgtcgccgacttcaagtcacacggtagagattacgcccaaatttgtttacgtttcggggaagcctcctactggccaaaacccagagttaccgcttagagaaccatctacggtaacgcctattaaacttaagcccgtttacaaatacgcccatgagcgccctccattaacgcctgcatacgtaccagaggatcaggatcagctaccagatattcgcacctcatcactggccgaaatccttcacaagcttcaagcgagcaatcatcttccgcaaaccctaacacccgacaacatcgacaactccatcaaaacattgatccgcatactgcaaaatctaaagcaaacccaaaccattgtggctaatcctccgcagcatcacgacgagcacaagtccagtgcccaggattatgattacaatacgggcagcgaagaggaacaccattctcaatcagaggaagcgattgccagacccaagggaccaaataaacatccaggaccaagcactggaagacctggcatcgattatccgaactatgcggagatccctcaaaccagttttgagtgcaccaagcaacgctacaagggattctttggcgatccggagaccaattgccaggtctggcattactgtgatctcaatggaggaaaggcttcgttcctttgccccaatggaaccatatttagtcagttccccgaggactacaacggacctattgtggataagtatctggcaatgaaattccaggaaatggaggagaagatgcgcctggagaaacaacgcaaggcggcccaagaggcacagaagcccgaagaagcaccatctactctacctgcgttgcccaaaaatcacaagccagaaccgaaacatggtagcggaataaatgcccaggtctatgagcaaagctctgagaaaaacttgctgatcgatgatgagatagatgatatttcggagcgtgggacctacgatacgtacgaccagaccgcacccacaactataatggcacccacgagcacccaggacacgcagtcctttgtccttaaaccaatcgtagtttcctccactccacaaccgctgccagagattgatttcgaagttgagccaacagctccaggcagcagcgaagaggaggatcacctgcaaagtctaagggaaactaaggaagctgagaagaaaacgcgtgaatccacaaaggtgagcgtggaaaagctggaagtaatcgagatcaaaaccgatggaaacaccggacaactaatgcccatcaagagcagtagcaaatga

SEQ ID NO: 34434 - protein, 1194 aa, DROSOPHILA
MRCERNIKKVAILVSSSQATGSASQPAPINRNPRGSHNSSGIGDSELSASERSRRLIPYMAFYLPAPELPINQQYATKHSSSAGGAQLQAPLPGPGRIPVPVAYMPQQKHHPHHHGPPHPPPGPHYQSGAGEVYHSLAIGGHQHQHAPPHPPPGHVKEQQAITNSGATYIAYKPLNPTHKANCFLLKSINREIPAILRILEYETSRHKTVQHFPPLPPSPKEQVQQQHPQQHHHLLHHQQQQQQQQQQPQQYEILSSSLVASQAQRQRGKQSKINLTPFTAQNTLPGQFIPIIYTPVSSSKPGSPGDAINYNNIQSNLKQPEIVYKNSHQTQIVTDYAAGAAASAEQPPLSSSGEEVDETNGEKMVEQQQEDHRAQEEAVEQQQQQPQLHQQVQNNPSPVHSNVRLRHRPRPLFSISESGRPHRHHLCNCTGDVRSMTTTIATPIAVRCTAGGTASGQQKGGLRRLDLAGQCLIIGYASVSVPDSSAITATTSSKNALIIHQKSPAFGHVSKYESYFNMAPPSTSLGHSPHQQHSHMTPQEKYVLYLQQRMKHQKHQQHLQQQEQQQQQHYDFSHPVVPAQSNTLAGSHHSQHTHLHPHHPQTKTHHPNKYDALYVRPDATAGQQVLHIPLRALMAHVQEQSHSQSQLQAESQAQSPRHDFAKDEPLGSPAPPQFIDYLIDGPRQSLEEEQQHSQHERPSAHQPPQHAYILVTTTAPHIEHQPAPQMHPEISTPRPPILYNQQPTLRLRPVHTYKATRRPIYVTTPAPAVSPTSSHTVEITPKFVYVSGKPPTGQNPELPLREPSTVTPIKLKPVYKYAHERPPLTPAYVPEDQDQLPDIRTSSLAEILHKLQASNHLPQTLTPDNIDNSIKTLIRILQNLKQTQTIVANPPQHHDEHKSSAQDYDYNTGSEEEHHSQSEEAIARPKGPNKHPGPSTGRPGIDYPNYAEIPQTSFECTKQRYKGFFGDPETNCQVWHYCDLNGGKASFLCPNGTIFSQFPEDYNGPIVDKYLAMKFQEMEEKMRLEKQRKAAQEAQKPEEAPSTLPALPKNHKPEPKHGSGINAQVYEQSSEKNLLIDDEIDDISERGTYDTYDQTAPTTIMAPTSTQDTQSFVLKPIVVSSTPQPLPEIDFEVEPTAPGSSEEEDHLQSLRETKEAEKKTRESTKVSVEKLEVIEIKTDGNTGQLMPIKSSSK

SEQ ID NO: 34435 - DNA, 3117 bp, DROSOPHILA
gcaacacatgccgcacaggacacgaaaatgcgaggccgggccaagccaatccaaaccaatccaatccattgcaagctggccaggaatggcgaaacgagcaaatcacacaattacttatgtttcccagtgattggtcacatgacacggcttaaacgagcctagcccaaaattaattcccccaaattataacacattttgatgggttttagacggacatggacagatggacagaccagacgccttccttcttcgagcttaaccattatgataaatatgattgaatccaagtctaatttagttaaaatttaaatcgttgcgtcgcatcactggcgcgcctttcttttcactgtcgtctgtgggctggggattcccctcccacatggcatggaggctctttggatgcctctgccggctgacacggctcactaaacacggccaactgtagcggagagtgtggccaacaatgcacacgataaataaactctagtacgccatatgcagtggggaaagatgcaagaaaaatttgttcgacaatttacctaatgctattttataatagtatttcttttacggttatgacagcgccactttttttgtttggtttctgtggttaagcttcgttgggtctggctttctgcttcatccaagtcgcttaattgttcggtttgcatctattactcaacatcgactggcttttttttttttaaatatatttaaataatttaaaagctctatcccgaaggaatagtatttacatatcgtaaacgattagacctaaatacttcaccatttggttttttattaataccatacaaaataaaaagtgggtgatgggattcagacagttgaaagatatatctttctgaaaaaataccattgaatttctgaggaaccattccaatttacacatatctgtgaaaccaacgcgctatgcgtgcaagtgctcataggattctcagtgatgagtggcttcagagattttgcaaacttgcagtcagttctagggaatgggtgtttgggattcctcgacggttcgcagccatgcacagttaaggatctcgcgtagattccagcgagcatgtgcctccggttcgagcagcactgaaacagtggccttcgcctgggccgatatcgtttcctgcagcttccggcgaaaggcaaacttgcggttacgctgatcctccagcaatttggtcaagttactgtcatcgaaaggcatcttggcattcatcatgatgaacagaatgactcccaaggaccaggcgtccgctagctttggatcatatggtcgtccacaaactacttcaggtgcagcataagcagctgatccgcagtatgtctcagatttcatctcccggccattatcgtcgcgacaatagcgagcaaatccgaaatcggccagcttgatgttgagccgcttggagagaagaatgttctcgcacttgagatcccgatgggcaatgtccaggttgtgcagatacttcagtgccttggacatctgaaagaaccagatcttcgattgcttctcatcgatgggacccgacctcttgatgtgcgacaacaaatccccattctctgcgtaacgcataaagatgaagatcttgggaccgcgctgaaggatgctatggatctgaataatgttggaatgatcaatctttgtcaggatctccagttcgcgcggaaagaacttgttcacgaaatcagtgggcgccttggctttgtcaatgattttacaggccaaatgtactccatgtccatgatcatcggcataaccggcggttataacagtggcataagacccctcgccgatcttgtgacccacattgtagccccgctgtgccagtgcatccacatccgaacttcgagtacccaactgacggatcccagcgctagaattgtatttggacatggctcttgtttcctcggcgtgcgtgtagtgtagttttccgagagtttgcaactaggtgatttggtaatggcatcaagcgaatgattcttttctaaacagcggacataattacccttaagttggttgatttcacaaacaataattttatgccacttgtgtattttacttactaaattcgaatccagaaattttgacaaaacctacaaacgttatgaggtgtgaaagaaatataaaaaagggtaatgcacagccttctaccataactgacaaatctgaaccaaagtataaggttactacgtcccaaatattattatgctagcatgcgaaatgctaataagagggcataaaaataatatataatatatggataaggaaaaactgtttaaagttgagtatttgttttgagacattttaaaagccttaaattgataaattaagtaaaaaaaaaaaactgtgttctgaaagcaactaaagttttaatatttctatattacagttgccattcttgtttcctcgagccaagccactggctctgcgtcccaaccagctccaatcaatagaaatccccgaggcagccacaacagcagtggcattggcgactctgagctaagtgcctcagagcgaagtcgacgattgataccctacatggccttctatctgccggcgcccgagttgcccattaatcagcagtatgccaccaagcactcgtcgtcggctggcggagcacagctgcaggcaccgctgccaggtcctggaaggataccagtgccggtggcctacatgccgcagcagaagcaccatccccaccaccatggaccaccgcatccgccaccagggccgcattatcagtcgggagcaggcgaggtctatcactcccttgcgattggaggccaccagcatcagcatgcgcccccacatccgccacctggtcatgtcaaggagcagcaggcgatcaccaattcgggtgccacgtatattgcatacaagccattaaacccgacgcataaggcaagtatttgaataataagtgtttttaaaaaggctatgtcgccttgggaaagaatatatatcaaatggagctaaattagtgctgaatcggtttagattgcttccttctaaagtccatcaatcgtgaaataccagcaatattgcgaatattggaatatgaaacgtcgagggtattgaaaaagcacttggatacctatcca

SEQ ID NO: 34436 - DNA, 999 bp, DROSOPHILA
gtttgtaggttttgtcaaaatttctggattcgaatctagttgcaaactctcggaaaactacactacacgcacgccgaggaaacaagagccatgtccaaatacaattctagcgctgggatccgtcagttgggtactcgaagttcggatgtggatgcactggcacagcggggctacaatgtgggtcacaagatcggcgaggggtcttatgccactgttataaccgccggttatgccgatgatcatggacatggagtacatttggcctgtaaaatcattgacaaagccaaggcgcccactgatttcgtgaacaagttctttccgcgcgaactggagatcctgacaaagattgatcattccaacattattcagatccatagcatccttcagcgcggtcccaagatcttcatctttatgcgttacgcagagaatggggatttgttgtcgcacatcaagaggtcgggtcccatcgatgagaagcaatcgaagatctggttctttcagatgtccaaggcactgaagtatctgcacaacctggacattgcccatcgggatctcaagtgcgagaacattcttctctccaagcggctcaacatcaagctggccgatttcggatttgctcgctattgtcgcgacgataatggccgggagatgaaatctgagacatactgcggatcagctgcttatgctgcacctgaagtagtttgtggacgaccatatgatccaaagctagcggacgcctggtccttgggagtcattctgttcatcatgatgaatgccaagatgcctttcgatgacagtaacttgaccaaattgctggaggatcagcgtaaccgcaagtttgcctttcgccggaagctgcaggaaacgatatcggcccaggcgaaggccactgtttcagtgctgctcgaaccggaggcacatgctcgctggaatctacgcgagatccttaactgtgcatggctgcgaaccgtcgaggaatcccaaacacccattccctag

SEQ ID NO: 34437 - protein, 302 aa, DROSOPHILA
MSKYNSSAGIRQLGTRSSDVDALAQRGYNVGHKIGEGSYATVITAGYADDHGHGVHLACKIIDKAKAPTDFVNKFFPRELEILTKIDHSNIIQIHSILQRGPKIFIFMRYAENGDLLSHIKRSGPIDEKQSKIWFFQMSKALKYLHNLDIAHRDLKCENILLSKRLNIKLADFGFARYCRDDNGREMKSETYCGSAAYAAPEVVCGRPYDPKLADAWSLGVILFIMMNAKMPFDDSNLTKLLEDQRNRKFAFRRKLQETISAQAKATVSVLLEPEAHARWNLREILNCAWLRTVEESQTPIP

SEQ ID NO: 34438 - DNA, 3202 bp, DROSOPHILA
cctttgccccaatggaaccatatttagtcaggtaaatgggcgaacttatgttatacacatgttaagaattaaacaattaaaaacatatataaaaacagattgccttaacttgcgattggtggttcaatgtcaaatgttcaacaaccgcacaactttatgtgctgaacgaacgactttacaagtacattctgccttttaatccaaagttccccgaggactacaacggacctattgtggataagtaagacactcttatatgattcgaaagtattaattaacaaacgtgtcatttacttaaggtatctggcaatgaaattccaggaaatggaggagaagatgcgcctggagaaacaacgcaaggcggcccaagaggcacagaagcccgaagaagcaccatctactctacctgcgttgcccaaaaatcacaagccagaaccgaaacatggtagcggaataaatgcccaggtctatgagcaaagctctgagaaaaacttgctgatcgatgatgagatagatgatatttcggagcgtgggacctacgatacgtacgaccagaccgcacccacaactataatggcacccacgagcacccaggacacgcagtcctttgtccttaaaccaatcgtagtttcctccactccacaaccgctgccagagattgatttcgaagttgagccaacagctccaggcagcagcgaagaggaggatcacctgcaaagtctaagggaaactaaggaagctgagaagaaaacgcgtgaatccacaaaggtgagcgtggaaaagctggaagtaatcgagatcaaaaccgatggaaacaccggacaactaatgcccatcaagagcagtagcaaatgagcattttgtggagaggatgaatagctcttgccatatttgtaatgagaaatttgtttgcgacttggttgtataatccctaaattattcttagcgagcaagtactgtaaatagctagctgtaaatgcaactgtatacatacctatagctatagtgaaataaaatctgacaagtaagtaaaaacgatcatagcacttacctgtttgccattgaggacatgaatatgagccatgttgagtgagtttaaagtcgtgggaatctcggaagcatagctttgattctgtggaagaaatcaattaatattaggtggattattattattagattaatcacgatatttcaagttgctagtgcgcaacgtaatggatttataagtacaatgccacaatttatgtgtacctcatagatatgtaaattctaaagcatgtacgttttgtaagctagcatttgaaaccatattgtagatctcaaaactaacgtgcttaaaatcttattcagaacatttaaataagcaattacatatacaaatatggcagggaaatgtttcaatatttcaaaaattatactaacaatctcgattagcttccgtatgcgatgcccgctatgatgcacggtggagcaaatttggcagtgggatcggtaacacttcatacagtacttgtctttgggcattcggtgatggatgcaaaggttctgactcggcaatgtgaagtactgatcccccactctgagtttcttgctgaaactactgtcctgttccgtagaattgcgaaaaatatgcgactttagtacgcgactacgtttgtggacagcatcaaagcaacggcggcagtagaaggcattgcattgcctgcactctccgctggcagtggcattcccgcactcgctgcacttgacggtctggacaatctcgctgatcgaactggggctcagcgattggtttgccgagtccttggcaaatggcagaaggtagctgaggctactggtcctacccagcacgtggtagtttagttcgtacaaatcgcgcaaattggcgaccgacttgcagtccgatctcttggccacaatcgtaggaggagctggactatggcacacggcgcacttcggatccaggcgatcgttccacaagcagctctcgcagagagtatgaccgcatcccagtagaaagggacgatgattgtctgttgattaaaagcaggtttcaagttaagctttgaaaatatcgtactaacaaaatatgaaataaacagtcgtttagatcccatctgacaatattaattggttcgagaacaatatttgtgctaaaaaaaattgaactgcagggtttatttcattacccaacataaacattcataaacttgtgcatgcatacatatatacatatgcacatacatatgtaaaattactgtacacctgtttagaatcagacgccaaagtgaacggaaaaacttttgcagtaatgtgagtgagtatcttcaaaacggctcttcatgtttggctctggcttcttatttttcttaaatatgtttcaattcatttaacaagtaacctttcaagctgccagcagcctttttactacattttagttaacgtttttacactccttgtactattttccatttttcttgcctgaacttgtcaagctttcatggtggcaacacttgttcaataagtgatgcagcatttgccattgcttataccaattgtagccccccacagtctaaaaagttatgaattgaaaaagccaattatgtttggccaaattcctatgccacacagttgagcacttaccttcttcagagttcgtattgtataagtaagtaaaacattttgaacattttgggcaccgcagaagattctgcagattggacgccacaaacttgggatcaaagggctttattccactgtcgtcggcaatcatgatcgaatcttagcacgagccgacgggaaatactgcactttaattactacacttttatttaattcccgacttccaagctgtcacacgaagaacagttattcaagcacgccggcgaaaaggaagagggagatggtgatggcagcccttcgatgacagtatcgataagattgctccaaaaaatatcgaaggcaattatcaataaagtgggaacagttagtctcagtaaaagtgggaagagtatttgatgggcattgtcagtgaatagttcaaaaatgatctctttaaaaggcatattccaaataaatagataattatacttactttaacataataaacggacgacaccaatctcttcccaataaaagacttttttcccttaagcacctttattttaacatactacaaatttgaccaaataccgctgtcgaa

SEQ ID NO: 34439 - DNA, 756 bp, DROSOPHILA
atgtttatgttggacaatcatcgtccctttctactgggatgcggtcatactctctgcgagagctgcttgtggaacgatcgcctggatccgaagtgcgccgtgtgccatagtccagctcctcctacgattgtggccaagagatcggactgcaagtcggtcgccaatttgcgcgatttgtacgaactaaactaccacgtgctgggtaggaccagtagcctcagctaccttctgccatttgccaaggactcggcaaaccaatcgctgagccccagttcgatcagcgagattgtccagaccgtcaagtgcagcgagtgcgggaatgccactgccagcggagagtgcaggcaatgcaatgccttctactgccgccgttgctttgatgctgtccacaaacgtagtcgcgtactaaagtcgcatatttttcgcaattctacggaacaggacagtagtttcagcaagaaactcagagtgggggatcagtacttcacattgccgagtcagaacctttgcatccatcaccgaatgcccaaagacaagtactgtatgaagtgttaccgatcccactgccaaatttgctccaccgtgcatcatagcgggcatcgcatacggaagctaatcgagattaatcaaagctatgcttccgagattcccacgactttaaactcactcaacatggctcatattcatgtcctcaatggcaaacaggtaagtgctatgatcgtttttacttacttgtcagattttatttcactatag

SEQ ID NO: 34440 - protein, 251 aa, DROSOPHILA
MFMLDNHRPFLLGCGHTLCESCLWNDRLDPKCAVCHSPAPPTIVAKRSDCKSVANLRDLYELNYHVLGRTSSLSYLLPFAKDSANQSLSPSSISEIVQTVKCSECGNATASGECRQCNAFYCRRCFDAVHKRSRVLKSHIFRNSTEQDSSFSKKLRVGDQYFTLPSQNLCIHHRMPKDKYCMKCYRSHCQICSTVHHSGHRIRKLIEINQSYASEIPTTLNSLNMAHIHVLNGKQVSAMIVFTYLSDFISL

SEQ ID NO: 34441 - DNA, 3089 bp, DROSOPHILA
cctcgaaaaacagtgacaaaaattagacactaatacggttcttgggctctcttgacaagaaattaacaaagaagctaaaaacaaaaaaaaaaacgaaactgaatccgatcccacaatcatctgttcaaaaataaacagtacattatacaattagatcttatttaagtgtctgaacacgaatcatctgcacatacaacatacatacattttaaatatggtttgggttcctcaatatccaattcagtcgctccaccgatttttgtaaataactactccttgttgaatattttaagtgaacccatggccaccgacgatcatcattttttttacaaagcaataatgattttcccatcccgttcaaaagtgctgtttccaaattctcgaaaccccatgaaagaaaaagaagaaatttttaactaaaatttatttgccaattttttgggtgtaacaaaatttgattgcgaacaattttaaatgcatataatccaaaaatcccgaaccgagcagaggtctctgccccatataacaccatgtctcagggatatgaacaaaattgatttaacaatcattcgtttttcagttgtaatcattctttccatggcaaaaagaaagcagatattacgaatctactaccagaaaagcaaacatacacgcataaacacacacacacacacacacacaccagaaacatacaaacacacacacgcagactatgaaaaccatctaattatacagtttaagaattattataaaaatgatttttctgtttctgtgaatcaccaacaacaacattgtttttctcttctttttttctttgcgcgtttgaacgaacaaattaatgaaaaaaccgaaaacgaaatcgaaatcaaatcgaatcgaaacgaaaaatgcaataacccatgatataaacaaaaataacgaatcgaaatcgaatgcaattgcaatcaatcgaaaataaattaaatatataattaatcgcgcaggctccaaggcctggcacatgcggctaactttcgagcgcctctcgggcggctgcaacctgcaccgttgcaagctgtgcggcaaggtcgtcacgcacatccgcaaccactaccacgtccattttccgggccgcttcgagtgtccgctgtgccgggccacctatacgcgcagcgacaatttgcgcacccactgcaagttcaagcatcccatgtacaatccggatacgcgcaagtttgacaacctaatgtcctcgtcggcggtgggggcggctgccacgcccacggccagccaattggcggtggcctcccaagcggcgatggcagcggcagccgcggcggccttcaatgcagcgcaacagcagcaacagcagcagcagcagcagcaacaacatcaacaccagcagcagcagcagcatcagcagtcgcaacagcagcagcagcaacagcagcagtcgcaacaacaactccatgcccttgcgcagcagcacatgctgcaattgcagccgcaacaccaccagcagcagcagcacaatgccacaagtgaatgatacagtcagtacctgggctggaactacggcgcctggcgtcccgatgaccccaaccccaagcagcagcaacagcagccacatcgcaaggctcagcccttcaacttctatgcccgcgactattactaccagcaacatcagcagcagcagcaacagcagcagtcacccatcagcagcatgagcaacggcaacatgcggcagcaacagcagcagcagcagcaacatcgacgccagcagcaacttccgcctgcgcagacgatcatcatcgatgagagcgacaatgagctggaggaggagcagcagatgaggctgagctttgagcggtacatggagcagctgaagcagctggcgccctacgatccccaagaaactttgtgcaatagcaacaccaataacattagcaacagcaacagaaacaacaatagtaacagcaaccgcagcggcgaaccaacgaatgccaatcaaatggaagctactacaactactactaatagtaataataataataacaatagctatgctaaccacagcactaggaactacaacaaaaggcagcaggagtagcaacagcaacagcagcaacagcaaccaattgatactcaaagcaaatgtaatttagacgagaaacgcgaataagttcttaaatgttgaatcgatttaagggtaagccaaatttgtttgtcaattatgtaggcgaaaattgaagaggattggaaaggagaggagaggatgcatttcatttccggctgcgaggaggaatccaatgctgatcggtgcaaatggaggcgacacattgtccaggtttcaactagatacggatgttgcagtcacccacacgcacttatatacagaatgcagtatatagtatacagtatacagtatacagtatagtaggagaattattcgcaatggagttttaattgcaaaagtcttgttcgtggggcaagcaaaagggtttcccagccagctgaaagcagagggtggaaagcaaaaaggttttaactacagtagtagcagcactcaaatatttacaacaaggaaaaacccacaataaaagaatcacataaagaaagaagcttaaaactaaacttaaactaattgtatttcgaagctactcatactacatatatatggaattacaaattttacgaactaaaatcgttggacctgtcagacatttgtgccaaaatctcttggtggtagtgccaacttccttggctgcactctctctctctctctctctatttaattgcacctgttcgttgttgcatttaacactagtatgtgcacacccgcacacagacacacacacacacacacacaacccaacccaaacacccacactaacccacccggaaaccactctgatactctataggaaatgaaaagaagttaggagcaaacaccgaacattgaagacattttaacgagagatttctatgctgctaaccattttactgttttatataaatgtaacattaattacgatctaatcgatgtcgtgttttgcgcataataacaacaaattgtaaaatagaataatagcgttactcctcgactcgat

SEQ ID NO: 34442 - DNA, 987 bp, DROSOPHILA
atgcggctaactttcgagcgcctctcgggcggctgcaacctgcaccgttgcaagctgtgcggcaaggtcgtcacgcacatccgcaaccactaccacgtccattttccgggccgcttcgagtgtccgctgtgccgggccacctatacgcgcagcgacaatttgcgcacccactgcaagttcaagcatcccatgtacaatccggatacgcgcaagtttgacaacctaatgtcctcgtcggcggtgggggcggctgccacgcccacggccagccaattggcggtggcctcccaagcggcgatggcagcggcagccgcggcggccttcaatgcagcgcaacagcagcaacagcagcagcagcagcagcaacaacatcaacaccagcagcagcagcagcatcagcagtcgcaacagcagcagcagcaacagcagcatcagtacctgggctggaactacggcgcctggcgtcccgatgaccccaaccccaagcagcagcaacagcagccacatcgcaaggctcagcccttcaacttctatgcccgcgactattactaccagcaacatcagcagcagcagcaacagcagcagtcacccatcagcagcatgagcaacggcaacatgcggcagcaacagcagcagcagcagcaacatcgacgccagcagcaacttccgcctgcgcagacgatcatcatcgatgagagcgacaatgagctggaggaggagcagcagatgaggctgagctttgagcggtacatggagcagctgaagcagctggcgccctacgatccccaagaaactttgtgcaatagcaacaccaataacattagcaacagcaacagaaacaacaatagtaacagcaaccgcagcggcgaaccaacgaatgccaatcaaatggaagctactacaactactactaatagtaataataataataacaatagctatgctaaccacagcactaggaactacaacaaaaggcagcaggagtag

SEQ ID NO: 34443 - protein, 328 aa, DROSOPHILA
MRLTFERLSGGCNLHRCKLCGKVVTHIRNHYHVHFPGRFECPLCRATYTRSDNLRTHCKFKHPMYNPDTRKFDNLMSSSAVGAAATPTASQLAVASQAAMAAAAAAAFNAAQQQQQQQQQQQQHQHQQQQQHQQSQQQQQQQQHQYLGWNYGAWRPDDPNPKQQQQQPHRKAQPFNFYARDYYYQQHQQQQQQQQSPISSMSNGNMRQQQQQQQQHRRQQQLPPAQTIIIDESDNELEEEQQMRLSFERYMEQLKQLAPYDPQETLCNSNTNNISNSNRNNNSNSNRSGEPTNANQMEATTTTTNSNNNNNNSYANHSTRNYNKRQQE

SEQ ID NO: 34444 - DNA, 2372 bp, DROSOPHILA
ccttatatgcacagtacgtctcactggattttctcttggtttgctttcttggctggctttcttgtcttgttttggatgataagcggaagcggtaatgatctccacatcgatatacataattagtttaaggaacgcgcgccatcgcatttacaattacttctcggatctgaattggcaaaattcactttattcacttgcatttgcattgagtacttcttctttgacttgcccagcacaatcagagaaaactacgtcgtctatgcctggacgagctgattgctatattgctatcgacgctctcgtctcacaaatttgatactttgcccccagtttgcgatggaaactggggatcaacctaagtaaagtacatttgttgttgtggcttgctttttgccagttgcaacttaaagttagcttacgtacgctaagtaatacttaatcagagggctttgtgggtgtgtgtgatttagattttaggctggttagattaatgcgtctgtgcggatgatgtataaattcattggggtacttaaaacataaattgcttgagacacgctacgattacagtgcttgctctacgatgtttactttatatcatgtgcgcaaatcacaaatcttttcatcaattacaaataaatagcatggagtgtttgtataaaataagagaggtctgtaaaatcagcatatatataaatacgcatatatataaatatatagatatatatatattcggattatgtatattattgcactgatgagattttgctttcagtttgggacgaattacaaaaatgcgatgatcaaagatacaaaatacgaacaaaaaggggaataaataaatacatgtacaaaaaatgaagggacgaagggactggacatacatataatatatataggacgtggtaggtgtgactccacttaagctaagtgctgatgctgctggtggttctaagaaactttctctcgtacaagtacacatagatatagttaggctacagatctaacggcaaagcgtataatacaatttctgcagtttgcgtttcgagcgacactgatgatgatgatgatggtggtgcgagtggtgatgtgagtggtgttggtggtggtgatgcctgtgtgatgttgccggatggtgatgatggcgcgcctgtggcggctgctgcgtctgctgttgttgcatatggctgtggtgatgactatttacaaggctcgcggacgaggcgctcagagccaccgccgacgagatcagggccgcagccaggcgcgatgaggaggccagcgcgagctccggggcggcagccagcagctgctggtggtgctggcgcagctgcgccacctgctgacgcttgagggcggcggtacccttgcgcatcgcatgcaagcgacgcctgtggtgatgcggatgcagttgcagctgtcactttgcctcctcgccggcttccaatagattgttgctcccattgttggtggcggccaccgccgccgaagactgctcactgatgccgacaccctgctgctgctgcatttgctgttgctgctggttgagcgcgtggacgtgctggcaaaatgcctgcagcacctcgaagtgggtcatcagattcgctggctggttgtcgtagtgcaagtgccgggtgatcggcgcattcagcctacgtagcatctccgtaaacaacttctcctcctttctaatccagggtcggcgatcatcctgcacctggtagggcgtcaggtggacatggatgttcatgcctgcttaaagactcccactcgttagttgactcaacttggcatttactctctctccacttacccatccgcgttagtgtttccagcaagctacgggacgtgatccaagtgttcttttggcccccatggccgccatccagccagtacatgtctgaaatccgggagagaaggcggcacatgctgctgtcgtcgggcgtgagcgtcttaagatagtggaactcgtagatgaactataaacaaaaaagaaagtgcagataagtatggtcagttgggtatgggccacaatcctcagataccgattcagcgtttagatttatactctacacgctccatcgacacttctgcataggattgaagctggcgtattggcgagtggatcaactaggtaacgaaccaaacgcgactcacttgattgagcacgacgcagcccttgctaaagccaatcagcaccagcttggatttgtccagattgaggttctcccgccaccacagcggattgctatcgctgcttgccgttgatgtggaggtgcccgttgccgaggctgttgttgcagaggcagcggaagcctgcctcgtaccacaatcgttgttgtagtgctccacattgttggtggcatttatcgccg

SEQ ID NO: 34445 - DNA, 372 bp, DROSOPHILA
atgcgcaagggtaccgccgccctcaagcgtcagcaggtggcgcagctgcgccagcaccaccagcagctgctggctgccgccccggagctcgcgctggcctcctcatcgcgcctggctgcggccctgatctcgtcggcggtggctctgagcgcctcgtccgcgagccttgtaaatagtcatcaccacagccatatgcaacaacagcagacgcagcagccgccacaggcgcgccatcatcaccatccggcaacatcacacaggcatcaccaccaccaacaccactcacatcaccactcgcaccaccatcatcatcatcatcagtgtcgctcgaaacgcaaactgcagaaattgtattatacgctttgccgttag

SEQ ID NO: 34446 - protein, 123 aa, DROSOPHILA
MRKGTAALKRQQVAQLRQHHQQLLAAAPELALASSSRLAAALISSAVALSASSASLVNSHHHSHMQQQQTQQPPQARHHHHPATSHRHHHHQHHSHHHSHHHHHHHQCRSKRKLQKLYYTLCR

SEQ ID NO: 34447 - DNA, 5053 bp, DROSOPHILA
gaaaaagtctagaagtgacccgtttttgggttttgttcctcaacttttgccagtcggagacgagttttttagtgcaaactcacctgttttggctgttggctgatctataatttattccaacttctgctgacctgcactttggactatatctgcgctgcgaaatggaattggtggatccaagagctagtgccacaaccttcgccttgaacgactaatcggagactgaagtcggaattccgattataaagccgaggctgcggagaatgcgcgatcgtctccaccggtttggtattgccgtggtcgcggtgattttgttattgcacttatagccatggtaacaggttagccaagcggctttccgggctcctctttgggatcgtcttcatgaacggttcactcgcagcgaaagagcgagcacagagtggagccaaactataatacatagttaccagcggtaagagaaagatctgggtagtggattccaagaaagtgtgtctagaaagccacctgtcgggggcttcgcaaagcttcttttctagttatgcagctcgaatgatgagcttgaaataatgtagaaaataataatggatagtaattaacttttttaatgaccaagactttattactatttgaagtactacgggtaattgtataaacatgtcagataaaaatctattttatttttcatttcatatatcattaaccgagataccactgaaatatatcaacattcttttcaattcaatgcattttattatagagatgacatattcacaagtacaataaagaatgctcaacaatctaccacaagcttagtctaagcccgtctagttcgttgccttagtcctgtatatagctttatttgaaaaatataattcccttagaattatcgctcaaatataattcctttgaatgcagtaatgtttgaaaataaatatatatttacattcggttataatgctggcagtttaaacaaggtcatatggtaatataagtcattctacttctcaatgctgttttgtcggcggggtggttgggtttccgcatccgtttccaagtgcttggttaaggtgttgtaccattcgttcatatggttggatatgatgttgatgaagcgagatacctttgatttcatagtgctcacgaggctttcggagagtttagtcagactacgaccagaggccagcgaattcttgctgctgatcctcatgatcttggattccttttcctccctgggctggctggcatccttctctgcctcgtgatccatcttgtactcgtagtaggtgtaccttcccagcggcatcatctcatcgcgatctgccttgtctatggcattggagggcagttcagccagggaattagtgttaagtacggcacgccgccttctcatagctggtaaatcccaccaggaagtgataccctcatcggctggcttttgaggcaatttcgaatgaagagtaggcgttgccttctttccctcaaaatgatcctgtatgagggacttcctaccgacattcgccgactccagggaactttcccgcatgccctcatctcctagagaaaactcgtgttcatgctcgttgatgtggctgaggaaatgctttccaagctctttttgggcctgcaaaaagtcgttggccacgtgacctagcctggagtgacgccttctagcacttggcaccggttgcacatcctcctcgggctcggactcttcaacagacttgggtttttgggacagactagccttggccatggtggccttgctggagaagggttccggaaatagcagtgagttcaaggtggctcccagatttaatcgcttgttctgcttgggagctggtagggcctcaaagaattccgtgggcagtagacgcaacttgggacgcccttctgtttgctccggttcctgctcctgttcatcctctttgtcctccctttgaatgatctttagctgactcttggacttggtcctgcgctttttgggtacctcccgctcaagttcctcttcgttttccacctccccatccacagtctcaatgtgcttcaggtggacatcaccctctggaagccgtgtgtaagtgggtatttcctcggatttctctccaatgcgcttgaagaacttctcctcatcgaattcatcgaagtcgaaaaggggcttattcttcttttccggcttccggatctcagtaatcttcttcgtcaatgctgtcttcttaccctggcgattgtagaagaagggcccggaatagctggatgtgtcgcgtctctcccgctttttgcccatgtcacgggtgtgctcgagcacttgatacagccaggccagagctttatgaggcttaatagcctgttctttggacttgttcacttcatcacccacatccctcttcagcggaccgtcatccttgaaatggtccagtagtcgatctagtagggtctgtgacgtttcctccttatcaacgacaaatctccgattgcgattaatagaactctgaaccgagcctcgggcaactgcagtttcctcgatcaatcgttggagtaaccgatcggcggaactatagcggaatgatcggcgcttctccttggaggactccccactcgaatcgcctgcctcgatctccgtgaactggcagtgttccagattgacatcgggcagcacccagaaactcaccgccatgctgggcgtgatcagttgcagtggctttgttggatcaatgggtttgatcaggggacgcaaagtggtgttcaagtgcaagcggacattattcagctggaccctttgatcatggccagtcagtacatactgccaaatctcgctactgctcaaactactggtactcttcacagtaatcgttgttggctgctcctccgtatttaccaccatgaatgccaatcctccggatacggcatttgcacaatgggtatacaacttgttgctcggagcaaaggcgttcagaggtcgggctgggaacacccttgatcccatgaccttcttgaacaaagcagttacatacagactgaagtttggtcgctcgaagtccaccaagttcattcgcttaaatataacatcgaatccactagcggcggcatctcccatagtttgggcccaccgcaaggcatccgtggtctcgtcgcccaccaatctctgcgaggatcgctcctccggcaaggtcagccacaagggaacgcgctgttgctgaagggttcgcagggcaggatcgctgtcgtacaagtagcttcccaggcttgatttgggcagcatgtttgcgggtctacagttggaacaaaataattattaaaaggtaagatgctacttctataatgttcataaatacattcacttccaatctcactacttactgcgtccatccaaatgccgtattcagatccttggacatatctacgtatctcttggtctcatcagcactgcttccagctgaaatgtccgctcccattagtcgccagtcgtccacatacggtttgaaagtatccgtcatcagtttgagagttcgaagttcctggacgtagtccttggctctggaggtgccaaagtctgtgcccagctgccagatgcagtcggtgatgccaaccatataggaggtgttcaggatcttcagcgtatgcatggagtcccaatcatcgggcgcataaggcaccgggatgatcatggtccagtttacggcccttcgaaaaataaggtcagatagatgatcagaaaatgggaggaaagccatcaccaccaacttaccgcgaccaccgattgaaccccttccaaatgattttggtggggtttcgcagcctagttggcgcattgctggcgaagtaaaaatctcccacgaacttgatgtgcgcatctcccagcagattcgccaaattggtcaccgccttgcggttcttgccatccagggcatcgtacagatcctccggacgaacggcaaaactgacaaacttttcgttcacatcgttgtaaggacgattcacatggagctgaaccagtgtatccgcaaagcacactaccgccagtcccaaaagagccaaacacaaatgccacatgttttaatccagaattacgaatggaaagaccggagacctgtctgttgctcgatggctccacaactgaccggagtttcataatgactacctctaaataaactccccactcgatcatttccatctgatttcgctgccatccgcaagaattttgcgctgatcgctgccctcaatatgatgaccttcttccaatgcaccactaacgtaacccaaacccacatacaagtgggccgtggttggaatgccgtgcttatcaatgaactatgagatgacccaataaggttggggtaaatctgcggaggccagttcttcggcatcctcgctggcggtcacggtttgttagaagaaaagagaagagaaaccgtctcatttttttaaattaagaaggtttctcacacaaagtttaatgttacgaaccattttgcaaaacaaatcacgtcaaagctttcagttatactcacaaagtaaaaggagggtatattagattcgctgaaaagtgtgaaacatgtagaagaatatatttttattatatatatttatatttttgatcagagtcacaagtccagagtcagagtcgatcgtccacagtttctgtgatatacataaatatatgaacatgaatgtgaatataatgtatgccaatttcagatatggaaactattaaagttatgaagtatttgtgttctttgactagaacgtaaatatttccaattggtgtaaatttaaatagcgcgctcatcaacagatctatcaccaataagtgtgtagaaagttgctatcgtcatcgacctatctgctgttttccaacactaagttgaccgccattttgtacgtcaaaacagaaatttcgccaaaacttgaatagaacgttgcgacaattattattacagttaaacaaattgttatccaaaactacatgagcaatgggtagtaaccaagattggaacaaggaagactccaaaactgaggtcccacctgaggaagatgaccaagtgacagcata

SEQ ID NO: 34448 - DNA, 2808 bp, DROSOPHILA
atgtggcatttgtgtttggctcttttgggactggcggtagtgtgctttgcggatacactggttcagctccatgtgaatcgtccttacaacgatgtgaacgaaaagtttgtcagttttgccgttcgtccggaggatctgtacgatgccctggatggcaagaaccgcaaggcggtgaccaatttggcgaatctgctgggagatgcgcacatcaaggccgtaaactggaccatgatcatcccggtgccttatgcgcccgatgattgggactccatgcatacgctgaagatcctgaacacctcctatatggttggcatcaccgactgcatctggcagctgggcacagactttggcacctccagagccaaggactacgtccaggaacttcgaactctcaaactgatgacggatactttcaaaccgtatgtggacgactggcgactaatgggagcggacatttcagctggaagcagtgctgatgagaccaagagatacgtagatatgtccaaggatctgaatacggcatttggatggacgcaacccgcaaacatgctgcccaaatcaagcctgggaagctacttgtacgacagcgatcctgccctgcgaacccttcagcaacagcgcgttcccttgtggctgaccttgccggaggagcgatcctcgcagagattggtgggcgacgagaccacggatgccttgcggtgggcccaaactatgggagatgccgccgctagtggattcgatgttatatttaagcgaatgaacttggtggacttcgagcgaccaaacttcagtctgtatgtaactgctttgttcaagaaggtcatgggatcaagggtgttcccagcccgacctctgaacgcctttgctccgagcaacaagttgtatacccattgtgcaaatgccgtatccggaggattggcattcatggtggtaaatacggaggagcagccaacaacgattactgtgaagagtaccagtagtttgagcagtagcgagatttggcagtatgtactgactggccatgatcaaagggtccagctgaataatgtccgcttgcacttgaacaccactttgcgtcccctgatcaaacccattgatccaacaaagccactgcaactgatcacgcccagcatggcggtgagtttctgggtgctgcccgatgtcaatctggaacactgccagttcacggagatcgaggcaggcgattcgagtggggagtcctccaaggagaagcgccgatcattccgctatagttccgccgatcggttactccaacgattgatcgaggaaactgcagttgcccgaggctcggttcagagttctattaatcgcaatcggagatttgtcgttgataaggaggaaacgtcacagaccctactagatcgactactggaccatttcaaggatgacggtccgctgaagagggatgtgggtgatgaagtgaacaagtccaaagaacaggctattaagcctcataaagctctggcctggctgtatcaagtgctcgagcacacccgtgacatgggcaaaaagcgggagagacgcgacacatccagctattccgggcccttcttctacaatcgccagggtaagaagacagcattgacgaagaagattactgagatccggaagccggaaaagaagaataagccccttttcgacttcgatgaattcgatgaggagaagttcttcaagcgcattggagagaaatccgaggaaatacccacttacacacggcttccagagggtgatgtccacctgaagcacattgagactgtggatggggaggtggaaaacgaagaggaacttgagcgggaggtacccaaaaagcgcaggaccaagtccaagagtcagctaaagatcattcaaagggaggacaaagaggatgaacaggagcaggaaccggagcaaacagaagggcgtcccaagttgcgtctactgcccacggaattctttgaggccctaccagctcccaagcagaacaagcgattaaatctgggagccaccttgaactcactgctatttccggaacccttctccagcaaggccaccatggccaaggctagtctgtcccaaaaacccaagtctgttgaagagtccgagcccgaggaggatgtgcaaccggtgccaagtgctagaaggcgtcactccaggctaggtcacgtggccaacgactttttgcaggcccaaaaagagcttggaaagcatttcctcagccacatcaacgagcatgaacacgagttttctctaggagatgagggcatgcgggaaagttccctggagtcggcgaatgtcggtaggaagtccctcatacaggatcattttgagggaaagaaggcaacgcctactcttcattcgaaattgcctcaaaagccagccgatgagggtatcacttcctggtgggatttaccagctatgagaaggcggcgtgccgtacttaacactaattccctggctgaactgccctccaatgccatagacaaggcagatcgcgatgagatgatgccgctgggaaggtacacctactacgagtacaagatggatcacgaggcagagaaggatgccagccagcccagggaggaaaaggaatccaagatcatgaggatcagcagcaagaattcgctggcctctggtcgtagtctgactaaactctccgaaagcctcgtgagcactatgaaatcaaaggtatctcgcttcatcaacatcatatccaaccatatgaacgaatggtacaacaccttaaccaagcacttggaaacggatgcggaaacccaaccaccccgccgacaaaacagcattgagaagtag

SEQ ID NO: 34449 - protein, 935 aa, DROSOPHILA
MWHLCLALLGLAVVCFADTLVQLHVNRPYNDVNEKFVSFAVRPEDLYDALDGKNRKAVTNLANLLGDAHIKAVNWTMIIPVPYAPDDWDSMHTLKILNTSYMVGITDCIWQLGTDFGTSRAKDYVQELRTLKLMTDTFKPYVDDWRLMGADISAGSSADETKRYVDMSKDLNTAFGWTQPANMLPKSSLGSYLYDSDPALRTLQQQRVPLWLTLPEERSSQRLVGDETTDALRWAQTMGDAAASGFDVIFKRMNLVDFERPNFSLYVTALFKKVMGSRVFPARPLNAFAPSNKLYTHCANAVSGGLAFMVVNTEEQPTTITVKSTSSLSSSEIWQYVLTGHDQRVQLNNVRLHLNTTLRPLIKPIDPTKPLQLITPSMAVSFWVLPDVNLEHCQFTEIEAGDSSGESSKEKRRSFRYSSADRLLQRLIEETAVARGSVQSSINRNRRFVVDKEETSQTLLDRLLDHFKDDGPLKRDVGDEVNKSKEQAIKPHKALAWLYQVLEHTRDMGKKRERRDTSSYSGPFFYNRQGKKTALTKKITEIRKPEKKNKPLFDFDEFDEEKFFKRIGEKSEEIPTYTRLPEGDVHLKHIETVDGEVENEEELEREVPKKRRTKSKSQLKIIQREDKEDEQEQEPEQTEGRPKLRLLPTEFFEALPAPKQNKRLNLGATLNSLLFPEPFSSKATMAKASLSQKPKSVEESEPEEDVQPVPSARRRHSRLGHVANDFLQAQKELGKHFLSHINEHEHEFSLGDEGMRESSLESANVGRKSLIQDHFEGKKATPTLHSKLPQKPADEGITSWWDLPAMRRRRAVLNTNSLAELPSNAIDKADRDEMMPLGRYTYYEYKMDHEAEKDASQPREEKESKIMRISSKNSLASGRSLTKLSESLVSTMKSKVSRFINIISNHMNEWYNTLTKHLETDAETQPPRRQNSIEK

SEQ ID NO: 34450 - DNA, 2270 bp, DROSOPHILA
agatacacaatatgacagattcttcacctctaaatttaaaagagatatcgaattatagatcgctcttatgacgaagatggatttcaattcgattgtttcattattgttaggactaaaaaattatactaaaattacaataactttcattttgaaagaaacaaaacgttaaaattgctatttaactaatttatgcatgcaaatcaaagtaaatttttgtttttctttttaatgagatcaaagctatgatattgttaaattgataaaatcttcttagtgaattgattttttcgatcttagccaaaacattgttaggacattttaattagctatttgcagttattaggttttatttcaaatacattagttgtattccattttttctttcttcttttttattgcagatttaatattgtttattccgttctttattcacatatgcactcttaatcgttttcaccttctgaatagatccacaaatggcatgataccaagatcaccaatagaatttcaacgttttcttgcaaaatatgtttgtaacttttttttcgaagactcggttttaagtagtaacacacgatcgttgttttccgatttgaattttatgcgttttcagttttcgatttttcgagtgcggggcaagaagcgacttttggcgaggagcataagacggcgactaattgtcagttgcagttcggttcgagccacctcggcccaaaatcgactgatatatcggattggcagagcggcagcaaagcgacaaccgacaactacagaggaagcagcagggcgcaaaaaacatactcacttaattataaacaagcgacaaaagggcgcaaaagacaacggcaacaacaatctcgctcgcactcacactttggtcggctataatgacacaagtacgcagcactacacactcgagacccttgctgaaagcacccctcctccaataccaaacccataccataccatacccacaccaagccatcccgcactatatcccatgcccactcctgagattccatccatccaccaccacaacaacgctgccgtcatcgttgttggccaaccaatgcgctccgtctgccggcttttgcggctactacccacccctctgctgcttccacgtccacatcctcatccaaatccaaagtcaccctcctccgccttcgccttcgcctccatatccgactcctccgctgccgatcccgcccagtccgagtttcaggcccattcatacgtggccagctacatcggcagcagttttcagtagtttttatttgtcacccaatatcttacagctcgacaccagataccaacgaggcggggagaaaaaagagtacacttcgagaaataatcgctagcaagcagttctagtgctctagaatgttacacttcaaaatcgatggccgttcaaataacgttgttttcaattcacaaacaagtatcctcactttatttgttgaaaagaagatatgaagttccttttccttaaaatctatagatgcacaaccgcagattgtcgctaaattcttaagaggacatcaaatcacttgagactatttgatatgcttgtgattagtgaatattttcgatatataacatattatttactttcttaaaataaaggtattgtaattttattacataataaacaaaaagtactatagggattattaataaacaatgtaattggtatgatataaatatgatacaagaagtattgaaaataaagtaattcacatattaaaatgggaattttctggcagggtctctgatgagggagggacagttgctacggacttgccaaccattgatcgtcttcgtcggcattctgcttcctcttcgctccattgttttgtggttaagtgaggcagtccatcggccaagtcggccggcaaccccctgactgcttctgtagcttgtatctgcgtatctggccgtgtgtatctgcttctgttgcgtgtatctttgtatctctatctccggcgctgattctcaattgtagcccggccaatgacgactgccaatcgatcgatgctcttgtcgccgggccgacaatcgtgaatagtttgaatgttatttgatagttcgatttgtggtcgcagcagaaaaagcaaggaataaatcgcaggccagatggaaaagcaaatggaaattatgaaatagatgtgttaagcccaactcgactatatttagctaagatatattatagatataatgctatgaagagatcccaattcggatcgatcacctggttcacacgcccgaaa

SEQ ID NO: 34451 - DNA, 270 bp, DROSOPHILA
atgcccactcctgagattccatccatccaccaccacaacaacgctgccgtcatcgttgttggccaaccaatgcgctccgtctgccggcttttgcggctactacccacccctctgctgcttccacgtccacatcctcatccaaatccaaagtcaccctcctccgccttcgccttcgcctccatatccgactcctccgctgccgatcccgcccagtccgagtttcaggcccattcatacgtggccagctacatcggcagcagttttcagtag

SEQ ID NO: 34452 - protein, 89 aa, DROSOPHILA
MPTPEIPSIHHHNNAAVIVVGQPMRSVCRLLRLLPTPLLLPRPHPHPNPKSPSSAFAFASISDSSAADPAQSEFQAHSYVASYIGSSFQ

SEQ ID NO: 34453 - DNA, 2528 bp, DROSOPHILA
catgtcctcgtctaagcctcgcattgtagattgtacacacattataatggaaatcggttttagctgaactaaaaataattggccttgcatctctggtttgttttccgtccgtacagccatatatacacacatacaaacatatatttaggcgagtatttgtgtgagttcaagtcctcgttgttgttgctggtaatcaacagtttgttggcacgcgttgccatttgccccagagatcaggagtcgggcgctgggagggggccaaatttagacggagcgaaaaacatttcgcaattagctcattctctattctccattcaagctggtgcccatggattttccagcatttggactgccaaatatatgattacaattcggggctgctattttggattttatttggggcatggcgtcgggaatggaaataatctctgcactttagttgtatcgaatgaaatgcaaatgatttcagttagattggaaaatgtgcaggacaagtaagaattttaattaaaattaaataaattttataataactatgacgatttaatagaaatattttccttcgaaaaagggatttagccattctgcctcctttgaaaattcccaaagctccccatccatttctattattcacccgaatagcttgcgactgtccattctgggattcttgcagggattcccgctcaaacgagggcattttaaattgggaataaatcaaaggctcaagcaccaacgtattcagcccatcgacgctgctcgaaaagtacaaactcggcaaattcaggctgctcgcacattaaagttgcatttatttccggcgaaaaacggggaagccccacaaagtcaggggtccacataaaatggcgggaggggggaggggggaggtgggcgaggggaggctgcctaatgcggcaattgttaaaccgaatgcaaatagacgttgcagttggcagtctccaaggaactcgggccgcgtgccaggcataaatcactccaatgactacggctgcttcgtctcaccattcccctgccacttcttttcatccgctgcctggttcgtttccgtttccggttccgcttccgccggttcctccagcctcagctcagactccatctccagctgcaaatccaagccgtactcctccctgtcgacggttagcttggtaacgctttcgagggtttttatggtttgcatatacagcttcttggccaactccttgtcttggcccgtcaccgaacttgccgcaatttcgcaatcactgcaacgaacaaaaaaaaaaggggactttttggtgggaggggggcgtgctgcagaaagtggccaacaaagtgctggctaatgcggccaacagaaaccggagtgcagcggagtggccatggcaactactcacttgaagtactcgccggtgacttccttcagctggggatcggtggccaagcggatggcgcactgggcgccctcgtaggcattcttcatgaacagccacatccacggataggtgaccgccttcacgcagagggacgacatcagcggcgagctgcaaagttaaccaattattgtaattatttaaatggcaaacaaggagccaggaaatgttgaagctgaatggggtgcatttaaatgaattcgttgctcttaaaatggattctagaaagggaaaagaaatatttcttaattaaatagttagccattcacaaactttgagttcttatatgtaacaatcgcttctgatttaagatgttgcagatatattcgcaattaaggaaagcaacaattaagtcatagataaataaaataaagctcaaagatgaaagtgaaaactatatttaaatttatctacatatattgttccaaatgtttcttttgctggtttagccaattaaatttgttcagattaagaaacatgaaagtggcttgaaactctcaagatatgcacaaacttggaaataaagtgtcttgtttagcttgcttattattcaacccatattccgctttcaattaaatcgttatatcccagttaagtttcttataaagttctgactaaatctggtcaccgagcgaaacttgaacaatttcttttggatgcattgttttaatggcattttcaattggggcgataaagggcgccagtaccgccagctctcctccattcaattcagccgctcatccgttgatctccagcttttggccatctccgcagctgggacggggccaattccagcgtctgagcccaacgagttgtgcgaaatggccacccccgaccagctctctaccacttctttcaacgcctctttttacttttacactgagaaatgttcttttgaaaatatcactggaacttgaaaatgttttaaaatattagatattgcgccttaactttttctgagctccttaaatgattataggtaaattatctcatattgattcaactgttttagaactgaattattaagtcatttcagcatttttaacacattttaaagctacctagtcatttgcctccgtgtccttctgatgctgcctttca

SEQ ID NO: 34454 - DNA, 396 bp, DROSOPHILA
atgtcgtccctctgcgtgaaggcggtcacctatccgtggatgtggctgttcatgaagaatgcctacgagggcgcccagtgcgccatccgcttggccaccgatccccagctgaaggaagtcaccggcgagtacttcaatgattgcgaaattgcggcaagttcggtgacgggccaagacaaggagttggccaagaagctgtatatgcaaaccataaaaaccctcgaaagcgttaccaagctaaccgtcgacagggaggagtacggcttggatttgcagctggagatggagtctgagctgaggctggaggaaccggcggaagcggaaccggaaacggaaacgaaccaggcagcggatgaaaagaagtggcaggggaatggtgagacgaagcagccgtag

SEQ ID NO: 34455 - protein, 131 aa, DROSOPHILA
MSSLCVKAVTYPWMWLFMKNAYEGAQCAIRLATDPQLKEVTGEYFNDCEIAASSVTGQDKELAKKLYMQTIKTLESVTKLTVDREEYGLDLQLEMESELRLEEPAEAEPETETNQAADEKKWQGNGETKQP

SEQ ID NO: 34456 - DNA, 2384 bp, DROSOPHILA
cagaaagccggtagccccgagtcctgttcgaagtcatagccaacatccaatctaatccaatcctaaacatttatccggcatccacaaagcggcgcagcggcagttaaattgcgaaaccaaacctatagtatcagttcatttatagccatttttaatgttctaatctactctgaaattgttttattccgaaaatccaaattgaaacggtttgatttatggccgccttaaacaacaaattattaattacaaatagtagaactgttacgctgtgcaagaaatggaacattgcgaaacataaactaataatatttgaattaaaaacgaaaaaacaaagaaaaacaaacggatattagttattatttatctaccaacaaatctatccaactaaatgaaaaagtaaaaaaaaaaaataaaaaacataacgatatattaatgaaatctacaactcatacacataaaataggagtttagcgaacactaatatttaaggcaaaaggatatataataataatgatcaaaaggcgagatgtgaggttagctagcgagtaagcaaaatcaaatccatgagttttcgccagatatatctgcgccccatccccccaagtgttccttttcagcgtttcgtgtcatgtcttttgtttttattatacacctgcgttatattttgatggttttccatatagcaatatccaaatcattttccaaacgccccattttcttttttgctgtccatgcattcagttttcccttttcagtttagttgtagtctaattcgaaccaaacaaaaaacaatggatgtgtaaaaagtgatgagactattgatttttgtaatgagttgaactccaataaatggcgttgattaacccgaatgcaaaacagcacacgttccaaggctttttcactttttgatagtaaaattcatgctacaatttattattaaatgcagaaactcgtacataattgtgtgtaagcggaaaaccgccatcgaatttggcatcgtttacagctcctcgtggcgcgaagggaacttcttgagtatggcatggtagagactgtagaaggcgtacaccgaaaccgtgatgatcaccagcagagctccgccgaacgcgatgctcaggaagtttccatcgatgatgcccgccgagcggtggcgcttggtggagaatatctcctccgtggtcgccgggttgttttgctgctgggacgtccgctcggccatcagccgcttcatggtgctcagccgctcccgcagaacttccacggactcggtgtccaggtcagaggttcctagagcgattttgtttactttctgttctcattaaaatgaatatatgttattaatacctgtcgactgggatgcggaagcactgggataggtagacatatttggatctctgttctgtgctatttgtgaaaaaactgcagcttgagctggccaaaaacagagttatcttaaacgttttggggtgggtttgttagattttcgagttttaaaagcgcaggcgcgtaacggaaatcgcgcggcgttgccacccaatcgcgctgccaactgctttgatttgcgaagaacaaatcgatagaaacggctggcaatcgattgggaaccatctccaaacacgtgaaacgcgatttttgatttaccttatgtgttttgaatgctgcaatgggtttaactaaacaatatttggcctaccgggctatagacagctttaatatcatcacctccggccgcgccaatgtgaactttgccgttgtggacaagacagagggtcgatatgtggccgctccagctgctgaaaatgtgatcgtgtgggatttgcggtaaggctatttaagcttttcctttacttcgtttttaaactgacatgaatttatatttccccagaatgggcgatcgcaagctgacgctgcgccgcgaaaagttcgaggtcacctccctgagggtctcgccagatcacctgcacattgccgttggctatgcggatggcatggtgcagatcttcgatctcagctcggacaggtactacgatcccatctgtacgctggcactccacaagaacgctgttagcatcctgcggtacgatttgcagggcatgcgtctggtgagcggaggcctggacaccgaattggtggtcgtcgatgtggtggagcaggcgggaagagctcgattgagtggccacaatgccgccatcacggacgcccatttcctgcagcgtctggtagacgagagcatagtggtaagctgttcgaaggacacgcagatcaagttctggaacctggagacgcagttctgcttcaagacaatcgtggataaccgcaccgaagtctgggcactggcctttattgggaatctaatggtagctggcgccggcgaaagcggcatg

SEQ ID NO: 34457 - DNA, 327 bp, DROSOPHILA
atgtctacctatcccagtgcttccgcatcccagtcgacaggaacctctgacctggacaccgagtccgtggaagttctgcgggagcggctgagcaccatgaagcggctgatggccgagcggacgtcccagcagcaaaacaacccggcgaccacggaggagatattctccaccaagcgccaccgctcggcgggcatcatcgatggaaacttcctgagcatcgcgttcggcggagctctgctggtgatcatcacggtttcggtgtacgccttctacagtctctaccatgccatactcaagaagttcccttcgcgccacgaggagctgtaa

SEQ ID NO: 34458 - protein, 108 aa, DROSOPHILA
MSTYPSASASQSTGTSDLDTESVEVLRERLSTMKRLMAERTSQQQNNPATTEEIFSTKRHRSAGIIDGNFLSIAFGGALLVIITVSVYAFYSLYHAILKKFPSRHEEL

SEQ ID NO: 34459 - DNA, 2480 bp, DROSOPHILA
actacaagaactcacaccatccctttccccatccggccagtgcaccactgggacccactaagaagcgcatgctagccggtccgatggccgccgatcgggaaacgttgttggacatgaccaagtcacagaccatactcgaacagatcatcgcccaggcgcagcacattttcatgcgaaagcgaacacaatatgtgctcgatacgctggccagggatgtgaaggacccgcagatagtgtcgcattggaatgccatgaacagtccaaccatgtcgtgtgtgaagattaacattgtaacgcatggttacgatgccattggacgcacctcgctggtcattcacgtgaaggagcgctctcttaaatgcatttgtcgcgatggacgtgttatgcgactgtcctacgagccgcaggaacttcgcgacctgatcctctgccagatcaactctcaccagatctcctgcctgatcagtctagcgcgctgcatgtcctggaccgtgctgtcgaacagcaaccacttgggtatcggcaaggtggagccgctgggaaatgccagttcctgccttctggcatctcccaatagcgatcgcatgattgccgttcagattcgctgcgatccgcagatagatgttaaagtttatatagcgagaagtccacgacaggatttctttcccagtccactggtgccggaaaagctatgggagaatctgggaggcacattcaaggaggtgagtccactattggaaagcagtcgaaaaaaaacagagccattaattttgatttgtttctaggtgaggttcgacaaaatcgaaggcaagagctttctcaacaaaatggagtttctgatggcctcgctgacaagtaacacggcctgaaaacccgtcacatgcatacccactagattgtaaatcaaattagaattaattaaagtaaaaaaatttgtaatttacatacgagacttctgctattgcaatgtttagatataatctattgaggtgctttcagttcagtgcatcaggctgtagctgacgttgttcttccacaggcgtggctggtagttcatagactccggcgacatattgcgctgctgcatgatgctaaaggtgtcctccaggctgaccacattcgcccgattggtgctctgcagacagagagagatagagagttgtgtgacctccgtacacggattacttccctacgaaattgaactcacccagcgctccagatcgcagaagctgatgttgtagttctgtccgcttggctgcagtgtcatcacctccatctgatctgccagtggttgggccaggcgcagatagagtccacggttggtggaaaacaggacgggtactcgcttggctggcgctgatcctgcgcccgttccggcacctggaatctgtcggtaggtcgggcaatgattgagcgtagacaccgcctcctccggcagctgtgcatcgctggcgccgccaactgtccgcatcagacccatgcaagtgtaaaaacaggacgccactttgccgcatttatgggtctggtggccgtactcgatttactgatctcgctagcagccgccggatgaacttcgctgtatttgcatggttccacacacttctgctgaacctattgattttgtgcagcgccaagccaaaccaacgtcaacacgctgccagtgtccagtcgctgtgtgtatccagctcccaccatttgtatgggccacaatcgaacggccggttgccccgacaacctggtggtagccctacacccgttccctgaccgctcgctggtgttcattcattaggcatgtgcgtgtgccggaccaattgtctcagccagagccagataggcagatagtcaagccagccagccggccacacgcgtttctgcaaaattgttcaattactgccagcgggaactgaaatctctttgatgatgtatgcaatcagcagattggctccaactggcggtgttgtgattgcaaatagcaggcgattatggatgaccaagtggatgttgtggctaaatcaatgttaagctgtcactatccctcggagaatagttatgatcactaagatcacctacatatcttctaattaaatggtatcttatagatactctaactttaaaatcctagttttagaatccattttgaaacccttaaaaaaaacgcttctatttctttactttttacaaatattgttttaaaactttatttcatttttatattatattgttgttgttttgtttgtgttgtgtacttgtaaattgtataattaacactaaaatacttatttaaacatattccatattcaatcggttttttgttttgtattcccttcattattttttttcgatttttccgtgttactttttgcaatttttttgtttttattatttgttgttggggcgacttataccttttgtttacttaattccgctccattacacttatataatttattttttttgtttgtggtttttatagatccagc

SEQ ID NO: 34460 - DNA, 408 bp, DROSOPHILA
atgggtctgatgcggacagttggcggcgccagcgatgcacagctgccggaggaggcggtgtctacgctcaatcattgcccgacctaccgacagattccaggtgccggaacgggcgcaggatcagcgccagccaagcgagtacccgtcctgttttccaccaaccgtggactctatctgcgcctggcccaaccactggcagatcagatggaggtgatgacactgcagccaagcggacagaactacaacatcagcttctgcgatctggagcgctggagcaccaatcgggcgaatgtggtcagcctggaggacacctttagcatcatgcagcagcgcaatatgtcgccggagtctatgaactaccagccacgcctgtggaagaacaacgtcagctacagcctgatgcactga

SEQ ID NO: 34461 - protein, 135 aa, DROSOPHILA
MGLMRTVGGASDAQLPEEAVSTLNHCPTYRQIPGAGTGAGSAPAKRVPVLFSTNRGLYLRLAQPLADQMEVMTLQPSGQNYNISFCDLERWSTNRANVVSLEDTFSIMQQRNMSPESMNYQPRLWKNNVSYSLMH

SEQ ID NO: 34462 - DNA, 3926 bp, DROSOPHILA
aattatacaaacatagaacatattcatactgtaataaaaaataaatcaaaaaacctcttattgccgtcttccaattgaacgcatttttagtaaaaacgtttagtaaagcgcgtaggtgtctagaatctgtatgctgaatctgaaccttgtagacatttatacagaaagacggaaatggccagatcgactcggctcttgatcctgatcaagaatatatatactttttatggtcggaaacacttctagtccagtatacccttttactctactagtaacgggcgtaaaaaggtaataatcaattgcatagttctttctgaaatatatgtgtattaaaaaaggaatgaatgaacggatgctcattacttttattacactttcttataaagtaaattggtttatattcattttttaacgtatctcaatacctacaagaactttttgaacaatcattacgtattatatgtatttatatcgcaacgtaacgatatatcgcataacgtaagaccagggctgcaactacgaaatgaataataataaggtgcaattagttgcaaagttcaaaacttgtcagaattatcatatctattgtaattagccagcaaaagatttttcgagacaatacacaaaataaaagccacttgccaaataaataaagccggaagcagtcacaaaaaatctatattgaaaacctatatattgacaagaagatgaggtcgtgaggccgcgatgcgtggtccaagcttctggagttcaaaaaaggattttttgttcatgctttgccgccttgaaaattaattctggcggcttcaagacttcttcctattggtacaggatttcggtttgcatttgcaatgggatcgtttttggagagcgaaatccttcagacaaggactcatttacactgcttgaactcatcgtactacaattatacagaaaatttgcacaaattctgaaaaaaagggagaggagagcttaatatggcgtttatttgatatgcaagatgccagctattaactgtgatggagtatgttcctcctgcatgtgcgtgctgggtatggacagttcaaatttcgtattggaagcgctttaaggcacgcaatgcacgaacgggaggaaaagcacgaaggcgaaaggatacggcgagagaagaagaagcataggcacgtagcagtgcgaaaagaaacatgtgtttctgcgcaaaatcgatgaataaactgtaaaggggaaaccgaaaactaaatagagcagtgcgttttctgcaataaagcaataaatattgtgttcgtgcaaaggatcgagagtaaggctgactgtaagagcctccgcaggactccttggaaaaatgggtattacggagacagcagcaacaacaactaccggactgggagcggcaaacgccgtggagagcaaacaaatcctctcgctcgaggtgttccaagacatcttcaagcacgtggaaccggatgtgcagatcgatgccttcgaggtaaggacacttcgagcaagcaccaaacattcggttatgaaatcatttccacccacctatctacatatacatatgtacttttgcagctggcccagggctccgaccggggtgacaactatacggccgccctttatcgcataaagctgaccggaaagcgtaggagtctcaaatgggaacagaacgtcatttgcaaggtgatgccagaaagtgtagtcgcgcgggaggcctacaagagcgacaagctcttccggtgagtgctccaattccgtgcatccttaatagcgtcataatccctgcccattctccacagcaacgaggtgcagttctacaacaccatcatgccggaactgctcaagttccaggcgagcaaaacgaaccaggacacacccgtgtttaatgccattcccaagtgctattcagctaggcatgatctgctcataatgggtaattacctctcgcctttactagggattcctatttggttaattaatttacattttccgtagaggatcttcgcgaacgtggctttcagatgtccgaccgccacaaaggcctcagtctggaggagacgcagtccgtcctgctgcaggtggcccagctgcacggccttagtctagcctacaagttcgagaaaccgctggagttcagcaatctgtgcagcatgatcagtgagggcatattctgcacggccaatacgagttggtatcgaaactactacgaacgccttaccaagaacgccattcagatggtgtccgaggtgctgccccccgactccaagtatgtcctggcaatgaacaaattcgcagaaagctcctcattcttcggtcggatggtgaagttggccagtaccgagtcgccgttatcggccatttgccacggcgactgttgggtgaacaactttctgtaccactatgatccggaggatccacaccgagtgcttgaggtggcgctgctcgactttcagctgatacgctacagctcgatcgcactggacattgccaatctgctgtactgctgcaccaccaaggaaatgcgcgatgctcagctgcagactctgctcaagatctatacggaggagctgtttcgatggctgcaaatgctctgcacaaatttgccggaccactgcgacacgttacagaagctgcaggatctgtaagcaaatgatttttttaagagttaaaatagttaattgatgttttatatgtccatagttttgccgaggagctgaagacatacggacgctttgcacttggtttggcattggatatcctgcctattagcacctgctcttcggaggatgctcccgatatgtatttggatcgaagcgatgaactcggggaggatgtgggcgcgcccacgcttaactttccacccaacgacctgtgccgccagaagatgtcggagatagtcattgatatggtggatcgggacatgctctaggccaccctgcaatcgaaatggaacactagctgtcagcccaaaacaccaatttcgaacaatacaccgtgctccagttgatgctcacttaacccttagttatatgtatgcaagatagtaaaaattatcagtaacttagcaagactttgtacgtttagggtaccaccgctacctttatgttacgtttctgtagcatccaattccttgaccctgcgtcccaggttggatttcatgtagtcagagttaacacttttccgtatgaataatttattctcatattagttttttatttgtactgctagatgagcaaacagaacgttgcaaaaatagtaaataatatatgttttttgtttagtctttcgcttaactcatgataccaagtgggtattctcggaaaatttaagtttccattgcgtttacctagacggaatgcaattgggcacagggcttttaaattggacaggaattgtgagaaagcactattcgctctagccgtagctaaaattaacaatacatttgttgaacttaggccgaaaaaaaaacagacaatagaaagcttgtctagtcgtattgtgtttttctaaagtattctttacacaaagtaataaactataaatgaagggtatgcctttccttaactcagtaatccgccttggccgtccaggtggccttgtttcccaggacgcccttgtcgcagttctcacgcagaaatctaagacccgcttcgatggagcgctccaggtcatcctgagacttgggctttttcgctggtggagctctgtcatccaatccagcaggcggaggaatagcggcacccatgccacgactggatgtgctcggttgttcatcagcttcgtcttcgttattcgcactgtagctccgtcgttggaacttcttttcctcctttgtgctgtgaaaattgtggaactgcggctcttgggcacggttccacaccataggcggtggcatgctgctgaagttactgcgcttaagggggacaggc

SEQ ID NO: 34463 - DNA, 1419 bp, DROSOPHILA
atgccagctattaactgtgatggagtatgttcctcctgcatgtgcgtgctgggatcgagagtaaggctgactgtaagagcctccgcaggactccttggaaaaatgggtattacggagacagcagcaacaacaactaccggactgggagcggcaaacgccgtggagagcaaacaaatcctctcgctcgaggtgttccaagacatcttcaagcacgtggaaccggatgtgcagatcgatgccttcgagctggcccagggctccgaccggggtgacaactatacggccgccctttatcgcataaagctgaccggaaagcgtaggagtctcaaatgggaacagaacgtcatttgcaaggtgatgccagaaagtgtagtcgcgcgggaggcctacaagagcgacaagctcttccgcaacgaggtgcagttctacaacaccatcatgccggaactgctcaagttccaggcgagcaaaacgaaccaggacacacccgtgtttaatgccattcccaagtgctattcagctaggcatgatctgctcataatggaggatcttcgcgaacgtggctttcagatgtccgaccgccacaaaggcctcagtctggaggagacgcagtccgtcctgctgcaggtggcccagctgcacggccttagtctagcctacaagttcgagaaaccgctggagttcagcaatctgtgcagcatgatcagtgagggcatattctgcacggccaatacgagttggtatcgaaactactacgaacgccttaccaagaacgccattcagatggtgtccgaggtgctgccccccgactccaagtatgtcctggcaatgaacaaattcgcagaaagctcctcattcttcggtcggatggtgaagttggccagtaccgagtcgccgttatcggccatttgccacggcgactgttgggtgaacaactttctgtaccactatgatccggaggatccacaccgagtgcttgaggtggcgctgctcgactttcagctgatacgctacagctcgatcgcactggacattgccaatctgctgtactgctgcaccaccaaggaaatgcgcgatgctcagctgcagactctgctcaagatctatacggaggagctgtttcgatggctgcaaatgctctgcacaaatttgccggaccactgcgacacgttacagaagctgcaggatctttttgccgaggagctgaagacatacggacgctttgcacttggtttggcattggatatcctgcctattagcacctgctcttcggaggatgctcccgatatgtatttggatcgaagcgatgaactcggggaggatgtgggcgcgcccacgcttaactttccacccaacgacctgtgccgccagaagatgtcggagatagtcattgatatggtggatcgggacatgctctag

SEQ ID NO: 34464 - protein, 472 aa, DROSOPHILA
MPAINCDGVCSSCMCVLGSRVRLTVRASAGLLGKMGITETAATTTTGLGAANAVESKQILSLEVFQDIFKHVEPDVQIDAFELAQGSDRGDNYTAALYRIKLTGKRRSLKWEQNVICKVMPESVVAREAYKSDKLFRNEVQFYNTIMPELLKFQASKTNQDTPVFNAIPKCYSARHDLLIMEDLRERGFQMSDRHKGLSLEETQSVLLQVAQLHGLSLAYKFEKPLEFSNLCSMISEGIFCTANTSWYRNYYERLTKNAIQMVSEVLPPDSKYVLAMNKFAESSSFFGRMVKLASTESPLSAICHGDCWVNNFLYHYDPEDPHRVLEVALLDFQLIRYSSIALDIANLLYCCTTKEMRDAQLQTLLKIYTEELFRWLQMLCTNLPDHCDTLQKLQDLFAEELKTYGRFALGLALDILPISTCSSEDAPDMYLDRSDELGEDVGAPTLNFPPNDLCRQKMSEIVIDMVDRDML

SEQ ID NO: 34465 - DNA, 2654 bp, DROSOPHILA
gagcggctcgtgtgtacaaacatttatttaaatgcttacccccaccccgtagccacttcagatgaagctggagctggagccgaatctgaagcttggagcttgaagtttggagcacggtggagaattgcgcgtaaattcgttgcggtctgcgcgtcatcaacgtaatcgccgtcaacagcagtcaacagcatcaaactggcaggcaaatgttgctactgtttccagacgcagtccgtccggccaacagaagcaaacgaagcaacagaagcaccaaccgccgcagtgaagtggttttttatgatcagacgagatgagccgagcccaaagcagcactttccatccgagaaagaaaccgaggctacaacaaaagcgtgtctttcgagttcgctaatgggaactacatatatgtatgtacatacatatgtacattccgggtacaaagtgcattttgtggaaaccctttgggcagaatgtaaaccattaacaaattgtagcagacctatggcctatacatttcttatttgttttaactgttttgactcttataaatgaacatattttcaagaatctgaattaaattgtaaattagtagaatgaagctctttcgaaactacctcgctttgctccttccgtttgatcatttgaccatttttgaccatttgctttaggttatggcattttgtccatttcgtattggtcattcggttttggccattaatttcgttatatcatttcgtttttgtcttgctttggttatttcgttttggtctttcatcttagtcagttcgttttgaccattcgtttgggccgcttatgtagttttagccaaatctttttgaccaaattgacttgagcttagttcctggctctacatattctgttatttttttttttttttaatttttgagctggaattaaagcgtttcacttcaaacatagtacacctgtcgcacagacttattgtagttagttttgtcaagcgttcgaagcgactgcagaaatgagggtctacttgtatcaaatgcgcccggtgctctttctcttctacatggtggagacgacggccaacttattcgttttgtactaccaactgaaagcatttgttttcgtcaatctgacaacgatgaaatgggaagatgttctaatccaaagcttttatatgtccttcttttacatattcacagtggtaacgctctttgccagcataaatctctgcaccggtcatcgcacatcgatcgttgaggaagttgtgcgtcctctgatcggatttgttctatatacggtaatatcgttgatggcactgggcgatgccgagacggatttctatatatggtatgatggaaggaacccggatgatttactatatccggagaagccgctccatccgttcttcggtagcctgcgggaccaggcgacagcctcattggtgtccagtgttatctatctgctgcactgcctcattgcgttggatgtccttctgtcgaatgacgattcggataacgaacgcgagtcatccaattcctccgacgatgtgaacgaagaggtcgactacgttccagtgcgtctgtacgtctttggcggcgtgatgcaacgctggctggagcagttcgactggtttcaggactttacccacagtggagtcacagatatctgatattttatcattaacttcatttatacaactacaaattacatgataaacaaaacttcgcatcgcttttctcggtgattatgcagcctttggattttggttacattcggtgcaagaaaccctaatcatcagcattcccatgacgtcagtgggaagcaacagttcggtctctgcatcatataaagctcattgtcgtcaatgtgccagtgataagcagctggggccaaaacatctacataagtacgcgtatctatagtatctatgtatcttggtacgagtatctgtatctgctagtgcgcaggtccaaagttaaagcgaacaatcgatatatgtactatgatgtttggggcaaagcggcagtcaagagcaaggtgaagcattgccccggtgctcctgggtgtggtgcttttttcattcataaaaaaaaactggtccacatgacatgtggacacattcaaggctatttctagaccagaccaaggatgtccttatgcctctcataaactatgcaatatgattagaaagtctgaatgtttagaattagttttataaactcacaaacttcggtggatcaaaaagtttggccaggtgaagctaatactatggcctacttttcggggttattttaataatatgattattgctgccatgcttttgtataaacaaatcaatttcacactcttattaagtaacatttttaagtacttcccctcttataaagcttgaattttccatacggaaacccaattcaatcttaaatgctacaatttaaataaaaaatcacataaatactcgactttaaacagaagtcaaacaaaacagcaataaatctgctcaaaaatcacgcttaacaagaagaaaaaacatattttccgcccacgcaataagcgaatgtgaaaatgtacataaatgcgagagggaaaatcgataaggacgccattccgcaggagcgtcgtgtccttgaaatcgaaaaagggaaagaccattcatgaagttggccgaa

SEQ ID NO: 34466 - DNA, 654 bp, DROSOPHILA
atgagggtctacttgtatcaaatgcgcccggtgctctttctcttctacatggtggagacgacggccaacttattcgttttgtactaccaactgaaagcatttgttttcgtcaatctgacaacgatgaaatgggaagatgttctaatccaaagcttttatatgtccttcttttacatattcacagtggtaacgctctttgccagcataaatctctgcaccggtcatcgcacatcgatcgttgaggaagttgtgcgtcctctgatcggatttgttctatatacggtaatatcgttgatggcactgggcgatgccgagacggatttctatatatggtatgatggaaggaacccggatgatttactatatccggagaagccgctccatccgttcttcggtagcctgcgggaccaggcgacagcctcattggtgtccagtgttatctatctgctgcactgcctcattgcgttggatgtccttctgtcgaatgacgattcggataacgaacgcgagtcatccaattcctccgacgatgtgaacgaagaggtcgactacgttccagtgcgtctgtacgtctttggcggcgtgatgcaacgctggctggagcagttcgactggtttcaggactttacccacagtggagtcacagatatctga

SEQ ID NO: 34467 - protein, 217 aa, DROSOPHILA
MRVYLYQMRPVLFLFYMVETTANLFVLYYQLKAFVFVNLTTMKWEDVLIQSFYMSFFYIFTVVTLFASINLCTGHRTSIVEEVVRPLIGFVLYTVISLMALGDAETDFYIWYDGRNPDDLLYPEKPLHPFFGSLRDQATASLVSSVIYLLHCLIALDVLLSNDDSDNERESSNSSDDVNEEVDYVPVRLYVFGGVMQRWLEQFDWFQDFTHSGVTDI

SEQ ID NO: 34468 - DNA, 3035 bp, DROSOPHILA
gaattgcaacggttgtcgacaagagcaataaagcgcagaggaaaccgagatacatttatttaattaacttgcatcgagagttgttgaagtgtattaataaaacatttcaattttccatattttccagcagccacacacacacacacactttcgactagttttgtgatttttctcgttcgtttccattgtgaaacttgttttaatatcaagtccagccagccaatcgtctaattgatgccacagcaaaatgttttgggaaacaaaagccaagatatgagcagtcaagtgtcataaataagtttccaaacaactcgtcggctcattagcaaagagtttggaacaccgtctggcccagagaagcatcaagaagtgccgaccgagatgagatggcattggaaaaaatggaaaaatggaaaggtggaaaagtggaaaagtgaaaaagtggtgtccaactggagcgttgcaagtgtccccgtcgattaggtcggggaccccatgcctgggaccataaaacaaaatcagtttgaaatgaaaacatatccgtggctcgttagcatccgatctcagcagggtggtagcaatgacaccagtctttggctggaaagtgggggaaattttcatttgaatttctcattgcagttgggacaaacttgaaaaacatttgcactttgtgaccaggagccatacatattttaggaaaaaaaaaacaacgtaaccctaagtgctttgttctacttcaacaatttagacaaaaacgatccccaatttgaaaacaaaaacagcaaatttagcaactcccacacaaatgtataaactttaagcgtggaaaatgacttcgcccaaaaagaaagataagaattcgaacgagttggtttgtagcagtgattccgagcgggaaaatgatgatctggctatgctgaaaattgttctaaggaagctaaatgtcaacgatcagacgctgctccatcgccatgttggccatataccggatgcccttcatatgctctggagattgcaacatccacgtctgaactttgagttaatgcaacggaagctgcatggatccgatttggaattgtttctacaggaaatgattacggatattcccagcattaaatttcgcagtgagagcttgcaggacgaattgaacatcctggaacgggccaatattaaacgtctgctgcacgtgaaatgttgtacgattacgtggaaaaattcgacgagccagaagaataccaaattccctcattggccatttctcgcactgcccaaattgatgagcaatctgaccgatctcgatatatactgcccagtgcaggattgctttatcgatcagtttgccaaattggaagccctgaagatcgctgaagagatttctaaaccagccatggacgccatttacttaagtggcgcaccattaaagtgtttgaatctatcgggttctcatacatatcccacaagttgcatctcacactgcaaatatctgagcaacttattcgtaaatctggacacttttttggccggtcaaaatgagattctcaagctgcccagtcttactgaactgaaaatcactgagattcgagaaaacaaggacacaacgaaagccctagccaatgtagtgcagacaaaaggcaatgaacttgtgggcattcaaattaattgcatctttgaggatcatatcaagtgcctaagtgatttgactttaaattgctgtataaatctgacggaactgcagttatccaattgcatatttgcctatcaggatatagtcaagttgtgtctgcccgttggcataacctttgctcgattcaccaactgtccagatctcactgatgaacagctcttggacttcatcaaggctaatgccgaaatggaagagcttctactggatcagtgcccagaactgacggaagatctacttcatggtgttcttaaagtgcgcagtagtggtaataaacaagtgcacttgttgctcagaattgcgaaaagtccgaatctttgggatacatatcaacagaacgtaagtatctattagtttcacttgtatcacttatgaaagtttttaactttcagttaaagtattggaaacgaaaggaatctattcttaaattggaaagtttggagagttctgcctcggaggacattgtgatgcactttgaaaatgaaaatttataacctgcttttaaagtgtgcttttaaatggctttcttagaacccttttacaaagtctaataaacgcttctattgtatttagtaacttcagtcttcttggtattgatatatgagatcataaggataggatcgatcgctaagctcatccatgcttacatatatatattctgcacatatggtagcttagtctggccattagctataattaatcttgagtctatcaggtggcatcaaaccagtctgtatggacttctccgcttgctaattggccgcctgccatgtggcgatttgtcatagtcaccgactccaccacgcatgcgccacgcatgtggcacccggacgcccctttggtgccgccacgcctctcgccccccccccctctttccacacgatgcggtggggcgtaaaagccacacgcaacagctacacgattttcaacaacaaaatttgtcatatgtgacgatggctggggtttatttgcttctcgattttttctcttttttttttttgccgcattttgtgcgttttggtgctttgggctttgagcattttgtcagtggtggcggcgaccaccgttgcggaatgcaaacaaatttgtgaacatgacgcggttaacacagttcaaactccaccacctccagctccaaaactcgacgactgtcgctggggccacccattgttataattattgggcgcccgtttgccagtgacaatttggcctgactttttggttagccaaagttaggcatttgtggagcaaacagttaaacgagcgacatgtgttgaaagtcctgcgaggacagctgttttttttggccataattaaacaggagttgtgaccgaagagcagccataagttctga

SEQ ID NO: 34469 - DNA, 1035 bp, DROSOPHILA
atgctctggagattgcaacatccacgtctgaactttgagttaatgcaacggaagctgcatggatccgatttggaattgtttctacaggaaatgattacggatattcccagcattaaatttcgcagtgagagcttgcaggacgaattgaacatcctggaacgggccaatattaaacgtctgctgcacgtgaaatgttgtacgattacgtggaaaaattcgacgagccagaagaataccaaattccctcattggccatttctcgcactgcccaaattgatgagcaatctgaccgatctcgatatatactgcccagtgcaggattgctttatcgatcagtttgccaaattggaagccctgaagatcgctgaagagatttctaaaccagccatggacgccatttacttaagtggcgcaccattaaagtgtttgaatctatcgggttctcatacatatcccacaagttgcatctcacactgcaaatatctgagcaacttattcgtaaatctggacacttttttggccggtcaaaatgagattctcaagctgcccagtcttactgaactgaaaatcactgagattcgagaaaacaaggacacaacgaaagccctagccaatgtagtgcagacaaaaggcaatgaacttgtgggcattcaaattaattgcatctttgaggatcatatcaagtgcctaagtgatttgactttaaattgctgtataaatctgacggaactgcagttatccaattgcatatttgcctatcaggatatagtcaagttgtgtctgcccgttggcataacctttgctcgattcaccaactgtccagatctcactgatgaacagctcttggacttcatcaaggctaatgccgaaatggaagagcttctactggatcagtgcccagaactgacggaagatctacttcatggtgttcttaaagtgcgcagtagtggtaataaacaagtgcacttgttgctcagaattgcgaaaagtccgaatctttgggatacatatcaacagaacgtaagtatctattag

SEQ ID NO: 34470 - protein, 344 aa, DROSOPHILA
MLWRLQHPRLNFELMQRKLHGSDLELFLQEMITDIPSIKFRSESLQDELNILERANIKRLLHVKCCTITWKNSTSQKNTKFPHWPFLALPKLMSNLTDLDIYCPVQDCFIDQFAKLEALKIAEEISKPAMDAIYLSGAPLKCLNLSGSHTYPTSCISHCKYLSNLFVNLDTFLAGQNEILKLPSLTELKITEIRENKDTTKALANVVQTKGNELVGIQINCIFEDHIKCLSDLTLNCCINLTELQLSNCIFAYQDIVKLCLPVGITFARFTNCPDLTDEQLLDFIKANAEMEELLLDQCPELTEDLLHGVLKVRSSGNKQVHLLLRIAKSPNLWDTYQQNVSIY

SEQ ID NO: 34471 - DNA, 3347 bp, DROSOPHILA
ctcttgatggggcgatgggggccacaaattagtccggaccccactttgtgttgacttgccagtgcggccaataatttaggccgacagacgcgatcggctcacgtaatgttggaaaacgaaagcaaaactatgctctttttcccaaaagccatattttttttcgaagagaaaagttatgtaaatcattcagccaggcgcacattttttcaaaattgcttaatttccttcacgtgcaagtacgcatgggatagttatcgtttatagtagatatgttatgggatattatgttataatccagaaggctagactaccctgtgattatcctttccgatcggaaacctcataaaacaaagtttacatattcattatggaataaccaaaatattaacaattacacacaaattatagttaaacatctataatctagcttatttgaaagcagttgtattgcgccaaccctgaagtaagagagccaaatccccaatgccatgccaaacttcacttcttttggccagttggccaatggtcaggagtttcggtgatcggggaactgagccggacagtcggcaaagagctttgggcactttgcgaactcattttccgactcaatcaaatcaaataatttatgcctcgcgaaattaactggccatgtgagtggaggtcatgccacatgtgaggagagtccaagaagccatgacggcaacttggggcccaaagcacagttaaatcttttcgctggccataaagtgtgttgatttttccatttgccagaccctaaagcgctgcaatgcgaaataaataaatgtttgccgttgaaggagagacctcttggaaaattgcctgcaatcggggagtgtttgagaatgaaaatgtgcgttgcttttgatttagccagtgcgtcttatttatatacaatagaaaatataaaaaattacaaaattcatgaaaaaaaatatttgtttaggagtatatacaattggtaaaattgttgagctgttattcactcaaaatcaaactcgaaaccatcctcctgatattcgtattcgctgctgtcacaggtgacctgaacatatttgttgctctgccagtgataatattcctcgggtgtgaagttgccccacatcatgtcgctgaacacctgcagtggtctgggattcctttcctgattgcgaatattcacgagcttagtaagtttctcccagttgctgtggtagccgttcagagccaagtgctccagattgacgcactcggcgaccagttccaggagctgagtctcccgcacaatctcccagccactgaagctgagcacctccatttgttggcagggcatgtgctggcgatccaggaagaaatcattgtggcaccaattctcgcatatcaccttcctcagcttgggcagttcgaggagcaaactttgctgccaccgagctggcaattgaaccacttcgttgttcagggcaattcgggtgatcctttcgcttttggccaccacaatctgctggaagatggtctcctgatctgcgttcaattgccgcgaatcatcgaatcgcacggatagtttctgtaacttgggcaactgcagcacctccgatagcatgcattctacggtgctcaagttgatttttagcacttccagattgggcaatttgatgtctgtgagtctcacacaactgtcgaactgatcggtaatgtcaaggactctcaaattggtcattgtcagacagatatcctgaatccagcggctatccaatggcaccgaatggtacaaggagttgaataccagctcctccaacttcttgaagccacgcatatataagccagatagattcatgcaggtcattaggcgcttgagattgggcaacattaccgtcaagtcgcggatgtcctcatcgaccactgtgttgggattgcccgccaatatgcaagtgtccaccttgggaaacttggtgatattgatatcgcacaggtgtgtgatatagtcgtagaattcagaaaaggaaccaacgccgtcgtgaacgtgcagatccgtgaagctatcagccatgtgttccataaagaagacatagtcatcgatgtccaggagtccaaggaatggtgtatttggaccgatgatcaggtgcagtcgcctctgccagaacttgagaatctgtggcatgaactgtggataggccctagccatgcgtacctgatcgatcagattgtcgatctcttcgaaaatctgctcgaaaaatataatgtgcaggttgtcgatgtagttcggttcaatttcctccatcggtgaacaggtattattttgctgggcaaccagagcgtccttgtagaatgcggtattgtgcatttgcgacattgtatgtattgtctgtcaaatgtgatgactgctgtgtgttgcttcctcgaaggctgctgttggttgaatgtgctcttgttttgatgaatctaagtttttatgcaaatttaggtagtgcatttagtgagggagtgaatcaggtagtagtggggaaggattacccagtgtccttatctcttttgcaggctaatcctttggcaacagctgtgccagctttcagtagtagttacctgtagttacctgatctgtaggatcgcgccatgatcgcgccggtcctcataaattgcgccgtcgtatactgcctgcaatttgtaagcctgcgctgttgttgttgctgcagaaaaaaaaccctatctgtacagttatcgctagagagactcactagtttgcatattacacgaacccagacgtgttcccagccaacttctctagcaactgccctgttccagtccagaatcttggccggatgcgttggacaaaacgtggtcagcattcggctttgcctggcttggcttctaggaaatgctaacaactctcgcagaggaatcgtaaacgaagaacagtcccaccaaatggaatagaatagaatggaatggattctgtgcgagcttcaacgatctaataatcaaagccatgtgtttttgtctggcagcttagcgagcgattagaggaatcacaatcacagaagacactgaaaaagaaactgcacagtttattatccgaagaaatacattttcttttaaagatacagtgttagaattatctttatattaagggagaaacgtagctgatgaaaactgtcgaagcgattaaaagcgaatccttttcactaaagtatgtccaaggaatatatatgttaaaagtaaatgttataagatcacaaacctttgttaataatatatttaacatataataaattgaaaaaatcatatataggaaagtaaaatataaaaatatcaaaaattgaggtacattcttagtttgatttcctttaaaatct

SEQ ID NO: 34472 - DNA, 1347 bp, DROSOPHILA
atgtcgcaaatgcacaataccgcattctacaaggacgctctggttgcccagcaaaataatacctgttcaccgatggaggaaattgaaccgaactacatcgacaacctgcacattatatttttcgagcagattttcgaagagatcgacaatctgatcgatcaggtacgcatggctagggcctatccacagttcatgccacagattctcaagttctggcagaggcgactgcacctgatcatcggtccaaatacaccattccttggactcctggacatcgatgactatgtcttctttatggaacacatggctgatagcttcacggatctgcacgttcacgacggcgttggttccttttctgaattctacgactatatcacacacctgtgcgatatcaatatcaccaagtttcccaaggtggacacttgcatattggcgggcaatcccaacacagtggtcgatgaggacatccgcgacttgacggtaatgttgcccaatctcaagcgcctaatgacctgcatgaatctatctggcttatatatgcgtggcttcaagaagttggaggagctggtattcaactccttgtaccattcggtgccattggatagccgctggattcaggatatctgtctgacaatgaccaatttgagagtccttgacattaccgatcagttcgacagttgtgtgagactcacagacatcaaattgcccaatctggaagtgctaaaaatcaacttgagcaccgtagaatgcatgctatcggaggtgctgcagttgcccaagttacagaaactatccgtgcgattcgatgattcgcggcaattgaacgcagatcaggagaccatcttccagcagattgtggtggccaaaagcgaaaggatcacccgaattgccctgaacaacgaagtggttcaattgccagctcggtggcagcaaagtttgctcctcgaactgcccaagctgaggaaggtgatatgcgagaattggtgccacaatgatttcttcctggatcgccagcacatgccctgccaacaaatggaggtgctcagcttcagtggctgggagattgtgcgggagactcagctcctggaactggtcgccgagtgcgtcaatctggagcacttggctctgaacggctaccacagcaactgggagaaacttactaagctcgtgaatattcgcaatcaggaaaggaatcccagaccactgcaggtgttcagcgacatgatgtggggcaacttcacacccgaggaatattatcactggcagagcaacaaatatgttcaggtcacctgtgacagcagcgaatacgaatatcaggaggatggtttcgagtttgattttgagtga

SEQ ID NO: 34473 - protein, 448 aa, DROSOPHILA
MSQMHNTAFYKDALVAQQNNTCSPMEEIEPNYIDNLHIIFFEQIFEEIDNLIDQVRMARAYPQFMPQILKFWQRRLHLIIGPNTPFLGLLDIDDYVFFMEHMADSFTDLHVHDGVGSFSEFYDYITHLCDINITKFPKVDTCILAGNPNTVVDEDIRDLTVMLPNLKRLMTCMNLSGLYMRGFKKLEELVFNSLYHSVPLDSRWIQDICLTMTNLRVLDITDQFDSCVRLTDIKLPNLEVLKINLSTVECMLSEVLQLPKLQKLSVRFDDSRQLNADQETIFQQIVVAKSERITRIALNNEVVQLPARWQQSLLLELPKLRKVICENWCHNDFFLDRQHMPCQQMEVLSFSGWEIVRETQLLELVAECVNLEHLALNGYHSNWEKLTKLVNIRNQERNPRPLQVFSDMMWGNFTPEEYYHWQSNKYVQVTCDSSEYEYQEDGFEFDFE

SEQ ID NO: 34474 - DNA, 8753 bp, DROSOPHILA
gcacatcccaaatccaaaggccaacaacaggagtgcgcgattccgccactcgactcaaccaacacattccattgtgccatatacacacttaatttccatttttcatattccaagcgcactgaaaaaagaagccaaccccactaaccccaccaccctcactccaaaaggcacccaccacccaccgaaagcggagagagcgatggatagtggaagagagagagagagagagcacggaacgctggagagaatcacgtttaaaacaagaatcatacacacacagcagcacgagtatttggcaatcaggaaaacgcgcatagtaaatttaagactttcggtttatctgctctatggccaaacattaattatccatgtgaaccgaaagcagatcgtaaacatactcaaaacattgtgtagtgcgctagtctcagctgttaaggccccattggaatgccatgcgtcgcgctcagagagcggctgatatgggttttccccctgatttgcatgcgacaagtgtccgaaaagataatgtaaaagggttatattcatgccgggattttctatacttcccttaagagaaaaataataatcgtttataatgtattcgttttctcctgtatccgttgaaaagttgtatctttaagataagcttaagataagataggagaagagaatataaacttcaaacaaggcatcatagttcaatagaaaacattatttcataaaacattaaggcatccataatgtttttgtgctgcttaaacgcacactatgattttaaaaactactcctaccagtttatattgatctcattttgtacgcccaactcaatttgcagcacgcatcattcagcctactacaacttgctgccaatgtaaaaatagtatgctgcaaccactgtgccgggaacggatcgaaatagaacaaagggaaaggaatgaaacaagacgaaacggaacgagactaacacactaacacacatttccaatgcgcaccgttttctttattttctgttaggagcatgcgcttcaaaattcacatggcgccgctgccgctgcttttcctctgccgctgccttttcctctgcccacacccacaacatgcacttccacttagcaagcacaacaaaaaagcgggagaatggcagaacatgtgagcgtgtgggtgagagtgtgtgcgacaaggcagctggaataaaaagggaagggaagagcgagaagaaggtaacgatcgctgggaaacttttgactgtgagcgaaagagaaagatgtctatattctggaaggatcaaccattttgaaaccgcgcttaaagccaacagattatagcatacttaacggggccattctctaagctcagctgattgcaaatcaaatctatcatattatacatatttaaaattacccccgcttttaaatcaactaatatgtttattcaatctaatttctctcgggacattattcgtaagtaaaacgttaagcattagcagtggtacaataaacaacaatgaaacatttccctaatcgattttgagtcattttagtaggaaaggggtactttcccttgaatagtcgtgttgaaagtctatttctggaaatagggttccgaaaactttccttagaactgattcaaaaagtacttattatctactgcactgggttaccatgttactaaaccaaaactgatatcaataaaatggactcaccgctatcgtcttcttccgctgttcggagatcatgttctcgctggaaccctttagtagctcggccaacaaagcgggcgttggcttcagacctgcctttccgccacctcctgatcccgatcccgaggttcctccagccagtggggcatttttcgcagccttgtcgccagatccagcatccaaactgcgcttgccagcatgatgatgaccatggctgtgcccatggccatgaccatggtgatggtggtgctgactgggacgctccgtgctcatcgactggctgcgcttgctgtggttagatttaggagccggagcttcagaggcagcgcgcttcatgtggtgcacctggtcatccagttccgcctggctcagattcttggcggacacggagatttgtgcagtggccgctgagatgcccttgctggcgtgctccagctgcgagggcgtggaagccgcacgagcatgagatggcactggcaaaaaggtacttgtctttctcacccgcattgaattggagtactgcggcagatttcgggagggaccaaccgttccaccagcagccacaccaggagctgatccacgcaagtgcaagctggaaaatgaagaaagtcataacaaatgtcttcaactttaaggttcaaactcacctgtccgtctctcgcagctcctccagaatctcttcgaagtgcatccggttgggcttcttcatctccgcttccagcatctggccgtaaggacctctgagtggtcgtttcgaaaatctcttgtagtcgtagtcgccgctgctgggcgtgggactggaggtaatacgctccctttcccgctcccgtatggcccgatcgcattcgttgtccgaggtggaatcggtgcgcagatagctcaggctccgacatgaggcatcgtccttttcctcgctgctgtggcagctaaagttgcttaacagctgcgccttgtcgcgcaccaatcctccactgccccacgaaggcgaacccttctccagttcgggggtattcaattcaaaggaataggagctctgcggactgctgatgtacatttgcgaggcgccaggggtgttggcttccggagattcgggtttaattgcattcagattggccacacttatgtccagggctagaccacgttgcggtgcctccgtgggagcttgccaatccgcattatctatgtacatgcccttacgtttggtggacttatccagatgcctacgttgccgctcatccgtactgtgtcgcggagtggctatggcctctaaggagctcctcagatcgacattggccaggtccagatcatcttggctgtactccctgatgtggcgatccattgatgtattcctcgccgtggtggccacctctacttgcggctcgtcctcgatcttagccagttcatccccttcttccgaggaacgactcacagatatggtgggcacaaggtcacttctcactgctgtggtcaacgtggacggcgtctgggagattttgcaggctgcatgcggaatgggtggctgtatggtctccgggacaataccaaattcctcaggggccacctccacccattcttgggcgggtgtctccagccattcttgggcggcacactcatatactggcactgggatctcacacgtggtggccgtttgcaggaagttatccggcggggcctccagtggcaactgctcctccatcagggttgccaaattcggagcactgccgctcaccgacgaggcgggtggtgttatctccactactggctgcacaggcggcggtacatcctccttgatcaggcaatcggtttccgactgaatggtatccgtaagcgattccatagtggcatgtgcggctatcacactgctggcggtggccaccgggaacacgatgcctgagctgtcacttgctgccaattcgttgctaaagatatcctcctcctggatggcgtcgtgatccagcgacttctcctgtccgtagttcagattgatgctgagttcggtctttttgagtggtattcgcacccaaccgggatccggaggagcaatttcctcctccctggagtgcgtcggactgggactgggcgcctcgatagccttgtcccgttttaagcgatctcttagagctgatagagtggacttgcagtcgatctgcgagaacgaaacggatcgaaatggggctgccttgtgcgcgctgcgtgaatccggccgtgatgctagcgccgtgctctcgaaactggcactgctgctggcagtggccgacgcatctacgcatctgctggccgcaggtctgtgattctgctgcgcaggtgggggcggggacttggacttctcgcggttgctcaacatgaaggcctccaggttggagagactcgtgtttggccgaagggaggcaaatatacgggcagcggtgctgagaccaacaccaccaccaccaccaccagcacctccactgtgacgtgtggtggtttcttcgctgggcatccggaggtgagcgctgcccgcttccgactccgaagtttggctggcgcccgtatcctggcgctccaggtgcgatatgcgcggcttgcggggtggtggcaccggtggcggcggaggtggtggcggagtgggcgtggacgaggcgcgggaactactgccaccgccgcctcctccccgcaaaagttccgttagctcgcgcaaacgctccgaacggtccgacgtcttgcgctgcttttccggaccggaagtggatgacggcgaggaggaggacgtggacgcggaggcggctgccgctggtgatgatttacgcccgaaaccgagacgctgaaagcggtccagggtattacgtcgtttctccattgtgtgctaaaagtgcgagagtgcgaggagggataattcgagttaaacgtttattattcatcgacggattgctcggcctgcccgggcccattatccattcgtccgttcctccccagcctcatgtctttttatggactagctgtgggcgtacttgtgaacccaccccaacccactacaccccgctcacaaaataaaaacaaacaaatcgctggcaattcaattcgatacactgaagcggcagcaaacattgagtcaacacggcgtatgtgtaatatcggcagagagggaaggagtcgatgaaacgacgaacagatttcgctttcccgcaggatcgtatgggtaatacggaatgctaattggaatgagcataagcattatgtatttgaatgtccggaacccagccagcatgattatattaggcgccttctcatccccagcgtcattatattcgctgcacaatgacacacataccagccaatctacgagaacacaatgtaaggcaagccaacacggtgctctatatatattaagccgattcgtgtatacatacgcacacagtgatatttttagtataaacaacagatctcagccgcatatataaaagtacgtattccacatacgtatttaaatccaaatacatataggtatatgtatgtaggtggaatatacagaaaatacaagagatctttgggactatgactgggaatgaatgagcagacaggccaacttacaatacactgctaggaaatcgtactagctatgacaatcaaatgttttaagatagatcatgcttgaaagccttgataacaccatataatatgaaatccttaaagttcccttttattttacatatttcgattttaattttcccagctatagcatcctatttttcccagtgcacacattaaaagaattgtacaaacaacacaaaagtagagcaatactaccaatgagatctgtggtgagcagaactctcgcaaccaacaccaatcactggcgaaaagcccacattctcccaatctctccgattgagcagaagaacgtgccgttcaggtggtgcccatccatcgaatcgtacatatatatatgacttattctctggcagaactacaatctccaagagatctattctggcccattgaaggggaaacaaacgtacgagtaactatatgatatatgggatcaataaaatcgatcaaaacaaaaggtttatggctgaaaattgcgcaccctgacagtttggtgatgaatggtggccatcgagttgcgggaaatgcaaatatacatttatacatttatctatatctgtttaaggctgatattctcttgctcatttcttctatgttgggtgctatactatcttatgtgctttcaaatatgcctatagcttatctcatttgttttaatacatttctgatttattaaaaacttaccccgttctccttgttaacctcgtatggagcatccacatggaaattacagtgacagggcagaagaatattgtttagcttaatgtggtttgttagctgattgttaatttggctcgcagcactcacttggttcagtgcattgcaaccacgattgtgctgcagtggcagagaaaacgaactattacgatcactaatattctggtttataacattcgcagtcacacgcgacaaatcggtgtagggatcgtaaggaactttgggctctgcgtaatattgtactggcaaacgcgattcactcagtgacttgtgcactccgttgctctttgccaccaccacttccggttccggttcggagtcgaaggtcaggcgaccgtgtcgatcataacagagcgatcgcggccccttcagcgatccccaagtgcactccccactcgctccaaagcggcaattgtagttgatgttattgctgaagttgccctcgaaggcatggggctggtagtccttggggatgcaacagctgttcgccggatagatccgaggcggaaagtgagtggggttggcaggtggctgagggtgagagtgatgatgatgttgctgttggcagaccaaacggcgggtcttcagagctggttcatcggatgcagagaaatccacacagacacgcggtttcggaggaactggcggcggatggcgatagcttcgatagctaacggtggcacaggaattgtagtgttgcaaatgctgttgctgttgttgtagctgctgctgctgctgctgctgctgtgacagttttttgtcaattgtataacaacaaatggctggtgactcgtcgctgatttcagatgacagggacaacactggcgatgacgcgtctcccactgatgttgctgctgctgctgctgctactgttgctgcctctgttgatttttccgttttcgttgttgatgtatttggctgccgcttttctatttctataaccggcggccgcacaacgtcatcgtcgtcgtcagcggcatcctcataatgagcatcgactaatacgcgcctcgtcgaatcgacttcctccccatcgaagacaaagccaaacgacgacaaatcggacactgaatcgtagtccccaaacggcagctgctgttgctgttgctgctgctgattctgcttctgctggtgctgctgatgttgctgctgttgccgcttctgctgctgcggatgaggctgctgtggctgttgcttttggcggtccatggagctgccaacttgttgctgcctctcgccacaacaattctcgcagagaatccgtgagcttttcgcagcgatgccaggagatagcttttggtgctgcgtgttggcaaagtatttggcaatgggatcgtactcctcgccatcgttgttgttgttattgttgttgttattattgttattaatattgttattgttgtgggtgagatgctggtaggtgagcggcggattggccctggcctcctggccccgggcgatcattgatcgttcgcctgtctgccggcgtggctgctcctcattccatgagagcttcttgtagccccgtccgcgcaccacccgttggcccaattgcggtgtggttggcaaggagctggacagcttgagtggtgcaaggtgcggcacctgctgatcgcctgtggaaaggtggtgaatgtaagtcgagttcgtgttcttttagcttcaaatagatgtactcccaatcttaccaatgattgcctccccttcgagctggatggcttcgctatcgacggtccgcgtcgagtggcgcatgcaacagcaggatatgaggcgactgctcttgttccttctcctcaccgcctggtcaacttcaatgggctgtggtgttctggagcttgttctcaaatcgctgcaaaaataatgctatttttagtatcgtaaataatttagaagtcattacggcaaagtgacaaacattcagctgcattggttatttttagccttgcctcatttgtatatctcttgataagcttaaaataaactggacaagcatacaatagtctatgtttggtttaacacttttaaagataactataaagtaaacaaacaactgcgattttagaatggttcaaggtgaattggtagagataattaataaacgcaacctaggcatgcaatgaatagaaaacttattttggccaacaatacaagtaaattatgaaagcaactaatatgccccgcgtggttaattcaattacaggatattgcaaatgttcgcccaaaagcatgccacaagcactgaactcccaattttcatgcaaatcagctgggaaatcgcattgaattttcacctccgccaagagtttccattctcattgctcggataataggttttcatcggaagatcatcaaattttcctcgcgcgggtaaatcgtatgtaatatatccctgacgtgcctccggcatttttggtgatctataagatatagaaagcgatgacagtcccaaatcggtcgagtgtattcgcagtaaagttcagtgcctcagatatagcgcatacaacccattctatttttatctgttgcagcgcatacttcattcccaatgcgaacgaggctatagtaagatatgatattataccatttcaaaggggtgcctttcaaaaacatttcaaaaactttatttttaatacgttaaatattatttctaaaaaccttagtaatttatgaacttaaaataatttaaaacaatgaaaatgtaggaaatataaaatgaggttaaccttctacgcgagcttttcaatcaatttaa

SEQ ID NO: 34475 - DNA, 4482 bp, DROSOPHILA
atgcgccactcgacgcggaccgtcgatagcgaagccatccagctcgaaggggaggcaatcattggcgatcagcaggtgccgcaccttgcaccactcaagctgtccagctccttgccaaccacaccgcaattgggccaacgggtggtgcgcggacggggctacaagaagctctcatggaatgaggagcagccacgccggcagacaggcgaacgatcaatgatcgcccggggccaggaggccagggccaatccgccgctcacctaccagcatctcacccacaacaataacaatattaataacaataataacaacaacaataacaacaacaacgatggcgaggagtacgatcccattgccaaatactttgccaacacgcagcaccaaaagctatctcctggcatcgctgcgaaaagctcacggattctctgcgagaattgttgtggcgagaggcagcaacaagttggcagctccatggaccgccaaaagcaacagccacagcagcctcatccgcagcagcagaagcggcaacagcagcaacatcagcagcaccagcagaagcagaatcagcagcagcaacagcaacagcagctgccgtttggggactacgattcagtgtccgatttgtcgtcgtttggctttgtcttcgatggggaggaagtcgattcgacgaggcgcgtattagtcgatgctcattatgaggatgccgctgacgacgacgatgacgttgtgcggccgccggttatagaaatagaaaagcggcagccaaatacatcaacaacgaaaacggaaaaatcaacagaggcagcaacagtagcagcagcagcagcagcaacatcagtgggagacgcgtcatcgccagtgttgtccctgtcatctgaaatcagcgacgagtcaccagccatttgttgttatacaattgacaaaaaactgtcacagcagcagcagcagcagcagcagctacaacaacagcaacagcatttgcaacactacaattcctgtgccaccgttagctatcgaagctatcgccatccgccgccagttcctccgaaaccgcgtgtctgtgtggatttctctgcatccgatgaaccagctctgaagacccgccgtttggtctgccaacagcaacatcatcatcactctcaccctcagccacctgccaaccccactcactttccgcctcggatctatccggcgaacagctgttgcatccccaaggactaccagccccatgccttcgagggcaacttcagcaataacatcaactacaattgccgctttggagcgagtggggagtgcacttggggatcgctgaaggggccgcgatcgctctgttatgatcgacacggtcgcctgaccttcgactccgaaccggaaccggaagtggtggtggcaaagagcaacggagtgcacaagtcactgagtgaatcgcgtttgccagtacaatattacgcagagcccaaagttccttacgatccctacaccgatttgtcgcgtgtgactgcgaatgttataaaccagaatattagtgatcgtaatagttcgttttctctgccactgcagcacaatcgtggttgcaatgcactgaaccaacacacaatggagaaacgacgtaataccctggaccgctttcagcgtctcggtttcgggcgtaaatcatcaccagcggcagccgcctccgcgtccacgtcctcctcctcgccgtcatccacttccggtccggaaaagcagcgcaagacgtcggaccgttcggagcgtttgcgcgagctaacggaacttttgcggggaggaggcggcggtggcagtagttcccgcgcctcgtccacgcccactccgccaccacctccgccgccaccggtgccaccaccccgcaagccgcgcatatcgcacctggagcgccaggatacgggcgccagccaaacttcggagtcggaagcgggcagcgctcacctccggatgcccagcgaagaaaccaccacacgtcacagtggaggtgctggtggtggtggtggtggtgttggtctcagcaccgctgcccgtatatttgcctcccttcggccaaacacgagtctctccaacctggaggccttcatgttgagcaaccgcgagaagtccaagtccccgcccccacctgcgcagcagaatcacagacctgcggccagcagatgcgtagatgcgtcggccactgccagcagcagtgccagtttcgagagcacggcgctagcatcacggccggattcacgcagcgcgcacaaggcagccccatttcgatccgtttcgttctcgcagatcgactgcaagtccactctatcagctctaagagatcgcttaaaacgggacaaggctatcgaggcgcccagtcccagtccgacgcactccagggaggaggaaattgctcctccggatcccggttgggtgcgaataccactcaaaaagaccgaactcagcatcaatctgaactacggacaggagaagtcgctggatcacgacgccatccaggaggaggatatctttagcaacgaattggcagcaagtgacagctcaggcatcgtgttcccggtggccaccgccagcagtgtgatagccgcacatgccactatggaatcgcttacggataccattcagtcggaaaccgattgcctgatcaaggaggatgtaccgccgcctgtgcagccagtagtggagataacaccacccgcctcgtcggtgagcggcagtgctccgaatttggcaaccctgatggaggagcagttgccactggaggccccgccggataacttcctgcaaacggccaccacgtgtgagatcccagtgccagtatatgagtgtgccgcccaagaatggctggagacacccgcccaagaatgggtggaggtggcccctgaggaatttggtattgtcccggagaccatacagccacccattccgcatgcagcctgcaaaatctcccagacgccgtccacgttgaccacagcagtgagaagtgaccttgtgcccaccatatctgtgagtcgttcctcggaagaaggggatgaactggctaagatcgaggacgagccgcaagtagaggtggccaccacggcgaggaatacatcaatggatcgccacatcagggagtacagccaagatgatctggacctggccaatgtcgatctgaggagctccttagaggccatagccactccgcgacacagtacggatgagcggcaacgtaggcatctggataagtccaccaaacgtaagggcatgtacatagataatgcggattggcaagctcccacggaggcaccgcaacgtggtctagccctggacataagtgtggccaatctgaatgcaattaaacccgaatctccggaagccaacacccctggcgcctcgcaaatgtacatcagcagtccgcagagctcctattcctttgaattgaatacccccgaactggagaagggttcgccttcgtggggcagtggaggattggtgcgcgacaaggcgcagctgttaagcaactttagctgccacagcagcgaggaaaaggacgatgcctcatgtcggagcctgagctatctgcgcaccgattccacctcggacaacgaatgcgatcgggccatacgggagcgggaaagggagcgtattacctccagtcccacgcccagcagcggcgactacgactacaagagattttcgaaacgaccactcagaggtccttacggccagatgctggaagcggagatgaagaagcccaaccggatgcacttcgaagagattctggaggagctgcgagagacggacagcttgcacttgcgtggatcagctcctggtgtggctgctggtggaacggttggtccctcccgaaatctgccgcagtactccaattcaatgcgggtgagaaagacaagtacctttttgccagtgccatctcatgctcgtgcggcttccacgccctcgcagctggagcacgccagcaagggcatctcagcggccactgcacaaatctccgtgtccgccaagaatctgagccaggcggaactggatgaccaggtgcaccacatgaagcgcgctgcctctgaagctccggctcctaaatctaaccacagcaagcgcagccagtcgatgagcacggagcgtcccagtcagcaccaccatcaccatggtcatggccatgggcacagccatggtcatcatcatgctggcaagcgcagtttggatgctggatctggcgacaaggctgcgaaaaatgccccactggctggaggaacctcgggatcgggatcaggaggtggcggaaaggcaggtctgaagccaacgcccgctttgttggccgagctactaaagggttccagcgagaacatgatctccgaacagcggaagaagacgatagcgtggaagtgcatgttgtgggtgtgggcagaggaaaaggcagcggcagaggaaaagcagcggcagcggcgccatgtgaattttgaagcgcatgctcctaacagaaaataa

SEQ ID NO: 34476 - protein, 1493 aa, DROSOPHILA
MRHSTRTVDSEAIQLEGEAIIGDQQVPHLAPLKLSSSLPTTPQLGQRVVRGRGYKKLSWNEEQPRRQTGERSMIARGQEARANPPLTYQHLTHNNNNINNNNNNNNNNNNDGEEYDPIAKYFANTQHQKLSPGIAAKSSRILCENCCGERQQQVGSSMDRQKQQPQQPHPQQQKRQQQQHQQHQQKQNQQQQQQQQLPFGDYDSVSDLSSFGFVFDGEEVDSTRRVLVDAHYEDAADDDDDVVRPPVIEIEKRQPNTSTTKTEKSTEAATVAAAAAATSVGDASSPVLSLSSEISDESPAICCYTIDKKLSQQQQQQQQLQQQQQHLQHYNSCATVSYRSYRHPPPVPPKPRVCVDFSASDEPALKTRRLVCQQQHHHHSHPQPPANPTHFPPRIYPANSCCIPKDYQPHAFEGNFSNNINYNCRFGASGECTWGSLKGPRSLCYDRHGRLTFDSEPEPEVVVAKSNGVHKSLSESRLPVQYYAEPKVPYDPYTDLSRVTANVINQNISDRNSSFSLPLQHNRGCNALNQHTMEKRRNTLDRFQRLGFGRKSSPAAAASASTSSSSPSSTSGPEKQRKTSDRSERLRELTELLRGGGGGGSSSRASSTPTPPPPPPPPVPPPRKPRISHLERQDTGASQTSESEAGSAHLRMPSEETTTRHSGGAGGGGGGVGLSTAARIFASLRPNTSLSNLEAFMLSNREKSKSPPPPAQQNHRPAASRCVDASATASSSASFESTALASRPDSRSAHKAAPFRSVSFSQIDCKSTLSALRDRLKRDKAIEAPSPSPTHSREEEIAPPDPGWVRIPLKKTELSINLNYGQEKSLDHDAIQEEDIFSNELAASDSSGIVFPVATASSVIAAHATMESLTDTIQSETDCLIKEDVPPPVQPVVEITPPASSVSGSAPNLATLMEEQLPLEAPPDNFLQTATTCEIPVPVYECAAQEWLETPAQEWVEVAPEEFGIVPETIQPPIPHAACKISQTPSTLTTAVRSDLVPTISVSRSSEEGDELAKIEDEPQVEVATTARNTSMDRHIREYSQDDLDLANVDLRSSLEAIATPRHSTDERQRRHLDKSTKRKGMYIDNADWQAPTEAPQRGLALDISVANLNAIKPESPEANTPGASQMYISSPQSSYSFELNTPELEKGSPSWGSGGLVRDKAQLLSNFSCHSSEEKDDASCRSLSYLRTDSTSDNECDRAIRERERERITSSPTPSSGDYDYKRFSKRPLRGPYGQMLEAEMKKPNRMHFEEILEELRETDSLHLRGSAPGVAAGGTVGPSRNLPQYSNSMRVRKTSTFLPVPSHARAASTPSQLEHASKGISAATAQISVSAKNLSQAELDDQVHHMKRAASEAPAPKSNHSKRSQSMSTERPSQHHHHHGHGHGHSHGHHHAGKRSLDAGSGDKAAKNAPLAGGTSGSGSGGGGKAGLKPTPALLAELLKGSSENMISEQRKKTIAWKCMLWVWAEEKAAAEEKQRQRRHVNFEAHAPNRK

SEQ ID NO: 34477 - DNA, 2867 bp, DROSOPHILA
cggcccaggcaccaccaccaccaccaccgctgcccataaagggagcacccgttcctcagccaccagcggtaatgccccactctgccggcatctacggacgcgctcctcaagcaatgcccgagatgatgcagttgtcgcccgagcaccaccacaatccacttcagcactcgctgcagcatccacagcaccatcctcttcagcagcagcagcagaagcagcagacaccacagcatcctctccagcagcagggcaatccgcaccagcatctagtcagccccttggctccggtcacggtcgcagttcacaccaacgaagcgcatgtaagtggaggatgtgggtataagtaaggttaaactacaggtagataccctaataagatcaggctgattgataatattagttaatgttcttatgttgggatgtatagtttactgaatcagcttttaatggtgcccctcagatgttgcacttaagtgcccctgacaatgcagcaaattcccagacttttaggcatacccacagctagtgtatttacccttcagcatagtgcatagtggatatttttgtgctcttgtttgggtgatttgcatgtgggattgcagggaggcgatgcgtcgtcatgtaggggcgtgtagcatgtcacgcccctggagcagcagcctgagatttatgtttgctgttatgagacagcataaatcagtgccagggccacagacatggggacatggcctgcggattggggacctggtctgggggacagtggcagcgacactgtccgaattagtgctccggtttgatggatgacctggaaaagcaggatggggcgaagggaataaaggctgtctacccgatttgacttgatttcgttttcacttgcaggaggggccacactgaagcagagcccctactgtcatctcctagaatctctcattatcccaggagctcctttaccactttcactgactccccactctctctgtctcgctttctctctatttttatgtttgtgccccattcccagattgcatccagttccacaccccgttgcctgcgtcgcgccgattcgggcgttcccaacgaggcgttgacaccgcgcagcgacaccacctccaccaccgaaagtaccaacaccacctcaccgccggaacgcgccccctccgagtcctccagtggcgtccactcgggcgaggaacgtgagctggaggtcatcatccggccaagggccaacagcaagccgccgccacgccccccacagccgccgatccaggaggagccatacggccgctgcaccaacatgcgcatgtccagcttcaatgcggatcccgccgccacctcgtcggcggtcatcaatagtgccacattgccgccgcagcgttctgtgccggagcagaagttcgactatacggctcactgcagcacaatgccactgccggtgggctgtcacagccagcaactcgccgggagcggtaatggctatgcctccacctcggcaatgaccagttccatgggcggtggcggtatgccaccactgccgccatcgcaggtctccagcttcatgacgcccaacagtatgcactacgccaatgcatcagtggccctgggaaatgttagtggtcaacagcagccgcacaccacgctgccaaatggagtgcgctactccaatccgcactttctgcgccgcctgccgcacgtgaccaaggcggcggagtcgccgtacggacacctgggctacggagctggtcaccacgccttcgcaaagctgccgcacgagacgcatcccacgattccggaggatcgcgactccgccaactactcgatggcctctgaccaggattgcggactctatgtgacggcccagctgcactaggatggcaagggatcccacttcatttatactatgaacttagacttattgcaaagagcattgcgcaccatgtattagcccttaaagtcataagttaaagtctgattgctctgcggcatggaacattataaagtgtatcgagtgtcgtggtgcaatcggattttaaatccatagccttaaccacttgcaataccgcaagtccctaggtcccgtatcgccctaagttagcctctcggtttttgtacagctccgggcgcccagagaagccataccaaatccactaatcttccaaaggatcagctggttaccggaccccaaatgaattaaattattcctcgtttgctttgccttgacgatgatccactcaagtgtgtagcgctaattgccacccagatgacccactaaaagaattgagaattgaagcttaactatatctacatctaaactgcatctacatctacggctaaatctaaatctaatatatatttatatttatacatgctatgctcgtatacaatgtgtaagataataagctaatcgagtttaagtaatcaatgtaaactaaagtttatcatatcatatatgaatgaatatcgatagctaactgtaagaccctaaacaaatattaatgcgaaaagaataaaatatcatagctcgatcatgtgcaagcactcaaagtattttcccctaagcaatttctcttatcaaacaaacgaaaaatggaatgaacaaaggcatacgaatttaagcagcaattctatggtttttattgtaaggttaaactgtaaagtggtacatcgtaattttatggcactaactagccaacacgttatgcttcagctagtcggcatagaggatagacacccagcaaggctttggcatatgtattttctatggtctctcaacgcttaccgtttaagatgaatgtaaaatgtaatgtaacaaagcgacaatatgaatactatctaatgtatgatacgaatgaatactatccacaccccat

SEQ ID NO: 34478 - DNA, 867 bp, DROSOPHILA
atgtttgtgccccattcccagattgcatccagttccacaccccgttgcctgcgtcgcgccgattcgggcgttcccaacgaggcgttgacaccgcgcagcgacaccacctccaccaccgaaagtaccaacaccacctcaccgccggaacgcgccccctccgagtcctccagtggcgtccactcgggcgaggaacgtgagctggaggtcatcatccggccaagggccaacagcaagccgccgccacgccccccacagccgccgatccaggaggagccatacggccgctgcaccaacatgcgcatgtccagcttcaatgcggatcccgccgccacctcgtcggcggtcatcaatagtgccacattgccgccgcagcgttctgtgccggagcagaagttcgactatacggctcactgcagcacaatgccactgccggtgggctgtcacagccagcaactcgccgggagcggtaatggctatgcctccacctcggcaatgaccagttccatgggcggtggcggtatgccaccactgccgccatcgcaggtctccagcttcatgacgcccaacagtatgcactacgccaatgcatcagtggccctgggaaatgttagtggtcaacagcagccgcacaccacgctgccaaatggagtgcgctactccaatccgcactttctgcgccgcctgccgcacgtgaccaaggcggcggagtcgccgtacggacacctgggctacggagctggtcaccacgccttcgcaaagctgccgcacgagacgcatcccacgattccggaggatcgcgactccgccaactactcgatggcctctgaccaggattgcggactctatgtgacggcccagctgcactag

SEQ ID NO: 34479 - protein, 288 aa, DROSOPHILA
MFVPHSQIASSSTPRCLRRADSGVPNEALTPRSDTTSTTESTNTTSPPERAPSESSSGVHSGEERELEVIIRPRANSKPPPRPPQPPIQEEPYGRCTNMRMSSFNADPAATSSAVINSATLPPQRSVPEQKFDYTAHCSTMPLPVGCHSQQLAGSGNGYASTSAMTSSMGGGGMPPLPPSQVSSFMTPNSMHYANASVALGNVSGQQQPHTTLPNGVRYSNPHFLRRLPHVTKAAESPYGHLGYGAGHHAFAKLPHETHPTIPEDRDSANYSMASDQDCGLYVTAQLH

SEQ ID NO: 34480 - DNA, 7008 bp, DROSOPHILA
aagtttattgaagagaacccaaaacggagagcttagtttagtgcttatctgctcgcctgattggttttcggactccactggaccacttctgaactgctgtggaacaaaggagtggcatgctagcccctgtgaaaagtccccatttctcggcttgctccaataaatcgcattaccagggtctgaccgtaataaacatgaatattaagctccgccgctgagcaggagtgcaggagccactgcaaagtagttatcagttcgaaagttggggaagtttgtatgatagcttaaggagatcgggttgaaatggtatgggctccggaggttcatatatgtacaaatgtttccactgtgcgcctaattagacctccgaaactgaccggccatgttgcctaatggtggaattgtgtgcattgtttttccatttggttctgaatcgaacggaaatgggatcgaccggaaaaattgttttcttttttcctcttttggctttcaaacagagcgaatacagcgcagatttcccattgtctggagattccagctctcgtcgtcattgatttgacttgattggtattcattgagattcaagcagagaagtgtagcccattgtcttgcgtctaataatcaacggggcgtggattatagaagtcctgcaagtatcgatgcctcatttaattaacgattgccacacggctgaagggtgaattcgagtggaagacaggaaagcatcctgcttattacacgagctcatgtttatgcaagatgtgtgtgtgtgctctcgtccttaacaggtgcttaccatgtaatcctgcgtgatgtatacgaattagatgcgaaagcaagttgccttccttaccgagttcaaagcaattaattctatgtacttgagcagccatcaatccacaaaccttcacccttaaatctttctctttcgctctctaccattccagagcaaatttgggccactgaattggactttgttgtgatcaatcgacgcaatttgatggccatgtcggtggtgggagccacaccctttcccaggcaccatcagccatcgaaccagcagcagtcccaccaccagcatggcagactaaacttgaccgcaaacagcttggaacaggacgaggaggactacttcaacgataccatgttcacggcaatccgtggagtgccagccgggggcaataacaatttgttcgacctgcgacccgataggatggctaacggcaggaaggcggccaagacgacggcgacgaccaggacaacaaccaccgccaacaaactggatgcgggcaaggggcaatactttgaagtgcccgatttaattaatcaagatatcgacgaggaggagcgccaagaactggaggaggcgattcggggcgaggaagatgatggagatgaaggtgtgggtgtcggcgaagagggaaccgtcatcatgccagatttcgatgagttggcgccaagaaccgcagttggaacgtcaaccacaacggctaaggcgtcctctgatgccgacaagttaaatgtggaaaattggcaacagctgggaactctgggcaaagcggacgcatcgagcagctccagtagcacaacatctaccacaacaacaactacgacatcgacaacaaccactgcagccacaacaactagtacaaggggcaccagcaccaccacaaccaccaccactattaaacccatggagataacaaccagcagacaatcagcacatcaccatcatggaaagtcccgcaaacaccacaaacatcacaataaacagcgtcaacagcagccaccgcgtcgccatcatgtggcctcccacgagcaggcgatcctcgagagcttcccagaggaggagaccaccacccgcgacagcagcatccatcgggtaaggcccgaagtcctgccggagctaccgattccctcgacgcccgtctcagcctccaactccaagatcattgccatcaaagcgaagaaccaaaagcgcaggatatccaaacgggctgccggagttgaaatcgagccggaatatctgcttggcgatgccaatataaattccagtgaattcgtggccaaatcgaatgaggaggagccagaggagagcgaggacttcgaactggaggatggtgattttcaggcagtgcccgccttgactcctgcacctcctgctgaaccaaacggcccgaagtcagggcaggattacgtccgactggatggctttgccggaatgctgcagctcttctttggcattgataaacccatcgatgtggcaattttctcccagccacccagtgccgagtttgtgaacctactttgcgccctgttggtttggtccgttcggtatccggccgttttctggaatacctcaaaggcctttgcctgcgttttcagcctccagatggtggtggccgccctggacatcatacttggttatgtgggcatctcgaatctgtacaagctacagatctacgccgaggcgatgccggttcatcagccgggactcatcctgaatgcagtggtcactttggctttgtatcttttgtccaccgctttggtgttggcctcttcgatggtcatgtacttgtacggacacggacgtctggccacccggatgcgggatcgctccattatcacgttgaagactcaccaaacctggatttacttcgcccactgcgcctccttgtgcttcgtcctcgccttggcggtggtgaaggctccgctactcaacgatctcagtgccacctacaagaacaacctgcactgccccaccttcctagcaggtgagtaaaaaacagataaggggttacttaaaatagcggactacttgaaaatgagtaagcaatgcgtcgtaaaagttttttccctctattagaatagctcattgaaatactcggtatctattggtataaattaccaataaatcttttattggaagttaatcattctcttgagtacgaaacgcattaaaacactgtcgatttggctgtccggttaagtgtatatcaagaattgaacattcaaatgtagaacaagacatttccatttctcaaccccgttaaaagcgataatttcagataatgatatttcagataaagtggtagagagcaaatcgctgcaatgtccgattccccaatcgattgagtatgttagatttgcataattagatgaccggtaatcgggtgccggggacgccttgaactcggtcttaggtatgttttgtggtctaagccaattagcggccttgttttgtctctggctctgccgttgggtgagcggtaatcgggggctagataacccgatgagacaaaggagccgtattaagtgtcacttggggcgagacaatcgaactgcagactcagtccaattaagctgtcatacggccgattgccgccttaaccgtattacgcttttacctgtgcagcgtcaccatctcacctttccccctttcacctttcgatattgcagctcttgtcggtgtgacacacctgctgctatggattgtcatctggctctgcctgaccatcaagcggcgctggcactttaagctgcctccattggacagcacttacggtggactgctgggaaagtccagtgcccagccgctcctgatgtccagtggccagcgtacggggagcaactcgagcagcagtggctgcaactcgaccagcaccacggtgaatggtggtgactccaagccggacatgatgagcacagccaccagcacggaactgggaatgggaatgggcatgggcataggtgggggcatcaatgggggcatgggcgggacgggcatgggactggccgcccaggaggacatctattggcccaagctgacgcccagttcgcccaagctgaaggtcaccttcaacgaagttacgagtacgtctgatgatgtcctactaattggtgaccaagaacaaactgatggcaagcggtaaaaaatcgttttttagctaccaacaaacaaaacaacaaaagcattgcgggtttccaagctccgtacttgtccgttctcttaactctaaccatagcaactagtttcatttgatttttcttcacacacacacacactgcaccgccaaaacaaaaaaaaaaaaaaaagtaaacccacccagcactatttttcaggaacttcatgtgattttgtgttttcgttcttacctagactgctaattcattcattttgtactttatcggtgtgttttctctgcacgtcccattttcgggaagagccattattgaaaactaattgcccaacactagtcattagtgcagcgttttgccacacctaatttaccccacatttaccagcactgtactcttcagtttcgattcgtgcgtgcttctgacattcgcccatttatacatataatcacttttgtgttttcgtttagtttaagcttttgtttgtccactaaaacgattgttcaattaaacatagcaaaacgatttatccatatatgttcgtatatatctatagagagacatgtatgtatagaggatgaaggataataatgagaaactattttgttccgcttgtcgcctgttttttaaaaacgattcttatttattttatttttcaattgtttgatttactagaacttaattactactaactctagctaattgagtgtgggcgaattgcatttcaattaacaattaactattactaaaacaaagcgttcgcagattatatgttgttgttgtcgatgtcgccgtgttgttgttgttgtccttggtaatttgtttaactaactggaaaaccattgaactaacacagacagtgtttgaacgaattcaagggaagataatgcattttacaaattggttttttattatatgtaagtgtgttctagtgaggaacacaatttattgtacatttttgtagctgacaatgggagaatactttaaaaaattctcttgcactccttaagtcctttaaaatgattcacttccttgggttcgttctgatccctgaggtgcctgacagacctcgtggcaaccaacacaaggcggcaatttaatttgatagtatatcatccactgaccggaatcccattctcctccagccatacgagccgtggagcctcggtatgttttgccagtgctacgggggaagttgacgacggcgagtacgcgacactaagggcagccaccgccggcgccgtcgtgggcatcaccatgggcagcatgaaaaggggcctcagcaacacctcggtgggggtaagtctgctccacctttccgagtacgacgaacttcctccgccgccgccggccaaccttcaccatcagcagcagcagcagcagcaacagcagcagcggcaggcccactcctttgcccatggacatccccacgactatgcgaatctgagcggattgggtggcatcagtgacgacaacatctccgaggagggcaagctgctggcctgtgtgcgcgatgacagtatcacctacgcatccaccagtgatttggagccaccacagccatcggcccaggcaccaccaccaccaccaccgctgcccataaagggagcacccgttcctcagccaccagcggtaatgccccactctgccggcatctacggacgcgctcctcaagcaatgcccgagatgatgcagttgtcgcccgagcaccaccacaatccacttcagcactcgctgcagcatccacagcaccatcctcttcagcagcagcagcagaagcagcagacaccacagcatcctctccagcagcagggcaatccgcaccagcatctagtcagccccttggctccggtcacggtcgcagttcacaccaacgaagcgcatgtaagtggaggatgtgggtataagtaaggttaaactacaggtagataccctaataagatcaggctgattgataatattagttaatgttcttatgttgggatgtatagtttactgaatcagcttttaatggtgcccctcagatgttgcacttaagtgcccctgacaatgcagcaaattcccagacttttaggcatacccacagctagtgtatttacccttcagcatagtgcatagtggatatttttgtgctcttgtttgggtgatttgcatgtgggattgcagggaggcgatgcgtcgtcatgtaggggcgtgtagcatgtcacgcccctggagcagcagcctgagatttatgtttgctgttatgagacagcataaatcagtgccagggccacagacatggggacatggcctgcggattggggacctggtctgggggacagtggcagcgacactgtccgaattagtgctccggtttgatggatgacctggaaaagcaggatggggcgaagggaataaaggctgtctacccgatttgacttgatttcgttttcacttgcaggaggggccacactgaagcagagcccctactgtcatctcctagaatctctcattatcccaggagctcctttaccactttcactgactccccactctctctgtctcgctttctctctatttttatgtttgtgccccattcccagattgcatccagttccacaccccgttgcctgcgtcgcgccgattcgggcgttcccaacgaggcgttgacaccgcgcagcgacaccacctccaccaccgaaagtaccaacaccacctcaccgccggaacgcgccccctccgagtcctccagtggcgtccactcgggcgaggaacgtgagctggaggtcatcatccggccaagggccaacagcaagccgccgccacgccccccacagccgccgatccaggaggagccatacggccgctgcaccaacatgcgcatgtccagcttcaatgcggatcccgccgccacctcgtcggcggtcatcaatagtgccacattgccgccgcagcgttctgtgccggagcagaagttcgactatacggctcactgcagcacaatgccactgccggtgggctgtcacagccagcaactcgccgggagcggtaatggctatgcctccacctcggcaatgaccagttccatgggcggtggcggtatgccac

SEQ ID NO: 34481 - DNA, 3048 bp, DROSOPHILA
atggccatgtcggtggtgggagccacaccctttcccaggcaccatcagccatcgaaccagcagcagtcccaccaccagcatggcagactaaacttgaccgcaaacagcttggaacaggacgaggaggactacttcaacgataccatgttcacggcaatccgtggagtgccagccgggggcaataacaatttgttcgacctgcgacccgataggatggctaacggcaggaaggcggccaagacgacggcgacgaccaggacaacaaccaccgccaacaaactggatgcgggcaaggggcaatactttgaagtgcccgatttaattaatcaagatatcgacgaggaggagcgccaagaactggaggaggcgattcggggcgaggaagatgatggagatgaaggtgtgggtgtcggcgaagagggaaccgtcatcatgccagatttcgatgagttggcgccaagaaccgcagttggaacgtcaaccacaacggctaaggcgtcctctgatgccgacaagttaaatgtggaaaattggcaacagctgggaactctgggcaaagcggacgcatcgagcagctccagtagcacaacatctaccacaacaacaactacgacatcgacaacaaccactgcagccacaacaactagtacaaggggcaccagcaccaccacaaccaccaccactattaaacccatggagataacaaccagcagacaatcagcacatcaccatcatggaaagtcccgcaaacaccacaaacatcacaataaacagcgtcaacagcagccaccgcgtcgccatcatgtggcctcccacgagcaggcgatcctcgagagcttcccagaggaggagaccaccacccgcgacagcagcatccatcgggtaaggcccgaagtcctgccggagctaccgattccctcgacgcccgtctcagcctccaactccaagatcattgccatcaaagcgaagaaccaaaagcgcaggatatccaaacgggctgccggagttgaaatcgagccggaatatctgcttggcgatgccaatataaattccagtgaattcgtggccaaatcgaatgaggaggagccagaggagagcgaggacttcgaactggaggatggtgattttcaggcagtgcccgccttgactcctgcacctcctgctgaaccaaacggcccgaagtcagggcaggattacgtccgactggatggctttgccggaatgctgcagctcttctttggcattgataaacccatcgatgtggcaattttctcccagccacccagtgccgagtttgtgaacctactttgcgccctgttggtttggtccgttcggtatccggccgttttctggaatacctcaaaggcctttgcctgcgttttcagcctccagatggtggtggccgccctggacatcatacttggttatgtgggcatctcgaatctgtacaagctacagatctacgccgaggcgatgccggttcatcagccgggactcatcctgaatgcagtggtcactttggctttgtatcttttgtccaccgctttggtgttggcctcttcgatggtcatgtacttgtacggacacggacgtctggccacccggatgcgggatcgctccattatcacgttgaagactcaccaaacctggatttacttcgcccactgcgcctccttgtgcttcgtcctcgccttggcggtggtgaaggctccgctactcaacgatctcagtgccacctacaagaacaacctgcactgccccaccttcctagcagctcttgtcggtgtgacacacctgctgctatggattgtcatctggctctgcctgaccatcaagcggcgctggcactttaagctgcctccattggacagcacttacggtggactgctgggaaagtccagtgcccagccgctcctgatgtccagtggccagcgtacggggagcaactcgagcagcagtggctgcaactcgaccagcaccacggtgaatggtggtgactccaagccggacatgatgagcacagccaccagcacggaactgggaatgggaatgggcatgggcataggtgggggcatcaatgggggcatgggcgggacgggcatgggactggccgcccaggaggacatctattggcccaagctgacgcccagttcgcccaagctgaaggtcaccttcaacgaagttacgagtacgtctgatgatgtcctactaattggtgaccaagaacaaactgatggcaagcgccatacgagccgtggagcctcggtatgttttgccagtgctacgggggaagttgacgacggcgagtacgcgacactaagggcagccaccgccggcgccgtcgtgggcatcaccatgggcagcatgaaaaggggcctcagcaacacctcggtgggggtaagtctgctccacctttccgagtacgacgaacttcctccgccgccgccggccaaccttcaccatcagcagcagcagcagcagcaacagcagcagcggcaggcccactcctttgcccatggacatccccacgactatgcgaatctgagcggattgggtggcatcagtgacgacaacatctccgaggagggcaagctgctggcctgtgtgcgcgatgacagtatcacctacgcatccaccagtgatttggagccaccacagccatcggcccaggcaccaccaccaccaccaccgctgcccataaagggagcacccgttcctcagccaccagcggtaatgccccactctgccggcatctacggacgcgctcctcaagcaatgcccgagatgatgcagttgtcgcccgagcaccaccacaatccacttcagcactcgctgcagcatccacagcaccatcctcttcagcagcagcagcagaagcagcagacaccacagcatcctctccagcagcagggcaatccgcaccagcatctagtcagccccttggctccggtcacggtcgcagttcacaccaacgaagcgcatatgttgcacttaagtgcccctgacaatgcagcaaattcccagacttttaggcatacccacagctag

SEQ ID NO: 34482 - protein, 1015 aa, DROSOPHILA
MAMSVVGATPFPRHHQPSNQQQSHHQHGRLNLTANSLEQDEEDYFNDTMFTAIRGVPAGGNNNLFDLRPDRMANGRKAAKTTATTRTTTTANKLDAGKGQYFEVPDLINQDIDEEERQELEEAIRGEEDDGDEGVGVGEEGTVIMPDFDELAPRTAVGTSTTTAKASSDADKLNVENWQQLGTLGKADASSSSSSTTSTTTTTTTSTTTTAATTTSTRGTSTTTTTTTIKPMEITTSRQSAHHHHGKSRKHHKHHNKQRQQQPPRRHHVASHEQAILESFPEEETTTRDSSIHRVRPEVLPELPIPSTPVSASNSKIIAIKAKNQKRRISKRAAGVEIEPEYLLGDANINSSEFVAKSNEEEPEESEDFELEDGDFQAVPALTPAPPAEPNGPKSGQDYVRLDGFAGMLQLFFGIDKPIDVAIFSQPPSAEFVNLLCALLVWSVRYPAVFWNTSKAFACVFSLQMVVAALDIILGYVGISNLYKLQIYAEAMPVHQPGLILNAVVTLALYLLSTALVLASSMVMYLYGHGRLATRMRDRSIITLKTHQTWIYFAHCASLCFVLALAVVKAPLLNDLSATYKNNLHCPTFLAALVGVTHLLLWIVIWLCLTIKRRWHFKLPPLDSTYGGLLGKSSAQPLLMSSGQRTGSNSSSSGCNSTSTTVNGGDSKPDMMSTATSTELGMGMGMGIGGGINGGMGGTGMGLAAQEDIYWPKLTPSSPKLKVTFNEVTSTSDDVLLIGDQEQTDGKRHTSRGASVCFASATGEVDDGEYATLRAATAGAVVGITMGSMKRGLSNTSVGVSLLHLSEYDELPPPPPANLHHQQQQQQQQQQRQAHSFAHGHPHDYANLSGLGGISDDNISEEGKLLACVRDDSITYASTSDLEPPQPSAQAPPPPPPLPIKGAPVPQPPAVMPHSAGIYGRAPQAMPEMMQLSPEHHHNPLQHSLQHPQHHPLQQQQQKQQTPQHPLQQQGNPHQHLVSPLAPVTVAVHTNEAHMLHLSAPDNAANSQTFRHTHS

SEQ ID NO: 34483 - DNA, 2448 bp, DROSOPHILA
gattgggcctgtgccagcagagcgctctgaagtacaaggatagcctttccggccaagccaccaccagatttacaatccacggctccattcagaggcacagctcactcacgtgcaaaatgcagactgtgatgggcgctgagacgcagaaaatgctgaagaacagcgaggattatgtttaaaccgaacccgggtattgtgaactcacctcttcccaccccgttgtgatatatgatacatatatgtaatacatacatacgtgtactattagttaacgctctcttcatgatttgctatctgttgcagtattgctagcatcccacgattaatgatatttaacagccataagtttaattacgttatcttgtcataattaagtgttaactcctaagtatattttagctaagagaaatattgcttgaaggaaggagcttgtccccggataacaactaagtggtttcccattgaatggtattaaatgtttagatgtacacatttaaaactctaaatgttcaaatgttctgttgaaatatatgaaaaacattgaaaaaaaaaaaaacaatttaaaaacgcattaaaattgtgtatattgatgtaaatttgtagtttccgtttccctttcattaaaattcaattttttattgctagcaacataatttaaagcaagaaacgctataatcgagatacccgttactcagctagtggctccgcagtccaaaacgcagagctccgaaactgtgtcccgacctatctcgctggattatcccaccgacatgtcctgctaatctgtcccgccgacctgttgttccatacacaggtctttaattatacaagcgattattaatagcagatcgtgtatttatacttcgtgtatcgtacacatattttacatggcttctagtggcgccatctaggtgtgcaaaatgccacgacagtcgtgcagtcgtcagccctggcgaacagctggctttgaaaaggacgaagcaatcgaagggtaaggaaaatgacgcgtcctgcgattttcctcgttgtctgctcaataactctgcttaattccgtcaatggctacaaggagatccatggaatgaatggcaagctgtttccgaaggcggcgacgtttaattttcccgaatatgcttacaaggagaccagcaaaaatgtgagttatcgcaagcctattgatttttttttcatgaccacttacccattttttgcccaacaaatggtgaaaaataaaataggaaatcacttaccacgaactggaggtgacctgtgaccagcacgcccagtgcattggccttagtccggtgggcgtggccaagatcaactgcatccgacagtgcatttcgccatcgtgctaccaggacatctatgccttcaacgagctggaggagggcgaaatcgacgccaggctgaactcctttaagggatgcgttatccaacgcatgtagcagcgaccgcagttgttcaaggagtgcttcatcttcaagtggctggagctcactggcatcgcctactaaatggacccaatgccgatccgtttcgagcacttgcagttgatggagctattggctgttgactgcgaagataacacacaggagcctctttctaccaaatgcccatttggatgtgagaggcttcggcggcatcatctgtgcaatgaaatgaactcttacatcgcatctgcgatcggttgactgccccttgacttaaggccaaatttagaaataaactttttcactaatataaaaaatataagattaacattttattgcggcaaagagtgtgactgtttccggtttgatatgcaggatcttattgctataaaactgggaagatgattcactttattgggaaatgctatacatatccaatatttattcagtatagagtctgcaatgcataagggagaagtatttaacatataaaaacatttttaatcagtgtcaacagttgagtagttatatcaatgtccatctgtatgcctgtccgttcatccgtttcccatgaaactttcccagtaaccatattatttggctgcataggaatactaaaaaagaatattagtatatataaaaaatacaccttacatgtttttgatcattacgacttttttcaaatatataatttagattttaaattgtttcgaatcatatatcaattagctgcggaaggaacagttgaaaaatattgaaaatatttaaaataataatttcatttagtatagttctcttaattcttatttggtattttattattattattattatttattattatatttattatatttattattattattattatttattattattttttcttaatgtagggtatttgagcttcgctttgcagaagcgaacttcctttcttgtttgtattttcaaagatatttaacatttgttatattcttatctagttatattctggcgaaaaagatggggtatt

SEQ ID NO: 34484 - DNA, 366 bp, DROSOPHILA
atgacgcgtcctgcgattttcctcgttgtctgctcaataactctgcttaattccgtcaatggctacaaggagatccatggaatgaatggcaagctgtttccgaaggcggcgacgtttaattttcccgaatatgcttacaaggagaccagcaaaaatgaaatcacttaccacgaactggaggtgacctgtgaccagcacgcccagtgcattggccttagtccggtgggcgtggccaagatcaactgcatccgacagtgcatttcgccatcgtgctaccaggacatctatgccttcaacgagctggaggagggcgaaatcgacgccaggctgaactcctttaagggatgcgttatccaacgcatgtag

SEQ ID NO: 34485 - protein, 121 aa, DROSOPHILA
MTRPAIFLVVCSITLLNSVNGYKEIHGMNGKLFPKAATFNFPEYAYKETSKNEITYHELEVTCDQHAQCIGLSPVGVAKINCIRQCISPSCYQDIYAFNELEEGEIDARLNSFKGCVIQRM

SEQ ID NO: 34486 - DNA, 5958 bp, DROSOPHILA
aaaacatatcaagttaaaatgttccttcgaagaaaggacacaatttagagagatgtatttgtgggaattgagttttacttatgaaaattcattgcaaatccaacacactttagttatttatcaatcgaattaatgatgttgtctaatttgttattaaaataaatgtgagtgagtgatttgagaaaattaatgtatacaatgcttttaatatttaaacgcaaaagtagctgaagccaactcatgcaagccaaataaattttcattcagattctgtttagcttcacaggacttaaacttccttactttttaattagttcatgttacaagtgacattaacaaaaaaaaggcaacgccaaggatttgtggtcgtataatttagcatttcttaacgagatttttcggcaaggaaaaaaaaacgaaaagaacaacggaattcgcacctttgcatacacaaatagcgagagcaaagttttggcggatgaaagagtgctagggtatgtgaatggggtcaggggtgctgtggttataaattttaaatctgttaaattaatgcagcagctttctttcatttctccgttcgttttcttacgtgccagaaagttacgaataaactcagggcacgtcgcttgattacattaattattcctttattgtttgcaaaagttttcaccttactcggcatctttgtagttatgttttcgtaatttgtctaaatgtaattaattagaaaagatttcacttacaatgcatgttctttctttttttttacagtggtcactttaacaatagagtggtaagttaagaagaacattgaatacttggtttttataatcaacaaaaatgttgtagcattctaatcataatcaaaggcaaacgccttacccgaaatcaaactacgaaaatcggggccgttctgacacccggagttcaaaccaggaacgacaggagagagattataccaagagaactgattttcgtgaaagaaacactagattctccgatgagagacactctggcagatatagtgattatcaccgtagaaaccattaccacagatttaagtcatggggaagtgagggccgatcctatcgtagggacaaaggtgccagagatttatccaagtcacgttatgataatgatgcaagtggttcaagtctaatcagaggtgcatctgagatcaggcgaaaaaacggacacaactgtgatccgaatagcgatgcttccaaaactgagaattctgaggatatccaaagttgtataaatcactatcaaaccgaagaaaataaaattgatacagagcaatctaaggatcaaggagctaacagaaccagccccaccgagcaattatcagatatctcaaaacaatctaatccaattgcattagaaggcgatcagaacaaaaagacgaatgagttgaaggagagctcttgctctagcaagccaagcagggaaataaatgaaacttctaaggcttcacagtttcccgatcaaagatcgaaggaacagtcgtcgggggaagaactaaacgtatccgagtccagtgataatcactctggtgcacaggctagtcaatcaattccacgtatccaagtgcgcccccttaccaaacttctaaggcaggagctctttgcagtcacccaggagaatcgtctgatcaaaagtccccctccatccgcatccccagccagtcccagtcgtctggtctttacgcccaaccttagaaatcgtcgccgaacagtgagcaactgcatctacaatgctggaagttttgatcagaccgccgagagcgaggccgttttcaatgatcgcatcgctagcatggacaaggagagtctaaagtacatcatcaacaatggcgacaccatctttgaaccgcacttgcaactccaggccaggcggcgtatacgtgacgaaattcgccgacagctaaagacaattgaattggagaagcccaaggattgtctggtaacggatttagtcgaggacgaaatcgtagattccatcaaattgcccgcatttctacttgaggagatcggaaagtgttttggcatagacatatcagagggtcagacgaccaaagattctgcagcagaaagagaagatacaacaagggttaacgcggaaagcccagttcaagataccgaagaagaaacgaagagagcttgtaacggcgtcgaaagtttaaaagatataaaaactgaggcgactgctgatgatagcaatcagtgcactaaatttagaaatcttgaaaacgaaattgatattaatgataaccaccatcaatcagaagacgacgagcttagcaaaccgctcagtgtattgcctaaagatagtgaagattgttctgtaaaatcgaatggggttagtaaaaaggtcttgcaagaaaacaataagaagaaaacttttaatcgagacactaaagtaaacggaaataaggcaatgaatccgccacaagaaaccgtgatagaaactctggaacactctgattccattaacaggtccataactaatccgaaaacagccgatgagctcaaaagtttcgcgggaattgaatgggaagtgaattcgaagagtaagcactccaacccaagtcaatccgcattcattaaaaccaacaaaagtaataatatagaaactgctttaatagattccctttctgggataagtaagccctgtaaaatggaaattaaaagggaatcaagcagctcacccatatcagtaagttctttaccttcaaacgatgttattgatctgctgagctcatctgacgaagagctggaagagcatgccgtggtggatatggacattgatgaacatgaaggtgatattgaaaatcaaaagatatttaagaccttggaagctttgaagcaatcagatgatgttgttgatagtgatgactccaccagctcccaaagcagcagtaaatccacaaaaaggcgacgcaggctgaagctacagaacgatgcagaaaatgtggttgacagttttgaaaaattgatccttccccatcttcgagaggctctcagcgatcgctatcgtcgccagcattctagtagcctgcagagtcgattgcactttatctcctgcgtagtgacaagctccgagcacaatgcacaaacctttagtaaaattgaggtagccaagatgcaaatgaatctcaaagcagccgacaatcgccaagctatcgaatttcttctaaaagagattgtcaacgtggtgagtctgcagaaacagcgtcgtcgggagcaggacgaagagcaaaagcttgcaaatttattaagccccaaaaaaaccgcattcacatctgatgaaacctgtaaggcgtcaacactatgtccaaaccagcacggttttattccaccaacggctcaggatagttcgccagttacatcaccgtgtcagaaacctccatcttctccgccatctcagcagagtccttcttccgcaactgctcagcagagttctccaatggctcttcagaaaactcaatcttgtccagcccgccaatcttcaacatccatccaggagaatcctatggactcatctggacagtggcggggttcagctagtcataaaactcaatcttctcctgcccgtcaaactacaccagtcggagatgtttttgaaaacccatctcctaaccaaggaaaccctccctcttcggcgaaactggaatccttcaacgttgggtttccatttctatccatggatcctacactatataattattcccgtttagctagtggatcaaaaataaacgaacctttgggaaaatcggacgacatgatggagcagcacttggttgaaattgagcgtgaattgataaaacatgaaaatcgttacagctttctggacgatataataataaagtttcaaaaagagaaatctgaagtcggtatggttattctagaactaaagagtcggaagtttctaattattaactccatggctagtagaaatcaagctacttctgctcaagtggctgactccaaaagcaaaccacatgaagcagaaactgctcaggaatcaacacacgaggatagtttcagcaaaggagggatagccagacgaactagaagtagattaagaagaactgtgttggtcctggcacccaagcgtcaagtaagggtacaaaaacgagtttccaaaaaaccaaaatctttcaaattagtggagaaatcccatgaagagattgctgaacaagagacgaataaaatggattctaaagcgaccaatcaactaaatatcaatgaagagctcttgaaagtgtcagctggtgaccaagtatccgattattcacccaccgccaaacttgcacaatcgcgcctgagcaagcccagtattgctgttaatccaacccatcaaccactggctataataccaccactaccaccgccaccaccacctcccgaaccaatctgccacatgtcctatgaagcatccagctcttttcttaaggaaccactacacgaaccgggtcaccaattgtcagagctcaactccgaagacaagacaagacaaggttttgtgacgaaggggaaattgcaaaatgttggcagccccattacccaaataaagatctacagggataacgtgatagccgcagccgaggatggagatatctacgtgtttcacctagtcactcacaagctggagcaaaagatcaccaagcacagtgaggctattacgaatatgttcctcagcgaaaaggattctattctttacaccacatcagcggatggcttttttaagaagtcctcgctcttggtaaattacttagattttctaaaggagccttacaataccttatgcctattaaacacttacagaatctggagcgggtctttgaaacggtgtaccttaaagagccattgcagtcaatggacgtcgcttggggattggccttcattggcagccgatggggtcaaatatctaccttcaacgtggtggtgagttgaaaagttctctagaaagtaaaatgaaatattattaagaagtgaggtcaggatttttttataagatggtatacatcagactaactgattggacctcccaatgtggaagtcaatcaatgacatctcaataaattttcgacactcaatttgactcattaaatatttatctgtcaaacaaacacttgaacaattttaattaaaatattgagctccgtctcgcgagtcctgccaaaaggacagccaccacacacacaggatgagtccacaccttgcccgcgcggcaacaataacaccaggagttaacgaattggcaatgaggaaagccaaaaacgaaagtctagacaatggaactcaaatcgaatttatttttcattttttatactcgcgtgaatttaacaaattggatagtatggagaaagactgccgagaaagggagtttggccggagttgatacttgattataatattttacattgggggaagaggaaagctatgtcttaattttggcagaaattcgatttatggctgcgacgtgctgataactcatggttcgaatgtattctgcgtttactggctctgtgcacaactgtacttgattagggaaggacacgaaaaaagtcatcggagctgttgttaggtggttaattactatttaaatatttttaaaattataaaaatgcacgtaacaagcaataagtatggaagtgagggaattatagttgaagcagaggcaactgtactacactttatctaaatacaaacgggctccaattatataatcctttgtagtgtgggaggcagttttactatacttcatacatagtggagtgggcgcaaggctttcattgtggaggggggatgacaaatacatttttttaccaagcaagagacaactgtacctgcaattgtattgtagatgaaggcaactgtactaccgactgtagtatgagtggtggtgccctgtcctcaagtcgttggtgggtgcagtctaaagctttggtta

SEQ ID NO: 34487 - DNA, 2655 bp, DROSOPHILA
atgagagacactctggcagatatagtgattatcaccgtagaaaccattaccacagatttaagtcatggggaatcacgttatgataatgatgcaagtggttcaagtctaatcagaggtgcatctgagatcaggcgaaaaaacggacacaactgtgatccgaatagcgatgcttccaaaactgagaattctgaggatatccaaagttgtataaatcactatcaaaccgaagaaaataaaattgatacagagcaatctaaggatcaaggagctaacagaaccagccccaccgagcaattatcagatatctcaaaacaatctaatccaattgcattagaaggcgatcagaacaaaaagacgaatgagttgaaggagagctcttgctctagcaagccaagcagggaaataaatgaaacttctaaggcttcacagtttcccgatcaaagatcgaaggaacagtcgtcgggggaagaactaaacgtatccgagtccagtgataatcactctggtgcacaggctagtcaatcaattccacgtatccaagtgcgcccccttaccaaacttctaaggcaggagctctttgcagtcacccaggagaatcgtctgatcaaaagtccccctccatccgcatccccagccagtcccagtcgtctggtctttacgcccaaccttagaaatcgtcgccgaacagtgagcaactgcatctacaatgctggaagttttgatcagaccgccgagagcgaggccgttttcaatgatcgcatcgctagcatggacaaggagagtctaaagtacatcatcaacaatggcgacaccatctttgaaccgcacttgcaactccaggccaggcggcgtatacgtgacgaaattcgccgacagctaaagacaattgaattggagaagcccaaggattgtctggtaacggatttagtcgaggacgaaatcgtagattccatcaaattgcccgcatttctacttgaggagatcggaaagtgttttggcatagacatatcagaggtaagttctttaccttcaaacgatgttattgatctgctgagctcatctgacgaagagctggaagagcatgccgtggtggatatggacattgatgaacatgaaggtgatattgaaaatcaaaagatatttaagaccttggaagctttgaagcaatcagatgatgttgttgatagtgatgactccaccagctcccaaagcagcagtaaatccacaaaaaggcgacgcaggctgaagctacagaacgatgcagaaaatgtggttgacagttttgaaaaattgatccttccccatcttcgagaggctctcagcgatcgctatcgtcgccagcattctagtagcctgcagagtcgattgcactttatctcctgcgtagtgacaagctccgagcacaatgcacaaacctttagtaaaattgaggtagccaagatgcaaatgaatctcaaagcagccgacaatcgccaagctatcgaatttcttctaaaagagattgtcaacgtggtgagtctgcagaaacagcgtcgtcgggagcaggacgaagagcaaaagcttgcaaatttattaagccccaaaaaaaccgcattcacatctgatgaaacctgtaaggcgtcaacactatgtccaaaccagcacggttttattccaccaacggctcaggatagttcgccagttacatcaccgtgtcagaaacctccatcttctccgccatctcagcagagtccttcttccgcaactgctcagcagagttctccaatggctcttcagaaaactcaatcttgtccagcccgccaatcttcaacatccatccaggagaatcctatggactcatctggacagtggcgggctagtggatcaaaaataaacgaacctttgggaaaatcggacgacatgatggagcagcacttggttgaaattgagctggagaaatcccatgaagagattgctgaacaagagacgaataaaatggattctaaagcgaccaatcaactaaatatcaatgaagagctcttgaaagtgtcagctggtgaccaagtatccgattattcacccaccgccaaacttgcacaatcgcgcctgagcaagcccagtattgctgttaatccaacccatcaaccactggctataataccaccactaccaccgccaccaccacctcccgaaccaatctgccacatgtcctatgaagcatccagctcttttcttaaggaaccactacacgaaccgggtcaccaattgtcagagctcaactccgaagacaagacaagacaaggttttgtgacgaaggggaaattgcaaaatgttggcagccccattacccaaataaagatctacagggataacgtgatagccgcagccgaggatggagatatctacgtgtttcacctagtcactcacaagctggagcaaaagatcaccaagcacagtgaggctattacgaatatgttcctcagcgaaaaggattctattctttacaccacatcagcggatggcttttttaagaagtcctcgctcttgaatctggagcgggtctttgaaacggtgtaccttaaagagccattgcagtcaatggacgtcgcttggggattggccttcattggcagccgatggggtcaaatatctaccttcaacgtggtggtgagttga

SEQ ID NO: 34488 - protein, 884 aa, DROSOPHILA
MRDTLADIVIITVETITTDLSHGESRYDNDASGSSLIRGASEIRRKNGHNCDPNSDASKTENSEDIQSCINHYQTEENKIDTEQSKDQGANRTSPTEQLSDISKQSNPIALEGDQNKKTNELKESSCSSKPSREINETSKASQFPDQRSKEQSSGEELNVSESSDNHSGAQASQSIPRIQVRPLTKLLRQELFAVTQENRLIKSPPPSASPASPSRLVFTPNLRNRRRTVSNCIYNAGSFDQTAESEAVFNDRIASMDKESLKYIINNGDTIFEPHLQLQARRRIRDEIRRQLKTIELEKPKDCLVTDLVEDEIVDSIKLPAFLLEEIGKCFGIDISEVSSLPSNDVIDLLSSSDEELEEHAVVDMDIDEHEGDIENQKIFKTLEALKQSDDVVDSDDSTSSQSSSKSTKRRRRLKLQNDAENVVDSFEKLILPHLREALSDRYRRQHSSSLQSRLHFISCVVTSSEHNAQTFSKIEVAKMQMNLKAADNRQAIEFLLKEIVNVVSLQKQRRREQDEEQKLANLLSPKKTAFTSDETCKASTLCPNQHGFIPPTAQDSSPVTSPCQKPPSSPPSQQSPSSATAQQSSPMALQKTQSCPARQSSTSIQENPMDSSGQWRASGSKINEPLGKSDDMMEQHLVEIELEKSHEEIAEQETNKMDSKATNQLNINEELLKVSAGDQVSDYSPTAKLAQSRLSKPSIAVNPTHQPLAIIPPLPPPPPPPEPICHMSYEASSSFLKEPLHEPGHQLSELNSEDKTRQGFVTKGKLQNVGSPITQIKIYRDNVIAAAEDGDIYVFHLVTHKLEQKITKHSEAITNMFLSEKDSILYTTSADGFFKKSSLLNLERVFETVYLKEPLQSMDVAWGLAFIGSRWGQISTFNVVVS

SEQ ID NO: 34489 - DNA, 2633 bp, DROSOPHILA
tctggagtcatcccacttgcttttccttattgtcctagaacaaacataaataaactccaggacaaatgcatatgaagacggagagcattggacaggagtcagcaaacgcctcaatatgtggaaaagcagattccggtggccagatcccttcactatctgcactttcacacttctgtttattcaactgtcgcatggttgtttgcttctgccacgcccttgggcatgggcaagctctattattattttcgcaagttatataaaaataataacaggagcggacacggagctgaccaggccaatggatggccatccattatgctgccgggcatttatttgccaaacaattgaatctctccccagctccttgggcagcttgcaaccacttcatcagccatcctcgtttgcagctatcttatggtttatgatggaatcaaaacaaatgccggagctacgatagctcggctttgctcgtccggaacctcgagctcatccttcagctggtgaggatgatgatgatgagtttgtttatgcagattgcttgtggagtttttcctttggcgttaatggataaatggacgtgtgagtgtgtgcgtgggtaaccctttttgaggatttttccggggagctgcgccactttcgaaatctagttggtaatgtaaacaaaatgattttaattgcacagatgaacggttttcatttaaatttattgataccaagcaatggaaacacttaattttacggtctttattaaattgcgaaattatttaagtacacttttttaatagcttaaaaacattggtcagcactaaaataataatccaataattttgtaggatattggagttttcttgtcttagtttaagcaatagattgcggtttttagtgtgcaaaacattttccggtttcgaaaacttaattttatctcttttcacttaactttttttgacgcacacatttcaattaaaattgtattgttttcttttactttgctctgctctgtttacttgggcgagcgcttcctccggctacttgttttcccattcatcccagggtattggaagggtattggaaacggtcctggccgttgtccaggtcctgctcctggtccagaatacccacctgcgctggcctgtaccgttccaacggatgtgggcggtggcataccaggtggtggtggagggaaaggcggagctggtcgtatcggcgaagctccgctcagatacccatagcccatgggacttccagacgtcgcggaattttgatcactttgatagatatacacattgctgttcccctgagcctgctgctgattcagaggcatggtgtaaaatcctgcaggtgtagcgtagtaacctggttgaggaccaatagccgccaggctgcagccatatacaggacaattgtaataaccagatatgggataggcggggccggcgaatatgggatccggattgtgagaggccatccagcggttacgccaacgacgaaacaaagtacccagaaagaaaaacgatcgtccatcgattggttctggtcctgtatgatctggttcctcatccacatccaagtcggttttctgagatccattgctgttgaccaggatcagcaaaaataaaatctggagcactgccattttcccaactgcatctgctgaaatctgtaggcggactactttgcgtccgatctcaactccaactcagtgagtcccacgaagacaggctgcctaatgggccttgtaatgaacattcaagtgctgtaactttggcaaagcaaacaaagcgtgaaattttattaatacaaaaacattcaaggctgccccagttaccgaccgaaatctgtacaagtattaaaatgcatatccgaaaatgtatatcttaagttaagttaagtatttgaataaaaattatataaaacgatttccttttttaggcattcattttatttattttcatttcatttatatgaaaacccaaaattaaattaaaactaaagcaaagattgccaaatttatctaattaaaacgctaaaccactatttctttatacatacagtccaaaatagttagcggcgctcacatcggggatgtagctcagatggtagagcgctcgcttagcatgtgagaggtacggggatcgatgccccgcatctccagaaggtttatttttattttatatttccggaatttacatattggtttaaaaaaatttaaaaataggtataaaaaaaagttgcagtgatttcccaagtatgcatccctaaaaatgttctcctttcccacgtaaatactcgcgagccgcacgtacgagcaatctttcattattaaatgtacagaaaaactcgaagtttttgacttttgctgcttgattttattttgccgcattacatacttttgtgagggcaacaaaaaccgttttgagttatgagttctgcgtgccaggtgtactaacattttaagcagttgaagataatgcgacgcctaaacaccctgtaaggctgtgctgctcaagaactctatactcattgaatcaggaaaaacaccaacttctgagccatgcccgcatacccaacttttagcgggaggcctgcgaataaagtgtgcaaaaaacaggtgacaacaatcagtacgaggtaaa

SEQ ID NO: 34490 - DNA, 633 bp, DROSOPHILA
atggcagtgctccagattttatttttgctgatcctggtcaacagcaatggatctcagaaaaccgacttggatgtggatgaggaaccagatcatacaggaccagaaccaatcgatggacgatcgtttttctttctgggtactttgtttcgtcgttggcgtaaccgctggatggcctctcacaatccggatcccatattcgccggccccgcctatcccatatctggttattacaattgtcctgtatatggctgcagcctggcggctattggtcctcaaccaggttactacgctacacctgcaggattttacaccatgcctctgaatcagcagcaggctcaggggaacagcaatgtgtatatctatcaaagtgatcaaaattccgcgacgtctggaagtcccatgggctatgggtatctgagcggagcttcgccgatacgaccagctccgcctttccctccaccaccacctggtatgccaccgcccacatccgttggaacggtacaggccagcgcaggtgggtattctggaccaggagcaggacctggacaacggccaggaccgtttccaatacccttccaataccctgggatgaatgggaaaacaagtagccggaggaagcgctcgcccaagtaa

SEQ ID NO: 34491 - protein, 210 aa, DROSOPHILA
MAVLQILFLLILVNSNGSQKTDLDVDEEPDHTGPEPIDGRSFFFLGTLFRRWRNRWMASHNPDPIFAGPAYPISGYYNCPVYGCSLAAIGPQPGYYATPAGFYTMPLNQQQAQGNSNVYIYQSDQNSATSGSPMGYGYLSGASPIRPAPPFPPPPPGMPPPTSVGTVQASAGGYSGPGAGPGQRPGPFPIPFQYPGMNGKTSSRRKRSPK

SEQ ID NO: 34492 - DNA, 2451 bp, DROSOPHILA
acatttttacgccatctaacgaaaatttttggagactgccaaccataaagaaaatgagttcaccaattataacatagatggtgccacggataatttaattttggatcattgaaggttaattttggtaatagtgaagccataggacaactaaaaaacaagtcataactgcaagtgtattataacttcggctctccaaatctagtttccttcttcttcaaaataataaaataaatctaagtagcaactttggaaagatcagaagaataagttaaacggccattgaaaaatgtgtttctccaattgttctaaaaaatgtaataaaattttaaaataagcaaatagttccacaggaaactagagtcatgcgggatagtcctttttgtgttgtgtgaacacaatacgctatagtgttattttaaactaaatgattcatgacgttttcgtagtgtagtggttatcacgtgtgcttcacacgcacaaggtccccggttcgaacccgggcgaaaacaaatcgactttttttaaatttctttttacattttttacaaaacggtaacacaaataaaatatttgaatatccttaaggataatttgaaaaaataaaacgatgctatagaaacgtaccaatattttaataagccaatggggttgaaatccatacatattgtttacgggttaaaccatttactttctatagtttaaatattttctttaattttcaggaaaatttgcaaagaaaaaatttgaacgtgcagttgaccgttgaacaacaaaataacacagctgggctcaaccgggatttgaacccgggacctctcgcacccaaagcgagaatcatacccctagaccattgagcctcataacgagtaggcagctgttcgccagtttccaactaggcaaagcaaggcattttcttgagtaagcctctaaagacaaacaaaaatcattgctttgatgtaacaatctaaaatatatatttagtaaacatagaacaatactctcagcgccgcctaaaggtgccaccacccaatccgccatagccaccgccaaatgaactggcagagctaaaagaggaggcagaggcaaagttctggtagcctccgaaaccgccgccataacctccgccaaatccacctagacctagaccacccttccatccgtgtttgatgggaataactactggttgggggactgggactggaattggttgaggaatagccacgggaactggaacaggttgggccactgggatcggttgggcaactggatatgggacaaagttgttgtagacaggggcgtagcctcctccaagctttccaccaaaaccatgtgagtgtgcaagcgccaaacaaagcagcagggacagacccaaaatcgttatctgcgaatgaaaaatcacgtcatctgaagtgcagatataaaagtcacacactcaccttgttttgcctcatgttctctattggatctaagcgttgccaagtttagaacggccgtatttatagcaatgtcccagcacttcctgaacttccttttcttgcatagttcaaagaacttgcaaaaacttgatccataaccagtttatcgaacctatcaatttttattgtatcaaaacttagtcacagcaactaacagcaaaatataagaaaccgtgtgaaaaacattgaagtcggttaagttcagatgggttgaaggtcgccttttggtcgtgttccggagtaatgtgggcgtaggtttttaagaacattgctataaaaactgaaacaatcggtggctaagcaagtcagtcacatttaagacgaactagaaacatggtcaagattagctgttcggtgagtagtggcttgttatacagaagatcacatgtttcctaataatttggattcccttttattagctgctggtgctcctttcgctttgcgcttgttcatacgctcaatatgagtatccacagcagcgcccttcgccgggaactggagctcagcctactggtgggcaagtagacaatcgtatccttggaaatctcctcggtggcggaggaggactccttggaggcggcggtggcggtggaggacttttcggaaatttattgggcggccttttgggtggcaatcgtccgcaaccgcagccctacccagtgccagttcccgcatatgggggcggattcggcggtggatacccaatcggaggaggcggatatgctggcggtcttcctggtggttatccaggtggctttggcggcggcttcggtggcggatacggcaatccatacggtggatattatggctaagaccacaattttggtacctctaaaagtattatttgatttataagttgttgacattgaccatttaattaaaattcatgaaaaaaacaagttcggcattttattattttcggtgaccgcttgatataaggggatgtagctcagatggtagagcgctcgcttagcat

SEQ ID NO: 34493 - DNA, 396 bp, DROSOPHILA
atgaggcaaaacaagataacgattttgggtctgtccctgctgctttgtttggcgcttgcacactcacatggttttggtggaaagcttggaggaggctacgcccctgtctacaacaactttgtcccatatccagttgcccaaccgatcccagtggcccaacctgttccagttcccgtggctattcctcaaccaattccagtcccagtcccccaaccagtagttattcccatcaaacacggatggaagggtggtctaggtctaggtggatttggcggaggttatggcggcggtttcggaggctaccagaactttgcctctgcctcctcttttagctctgccagttcatttggcggtggctatggcggattgggtggtggcacctttaggcggcgctga

SEQ ID NO: 34494 - protein, 131 aa, DROSOPHILA
MRQNKITILGLSLLLCLALAHSHGFGGKLGGGYAPVYNNFVPYPVAQPIPVAQPVPVPVAIPQPIPVPVPQPVVIPIKHGWKGGLGLGGFGGGYGGGFGGYQNFASASSFSSASSFGGGYGGLGGGTFRRR

SEQ ID NO: 34495 - DNA, 3886 bp, DROSOPHILA
tgcacatcgatttcccatatttcatcgagtgaaattctacacaataaccgagccacttggggaaatcctttggggttcgaaaacccatctacagacgaacgtagaccatgagaaacaaatttttgactagtcagctttttggcatatttctttttttttttgcaccaatgtgtgcaagcaccgcaaccgttaagtgccataaaaataattcaaaataaattgctttacataaaaatttggtttcggcagagcagcgcgcccaactgttttataaggtgtataatttggccataataatgcgcatcatggcagcatccatcgcggggttggttattaattctcggtcgacgcgtcgtcgagcccgagacataaataacgcgttttatgcgtgaatatactttgcatttttcgcagacacggcggagtcctagttaagccgtaaaaattacaccagccagtcaagaagccccgccacgactttgacttcctcgaaggaccaaggcaagtcatgtcagctggcctaatccccaggtagatatccgccttgattggccgcaatgaaagatgccaagtcaatacttttgatactcccaggggtcctgtgaggaccggtgggcgatggtgagtgggataaacgctgacttgtaatgtcatgtaattagggtaataatcggcttgccacttgaggttttatcccgcagcccaaaacgactttgttatgcaaatctttctgttgggaaagcaaagatattcgaggaaaattggaaagctcaaattgaccagactttaagtcatctttaaatgtgatggtttttgggtaacacaatcgtattcggaaagtgctctcaccgcaaccttttgttatagttgaatatcaataaaggaccttcgctggcaaccgtttcctggcagccaagaagccgaactaataaacaatattcaattttcaactatatgagtaactggagtttgcatattttgagagtctagatttgttaacatggatttcacgtactgcgaattccccagcaccgtttccattgacaccttcaaggcctatttcaatctcaccgatgtcaagttgcccaaagtcggcgataaatcagtggacacaatccagatccccagcgaagaccaggaggaccagaccaatcaagcgaaaagtctgcgacatcttgttctcgattccattgtcgagaattggagtggtgagcatttaactataaacttgacaagaaatcgcaaaaattggaatttagaattcactttaaaattcctatcactttaaaattcgttgcttaagatgcatgaatatgtttgtttttaaaaatgatgtttacattttctaaaagctagataaagcttagatatttttagttagaaagtagccagactgacagtccttgccgaactgataagatccagacattgctcatccgcagagctgccgctgtaccggcagctgggccgtcgcgaggaccgcaactacctccttagccatctggacacgcagctgccgctgcagctgctcagcgcccacattcgcgaggacttcttctggcagcgctgctacggccaccgttggaggagcgccccacttcaggcgcggggcagggagcggccctggatcaacatctacatggagcgacatgtgcaggagtttattgaaaacatgccgacgggcgactatgagcaggatggcaacgttcaggtcgtcctggacatctgtgcggcgtacataaatcagttggagataagtttccttcaacccgccccgcccacaaccgatgcgaatggtgagtctcgaatgggaaacaccctgggtttacttgttgcaatggcattcttcatacttcaagcattatgcttgtcccaactttgtcaaagtttatttcggaatatttatcaaattagcgagggtatgaaatattcgaaattccccacccatctacagatcacattccgcttgattacctactgagcaatctgccggatttacgccaactgcgactgagttacagcaccaagacggtgggttgcaattaccaaatgggctgcaaccaactgactgtcagggatattctacacttgaccaagggactcagtcagtgccacgagttgaggacgttctggtgaggaccggctgctccacaaaagtgccttctgcaattcttttgagtttcagcctgcacaacacgaagttaatgccatatcagttacgattcctggctcacagtttggataaaggatgtcaccatctgaccgaaatgtccttgctgcactgtgcagtgggagatgcgggaatccgctgcttcttggagacgtgcggcaaggagtccttcggcactctcactgtcctcgatttgactaataacaagatcagtaagtacataaataattggcatttcatatcttgcctcatgaagtatttatattccagctgaagaaggggcttacattcttagtcgcaccctgaggcatgttcccctcgagaaactggtgcttcgcttgaatcccattcaaagtgacggagctgcggccatcttcaacacacttcaggtcatgcccatcaaggagttggatctgggaacttgtggaattacagaaacgattaccaaattgtttatgatgctgatttgccaacacacgagcctgttggaaatagatctgtcgaataattccttgggagaggactttggcaagcatttgatgaagataattagctgcaacaagcttcttgagaggttggaccttcgaaatacaggtctatcgttagatatgcgtaggaaatttcaagaatttctgcttaaaaatgtggatcgtaagaagcacgaggccttgaagcaaaagcaacgggataagtttaaggccatgatgcagctataaatactattagatatttgtgttttacaactgaacattatgataaataaatatttagcaaaaaataaattccaactgtttccgcccgggattgaaccgggggccttccgcgtgttaggcggatgtgataaccactacaccacggaaactcggatgacgaacgttttcctcatagacaatttaagacaagttagcaaatatatctgttataataaaagcacaaagtaattataaaatgtaattataggaaataatttaaaaagtgcacgcttatatagtggtttgcctctatcccactctcctcccaatggtattgcaacaacttaagcagcaagccgtgaagctacatacctacctcgaagctttcaagccaactttcattaaccctcgaccttgttgacttaagccaacaaaaacaatggtaaccccatcaagattgccaaggacccaactctctgaacccatctgtccttttctaatggcctgggctagcaacagcgacaaaaacaacaaccaactaagtggaaacacttgaaaatgagttggaaaaaaggttaaaagttgttgagaaaataaataaaaagaaaattcagtttgatgctattttagtgggtgttgttgttatttggcttgctcttgtttttgcgagctagtttgttgtttgttcggctgctcttattggcacgcaaagtgtaaaaattgcttgtgcttttgttaatggcattttaagtgcggttgggttaagggtccaaaggtgcgaagagaggttaaggttttataatagaatttgccattaattagattattttccaatagatttgaggtcaaaggtgacatttaaaaatggaggtatcaaaaaaatgcaaataacgttttctaactttcttttctctaacatatccgtatggaattccaattttgcacctttgttttcattttacaggcttgcttatgctgttgttgctatttttcaattaaaacgaaattgtatttttgtctcgtg

SEQ ID NO: 34496 - DNA, 1332 bp, DROSOPHILA
atggatttcacgtactgcgaattccccagcaccgtttccattgacaccttcaaggcctatttcaatctcaccgatgtcaagttgcccaaagtcggcgataaatcagtggacacaatccagatccccagcgaagaccaggaggaccagaccaatcaagcgaaaagtctgcgacatcttgttctcgattccattgtcgagaattggagtgagctgccgctgtaccggcagctgggccgtcgcgaggaccgcaactacctccttagccatctggacacgcagctgccgctgcagctgctcagcgcccacattcgcgaggacttcttctggcagcgctgctacggccaccgttggaggagcgccccacttcaggcgcggggcagggagcggccctggatcaacatctacatggagcgacatgtgcaggagtttattgaaaacatgccgacgggcgactatgagcaggatggcaacgttcaggtcgtcctggacatctgtgcggcgtacataaatcagttggagataagtttccttcaacccgccccgcccacaaccgatgcgaatgatcacattccgcttgattacctactgagcaatctgccggatttacgccaactgcgactgagttacagcaccaagacggtgggttgcaattaccaaatgggctgcaaccaactgactgtcagggatattctacacttgaccaagggactcagtcagtgccacgagttgaggacgttctgtttggataaaggatgtcaccatctgaccgaaatgtccttgctgcactgtgcagtgggagatgcgggaatccgctgcttcttggagacgtgcggcaaggagtccttcggcactctcactgtcctcgatttgactaataacaagatcactgaagaaggggcttacattcttagtcgcaccctgaggcatgttcccctcgagaaactggtgcttcgcttgaatcccattcaaagtgacggagctgcggccatcttcaacacacttcaggtcatgcccatcaaggagttggatctgggaacttgtggaattacagaaacgattaccaaattgtttatgatgctgatttgccaacacacgagcctgttggaaatagatctgtcgaataattccttgggagaggactttggcaagcatttgatgaagataattagctgcaacaagcttcttgagaggttggaccttcgaaatacaggtctatcgttagatatgcgtaggaaatttcaagaatttctgcttaaaaatgtggatcgtaagaagcacgaggccttgaagcaaaagcaacgggataagtttaaggccatgatgcagctataa

SEQ ID NO: 34497 - protein, 443 aa, DROSOPHILA
MDFTYCEFPSTVSIDTFKAYFNLTDVKLPKVGDKSVDTIQIPSEDQEDQTNQAKSLRHLVLDSIVENWSELPLYRQLGRREDRNYLLSHLDTQLPLQLLSAHIREDFFWQRCYGHRWRSAPLQARGRERPWINIYMERHVQEFIENMPTGDYEQDGNVQVVLDICAAYINQLEISFLQPAPPTTDANDHIPLDYLLSNLPDLRQLRLSYSTKTVGCNYQMGCNQLTVRDILHLTKGLSQCHELRTFCLDKGCHHLTEMSLLHCAVGDAGIRCFLETCGKESFGTLTVLDLTNNKITEEGAYILSRTLRHVPLEKLVLRLNPIQSDGAAAIFNTLQVMPIKELDLGTCGITETITKLFMMLICQHTSLLEIDLSNNSLGEDFGKHLMKIISCNKLLERLDLRNTGLSLDMRRKFQEFLLKNVDRKKHEALKQKQRDKFKAMMQL

SEQ ID NO: 34498 - DNA, 2479 bp, DROSOPHILA
gggacctctcgcacccaaagcgagaatcatacccctagaccattgagcctcataacgagtaggcagctgttcgccagtttccaactaggcaaagcaaggcattttcttgagtaagcctctaaagacaaacaaaaatcattgctttgatgtaacaatctaaaatatatatttagtaaacatagaacaatactctcagcgccgcctaaaggtgccaccacccaatccgccatagccaccgccaaatgaactggcagagctaaaagaggaggcagaggcaaagttctggtagcctccgaaaccgccgccataacctccgccaaatccacctagacctagaccacccttccatccgtgtttgatgggaataactactggttgggggactgggactggaattggttgaggaatagccacgggaactggaacaggttgggccactgggatcggttgggcaactggatatgggacaaagttgttgtagacaggggcgtagcctcctccaagctttccaccaaaaccatgtgagtgtgcaagcgccaaacaaagcagcagggacagacccaaaatcgttatctgcgaatgaaaaatcacgtcatctgaagtgcagatataaaagtcacacactcaccttgttttgcctcatgttctctattggatctaagcgttgccaagtttagaacggccgtatttatagcaatgtcccagcacttcctgaacttccttttcttgcatagttcaaagaacttgcaaaaacttgatccataaccagtttatcgaacctatcaatttttattgtatcaaaacttagtcacagcaactaacagcaaaatataagaaaccgtgtgaaaaacattgaagtcggttaagttcagatgggttgaaggtcgccttttggtcgtgttccggagtaatgtgggcgtaggtttttaagaacattgctataaaaactgaaacaatcggtggctaagcaagtcagtcacatttaagacgaactagaaacatggtcaagattagctgttcggtgagtagtggcttgttatacagaagatcacatgtttcctaataatttggattcccttttattagctgctggtgctcctttcgctttgcgcttgttcatacgctcaatatgagtatccacagcagcgcccttcgccgggaactggagctcagcctactggtgggcaagtagacaatcgtatccttggaaatctcctcggtggcggaggaggactccttggaggcggcggtggcggtggaggacttttcggaaatttattgggcggccttttgggtggcaatcgtccgcaaccgcagccctacccagtgccagttcccgcatatgggggcggattcggcggtggatacccaatcggaggaggcggatatgctggcggtcttcctggtggttatccaggtggctttggcggcggcttcggtggcggatacggcaatccatacggtggatattatggctaagaccacaattttggtacctctaaaagtattatttgatttataagttgttgacattgaccatttaattaaaattcatgaaaaaaacaagttcggcattttattattttcggtgaccgcttgatataaggggatgtagctcagatggtagagcgctcgcttagcatgtgagaggtacggggatcgatgccccgcatctccaggaataagtcttatattttctttttcccaaacaaatgtttatttttcgtttttcttaattaaagtggttttgcttgtttatttacagcagtgtttttgtttgcgtagcctgataaagtaaaatgtgcaattatcaggccaacggacaagcggctcaatggtctaggggtatgattctcgctttgggtgcgagaggtcccgggttcaaatcccggttgagcccgttctaactttttggaacttcgtaaaatattttttaaataaatatatttaaatttttttaagcaaaacataatttaaaaaaatatagttgataacaaaaattattatcaattggagatgcggggcatcgatccccgtacctctcacatgctaagcgagcgctctaccatctgagctacatccccgtcagaaactgttgtgtcaaagtaccaaaatagccagcgtagatgttcaaaatcacttcttttggtcaactcatttggtaattgaaaacataagttgttttttggtcgtaatttctggtttcagccttgaatgcttgaaagtagataagaattgagcgttgtgggctcttttaaatttacttatgcatttcatttccgtttccggtcagtgaaagttgtccgaaagaaagcacaaacacctgtcaattgagtctggagtcatcccacttgcttttccttattgtcctagaacaaacataaataaactccaggacaaatgcatatgaagacggagagcattggacaggagtcagcaaacgcctcaatatgtggaaaagcagattccggtggccaga

SEQ ID NO: 34499 - DNA, 414 bp, DROSOPHILA
atggtcaagattagctgttcgctgctggtgctcctttcgctttgcgcttgttcatacgctcaatatgagtatccacagcagcgcccttcgccgggaactggagctcagcctactggtgggcaagtagacaatcgtatccttggaaatctcctcggtggcggaggaggactccttggaggcggcggtggcggtggaggacttttcggaaatttattgggcggccttttgggtggcaatcgtccgcaaccgcagccctacccagtgccagttcccgcatatgggggcggattcggcggtggatacccaatcggaggaggcggatatgctggcggtcttcctggtggttatccaggtggctttggcggcggcttcggtggcggatacggcaatccatacggtggatattatggctaa

SEQ ID NO: 34500 - protein, 137 aa, DROSOPHILA
MVKISCSLLVLLSLCACSYAQYEYPQQRPSPGTGAQPTGGQVDNRILGNLLGGGGGLLGGGGGGGGLFGNLLGGLLGGNRPQPQPYPVPVPAYGGGFGGGYPIGGGGYAGGLPGGYPGGFGGGFGGGYGNPYGGYYG

SEQ ID NO: 34501 - DNA, 2582 bp, DROSOPHILA
cagtttagcaactacaacaactacggatcttctggctactacggcggttacccattcggcagatgagttgggaaaaaactactcgtagctgctggaaatttctgtccctgttttgtttgatttctttatttggcttttaatgtgatggaggtcaataaatcgaaaatacccaaagtgattcacccaagtgtgcattaatttttctatttgcatgtttgctatcacatttaatttaaatgctgatcatacattcggtaatagtagatatatgtgagatttgtatctagattctttttagtttctaagctagcaaaatgtatggcacgttttccattgacattcattgattttcagcttatttatttttacatttcttttctcatgcccaactttactcttgttgctctcaaaaaacctgaaattttcagggtcaaatcgcatgcataaggcaaatataaaccatagcctgaagttcacatcggcgacaacaacaaaagcccagacaaacaagacctcttcaacggctgattgcataagggcgcttcgaatcgctcagaaacagaaaaaaagcatctgcgagataaaaacacgtcgactgacgcgcagccgcttcaattgatcacgcgtcgttgtccaagtccaagccaagatacaagcttcgtcatcggcccacacagttgaacttgaagtttttaccacaagatataatagttttaaaacattaaaagacctgtgttgtttcgattaaagtttcgtttaggccacttgaaaagacaaaatgcaaataattgtaagtgatggattgtgatggatttgatttgctaagaagtgattataaataataaaaaggcaaaaccaaatttataaatacttgatcttgtttaaattttatttaagagtaatacggcaaaaagtgtttataatttatttccatagctgaaaaatcgaaataaaaattgaaataaaagttcgtaaaaatctacgaatattttattgaggaatgcaaggagtaatgcgaatcatttaagtcgttcgcaattatatagcataatttattaaaattcgtgttaagtactagtgcaatatattttaaaatcggattctattattcttttcattattcgaattgcagcctacacctttattacttttcctcggaatttgtttccttattaacctggatgaaacgtctgctggaaaagttaagttactagcctttaagggaccccatgccggatttgtgggtctcaaggttcgcactcccaagttgctgggcctaaaaagcggattggtgggtggagcagctggatttggacttggtgcggcggttggcgctaagttgggcgctggattagctggattaacaagccatgctggtggtcttggaggtggtattggaggaggttatggaggaggatacggcggaggatacggcggaggattcggcggaggatacggcggaggatacggtggaggatatggcggaggatacggaaggagcagcggctacgaacaccatgagtaccacgaaagccaccacagtgaaggatccagttatggtggtgggggcagccagtggtaaaaataggggtagactaatgttattagtgattattcatgtcctagccatcagaatcaaacattaatgttatttagatgtaattcatttgttcatttacgccagtaataaaaatgtagttataaaccgttcgcaactgtgtttacttctacctaactactcttatcaatcagctcaataaaataaaatttgaaatgagttcaatgtagcaaactacatgtatttcttccacgagcaaatagttaattagagttattcacgtacaataacacgatcctcacaattaaacgggctatgggactaaaggatgacatgactaaggacaaacaaggacatagaaacatcttgcgacagtagctgatatgatgtcgacgctccccacccttaagtggaccatttaacataagtggtgatcccaacaagtatgttacactttttagcacgtagatttgtttttctcacgcttatatgcttactcacattaatacatcccacgatgcagtttgcctgtgaaaaaagagaagaagaagccactgtgcttaaaaagcagtccacatggcggatatgtaagaaatgtaaaataatgtaagattcaaatagaaatgaaatatttaaacgacggcaacaatcgatgaagctggctgggatctggctgatactaagcaccacacaatcccctctaggggttggcactaatagttaaaatacaagcatcaagcaaagatattgcaataacaagatgagttgctaaacataatttcatatattttctgatttttaacatattaatcttttcatcagagcttaagtgggctgctgaaaaaaacattttttgtgctctgtgggatttgaatctacaacctctggttcgattaataaagctacactttagccagctgacccacaacaaggggagtccatatcgcgcaaagttacccacttgaacccggtttcatccggctagtatacagactatgaatcacaaaatggctatatttctcaa

SEQ ID NO: 34502 - DNA, 459 bp, DROSOPHILA
atgcaaggacctacacctttattacttttcctcggaatttgtttccttattaacctggatgaaacgtctgctggaaaagttaagttactagcctttaagggaccccatgccggatttgtgggtctcaaggttcgcactcccaagttgctgggcctaaaaagcggattggtgggtggagcagctggatttggacttggtgcggcggttggcgctaagttgggcgctggattagctggattaacaagccatgctggtggtcttggaggtggtattggaggaggttatggaggaggatacggcggaggatacggcggaggattcggcggaggatacggcggaggatacggtggaggatatggcggaggatacggaaggagcagcggctacgaacaccatgagtaccacgaaagccaccacagtgaaggatccagttatggtggtgggggcagccagtggtaa

SEQ ID NO: 34503 - protein, 152 aa, DROSOPHILA
MQGPTPLLLFLGICFLINLDETSAGKVKLLAFKGPHAGFVGLKVRTPKLLGLKSGLVGGAAGFGLGAAVGAKLGAGLAGLTSHAGGLGGGIGGGYGGGYGGGYGGGFGGGYGGGYGGGYGGGYGRSSGYEHHEYHESHHSEGSSYGGGGSQW

SEQ ID NO: 34504 - DNA, 2270 bp, DROSOPHILA
aaatcagaatgaaaggagtatttaaaggctatataaatattttataaatattaattttgataaaatatttcttttaatgggttacaatagcagggttaaacccaaatgcttgttatgagggtattgaacatcgtcgcaatccactagcatgcaaaacaaatgacttagacaacgaacttcagcgaagaccggcccgcattcgtctggctcattagcacttgttaccttagctattccggcagatctaactaaatgactaacgacgtgtcagcttcgtatgtatgtgcccgacttattttgcttattctgttaaattgacacgccctcactttcgatttcagtttattcacctccagttgacgtaagcgaaccttccaaagtgagaccatcccccaacactactagtcaggaaattatagttagatgcgatgacagcgtagataatatctaacaacgtgcttataaatattctttagttaagttagcaagtacataaggatttcgaaagtgttctataaatttcaaataagatcttaaaaatgtagacaagccctgcaacaaaacatctattcttaaatttaattaaattatttaaatgttaatataactattacattcagtaatttgtcacctaagaaatttagcctgttgcgcttgattgaggttaatcaaccgcagtaagtatttaccatatgctaagttgtctatgtggctctgtactaatgattatggtctcgcatttgttctataattatgataaaactcattactgtaattgctgcgaactctacttccgtttttcggcgactataagaatggcaaattttaatcagttgccattgagttgtttgccagccatgaaggtgggagtacaataaagtttaaggtgctcggactaaatcgttaatttggaatcttttgaaatattcgcagtacctttcattgtctttcctattgtgctgcctggtggccggagtgttgagtgccccccagtttggatatggattcgcaccatatggaggatacggaggatacggaggatatggaggaagctatgcctccgcctctgccagcagcagtgcgggaggatatcaaggattcggatacccaggatacgggggatatggaggatacggaggatttggtggaggatacggtggaggctatgggcagcaatacaaccagtttagcaactacaacaactacggatcttctggctactacggcggttacccattcggcagatgagttgggaaaaaactactcgtagctgctggaaatttctgtccctgttttgtttgatttctttatttggcttttaatgtgatggaggtcaataaatcgaaaatacccaaagtgattcacccaagtgtgcattaatttttctatttgcatgtttgctatcacatttaatttaaatgctgatcatacattcggtaatagtagatatatgtgagatttgtatctagattctttttagtttctaagctagcaaaatgtatggcacgttttccattgacattcattgattttcagcttatttatttttacatttcttttctcatgcccaactttactcttgttgctctcaaaaaacctgaaattttcagggtcaaatcgcatgcataaggcaaatataaaccatagcctgaagttcacatcggcgacaacaacaaaagcccagacaaacaagacctcttcaacggctgattgcataagggcgcttcgaatcgctcagaaacagaaaaaaagcatctgcgagataaaaacacgtcgactgacgcgcagccgcttcaattgatcacgcgtcgttgtccaagtccaagccaagatacaagcttcgtcatcggcccacacagttgaacttgaagtttttaccacaagatataatagttttaaaacattaaaagacctgtgttgtttcgattaaagtttcgtttaggccacttgaaaagacaaaatgcaaataattgtaagtgatggattgtgatggatttgatttgctaagaagtgattataaataataaaaaggcaaaaccaaatttataaatacttgatcttgtttaaattttatttaagagtaatacggcaaaaagtgtttataatttatttccatagctgaaaaatcgaaataaaaattgaaataaaagttcgtaaaaatctacgaatattttattgaggaatgcaaggagtaatgcgaatcatttaagtcgttcgcaattatatagcataatttattaaaattcgtgttaagtactagtgcaatatat

SEQ ID NO: 34505 - DNA, 270 bp, DROSOPHILA
atggattcgcaccatatggaggatacggaggatacggaggatatggaggaagctatgcctccgcctctgccagcagcagtgcgggaggatatcaaggattcggatacccaggatacgggggatatggaggatacggaggatttggtggaggatacggtggaggctatgggcagcaatacaaccagtttagcaactacaacaactacggatcttctggctactacggcggttacccattcggcagatgagttgggaaaaaactactcgtag

SEQ ID NO: 34506 - protein, 89 aa, DROSOPHILA
MDSHHMEDTEDTEDMEEAMPPPLPAAVREDIKDSDTQDTGDMEDTEDLVEDTVEAMGSNTTSLATTTTTDLLATTAVTHSADELGKNYS

SEQ ID NO: 34507 - DNA, 2978 bp, DROSOPHILA
ctcggactctccaaaaattgtacagttttgttttcatagttctaagttgaatgtatacttatatcctaatcataagcgtagacgactagtgaatgtgcttaaataaacattttatatgtatacggcaatgataacagttttcaaaggaaattagatatttgcttttttttttgtttaacatttaggtttcactgtattgagagaaatctatagctataaggtatctttttctgagaattcagtttatatttttctatgttaaattgattatccaaaaacaactttactaaacgggctacaatttgtaaaaagatttcaaatctttgaagatagatgagatgattcatattataattattataataattataccactttaataaggcttattttggcagcattttttatcagatattaatagtagtgcagagcgtcataaattgggttgccgttggcgaaaaaaattgattaatgtgagaagcatccgtgcatccccccaaacctaattagcttagctcccatattagcgatacttggtgcagtcggtaaactcgacattgacccactttcgggttacatttttggcagaaacgtggttttggccaaaacagcgttgggtgagagcttccatcgcttggttcaggtcaatgcacatgagtcgccgagtgtaacatgtttttacttggctattgttgtgccatgtgggcgattatactgatgatgatgaggttgatgatgccggtggctcgggtgggcggcctgaattaccatatcaaaacaatgccctggaaaaattgagccaataaaaaagggcattatgcaatatcgccggtgtctggctgccttctaagggaatagcagccaatttgccaaattcgagttggtttttttgcgcacgggcaaggtgataagttggggcgtactccgcattagaggaatagtttgtgctcatcccgccgagcgtgcagaagtctttcagcaatagaatcgcgttttcaatatgaaactgtttcttctactccttctgggagccttgggctattcgttggcctatccgcgcacctatagttacgagtatccccgccgaagggcctactccacatcgtattccgggaattcgtatagctctttggccggtcggaaggctagggaagaaagtaccaccagcaaatcggacaaggagaatgccaagtttgctggtgcttccaatcaggaattggatgaaaccggtgacgaacgcacactgctgcttaaaaagaagctcaagaggttggccaggccctacctaggaggatatggtggatatggcggatatggtggatatggcggatatggaggatacggcggtggtccctgctccccgtttggtcgcgatgctcgaggtggtcagaatcagaaggatcccgctgaacagggtcgctttctgttcgacgtgaatgtggtgaaagtatatcccggtggatgtcgcggctatggaggaggtggtttgggtggaggtcttctgtctgatcctcttccacctgtacaacccattccagtgccagtgcgtccgtacgcaccatttgccacctggctatcgctctttgctccaggaattcttaactcggccgtggtgcctggtgttccagtcagagatcctctaagagatccagttcgtcctgctggagatgcgcagagcgatcctgaagtggatcccaactatgcggcacctccgccagtaaggcgacctgttccgaatcgtgtgtactacgattctgcgggagcggtaagttcattaactttaatatattgcgaattttatatttttatttattgttaataacttttttcatgccagcctcctgtgacacctgctcaactagttggaggcgtggccaccacagtaaacggaatcattcagcagttgactggacaagtgcagccagtttaccaaacgggaggctatcggtcaagggatcaacgaagcagctacggataagttactatatatcgaatttgtatgtaaatttgtaaatagttttaagtaataatagtagcgattttatgtacgaaatacgtttacaattatttaacgaagattcctccctcaaataaaagaacgaaagtgtttgtaattatatattgatttcttttagtgtttagcgtagcggtaggtaaagtcttctatgaaaatcataaacaaaaatagcttggtatccgtgtacatttaacctcccagcaagataaacccaaggaattcccagataatttcgaggcaatggattagtcagacttgcgcataaatcttggatctttggccattaaatttatgcacgtcgcgtctgcttcataaaaatcagtgagagaataaccacaaaggcagcgccaaggacaatatttccaataggaaaaccggattttaagtgccttgaattgagcttactaaatctggttatgttttttcgtttattttacaatctacaaagggtcaatcacaagtacttaactatcccggtggcaagatttggcatctttactttccaaagaagccattgcctccatagccaccgcctccatagccaccacctccgtaatatccattcgagtactgtgactgactatagtggccgccataagatccgccctgattgtggtacgatccaccgcccggatagtatcctccgtggtgatgcggcctgtgtccaaagccggagtaacctcctcctggatagtagccacctccgaatccactgcctccgtagccgttatagcctgagtagccaccaccatagccacctgggtagccactcgcatagccaccaggatagccaccgcctccgaaaccgctatacaggccaccacccactccgatgccggcactaagtcctacactgccaccaaatccaccgcccagaaggcccaaggtgctaccttcggtcttcaccggcgccgcctgaccttgaccggcaatcagcaaaagggccagcatctgcaaggta

SEQ ID NO: 34508 - DNA, 906 bp, DROSOPHILA
atgaaactgtttcttctactccttctgggagccttgggctattcgttggcctatccgcgcacctatagttacgagtatccccgccgaagggcctactccacatcgtattccgggaattcgtatagctctttggccggtcggaaggctagggaagaaagtaccaccagcaaatcggacaaggagaatgccaagtttgctggtgcttccaatcaggaattggatgaaaccggtgacgaacgcacactgctgcttaaaaagaagctcaagaggttggccaggccctacctaggaggatatggtggatatggcggatatggtggatatggcggatatggaggatacggcggtggtccctgctccccgtttggtcgcgatgctcgaggtggtcagaatcagaaggatcccgctgaacagggtcgctttctgttcgacgtgaatgtggtgaaagtatatcccggtggatgtcgcggctatggaggaggtggtttgggtggaggtcttctgtctgatcctcttccacctgtacaacccattccagtgccagtgcgtccgtacgcaccatttgccacctggctatcgctctttgctccaggaattcttaactcggccgtggtgcctggtgttccagtcagagatcctctaagagatccagttcgtcctgctggagatgcgcagagcgatcctgaagtggatcccaactatgcggcacctccgccagtaaggcgacctgttccgaatcgtgtgtactacgattctgcgggagcgcctcctgtgacacctgctcaactagttggaggcgtggccaccacagtaaacggaatcattcagcagttgactggacaagtgcagccagtttaccaaacgggaggctatcggtcaagggatcaacgaagcagctacggataa

SEQ ID NO: 34509 - protein, 301 aa, DROSOPHILA
MKLFLLLLLGALGYSLAYPRTYSYEYPRRRAYSTSYSGNSYSSLAGRKAREESTTSKSDKENAKFAGASNQELDETGDERTLLLKKKLKRLARPYLGGYGGYGGYGGYGGYGGYGGGPCSPFGRDARGGQNQKDPAEQGRFLFDVNVVKVYPGGCRGYGGGGLGGGLLSDPLPPVQPIPVPVRPYAPFATWLSLFAPGILNSAVVPGVPVRDPLRDPVRPAGDAQSDPEVDPNYAAPPPVRRPVPNRVYYDSAGAPPVTPAQLVGGVATTVNGIIQQLTGQVQPVYQTGGYRSRDQRSSYG

SEQ ID NO: 34510 - DNA, 20130 bp, DROSOPHILA
gaaattaccacagtttgattttgtttatttttacatttcttttatttaattaatttgccgtactggttttcgttctctgtcgcacttcatctccgcatatatatattaatttaggtttatttcgtatgtatatattttacctatggtagcaatacaatttaattgttgatttacttttaattaaattccataattattacttttccaataaatgcagtaacagatttttgtcaattgtacaaatgaatgaaaaagtctctcgaacaaaccaaatgacatcgattaaatagccggcatttatgagtgctccgaaagtgtcaatcaagttacgcagttcattaacctgacatgctttttgcatcaacgcgtacttcagaacaatttaatttatcacaacaaattgaattaaatatatgcgtatgtatatatgtatattggtactattactagctagcagatacagttcaactcgtctcgtaacgattatcagtttaaatatcaatagaaatcgctggcaacatcagttgggagcatcagtaatcaatagtcagttagatctctatagatatagtctctagatatagtctttaatttgctcgatcgagtgtgcgagaactttgggtgtcatcttacagactaaatacattatacaccacgtttatgcgcttaacctttttgcatgaaatttaattacttgggggctcttaattattgccacgatttgatgacatttgaaatttggaaacgaatcattaatattgctggttaaaatgcttatttttcctaataataatcattccctgtgagcactttttttaaactatttacagcttttttttttctttttttatttgccacatgtcagccccataaacgtggtagtagtgtacacttattgaacaacgcttaagatcttagctaaatgcatttaaatgccacatttcgtatgtcatcgtgtgtgtatttttctgagtgacactgccatgtacagtgatcactattatacgtgtatcgtgtattctaggcgctcctgctccttcttctcgtgatacctagaggttcgcagtactggttagtatgggctcaagttcaagatcaagaacaagttgaagttcaagttcaagttcggggtaggtacacgctacaggcatgcaacacaagctacggtcaagcactttgggcggcattgtaaattcaaagcgtcatatacgttaccttgccaacagtgaggtcaactcctcgcgatccatcttggccagctgagcgtccccggtgctctccatcacgcgctgcacctccagatccagcgcccgctgttcccgctcgcaatcgctgtggtcgcccggctcccggccatcgtggaatccagccggcgggcggaaaccaccggaaaggtcggctcccgctcccgaccccgccatcgcggctatagaggctgccaaagaggcggcggtctccgcatcgacctcactgtctaaactaaagatggtcgaggaatgtggctttataagtctgggatcgagtgagcttcttgtaagctagtctaatcttcagtaggcaagatatttacttgtcaaataataaaagctaaatataaaatttagtattgagtccaccgtcttagtttgaagacggtgagttagtggtataatttgattatataaattatattacactctacagaagccctcgtaaatatcttgcctaactttacagctacacatttcgatcgtttcttcttgtcgctaatttaatttggatttgttagggtttaggtacctgaactacctgttgctactaccagggcactttcttcgctccaacgtttggttgctaggctgctgtgccgcgcttccgtgcttccggctgcgttgtccggcactccgcttctcggccggcccgttgcctccaccgacgcccccaccgccaccaccacccaagcccatggccatgcccatccctaggacgtggcgtggggtgttgtgtcgacgctcgggcgccggcgagccctggtcattattggactcggtgctggagtccggtcggaacatatctacaaaattgcaaaattatatataaagtatataaaaataatatgtgtaaaatcatcataactgtttaattggtcatgtaatattcgcaacgcgacctgaatatgtctgtcaaacattacgtatacgcacctacgaccgcccgaccatcactgctgcgcgacgacttgcatggcactcggtaggtgggcatgttggagaactcggtgctgggactgatgctcgtgtccgactccgatccggccaccactccgctgcaggctgcgctgctcttggcactccgtcctccgttggatttctttgagtgtcctgcctgcgaaccggctactatggtcatcgatttgctcagcgtagactcatcttaaatttacaagaaaacgaaaccaagtggattagattactaattaattcgccttctaacaattgtcaactctctagcctcgggcactataaaaagatgataggttcttgatagtcataaatttcctgtcacgcaattaaagcggtagggtcaaatgattttagatttccgattttactcaccttccgtgttgtaatagcgctgtttgtgccagctggacttgctcttcacgtgaccgaatcccgagctgggcaggagtgggtaggcggtagcgtttaagttctccccctccggatgcccgaaggttttgaattgcatggtgtaatcgaggggcgtttgagccgccacggcacgtgtgggagtcttggcaggagcccctgtccgtccgccattcacgctgaacgtggcgtacggtgaaatctcgtacatttctaggtgagacacgcaagcaaataagattctatattccactcaggaaggatggattttaaaaacgttataaattgtctttttctttttttttaataatttattaatataataattatgaatgtgtgtaacaggaggtttaattgccacctttatgtataagcccgtttcctgactcaatcgacttacccgactcatttcccttgtctaccgttttaactggcgaggcactgtacacctgctgattccggcgattttcgtggtcctccttgtagtccccgggtaaggtcctggattcgtagccctcggcgatgggtccgcatagagtgcgtcgatgtttgatggtcagagctctggaagtagaaggaaagaaaattatgacttcattgcgactatgtttctatctacttccgctgttaataacaggcagggtagaatgaattggttaactaactaacatttttagataaatatgaaatttattttttgtatgagtgtgacattaagtgtaagtctttattgactctctataatccgcgcaagtatccattaaaatataaaagaaaatccttttgttaaaattcctgattcaattcactcgaggattaaggggtatctttttataatgcctgaagagctcacgctcgttacttttccattcgcctgccagagagttaataaatccttaattaacattcgcaagccattacgacgaatgacttcgtcctgcacgggcctgaattcccaattcaattccctctttcctcggaaaaatcctgcgaccgaaaaccacccagcccaactgtccccattcgcataagagagccggacgcacttacatcgttatgatggaaaccgtgatgatgacgacgacaattagcgttgcgaaccaatcaccgctggtcggatttgttgagtttatcagattgttcatcaaatcgttttccgaggggaaaaccgatggcggcggaatggtgatgccatcgatgttcgttgtgctgaaatgataatgctccgtcgtttttcccgcatcgttggtggcagagattcgcagctgataccacttggcaggcagaaagtcgcagaagattaaattttcacggttttcctcggcgttcgaaatatccgatgtgacaactgtccaccgtatgtcgcctaggggcaatggccgttggaaaacacacgcaaagtacacacgaacacgttccggaaaaagagagatggataaaaggaaattatgcatcatacgccacgttgcacgcggcacggactacggaataaatttgataaatatttataaatacaaatggctgtagattggtcagttaattgaaaacaaaaataattatattaactgtatttaatttaaagcaaattaaatgtcagcaactgggcgacgccaggccatttgtggccggaagaatgacgcgtggatacccttaattaagcaattgcaaattgtaattaaaagcttgttgaggcgcgtattcttgaaaagagctgtggttaaagattacaaaataactcaacttcgaaaaaaaatgatttaatttaatatttttaacgtcgaataccagaaagtcaccgattccaaactttttaattattgtactatatcgtataaaatgaacaattaatgcaattttaaataaattatccaattcttttggattttgctaaaaaaaatgttagctatgtccgtcgactttataagaatattgtctttataaggttaataaaatgttgtgatctgcttcttcggttataacacggtatcattttccaagaacatggggcacccaattcagatggggaacgtggccatctgaaatgtccacccatgcattcattgctaatttggactcacccagcggtctgtgctcgatggagaaatgatgaatgctgcagccaccattttgccacgatgacagcttcaaattcacgcacgtcgcatttgtggcaattagttcgttggcattcggagcttgagaggctgcgaatggaaatcgataatgttaatgaaatgaacgaagaaaaattgccatgttgaaggtactatcatagtcaaaataatagagctatattaatacaatagttataaaaattaaaatagattggcaatgtctctgatctattatttaaaacgaaaaatactaaatttatatctgcaattaatattaaataccgtgtagtttaaaaaaaacttgaattcatagtaaaaatcttttatgcttattacccattgtatatattatttgaaaaataattcaaactattcatttatttttcccatttccactgtatgccttcgacatgacccttcacccagtgccatttgtggtcaacagacgaaatttgaattcaggacaggacgactgggaattgccatccagttccgactcacctttacccttggtccagacgttaatttcctcactggccaccccggagcccaccatgttgtgtgcggacatttttataatgtactgatttccgcacttcaatcccgagatcgtaaaggcattattctcgggcagcagctccgtgatggaccagctctctccggccgtgtggtacgatatggtgtatccttgcagcggagctcccccatcgtcgggggcatcccagcttacgcgaatgctgtcggcggaagcgtactgcacgatgatttgcggtgcgctcggtggcttcatggcaatcacctggtactggatctcatcactgccgaacagattgttcgccgtgcatgtataatttccggagaggctgccttcgacgcctgcaaaggttaacgaggaaatggaaaaatgagtggcaaatttacaaaaggtaaaacctgttattagcttatagtaaaactaatttaatcagctcttaataaactttgttttgacaccaccctgccaaatatgaaatattaaattatattgaagatagcacgatttgctaattcgatatctgatacttgtttcgaaagatatttattataatttgctgtatcacttacggtgaatcttcaggttgccctcgttggtcacctcgtaaaaaggactgaaggtgacgggacgatcgcgggttagccatcgagcccgtggtgtgggattacccaccgccaggcactccaacaccagtccagtgcccaccgccttgcgcaccacctgaccaaaggaggcgattcgggcgggagctgaaacgggggaaatgccgaggaaaacacaaaatgaacaacagaaaggcaggacatttagttaggtgagcgaaattaaaatgttgcggccggtgcggcttttcgctcgcacgctgaataaatgtcaatttttaattaaagcgacatttaccggctcatttatatacgtacacacggaaaaagtactcagttcttttgtaaaaacattttttatgcactttttcaaattttccattaaaatcgaactgtggtctcgttctccgagtgcatgcgtgcaaatatttgtatgtatattgtatttatctggatgcaacctacctcgcgtattggtggcctgggcgatcacagatgtgggctccccttcgcccacggatgtcgaagccgaaacccagaattcgtacatttgattttcggccaggctgcgtgactcgaatgtcaccggatagccgttctcgtcgacacgcaccatgtgagctggaccgggcgaaaaaattaaatgtccgtatgcatttcagcgccgcgcgttgggcgccatttctttgaaacttactcttagcctggcctttgcgacccgcctccctggaataaaccgtgtagtgcgaaatgatcccattgcgatttttcggcgttagccaggaaatcaaaatcgaatctgccgtcagggctgctgccttaatggccgccggtgcatcgggcacgtcgtcatccgtctggcagaaaagcggatgactagccaggccatcgccagtagctgtgtaggccaggactcggatcgagtaattgctggccttgtgtagtgtatgcaggtacgtctccaggttcgatgtgcgcttgatctccagcttggcgggaaaatcaactggtagaaaataataaaatttagggcaaatatagtatagaatattctgttcctgaagatattccctaataaattccgtaccatacctaaattctaaagacaaaagtgttttgtttaagcttctgctattaagatgtctatcatacaagcttttatcttaatcttctttcttcaaatttaaacagaaatatctttgcaactttgttaattttaacgaacacaccaattccatgcagcgccagttggcgttattgatttgatgagatttgaaaaatcagtgccaaaatcaacaacttgcagtgtcatcaatgggccccagagccaacccattgaaccctacgccaaaaccaataaagttgagcaactctcttcaccctttcgcctccctcgaccacttcatcctggcacatcttgctgcctggatatcgtatcatatctatagctgtttgcacagcgctctcaggctccggcaatatcaacaaaatcagcgtcataaagtgccaactgcaaactgacgcagctgtagtaagtgggggtatacagcagtggctggaatagtagcagccagacttaaacttggaattttcccttcgattttttataaattatatatatacctcttcgtaagattgtgttgctcatttgaatgtttaattattttagacataaattaagaaggtataaattcatatttgatgttggatagtttcaacatataagtgtgacccctatcgtacttgcggcatgtactcactttgatgcacaatcgggcgatataaaattttatagccctgtataatgccgccgtggaactgcagcggtggctccagccacgaaatcttcagactctgcgatgacagggcggtgcagttgacgttctgtggcgctgcctcgggaactggaaaaagattgagatacacatgccccgtattgcaatacatgtatgcatagtgtctgcgcatcggtctcattagcttcttaacccacctccctccgcggtcgttccaaagatggctgcactccaaggaccggatccaaagctgttcatcgctcgaatggtgaccgcatagcgggagtacttccggagacccctcaaagtcgccttagttgtcgcccatccgctgacaatcgtggacttcagcgagctgttcaccacgctgatgaagttgatgttctgcttctcctcgctgcagttcacggtgtagccgatgagctcgccgttccacgattcccgcggcgggatctgcaattagaaggtgcagatacagcaaataacataatgaggtaatgaggttttcataaaatgaaatattttatcgtaactaacaagttatcttcttagatcaatatccgcgattccatatcgacctttcttccacaagtgcataaatagaaacgacactcacctgccaggtaacaatcagctcgctctctccacccgtctgcacttgcacattggagggggcctcggtgggcgcctcctcttgggtcttgaggacaatggcctcggtgtaagcgctccgctcgatttcgttgatggcctgcatgcgaatcagaaaggtggtcgcaggggtcagacctgccacaatggcgctctctcgcaggtcgctgtcatagctgtcaaacaaaagaggcgatacagataaaaacgctttttgcacttttcatttttttttttacatgttttcgataaggagtgtgcgtcaacatataatcattcacttaaatagacaactactcactgtatattattatgaatgacaaactaagtcaaaatcacaacatttttcttaatgcaagaattaaatagtaacttttagtcctgttattgaattggagttaaagccatatacatcaaaaataaaataaaaatgaaattcttttcattggtagtatggcacctttttttaaagtgtagcagactgggatgccaaaaatatttctagcatgaacacatacctgcgacttatgctcgtcgacggcaggctgacgttgatgacgtgcccattccaatcccctccagctgcggccaaagaaccatgggactgtaggtactttaaagcctggtactgcactagatagctgagaacgggcgagtttccatcgaagggtcgacgccagctaagcttcactgtgcgcgaacccacctcaaagatctccagatgggagggcgtatctggtcgctcctgaacagcgaggaagataatctgctccgcccttccgtagggattctccgctatgcatcggtatactccggagtcgtggcggtccgaatgaccgatggtcagctgggagtccacgcccttttccgttttcatctccgctatgctaaaccggaagttattcagatcgatgcgtccgttgttctgcgtccaaccaattgtgatgggttcgtcgcccttggcatggcagtccaaggtcacgggatcgttgcgacgggaacttatgttacgggcagattgctcgaatcgtgcgggttctaaaggggcggatttaattattaagccattacttctgccaatgaaatttttatctttcattaccattcacatttatacgaatggtctttttgagaccagctccgatttcattggttgcctggcacatataataaccctcatcattgtccgtcgccagatttaatagtagtgagtgattacgcatactcaggggcttaaagtcctttgaccctttgcctacacagatgaaaatgttgtttcgtattcaattacaagcgttataaaataataaatcttttatagttgtataagatactaacaaactaattcttcaagttatttttaatattgatttaaaatatttggaatttctgaacgaatttctgatttattatttatttaattggtttttggtttaccaaatgcgtcacaaatcccttcattttattttttctttttccttaagctgacagagacaaaatctcgaaatgttaattgattgaacagagtgggcggttcctagaggacagcatccacttggcctccttgaacccatttaatgaactgtatacgaaatccaagccagctgggactgggattggcaaacttaccctgccctttgaaccaggtaatagtcggaatcggatatccttccgcctcacaatttatcgatattgtgttgcccagcataatggccgtgtccatgggctcgtatctccagcgaggcgccactgaaacgtgaccgggccacagggcgaatgcgtaacgaacggaatggcatggaatagagaacaacgaaaacggcaacaaaattaacaactctcgacccgtgtgcatgtgtatctttgttttgatggcccaaaaaaggggcaaacttcgcagccaacggcgcacaaatcctgtgtgatttatttagaaacagcagcgcatcgcttcaatggacccagacaaacacacacacacacacccagcatcgcattccaacccatctagaatccggaatcccgagtcctgaatcctgaatcctctccaggctccccacccactcacctcgcacctgcagctcagccgtgtagttcaccttggcagcagcgttgctggcatagcaggtgtacttgccactgtgcctcgcactgatatccttgaagaccagcagcgagtagaactcctccttcttctcggtaatcttgtaaattgaaagaaacacaagtaagatgggcgctttggaaattacagactattggatacccagttataactttaaaatatatagttttcaataaagtatatgcaataagtccacaatttataaacctaatgcttaaaaaagtttaaaccaattacttaatcaaaagagataaaagcagaacaaaaacaaaaaagcaacagctaatgaaaagtggcattcaaatgctgtaatcgtaagcttttttaaaaatcgaaacacagactggcaaaaagtctaccgggtatttccggaatagcaaggacaaaaatatccaggaaactttttcgttgcacttcagagtgacaggcttacctgcaaactgcttgggatggagctgtcgtccttcttccaactgaagtagatgggcatgtcgccggaggagaccgcacaggtgatttgggcccgtccgccctcctgcagattcttggggaacttgaagggctcgatgacgggcggaccttgatgagcgattagccgccagacattaatgtcgctcgaaaggagcaaaataaaagggacatcgccaaggagccgacagtcctctctacttactgttcacattcagctgcatgtcccgtcgcgcctcctcgccagcccgactccttacaatgcacgtgtatatgccctgatcccgacccggttccacattcttgatgaccagctgccctccgtcagccaccgaagccagttcgtagtggttgcctggttgtgcggttggacaataatgtgttagaccctcaggactctcagttctccccctgcaatttgtcttactcgttgtcaattcctggtgcgccttctcccatctaatttgctcgacgggataaccggcgaacggacagtgcacaattatatcctcgcccgcaacggctttaatcggtccaatggctctcacatacggaggtcctgcaagtatgcagaggaaaaattaagtattcacttgttcaccataaatattaattaaattgtatggattaataaataatttggttcacaatgtgacccatttttagaatattatttatcccgcaaagatttcgataaccagataagaaacgtcctattagtttgttccttaatttaaataaattacaatattagttcctctacacttaattggtgtatattgcagatagtttgtagtcatctcgtttgattattgatacaatttcgtagttaggaccgtacacgttatttacgcaaattattttaggtgtgtgtgcttatttaggggcattgtgaaatttattaaattagttacaaaatgcaattaggcgggaatacggtacgaatgctgaataattccaattatattcgtttggcgcacatgcgacgttagtacataaagtgcagatgcggcggcaagatgtgtatatgtgtgtgtgtgcctgtgcatttttagtgctgctaatgcaactcgttgcatgggtgaatgcgttgcataaattgcaatattcataattaaataggcgaaccgaagcctgtggcttcatcaggcctcaacaggccgaagtgtgtgtgagtgtgagatgggcgttgcggactgtgggcgtggctggagtgtatcagcttgtggcttgaactgttcataatcgaaatcattttatcattattatcccggcaaaaatcgcgtagagaaggatgaacgaagccaccagcaccaaaaggactattgggtgtccactacggaggattaaatttcgatatttctatgcatcccatcgacagttttatgtactcaatcacatattccccaacatcttcaacctctgcccgtaggtacctaatttgattttcaatttgattctggtgaaatctcctcgctgcagggcagcattcaaaacatcatcatttatcatcaatacgcacgcccacttaaatatcaagtatacgcacactgagactcaagctgcctttgctccatcatcaatcattcggcatatagggcgtatgatttatatctgtcccacatccactcgcttatgcattattaacacattaagattacgctctcggaactccttacaataagcaaaagctcagcagtcaagaaaatctttcagacgtcgaagcaaaagtggggggcactcttatcgtctgatactcgtatatgtgtgcagtttatacagcgatgcgacagtgattatcctgccagatactcaggcattcgccaggcaattcgcactcttaaacttgttagcaatgccatcagttcactcagaggaatattcaaattgcatttaaaatacaacttctagtttggtaatactggatgcctagcataataaaatatctgatgaaggaaatctgctttttcttttactttataggaattaatacctctacaataaaaacaatgtatgtagttaggaatttttctcggtgtatccatgtgctctatatcttgcgacatgattgaactgaaagcaacatcgtcatcggctttcttgttgcttttgcgaatgtctctgccccgggagattttctttgacgcgcagccaagcattttccccatgaatagcggagttattttccccatatcctgaactcctttcgccgcgatgtttttgtttcgttgccttggcattatttccaatcagctgccgtttcgattgccgattttgaagcttctcgggtaacaaagttcgcggcacagactcggcatcttttgtgatttgcattgtttggccagcgcacaaaggatgcctttcggcggctttagcgataacaaaacggacgcgcagaaacccattttgtgggacacaattaaggcgaccgggtgtgggtaattgatttttcgagccaatttatcaactcaccgtaaacattcaacctggccgagtgctgaacgctgcccatcgagttgctggccacgcacttgtagagaccaccgtcgtccggacgcacgtgcgagatatttaaatggcttatcacatcgccagacatatcgacaaattgcccgatcgcgaaccgatgatgcagcgatacatccatgatgggctgcgagtccagcagccaggcgaactgcaatgagatggaggtggataccgcaaaaatcaatagcagctcgaagagtggcctccaacgggagggcaatcattttcggacttaaccagggtggcagtttgtgtaagcaccaggagaaatacataatcaagtaaataaataaataaatttaaaaatgaatatttcaaatatatataaaaaaatgtccttctttattttaaaagcgttactttcttttttcttttccatttagcatatattaataaattcttttcagtgcttgcttgtgcgttacaataatgcataataaggcccataaagcatttgagagtgtgctctactcacttgtggaggcggcgagccgctggcggagcacttaagcgatattaatggcccgggacgaacgttctgctcaatgaaggtgtaaatcaattccggcacagtgtctgcgaaataacgtgaaaaaagtgggatggggttgaaacgaagccgtgataaatgccacaactccgcgtcataaactatgcactccgatgtcaacttaccgcccaacttcaactcagccatcgcctgggcactggcgcgttggttttccacgaggcactgatagacaccgcggtcccgccgtccaacgttttggaccaggagcgagctcttcgacaggaagcgtatgctgccgaggacaaaatgggttaaggttagcgcaggggttaaggggtcgctcgggaaaaagtgttaaaagtgccgagcttggcaggcaagcttctattgctgaaaactgacaacgttgcacaaaaaggaaagcggcggacccacaatttgccataaactcacgccaaaacaggcacatgagtgcactgacagaaaaaaatggcacgagttatgtacccctgctaaaaggaagtaaatattctgtaaattagttagagtgacggcagaaagtttggcttgaacggatattatacctattaaataacgtttcttgacgaattaatatcctctgttttcttcaagtgcaaaggatatttgtgtgcttttgtgttggctcgttcgggcgaaatttgttatttattttattagcataattgatttgtaatgctgatttgctcggtctcccattacccattctcaattcgcatgcttatcctttgggcggctttccttggccaacagctggccaggctgatatatttacatatgtagatatggctatatatatgtccgatgttaggtacgcacttatatacatatgtatacagagacgtatatacatgcatgcttttggagcatgcgatgtttgtttttgccggccgaattgtttgccagctgctgctgtacaaattttgcgtgcgaatttagtttgccttcggttttgctttggcccaggcccctcatgccaacgtattatgctgatttcatgtaatttgcattaaattatcaagatgtgtccaggccattcgggcgaaaatatgcacaaagcaaaggatttcccagaggcctaggtaagcaatgccaggatttgcataaattagtcagaaaggacgagtgggcgagggcggcagagggcttgattaaaaataatataatacgagaatgtatctctatagctgtgaggcatgctggcaaactaattgcaaaaccaatcgacgcaaaactgttcacaaatatttatgcagctgcattaacagcgccaacaatcaaaatcttttgagcacagaccttatacacatttttttctatggtctcgcttttccaaccaaacagggcagagcttttaaacaatcaactgagctgaactgaactgaactcaactggactcgactgaactgaaatctgaacggcggttaacggcgggggtgcagtaaaaatacaaaaatcccccgccaaccgccatccacgttcatcaatagtaataataataacagtaacaataaaacattttcgccggtcgaaatgccctaacaacggcggagcgtaatctatggactttttccacgctcatgtttgtattccattttttatttcatattttcggttgggtcggaaggcttttcgcaactggcgaaaaactgatataaatcgaaatcggcaatacagcgttgcatgcctgtctctttgtctgtctgtctgtctgtctgaatgtctgtctgtctgcgccgttgttcctatttcacacaatccccagtggaacccggccgtgaaagccccaatacccaattccagagatgtatgtatattttgggctccggctatacttacttatccctgccggtggtgagtgcattattcgcctgcagcggtttgccgttgtgcagccagtcgatggcatcgatcgctgaacccgttgtcgtacaattgaaattcgccgttccgcccgaattgacaatttgaacttgcggcaatatatgcacggacacatacgaattgacactgagtcggatctcgatgcgctgctccccaaactgattcgaggcctggcaaatctgcaaagggagcgcgggtgtttagatggattaggggaaagactcggaaaattagaaggaatacagtcgaacttctatagcaagtaatatgtagggatgtggcagttgctacatactcaataaactactacacttaaaggaaatccaatgaataatcatatgcacttcttaaacatgaatacaatctatttggatggaaaaaaaacccctcagcatgctcagtctgtaagcttaagctgagaaaacagctttgtaataaaaatgttaaatttgcaagaatttagtttagcgaagttcgactgtattcagtacaccgaattacagattgtcagcggttggcagttggacgcttacttacccacttgcccgcatcgcgttcgtcagcatttttgatgagcagcagtgtgcgcgaaagtatcactcgctgtgacgagggtatgggatagagggctgccgagtcggaaacgcgataccagctataaatcagagtgagtatatatacgagtatatgtaaagctggttggcaaagcctttgccgaaggcacaagctctttattgatttaaattcgggcctgctgctcgtcgagctgtatctgcaaacagtatctgtctcacatgctgactagctcagatcaataaacttaattttatttgcacagaagcactgcacttcaatgcttccctcaggtattttaagaaaacaaacattatttggacaaatactaacagtttttcaattgaaagtaataaacaatttgattcaattagtcgaatgcagtgttctaaaaacatatttaatagcgttccagtttcaaaagcaataccaatctaaaagttaaataaatttctgaaaacctagaaagaaaaccaaactcttttaagctcactaagtgaaatgtactactacggagagaaactggaaactcaatcagttacagaatcacacacgaaatcaataaaaccaaggaacctagtttgttattccagccacgcctgaacttatgcccaaaacaaaattatcgcccttcttctgcgattatagtaatcagttgggaatttcctcctcctttcaggcacttttcccgtctggctcggcatttatgttttcccagcgagaactttgctctgtacatgtttgtcttgtgtattttgatttttcgagctgtctgcgtccttgtcgcgaaaatgtatgtatgtacttccacatattcgtgaggggctcatctagtgtttagaactgcgtgaaattttaataagccctgctaagtgaaacagactgttaagttatgctaccctattgaggtccttgcaaactgttttattttgctaattatctgtgaggagggttgaagtcagtggttacttgatatgtgttattggcccaactttcgtggacccgaattgctttttaatgttcggccaacaaagtgttgggtccagtaagtcaatccattgtgagtgggcaaacaagatgatcaagttacttcaataccaagttagtgtgcggattggctttccagtctgtgcctttattagtttgttttcctccctgctattagcacatggcctcgtttcatccatgaagtcacctaattagcactaaaacatcagtccctaatatgcaataaaaacagcatccccaggcaaacattcaaatgcacttaagggctgtctataatctccaaaccggaacctcgtgatgttattttattgccagctgcgtagatacttggatacagatacacccattccacagatagcaagccaggcctttttggcttggcaattggttgactcacgtaaatatgggaaatgggttgccctggatgttgcacggcagatgaacgtcgtttccacgctccacgtgaatctccatcaccggtttctgggtggtccgaggagccagattcttgcttaactctgtagtaggttacggcatgaataatgcaaaatattatcactacagatataacattattttcgaattgttaaataacttgattctattcttttgagttgtaccaaaaagtgtaattttaaagattaaataaacaggtcaggctcctatttaagctcttgtgcaaatactttttgaaactcacctttgacctgcagcatcaccgcatcgctgcgctgtcgctcgccgttcagtgtatttgtcaccaggcagctgaacttcatcagtccgtcctcggaacgcacggaacgcacatagagatccccggaggcggccaggaccacatagcgtcccgctgttcggaaatcatacactcaggtcacatagatgacaaaagcaaggaaaaatcaaaactcgacgcccggcacccgctgcgtatacgcaacattcgccaataaatgtcatccgccccgttgccgccaaccgccagccctgaatgctgcagcaaaaagtgcagtttcattgctggcgagcaacaaaaccgaatcgttggcacataaatttcagctgccgataaactcccccgcccgttaaaatgtggcaacactcaccgacatccgacagatccggcaggagtatctcctcgccacgatgccaactggccacgcgcacatagggccgcacatactccggaatggcgcacttaatcaacgccgaatttcccaaatagacttcagtgttttccacgtgcacgtggaattgacgacgcaccactgaaagagtgaaggaaaaaataaatcgaaaccgttgcagaagtagtaacagaaatcagaaaagaactgcacggcagcaatagttgtggttgtgaaaatataaaaagttattggctcatttttatttaagaggaattaagagtgcatttaaaaattaaattttaattaaagaatttttatcaaggtgccaaagtctttttgtcgagttactccatttgtgttatgattttatttttgttgaactctggagaccttcaatatttatggtagcccagcaaaatcatactgaatatatttttgctcctattattttgaccgctgctgtggatgctggactgggaaactaaagtcaacaaacggcagtgctgctgcctgctctccggcgcaaactgcgcatacagatgagcgcataaaacgctttcgggcagcagaatccatggctggcagccccaatggcactgggcccaataaacggggaacaatgcagaatggctgccgtttaaatgaatgaaattgcttgaaattacatgcaaagcggaagttgaagagcagccaaaatactcgaaggaaaagcgccggcactggcagagtggaaagcggggcgacacagatgatacacatggaaaatgcaaagtgtaaatattgaatgagattttaagcgactatcatgcagcgttggttttttctgtgggctcagcggggtattgggctgaattggctgggcgagaattgtgtttacttaaggccaggctgtgcaaattcgaccgacgagctgcgttttcgaggtcaagcactaagaggcagcgcaaacagcgagtgcataaaataattaagttaatttcgagagcctcgagaaagttgcagctggccaagtctgtcgcatcgatcactgctcaagagctggcaggactctcgcaggatattaatgttacatgaagtggaagagaagggcgcagaaaagtggcgcacaggtgacatcccaagggctgccagaaagcaaaaccgtaaagaattccaggacaacgaacgtgagcagttttaaaatgttgtcaacacaatgcacactatctatctgtcagttagctttgccatcttggctgttttccagccagagcggaatactaaaagtataaactacactactttcagccacactttcctatgaaataaataagagatttccagaggtttataataaaataccgaccatatttcaccgatatctacaactgaattagtggttcggactttttatcaaagtagatttgcgtacagtatatgtctaacaattatttggctactattttttaaaatccatagctggatctggatacactgctctcctcagctcgaggctcgggtaagtaatgtaactgatggcagcagcgcattccgca

SEQ ID NO: 34511 - DNA, 5667 bp, DROSOPHILA
atgcgcagtttgcgccggagagcaggcagcagcactgccgttttggtgcgtcgtcaattccacgtgcacgtggaaaacactgaagtctatttgggaaattcggcgttgattaagtgcgccattccggagtatgtgcggccctatgtgcgcgtggccagttggcatcgtggcgaggagatactcctgccggatctgtcggatgtcgcgggacgctatgtggtcctggccgcctccggggatctctatgtgcgttccgtgcgttccgaggacggactgatgaagttcagctgcctggtgacaaatacactgaacggcgagcgacagcgcagcgatgcggtgatgctgcaggtcaaagagttaagcaagaatctggctcctcggaccacccagaaaccggtgatggagattcacgtggagcgtggaaacgacgttcatctgccgtgcaacatccagggcaacccatttcccatatttacctggtatcgcgtttccgactcggcagccctctatcccataccctcgtcacagcgagtgatactttcgcgcacactgctgctcatcaaaaatgctgacgaacgcgatgcgggcaagtggatttgccaggcctcgaatcagtttggggagcagcgcatcgagatccgactcagtgtcaattcgtatgtgtccgtgcatatattgccgcaagttcaaattgtcaattcgggcggaacggcgaatttcaattgtacgacaacgggttcagcgatcgatgccatcgactggctgcacaacggcaaaccgctgcaggcgaataatgcactcaccaccggcagggataacatacgcttcctgtcgaagagctcgctcctggtccaaaacgttggacggcgggaccgcggtgtctatcagtgcctcgtggaaaaccaacgcgccagtgcccaggcgatggctgagttgaagttgggcgacactgtgccggaattgatttacaccttcattgagcagaacgttcgtcccgggccattaatatcgcttaagtgctccgccagcggctcgccgcctccacaattcgcctggctgctggactcgcagcccatcatggatgtatcgctgcatcatcggttcgcgatcgggcaatttgtcgatatgtctggcgatgtgataagccatttaaatatctcgcacgtgcgtccggacgacggtggtctctacaagtgcgtggccagcaactcgatgggcagcgttcagcactcggccaggttgaatgtttacggacctccgtatgtgagagccattggaccgattaaagccgttgcgggcgaggatataattgtgcactgtccgttcgccggttatcccgtcgagcaaattagatgggagaaggcgcaccaggaattgacaacgagcaaccactacgaactggcttcggtggctgacggagggcagctggtcatcaagaatgtggaaccgggtcgggatcagggcatatacacgtgcattgtaaggagtcgggctggcgaggaggcgcgacgggacatgcagctgaatgtgaacagtccgcccgtcatcgagcccttcaagttccccaagaatctgcaggagggcggacgggcccaaatcacctgtgcggtctcctccggcgacatgcccatctacttcagttggaagaaggacgacagctccatcccaagcagtttgcagattaccgagaagaaggaggagttctactcgctgctggtcttcaaggatatcagtgcgaggcacagtggcaagtacacctgctatgccagcaacgctgctgccaaggtgaactacacggctgagctgcaggtgcgagtggcgcctcgctggagatacgagcccatggacacggccattatgctgggcaacacaatatcgataaattgtgaggcggaaggatatccgattccgactattacctggttcaaagggcagggcaaagggtcaaaggactttaagcccctgaaacccgcacgattcgagcaatctgcccgtaacataagttcccgtcgcaacgatcccgtgaccttggactgccatgccaagggcgacgaacccatcacaattggttggacgcagaacaacggacgcatcgatctgaataacttccggtttagcatagcggagatgaaaacggaaaagggcgagcgaccagatacgccctcccatctggagatctttgaggtgggttcgcgcacagtgaagcttagctggcgtcgacccttcgatggaaactcgcccgttctcagctatctagtgcagtaccaggctttaaagtacctacagtcccatggttctttggccgcagctggaggggattggaatgggcacgtcatcaacgtcagcctgccgtcgacgagcataagtcgcagctatgacagcgacctgcgagagagcgccattgtggcaggtctgacccctgcgaccacctttctgattcgcatgcaggccatcaacgaaatcgagcggagcgcttacaccgaggccattgtcctcaagacccaagaggaggcgcccaccgaggccccctccaatgtgcaagtgcagacgggtggagagagcgagctgattgttacctggcagatcccgccgcgggaatcgtggaacggcgagctcatcggctacaccgtgaactgcagcgaggagaagcagaacatcaacttcatcagcgtggtgaacagctcgctgaagtccacgattgtcagcggatgggcgacaactaaggcgactttgaggggtctccggaagtactcccgctatgcggtcaccattcgagcgatgaacagctttggatccggtccttggagtgcagccatctttggaacgaccgcggagggagttcccgaggcagcgccacagaacgtcaactgcaccgccctgtcatcgcagagtctgaagatttcgtggctggagccaccgctgcagttccacggcggcattatacagggctataaaattttatatcgcccgattgtgcatcaaattgattttcccgccaagctggagatcaagcgcacatcgaacctggagacgtacctgcatacactacacaaggccagcaattactcgatccgagtcctggcctacacagctactggcgatggcctggctagtcatccgcttttctgccagacggatgacgacgtgcccgatgcaccggcggccattaaggcagcagccctgacggcagattcgattttgatttcctggctaacgccgaaaaatcgcaatgggatcatttcgcactacacggtttattccagggaggcgggtcgcaaaggccaggctaagactcacatggtgcgtgtcgacgagaacggctatccggtgacattcgagtcacgcagcctggccgaaaatcaaatgtacgaattctgggtttcggcttcgacatccgtgggcgaaggggagcccacatctgtgatcgcccaggccaccaatacgcgagctcccgcccgaatcgcctcctttggtcaggtggtgcgcaaggcggtgggcactggactggtgttggagtgcctggcggtgggtaatcccacaccacgggctcgatggctaacccgcgatcgtcccgtcaccttcagtcctttttacgaggtgaccaacgagggcaacctgaagattcaccgcgtcgaaggcagcctctccggaaattatacatgcacggcgaacaatctgttcggcagtgatgagatccagtaccaggtgattgccatgaagccaccgagcgcaccgcaaatcatcgtgcagtacgcttccgccgacagcattcgcgtaagctgggatgcccccgacgatgggggagctccgctgcaaggatacaccatatcgtaccacacggccggagagagctggtccatcacggagctgctgcccgagaataatgcctttacgatctcgggattgaagtgcggaaatcagtacattataaaaatgtccgcacacaacatggtgggctccggggtggccagtgaggaaattaacgtctggaccaagggtaaagcctctcaagctccgaatgccaacgaactaattgccacaaatgcgacgtgcgtgaatttgaagctgtcatcgtggcaaaatggtggctgcagcattcatcatttctccatcgagcacagaccgctgggcgacatacggtggacagttgtcacatcggatatttcgaacgccgaggaaaaccgtgaaaatttaatcttctgcgactttctgcctgccaagtggtatcagctgcgaatctctgccaccaacgatgcgggaaaaacgacggagcattatcatttcagcacaacgaacatcgatggcatcaccattccgccgccatcggttttcccctcggaaaacgatttgatgaacaatctgataaactcaacaaatccgaccagcggtgattggttcgcaacgctaattgtcgtcgtcatcatcacggtttccatcataacgatagctctgaccatcaaacatcgacgcactctatgcggacccatcgccgagggctacgaatccaggaccttacccggggactacaaggaggaccacgaaaatcgccggaatcagcaggtgtacagtgcctcgccagttaaaacggtagacaagggaaatgagtcggaaatgtacgagatttcaccgtacgccacgttcagcgtgaatggcggacggacaggggctcctgccaagactcccacacgtgccgtggcggctcaaacgcccctcgattacaccatgcaattcaaaaccttcgggcatccggagggggagaacttaaacgctaccgcctacccactcctgcccagctcgggattcggtcacgtgaagagcaagtccagctggcacaaacagcgctattacaacacggaagatgagtctacgctgagcaaatcgatgaccatagtagccggttcgcaggcaggacactcaaagaaatccaacggaggacggagtgccaagagcagcgcagcctgcagcggagtggtggccggatcggagtcggacacgagcatcagtcccagcaccgagttctccaacatgcccacctaccgagtgccatgcaagtcgtcgcgcagcagtgatggtcgggcggtcgtagatatgttccgaccggactccagcaccgagtccaataatgaccagggctcgccggcgcccgagcgtcgacacaacaccccacgccacgtcctagggatgggcatggccatgggcttgggtggtggtggcggtgggggcgtcggtggaggcaacgggccggccgagaagcggagtgccggacaacgcagccggaagcacggaagcgcggcacagcagcctagcaaccaaacgttggagcgaagaaagtgccctggtagtagcaacagtttagacagtgaggtcgatgcggagaccgccgcctctttggcagcctctatagccgcgatggcggggtcgggagcgggagccgacctttccggtggtttccgcccgccggctggattccacgatggccgggagccgggcgaccacagcgattgcgagcgggaacagcgggcgctggatctggaggtgcagcgcgtgatggagagcaccggggacgctcagctggccaagatggatcgcgaggagttgacctcactgttggcaaggtatcacgagaagaaggagcaggagcgcctagaatacacgatacacgtataa

SEQ ID NO: 34512 - protein, 1888 aa, DROSOPHILA
MRSLRRRAGSSTAVLVRRQFHVHVENTEVYLGNSALIKCAIPEYVRPYVRVASWHRGEEILLPDLSDVAGRYVVLAASGDLYVRSVRSEDGLMKFSCLVTNTLNGERQRSDAVMLQVKELSKNLAPRTTQKPVMEIHVERGNDVHLPCNIQGNPFPIFTWYRVSDSAALYPIPSSQRVILSRTLLLIKNADERDAGKWICQASNQFGEQRIEIRLSVNSYVSVHILPQVQIVNSGGTANFNCTTTGSAIDAIDWLHNGKPLQANNALTTGRDNIRFLSKSSLLVQNVGRRDRGVYQCLVENQRASAQAMAELKLGDTVPELIYTFIEQNVRPGPLISLKCSASGSPPPQFAWLLDSQPIMDVSLHHRFAIGQFVDMSGDVISHLNISHVRPDDGGLYKCVASNSMGSVQHSARLNVYGPPYVRAIGPIKAVAGEDIIVHCPFAGYPVEQIRWEKAHQELTTSNHYELASVADGGQLVIKNVEPGRDQGIYTCIVRSRAGEEARRDMQLNVNSPPVIEPFKFPKNLQEGGRAQITCAVSSGDMPIYFSWKKDDSSIPSSLQITEKKEEFYSLLVFKDISARHSGKYTCYASNAAAKVNYTAELQVRVAPRWRYEPMDTAIMLGNTISINCEAEGYPIPTITWFKGQGKGSKDFKPLKPARFEQSARNISSRRNDPVTLDCHAKGDEPITIGWTQNNGRIDLNNFRFSIAEMKTEKGERPDTPSHLEIFEVGSRTVKLSWRRPFDGNSPVLSYLVQYQALKYLQSHGSLAAAGGDWNGHVINVSLPSTSISRSYDSDLRESAIVAGLTPATTFLIRMQAINEIERSAYTEAIVLKTQEEAPTEAPSNVQVQTGGESELIVTWQIPPRESWNGELIGYTVNCSEEKQNINFISVVNSSLKSTIVSGWATTKATLRGLRKYSRYAVTIRAMNSFGSGPWSAAIFGTTAEGVPEAAPQNVNCTALSSQSLKISWLEPPLQFHGGIIQGYKILYRPIVHQIDFPAKLEIKRTSNLETYLHTLHKASNYSIRVLAYTATGDGLASHPLFCQTDDDVPDAPAAIKAAALTADSILISWLTPKNRNGIISHYTVYSREAGRKGQAKTHMVRVDENGYPVTFESRSLAENQMYEFWVSASTSVGEGEPTSVIAQATNTRAPARIASFGQVVRKAVGTGLVLECLAVGNPTPRARWLTRDRPVTFSPFYEVTNEGNLKIHRVEGSLSGNYTCTANNLFGSDEIQYQVIAMKPPSAPQIIVQYASADSIRVSWDAPDDGGAPLQGYTISYHTAGESWSITELLPENNAFTISGLKCGNQYIIKMSAHNMVGSGVASEEINVWTKGKASQAPNANELIATNATCVNLKLSSWQNGGCSIHHFSIEHRPLGDIRWTVVTSDISNAEENRENLIFCDFLPAKWYQLRISATNDAGKTTEHYHFSTTNIDGITIPPPSVFPSENDLMNNLINSTNPTSGDWFATLIVVVIITVSIITIALTIKHRRTLCGPIAEGYESRTLPGDYKEDHENRRNQQVYSASPVKTVDKGNESEMYEISPYATFSVNGGRTGAPAKTPTRAVAAQTPLDYTMQFKTFGHPEGENLNATAYPLLPSSGFGHVKSKSSWHKQRYYNTEDESTLSKSMTIVAGSQAGHSKKSNGGRSAKSSAACSGVVAGSESDTSISPSTEFSNMPTYRVPCKSSRSSDGRAVVDMFRPDSSTESNNDQGSPAPERRHNTPRHVLGMGMAMGLGGGGGGGVGGGNGPAEKRSAGQRSRKHGSAAQQPSNQTLERRKCPGSSNSLDSEVDAETAASLAASIAAMAGSGAGADLSGGFRPPAGFHDGREPGDHSDCEREQRALDLEVQRVMESTGDAQLAKMDREELTSLLARYHEKKEQERLEYTIHV

SEQ ID NO: 34513 - DNA, 2270 bp, DROSOPHILA
taattgtaatataaataaatgagataaaaacgcaaagtggcaggggcgcgtaaaaaatgcaaacggaaatgaaaaactgcgctccggttgcgttcttaccaagaactggattcactgagagaacaagaaggtaccaagcttgaaattaaagaaatcaattaaaaattgtttacttgtattttcaaagtaaacttattgatgccccaagaaatgtgtttggataatttcatgattaattgtatttgtccttgtcccatgcgaatagatcattatctagatgttttgtaacaagaggcataggtataatacataaaatgaagaaacaaaatcctataaaattaaacaattactttcatctggaaaataaagagttttatattaattctatattccttgaagtttaagtcaagttacctagtttatgtaaaaattactgtgttcaacaccaattcatgctcttggtgtatttttctgctcagactcacgagtcttgtaagcggagttccatggggagggctgtcgaaaataataaatcaaagagacacattgagaatgcaaaggcccgggctacgtccccatattctattccatctttgccccacctggccgaaagataaagcgagcggagctttcaatttcaacgctccacaacgccaagactgacgtttgacagacacaagacgttgcagcaacaaggagtgcaccttaggaaaaaataaaaaatgaagaaaaaaaaaagggggaagattacgtggaatgggtgcagacactttactttgcgggtagggctggcatccacatcaaccctttcgtcattgtcagacgaaggcgggcgaagttgttcaagtactttgcggatagaatagcttgctgtcgcaatttagataaattttaattttaataaagtgtttgctctgctcttcgcggccactagagcggatactcttggcattatgaattaattatggcaacagtcattccccggctttggttgcggtgtttagcatttccgacgtctggcgggcgcacgaggcggttttggcggtatctcgtagaagagtccacccacttggcggatgctcttgcaggccatggcctcctcgagggcctccgtgataaccttaaagcagacttcgcccggaaatcccgtcttgcgtgtgacaaaggtggccagatcgcgaagggaagtaccggtggtggagtccttcaatcccgccaggacgagctcctgcggcgagttaattgtgcgatcgaagtatatgagaggcatgttcgatttggggaaacggaattttgtagtctcaactcagtgaaatattaaaaaatacagttgacaagtcagcaaacctaataagtaatatggtaaaacaattattattattattattattattattattattattattattattattattattattattattattattattattattattattattattattattattattattattattattattattattattattattataaaggtattattatatcaatcgtagtttataggattatacatttttgtaaatggttctgtaaaaattgttccgaaaatgagcttctaataagatttttaattatctttccaagtgccctgaagctatcatctctccttgccgttggccaagttcagggaattgaatcgcaagcttggcgcatgatgcgttaagttgctaacgctattctttttttggccaacgacgacaactcttaaccccttggcgccccacactttcgctattttttcacacatgcctttgcacccagacgttgcctgtcaaattaacgccgcattttatgcgccccgtggcgccccgacttaacttttttcggtgttcgtttatttcgctgccttcagttaaattgaaattaaagcagcacgctgtagttcggcttaactggctacaagctgggcgatttacagactcaataatacatcggtggcgagtgccaaaaggttcaaaaggcgaccaaaaatttcacagttctttctctacatccctcggcgaacaatttgaatgaagcgcgcaaattgaataaaaggccattgccacagttcaagctgaaaaactgctggctgtgataaaatcatcagtttccatcctggctccccgtcttcattttttcactgctgaagttttttacggttcagtctaggtggaatgagccggattgggtatgctggtaataaatttttattgcccgaacgaattcaatgaaacgagccaaggaggaagaattga

SEQ ID NO: 34514 - DNA, 270 bp, DROSOPHILA
atgcctctcatatacttcgatcgcacaattaactcgccgcaggagctcgtcctggcgggattgaaggactccaccaccggtacttcccttcgcgatctggccacctttgtcacacgcaagacgggatttccgggcgaagtctgctttaaggttatcacggaggccctcgaggaggccatggcctgcaagagcatccgccaagtgggtggactcttctacgagataccgccaaaaccgcctcgtgcgcccgccagacgtcggaaatgctaa

SEQ ID NO: 34515 - protein, 89 aa, DROSOPHILA
MPLIYFDRTINSPQELVLAGLKDSTTGTSLRDLATFVTRKTGFPGEVCFKVITEALEEAMACKSIRQVGGLFYEIPPKPPRAPARRRKC

SEQ ID NO: 34516 - DNA, 3350 bp, DROSOPHILA
aaaggagtggactggccccaaagtggattgcagcaagagacgcagtgcgtgccgcatgcgagccactttctagttggcccaaaactctggctatgcgcacattgaacttaaccgggtctcgtaaattttgtgcgagagtgctctcgactggctttttggtacaaaattaacaggcacaccagttaagtgccagacatggccattttcgatttcaatttgacaaatttgcccaagaaatatgcacgaaagttgttacttacgcaaggcgatagctagatgccctgccaaaataaataaaatctattttaattttaaatgttttttgaaaagaacttcgtaggtaagctatctaatatgttttctcacatctaaatctatatagtgtacttacaaaattgcttcagatcagaatgtgtcagttagaaacaaaatgtaatcctattagtgcttggattcctgtttctaagcccacaaaaattttaaaaggaaactgaaaagcggaggaaaattacccagtgacagggtaaaatatctgcaagttcgtgaaaaatgttgcttttagccgaaatggttttgggttgcgtgagctcgcaatgctgctgcggattttgtgggcagattttctgaatacactgctgctgctgctgcagttgctccagctgttgttgtaattacttaatacttacgcattgttaacacgcatcgttgtcgcctgacacgcgttttacatgtcgcaccattcgaggaagtggcagtggccccccaatttggttcgattttcccgagctgctgagacgcagctgttcgacataagaaatttgcgtgtttttggagtttaattaacaaaccggctggcaaaagcagagtaatatggcaaagttaaagttaagtttgttactgtaacagtaacagttggccatatttgtgtccgaatccgaatggagatgtttgggacagccatttcctgtcacgaggaaaaaccgcatgcagccggttaactctagtcgtactcagctccaatggtcaggctgatggctcccggctgcacaaaggtctggtggtaccacttgttcgtgtccaacacaactggaaatatgcttattagtagagggtgcactttttaagtaccatttcgagtgacttctcacttatgtcgccctgttggaccaccacgtcgaatctccggcactgcaggtagcactcgggaggtggaaccagtagccatcgcttgctgcccgccagctgagcctgccacgatggcagtctcacgttgtcaatctgcaggccacatttgacatatataagcaaaaaaggttattacacatctacattttgtgtaaaataacatttggtaacagtggtgttttgaaataaaagtgtcaggaagtacattaaaatctcttatttatttgatttgaaggagaataagtatttttgattattactagaatgcactatcattctttttgtcataaatcagtgtgctttagaaaataaaacaattctctattgttgtctatgaatttaagtgtggataataaatgggcagttgtaaaaagccaaaagttagaaaaatatgggggataataaaaaagttcgaaaatgcaaaaattcatttaaagttctaatccaaaaatccatctcactaaccagtaaagtgtacctaaaaggtaatatgagaaacttacatgcatttgggcacccaagccggataagccaatgaaaaaccaatcaacagcattgttttccgagccttcgggcagaaaatatggtctaccatagtgcctgcggaattcctctgcggtttccgcatggcagttgctccagccgaagtaccagggctgttcgcctggttttagctccacccgatcctcgggcatatccaaagcgtcatagatatccaaaaatccggttttatacggcaggaactggcattcccttatgtgctgcttttgcttggccttggtataaacatcgcgaaaataccagtagttaaataactgcaatatgcatacactgttaattaaaggctactttatatgactttatagatagttaaccgaaactgctgtccaatttttagtggcatcactaatgataactggcgctgcactgtatgcgaattttttctcaaactcctgggggctaatatttttaagtcgcggcacatttttaatatttgcacagaaattacaattttcaggcggtcggaaagcgtaacgcaagttgcgaggcagatatagagcgcaattctaaaaaaaactcgaagaaaataaggtattagttgttctttaatactttttgtccaactgaaacagatcaataagaattctcgtacctttccctgcatttcttcatagtagtatttaactcccaataaaataagagttccgagcaaaacaattttgatccacttaacccatttttcgctgaatagaaatcctttgcaaaaattgggaagaagctcttgaaaagtactatccagataatttggcttatggatattaagtatttgctctagtttactgcgcgtctgctccaattttccttccttcatcctgacgatgttactttgaccaagttaagtgctgtactgaataaagaacttggctgtttcctttcaacgcggctttttaacgcactggcctggcaataattttattatctgtcagtgcgcaggcttcccagaaggactggatgtgggttgtgtggttagcatgtgataagcgacaaattgcctgttattgccaatctaaatcactttctcttcaatttacttgcagaaacccgtacaacaatggaccgggcacttgcatcacctacgatgccatcaatgcggcctacttggatgcacgcaagcgtattcgtgagttaatcctcaattcaatacagtaaagccttccttaacggaatcaagtttaaaataaatttatcttttttgtcatattgattaaaaatgaattttcaattaaaaataatagtaaaagtgttattaagttgataacataaatctatatataacaatctatactggaacttaaaattgcggcattcaagccacatttgtctgtaatttgacttgtggaaatttgattgtaggacttaattttcgattataattcacacatgcgtttattgcagatgtggcgcagccaaagtctgactggaagccggaggaactggccaccgtgggcgagctgctgctcgacatttccattcaattggcccgaacgtaagtactcagcgctaaacgcatttgaaagttgccctggcacgcccacgatctccatctccctcggcgctaataacgattgccaaataacgcatgacaaggcagttaagtcgtgcac

SEQ ID NO: 34517 - DNA, 540 bp, DROSOPHILA
atgcagggaaagttatttaactactggtattttcgcgatgtttataccaaggccaagcaaaagcagcacataagggaatgccagttcctgccgtataaaaccggatttttggatatctatgacgctttggatatgcccgaggatcgggtggagctaaaaccaggcgaacagccctggtacttcggctggagcaactgccatgcggaaaccgcagaggaattccgcaggcactatggtagaccatattttctgcccgaaggctcggaaaacaatgctgttgattggtttttcattggcttatccggcttgggtgcccaaatgcatattgacaacgtgagactgccatcgtggcaggctcagctggcgggcagcaagcgatggctactggttccacctcccgagtgctacctgcagtgccggagattcgacgtggtggtccaacagggcgacataattgtgttggacacgaacaagtggtaccaccagacctttgtgcagccgggagccatcagcctgaccattggagctgagtacgactag

SEQ ID NO: 34518 - protein, 179 aa, DROSOPHILA
MQGKLFNYWYFRDVYTKAKQKQHIRECQFLPYKTGFLDIYDALDMPEDRVELKPGEQPWYFGWSNCHAETAEEFRRHYGRPYFLPEGSENNAVDWFFIGLSGLGAQMHIDNVRLPSWQAQLAGSKRWLLVPPPECYLQCRRFDVVVQQGDIIVLDTNKWYHQTFVQPGAISLTIGAEYD

SEQ ID NO: 34519 - DNA, 2375 bp, DROSOPHILA
ccagacgaaatcttcagctgctcgttcagttgctcctcgtattgtgtcttcttatggtcgtcgtcaaattggatccaactctcgtcctgctgttatcggtagcgctggacgtgctatcggcggaggagctaaacatgcccagaatcgcaataggattcattaaccatactaattccaaaagctgatttagtccccgacaaaatgttaatcaaaataaaaattatatttatataaaaaaaaatatatttatgtgtatattatggttgacttcattagcaaggactcgggatttttatgttcaagggatatactcataattaaagtaagcttttttttttttaatttttgaatgtcagtaaaaacatacagatttattacaaaaaaaaaaaatgtaaagcagttagaatcgtaggatgtataaaataaaaaatttatttaaaaaaaaacatgtatgattaaagagttatgcacgaaataagatgtactaaaacctacatatgtatatatatgtgctttatgtgcttatgcgctttagtttattgtttattttagcactctggcttattttaatgattcaagaatcagcgtcttaacatagccgaatatcaacaaattggtaactttaaatggtttgaaaatcgaattcatattcccagcttaaatggctactcgctttgggcaactattcaagaaatgtttaaatcatgaagtgcagccaattgagtgcgtaacttgtcgctaaagctgaaattggcgtattaaccagttcattaaaggtgacattgttgctaaggattaagtactaggtaatgcctatgaaatgaatattccccaatgctcaatcttatccctgccattgtaaaataatcttaatcaagtttcgtttttatgtaacatttgttattatttgcgatagaaaaaggtttgagagtagaataagaatgtgacaataaggatgtagatctaggtttggtcatttgctgatgataagttctgtttcttaataaggcttttggctgcgttggcgattctggtaggaatttccatgggcagatccacctacatttggacgtccatgagctccagcagacggactacgcggagctccaccacgaggacgagatccggtcactccaactacgggcactcgacgggatcctccaacaggaccagagagggatccatatccagagatgggtcgttgggtctgaggggcagcggagtagccacgggttattccggcagctggagctctagatgaaatagctccagactgatgcactcccaccccggattcctgattcaccgacgacaaatacgatccttgggcgaggacaagcaggacactgatcaccaaaatataatagagtgccattttgaaataggtcttttaattgtgtgcttgaatgtagagtaggaagcaactgatacttggcttaaaaggaattactccttttatagcagatacctgagtacttaaaaaaaacatgaatgcagttaaaggtacatattatgttaaaaattaaattatatgacaattttgataatgttgtaatggagaaactgaggtcagattttatctgtaatatactccaatgatccagttttgtaatttcagtgtttagcagatgataaatcagaatgaaagagttcaacaaccacctgctattattcatataaaaaatatgaatgagtaaatatgaattcaagttagaagcacataccttagcaagcgttgttatatgtagctgaacacaaaatttcatagaaaaaaccagagatatatactacatgcgcagacgcattttcaactcttaaatcaatttatgcataaaacatgactagcaagacatagaaggctctttttcataaaattatggtctaactaacattactagcagccatggatttaattggcatatagaaggcttgattaagccggccaattggtaagccaaaaaagaaacacccgcgatgatcgcggttgccaggaagtaaggcatttgcgaaaatagttttgaaaatataggctcaagtgatggagacccaaaataatggttaaccttgccatatatagctcagggtccgtttattatccataacaatgaaagcaaattaggcttacgattgtttaaaaaattgcaaacccaattgaggtttgataggtgggcaataataatgaaaaaatggtaaaaatgaaatgtcatggtggcaacattgaattacgtaaattacgtaaaatcattttgcgatttctgaaatttagaaagtaaacacaagtgtgtgaaccatttttgggtgtatcactcatatgtgttcaagtatgcttttaataccaaatattttataattactcggcataacattttttaggt

SEQ ID NO: 34520 - DNA, 375 bp, DROSOPHILA
atggcactctattatattttggtgatcagtgtcctgcttgtcctcgcccaaggatcgtatttgtcgtcggtgaatcaggaatccggggtgggagtgcatcagtctggagctatttcatctagagctccagctgccggaataacccgtggctactccgctgcccctcagacccaacgacccatctctggatatggatccctctctggtcctgttggaggatcccgtcgagtgcccgtagttggagtgaccggatctcgtcctcgtggtggagctccgcgtagtccgtctgctggagctcatggacgtccaaatgtaggtggatctgcccatggaaattcctaccagaatcgccaacgcagccaaaagccttattaa

SEQ ID NO: 34521 - protein, 124 aa, DROSOPHILA
MALYYILVISVLLVLAQGSYLSSVNQESGVGVHQSGAISSRAPAAGITRGYSAAPQTQRPISGYGSLSGPVGGSRRVPVVGVTGSRPRGGAPRSPSAGAHGRPNVGGSAHGNSYQNRQRSQKPY

SEQ ID NO: 34522 - DNA, 2309 bp, DROSOPHILA
gaaactaaaaccaaaacccatttaagccaaagatccaactcattttagcccgaagatgtgccgaagcatgaagaacttcattaggcgtcgacggcaaactgcattgtttaacgggggcgtggctgcgggggagttcgaagtaaatcactgtgacaggtggagcgggatatatttatccatgtggatacacatatatacacctacttgttgattgtggcaaagacaggccgtgacgagacaaaaaaaaaaaaatgaaaataaagtgagagaagcaaaattatgtccatgtctgtcgccgttttgttttggttacggacttcgccgtgctgccaattaaaagcagccgcttgcataatttccgctggcagagagtcaggtgcaagagttctccagttgacccaaaaaccataggtctcaatgggtgggggtcacaatcaaataaaaaaaaaaaaaagataaaaagtagagaggggctcgacttaattcacttcctgaagctaataaaatgcgacaaatgcgtgcgggctgaagttgaaattgaaaatggtcgtggtaatggaaatggagaagtgaaagtggagcccgctattggccatttttcatacgactgtcgagccaaaattgattcgaaattgtatcatttatatccataaaaatcagattatgttacatatcaaaaaaattactattgcgtccaaactaatgggggtgctattacaatttgcggttagctttcaacaaaaaagaaattacttttatctcgctgaactgaagtgctaaaactgagaacggcaggtggtaacaatccacccactttataaattacgatatttaaaattaattctacgcatcaattatatttccctgtaaaaataagctatccgactcattaacttattattaagcaagtagtaaacggaattttatataattttcctacattttcgattgcagccggaagtagaagtaatgtgaagatgagcccgcagctgaccgtaagatgatcgaggcctttgcgaatcatttcagcagccatctgggacgccacctcttctactgggccatcgaatcgagcagcgccacctcgggtaactacggcctcaacctgcggctctccgagctgatcaacaagttccacggccccctcgagcggggagtgcaagtgctggaccacctgctcaccctcgaggaggacgatttcgccggccactggggcagcgcctacgcgcacaactatgagccggagtacgccgctcgggtgccggagaacgaggagctgccgcctccagaacacagtgagttaacctaaagccagttctcgaaagatttagatataggaatactattggttttatcaggcgagcgacagatttccgatactccaacctgggctgtagtatgagcagtatgagtcagaaactaacttagccaaaggtcaacaacatgttttttatttttcggcacacatcttcgatccgctgccggttggtgcttctgttggtggggctgctgcagaaactggttttactgtacacgaatgtgctaagagataaacaaaccttgacaagtaagctcggtggccgagcaaacacatcaaaatcgatttcaagttcagcgatatgtttcttcataataaatattcgcgggccaggcaataaataatagtccaaatacgattcggacatgcaaataccgggtaaagtccccaacaaggctgatcgaaaagagacagaggagacttgtaaaataaaagttttcaattcggaggtggttacacacagaaaaacatattaattctacggactgaaccttaatgaactttgtgggtggagtttgcattttcacgctggaaaagcttagataaattgaaaatgcaaatctagcccacaattaatacggatatatgtgatcgaaaaatgagaactttttagactttaattgaagatcctctttttctgtgtagcataagcctcttgaatcggccctattagctcccacacgtacgtatttttatggcgcgccatgacggaaatacatattagcaccgagtggccgtgatataatcaaaatgggttgcgaaatccacagttgacgtatttcagctaatttaaattcaaaacaggcgcccaatcgctgcgctagccaacactggcacatagagttccgcagcaaattggtgtgaccagctggcgaaaggccacgacttaaaccttttcaacacatttcccattcgttatactcagctgattcgaatacaacactgcttggaatcgctttccagccctcgaaaaatacttgtatattctatt

SEQ ID NO: 34523 - DNA, 309 bp, DROSOPHILA
atgatcgaggcctttgcgaatcatttcagcagccatctgggacgccacctcttctactgggccatcgaatcgagcagcgccacctcgggtaactacggcctcaacctgcggctctccgagctgatcaacaagttccacggccccctcgagcggggagtgcaagtgctggaccacctgctcaccctcgaggaggacgatttcgccggccactggggcagcgcctacgcgcacaactatgagccggagtacgccgctcgggtgccggagaacgaggagctgccgcctccagaacacagtgagttaacctaa

SEQ ID NO: 34524 - protein, 102 aa, DROSOPHILA
MIEAFANHFSSHLGRHLFYWAIESSSATSGNYGLNLRLSELINKFHGPLERGVQVLDHLLTLEEDDFAGHWGSAYAHNYEPEYAARVPENEELPPPEHSELT

SEQ ID NO: 34525 - DNA, 16678 bp, DROSOPHILA
atgattttatgatttttatttttatttataattttgagtagcataaagccttatttgtttatatggaaagattccccgtgctgcttgctgctattggcaacatgttgcggtggttccagcaacatgctgccacctcccttccagcgcgctaattttggaaatgttaacgctgcgctacgtcacaccaggccaagtcttcatgtcttcatgtttttcggggtgtgttcttggggagcgtcctgataactcctcagtcgtctgtcaacttgtcgtaggcgcggattgtcgctcccgggaaaatttagattcggatgtgcgttgcgttgtgttgcggtgcggttttcactgtttgtttacatgccaaatacttgcgttttgggggacgacggctgctccatttaattacacaataactaaatttttgtttgttgttcatttcgctttgcagagcacttccggggagctaaacagctggacacaagggacgtttatgagtgcgtgaagtgaagtacttggcagataccaaatgggtgccgtctgaaatcaaagaaaaaataaatcaagaccagaggaaaatcttcgaaatcaacgaaaaaggtcggggacgtgcaacaattaacaggcggaaatggaaatgtataaacaatcagcgaaatgtgcaaattcgtggagtgccaatcgaaagccagcttgagtgaaagtgaaaaactgcggcgcgggcaaattattaattatccggctgctctttagctcgattttcccagggcgcagtgcagacattttgtttatgagccaatttgccaagcgcaaataaaaccgaaccgctgccagttgagcattaataatttgcatattccgtcccatccccattcaacccccccaaaaagtgccaagaaacagacagtgcggcgtgcggcgttgaagtgtttattaaattgtctttgccacaaatgcaagacattttgccgacacgcgtcgcaatactatattccccctcgaaatgctggagttgcaactttgcggagatttgtcagccggcgacttgagcgaaattcccaaaatgggacaccaaagggccacggatacgggacatcgccagatccggagccacagaaaatccgactgccggacttttccagccagatgcctcctgctgctactcggcgttctacttctgagcatgggtaagtctgccatttgtttagtctaattatattgccaatgataatgtttaccaatcgggaaacatcaaaggtgcgggttgcaaagccatcaaacaaatatagctgtagctcgcaaaaatgtttctatacaagttatgcttaatgtcaggaacgaaagaaatcataatgtaaaatttgttctttacctattactttttggaaaaaatagcccttatcctctagcttatcctctaggttttcaataaatcataaagcatctttgtgcagcatcctaactattttccgaagcgacaaattcgagaccattaaaacgcactttaggagtttcatttgttcaatttaatgaagtatttgtcaggcatcgccagtgagcacccctcccccatctgtcatcccttttcaagtggtatctgggcatctgggaggttggggcactgtcaaccacacacaaacctccaactcaattgactgctctacttattttttgccaagtcggacgctgcggctgctcaattaagtgactcgaatgtgactctatctccaagtatttccaccctttccaaatgaaagtcggaaattaaaagagttcgtaaaacacacactctagaatagatacgcaccatgtaataaacaagcaatagtatcttagtatgaagaaaatataatgatcgattctcagtcaatatattgttcacctattggatttaaacaaggcgatgaaacttaactttttagaatccaatatatcaaataccatacaaaagtctagtaatttccgaactattcattctcgacacacatttgtcttgtaactttttctcagtgtagatacaaacaatcgatacttgaaatgacattcgaaacaacactttggcataataaaatacaaataaaagggacatcgactgcgatacccagccgccaattgattgacgaagtggcaaagatccggcgagtgggaagtggagagtgccgggcaataaaagggattgataggcggtcctaagcggtggcgaggtgtcatcctggcagaggaaaaggggtacgattggggaaggggtgccatgggatccactcgtctcgctgtcaatggcaatcaacagaggaatcacatcccgcacacacactccactttcgaggagcgctaatgctgatgccgaatgcttgtaaaaagtttttaatgaccccggctgccgtgtcaccatggccacaaaactgaacactatggcgcccggaatcgaaccgaatcgaggcggatcgaatcgaattgagtatatacaggggtgcttggcgagtgcgggggccatccgcacttgccaaagcaaatctgtgtcagactgttgctccattactccgctgctaatgaacagcttaagcagcatttcaatgggaacattccctcgtttgcaatcagtgcagtcgttttggatgtttttcggccttttccaggcgttttcaaaaagaaaatccaaggccacatacgaacatggtactcgcctaaaaataacttttagtggctattgttatattgtgatacatcgaagaatacaaataatttcccgctctaaaatacaaactttggaaactactccattattttaaggaatgtataaaacttgaaattggagccagaaatattacacatctctgactggagtggatttttcggcagccggcgaaaggggtgagaaatcgattggagttggggtaggaattgaagtgccgagatccgtgactctttggagtgcattgttgtaggtcttttccagcccgaaatccagagcactccgattcacggcattgtgaagatctgcatccgcagcagcagaaggaaaatctgaggcatcagctccctattaaatggaggcagcgtcgctaatggatggggttaatgggctggggttggcggcaaagtggtgtattagtaaaagtgaattagaaccaaaaacgggctgctattgttctgatgtacgacggactgtaggccataaccattcgcccaaaaagaagtgtggatataaatcagtgcatagaaagctgtgcggattagtaataaatttaatttgattttccgggagatcggaatcgggggtgtggatggttttcatggtccgtcgactatgtaaactcgtttccatcaatttatgctctaccgaaagtgcataataatcagggacatataaataccataaatcccatgagcacactgatggtaaaccaacgctggacattcgtaatcaatttccccatttgctcactaataacaaaatgcaattcaactataaattcaatactcacttgaatgcgtcaaataaaaatacatttcggaggtcgaattgatgtagactatagaatacccaatatttatacccgacacctgttttaaattgttagtcagtaaatgaaaaccaaatgttgaaccatttagtaattgtttaagttaatataaagtaacttggattaactaattaaatgagaaatttgcaggcctaaggctttggttgatttatgggttttcagccgaattattattccgacagtatatgtggaacttcaactgacgtgcaacctttttccccaagaaccttgcacagatgcaacggttttatcattgaaatattaattgcaaaataatattgacaggagggaaacaaattacaaataaaatatgtaaatttcctgtggttcagtacttgcgaaaatgccagcggcatacgagtgggcgctgttgggccaaaattttcggccaccaaacaaattatgctagtcacgcaaaaattgccaaaaggtaaatcgaattcgcaaatcaggcttagacccgcgtctgtatttgtttattattaatgcaatttgtaattatttgtttcggtggcgtgactgccagcatgtgagcccacaatgcatgttcgcacacccattcccaacaacgatttcgtctgtttgccggcttgtttatttgtttgcttgccacagccataaaacgcaattatcgcgtacaaagaacaaagctgggtgcaggaaaagtgcacatctaactatatacgagtatatatactcacgattctaaccagaagctaaaatgtagccagcaaaaaaaaaaaaaagaaacgcagagggagtatttgcaaaagctggaaaagttgtcgccagcatcagagagttccgcattttcgcatttgcgttgccataattaacttattttgtacattagcaacagattttgtttattaacgcatgtgcgcttgctttcggtaatgcgataccattcacgcacccccgggctttaatgttttaagggctggggccgcaggactactataccacggggcgtatacttatcttttggcattgcaaagtgagtttatttgttttctgctgtggttctttgggtggttggctggtctggtctggagggtcggtggcttggcattttgtgcggctgctgtcgcataatttatttatcattagcaaaatttggcaagcattggaatgctttcttcactctccccccccaaagaaaacttggctgtgtctgtgcgtctctgtatttggctaaatagttgaaataattaggctcattagaagttttgtaggtctctggctacagagtgctgccttgattgacaagtgcaaattggtattaatgcagaagttcgggaaacttcggaagccacaagcaaaagggggagctttgaaccgagctcatggcgattattacgaattaaattggaaaattccacgaataaatgaaccagttgaaatgaaaataaaggcaaaattaatgattgttcatatatatataaatatatatatacccatctaaatatacattactgaatttaaatctatttctttaatgtaaacacaatttatgtacagagttcagaaaaggttgaggggaaaatattaatgcattcctcggcattgttgtgatactagtctgagtctgcatattattggaaaaagaaaattctaatatttaaactccatctggcaatagttcacgtttaattaagcaacgttgccaaaaaaatatctggaacaaatcacgacgacaaaatcgcaactggcgcacccaaaaataccacacttttgtttcagttttttcagtttattctattttcactttgttttcctaggtatttctggcagtgccactccctccgaaaaacaaaaacttgttgttcgcagggtccagggaaactgtgtgtgcgaaatgcaacagccgcaacaaaaacgacataaacttttaacaatagcaaaaccaaataaacaaaacgtagggcgaaacaaagggaaaacactaaaaactgctgcaggctataaatctgcaatgggttggagcaggggatccttctggtgcggtgggcattgggtgttggtgggtggtttttggccaaaaatgccgccgggtcctttgcacagagccattcattcacacatacaaagcaaacactcacacattacggagaacgcgcctgctgcgtaaataactaataaggctcggggataaatttcaagtgcaattttgtgagcatcgtaaccaaatacaactcgaaacaaaacaaaaacccacgtccgccggctggcgggaaaactcgcacacaaaagttaagcgtactggtttggatgcactgaacacaaatatttgtagaacattaggggcttagagctctgagaaaagctcattaactgcctttcttcttaagtaaaataatatttgaagtggaataccgacagtgctttaattgaaaataatattatttttgatattaagaacgaatgttttcccacagtgcagtacatctgcgttttgtgtgcagcacgtttctatgacttaattaaaattatgaatgtttttgccactgaatctctggcatgaccaaaaaccagccagaaatggtggatggcggtcggggaaacaggaaacgggaaaacggacaggatgtccatggcaaatgcgctttttgccagcgagccaaaataaataggcaaacaaacaactagtagcatcaatttatgcataaatcagaatgcacaaaaaccatgccaaattgtaaacataaaacgaaatggatacagtccaccccttgcatttgccacacaacccattgacaccacatttgtgtgactgcgtcgagagatctagttaccaaaaatgaaatttccgaatgccattgtcgcttatcgcctgccttaccattttggccgattttcccacccttgataccttctatcctttttcaaaatgaaaattgcatttaaaacagcgttgagattaatttcctaatcaaagagagagttgtgtcgcaccttttggcgtgggtaaattcattttaccttttattgcaatgtagagttggcgttaaattggaattgcgattgacaaatattgaccatcgactgctaattagccagctttccagttttatattggtagatagcgatagatttcaacccataatcaaaaggattcgttcgtgagacgtgacaggtgattgctttgttttcagggcatcaggtttttccatttccaccaaaagaacagccaacaaacgacttgttgaaagacccgacaaactgttggctcgcaaaattgataccagcagcaaaatagaaaaagcccaaaaaagaaaaacagaaatatgaaagaaaaaggctttggaaaaaaaaagaagcgaagttgtgcgaatttgggttcccataaaacagaagcacaaaaatgttgttcaaaaaatagttggtacactaacgaatttttcgtactgttcatatttcagttacagttcatttttagaaagacacaaaatttgtttaatttatttttaattcgaatataagtaagcatagtgcaatttttttacaaaactattttctattttcttcctttattattttcaagcccaaaaccaacttcgaaagaaaaatcatgttttcaatccaaatttccatataggttggtgatcatggacctattccaaatcctattttttaaatcaagacttagggtaccagaatagtgctccgaggaaagcgatagcgaagtcgatgaatggcatccaagttttgtccctgcagcggacacgggcccagggggcaattggaatggaatggaatggtcgggcggcgggagtggtggaaattgtggcggggctggcccggacccagtggaatgggaatggaaatgggcagcggatagcgcaaacggtcaaaagttccattagtgtcaggccatgaatgctatttacaagcagttcgcgatgcggcatgcgagataagcgctctgacgctccgactgggccaaatggaaaaactgaatgaacaagaaaagcgccgggaaaaaatatacttgttgggggaaaggaaaggaaacccagtcggcgtgcacacacaaaacgcagttgggcaagggggaaaaagaagaaaaaaaaattgcgaaaaacttgctgaactaaaaatccattcggcatcgatgctggtgccgagataacaaaatgtttgctgcccagcctcaattgagtcgtattcgcagtcttcggcgttccggcgttgcgtatacgccaagtgagcagggccagagaagctgaaaacaaactaaacaaatacgaaccagcagatgtggatcggtgcactacaaaaattattgtcatgttcagcactacacaagaacttgctaaacagaaatttaaaaggatgaagacagtatactattccacttaatgtattgataagcagtaatgagttgtaattaaaatccaaacctaatctagctatttgtagtccaaaaaattggttattattaacttgtaaattattgtttgtgtattaaaatcctaaagaaaatgtttgcttaagatatttttatattgaacagtccttatttgtgggacagtgtaactttctctgcttaaggagtagagcaaattaaaatgggcgtcgactattcatccgagtaacttttgagcactgcaatgtcacccgttggaaaataaaaacacaaacgccctcgcatgcatatttatgtttttaggagtgagtgtttgccattttcaccactccccccagcccgtctccagtttcgcgcaccaagccgtctgcacaatatttgcacagttatcctttttgttttatttgcttagcgcttctgtgcgaagcggagaataacgaaagaccatctcgagaccaaggagcgccagtgcaaggataaaccggtacgatggcggggttaaaggacgccgtttcggcacatcatcatcgccatcatcatcagcagcagcgccatcgccatcatccactcgagctggcaacactcggattaatgtttgttattattttttcatttatcgcatatatattcctattgtttgccctgtccaatgtctgtttgcagaaagcagacaagaagtgtttttccttcgtttcatatatatttttcttggcttgcctcctcccagggggtagtgcgagttagtctggattttgttttttataaaccactgccgagtggcggcgaagttcctaaaaaatgtacaatattgagtggtaaaaggctggagcgcaatgttatcaataacgggcttgtgctgttaattaaagcctataaaaaatggtggattaaacatttgatggtatcgaatttaatggcaatctaaattagttagtgcctctggcggaatcaattgtattataatgtacacatgtaattgcgcagtttttataattccagcactttcatataagttattttaattatttgtttttttttatttttaatatattttataaattgctgaagggccatggtcttctaaaaaaaaattaatcaaaatggcaagcgactagcaatcaattaaaagcttgcgatgttaattgaactttttaacacacattacccaaacgattaaatactgtgtaatttaaataatttcgattttttgtgtaatcactcgattggatatttgattaaccaacacataattaaattgtcattcgtaattgaatttaatcatcaagcaattaggaaatgagaattgtgaaatccaaatcaaatccccagcccaactcggccaacggctcatttagcagccgtaacacacaacaaattatagttggcgttttcataatcagcatttttcatttcctttggcgaggtgtgccacgccccgtggacaaagggaattttaactaaattatgctgctcctttgttgttaggctgatgcccgctggacacgtcacgaacgggttggttttgggttcggtctcggtttgggtttttgtaacgcttatgtttccgatttgaatgtggctttgggttgggcccttgccaccacccccgcccccccgctgtttttccttcgacgttgtgacaaaggcacagcgaaaaaaaaaaaaacaaatgtttctcggagtccaactttgtttccagaactgcacattagagccgggtatcgtaaaccataactagcattttcggtttcattagaggcgcttttcctagtttttcctcgccacggctcggctcgctgtcccagccccctttgactacccctttttttcttgtcgactgcactttttgccagacatttttccagtttgggtaccgtattagttctttccaaggcattagtttagtgctgggcgtgtgcgggcttttgatttatggtctcgaattgtgcgatttgcgttttttatgttaattaaattgctttgcctcggattggatggggtcgccctgccatttgtgttctcgctgctgaagtgcatgttcgccgatgcctgactaagtgcacttggccatcctaccagctagctatttcaatcctggccaaaagcaaactgacgcacgaaccaaccgcttttgacccgcctgagcaaatgaactgcatcacgcttattgtcactaaatgctgttgacccagcaggaaggcttggctgctcctgttcaggtcttatggtcttcaggtcctcctttcacgatttcagtccagttgagttgggtagctgtggcagttattagaaattccattatgcatgtgtatggggtgcccatgtgggctgtgtcaacactgacggtctggattcaggactctggacaggtggtggctcgtcatttgaggaacactgcaatttaattacattcagatgaacatcacaaaacagctaaaagtaaattacgtagtcattactaataatactgttaaaactatatttgaaattagttcttcctaattcattttaaggaagactaacattcgttagtgaagtagacatttttaaagctatgctttccgaactctcgagacctcatttcaaaaataaagtcgcattttcctactacgatttttctcagtgcgccaatctcttcccgagccacccactcccttccgagaacctgctatttctggtgaatgataaatctttcaatgagctgggagtcgggcaataaggacgctggtgggaaaccgaaacagcaacaggagcggcaaagtggttggggggagatacatggcaaacaagccaaggagcaaaacgggactcaccgcctccgtttccattggaaagctgcaacaaaagcctattaaataccgagacaagccacccacacgtacacatgaatgcacatagatattacatgccagctgctggcctggtacttgtttgttttcggcctcccttgatatgaaagcgactctgcaaattattatgctgtgatattcatatcgacccactccaattcgccatcacggttgcttgggtcctgccatgttttcaggaccttaggaatccgtaagcaagcgcagtgtttgactagccattccaaagtcgcaacaaaagagaatcgatcagttcaaaactaaagctaatatacagattccaaaagcacaatttagatcttattttaggtatcttgcgtaacaattaaaaagcttacttaaaaagtggtaagcttcagataatacttcatcatgtttccttatttttatcaaagttgaatagaggtgcattaaattttccaactttcactgcagtttctgcaaaaattcccaaatcgcctggcaagggcggtaagaacggcaactaatttcaatttggtatcacttgcggcttcgacgaatgacgcactccggctagattggaaaacaataagaacagggcgggaaagtgctgtgaaaagaacgtgaaaagcgtccactggcacaagaggtggagggcatttgctgggaaaatgaaagcgagcaggacaaagggaatggaaacaaacaagccaggtgcattgatatttagcaggtgagcaaatattcaatccagaacgatattcctcactccagcaaaggtgggctgcttgttttttttctgtgtccttactttggctgccatgtaaacaaatcgcaaaaggataaggacaaggcacttgtaagctggcacttagcagaatcgaacaaatatgtgacttttgcaaaaactttttacctttccaactatatctcgagtgtgcgtgtggatttatagacattgtttggctgctctctgttgcttttccccaggttttccccagcacccggccgtgtgctatgatttcttgctgcaccttcctgcacctaaacactaacaagcaaagttttccgagcaataagcaagtatttgcggttgcatttcgccgcttctgctgctgctgctgctgcttttttggttcggaaaactgggaaagctgggaaaactctcaacgggcgggatccggcaactacactttccaattttcaattggcaaacaagcggaattttcgattccagtgagcaaatatttatgcggctagcaaggactttaaggtactgcttaacttaaggcaggtgttcttgcaacgcaatacctgcacagattaggggtatataacttttgctgaggctcatttaaaaaagtgcaggggaattttgcccagaataaaggcacacaaaaattcaacatttgtcaacaagattgcttgggattttcctactcttgcagagtaatataaagtccatacaatgcgatataatttcccggccttctttattttgcaattttctgttgcccaggcaccggtgtccctggccaggacacagaggcggtgggccaattatcctggcaggccccgctggtcattaaggtcaatgtgcaagaattcattttacagcctgcaaatagagtaaatgttaaagggcagctcaacatcggaattggcataatgaaaatcatgctgattttccctggcattttccatgcagtcgccgaagatatcgcccgatatgcaaagaactcccgaaggtaatgaattacgcacagctggcatgtagaaaaagaatgaaaacaattttattttattcgcctcgcgagagatttacaaggaaccgaatccttaccacgcgttccacggacttttctcggcttttcccgcctttcccgctttcccctcattcaccgcccacttctcacccacaaagggactgttgggaaagccgcaaattatgtgccattattcttaagggcagagccgcatgaaatgtgacccaaataagatataaaaaatttttgagtgccttgttaggctatgttggaaatggtggcaaacgcttgtaaaacaccagttccagagcgggatagcgccattgggaccggtgtgggttagagggagaggcactccactgcctgtgcgccttgaattatgctacgcatttgttgacaaacgactctgaaatgggcggtcataaagttgccggaaattggcgttgattgtttggtaattaataaaagttggcgagcaagcaagaaaattgcccaagtaagtgaaggtcggccaaaactcggacccgaagtccataaatctggctaagcgttcgacttaaataaaaaaaaaaaacgtaccctcaatgacttataatattcaattttagtttgacactctattggaattttatttttcaccaccagtaaaacacagttgcaagctatcttagtttcggcttacaaatggacatcggtttttagtataatgttttaatttagtaatattcgtttacataactggcctcgcaaaattccaccataatctatcaagctttcgcagtctgaaaaaacatttataaatcatttaagcaccaaatatgacaatcaattgacaagaaacacgaaccaaaacaagctgccagacattttaaatactcttaaatgttatttcaattctaatgtagatttgttgactttccaataaaatagtttaagagcgccaatgatacaaacagtttaaggaattatattgatctattggtaatgttttttggaaagcttatagaagccaacatattgtcgcgacgaccccatatgagatatgagagtatcgaaaaaagttgaccaactaaattgagttttcagcatatttgcatgccattttaagcattttggccgccggcgaacccaacaccgcgaaaaccaatgccaacagcaaacgcctgcaactgaaatgcaagcaattgcggtgcagttaagcgccggattatgtgttatcagtgtcgcaggaaagtccgctttcggacaatatttcaataatttattaaaataaatacactaaattggaatccccccggctttgcgttcgcacgtaattccatcagcgttttttcacaacaccccccccattcaatcttctcgtttcagagctcgtcgaatgcgcgctgcgcaatgtcaatttaataatcgaaccaccggcagtgcgacggggccagcatgtggtgctgcggtgcatgtacgacctggacggggctccactgtactcggctaagttctaccgtggccagctggagttctaccgctacacgcccggcgagtttcccaatacgaaagtgtttccattccccggcattcacgtggatgtaagtgtgcattttaattacaaagtatctattaagtttcgggtttgcaaccgaacactgagatacactaatttaaatgattttaagatatgtttagttgaatagttggttaatagtaaatagttggttggttaaagcggactatttagtgagtaaaaagttggataaaactacaataacttgtgtagaaaatggattttccaggatcgccagacgttgcggatttctgagccctgcccttttggctggtcactgcgactcagtcggtctgaaaggaagcaaccaacgaggctccactttgatgtccttaattgcgcgcacactgcatttatttatattgtatattttaaactttccgctcatgcatattcagtttggcagttttattgttattggcggttattcaaaaaatgccaggggacacctggccgccaggatgcctgccgtcggaatgccagcttttgtgggcgctatcaacgcgcggctatctgcggcaaaaatttcatttaaatttttgcattctgcgtctgagttttgtcgcccacctgcaaaaactgcaatttgccgagcaaagagtgggcgtggctgactggagatgcggacgagctgaggacgaggatgaggacgaggatgaggtcggagaattgagtctcggatggggtaattctactttggctagattattgaaaaagtttatccagccgacggtggggtagtgggagctggcaggtccctgcaatttcgttgcttcgataaagttgctccgaatctggctaaatatttcatcaggctattgagtttgtgccagcgagtttatctttagtttttgtgtgtactctcctttttattttatttgggtgcattgctttctttttttttttagagttttgtcatcgaaaacttttattttacctagccgaaggcaatttttgtcgttccttttgctctgctgtctggtggttgagtttgtatttgtttgttttttaagctgttttaataaatttaagtgcatttctttgttggactcgatgtcagattgcggacagctgagcgatggcacgtgggtgtcgatttatagtttttccgagcccggcataacattacttcttagttggtaaaaaggaaaacacaaagtactttagaaatatagtaaaactacacagagcttgtttgacatagtaatagttcaaagtgtgttctttgatacgcagagacttaaggatcagagaaaggcttagatatgtaaagcaaactttcacattaccattatttgtgttgaattgcatatatcgcttgtattaaatcgcgcttaaatactgcatctgctcttctgctcaacaggtaagcagctccaatgccacccaggtgctgttgcgcaacgtgggattcggtctctctggcaacttttcatgcgaagtgaccgccgatgccccgctcttctcaaccgccaccgcagtggacaccatgcaagttgttggtaagtctggctctaagctgattcaaccaaattggcctaaagtgcgcttaaaagctttcaaaggagcagcgggcgggcgagtgagtgtatcagctatttcggctagcctttgacattactcgcctttgatcgtcggtcagcgttccgtggctgagttcagtatccacagtccagaatcccaaatcctgtggctgcttttcgaccgggagataaagtttttcgccttcttggcaatttgtttttggccggggccaaggtcgcagcagatgtttctgctggttggcaaagttttgcgctgaaaattgcgtcattaacaggccatttcgtctttgccagataagcgggtttgtcggcaatgaggcgctggttcaatggttaggtggtccccggtggttctggttggggcacctgtctgggggtcatttggtagtcttacctgtgctccacgcatttcacggccttatgcgctttaaatgagcgtggagccgcgcgctctgaattacggatttaatcagcgtgccagggtcatgaaatccaatgagcgccagtccgtttcggcttaacaattatttgccctttgcgtagcctttgccagctggcaaaagtgatacactatgaattttatttggctaaatatatacagccttcgtaaaattcgtaattttgttagtttaaaatatttgaaatggaatttaagcttctacgttcttcttcaaaagatttctgaagtcttccatagatataatgataaaaataaaatattttttatacgctttgtcgagcagtgtgtgctgctccttacggaacctttttatccatgtatccaagtgcatgcccttcgatgcacaacaatgtggcctccacttgtacttgttttgtgtggggctcggcagccatatggggcgtatgcgtaatgcgacctaaatcgatggcgcagcttcagcgctcgtcggagttaatctttctatccgcttggcctcaagcatttgagaaatgcgctccgacagctaaattgtgctttattcgctgatttttatgccacttgctgggcaggatttatttgccacatccccgcgtgtcctgaaaccaatcgagggtccttctttccgtggg

SEQ ID NO: 34526 - DNA, 648 bp, DROSOPHILA
atgctggagttgcaactttgcggagatttgtcagccggcgacttgagcgaaattcccaaaatgggacaccaaagggccacggatacgggacatcgccagatccggagccacagaaaatccgactgccggacttttccagccagatgcctcctgctgctactcggcgttctacttctgagcatggagctcgtcgaatgcgcgctgcgcaatgtcaatttaataatcgaaccaccggcagtgcgacggggccagcatgtggtgctgcggtgcatgtacgacctggacggggctccactgtactcggctaagttctaccgtggccagctggagttctaccgctacacgcccggcgagtttcccaatacgaaagtgtttccattccccggcattcacgtggatgtaagcagctccaatgccacccaggtgctgttgcgcaacgtgggattcggtctctctggcaacttttcatgcgaagtgaccgccgatgccccgctcttctcaaccgccaccgcagtggacaccatgcaagttgttggtaagtctggctctaagctgattcaaccaaattggcctaaagtgcgcttaaaagctttcaaaggagcagcgggcgggcgagtgagtgtatcagctatttcggctagcctttga

SEQ ID NO: 34527 - protein, 215 aa, DROSOPHILA
MLELQLCGDLSAGDLSEIPKMGHQRATDTGHRQIRSHRKSDCRTFPARCLLLLLGVLLLSMELVECALRNVNLIIEPPAVRRGQHVVLRCMYDLDGAPLYSAKFYRGQLEFYRYTPGEFPNTKVFPFPGIHVDVSSSNATQVLLRNVGFGLSGNFSCEVTADAPLFSTATAVDTMQVVGKSGSKLIQPNWPKVRLKAFKGAAGGRVSVSAISASL

SEQ ID NO: 34528 - DNA, 2737 bp, DROSOPHILA
aaaaaaatattattttccgatcgaagtttttactctgtagctaagatttcttcaattttttaatgttctttcactcggctgcattgcaagctaggtttataaatatgatggtcttggtaatggtgtttttttttttatttgaagggcatgtttccgtcgggccaagtttgtaactcatttttccatccttttgtgtgtttgtgttgtgctcagacgccgctgctttttgctgcattgcattaacacagataaagttccttgatacataatttccatgcatacagaagtgtctcccagcacatgtggcaaatcccctgactacccagatactcctaccccataacccccctggaaaagcgctcccccgccgccactgctctttggcaaactgtgccaacttgcaaatggcgacaagatgctggctggcaaaagttttttccttctgctcggtccatccaaacggccaaaaggagaagtacaaacaaaagtattacgagcgtgagggctaaacgttgccaaatgctcaggcctctcctcgccgcagacccctcgagcgccttaaaatatgcaaatgcatttgcgagcgtaaaataaacaggcgcagtctaaaattataatccccttgtatacgcttccccgagcactgagaaaaacaagaaaatcaagattggagtttcgaaaagcgaagaatttaaggaaataaacatagaaataaaacaaacgtacatagaattcctccgtgatcggaccaatgaaatgtttttgaataaagttaggcttaaagcatcttcaatatccttaaactttagttcgttatacattttcagtgcaagaccaaactgctttgaataaattaaactaatatgaaatatattcttttgtttgtgcattatttgagtccaaaaaccaacttgctaaagtaaaatcttgcaatatatttatatgagactaagcacatacggaaatgcagaaatataaataaataaagttgtaatgtgtgatgtttttcttcttacagataacccatgtggacaccgagtacattcgcaccattgataatctgattgccacgcggatctcgctgaagatgcaattgcagggcattcacttttccagcgtgaatccggccatctacaataacgtttacgggctgaactcggtttacgggcatggaggaccggtttatgccccgaattcgaatcctggcggattacttttgcgctgctcggcgcaaatcggggatctataccaggagtacaaggaaatcgagctgggcactccgcaaaaggatccggtaccggcacgtggtaagtgtacgatagccgccagtcaattacgccagatccaactgacttccgtttccggtttttcgccgtctcttccgctttcccgcttgcagtcacgctctcatccgacacgagcttgaagaactttttcagctcgtatttctcgacctcggcatcggcggcatcgcgactcctgcccggcgtctacatggcgccgcttataatggccatgctggctagtttattccggctaattgaggctgcatttgagccctgcgatgccagcagccaggatccacagtcacagaccggacattcgatggaacattccaaggagcgaagggagcccaaggagcgtccagctcttgtgtccagctgcagcgtctccaaggcgtccagacagcaactggcctggccaggatcacggacagaaagtctgcgtctggcctaggcgtgtgttacgagttagttaaagccctaagtaattcgaaatatattgggggagttcgctagacctgggcaattaataagtatttaggtgatcaaaacttgcgatacgaagggcttgaataaaacttaatcacgacacatttgaacatacttgaagtcattctagcggtaataaaccattttagaaggccagaagaactctcagtgagatacaaattcattagccattagttcaacgtttattatttaaacaggtctagagaataccctcatttcgttgatttcaagtattttcgtttgatgactgcttttcatgttaactcttattttacaccaaaaaccacactttgagatgtggcgtctactagcgagctaaagagtaaaaacaaattaagtttaagcaaacatttataaactagcctagtcatagacaagaatactggaggttggacagcagaacagaagagtttaaaacctataaagcaggacatacacaattcaaatataaatgtttacacgaacgaggtaaagtgaagggagaatatgctaagtacatgaaattactgattctacttttaatgtgcaaaataacacaaaaataaacagagcagcataacaaaccaaagccagaaatcaaaggtgtgtatccgagggaagggaaatgtgtgtaaaatatatttaatgaaacatattaaactaatttaatttaaagtaaataaatcaaagccttgtatgggcatattgtaaatggtggtgaaattaaataaaatgtgtgttaattttaaaggttttcggacttttattggaaatctgaatcaacgataaaagtaagtagaaaggaaaactagaaactgaagaggtcaatgtgctaactctaagatattccccattttcctccaatttacttaggttttctgaccggtgacccaaggcattttccgattcaacaaattttcactgttgatttttggcgttaagaattcttacccaacatttttgca

SEQ ID NO: 34529 - DNA, 645 bp, DROSOPHILA
atgtttttcttcttacagataacccatgtggacaccgagtacattcgcaccattgataatctgattgccacgcggatctcgctgaagatgcaattgcagggcattcacttttccagcgtgaatccggccatctacaataacgtttacgggctgaactcggtttacgggcatggaggaccggtttatgccccgaattcgaatcctggcggattacttttgcgctgctcggcgcaaatcggggatctataccaggagtacaaggaaatcgagctgggcactccgcaaaaggatccggtaccggcacgtgtcacgctctcatccgacacgagcttgaagaactttttcagctcgtatttctcgacctcggcatcggcggcatcgcgactcctgcccggcgtctacatggcgccgcttataatggccatgctggctagtttattccggctaattgaggctgcatttgagccctgcgatgccagcagccaggatccacagtcacagaccggacattcgatggaacattccaaggagcgaagggagcccaaggagcgtccagctcttgtgtccagctgcagcgtctccaaggcgtccagacagcaactggcctggccaggatcacggacagaaagtctgcgtctggcctag

SEQ ID NO: 34530 - protein, 214 aa, DROSOPHILA
MFFFLQITHVDTEYIRTIDNLIATRISLKMQLQGIHFSSVNPAIYNNVYGLNSVYGHGGPVYAPNSNPGGLLLRCSAQIGDLYQEYKEIELGTPQKDPVPARVTLSSDTSLKNFFSSYFSTSASAASRLLPGVYMAPLIMAMLASLFRLIEAAFEPCDASSQDPQSQTGHSMEHSKERREPKERPALVSSCSVSKASRQQLAWPGSRTESLRLA

SEQ ID NO: 34531 - DNA, 2507 bp, DROSOPHILA
gggctagtatatggatgggttgcatggtttgggtggtaaaggtcgacaagcgtgtttattgttgtttatgtgccatgaggctttgcccacaatttgcagtcctcaaactcccctttgattttcgttattcgtttcgtttcggatcggttcggtttggttttctgtggggcttttgtgattgcctttgtttggcgttgttaaaaaacatttatgcgccattattaaaagcaatgcgacacccacatacacacacacacacacgcacagacacacatgttgcttattgttgtttacaaggttatagcatttgattattgcctgggattaagctataattgcgtatcgcatttcggttatttgcttccattccacgtccgagaatcggttaataccgatgggtgtttgtgtcgttggtagtgccaaagatatcgaaatcattagcggccgcaatatgttttgatgattccagcaggatcccttaagcccttacatttgccctgggctccgtataatgtattatcttgatttagtggccgtaaatgtgccttcttaaagtggaaaacctctaaattttggatagactcaatcaggaaaccgcacacactgtaaccaaaatatccctcatatatgtactatgtgtgcagagcagctgaaattggtttgaaaatttcaggcatatttggcaacgggtcattaaatacggaaattgagtcaacaaaagccaaagacggcaggaaaggagcaggaaggatatatacaagccactaacacacacgcactttacccataaaagcaaatacagctggcgccattcaaatagcaccgaaatgagagatatctctagcatagaattgaaataatttgatacgtattaaattatagaaatttattgtatgtatgagacaaaaaagaatataatcataaatttatcttcgtacagatccattttctaaaggagttttgaattatatcaatatttatgaaatgatttttatgcttttcaataaattcacttttcaagccacagttattaccgatgctgtactaagcacatgtgagcaaaaggctgtatacacacaaacacccacaaaaaaaaaaaaaaacaacaagtcggaagttttatttttggcctgcttcggatcgttggcaaaagtcaagctatataaaagatgccccgaatcggtaacttgtttttgttgccccagccgcctggcttttgattatgtaactctcgatttttagggaccccaacgaagcataacagatgcaaacctcacgaataattgccgacaagatggagaaaaggtctgccttcgattggctgccaataacagaacaggagcaggacttctcgttcagaaaggacacgaatgcgtgtacatgtgtggccaacgagtgcgcgtatgtgtgcgtatgtgtgctcgagtcaaaggttaagctaagcaatgtgttgattgtgggtcaagcgtgaaagaggtccaagcgaattgaaattgttaattttgtgcaaatgctgcacttggaaaagtgatcacttattggtatctaagttatataaattgcatcacaagcagaactactttatcttcagttagatacaatatccgttctaatacaatattcttcatttgagaccacaattttgtaattaaactatgaatttttcatttaattatgtataacatttcaatcaattaaattctcaaattcatagaaaagttgtgcgcttcaagctggacgtgttctcagtgaattgctgatattttccggcttaggcgaatagctgaacacttttgtggaagtggcgtttgccagagtctcccgtcaacaacttttgggtcccgaaacttgcctgataaacaaagcagcctgaactagacaaccaggcgcaccaattatgttgtacaaggcaatgcgaatagcaggaggtacctcctgccttatgtcggcgaattactcacccacccacggagccgagtgggagttataattgaaataatttctggttatttagaacaatcagcacagcaggtgggtggcaaactttggttcggttcggttcggtttttggggctatggcttagttggggatagtttatccagcctcctaaaaatccatatatacgtacacattcacatttccgttgcgcccgctgtggctgaacaattgctcattaaacattggggataatttatctgccggcagagtacgttctacaacaaagtttagtttattccggtataaatcgttatatacatagagcatattgtggtcgactaattgcttgaggttttcgaaattggcatcaacaaaaaggtaccttattagtaaagctaccttattactgcataccgaataattgcttttcagaattttaaaaaccagttaagcgccatttaattttaaagtatttgcatatcagaaaatgtagtctagtatattaactagcatagttatatcaattgcttcgaatcgagccattaggttcatttaatgcaaaccgcaa

SEQ ID NO: 34532 - DNA, 425 bp, DROSOPHILA
tcaataaattcacttttcaagccacagttattaccgatgctgtactaagcacatgtgagcaaaaggctgtatacacacaaacacccacaaaaaaaaaaaaaaacaacaagtcggaagttttatttttggcctgcttcggatcgttggcaaaagtcaagctatataaaagatgccccgaatcgatgcaaacctcacgaataattgccgacaagatggagaaaaggtctgccttcgattggctgccaataacagaacaggagcaggacttctcgttcagaaaggacacgaatgcgtgtacatgtgtggccaacgagtgcgcgtatgtgtgcgtatgtgtgctcgagtcaaaggttaagctaagcaatgtgttgattgtgggtcaagcgtgaaagaggtccaagcgaattgaaattgttaattttgtg

SEQ ID NO: 34533 - protein, 68 aa, DROSOPHILA
MQTSRIIADKMEKRSAFDWLPITEQEQDFSFRKDTNACTCVANECAYVCVCVLESKVKLSNVLIVGQA

SEQ ID NO: 34534 - DNA, 3008 bp, DROSOPHILA
cctcaaaaggcatcacttaaacagttttcaacggcaaacagccttcacacggacggacacactggcgtacactcgaacaaaatgccggacacttttgtagggagcggaaaaggcaggcgaaccaaccgggcggatgagtgaataagtgtctcttgatgtttctgttgttgccatagttgtgtgtaacattgaaaactcgtttttaaatggcaatgccagtggcaacaacaatcgtaacgacaactgtggaaacaacaactacttggccaacaactcgccacaagcaacaacaaaaatatgacatgcacatgtccgttcgcttcgttcgctttcagtgtccgtttccttgcctcgcagcttccactgcactttcctggccaggccaaaaagcccagcacacttctcagctgcactaaagaaaaaaacgtttcaattgcatttgaaataaaattaccgcgcaatgagtcaatgcatgtgactattaccaaattagtatgacgccaatctcaataatttcacatttgcataatagagattattttcattttgaattttacattcaagtagtttttttctgagtgagctggtcaaaggattggtcactggcaagcagccatggccacaagtgcaacatgcttgcaataaccccacacacactgtatatgcacagacagaaaagggaacgagttggagaaacggacagacgacaaattgccattcatatgcagttgcacaaaactcgatgcgaaactctagcactctttttggttttttttcccttttgctgctgttatttctcctttcggcctgcatggtgcaacattattttctgacttgtgggaaaggactcgacgcaaagggttgagggagtgaaaggacgaaggggaggggtgtgtgtcggaagcggaagagaaaatcagttgcaactgcaattgctgctggaagctcaccatgaataatttaaatcatattttagctcatgtactggcattcgattagtatgcaaaacgaaaaaaaaactcaaaatattgtggttaaagtgggtcgattgatttgatgtgtatttgcagcaaaaattgtgtcctgcagtagaaatgtgcctctttaataaaagataatatataaaatagtcaatcgaagtcaagatctaagaaaaaagcgttaagcttgactcttttcttgacagcatctgttaatattttcttttgcttttgcgacaggtcagcacggaggaaacgcagtacattcgaacggttgacagcctgattgcatcccggctcagtctgaagctgcagctgcaggcgactcactttgtggctgggctcagtgcccatggaaatgggaacgggaatggtaatggcaatggaaatggcaacggcaatggcctggcgaacgcactgcacctgggtggcggcggcggaggcgctggaggcggaggactcatcctgcgttgtacggcgcaaattggcgatctctatcaggagtacaaggaaatagagctgggcacaccgcaaaaggatccggtgccggccagaggtaagcctcaaaaggataactgccgacagccacgaagcactgaaaagaaaatatttccgtaaacaagcaaactgatttaaagacgatttaaatttaaaagcgctcagcatagaatccctcttttcaatttgtttatctaactttgatctagtttcttttcaaattattatataaaacttctttaatttatctaatgagcttaagaaatatctagtgtttccaaatcgggttagaacctaaaaaaaaaatatttatttttatttcctaagtaaattatactgctattaaatctctctctgtaaaaatgcatttgttggccattgcagtgacgctgtcatcaggaaccggactgcgtggcttcttggagacctatttcgctacatcttcgggccccagcaattggcggggatcggcaggggtcgtggccatcttcctgcccactgcgttggcccaactaattactggtagctaaatcgggggccagtcggctggaatttggggacatggacttggaatgcgaacgtgtgtcggcttatcgagctgcgatggaaattagggagccctcggccgtaaactgcattatttatctgtatcgaatgcaatttaaatttatacacatgcaggacatgtccgtgtgattcccggttaagaccacacatgcacacacaaaccctacgtaactgtaaatatttgctttaatgatgtgaacggatacacttaaatgaactcgcactcacactcacgcgctcacatacacagaaacacgcgactaattgttaattaatggattatttaatgatgcataaaatattggataaaatattaatgtttcatttgcatttagcttcaacccaagcgaatatcaacttaatgtttaagtaatttaaaaaatgtaaatcgttgaaacgatagaaatatgaaaaacagaaaagtgtaagcaacagaaatgaaatgccaatgccaagacaaaaccaaaaccaaaacaaaaaaaaaaacattcaaaccagaataaacaagcgaaaataatcaaatttatgtgactccttattttgttgggacttagatcggtaaaacggtcgttttaatatgattatttatttcatgtgccaataaatcgttttctcagatgttccttgatctaaattttgaattcatttttggcagattgaagtgatatatttaaataacagtgccaagttcagctgcattcaaatgtattttcccatggaggaaaattgaaatgcaaaatattacgactttcctcattcgacgcgttttgtgcgcggtttcaagcgccacagcgatttctcgtaaaattttgttgcatagttttaggccgtcgtcgttaaagaactgcttgctgcgagggcatatcggcaagcagtgtatttaatgcaattaaaatcaaatatatacaggggccaacatctcgcaattttagctctgcactttaccgaaaagtcattaaaaga

SEQ ID NO: 34535 - DNA, 501 bp, DROSOPHILA
atgcaaaacgaaaaaaaaactcaaaatattgtggttaaagtcagcacggaggaaacgcagtacattcgaacggttgacagcctgattgcatcccggctcagtctgaagctgcagctgcaggcgactcactttgtggctgggctcagtgcccatggaaatgggaacgggaatggtaatggcaatggaaatggcaacggcaatggcctggcgaacgcactgcacctgggtggcggcggcggaggcgctggaggcggaggactcatcctgcgttgtacggcgcaaattggcgatctctatcaggagtacaaggaaatagagctgggcacaccgcaaaaggatccggtgccggccagagtgacgctgtcatcaggaaccggactgcgtggcttcttggagacctatttcgctacatcttcgggccccagcaattggcggggatcggcaggggtcgtggccatcttcctgcccactgcgttggcccaactaattactggtagctaa

SEQ ID NO: 34536 - protein, 166 aa, DROSOPHILA
MQNEKKTQNIVVKVSTEETQYIRTVDSLIASRLSLKLQLQATHFVAGLSAHGNGNGNGNGNGNGNGNGLANALHLGGGGGGAGGGGLILRCTAQIGDLYQEYKEIELGTPQKDPVPARVTLSSGTGLRGFLETYFATSSGPSNWRGSAGVVAIFLPTALAQLITGS

SEQ ID NO: 34537 - DNA, 2123 bp, DROSOPHILA
attaaactgcgctacggtaatgtagttatatgtatataaaaaggtagagctaatctacgattcctttgatggttctccccaggggcagatggagcttgtttgcaattaaaagctgatattctttgtcgtattatttcatataattatatacatagcttacaaaaccgatggggttaattttatggaaaaattaaaggagacaagtcctggataggctatgttatggtttcaagacactatactgtacagtatgtataaagtaagttgaagttcacgaaatcccatgattgtcaatcttgtgaaaggttcagagtcaattttaattttaaatacatcccccagagcgacctgccagaggtaaagggagaatttaatattctgggccaagttaaagccaatttaattcactttcagcctccatcaatctttgttatgcccacagaagcgaaacttgtttgcttatttgctcggcgagcccagcgtgaaaatatttgtgcaattgctagacgttcttttaggggccatcaaaatataatgtcaaattcacgcatgcttaactgctccgacttctggccaatggggaatcgtatctgtatctctgttggtttagtattaaaactaaagtacgtcgtaagttgtcctttcaggctggtcaccgtattttggtttcggtggcggataaacgcgcttttatgtgagccgttatgaatgcccatttcatacgccgacttgtttatgtttacgcgaaaatattttcgtttcatttttagtacggctccctgagctgccacgcccccgcttccggatgttgacgcagcccttaatcaaacagcgggcttttgtgcgacacttacgtataaagtccgatacccgatgcccgatgcccaatgtccgtggtgagccagggctatatttaacgcacttgtggcttgtggcctctggaccacgatctcatctttcgggcttctccttttgcagctcgcgtatgccagcggccatgtcaatggcaacggcattcaatcaatcgccacagagtcgacacaaagcccacgcccagcaggtccccgtgcttgatgaatgagtcagtggatccggcgagtcctattcccagaatgacggccatggcaacgccagctgcaaatacaatcgagtcacatgtccagccgcctgagttggccaacaacaagtggtggccgtgcactgaatgcccgagcaaacaaaatcataaagggattgcacggggatcacagagcgacctatcaaatggggctacatgacgagtgggagtccgtgaatgggtcaccatatcgccctgacattattatgccagctttccgctggtctatttgtgggtgtgacatgaccattcaagctttttgtctcaggtcaacgaggtgcctcgaattgttattcagttgaccagaccttaactgcaggcaaataaatcatgtttgcaaatgcccatttatgggaaggtaaacagatagaaatatagaagttctctatcctgatgttatgttatttccatatcagtcggccatttttatgggcattgaacctattatcctaattgtctgtatcgcgtatacgtaaattacgtatacgtattatgcacataaattctctgttataacgaaaaaatctagaattccggttcctcacttaaagttaataaattttgcttgctgacgtacaacacgtagattcacttaaggtcattgcaatattaatacggcattcattaggtgaattgccttaagaatcgattggctttagacgttttatcaatacgccgagcggtttccttaattaaatatttagacacgacccccattgaggaattttgcaatcaagaagcacgcgccattaattgctttccgttgcaagcccgttgcctacatcccggggcaagttgagcaggtggctggtggggcagggtataatgggtgcacgcacctgttgcgaaaaggtcacatcacttagctggcaaccctataccgcactataccccgactataaatggctgtgacttacctcagtttgacatttatggcgtggctcatgtatttgtttacttcatattcagcgcaaacgaacgaagacatgcaaattgatgtgctgat

SEQ ID NO: 34538 - DNA, 123 bp, DROSOPHILA
atggccgtcattctgggaataggactcgccggatccactgactcattcatcaagcacggggacctgctgggcgtgggctttgtgtcgactctgtggcgattgattgaatgccgttgccattga

SEQ ID NO: 34539 - protein, 40 aa, DROSOPHILA
MAVILGIGLAGSTDSFIKHGDLLGVGFVSTLWRLIECRCH

SEQ ID NO: 34540 - DNA, 5943 bp, DROSOPHILA
tcttggatttcagccgcttcacacgcgaccttcgctcgctgatggcttgttcggtgactgcaagagatggggttataccacgtccaactgtcaggactggaaggcacttaccctcgaggagctccacgtatttggcgtagcgcggcttgcgcaatcgcttctttttcgcctgggccactgcatccgtttgtgtgggtgttgttgtttgtgtgcgagtggttgtcgttgttgtttttgctgtaattgctccttcaatggaaaagcacatgttgcattagatccataacactttaccgattcgagttagttactcacctgccggcatctggcggtagagcatttgataatactgctgataatgcacgaaatttgaaggcgcaattccgcagccgcaacacactgttgttgttgtagctgttgttgttgttgggtgagcagtgggtggcactcgcagtgctttttgcacggccgccgcccgatttgcactcagcaagcgatacattccgatgaactgcagctagaggcacacgtttcacgcaagcaacggcaaattaacgcagattttggcagttttcacacagcatttgttgcataattacacaccgattccgaccaattggttgtttattcctgcacttcacgtgtggcggcgcaagcagttgttggcagcactgcttgctgggcagaacagctgactgcgatgccagggctgacgagaggaaaatactgcagaacatactgcaaattacaaaagttttaatttatttgccagttactacaaaagttcgaatttacgtataaggctactcttgtatggcaaatctaaataacagcgaacaaaaagtcaaatttcgtgtagcacaaaacctttaaacattttaaagcattgcgaaagagttagcgattttggtatttttctggtattcatttccgactagctgtaccgttgtcaacgacttttccgttaaaagtaaacacaattcaaaagttcgaagcgaaaatgccgcccaagaaggcaaagaagggggcggggccgaagaaggatgacgatctggacaaccgcccacagccgccgaatgtgttcctgtacatccagctggcgaacatcgtcaacatgcccgagtcgcagcatccgctggagattcacattagccagggcgacagtttgctggtcaagtgcgatgagcactacaacaccgatggcatcatagtgcaggaggagttccactcgaagcccacgttcacgctgattttccagcaggacaatgtggaccggataaaccatgccgccgacaatccccttctcgttcagctatatatgcgcgtccttccgccgagaaggattgttcaagtggagtacgagatgcttgaggaggagcaggagggagaccttgaggcagattcagactcggatttgactatgtcgacgactatagcgacgacattgctggacgatgatgcgtttgaggccagggagacggtcaagctggagctcctttgcgttggctatctggacgtgatcaagttgtttggccaccggcgcagcatgatctgcgaggaactcttcctctatcccatgccggatgtgcccaacgagatgcgctctaccatccacacggagtggcacctctacaccctgctgcccatcgccaagaagctgaccttcaccaatatggcgttcgtgacctttgagagcatctactgcctaaaggacgagtacgtgctggacctggagaccctgtgggtgcgagtgagcttccgctcccggatgcccggcgaccgaaacgaaagcctcattccgctctgcgagttcgggaatctggagcggaagatcatatgcatgcaggacaaccaccacgtgttcgagtccttccggcgcagcgtgaagccctggaatgtgaccgggctgaagtccgccatggaggttcaaaggcaccgactcttctcggagctctttcactccgagaacctgacgccggacttcgaggagattgacccggccatggacgaggccctcgtctgcaactccttccaccggttcatcctgactcagagtatggccgatattctatcgttcgccataacctgccagcagtatgtcctcgctgtggaggtgttccaaacgttcggggccgccaagccgcagaaggttttccaaggggttttggacccgtccatcatggcttatcctgggggtgaatataccatctatactatctggagaatccctttctatataattttatcatttattctgagcagtgcagaacatgagattcgctgtccagctggactacctcggaaaacttaagcccaagaaaataatgagcacgttcaatttgaagtctatggagcgtgcgaaaacccttcccacatttgccatcatcaaactgtgcctcctggccccgattggagagatctacaaggagctgaaggtgttccgggaaagcttcatccggcagaaccggctgctcttctgcgaccgtccttacagtagcatcaatgcgatgagcctggccgaaatccaaatggagtgctacgctcgcttcgacaagttcatccgcgactgcatatccttcatcatcgacaagaaggtgatgaagctggaggacaagaagcagcacttttgctgtgctgtgcaaaacttgaccaacattctgatgaaggtggtgggtagtgtctacaataccaggacgcccacgaatacaagcgtagactttgcggtgcgtagtcctctggaatattgaatattatgtttcgttgcttctccaatctccagaatctctgtgcatttgcctacaacgagttggagccaagggtccacacagtggtggagcagatcgagaacgagggtttcgatagctacacgatcagtaagcagatccagaatgagcgaatcatcgactacttgaacaccatcaagttgctcctcatggtgaatgatgaaaaccatgctcacctgttgatggagaaggtcagttgattgattcattcgttggaaatgtgaatcattgatgggttttgggcgcttttattgaccaaccccaccattaaaaactttctttataaattcgtaagctttccaatgaagttctaactagataattatattctatctataaaacaaatgaccatcaacagtcattcagcaatatttatactcactaatttagtggcttaaaaattattgaattaaaattgatctgagtcatgtaagattaaattaacaaacagatttcaaattccgattaactttcgatatgatataaccggaaaggaaaaagcttcatcaaaacctgtaagtgattcacatgaattgtacgctaatttgattagattgtgtataatgaataacggtagtgtatcagttatgaatgaacaaaattcggaagtaaagaattaatcattaaggtggttaggtgctgagtttgtcaacaatcaaatgaaatttaaaagtaattcaatgcaatgaaaaaaattcaatgaaagtaatgaaaaaccctgatgatggaaccatttagcacttccgttgccaatttcctttaactattttccatttccaggccatcacggagtatccaagtaacgagcgcttctggttctacatggtaatcgcgtacatggaacgcggcgagctggagaaggcgaaagtgtactttaaaaagaatcacctggcggacacccacgactatttcgcgtaagcctcttgatattccacagaatgaaaatgaaaatagcgatatgatatcacaggggctggattaagctgtacatcaactacgtggacacgcgaaacaacccggagacagcgcccgactgcacggagtgcctgttgaggagcatcaccaactacgccgagcggtatccccgccagcaggacgcgtggatcctgctctactgctactacaagcgattcaactacgagccgggctgcgcctttgcgctctggagattcggggatcagcatgggcactgccgactcagctcctcctccaatgcaccgcacagcctgtggggactctatgtgaacctaaacatcaccattccaaccagtcggggcaccatgtttctggaggtctttagaacattcgcgcggctgggcctctatgagttcgcccaggtggtcatcgccgccgtgttgcctctggccagcgatgcggataggtatatgctccagacccagctggacatgatgctcaaccaactggacgagaactttgtgcccctgagctttgagtttgaggagggcgaggaaggtgactattcggtgggttgttcatccttcttttgaggatctttgaattgagtccgattgactcccttgcaggccgccatgaatgcccagatcaacggcaatgtggagttccagcgagggaacctggaggaggcggccttgtactacgagagcgccctgaccttgccgcctcccgaggtgaacgagcgcgacttcttcgaggtcagccgactgcgcctgggctacatatcctacgagctgggcaactacaacaagtgcatcgaagcattgtcctttccattcgctggccaactactctccattgtggccaactatatgataggcaagtcctactacaaactggacctcttggacctggctcttgagtccttcgccaacgccacccatatggacacccatgtgcccaacgtttggggtttcctggcgctgattaacctgaggctgggcgagaactacaaggccatcgagtgctggaagtacgccaagatagtaagttgagctattcctttgcagctcctagatgtcatcgttactaataatctttccgcaggagccaaactatcccattgacgacatgatgatctatgaggaactggacgccatcgactatgactccgttgacctgtacatagatgcacccaatcaaatggtggacgacatctttagggactcgcaatcggactcataacttgtatattttgtgtgaacccataaagaccgacattctggctgcgctgctaaaatggctatgttcataatggcttcatctgggcctgcatccaaatgaggtaaacggatgggggtttgtggtgggctactttttttccacgaggctcatttgttgctgtttagctggcgtgacttgttgacacaaggtaatgagacggggcagcagcaatgtgcttgcataagacagtccacccagccagccagtacacagacatgtgtacatacatatacatatcctatatcctggctttttatagaacccattcgtggcttgagctccgctgctgcagtctgcatccaaacatggcccacggaggaggcatcagctcgttggccgggctggaggagaagccagcggcctgtgtggccagcagcacggccttggccattaggaactcgaccataatcgcccatcggctgtccatttacctgccgcagctgctgctgccctctcgggatccccagaaggcagggcatgccactccacagccattcgaattttaattgaatcccttccagctcattaccgaaatcaactgctacgtggcccagtttcgggagctgctcatctttattggccaggcccgcgattcgccagagctgcgcgagaagatcaggaagctgaggcgcagctgtgtggatgcctgcaagcacaccgcccacttaatcactccccagccgcgccactgcctgggcagccccagtgagaggatgcacttgaccctgctctaccacctcacgttgcagttccagcacgagttgatcaagagccatcgcttgatccaactggtgccgctggacatgacggagtactatggttagggatccgatatactgggtgagctgatggttaagcttctatgctctcttccagctccttcccgcactgctccatccaatctgggcaatgtcatcagccaattcttgctgtgcaagcagataaatcccgatttccagca

SEQ ID NO: 34541 - DNA, 3054 bp, DROSOPHILA
atgccgcccaagaaggcaaagaagggggcggggccgaagaaggatgacgatctggacaaccgcccacagccgccgaatgtgttcctgtacatccagctggcgaacatcgtcaacatgcccgagtcgcagcatccgctggagattcacattagccagggcgacagtttgctggtcaagtgcgatgagcactacaacaccgatggcatcatagtgcaggaggagttccactcgaagcccacgttcacgctgattttccagcaggacaatgtggaccggataaaccatgccgccgacaatccccttctcgttcagctatatatgcgcgtccttccgccgagaaggattgttcaagtggagtacgagatgcttgaggaggagcaggagggagaccttgaggcagattcagactcggatttgactatgtcgacgactatagcgacgacattgctggacgatgatgcgtttgaggccagggagacggtcaagctggagctcctttgcgttggctatctggacgtgatcaagttgtttggccaccggcgcagcatgatctgcgaggaactcttcctctatcccatgccggatgtgcccaacgagatgcgctctaccatccacacggagtggcacctctacaccctgctgcccatcgccaagaagctgaccttcaccaatatggcgttcgtgacctttgagagcatctactgcctaaaggacgagtacgtgctggacctggagaccctgtgggtgcgagtgagcttccgctcccggatgcccggcgaccgaaacgaaagcctcattccgctctgcgagttcgggaatctggagcggaagatcatatgcatgcaggacaaccaccacgtgttcgagtccttccggcgcagcgtgaagccctggaatgtgaccgggctgaagtccgccatggaggttcaaaggcaccgactcttctcggagctctttcactccgagaacctgacgccggacttcgaggagattgacccggccatggacgaggccctcgtctgcaactccttccaccggttcatcctgactcagagtatggccgatattctatcgttcgccataacctgccagcagtatgtcctcgctgtggaggtgttccaaacgttcggggccgccaagccgcagaaggttttccaaggggttttggacccgtccatcatggcttatcctggggtgcagaacatgagattcgctgtccagctggactacctcggaaaacttaagcccaagaaaataatgagcacgttcaatttgaagtctatggagcgtgcgaaaacccttcccacatttgccatcatcaaactgtgcctcctggccccgattggagagatctacaaggagctgaaggtgttccgggaaagcttcatccggcagaaccggctgctcttctgcgaccgtccttacagtagcatcaatgcgatgagcctggccgaaatccaaatggagtgctacgctcgcttcgacaagttcatccgcgactgcatatccttcatcatcgacaagaaggtgatgaagctggaggacaagaagcagcacttttgctgtgctgtgcaaaacttgaccaacattctgatgaaggtggtgggtagtgtctacaataccaggacgcccacgaatacaagcgtagactttgcgaatctctgtgcatttgcctacaacgagttggagccaagggtccacacagtggtggagcagatcgagaacgagggtttcgatagctacacgatcagtaagcagatccagaatgagcgaatcatcgactacttgaacaccatcaagttgctcctcatggtgaatgatgaaaaccatgctcacctgttgatggagaaggccatcacggagtatccaagtaacgagcgcttctggttctacatggtaatcgcgtacatggaacgcggcgagctggagaaggcgaaagtgtactttaaaaagaatcacctggcggacacccacgactatttcgcgggctggattaagctgtacatcaactacgtggacacgcgaaacaacccggagacagcgcccgactgcacggagtgcctgttgaggagcatcaccaactacgccgagcggtatccccgccagcaggacgcgtggatcctgctctactgctactacaagcgattcaactacgagccgggctgcgcctttgcgctctggagattcggggatcagcatgggcactgccgactcagctcctcctccaatgcaccgcacagcctgtggggactctatgtgaacctaaacatcaccattccaaccagtcggggcaccatgtttctggaggtctttagaacattcgcgcggctgggcctctatgagttcgcccaggtggtcatcgccgccgtgttgcctctggccagcgatgcggataggtatatgctccagacccagctggacatgatgctcaaccaactggacgagaactttgtgcccctgagctttgagtttgaggagggcgaggaaggtgactattcggccgccatgaatgcccagatcaacggcaatgtggagttccagcgagggaacctggaggaggcggccttgtactacgagagcgccctgaccttgccgcctcccgaggtgaacgagcgcgacttcttcgaggtcagccgactgcgcctgggctacatatcctacgagctgggcaactacaacaagtgcatcgaagcattgtcctttccattcgctggccaactactctccattgtggccaactatatgataggcaagtcctactacaaactggacctcttggacctggctcttgagtccttcgccaacgccacccatatggacacccatgtgcccaacgtttggggtttcctggcgctgattaacctgaggctgggcgagaactacaaggccatcgagtgctggaagtacgccaagatagagccaaactatcccattgacgacatgatgatctatgaggaactggacgccatcgactatgactccgttgacctgtacatagatgcacccaatcaaatggtggacgacatctttagggactcgcaatcggactcataa

SEQ ID NO: 34542 - protein, 1017 aa, DROSOPHILA
MPPKKAKKGAGPKKDDDLDNRPQPPNVFLYIQLANIVNMPESQHPLEIHISQGDSLLVKCDEHYNTDGIIVQEEFHSKPTFTLIFQQDNVDRINHAADNPLLVQLYMRVLPPRRIVQVEYEMLEEEQEGDLEADSDSDLTMSTTIATTLLDDDAFEARETVKLELLCVGYLDVIKLFGHRRSMICEELFLYPMPDVPNEMRSTIHTEWHLYTLLPIAKKLTFTNMAFVTFESIYCLKDEYVLDLETLWVRVSFRSRMPGDRNESLIPLCEFGNLERKIICMQDNHHVFESFRRSVKPWNVTGLKSAMEVQRHRLFSELFHSENLTPDFEEIDPAMDEALVCNSFHRFILTQSMADILSFAITCQQYVLAVEVFQTFGAAKPQKVFQGVLDPSIMAYPGVQNMRFAVQLDYLGKLKPKKIMSTFNLKSMERAKTLPTFAIIKLCLLAPIGEIYKELKVFRESFIRQNRLLFCDRPYSSINAMSLAEIQMECYARFDKFIRDCISFIIDKKVMKLEDKKQHFCCAVQNLTNILMKVVGSVYNTRTPTNTSVDFANLCAFAYNELEPRVHTVVEQIENEGFDSYTISKQIQNERIIDYLNTIKLLLMVNDENHAHLLMEKAITEYPSNERFWFYMVIAYMERGELEKAKVYFKKNHLADTHDYFAGWIKLYINYVDTRNNPETAPDCTECLLRSITNYAERYPRQQDAWILLYCYYKRFNYEPGCAFALWRFGDQHGHCRLSSSSNAPHSLWGLYVNLNITIPTSRGTMFLEVFRTFARLGLYEFAQVVIAAVLPLASDADRYMLQTQLDMMLNQLDENFVPLSFEFEEGEEGDYSAAMNAQINGNVEFQRGNLEEAALYYESALTLPPPEVNERDFFEVSRLRLGYISYELGNYNKCIEALSFPFAGQLLSIVANYMIGKSYYKLDLLDLALESFANATHMDTHVPNVWGFLALINLRLGENYKAIECWKYAKIEPNYPIDDMMIYEELDAIDYDSVDLYIDAPNQMVDDIFRDSQSDS

SEQ ID NO: 34543 - DNA, 2920 bp, DROSOPHILA
ttgaggatctttgaattgagtccgattgactcccttgcaggccgccatgaatgcccagatcaacggcaatgtggagttccagcgagggaacctggaggaggcggccttgtactacgagagcgccctgaccttgccgcctcccgaggtgaacgagcgcgacttcttcgaggtcagccgactgcgcctgggctacatatcctacgagctgggcaactacaacaagtgcatcgaagcattgtcctttccattcgctggccaactactctccattgtggccaactatatgataggcaagtcctactacaaactggacctcttggacctggctcttgagtccttcgccaacgccacccatatggacacccatgtgcccaacgtttggggtttcctggcgctgattaacctgaggctgggcgagaactacaaggccatcgagtgctggaagtacgccaagatagtaagttgagctattcctttgcagctcctagatgtcatcgttactaataatctttccgcaggagccaaactatcccattgacgacatgatgatctatgaggaactggacgccatcgactatgactccgttgacctgtacatagatgcacccaatcaaatggtggacgacatctttagggactcgcaatcggactcataacttgtatattttgtgtgaacccataaagaccgacattctggctgcgctgctaaaatggctatgttcataatggcttcatctgggcctgcatccaaatgaggtaaacggatgggggtttgtggtgggctactttttttccacgaggctcatttgttgctgtttagctggcgtgacttgttgacacaaggtaatgagacggggcagcagcaatgtgcttgcataagacagtccacccagccagccagtacacagacatgtgtacatacatatacatatcctatatcctggctttttatagaacccattcgtggcttgagctccgctgctgcagtctgcatccaaacatggcccacggaggaggcatcagctcgttggccgggctggaggagaagccagcggcctgtgtggccagcagcacggccttggccattaggaactcgaccataatcgcccatcggctgtccatttacctgccgcagctgctgctgccctctcgggatccccagaaggcagggcatgccactccacagccattcgaattttaattgaatcccttccagctcattaccgaaatcaactgctacgtggcccagtttcgggagctgctcatctttattggccaggcccgcgattcgccagagctgcgcgagaagatcaggaagctgaggcgcagctgtgtggatgcctgcaagcacaccgcccacttaatcactccccagccgcgccactgcctgggcagccccagtgagaggatgcacttgaccctgctctaccacctcacgttgcagttccagcacgagttgatcaagagccatcgcttgatccaactggtgccgctggacatgacggagtactatggttagggatccgatatactgggtgagctgatggttaagcttctatgctctcttccagctccttcccgcactgctccatccaatctgggcaatgtcatcagccaattcttgctgtgcaagcagataaatcccgatttccagcaggaggagctgtgcagcattgtcaaggactcgcaggagcttagcgagctcttggaggagttgcaggctcacatgcccttgaccgaggcctctccagaattcgacctggatccaacacagaaatgtgagtcagttgtatagggcttttaaaacccaatcattaaatgttaactcttttttccagctgaaagtagccttgtttccctcaacactccggattggtatgcccggcagcgcagaaggagttgcaagagccggagtcgtagtctttgttgctgcctggccaggaagtcacacaaaaccttttagaaggagctagatacataaatagtttgctgtctttcaatgttatatagtgatagtttcctataagctcggtgtcaaatgtcatgtaaaggaaatgaaaacctgtccaacatagaagccaactatcaactacgaactagcgattttacacccattaataagtcaataaatctgtaaatgttgcactgttcaatgataacatgccaattttggaagcgataaaacgtattcccagaaatgataaaaaaaaaacgccagttataccggcaaagtggcacctcaaagagacccaaggcaataatcgtaatataagcgattaaatacaaagcgagtattgtattggtgttttctcgattcggggaatctcgagcagaatgatgaaatccgaaatcagtgcccacatcacgcggacaaagcgacataaattcacgaagagcaggtgaaatcccactttacgacccccgagaacgatgtcacatttatgggtgagaatcccagaagcccacatttgtttacagactacttagcggagcaggtgatggcgcccacctggcaaccgtaaattagattagattccggcttacaccgcctgccgctcgtcattggacaatggcaagcaggttgggggggatcgcgatccgcgacttgctgatagagatgcttgacaacagagatttcgcattaattagaattcattgactggcttgatttttgcatagtttaggtatttaattttaaaaatatgcctttgtcttttacaaaacatatctctacattaaaaatatatatatatttatgtatattgtatgcagatttatgtggtatataatatataggtgtatatattaggtataaacttctacatgtcatatggattttcacagaaaatcttcaactttgagtaatgcttttcaattgtttccttgtgcgtgttttcacatccttaattgctcatttcta

SEQ ID NO: 34544 - DNA, 597 bp, DROSOPHILA
atggcccacggaggaggcatcagctcgttggccgggctggaggagaagccagcggcctgtctcattaccgaaatcaactgctacgtggcccagtttcgggagctgctcatctttattggccaggcccgcgattcgccagagctgcgcgagaagatcaggaagctgaggcgcagctgtgtggatgcctgcaagcacaccgcccacttaatcactccccagccgcgccactgcctgggcagccccagtgagaggatgcacttgaccctgctctaccacctcacgttgcagttccagcacgagttgatcaagagccatcgcttgatccaactggtgccgctggacatgacggagtactatgctccttcccgcactgctccatccaatctgggcaatgtcatcagccaattcttgctgtgcaagcagataaatcccgatttccagcaggaggagctgtgcagcattgtcaaggactcgcaggagcttagcgagctcttggaggagttgcaggctcacatgcccttgaccgaggcctctccagaattcgacctggatccaacacagaaatcgcagaaggagttgcaagagccggagtcgtag

SEQ ID NO: 34545 - protein, 198 aa, DROSOPHILA
MAHGGGISSLAGLEEKPAACLITEINCYVAQFRELLIFIGQARDSPELREKIRKLRRSCVDACKHTAHLITPQPRHCLGSPSERMHLTLLYHLTLQFQHELIKSHRLIQLVPLDMTEYYAPSRTAPSNLGNVISQFLLCKQINPDFQQEELCSIVKDSQELSELLEELQAHMPLTEASPEFDLDPTQKSQKELQEPES

SEQ ID NO: 34546 - DNA, 2603 bp, DROSOPHILA
gccaccgaagctcaatctagataccagcaatcccaactacgagctggagaagctggaagccgatatcaaagagttttacgccaaggattcaaaagacacggaggaaagtggcgacgacgatgtgaccattgtcttgaaacccggcccccagacagagcaacaaaaagaaaacttgtgcgtcctccttcacggagccctcaaaatggagaacatggcagctctggttcgagtgggtgacaagtggtacggattcatatatgcattcaccgacagcaagaagaagtcaaacctgatgctgaacatacttccacccggcacgaacgtgattccctggctaggagacctggaatcgctgggcttccccgaggatttggcgcccggagagacggccagttttccggtgcgtgccgaccgcagatcttattcgcagagcagtgtggtgtggatacgacaggctagcctgcagtccgacgtccagaaggtactgcgacacgccaagaagatgcccgacaagacgcagcacttctacaaggagctcaatcgcatccgccgcgctgccctggcgctgggattcgtcgagttgctggaggctttggccatgctgctggagaaggagtgcgcccatctcagcctgaacggagccagcaacgactgcaccctgcagctgcagcacgcggctacggagttgcggaagacctcgaacagagacatgaagtccatgattgttccgctccagaaagttggtgcatcggatgcgggcagcacggctgccacggctcctgctcctgcatacatgtattgaaaattttttatgtccttactttaagactgtgtttactttgtaatacaaataatcgtaaaaatttaaatcttaaaagttcgggctttaatgaaagcgtaacggtatttttcatctctgcacttcacagcactggccgcttggcgttatcgttatcgatgaccaaataatatagtaacaataaaagtcgtaaaaataataatgggaagtccagaattgccctcagatcccggtcaagagggacttccaaccccaccggttgaccatccacggggaggggtggagagcgaggatgacgatgattcggatgcatacgacggctaccaaccactcgctttggatgaggagaacgatgcagcggatcccgaggagatgtccagggagcaggagaccccgtccgcggataatgacgaagatgttgacctgatgactgccccagtcacccacggagaccccaacatgcctgccattgagcccgctgacgtggaaatcgagagacaagtctggagtgaaccaagacccagggaactccaaatggatcttgacaaaactcgaacggaacaggtaagacattccgatttacaattgcgagacatgccagcaactttcatcccgacactccagatactcaaagcgatgtccactataacgttacccaacatcacagtgccggattgggccagaggagtgcccgaggagcattggaagcatgagctgctggaccggattaacaaccggcaccatccacccgaaccctcaacgtcgtcgtcgcgcgagagtcatcagcattccaagaaagaatagcgtttgtgtgtatttagaaaaaaagttctccaatatatgtataatttagaatgatcataagaagttgcttggcggagatcttagaacacagccagcagggcctggcccacagaattcaccttgctgaagttcttgtcctgcggagtaatggtaagttccctcaacttgtccatcacatagtccacggacaccacctgcgcaatggtctcttggccgcacgaagtggtggtcaggttgccgatggcctgcatggaacggtagcacgcttccaagtccttggcccacttgagcagctccacaataccggaggtgaccacatgacacacctccgacttcgccacgtccagagtctgggagattgtgaggttcaaatagaaggtggccacggcaatttgcagattggcactgcccgtcttgatggctcccacgagatcgatgatctccgccagacgggacatcacattttgccggccggcggcgtggctcatgatgttggccaggcagcgcaccaccatgagctggttgggtgccgagccgctcaattgagggataacggtcgccaggaagttgtgactgttgttcaggacactgaagatggcttcatttcgcacggccaggcgaaggatgtccagcacggggaactgcatggacgccggccacttcagcaggatggccagagcttccagggaggtcagatcgagctcaggcgattgatcggcgagtttgattacggccaacaagacctcctctcccactcttccatcaggtaggcttagtttgccattgaactctctgccaaagagatgtagggattagttggggattagctgagaaaatatctaaacccacatcattttctctagcaccttcttggcatcacaggtgtcgaagatgcggtagttgctgacgggaaagtgtttgtcgccagaccgcacaaagtttacatccacctgcgactgagcattgctactcgctgtggagtaactcgaggctccagtga

SEQ ID NO: 34547 - DNA, 603 bp, DROSOPHILA
atgggaagtccagaattgccctcagatcccggtcaagagggacttccaaccccaccggttgaccatccacggggaggggtggagagcgaggatgacgatgattcggatgcatacgacggctaccaaccactcgctttggatgaggagaacgatgcagcggatcccgaggagatgtccagggagcaggagaccccgtccgcggataatgacgaagatgttgacctgatgactgccccagtcacccacggagaccccaacatgcctgccattgagcccgctgacgtggaaatcgagagacaagtctggagtgaaccaagacccagggaactccaaatggatcttgacaaaactcgaacggaacaggtaagacattccgatttacaattgcgagacatgccagcaactttcatcccgacactccagatactcaaagcgatgtccactataacgttacccaacatcacagtgccggattgggccagaggagtgcccgaggagcattggaagcatgagctgctggaccggattaacaaccggcaccatccacccgaaccctcaacgtcgtcgtcgcgcgagagtcatcagcattccaagaaagaatag

SEQ ID NO: 34548 - protein, 200 aa, DROSOPHILA
MGSPELPSDPGQEGLPTPPVDHPRGGVESEDDDDSDAYDGYQPLALDEENDAADPEEMSREQETPSADNDEDVDLMTAPVTHGDPNMPAIEPADVEIERQVWSEPRPRELQMDLDKTRTEQVRHSDLQLRDMPATFIPTLQILKAMSTITLPNITVPDWARGVPEEHWKHELLDRINNRHHPPEPSTSSSRESHQHSKKE

SEQ ID NO: 34549 - DNA, 2766 bp, DROSOPHILA
gcctttcacggaggagggtcggattttcacgggtggggctgttctatgatgtatagacatcgtcgtatctgggtgggcatgagaaatggcatggtttggggatttgggaaatggcgggtgtggtttttgcatttgcgcacggtgctcgtgtgtgcaaaaatgtgggttaataatgaggccacaggcagcagcagacggccttaaattcgaaagacatttgtcttgactattacgtttttacatatgattatttccaggtttccatatttcagggtaatgggttcatttgttaaaggttaatgcgtagattggccaacaactcgtgctcggatataatttctcaaaaaagatatgtaattctgcttgtcatgttctctggaaataagaaataggtctccattgaaccctttcatcatgcactttcctcattgagttggaaagtggaaacaatcttatcaaatgcgattgctagcaatcttttctcttatttagcccacattcaaagctcattcgatggcaaatccaagacagacttcatttcaaacgatacgatagcgtatatacacaaaatgcacttacaaaaatcattcgaagctgttaaaattactctgaaatggattgtaatggtagaaagtgttgaatggtgatttatttaaggacttaacatgttatactttggtatgtgctttacccatacgaataaatacgaattctttcagtgcagtgtaaactttgccctgtgcaacagttgcctatgtctggccacccacttttcccttcagcaattgttagcttgttggttcgataaactccctgccaacagccaaacaaagaccacttccaataccaataccactcccaatccctattccagctgcaccttgttcctcatccaactggattcagttccacggcgaatgcccggcggtgagcaagtgggcaaatctggatctggtatctggctgagtggggcccggcataaaacggaaaacttgttaggatggataaactgcgaggcaacaatgcggctagcgagaatcccttcaagcggccgatgaatgccctccagaagcagtggtaccgcgtcctgctggcccgccgtgtgggattcgggcagcgtcctccgcccgacgaaaaggagctaacgtagtaagtcaatcgcagccccgtttcaaatcaaattgtgtgaaaaaaagcaatttcccgcggagctaatgcatttcacaatttccacacgcctcgggaaaagcgccgacatttgtcgtaagcgctatgcggcatcgttccggcgatacaacgagtgtttccgccgggaaatggccaaacatgaggagatgcagcgatgcgccatcgacgccatgagggtacacaggtgggcattaaggactaatcatttaaagtactcatttttaatcgaagggaatttaaataaacccactgacaacagaacctttgccatcaccacactttggctacctttgcactcgaagcgggaaatcaactcaacgctggaaaccctcgaaaaggtatgctacatttgagataaatctcagaattgaaacagctgaaaggtatacttattcaggttctcaccgccaaggaaagacgacgcctgcaggagattctcaagcagggagagtcctggcactcgcaccgctaaggctacatccaagattcagatcttgattcaggctcagattcagattccgagccttactcatccccggcacatcaacatcatcatcatcatcagctgccacggctaagtgaattccatttagcttggatttcagtcttccagggagcctgattttccttccccgacttcgtctttttttacttttccatcgctttgttcttggaatttcgctgtcagtggccaaagcactgtcgtaaatatttaataccagtaaaagtgcaaagttcactttggctaaaaccgaaactgtgttgggacgagatcaattttctgggaatgggatactcgggattattaaaaggttatagaacttgctggttcaaatggtttgctgcacttcagttgcattgagtcttaccctctctcaatttcactatcatttcttagcattaagaatgtattactttataatctattattttaacccagtttaaagatacacttcttgacctaacctgccatatttcaagggatttagatttattatgttttcgttggccatcgatttagcctattaaaaactgctgcctagggcaaagttgttcaatgtaaatatgtcatgtgccgaaaaaggattcgccataaaacacacttgttgggggaggaaaaaaggggtgaactttcccaaatccccgaaaatctgagagacaaaagccaaggcagtttctagcttaacccactcacataccccagtgacagttgctgccaggccgaggctcgatactaggccaaacagcagaaaggactcaacccaatatccttgccaacagcaaacagcaaacaacggaaacagaagcttggccagcagaaaaaccgagggaaaactcgactcgtgggctcgaagggccgcagctgtttcagcttggcatattgccgactttacttggcaaaaacagcaaaaaaaaaaaaatcggcaacgaaactattgaacaaagtggcgcctgtcgcactttatgacgagcctgcagtgccctttttcttccttttccaggacctcctcctcgccttccataatagcaatcacagaaatgtgttctaatttaaagccatatatatggaaaagcaaa

SEQ ID NO: 34550 - DNA, 453 bp, DROSOPHILA
atggataaactgcgaggcaacaatgcggctagcgagaatcccttcaagcggccgatgaatgccctccagaagcagtggtaccgcgtcctgctggcccgccgtgtgggattcgggcagcgtcctccgcccgacgaaaaggagctaacgtacgccgacatttgtcgtaagcgctatgcggcatcgttccggcgatacaacgagtgtttccgccgggaaatggccaaacatgaggagatgcagcgatgcgccatcgacgccatgagggtacacaggttctcaccgccaaggaaagacgacgcctgcaggagattctcaagcagggagagtcctggcactcgcaccgctaaggctacatccaagattcagatcttgattcaggctcagattcagattccgagccttactcatccccggcacatcaacatcatcatcatcatcagctgccacggctaa

SEQ ID NO: 34551 - protein, 150 aa, DROSOPHILA
MDKLRGNNAASENPFKRPMNALQKQWYRVLLARRVGFGQRPPPDEKELTYADICRKRYAASFRRYNECFRREMAKHEEMQRCAIDAMRVHRFSPPRKDDACRRFSSRESPGTRTAKATSKIQILIQAQIQIPSLTHPRHINIIIIISCHG

SEQ ID NO: 34552 - DNA, 2210 bp, DROSOPHILA
tttttggcaaaatgcgtgacaagagcattcggagatccagcggagaaagtatttcgccccactctcgatttttttgtcttatttgtttattcacgcctgggaatacccacacttttttgactgactagcaatacattaagttttgaatcgcatattgattaatgcgactattattgcgcaatagtaacgacgccagatggaccgagctgccttagctcggtagtatcgccctttccaagggcagcgggttcaataacccagccatgaaccgccgaactattacaagtgggcaaatctactggccaaggtgagccacttcaaatcactcaaccgatttagcgagctagtgacgaatttattgagactatcagtagtggcccagtatcgccggtggatctgttcgccagaagtcactatcggtcgctgacccatttgtgaaatataaaacaaactgacgtaattgttgcccgagttttaacccgtcgatgggccaggtgtttccccggggatacactctactgattgcgtgatgctgcagttatgcctgacagttaatagtttttactcagcgtcatcggcagcgcaacggacatccccatgtgtggcattgaatctaattcggctgctatatcggtcattgaaccgatttataggcgatcgtcacaatgatcgttgctcgcacgctgctgagatatcgcaaaagtgaggtggatagacccacctgctaccctgcataagggtgcgagataaacctaatggcacatggcccacgggttatcaaaaagttcccactgcacgaccgagcgactaactactgcagtcaagagagctcctcaggtgattagaaatatgtgttagccatatcagacggctcgtgggccggagtaagactcttactagcccggtataaatatcactcgcagcgtcatggccgtcgcacacagcaatggtattcaggcaactaagcagcgcgagctcatcgctcttcatcccgaccaagatgatcgtggccttgatcgggatcatgggggtgggagtactaaccactgcccagacgtacagctccaaggacctgttgacttggatgcagtccagcaacttcggctaccaggtgctccagcaggccttgaatgacaaccaatcctcatctgctgccgaggcatcttgcctggcggaggttcgcctcctcctcacgggagcagaggccaaatccttgcctgctcttcgaggtcggttgatggcaaccgatgtggatatactttatatactgaccttccgtgtccgtgtcttacagttttcgatgcctggggaaagttcccgcaaggactgctctacggccactttatggacatgggcaactacgaatcctgcctcagcttggatctcagcaagagtctgggcaatgtcatgaccatcaatgccggagccaagtattgcttgagtcgtatgcagttcgagagtttgctcatggaagccgccggcgcagatgccctcaccttgagtattggaacctgcataccctcatcctgcagtgccgcccaactcagtcgatggatgtctggtcatctgaaggatatgtttgggcagaattcgacggaagcaacattggtgcaggaaaaggactgctctttggcgcacagagatcccatgaatggactggactggcttgctgtgtgagtaaaatcaagggggatatggggtattccaggtatagatcgtatctcccagcctttgtttgctcatatcttacgcaataagcactggaaagacaggttgtgtgcgcttagacttgtttggcatgccaacgaatttaagtgccagtgtagtatgtgcatatatcgagggtacactgtacctataagtacacagcaacacttagttgcattgcataaataaatgtctcaagtgagcgtgatataagatcacccatttatgctttaagctaagtcagcatccccacgctggccgctggccatatatgcgcataagctctctctctctctctcttatacatatatatatacgctgctcttctgccgctgtcgacggcggcgcagtcgcagtatttaggtaagattagacactctgtagaggttaagcgggcagaaccgtttctgctactcgaagagataagaagaaataaaaaggtggcctgacggctgcacccaactgcaaggaaaacacgtgttctcaattggtggcatatattg

SEQ ID NO: 34553 - DNA, 612 bp, DROSOPHILA
atgatcgtggccttgatcgggatcatgggggtgggagtactaaccactgcccagacgtacagctccaaggacctgttgacttggatgcagtccagcaacttcggctaccaggtgctccagcaggccttgaatgacaaccaatcctcatctgctgccgaggcatcttgcctggcggaggttcgcctcctcctcacgggagcagaggccaaatccttgcctgctcttcgagttttcgatgcctggggaaagttcccgcaaggactgctctacggccactttatggacatgggcaactacgaatcctgcctcagcttggatctcagcaagagtctgggcaatgtcatgaccatcaatgccggagccaagtattgcttgagtcgtatgcagttcgagagtttgctcatggaagccgccggcgcagatgccctcaccttgagtattggaacctgcataccctcatcctgcagtgccgcccaactcagtcgatggatgtctggtcatctgaaggatatgtttgggcagaattcgacggaagcaacattggtgcaggaaaaggactgctctttggcgcacagagatcccatgaatggactggactggcttgctgtgtga

SEQ ID NO: 34554 - protein, 203 aa, DROSOPHILA
MIVALIGIMGVGVLTTAQTYSSKDLLTWMQSSNFGYQVLQQALNDNQSSSAAEASCLAEVRLLLTGAEAKSLPALRVFDAWGKFPQGLLYGHFMDMGNYESCLSLDLSKSLGNVMTINAGAKYCLSRMQFESLLMEAAGADALTLSIGTCIPSSCSAAQLSRWMSGHLKDMFGQNSTEATLVQEKDCSLAHRDPMNGLDWLAV

SEQ ID NO: 34555 - DNA, 2267 bp, DROSOPHILA
cacagccataagtatcgtttgcgtcacgaaaatgttcaaatatagaatacaatttgcattctctgaatttattttcctatactagtattctacctctgagctccttcatctggatgtactcccctcttttattggaccatctccattccagcctgggacatgcaagcgttttgcttcagctcctcctctccgtaatctatgatttatgactgagcatttatggccggtctcaattaggttgccattttgtaagccacaataactgcagacatcgagacacgcactcataacattgtacagactcgagaaccaaaaccaagggtaataatctttggcagtaagccacagcgccaagattaaaccgactataaaaagataaacaagccacgataactggagcagaagtcgtggagtcttgggggtagtcgtgggaaagggtggggtttatatggcttataagaacgacaaatgctcacgtgaaaatcacatcaattgtctgactgggaaattctaaatatagttagaaaacaagtcgttttagctgactatggggaactagggataccctatgaagtaagagcagcagaatgaagtcaagcagcagaatgaaaaatatgcttaaggattgttctgcagacagattcacagcctggatagaaagcacacagataccaagattatcaagaccaaaggtcgtttcagaaatcaaatgcgaacttattcgctcaacccatctacttaagctgaactacagggcatttgctatgaggttggaaaacggcgtgcaggagctcttgccaattgaatataaaaagtaatttccgtcttttattatttgcacgttacagcacaagctgggcgattttagttttaacgagccgtaatcattgccagcccccacatggaagccatttcgatgtattcagtctcccgtatgtactttttatttcaggcaatcacgcaatcggaaccgtgcgaaagtttccaacattgccgctaaatggaggcggagccgtcggtgccggtggctcaaattcgacagccgcagctgggcagagtggccatggcctgtggatcgatcccaccagcggcgtttggcgacaggcagcgggtggcggcaatcctggcggagtgggctcgtgtacgacaaaggagcaacttccgggatacgcacaggccaccgcccaacaaggacaacagcccacgctgctacccgattacgagaggtgagtctccgactgtttatctgctcaggaagttgccttaatatcctgtccacgcctcgctgactgtttaattacaataaaaaattggcgagcattggtaaagggatgtaggataaaggctcgttcaaataaagggtgtgcactttgaaaaaaataaactagttaagctagtgatgcctttcactccagatcaattatccctgctactactaggtgcctcttaacagatatttctgcaacgaacttcttgtaaatggtgatgtggtatattttttttcttccgtgtagtaagaagccgactacttggtgtaagtaaaagatccatagcactatttacgagccgggtcgtaaaagatattttgtggagctgcaaccgctgccaccataaagattccccagccaaaaccgagccaccctcgcaatggaggacctgaaccctctgctccattcgaaaaccgccgcagcaacaacaaacgccattaaattgttacactcgaacgggttttactttgggccatggtaacttactccgccacgaaatgtttacgttggcaggagcagcaatgcagccgttatttaatttccatatacgcaattcgttcatatttcctggggctgttttatctccctgttttctgtattttcgtgggggttttctttaaaggttaatgaattttccatctgggaaatgcatttcagtcgaacggactcttaacctacttttatttaagtctttggcaaagaaaacatgtttaacttaaagtgacttgagtatgtaactaatcctcgaacttattatctataaaaaattccttaaatttgtcaattcgtagcaatattaagtaggattattctgtcggtaagttaagagaactcttaaagtttttgataccaatttcagattgtgactatcagccaagtaattcaaatgtttcttggaaaatcctatgaaagtttcgatgaagattttcatgtgagcgctttaattccggctgtccatttatttgtatttcccattccatttggattttcttttcactt

SEQ ID NO: 34556 - DNA, 267 bp, DROSOPHILA
atggaggcggagccgtcggtgccggtggctcaaattcgacagccgcagctgggcagagtggccatggcctgtggatcgatcccaccagcggcgtttggcgacaggcagcgggtggcggcaatcctggcggagtgggctcgtgtacgacaaaggagcaacttccgggatacgcacaggccaccgcccaacaaggacaacagcccacgctgctacccgattacgagaggtgagtctccgactgtttatctgctcaggaagttgccttaa

SEQ ID NO: 34557 - protein, 88 aa, DROSOPHILA
MEAEPSVPVAQIRQPQLGRVAMACGSIPPAAFGDRQRVAAILAEWARVRQRSNFRDTHRPPPNKDNSPRCYPITRGESPTVYLLRKLP

SEQ ID NO: 34558 - DNA, 3023 bp, DROSOPHILA
cggaatgtgacatttaattgtctcgagttttaacggtgtggattttgacatattttagatattaccattcgaaagcgtcatcaattgcgatgaatttcatgaaagttcttttcaccccagttgtttccaaacaatccgaaccaccatgaaatggcgaaaagtcttcgcattttgcagcgccacactccgcatttcaaacattttagtaaatttttacgagaactcattggaaagagcagagcgatagataagcattatctcattagctaattagtgtgcagaaatttgtgcaataaaaaagttttccccgcttttctgtctcgcgaacgttgatttttcgtgttggcaggagaactcgcacggctaaaagtttgatttgaatggaagtcctgctttttttttgctcccaaattggttgctccccgttctttggcagctcctccatttccggtgttggcccattttaattccagtaccttctatgcgtagctccctctaattacgaagttgaattgctaatggggggaattttgtattgtatttgccatatttaaccaaattgcagtggcaacggtgggggtagtggtggcgcattcaaagggaaattgcaacgaaatttttaatgagtaggtgtgagacgggcacaatttccggagtggcattcagtgcctaacaaaagcaatttcctcccatcaacaacaacatcgaatgatttatgaaatcggtgatgtgagcgccagacaaacataaatccgcataaacctatttacacagcaaattattttaacctcaaatgttgtatcagtaaagttaaacctaaagttttctaaagtacgcagtggagtagcagtttcggataattatgcagctacaactttgacaaactctatattctgcaagcatttctcccagtgtatttatcattcacactcatgtctgcactgaatcaattttaactgctgatttcatcccctccaattgcagactatcaccgctgaatatgcccgattacgcggaagtcgcctgctcgacattcaaaagccccacacacggagcaccgccgatgggtggtggtggtggtggccagtcggcctccctgtacgacagctgtggggcctacgctaccaccaatgtggtggccaatgtaaagctctaccagaaccgctatgcgacaaagccgaaccagagcagcggcagcaataacaacaatcaccagggcaatgactaccagtcgaccgggatgtactccgctccaccgagcgcccactacggatgcttggagccaaagcagcagcagcagcagcagcagcccaatctgatgaccacctccacggccagcacggccatcttgacgaactcgccggccaaggtgaagaagatcaacataaccgagaacaaaatggatcagctggagggcaagtcggagcggacgaacccgttcaaccagcagcagcagctcctcctggccagcaacgccctgaagcagggactgggcgcctatgccaacaccaccttggcggctcagatggccagtggaggtggagcgggcaccttgaggcgccagcgtcagccgaagacgctttacaaaagcgaaaacaatatactgggcaagtctggtctgcggcagaacaccatgaatgcgagtgtaggtgctcccagcaacgggcagatggacttcctgaccggcggtcctccgtcggagggcggagacttctccggactgggcctctgcaactccaccaaccagctgcttaacgactgggcatccagtgcctcgatcgcagctccaggggattatcatttcggcagcaagcagcccagcaagcagcacctctacgtgaaggccaaggatggcacctggtcggccgtcagttcggatgcctatcagtccttcaagcatcagcagcagcaccatcccttcctggcaggatcaggtgacaacaccaagtccctagctagtgtaaacagcttagctggcgatagcaaattcctgagtagttttggctctagtgccaatgtctagagtcaacctttaagcttgggtcaatcgaaaagtgctcaataagttagaggattctagtggattcccagaggataagttgtaggcgtgtatatccgtttggcgggtggaagctggggttgtggaatgttgtgaaggtttggtggggattgaacttctctaagaaatgtgtaataccttttcgttttaactccagtataatatgattccagctgacctagctagctatccgtagagcaatatataaacgccaaaaccctcatgtacccacccatagctcgattagacttccaccatccgatgaaagtccccaaatcagaatcaacaacgaaatgtatgtaaagagatacagaacaaccggagtaattggcttgtaaatataactcccctaactatatcctatatatgtaaaaccttaaccctaaagcatttagaatattgcatttggagcaagcaaaataacattaatttacacaagaaaccagaaaacaacccaaatagcacagacgtagttgaagtaagtacagcgatggaaatctttaaaagtttgcagcaaaccattacgaacttttgcagaaagtgttcgttcccacagataaggaaaccaatgttgaagccaaaaaagatgaatacccaaccctaacgaaaatattacttagagttacatgaaaagcacgatgaaaagttagttgtgtgtgttgaaaatattgaaactcacctcccgcaaaagctaaataaatgctaataataaggctgttaaatgtaaaatatcataaacgattcaagaatgaatgactaaatctacatttaatccgtgtaattaaagcattaaaatgtaattaactgacactagatttagtttgaatagctaaaatcggaaaaccgacaagagagaaaagcgaaagtgcaaggataacagcaaatagggggatttagctggaaaaagacaaaataattcaactaatcaattaattgataaattatgcaatgagaaaactaaaaa

SEQ ID NO: 34559 - DNA, 1023 bp, DROSOPHILA
atgcccgattacgcggaagtcgcctgctcgacattcaaaagccccacacacggagcaccgccgatgggtggtggtggtggtggccagtcggcctccctgtacgacagctgtggggcctacgctaccaccaatgtggtggccaatgtaaagctctaccagaaccgctatgcgacaaagccgaaccagagcagcggcagcaataacaacaatcaccagggcaatgactaccagtcgaccgggatgtactccgctccaccgagcgcccactacggatgcttggagccaaagcagcagcagcagcagcagcagcccaatctgatgaccacctccacggccagcacggccatcttgacgaactcgccggccaaggtgaagaagatcaacataaccgagaacaaaatggatcagctggagggcaagtcggagcggacgaacccgttcaaccagcagcagcagctcctcctggccagcaacgccctgaagcagggactgggcgcctatgccaacaccaccttggcggctcagatggccagtggaggtggagcgggcaccttgaggcgccagcgtcagccgaagacgctttacaaaagcgaaaacaatatactgggcaagtctggtctgcggcagaacaccatgaatgcgagtgtaggtgctcccagcaacgggcagatggacttcctgaccggcggtcctccgtcggagggcggagacttctccggactgggcctctgcaactccaccaaccagctgcttaacgactgggcatccagtgcctcgatcgcagctccaggggattatcatttcggcagcaagcagcccagcaagcagcacctctacgtgaaggccaaggatggcacctggtcggccgtcagttcggatgcctatcagtccttcaagcatcagcagcagcaccatcccttcctggcaggatcaggtgacaacaccaagtccctagctagtgtaaacagcttagctggcgatagcaaattcctgagtagttttggctctagtgccaatgtctag

SEQ ID NO: 34560 - protein, 340 aa, DROSOPHILA
MPDYAEVACSTFKSPTHGAPPMGGGGGGQSASLYDSCGAYATTNVVANVKLYQNRYATKPNQSSGSNNNNHQGNDYQSTGMYSAPPSAHYGCLEPKQQQQQQQPNLMTTSTASTAILTNSPAKVKKINITENKMDQLEGKSERTNPFNQQQQLLLASNALKQGLGAYANTTLAAQMASGGGAGTLRRQRQPKTLYKSENNILGKSGLRQNTMNASVGAPSNGQMDFLTGGPPSEGGDFSGLGLCNSTNQLLNDWASSASIAAPGDYHFGSKQPSKQHLYVKAKDGTWSAVSSDAYQSFKHQQQHHPFLAGSGDNTKSLASVNSLAGDSKFLSSFGSSANV

SEQ ID NO: 34561 - DNA, 2723 bp, DROSOPHILA
acttattgaaaatcacttagacacacatgtgacgccctctagttcgtgagcccgaaaatgaagcaggaaatttcggggctataatttatgtctcggggatttgaatccgagggagcagggttaaaccaccaaaagcacctatgaaaagtttgcaaaacggccagcgagggctgctctaaatatgcaaagccaaaggattggcaaaataaacccgaaggagtgtcaaaaatcggacagctggacagttggatatccttagggcttcttaatagacatgaccaccggctaagaccaccagaccgccagcatgtgacgacaaactcataatttatggccacatcccggccagacgccgaatgctatctcttcctggcccactccacgtctagcgcctccttcccctggtagaatgcgtcctggatctcagtttcagtttcgcccggcatttcgagcctgtcagtgtcgtctgtaattgttttcctaatggaggggagctctggctggagatctggagaactggaccccaaaaacatgaccgcacttaagttgtcagcccagttatgggcgtggacaaatttatgggcccgagcgaaaccagataatcgcctcagaagtggaagacagtggcagttggaacggaaacacctccctgaaatctcttggggaattcgaatgcaactatgggggtacaggatgtgccctgaatgcagcctcaagttgtaagttctttttgtttagatcatagagcttatgcacaatcggtctacgagtttaaaaaacatcaaaattgattaattgtacaacactgatgagttataggattttctatgatttcaactacgtccacactatattccaagttttcggagtaagtgtgatgaaaagtagggttataaatcttgatccaagtagattgcaactaacagacttgttaatcaaaaatcgttgtgctaaattccatttgcactcgcaggctgtgtagtgtcaaaaagtcaaaatcatgttcctggacgactttggaaatccaaaggaggtgactcccgaaaccctgagcacttacacatacgatctggtaatttttcaattacaataattgtgatttcaacaaaagcatttgtttttagcatggcaccaagctgctgacatcggcggacaccgagatttacctgccgccgatgtggcatggcacgatttacagcactgaaaagctgctggacacctacaagaggcggttcaatgtaagttgctttcgaaggagctagagatactgatccaactatttcactagccggatccaactctgctgaccttccacgccatgcagccgtacgaacccgagttcatttgcgtccaacggactgtgatcgagctaacgctccttccggctggtcagagcctctacagcgacaaggacatcgtcgtgttcctgatcaagcagcccgccgagatgaaaaactcgctggtcacaaaggaactgagcacgctgctggacttctttccgcacaaccaccactaccactcgataatcatgaacgagggcatcgatgtagtctacgtggacgacaagatctacaacaatatatcgcccaccagtcaccagttccaccgcctgtacaatttgcttcgaaatatccagccggacgacgtgcagagcctctcgggttctccattgcccgatgtgctgcgcagtgcctgcaggaaggcagcccacaagaccaagtagtcgcactgaaactcaacctcctcccacggaactgtgtgcctccaaaacattgttatagtccggtttaataaactttgtgactgcagaagattcgtctgcccgccgattgtttgcatatctgatggcgacgcattagtcgcagttggttgggccaactgtctgcgctttcctgtctgccaattgatttgattatgttgcagctcgaggggaagtgggaatctggaggagattatcggccgctgcgaagcagttggactattttcagggattaatagcagagttattaattctttattacattcttaaagcaatgtttactttgagtaatggatgtatacttaagtaccacctatcccattaaatcctgtccagtgggcgtattttcccccaaatacaatatatttccccttccctatccacttgtcaataaatatatttttggactatgcaaagcagtccttggcataaacttgtaagtcgcccccacttcggccctccagctcacattagtattcataacaaaatgtcatatattatatttttgggtgtaccaatggccaaatccccttgggcaacgcactgcgtgacatctttgtttgtggtctgacctcctgaacggccaaaaaataatctcctttctgggtccttgttcccccgaattcccctccttcaatccttcggctattcgatggctttgcaatcgctttactcttttgttttgtgcgtggaatgtctaatggatgcggcaactaattgagttgcctgcaaaggatttcgctttcctccttgcatttgcaaatcctttttcggagctaaatcgttttggttccttcggttgggtcgagcatttgcgatggtctcagtacttaatgaagcggatgtgaggattttctggcacaaacattcgacgcaaatcaaaaagttaagcattctagggaaagtgttcagcgagagttggttgagaaatcgatgggaatgttaagttggaattggaaatctt

SEQ ID NO: 34562 - DNA, 621 bp, DROSOPHILA
atgttcctggacgactttggaaatccaaaggaggtgactcccgaaaccctgagcacttacacatacgatctgcatggcaccaagctgctgacatcggcggacaccgagatttacctgccgccgatgtggcatggcacgatttacagcactgaaaagctgctggacacctacaagaggcggttcaatccggatccaactctgctgaccttccacgccatgcagccgtacgaacccgagttcatttgcgtccaacggactgtgatcgagctaacgctccttccggctggtcagagcctctacagcgacaaggacatcgtcgtgttcctgatcaagcagcccgccgagatgaaaaactcgctggtcacaaaggaactgagcacgctgctggacttctttccgcacaaccaccactaccactcgataatcatgaacgagggcatcgatgtagtctacgtggacgacaagatctacaacaatatatcgcccaccagtcaccagttccaccgcctgtacaatttgcttcgaaatatccagccggacgacgtgcagagcctctcgggttctccattgcccgatgtgctgcgcagtgcctgcaggaaggcagcccacaagaccaagtag

SEQ ID NO: 34563 - protein, 206 aa, DROSOPHILA
MFLDDFGNPKEVTPETLSTYTYDLHGTKLLTSADTEIYLPPMWHGTIYSTEKLLDTYKRRFNPDPTLLTFHAMQPYEPEFICVQRTVIELTLLPAGQSLYSDKDIVVFLIKQPAEMKNSLVTKELSTLLDFFPHNHHYHSIIMNEGIDVVYVDDKIYNNISPTSHQFHRLYNLLRNIQPDDVQSLSGSPLPDVLRSACRKAAHKTK

SEQ ID NO: 34564 - DNA, 4687 bp, DROSOPHILA
taggcaccacactcagacgttccagttccgagccctcgggcaccgcaaggaataccaaattgaataaatagggtacgctataatctccaaagagtaacccaatagccagcgggcaaaccgcaaaactgcaagcaggaatcgtcctttgccactcaataaatgctatccgtctatgtgcggagcaggctcaaatgtcagtcacatattccttcaatcatcaggacgctccgcagagcgatttcccaaaggatgccagtgcaacaatgtcgtggctggggtgggtgtaaaacatgggcacaaagtccaatttgtttgtaatggcattactttgtttacaaaacaaattttgtatgcatagcgagtagcagtcgttgggtggaaagaggtgagttggccagggactcccacacgaccaattcctagcccgattcctcgacccttgcaacaaatgctgcacaacaccagctcgaatgccgcgggagctgtcgcagtctgggaaactcgaaaacaaaaatggaaggcgggcaaataaaatatagacatagatatatacaatgtatatgtttgtacagcttctaaaaatcgttgtaccataaaatttccccaatggacgctcggagttttcgctctgcaaggacccaacgtcctgccttttcgctgtttaattttacaattgtcctttttctttattcctgtccagggagcgagatgagttggtgggccaggtttatctatgcgcatccgttccaagtgcggttttgtgatttatgctcgtttctgtgggccaacatttgttttgctcacctaggccgagcaaatagggcagttttgttggtggtaaatgtggttcacgtagaatcactataatttatataagttaagcttttaaaaacgagttcccagaatgggttaatttccttaatccgaagtcaaaatcaattcgatatgctaattgcgacctacaagttacacttttattttaaaacaaagcttatacttttcaggtatcataaggacacgactcctgcggaactttgctcatgtcacctataacaaggccggcactttttccaaagtactgagccatatgaataacctgagtactgggcaatcgttttcgggtctggatgacagcccaatctatgggatcaatggaatcgtattaggggaaagtatttattattcacagcactgcactcacgaaagctgaatattttgctggcatcaaagcacataaatcgaatggcgaagttcacataatcggtatccagaacgtacatgagaacgccctcaggaaatgctgcaataaaatacgttaataactcgctttaattggtttaactaattccaccataatttacccgtacttgttgtgcccaaaacataccgcccaaattctggctccacgttcagtatgtctgcctttctcatctttacagtaccagttctgtaaatatggcttatagagttgtttcaaaatatttaaaatcactcactgggtgttcagttcccgggccacaacgctgaatttattctcttccttctctatgaaatccgtcgactgacatttctccactcgcaacgagagatgaggatatatcgagtgggtgtaccactttcctttgaatcggtccatgtccaaatccccaacagccgtcatattggagggacaggctccgtgaaaggcccgcatggccatggaggattgaagatataggattgcagggctttcgaagaattatgtagggtattcaatattcatatagctgatattcagaggctgcactcacacgaagatcttccacttgatcatgctggaacggtttgagtaaaactgcaaactgaatcatttagtctggtttatttgaatccactggatacggtttaatgaaaaataatcaagattttgcggagcacaagagtttcgcacagcgtttaaaacaaaagcggaaccgttccattgagtcacttgatcgtgtacatctctcagttgtataaagtctttacatgatcggttttctatttatttattcctcgcaataacaacaaacttaaattgaagcaccaaagaacatttagcatctgaaatacgacctctgtgataacatgacacttagtaacttaggaagttcataaaaatgtcgtagagacgctcgtagaggcgtcggagccattctcatgccttttcaatggcatttggcaccgtggtagacacgaagtcatccacatcgaggccatcctctccggccagcccagtgccattaccatccaaccggggacagttcttctgaacagtatcgatgaggaaggcctgggatacatcgttgtcttccaagatctttctggccgcatcaaccgcttccgctgaaggttcacgctgacgagtcaagatccaaacaatttctgcaattaaaattataattatcattctggcgtaagtgcttgtcactccattttagtttagtgacacagttcgcatatgaatatgctgacaagctgactagacaccccattaactcactgaaattggccaaaggtgttacactggtgcagctgtagacgacggcgtatgactcgtaatctgtgcccaaaaccaggtagttggccttcgtcaatggctctaaaatgtattggataagcaaaaaaatgtttgttaaagagaccacctaaaattggcattactcacgcgtcgggtaaaaggccacggccaattgaccgggtccaaggaccttggcctgtccagttacattcgagggttgtccggtgctttttcatcgattttttgattaaatggagtgtttcagattatactacttgatactcacaatcgattgatggccgcattcaccaccgaaacagtgctgttgtctatgagactgtagttggcgtagatgcacttcttgccgatctcgaaagcaaatggataggctgcgtactcgtaccagacgcccatatactgaagtattcgaaataataatagtaataaatacaatgtaagaatattacgtttaagcagatggtcatataataagtaatacaaactacagcacgaagtgtttacttgttatttaaaactgtggaaataattatagctacattagataagtaaggtccgataattaaaaaaataccaaatacaaatatttacctagaaagctgtaagaacagtgcactttattaatatgaaagcaatttgcttatcttatcattatagttttcgctatctatcaattttgcaaaactaacgaaattttaaatttgaagatcgaatttccccaattggtaaaccatgtgaagttttactaatatcgcttaattcgatatatacccttatatttaaattttagttcataactattgagactttgaagtgcctttattggcatgttcgcttgcaactgatcgtttagactttcctattctaaatctatcagaatgacatgattaacatgcgatgcgagatggttggcctaaggtcagaactcaccgcttccgcgtcgaaggtgtccagtagcttaacatctgggcacttgccaggaaatggcacctgggcatgggccacccatactgccccaaataccacggagataagcagcaacaggtgcgaactgtggggatgattaatgaaatgtaaataacttggagctagtgctcagcgagtggcgcttacctcgagtgatgattcattctggaatatactgggagatacggtcgctatccactgaacttggtatccgttctacttctggcttagaactgaggttcgactgcatctgcattgtatcttttatacgctggatgcgagagctttgcttttcgcgagcgagcttttcgagtgcgccgaatcggattgcccatgtgaacaaagtgaaatgcagacgatctgattgcagaatcagaacatattgctcttgttacaatcgctaggaggcagctatggaaaacaatcccaatacaactcacttaatttctgtatgcacatcgcgataattcgctttcgataagggcttccgcatgcaaagcggaacaatttgcactgcaattacgggggtcaattaattaagagagatcgcaacttagtaggttcaatgccctgatatggcaaagtgaaattgaatagtgagtaagcagaaatgaattattcagttcgcaaatcagaatgactatttcagttattgcatacgtattaatcagacacctttaatttaagttacatcttaaccatttatataattatttatattaatacctttgcatattcaattacttccaagtattacaagttttatgacactataataaaaatgtatttctgctacactgattttactaaaatattttaaatttggtaccactgcaatatttaaataaataaatggtatttcttagcatccacccacaggagagcttttcccttcatgtggattccgtttgtggcgccatctcttcgcacttctgccagcgccatctgttgagcgctttgccggcgttgctcgatataactacaaatgttcgcatattttgaggttccttcagctcgtatccttcttcagctcgttctcggactggtcagatgaattgttgacagtggcgagatttctgcggtttttctctttgcagctgggaaggaagagaatttaatttccccatatattattaaattaattaaatgtaaaccacaaattga

SEQ ID NO: 34565 - DNA, 1218 bp, DROSOPHILA
atgaatcatcactcgagttcgcacctgttgctgcttatctccgtggtatttggggcagtatgggtggcccatgcccaggtgccatttcctggcaagtgcccagatgttaagctactggacaccttcgacgcggaagcgtatatgggcgtctggtacgagtacgcagcctatccatttgctttcgagatcggcaagaagtgcatctacgccaactacagtctcatagacaacagcactgtttcggtggtgaatgcggccatcaatcgattcaccggacaaccctcgaatgtaactggacaggccaaggtccttggacccggtcaattggccgtggccttttacccgacgcagccattgacgaaggccaactacctggttttgggcacagattacgagtcatacgccgtcgtctacagctgcaccagtgtaacacctttggccaatttcaaaattgtttggatcttgactcgtcagcgtgaaccttcagcggaagcggttgatgcggccagaaagatcttggaagacaacgatgtatcccaggccttcctcatcgatactgttcagaagaactgtccccggttggatggtaatggcactgggctggccggagaggatggcctcgatgtggatgacttcgtcatgatcaagtggaagatcttcgtccctgcaatcctatatcttcaatcctccatggccatgcgggcctttcacggagcctgtccctccaatatgacggctgttggggatttggacatggaccgattcaaaggaaagtggtacacccactcgatatatcctcatctctcgttgcgagtggagaaatgtcagtcgacggatttcatagagaaggaagagaataaattcagcgttgtggcccgggaactgaacacccaaactggtactgtaaagatgagaaaggcagacatactgaacgtggagccagaatttgggcggtatgttttgggcacaacaagtacggcatttcctgagggcgttctcatgtacgttctggataccgattatgtgaacttcgccattcgatttatgtgctttgatgccagcaaaatattcagctttcattgggctgtcatccagacccgaaaacgattgcccagtactcaggttattcatatggctcagtactttggaaaaagtgccggccttgttataggtgacatgagcaaagttccgcaggagtcgtgtccttatgatacctga

SEQ ID NO: 34566 - protein, 405 aa, DROSOPHILA
MNHHSSSHLLLLISVVFGAVWVAHAQVPFPGKCPDVKLLDTFDAEAYMGVWYEYAAYPFAFEIGKKCIYANYSLIDNSTVSVVNAAINRFTGQPSNVTGQAKVLGPGQLAVAFYPTQPLTKANYLVLGTDYESYAVVYSCTSVTPLANFKIVWILTRQREPSAEAVDAARKILEDNDVSQAFLIDTVQKNCPRLDGNGTGLAGEDGLDVDDFVMIKWKIFVPAILYLQSSMAMRAFHGACPSNMTAVGDLDMDRFKGKWYTHSIYPHLSLRVEKCQSTDFIEKEENKFSVVARELNTQTGTVKMRKADILNVEPEFGRYVLGTTSTAFPEGVLMYVLDTDYVNFAIRFMCFDASKIFSFHWAVIQTRKRLPSTQVIHMAQYFGKSAGLVIGDMSKVPQESCPYDT

SEQ ID NO: 34567 - DNA, 2264 bp, DROSOPHILA
aaagtttcccaaatccacagtacttaactcataaatatacaccactcgaaataatttttgtttaatttgcggccagcataaaatcagccgcaaataaataacaattacaattcgatgccaggaacattgcgccaaaacactttcgagtcgaaacaatattttcactgccccatttgattattttcctgcatttgccaggggccagacatataaattagatcgccctcggccgaaaggccagctacatggattcaactttgatttgccagctaccacaaaactaattgcaaattcgcggccaaattatgcatagcatattttatcccagccccgaatcctttttgccaattttttcggtaaagttaaagtcgcgttaaagccgatcctcagaggcctcaataattacattgctctgttttttttttttcggtgcgaactcaactgggctttggcgaaaaatcaacataaatagcgtggccaacatttctattcctaacttgattttgcccatggcccgggggaaaaacgaaagaaaaactctaccaaaaagtgagttttttcggtgggctcccctttttttgtggatgctcctttttttctggtagtcgccgcggcagaaaaatgcaatttcacagtttggtgaatttttattgtcgtcgctttgagctgccaggtcgacgaaacactctgccttgtaaagggtgtttttgactggacgtaagattggatcagtctgcgctgattactaatttactgtatgcattacaaaattgagttatttgtgtgcttttcccaaattatcaaagagtactcttttcaacctaagactcttaatattcgaaaaaagccgttaatgttttaaacaaaatgggagtacacatctcttaggcgattgctttcaatatttaataaagagcatccccaaaactttatttttttaacaaaacaccgcttttatgtgtccctctttattgtcggattggttttttcgaggtaaaacttaccgctgctgattgcgttcgctgccgtgtcctccatgaatgtcatcgccgccgctggcaccgctgcccgcgccaccggatccaccggaagaggtgccaccgccggccggagaaccgggggcaccgcagaccggcgcatagtcggcgatgtgatccttttgcatctccagcgagtcgccgccgggcgagggacgccacaccattccgccggtggaggagtccagccagtagccgtttccattgcgcgccgatagactcggcattttgagcacgtcgctcgtgtgattgcctgcaggtgagaggagagatggagaatggggaaaagggggccgtcagtcagagcaattaaatgtggtgcaacaaattgtgagccgaataaattgctttccggaaattaaacaaaaacatacaaaagagccgcctagacaattggatgttcccgaaaaggatttcgatgggattctactgggattttggtaagcgtacagcaatgttttcgaataaggttaacttaactcattatgcgctttaaaattacaaaaagtatagtcggtctagaattaaaatgctggaacgcttaaagccgcacctataaattgagcgcattaaaataatattatccccatccagtgacgctgcgactggaaagttacctcacactgccagctgccaaatcaaataaattattgtcaattttccgcttgcattgcccgctcacaaaacacaacaactgcaacgcgggtgccgcataaaaaatgcaaccaattaaactgtccccgggttataactgagcatcaagcgagtgttttatagcccgccacctctggtccagagtccctcatattttgccttttttcagttggctgcaggtgaatattctgatctccctctctgcagcttagtttatggtaaatggcgcccatgaatatgcaactttttgtggcgctctgtttcggagcatttggattttctggctttcacttgtctacgctattgttgagtgctgagtttcgactgaattgcgtggcgtcactttcagctttaaatattaaatttgctcaaactgaaatttgtttttagatgtttcgttaggaagatcttggaccactagccctagtagcgcttacaacccatcctaaatgcccaattccccagctaacataccactaccttgctaatttcaattagaccacaagtagtggctcaaccctcgtattcccatatccgtgcgatatatatatgcacacatatatcgcgcttctt

SEQ ID NO: 34568 - DNA, 264 bp, DROSOPHILA
atgccgagtctatcggcgcgcaatggaaacggctactggctggactcctccaccggcggaatggtgtggcgtccctcgcccggcggcgactcgctggagatgcaaaaggatcacatcgccgactatgcgccggtctgcggtgcccccggttctccggccggcggtggcacctcttccggtggatccggtggcgcgggcagcggtgccagcggcggcgatgacattcatggaggacacggcagcgaacgcaatcagcagcggtaa

SEQ ID NO: 34569 - protein, 87 aa, DROSOPHILA
MPSLSARNGNGYWLDSSTGGMVWRPSPGGDSLEMQKDHIADYAPVCGAPGSPAGGGTSSGGSGGAGSGASGGDDIHGGHGSERNQQR

SEQ ID NO: 34570 - DNA, 2898 bp, DROSOPHILA
attattgtcaattttccgcttgcattgcccgctcacaaaacacaacaactgcaacgcgggtgccgcataaaaaatgcaaccaattaaactgtccccgggttataactgagcatcaagcgagtgttttatagcccgccacctctggtccagagtccctcatattttgccttttttcagttggctgcaggtgaatattctgatctccctctctgcagcttagtttatggtaaatggcgcccatgaatatgcaactttttgtggcgctctgtttcggagcatttggattttctggctttcacttgtctacgctattgttgagtgctgagtttcgactgaattgcgtggcgtcactttcagctttaaatattaaatttgctcaaactgaaatttgtttttagatgtttcgttaggaagatcttggaccactagccctagtagcgcttacaacccatcctaaatgcccaattccccagctaacataccactaccttgctaatttcaattagaccacaagtagtggctcaaccctcgtattcccatatccgtgcgatatatatatgcacacatatatcgcgcttcttcctgttggccgcctgaccagcacacacacacacacacaacttgttggttaataatgcacacaaaactaaatgcataattgcaatggcagccattagggggttgagtcgagaaattcccgactagcgaactaggggaagtcaccgtcacgtgcaaaatgttaatttctattatgtgtggcatgtgagtgcgccgatgtggcgatgtgcctggtgctcggggctcctatgctcggcctgctaaaatatttattcgcacctatttcggtttttttgccctgccgctctagttgttgttattgtgtccaacaatgggaaattagcgttatttatatatgcaaatgtgtgtgtggcgtgtctggcaaggaaggaagcgaaaactagcagctcgcaacggatgcagagcctgagggcccggaagatcacaggcgccctgcaactgaggcgtatgcatatggggtttgaaatagtggtgtccttacacagcagaaaaatttgtatattttgtattttctaaataactatattccaactaacctagtaagactaaacactattttaataaagcgattttggcaacaagcacttggcacccattgttggtttcacttccacgccccacgttgggcgccacaagctggggtttttttttcaatgtactcaccacgcattgtatttagggccgactgcttcatcatcatgtgcttgcgcttcacaaagaccattgcgccaaaggacagcataagaacggccaggatggcgcccaggagtattatgaaccagggctgcgtcagcacatcgttaacatggtcctgattgatgggatagctggaagcaccaaaccaaaaatataaatagaaattatccactcactgctgaaaccaaaaccaaaaatagacaagtcttaaaggactcaaacctaccgctgattgatgaacggatcgagtcgctttgtgatgggatccaaacgcaaagtagctgggacacaataaggaccaactccagcgttatttccggccgccacgcccacggtgtacatgacgccttcggtgagattggccaaaaccagagtaggcgaagcggcatcgatggtgacatttgtcaaaatgcgtgagaaattgtgggcagtgtcaatacctcggactataacatgatagttcaagagaacacctgaaaatacaatagaataagtaaaattatttaaaatgtggtgcttatgggaatgacttattttctattaaacctaccatgccgatccttgagttctggtgccttccatttgaggaagaccgcggaggagttcaacagcagagcctccattccatatggtgcctcagagggaactggaaaggaaacaaatttcggttgggttagatttgaattttgggtacggctgagattgaggagcaaagttaaatggctttttgattgtggtgcgtgatgtcacccagctgacgtccgctctaatgagatttggtggccgtaattaattagcatttagtgtgtgggttaccaggggaagttgctactgcaactagttccgggtgttggcttcaagggtttcccgaccattgcactgctcagacacatcctgcctgcacatcgagtgcgtacagaaaaggaaacggttgaaaagcaggaaaagaatcctttccgttctcccatctcacttcacaagcacacagagctcatcttcatttgtttatttgtttcctgctgtcgctttttacaagtgggtacactgagcaaaacgagttaaacatttagctcgaaatctatagattctataatctatataatgtatttgtttggagagaagtgaaggtgcactaactaaatattgaaagtcatatttttcagcttttccgagatagaaagatatatatttaccagagtgcaacccctactcgtgcaattctccaaccccccttcgcaggttttgtttctttttgtgtgtgcggctgagtgaagcaatttctttaaataaacacacacgtgcaaaattctcaacgacacaaatgtggaagggagctcgggaaaacaaagcgtagaaagagtaaaatccctaaataggcaacgtctagcggagtgtgaagtggagtgcagtcgttcttctgtctttttttttggctttgttgtaacccagctcgctgaatttgcccctttcccttggggacattgcgacatgctaaagtgcttgtcgtgcttttgtctatgcgggcgtttttttgctttacccctttgctttcttcctggtgctttctgcttttcgccttttcttccgctgatgaggcaccgcgatgcttaacacgtatctgcc

SEQ ID NO: 34571 - DNA, 501 bp, DROSOPHILA
atggaggctctgctgttgaactcctccgcggtcttcctcaaatggaaggcaccagaactcaaggatcggcatggtgttctcttgaactatcatgttatagtccgaggtattgacactgcccacaatttctcacgcattttgacaaatgtcaccatcgatgccgcttcgcctactctggttttggccaatctcaccgaaggcgtcatgtacaccgtgggcgtggcggccggaaataacgctggagttggtccttattgtgtcccagctactttgcgtttggatcccatcacaaagcgactcgatccgttcatcaatcagcgctatcccatcaatcaggaccatgttaacgatgtgctgacgcagccctggttcataatactcctgggcgccatcctggccgttcttatgctgtcctttggcgcaatggtctttgtgaagcgcaagcacatgatgatgaagcagtcggccctaaatacaatgcgtgttgcagggcgcctgtga

SEQ ID NO: 34572 - protein, 166 aa, DROSOPHILA
MEALLLNSSAVFLKWKAPELKDRHGVLLNYHVIVRGIDTAHNFSRILTNVTIDAASPTLVLANLTEGVMYTVGVAAGNNAGVGPYCVPATLRLDPITKRLDPFINQRYPINQDHVNDVLTQPWFIILLGAILAVLMLSFGAMVFVKRKHMMMKQSALNTMRVAGRL

SEQ ID NO: 34573 - DNA, 2660 bp, DROSOPHILA
gcagttcctcttgatcggtattgtactgggtctgtcaatgataaatataatgtttttctcaacactttcgactggtgtcgccgttgtcctttttatgtcctgcgtatctatgcagacgttccccttttgctatttgtgtaacatgattatggatgactgccaagagatggccgactccctttttcaatcggactggacatctgccgatcgtcgctacaaatccactttggtatactttcttcacaatcttcagcagcccattattcttacggctggtggagtctttcctatttccatgcaaacaaatttaaatgtgagtatcaatcaatatgagctataatgtatgtatgagattaaaattactattcttttatagatggtgaagctggcctttactgtggttacaatagtgaaacaatttaacttggcagaaaagtttcaataagttaagatatgcaagctctgctattataaacctacactcgagaaaatatttcttcacattaataaaccttcagtacttactgcttgtggcgcccccggaagtatctcttgcgaaatattagtgtggtaattttataagtgattatggactcattttcgtaaagcaaaagaaaattatttgtcggcaaaagaaaaccagacaagctccaccataaaaggacttaaagttgggtcagtaaatctactgcagttgtctctttcgcacgagaaggcgcccagggcgtgctttctcttgcccgccactgtccatttaataaagtgcaaacaggcaagtgattatttcacagctattgttcgaaaaggatgcggatgcgggttggaccaaaaagaggcgtggtctggggtaggagacaacaaaggatttgcgttataaccaaggtaacgaagcagaacacacaaaacatataaaagcagcaaaaacaccatataacgagaaggacaagcgcgaaaaaattgtgcagcgcgaataaaaaatttaactaaggaaattaatacaatggtgcaaaagagggacagtaaaggaaggcctgggtgagattggagatgggtcaacagcaagagacattttgggagctgttttattgcactcttaatctagcatcctgagtaacacacacacacagtaaaggacattcagaccctttttcacttcaacaaatcattgagatcactgcttttgagttccgtgttctttcagtctcatctatcatttgactaatgtcatttagcattagacctcttgtactatgcaaatttagctgctatatttcgactaaaccttccaaggtcggtcgtctagtgaaaaaagttcacaaattagcgctcatcatcaatcaatggtgggctagcagctccagccgaggtcaatggggtgaaatgctgacgctaattgcaatttgtggtttcagtcagctgcaagaggagcggcggcaacaagaccgatatatgtacaatgtactacatcgcactcccttcgaacagcgtttgcatttgaggacctcgatgatggattttggccagcagtgcgaagccgaaaaaccgcatcgacatcatcgtcatcttctccctaacccggccaattcgattgaaggaagttcgggccctgctcccggcccgcgaaaaccaggtaaactcaatcagtggggaggccaggtagccgacatcaggtgcgcatattcaaatcaagtgtttagtggcctggaggtcgcaacgcggtctgctgcttaaggattctgcgtggctcatgtgtttcctttgatctgcagcccttaagtgtgtttcgaggaattcgcataaaatattcaataaattctttcatcggaataacattatgaatcgcgcaggtaacgtatcttttactatgcactatgcaggaaacaacatttgagtcagcttaaagaatatggaatttaacatgtttatatggtaatttatattgcacaatttctatttaatttgtattgaatttctacatatttaagtgaaagtatcttactcaggcttcgagatccttgaaaatgaatgttaaatttcagttgacatccgtgacttttcccaagtgacttgcactggctcaacatattttattcgccaattttaattattaaatggtaagtccatcacatggctcgcagacatattttcccatagtattcttttattattgctgctaatccgataaacaacgctaaacgcacaaattggaaaataagcaagtgcacagccagaaagtggccaagtcatggcagctgccaaaggaagtcgtgactgtggttgcctcttctacactgactttgcacctctttccggcaagcaagtcctgatcctttattcgagcggcatttgtggcattcgaggcgtgcggcacacgctgcgtatgagctattttcttaagttgcttcctttaacctttcgcttttcttttgttcgctatgtctgaatgaatgtgtgccatgtgtggcatgttcagcatgcaatgtctccctttggacttattgaaagcatctgtgagttatttttatagagctactttatgcccctccctctatcggtggttgaaaactcgagtcacatgaaagtgcgccatcaactgggcttgttttttttttacttttaagttatacaagccaataaaaagctaaatattaaaggtgtat

SEQ ID NO: 34574 - DNA, 171 bp, DROSOPHILA
atggtgcaaaagagggacagtaaaggaaggcctggcagtgcgaagccgaaaaaccgcatcgacatcatcgtcatcttctccctaacccggccaattcgattgaaggaagttcgggccctgctcccggcccgcgaaaaccaggtaaactcaatcagtggggaggccaggtag

SEQ ID NO: 34575 - protein, 56 aa, DROSOPHILA
MVQKRDSKGRPGSAKPKNRIDIIVIFSLTRPIRLKEVRALLPARENQVNSISGEAR

SEQ ID NO: 34576 - DNA, 2153 bp, DROSOPHILA
tcaaacacgtgcacagaacggaaaaggttaacaacacaacaaaagtaaaaacagcaaacagcagcggtaacagcattacattattccttcttttttttttattttgaccaaacacagggaaataaaccaaattttaaaaccgcgcgctaactgaaaaaaagattcgaatataaaaaaagggggaaaataaaaacggatataaaggaatttcaagcgtttggcgttttgtcaaccagtaaagggccaagtgacgagcaaacaaaaaaaaaaaaaacggaaaatatcgagggagaggcgcacaagtggctgcaacaaagggccccgaaccaccgaacccgcgacctctgacaccccaaaaaacaacaaaatataagaatatctaccttttggccggaaaacgcttgtttcagcacgcgaacaagggagacgggacgactgcgagggagggagacaggaccaggaacaacagcaacaaaaacaacaaaacaaacaggtgagaaggagacttgcacgaatgaatgaatgaatgaatgcctgggtgagggaatgaggaattgcggggggcgagtatggcgaagtgaatgaataaaggcaacaactgaaaaacggaggccagtacagtgatacctcaagtaacatcaattctgtattatttcacttataaaataacaatttatctagtaactttgaatggttaaaaaatatttttatatatgtatatccaaaactatatcaatttcctttgttgtcgtaaaaaaccaatatcagcaaacgaaattatcacaacagcgcaataactaacctcttctagccacaaatttgactttgcgagtgcccactgtttattagttccagttgcgatacagtgattgaaactgataaagaataataaaaaaggctttcctcatgcacgaggattttcccaaacaattctttcccgcggcggtggtttttcgtttcacttcggatggcagagaagcctgctcaataagcaattaatatgcacaagtgtctgcccggcgagtttccaccaaaatctccgagaggaaatgggaccgagtctcgactgcgtgaaaatggggaaagaaagaaaagccgagcccagcgtggcacattgtttcgatttccacgcagtgttaagagcttaatttaattccgaaaaggttttttcacttgatgaaaattgagtttggttttgtcgaggaaaaaaaacgggcaaagcgaaatcttggtaatgaaaatacaaaaatacaacactgccctctgattcaataattaaatatatattttcagtaattttattagttcgtgtgtgacgtcaaattaacaaacatttctcctccaatttggagaaatggtttacacaagtcgaagtgatccgtgtgctgccttctaccattaattttaatgcaaatcaggttctattatctcaattgaaagttgtctttgagtaatttgagaccaaatttgattctctgctcgccggagccattttccactgatatttctccattctgcagcttaccccagtcacgattgcaactttaatctatggcaatttatatttgcttttgttggtactaaacaaattcaccatgaaacacacacagaactattttggcacaaagggacgtagtcggaggtttttccaggggggtttccacagtatcatccataaaagtatgaaataaatcggaatatgcacagcaatgatttatcattatttggattctgcaaatgcaatttggccccccctgctcccgagccactgaccttggtggaaactctgcgtgaagttgcaaagtaaaaataaccgggaaaagttgcaaaaagcagcagaagtaatgccaaaaaatacgcaaaacaaaagaacaacgagttcgcaaaaagaaaaacactccttcagaagtacaacgtattggtgtagtcaactcgattccggcgagactcttgtgaaatatcgcactttgctcatagaaatggttatctgcgctcgaaaaagaaattcaggaaaagtccgagtaaacaaaaacacaaacagcgagtaacaaaacgcatggcaaacaaactcgcacagacaaaagtaatgtgaaacacaataaaagtgtctaactgtaggaagaaatgaaagtcaaatgctggtgcgtttccaa

SEQ ID NO: 34577 - DNA, 153 bp, DROSOPHILA
atgcacaagtgtctgcccggcgagtttccaccaaaatctccgagaggaaatgggaccgagtctcgactgcgtgaaaatggggaaagaaagaaaagccgagcccagcgtggcacattgtttcgatttccacgcagtgttaagagcttaatttaa

SEQ ID NO: 34578 - protein, 50 aa, DROSOPHILA
MHKCLPGEFPPKSPRGNGTESRLRENGERKKSRAQRGTLFRFPRSVKSLI

SEQ ID NO: 34579 - DNA, 8984 bp, DROSOPHILA
tccgtctgaaatttctgcttgaaatcacataatataacaatgatctgcggcataaaaactgtctcagacaataacaagcgaaagaggagaaaactgtgtgtcatcataactcatgattatgcaaaaaggtcaacagcttctttgctgacccttaagtcatcgtccattgtttgcttttgaggggttcaaaagggttcaaaaggcgaaaaatgcttgggcggtgaaaagggggccgcatcacgtgcttggcttttttatgatgcggccaaattaaattaaatggccaacaaaaagctgcgccgcgcaacacttttttatttcgagcgtttggcggcggttcccttttttgaaaaggagtcaccaaagggatgcaaaggatttactttcgctacgtcttgcttaccatgtttttatgcctattttatggccaaaagcggagcgggaaagtccaactgaagcacctcgtatgacaggcggcgcagccaggcagacgggcaaattaatcaaaactaaactgccccaaggatcagatcactggaatgggctgccatgggatggcatggtatggggctcctctttcacgcactgtttgctgtctaacgagcatgaaaatgaaattgaaagtagcctgccaaaactgattgattaagcttgcccacttgcacttcccatgcagtgagaaaaacatctcaagagtgctagtaaaataatgtacatatgtgaaatctaaataaatgtatagaaattgcattgtatttctttctgtgtacacttctgctactagacactcaccccaatgccaatccttgaccaactgaccagtgaaagacactagaaaacagggggcgatttgcctgccaggcgacagtattaattgggtaatttattgccgggctggcccagacaaccttcactttttcactgagtcccagcaggattgagtctctctaactgagcgccgtcttctcccatttacttgcagctctatgccggcaccaagatgagaccaggccgaacgacaacagctttaccagcagcgaccacgcccctgctcctgctactcccacttatcctgggcaggctccacgtggcccacgcccagtgtccttggcagcgagatgtgcccgacctgcagacgagctgcatctgtgcctacaacctgggcagagagctatccgtgcagtgtgatcaggtgagagttgattcctaattcgatacgaatatgcaaacctaatctggtgtgttatccagatccggttaaattccttcttttggaccaacaatacttaagtggttggttgtgcaaccttttattccctccaatccaggtggacttttcgcaactcctggctgcgatgaacacccatgcccgtctgaagcccgtggatttgctgtacgtgaacaactccacgatttccgagcttcccgacgccgttttcagcaatttgagcctgcacaatttgcagctctcgagctgcggcatccagaggattgcgacgggtgcctttaagggccaggagtcggtgttgcggaatctcaatctgcaggataatctgctggccgacgtgccagtggaggcgctcaaggtcctgggcaagctgaacctgctggatttgtcaaaaaatcagctcagtcacattcccgacgacgcctttgtgggcctaacaaagctgtccaccctcaaactgaacgataacaatgtcaccctggccagcaatgcatttagggggctggagcagagcctgaagaacctgaatctgaagggcaccaagcagcgaaaggtgccggaaagtattaggggtctaaagagcctggccttcctcgatctctcccagaatggcatcaaagaactaccgggtgcgggcggaatccgcgtctttgacggtctggacgccctgactgccctgaatctggagaggaatctcatccagagcatcggagaaacagcatttgccggcgtgcgaaaaacactgagctcgctgagtttgctcaacaacctgctggccgaatttcccattggagccgttcattcgctgaaggagctgcgtgtcctggacattggattcaatctgctgaccagcctgccggaggccgcctttcggggcaatccgggcatcactctgctggccctggacggaaatccactgagcagcgtgcccgaaggcgccttcgcccatctgaatgccacactccgcggactctccctcggaggcaggttcctccactgcgactgcaagctgcgttgggtggccgagtggattcgcaacggcgacttgcaggtaagtgcatccttttaaagtcaaattcaatgggaaattgtaactagatgccacacaaatcctttcaaattaatttcgaccaatcttaaatttgcttaaagcccaaactcttgaaagctatcaacttctgcacaaatatttaatggactattttaccgagcctccttacataattcaatgacttaaacttgtttcagtttgatagagaaattcctttaataaatatcaacgaccaatttcagcatccctagttcccacatttttttttttttggtttcctctataaaaattgttgtcaaatggaccatttccgattggatctttttgcaaacttgccaacgttcgtttcattaactgtgttttggtctgttttgcttttcctacccaaaaccaccccgcacggccttaggttacatcgcgcgaacggaatccccagttctgtggcaccccacctcgcttccgggaccgaggcttctactccattcagccggaggagctgagctgcccggacattgccgatgcggccctccgtggacccgtcggcctggccgataacctgaagcccaccctgccctcgtcgcccgattccgtggaatatgaaacgggcacgggcacgggtacagtgggcactggcacggctgcctctgctccggtgaccagcagtgtgagcagctccacctcgacgacaacacccacaacaaccacaacgacaaccacagcggagccaacaaccaggagaagcacggtaagtgggcaggtgataaaaccgggcggcatcgttaagttaacaattgcgggaaaataaaatgcaaaaaaaaaagaaaggggggagtatatgatggtggcataaagtgtccgtacatttgcggttcctcggcgacactttgtcaaataaatcaagggacattattcgcactgtgttgatggttcgttcttgaagtactcttaaaataaacatacatatttgattgagctttgaacttttgaattctcacatatatatatatattttcccatactaaatgcaacagactcgtcctccgaccaagtcaactacaacaatatcggccaccacagcctcgccagcttccaatccccccgtaaatggaacgggcacagttcaggccacctccatcacgacgagcagcagctcctcctcctcatcctccacgtccacgggtcacggcaacggcaagcaggcgccgggatggcgccaaggagtgaccaatggcaatggcaatagtggagtaggaggagcaggaggtctgcacaagccgcagaggccaccacttgtcctgggctatccaccacagaggggcactcgcatcgacgacgccaacgaagtgcaggtgaagcacgccttccgtcaggatagctccgtgatcattcagtgggactcggacacggctaatattctgggattccgcgtggtctaccgcctgttcggcgaaaaggccttcaagcagggacctccgctggagtccagcgaacgcgaattcaagatcaaaaatgtgccggcccaggagtgcatcatcgtgtgcgtcatctcgctggaggagctccacgtgaccccggaaacggttccctaccagcagtgccgcgaagtgaggactgtcgcctcgcaggcctccaacatggacaagataacgattgcggccagtgcggccatttgtggcaccatcattgtggccgtgatagtcttcatcgctgccagcaggtgggttcctctgcactttgaatacttctgctccccctgcttcctttccgaccaaagagttattacccaacaactgagccacggacaaagccaattgctttgcaaagtggctggctgatttatcgcaggtccttaagtcgttcccactttcctatacattatacagtgtattcttgccccatcgccctgcgtggaatttgttacgctctacatagtatctttgcacttcatcatctttcggtgcaacccattgtactctgccaaaggttattgtaatttgctaaggaaggttgttaagattatcattgattattatcatatgtcaaacaaacgcataccctcgtaaatttagagaaactatgatgttttttttttgtttcatgtaatttatttcatctacactatttacttatttgaaatgcagtactttcattatgcgaaactaggtaaattgccgtttagaactataaaacgagataaatgatgcgattacttgtttggcagtgtatttaggacccccacttcttgccgagactcatcctttcatccccgtttgtatctttttcagacgatcccgcaaactgcagagcagccagcagaagagtccgctgccaattggaggtctgcccgttaattgctgcggtccgaccggttcaccgggaccacttggctccattgcaacgctatcggcatttaacaatcacaaggtgagtagaaaccccaacctccgccctctgggcctccacttggcttagctcgaggtggagcttgccaagaaattgttgctacttctggctcccggctggctggccaactaaatagctggctgactggctgactttctgtccggattatcgggtagctggttatcttggatggggaacttagtccatgactacgggaaattggcagcgacgcgatttgatgactgttgattgtatttatgggggggcagcacagataaataatgcgagcgaaaaagtatttcagattggcaaccttccgttttcgtttttttggcaaggctgctatcaaaataattaagtatgagaaggtgggaaaaacgctagatgagtggggaaatggaaagttctgaagacttaagtctaagctttgaaatctactttccaggaatgggatcaagtgtcggcgtacagtggtcgctctataccgcgaccgcgcatttatcccgtggagcagccggatgacatgaggagccacttctccggaatgcccggcaaggtgggcaagtcaaggtgagtcgactcttcaaccttttgcaatccgcggcgaaccaaacatttgcttgccctgcattccgagcctgctgcattatttacacttattatttatttcgttcgttcgattcgattgtttcattgtttgattatgcattacacacatgcattacacacatgcccacgcccacaaaccacaaccacacacccatccatacgcaactacagtagatccctggcggacggacagtcgcagcacagtttctcgaacaactcgcaccgcggctacctgggcagcgccttcccctcgaacctggtgaactcccggccggagctgaggcaatcccgtcagtccctggccgccgcctcggagcgcatgtctcgtgcctcctatgcgggatccattcacggcggtaacggaggaggcggtggcctgggcggcaacggaggcggcggaggcaacggcctgcccgtgagcagcctgatggccatgagcggaatggtgggcggcggcggaccggccagcatcgcctccagcgcccggagatcgcgaccgcgctccagatcccgcgagcagctgaacaccacccacatacataaccatcgaccgggaagtcggtaagtagagcacacacagctcccaaagagtcgagataaacaaactaattaaatggagctcacacccactaagagatcgtcgtaaaacgctaatcacggattacaaatccacacaccccagcaattcaaacactttcaattctttcttttatgtttccggtttgcgacttttgcgttgaaagtttcttaattcaatggctttcgttggtcgttattttaattagtttttttttatgcatggggtggaacagtctcctaaaatttcaatgccaaattttatcgcgagtttcgcagaagtcgtgagaaaaatagccagatattgattaatgaaccagttgtttatcaaacacctttgattcgtgtgcgctgtttcacatttcaccttgaacttagaggatgactacatctagatactttttgattgattcttgaattcttagttttgcttactaataacttgttcaatctgagtacaaaatacactatgtactgacttatttcagattaattaacttggctaacttttccaagtcgcaactgaaacactttcgaactgcttcctcgctttactttcagccttgattggcaactatccatcgccgcaatcaaaacgaatcaaactttcattgatgtgtacaaaaattctgtaactacagtgtgtacatgcattcctttcaccactaactactaacccaatggcccccttccccctagccccactgtataaatttccactgattccattaattttaattgcgtttcgcttcgattcgagcatttttactgttttgccgcacaaacgcattgggcaatgcgtcagtgttgcacgagtgaatctctgatataatcgataccaactaccaaccaaccgactggttggctggctctttggattgctttgcagatactcgcaggcgggatcgacgcacacgctgaacaactactgcgatacatcggacaactggacggatcacgacatggacatctatatggcccgcaatccgacgacgcgaaacggtttagtgccattatgagggcgacttacgttgtcctgatatttcaatgttgtattaaactgggacggcatcttctgacaatatctgacgccgaccattgaggggaccgagggcaggggtcgtggtcggcgtcagcaacagcagcagcagcagcaacagcagcaacagcagcaacaacatcagcaactgcaacatcagcagcagcagcagcatcagcatcaattgcaacagttgaggaacgagcgacatcaacaacgacacagaaacgatcagcaatgggagcagccatatcagccagcacagcagcaacatcaacgattacaatactatatgccgcagacggagcgctgcacctcgccccccgacgtggtgccccgagcagccaatttccataatagcaacaccaccagtactggccacaacgacaacagcaacagccacggcagcagcagcagcagcagcagcaacatcgcccagcagcagcaggcgccgctggctgcgatgacagcagcgctgggagatgcaactgcagcagcaacagcagcagcagcagcagccgcatcagccagtggcatcgttgtcgagaactattttaacgaatatgaacgtcaggaaatcatctatcatcatcccacaagcaggagaagcagcagcagcagcagtagctgcagtgcggctgcaacacgccacgttccccgcagcaacgccttccgtttacagctacccgcagtggcaacggccacgactaacaatattttatataatatcagtaataagcatggtgcaaccggccacaacggcagcatcggcaattataaggcgcatacgtttagtgatagctgtaattgtacatgtaattgtagtctaagcgaggaggaggagataagccaggagacagccgcagtgacagcagcagctggggaggatggggatcaggcgggctcatccttgtccagcacctcagtgtcgagcatagaacaagtgcagcaggggcagcaagagcagcagggtcaggaagtgtacttgtctctgaacttgacattggctgatgctgctgcgggggcagatgctgctgcggatgcagcagacgcatctgcagacagggccgagctgtgagtgcagctccttgatgccgctgttgtcacggggcctctcggaatactaggatctgcataatgcataataaggacacggcagacgtggatgtgtagtacagaggatagatatttttatacgctgtttagagtgcaataacacaacttatccccagttctttccgcagcaatcgaggaactacaacgtaagtcaatatggtactaaaccccacttaatagctattaaactaactaatgactagcgcgtaaggaggcggggtcgttgggcgctggtatagacaggcatagaagtcgctgagagagcacaaaagcaatatgtatatagtctagaatgagcaacagccagtcctataaggtgtagttaacccgaacgtaattcaaagtttaaaggttttcaaggtagttaagagccaaataaccaattgcagtaggtcgaattaacttttcacacactttcaagcatttccacaacactctctagtctagaactcttatcacttatcatttggctcaattcatttactttcattctatgttcgtctctcccagctccgagctaatcacccattccagtagttttgaagaaaccaacaatttactgcctttagtttaaatcacattgaagtcagtttagactcagcttcagtttcagttcgaaatcgattttaagtctcgtcttgtttttatttcgtttgtacagaagcttcaatcgaatatttgcgtgctaagttctgtcttatgtttatgctttctactttcagtaagattttaataaaagaatatattacacacttttggttttattcacacttttttggtttgtattgcttgccagtcgagcgcctgtacatcgatgtatatagaagtttgtaggcttaagcgttcgaaacgatttgggttcatcattatcatagccttaacattatcattgtcgttggagggacgcgtccggacaaacagtccggtccagtccgggcgaaacacagttgacagttaacaat

SEQ ID NO: 34580 - DNA, 3951 bp, DROSOPHILA
atgagaccaggccgaacgacaacagctttaccagcagcgaccacgcccctgctcctgctactcccacttatcctgggcaggctccacgtggcccacgcccagtgtccttggcagcgagatgtgcccgacctgcagacgagctgcatctgtgcctacaacctgggcagagagctatccgtgcagtgtgatcaggtggacttttcgcaactcctggctgcgatgaacacccatgcccgtctgaagcccgtggatttgctgtacgtgaacaactccacgatttccgagcttcccgacgccgttttcagcaatttgagcctgcacaatttgcagctctcgagctgcggcatccagaggattgcgacgggtgcctttaagggccaggagtcggtgttgcggaatctcaatctgcaggataatctgctggccgacgtgccagtggaggcgctcaaggtcctgggcaagctgaacctgctggatttgtcaaaaaatcagctcagtcacattcccgacgacgcctttgtgggcctaacaaagctgtccaccctcaaactgaacgataacaatgtcaccctggccagcaatgcatttagggggctggagcagagcctgaagaacctgaatctgaagggcaccaagcagcgaaaggtgccggaaagtattaggggtctaaagagcctggccttcctcgatctctcccagaatggcatcaaagaactaccgggtgcgggcggaatccgcgtctttgacggtctggacgccctgactgccctgaatctggagaggaatctcatccagagcatcggagaaacagcatttgccggcgtgcgaaaaacactgagctcgctgagtttgctcaacaacctgctggccgaatttcccattggagccgttcattcgctgaaggagctgcgtgtcctggacattggattcaatctgctgaccagcctgccggaggccgcctttcggggcaatccgggcatcactctgctggccctggacggaaatccactgagcagcgtgcccgaaggcgccttcgcccatctgaatgccacactccgcggactctccctcggaggcaggttcctccactgcgactgcaagctgcgttgggtggccgagtggattcgcaacggcgacttgcaggttacatcgcgcgaacggaatccccagttctgtggcaccccacctcgcttccgggaccgaggcttctactccattcagccggaggagctgagctgcccggacattgccgatgcggccctccgtggacccgtcggcctggccgataacctgaagcccaccctgccctcgtcgcccgattccgtggaatatgaaacgggcacgggcacgggtacagtgggcactggcacggctgcctctgctccggtgaccagcagtgtgagcagctccacctcgacgacaacacccacaacaaccacaacgacaaccacagcggagccaacaaccaggagaagcacgactcgtcctccgaccaagtcaactacaacaatatcggccaccacagcctcgccagcttccaatccccccgtaaatggaacgggcacagttcaggccacctccatcacgacgagcagcagctcctcctcctcatcctccacgtccacgggtcacggcaacggcaagcaggcgccgggatggcgccaaggagtgaccaatggcaatggcaatagtggagtaggaggagcaggaggtctgcacaagccgcagaggccaccacttgtcctgggctatccaccacagaggggcactcgcatcgacgacgccaacgaagtgcaggtgaagcacgccttccgtcaggatagctccgtgatcattcagtgggactcggacacggctaatattctgggattccgcgtggtctaccgcctgttcggcgaaaaggccttcaagcagggacctccgctggagtccagcgaacgcgaattcaagatcaaaaatgtgccggcccaggagtgcatcatcgtgtgcgtcatctcgctggaggagctccacgtgaccccggaaacggttccctaccagcagtgccgcgaagtgaggactgtcgcctcgcaggcctccaacatggacaagataacgattgcggccagtgcggccatttgtggcaccatcattgtggccgtgatagtcttcatcgctgccagcagacgatcccgcaaactgcagagcagccagcagaagagtccgctgccaattggaggtctgcccgttaattgctgcggtccgaccggttcaccgggaccacttggctccattgcaacgctatcggcatttaacaatcacaaggaatgggatcaagtgtcggcgtacagtggtcgctctataccgcgaccgcgcatttatcccgtggagcagccggatgacatgaggagccacttctccggaatgcccggcaaggtgggcaagtcaagtagatccctggcggacggacagtcgcagcacagtttctcgaacaactcgcaccgcggctacctgggcagcgccttcccctcgaacctggtgaactcccggccggagctgaggcaatcccgtcagtccctggccgccgcctcggagcgcatgtctcgtgcctcctatgcgggatccattcacggcggtaacggaggaggcggtggcctgggcggcaacggaggcggcggaggcaacggcctgcccgtgagcagcctgatggccatgagcggaatggtgggcggcggcggaccggccagcatcgcctccagcgcccggagatcgcgaccgcgctccagatcccgcgagcagctgaacaccacccacatacataaccatcgaccgggaagtcgatactcgcaggcgggatcgacgcacacgctgaacaactactgcgatacatcggacaactggacggatcacgacatggacatctatatggcccgcaatccgacgacgcgaaacggtttagggaccgagggcaggggtcgtggtcggcgtcagcaacagcagcagcagcagcaacagcagcaacagcagcaacaacatcagcaactgcaacatcagcagcagcagcagcatcagcatcaattgcaacagttgaggaacgagcgacatcaacaacgacacagaaacgatcagcaatgggagcagccatatcagccagcacagcagcaacatcaacgattacaatactatatgccgcagacggagcgctgcacctcgccccccgacgtggtgccccgagcagccaatttccataatagcaacaccaccagtactggccacaacgacaacagcaacagccacggcagcagcagcagcagcagcagcaacatcgcccagcagcagcaggcgccgctggctgcgatgacagcagcgctgggagatgcaactgcagcagcaacagcagcagcagcagcagccgcatcagccagtggcatcgttgtcgagaactattttaacgaatatgaacgtcaggaaatcatctatcatcatcccacaagcaggagaagcagcagcagcagcagtagctgcagtgcggctgcaacacgccacgttccccgcagcaacgccttccgtttacagctacccgcagtggcaacggccacgactaacaatattttatataatatcagtaataagcatggtgcaaccggccacaacggcagcatcggcaattataaggcgcatacgtttagtgatagctgtaattgtacatgtaattgtagtctaagcgaggaggaggagataagccaggagacagccgcagtgacagcagcagctggggaggatggggatcaggcgggctcatccttgtccagcacctcagtgtcgagcatagaacaagtgcagcaggggcagcaagagcagcagggtcaggaagtgtacttgtctctgaacttgacattggctgatgctgctgcgggggcagatgctgctgcggatgcagcagacgcatctgcagacagggccgagctgtga

SEQ ID NO: 34581 - protein, 1316 aa, DROSOPHILA
MRPGRTTTALPAATTPLLLLLPLILGRLHVAHAQCPWQRDVPDLQTSCICAYNLGRELSVQCDQVDFSQLLAAMNTHARLKPVDLLYVNNSTISELPDAVFSNLSLHNLQLSSCGIQRIATGAFKGQESVLRNLNLQDNLLADVPVEALKVLGKLNLLDLSKNQLSHIPDDAFVGLTKLSTLKLNDNNVTLASNAFRGLEQSLKNLNLKGTKQRKVPESIRGLKSLAFLDLSQNGIKELPGAGGIRVFDGLDALTALNLERNLIQSIGETAFAGVRKTLSSLSLLNNLLAEFPIGAVHSLKELRVLDIGFNLLTSLPEAAFRGNPGITLLALDGNPLSSVPEGAFAHLNATLRGLSLGGRFLHCDCKLRWVAEWIRNGDLQVTSRERNPQFCGTPPRFRDRGFYSIQPEELSCPDIADAALRGPVGLADNLKPTLPSSPDSVEYETGTGTGTVGTGTAASAPVTSSVSSSTSTTTPTTTTTTTTAEPTTRRSTTRPPTKSTTTISATTASPASNPPVNGTGTVQATSITTSSSSSSSSSTSTGHGNGKQAPGWRQGVTNGNGNSGVGGAGGLHKPQRPPLVLGYPPQRGTRIDDANEVQVKHAFRQDSSVIIQWDSDTANILGFRVVYRLFGEKAFKQGPPLESSEREFKIKNVPAQECIIVCVISLEELHVTPETVPYQQCREVRTVASQASNMDKITIAASAAICGTIIVAVIVFIAASRRSRKLQSSQQKSPLPIGGLPVNCCGPTGSPGPLGSIATLSAFNNHKEWDQVSAYSGRSIPRPRIYPVEQPDDMRSHFSGMPGKVGKSSRSLADGQSQHSFSNNSHRGYLGSAFPSNLVNSRPELRQSRQSLAAASERMSRASYAGSIHGGNGGGGGLGGNGGGGGNGLPVSSLMAMSGMVGGGGPASIASSARRSRPRSRSREQLNTTHIHNHRPGSRYSQAGSTHTLNNYCDTSDNWTDHDMDIYMARNPTTRNGLGTEGRGRGRRQQQQQQQQQQQQQQQHQQLQHQQQQQHQHQLQQLRNERHQQRHRNDQQWEQPYQPAQQQHQRLQYYMPQTERCTSPPDVVPRAANFHNSNTTSTGHNDNSNSHGSSSSSSSNIAQQQQAPLAAMTAALGDATAAATAAAAAAASASGIVVENYFNEYERQEIIYHHPTSRRSSSSSSSCSAAATRHVPRSNAFRLQLPAVATATTNNILYNISNKHGATGHNGSIGNYKAHTFSDSCNCTCNCSLSEEEEISQETAAVTAAAGEDGDQAGSSLSSTSVSSIEQVQQGQQEQQGQEVYLSLNLTLADAAAGADAAADAADASADRAEL

SEQ ID NO: 34582 - DNA, 2893 bp, DROSOPHILA
ggccacgcccgtatagtagttccatttgggatcgtagatctggacgaagatgggcactaagctctgaacttcggcagacacaacggcgacggcgctcaggaagaagttgaactccgaggtggacctcatgtagttcagagttggattcacggggtgcaggacaatgaacctccttagcccgtagatcctggccagaatgtgcagctcctgtgagcttcttattggaggaccaaagctattcccagtggacatgagatcatggtggcaactggtgcgttgcaggcaggtgatctccttcgcctccgctctgacgagttcctcatcctccagtatggcctggtgatactccacctcaatgccattcctcaacatgtccagcttctcccgctccaccttccaattgcagctgaagatttcttcggatttaagatttctggtctcggaatccgacgatacgtcccatttttgaaggatttcgcccagctgggcgttgaacacctcccagtcggaatccgcactgaagttctcccggtaaaactcgttatcgtcgatttcttcggccattttacaggaatttaaaggcgtaaataaacaaaggacaacaaactaaaatcgtagacaacaatggacagcgttgccagagcgttgtgatcggccatatcagctgatggttagggctgccatcggaaagagtgttggaaaggaaccaaatttttgttatttatttaaacttaaaaataacttaaggaccacctatttatataagtagcttgaaattggtcttttaagttggcaagtgcgctccagtaattcattaattattttgaactaacggagcttagtatttttctaaacggaccgccgaatttgaaacttttcttgtcatccatccctgcttaacatcaaaagatctggcaactcacgactcgcaaccaaacagctttttgtttaccaaatttttaattttgtctttgcgaagggaaatttaattacatacgcaatgtttgcggctaagcgagtaagggcccgtgcgaagaacttcaccattgaggaggaggagatcctggagaacctgatcctggcgcatcgcgacgtgatccgcaacaagcagaaggatccggccatttggaggaagaaatcggaggcgtggaagcaaattgaggcggacttcgccattcagaccggaatagagcgttcttggcaggctctgcgagagaagtacaccaacaacctgcggatgatgcgaaagaacggaacactgagtgacgaggaggcaaagactgacaatgcatcagattcggtgcagaatttgtccatttcgggagtttcttcgctggctgcagctgctgataatgaagaaagtgagtaaaggatggcaggatcaaaagcatgaacgtggtagttgacaagatgtaccttaatagtcttaccatgataggttcttctacagcaatatttcagtgctttatctctaataaactctaaaaacatcttgcaggtagtacctatttcgaatcggaattgaaccgaaaaagcctcagaagcgcctctaccgaagtcaagctcgtgccgaataactcaagctactcagttgacagaccaaactactcagctctgaatgtaaatgaagagtcagtcgatgtgagctcagaagaggatgccacgaataccctgaaggatgaaaaagtcgttctgatcaggctgcaacaggagtactatcgatgcgaaaacgcccgggcagccgagaagcacaagcttgagatggagaagcagaaatacgagctggagcagcgaaaggtggagctgcgcaatatgcgcctgaaaaacgaacttctcgaagcggaaatactcgaaaaacgacgcaaagtcgcgcaaagcaaggcttcatcctaaggaattgctagctaggataagttaatttattcttgtcttcataatgtcagtgctcttcagtaattactatagtcctagttaaacaaaagattatcgaaagaaactcatgtacactccttgatttttgaaaccagaagcaaacaattacatcttcaaaagatttaataatgtctgtcaaacttctaaagattcgtctacattttaacaagtaagctggatttaggctgctggatttaagcccttcacatttattcctcctcagttcgaatgaattgctcgtttatgctcggtcgttctgtttggttgtatttattaatttacatcgatccattcactatgcagttgggggcttaaacgataacagctcctctagccgaccacgagaagaccctcgttggggaactcgtgggtgggcacctccaagttgaggggcgcgggtcccttgcggatccttccggaggcgtcgtagtgggagccgtggcaggggcagtagtagccaccccagtcgccggcgttcgcgatgggcacacagcccagatgcgtgcacactccgatgaccaccagccactcgggcttgatcacacgttgctaaagaggaaatgggtaacagcattagcgaatcgacccactccacggtacctacatcatcagcctccggatcgcgcagcgtggatgtgggcacatttcgctcggtctcgatttccgcggccgtgcggtggcggatgaacaggggctttccgcgccacttgaaagtaaccgacttgccctccgggatgtcggacagcttgatctcgatcttggccatggccagcacttcggcggaggcgctcatcgatccgatgaaggtgttaaccaggcccttggccgcataggcaccgcccacggctccggcgccgaccatcaagtaggagaaggccttgcgctcctcggcggtgtcgttgcgacgacgactgtccttcacggactcccggcggtatgccgagaagtctggcacctgcag

SEQ ID NO: 34583 - DNA, 756 bp, DROSOPHILA
atgtttgcggctaagcgagtaagggcccgtgcgaagaacttcaccattgaggaggaggagatcctggagaacctgatcctggcgcatcgcgacgtgatccgcaacaagcagaaggatccggccatttggaggaagaaatcggaggcgtggaagcaaattgaggcggacttcgccattcagaccggaatagagcgttcttggcaggctctgcgagagaagtacaccaacaacctgcggatgatgcgaaagaacggaacactgagtgacgaggaggcaaagactgacaatgcatcagattcggtgcagaatttgtccatttcgggagtttcttcgctggctgcagctgctgataatgaagaaagtagtacctatttcgaatcggaattgaaccgaaaaagcctcagaagcgcctctaccgaagtcaagctcgtgccgaataactcaagctactcagttgacagaccaaactactcagctctgaatgtaaatgaagagtcagtcgatgtgagctcagaagaggatgccacgaataccctgaaggatgaaaaagtcgttctgatcaggctgcaacaggagtactatcgatgcgaaaacgcccgggcagccgagaagcacaagcttgagatggagaagcagaaatacgagctggagcagcgaaaggtggagctgcgcaatatgcgcctgaaaaacgaacttctcgaagcggaaatactcgaaaaacgacgcaaagtcgcgcaaagcaaggcttcatcctaa

SEQ ID NO: 34584 - protein, 251 aa, DROSOPHILA
MFAAKRVRARAKNFTIEEEEILENLILAHRDVIRNKQKDPAIWRKKSEAWKQIEADFAIQTGIERSWQALREKYTNNLRMMRKNGTLSDEEAKTDNASDSVQNLSISGVSSLAAAADNEESSTYFESELNRKSLRSASTEVKLVPNNSSYSVDRPNYSALNVNEESVDVSSEEDATNTLKDEKVVLIRLQQEYYRCENARAAEKHKLEMEKQKYELEQRKVELRNMRLKNELLEAEILEKRRKVAQSKASS

SEQ ID NO: 34585 - DNA, 2627 bp, DROSOPHILA
actaaacgcttcgctggattttggcgcttttaaagtggacaacgttttcgccgactccgacgactgtgacgtcacgaagcgtgcgcgaaaaatagtagtaaaagttatagcttactgctataaaacagcaacagaaataatcgtgcaaaagcaaaaccaaccgccataacagcaaaaccaaaatgtgtcttttgcaaaggcacaattcaaagtttaacgaacttttgaagggatcgagtaagattgcgagaaaaatatgagccaagttttgttttaagctgtattattacgatagttgacttaggtcagggttcttgtaccacgttctttgataagacggctatgttgataaacccacaaactggtttgaatatcaccaattgagttgattagtattcctgcctttgatttggcctgacgattttggccttacccatatgcgtgccaattttggaaggttggccaattcacataaatatttaacatattagaacttgctaaataaaaaccactctttatttttcggatacgattaaattaaaccatttcgccaagaactttattctgaaaaattagatttccgtttaagcgatatacgtagataatagagtggaaaacatcatttaaataggtttcatctaaagcaagctactgaaaagctgttttccttgaatacacaatttaatgtacacaatttaggaagttactcattgagtaagacggtgtaccaccacatttgtttaaaataatttaactggttgagtaaatcattttcagccctataagagtctttggtcaggatcactagtgaattcggtctatttttaggggaaattttttagcgggggttttgcaaaagtttaaagatcttccctgtaactgaccacagaactttaattgttaatcaccgatctaaaaaagttactaacaatctaatcacaaagttactcctcgaagaatgatttactatcaatctatagataagaaagacctataaaagatgttagcagctcgaaatgtccacaacaccccgcctctcaacaatcgaatcatgttctcagccaagagttctgcaattgtggccgtagtcctcgtccagatggtggctcaaatccacggaggagtctacagctatgaggacaagtgggtgtacctggacaagaccctggaccttccagaggaagcgattctcggtggcgtcgatcccgatggttactacacctacgtgggtcgtgtcacatacagcagtaacattctgccagcccgagtggtaccggagctgggaaaggccacctacaacaccgacaccttgggcaaccaagccaccacctacgaggttctggtgtccaacgccactgtcggctaccattggatccgtagtttcgatggtttccgggaaaagaacgccgtatctgtgggaaccaacgccctcagcgagcgtgtcttcatctgtcgtgtccgctgtgatgaatccatctttatcggcactctgtacctttccaagcggatgtgcatcgtcaagtacgacaactttccgctccggcagttcgacaagtacgagatccttgtccgcgaacgccatgtagctgccgtctcgccatttgttgatggttatatccaccattaaatgctgagcaacaaaataaatagaataaaatataaatacaaaatatttattaaaaaaaaacaattcctttcaatttatttaatgactttgaattaataaaaataattaatataaaagcaaagtttcctattcttttttcttaatttaaaagaggtagaaaaacagaataactgtgtttaagtttttgataaatccaaagaagaaattatgtgaattcctattttcaatttttttgtaactgtaactatttattcctttgttaaattaattacttaattatactcgtagagtaaacgcatttacttgattttgattgattgacaatgatataacaagtggatggaagctttttcaacccaacaaagtatatatagtttcgatcaggatcactagacgggtcattcaagccatatccgactgtccgtacgtttgtctgtatgaacatggtaatctcgggaactataaaagctagaaagttgatatcagacttgcagattctagtcacttcaagatatcttcctagtcaacagttcaagaatgtactgctacaagggcttgataattgtggccgtagtcctagttcatttggtgacccttatcaggggagcagtatatagcagtgaagacaaatagatccttgccgacaggacgaaggatctgctggacgaagcagtgctggctacatgaactacgtcggccgtgtgtactataatgtcctcaataatgtcctgcctgcccgaatggtcccggaattggttagggcccacttcaacacggacgaggctaactttgcgctgaaggcgtcttcatagaaacgctgtagccttcgaaaagagggtgcattctcaaatacgagtacgagtaatacaagtacgagatactgatcaggcaacgccaagtggcttcgttcatgccattcgctctgtaaatacattgtatgtatactgaatgcaagcaaataaaatctataactctttatcagaaaatagtcttttgcgtt

SEQ ID NO: 34586 - DNA, 627 bp, DROSOPHILA
atgttagcagctcgaaatgtccacaacaccccgcctctcaacaatcgaatcatgttctcagccaagagttctgcaattgtggccgtagtcctcgtccagatggtggctcaaatccacggaggagtctacagctatgaggacaagtgggtgtacctggacaagaccctggaccttccagaggaagcgattctcggtggcgtcgatcccgatggttactacacctacgtgggtcgtgtcacatacagcagtaacattctgccagcccgagtggtaccggagctgggaaaggccacctacaacaccgacaccttgggcaaccaagccaccacctacgaggttctggtgtccaacgccactgtcggctaccattggatccgtagtttcgatggtttccgggaaaagaacgccgtatctgtgggaaccaacgccctcagcgagcgtgtcttcatctgtcgtgtccgctgtgatgaatccatctttatcggcactctgtacctttccaagcggatgtgcatcgtcaagtacgacaactttccgctccggcagttcgacaagtacgagatccttgtccgcgaacgccatgtagctgccgtctcgccatttgttgatggttatatccaccattaa

SEQ ID NO: 34587 - protein, 208 aa, DROSOPHILA
MLAARNVHNTPPLNNRIMFSAKSSAIVAVVLVQMVAQIHGGVYSYEDKWVYLDKTLDLPEEAILGGVDPDGYYTYVGRVTYSSNILPARVVPELGKATYNTDTLGNQATTYEVLVSNATVGYHWIRSFDGFREKNAVSVGTNALSERVFICRVRCDESIFIGTLYLSKRMCIVKYDNFPLRQFDKYEILVRERHVAAVSPFVDGYIHH

SEQ ID NO: 34588 - DNA, 3184 bp, DROSOPHILA
tgattaaattgggtgacaaacagcgggcccatcgtgttcttggtgaggccttgaagtgcaactacagcaactggaaggtttgggagaactacatgctggtgtccgtggatacttcccactgggacgacgccatgcgggcttaccagcgcatggcggagctaaagcagcactacctcgatcaggaagtgctaacccgtattgtttacggagtttccaaggaggaccccgccggctcaagtgctctgatcaaaagactcataaagcttctgggacagcagagcattcaacatggtaacgagcctcttgtgtgggaactggccgccttggtggcccaaacgccactgaagaaggccgagaaactggtaaaatcgtatcgtgcgtacacaccgaagcatttgggctgggaaaccaagtcggagcacgctttaaaagccctagatctttgtttagaggtctgcgatctctcagtggcggccatcacagagcacattcaagaggaaagtgaggtaatgattacctctcaactaaattcagccagactggcgggaacatcttgtctgaatgctttgaagagagccataaatgtggatgtatcggcagaacagactgcaaaagtggagcagctggaaaaacgcatcgaagacctgacaaaaattgtccaggaacgaatgaatgcgtctcgatcttagttatacactatataaggttttatactattttgtaattgcaaaacaaataaaaagagtcattttttattgtacatgaaatagtttattgctgatatatatttgtaagctagttttgatttgtaatataattcagctcaagcagattatccagtttttctgattttaaaagctattgcgcattaaggatttattgtctagcaataggtgcaatgaaagtgtattcataaaaatataaacctatgaattaacccatcatccaatatcacaagtatgaagcatttctttaatgggtttcttttgatgtccaccatctaaaaagtgtttagtttggtggtaattaaaacgcgcacgctttgatcgaatgctccacagacggctaggcccagtttgtctggatgccagtcaaagcagtgaaccggctgagagctcaaagtggctgcactaagcatattaagggctccagcaactcccaacttgtttccatcagagtcatcaatgaccctcctgtcgggatactcgtactgccacaggcgaatggaaccagttccgccgcccgtgagaaagagatcccgattctggggcagatgacgaactacccaaacggtggctttgggtccgctgatcacgccatttgttcccacgctgcgtccggcgttgcgttcctccacgtaactaaatcccttggtcggatgttgggttctcatatcgaagacaaggagaccgccctccaaagtggtgaccgctagcttgttcatgggaatgtcccggcgatcgaactccagtccacagataccattcttcatggtggcctcccagcgtacggaaagggatcgcaaatcgaatatctttagatctccattatcatagccggcggcaacgatgcgctcctcagcgttgtaggtatttccaaaggccacggcccagcagtcccggcggccactgctgttgttaacgccatcgcccatttgcggcggcggcgacatgtccaccacaggagcctgcccctggcggatatcccagactttaacggcgccgtcacgacttccagtaacgatttccggagcaccgcaatcgatttgtgtgccgccaatcgcgtcgatggtgttgatgatgccgttgtgggcctttacattgtagaccggaaggtccggctgctccatatccctgcaaagaacacatgtcagagaagcatctaatgacttaagcgggattatgcttacagaacttgcagcctgccctcgaaatctccgatggccatgtggcggttcctgagcgaagctgctccgaaggtgccgcatttgaaggcaaccttcttctctacggacttcactttcaccagcttatcctggttgagttcgtagatgtccatgattccgtgcccgttggccttggagcccagaatcacaaacttggccgaaaggggcacccatttcgtatcgtacaccgtgtagttgagtgcctcgtggaggtgctcaataagctggggcttgtccatttcaacgatctatatttccgtctcaactttatgctaatattccaaaagcggccggtgaaaacttaaggatttatcaaaaacaagttgttttgttgtcatggctatctcttcctctttttcagtgtagccgtacatgcagcgcctgaaatataccaatcagctgacggaaatataccaaatctaatttttaaatagataaattataacatatccactaaaatgcaatatttaaaaaaataataacgcttaacgtttgtaaaaagtatatcccattactatagttcacattttgtactcatataatcaaataatttaaaatttacgaaataatgtgtgtgtacgatagttatgccgatacattagaaggcatcgggaacagctgttaatggtggtaagcttaaaaagctttcgccactctgtgagttgaatacttttttcttcagttttactgggtcagtcggacgctgttttgcttctgtcgcggattttccacatatttagtttttggcgcgagcatctttttttggcgttcgaccccccaatagcaacaacaacagcaacagcagcaacaacttcatatataacgacaaagaaacacttttacgtgtgtcgcaagcgacgcttttctgcattaaaaaaaaaacgatgagatattaaacgtgcggggttaaataagcgaaaataaatattattgaaataacaaagcgcagcttatagcgttggctattaatttgcgggccttttagccggttttatataagtgataatcgttttggcagaacaaaaactcgctaaagagtgctcaaagtttagcatatttgcgatgcatgcgccagaaaagtgttaatcaattttttattggcaacaagtgatacaacaataacaaaggcgctatcaaaagttgaaggtgccaacaaatcgacggcagtatagacgactacaagaacaacaactacagcaacagctgtactcgttggcaaccgaattgagtgccaactaa

SEQ ID NO: 34589 - DNA, 1128 bp, DROSOPHILA
atggacaagccccagcttattgagcacctccacgaggcactcaactacacggtgtacgatacgaaatgggtgcccctttcggccaagtttgtgattctgggctccaaggccaacgggcacggaatcatggacatctacgaactcaaccaggataagctggtgaaagtgaagtccgtagagaagaaggttgccttcaaatgcggcaccttcggagcagcttcgctcaggaaccgccacatggccatcggagatttcgagggcaggctgcaagttctggatatggagcagccggaccttccggtctacaatgtaaaggcccacaacggcatcatcaacaccatcgacgcgattggcggcacacaaatcgattgcggtgctccggaaatcgttactggaagtcgtgacggcgccgttaaagtctgggatatccgccaggggcaggctcctgtggtggacatgtcgccgccgccgcaaatgggcgatggcgttaacaacagcagtggccgccgggactgctgggccgtggcctttggaaatacctacaacgctgaggagcgcatcgttgccgccggctatgataatggagatctaaagatattcgatttgcgatccctttccgtacgctgggaggccaccatgaagaatggtatctgtggactggagttcgatcgccgggacattcccatgaacaagctagcggtcaccactttggagggcggtctccttgtcttcgatatgagaacccaacatccgaccaagggatttagttacgtggaggaacgcaacgccggacgcagcgtgggaacaaatggcgtgatcagcggacccaaagccaccgtttgggtagttcgtcatctgccccagaatcgggatctctttctcacgggcggcggaactggttccattcgcctgtggcagtacgagtatcccgacaggagggtcattgatgactctgatggaaacaagttgggagttgctggagcccttaatatgcttagtgcagccactttgagctctcagccggttcactgctttgactggcatccagacaaactgggcctagccgtctgtggagcattcgatcaaagcgtgcgcgttttaattaccaccaaactaaacactttttag

SEQ ID NO: 34590 - protein, 375 aa, DROSOPHILA
MDKPQLIEHLHEALNYTVYDTKWVPLSAKFVILGSKANGHGIMDIYELNQDKLVKVKSVEKKVAFKCGTFGAASLRNRHMAIGDFEGRLQVLDMEQPDLPVYNVKAHNGIINTIDAIGGTQIDCGAPEIVTGSRDGAVKVWDIRQGQAPVVDMSPPPQMGDGVNNSSGRRDCWAVAFGNTYNAEERIVAAGYDNGDLKIFDLRSLSVRWEATMKNGICGLEFDRRDIPMNKLAVTTLEGGLLVFDMRTQHPTKGFSYVEERNAGRSVGTNGVISGPKATVWVVRHLPQNRDLFLTGGGTGSIRLWQYEYPDRRVIDDSDGNKLGVAGALNMLSAATLSSQPVHCFDWHPDKLGLAVCGAFDQSVRVLITTKLNTF

SEQ ID NO: 34591 - DNA, 2952 bp, DROSOPHILA
cttctaggatactttttttatgcggtttgccgcccacgttccgcacttggagtgtcatttttgagtggagtcggtatgtgcgtaggatggggcagtgggtattggtatggaacacttccgcacaggcacttgaatacgcaaaaaggcgaatgcaagtgacgaggtccatgaacaaggccgagagtgtgtcctggccgaaatacggacttttgcgccaggggacgactttggtaaacaaccgcactctggtcaaatttggactgtggtcctggccacatatatacccagtttaagcagttaaagttatctgttatctctaattgagagagaaatgtgtgtgcgtgtgtgggggctcaaatttaaagttgttgattttattacgcatacgcctagtggctctagccatggcctcttatgttggccgtaacaaacttgcccgcttaatggcgcagctttttcgggtcctcaatcaaatggtaggaaatgtcggggctttcgtcatgggaagccggcaaaaacccttttcggattaacagatcaacgcacaaatgacccgagcaatcgtcttgggttttcccagttttttccttcttgattttccctgccattccgataaggctggaagcttatcggggctgaaggactttgacgacccaattaattcttgttcaacaaccggccgaaaaaaaaaattgttgccacatgcattgttagtctacttttcatgtcaaggaaaagcgacggctgagaaaaaaaaaactaagtgaataaggtacaaaagaaaataaaaatgagaaactcgtgaacgttaagttaaattgcgcggaaaagttatgcgtccccgttacccagagtttctctaacaaaaaaactttgttaaacattttattccctagaacgcttgccacgttggcttagcggaactacttgaaatgtaaaaatgttcgagccttgagttgaaaaggcaaacttggcagcaactttgaaggttcacataattatgcgcattgccttgccacggctcctgtgccacatccttctctatcacctgctcatgatctcgtccagccttgcagcctgctaccaacgtcattcgagttgcccgcagaaccagcagcagtccagatcccagcttctggaccagtccgcggacctcaccatgggcataagacaaggcaactccaagcagaccgcctcgaatattgcccagaaggctgcccaggaggccaagaaggcgtcggacactcaggcaccagctgctctggctgctgcccgccaggtgaaacaccagctggccgagaaagccattgctgcggccaaggccgctgaggcggcgctggcggggaaacaacaacttatggagcagctgcaggacgaggtgcacgaggcggagattattgtgcaggaggaaacctactcactggttggttcacaggtatgtgctaaacccccttttattaccaattctattatgatatgctaaatttcagacaaatgtcaatgtcgctgttgccacagcgaagcaatgtcaaacgctgttgcaatcgcttcggagctcagtaaaagttgccgaggaggcagtgagcaatgctgaggcagctgcatccggtgcccagcaggagttgtgcgaaaagaaccagctggtggaaaccgctcgccagagagcagagatgctgatgcagcagctgcgctccgccaaactggactataccaacacgaggaaggccgcctacagggctgcctgtgccgccaacgaagcaaggaacaaggctgtaagggaccgaagatcctacgaggaggacatcggtggaacttttgggcagcagcagcagcagcagcaacaaatgctgcacaatcacgaccagccaggaaatctccaagatccagaagttaaaggacaggtggagggatgggagtataatgagcagggtaaagctatattttctaattgatgtgccctgtaaaatacatattattttgctaaaatagtttaaaaaaaaaatgtattaaaaggaccaaattccggactttattttaaagtttatcagcagcatgagaccatgtttcgagtgaaaagtgtgggcacattggaactttctctgccaaacgcctgggggatttggcaacgccaatcgaagcgaactccaaaaaggcaaaatgacagagccaaaaagggacacgaaacccaattggcttgtaaaacaatttgaccaaagctattttgttataacttttggctctttttttttgttttcacatttttctttcctttttttgcggtcacagtgacagtggaaaaaggcgtgacacaatagggggcattactaaagttttcaccacacgttttcaataatgattagtttcggtattctctttggggaattgacaaagaacattgccaagaacattaagtttaaagtttttcgattctcgctcgcttgcaaaagtttacttacataagcagaaatggcaataaataaatgttgcttgtcaccgtattaattgggtcatcagttgggatatcgtgaaagttggctggaaagccaaaggtttccacccgtaaaatgctcattggggagcggttaaagtaacgatgcggatttttggttatttgtggcgtccatttggacacgaatgccccgagggaaaacaagcgattggtacttgagacaagagttatcagccatcaagtagcaatcgatggtagctatcgccatttcggcttatgatctggctcaatacaatgtatcttggataggaaactgagcccaaataactacccaatttatagtttggatacgttttaagagctgcgccatccgtcgttgacaagctcactaaaagggttcaattgagaggcaggttttgtctttcttaccgtgggacttagtcaagcctactcttttgttacactgcaagaatatttcctacatttttacaaattagcttact

SEQ ID NO: 34592 - DNA, 897 bp, DROSOPHILA
atgcgcattgccttgccacggctcctgtgccacatccttctctatcacctgctcatgatctcgtccagccttgcagcctgctaccaacgtcattcgagttgcccgcagaaccagcagcagtccagatcccagcttctggaccagtccgcggacctcaccatgggcataagacaaggcaactccaagcagaccgcctcgaatattgcccagaaggctgcccaggaggccaagaaggcgtcggacactcaggcaccagctgctctggctgctgcccgccaggtgaaacaccagctggccgagaaagccattgctgcggccaaggccgctgaggcggcgctggcggggaaacaacaacttatggagcagctgcaggacgaggtgcacgaggcggagattattgtgcaggaggaaacctactcactggttggttcacagacaaatgtcaatgtcgctgttgccacagcgaagcaatgtcaaacgctgttgcaatcgcttcggagctcagtaaaagttgccgaggaggcagtgagcaatgctgaggcagctgcatccggtgcccagcaggagttgtgcgaaaagaaccagctggtggaaaccgctcgccagagagcagagatgctgatgcagcagctgcgctccgccaaactggactataccaacacgaggaaggccgcctacagggctgcctgtgccgccaacgaagcaaggaacaaggctgtaagggaccgaagatcctacgaggaggacatcggtggaacttttgggcagcagcagcagcagcagcaacaaatgctgcacaatcacgaccagccaggaaatctccaagatccagaagttaaaggacaggtggagggatgggagtataatgagcagggtaaagctatattttctaattga

SEQ ID NO: 34593 - protein, 298 aa, DROSOPHILA
MRIALPRLLCHILLYHLLMISSSLAACYQRHSSCPQNQQQSRSQLLDQSADLTMGIRQGNSKQTASNIAQKAAQEAKKASDTQAPAALAAARQVKHQLAEKAIAAAKAAEAALAGKQQLMEQLQDEVHEAEIIVQEETYSLVGSQTNVNVAVATAKQCQTLLQSLRSSVKVAEEAVSNAEAAASGAQQELCEKNQLVETARQRAEMLMQQLRSAKLDYTNTRKAAYRAACAANEARNKAVRDRRSYEEDIGGTFGQQQQQQQQMLHNHDQPGNLQDPEVKGQVEGWEYNEQGKAIFSN

SEQ ID NO: 34594 - DNA, 5401 bp, DROSOPHILA
taaattggctcaatttgaatcccttggcttggcgggtgaatatttcagccgagagattcgggatcccagaggtaatggtgtcagtaatagcactgaaagaaatgagaagtatagaagcatattttaagatagtaaaatgtgaaattatttctaaattccataggttgacatggctacttattagctcaatatataagcttgtctgttccatcctgatgtatggatatgctgagtttcctgataatcagcttacgtatttagcatatattagcatttcccattaatttactattatttcgtgtgcgtttgtgtgtggcggtgggctttggctcaaatctggaatagcaatggagtactatcgccaccacccccctcttcaaaaattttcccataaccccctgtgcgtgcctgccatttaattaactgcatagacaacattttcaatctctgctccactcgactccacaaaacgcaacccgattgcgatgtcatttcgagtgggaatggcagtccgaaatgctgttataataacgcaaacaagctgttgggcttacaaaatctaatccccagtctgtgtctgtatgtcggcggcactaaaaactaattgaaattgccatatttcatgtataatatacgagagcacggctttatggcatcttatgccataacataaaatttgataatgccattcggattttcacagcattagcaggcgagtgtcgtctcctgcatttcgatattaaatggcacattatttacggaaaaaatcctgcagacaaatgatcttagcatcgttctggaaaaacactcggaaagcatgcagtatttgtatatcaaataaaatgaatggcttaaaatggaagtgccattagccattattggcagcgcaaaagaaaaacgtacaaataaaaatgtgttagtcgtactataaaaaatatgcgagacatatcacatttaaatttttagcgatattgaaatgaatgcagacaatgaagaccattcagtagattatatccatgcgatagggatcacagggattgggtgcttttccgcgccggggcatctcagtgattggtattggtggaacggccaggagcattttgcgcttcctttcattgtcctttaggccatcgtctccgacaaagccacctttgggtggtctaggtcttttgtccttgccctcctgcggattccagggacggaccagagtacccttcttctgcagatacttgatcatattaatgcccttcttcttcgcatccacagcggccttctccgcctccttggcggccttggctgcctcctcggctggcttgaggaatctcttcggatagcgtactggtataggttcggatttttctccttttcctttgccttggccttgggcctttccgacggctgcggtaggaaagcccttccaggcaccacctccaggtcctcctccaggtccgccgggtcctctaaagccaccgccgccagctcctccgcctctggctgaccttccgccacctaagactcctcgagcgcccccgcctcctccgattcctccgccatcccctcctgcgccaacgccccaagctcctggcactcggggtctgccgcaaggcattggattggggccatgtggtccgccacccatcattccaaatacgccatcctcgaagaccatttctcccggccatccgaatgccgtacccatgtagcgatcgcccacagcgcagtcgaaacctctgtaataaggtggaattcggatgggatactttggaggtagtggcatctggtctttcttggatgtctgggtgccatggttaacggtatccggcaaaggcggctggcatggttgctccgtacctgctggcggagtgacatcaaagtcaaactccatgtcgctttcgctggtatctgtgagcaccagatggtcgccagccggtggaatgcaatgacgtcggcattccctgtttaaagccctctgcagatgaaccttttcggtgggatccctgcaacggcacatcatcaatgtctggtgacaggtgcacttgcggaatcccttatccttcagttttctcttgatctcacgcagggccactgccatttcgctcttcacaatccggaaagtgatgggtttctggcgcatacccaagggagaaagaggacgcagggtgatgaagatctctccgttcttcttgcagatattcaacaccggtgaggccagctccttttctcgctccaaagtctccgtgtccttgcatttggcaaatgcattctctctggcaggttgctccaggaagaacttcatcagtttcttgatgggcttacggatggcacccggacgccagcccagctttttggcctcccagctgttgctccaggcccaaccatgttgtcgggacacaaatcccgatcgaaggacacatcgcttgtgtctgctggaaatatgacccttgttgttaggtggtatataaggtggtttcttgggagcttggttctcctttttgggttcttgtttctcaggcttctccgttttgggcaccgctcgatcgcagttctcgtccagttcggataacttcttggtgtccttgatatcgtagagatcgcgcaactcggagaaaactttggccaaatagggtcgacagtcctcggagcttttgtttaccacacagtagtcctccgattcctttggctccacttttggacacttgggagtcacctgatcgctcttaaatatatcggcgcacatctttcggatgcgacagtgggcacacattttaccgaacttgcagctgcaacggcatggtggacactcatcatcgtcggctctatcttttttggccttttcacacggatccgtgcagtagtcatccacagtggatggtcctttgcccaagtactcgagcaggatctggtcggccgataccttcttctccttgtgcctatcctccaccacgggcatcggtttgattccacacttcggacacgctgcaaacttcggcagccacgacatattggtcaggcagaccggacaaaagcggatgggcttgatttccggcttctgtccatcgcagtccgcaatgggaaccggcattaggttcttctcgcagaagtccggctcgtgatcttgggtggcgggcaggtaaacgaagcatggcttgtccggtttctcgggcagctcaagaaattgaggaagttcaggttggcaccaacaggggttcatgccaaagttgttcgcctcgtcgggactacgacacggaggcttgggaggcggcatgccggtctgtttggtgatggaatcaatcatccgctcgtactcgattgccattttctgaatttaaaattgtaaaataatataataatattaggaaaataatgtatttttagtaaccttaagttcacaacacgctggtatcccagatgcgttgttcgtcatcatattgtatggctttataccaccaccctggctgcgatatcgttccaggtccagtctgagccgctcgtcgccttcctccgcttccaaatcattttgacagggttcacaggcactgggacacacctgcgattcacccattacgaacataatatcctgtgcattgatgctcctgtccatgttacgggcgcactcgagctcaggctcactgaaagggtaaacaaatataaaattaactggaatacttagcaacaaacatgtatgcacgtgaccatttcgaattacttactcagcaatgcacatgacgaccaaccggcaaaggaactccagtttgccggtcacctcgccgcctgcagccaaatcaatgacgtccgagtgaagaatatcggtcatgtccttttctatggagtccactacgctggaggggaacgatgcctgcccggagccaatcaccttcttgctgtacaccacgctgaaggatatcccacaatcgttaactgtcttacgaatttcctttggatccttttgaagggagagaccggcattcgccttgaaatcgctaacatttatctgactattggtgaggagaagtggagttttgaagaagtttgctgtgacttctagcttcgatggattggtgaactcggtatttttggcctccaaatgggtgactataacatcgaatacgaaaacggggatgggctctttctttggcttcaccttttcaggtggtggttggtcttctggtttagtttctgcaatagctacagcaacggacttctttttgggtcccatctcgatatcttaaatttctactgtctgtctgggctttcttttatggaggaactagtctgagtcattaatgttccaattataatgatttttttttactttagatttttgaaatagtatcttacgacttactacactaaactttacaataaaactgaggtagacagtgttctgaatataaaaacaagcccaactctgaccagtttcaaatgcaaaatgactaccaaacacttatgacagagatcaaggcatgtttcgtttacttttggaattcataatgagtacttccagttattcgattccatttgcttatctttctgaacaacgttctcaatgcaaaatctgcggcaagccctctaaatgctgaactggttttctgttgtttccccaaatcttaaaatcacaatatgttttcgataaatcgaatattttattaggatatgctgtactgaaggtgttgaacaaacacttcgtttctttccatcaaggtctgcattgcgctccttgtaggattcagataagttttcagccagaatgaccatgaacaccatgtcccacaactggaccatggcctacaactggaccatggcctacaactggaccgtgtccaacaggaccagcgtgtcccacaggtccgtggccagcattgactgggtgtcctccgtgtcctacaggaacatggcgcagatcaccgggagttgcctggacggtagccagggcaatgaggaggaaggcacacagagcaaagaacttcatcgtttcaaaatttgatacactttgaggtgctggaagatcttatatacctaatatcgtaaccgtttacagttatctttttttttataatttttcgttattttttgggtcacaaaacactaaattatacgaaatgtatttcaatatataggttgcccgttaattagcgattatgaacaggtgcgatcattgaataccggtcattcttgttatttctgcatttgtttgtgcaaacaagtttaattatattatttatggcaactgtgctttgtataaaaaatatccaaatttttaaagcctatatttaggcttttaagtaaatgtaaaataggcttgctgctgaatttgatttattaatactcgacgtcgaattgcagatgtaaaataatctgtgtgtttgtgagatttcatgcaactaatcggatcctccgatta

SEQ ID NO: 34595 - DNA, 3260 bp, DROSOPHILA
cttgtttttatattcagaacactgtctacctcagttttattgtaaagtttagtgtagtaagtcgtaagatactatttcaaaaatctaaagtaaaaaaaaatcattataattggaacattaatgactcagactagttcctccataaaagaaagcccagacagacagtagaaatttaagatatcgagatgggacccaaaaagaagtccgttgctgtagctattgcagaaactaaaccagaagaccaaccaccacctgaaaaggtgaagccaaagaaagagcccatccccgttttcgtattcgatgttatagtcacccatttggaggccaaaaataccgagttcaccaatccatcgaagctagaagtcacagcaaacttcttcaaaactccacttctcctcaccaatagtcagataaatgttagcgatttcaaggcgaatgccggtctctcccttcaaaaggatccaaaggaaattcgtaagacagttaacgattgtgggatatccttcagcgtggtgtacagcaagaaggtgattggctccgggcaggcatcgttcccctccagcgtagtggactccatagaaaaggacatgaccgatattcttcactcggacgtcattgatttggctgcaggcggcgaggtgaccggcaaactggagttcctttgccggttggtcgtcatgtgcattgctgatgagcctgagctcgagtgcgcccgtaacatggacaggagcatcaatgcacaggatattatgttcgtaatgggtgaatcgcaggtgtgtcccagtgcctgtgaaccctgtcaaaatgatttggaagcggaggaaggcgacgagcggctcagactggacctggaacgatatcgcagccagggtggtggtataaagccatacaatatgatgacgaacaacgcatctgggataccagcgtgttgtgaacttaagaaaatggcaatcgagtacgagcggatgattgattccatcaccaaacagaccggcatgccgcctcccaagcctccgtgtcgtagtcccgacgaggcgaacaactttggcatgaacccctgttggtgccaacctgaacttcctcaatttcttgagctgcccgagaaaccggacaagccatgcttcgtttacctgcccgccacccaagatcacgagccggacttctgcgagaagaacctaatgccggttcccattgcggactgcgatggacagaagccggaaatcaagcccatccgcttttgtccggtctgcctgaccaatatgtcgtggctgccgaagtttgcagcgtgtccgaagtgtggaatcaaaccgatgcccgtggtggaggataggcacaaggagaagaaggtatcggccgaccagatcctgctcgagtacttgggcaaaggaccatccactgtggatgactactgcacggatccgtgtgaaaaggccaaaaaagatagagccgacgatgatgagtgtccaccatgccgttgcagctgcaagttcggtaaaatgtgtgcccactgtcgcatccgaaagatgtgcgccgatatatttaagagcgatcaggtgactcccaagtgtccaaaagtggagccaaaggaatcggaggactactgtgtggtaaacaaaagctccgaggactgtcgaccctatttggccaaagttttctccgagttgcgcgatctctacgatatcaaggacaccaagaagttatccgaactggacgagaactgcgatcgagcggtgcccaaaacggagaagcctgagaaacaagaacccaaaaaggagaaccaagctcccaagaaaccaccttatataccacctaacaacaagggtcatatttccagcagacacaagcgatgtgtccttcgatcgggatttgtgtcccgacaacatggttgggcctggagcaacagctgggaggccaaaaagctgggctggcgtccgggtgccatccgtaagcccatcaagaaactgatgaagttcttcctggagcaacctgccagagagaatgcatttgccaaatgcaaggacacggagactttggagcgagaaaaggagctggcctcaccggtgttgaatatctgcaagaagaacggagagatcttcatcaccctgcgtcctctttctcccttgggtatgcgccagaaacccatcactttccggattgtgaagagcgaaatggcagtggccctgcgtgagatcaagagaaaactgaaggataagggattccgcaagtgcacctgtcaccagacattgatgatgtgccgttgcagggatcccaccgaaaaggttcatctgcagagggctttaaacagggaatgccgacgtcattgcattccaccggctggcgaccatctggtgctcacagataccagcgaaagcgacatggagtttgactttgatgtcactccgccagcaggtacggagcaaccatgccagccgcctttgccggataccgttaaccatggcacccagacatccaagaaagaccagatgccactacctccaaagtatcccatccgaattccaccttattacagaggtttcgactgcgctgtgggcgatcgctacatgggtacggcattcggatggccgggagaaatggtcttcgaggatggcgtatttggaatgatgggtggcggaccacatggccccaatccaatgccttgcggcagaccccgagtgccaggagcttggggcgttggcgcaggaggggatggcggaggaatcggaggaggcgggggcgctcgaggagtcttaggtggcggaaggtcagccagaggcggaggagctggcggcggtggctttagaggacccggcggacctggaggaggacctggaggtggtgcctggaagggctttcctaccgcagccgtcggaaaggcccaaggccaaggcaaaggaaaaggagaaaaatccgaacctataccagtacgctatccgaagagattcctcaagccagccgaggaggcagccaaggccgccaaggaggcggagaaggccgctgtggatgcgaagaagaagggcattaatatgatcaagtatctgcagaagaagggtactctggtccgtccctggaatccgcaggagggcaaggacaaaagacctagaccacccaaaggtggctttgtcggagacgatggcctaaaggacaatgaaaggaagcgcaaaatgctcctggccgttccaccaataccaatcactgagatgccccggcgcggaaaagcacccaatccctgtgatccctatcgcatggatataatctactga

SEQ ID NO: 34596 - protein, 1024 aa, DROSOPHILA
MGPKKKSVAVAIAETKPEDQPPPEKVKPKKEPIPVFVFDVIVTHLEAKNTEFTNPSKLEVTANFFKTPLLLTNSQINVSDFKANAGLSLQKDPKEIRKTVNDCGISFSVVYSKKVIGSGQASFPSSVVDSIEKDMTDILHSDVIDLAAGGEVTGKLEFLCRLVVMCIADEPELECARNMDRSINAQDIMFVMGESQVCPSACEPCQNDLEAEEGDERLRLDLERYRSQGGGIKPYNMMTNNASGIPACCELKKMAIEYERMIDSITKQTGMPPPKPPCRSPDEANNFGMNPCWCQPELPQFLELPEKPDKPCFVYLPATQDHEPDFCEKNLMPVPIADCDGQKPEIKPIRFCPVCLTNMSWLPKFAACPKCGIKPMPVVEDRHKEKKVSADQILLEYLGKGPSTVDDYCTDPCEKAKKDRADDDECPPCRCSCKFGKMCAHCRIRKMCADIFKSDQVTPKCPKVEPKESEDYCVVNKSSEDCRPYLAKVFSELRDLYDIKDTKKLSELDENCDRAVPKTEKPEKQEPKKENQAPKKPPYIPPNNKGHISSRHKRCVLRSGFVSRQHGWAWSNSWEAKKLGWRPGAIRKPIKKLMKFFLEQPARENAFAKCKDTETLEREKELASPVLNICKKNGEIFITLRPLSPLGMRQKPITFRIVKSEMAVALREIKRKLKDKGFRKCTCHQTLMMCRCRDPTEKVHLQRALNRECRRHCIPPAGDHLVLTDTSESDMEFDFDVTPPAGTEQPCQPPLPDTVNHGTQTSKKDQMPLPPKYPIRIPPYYRGFDCAVGDRYMGTAFGWPGEMVFEDGVFGMMGGGPHGPNPMPCGRPRVPGAWGVGAGGDGGGIGGGGGARGVLGGGRSARGGGAGGGGFRGPGGPGGGPGGGAWKGFPTAAVGKAQGQGKGKGEKSEPIPVRYPKRFLKPAEEAAKAAKEAEKAAVDAKKKGINMIKYLQKKGTLVRPWNPQEGKDKRPRPPKGGFVGDDGLKDNERKRKMLLAVPPIPITEMPRRGKAPNPCDPYRMDIIY

SEQ ID NO: 34597 - DNA, 3291 bp, DROSOPHILA
acataatagccctaagctaaatgctagcagttaattattaaattaccataattgtgacaactcaattatgtgctttgtgtggcattttctattattcccggaactggagcgaatacctgccgagcatttttaaagacgcgaacgtgccacaagcgtattttgggcgaaagtctgcacgggttcaagagctgttagtggaatgtgatttatttgcttatttgtaataagttattttgctcacaaacttttcttgagagggcaaatagggcattgaaaggttttggtattatttgtgattaaatttttgttggcaatttagttgtcaatccctgtacgttttaggacatcaaataatctgcgttctgactctttatttgctccaatttttctttggtaatcccctaacaaagtccattatccagcaaaataccttcgccctaagcgtatcctaaattcggttttttacatagaaagcctttccattcgcatttatttttttgccaagcttttgttgccttctttgattttgacgtaatgctttggcccgcggtctgtgacgcccagtgacaaaagggattagttctttgttgtcggatgtggattgtgtgcggtggagaaggtggtggagctgtagccacagccgccaatcgactgacagttattaattgccacttgacgtggctccgacggaacgagcagcatcggcccaaccgaactcgtgtcgctgccaatgctgataccaatgttggggctgatggccaagaccatgctgacacccatcagtcagcccgcctgagcccggcttatgagtaattgaaattgcgtgtaaatccgcgaacgcgaagtggcgccgcgataagagagttcagttcagagcaacaaaaaaaaaaaaaaagcggaatgaaacactccacttgggcacgcctgaggtatttatttatagcatcttaaaaataacttattttactccttttttatcgccaacaaccggtgtctctgctcatttatcaccgttgctaaaaacactgatggcgtagaactcgggcacccggtaaaccttcagtcgctcatggctaaatcgtccgttggtgagcgccttcacatagaatatgtcctttaggccgagatttttgcgctgcgaggacttcgtctcctccatgacgagacgttgctgcttgggccgatagccatgggacttatcctgcagcagcttcacaaagatgatgtcctggtcgtcatttcgtccagctaaagttcgcgcctggtagagattctcacgtggcttggggtaaatcaacacgggttgtatgggcaacacctgactgggcgacgtgggataggcctccagttcatcgggctctgggtcactgaagtgcagggcaggagctgcccaggacatgcaaggaaggtaagctgccagcagtaggaagccgattgtgtgttttatctattataaataaataggggtagatatgattatttaatgatttaatttaatcatttaatgatttatttaagtgtatggcaacgaggtctaaaccagttttacatatattagcaattagtttcaatttatggggctttgtggtgcttttcctacgaaggatttatggctttattttggaacattttaaggaaaactcaattaatatctcaaataaatcatagctcgaccagctgcacggtgaagcaatttaataattaagtagctatatatcttgtttatattttaaatttatgtatgtgctggcaaacagtttaagattttccgcattttatggttctgatttatcacattgattttgatttgattaattagaagaccaatcaaagatatgataaatgggaaaatcacaaaattaatctgataatctgaaaatcttgttcaccactttttgcttcgattgtaaatgatttattgcattgacagatttgttttatcacggctatttgcatacttaatcggtctacaaaactcggcaaattaattgagtattgtgaccaaccagaattggtttcagtcaaaacaccatttgatatttggccaaaagctgccagtgtgactttatacttttgagtcggttcttgtgtttgaattaccgttttcattgcgtttgctaaaatcccagctcaagttcgctccacgaaaatcgaagaaatatatagctatatatatatttatttttgaacctaagccgctttgcttcgcttgtcggcactttggccctttttggccaatagcaacggagtatcacagacgttaaaagcggcgatcgagcgcggcgcgcgaatgtcagaagcagactggcgtgcgacaaggccaagttaacttcatttaccgcccgacggagccgccggcagaagctgaagcgcagtaaaaaaaataaatatacaaaataaaaaaaaaagaaggcccgagctggacgaagaaaaagcagcagaaaccgcgcagcttccagctgtcagcaaatggcaaacggtgggcaaataaaaacagatgtctggcttaacactcattaactgcagcaagaacatctcctaaatcaaaagcattaaaagattaaaaacaaatttaaaatgccctattagcacgaacaataaggaaggaatgtagaataacatattaatagtaagtatttttcataaaggagtaaaaagatattagttggattcttcaagtaagaaaatagtttttaaaattcttataaaattttatacattttaattatagcattagctttatatttatgtatttaagttttataacattttatacattttttaattatagcattagcttcatatttatgtatttcaaaaatttattttgtgcagaaactattatccattccagtcattcacggcacataagtctccttagatgaacacatagccattttagtttcccgcccatagatcgtcaatgggttaatagataaagaaggtccgggggcggatcattcaatatttgtgctattaattgatcactaggtcggagtgtcgagagggtcaatgttatcagcatgcgagcgcgtatcaatcacctgtgtttgatgatgagctcaagactaatttccagctgcttacatttgtgtttatctcgtggtaattttatgcttgccgccagtagtgatgtcaaatttattattatagccgccgctgaatgggaaggtaaatgaaaaaaatcacccaaacggcagaaataaatttagacacgtagaaatgcttaattagcgaataaatatttgcgctgccttgagtttagtaaagagttttgcacacttgcggaat

SEQ ID NO: 34598 - DNA, 638 bp, DROSOPHILA
ttcgcgcgccgcgctcgatcgccgcttttaacgtctgtgatactccgttgctattggccaaaaagggccaaagtgccgacaagcgaagcaaagcggcttaggttcaaaaataaatatatatatagctatatatttcttcgattttcgtggagcgaacttgagctgggattttagcaaacgcaatgaaaacgataaaacacacaatcggcttcctactgctggcagcttaccttccttgcatgtcctgggcagctcctgccctgcacttcagtgacccagagcccgatgaactggaggcctatcccacgtcgcccagtcaggtgttgcccatacaacccgtgttgatttaccccaagccacgtgagaatctctaccaggcgcgaactttagctggacgaaatgacgaccaggacatcatctttgtgaagctgctgcaggataagtcccatggctatcggcccaagcagcaacgtctcgtcatggaggagacgaagtcctcgcagcgcaaaaatctcggcctaaaggacatattctatgtgaaggcgctcaccaacggacgatttagccatgagcgactgaaggtttaccgggtgcccgagttctacgccatcagtgtttttagcaacggtgataaatga

SEQ ID NO: 34599 - protein, 132 aa, DROSOPHILA
MSWAAPALHFSDPEPDELEAYPTSPSQVLPIQPVLIYPKPRENLYQARTLAGRNDDQDIIFVKLLQDKSHGYRPKQQRLVMEETKSSQRKNLGLKDIFYVKALTNGRFSHERLKVYRVPEFYAISVFSNGDK

SEQ ID NO: 34600 - DNA, 2448 bp, DROSOPHILA
agtaagtcaaattagaacggaataaatatatctgatggtacaagttttgacttacagataatgcagctggcctatagactcttcacttttctcaaatctcattaaaaggattgatcttttatttgttttctgcttgcctttatgtgacagtataaattagtttatcaagttcacatatgtatgacaaattaaatacacttcctggttgtaaacagtatatgctatgacttacgcactttaggcttaaaaatatatgtagcttgtttttaaacgttgttgaatgataacatcgcggatcgtgatcttcacgattccgtaaagtagaaaacaaagtaaacttcgaacttacatacgctgcagcttaaaaatgctcatgatatataaaaaaaaaaaagtaattcataattttaaatagagaaaaactggtcttccttagttgctgcaatgttttaaagaagcgcaaagggattggtggtatcttaagacatgcagaaagaaacatgtagcagagtgtccagtaacacttaatgattttgtggacttgtaggggcatccctggcacttgtaaggcttcggttcctgctgacagatggccatgtgagcgttgtactccacctggttggccttggtgttcaggcagtaagggcacttaaatttccttattttcggtagcaatggaacgtttttcggatcatttatatcattttgaaaagatttgatgcaactaggacacatttgaaatacaaatggggtctgctccgaaatggcacactccttcgatgatcccttatcgtgttgcgaagatttgtagatcgattttaataccgtgttcaaagcaagttcttttggcgaatttccgctgggttctccgaattccagagaacgttttagtggtttgtttggtgaaactgtacattccattgatgaaacatcacgtgattcgttgcactcctttggcaagtctgcaaatttcgtaatttcctcagggcataaaactaaactacttgatgcactcaggtccaatggtgtttctagtgattcctggtcaggcaaattcatttcattggattctaaattcagcacacgtggtaaatcatttctttgattggtattgcataaatcttacccacgtgttccttcagctcattttctttgctcaacttgcaggtgctcatgcagttgatcagggttccgtaattgatcaaatggttgatttgaaggagtgccgagttgcaggggcacttgtggagcatcaaagttccgtagttgataaaggtttttatctttagtgttggtggataggcatttcccttgcatctgcctgtcctcatcaatccgtaattggtcacgttatccgtattcagcaattgtaagtcgtttcccgatttactcctgcactggcatttccgatcgaatataactccgtggtttgaaattgtgctcgacataacgatttccttttaatttcgcagaattgtacagtttcgtaaagttgaaaagcaataagtttcgatatcgattgttaccagagctgccgttcgtttagcgcgtgttcgattcgcacatcgcgttcgattttaaaagcttgatgtctacccagtgttggacaatctctaaatttaatggtaataaggcatttaaccatttaataactatagttcaaaacaaaaattgagtttttcagctaattcaaagctgaatcaatatttatattttaaaaatttgttaggtccttaaagcttacatttttattggatatatgcataacatatttaagtgcctgggatggaaagatataacacaatgagtaaattgagcagacattcgaatcctcttcctaagaatcctaggccttaattacaactattcctgagcaccttccattccactagtgaccgtcaatcctacggatgtggatgtggattcctggccacccttaacgaaggtcgacgtgatcctccggctggaacattcgcacttgtagctgcggaaagccggggcagacgcggattgacaggtgggcccatgactcggtcgacaggatccatttggttgtcgatttgaggcaggggcgaggccggcgaccactctgaactggaactggagccgggtgagtcagatctttgggcaaatgtgacaatttaataacttcttctcggatcaatattgtagttatcccaaaatgaatccttaccccgcagtatagatgggcggtagtttccgttcatagttgctggtgctgggtgttaccacgccagcatgtatctcctgctggtaaagcccataaagctcacgcaactcatccggcagatccacgttgccctcttcgatgagccttctctgggagctgatgatgtcctcgcagaggcgtcgctgtctttctgccctaagcagttgaagatcacgcctgcgcagctccgcctggcgagccagccgctccgcctgcag

SEQ ID NO: 34601 - DNA, 363 bp, DROSOPHILA
atgtcgagcacaatttcaaaccacggagttatattcgatcggaaatgccagtgcaggagtaaatcgggaaacgacttacaattgctgaatacggataacgtgaccaattacggattgatgaggacaggcagatgcaagggaaatgcctatccaccaacactaaagataaaaacctttatcaactacggaactttgatgctccacaagtgcccctgcaactcggcactccttcaaatcaaccatttgatcaattacggaaccctgatcaactgcatgagcacctgcaagttgagcaaagaaaatgagctgaaggaacacgtgggaatcactagaaacaccattggacctgagtgcatcaagtag

SEQ ID NO: 34602 - protein, 120 aa, DROSOPHILA
MSSTISNHGVIFDRKCQCRSKSGNDLQLLNTDNVTNYGLMRTGRCKGNAYPPTLKIKTFINYGTLMLHKCPCNSALLQINHLINYGTLINCMSTCKLSKENELKEHVGITRNTIGPECIK

SEQ ID NO: 34603 - DNA, 2561 bp, DROSOPHILA
actatatttttaggaatccaatttacacttaactaggtatcatttataattttatgttaatttgatttgagaagtttttaactagttttgtttttagtcgaaacaactccaaattttgttttatttattgttgattcattttgtataaaaccgatttatcttctttcgctcagccaaatcgaaggccctagctgccggtgacgtctccatttccaattgccccaagagcaagtgcatcctgaagcgcaacacggaggccagcattcagatgaagatccggccggagcgcgacttccaggagctgacctccgacatccagggcattatcctggacgtgccgctgccgttcccaggatattacggcaccagcgcctgtccgcacatctacgacgaggctggcgagaagaaggtgggctgcccactgaaggccggccaggtgtacacctacaagaacagcttcaagatcctgcccgtctacccgaccgtcagtttggagatccactggggattgggcgataagcatggggatgcggcctgcttccagatacccgccaaaatcaaggcttaaaatacaaatgcggacaagtgcactcaatgttagcttttattagtggtaattcttaagatcgtatctgcgtatctgcatatgcttagtttagggattaagtacggttaagtgaacgaaaacgaagcaggccattattgcggcatccagccagtgacgcaatatggccaaaggattccactgatcggctcagtaagtctaataataaaaaaccacaacgaattctacatgtttagtgcgcctgctccgcgatctcttctaccgactgcgttaattgatttaaattgatttctttttttttttgttaattgatgcccggcatgcaatgatctcgcgtgtgataaatatcgttttatttcgcttttccctctgttcttctggcttagctagcgtgttatctgcataatttcaatttggcaattggcctcggaatgttcacttcgttagctcgtagcccgagtagttctcattgtcggcatcgatttgggcctgcagagcctgctgcagtttcctccaactctcggctgccgcatcgtactgaccctgaccgcccctgccacgcccctgctgctgctgatcctgcaactggcgcaattgatagcggtgctgccgcatcagctgcgcccactttaggccaccgattcgccgatcctccgattctcgacgacttataatggctggagcagccaggggtatgttgttggcactattcgcattcgtatttctgttgctgtcgtcatcgttgttgtcgtcgtcctggttgttctggttgttgttgttgttgttgtacagttgctccaccacgctatccaagccatatgaatttggcaagggatgctgttaaaaggtaaaacaaattaaattttaaaatgaaggcagtagtaaaatttaaactaattaattccttctatactcaaaggtcattctcaatcttacctgtttagcatctatgaccgccttcccgccggaccgcttgccatgagctgtggaatacataaacatgagtcacgactcctgggccagttgtgatgatgaactgctcccgtcagagcttaaccggcgagccacttacctccccaacacgaatgtccgtattccaggcaggaacctgaaagtatgcaacattttttccaatttagtataaatcatcatcagtttgccgcagctctaagactttgtgcgcaagtaaatttgctagaaacgcagccaggtgtcagaaaacctacacagcacagcagcgtagcttcgaccacacagcgagcctaagcttgggctttaaaactttctcttctttttttacggttctatagtaaaagctactttcaccagcatcccgttgatgctgctacttcggctgctactttccgtgtaaaaagcacatgtttattgtgtgtgcttggctgctaatgtcgcgacccatgataaatgcgaccattatggaactcatatgccaagtcggagtgggttgagtaatgcactcggcgtgggcacatcaaggtgttgcagtcctgcatcctagcaatttgataattcaacagcactgtggggaaatataccactggagacaacaatagaattcctatttaaaaaccaaatatcatacgtagattaccttttaaaaactttctcaaacattttttatttaaagtagcctccagaacattttattattacataaatgttgccaaaaatattacaaacgcttgctcgctgcctaatcttctgcccccaagttcagatttcccagcaacccagttgagctgctcatcctcgtgcaggtccaacctgtggctgttcataacgtcctgccttacaacaatgtccttgatgccactcgtgcattgtgtgccaaaaaaaagaagaggtggcggcgcagaactaatcatacaaatggacggcaacgcatcagcatgaaataaggaggaggactcagctggggacagaggacacttggtgaggcatgtgaatacgctttgcgcaactgtcagtcgcctgg

SEQ ID NO: 34604 - DNA, 462 bp, DROSOPHILA
atgtattccacagctcatggcaagcggtccggcgggaaggcggtcatagatgctaaacagcatcccttgccaaattcatatggcttggatagcgtggtggagcaactgtacaacaacaacaacaacaaccagaacaaccaggacgacgacaacaacgatgacgacagcaacagaaatacgaatgcgaatagtgccaacaacatacccctggctgctccagccattataagtcgtcgagaatcggaggatcggcgaatcggtggcctaaagtgggcgcagctgatgcggcagcaccgctatcaattgcgccagttgcaggatcagcagcagcaggggcgtggcaggggcggtcagggtcagtacgatgcggcagccgagagttggaggaaactgcagcaggctctgcaggcccaaatcgatgccgacaatgagaactactcgggctacgagctaacgaagtga

SEQ ID NO: 34605 - protein, 153 aa, DROSOPHILA
MYSTAHGKRSGGKAVIDAKQHPLPNSYGLDSVVEQLYNNNNNNQNNQDDDNNDDDSNRNTNANSANNIPLAAPAIISRRESEDRRIGGLKWAQLMRQHRYQLRQLQDQQQQGRGRGGQGQYDAAAESWRKLQQALQAQIDADNENYSGYELTK

SEQ ID NO: 34606 - DNA, 2237 bp, DROSOPHILA
ccagtttgccggtcacctcgccgcctgcagccaaatcaatgacgtccgagtgaagaatatcggtcatgtccttttctatggagtccactacgctggaggggaacgatgcctgcccggagccaatcaccttcttgctgtacaccacgctgaaggatatcccacaatcgttaactgtcttacgaatttcctttggatccttttgaagggagagaccggcattcgccttgaaatcgctaacatttatctgactattggtgaggagaagtggagttttgaagaagtttgctgtgacttctagcttcgatggattggtgaactcggtatttttggcctccaaatgggtgactataacatcgaatacgaaaacggggatgggctctttctttggcttcaccttttcaggtggtggttggtcttctggtttagtttctgcaatagctacagcaacggacttctttttgggtcccatctcgatatcttaaatttctactgtctgtctgggctttcttttatggaggaactagtctgagtcattaatgttccaattataatgatttttttttactttagatttttgaaatagtatcttacgacttactacactaaactttacaataaaactgaggtagacagtgttctgaatataaaaacaagcccaactctgaccagtttcaaatgcaaaatgactaccaaacacttatgacagagatcaaggcatgtttcgtttacttttggaattcataatgagtacttccagttattcgattccatttgcttatctttctgaacaacgttctcaatgcaaaatctgcggcaagccctctaaatgctgaactggttttctgttgtttccccaaatcttaaaatcacaatatgttttcgataaatcgaatattttattaggatatgctgtactgaaggtgttgaacaaacacttcgtttctttccatcaaggtctgcattgcgctccttgtaggattcagataagttttcagccagaatgaccatgaacaccatgtcccacaactggaccatggcctacaactggaccatggcctacaactggaccgtgtccaacaggaccagcgtgtcccacaggtccgtggccagcattgactgggtgtcctccgtgtcctacaggaacatggcgcagatcaccgggagttgcctggacggtagccagggcaatgaggaggaaggcacacagagcaaagaacttcatcgtttcaaaatttgatacactttgaggtgctggaagatcttatatacctaatatcgtaaccgtttacagttatctttttttttataatttttcgttattttttgggtcacaaaacactaaattatacgaaatgtatttcaatatataggttgcccgttaattagcgattatgaacaggtgcgatcattgaataccggtcattcttgttatttctgcatttgtttgtgcaaacaagtttaattatattatttatggcaactgtgctttgtataaaaaatatccaaatttttaaagcctatatttaggcttttaagtaaatgtaaaataggcttgctgctgaatttgatttattaatactcgacgtcgaattgcagatgtaaaataatctgtgtgtttgtgagatttcatgcaactaatcggatcctccgattaattgcaaaatgtccaggaatatgttcattacatccatgtaaatatttagggcagcgaatatgtactcctcgggactaatggagtacctatgcttgcctcccatcatcaattgtgtatcgtaaactaaataaacggagaagagcagagcgctcaatgaggcatatatggtggtgaccatatgtccgcccacgaagatggtcacaattccaaagaagagcagtattatcaggcagctcaccaggaggccacccatgacggtaaagtcgtaacgcgtctgcagagcaaaaagggtgagtccaaggcaaactgacgccgtgattagcacggccatgaaaatctccattggggcataacgacaggctgccacgcccagcagaaaggactcggctatcgtgaaggcagataggaagatgaagttagctggggtctgacgacgcagatcctcattgcagcccagagccaccagagagaagaccactattagtatggccaccacaaatatccaggtgctttctgccaccatcagacgcacccgtttatcagcagtaagtgaaactataaccaccagggaagtgatcagttg

SEQ ID NO: 34607 - DNA, 237 bp, DROSOPHILA
atgaccatgaacaccatgtcccacaactggaccatggcctacaactggaccatggcctacaactggaccgtgtccaacaggaccagcgtgtcccacaggtccgtggccagcattgactgggtgtcctccgtgtcctacaggaacatggcgcagatcaccgggagttgcctggacggtagccagggcaatgaggaggaaggcacacagagcaaagaacttcatcgtttcaaaatttga

SEQ ID NO: 34608 - protein, 76 aa, DROSOPHILA
MNTMSHNWTMAYNWTMAYNWTVSNRTSVSHRSVASIDWVSSVSYRNMAQITGSCLDGSQGNEEEGTQSKELHRFKI

SEQ ID NO: 34609 - DNA, 3346 bp, DROSOPHILA
aattttatttctctctggagagccctttctctctcgatttgtttatgtttgccgccgtttgtgtgacccacataaagaaagaagcaaaaacaaaaacgccagataaggggcggccttgattttggtgtgcgtaaagagaggggagggtgcatgcatttggacaataagatagctagagagcggagagcgttaagtgtttgcgtaaacttacccccgttttgagcagtgcacgcctcggacaatattacgaaatgcacgaggggcatccactacgcacaaataatagctcaatttcatgtacagtcaagcttcgccaacgtgaactaaaaccataccaacatattatttatgctacgttcatcctatgatttacctttaattatattatagtatacattttatatttttgagccattaaaaaaacatttttttattttcattagcttaatttagagtcttgaatggagttgaactgaacttgactgttaaaaatatgcaattaaatcaacactagctgagcaattaacctaagtagcaattagtattagtaacagcaggcctataattctgacaaaatggtgagaaaattaagcaattataaaataatactagatcgcgacagtgaaatttagataagtatttatgtaggtgttgtcagacctcataaactacaaggtacatatttttaataaaaaaaatattaaacaaacacatttaaaaagaatgaaatacattatgaaaaaatagttcttaaataagacgttttacagacatattctctaagatactttctactaactagttatttgcctgtagctaatttactgcgatcataaaacgtgcaatttagaatccaatctggcaggaccttatcaattagactcgtaattatttaggattattggccatatataggaagttcagacagtagaagccatacagaaaagttaagtgagtttagcaaaccatgaagccaacggaaatcaaaaaaccctatcgaatggaggagtttctgcgtccgcagatgttccaggaggtggctcagatggtgcatttccagtggcggagaaatccggtggacaacagcatggtgaacgcatccatggtccccttctgcttgtcggcgtttcttaatgtcctgtttttcggctgcaatggttgggacatcataggacatttttggctgggacatcctgccaaccagaatccgcccgtgcttagcatcaccatttacttctcgatcaggggattgatgctatacctgaaacgaaaggaaatcgttgagtttgttaacgacttggatcgggagtgtccgcgggacttggtcagccagttggacatgcaaatggatgagacgtaccgaaacttttggcagcgctatcgcttcatccgtatctactcccatttgggtggtccgatgttctgcgttgtgccattagctctattcctcctgacccacgagggtaaagatactcctgttgcccagcacgagcagctccttggaggatggctgccatgcggtgtgcgaaaggacccaaatttctaccttttagtctggtccttcgacctgatgtgcaccacttgcggcgtctcctttttcgttaccttcgacaacctattcaatgtgatgcagggacatttggtcatgcatttgggccatcttgctcgccagttttcggccatcgatcctcgacagagtttgaccgatgagaagcgattctttgtggatcttaggttattagttcagaggcagcagcttcttaatggattgtgcagaaagtaagtaatgaaaagaattcatttaaattattctaattatatatttaccaatatcgaagatacaacgacatctttaaagtggccttcctggtgagcaattttgtaggcgccggttccctctgcttctacctctttatgctctcggagacatcagatgtccttatcatcgcccagtatatattacccactttggtcctggtgggcttcacatttgagatttgtctacggggaacccaactggaaaaggcggtgagttctttttgataagtccacaatgcacaaataatgcaacattacaaatttacagtcggagggactggaatcgtcgttgcgaagccaggaatggtatttgggaagtaggcggtaccggaagttctatttgctctggacgcaatattgccagcgaacacagcaactgggcgcctttgggctaatccaagtcaatatggtgcacttcactgaagtaagtcaaattagaacggaataaatatatctgatggtacaagttttgacttacagataatgcagctggcctatagactcttcacttttctcaaatctcattaaaaggattgatcttttatttgttttctgcttgcctttatgtgacagtataaattagtttatcaagttcacatatgtatgacaaattaaatacacttcctggttgtaaacagtatatgctatgacttacgcactttaggcttaaaaatatatgtagcttgtttttaaacgttgttgaatgataacatcgcggatcgtgatcttcacgattccgtaaagtagaaaacaaagtaaacttcgaacttacatacgctgcagcttaaaaatgctcatgatatataaaaaaaaaaaagtaattcataattttaaatagagaaaaactggtcttccttagttgctgcaatgttttaaagaagcgcaaagggattggtggtatcttaagacatgcagaaagaaacatgtagcagagtgtccagtaacacttaatgattttgtggacttgtaggggcatccctggcacttgtaaggcttcggttcctgctgacagatggccatgtgagcgttgtactccacctggttggccttggtgttcaggcagtaagggcacttaaatttccttattttcggtagcaatggaacgtttttcggatcatttatatcattttgaaaagatttgatgcaactaggacacatttgaaatacaaatggggtctgctccgaaatggcacactccttcgatgatcccttatcgtgttgcgaagatttgtagatcgattttaataccgtgttcaaagcaagttcttttggcgaatttccgctgggttctccgaattccagagaacgttttagtggtttgtttggtgaaactgtacattccattgatgaaacatcacgtgattcgttgcactcctttggcaagtctgcaaatttcgtaatttcctcagggcataaaactaaactacttgatgcactcaggtccaatggtgtttctagtgattcctggtcaggcaaattcatttcattggattctaaattcagcacacgtggtaaatcatttctttga

SEQ ID NO: 34610 - DNA, 1173 bp, DROSOPHILA
atggaggagtttctgcgtccgcagatgttccaggaggtggctcagatggtgcatttccagtggcggagaaatccggtggacaacagcatggtgaacgcatccatggtccccttctgcttgtcggcgtttcttaatgtcctgtttttcggctgcaatggttgggacatcataggacatttttggctgggacatcctgccaaccagaatccgcccgtgcttagcatcaccatttacttctcgatcaggggattgatgctatacctgaaacgaaaggaaatcgttgagtttgttaacgacttggatcgggagtgtccgcgggacttggtcagccagttggacatgcaaatggatgagacgtaccgaaacttttggcagcgctatcgcttcatccgtatctactcccatttgggtggtccgatgttctgcgttgtgccattagctctattcctcctgacccacgagggtaaagatactcctgttgcccagcacgagcagctccttggaggatggctgccatgcggtgtgcgaaaggacccaaatttctaccttttagtctggtccttcgacctgatgtgcaccacttgcggcgtctcctttttcgttaccttcgacaacctattcaatgtgatgcagggacatttggtcatgcatttgggccatcttgctcgccagttttcggccatcgatcctcgacagagtttgaccgatgagaagcgattctttgtggatcttaggttattagttcagaggcagcagcttcttaatggattgtgcagaaaatacaacgacatctttaaagtggccttcctggtgagcaattttgtaggcgccggttccctctgcttctacctctttatgctctcggagacatcagatgtccttatcatcgcccagtatatattacccactttggtcctggtgggcttcacatttgagatttgtctacggggaacccaactggaaaaggcgtcggagggactggaatcgtcgttgcgaagccaggaatggtatttgggaagtaggcggtaccggaagttctatttgctctggacgcaatattgccagcgaacacagcaactgggcgcctttgggctaatccaagtcaatatggtgcacttcactgaaataatgcagctggcctatagactcttcacttttctcaaatctcattaa

SEQ ID NO: 34611 - protein, 390 aa, DROSOPHILA
MEEFLRPQMFQEVAQMVHFQWRRNPVDNSMVNASMVPFCLSAFLNVLFFGCNGWDIIGHFWLGHPANQNPPVLSITIYFSIRGLMLYLKRKEIVEFVNDLDRECPRDLVSQLDMQMDETYRNFWQRYRFIRIYSHLGGPMFCVVPLALFLLTHEGKDTPVAQHEQLLGGWLPCGVRKDPNFYLLVWSFDLMCTTCGVSFFVTFDNLFNVMQGHLVMHLGHLARQFSAIDPRQSLTDEKRFFVDLRLLVQRQQLLNGLCRKYNDIFKVAFLVSNFVGAGSLCFYLFMLSETSDVLIIAQYILPTLVLVGFTFEICLRGTQLEKASEGLESSLRSQEWYLGSRRYRKFYLLWTQYCQRTQQLGAFGLIQVNMVHFTEIMQLAYRLFTFLKSH

SEQ ID NO: 34612 - DNA, 3296 bp, DROSOPHILA
actaaagggtggaagggaggagcccccatggactacactgaaggaagggagtgcgacctggcctcacatcctgctcaccgaagtcataccttgactggcagtcccggtgagcgagcaaggactgtagagcacgcggaggtttttgttttagtacgtaggcataattccaatagggcttatgaatcgtgcatgccacctacggacggtaggtggtatctttagaagattttaattttcctaccgtaagtcaaataataaaaaaaaaaaaatatatgcacatatagccagcgataaaaatggctgagaaacttttacaaaacaaacttttgtttgttcggcggttttgtttgtttgttgtggccgttacccaaggatgtgacaatggtaactcgaaatgtggccaagaacgcaaggggtcctggaaactaaactgggtcatcagcacactctgggccacacacatctcaagtggatttcagtttccaattggagggccaacgattgttgacactggttaatgtgcgtccgtttgtgttgccaattacttgttgctaagctggccaattcgagctcagttttgcttattggatgggtttttcttgtgtgagaatttgatgttttggatcttaagttcatatgataaagaattcttgcgcttgaatgcaattttggttagctttgaaaggtcttcttcgacttcgcagccaatcagatattgctgtaaagttcaacttttgtcattaaccgatcgccacacattcaagaccacctagttagcatataaatagtatgcattttccatagccactgctttttatagtaggtgttaatggctcaagtgccacaaatgccaatggctggcatttaaacagcaataatatttatgcaaatgtgattagcagccctacagagatactactacttggctaaatagatcatttacacacacacacacacacacagaaaaaggagggccaatgggccaatgggcgtggcatatttaccttttatcacagaaatttgcggcggcgttacaaaattccttagaattggggcatttaactaataatactaggcacagaggagattgttgtggttgctgttgattgttgctgttgctgctgctgctgctgttgtggtgatgatggctgctgctgctgctgctgctgctgctgctgctgctgctgtggtgatggtggtggtgctgctgctgctgtgcaggatgggcgcaattataatgttgctgttgtaccgacgattgctgataggaggatgatgatgatgtggatgcagatggagatgccgatgcggaggacgaggatgcactgaggggatggtgatgttgctgctggttcagatgccgcctgatggactgattgatgcgattcgttatggagttggtcagcgccgaatgatggctatgcagatggtgtgacgacgaagaggatgaggcagccaccgacgaggaggatgctgatgcggaggaggaggacgaggaggatgaggaggaggcggctccgaacaggcggctggcgatgatgctgttgctgtggtgattgctgttgctgctgctactgccactgttgctattgccaccgttgtagtgcgtattgcccgcacaggcgctgctgcagttgttggaggaaatcgcactggacgagggcgagggggcggaccgcgttagtatgtgttgcaagttgctgctgccgaatgccgcctgcagtatgttgctgggtgttgccaaatgctgcgccagtgttgccgagccacttctactggttgctactgttgctgctgcagccgctgctgttgctgctgctgctgcagttgctccactttcgtaattcaggtgacccaaatgctgttgcaaaaccgaaggcgcagcttgctgctgttgctgctgttgcggtggtgttgccgttgctgctggcgtgtgtgggtggtgttgctgttgctggtgctgctgctgttgcagcgacgatctgcgcaataatactggtggcgtcgatatcaattgctgcaggcgactgcaattgccgctgctgctactgctggccgctgctcctgtggcgactgttgctgccgcagatgttgctgccacagatgttgccgctaccgttgcagttgcaacttcaggcgcattctgaggctcgccgttctcgcagcaacaattatcgctggtagcaggttgctgctgctgctgctgaagatgatgttgctgttgctctaaattctcattttcatagatttcattcacacttcgctttttcttgattttcacatagggctcaaacattttacaactttgatagcaaacacttcgaaacactcacacaccttatttatgtattttgatttgatttgaattgattataaaatatacggattcctcctggcttgcgtaaaaaattgctcaacttttttggtgcttaaaaatttttcatttgcacaaatctctttgttgccacatgccgtttgcttgatattttagttgccttacgatttgtatataattttcgagtgtgtgctcgattttgttgtttcgagtagtagtatttgatttgatttttctttgctttttttttttgtatgttatagttatagttatatagtatttggtggggcgacacacgaagcgagagagcaggcgaatggcgaatccaatcgaattgaatcgagttgagcgctcacaaaacgaacgaaccgctccgcttgaaagtgcgcgtcgaaatgagctgaaatttgaaaatacagaaatttccgccgttcgctcgcgacgccgactgcgatgccgactgcgattgcgacgccggcagcgctgctcgtttcagttcccacttcgtttcgcagcgtttctctctctctgcgtttcaccatgtaacacacacgcacacctacactttcgtttcgctttgtgtgaggtcgatgagcacatatgggggaaaactatgggtgcagggggtcgataaggaggtaccctaaattataatcaattgcattgccaagttgaacagacataacttgataatacaacattttgttcatctacacaacataacatggaaattctaattggcaaacatccagagagatacgctcaagttcaaaacccattggcacatatgccatgtttcgtaaagaataaaccattgcaagggacatacctttatattctacgattactgggtaacaagaggaagtgagaaagagagagagagagagagagaggccaagtgcgcaagtgcacagagtgagagcaagagtgagagagcgaacgttgagggccagctgataaa

SEQ ID NO: 34613 - DNA, 1296 bp, DROSOPHILA
atgtttgagccctatgtgaaaatcaagaaaaagcgaagtgtgaatgaaatctatgaaaatgagaatttagagcaacagcaacatcatcttcagcagcagcagcagcaacctgctaccagcgataattgttgctgcgagaacggcgagcctcagaatgcgcctgaagttgcaactgcaacggtagcggcaacatctgtggcagcaacatctgcggcagcaacagtcgccacaggagcagcggccagcagtagcagcagcggcaattgcagtcgcctgcagcaattgatatcgacgccaccagtattattgcgcagatcgtcgctgcaacagcagcagcaccagcaacagcaacaccacccacacacgccagcagcaacggcaacaccaccgcaacagcagcaacagcagcaagctgcgccttcggttttgcaacagcatttgggtcacctgaattacgaaagtggagcaactgcagcagcagcagcaacagcagcggctgcagcagcaacagtagcaaccagtagaagtggctcggcaacactggcgcagcatttggcaacacccagcaacatactgcaggcggcattcggcagcagcaacttgcaacacatactaacgcggtccgccccctcgccctcgtccagtgcgatttcctccaacaactgcagcagcgcctgtgcgggcaatacgcactacaacggtggcaatagcaacagtggcagtagcagcagcaacagcaatcaccacagcaacagcatcatcgccagccgcctgttcggagccgcctcctcctcatcctcctcgtcctcctcctccgcatcagcatcctcctcgtcggtggctgcctcatcctcttcgtcgtcacaccatctgcatagccatcattcggcgctgaccaactccataacgaatcgcatcaatcagtccatcaggcggcatctgaaccagcagcaacatcaccatcccctcagtgcatcctcgtcctccgcatcggcatctccatctgcatccacatcatcatcatcctcctatcagcaatcgtcggtacaacagcaacattataattgcgcccatcctgcacagcagcagcagcaccaccaccatcaccacagcagcagcagcagcagcagcagcagcagcagcagcagccatcatcaccacaacagcagcagcagcagcaacagcaacaatcaacagcaaccacaacaatctcctctgtgcctagtattattagttaaatgccccaattctaaggaattttgtaacgccgccgcaaatttctgtgataaaaggtaa

SEQ ID NO: 34614 - protein, 431 aa, DROSOPHILA
MFEPYVKIKKKRSVNEIYENENLEQQQHHLQQQQQQPATSDNCCCENGEPQNAPEVATATVAATSVAATSAAATVATGAAASSSSSGNCSRLQQLISTPPVLLRRSSLQQQQHQQQQHHPHTPAATATPPQQQQQQQAAPSVLQQHLGHLNYESGATAAAAATAAAAAATVATSRSGSATLAQHLATPSNILQAAFGSSNLQHILTRSAPSPSSSAISSNNCSSACAGNTHYNGGNSNSGSSSSNSNHHSNSIIASRLFGAASSSSSSSSSSASASSSSVAASSSSSSHHLHSHHSALTNSITNRINQSIRRHLNQQQHHHPLSASSSSASASPSASTSSSSSYQQSSVQQQHYNCAHPAQQQQHHHHHHSSSSSSSSSSSSSHHHHNSSSSSNSNNQQQPQQSPLCLVLLVKCPNSKEFCNAAANFCDKR

SEQ ID NO: 34615 - DNA, 2225 bp, DROSOPHILA
gggacatcggaacccatttaggctgagtatttgcactgccatgtgaaattcatgtggatttcatggaataagaactcgcgtaaaaaacgtcaaattgcaacacctcgcgggcagatacagatgcaggggtccagatacagatacacggcaaacacaggcacaagaagaatcatggggaaaccgaaacaaacgcagaactccagcactacacaacagctccacagaaccgcaggctggacgaagtccataagtcagtgggcccccacgtccttttggccctcgtaataattgcgtatctggcagatgcaatttatccgtgaatttgtttttaattttcaacacattcgctaatttgatttttaacttcgtttcgagcactgcctcggtctcaatcacagacagccacggccaaattgctgcacctaatcgtgagtgtgggtatgggtcccgaaatcgggatgagggcccctggataggacgactccaaacacccgctttcatttataatttgtgcaactcactttggcccagagctctctgaactaagagggccaggctcgagagcactgcaattaaacggtgtgagtttttaaaataaccacttaaatatatgaaattttattattatattgtagaataaaaaacaccaatatcttatgccttcaaatattgctaaaaaaaaaatcaattttgttgaataaaaattcgttttataatctaagaacattttttataatgtaccaagctatacatatataatcatataataatataatcatatatataatctttttttttttgtttacggttacagatactttgaaccattttcgttttgtcgcctagtgtaatccctttaattgttatccaaaatttagcagtaagcgagtaatgatcgatttttttcgctgtacaattcagttcccaagtctgaagtgttttttcatccgcctctccctgggctttttgtatcttttttagctgcacggggcgctgcttgttagtcgcgtaatttatgttccaccagatactcgttggcgttgcccagaccaagcagctcctcctcgggctcctcgagctcctctgcgccggcttggccgggatcctcccgatcctcctgatccacctccttcgcttcgtggtgtctccgcttgtctctgcttattttcttatccgttgttatccgcaacgcgagttgtttgcgcagtcgcaacccaagggccatgggcaaaatatggaacggaataaaactacaaatcgattttcaacgcaatgcgttcgatggccttatcatcctgggctccttggccacaaattcacggtgagcgtgaagggattaaggtctattagtggtcaagaccaaattgttcaagtcatttgtttaccaaatggattagagcatttatgtataatcgaacgagtttataaaatggattgttttatatacctatttagtttcgcgttccatccgaacatcattaatcactgacttctgtgagaaggaaatgtgatagcaaacttttcgagaatcatgggataatgctgacccattaaactttgcctccccctggtgacctcatcgaattgcccacactcgtatgtatttaccaacaaccattttccccctcttgttgtttttttttttttttgttcccaaatcgccatggctcgattgccaatgacttggcccggctaccactgccagccactataatccacaccttggctttatggccaataattttgcaggcaacaagaacatgaaccggaaacataacaaatcataaattaaaccctcgttaagcgaacttattgccattgctggtcgacggagaggtctcgcccatgcgccataactggccaactgagactcttggccagaaccctccacttcccgacaatcgtcatcgggcccaaggagctcgaattctggactgctctgctccggtccggagtaatttgcttcatctttatgcctttcagtgcgtggctgtgagttttattttatgttactacttgtttaaattatattgcgctattaagcgaatttaatgaaaacgctgcaaggcctcgagaaaaagaggcagttatagggttttcggttttttttttttaacccctccccatttttatctggactccaacctcgttaggtgtaaaagtaaaaaaaaaaaagaaaagaaaatcccagcaaatcgaacgtgttcaggctgatggtgatgatg

SEQ ID NO: 34616 - DNA, 225 bp, DROSOPHILA
atggcccttgggttgcgactgcgcaaacaactcgcgttgcggataacaacggataagaaaataagcagagacaagcggagacaccacgaagcgaaggaggtggatcaggaggatcgggaggatcccggccaagccggcgcagaggagctcgaggagcccgaggaggagctgcttggtctgggcaacgccaacgagtatctggtggaacataaattacgcgactaa

SEQ ID NO: 34617 - protein, 74 aa, DROSOPHILA
MALGLRLRKQLALRITTDKKISRDKRRHHEAKEVDQEDREDPGQAGAEELEEPEEELLGLGNANEYLVEHKLRD

SEQ ID NO: 34618 - DNA, 2789 bp, DROSOPHILA
gaaccaaaacgaacagaacagaatagtgggttaataaacgatcatttaataagcgttttaatgccaaatttacgatcgttttatttgcataaattaccaaagtggccaactgtatgcacattaatttcgcaaccaaattgccaataaaatgttatttatgttgctaagcgaaaatacaacaggcagttccccaagattcctttaacgcgccggaaagatcggctcaaagggagtatgactatatagaggcatatccgcacatatggacaatcagctggagtcaaaggtagtaaagtttatgggctttcggttggcattttgtaggcttacctcatttccacatcgcatatacgaatttcgccctaatagagtcataaagtttggcattcggtggccggaaatcgatgtgattctgttgagtaactcaaactgcctaagcccaatcaaacctagctcacgaactatatagttccgataggcagtatcttggcaaaggtatcgtgatcggtgaaatttgagaagttagtctatatatacacatggtttttagttttgtttaatagttgcacagctatttcgctctagaataaatcaaaaaatcatgctgattttcaagcgagctcgtatcgcatctatattggctttaactgtgagttttgtttcataacatttaacaatgtgaatgtataaaggcgttaacattgtttttttaaagatcttgattctgcaaataatacgtacatctaaagctgctgggctctttgattctttaactggcactactgggaccacatgtttaagtaactcctatttgtccgttttatcgagcgcactttcaagtctttcatcaggggatcttaatttgttaaaattgttgagtcccgccctctataatgttcttaaacttttaacgccggttctaacggctctcagcggctaaatcatgtgtacatttaattttcaaatttttgtgcagttgaataaataaacgaattacttattacaaatcatctgtggttcgaccatggtattcgggtatccaggtgaccatcatttcggtcatgtcgaagactgcgaatgctttgcagaagtcttggaacattatttggttcgagtccgtatgatccatttccttcattatggtattcacaatgcgcattatctgcacgtgatccaatagatttgagaacagcttgtggacaactacaaccaagtcatactttgtaatacgaccgtccttgttgttatcgtacatgttgaaaattactgaaaaaatttatattttacttatgtcacagtctgtaatataggcttcctaaatggctcagaagcaacagcaccactaaccgcatttgaccatatttattgttgaacttacaccttaatttcttgtccatcatcacattttttagctcattggaggttttaagagaatgggcctgaaaggtgctcagaaacagagcgaaatccacaaaggtaattgtcactttattcccgaacatggagttcaatatggtgggcagcaaggggtttagttgcagtagtcctgaatagaaattgtacttgtgcagatgacttgggggatctttgcctcctcctgaaaactggtggaatcgaatatacagatacttgatctgactacgacttactgggaaatgttatgatatcagaattctggatttgcacagcttcataacctcttacgtgctgtattcatcctgagggtgttcataatctcttgtggaactgagggatacgaggagaacttcctcaaacacagacatcccattctgtagggccatccaattaaaacagatttcttaaaattatagtacttgaaaatttccactgacagcatttactaagaagcacatacaatatataagacacttgctacttcattttccatttcccatttttcttgtttttgataaacgccgttcaagatctgttaagattagggtctagacctcattttatgcgttagttgtcttttacgatcgtgtacacccataaaaaaaagatctccaaagacaagaagctgcgacaagtgacattttgtgcgcaagaagtcgagcactcataaagcatattacttcactaaaaacagaaattaaaccgaattccgagtgttattctgattcagtttgtgttggggccgactttaatgacggtcgattttggtatttttttccatttcatgaaggttaaacgaactcaaaaaaaaaaaaaaaagcgtaaaatagtttatgaaatgagtatcgttttagctcttgcagtttagcaaccaaagattctttatataaaaattatttacaatatagccgtgtgcctttaacttgatatcaaaatcactttacttggaggtcagctgaaaaactttcgtggacccaagggaaaaattgttacaacttttggcggccctagaacttcaaccgctgtgtggtccgcctgccgagggtcacgtctcaaatggtcgcatatctggtggccaatttgcggcagaaatgtgtgccacatgacaagcaattaagcgcggactgcgacaaagtacgtgcccaagttgggggtttagtgaacccggtcgcgaaagcgataaatttatgacaaattttcaaaagaaatggtctggtcagactgcgtgtggttcagatatcgccgtggctgtggtgatgttcctggtgtttctgctggttgttctccaccgaacttttcgacgtggcggcacttaacaccacgcatcattttaattatttatttggccataaaacagtcgaagtagaggaagg

SEQ ID NO: 34619 - DNA, 621 bp, DROSOPHILA
atgggatgtctgtgtttgaggaagttctcctcgtatccctcagttccacaagagattatgaacaccctcaggatgaatacagcactaagtcgtagtcagatcaagtatctgtatattcgattccaccagttttcaggaggaggcaaagatcccccaagtcatctgcacaagtacaatttctattcaggactactgcaactaaaccccttgctgcccaccatattgaactccatgttcgggaataaagtgacaattacctttgtggatttcgctctgtttctgagcacctttcaggcccattctcttaaaacctccaatgagctaaaaaatgtgatgatggacaagaaattaaggttaattttcaacatgtacgataacaacaaggacggtcgtattacaaagtatgacttggttgtagttgtccacaagctgttctcaaatctattggatcacgtgcagataatgcgcattgtgaataccataatgaaggaaatggatcatacggactcgaaccaaataatgttccaagacttctgcaaagcattcgcagtcttcgacatgaccgaaatgatggtcacctggatacccgaataccatggtcgaaccacagatgatttgtaa

SEQ ID NO: 34620 - protein, 206 aa, DROSOPHILA
MGCLCLRKFSSYPSVPQEIMNTLRMNTALSRSQIKYLYIRFHQFSGGGKDPPSHLHKYNFYSGLLQLNPLLPTILNSMFGNKVTITFVDFALFLSTFQAHSLKTSNELKNVMMDKKLRLIFNMYDNNKDGRITKYDLVVVVHKLFSNLLDHVQIMRIVNTIMKEMDHTDSNQIMFQDFCKAFAVFDMTEMMVTWIPEYHGRTTDDL

SEQ ID NO: 34621 - DNA, 2363 bp, DROSOPHILA
agagtggatttgaattgggtttacacaacggtaaatacaactttaattattcacttaaattaatggctaaacaaattatagcaaacgtatatgtatgatcagcaaagatttataaatgcaacataattaatgttgaaagcttagcaaatcagtaatgttgtaagaaggtaattcatacgaaaatcatttttagactgaaaaaacaatttcgaaatgcaaacaaacctatatatgttaatatctacaatcttaatattttcctgaagagggtcttagttaagataaaaaatctctcctctcatttctcccagtgcttttcacacagatgcatttgaaccagtctcacacacttccagccagatcataattgattgcagcagcaaatatttttatggtcagggccgaaatcacttttggccaagcgagagcgaagctggtcagccaatttgcttttaatctagcctgatgaagatgtccgcgccgatgggattagcaggccaaagaagatgtggctcgggaatctgaacagtcatacagcgttagcgttgttgcagcagcatttccgcattttggccaacagagagcgagcgaaagaagaagaacgtgctcttaaggcccacaatgctgctcttaagccccaaccgatttcggaggttcgcttcaaactggctcactcggctgcttggccgggcccaaaaggtttgagccaagttcggctcgggcccatcatcggttggttggatcttcggctccatggaggcaacaatacgtcactagggtgaacgtactcgcggatgttagtgggtcactatttgtacggtcaacgaacctttggccgcttgtaaatacaacaaaagaaaaagcccggccagcaacttgctttctttcttaacttttttctcacacaccaacatccagccacagcgatccagagatgactctcgtctctcgtcgtcttgactgacttgactggttgacttgcagtcgtaatttacttgggctataggttgatcgtcaacagccccctagccccctttcctcctgctgcagtcccaaccccctgctcagttgcatcctgatgctgctgtggctgctgctgctgccgaagctgctggccgtatttgttgccatcttggttgcattggccaagatgaggctgctgctgctgcagctccaggcagctgcattgcttggtgttcttattatgccccaaacaggtccatccatgggaggctcttttcttgggctcaggcttcagcttcagctttggctttggctttggtttggctttgcttggctcggcttggtttggcttggttttcacatgattatcatgatcatcattaccatccgccagccgcattaatatcgtcatcttcgggccaactgtgcgacagggagggcagcatcagccaaaacgagacagagcgattcgaagagctacatacgttcacatgcaagtttcgccggctggctctggcatgacttgtggtgtttgacttgtgtgtaagtcagtccatagaaatgcatttccgcatattttacaccactaaaaagtccaaaaagaaggaggaaggaaaaaaattggaaaaaaaaaacatatacatatgtttgtttactcttttgttgtggggcgttcgttagctccatctccgggtaattgaaaccataatcattatctgctgcctgcagctcaatcagctcagttcagtcctcttcagatctgctcagttgttgccgctccattataatggagtaattatggcgtgctcgagagccaagaattttctgcactggacctcaatgccaaacaattcccttttgtcatgatatggccttatctgttactctgttactccaaccatagttcagctttcctgataagatgtcactgaaccccattggcgctcgactttgtttaccactttccaatcatttgcattgtctccgaatattcatgctgaattcttgaaaccccatgcgaatgggtgaattattcaaatccagctcggctgagtattgaaatgttaaacacacatggtgtattagaatttcgtctgatttgcatcgtttacatagaaaattttttaatattttgctttaaccttaaccattaacttaatcatattgtaatgttgtaaagcctcaattcattgcattctttagccagaatgcatacatttactaataactagtaggatattaagagttagcaaatcaaatactagcgatctctctaatatttctaagctcatatggatgccaacagatccatcatcctaacgcttttatggccaaccatccatcaactttctttcaccgaccgggtctttgtagctatctttctacgaacttctttatca

SEQ ID NO: 34622 - DNA, 363 bp, DROSOPHILA
atgcggctggcggatggtaatgatgatcatgataatcatgtgaaaaccaagccaaaccaagccgagccaagcaaagccaaaccaaagccaaagccaaagctgaagctgaagcctgagcccaagaaaagagcctcccatggatggacctgtttggggcataataagaacaccaagcaatgcagctgcctggagctgcagcagcagcagcctcatcttggccaatgcaaccaagatggcaacaaatacggccagcagcttcggcagcagcagcagccacagcagcatcaggatgcaactgagcagggggttgggactgcagcaggaggaaagggggctagggggctgttgacgatcaacctatag

SEQ ID NO: 34623 - protein, 120 aa, DROSOPHILA
MRLADGNDDHDNHVKTKPNQAEPSKAKPKPKPKLKLKPEPKKRASHGWTCLGHNKNTKQCSCLELQQQQPHLGQCNQDGNKYGQQLRQQQQPQQHQDATEQGVGTAAGGKGARGLLTINL

SEQ ID NO: 34624 - DNA, 2234 bp, DROSOPHILA
ctggttcctggacgcttcctggccactatccgccaaatctggttcatgcggcagatgattaatcgattttattggcatccatttttatgggcttgtattgagattgcggaaaaccgtatggcgtatatttgtggttaaagaaatcgtcaaaaatcttacacgtaaaattatagcgatcttaacgtagtttaatttaaatgattttgttggaatatgtgaggtagcattgaatgttggttcaaagcagctgacatgacgcctggccccccagtaagatatcaaaaacaacagaccaaggagcaacaacagcaatgaggaacaacaatccggtatggacaatcaccaaaacaccttgtcaattgggcgcttgtcttttggaagcagacgaactggctccaagtgagtgctgcagttgctccccgatccataaagtcgcgaaaacggcaaatgaagaaaacataccattggggacctgggactcaagacgtcggcggtggcggcgacggcattaataatagcaaacaacagacaagcaacaccaaatgaggggggctgtgttgctgctgctgctgctgctgctgcttgttgcaacttgcaactcttgcaccggcagcagcagcgtcagcagcaacagcaaccacttggagcagcaaacgacagaaatgatcttaaatgaatgcggaagtttttcttggggtttcgtaaccagctacagcagcagcagcaactacagcaactgccgcagcagcagcagcaacaccaaagaggtcgcaattccagtggcagcaatgttgctacatttatgtacatgtgtttgtcggccagtcgatgccgtgagcccataatcatagatgctgccggctaggtcgaaagcagcagcccagtccatggacatattaaaattaatccaatgattgcagcggcagccgcttgaaaattgttagccaatttggtagcccctttggcaggctgttcgtcgtagccagttggcctcacttcaatgagcagggagcgtgtgaatcggaagctgaggcacccagctgccaatagtcatttgatcctggcccaaaagctcggccagtttcccatgtgcccaaccagttggaagatgatgcagcagttaaagcagcaacaagagcaacaggagcagcagcagcagcatcaacagcagcagctgctcaaatcatcgagttctcgaacgtaccaagttcaaggctgccaggatccatattgaatgtcctcccccgcctgcagttgttcattcatgaacgagaacccacgaatccctatgcgtgggtgggccaaaacagatcctgcctgagaacagacaaatttctgcataaactcataaatatcaagttgatctaaacgggatacgggatcccagaggcgccggcgccctgaacttgaaaatccaacaaggccgaccagtcacgtaccaagcaacttgacaactcataaataaacgctaaattatgaactccagtcgaatttggaaaaggaattgaaatgtttttgccacaccacacagattttcctctgtcagcagcgtttcaggaaaaccaaacaatcggcaaacccacagcaggctgggctggtatgcacggaaaagaaatgggtaatttcataatataataaatgtacttaaaagggagtagaatgtttttaaaaatgtaaaaaataatatatgcttatataatatattatatatatatattataatatatctttttaaaagagatttcaataatgacaaaataaattaccaccctataatatgatatttagcttgcacttatataatttccaaaatccttacctaagcatttatggccaaagtgttgaatgagtttagaatatttctctgtgtgcagagaagtcggctcataatccataatattgtgtcatgttcatgatcaacgcggcctcagccttggcgaggaaaatgtatggctggcccacaccttgatggcaaaattattcggaaaactcctagccgagcgaatgaaagtaaaggaaaggcccaaaaaccacagccaaaaattgaaaactgaaaactaaaaacccaaacccaaaagactgaaaaccgacaattcgacccgctcgtcggctaatgaagtggtaaaaaggggcttggaaaactgcatgccaatgcatttggtattggtgttgcattcgctgtttgccaccaacgccgcttggctcggtgttgcactggcgttgctagcttgcct

SEQ ID NO: 34625 - DNA, 234 bp, DROSOPHILA
atgagcagggagcgtgtgaatcggaagctgaggcacccagctgccaatagtcatttgatcctggcccaaaagctcggccagtttcccatgtgcccaaccagttggaagatgatgcagcagttaaagcagcaacaagagcaacaggagcagcagcagcagcatcaacagcagcagctgctcaaatcatcgagttctcgaacgtaccaagttcaaggctgccaggatccatattga

SEQ ID NO: 34626 - protein, 77 aa, DROSOPHILA
MSRERVNRKLRHPAANSHLILAQKLGQFPMCPTSWKMMQQLKQQQEQQEQQQQHQQQQLLKSSSSRTYQVQGCQDPY

SEQ ID NO: 34627 - DNA, 8243 bp, DROSOPHILA
cgaaggaggaggaaaactgaaaaggggcatagatgatgatggtgtttcatttccgactctcgttccctgacctagttgcaaagtttcgctggctgaggagtcttgcaccttagcacgtatcagcttttcacttttatttgcccttgcagtttctggtgctccaatcagaggtggccggctcctgtaaagataactccttcatcctcacgctccgacgactccagaaagccacactcacaaaagcagctgctgtttgtgctgctgctgaaagtgcccccattgatgaacgatggatggaatgatggtgtagaacaccagctcctccagagtctttctcggaaactttcggtttcgagcagctgctgtctcaagtccgcaactcacaatttaattggactttagtatgtcagtgggttgctaaattgcagacgtttcggtgaaggaagaggttacacccactcctaaatgcatggccaccagtgcaccgacaatttccttcgaatgcaactctatatgcactcgccgcccctttgggttaggtgggtggggcagctgtttagtgggtcaggtcaggcacagcaagttagccgggaaatgagtcgcgtgcatgatttatggccccgggttcctggccaagagaccagctgcgccgccttccaagttccaaacaagttacgggccacgccaatattccacacttaaaaacttgaaaatgtttccgaaaataagtctatggcatggaccattaaagacggtcattaaacttaaacttaaagtctaaggaaaatagtatgcaaaaatgtaaattgcaattgaaatctgaaattttgtaaaatcttttcataactgactgcctctagttttgacgagtgcaaaagtagttaagaattcacaagcccatttaccccgttgcaattacataacccttttctaacatctacccgttctcccctttttcgcccatttgtaggccagtgccgccgatcaactaatcaataccatggacttgcgtgcccgcacagcggcggccatagtgcgtccccattcggcggatttcttggagtacgaggctcgtgccgaggcagctgctgccgctgcggccgcggcggtggcccaaagccagcaggagagcggcagggcgccgaggcccaagtccagcttggacatcaatcgcacaccggacagcttctactactcggaggccagctatgcggacaagatgcggaagagtgcgttgtatctgcagagcggcggagctggtgccgcacagccgcagcagccgggtagctatcgcaccacgggggcagatttcaattctggggtaaacaccattggctatgagaatccctacgagcgggcctacaagcggcaggaacttctggccgaggcgcagggtggtggggccagcagcatgccgcggatgagccgatccgccagtcagggacgttcggtggcctcccagctgcagtcgccgcagcaagaagatctgccgccactgaatgttcacccgggctccattttcccgccgtcgatgtccacccaggagatcattagcaagaacgagcagttcctgagatccgctagcgcccgtttgcccaaaagatcgggaggaatggatgatgactattcggctggcaattccacgaccacatcgcccacgggtggagcaggtgcctccaactcgccgcagcataatctggatggcgaacggaagcgggaggagtccatgaagcgtctgctagagtggaaacagcgcatgttgcagtcacctttgacacgcaagggtattcaacagggcggcagcaacatgtccgccatgtccaagttgggcagcaatccaaacatcttgctggcatccactgcggtggccagtggagcacgctatgcaccccaggcgggtaaaaccgtattggtgggcaatggaaatggcactgctcagggggctggaaatccaccatcagcatcgggcatccagcgatcgcgatccgagagccaggccaacgtgggacctgggggagtggtgtacaacaactactcctcggatgatgagggtgagtcctagtccgcgatgacttccattacgtattccccattctgcttggcttcaactctgtccctttgtaatacgtctatatctgtaactctctcttctacgaatcttaaactacgtttatgcgcaagcaaagtaatgaattacatatataaaggtttacattgctaacattcatgaaaatgtttattaaagcctaatgcttcattcttgtctgcaatgtgcaaagtcttaaattaaattcgttggaactttaaacaactttattgaaatatacgtttaattatgcaatttaaagccaattatcctacggccatatttattttgcattaaaaataatgcaattgaaaaataacaattctgtagttttggtgaattatatttgtttagcagactgcatttttttttgcatttaatgcgcgcgcataaacgtagtatgtatctctatttgcatcagtatcgtatcgtatccatagctgtatctttttatttatcagtatctgtagctgttgctaaccgtgctgccctgttctgcgtacctcactttgttttgttttttattttatatttatatttatacttttaattttacttggcgacttggcttttgctttcagttagttgcatgttttatagtcttgacaacttgagatgtctgctttttccattacttttgtagtcatcccaggttactttgttgcatttgcatctgcgttgcccttccgcttaaggactttagaaatctataaataaaggacctcatctggccttgacaggccacattttggtccaaactctgaccattaactatttataagccttaaccatttcaatgctaatttataatgttcagacgccagactaaacaattaaaagcttcatgtagttaatacacggtgtgtattacaattttttgttgccttgttttatgttttaataaatatggttaatttgaatgtacgcaacagaaagcaatttatgtcgaatatcgaaaccttcctgccgtgcgcacacaaatacaaatacatatacataggcatgtacacagaactccgcacccacacaaaagcaaaattcagaagcaaattgaaaagtatcgagtaattaatttaacaatgctgccaaaaagtaggcaacacatgaaccgaaattctggccagtttaaaatggttggccgaaaacttaaatcaaaagtacacacaaattcttccatttgcctttatccgatggaaaacggagtgtgtaaaacgaaaatccaatatttctgtagtccataaatctatctctcccttttgttttttggaaatctctatctatcatgggtttagtaaacatttttggcgtagtttcgtatcggatttgtttcattcatatatacatatacatatattacatattcgtttttccatcatgacaaccgggtgcttggtatttccactactaaatgccgctgtaaattttgcactaaaacccaaaaacaataaataagcaaaaaccaaataaaactcaaactcaatctgggctcatagcgcaatcgaccacccatttgattgattttaattacatacatatgtaccaaccagcaagatatacaaatgtgttttatatatttcttcttttccatacaaacatttataaataattcgttgtgtatacgttgaatttggtaactctttaacaaaatatctcaatttgtaaatgctgtaaatgtaaaacaatgatcgacaatgatcgatcgaaactcgataatcgccatcaaataattaacaatatcgaaacgaaacgaatcgaatcgcagctgggactgtggatgatgataacttgtatagtgcaacggcaggaaggtcatcatcgtcaaaaacaacaactaaagcaacgacatcacaggcaatagtggcaacaacaacagcagcgttagcaatcacaaatcttggtagtagcaaaaatctagagacacccaaccaaacagaaacagaggcgacaccatcatcgtcatcaacagcgtcatcaaccaaagcgaaattccaactaaagcccattttgaaagtgcacgaggccagcaaaacccgcattattcaggtgcaacccaaacatctggaagagcggccaaagctcagattgcaattgcccaaggcgatgggaaatgaggaggagcagaagcaagaggatgaggagcaggagaatgttgaggctgagcccgtacccattctgccaaagaaaacggcgcccaagtcgcctcagaatgccaattatgtgcctgtgtacaacaataagctggttagcaactacgagaacatggagtttggcaagccaatccccgaaagtaaaatccctcacagcaatgcagccattaccgatcccgaggagacgcccatgctaatgcaactaaagctgttcaaggaacagcaggaccagcagaagcaacaacaggaaaacgaagaggaggacctgacaccaacagcggaaagtaaacccattccaggcgaggaggatatgggggctccaaaggttataaaagaccagaaattagaatcgaacgaggaggagcaggagctggaggatgaggatgacagcacggcttgcgaggagtacacagatgatgatatagatgaagctctggctcaagatgatgaggatgaagctgtcgtcgaggcagtagaatcccaggaactggctgaggagcgggaactgcagcagatatatgttaacgagcccatcacacccacggaccaacaattcgacgagagtcactatctgcccatgacgcccaagaaagtggaactgggtcagccgggtgtcctgaccttagtttccgcgacgtacgccgaggaggaggaggagaatcactatgtagagatgacaaagggcatacaggacgaggattgtagaagcaactacgagataatgtgtttggctagcaccagttcgagtgccttcaaggtgaccaccaaaacggagcctgtctacatggaactggcaggggtaaaggcatcatccgcagtgccagccaccgaagaggcccactgctcttcgggccgttccactttaaagaagtgcaagaaatcgggcactgaaaccctgaagaagaagaccaagaagcgacagggcaaggacatgcccgatatacttaagccggccaaaagtgccctggccttggccagcgatagttcggatgcggatgacgagagcagccgacagcagttagaggctaagaaactgcgctccaggtcacgtttcagtttatcggacacatttaggccagcttcttactacttgggagcctcaacgcctctcaacaattatgcagagagctcggatagtgagatattgccaccaccacccattcccgcttcaccaccgcccatggaggagctgaaaacggaggagatcttctcctccgagcactatgatactgtgaaaagaaaggatagcaatggcaaagtgaatctatcgtacgagcaattgcccaagatgcatgccagcaatacgtccctgaatctgccgaaagctgtgcccagtcctactctgaaaagtagtcgtctctccttgcctgaccatttcaccaaggtgcggatgacaccgcagagattattggttccagccacaccgccgcagcagcatcacgccaggacattatccgactccaactatagttgccagctgaccgatacaagttcccgaacatcctcggatttggatctatatcgcaggaggggtcaacagcagaggtgtaccagcaataattctctgcccttaagcagtgaaaacgagtccgtggaattccgccagagatcggactccgaattggatcgccagcgttcgaggagaccactttcccaagaatccatcagtgagattgagtcgttgagcgaacagtttgaggaaaccctaagtagtcatgaattggacacgtacctgagccatttgcatctgtccaccggtcaggccacgcccaccagtcacctgctgaatgatgcaaatgcggcagccggagccgatatcctgaccaatctcatcaagccaccgaaaacattccggaatgccgaggacgaggagcagcatttctatggtaacatacactttctctcctccacggactcaattcagcagttgggtgaagctggagcaacggcattacggattatccacagtcgcaataacagcaatatatccacccagtcggctccttattactactccgagctgccagcaccgccgcccttgaacaatcagcgggatatccatgcacatgggctgaacattgcccacatacataatcccatcgatcggcatcagttcaatgtggacgcactggtggacaaggatcaggccatcgatagcaagaacatctattgtgggcagaaggacaacaacgagaagctgagcaacaagaatctcaagctgaacaaatctgtggatctgccggcagagatggagggcagtggtagcagtggtggtgcactaaacccggtggtccattcatatctcacaactactaaaaacacaaatctcgctcgtaaaacgattggtggtagcaatccgtcggatgatggcaatcctaacgaagatggtgctggtgaaaacacggaggaggctggcaagaccccgtcgaataatgtccataccaacctttcagttttaggtggcgagctgctctgggaggaggatgctctgtggcgggagagcttgcgtcgggtgtcccagcggcatgccagatccttggacgatctggacaggattacggctgctccaccaatttctagtacgcccaaggcaaaactgagccgcgaggtgacctatgtgaatgacagcttgaagccgcgccagcatccgcacataaccaacgagcatgatgtctatgtgcaactgatggacactacgtcctcctcgcacgaccacgaccaaacggattccgatgtctacgaggtcctgcgggaggagaccgcctcgaatttgtcacacaaatcaaacgaactggatcgcgagaccatccgtcagtgggatgccatgtcgagtggcctaatgaagagcaaccacagcggagttgaggctacaggagctagctctgcccacctgcccctaaccagcagtgtgcgctccatagttcagcagttgaacaatagttccatggatgatgccaatggcaatcccatggcgacgggcaaaaagtcaagagcgaacaacaataattagtgaggctagcaccgcggaaaatgcaacctcctcgtttccgttccgaaaaatatatgtgtgcaatcatttccgtagtttcaattttagctttgcattttgcaattttgcaacttttgattttgcactctccaaaatattttatgtcactctgtttgcccgtcataattttcgattaggtagtgctctatttgttttgttgactgtcactgttgctgttgttgttgctgttattgtcattattgttgtgttatgttgttttgtttaattaatcaactggtaagcaaacttatacttatttatccaacccacttatttcattaagtcattgaagcgcttgtaaatatattcgccactcactcacattctcacccatgcactcacatctgtaaagttgaacaaatccatagatagataacttatttgggaagttacaaatagccatacaagagccagcagctgcagatacagataaaatatatgctaaacatccgtagatatttccataacccacccacccaggaaaaattatacaaatattagtgcaacacagagccaacaccaattacaaatccaaattaaatattccgtacaactgctgggcattcgctaaccgattactgattgcttttctaaatatttcgcgcacgcattgaaactattttaagcccaatcccctcaattcactcgaccatttgaaattacctcagtttcctaatcaaatctctgtgaccttatagcctcgatttccgtgcgcaatgtgaacaatctgccggtgggaaatctgacggtgaagccggatccctcggatgtccatcaggagtccgcttttgcaccctactatggtggagcggcggaaactaagtacgccaagaatacggtgctcacggatcgcggtctgtatgccgcaaacggatctggattggccacatccacgccccaaaatcatcagcagttccggatgcggcacaccggaagtagggcggaaatcgatatgctggaa

SEQ ID NO: 34628 - DNA, 4446 bp, DROSOPHILA
atggacttgcgtgcccgcacagcggcggccatagtgcgtccccattcggcggatttcttggagtacgaggctcgtgccgaggcagctgctgccgctgcggccgcggcggtggcccaaagccagcaggagagcggcagggcgccgaggcccaagtccagcttggacatcaatcgcacaccggacagcttctactactcggaggccagctatgcggacaagatgcggaagagtgcgttgtatctgcagagcggcggagctggtgccgcacagccgcagcagccgggtagctatcgcaccacgggggcagatttcaattctggggtaaacaccattggctatgagaatccctacgagcgggcctacaagcggcaggaacttctggccgaggcgcagggtggtggggccagcagcatgccgcggatgagccgatccgccagtcagggacgttcggtggcctcccagctgcagtcgccgcagcaagaagatctgccgccactgaatgttcacccgggctccattttcccgccgtcgatgtccacccaggagatcattagcaagaacgagcagttcctgagatccgctagcgcccgtttgcccaaaagatcgggaggaatggatgatgactattcggctggcaattccacgaccacatcgcccacgggtggagcaggtgcctccaactcgccgcagcataatctggatggcgaacggaagcgggaggagtccatgaagcgtctgctagagtggaaacagcgcatgttgcagtcacctttgacacgcaagggtattcaacagggcggcagcaacatgtccgccatgtccaagttgggcagcaatccaaacatcttgctggcatccactgcggtggccagtggagcacgctatgcaccccaggcgggtaaaaccgtattggtgggcaatggaaatggcactgctcagggggctggaaatccaccatcagcatcgggcatccagcgatcgcgatccgagagccaggccaacgtgggacctgggggagtggtgtacaacaactactcctcggatgatgaggctgggactgtggatgatgataacttgtatagtgcaacggcaggaaggtcatcatcgtcaaaaacaacaactaaagcaacgacatcacaggcaatagtggcaacaacaacagcagcgttagcaatcacaaatcttggtagtagcaaaaatctagagacacccaaccaaacagaaacagaggcgacaccatcatcgtcatcaacagcgtcatcaaccaaagcgaaattccaactaaagcccattttgaaagtgcacgaggccagcaaaacccgcattattcaggtgcaacccaaacatctggaagagcggccaaagctcagattgcaattgcccaaggcgatgggaaatgaggaggagcagaagcaagaggatgaggagcaggagaatgttgaggctgagcccgtacccattctgccaaagaaaacggcgcccaagtcgcctcagaatgccaattatgtgcctgtgtacaacaataagctggttagcaactacgagaacatggagtttggcaagccaatccccgaaagtaaaatccctcacagcaatgcagccattaccgatcccgaggagacgcccatgctaatgcaactaaagctgttcaaggaacagcaggaccagcagaagcaacaacaggaaaacgaagaggaggacctgacaccaacagcggaaagtaaacccattccaggcgaggaggatatgggggctccaaaggttataaaagaccagaaattagaatcgaacgaggaggagcaggagctggaggatgaggatgacagcacggcttgcgaggagtacacagatgatgatatagatgaagctctggctcaagatgatgaggatgaagctgtcgtcgaggcagtagaatcccaggaactggctgaggagcgggaactgcagcagatatatgttaacgagcccatcacacccacggaccaacaattcgacgagagtcactatctgcccatgacgcccaagaaagtggaactgggtcagccgggtgtcctgaccttagtttccgcgacgtacgccgaggaggaggaggagaatcactatgtagagatgacaaagggcatacaggacgaggattgtagaagcaactacgagataatgtgtttggctagcaccagttcgagtgccttcaaggtgaccaccaaaacggagcctgtctacatggaactggcaggggtaaaggcatcatccgcagtgccagccaccgaagaggcccactgctcttcgggccgttccactttaaagaagtgcaagaaatcgggcactgaaaccctgaagaagaagaccaagaagcgacagggcaaggacatgcccgatatacttaagccggccaaaagtgccctggccttggccagcgatagttcggatgcggatgacgagagcagccgacagcagttagaggctaagaaactgcgctccaggtcacgtttcagtttatcggacacatttaggccagcttcttactacttgggagcctcaacgcctctcaacaattatgcagagagctcggatagtgagatattgccaccaccacccattcccgcttcaccaccgcccatggaggagctgaaaacggaggagatcttctcctccgagcactatgatactgtgaaaagaaaggatagcaatggcaaagtgaatctatcgtacgagcaattgcccaagatgcatgccagcaatacgtccctgaatctgccgaaagctgtgcccagtcctactctgaaaagtagtcgtctctccttgcctgaccatttcaccaaggtgcggatgacaccgcagagattattggttccagccacaccgccgcagcagcatcacgccaggacattatccgactccaactatagttgccagctgaccgatacaagttcccgaacatcctcggatttggatctatatcgcaggaggggtcaacagcagaggtgtaccagcaataattctctgcccttaagcagtgaaaacgagtccgtggaattccgccagagatcggactccgaattggatcgccagcgttcgaggagaccactttcccaagaatccatcagtgagattgagtcgttgagcgaacagtttgaggaaaccctaagtagtcatgaattggacacgtacctgagccatttgcatctgtccaccggtcaggccacgcccaccagtcacctgctgaatgatgcaaatgcggcagccggagccgatatcctgaccaatctcatcaagccaccgaaaacattccggaatgccgaggacgaggagcagcatttctatggtaacatacactttctctcctccacggactcaattcagcagttgggtgaagctggagcaacggcattacggattatccacagtcgcaataacagcaatatatccacccagtcggctccttattactactccgagctgccagcaccgccgcccttgaacaatcagcgggatatccatgcacatgggctgaacattgcccacatacataatcccatcgatcggcatcagttcaatgtggacgcactggtggacaaggatcaggccatcgatagcaagaacatctattgtgggcagaaggacaacaacgagaagctgagcaacaagaatctcaagctgaacaaatctgtggatctgccggcagagatggagggcagtggtagcagtggtggtgcactaaacccggtggtccattcatatctcacaactactaaaaacacaaatctcgctcgtaaaacgattggtggtagcaatccgtcggatgatggcaatcctaacgaagatggtgctggtgaaaacacggaggaggctggcaagaccccgtcgaataatgtccataccaacctttcagttttaggtggcgagctgctctgggaggaggatgctctgtggcgggagagcttgcgtcgggtgtcccagcggcatgccagatccttggacgatctggacaggattacggctgctccaccaatttctagtacgcccaaggcaaaactgagccgcgaggtgacctatgtgaatgacagcttgaagccgcgccagcatccgcacataaccaacgagcatgatgtctatgtgcaactgatggacactacgtcctcctcgcacgaccacgaccaaacggattccgatgtctacgaggtcctgcgggaggagaccgcctcgaatttgtcacacaaatcaaacgaactggatcgcgagaccatccgtcagtgggatgccatgtcgagtggcctaatgaagagcaaccacagcggagttgaggctacaggagctagctctgcccacctgcccctaaccagcagtgtgcgctccatagttcagcagttgaacaatagttccatggatgatgccaatggcaatcccatggcgacgggcaaaaagtcaagagcgaacaacaataattag

SEQ ID NO: 34629 - protein, 1481 aa, DROSOPHILA
MDLRARTAAAIVRPHSADFLEYEARAEAAAAAAAAAVAQSQQESGRAPRPKSSLDINRTPDSFYYSEASYADKMRKSALYLQSGGAGAAQPQQPGSYRTTGADFNSGVNTIGYENPYERAYKRQELLAEAQGGGASSMPRMSRSASQGRSVASQLQSPQQEDLPPLNVHPGSIFPPSMSTQEIISKNEQFLRSASARLPKRSGGMDDDYSAGNSTTTSPTGGAGASNSPQHNLDGERKREESMKRLLEWKQRMLQSPLTRKGIQQGGSNMSAMSKLGSNPNILLASTAVASGARYAPQAGKTVLVGNGNGTAQGAGNPPSASGIQRSRSESQANVGPGGVVYNNYSSDDEAGTVDDDNLYSATAGRSSSSKTTTKATTSQAIVATTTAALAITNLGSSKNLETPNQTETEATPSSSSTASSTKAKFQLKPILKVHEASKTRIIQVQPKHLEERPKLRLQLPKAMGNEEEQKQEDEEQENVEAEPVPILPKKTAPKSPQNANYVPVYNNKLVSNYENMEFGKPIPESKIPHSNAAITDPEETPMLMQLKLFKEQQDQQKQQQENEEEDLTPTAESKPIPGEEDMGAPKVIKDQKLESNEEEQELEDEDDSTACEEYTDDDIDEALAQDDEDEAVVEAVESQELAEERELQQIYVNEPITPTDQQFDESHYLPMTPKKVELGQPGVLTLVSATYAEEEEENHYVEMTKGIQDEDCRSNYEIMCLASTSSSAFKVTTKTEPVYMELAGVKASSAVPATEEAHCSSGRSTLKKCKKSGTETLKKKTKKRQGKDMPDILKPAKSALALASDSSDADDESSRQQLEAKKLRSRSRFSLSDTFRPASYYLGASTPLNNYAESSDSEILPPPPIPASPPPMEELKTEEIFSSEHYDTVKRKDSNGKVNLSYEQLPKMHASNTSLNLPKAVPSPTLKSSRLSLPDHFTKVRMTPQRLLVPATPPQQHHARTLSDSNYSCQLTDTSSRTSSDLDLYRRRGQQQRCTSNNSLPLSSENESVEFRQRSDSELDRQRSRRPLSQESISEIESLSEQFEETLSSHELDTYLSHLHLSTGQATPTSHLLNDANAAAGADILTNLIKPPKTFRNAEDEEQHFYGNIHFLSSTDSIQQLGEAGATALRIIHSRNNSNISTQSAPYYYSELPAPPPLNNQRDIHAHGLNIAHIHNPIDRHQFNVDALVDKDQAIDSKNIYCGQKDNNEKLSNKNLKLNKSVDLPAEMEGSGSSGGALNPVVHSYLTTTKNTNLARKTIGGSNPSDDGNPNEDGAGENTEEAGKTPSNNVHTNLSVLGGELLWEEDALWRESLRRVSQRHARSLDDLDRITAAPPISSTPKAKLSREVTYVNDSLKPRQHPHITNEHDVYVQLMDTTSSSHDHDQTDSDVYEVLREETASNLSHKSNELDRETIRQWDAMSSGLMKSNHSGVEATGASSAHLPLTSSVRSIVQQLNNSSMDDANGNPMATGKKSRANNNN

SEQ ID NO: 34630 - DNA, 4331 bp, DROSOPHILA
caattcccagttttttgttggttttcttttggtggcaccccaaaaagtcggaggcacacacgcgaaaggcaacgcgaaaaaaagaggccgccacatttcaatcgaaaagttttaattgagtttttgcagccaatcgaataatcaaatcaaaactcattacaataaaaacagcaatgcgggcgcgagaaagaaattagtgcaattcaattaaggcaataaggccaattaagttattaaacgaattaacaaaatctacacgacacaaacagaaaggcgaaaaagtgcaaaaatgtttggctgcatttatcagctgtgggactggtgagtagtgtaaatctcgttgatctgtctatgaaagttatctgcaaccctttccaccccatgcaccaccccattgcccaccccatttccccttccgatttcccatttcccattgagaaaatgaggccggcaaggtcagccgtgtgtttgtggccggagcggcgactgcagttaatcaattacggtcaattacgcgctgagccagttgcattttccacggcctccgtgtcttccgcagctcgcgaatctcgcaaagaccctcgactaaagcttaaccccttgtaaagactgttaagtatttcaacaatttagcgattcaccactgcaaaacttgaacggaaaaaaaaacgatgataaatttaccctttttttgctcaaattattaaaaagaattaaggaattaggatttaaaagcagagtgtaatcaaaatgcccttaataaatactttaatagtcagattaagccctaaatacatgttcacttaataatataataatgaataatgattttggtttttattgaagaatgaaaaaatagcctttctagcaatttaaacccgctgaccacatttgattgaatcacttttccgcctgcgttgcgaactttactgatcggatttctgcttttccattccgcatttgcaggttggaggcgccgcccctcttcaccgccggcaccatggacgccaagaagctgcagcagctgcaggaggcagcgatcctggcgcagcagcagaagaagttgccgctggcctaccagacgaatctcgtggactaccgaacggcggcgtacagtcaggcattgtaccaacaatcgcccacggccaccagttccagcggcggtggacccctgtcgcctattgacatgcagccgcagtccaagcattacaatctaatgaagcacggcggtggaacatcgagcagttcacacagctccccctaccatcagtcgtactccagcagcggaggcactgcggccggggagcagctatatcaatcgcccacggagcgaacgtatctggcggcagctggaagattgcatgccaacaatgccatggcaggtcatcatccaatttcggcactgcagtcgcagtatcagcagctgcaggcggccaagatgcaggcacagatggccacacaaagcgaggccgcccagcagcagcagcggacatttgccttgcgacaggccatgaacccgcccacaaatcactaccacatgagtcagtcgtccagcatggtctccaccatgaccgctctcaatcagcagcaacaacagcagcagcaacagcagcagcaacaacaacagcaacagcgggctccaccctcttcgcttaatttgcaaaatcaatatcaacctgcccagggtcctctcaaattgcaacagcaacagcagcagcagcaacagcagtcgcagcagcctgcaatgcccaaacactaccaggagcaattgtacgcccagcagcagcagctgcaacagcagttgcaccagcaacagcaacagcaacagcaattgcagcaacaacaacagcagcatcgacacaaaaacgacttgcaaaccccgggcagcgagcatggtaccgtttatattcagcaaaatcatcccaaccatgtggtgaaccaagcttgccagacccaaatatcagcggtcaagcccaaggccacgcccagttcggaggagtcatcatcgaactcgaccaaaagtcccagccatgctccgttggatcgcaagaagagtgccggttccatacaggctctaaagtcacccattaccaagaggccaccatccacgccggttaccctatcgggttggctgcacaaacagggctccgatggcctgaaagtgtggcgtaaacgttggttcgttctggccgagtactgcctgtactactacaagggacccgaggaggagaagcttttgggatcagtgctgctgccctcatatcgcgtatccgcctgtttgcccgaggacaagatctatcgcaagtttgcctttaagtgcgagcatcagaatatgcgtacctattggctggcggccgataattcggaggctatgatgcagtgggtaagggcactggcagcggccagcttaatgcaggcacccagcagtggggaatcggagccaagtgtaaattcctcgctgaatcacagtggcgagaactccgattccggcattcacacattgcaatcgcaccctggcaaagggcagccaacaccatcgtcggaaaatacgggcagcagtggaggaggcagtgggagtggacaacccctctatgcaaatgcaccacccaagccgagacgcattaacgatggtggctactcgtcaccatcacccgagcacaacgaacagcagcagcaacatcctagtcgccgccttatgtcgcccacgcagcaattgtaccagcagcagcaacaccaacgatctcagcagcaacagcagcagcaaccgcagcaacatcacgccatctatgacactcgaactggacatgtgtccaccgccttgcagttgcaacaggcgcagcagcagtactccctggaccatctggaggcgcagttccagcaacagcaactggacatggaggagcagattgcgcggttgcagcaacaacgcgccgccgaggagatctacggcgagcgggagatgtacatggccaagttgatgcagcagcgacagggcccgaatggaacatatcccacccagcagcagttgctacaggcggagcgcaggacacccgatgcctatgggcgctccaagcagcagcggctctttgccgccgcagcagctgcagcagactacgaggatatctacaacatgtcgcaactggcaggtggcggcggagtgcccatgtccgcccaggaggcacttctccaggaggcggccagctaccgcagaccgctgagtccgcccagctacgatggcagcaagcatgtgcccgcgatgccgcaacggtacacgcccaatcatttggaggtgagtctgaaaattaacacagttaatttagctcaattttagttttttacttaatatcttaaaatacttttaaatccatttaaagtcctcatattgctttgaaactattattagaaaaataagtgggtttgagagcacaaccagtgagtgcaattctcaaaggcagtcaaaaaggcaaaccacagccccaaggcagccatgagttgcgattccgattgcgattgcgattgttgatgacctgccacttggcattgcatcctccagctttatgggtgcttcgcatagtgggaagctgggagctgtgagcttcgagctcgggggcgtggcaccggcaaaggtcagcccaccaaatcatcagcgatgccacttgatgttgtctgattgccgcaaatcgggggaactgccagtgcttacaaaaaaaaaaaaaaccggcgaaggaggaggaaaactgaaaaggggcatagatgatgatggtgtttcatttccgactctcgttccctgacctagttgcaaagtttcgctggctgaggagtcttgcaccttagcacgtatcagcttttcacttttatttgcccttgcagtttctggtgctccaatcagaggtggccggctcctgtaaagataactccttcatcctcacgctccgacgactccagaaagccacactcacaaaagcagctgctgtttgtgctgctgctgaaagtgcccccattgatgaacgatggatggaatgatggtgtagaacaccagctcctccagagtctttctcggaaactttcggtttcgagcagctgctgtctcaagtccgcaactcacaatttaattggactttagtatgtcagtgggttgctaaattgcagacgtttcggtgaaggaagaggttacacccactcctaaatgcatggccaccagtgcaccgacaatttccttcgaatgcaactctatatgcactcgccgcccctttgggttaggtgggtggggcagctgtttagtgggtcaggtcaggcacagcaagttagccgggaaatgagtcgcgtgcatg

SEQ ID NO: 34631 - DNA, 2331 bp, DROSOPHILA
atggacgccaagaagctgcagcagctgcaggaggcagcgatcctggcgcagcagcagaagaagttgccgctggcctaccagacgaatctcgtggactaccgaacggcggcgtacagtcaggcattgtaccaacaatcgcccacggccaccagttccagcggcggtggacccctgtcgcctattgacatgcagccgcagtccaagcattacaatctaatgaagcacggcggtggaacatcgagcagttcacacagctccccctaccatcagtcgtactccagcagcggaggcactgcggccggggagcagctatatcaatcgcccacggagcgaacgtatctggcggcagctggaagattgcatgccaacaatgccatggcaggtcatcatccaatttcggcactgcagtcgcagtatcagcagctgcaggcggccaagatgcaggcacagatggccacacaaagcgaggccgcccagcagcagcagcggacatttgccttgcgacaggccatgaacccgcccacaaatcactaccacatgagtcagtcgtccagcatggtctccaccatgaccgctctcaatcagcagcaacaacagcagcagcaacagcagcagcaacaacaacagcaacagcgggctccaccctcttcgcttaatttgcaaaatcaatatcaacctgcccagggtcctctcaaattgcaacagcaacagcagcagcagcaacagcagtcgcagcagcctgcaatgcccaaacactaccaggagcaattgtacgcccagcagcagcagctgcaacagcagttgcaccagcaacagcaacagcaacagcaattgcagcaacaacaacagcagcatcgacacaaaaacgacttgcaaaccccgggcagcgagcatggtaccgtttatattcagcaaaatcatcccaaccatgtggtgaaccaagcttgccagacccaaatatcagcggtcaagcccaaggccacgcccagttcggaggagtcatcatcgaactcgaccaaaagtcccagccatgctccgttggatcgcaagaagagtgccggttccatacaggctctaaagtcacccattaccaagaggccaccatccacgccggttaccctatcgggttggctgcacaaacagggctccgatggcctgaaagtgtggcgtaaacgttggttcgttctggccgagtactgcctgtactactacaagggacccgaggaggagaagcttttgggatcagtgctgctgccctcatatcgcgtatccgcctgtttgcccgaggacaagatctatcgcaagtttgcctttaagtgcgagcatcagaatatgcgtacctattggctggcggccgataattcggaggctatgatgcagtgggtaagggcactggcagcggccagcttaatgcaggcacccagcagtggggaatcggagccaagtgtaaattcctcgctgaatcacagtggcgagaactccgattccggcattcacacattgcaatcgcaccctggcaaagggcagccaacaccatcgtcggaaaatacgggcagcagtggaggaggcagtgggagtggacaacccctctatgcaaatgcaccacccaagccgagacgcattaacgatggtggctactcgtcaccatcacccgagcacaacgaacagcagcagcaacatcctagtcgccgccttatgtcgcccacgcagcaattgtaccagcagcagcaacaccaacgatctcagcagcaacagcagcagcaaccgcagcaacatcacgccatctatgacactcgaactggacatgtgtccaccgccttgcagttgcaacaggcgcagcagcagtactccctggaccatctggaggcgcagttccagcaacagcaactggacatggaggagcagattgcgcggttgcagcaacaacgcgccgccgaggagatctacggcgagcgggagatgtacatggccaagttgatgcagcagcgacagggcccgaatggaacatatcccacccagcagcagttgctacaggcggagcgcaggacacccgatgcctatgggcgctccaagcagcagcggctctttgccgccgcagcagctgcagcagactacgaggatatctacaacatgtcgcaactggcaggtggcggcggagtgcccatgtccgcccaggaggcacttctccaggaggcggccagctaccgcagaccgctgagtccgcccagctacgatggcagcaagcatgtgcccgcgatgccgcaacggtacacgcccaatcatttggaggtgagtctgaaaattaacacagttaatttagctcaattttag

SEQ ID NO: 34632 - protein, 776 aa, DROSOPHILA
MDAKKLQQLQEAAILAQQQKKLPLAYQTNLVDYRTAAYSQALYQQSPTATSSSGGGPLSPIDMQPQSKHYNLMKHGGGTSSSSHSSPYHQSYSSSGGTAAGEQLYQSPTERTYLAAAGRLHANNAMAGHHPISALQSQYQQLQAAKMQAQMATQSEAAQQQQRTFALRQAMNPPTNHYHMSQSSSMVSTMTALNQQQQQQQQQQQQQQQQQRAPPSSLNLQNQYQPAQGPLKLQQQQQQQQQQSQQPAMPKHYQEQLYAQQQQLQQQLHQQQQQQQQLQQQQQQHRHKNDLQTPGSEHGTVYIQQNHPNHVVNQACQTQISAVKPKATPSSEESSSNSTKSPSHAPLDRKKSAGSIQALKSPITKRPPSTPVTLSGWLHKQGSDGLKVWRKRWFVLAEYCLYYYKGPEEEKLLGSVLLPSYRVSACLPEDKIYRKFAFKCEHQNMRTYWLAADNSEAMMQWVRALAAASLMQAPSSGESEPSVNSSLNHSGENSDSGIHTLQSHPGKGQPTPSSENTGSSGGGSGSGQPLYANAPPKPRRINDGGYSSPSPEHNEQQQQHPSRRLMSPTQQLYQQQQHQRSQQQQQQQPQQHHAIYDTRTGHVSTALQLQQAQQQYSLDHLEAQFQQQQLDMEEQIARLQQQRAAEEIYGEREMYMAKLMQQRQGPNGTYPTQQQLLQAERRTPDAYGRSKQQRLFAAAAAAADYEDIYNMSQLAGGGGVPMSAQEALLQEAASYRRPLSPPSYDGSKHVPAMPQRYTPNHLEVSLKINTVNLAQF

SEQ ID NO: 34633 - DNA, 3190 bp, DROSOPHILA
caataaattattaatgataatgataacaaataggacgtaaagttaaactaatgtggggcaaacagacatcagcaagcagagataacaataaaataaagtcttaagtaaaatagtcttcttgagttttcgagtaagtttttttcgtatttaactataatattaatttgtatttaacgaatgtagtagggctcacttggaaccaatccaatccaattcaatccacactcatacgctcgctcacacactgaaaccaattgacatcccacagctacactgacagaaagtaataaagttatttgttaataatcgtatttgccatgtgcgttgcgtactgtactacatttatttattttagtgtttaaagaacttgtcactgcaaacggtttcccccgagcaaccgatcgttcccactcccgaagtccacgatctatacctatgatagtacaccaataaaatagacggggaatacgtgtatccaaacatttgtccttccaagttgatgtttttgtttgtttgattgagcagcattaacaagaacaaggataacaacaagaaacagaaacgaaaacaaaacaaaatgataatgaaaacgataacgaaaactaagcgtaaacgtaaagcgacaacactatagtttatacatagtatttatatgaatcgtgtattgtatatgatatgctgtctaatccctaatcctaacacatacccattacgtctataatttgaatattttatttagttgttaaaacatccgtgcgtaaaatgcgatatatataactctatattattattatgagtaaattaaataatagtttttaatagtttttaaacagaaacaaatggcaaagctctcaagttgttattttattcaatatagcagcaaatacctgactgtcaggtgtttggtgctgggtggtttttcatttgccatggcaaccgattcaaggaccaaacaaatgtcgactatgcagtttagtcacttctttcaattgtagctaaaatgtcggtggaagactcctgggttttcgattcgctggtgtgcttcctgcacgggcccatttggaatgctccgcttcagacgttcatagagcaaaagtccttaggtgagaagtccactcagaaaatgtaatcgccagtaacgcagggatttggtgcagtcttcgatcccaaccagcagttggatgagaacaatccggacatactgcagatacacgaggaatacaagaatctggtggactacatgctcggcagcttcatggaggagatgcagatatcaccggagcagttcgaaatggcctgtctggagggtaggcagcagggtcagggcgagaatccctttcatttccaccaggtgcttttccagcaggtatgtgcggtcgcacgatctcacacagtcgtgtctccaagatgtcatctttcagatatgggccgccaacgatctgaagatattcatacggatgatgacgcaacgcaacgtggagcttcagctgcaggccctggatctcatagagaaaaatcaattagcccctggtggcgtcgaggagggggatgaccgcagtgcggacgctagctcggatccagggtgggtaatgatgtcttatgcaattgtaggcactttgccaaccaaattgtacacgggttttggtaattagtaatcaatacttcttgttttttggtcattattctatatcgcatatatatattatatatgaacattatactttgaacagggataccgcctccgaggtggaacaaatgatagccaagacggtgtctgacgaactggagagccccgaagcggccctaactccagagcaggagcccaatctggagctggttaacgacaagttccagcgcctgaatctgttcttcgagcaggaggatcgtgtggaccccagtgatgttgtctcgcggcaggagtacctgcgccaacagcgtgacaagattgtggagataaagaagcagacgcgtgcaaagcaactgcaagagaccatgtcccgcggtactccacatgcaccggaaggagcacgtcccagctccgcgttggtggcccaacagctgctcgagaatggcggccagactaaggagctctccatgccggcaccactagaagctgaggagaacgctgccctgcagctcagacgcaatcttgccaagcgcttgcgcagcgaagtggttgagcagaagtgaaagaaaggacgcacttttttccctactattcccatttattgcagatactcagccaggattaacaacgtgcattaggtattgtggcatgcagactagtttggttggttgatgcacggtgtgtgtcgtatgttgtacttgtaacgccacccctcatccatgtccacaaacagccaatccatagattgattgtttgtgggcatggtcgagcggatctatcaatttccattacgctattcctcaaaataaacatattgctagtgaagtgtttctcaaaaaacggtgtgaattgctcttctatgtgggtatgcgatcgcgcaaatacgacatgatggcgtcagtgcccttcatcaggatttggtggcggggctgtcgaaatggattgcccaccagctccaagtgactgcaatatacagagaaaataagtttggctccaaacaatatatatccccagcaaggatcttacgttatgtttgtcaggttccccaaaattggtggcactgtctcgatgtcgttattgcgcaaatccaatgtgctcaaacgtcgcatgttctgcagacccgatacatttaacatttttatgtggttctcactggcaatgaggatctccaggccttgcagctcgtacacacagttgggaatacacggaaagctgaaaataaacaagtgggaagtttaaataaagctacatagtttagaaaagatatttcccaatacccaccgattgtttgcaatgtttagttcacgcagtgtattcaagacaccaaactccgtgggcaggtcattcaacagattgttggacaaattcaagaaagatatacgtgtaaactgggagatgaactgtggcacatagccgatgacattgttggataaaactagttccgtaactaaatctttcatgtgctgcagtctaaaaaaccaatcagttataaatcattgcatccattaaaactttaaacttacccattgggcaaagtgctcagctggttgcgcgcaaagtcca

SEQ ID NO: 34634 - DNA, 933 bp, DROSOPHILA
atgtcggtggaagactcctgggttttcgattcgctggtgtgcttcctgcacgggcccatttggaatgctccgcttcagacgttcatagagcaaaagtccttagtcttcgatcccaaccagcagttggatgagaacaatccggacatactgcagatacacgaggaatacaagaatctggtggactacatgctcggcagcttcatggaggagatgcagatatcaccggagcagttcgaaatggcctgtctggagggtaggcagcagggtcagggcgagaatccctttcatttccaccaggtgcttttccagcagatatgggccgccaacgatctgaagatattcatacggatgatgacgcaacgcaacgtggagcttcagctgcaggccctggatctcatagagaaaaatcaattagcccctggtggcgtcgaggagggggatgaccgcagtgcggacgctagctcggatccaggggataccgcctccgaggtggaacaaatgatagccaagacggtgtctgacgaactggagagccccgaagcggccctaactccagagcaggagcccaatctggagctggttaacgacaagttccagcgcctgaatctgttcttcgagcaggaggatcgtgtggaccccagtgatgttgtctcgcggcaggagtacctgcgccaacagcgtgacaagattgtggagataaagaagcagacgcgtgcaaagcaactgcaagagaccatgtcccgcggtactccacatgcaccggaaggagcacgtcccagctccgcgttggtggcccaacagctgctcgagaatggcggccagactaaggagctctccatgccggcaccactagaagctgaggagaacgctgccctgcagctcagacgcaatcttgccaagcgcttgcgcagcgaagtggttgagcagaagtga

SEQ ID NO: 34635 - protein, 310 aa, DROSOPHILA
MSVEDSWVFDSLVCFLHGPIWNAPLQTFIEQKSLVFDPNQQLDENNPDILQIHEEYKNLVDYMLGSFMEEMQISPEQFEMACLEGRQQGQGENPFHFHQVLFQQIWAANDLKIFIRMMTQRNVELQLQALDLIEKNQLAPGGVEEGDDRSADASSDPGDTASEVEQMIAKTVSDELESPEAALTPEQEPNLELVNDKFQRLNLFFEQEDRVDPSDVVSRQEYLRQQRDKIVEIKKQTRAKQLQETMSRGTPHAPEGARPSSALVAQQLLENGGQTKELSMPAPLEAEENAALQLRRNLAKRLRSEVVEQK

SEQ ID NO: 34636 - DNA, 3408 bp, DROSOPHILA
gttcaactaccgggagttcctgaaaatcctcgacgtgctctttgccaccggtcaaatgaagcgcaactattagtggcgcgaaaactaaccctctccaaattccaagtgtatcatttgtccaaatttttgaatgttatcagtaaaataaaaaaaacaattggtggattcttttaatttaggtttctttaatgtaatgttcgctttaaaactgatctcctatcattcaattaagttaggttgtaatttcgcttgagaatgtttaatttctttttttttttaagggggaaaatccacgcttccatgtattgatttcctcgaaatgctacctaaactgcccgtccagcacacatcggcatttacatatattaatgccatccattcagcttgacggtcggacgatttcataaagattttcatatagctatagtagtgtatacatagatagatttgatttaacaattcgcattcttgcagtggtctatacaattgtgggtgtgtacgtagagagtgtgactttagatttttattaaaatataaatctcttccctttcagaagtgtacataaatatagatgtattatgtattatgtatgtatatatgtagtctatgagcgtaatacacatatccggaaaacaaaaactaatatcgtttccgctttctctgctctgtactagtatattatgtaatatggtggtttgtttgttgtaggttgtttctgctttgttgtcttgtcctgtgtcttgtcgtatatcgtatatcgaatatcgtatatagtttttctcaatcgaacgggaagaaggcaacccgatgtgccagccagtcaatgcttgcttcttttgtttgttggttctataattattattacatattacagttaattcataattaaagttaaacaaatacttatactctattgtattgtgtaatatatgaaacattttagctgtattttttgttttgttttgtaagtatttttgtttgatttcttctgtttttttttcctatctttcctatctctccgacatcctgtgctctactgacgcgttaaacaattacctcgcataatgtatgggactacattagaaaaacaaattagtttcgacacacagacaacgtgagcattgcacagcagttagtttggcaaatgttgtttgccacgtttccctgcaatgttgtcttgtggttttgcacgggttgaagggttgtttggtgggcggttggttggttgtttggttggttggtttgtcggcttaatgagcgtgtggctatgaaaaattagccacttgctgaaaaattacatgtgtatgcctaactatgtgtgtgtatctatttgtgttgttttttttttttcttgttttgctttgtggtttgccttgtattgtataaatgatgttttttagctgcgtatgatgctgttgttggaatggtgctacacatcaagtgtgtaaaggtgtgttaaggttgctgatgttgatattattgctcccagccagccagtctattcatttccttttttcctcatttctttcatacagatatatacaacggcgtatgtatatatgcggttacccagatggtgttgttgcagagatgtgtgttgcttcttgtagtaatgctgcaatgatataatcaactttaatgaactggcaacaaagcgtcgatggcttttaactcaccataacaaactaaactaggtaaaattcaaatagtttgcagttatccggagaatgcgagatacccaatgcccacgccccctgcccactttttagtagggctgatgccgctgctggcgtccaccgcctccgcgctgcttgccaccgttaaaaccgccaccgcctgttgtggaaacgtttggaaagtgtgcaaggcattagtcagttaaattcgaatcgagagtatcagattaaatcaggcaaaaagaaagacatgctcaacatctgcgggtaggaaaggagaggggttcatctatagatatcattaactacgccaaacgacttcggttttcattttttgttatttttttgaaaattttgaccaattctagtgggggggcagcacagcatagcaaaataaagtaaaacataagtcatgaaaagccaatggaggaaggatataaaccaaaaacgatgaaactgctttacaaacataattaaaatcattgcgaatagtagagactacactatgtattttttttaataggaggaatgagggcccaacagttcgttggttacagatagttattttatttttttttttgctaggcgcttcttagtgttaatacctttggggccgccgccgccgcggggtccaccgcgaccgccgcccatattgccaccaccgcctccgccgtagccgttaccctcaaagccgccgccgtaaccgtagccgtcttttggttgcaatggcatttcgtggtgcaatcaatcacacacacagcatgcgcagattgggtcgtacagaaaattgatgaaaacacaaacaaagcttatcttataaaatggtgtaaaacgacacgaactaaaataagatgggtctaattggtactgccaactactttagcctaaattattgctaggaattgtgagccaagtggtcacgacttggttgttgaattgttgaattcttacaatttacatttactaacatgttatcacaataaatttacaacgtttaatgacctcatttgacacaaaatctgataaaatatttgattacaatacactttacaagaactggcgctagttggcaggattttcagtcgagtggaactatctattacttggatcggggaattgtattcttttactttttcgcttggtcaaaatttgtgccgcccagttttggacgacgccgacgagccgaggggagacaattcaaatggcacataccgcgagcgagctggaaaggaatcacctgctccggatccggaggagattgtggttggtgttgggtgagagatcaggggtgggttgtgggcggaaactgaaatacacacaaaattgttgtctggtttgttttttttttttttcgtttttcttttatttgctcatttttcttgtttgtggattttgattataagattgatggttaaaatgttgctctaacatgtgtagttgtcgattgttgtagctgttggttgctggtacacaataaaaatttaaaaaacaattttcactcgctttcctcttgcaaatgtcgaggaaaatggcgcaaggcggcgctcacacatacatgcggttctcgattggattggtggttgttatttcgcttcgttatatataattatataatataactctggttgttgtctcagattttggttagttgtcgaccggacgcgactcgacttattaacatgtttcacaatgtattgcaatggatatttcaattcattcgatttctcatttc

SEQ ID NO: 34637 - DNA, 902 bp, DROSOPHILA
atgccattgcaaccaaaagacggctacggttacggcggcggctttgagggtaacggctacggcggaggcggtggtggcaatatgggcggcggtcgcggtggaccccgcggcggcggcggccccaaaggcggtggcggttttaacggtggcaagcagcgcggaggcggtggacgccagcagcggcatcagccctactaaaaagtgggcagggggcgtgggcattgggtatctcgcattctccggataactgcaaactatttgaattttacctagtttagtttgttatgcattactacaagaagcaacacacatctctgcaacaacaccatctgggtaaccgcatatatacatacgccgttgtatatatctgtatgaaagaaatgaggaaaaaaggaaatgaatagactggctggctgggagcaataatatcaacatcagcaaccttaacacacctttacacacttgatgtgtagcaccattccaacaacagcatcatacgcagctaaaaaacatcatttatacaatacaaggcaaaccacaaagcaaaacaagaaaaaaaaaaaacaacacaaatagatacacacacatagttaggcatacacatgtaatttttcagcaagtggctaatttttcatagccacacgctcattaagccgacaaaccaaccaaccaaacaaccaaccaaccgcccaccaaacaacccttcaacccgtgcaaaaccacaagacaacattgcagggaaacgtggcaaacaacatttgccaaactaactgctgtgcaatgctcacgttgtctgtgtgtcgaaactaatttgtttttctaatgtagtcccatacattatgcgaggtaattgtttaacgcgtcagtagagcacaggatgtcggagagataggaaagatagg

SEQ ID NO: 34638 - protein, 65 aa, DROSOPHILA
MPLQPKDGYGYGGGFEGNGYGGGGGGNMGGGRGGPRGGGGPKGGGGFNGGKQRGGGGRQQRHQPY

SEQ ID NO: 34639 - DNA, 2336 bp, DROSOPHILA
acaatttggggttaaccatgaatatttcaggttggagattaattccggcagttacgaaaataaaacttttgaaataaattacctttaaacactgttaaattgcgcttttcatataacctttgaaaccgtacagtttgcgtgaaccaatttacataaatccgataagatacatcatattgtcagagcgcaaacaccttgttaaagttctataaagtgcaaaaggtcagccaactaaatcgatttttcagccagctgctgaacgttgatccttcatccgaactgcggctggacattgtcctggcaaagagtaattcaattaccgtgtaacaaaaaataacgcctgaatgcaaacaatttgtaagcaatttaaaacaaatgcattttaattgaattgagagtcgggcttaatgttattaatggagtttttggccctgattggccgcataagcccgtcaaaccctgcaggacctctcaaaatggcttacaccccccacacacacacacacatgcacacacacacgtctcgctattaaaaagccaaacatgtgaaactgctgctgcgagcttatgtttacaaatttcgtaattaaattttaagtaaatatcaattcaaaacggcaaatgacattttgtgcaccaaacttggatgcgggctggagcttggcaaattgcaggacgagatggcgaaaggagctggaggcgcaaggaggagccagcgttgatgatgatgacactaaataaaagattttatactgttgatttttgcgctttttgcaactttgcacgttgcattgcacttgatctgtgtgccaaacgttacaacgacacttcagcaggagtgcggactgaagatggaggctggactgggtagactggttctggatctcaactgccagcgggaggagtcctgaatgtcctcaatgtcctggcaatcctggcagcagctgcaccagttgtttgtagcatacaatcagctcgtttcgttttattgccaacgtcgtcatagagcaacgccaacaacatccttctcgtccttcacctccacctcgtgctggtcctccacctccagttcctccacagccgccacctgcacctcgtccttgtccttgtcctcgtccacatccacatccacatcctcgtcgtcttcatcgtcagcgctgcgacgtcgcctagacacaagacttgacagcaaagcaaaagtgtatttacattcaattagtgccaacaaaattgtctttggctgcttgccgtagcctgtgcctagtgccacaaccaaagccagttttacaggccaggcccaaacccacacggccaaaaaaaaaaagcaccaaagcatattagttctcataagatattgagtaagatctgaaacgatccaaaaatatcctcagaaaatttgtaataatttcttattatgtagatattctataatttataactacaatataatattaagtaaatgaaatgtgttcaaccaattatttgacaaattcacaaactttgaaataagtttttattattgccggatgtcaaaagtattatttgacaaccaattgcatacacagaaagaaatattctgttcactggcgaaatagaaaggtagaatggatcaaatttcaaaaatgaaatgcaaaaaaccattaaatttacgatattcaaatgatatatgaataaagttacctttaattaaaaatacgatttttggtatagctttgtaaacaatttttccgatgacataaaatgcaagcagccgttggccatttatttgattttggctatgacaatgcctttgggcaatgactttttatgaaacccgccagctctggataatttcttgattttttcaacatatacatgttgacatttttctgcaacattttgaatattttttcgctgtgcacaagttttttgcaagttgcctgggcgtaaattacttttcgcattggtgcgggcaaaagggggcgggtgtcagcggtgtaggcgtggacctgggcatgacccatgtttgcagctttttagttgggagctaagtaatgtaaaatttattttaaataaactgaaaatatgttttggcttgcaccagaaccagttccttattattcgtgttgtttccttttttggccagccagccagtcagccagcctgcttattttttgccaagcattttatttatgcataacaaagcaccacttaaatctgctcagcattttacttttttttatttttttttttttgctttctcggtttgcgctgctgccttggagagagccgctgatgctattcgaaagtttgcaatctgcatgccaagttgtcgacgttttcacacaaacaggccg

SEQ ID NO: 34640 - DNA, 336 bp, DROSOPHILA
atgctttggtgctttttttttttggccgtgtgggtttgggcctggcctgtaaaactggctttggttgtggcactaggcacaggctacggcaagcagccaaagacaattttgttggcactaattgaatgtaaatacacttttgctttgctgtcaagtcttgtgtctaggcgacgtcgcagcgctgacgatgaagacgacgaggatgtggatgtggatgtggacgaggacaaggacaaggacgaggtgcaggtggcggctgtggaggaactggaggtggaggaccagcacgaggtggaggtgaaggacgagaaggatgttgttggcgttgctctatga

SEQ ID NO: 34641 - protein, 111 aa, DROSOPHILA
MLWCFFFLAVWVWAWPVKLALVVALGTGYGKQPKTILLALIECKYTFALLSSLVSRRRRSADDEDDEDVDVDVDEDKDKDEVQVAAVEELEVEDQHEVEVKDEKDVVGVAL

SEQ ID NO: 34642 - DNA, 2339 bp, DROSOPHILA
gtataacgataattcaatattatagcagatcaactatcaaaactgaaacattttccgctgcgctctcttcaacaattcacaaaccgaatgcgttcatctgatcccattgggagtgaagttcataaaaagggcataaattatgtaaattgattaaaaaattgagcatacctcggcaataaaatgattataaatctgaatgaataaacaatagccacttgcgaaactgcaacaactgcaggacagcacttataatagagtaacaatttacaactgccggtggagtggcaattgaaactaagaccgttgaggaatgtattttatttgatttggctggttcccttctttggttggttgttattgttgtgcgtttaatgaattttattgattgcaaatacaaaataagaacagcatcacgtaaatggaaaccatttacagcttaaaaatatttaattaccaaccgcccattgcccaccgcgccgattgggcagcggattttcgatgggttgttgtggggttcgaaatgtttcaggtcttgccaccaaattgcaattaatcttcttttaacagcaaacttttgatccgctttatttgcatttcgctgcggccccacaacaacaacagcagcaacaaataaggtggtcccacggagggaaaataacgaaaatgcttgtcataaaaaattatcaagggttaaaaattatgttacgcgtttcattttggtcgctgcgaaatgatttatgcaaaatctgtgcaaaatgaatataaattgtgcaatttcatgttcttcattttttttttatacgcgccccacctcttcaacttagctcaactttttccctgtgtccggcaaattaatttaaaagcaccaacaataagtaaaataacaaactgcgaaagggtcgacgccgctccttcctggccattatttataatctcacattgaaaaggggttctctaatcgatttttcgctctgtcttttcgttctctcacaaatctgcattaaccgatgataattttctgatagcccaggtagccgggatagtagccactgccataaccataatagccaggcgatggtgagccatagtagttgtacggatagccaggatatgcccaagaatagccactggcccagttgaggaacggcaatccgccgatgctgccgctgaagaagatgccacgccttcgacgaaccggaagcagatttcgctgcgaatccgcagcgccgccaatttcctgctccaatgacagcaaatccgtttttacatagccaactggtgccacatccttgtcaacagccgacgcgccactcaagtgcgtgcccagcagcaaaatcatcgccagaggcagcaacagcaatcgcaattgcaatggcaatggcatatttaattatttaatttaacgatgaaaatatgatatttatatttaattcaatcgacaaaccgcgtcaatgatttccacacaactgccagtcaaagagccgccgctgtttcctatttatatgtagagtgagtacttcgattgaatttaatgccaacaccattggcgtttgtttttaaatttaaagctcgctaattgaagccaatgctaatgccttcattcagaacgcccgcaaaaaattggtggccaataaaaagcagtacaagagctgaagacaaaaaaaaggttctaacaaatgtgacgtattagtcgagccaatcaatgtggtatagaatcataggaactcaaaacagcagatgcaatgaagattggataccctaatgttatttattttaatataaataaagatactgctaatagatttattaacattaaattatgcagaactttttttctatagctatgttttcccaactttaaatgaaaaaccaagcacattattttcaatgcgataggtgttcgtttttaagtatcttaattggaggcaattaaaatttgtttataaaaaattcaggagcagtcaaaacacgattgcaaaaagtcatatgaaataaagccgggaaaattgtataactcaatcaatacgaacacgatactttcatgttgctgttttatgtgaaaggtgcaattttaaaacgaatttttaggattatgtaacctatttaacctactcgaaccgagaaaaatcatttaatgtggctttgtggcttgaccagggactcacaacaccctctcgaagcttatacctaaatcgctttatgaaccaaattatgaaggcttgacagcatttgtctgatgctcgtcgcaaataccctcactactgccattccgaccgaacaccacccaataccactcatttgccgcccgacaaaagtgccagaccttgtgtcccttttca

SEQ ID NO: 34643 - DNA, 339 bp, DROSOPHILA
atgattttgctgctgggcacgcacttgagtggcgcgtcggctgttgacaaggatgtggcaccagttggctatgtaaaaacggatttgctgtcattggagcaggaaattggcggcgctgcggattcgcagcgaaatctgcttccggttcgtcgaaggcgtggcatcttcttcagcggcagcatcggcggattgccgttcctcaactgggccagtggctattcttgggcatatcctggctatccgtacaactactatggctcaccatcgcctggctattatggttatggcagtggctactatcccggctacctgggctatcagaaaattatcatcggttaa

SEQ ID NO: 34644 - protein, 112 aa, DROSOPHILA
MILLLGTHLSGASAVDKDVAPVGYVKTDLLSLEQEIGGAADSQRNLLPVRRRRGIFFSGSIGGLPFLNWASGYSWAYPGYPYNYYGSPSPGYYGYGSGYYPGYLGYQKIIIG

SEQ ID NO: 34645 - DNA, 2399 bp, DROSOPHILA
gcagcattgcaaatatttttataacacgatatttgtcatggttgcgtatatttatgctatgatttttccaaaccagttgagtatattttccattgaagtctaaaaatatttattaaaactattgctgctgcaagccagaagcccgttaactacaagtgaatattgttttttttttattcagttttataaaaaggttcataaaatgccatggatatatttcctatattaaaaacatgaatattaaatggtaattgtagcagtaggggcaagtgttttttgttcgattttgaagccgcttcgtctgaaattgatttttccataatttagcctgtcaaaatgctagcaacttggctaaattatttggttgattttcccccaaaccgctccaccaacagcagtcgacgtgtcccgcagggcgaacgttaattcgatttgagggcatctctacactcgatatgtataagtattgccatctatatacatatacagagatccagttccccgggtggcaacctcaatttacccatttcggcagtcccgatggcataagcgaattcatccattaaagctgccagcagcgtacataaagccaaacaattcccctaactacccaaattgatcaatttcaattcactgcaaatagcctgggcgtgatttgttggggtggcccaacactattgccagtaatgtcacccccccgttggtaatgttttgcaatataaactttttgtacttttacgatataggaaaccctactttctctgtcacaaaagccaaaaaaaaatataaaaaaaatatatatatatatcaaacgacacctctgccaagtagcttcgtaaaaaatttgtcaaagccggggtaaatcgaaaacaaaaacgtagaaacgtggtgcgaagtaaaaattgcaatcgcagacaaaagcgcacacggtacgcaaaagtttgcatttcaagagtcaatttccctgctgagtttgctgcataagttcgagattgtgaaaatggtcaagcatctggacaatggacttgtgttctaccgactgatgctgagctttccgctaagaattgcactgtatgcggtgtacgtttacctggagaatttgctggggctgatgcttttgatccaggaagttctggtccttcaatttctattcctctgcatggtcatccggtgggtatacccaccgtggccagcaaatggtatcgcttcatcgctgaggtttcgcacacggaaagccctccagatcttcctgaccatctggatcgtattgctcaacacgaccacctatacgtggagcatcccatgccagggcatcatgcaactcagccgactattccggatatgcgcctatagtcgcacctggatcatgatacagcgccacaatggcgcccgacgctgaaaaattatcctgcgagagcaataaacgttcgcaagtgcatgaaatttaatgctcggttggtggactcaaatccgcattgctctgcgcggtatttggagtaaagcagggtataagtggttaataaaaattgaactaaaaatatgcatatttggccattagtcccaattcctatgagaactttcaataattttcgatcgatatattgttgtattgtggaaatggaaaattttgggtaatttaaaatagatttttagtgaatcaaaatgttcttaatacactcctatggcatgcacagtacctttgagtcgactataacgatcttaatttagttttttgttttggaatggggaatgtcgccaaatgcatccgcattcgtattcgcttttagcgtgcgcaattacacttgaagaaatcctggggatttcatgcgaaaatccatttgtcacaatgccgagtacgtgcggcaccagcgctgcagctccagctgcagcagtgcgtgtaaatgtgtcgtccgggcgagtccttcgggtcgggtcctggggatcctttgcgtccgtcccttgccagctgcagagctgcacagctagctccaccaaactgattccgctgcagtgccgttgctctatcacaatgacacttcatttcagttggcctctgcggcaaggactgactgctcgatgctttgccaaaatatatgtacacatctacatgtcgcaccgtatccgtgtatctgtatctctgcctctgtatccgcatctgtaactgtatctatggtcactgccgggagcttttggctgagaaaatggccagctctggattatttgaagccgaccgagtgcgttcgttcggctaatggagttgttccaaaggattcaaggagtaagaagtgtgtgtgtgcgctgtagcgcgttaacttaaaggacttttgataatgtattatttatgtcttacctcattgttgtagtattagatatgcacaataaacccactgactcctttg

SEQ ID NO: 34646 - DNA, 399 bp, DROSOPHILA
atggtcaagcatctggacaatggacttgtgttctaccgactgatgctgagctttccgctaagaattgcactgtatgcggtgtacgtttacctggagaatttgctggggctgatgcttttgatccaggaagttctggtccttcaatttctattcctctgcatggtcatccggtgggtatacccaccgtggccagcaaatggtatcgcttcatcgctgaggtttcgcacacggaaagccctccagatcttcctgaccatctggatcgtattgctcaacacgaccacctatacgtggagcatcccatgccagggcatcatgcaactcagccgactattccggatatgcgcctatagtcgcacctggatcatgatacagcgccacaatggcgcccgacgctga

SEQ ID NO: 34647 - protein, 132 aa, DROSOPHILA
MVKHLDNGLVFYRLMLSFPLRIALYAVYVYLENLLGLMLLIQEVLVLQFLFLCMVIRWVYPPWPANGIASSLRFRTRKALQIFLTIWIVLLNTTTYTWSIPCQGIMQLSRLFRICAYSRTWIMIQRHNGARR

SEQ ID NO: 34648 - DNA, 2585 bp, DROSOPHILA
caaataacaatggcaaaaacaggaaggccaaaacaaaaccgagccaggaatacaaaggcaaacaaaacaaaacacaatacaatggcaactggcaatggcaatgtaaaaaaccaaaaaaaaaaaatataataaagcccgcgaaaatatttgcagcgggcattgagaaatgttgcgcaataaaaattgcatttttatgctgatgtttgaatttcgcatgcaaatgaaaaacgaacagtgccgaccaaaaaataacagtcgcacttcctttgccatcgtaatctcgaccatatagctacccgatatctagaaatataactatctaatttaaatcataatcatatctatttgttattcacataaccctatcgccatcataacgccaaaagcattttggactctcaactgtcactcatgataaacctatcacgtgtcaaacaaattatgcaatttttgctggcaaaaagtaagtcaataaattgataagctttgtaggttttatttaaaaaaatattcgttatagatacaagtaatattttagaatatttcagagcaacgaaacgaaagcccaaatataaaaggataaaacgtaaatacttattgtaaatacatacgaatgaaaacaatttttcaatcatttttctttgattgttatgttgcgtaagtaagcaattttaatagaaaacgctataaaatacttgatccaagtgaagtatttccttaacgcgctgccatcaaagtgaatgccactatactcaatagcagttttgcggccaaatggagtggatttaatactcctttgataccctctgtctgtcatgttgcatagacaacaaaatggtctggaaataaaaacgaatggtggaagggaactgcgaactaggaatctcggggcaggaagtggagctaccgctaccgctaccgtttgcctcaccaccggcatcgcggattttcccgcttttccccggcttttccgacgctttcgctctcccatttcccagcactatgccggcttagctgagactttgcgcccacgctccacgtgtttatgactttgaattgcaacttcatccgccgtgtgggccgccgtggtccttagtccgtagtcctgctgttccagttgctgttcttgttgttgctgctgcagcaggtaccgttttagttgttgccacagccgtgtgccgttcgctgtcggttgcaatgatggcggcgcatagcgcgcattgtgacgcgaaatggcgtcgagttgaataatccaacatggcgttgtgccgccgccgccgccgccgccgtctagtatttgtgtttcagcagctatgtttgtgtgcgtttgtgctgtctgtttccggcagccggataaaaaacttggcgttaaagtgttaatattttgagttttgagagcgtcggactggcaggacatgcaaattctgtacaacaacgtctgagaaacgacggcgggagggggctttggtagttttattggagcaccatggagcgtcagcttcgacgctgtttcccctcgacgctgacacttgttcaattcaaatagcacgccagagccaccgacattgatgtcctggcacggcattccgccgcttttccgcttttcgggcctagctccgtccggaatgggaatcgggatcgcaacgctacggcttgctgggctatgctatggcatggaatcgaaatggactgtaatggtatggcgtgcccaggcgagccgcatttatgttatctttaatttttcactacaaaattggccgtgggagtgcagttcgaattgccagacaacgagcatatttatttatattgccccgccgttcgaccccaatgcgaactgtcatgaagttacaggccagatgaagcacttcagttgccatgaaatgggagtgattgagaggaatggggatggtatccttcgccacctgtgaatcaaatcaagttgacggcgcctaatgggaagaaacatttggacacttgactgtcaatttaatgagaatttcaaaaataaatgtgctgataatatttaagaattttagattaattttataaaacttcttacacaataaactcgattattaacatcatcatcagcatcttaaattcgatacaggaaataaatatgatgtactacctcacttgggcgtacttttatatatcttcgaaaagttcaatgtcttatccttaaacttcacaccttacacagagcatcaccactacaattgcaggtgaatttggcttgtaaccgcggtatagctttcccacttggaatgctcggagtcaatgcagcatattaatgattgactgcgaaccaatgtttgaccatcgttcgtttaatgagcacaagggctttcgatcttggccaattaatcaatcgggcaacgcatttcgtggtcagcttggccaagttcccccaattagaccgctgcggtaagtgttcgcttagcaggaaagtgccagccagatggaaatgctcgtagcatgaatactgaatgacaaataaggcatcatcgttaccattaccattatcattataatcatcatcgtcatcatcatcacgaactcgggcaccaattaaatagtgcctt

SEQ ID NO: 34649 - DNA, 585 bp, DROSOPHILA
atgccgtgccaggacatcaatgtcggtggctctggcgtgctatttgaattgaacaagtgtcagcgtcgaggggaaacagcgtcgaagctgacgctccatggtgctccaataaaactaccaaagccccctcccgccgtcgtttctcagacgttgttgtacagaatttgcatgtcctgccagtccgacgctctcaaaactcaaaatattaacactttaacgccaagttttttatccggctgccggaaacagacagcacaaacgcacacaaacatagctgctgaaacacaaatactagacggcggcggcggcggcggcggcacaacgccatgttggattattcaactcgacgccatttcgcgtcacaatgcgcgctatgcgccgccatcattgcaaccgacagcgaacggcacacggctgtggcaacaactaaaacggtacctgctgcagcagcaacaacaagaacagcaactggaacagcaggactacggactaaggaccacggcggcccacacggcggatgaagttgcaattcaaagtcataaacacgtggagcgtgggcgcaaagtctcagctaagccggcatag

SEQ ID NO: 34650 - protein, 194 aa, DROSOPHILA
MPCQDINVGGSGVLFELNKCQRRGETASKLTLHGAPIKLPKPPPAVVSQTLLYRICMSCQSDALKTQNINTLTPSFLSGCRKQTAQTHTNIAAETQILDGGGGGGGTTPCWIIQLDAISRHNARYAPPSLQPTANGTRLWQQLKRYLLQQQQQEQQLEQQDYGLRTTAAHTADEVAIQSHKHVERGRKVSAKPA

SEQ ID NO: 34651 - DNA, 2138 bp, DROSOPHILA
cataatggtggaagaccacaatttcaaaagcatacttaacaaatattacgaaatactacagagaaaagtgcacgcaacaaaagaataacaggggctggccaaagaatcgcagacgggcgacatggttgcgggttaaagagatgcaaagcagcagcaacagcagcagcagcagcagcaacagcagcatcagcagttgcagcaacagcaacagcagcagcaacagccgcctaggtgagctagacaaaaagcgcaaaacaatgcaaacgacacgcagtggacaagaggccacaatagacttttgagggccagaagtccagagatgctagcgggagtacaatgtctcgtgatcagtcaggggaattcataaaagaagtaaaaactttttaatagatactgagtttattttaaataaattactgagtttattttaaataaatttgcagaaattctaacggacaattaactttaagtaggccactatatgcaggatacaggatatacttgaaatcacttttttagctacttcatctttacttctatatattgaactccaagtgctatccgaatgatgtacacttcgatcacgaatggtgacttccggaccgcagtcatctccgctccgaatcgttacaatggagaaactgttgctgcattaaataataatcataataagtaatgtggggagacaaggctctcggcctgtaacaaagtggagtgctttcgaggggtgtggagcatgggggttgggaaggactaccggacggcactcgggccagctaaacgtcatgcaaagtgcggtaaaaggacactacaggatgccagcgctgatgttacacttcctgcttgctggcagccagtcagaatggcaggcaggtcctgcctgttcatttgccagccggctttgttgctgcgaaaataccttatagttgcatgtagctgttctcgcagttgtgtgtgtagtgtctccactcatcagcgctgttgttcttcagcctcggctttagcttctggccaggttctcatcctcatcctcatcgccagcctcgtcgacctcgtcctcatcctcatcctcatcctcaatcctgaagcctgtcatcgtggagcggtcccttgttaaatcctttaccaggctccgcattgttgctcacttttgcctgccagccgagccattgttcatatagacaagttggcctggcccggcgtggcctacactgtctcctaatagtttagccccctgcacggaaaacaaataaaaatatctacatctaagatagaaatgttatttttcaaaagcatttcttagttgattttatatctaaattgatgatgtgatcataatttgaagcatagatcctttgattgacttgatttaggtggtggtaaatatataaaaatggtacagcatctgcagatataggacaagttctaatataaaagttataagatagatgggattattttaattaaattaagtaacctcatcataatcggtttattatcatatttttctcagtgcattgtatatcattctgcggctttatgagcacaggtagtagtaccttttgcacgggagcagtgggaacaatgccttggcacacatttcgcattcgcctttaccgtattaagcccaaatgatttaatgagcatgttttacccaaaatgtagtaattgtcacgtattacgtgctcaggctgaagattgcgtatgcagagctgacaaatagctaaatctttgggccgctcggttgcctatttgccaggttttttagcccggctcaagtcagtagcatcagctgaagcagctcgaattatgtatatttgcatatgtaattttatggtaatactcgttaaaaatatatgtacacatatatctgcgaatcccccgtttgtgtgcaaacaaaacagggccaagtacgtgggcttagctgggttagttgttggcatactattctgaatttgggagcataaagctcgcatacttacccgacttgagcatccccgtatcaaccaaaaatccaaattagaactctgggagcagcacgtgtggtgccgttgctgccgagcaaaactcttggcgaaacaaattttcatgttgagtgcataaaaactctaaaaaattcatataaaaccaaagaacgc

SEQ ID NO: 34652 - DNA, 138 bp, DROSOPHILA
atgcggagcctggtaaaggatttaacaagggaccgctccacgatgacaggcttcaggattgaggatgaggatgaggatgaggacgaggtcgacgaggctggcgatgaggatgaggatgagaacctggccagaagctaa

SEQ ID NO: 34653 - protein, 45 aa, DROSOPHILA
MRSLVKDLTRDRSTMTGFRIEDEDEDEDEVDEAGDEDEDENLARS

SEQ ID NO: 34654 - DNA, 9772 bp, DROSOPHILA
aaataattatcgtgcttaaagacagcttgttcttgctttaagattttcattttatattttttaacctttttctgggtaaataattcatttatctgcgtccattatttattgaccccaacaaatttcaggtcggccgcgacctaatgtcacctggtacttggacaacacggcgattgacgagtccttcgagcagcggcccgatggcaagaccattaaccacctgtcgtacccaaatgtgggcaggcagcacctcaattcccggctaatgtgcgtggccagcaacacgaacttgacgccacccaacaatcgggtggtcatcctggacgtgaatcgtgagtgaatgccgcaagtgaatatgctaattaagtgctaatgataatggttctcttctgttctgcagtgaaaccgattgccgtgcatatacttaccaaggatcgattcgtgtctgcagatcgcacctatgacgtggagtgcaagagttccggatcgaagccgccggcgctcatcacctggtggaaaggcagcaagcagctaaagaagctaaccaagaatgtaagccccgactcgtaaatgactcgtgaaggcgctcagtcccaaactcattaattaaacacaaattaatattgtgtagtgtgtgcgtcgcttataattgccacaaatttcctttccattttcgccgggtttcgccgtggccttggcacgattttctttacttttctcactttccgttccgttgcgttccgttcggttactttcggtccgcttccgtttcattattcatttcctaatggactctgtttgcgtttcttttttagtttaatgaacccgataatcaatctctaagtatactgacgtttacgcccggacgcgaggacgatggcaaatatttaacatgtcgggcagaaaatcaattcatcgacggcagcgccatcgaggacaaatggcgactcattgtccattgtaagcaaaagatgcggcaaattctaagagcgggtagagtctaattgcaaaaaaatcgtttctcccatgtgtccacagaccagccgaccaccacgctcaagattggctcctcgctgaatcccgacgacatcaaggagggcgatgatgcgtacttcgagtgcattgtgctggcgaacccgaagccgtacaagatgtcctggttccataacgtaagcatgtccctgaataatgggtgtcaaatacttcagtcactgcaagaaagtgcaaacagaaaataagttttcaaattgaaatttcacatttaagatacattcaaggtactacattactagtattcaaagtgctaattatagtttgccataaaaaatggtgtgatataaacaatttgaatattcaaaactcagtttccataaattaacactttaccagagccatgctcaaaaaactagtcttatatcgttcatacgccctgtgggttagatgttttattactgtatatgacaacgctgaatggcttacgtgtctttcctctcttttttgttcctgtgcagggcaaggagctgcagcacaacatatccgctggtgtcatcctgtcggatcagtcgctggtcctgcagagcgtctcacgtgcctcggccggcgactacacctgcctggctgtcaactcggagggcaagggccccagtaatccggtcacattgcgcatacgctgtaagtaaatcgcatccaaatcccaaccgtccccatccgaaacggcaccctctacgcccctgggcttccatcgaagttagccaagtttggctttgaactaacgtctctgtaatttccaatttaatccttgagtttgaatggctcttaatgtatttagagtacggggctcagtgttatattttggccgaaagccaagaacaaagacagagtaggtgtgtcggccccagtaccctgcacataaccattcgcccccagaatccccagcccgcagcccttacgactcacgttaatgaccaagattatggcgcaatgaatgcattgccttggcacttgcccggcctcctcctcggaattctctgaatctgactctggcaccgagtgatattccaaatgaccataggatgggtgggattctgccccctggcttaggcatcgccatgcccaaaatgcgccagccaaattcgaaattcggtattaattcaggccgtttaaggtctattacaggcaaaaagcagtttagttattacgacggcgcacataaggaaaaagattcttatggcttgttagttagcagggcttaatttaatttcttacattattcatttggttttgttgatatattttaaagaaaaaaaaacagaaaacaaaacgaaaacttgaaaactaattttataaaataaggtttgattcgcttaaaaatccaattaaattctatttttccttcttgattgacccccaatgttttaagtgcattgctaagctgcattgtcatgtcgttcgatccttttgatggccgttaaatatttcaataagcgctctaatttcccacttgacttcgatagatgccccgatttgtgccacggaccacgaggagctgctgggcgctctcaagcacgagaccctgcccctgaagtgtgaagtggactcctcgccgccggcggactccttccagtggaccttcaattcgtcaggcgagcagacggagctgccagctcgcctgcactccagcgaggtagaattgtctgaaggacagccactctgaaagtgctaactaactacctgtgtatctatatcctttaagaccggcatgtcgcgattaaactacacacccagcacggacctcgattacggcacgatttcatgctgggccaagaactccattggcacgcagaagagtccctgcgtgtttcaaattgtggcagccggtaagcacccaacagcaccatcatcttcatcaccagcattatcccagttaatcggggtggacgtaactctatccgcaggtcggccgtttccactgcagaactgctcggtgaccaatcagtcggtggactcactgcaagtagactgcctggagggattcgatggaggtcttccgcagggattcatgctggagctggtcgaactgaacacgttgcgtctggccagaaacatcacggtttcggtaagcttcagaattgggttaataagcacgggaatcttaattacccagcgaatccattaaacaactttatcggcgacttactctaatcaatgggggtttaaagtaattaattgcctcgcagtgttcagaacagcaggagataagcggatggtaatattgtatactttggggctctgcgcttacatttttaagttgccaaaaaataatataatttgtaacaccgtgaataaattattttgttggattttgcgagattaaaagctaatgtgggttagacttgcagtaaattattagcatcatttgaatatattcctagtggttagatgtttttctatccagataagttcctcctcctcctcctttaaattagagttagaattcaatggacgctttttatttttattttttaccgaatttggatgttacgttttgtaagttcagtaaacattaaagttcgagtaaacaggaggagaagttcagagaaatttataaggatttttgcgtttttaaacttcttctgaaagtaattataatttttgttttgttggtttttcttctacccgaaattatttagcatacaccggtgacctttgtgatagacaacctagaccaggcggctacctatcgcatggtgatattcgccgtaaatgccaaaggtcgttcggagcccaccataatcgacgacatcaatttcaagggcgtggccaagttcacaggtgagttgcggttggggcccaagaacccaagtaattgggaattatgtggtaataatttatttgcggcatttcgcaggtgcctcgaccggcctctcgatgcccctctccccatttctggcgggtctgacccttttctgcggcctgctgttcgccatcttctgcatcatgctggcagccatctaccgaaggatttccaatcggtacggacaccaaaactaagctaatggctaatggctgcggctttgctctaatggccccatttaaattgcaggcgcagcgacagcaatctgaaggtggccaagcacacgcagctcacgattccggcggactgccagctggacccgttgcatccgggcgttcagacggacggatccggcaaccatcagccgcaccacagcctcctgcccctcaactgtgatggtcgcaacgcggtcgactgcggcgctctcggggatgtgggcggtggaggcgtgggagtgggccttgatggcgggattaagggcagttcgcccattggcctagtggccatgcctggcgatacactccgctcaaatgcaaggaaccggcacagtcccatggccgatcaggccgatatagacgacaccgatcccgatgttataccaaatcagtatggtgagtacccataactgcttgctggatctccacgggaataataaccttttagttaaaaaattaaatagtgtattcactaaatcttgcaaaagaatttttcctttaaaaaaatatttaattcttgtgaactaatccatatctaaacgaattctattagagtaccagcaacttcgttgcaagtaatcatcagtgtccttaattaacgcatttgcagaaaaacgtccgctgaaaagcctggtgtccccgccaggatttgcaagcccttcgaatcgcctgatgcagcgcgattacctccgggaaacggagctcacgaagggtggcagtgacgtgggcatgggtgcggcagagggtctgtccagcatcgggctgatgagcagctccgggaacgaggtgctgcactacaccttccggcccagcaagcaaatcgtgagtattaaaatctagaattaaagctggaaaaatgtcgataaagttatcgaaataatcgttttctcttttggttaatatcaaaaatcacaaaaaaactaatatctatgaaatattcctaaaaaaaaaaacaatctgatatgtgttcatagagtctgataactttgatttcgatattttgacagcttatgcttaaggctttcggtgatggttatatcatacattacctcatggtgttcctttcggggctttcctctcatgcattcttctcccctccaaaaatcgcactccatacagagctatgctacactgaacaaaaagggcatcaccacctgcagtccgccgttgggttcgctgaactatagtgtgagcacctcgacgcccacgtcctcgtaccacctgacgccccagcccatggaggtcagtctgctgagtccgaacaatccgtcggtgacgtcgtcgttgagcgagtaccgatttcgcaccggtccagagatcgtcaccacctcgaatcgcatacaggaaagttgtatataaagctaccacacccatacttacttctgagtgtacaaaaaaccaaatgatatagagtggcaaatgtattaatacatgagtatcgtaccgcatcgtatcgaataatatcctagcagctagacgtatttattcgcatggtttgaggaaagacttctcctagctcgtaagcatcttgtgtacttaatgcaatgccaaaagtgtaactgcaatacactcgttttgtaaataatcgttgtcatctgttgttgtaattaagccaagccagataaggaatatattctcgtggagagagagagagagagagcagtaaacgaaactacttctaaagaacatatcgtttaacgtttcacccacacacccatatccaatatccaatatccgaaatcccgatatcctggaacccagatccataccctatcctattccgaaaaacaaacgctgtcaacttaacatatcgccgacatcctaacgctcgctaagctaacccgagatcattgttgtgcgcaaaaaatgcaagaaacataagcaaacttgagcaggccgattgcaactaatttacgccatatttagtataccaataaacgaatatatatccatttaatctgaacaggacctgcactcttccagagttcccggcagagtactgcgggagtcgcatttgtgagaatatcatgtccatatcctctatgaaagtattacctattgattttcgtttcgattaactcgagtgtttaagtgtagctaccacatacgtgtatttaactagacctaagtagtcctaattagcggtctaagcgatatgtacatacatgattatacagaaggccggaactctccggcactccggtattccggaattccgttgctccggtggtccggtactctggcactcctccactccggttttctgagattctccctgtaatttgaaattgtctaaccgctccgaaccggcaactgtatatagttcataatttattgtgaggacgaaatgtgccgttcgctccgatgtacgttgtgttgcccccatctaggattaaattaagcatttatagaacaattgcaatgccgcaacatatgtacaaaatcttcggagcgatccgaagggtgtgtgtcccttccagagcctcgcactttggcacttgaaaccctcagtcctgaattctaaactcagactgaggttacagtggcgtttcttccctggagcgggcaccttacagcttgaggatagtatatgtatctgaataaaaaagtgtatgtatcttagagaattgctgccacttaatcccgaaatatatgcggcggcaggcgatacttgtgcgctacgaacggtaaaacgcaaagattagtataatttgtcaagcctagtttttgtaactattaggagaaatattaaatacaattaaattataactaaatggaatcgaaacactgagcagcgtgtattcttttgctgggcaactcgccgctttaataagcacttgggcagcaggaggtattgcggacacgaacctaactcctgcggcactagtacttaggaaagcgaacttggtaagtaggcggcacactgtacatctagttttaacatccaatattcacccttgatctcgagatattctccgggttccgtggccccatgttctgcaatgataaatcaattagtgcgaaagtactttctctggatcactgtcacaagtgacagctcaaagatgcctccatccgctcggtaaggttattgtgttctgaactatgcacttaatcgtttagtttctgagttattaatatctgtacgagatacttaaccttctgtggcagctgtctcatcaaaatgttttcctcccccaaaaaaatataaatatttctctacaattcctgttcaatttcccgaccctccctcctcgcagtccgtctgcatgtagatgtgtatcattgcaagtcgtgtacggctagtaacctcttgcacataatacataagtttattaaatttaaattggcttaattgaccctcattcgttttccgttgcccgatgcccaatgcccgatgcccgtattcgccggcagcgttcaaaattgctccatgacagacgacaacgatgtggctggtatggctgtgtgactgagtgtttgtgtttttatttcgctgctgccttcattgctggagcattcaaagtcaattgaatttaaacgaataaaacgaatgaaactacatacaatgcgatgcctgccacagagtcttattgttgccgcattgcccgattatgattgccactgctgccggggcaaaagcgtcaagtacttgtcagaaaagcagaggagccagaatacgacaatacaacaatttgtcagcccaagatgcacagcaaatggttggatgggctgaatgcattcatcagctaaattagaatatacatagattaatcagagcacaataacacttagttatttgagtccgatttagcaacagctaaggcaacggccgtcgtggaaaatctgttgcatttcctgattggcattaactacggcttttgtcatcgcagaacattttgatttggtctattagattttcccatttcacgatttgtgcagagatttgagtgaaacttgatttgatatgattgaagcttaatggcgtgaaatataatcacttaagatgctatttacgagaaaaaacattactaattaaatggaattttttcaaatcacctagattagtcaatgagatagtttatagcttaagttgcattttaattgcagctttatttttatagaatttctaagaaaaaacttatttaactctctttttacacaccatcgattctaatatttctccctcctattttttcttcaaagagttgtttttggcttccttaaccttaaaatgtactgaattgttttcatgctgaaataaagtgaattatgtagagcatattcgtttatcgcatacatactttagctttctggtgattccaagcaagggagtgggtgtgagatagagatccccactcgccggaaagtctcatcgctgatgttgttgctgtggatgttgctgtggtggccgctcggcgacgagaactttgattgcgattatcgcgccttgggtagggtcttaaccccgaacggagaattgaccagtagtcgtcgatctcaaaacatatatattttcgtgcatactaatatggaattttaattgatgagcaactcgaaccgactcgagctagattgtgcgaagtaccgatttcgactatgcctcagttgatgttgcatagatatacatagatttcactgggctttcgggagtccaagatctgaggtccgagttcgagaacgcggagaacattgccgctcgagggcgattccacaactgatttgtgcagtgatcgcgcggacagtcgttggatttttgaaaataaccatcaattcattactctccctgtgtgtgtcttccgatgcgagtgtgtgtgtgtgtgcgggcctgtgtgtgtgtaagagatcgccctcatatgcgtaacggagcacagtgtccgtgtattggtgcgcgtcaattccgcaacaagaagagcgatttccccgcccactttccatttggcactttccaccccgaactgcagttgattactgactaagccggccatctcaactatcccgcatatagtcgaattgaaactgaactgaaattgaaattgaaatagaagcattcgcctcgaaatagccgcctcccattcatgtgagattatttaatcgcactcgctctctggctcgttacagttctgcttgttttccatctcggatcttaaatcaccatcgccgacggcttttcacacaaacagattgtccagccgcataatagattaggctggtcctccgtcacccgcctccacctccgcccccaactcccccctgaccaacacactcccccaatttcccattttccattcgctggccaagttgctaatacgcttggcgggattataaccatatgccggggagattcaatttttgtccacttctggattcgggcattatgcacttctgccgcttaagacgatgatgtgcgatgatgtgggtgctcgggaggtggcaaataaaatgccgggattcccatattctcacactcaacttctagtacggaccatttaatggtccatttaatctcaatataaataatttatttgaaagacggtttgcacatagttaaacataaatataaatatgtgcacgaatataactgttttagatatattatttcattgtatattgtgcgaaaagcttgatgaagaagtggttttaaaaaatattttataattttaaataaatcttgcttgttattttacttttaataagataagtc

SEQ ID NO: 34655 - DNA, 611 bp, DROSOPHILA
ctcgagcggcaatgttctccgcgttctcgaactcggacctcagatcttggactcccgaaagcccagtgaaatctatgtatatctatgcaacatcaactgaggcatagtcgaaatcggtacttcgcacaatctagctcgagtcggttcgagttgctcatcaattaaaattccatattagtatgcacgaaaatatatatgttttgagatcgacgactactggtcaattctccgttcggggttaagaccctacccaaggcgcgataatcgcaatcaaagttctcgtcgccgagcggccaccacagcaacatccacagcaacaacatcagcgatgagactttccggcgagtggggatctctatctcacacccactcccttgcttggaatcaccagaaagctaaatgactgaagtatttgacacccattattcagggacatgcttacgttatggaaccaggacatcttgtacggcttcgggttcgccagcacaatgcactcgaagtacgcatcatcgccctccttgatgtcgtcgggattcagcgaggagccaatcttgagcgtggtggtcggctggtctgtggacacatgggagaaacgatttttttgcaattag

SEQ ID NO: 34656 - protein, 58 aa, DROSOPHILA
MLTLWNQDILYGFGFASTMHSKYASSPSLMSSGFSEEPILSVVVGWSVDTWEKRFFCN

SEQ ID NO: 34657 - DNA, 3990 bp, DROSOPHILA
gattacctccataaagctgttagttacacttaactgactttctaaagagactccataaaatcgcgaaaatgagtgggacgttttgatcccagaacgcattgttctcttaaacacatttgatttattggcgagatgaatggaattgacatcggttattaattgtgctccggcagacaaaaggcacgtttaacaaaaaattatttaaatttatgcccttgaagctgaccaaataaagtttaccaatcattttgatcgttctaatagtcttttgcatatggtaacctctttgaatgcatcgtaaaacattttcattgcaaattgagtgctcgaattggggcttattagtgctacgattcatatcttaattgcttttcctcacaggaatatttgaaatgttcgagcttcattgatggtaaatggagttgaaggtaaaagaccttatgctatctgttccacaaatataatacgttccaattattcacaaaggccacaagatagcacgtttaaatttaaatgattcctaaaattggtgaatatttacttttctattcactggaaggggaatattttcagtattgtcatcgaactatgtatttcattttattggttttctaactttattacattcattagtgacagcttggaattttttaaataattgttaaagtaaaatttttttattgctagcaaaaaaaaaataaataataatgattaatatgaaaacctaaatagtgcgcgatatatgtactcaagccactaaatttattcatatcaactaatgttattagaaaatgaataagcatgtgattttcatctattagtaaaataacttatgacttgaattattgcattgtgcagctgaaggacaacgaatccccttgctcgcccacaaacttcgcatcatggatgaaactgcgataatctatcaaaggctatgataaaggtcaaagaagggagtcttagcaagcgattagtttgagtaaacgagaaagcgaaaatcatgcatcacgaggagacataccaagtagtttgccgactgattgaaagggaggagctggaggatcgggagccctgctgtcggaaaaagcccactgcgccccatccattccccagtccgaatgtctggaggcagttgctccttcccctgctcatgctgtctgggatcagccaggtgtgcagtacatacgtagaacaggatgaactcatgcagaatctggaccgaccggttccactcaccactgtgcagggtgtccttggacgacaggcgatgctgccctgcgatatttcgccgcaggagcgggacgacgccgtctatatggtcctgtggttccgcgagggcgatggcgaacccatctacaagtaagttcgagattacagtaagatttaaattttaaactgaaagttatcgtatatgtttaagtaaacaggttaatattaattaattgaaaaagaaaaaatggttatttgaacagctaattcaaatgcatgataaatcaaagaagttcattgtactatacccgtaaaaagcacaaagagctaaccctggggcataatttgatattgtgtaaacaatgtgtttttgtgatttatccctgcaatgcacttttaaaagcagtcagaggagggtgggggtatctaccataaaataaatgtacaaagatatagacgtgcgccataaaaacactttcgttagaatttcgcagcaattccaaaactcagaccaaccaatttggtggcaaacggaagcacagacattttacccaatggttttattaattacatccaataaattggttaataagtaacttttgttttttgatcaaattatattatgttctgatttaatataattatcgttgaaacatctccaattaaagtttcgatgtgcggggccggcagtttggacaggcgcgtttgtggtcatcgcccacggcattcggcacccgcgcccacttcagcagcaccacccatcccgcccagctgaagatcgacaacatccggatcgaggacgaaggtgtctatcggtgtcgcgtcgacttccgcaactcgcccacccggaatcttaagatcaacctcaccgtcatcgtcccgccggacagacccgtaatctatggccaaaacaggcacgagaaggccggaaatgtggagtccttcagtgagggcaacgacatcgtcctgtcctgcgaagtttcaggaggtaagcgattttgttggaattaaaaagtacgacgtctatgcatggacaggacaaatttgtaaacaatgtcaactgtctccaatgttggttttaagccaaattacataaaaatgcacttgaaaagggttgttttagcaaaaagtacggaactaaactttagcatgtttcggttgttcgttcctataaaatttaggcaaatgggttgatattttaatgatggcagaaataattatcgtgcttaaagacagcttgttcttgctttaagattttcattttatattttttaacctttttctgggtaaataattcatttatctgcgtccattatttattgaccccaacaaatttcaggtcggccgcgacctaatgtcacctggtacttggacaacacggcgattgacgagtccttcgagcagcggcccgatggcaagaccattaaccacctgtcgtacccaaatgtgggcaggcagcacctcaattcccggctaatgtgcgtggccagcaacacgaacttgacgccacccaacaatcgggtggtcatcctggacgtgaatcgtgagtgaatgccgcaagtgaatatgctaattaagtgctaatgataatggttctcttctgttctgcagtgaaaccgattgccgtgcatatacttaccaaggatcgattcgtgtctgcagatcgcacctatgacgtggagtgcaagagttccggatcgaagccgccggcgctcatcacctggtggaaaggcagcaagcagctaaagaagctaaccaagaatgtaagccccgactcgtaaatgactcgtgaaggcgctcagtcccaaactcattaattaaacacaaattaatattgtgtagtgtgtgcgtcgcttataattgccacaaatttcctttccattttcgccgggtttcgccgtggccttggcacgattttctttacttttctcactttccgttccgttgcgttccgttcggttactttcggtccgcttccgtttcattattcatttcctaatggactctgtttgcgtttcttttttagtttaatgaacccgataatcaatctctaagtatactgacgtttacgcccggacgcgaggacgatggcaaatatttaacatgtcgggcagaaaatcaattcatcgacggcagcgccatcgaggacaaatggcgactcattgtccattgtaagcaaaagatgcggcaaattctaagagcgggtagagtctaattgcaaaaaaatcgtttctcccatgtgtccacagaccagccgaccaccacgctcaagattggctcctcgctgaatcccgacgacatcaaggagggcgatgatgcgtacttcgagtgcattgtgctggcgaacccgaagccgtacaagatgtcctggttccataacgtaagcatgtccctgaataatgggtgtcaaatacttcagtcactgcaagaaagtgcaaacagaaaataagttttcaaattgaaatttcacatttaagatacattcaaggtactacattactagtattcaaagtgctaattatagtttgccataaaaaatggtgtgatataaacaatttgaatattcaaaactcagtttccataaattaacactttaccagagccatgctcaaaaaactagtcttatatcgttcatacgccctgtgggttagatgttttattactgtatatgacaacgctgaatggcttacgtgtctttcctctcttttttgttcctgtgcagggcaaggagctgcagcacaacatatccgctggtgtcatcctgtcggatcagtcgctggt

SEQ ID NO: 34658 - DNA, 1053 bp, DROSOPHILA
atgcatcacgaggagacataccaagtagtttgccgactgattgaaagggaggagctggaggatcgggagccctgctgtcggaaaaagcccactgcgccccatccattccccagtccgaatgtctggaggcagttgctccttcccctgctcatgctgtctgggatcagccaggtgtgcagtacatacgtagaacaggatgaactcatgcagaatctggaccgaccggttccactcaccactgtgcagggtgtccttggacgacaggcgatgctgccctgcgatatttcgccgcaggagcgggacgacgccgtctatatggtcctgtggttccgcgagggcgatggcgaacccatctacaatttcgatgtgcggggccggcagtttggacaggcgcgtttgtggtcatcgcccacggcattcggcacccgcgcccacttcagcagcaccacccatcccgcccagctgaagatcgacaacatccggatcgaggacgaaggtgtctatcggtgtcgcgtcgacttccgcaactcgcccacccggaatcttaagatcaacctcaccgtcatcgtcccgccggacagacccgtaatctatggccaaaacaggcacgagaaggccggaaatgtggagtccttcagtgagggcaacgacatcgtcctgtcctgcgaagtttcaggaggtcggccgcgacctaatgtcacctggtacttggacaacacggcgattgacgagtccttcgagcagcggcccgatggcaagaccattaaccacctgtcgtacccaaatgtgggcaggcagcacctcaattcccggctaatgtgcgtggccagcaacacgaacttgacgccacccaacaatcgggtggtcatcctggacgtgaatctgaaaccgattgccgtgcatatacttaccaaggatcgattcgtgtctgcagatcgcacctatgacgtggagtgcaagagttccggatcgaagccgccggcgctcatcacctggtggaaaggcagcaagcagctaaagaagctaaccaagaatgtaagccccgactcgtaa

SEQ ID NO: 34659 - protein, 350 aa, DROSOPHILA
MHHEETYQVVCRLIEREELEDREPCCRKKPTAPHPFPSPNVWRQLLLPLLMLSGISQVCSTYVEQDELMQNLDRPVPLTTVQGVLGRQAMLPCDISPQERDDAVYMVLWFREGDGEPIYNFDVRGRQFGQARLWSSPTAFGTRAHFSSTTHPAQLKIDNIRIEDEGVYRCRVDFRNSPTRNLKINLTVIVPPDRPVIYGQNRHEKAGNVESFSEGNDIVLSCEVSGGRPRPNVTWYLDNTAIDESFEQRPDGKTINHLSYPNVGRQHLNSRLMCVASNTNLTPPNNRVVILDVNLKPIAVHILTKDRFVSADRTYDVECKSSGSKPPALITWWKGSKQLKKLTKNVSPDS

SEQ ID NO: 34660 - DNA, 2300 bp, DROSOPHILA
tgtatattggtcacccttcagccaagaaactattaaccaaattttggaattcccaagtaaaaatgtaatatcaattaataataaaaaacactttctttagttatttaatttaattagaaggtattatttatagcgtatattaaacaatatcagtcttgttattttaagaaagttcttactattatatgtattctgcatataaatacatgagtttataattatattgaccttccgatctttaatgaaataaagctaattatttgtcgcttggccagcatttaactttgaacccatccagttgttgaaattccccttgttccgcagtttttatatagaatatatgtataagtgtttgcagattacagatgtagttagaacattttaagttttcccctggctcatcaaatctggttggcacatcaacagcgctagcaaattgattcgccaacaagttgtttacaacaattgccgcctccaccgattccgatcccatgaccatctggtataatcagaccgctcgaatgcgatttagcttctgtttagcctgttgctacagtgaatatcccctatctcgcccatctcccccgcagcttatcgctgtgcacccaaaaacaaattagccgataagcagctgacggggctccaatgccctccgatcaaaatatttgaccacaaacacggtagcacaagcttacaatggattttgcccatcgatgatcatctgtcttttgaatcttcatcagggatttcaacccatcaagccatctcaactaatctgatagttaattaatgattattttaggggcgggaaaccccatgattagaaaggtgcagttaattaggcttataataaattaattaaccaaagtaaacataagctagattctgatagagagaatcgagcacgatgtgttttctctcatattttttatatttaggtaataaaatgcatgtttcacatagctttaaacggtcattacgtattccagagcagtcctgtttacttcttcttcaagaaagagctgacgacagcgggagctgcgtaggtggtgatgggagcagcataggcagttccggcggcatatgtggtcacaggagcagtgtaagcaggagcacttaaggcgggaacggcggcagcggcgtaggtggagtatgctggtgcggagtaggtggccaccggagcggagtaggccaagggagcagctgcggaataggtggcggcataggtggccactggagatgcgatgaatcctgcctgggcggcggcaatgcaaagggtcaagcagatgaggaacttcatgttgagttggttgtttgggtttgttggcttgtcggtgactgatattttcgacaatttcctcagatgttttataggacaaatgtggccaattaaccaaacgggttttcgattattgaaaccctaatcagaaccacaattgcgaacgcctcgagatttctagtgcgtaatgttcactgaacgcggaagcagcagtttgcttttattcagtcaaaggcatgtcaaacggattacctttttaattatattttctttaaaagatatggttctttctgcccccacaatattcacttttaacagaggattggcttctctttgggacagcattaagagtttatttagaattaacattcttaccttataatcttttaatgtacaactgaaggaatattgtattttatgttgttatattatacacaatattccttattgtgactttaaacgaatgtaattaaaagtaaaatacatttcattatttaaataatgctgcaatgagaaaaactgagtggaagtcaatgagagcacagccacttggatcaagatactaaaagaccaaaaggtaatccatttgatacgccgtttgtaggcaaaccagcaaacgatcagttaacattagtcagcagaaaaagtgctctggtcacaattgtgttctaattaaaacttgaaattccgtttgtatggcagcaactataaaatggtaatgaaaattggcaaaagtatcagtcactgaccaaccaacaaacccaaacaaccaactcaacatgaagttcctcatctgtttgaccctgtgcattgccgccgcccaggcaggattcatcgcatctccagtggccacctatgccgccacctattccgcagctgctcccttggcctactccgctccggttaccacctactccgcaccatcatactccacctacgccgctgccgccgttcccgcctacaccgcctactccgccttaagtgctcctgcttacactgctcctgtgaccacatatgccgc

SEQ ID NO: 34661 - DNA, 300 bp, DROSOPHILA
atgaagttcctcatctgcttgaccctttgcattgccgccgcccaggcaggattcatcgcatctccagtggccacctatgccgccacctattccgcagctgctcccttggcctactccgctccggtggccacctactccgcaccagcatactccacctacgccgctgccgccgttcccgccttaagtgctcctgcttacactgctcctgtgaccacatatgccgccggaactgcctatgctgctcccatcaccacctacgcagctcccgctgtcgtcagctctttcttgaagaagaagtaa

SEQ ID NO: 34662 - protein, 99 aa, DROSOPHILA
MKFLICLTLCIAAAQAGFIASPVATYAATYSAAAPLAYSAPVATYSAPAYSTYAAAAVPALSAPAYTAPVTTYAAGTAYAAPITTYAAPAVVSSFLKKK

SEQ ID NO: 34663 - DNA, 2982 bp, DROSOPHILA
tgccgaaaatgtttactgccaaaacacgtgtggcgaagtgtgaccggagcttgaaaacaattcacctaaccatggttaaatatactaaatgaaatttagaaggggtattcgtattttattacactttggcgccaaatgattatttcaaaaataaaataacgattttcatttaacccaaaaaactgcaaactaaaagttacgaaatatttatgtatgcgctttcaagtaagttacaaatattatttggaacaattagaagaaaaatagattatttatcaattctgattatttagaagccaaaaaaagttttcgtttcattggaggattcgggatgaaaattttgtttgcctaaatctattagattatgcaaaaaaacaacaatcgttgaatttggatgcttttgtagcacattttattatatatttaaacaagcatctctttataaataaaactgttgggaacaatttgttagtgttgcgcagccgtaatatacatatacacctataatgattaacatacacagtttacaaagttaatatgtatatattttgtatgttaaataaaattacaactacatatagtctttcgctttcttcgtaaataaacataaataaaatatacgtatgtatttaacatatgaacagtgaaacacgctgtctttgccgttttcttcgatttatttttcgtcgtctgctcctttttttttttgacactgaaatccttaccagcccctaaaaatttcagttgggtttttttttaatgtgttcgatgcttatgcaattagcataaaaattgactgcctggtatgtgtagacatttatcaaacattttatacaagttgcgaaagtaattaacattcataagtaattcatgtgttgtcgctgatgttgttgttgttgctgttactgtatctcttgatgttgttgctcttgtttttgaggcttatttccggtttttaatgtacgttgtggatatttctgtattgataacttttccggccttagttcacgccattcaattcggcggaattggccaagggataatcaagttcacccaggcgagaggcgggtcggcgaggtcggttaaactaaaaggggaaacattcgatagtaaaaagggttaaaatcaatcctattcaaatcgtttcattcaaccaggaatccccaaactaattcatattttcatcaaggaaaaaactatggttttaaatcgcattaaaagccgccgaaaaagtatgcaaaatacatccaaatagatttaaactatttttaagttggttttaatctgggtaattttaatcaatcacgagtgtttaactgactactttcatctttaagtgctgccaaatgtagaacgggacataaaggtcacttacccatgatttcatgattttgtaaagcacctgacgggcgggatagtcattaaagtcgccctcgagcggcacctgttcatttggcgccatcatgggcagtaggccattcggacgcacatagtccggttcctgccccccggaggctgcctcgcccattcccccgcccactcccgttccagacccggatccggggctcagagagcgcttgccatgaccaccgtagcacacatgaccgtaggcctggcatccctctgaaaaagattgaaaatatgtcaggcagtgtcaacctaatttaaaagcacccaagagcttaaataaaataaattaaatacaagtggattcgaaattatattagtaacactatacattaataaataaattaacaagccaaacaatcacaataaacttttccgatctcatttacatttataatctacacttattaattgccaatttaaaatgcagatatgcaagacaagccataaatggaaaatttccttaactgaatcctaatcaatactggaaaaatcctcacatttcccacatcactttaactttccaccgatgcgtgtgcatttcccaacgcaccgccccaaaatgctttccccattactgggtagatagacttgctcctttggatttcgttactgccaaaatctttaatcgctccccaaagctcaagagagacatccggcgataaccatttgaccccacgacggcacggctcagtttcgtttgtttgcctgtctggctgtgtgtgaacaaacttttgactttctactgttttttttttttgaatttccgcccacacgggcgaacataaattttcgtgttgcacacttgggagttgtccttgacatacgcaggatttaaataaataaagggggggttggtttactggcatgactttacaaagctgatgggactttggttactccaatggcacccaatcgaattccggtggcttctatcaatgggaatattaattcgttcagcttcaaagatcccaaattactttctacttatttatataataaatttaaaggggttgagattttttaaatagggaaatatatgtgaggatgtagtctcaatattaaggttattaaatgggatgaatctagtaagtttacacggtatctgtgtaattctaccaatcttgccttattataatgaaatctcatgggagctctaaacaagtttgcttgccaacatcttaaatgccgtttcagaggcaatcaaatccaaaactttggataattgactactgaatgggagaacagatgtgttctgaatggcagcggatgcctagaagtctcttgacattcactattcactattaataattttaaggaaaacgatgtccctctcgtgtctgactcgtgtcttcgagatagttgcagcttgcaagggaaacggaaatggcccccactttcctcattttctcattttcacgtcgctgtagaggacagccttgttgttgccattgaacgtacccacagctgggaaaacaaagacgccggtttgtttgcgttgcattaaactgcaacaattgatgcagctcgatgggtggtgaatgtgtggatatcggcacccatttatgactttgt

SEQ ID NO: 34664 - DNA, 357 bp, DROSOPHILA
atggggaaagcattttggggcgagggatgccaggcctacggtcatgtgtgctacggtggtcatggcaagcgctctctgagccccggatccgggtctggaacgggagtgggcgggggaatgggcgaggcagcctccggggggcaggaaccggactatgtgcgtccgaatggcctactgcccatgatggcgccaaatgaacaggtgccgctcgagggcgactttaatgactatcccgcccgtcaggtgctttacaaaatcatgaaatcatggtttaaccgacctcgccgacccgcctctcgcctgggtgaacttgattatcccttggccaattccgccgaattgaatggcgtgaactaa

SEQ ID NO: 34665 - protein, 118 aa, DROSOPHILA
MGKAFWGEGCQAYGHVCYGGHGKRSLSPGSGSGTGVGGGMGEAASGGQEPDYVRPNGLLPMMAPNEQVPLEGDFNDYPARQVLYKIMKSWFNRPRRPASRLGELDYPLANSAELNGVN

SEQ ID NO: 34666 - DNA, 4868 bp, DROSOPHILA
ccgttctggcaacaatcttgcaataattgactcttgattgcctaattgtagtgttttagtgtttcagatagtcccgattgtgaattgattggatttaatgcttgtaaaggtgtgagacataaaagtgttcaaagtttatagctagctaatgacgaatatggaaattgaaaatggtatgtcttgcgcaatgcaagccataaaaaattgtgcgtttttgaaatatgttgccggccaagagataaataaaaatgaggccaatttgctggattcaaaatctggtgaccaccaagattttgcaattcaatcgcatgttgtcgtgtaaatcgttttttatgcacacgcgctctatttaatttgttttttcttttacatacggtgcgttataatttatgattccaaaatgtcaggcctcgttgttcccgcgagtagctcaaatttgtatttattgtcaaatggataagactccaccagaccgttgtaaggaatagtcgaaatatagtcagagttgtcgcagtttatcttttaaaatagttagattacttgcaagtacttctaaattcgaaatattctaaatagagagaaaaatgcagtataaaataaaacaaagtacaaaacttcagttatagcttgtcatattttttgtataccttgtatgtttgaacgaataacatttcaaccaaaaaagctaaagtgctagcactgagttcatctaattgaagttgcagtcattgcggtatattggttcagagagatttttagatatgacttgtcgcaattcaattgaagcttcggcgtttatgacggggccataaaaaatcgtggcctaaacaaacagaccaagcagaatgtggggaaaaatattattcatattaataatattcgcagccgagaggctcgaataagcccagagattgggaaattaacataattgcagtataataactgagtcggttcccttgggggctgcgagtgcgttacccgccccaagtgggcgtggtaaatgggcgtggatcagtcattcgtttgcggcatgtccacacctgagcaacgtttttggttggcggccttgctgttcctcttgagtcagcattccgaagttcgtggattcggaataaatctgatgaaggttcaaaccgaagataaaggacaggaggcttgcatcctggcattgctacgaaagtatttcgattctggtgatggactctcgggttcagtactatgcatcaatcgcaactatcagttgcccaatatcgaagagcagttactaagaggagtaaacaattacgagaattatccttggagcctgttgataaccaactccagggagggaccttccccagcgaagtttctaatgaacgagaagccacagtgctatttccttattgtggataacctggaggacgaggacctagatgaggtattcgagcattggaaaggtatggtcaactggaatcccctggctcaattcgtcgtctatttggccagtttggaggaaacggacgaggagatgaacgacctaatggtggaacttcttctaacatttataaacaagaagatcttcaacgtgaatgttatagggcagagcgaggaaaatcaattttactacggtaaaactgtttttccctaccatccggacaataattgtggtaatcgtgtgatatctgtggaattactggatgcctgtgattatccgagtgaagaaacggatagcgaggatgaaaatgatgaagatgagggagatggagcccaggaagaggatgatggtccccaggaggagggagatggagaacaggaggaggaagatggaccccaagagcaggaagatggagaccaggcgaagggagatgaaggtcaggagaatgacgacggtggcctagagaacaaggtggaaaatgagttccgaattggggcaagtggtgaaaatattgaggaaaattccgagtctgctactactagtcaaggagctactgagaataatataactgaaatagaaactgtaacggttgaaaatatggattatgatgaaaatcctgaaggaactaggttttatcattctataaaatcgcaagaaaacttgctaagacaatttgtaacgcctaaaaattattattctgataattcgcttgaaaatacaagtgtatttcctgaaacaaactatgataaccgaagtgattccaataacgagactaacgctgatgaattccctggaatagatgatgatgaacttgagaatgatttgagttccaattcctccgagccagaagctattatcgaggaattttttcgggccaagttcgaggataaattcccacgcgacctcagtgggtgtcctctcacagcatcgtttcgtccatgggaaccatatatttttcgcaacagcgaggaacaacccgtggatgactactactacggtttgcaaggggatgaagatgactacaacgacacatctccaaattatggcgaatcggacgacgaaagctatgctgatccaggggaggacggtgatggagccattccagacacagaaactcaatccggtggaaagctcaagttgagtggaatcgagtacgaaatggtgcagaccatcgccgagcgtctgcacgttagcatcgaaatgcagggcgaaaacagcaatttgtatcacctttttcagcaattgatcgatgggtaagcctgattaatatatataaaatataaggtcccgtactcggtcccgttttttatttaataaataattagtttatgtttttatatttaatcgcagtgaaatagagatgatagtcggaggaatagatgaagatccgagcatcagtcagttcgtttccagttccattccttatcaccaggacgaactcacatggtgtgtggccagggcaaagcgcagacatgggttcttcaatttcgtggccactttcaatgcggatgctggctttctgattggaatctttgtggttacatgctctctggttgtttggctggctcaacgcgtatcaggcttccaattgcggaatctcaatggatatttccccacctgcttgagggtgttgggaatcttgcttaaccaggccattccggcacaggattttccaattacattaaggcagttgtttgcgctttcttttctaatgggcttcttctttagcaacacatatcagagttttctgatcagcacactgacaactccacgtagttcctatcagatccacactctgcaagagatctatagcaataaaatgaccgtgatgggcacctccgagcatgtcagacatctgaacaaggatggtgaggtgagttactatcccattttcgatcatggaaattaatgggaattcatttttagatcttcaagtacatacgcgaaaagtttcagatgtgctacaatttagtggactgcctcaatgatgcagctcaaaacgaacatatcgccgttgctgtttccagacagcactctttttacaatccccgaatccaacgagatcgtctctactgcttcgaccgccgagaatccctgtatgtctatttggttaccatgctactgccgaagaagtaccatttgctgcaccagataaacccggtgattcagcatatcatcgaatcgggtcacatgcaaaagtgggcacgcgatctggacatgcgacgcatgatccacgaggagataacaagggtgcgagaagatcctttcaaggctctcacctttgatcagtttcgcggagccatcgcattttccgggggacttttgttggttgccagctgcgtctttgccttcgagttgtgctacgttaaatatgtctatcgcactgaaaaaagggaaaggaaaacgaaaaaaatcacgaaaaaagttcataatattaaaattcaacatgattagaaattgaagtggcgaaaatgactttggcatttctatgataattgacatgcaaaataaataaataatcaaaaatcgagaaacgggtatagctactttacaaagtaataacaaaatcatttctgctataataaaatcttaaaagcccatatagcatctatagctgcatattgtattctttacattgcacatacatatatatattgatcacgcatacgccctgtataaccaaacatgtgcattgaattaaaggcattaaatgcatattaaatattaaaaatatcgaaataatgcttgaagagattcataaatatgcttgcatattaatattttcttggcacaatattcaatttaaaaatacagctttgccatacaccgtgtaatgcagtctacttggccgctgcacagtaagaaaatgcgtatcattttgatttagataataaaaggcgaatttcccagatgtcccaaatgtcaaaattcatctaagcttgataataaatgttcactaatttatatgtaaaggtttttgattgtttgcatcggtacttgtggctggtagagggtagagatagctacttgagtttttcactgttgcacaaactcttaatatttttcctcgtgttccgtactcatatccgtagtagcatccgcagccgtagctgctggcgatgcggctggttgtcagaaaggcaaacaagcgcgcacgccgccaacgtcaagctgtcgtcggcattctcctccgttgtttggcgcatccttaaaaggtggtggtggcccaatgctcgacctggtatgttcttttttgtggtggcctggctggttggctggtgcctcctcttcggaagacgctgccacaatcaaatatatgtgattttctcagatttttataaataatattttcaggcagcacatttgttgcagtatcatcaaattggcagatttgtgttgttgctggccaacacaattcaatcagctgctgggcagctaatgtgggccgaaaaat

SEQ ID NO: 34667 - DNA, 2421 bp, DROSOPHILA
atgggcgtggatcagtcattcgtttgcggcatgtccacacctgagcaacgtttttggttggcggccttgctgttcctcttgagtcagcattccgaagttcgtggattcggaataaatctgatgaaggttcaaaccgaagataaaggacaggaggcttgcatcctggcattgctacgaaagtatttcgattctggtgatggactctcgggttcagtactatgcatcaatcgcaactatcagttgcccaatatcgaagagcagttactaagaggagtaaacaattacgagaattatccttggagcctgttgataaccaactccagggagggaccttccccagcgaagtttctaatgaacgagaagccacagtgctatttccttattgtggataacctggaggacgaggacctagatgaggtattcgagcattggaaaggtatggtcaactggaatcccctggctcaattcgtcgtctatttggccagtttggaggaaacggacgaggagatgaacgacctaatggtggaacttcttctaacatttataaacaagaagatcttcaacgtgaatgttatagggcagagcgaggaaaatcaattttactacggtaaaactgtttttccctaccatccggacaataattgtggtaatcgtgtgatatctgtggaattactggatgcctgtgattatccgagtgaagaaacggatagcgaggatgaaaatgatgaagatgagggagatggagcccaggaagaggatgatggtccccaggaggagggagatggagaacaggaggaggaagatggaccccaagagcaggaagatggagaccaggcgaagggagatgaaggtcaggagaatgacgacggtggcctagagaacaaggtggaaaatgagttccgaattggggcaagtgatgatgatgaacttgagaatgatttgagttccaattcctccgagccagaagctattatcgaggaattttttcgggccaagttcgaggataaattcccacgcgacctcagtgggtgtcctctcacagcatcgtttcgtccatgggaaccatatatttttcgcaacagcgaggaacaacccgtggatgactactactacggtttgcaaggggatgaagatgactacaacgacacatctccaaattatggcgaatcggacgacgaaagctatgctgatccaggggaggacggtgatggagccattccagacacagaaactcaatccggtggaaagctcaagttgagtggaatcgagtacgaaatggtgcagaccatcgccgagcgtctgcacgttagcatcgaaatgcagggcgaaaacagcaatttgtatcacctttttcagcaattgatcgatggtgaaatagagatgatagtcggaggaatagatgaagatccgagcatcagtcagttcgtttccagttccattccttatcaccaggacgaactcacatggtgtgtggccagggcaaagcgcagacatgggttcttcaatttcgtggccactttcaatgcggatgctggctttctgattggaatctttgtggttacatgctctctggttgtttggctggctcaacgcgtatcaggcttccaattgcggaatctcaatggatatttccccacctgcttgagggtgttgggaatcttgcttaaccaggccattccggcacaggattttccaattacattaaggcagttgtttgcgctttcttttctaatgggcttcttctttagcaacacatatcagagttttctgatcagcacactgacaactccacgtagttcctatcagatccacactctgcaagagatctatagcaataaaatgaccgtgatgggcacctccgagcatgtcagacatctgaacaaggatggtgagatcttcaagtacatacgcgaaaagtttcagatgtgctacaatttagtggactgcctcaatgatgcagctcaaaacgaacatatcgccgttgctgtttccagacagcactctttttacaatccccgaatccaacgagatcgtctctactgcttcgaccgccgagaatccctgtatgtctatttggttaccatgctactgccgaagaagtaccatttgctgcaccagataaacccggtgattcagcatatcatcgaatcgggtcacatgcaaaagtgggcacgcgatctggacatgcgacgcatgatccacgaggagataacaagggtgcgagaagatcctttcaaggctctcacctttgatcagtttcgcggagccatcgcattttccgggggacttttgttggttgccagctgcgtctttgccttcgagttgtgctacgttaaatatgtctatcgcactgaaaaaagggaaaggaaaacgaaaaaaatcacgaaaaaagttcataatattaaaattcaacatgattag

SEQ ID NO: 34668 - protein, 806 aa, DROSOPHILA
MGVDQSFVCGMSTPEQRFWLAALLFLLSQHSEVRGFGINLMKVQTEDKGQEACILALLRKYFDSGDGLSGSVLCINRNYQLPNIEEQLLRGVNNYENYPWSLLITNSREGPSPAKFLMNEKPQCYFLIVDNLEDEDLDEVFEHWKGMVNWNPLAQFVVYLASLEETDEEMNDLMVELLLTFINKKIFNVNVIGQSEENQFYYGKTVFPYHPDNNCGNRVISVELLDACDYPSEETDSEDENDEDEGDGAQEEDDGPQEEGDGEQEEEDGPQEQEDGDQAKGDEGQENDDGGLENKVENEFRIGASDDDELENDLSSNSSEPEAIIEEFFRAKFEDKFPRDLSGCPLTASFRPWEPYIFRNSEEQPVDDYYYGLQGDEDDYNDTSPNYGESDDESYADPGEDGDGAIPDTETQSGGKLKLSGIEYEMVQTIAERLHVSIEMQGENSNLYHLFQQLIDGEIEMIVGGIDEDPSISQFVSSSIPYHQDELTWCVARAKRRHGFFNFVATFNADAGFLIGIFVVTCSLVVWLAQRVSGFQLRNLNGYFPTCLRVLGILLNQAIPAQDFPITLRQLFALSFLMGFFFSNTYQSFLISTLTTPRSSYQIHTLQEIYSNKMTVMGTSEHVRHLNKDGEIFKYIREKFQMCYNLVDCLNDAAQNEHIAVAVSRQHSFYNPRIQRDRLYCFDRRESLYVYLVTMLLPKKYHLLHQINPVIQHIIESGHMQKWARDLDMRRMIHEEITRVREDPFKALTFDQFRGAIAFSGGLLLVASCVFAFELCYVKYVYRTEKRERKTKKITKKVHNIKIQHD

SEQ ID NO: 34669 - DNA, 2318 bp, DROSOPHILA
gcagcataggcagttccggcggcatatgtggtcacaggagcagtgtaagcaggagcacttaaggcgggaacggcggcagcggcgtaggtggagtatgctggtgcggagtaggtggccaccggagcggagtaggccaagggagcagctgcggaataggtggcggcataggtggccactggagatgcgatgaatcctgcctgggcggcggcaatgcaaagggtcaagcagatgaggaacttcatgttgagttggttgtttgggtttgttggcttgtcggtgactgatattttcgacaatttcctcagatgttttataggacaaatgtggccaattaaccaaacgggttttcgattattgaaaccctaatcagaaccacaattgcgaacgcctcgagatttctagtgcgtaatgttcactgaacgcggaagcagcagtttgcttttattcagtcaaaggcatgtcaaacggattacctttttaattatattttctttaaaagatatggttctttctgcccccacaatattcacttttaacagaggattggcttctctttgggacagcattaagagtttatttagaattaacattcttaccttataatcttttaatgtacaactgaaggaatattgtattttatgttgttatattatacacaatattccttattgtgactttaaacgaatgtaattaaaagtaaaatacatttcattatttaaataatgctgcaatgagaaaaactgagtggaagtcaatgagagcacagccacttggatcaagatactaaaagaccaaaaggtaatccatttgatacgccgtttgtaggcaaaccagcaaacgatcagttaacattagtcagcagaaaaagtgctctggtcacaattgtgttctaattaaaacttgaaattccgtttgtatggcagcaactataaaatggtaatgaaaattggcaaaagtatcagtcactgaccaaccaacaaacccaaacaaccaactcaacatgaagttcctcatctgtttgaccctgtgcattgccgccgcccaggcaggattcatcgcatctccagtggccacctatgccgccacctattccgcagctgctcccttggcctactccgctccggttaccacctactccgcaccatcatactccacctacgccgctgccgccgttcccgcctacaccgcctactccgccttaagtgctcctgcttacactgctcctgtgaccacatatgccgctggaactgcctatgctgctcccatcaccacctacgcagctcccgctgtcgtcagctctttcttgaagaagaagtaaacaggactcctgcaaaagacataatgactcacccaggcaattgatcaaacaaaataaaattattataaagcaatctattataactaatcatcttaatctacttcattgtgtaaaccacaaatccgactgagaatcccctctctttaaaaggcgcaaaattagttgatgggagaaatgaaaggcactagcttagcataacttcagggggaaaattttaactaaatgtataattcacttcattaaaagcaggaacatccaaagaaaatagataatttgttattattaaaggcacattataaccggacttaccttcaacattacaatagaaaaacgcttaaagtaccatattttatttcaactttattaaattgctactttacgatcagctctttgaaaactaatttctgatacacatattcgagctgcataattggacggcttgcgtttcaattggcctaaaaaacaaaccaacaaaaaggtcaagagcaaaatacagcattaggtgttgagattcccgattgccaaaggtttgagctgacttggaagagttatataaatggaaacatcggagagagtggacagttgagcttagcttagcttagtagaaggagcggataaaccaaagacccagcagggagctaaggatggcgcttacgctggccaaagatggagtcgatgctccgttgtgctggttgcagatgcgcggctgcggggcggatacgtattggcagatggtgcccaccaagttcacctgggcgcgatcattcaccttcttgtcgaattgctgaaagttaaaaaatagcatagattttgttattaaggcttattgaattatttaacttcaaagctagctgtaatagtttatttgttcttttacgatttactgacctcattgaacagaatggtgggcacgctggtgagtggctccttgagccgcatggtgctttcgccggccttccggagcagaacgcttccctcggtggagttggcacaggtcttg

SEQ ID NO: 34670 - DNA, 318 bp, DROSOPHILA
atgaagttcctcatctgtttgaccctgtgcattgccgccgcccaggcaggattcatcgcatctccagtggccacctatgccgccacctattccgcagctgctcccttggcctactccgctccggttaccacctactccgcaccatcatactccacctacgccgctgccgccgttcccgcctacaccgcctactccgccttaagtgctcctgcttacactgctcctgtgaccacatatgccgctggaactgcctatgctgctcccatcaccacctacgcagctcccgctgtcgtcagctctttcttgaagaagaagtaa

SEQ ID NO: 34671 - protein, 105 aa, DROSOPHILA
MKFLICLTLCIAAAQAGFIASPVATYAATYSAAAPLAYSAPVTTYSAPSYSTYAAAAVPAYTAYSALSAPAYTAPVTTYAAGTAYAAPITTYAAPAVVSSFLKKK

SEQ ID NO: 34672 - DNA, 2210 bp, DROSOPHILA
atcagttaaatatatatgagagttagatacacctggcctaatcagcttcttgtttagattgaaatcgcgggtctcaaatttacaatctaaagaaacccaaacaccccgccaaaacgacggattttcttatcgattttcaattattttggtaccccttactttaaaaagtcaagcatataaaatttccatttatttcaagacatttgccttttaagagaccttttattatatcaccaatggaaatttataaaaaaaaaaaattatactaaaacattaataacaataggctacccttaaattcgggcacattaaaaattgagaagagggtattctgcagctcgatctttttaataaggcatataatttttattattatttgcaaatacgtaattcgttgaagataattgttaaatatagaaaatccgattgcaaatgaaaacaataaaatgcctgaatcacgccagcaacatgttgctagtgtcgtcggcaacatgcagcacttatgcagcagcaacatgtgcgcacattaatccttatgcggcccagttagcactttagcccgactttgtagcctggtcatcaaaatcagggcttgtgtgatatcgatttatagaggccacacatgattggtctgccgatggtgtataatacacgtatctcccgagccggctgcccctgacgacgtgaccataacattggcattcttggcccgaaggcatattaccatatcgcacttatgacagttcaagccataattcagtctagagtggagctcattttcaaaggatttccaaaatgaaacaccaacaagttacggtggactattggaccatgtttaagacatcgggattgtgtcttttactggccatttgcggatttgtacttcttaagtaaggacatttactaaactattcaatactcaatacttaatgcgcaatgtacaaatttgtaatgtgatcataatacctggcaccttatagtaccaattatttcttatagaatggtgcagaccattttctggctacctggacatctgaagaagaaccagcagcgcctggaggatctggccaaaatctatgccaaggatattagcgaggaagagagggacgagatcgagaaactgttcaacagtaaggagccgctgactgaagaacgaatcaaccagttgctcgacaagccagagacttcagagccaaaaaaggagcaatagttaaataaattgattcgcatgttttatatatatatacatatatttatgtatattgagtgtataatcgataatttgttgatacaggttctagttcttacttgcatatcgtatatgtaactcgcaacacaatcaatcgtttaaccaatccatcaataatgcctgtaacgctcaattattcagggagggggacaacaaatagaataataactattcacgaaagtcgctcgtctgtggagcggttacaagttatatccatattagctactgatataggcggactcagagccctttcctgcttcaaatcggtcgtttctggtggcccatcgattttgccagcgacctcgacatctcaacctcggaatgtatctaactaacaaactcatatcaaatataagcaagtgcgccaattcgtatgcatatcgacatatggacatatggacatatacatatagatagtctatattaattttaaaagctcaaaggggcgcaagtctctctcatcagttgtgtctttagtttttttgatttggtttggtgatacctgcatctgccgccgactccacctgaccacaaaatatcacttgagtatcttttgctatattacacgtaggctaatccgtaaacgaaggtgaaaggtgccaatcgatcggatgaacttaattaggtcgagttggatcgaagatccgagagagcgcctccccagagtagcgccgatcagtgggtatatgcttgccatttagctgatgcgaattatgcgggttaacatatatatatttataggggtttctattaatctgagatggccgcccaatgtgtctttattggctaggggcgtgtattggaagcctgtaaaatgggttggccagattaacccgcgccgccggcagaaactccggatgttcggtcagggtgtccgacaatgcgctcagcaaaactcctggaaaaattaaaaaatacaaatgaattttacgccttttcataggtaatactggttacttac

SEQ ID NO: 34673 - DNA, 210 bp, DROSOPHILA
atggtgcagaccattttctggctacctggacatctgaagaagaaccagcagcgcctggaggatctggccaaaatctatgccaaggatattagcgaggaagagagggacgagatcgagaaactgttcaacagtaaggagccgctgactgaagaacgaatcaaccagttgctcgacaagccagagacttcagagccaaaaaaggagcaatag

SEQ ID NO: 34674 - protein, 69 aa, DROSOPHILA
MVQTIFWLPGHLKKNQQRLEDLAKIYAKDISEEERDEIEKLFNSKEPLTEERINQLLDKPETSEPKKEQ

SEQ ID NO: 34675 - DNA, 2608 bp, DROSOPHILA
tctcaagtttggcaccttgaattagccgcgatgccaatcgataccttaactaggcaataattctccttggctggctggcagattcccttgagcaatgcaacattccagcagcaattcgttcaccgtgtagaacataacttagctttagcccgttccagttgttaaccaagatgcttttatgctagcaaaatatttgttgttaagcgttcaatgcccgctatcccgaaatatatactttttaataaaatacagaaatgtattcatttaccgtgaatattaatgcttaaatagtgtcgattttttcgcaatttgcttgtttaaagtaaacataatatctttccactgcgtataacaatatgtatatttgtactggattttgaacaaactttaagctaagagcaattaaacagaaggtagaccattaaatatattctgtgctaattggtgtgggcatagaaggtaaaggttgactctatcgtactccatcgtcattgtcgtgctgttactaattataaatattttgttaacaatggctaagcatttgtttgttgttgctttatgtgtaaaatcggccattcaataaataaataaaaaaaaggacaaacggtttctacgaaatgtaaatagtctttgtttttctataaacaaataaattaaaattaataatgttatcccaagacgtaagaaggattaaaataaggtgctcagaatttaaaacagctcgattttttttttaaatcagttaaaagaaaatgaagggtaataattatttcataggtgtaccgtccttaaagtgaattcaatcgtatatttcgtgatgttggcaattaaatataactgtgcaatagcttaataaaacaaagggatcgcgttttgatatcaatgaaccatttctgggaataaccgaaacaagttcgtttccggtacaagcgatcatctatctaaatccttatataccaatgacaacgaatgatcagccatcagtcgtcaaagtatcgtaatgggctcctctttatgtcccgtctcttatctggcggtcttggcaattatcgtcctaaccagtaatattacagtccaggctaaaaggacattcaggatccagaaattagaaaaggtgactgaggatacctcatatctgcgcagtcgtctgcgtatcgctgagtccgaggaaaatgagttgaaagtcagcggatatctcgatctgaatcaacgactcgacaatgattggacggtacgtagtttataatatatagtggaggaattaattatttattattccttcaacaggttgtgcttaaggtttcaagatccccggatagcgatggagactacgagaaggttttgacattcgaaatgcagctttgcgactttatgaagagctactacaaggatatcttttacgaacggatcaaggaatactcgaatgccccgcatcccagcagctgtcctctgcccaaggaacgctatgtactagaggactatcccttcaatgtcaagttgctcaaaaagctgatgagtccgggcttctatcgcataaagtataccctcaagaatgaagagactaaaatattatcgtacgttctggatttggagttggaggagaactaatcaatctcgaaatttgctagctcaaatgctccgtttattgcctgaaaaataaatctattcgtaggattgcatctgcttcaagacctcgtcgtagacgtattttctggcctcagtgccccaaatgaaatccagatgggcccacttctcgaacggcaccaggtagtccagcgccatgttgggcagttcgtctctcaacttgcggacatcgctcacatcgcacatccagtcattggctccgtagtacaatagaaccggggccttggcattctttagcttgtaatccggagggaagtagctgccgtactcatagggattacggagagcggtgtagtcgaatttacggaactttccagagttatattcctgacaaaagtgcaagttctggttcaccgatgcgccagccggagacgtggccttgatgtgctcaaggagttcctgaccaaatggagagcagcattataagttacatggaaatataatttataggaccaagttcatttccagatacttacgtagtccagctgttcggtatcatagcctccaatcaggaagatctcgttggcgcacatgtcggcataaggagaagtggcctggcacatctctatgcccaaatcctgcttgaacttattgctgggcatgaactccatggatccgcagacctccacgatggcattgggctggcccaaaatgggtgcaaaggcgcgggtcaaggggctcttcatgttgcccatataggcggctggtcccagaagatgggcggacttgatcttgtcattgtactcgggtctctccgacaccatcaccagatagacagtggtaccctgggagtggcccacatattgcacctgctgctgtccagtctttgccaagacataatcaatcatcgccggaacgtcgtacatgccgatctcgttccagctgaagttccagaagatctgccagtaagtgggccagtacttgtgcgccttggagtaggtgttgcctcgggcattgcccatcc

SEQ ID NO: 34676 - DNA, 552 bp, DROSOPHILA
atgggctcctctttatgtcccgtctcttatctggcggtcttggcaattatcgtcctaaccagtaatattacagtccaggctaaaaggacattcaggatccagaaattagaaaaggtgactgaggatacctcatatctgcgcagtcgtctgcgtatcgctgagtccgaggaaaatgagttgaaagtcagcggatatctcgatctgaatcaacgactcgacaatgattggacggttgtgcttaaggtttcaagatccccggatagcgatggagactacgagaaggttttgacattcgaaatgcagctttgcgactttatgaagagctactacaaggatatcttttacgaacggatcaaggaatactcgaatgccccgcatcccagcagctgtcctctgcccaaggaacgctatgtactagaggactatcccttcaatgtcaagttgctcaaaaagctgatgagtccgggcttctatcgcataaagtataccctcaagaatgaagagactaaaatattatcgtacgttctggatttggagttggaggagaactaa

SEQ ID NO: 34677 - protein, 183 aa, DROSOPHILA
MGSSLCPVSYLAVLAIIVLTSNITVQAKRTFRIQKLEKVTEDTSYLRSRLRIAESEENELKVSGYLDLNQRLDNDWTVVLKVSRSPDSDGDYEKVLTFEMQLCDFMKSYYKDIFYERIKEYSNAPHPSSCPLPKERYVLEDYPFNVKLLKKLMSPGFYRIKYTLKNEETKILSYVLDLELEEN

SEQ ID NO: 34678 - DNA, 2710 bp, DROSOPHILA
caaagtatcgagggaatattctaactattacaatatactacttaataattatattcagttttgattataatattgtaagcatttaatcaattaatctcaatctattagaggcgatactttgttgacagtgtgcaaaattgtaaaaattgccacaaagtggaacaattaaagccggatttgagatgattgagtggctagatcgctagaaaaacgatacgctttgaattaagtgacgatggatcaagtgagagttaattaattagtttccaaccataatgagctatgagcaaagtcacggagaaatctgggccccagacaattatcggcattgctgttccgactaactgtgacccatttcgattattttggaactgggagtacgagtatctatatccatatatagctttctatacgtgtggcactgcggaagagcagttaaaagaaccgtaaatcacgaacgccctctgttgcatacaaaatgagatagaaatttcacttttcatttcagcagtaaggcacacgcaatcgaaaaaaatccattggcgctgtcaacaggaaatttcgattattgatttgttacttaaacatctgataaacatttagataagctccgaccaaataatttacacttttaatattttcattgaacaaggttttagatgtttaaatgtgcttttattataggtattttttttttttcattagagcttttcgtttcccaaattctttataatattttaacatgttttgtcttcattcagcagactaatttgtataataatttcatagtacaaattctctgctaaatgtctttctctttgccatccttgacttgtaataaataaataagttaaataaataatttaaactatacttaaattattatttggttgaacgctcgctgaggctgaggtaaatctgaatcctgactcgctaccagctcgccgttatccctggtcttgcattgtcatcctggtcagccaaaaccgaaacaaatcatctaccactccttctccaaccagacgggctgctgggtgtgcgagtgggagtagaccaccggcacgggtgcctggacgggaacgggtgctgcggcataggcggcggctgcctggacgggaagagcacgggacagcatttgtccgatggccagcaccagcaggatgacacccacgcccagtcccttgatggagacgacggtcaaggccgccagcagggtggtgatcacgcccacgacaaaggcgccgggcaccaaggcgaagctgatgcgccgcaggaaatgatggccaaaagtacgactttctggaataatgaaaaacacacaaatttatttaccacaatatcaaaaaaatatagaaaatttaagttcttcaaatgtaagcagaacgtttggctaatatgtgtgaggagataagctttttaaaatcgaaaatgataaattgatatagaagtttacacagtcaagatgcactatttcacttttattatcctaaatattacaactaagatcagaatgtattagatcactttctctggtaacttattatcacggaaaatgtcctcagcaacactgtaaccaatttagaaagatcactaacccgccacatccgaatccgaatccgagctgttggccgcctgctgctgacccagcaccaaatcacatgccaaaaagaggcagacgagggcgaacacaatcttctggttggcggccatttcgatttgatttgactgttggtgatttgattccttgaggatgagtatctggtaatccgttcgacactgcactgctcgactccgacgctggctaacaattgaatggagggttcacattgacattggcttttatcgagggtctgggccggcttactgggcggctacttgaaattcgggagccggacatcgcgtagccgcagcgtagcacgaacgtgcgccaaaacaagcaaatcgtgtcgaagccatacgactcgtactgaaattacactgtaccgtcccattgatgccggcacactggaaaaaaagtttattttaaccaacaaagattccgatgaaagtatgatgctgcatcaataaaatcatttttacacagttctatgatttgaatatgcttatgctattatgctttttaacttgtcacaatttggctgattaatacatggcaagtggataacttcctatttcttgcagtctatatttttgaatatgcatgcagtcagtcattattttcactacctctaagggccctttttcgggcccaacgcatttgggggtgtgctgcataggaacttggacatggaatggaacttggacatgggcattctttcacgacgcgtgtctatattgagggcagcacccaggtcttcgcattcgattcgctttcatttttcgtcgcgggccgataatgatttatcagctaattaacaatgtcgtactgcattttaatttataatctatacatgcggcttaaactgcaactatgtttagccattcgactgagtaacggatgttcattgatcaatgcttggcattccacgccctcggcatcgcaattcactttcattaacggatattgtatatatgaatatgcaaatcacatgtgagtaatgcgtacattattttaacatattttacagttttacttgcagttttccctttagatgatctgggtgcctctaagagtttggagtatttaaaatattcaccgtaaattttgtga

SEQ ID NO: 34679 - DNA, 414 bp, DROSOPHILA
atggccgccaaccagaagattgtgttcgccctcgtctgcctctttttggcatgtgatttggtgctgggtcagcagcaggcggccaacagctcggattcggattcggatgtggcggaaagtcgtacttttggccatcatttcctgcggcgcatcagcttcgccttggtgcccggcgcctttgtcgtgggcgtgatcaccaccctgctggcggccttgaccgtcgtctccatcaagggactgggcgtgggtgtcatcctgctggtgctggccatcggacaaatgctgtcccgtgctcttcccgtccaggcagccgccgcctatgccgcagcacccgttcccgtccaggcacccgtgccggtggtctactcccactcgcacacccagcagcccgtctggttggagaaggagtggtag

SEQ ID NO: 34680 - protein, 137 aa, DROSOPHILA
MAANQKIVFALVCLFLACDLVLGQQQAANSSDSDSDVAESRTFGHHFLRRISFALVPGAFVVGVITTLLAALTVVSIKGLGVGVILLVLAIGQMLSRALPVQAAAAYAAAPVPVQAPVPVVYSHSHTQQPVWLEKEW

SEQ ID NO: 34681 - DNA, 3261 bp, DROSOPHILA
cgtactgcctgtgcatctgagtggtggctgtaaactgcaaactgaaaataactacctaagggggattccgatcgtgggacctggtatgatggtagcaaggacatcttatatatcaatggcttcaattccaaatactacaaaacaaatgaaaactattcgagattagtcaatgcaactcgttcgcagcaacagagtgttaaaaaaaacctgcaccctctacacaatcccaatctcgcacttgtcgttcggggataatgaacacatctgccaccctctccctctcactatctctatctctatttttatatatattaattaactgtatatttacgcaagaggttctagaattaagcgtacctgctaagatctattttaagcatcgacttttatgtgtgtgtacattgtgttagttatgtaggtctaaattgtatatttcgatccaactattgttgaaaattataacaaaaattataaaaaaccaaacaaaaaatattgtaagcaacttattatcgaaaagggatgaaatacgcaatacttctcaagatccaaatgagtgtttaattgcttaattgattaaatattttcatagtgagaactaattgtaatggtgagtaagtacaacatatcaataaacattaatacatttgtttaactcgtgcctactctcggtttctaaatgtttacgacttctactgtgtataattgctgtaattatattttgaagtacaataaatttccccatttcaaatttattaggtgtcattaaccttttaacaccttgaaagggctttaattctgtagttagcttaaagttggtcgttaaactaaaaagtcaaatgcattttgcgattgcattgcaatgcatttgcggataataaataaatatggcaaaaagtttatattttttttttattttttttttccacacacatggaaataatgaagcaaagaaagaggcatttaatggaaaatgatcgaaggatggacactaatgcgggagctaactgtagctgatgtgctgctcctcgtgggtgttgaactgggtacgggcggcatacagtaaagctgccataaaggcgccattgttcatcaccagcgacaggatggtggccatcttaagggcgggcaggatgaagggcaggagactgccaagcaggacgacggggaagatcagcatgggcaccgccacctgcatcatggtcaccttgtacgagttctttttcttgcgcttgcccagaatgcctccgccgcccccctcgccaccggccacgcctcctccgccccccaatagcccctgctgcttggaatctccttccgcttccggttcgtaggtctccacacttccactattggcaccacccccaccgatggacggaatattaataaggggcaggtccatttcttcggtctcacgtcttcgggaacgacccatccgggatttgggtgctgtaaaatataagtagtggtaaatttcacaaggaaacaacaaatttgtttgtttttctattaagaataatgaaaatagcgagatatacagtcaaaatctggttattattttcaatgttattgccgtttaaatttagttttgcttcctggacaacattgccaataagtatttttcgaatgttgtataccgttctcagggtcataaaaagtagcaaattgtcttctaactaataagatgtttgtctgttacaacgtctagcaatacaggctgtgccaaatatttcaagataacgaaagccacgcttaaaatcaaagtagccaaactcgctatatgaaatactacattaatgtgagaaagtatcttaatattcttaattcttattcccatatggaaagatacaaataaaacgactactatacctagtaactagctaaaagcttaagtattaacatatagtatggataaattcgaagattagctcacccttcttgatcgagaacttcagtttgttgtccttgctgggcacaatcttcaccagcattccgggcaggatatgcatcttgagatcacgatgcttaaagaatcgctgaaaattaacaaccagccgctggttgagctccttttcggacattttgtggtacttcttgcccaccaggctgcccatctgtgtctcgtccccgaagaactgatccacaaagtcgcgggtgagatttccactgtttggcatctggcggcgctcctccattttctgcagaacgtacaatttcgtgcagtgtagcatggtgaactcccgcagacactcgtagattctcattggaatggacgccttaaagtatgatacactattcgccgactgactacgaccagtgcttgggttcaagtcttcgctaggatgcactgcatcttggccaagtgatgggtggaggttctgcaggagacataggcaaagtccgagcaggatgtgccaggataaggatctcgtcgagttagctcgcatttttgtatgtttatttcgcttctgcctacacaacacaactgaacggcatcagtgacagtggaaaactgaatgcacatcttggccaagtgcagctgccatcctagcccgattgtctggccactgaatgccaattcttggccactactttcctccggccgggccaactggtttgcgatcgccaacgctcgactgcctcttagatttagtttagcgggtcaggcggcactcgctcttacttggcacatgctgcatgctgcgagctacttgccccacttgcctaacttatggccgatacattcgattgtttacatccaaaattctgtgtccagttgtcattcctctaatctttgtccgaatcagttcttttcgtgctgagaatctggcgcacctggccaatgtatctgtggcattaactgtgccaccagtgcgtctgcaagtaaaagtaactcaacggtgcaccaggtgttcgtttaaagtagaacattatgaaagcaaaaactgaatgcaaagtatcgagggaatattctaactattacaatatactacttaataattatattcagttttgattataatattgtaagcatttaatcaattaatctcaatctattagaggcgatactttgttgacagtgtgcaaaattgtaaaaattgccacaaagtggaacaattaaagccggatttgagatgattgagtggctagatcgctagaaaaacgatacgctttgaattaagtgacgatggatcaagtgagagttaattaattagtttccaaccataatgagctatgagcaaagtcacggagaaatctgggccc

SEQ ID NO: 34682 - DNA, 777 bp, DROSOPHILA
atgagaatctacgagtgtctgcgggagttcaccatgctacactgcacgaaattgtacgttctgcagaaaatggaggagcgccgccagatgccaaacagtggaaatctcacccgcgactttgtggatcagttcttcggggacgagacacagatgggcagcctggtgggcaagaagtaccacaaaatgtccgaaaaggagctcaaccagcggctggttgttaattttcagcgattctttaagcatcgtgatctcaagatgcatatcctgcccggaatgctggtgaagattgtgcccagcaaggacaacaaactgaagttctcgatcaagaaggcacccaaatcccggatgggtcgttcccgaagacgtgagaccgaagaaatggacctgccccttattaatattccgtccatcggtgggggtggtgccaatagtggaagtgtggagacctacgaaccggaagcggaaggagattccaagcagcaggggctattggggggcggaggaggcgtggccggtggcgaggggggcggcggaggcattctgggcaagcgcaagaaaaagaactcgtacaaggtgaccatgatgcaggtggcggtgcccatgctgatcttccccgtcgtcctgcttggcagtctcctgcccttcatcctgcccgcccttaagatggccaccatcctgtcgctggtgatgaacaatggcgcctttatggcagctttactgtatgccgcccgtacccagttcaacacccacgaggagcagcacatcagctacagttag

SEQ ID NO: 34683 - protein, 258 aa, DROSOPHILA
MRIYECLREFTMLHCTKLYVLQKMEERRQMPNSGNLTRDFVDQFFGDETQMGSLVGKKYHKMSEKELNQRLVVNFQRFFKHRDLKMHILPGMLVKIVPSKDNKLKFSIKKAPKSRMGRSRRRETEEMDLPLINIPSIGGGGANSGSVETYEPEAEGDSKQQGLLGGGGGVAGGEGGGGGILGKRKKKNSYKVTMMQVAVPMLIFPVVLLGSLLPFILPALKMATILSLVMNNGAFMAALLYAARTQFNTHEEQHISYS

SEQ ID NO: 34684 - DNA, 3140 bp, DROSOPHILA
atgaggcactttccttatcgcgccgtcaagatgtttaacccattagtcatttggggaacttatcagacccacaaccggagcttatgggaaaccgcgatagctggccccgatatgtagacccacccacacccattgcctggaaaaacattgctaaccgatttgttttcttactttcgcagggcatatcggacattctgctccagggagtccagttcccgttctactgcgggaaagccatgttagagggcaagcaagctttttaagggggatatttccccaatatcaattaactaagtgccttactgataactcttgttttcaatcattttttacaattttacaaataaagatttattaacttatatttataattactggcattttttcaattgattgattctgattgattcaatctgatattacatgttgtttgttcgttacagttgataaattcgcctgatggagtgatttttactatctttacctacagaacatacattaaactatcatgcgataaactttttatcacatggtattgtacatgcgtaatatttacccttcagagaattcgctttgtatcattcacaataagtaaatcacaattgttacccacacacaagaagtggtttccattgattacagctcttccgtgatatcattctctgagaaaattcacaatttatactttgctggcaaaccaaggtcaggaaaacactttttgaaatgcagttagtgaaatattaaagcgaacctaataccttaatgagcccatttattgggcacttaaatttctaaacggatgaaatgtaatgaagccatttcatagaacaaaaacaccatcagatagatttaaagaataaatgcacgccacactacaacaactaataaataactttattaatgaaaatcagttaacaaaattaaaaaatgaaagcactagcatatattctaattgccgtattgagcacggtttggaaccgattccaaagtccaggtgaatttatttggtggtagaagccactgtcgcattctgctgaccactgcctgaggcttcagctgctccagacctggagtttcccgcgagatccggaagtccggcgacctcagagagcgcctcctgttcgcaaagagcacgcaactcgagctccccaatgagctgcattacccggatcttaccctcggtggccagtttgggcggcaagttcttgacggtggcacatatgctgtcgaagaacagctccaatgagtcgcgcggtggcgttataggtgacaatggttgcagttgataagattgcagcgggcgggcagcataggagggcgtcgtgtgtataggcgttatggtggccttggaattgatctcctgagcttggcacatcccactgagtggagtactgtgcactggaacttttttaatggtgatcctgcatggcggagctactgttgctgttgctgaggatgtgggataggcggagacagtggtcggaagactttgaggcccctcgttgatggtcacgtgtagtggcagataatccagcatgccagaattctgtgagtcggtctccgaagtgcggcgctgctgcttaatgacgggctccgtttcgagatcattttgtgcttccagttcttgagtccgcttctcatcgtcctcgcagtcgccctctgtttcgtcaagttctccctcctcctcatcttctgtctcgtcgtcttggggatctgttccgtattgtagtagaccctcctcgtcctcggtatcctcccacttcatcgcaccggagctggatccattgaagctcgaattgtttgccttggctggcaatgattttctttgtgcattttccgagtgcttaatgctaccctcgtgctttcccagatcagatctcttgcagctgagcctgcactcgcacaccgcgcagaacacgaagtgcggatccgtctcatccgggagcaaccacggatatatcgcctggtactccggctttgtcttgggtcgaggatatttcagcagggcgcacggccggcgtggcctgtattcggagcgtagggcatctctgggcggcgaatatagtcagtgaacataagaccctggtctcttactttggtatactcacagtttttcctgagttaactggaggtttgacatttgggtagtcttttccaaaatataaacaaaatccagtgaggtatgaccgtgcgcacatgcatagaaataccgcataacccgttttgcacatgctgtaagagttgtcacccacaccggttgtttgtttctacacactttattttaaatattcaacgatatatgaatcatatgctaatgcatgtaatttctttatatgctttctaagcataatgttcatgtagttattaaataaataattgcagttatactatgaacagtacgttttaagaccgttctcaataaagtgaccagtccagtccctcagttgcattttatgtattttttgaacttccttagtatatggtccttagcccgccggtttaatgcaacagtacggtcacattggccatcgccttgacagcgattctgagttttcgcttgcgattatttttatttttttagtttataaccgtatactgtgatctcccaaaagctaacaaatattagagcaaagtgcctggataaccagtatctcgtgatggatcgggattcgagcatgcaggcgaaaaacctagatgctcaatgcaacccagacctcaaaatggcgtctgcaaattcagaaactttagcgtcggcaacgcacgagctgaaaattatggacgtagagggtggtgctctggtggatccggatcacatcgaggaagtggagacctccatggtcatcgtggtggatgatgacgatggggatgtggccatggtggtggaggaggacaagcacccgatgcgggatgacccgtgtattgaggacatcatggatgacgaacatgctccattggtggccgagctacagtccgctctaaataacccagacgacaaacaggccagcgaggatcccctcctggaagaccaggaacgtgaacccgatgccatgtccactaaaactgaaccctccagcgatgcggagagctcccattcgtaccacgatcccatgggcctgctggagaggattgaaatccatgat

SEQ ID NO: 34685 - DNA, 1080 bp, DROSOPHILA
atgtcaaacctccagttaactcaggaaaaactagatgccctacgctccgaatacaggccacgccggccgtgcgccctgctgaaatatcctcgacccaagacaaagccggagtaccaggcgatatatccgtggttgctcccggatgagacggatccgcacttcgtgttctgcgcggtgtgcgagtgcaggctcagctgcaagagatctgatctgggaaagcacgagggtagcattaagcactcggaaaatgcacaaagaaaatcattgccagccaaggcaaacaattcgagcttcaatggatccagctccggtgcgatgaagtgggaggataccgaggacgaggagggtctactacaatacggaacagatccccaagacgacgagacagaagatgaggaggagggagaacttgacgaaacagagggcgactgcgaggacgatgagaagcggactcaagaactggaagcacaaaatgatctcgaaacggagcccgtcattaagcagcagcgccgcacttcggagaccgactcacagaattctggcatgctggattatctgccactacacgtgaccatcaacgaggggcctcaaagtcttccgaccactgtctccgcctatcccacatcctcagcaacagcaacagtagctccgccatgcaggatcaccattaaaaaagttccagtgcacagtactccactcagtgggatgtgccaagctcaggagatcaattccaaggccaccataacgcctatacacacgacgccctcctatgctgcccgcccgctgcaatcttatcaactgcaaccattgtcacctataacgccaccgcgcgactcattggagctgttcttcgacagcatatgtgccaccgtcaagaacttgccgcccaaactggccaccgagggtaagatccgggtaatgcagctcattggggagctcgagttgcgtgctctttgcgaacaggaggcgctctctgaggtcgccggacttccggatctcgcgggaaactccaggtctggagcagctgaagcctcaggcagtggtcagcagaatgcgacagtggcttctaccaccaaataa

SEQ ID NO: 34686 - protein, 359 aa, DROSOPHILA
MSNLQLTQEKLDALRSEYRPRRPCALLKYPRPKTKPEYQAIYPWLLPDETDPHFVFCAVCECRLSCKRSDLGKHEGSIKHSENAQRKSLPAKANNSSFNGSSSGAMKWEDTEDEEGLLQYGTDPQDDETEDEEEGELDETEGDCEDDEKRTQELEAQNDLETEPVIKQQRRTSETDSQNSGMLDYLPLHVTINEGPQSLPTTVSAYPTSSATATVAPPCRITIKKVPVHSTPLSGMCQAQEINSKATITPIHTTPSYAARPLQSYQLQPLSPITPPRDSLELFFDSICATVKNLPPKLATEGKIRVMQLIGELELRALCEQEALSEVAGLPDLAGNSRSGAAEASGSGQQNATVASTTK

SEQ ID NO: 34687 - DNA, 3827 bp, DROSOPHILA
gatcttcgcgagattgtctactactacggcatgcagcagtccaccagccaatcgagctgggatcagttgttccaactctttgtggccgaaaccgatgccagcgagaaactgaagctgatgtacggattgtctggcgtacggaacagccagtatctgttcgacttcctggcacaggcctccagtgatgagagcatcgttcgctcccaggactatttcacctgtgtgcagtacatagccgccaatcctgtgggtgaaccggtggtctgggaattctaccgcgaacagtggccccaactcaccacccgttttggcctgaacaaccgcaactttggacgacttatcgcccagattacggccaactttgccagctccgtgaaactggaggaggttcagcacttcttctccaagtaccccgaatcgggagctggagctaactcccggttggaggccgtggaaaccatcaagtacaacatcgaatggctatccagaaacgaagctgacatcaccgactggctaagtggaacggcctcgccgctgaccaagaaaaaccaattgtaaaattgtatattgtatataaactggccatttagccaataattagagttgcataagcgaaaattccgttcgagttcaataaaatgaaatttcaaaatcaaaccataaatacaacccccatattttcattcattttatccgaggcaagtggggatttctatagcttctaggaaataattggagatagggtctttgagtatatggtcaatgcggaatcatgaccatgcgtaattatcctgagtaattagagtgtccagtcataatagtcgatatatggccttgttcgaatcgtaaaagtaatggtctagcataaaacgattttatctggacacgaagctatatagtatatagtctagatatcggtcagcaatctgatcaggtttatcaagtccaaattgtggggtcagattcgcaacttgcattcagtttccaatttggcttccagcctagtggaagcagtcgagtaattttcatcgaaaaaagaatatccctaaaaatggttgcctgtgagtcttctatatagagtagcatatcccgaaggaacagtaactaatgtgaactcattttagggctgacggttaagtcagtggccatctttttgggcctggcctctactgctttttgtgtggccacgattgtgctggccgttcagaatgcggacctggagaacgatctgcaggatgccctcgataagatcgacgcattgacggtggacaccacgtccacgtcctccacctctaccagcacttccacgaccaccaccactgcaaatcccaatgggcccacggatgacaccgagcctggctctaccaccacacctggcgtaggaggtgacacaacccccagtgcaggaacatctccgggtggtgaaacttcgccatcatccagtacaggaagcaccaccaatcccatctatccgacattgccgacaggacttcctgatcctgaaaaggtgagtgaagtgcaagaaaaatatatttcacggctataaaagatgttagttcagaaaaaccctcacacagagtgggaaaattttcagcgattagacgtaaagtcggcatggctactaatttcgaatttattaagttccaacttagtcttactggtcatttcaagtgcttatcgcttggctagcgttttttttcctcttttttatcataatacaaaacgggtctaatttcttgggtcttttaagttagtttaattgcggctaacgcagtgttaggagccacaaaaatgggacacatgcaggacaggattaagggtatttattgataacgaaggaagttttgggaaaacaccgataccgattcatgtatattttcatagacttgatcaccgctgagcgcgtggctatattctttggtctattatcgacctgcttgatcgttgcccttgtcattgtggccgtccacagggataatttattgctgcagttggacgaagccaaaaggatgttggatgttctggaggaatacattcaaagccacttgttgtccaccatttcggaaagaaattcataagaattagggtgctggcaaacattcaaaaagatggctttcaaatccatatctatttccaaaaatggttaaagcaataaagcaataaaggcaaacggataagaaaccaaaatacgcttaggtttcaatatttgtgtagtagagctattgttgtttgatatctgaaattgcacctaataaattaggaccctaatttcacaacatttagccactatatccagctaaggcatatttgttgcaacgacgtccacttggtttacgacctgaccacaacagtgctatttcctatcgccaccttatcaacgcattgctcacttaatagggccaaagcccattatcgatggcgtggatattaaataaactttacgaccccgcagatcgaatggcgcctgcccacggaactgacgcccatcaagtacaaggtgtactaccatcccgacttgacgaccggcgcctgtgagggaaccgtgtccattcagttccagctgaacgcgatcaccaacctgatcgtcctgcacgccaaggagctcaatgtgcacagcatcagcatcctgaacatgatggcgcgcatacgcgtggccatcgatagcatcaacttggatgagtcccgggagctgctcctgatcacgctaagagaggtcctcagtatgaacaaggcctacacactgtccgcaagtttcgactgcgatctgagcagtctggtgggcagctacatcagcaactacacgaatgccgatggagtagataggtgagtaattttaaggtatatcttgcgatgacaaacattttgttagcatgtctagactaagatgtcaggtatctttattatatcgtactatttatgtagctaagatcgtatctagtgcactgtccgcaactagtacgattgcaagcacacttgtgaatacccccaatgcattggagatcatcgcatgttggggccataaaaaagccggtctcagctgatgagagagctttccggagaagctcgagtgccgtgacaactttggagcccgcttcagtcggaagttcagagcagagcgcgacggtcgcgatagaaaagagcggactccgtctgcaaatacgatctcaattacgattctcgcgattcccctttcttttcgcttttcttcgttttctcggatttctcgagtgcgcgcctacgatttgaatcaagaatgatagctgtccggcaattgccgttatcaaattagccgagtgaatattcctcggacccggcaaagttacaattaatgccattcgtagacaaaagaaaaacgaaaaacgagacacgaaaagctgtgatttcaactgtaaatcaagtaaaaggcatagtgcgaaatgtgacgggaataatagataataagtggcccatatcaatcagataccgttgagtccgctccaaaagctccacgccaatacaaaatgaccattgtcaccgcatcgccgttatgcgatcaaaattctagttttaattgggcgcattgaggcgatcactatttttaatattcgctgaaatgtgaccaccggattctatgccaactttgactttcaacgggtattcgtttcgataaacaacgggccatcgcaggctggccaagagaactccacatggctgaatcaaacaggttgcaccgctcccttcccctcccctccttctttcccacacccctttgggaccgctgcaaacaggcttggagccaaatgcatacatagttcacttgccgcgcaagttcttggccttaaatcggc

SEQ ID NO: 34688 - DNA, 819 bp, DROSOPHILA
cctagtggaagcagtcgagtaattttcatcgaaaaaagaatatccctaaaaatggttgcctggctgacggttaagtcagtggccatctttttgggcctggcctctactgctttttgtgtggccacgattgtgctggccgttcagaatgcggacctggagaacgatctgcaggatgccctcgataagatcgacgcattgacggtggacaccacgtccacgtcctccacctctaccagcacttccacgaccaccaccactgcaaatcccaatgggcccacggatgacaccgagcctggctctaccaccacacctggcgtaggaggtgacacaacccccagtgcaggaacatctccgggtggtgaaacttcgccatcatccagtacaggaagcaccaccaatcccatctatccgacattgccgacaggacttcctgatcctgaaaagatcgaatggcgcctgcccacggaactgacgcccatcaagtacaaggtgtactaccatcccgacttgacgaccggcgcctgtgagggaaccgtgtccattcagttccagctgaacgcgatcaccaacctgatcgtcctgcacgccaaggagctcaatgtgcacagcatcagcatcctgaacatgatggcgcgcatacgcgtggccatcgatagcatcaacttggatgagtcccgggagctgctcctgatcacgctaagagaggtcctcagtatgaacaaggcctacacactgtccgcaagtttcgactgcgatctgagcagtctggtgggcagctacatcagcaactacacgaatgccgatggagtagataggtga

SEQ ID NO: 34689 - protein, 255 aa, DROSOPHILA
MVAWLTVKSVAIFLGLASTAFCVATIVLAVQNADLENDLQDALDKIDALTVDTTSTSSTSTSTSTTTTTANPNGPTDDTEPGSTTTPGVGGDTTPSAGTSPGGETSPSSSTGSTTNPIYPTLPTGLPDPEKIEWRLPTELTPIKYKVYYHPDLTTGACEGTVSIQFQLNAITNLIVLHAKELNVHSISILNMMARIRVAIDSINLDESRELLLITLREVLSMNKAYTLSASFDCDLSSLVGSYISNYTNADGVDR

SEQ ID NO: 34690 - DNA, 2625 bp, DROSOPHILA
gccaaccggtttgtgggcgatctgcaattgtttttatgatgacttaagatgggcgatgacttaagacgacacaccccgtcaagtgcagtgctcgctagcattgtgatttgcataatgacgacacttgttttgagagtactataatcaccacttgatcgtggaattcggctcgaaatcggcggtcgaggcctcgacctcatactctgccttatttttgccttattttggtcacaatcagttttgacgtcagtgtttctaaaatcagtctcaaaaccgagccaaatcggtcgttagtatgtttgtcacgacccaaaagtgaaatctaaatgcagaagaaagccattcaaatgcatttttcggtggtaaaacctgagtgtatgcatattttaataatattttctaaaaagtgaaaaagtatttttaggagaaagccgaatatttaatcattttatagtgaaggaagatattaactaaaattcaaacttcagtaatcttcaaaggcctaactcaaggtctacttatataatatataatttgaaattgcatatgactaaaaactatttataaatgagtgtggtatgcaaacacaaatggggtttactgaaggatttacttgctcgaataacttgacattcactatcttaaatgggaacgttgatacagcgatggaaaaaatgatttagaaatagaagtgacgttttagaagctcttttaattaggtggggtttatcagaatcgtgttctatcgaaatgcaagatttaatttgttagctcattaaaaatattatgaggtcacttttttaaggcgcatatcaaattaatgacatgtgttttgcttattaaaaatatacgaaatgcagaaattagttttatgctcgagcaagctccaagtcttgaagtttttaatgagatatgctctattaagaagacgactgataagcttcagttttttatggatctttccactaataagatcccttgtatttatcttatcgcacagctgaaatcgctctgaacaaacaacaccactcatcacgatgccaaatccactgtggttcgtcttctggctgctggtcttctggttcgtctccttcttcgtggcattcttctgcgcctttttctacatctgggtctacgcatttgcctcctgcattcccgccctgacggtaagtgggttttttttctattttggggagcagcatttgaagttatatggcggggtgagtcaatttacctgcttcacctgctggttgcatgaggcactttccttatcgcgccgtcaagatgtttaacccattagtcatttggggaacttatcagacccacaaccggagcttatgggaaaccgcgatagctggccccgatatgtagacccacccacacccattgcctggaaaaacattgctaaccgatttgttttcttactttcgcagggcatatcggacattctgctccagggagtccagttcccgttctactgcgggaaagccatgttagagggcaagcaagctttttaagggggatatttccccaatatcaattaactaagtgccttactgataactcttgttttcaatcattttttacaattttacaaataaagatttattaacttatatttataattactggcattttttcaattgattgattctgattgattcaatctgatattacatgttgtttgttcgttacagttgataaattcgcctgatggagtgatttttactatctttacctacagaacatacattaaactatcatgcgataaactttttatcacatggtattgtacatgcgtaatatttacccttcagagaattcgctttgtatcattcacaataagtaaatcacaattgttacccacacacaagaagtggtttccattgattacagctcttccgtgatatcattctctgagaaaattcacaatttatactttgctggcaaaccaaggtcaggaaaacactttttgaaatgcagttagtgaaatattaaagcgaacctaataccttaatgagcccatttattgggcacttaaatttctaaacggatgaaatgtaatgaagccatttcatagaacaaaaacaccatcagatagatttaaagaataaatgcacgccacactacaacaactaataaataactttattaatgaaaatcagttaacaaaattaaaaaatgaaagcactagcatatattctaattgccgtattgagcacggtttggaaccgattccaaagtccaggtgaatttatttggtggtagaagccactgtcgcattctgctgaccactgcctgaggcttcagctgctccagacctggagtttcccgcgagatccggaagtccggcgacctcagagagcgcctcctgttcgcaaagagcacgcaactcgagctccccaatgagctgcattacccggatcttaccctcggtggccagtttgggcggcaagttcttgacggtggcacatatgctgtcgaagaacagctccaatgagtcgcgcggtggcgttataggtgacaatggttgcagttgataagattgcagcgggcgggcagcataggagggcgtcgtgtgtataggcgttatggtggccttggaattgatctcctgagcttggc

SEQ ID NO: 34691 - DNA, 358 bp, DROSOPHILA
ctgaaatcgctctgaacaaacaacaccactcatcacgatgccaaatccactgtggttcgtcttctggctgctggtcttctggttcgtctccttcttcgtggcattcttctgcgcctttttctacatctgggtctacgcatttgcctcctgcattcccgccctgacgggcatatcggacattctgctccagggagtccagttcccgttctactgcgggaaagccatgttagagggcaagcaagctttttaagggggatatttccccaatatcaattaactaagtgccttactgataactcttgttttcaatcattttttacaattttacaaataaagatttattaacttatatttataa

SEQ ID NO: 34692 - protein, 70 aa, DROSOPHILA
MPNPLWFVFWLLVFWFVSFFVAFFCAFFYIWVYAFASCIPALTGISDILLQGVQFPFYCGKAMLEGKQAF

SEQ ID NO: 34693 - DNA, 2637 bp, DROSOPHILA
tgatcaattttaataagacaatcgatccttgcattcagctagataaccaaagctttcttcattttatatatactcgagattccctttgaaatagctatttattcttatctgcaatcgccagcactggattgacactatggccggtggttcgatggttggtgttcagtttcaattgtgctggcaaacgtgactccaaattggctgccggcgaataattcatacgaaacactttcgcaccgtgcgccttgccattagcatcgtaccactgcccccaccgtcggatgaccacccacctcccaccacccactggcacccaaagcgcccacttcgaaccacagggtagcccatgccatgccccacgtaaccccacgattgcatttacagcaaattatttatggctgcgacagacacggaacaggaagcgagtatgcgctgccaacttcacgtccatcaatattttatgaaaccctgtctgcagaacgctccgcgctgctctcagccgccggaatggatgggttggagtcctcggaacaggacgagggtatctgcttacatggctgccttgtgccttctgccggctgcctggctgtcgatatccggtagatgagtatctaaattgcctttactgttgatgaattagcgccggctgcctgccgctcccatttgtgtggaatgggtggcattgcaagtgcctgcgtggcgcagataagcttccacgatgggtgcaaatttcaatttgttctcgatgattttgcgctcatcaaataggccggcaatctaggaagacgggaacacgaccttgttcgaaaggatatgaagtgagaacagagctacaacagcaggggattggcaattcaccaaacggatgcacctaaaattactccatcattcctgttggaataatacacattaaaaatgagtagtagaaaatgacttatcaatccttgagttaaacatcagtaactgttgcagtatttttaaattaccagttacgtccattatgttactctcccgcaaggaaatcgtatcgttattgctattcctcacggcggttagttgcacctgactgccatctaatatctgaccttgtgactcaccccagtcatctgctccgcagatcatttccgtgctgaacgcgtcggtgtttgggaacgtcctgcccctccacgtcagttatgagcagctgggccatcaagtggtctgcgtgggaactgcctacatttgcctgatttacgccatgagcacctggttataccactcgaattattccaggacccgtctgcacatgcgattggtggtgggtggtcggccaaatggaggtgaagtctaatttcgaacatttaaatatcccatttttgcagctggtggccatgattttgattatgatactgtttaactgcgcttctacctactacttcctaaccggcgtttcattttcaaagctaggagattccatggaactaattttcctctttagcagctttgcaatggcctccaaatcggtcagtttgagcatgtcggccatcagcgtggtgatcctgatcgtgatcatggtgttactcattgtgacaatcattcagtcccatagaagacacaaacgggacagaatgcgttacctcgagtcgcaaaagcaataaactcatcctcattcccgtgggagtgcacattaagtttggtttttatgcaacgccaaacatttcatgtcgctgcaatgtggcgccgtagctgcaataatataaatattgcactcgtacctcgtttggcacagacagacacgaactgctcacctcctttattttttcactcatgacacaccgattctgtgtgtgtgctttcttcgcaggtgatatgaaaaacatatacgagtgtaagagaatctctgttattgtttatccaagtcgcagtgggcatgccctgccttgagaataattatacaatatatttttgtaattctatgtaataaatgttagttaatagggttgaagtttgaaattttctttctttccaagatttttactcattctgggtcttaataatttggcattacatacattttcggtacctttttttctcgattatgaaaatgccatcagtgtatgcagtgtatgtgtgagtgcttgggcaccatcagggcccaaaaaaataccattctggccaggataagtctgaacagtgcaactcataagggagacaagcagcctcttcacatcggcttgtgtaccattgcattttgcataatgaagccggcagacagtgcactttcgagcatcagacaaacgaagttaggtacgaacttaaaggcttgccaagctggaaaagttaaagttagctttttggcacaagtagtgagaaggggttggtaatttgggtaggggtttttaggagcgttgtagtagcctaattacgctccaatggctgcccatcaaaagtgacagttggcaaggcaggggcttacaataaaatttcaagttaagttattgccgcgccgctggcgagagctacgcgaatactcagttgaaagtaattccaaatttaattgcgcacaatttagaatggcgagatgttggcgtgcgtttaattaactgaaaaataacataaaaagcaaaacgaaaacaaagcccaatgacagccgcggcg

SEQ ID NO: 34694 - DNA, 522 bp, DROSOPHILA
atgttactctcccgcaaggaaatcgtatcgttattgctattcctcacggcgtcatctgctccgcagatcatttccgtgctgaacgcgtcggtgtttgggaacgtcctgcccctccacgtcagttatgagcagctgggccatcaagtggtctgcgtgggaactgcctacatttgcctgatttacgccatgagcacctggttataccactcgaattattccaggacccgtctgcacatgcgattggtgctggtggccatgattttgattatgatactgtttaactgcgcttctacctactacttcctaaccggcgtttcattttcaaagctaggagattccatggaactaattttcctctttagcagctttgcaatggcctccaaatcggtcagtttgagcatgtcggccatcagcgtggtgatcctgatcgtgatcatggtgttactcattgtgacaatcattcagtcccatagaagacacaaacgggacagaatgcgttacctcgagtcgcaaaagcaataa

SEQ ID NO: 34695 - protein, 173 aa, DROSOPHILA
MLLSRKEIVSLLLFLTASSAPQIISVLNASVFGNVLPLHVSYEQLGHQVVCVGTAYICLIYAMSTWLYHSNYSRTRLHMRLVLVAMILIMILFNCASTYYFLTGVSFSKLGDSMELIFLFSSFAMASKSVSLSMSAISVVILIVIMVLLIVTIIQSHRRHKRDRMRYLESQKQ

SEQ ID NO: 34696 - DNA, 5641 bp, DROSOPHILA
caatcattttaacaaattgacgtgcacaatgacgttggcttttattttttgggtacgggttgcctaaaaacaaagcggacagctgattttagcagtttggcggctgtcttctgccgcgttttcctttttttttttccaattttgttggctgccttttcacattttgagggtaatttgctaattggaggcgtcatcggcttcgacagaaaaggcaacgccacatcatcgctcagcccaaaatcgagttggcttagttagtcagtcatggtggggaacttttcgtcctgcccgatgaatgggtcgaatggcattgggcggggcagctgttggccctttttaatgtagtcgatgatattcaataagtatttttgggacggtcgaaaggttattgatgttggactttgatttattcctacgaacattctcgtaaaagtataaattctacactgtcaatgaatttatttcatttctaaggcatacatatcaaagcaaaatatttttgagcaatgaatgcgtttatttgtgttgggcagaggatatctatcaatcaatttaaatttactggattatttatttatataaatttatcaaatttctaaaactgttcaaactgtgttgagagtctattaaaactaaaatatgagtgtgccaaaccatttaacacctggtcttccaccttatggtaacccccaaaatttattaattactccgtgtgtggcatgaatataaatatttatttataaattgaattcaaccccaatgaaattcagttgaaaaaattaagtatttgtcacatttaattgaattgaagcaatgtggcatgcatttttcatatagatacggggccaacatgcaacaaaattcaatttggttacgtgtgcacacatataatgaagaatttaattacaatatatattcattttgttaactaacctctgcactccaactccacagggtttttctgcgcgatgtggtggaaacggccaacgttttcattaaaatgatggagcgcttctgccaggactctgtggtggtgcaagacaagaagcgaggtcgtggcgcctcccgaaagaagaagcaggcggcgaccaagtccaagccaccagctgcaccacagcccactgaggtaagacccagatgaaaaataaaataaagtagtcagttgaagtttttcacgcccagggttatgttatgattttcgagtaactaagctttaatttaaaaataattacgaacattttcctgaattttctgcttgaagtcaacatcaatctgtcctttatatagattctgtttaatgttttataaataaatggccgcattaaataactttatttaagcctgctggtcagcacccgctgtgcaggccataaaatacaccctaaattgccaataaaatttaaaacgaattgcaaacagaagcaaagaaaaggaccatgcacaaaaaacaattgtcgtctatgctatgaccgttgaagatttatgtgcttgatcgtgaaatttaattgactgaaaatatggaaaaaaaagtacagaaaatgtatagaagcttgtcccagcaacgattctatttcattcaattttaacgactgggacttttatgtattttctacttcgtgtgtgcgtattattttcatggtacacaattgcatgcgaccttagctaacgcagccgcaaactacttcattctctcactcgcggaaaatgtggaaaactttcaccagtcggtccaccaggtttccgttgtttttccgcagcttttaaccttttcaaaaggctcagttgtgcgtttagttcttgttattttcccaacatacgatgtgataaaggctggaagactataattgcgttagttaacatttatttgaatttatggagttttacttaacatggtccttaaaacttaacattatggtattgacagattttaagaactattaggttagttactacacaccaaagtcacatttctctgaatggaatttaaatatttgctaaaataagccgagccaagcttgtaagagtatcttaaagtcgcatattttcctgggtgtccagagcccattgtattcccaaccatcttttgtttttgcacactttgtcgcgttgggaaaacgacgcaccactgagcgtgatttccgggcagtggaaactggcctttggagttttccacaacagtttgcaactgcatcatactgcgtggactggccatttttgtgccctccgatttggtcctgttggccaggaggtgcacatagggcaaggatatgggaatattaacacgaaggtcgtggctgacgtgaacaagattaattttatttttttgcaacaaccttcaattgtgttaatttctgacatatttatttgtatagctgcggtcgtgtagctgtgctattgtttttgggccacgcacacgcgttcagcgcatcaatttttcaacaattaatttataaatatttgtccttgccgccgagcgaaaaacatgacaatcgccacgaggaacaaatatttccgtgttcctcctcttttggcttgaaagagttaagcgtgcgataagcaaaaaagatttaattgtgtaacgtgtaaaataagcataaattaaatgaataataaaattatgataatagtgaagcagtttgatcattttgccttgcccaacaatttagcaagaatttcgatattcgaaaaatttcataaaagatttaaatgcatatcatttaattttttattgtttaaattgcttttgaaaataatctaaaaattgcgcgtcttttatttaacgtataattattttaaaaaatttatttattttttcacttattagactgatttaaaaaataaatgagaagaaaatactttgcagtaatcatcgtcagacatcaaccattgatttacaattaatatgcattgttaacaggtcggaaatgggcaaaaaatgagagaacaattgtttaaatgtgtttcttttttgcaagcagaaaattacaattcatagctgttaccagtctttaaactttaaataatttaatgaaatcataggaactgtaatgtaaattatgtatgaatataactattaagctgctttttcattctctaaaatataaagttatgctttgtaagtgatcaaacgtaatcaatatgcctgacagcgattttaaaaaatcgaattcgagttatagaaaatcattttatagccattttatttccaacacatttttaaatttcatttaaatgctcacattgtatttggtttttttttttgtcactagcaaatggctgacaaggattattagatattgggttataattaccactgcctgtggtataattaattctattgctccgatatttacgttacgactaattttcctctttgattatccatttgcaaaacaatgtcgaatcataaataatttattaatgcataattgcaggaagaattgtcgagcaaatgggctgaactggcaacggaagtgtgcagcctgctgtccacggaattggaaatgccagaggatgagcagcccctgcccttcgatgccgcatccgagaaatccattgatgatcagcggtgagttagttgcaactatttttattccttccttactttcttccttccttgtactgcatctgaccccctgaaacgaacctattattaccagttcgatttccagtggcacaacgtgtccttattatgtttcttggtctttctccactttcagcgaggattgcatgattcgcataaataaactgcttcgttccgagaaactggaccaggccatcgcccttcttcgtgctgccaggtgagttaaaaatgccattccctagtctctgaaccctgttgctagggctccagacgtaatgcctttgtaaatcccgctttttaataacttgacattgaccggggcacggaaaaggtacgaaagcaattcgcataataaattaactctagtcaaaaatgggcacaaaaaaaaaaaaaatgcgcttggtcgtcctgtgtcctttaatgcaacttcactggcatttatcgaattttattttcatcctgtttatttttttatatcctttctctgcgcttttgcgcgatgcctttcgctgccctgcgttgctcttaaattaaatagtttttatttattgttaaggcagagcacgctggcaccccggtaactacagataatggcagtgcccggaatttcttgtccctgctctccctttttgcccccacagataataagaagagtccttgcgctgtcctgtgcattttgcacagacaatttctcggtgcgcggttttttgtcccagccgcctgcaatttttcagtcaacaaaccgcagagttggcaaggtgaggttgatggaggttggtggatggaggatggtggatggaaccaggtcagagaacctcctctgcgcctttcaatttaattgcccgctcaattatgtaaagcccattgaagacgcgctcaagaaatgtttattgtttgctcggggaaaattgcgtgaaaataatttatctttttcgcgtcaacatttaaatagggccgtgccgacagcacccgcacagaaacatcagcagatgtcgccgggtgtcaaaggctggctggttgtgctgtgctatgccagagcaatcgaaaacgtggcttaaatatttccaagtcatttaattacaacctcattaaaattttccacctgctgcctgcctgcctgcttgcctgttggttctggtcggagtactcgtgtctcaaaggaatccaatcgatggcatctgcaaataggaggagaccgagatgctggaggctccagctcctactcttcgctctgtgcaaattgattggatatattcgaggaaagtgttgccagtgagatggctccacagtgtgtgtgtgtgtttgtagaggctttctcgaaatttatgtacattttaattgttgccaacgaaaattgttgcattaaaatgaatacaatttttgctgtgcgactcggctgctgcagtggcagcttaaaaaggtctagacgctttttgtgctaataaattaaaatgcgatatgcatatagagcactaccgaagcttgcatccaccgcctaccgctcactgcccacgcccccgaccacgccctcccatgggaacccactcctttgtctgggcattgtctggaacttttttgtgccccgttgcctagcactttttgccactcactttatgtcgcataccctacaaaagagtcccaccaattggattcgatcttgcttaaaaaaatgatagacttagataagtttttattttacatttaacaaagtatattctgtactaagaagaaggttttattaaagttgacatttatacaatcttttcgattgttttagattgattggtttggtctaataagtagacgttgaatctacagctatatttttgttgcttccattagcctatttatgattttctacaaattatacaagtttgtcatagcgccagttcattaatctttaaatacaaatacgtgtcgtatccattgagaatgccaagcatgagagtatattatatattttagatgcctctgtttctcatttcactcttttccatgaggacgcttttgggtaagtaaaatattgaaaacaaactggagtttgtgggcccgacatgc

SEQ ID NO: 34697 - DNA, 504 bp, DROSOPHILA
atgatggagcgcttctgccaggactctgtggtggtgcaagacaagaagcgaggtcgtggcgcctcccgaaagaagaagcaggcggcgaccaagtccaagccaccagctgcaccacagcccactgaggaagaattgtcgagcaaatgggctgaactggcaacggaagtgtgcagcctgctgtccacggaattggaaatgccagaggatgagcagcccctgcccttcgatgccgcatccgagaaatccattgatgatcagcgcgaggattgcatgattcgcataaataaactgcttcgttccgagaaactggaccaggccatcgcccttcttcgtgctgccagagttggcaaggtgaggttgatggaggttggtggatggaggatggtggatggaaccagggccgtgccgacagcacccgcacagaaacatcagcagatgtcgccgggtgtcaaaggctggctggttgtgctgtgctatgccagagcaatcgaaaacgtggcttaa

SEQ ID NO: 34698 - protein, 167 aa, DROSOPHILA
MMERFCQDSVVVQDKKRGRGASRKKKQAATKSKPPAAPQPTEEELSSKWAELATEVCSLLSTELEMPEDEQPLPFDAASEKSIDDQREDCMIRINKLLRSEKLDQAIALLRAARVGKVRLMEVGGWRMVDGTRAVPTAPAQKHQQMSPGVKGWLVVLCYARAIENVA

SEQ ID NO: 34699 - DNA, 3580 bp, DROSOPHILA
ggcgcaaagttttcccagatcctacccttttttccccttttccgccgcttggcgacgactccctcgcactattctaagttgcttggttcttctactggagctcccaactcctagaactgcggctcctgctctcttattcattttcagcaatgtcccttcgccctttatcagagtttttcgtctcatttttgcacttatatatagtaagcatcctatgtacaatatatactcgccgaccataaaactttctgtttatttcctcaaatgcaatttgacgctgcctccgcaccgccctgaactttctttatcgtctgccattttctactgattttgcactatataaagcatggcattgctgtaatgtatgggctttccgatgggcaaacttttccagcagccagcaacccgaaaaaaagtgaaattgagtttgtcattttgtttatgcgagtacacgtacacagcattgatacagaaatcaatcgctgaagtctgcgaatgatcaggaatttgcaaaagtacaaggatcccctataaggcacaaatttgattgatgaaatcataaaattaagtcctaagaaacttattaaacttttgaaaatggataaccatataaagtattgatttccaagagtggtcaggatatgcaatatgatattacaaatattaagtggtgaaatatttcggagtcctttgtttagctcgcaatatttttgccacttgaaacatcaatattttatcccattttgtatgagtgcagccagttgaagcccaaatctcaattagtttatttgctttgcacagtttctcgtaaaaagtttgtgcatcaatcagtgtttttccgtttgttcactttgccacattatcgtgctgctgttcattgcacttttattgattttataatttatttatttaggttcctattgctgctgctgccgcacatctgtaattaatttgtttttaatgcctcttcaaatgctctcgacgttgtcgcagaactttaatggtggttgccaccgacgtagtgctgctaatttcgcccaagttgcaggcaaatgctgcagccaccggaagtgggcggcttagtggggcgtggttggccggtgggtggccactgggagacgtgcggcatgtcaacgcccagtggtacccgcatccttggggggaggaaaggacaagcaaaacttaggctggctggcgctcaattctagcgctacttaaaaattaattttgttaatgagtttttcgctctggcagttgcaagtggcagacggcaagctgcttacctgttttgctgctccatgctgccaacttgggccaactttaatgcagaattctactacttaaatatgcactcaaacacaacgattcacaccatacacgatgccatgtgcactgaaaacaaatagtggggtagttactaggcccgaaagccttgcactcatcattactataattctttttttttgttacactagtttatttaaatagttatattttatttaattgttaagtaattgggtatcttcattgtctggctgtgtacacgagtgttatgtaactctgttggctttttccatttcattcgcagcgaatcgttgagcgtgcaatgcttccactgggtcctgacgcgcatgcaacatgacatggacatgattgtgagcgacaagaaacaggcgcgtctctgggccaagcgactgcatgtagcgcttttggtaagtctcctccgttccagctccaggtcctgccccatccttgcatcctgatcccggtggccacctaagccgagcgtacagtgtgtgtgcgggtctgttgttgtttgctttggcgctgtaagtgcacttttgggggcactcttatgccgctcgacgattgccttggattaaactgggtgcctggctcttggcactgggctcccagtactcaagccaagctccgtacatcctttaagcccgccggaatgatggagaaacttcaaatgaacagcgagctttgccggggattagcttgaaatgtctggcacaaaaggtttccttgatcttttttctgaagattgtaggtaaatgccacaccaattagatagatcaaaagtgggaatcaaagtggcaagaagcttattattctgtgttaaagatagttggaaactaacagcttcattaccattaaccggaaataaacacttatgtcaaagcccaactgattccgttcacaccaaggatattgggactggccacaagtaatgaagggcgtttataattacacacatgtgtgttgagtctccttgtggctgtcagatcgtcaggctcattacaatgcggcacacaccatctttcgaccctgcctcgccactttacttgcaatcaagagctccaacgtctgccaagttaatgcttaccaattttttaattaaagacattccgggaattgctccaaagcctgctggcactgcagaagctaaaggatgacaacaacgcgcgagcccttttcgatatgttattgaacaacgtgtgctatgtcctggagtatcgggagacggtgctgcatttgttaatgaactacaatgaggcgcacagcacaaagtgagtacccgagcgaataaccattccaactatgcacacacattccgattgaaaataacttgcccttccggccatggtaaaaccctcgcaccctcgttgccactaccaaatacccactaccatactcatcacgaactgaatttggaaaccatctagcggcctggctgcatttctgatagataacggccacgaccccgtggcatctggaaataagcaagccaaacacacatcctctaatgggattactacgagcactcgatgtagtggctctgccccctaccgaaatatgcactgcaggctgtcaggatatcgccgcttctgccaggatctctcgccccgacaatcaggcattgtttgtcttggcggcatgcctttgtcttgagtcctgctctgtttgctcggctatttgcacagatgtctgctgggtcgccaaagctcactattagtgctggcaaaccagtggtttccgctttcagtgcagcaaaatctcaatggaaatttaaatgaagctatacaagtatgatagctaagtttctagacttatctagtgggtcttaaaaagtcagcagtacattttaatggctatcaattgtatttgaatacagttttaataatgtttcaatatactttatgacctatattcatataggccagcctatttatttatttggaagtaattataaaagttacagttttttggccctttgtagctgtccttgagtggacaacactatccccgaagagagttcagtgaatgtggtttgtttataagcgcgtgtgttcccccaaaagccggcatctccaaatgaactagttgcacattcctcgcgaggcggcgatgggagttggctactagcttaattgattttacaagcatgtgctgtatgcgtgccctggcataaaaattatgccatttcccacaagccaaaccatgtttttcagtgtttttatttgagggcaaatcgtgcaccttggctgcatcctaattgccgagttaacaccgc

SEQ ID NO: 34700 - DNA, 387 bp, DROSOPHILA
atggtggttgccaccgacgtagtgctgctaatttcgcccaagttgcaggcaaatgctgcagccaccggaagtgggcggcttagtggggcgtgcgaatcgttgagcgtgcaatgcttccactgggtcctgacgcgcatgcaacatgacatggacatgattgtgagcgacaagaaacaggcgcgtctctgggccaagcgactgcatgtagcgcttttgacattccgggaattgctccaaagcctgctggcactgcagaagctaaaggatgacaacaacgcgcgagcccttttcgatatgttattgaacaacgtgtgctatgtcctggagtatcgggagacggtgctgcatttgttaatgaactacaatgaggcgcacagcacaaagtga

SEQ ID NO: 34701 - protein, 128 aa, DROSOPHILA
MVVATDVVLLISPKLQANAAATGSGRLSGACESLSVQCFHWVLTRMQHDMDMIVSDKKQARLWAKRLHVALLTFRELLQSLLALQKLKDDNNARALFDMLLNNVCYVLEYRETVLHLLMNYNEAHSTK

SEQ ID NO: 34702 - DNA, 3037 bp, DROSOPHILA
tgccctgcttgtccagcttctcgatggacttgtgaatcgctccgcaggagctgtcatagtaggtatagctgaagcgatggccccagtggcaaaagtcggaagatatcacaaacagattggtggggtccatcagatacgaggacagcaggctgccgtactgcgcctcctgttcgggattgagcgaacccaccagaataggcacaatggtgaactgatccttgtagctgcagcagtgctattacttagtaaaacgcctcgagcatatattcaaatccacttactcctccatcactttggcaatgtagggtaaatgcatctcgatggagtgttcatcctcgtcagtcttcatgtccatccaagaaaactttccagtcttctcaagctcagagttgactaaatataaataataaatgaaatcaataaaacatgcaatgcaccttgtatttgcaatcgacatactctgagcatcaattttgagatcatagaggggtgtcctgtacttcttcgccacggataaggcgcagccacgcagacgcacatgatgcgagggacccagtatgaagattcgcttgctgcaagcaaaggttcaataaaaccggattgtcttcgcggaaatctcgaatgtgaacttcttacacgacaactgggctaacttggcgataggcaaaggcagcgcaggctccacagtacgtatatccagcatgtctgtggaatatcaatcagtaagttcaatggtgcttattgcaagaattcggttaaatcttacggagcaatgatggcacgagccggtccatgggacaaatctgcggcacccagccaacgatccaactgtctcgagagctcggcgcctgaaaagcaaagtaaatacatttattaacgaataaataatatcgtaaaccataattccctgctcaggaattggtttcagtttcgaaatcaacgaaaatagttggccagtcgttgcctagcagcaaacaaacaaatatttcctggtttataagactttcactaaatcgagacttatcacagcagcgatataaagttattaaatattgatttaaattttagttgaacattccgcgatggaaactgataaggaaaaacaaagcgatgagctcatgaatcgcattcggaacgagcttacagctatattatctcaagagtaagttatcaagttacccaatatatatatatatatataaaagaagaaaaaaatcaatccatttataatcctacaacagggctgctgatgattccgacaaggaggcgtcacaggaactgctcctgagtcccaatccgctgcccattttcgggcccataaggaaaacaaggaaagcaaaatcgaggagttccaagaagaacaatagtaaggcctcctcctcgtccgctggcagtacaaagagttcgtcgtcgggtaccagatcatctgaagatcgtttaactggaggtggagcccaggagaagccatcggatccggtctccacatcctcgagctattcgctaagatcaggatatgacgctccgcccgtggaggccagtgcccgtgccgacttccttgaatcgcaagcggccaaaagcatcgacgaagatgtccggaagatgcagctggagctcaagcagagctacgaactcttccagggcattggcgagaaattggagtcggttagcttcacgggcttgaaggaccgcatacgggacctgcacctaaacgaatccaacaacgagttgggcaaagcgacgactgcagagcttcagatgatgttcgaccagcgtttcctgcaaaatcgcctggacaagctatccacggacgccacgcagggattccgtcggcatcccggcgaattcggcgacatacccgagctgagcaccttcttccaggcatgcactcagttggaacgcggactggatgcactgcgtcagcagcggcggcgcaacagcgagctggagaagcgtctgtgctgggccaccgaaatcgcatacgatcgcatggacgagattcgcaatgcggttggctcggatccggaaaagaacttctgaattggtgacctgtagttacatttttggttcaccctaaggttcattacccgcacacaaacacacacacaggcaaacacgcacaggtgcaatacatatgcgtttatcccacacccataggcgatgcaataattgattgtgttatcttctgggccgcagctgggttgttactcacccgagtccgtgtaccagctgcctgcatgggttgctcttctggccgacattttgtgcgagatccctaatcggtctgtttagttagtaagagctattaactggccgttacttgtagaaaaaacgagttctttgttattggtacagcagtgtgaccgtcgtcttgtttttgaaataaacacgttctctggattcgctgatcagcggtcacacttcttcagggctgcattaagtacttaaatatcgttttttttttggtataatcatatataccattaatacttttttattattctaaataataaatcacacaaataaaatacaatacataaggtaacgtaattttatttaagtgttgttttttattaatttccataaatgaaatcgcataacatatacaactgaaactcacggaagtcgaaagtcggaattctgcaataccaacatttcaaactataccataattcttgcagtttgcctgcgcgcaccgaggtattttcgaacgacccgtgtgcggtcacactgttcgcatagcgtcattgctgtactaaaacctaaaaatccgccgtgttcgtattccgccattttgaaagctgcgagtggaatttggacgcgttgctggtaaattaattgtgggaaaactgcccaaaaagtgcataaaatttgtgaaaagtggtcggcaacggtgcatgagacccgccgccaagtgtttgtccccgaaaattgtgtgtggccgcgtttttggcacgtgaatttcttgcccaattgtgaactcgcaaaaaaagaaaaagaaaagagagaagaaaaccgacgccgccgtcgccgccgccac

SEQ ID NO: 34703 - DNA, 958 bp, DROSOPHILA
gactttcactaaatcgagacttatcacagcagcgatataaagttattaaatattgatttaaattttagttgaacattccgcgatggaaactgataaggaaaaacaaagcgatgagctcatgaatcgcattcggaacgagcttacagctatattatctcaagaggctgctgatgattccgacaaggaggcgtcacaggaactgctcctgagtcccaatccgctgcccattttcgggcccataaggaaaacaaggaaagcaaaatcgaggagttccaagaagaacaatagtaaggcctcctcctcgtccgctggcagtacaaagagttcgtcgtcgggtaccagatcatctgaagatcgtttaactggaggtggagcccaggagaagccatcggatccggtctccacatcctcgagctattcgctaagatcaggatatgacgctccgcccgtggaggccagtgcccgtgccgacttccttgaatcgcaagcggccaaaagcatcgacgaagatgtccggaagatgcagctggagctcaagcagagctacgaactcttccagggcattggcgagaaattggagtcggttagcttcacgggcttgaaggaccgcatacgggacctgcacctaaacgaatccaacaacgagttgggcaaagcgacgactgcagagcttcagatgatgttcgaccagcgtttcctgcaaaatcgcctggacaagctatccacggacgccacgcagggattccgtcggcatcccggcgaattcggcgacatacccgagctgagcaccttcttccaggcatgcactcagttggaacgcggactggatgcactgcgtcagcagcggcggcgcaacagcgagctggagaagcgtctgtgctgggccaccgaaatcgcatacgatcgcatggacgagattcgcaatgcggttggctcggatccggaaaagaacttctga

SEQ ID NO: 34704 - protein, 291 aa, DROSOPHILA
METDKEKQSDELMNRIRNELTAILSQEAADDSDKEASQELLLSPNPLPIFGPIRKTRKAKSRSSKKNNSKASSSSAGSTKSSSSGTRSSEDRLTGGGAQEKPSDPVSTSSSYSLRSGYDAPPVEASARADFLESQAAKSIDEDVRKMQLELKQSYELFQGIGEKLESVSFTGLKDRIRDLHLNESNNELGKATTAELQMMFDQRFLQNRLDKLSTDATQGFRRHPGEFGDIPELSTFFQACTQLERGLDALRQQRRRNSELEKRLCWATEIAYDRMDEIRNAVGSDPEKNF

SEQ ID NO: 34705 - DNA, 2999 bp, DROSOPHILA
ctcctgggtggtgttctgtgttcacgatgatacggaagctctgctggagggctatgcggaacctcgtcaggcagctggtcatctgccggaatgggccgtttccttgcgggaaaccctgcacatctcccatgccctcatccccaattcgcatgagttcgagtttgtggtcacgctgagccacgaggtgttgcgctttcacgccgtctcttggtaaaactaaaagctccccgcacgcaacgcaattaagattgcaccacttacagctcactttcgcttttttattcgcagggagattatgcaagagtgggtggaaacgctgcgctccaagctgcgcgaaatgaagattctgtcgccgcgcgaaaacctctacacgaagctacctgaagtgcgcgcaccgttgctgcccacgcgggatcccacatcgccactgccaccacctcctccagttccggcggctctggtaccgggcgtcgagcgtgtggtggcacccagccatcaggctccgccagcaccacctcctgagccaccaacaagtccagtgcccaccacacctgcacctcctgcccctgctcccgctgccatgtccaacactttaacgcagcacctcctcaacatgctctccgatcccataagcacctacagcgagcagatcagtgagtcggtagagtcagcctctggtcaggaagatgttgctgtagctgaggaacctccagcggagcaaccgaccactagtgatgccgatttgaatctctcggatgacgaatacctgtcgcccttgctgcgcaaggcatgtatgcttaccgagaatggagctcgcgttgacgtcgtggtggtcactggacagcgcgtttctgccggtatgaatattttttatataacctaaatatatttaatttttactctaacattacaaaatataacctaaaattgtagatcaagtcctaaatttggagcacattctgcaatgcgaacgactgattcccaggtgagtgaatccatcctacaacatctcgttcataagctcgtagttgtgctgcaggaacttgagtactgccttcttggtgctcgctttgcccttaaaggtggccttgaacaattttcgcaggacggctagatatctcatggcactgagggtgagctcgtggctctcggcatccaatttcatgcccaacacatttttgtatctcttgctcacctgggctttcagattgtcaaaactttggcttgcctcctccatcagaggagcacgctgctgtcgccggtagtgatccatgtgggcatgtagcaaggttttgaagagttcgttaaagtgctgcacctgctggtggtctgatacgtcttcgcagaaaacactgaacatggtgtcaaaaaacatcgccggatcctgtccattgcatagtctttttagggcgctgattgaggagcaggcgaaatttcgcttcagatatcggttctccttgtccagcatgtaaatctgatcatttatccttttaatggcatgtttgtccgccgcgcgtttcacctgcaacttatcgatcagacattgaagctccatcgactccttggttagtgcagcgttttctttgaccaacctacgattggcctccactatattctcgcatgaactaaaagaagactgttcctcctcattcaaactttcatcaaatttgcagcatacaacatctttgccgattgcgggattcggttttaggctcatttggtgaagagtgcgcaaatccaactggaaactgcccggccacgtaaatggataacccaacgatttgtgatcattgagttgtttatgaaggagcagtagcatatagtttctggaaaagcgttccttcggcgttgactgctggaagatgttgagccatcgggtgcatgtgggcacaatgttatctttatcgggcagcatgtccaccagtttcaccacactgacaacctcctgcacaaataggtcatctagcttctcctctgtcaaagaaaacggtttggccatgtctccaagatttgtttatatcaaactggcttgtgatttagaaatcagcctactatgacgtcagcattctttatcaaatattaaaatgtattcctgttttcttttagaccgcaaacatcgcgatccatgtcagctggagcggcagacaaatcaaagcgaccgcaacgcaagcccctccaatcccaatcttcgagcgccgctcctacgaacagtgcggactctcaggacaacatcacaattatccaagtgtcgaataccgccaacagtggccaggaacatccacccgaactgccgcccaagaacaccaccaccgctgaggtgtttcgattccctgaggttaagagcaagccccagactaatgccaagcagcagccaatccagacccatcacgagtataaaagcaacgtacaaatcattccgtccaacgccagtagcagtaccagtaccattcaagtccttggcaaacagtccagtagcagcaatccgtatacaacgcccgttaagcaaagctcgtccaatggctccagttcacaggtgtcgggcaccacgaaagtaaaggtgttgggtgacggagacgcaaccaccaaggtggctgtctacggcacctgctatccagcggccggaggaagtgcacccagttcttccgcagcctcttcctctgttaatcctgccaagccgcagacgcccagattaagtaaaaagataatactcagtgccaacacctcgggcattacgaatattagcgtgaatacagaacagggcagtgactccataatcagtggtaatatccactacgagaaggtcttcctttcctccagcattccgatcaccagcagaagcagtcccacaagagtggcaaacacgaataccacacagccagtgactaatggcagtccagctttgccacgtcgtcggttggcttcgccggcaacggcgcaaccagtgacccccaatgcagccggcagggcgacgccgcagttgacccgaggactaaccgaac

SEQ ID NO: 34706 - DNA, 999 bp, DROSOPHILA
atggccaaaccgttttctttgacagaggagaagctagatgacctatttgtgcaggaggttgtcagtgtggtgaaactggtggacatgctgcccgataaagataacattgtgcccacatgcacccgatggctcaacatcttccagcagtcaacgccgaaggaacgcttttccagaaactatatgctactgctccttcataaacaactcaatgatcacaaatcgttgggttatccatttacgtggccgggcagtttccagttggatttgcgcactcttcaccaaatgagcctaaaaccgaatcccgcaatcggcaaagatgttgtatgctgcaaatttgatgaaagtttgaatgaggaggaacagtcttcttttagttcatgcgagaatatagtggaggccaatcgtaggttggtcaaagaaaacgctgcactaaccaaggagtcgatggagcttcaatgtctgatcgataagttgcaggtgaaacgcgcggcggacaaacatgccattaaaaggataaatgatcagatttacatgctggacaaggagaaccgatatctgaagcgaaatttcgcctgctcctcaatcagcgccctaaaaagactatgcaatggacaggatccggcgatgttttttgacaccatgttcagtgttttctgcgaagacgtatcagaccaccagcaggtgcagcactttaacgaactcttcaaaaccttgctacatgcccacatggatcactaccggcgacagcagcgtgctcctctgatggaggaggcaagccaaagttttgacaatctgaaagcccaggtgagcaagagatacaaaaatgtgttgggcatgaaattggatgccgagagccacgagctcaccctcagtgccatgagatatctagccgtcctgcgaaaattgttcaaggccacctttaagggcaaagcgagcaccaagaaggcagtactcaagttcctgcagcacaactacgagcttatgaacgagatgttgtag

SEQ ID NO: 34707 - protein, 332 aa, DROSOPHILA
MAKPFSLTEEKLDDLFVQEVVSVVKLVDMLPDKDNIVPTCTRWLNIFQQSTPKERFSRNYMLLLLHKQLNDHKSLGYPFTWPGSFQLDLRTLHQMSLKPNPAIGKDVVCCKFDESLNEEEQSSFSSCENIVEANRRLVKENAALTKESMELQCLIDKLQVKRAADKHAIKRINDQIYMLDKENRYLKRNFACSSISALKRLCNGQDPAMFFDTMFSVFCEDVSDHQQVQHFNELFKTLLHAHMDHYRRQQRAPLMEEASQSFDNLKAQVSKRYKNVLGMKLDAESHELTLSAMRYLAVLRKLFKATFKGKASTKKAVLKFLQHNYELMNEML

SEQ ID NO: 34708 - DNA, 3503 bp, DROSOPHILA
gatgtctacatagctgaaatgcgccgaggtccgggctacggtttcaatcgggatcaattgatcatgggcctggtggacttctcctttccggccttcactgccatcggagtgcagctatcgctactcgtccagtatctcatgctatatccggcagttctgcggcgggttcagaacgagatcgacgaggtggtgggatgcggacgattgcccaacctggaggatcgcaagaacttgcccttcacggaggccaccattcgcgaaggtctgcgcatcgagacgctggttccctcggatgtcccgcacaaggcgctggaggacaccgaattgctgggctaccggatacccaaggttagaaaagtttcctatctatttaattttaaaaaccaaactattttcccctatatacccgtacaggacaccattgtcgtgcccagcctgtatgccttccactcggacgcccgtatttggtcggatccggagcagttccggccggagagattcctggacgcggatggcaagctctgcctgaaactggatgtctcgctgccctttggagcgggaaaacggctctgtgccggcgagacatttgcgcgcaacatgctcttcctggtgacagcgaccatgtgccagcactttgacttcgtcctgggccccaatgatcggttgcccgatctctcccagaacctcaatggactgattatttcgccaccagatttctggctgcaactacaggatcggcattgaaagtagccaagatattagagttatctatttttaagacaaagtaattttactgattacgttagctagtttgcttggatattttttgaggaattttattccgtcacatttcaaaaatattctagaattgcccaatactattatgtgatgcaccacaacgaactatttattttaacattgtcgtttactcatatcgtgtggtatcaaagttcgcgaacggaacttgttgagaagatgcgattggaatgagatgggtttcttagaaatcctcattatcgctgtatacaatgcaatcagaatctgagctggtggatgaaaaactcaatgagcgaaccagcgagaccatcgaagaatgtattgagggattgggggactggatagcattgtactcggattctgaatccggatcgtatccttcctcatcgtccatttcctcttgcgggttcacgaatgagttgtccaaaggatccacctcgttggcggcttccatcgttgcaccctgagtctcattgcgcaactcgatcacttcttggcgaatctggttctgctcctccgcaatggtggccaccagttgttcgagactgcagatcttggcctcatattcggtcagtttcttcttcagctgacagttttcggcccgacagttggccaattccaagcaggcgcacatggcgatcttgacgtcatccgaggttgcggacctggtactgtatgcaaaccacattgttaccacaaggaacacatacgccggatatcgaaagcgatctcttggccgaaacttacatgtttaagccactggagttcttattatgaaccgggcaattgagggacattttgagacttgaaatttataggcagttcagtttagcaattgtcttacgacaaaatcaactttgacctatttgtactcggaaagttcacccagaaatatttgacactgttttactgttctcttcgattcgaatgcaaatatgagcttctgaaatacagaaattcaaggtccctagattttaatctccattttaaatgggtcgcaaatcgaatataaatcaaaagatacagtcaaattactgcagattgttttactagccgagctgataacaaaaataaaatagcaaactgcaagataatgtgcaaacactttgaccaaaatgcccttatcaatattaagacaattgagtggcaacaaaaaaaatagaaaatagagttgaaaacaaggtgataattgtttggttacgaaaacgacaacttgttcgctatgaacccagtgtttaaaattcactatcaaaacaagtgaagttgacatacacatgaaaatatatcttacttaaaagtaacttttataaataataaaataaatgttaatattatttaaactactggcacttacgccttttggtgacttcatcagcatgcattcacgactcgagcggttggagctgcttttccggggacacctattgacgctccttggcttgcaggccggagtcgtgggctttcgggaacacttgggcactattttcttgcggccgcatcccatatgtttgagtttctccgattgacgccgatgacgcgaagtggagcttttgctgagacaccgtttctggtactgcagggtattaacgaagggcagaagataaagttcgccggtcagggggaaagtgtgtaatccctaggaacttactttcgatcgatactgattcttttctcgcgaactcaatgcattccagtaccccgctccctgacgcagtgactcctccatttggaggtgcggggatttaagatgtatagccaccgcgtaacttaaaaagccgtttggatacggtgccatctctacttatacttttcaactaacgtactgaaatttaggatgctaaactaagaattacgtacaaaacattcgagcttgaaaaattgaaaggtacaaatttgagttgagttgctgttgctaactgatagaagtgaaatctcaaaactacttgtttaataataattgccagtttctggatttgatacacaactcttcgttggccttagtttattatgatgtatatattacaatttggttaaaaactgttcgcttagcctagcaacaagcggtttaacttcaaaacttacagataatttgtcattacacttagccgtattagataagcgagagtcgttccgttccgaggaccctttctccaaatttatattgcttcgactcctaaatatcaacttacgaactaattgatttatattcacgttgcgcatggacctgcatccatgccagtaacttggctaatactggccactcccgccgatccccaaatcaccccgatccccccaaggtccttggccaactcctccctcgattatcctcgccattccccaaacacgcaggtgaaaggatttaggttttggtttggttctagtagtaggcctgctttatggccgcactggtgataaggaaagcggagccaatcagcatgaaggtgatgattttgagagcacttggtctaccggaagaatctgcgaaaagcgtgacattcatagatcatccttactcaattggttttgcaaggacacttacttttcttattgggcatcacgcgaatgcattgattctgattggcgttcgccgagtagcccagcttgcactggcacacggagttgcggcactcgacattctcgggatccttttctacatagcactcggtggccttggtgcacgactctcccagctctgcaagattgcaacatattagaattattacaaa

SEQ ID NO: 34709 - DNA, 714 bp, DROSOPHILA
atggaggagtcactgcgtcagggagcggggtactggaatgcattgagttcgcgagaaaagaatcagtatcgatcgaaataccagaaacggtgtctcagcaaaagctccacttcgcgtcatcggcgtcaatcggagaaactcaaacatatgggatgcggccgcaagaaaatagtgcccaagtgttcccgaaagcccacgactccggcctgcaagccaaggagcgtcaataggtgtccccggaaaagcagctccaaccgctcgagtcgtgaatgcatgctgatgaagtcaccaaaaggcatcgccatgtgcgcctgcttggaattggccaactgtcgggccgaaaactgtcagctgaagaagaaactgaccgaatatgaggccaagatctgcagtctcgaacaactggtggccaccattgcggaggagcagaaccagattcgccaagaagtgatcgagttgcgcaatgagactcagggtgcaacgatggaagccgccaacgaggtggatcctttggacaactcattcgtgaacccgcaagaggaaatggacgatgaggaaggatacgatccggattcagaatccgagtacaatgctatccagtcccccaatccctcaatacattcttcgatggtctcgctggttcgctcattgagtttttcatccaccagctcagattctgattgcattgtatacagcgataatgaggatttctaa

SEQ ID NO: 34710 - protein, 237 aa, DROSOPHILA
MEESLRQGAGYWNALSSREKNQYRSKYQKRCLSKSSTSRHRRQSEKLKHMGCGRKKIVPKCSRKPTTPACKPRSVNRCPRKSSSNRSSRECMLMKSPKGIAMCACLELANCRAENCQLKKKLTEYEAKICSLEQLVATIAEEQNQIRQEVIELRNETQGATMEAANEVDPLDNSFVNPQEEMDDEEGYDPDSESEYNAIQSPNPSIHSSMVSLVRSLSFSSTSSDSDCIVYSDNEDF

SEQ ID NO: 34711 - DNA, 3294 bp, DROSOPHILA
tgctgctgcacagcataaacagagtaaaatgtgtaatttccgtgatattttaatagtaaacaacggtggaagaaaactgcaagaaacatgcagggccgtttgcatatatgaagagctggcaaagtggctggcagtgcagtgggccagtgggtggattggtttggcttgggtggtgctgccgtgccgtgggtgactgggtggtgttgcacacgcacaggataagctgtaaggaaggcgaatgcgaggcagccagccattcaggatgtgctcgcgagaggaacagcgcgcgttcataaaatgtaaccaagagatgcatgtgattcgcatccgtacacacacaagcacacagggggcacccttcctgcttctgtgtgtgtgtgtgtttttgtgtatgtgtgcggctctgtgatttacggcagcactttatgcttaaaaaggatatcgctaaaatgaaaagctccagcactgccagtgcctccttgcttctctttcctcctatttttccctcgcagcgtgtgcgttttgccttccttatttcgcttttacttttgccccacaggatgtttctctgcatgtgttttatgatcatctatttttccgctgatataaaataaatatcttgtagatgcggggcagtcatgcctcgggctctgctacttttccccggcgctgctgttgctaaaatatttttaaaaatttatcaaaagcaaatagagaagttgggaaaaacaaacagaagcgtagcagaaaagtagcagcaaaataaagaaccatagcaaaaaaggtgcgccatttgcatgtgtaatgtgcgtttaaaattagctaaggacgtaactgagaactgagatgcactcagccggggaaaaagtcatctgtctcacactcgctcataagtgagtggggtcctttcgcagcaaggatactgcaggtgctttccctcttagctcaactcagcattgctttggttagttagacatgtctgtttttgatagctgtacatatgaaaccactaagcagtacgataacataaaaaacataattccagatgttttctctatataacttttacaaattctaaaatatttaataaattattacagcacttccccaaaacaatccactcatcagcagctttcactcaacttatcgctttaatgacttcgtagaggtcaactgtagtacagatttctccagccttttcacacggattacctggtacgtcaatgggataaaggtatgcgtagccaatccaaatcttccttcaagatcttagcattcgttttatttttgcaggtttctctggtggatctactaccctcttttgagaccaccatagtagcccatggatacagcatgcgacgcattgtttcccagctcaatttctacgccaatgaaccacgtttccatcaattgcaattgcaaaaactgatccagcaaaagcggacaatttcaccagcaagacttgggctcgagctgcgttgtgttgcggagatcgatcggtatcctcatctgcaaagagaaggcactatgttcgcccagctcttcagggacgatatcgatcagaaaaatcagaagctgatcaactcgagatcgggtaagtcaacatagatactccattgataaatgtatcgttaaaaatccttagttagctttattagttacgtcggtcacccactaaaagaagttcaacgttggcaaactccaaatttcgaacttgccggaaagtatggcgatacgtattaaattgtttgttaaaaagttcctttaattaacggtgttcaacaatgcgtgctcttaacacttaaaaatatttttaaatgtttattttttaattacgaaacaaaatttgatggctcaaaattgtggagtgtacatttggtgcttaaagtctcgtttcgtggcattgcttttaatgcacttgaccgcaatgtcagcggtcgctaattaaaattaaatacgtttccacacggactgacagtccggtcgcggtctcgctatttggacaaattttaacgcaaattaataaaagtctgatctctgacccgttgaccccactgaccccactgaccccactgaccccgccgaccccactggccattaccactccctcgtactcacattttatttccctatctctgcctcttcctgttgcaggtgccactccaaattcacaagtgcagcatctgctgctggtggctatttcgatgacgatgaccgcagtgcgactcttcacaccgctgacatttcaatatggcgcacggaagtcggcgcgctataaaatggcggcgacgtaatgtagttttcctcgtttccggttttgattgcgttattttttgttcggttcgatttgtttaacatttttgtagctctaagcaactgaaatgcacgtgagaatttacaaacaaaatcaatgtaatattaacgtataattctaataaaatgtctcggagaattttgtgggaaaaaattaacttaagcataggcaagcgaatcctgtaaatagcctttaagtgtgcaatcgaattataagaacaatgaaatcatcgtcaataaataagcaagcaaacaaattacttcttttacccttttaatttttggttcattttcaggcacgcccccaactctttgccgcccacagataaccgcaaaagttccgttaaatatgttgttgggagccctttttctggttcacattgcgctttattgtttcacttcttttttgtacttattgttgccttttgaggcacatgcctcgcatgcctttgggcatatcagctatgtgcgccacgcccacagaggcattcaacgcccccgaccctccattgagtcgtcagtctcgttttcatttcgcttttaaatcgaattcaatgaattcgattgcaatccccctttgcatacgcaagtttgcggcattggaggctggtcctccacacaacaacacatcagcaccatgcttctcaaatggccgacactgcacaataaagttaagcccgtggcgatatttagaggagtgcctgcttttaactcccatccaatgagaagatatcactgaatttgaaatattacccttattatttctaggaataaacaaaaataagagaacaatttcttattgatattttcttgtttctataatacattttttaagtgagcagtttaaatgattacaaattaattaaatatttttcagctgctgtaagtatttgaaagataaaactcattttactttttgggcagtcaaattaattttttttttttttggtttgcaaatacagacagcaaacccgctttcca

SEQ ID NO: 34712 - DNA, 591 bp, DROSOPHILA
atgaaaccactaagcacacttccccaaaacaatccactcatcagcagctttcactcaacttatcgctttaatgacttcgtagaggtcaactgtagtacagatttctccagccttttcacacggattacctggtacgtcaatgggataaaggtttctctggtggatctactaccctcttttgagaccaccatagtagcccatggatacagcatgcgacgcattgtttcccagctcaatttctacgccaatgaaccacgtttccatcaattgcaattgcaaaaactgatccagcaaaagcggacaatttcaccagcaagacttgggctcgagctgcgttgtgttgcggagatcgatcggtatcctcatctgcaaagagaaggcactatgttcgcccagctcttcagggacgatatcgatcagaaaaatcagaagctgatcaactcgagatcgggtgccactccaaattcacaagtgcagcatctgctgctggtggctatttcgatgacgatgaccgcagtgcgactcttcacaccgctgacatttcaatatggcgcacggaagtcggcgcgctataaaatggcggcgacgtaa

SEQ ID NO: 34713 - protein, 196 aa, DROSOPHILA
MKPLSTLPQNNPLISSFHSTYRFNDFVEVNCSTDFSSLFTRITWYVNGIKVSLVDLLPSFETTIVAHGYSMRRIVSQLNFYANEPRFHQLQLQKLIQQKRTISPARLGLELRCVAEIDRYPHLQREGTMFAQLFRDDIDQKNQKLINSRSGATPNSQVQHLLLVAISMTMTAVRLFTPLTFQYGARKSARYKMAAT

SEQ ID NO: 34714 - DNA, 2763 bp, DROSOPHILA
catttttctcttctttgagtttttaggcaactaattgccaatggctcacagatttctgttgaacgtttcaaattattgtttaagtaaaactttcatacaaaatagttttattttacaaaaccaataagctcaactctaccatctcacatcacagaatactttaagaatgtctgtacttggtcctggattttattgaagtaaaatgtcaaatgacaaattcaaaaggttcatatcaaaccagccggatagtttaccatttattgtatccttctggatcacagcacaatggtattcatctttttttagtgaaattaatttgacgtgtactttagcttgcctttttttctgtgtgtggaccgtaggagagaaactcgagcattattcagcccctgtcccaaacaaatccccttgtaacgagcatcggtcgtcggcggttgccgtttatattgcttatcaaatttgttgatttgctgccgcagttaccgcctaagccgcaaataatgcgaaatcgggcccagggcccccagccgctttttctaccatggctattaacaagtggcgctcgaaggcgacttatcaacactacagcagcgcacaaaagtaggcaacgatttttttgccttagccaggattttatttatgtggtttttgtagcaggggaaaagccacttggcatctgtttgcgagtgtgcgtgtgtgtgtgtgtgtgtgcgctggacaagttttccacttgaacactttttgttgtggattccgctttttacatgttttgaggcatttgtgggattaatgagcatcaatccacaatacaaaacaaattaaagggctgccctcgactcgacagccgtgcccctttttccatcgattcgaccactcgtcccggttttccacacgtcgaacccacattggcaatcagttaaggttgagtgcatgtaagccacttgtctgctagtggcgaaaaagagaaacgattcctccatttcctggccggtttgcgttgatggctttgaaagcttttaacccaagcctacgacacacatctgcagattatcagttggctttcgcagggatgagggaggaggacctttgcaatttgcggccactttgccagctcatctccactcccactctatagtgctgtcagcttggctattttttagtaaagcactggtaattttaaaaggaataccaataaatgtgtagaagggctataggtttgctatgtagctgtcagactaaaaaggtgatagtttaacaaaattttcagtatatttccctatgcttatttttatttttactggatctcatagaaaattctttctcttaacttaagttgtagtaattaacataatttgctttttattatacttgtatattatcccttaaagttgtctctttgtaactggcttagcaagaagttttaacagcacttgagctatgtactaaagtattttaattaatcacccaatcttcgcagatactcgcccctcaccccgcccacctacattccgttcgccgttgagggcgtgcagctgatcgatgacggcaacgagtgcaacgaatcctcctgtcgcgtggagctcaatttattgggcgtcaagtcgtcgggcgtctacaggtgcgaagtgtccggtgacgctccccacttccagctaactgcacgcgatgccaacatgaccgtcgaaggtgagtccaacaatccagatgatgcaggcgttgcaggtggaacaggttgggcaagtgagcagcaacggggtgcctgagtaatgaaatgcaattccaattgttagtcttaaattaacgagagtgagccagtgggtaagccaagctccacgcctcaaccgccaacgggcacgtgctcaaaaactatctttgtgggcgtgatgcaaatgcagaacaacattgtgttcactgagataaaaactgagatattaaaacattgctgctggtaaaacacaaagcacattacaagtaatttatttttatttccttattgtatttggaagtttaaaggaattcgagtacttgattttaaatcaaaaattctacaactcacttgacatcttcagggctgaagtttaataatttttttccagtgcataggtgcatttctcgttggcgtatccccgccgtgcttccttttgctgctgcacagcataaacagagtaaaatgtgtaatttccgtgatattttaatagtaaacaacggtggaagaaaactgcaagaaacatgcagggccgtttgcatatatgaagagctggcaaagtggctggcagtgcagtgggccagtgggtggattggtttggcttgggtggtgctgccgtgccgtgggtgactgggtggtgttgcacacgcacaggataagctgtaaggaaggcgaatgcgaggcagccagccattcaggatgtgctcgcgagaggaacagcgcgcgttcataaaatgtaaccaagagatgcatgtgattcgcatccgtacacacacaagcacacagggggcacccttcctgcttctgtgtgtgtgtgtgtttttgtgtatgtgtgcggctctgtgatttacggcagcactttatgcttaaaaaggatatcgctaaaatgaaaagctccagcactgccagtgcctccttgcttctctttcctcctatttttccctcgcagcgtgtgcgttttgccttccttatttcgcttttacttttgccccacaggatgtttctctgcatgtgttttatgatcatctatttttccgctgatataaaataaatatctt

SEQ ID NO: 34715 - DNA, 339 bp, DROSOPHILA
atggctttgaaagcttttaacccaagcctacgacacacatctgcagattatcaatactcgcccctcaccccgcccacctacattccgttcgccgttgagggcgtgcagctgatcgatgacggcaacgagtgcaacgaatcctcctgtcgcgtggagctcaatttattgggcgtcaagtcgtcgggcgtctacaggtgcgaagtgtccggtgacgctccccacttccagctaactgcacgcgatgccaacatgaccgtcgaaggtgagtccaacaatccagatgatgcaggcgttgcaggtggaacaggttgggcaagtgagcagcaacggggtgcctga

SEQ ID NO: 34716 - protein, 112 aa, DROSOPHILA
MALKAFNPSLRHTSADYQYSPLTPPTYIPFAVEGVQLIDDGNECNESSCRVELNLLGVKSSGVYRCEVSGDAPHFQLTARDANMTVEGESNNPDDAGVAGGTGWASEQQRGA

SEQ ID NO: 34717 - DNA, 2768 bp, DROSOPHILA
cagaaaaagccgagtaattattttacactttgctaccgctgccgttcgacgattttccaccattttccacttgcccgcgacgcagattcagcattttgatgaagtttttccacgacacagtcagttgtacgcccagtcggtcattccatctgtcgcctgtgcataataaagtttactttaagtttgttaaatccatgcccaccagtaatgtgacccacttttcaggttggcacgtgtaattatcgacatctcattaaatgaaatcaaagacaggcccagcaaaaggcaatataaattcgcataaattcgctacggcgctttaaatgtcaagtggtggggctcgtccatcgatttttctgcctcactggctgctggggtcatttatcaatatgtagattttccacggaaagttcaatgggtccggaggacacacatacgcactatacactatacacatggacccccgtataaattgcgtaattttttttacacgcacacacaattggagataaattgactgatatgcatgttgtgggccaccgtcgtctgtctgtctggcagtttgatggatgcgtctgcctggaaaactgtcctcctacacgcccactttcacttttctgctctttgattttttctttaaataaatcgacgccccaagccacttccacttccggtgactgcacttaaatgccagacgaaagcgtaatggcatcaatttccttcaggccaaaatttaaatgtgtctaaatctaaaatatattatcagccaagatacatatcaatttcatgttccgaaggaatatactgtctgaaatattacatgatttcaattaaaccataattcaaataaatttttaagaagagaaaactatttaatcacatctttaatgcttttcccttcaattagtagcagttagtttattgtttatatttattgttgttactttatattgagttctttgcgttgctttcacatgttcttgtatcaataccagcaaagatgaagttggaccttaccatgaacgaccgtttcaatcagcggtttcagtcggtttatggcggacttgttccccagatcgcccgactggtgcccttcaacgactctgaggtgacctgcatcctgatgatctactacaagtatagtctccagaatgggccctctgctcgccgaataacatccagccagtttgtgaacattgtgatcggtttccagcagctatatgacatggacgtggtggatcgcatcgtaaccctaatcgcaggtggcaggaaacacgtgacgcccatggaatttgtcaactacatgaccattctaatgtcccgcgacatggaacggaaaatggaatttgcatatatggtaatgggaatgtacacgatacatttgttttttttttttttaatttttcaattaggtttacgacaaaaatggcatgggtattaatagagagatcatttcatcttcggtcgagaggtttttcgtcggcgacgacgacgaggtactcgagatgcgactggtgagctggaatttaccaacttcaagccctcattcaatctgttgcccaattaggacatggtcgattttctactcctcaaatttgatgaagaccaagacggctacatctcatttgaggagtatagatcgatcgtgttgcagcagccgcgtctgctggagtttctgggtcccatctttccctcggacgagacgcgtctggtggtggcgtactgcactgccatatactctcacatacccgaaatgggtacgttgtaggtatgattgcagaagggtatgtggcattttgccagaactccgccagtcacataaatctttgaggcacaaataaatcgaaagcaatgcaaatcagtgcgccccgccaccgcgtttttctctgttcagccattgtagccactcgaaaatgtcaatgacaatgatgatgaactgcagaatagagcgctgacagctgcaacgagacgctggatagatggatagatggatggagcatatataggggacaccagctgtctctcgaccacacggggaaaaatattaaagattacgatggaatacttaacataaatatcaataaaatagagtaacaatactttcaattcacagcttacaattcatttttgtatatttatgtttaaatgtttaattcatttaaactggctaaaaaattaataatttattattgccatacaaaatgtataaacataaattctttaggtattccaaaatacgatgtacacagatttgatttaagatgtacagtataatattataaaaactaactattaattttattacatttcacagatgtaagtaacttatttaaaatggcaatagaattttatacttttgagttattgttttgatgttattcctagtgtagcccgctttagtgacataattttaaatacggagcgcagctccagaaatactttgctatggttgaatgctccactggctcgacgactgccttttgccactgcctcatgacagcttgatttgttggcagttggcatacaattgacatttgatggatggtgttctacattgtcgggacattctccaatccaggcttccaactgcagccactgcaggcccttgaagttttccccttggccggttgctctaattatggccattggaaattgggagcactattaaaactaaaatttaaagtaccataaagacagggttttaaattgagggttttaaatcgactgcactctttttatttagtataaccaaaagtatacacttgcat

SEQ ID NO: 34718 - DNA, 660 bp, DROSOPHILA
atgaagttggaccttaccatgaacgaccgtttcaatcagcggtttcagtcggtttatggcggacttgttccccagatcgcccgactggtgcccttcaacgactctgaggtgacctgcatcctgatgatctactacaagtatagtctccagaatgggccctctgctcgccgaataacatccagccagtttgtgaacattgtgatcggtttccagcagctatatgacatggacgtggtggatcgcatcgtaaccctaatcgcaggtggcaggaaacacgtgacgcccatggaatttgtcaactacatgaccattctaatgtcccgcgacatggaacggaaaatggaatttgcatatatggtttacgacaaaaatggcatgggtattaatagagagatcatttcatcttcggtcgagaggtttttcgtcggcgacgacgacgaggtactcgagatgcgactggacatggtcgattttctactcctcaaatttgatgaagaccaagacggctacatctcatttgaggagtatagatcgatcgtgttgcagcagccgcgtctgctggagtttctgggtcccatctttccctcggacgagacgcgtctggtggtggcgtactgcactgccatatactctcacatacccgaaatgggtacgttgtag

SEQ ID NO: 34719 - protein, 219 aa, DROSOPHILA
MKLDLTMNDRFNQRFQSVYGGLVPQIARLVPFNDSEVTCILMIYYKYSLQNGPSARRITSSQFVNIVIGFQQLYDMDVVDRIVTLIAGGRKHVTPMEFVNYMTILMSRDMERKMEFAYMVYDKNGMGINREIISSSVERFFVGDDDEVLEMRLDMVDFLLLKFDEDQDGYISFEEYRSIVLQQPRLLEFLGPIFPSDETRLVVAYCTAIYSHIPEMGTL

SEQ ID NO: 34720 - DNA, 2153 bp, DROSOPHILA
gctctttaatttctttaagtgcggctttgctcgacagcaactacagaaatccaattatgtttgtttgcattcagtcagcgatttttgccactcccccttcggcatcctactcctcagtcttccagcgagcttcatagttatagttttttctatttttcccttttttcctgcccggcctgcacacacttgaaagcgctttcgagaatgttagttcaacatgcactcgaactctcggtatgctcgtatttacatgcgcctagctgagcccaaacttaacatcatcatcaggagcagcggtagcagaaaaagccggcaaagtttcagtttcatttgccatatttcctacccagctccgaccatcttcacctgccctttttctggctatatgttctctattccgtcacttgtgggaccctcaacgatttcatcattttaatactgcccctcggggatgcaacgctacacaagaggctcatctgcatctcaggcgaataatgggggaattctgctcacatctcttgcacatctccacatttcgtattttgcatgttgccaaaaaagtttgataaaccttgcacactttaggaatccaaaagtggcgaatattcacgatttataaatttatacctaaccaattctagcaaataacaaaattgtatttaaaaacaaaggcgtttcaatgaagtatataatgaatacatattactcccttagcgagaaatagtcccactttgatactaatgacaaagctaattaaatatttgatcaactccatacagttttaagagaattaccgcttcgtttaccgaaagtgtatgcagataagaaacaaatagcaaacaatcctccgtatgaagcctgctgtatctgaaacacacacaactggagcaccattatgcaaacagtcagcctcacctaagcctaagctcctgattctttgccaagttagttcattgaagaggcggcaatcggtggtaaggggttagtcgttatagccagcttacctggacaggcccaagatgccggtggcaccgcgactgaagcactgcaggcgcaatttgtaaattggatccttgtccaacccgttggccaactcgcgtttggccagattcttcagctcggcctccttgctgtaggcgttttcgcgatgcatctgcaaaaaataaacacacacattcaaataaatctatagtggtaacgaagcgcaccctttgatgatctttgaagtagaatcaaagagagtgagaaagatagtatattaaatttttaaggataaattaaatctttatttacattatcttagttccaagcacgcacaaaaatatatttgtttacaagaagccaagcaatattaaatgattaaatactgcttgtaagatttgtatattagtaggaataacgttattcattccttctttatatctgtgtgtagttaattaacatttgagtttcctttgttgtgtctaagcttccttataagctgtcaattgcctgcgggcgatttacaagaatttgtttgatatttaatttctgtgtttacgccgctacaataattgtcagctcagcaaatatttttctggccggaaaattggataggccatggttgccaagctgcgacagctatagccgagagctattacacccggaattgatttactttggctcaaaggcgcctaattacaccagaaggtggtatgccattcgtcgtacgttttctctaagagaccgaaagcggcttgtaatttatctagatgatttacattttaaataaatttgtccaaatataacttgtcagtcacttatggcgcacacacttcacggttcaatggcatcgaaaggcttgccagccattcagtatcttaaatattaatcgaagtcaaacacaactttgtaaaattaagaccagttttcaggccaatgaaggaatcactttaggtaaatttctgttacaaatacttttgccacattcaaagacttatgcactgaggattacatgaaaaattgccttaaagcatttatttaggtctcatacaagagtttaccttatatgtttcatggaatgaaaaatattaatgtcctaattattaagcttgctgcatattaaatttttaaaatataagcaaatcataactgaataagaacatttgtatgat

SEQ ID NO: 34721 - DNA, 153 bp, DROSOPHILA
atgcatcgcgaaaacgcctacagcaaggaggccgagctgaagaatctggccaaacgcgagttggccaacgggttggacaaggatccaatttacaaattgcgcctgcagtgcttcagtcgcggtgccaccggcatcttgggcctgtccaggtaa

SEQ ID NO: 34722 - protein, 50 aa, DROSOPHILA
MHRENAYSKEAELKNLAKRELANGLDKDPIYKLRLQCFSRGATGILGLSR

SEQ ID NO: 34723 - DNA, 2288 bp, DROSOPHILA
aggaaaactcaggatgctgtgaatggagtgtgaatgcgcgaagctgagggctgctgtcatttgccatttggctgccccttttttgcatgccaccgtttctttggggctcactgcctttcttcggcccaattttttttatttcatgtcactcgtgcaacttgtcgcttaattatggcacactcgaaaaggccaaaagtagttgacaaagctgacaagaaatcagcttaagagcaatcaccgtgagaagtggattcaattagttgagctttgggcttaagaagtttaaaagtaacacttaagatataaataacagtattacatatatcaatattttatagttctatagtatcctacatatttataagagacatgtatattatcactagttgttgaaacggacaattcaacagccagagatgtgatccacggatgtaattgaattactctaaatacaattgttttgacatgcggaccatctggaaattagaactcggccagatccctaaattatatatgtaatttctgcaaaaaggcaggagtgcaaatcattttccacacaatttcaataataattgcacaaatcgcagacttgactcgcagcggctgtaaaactaatcaaaacttggcttgctgctcgtaataacttccatttgcagacatcagttccactagcatttccacttttccccctttattttttcccactgctcttccttctggtattttttgaagttttgcaaaagttttaacttgacaaacccaacaagtgccgatgacaatggaccggctatggacgccgaagtgaaatgggataaaatattaatagtcaagtgaacttttgcaattgactatcatcaaggaagtaaggaagtgggtggtgggggcagggaaatgggattggggcatcagcatctataatttctttcgctcaaacaaacttggccgtcgaaaatgcactaccagctggcatgtccttgcctccttttgtcctcttcctttttcacaatttgttaattactgcaaaatgaacttcttcactgatgaccatgctggaaaggagatactggtactggtactggtactggtcatactgctgctccaactgcgactgtgacttggccaacagcagctgccgtttcctggcctgtccggaacggcatggaatggatgcctccgacgacaatgttttcaggaccaggactttagctggtccttcgtccgtggactcatcactttcgatgtcgccattgtcgtccgctggctgacgtgacgttccatcagcggacattccatcgtcactagccctgttccattccaagctcctcgtctctattcctttggttgcactgaaaacaacattaaaggactaaaatctccatgtaaaagctgcgttgaataaaaataaaataagtccgtaataaaattattcagagaaccttcaactcgttattttgctgccccaattccggcacatcagcatgcgaattcatatttcacgttattgaattattacgtttttttccataagttattgaaattcgaaattagggcaaaataagtgaatcttaaatttcttgatatatttcatcatacgttaaactcacatccgtgacaactttaaattgaaacaagttaaaaaattaaaattcctttctatatcagaattccaggattttaaattttattgttgtcctaactttcaaatttatgcaattaatgtggttttgttagaatttgcacagtgctgctgtatctgttcactaatgcggtttgttttcgcaatttttgttttgcgcttcgttatttcttgttttgttttaagttctacttcgttctctgtcttctctttttccctttctgcatacttccttttcagcaggacaaacaacgtcactacgcggccaggatgccaaacaagcttgagtcgccaggcgcaatttttcattctgggcccaggatgggcaaaaggacatgggcaaaggacaatgccacccattcattaccagtgctttggttgcatgcagcgtggcagtgtcctgtcgagtggtgccaacttgaccgggataatattttggatgagtctggacataatttataatgcataccattaaaactatgaagtgtgattctcaagcaaagcaattgaatgctcactcaaaataatcaaaaaaaaatatatagtgggttttacgatagttgtatataattgaatacaccatgtatttaacaaaatgtttgaccgtcgtacctcctaataaataatctttaaaagtctatttatttaaaac

SEQ ID NO: 34724 - DNA, 288 bp, DROSOPHILA
atgtccgctgatggaacgtcacgtcagccagcggacgacaatggcgacatcgaaagtgatgagtccacggacgaaggaccagctaaagtcctggtcctgaaaacattgtcgtcggaggcatccattccatgccgttccggacaggccaggaaacggcagctgctgttggccaagtcacagtcgcagttggagcagcagtatgaccagtaccagtaccagtaccagtatctcctttccagcatggtcatcagtgaagaagttcattttgcagtaattaacaaattgtga

SEQ ID NO: 34725 - protein, 95 aa, DROSOPHILA
MSADGTSRQPADDNGDIESDESTDEGPAKVLVLKTLSSEASIPCRSGQARKRQLLLAKSQSQLEQQYDQYQYQYQYLLSSMVISEEVHFAVINKL

SEQ ID NO: 34726 - DNA, 3723 bp, DROSOPHILA
tcgggaaaggaaatgaggggcataagcggtttttttcaaggggtccctgccggtttttcaggaattcagattaagtgtgttttttttttgctctgactatgacaggcatccgttaagtttctagaaaacggaaagcacttaaaagattaaagaatactggttaatgtatcaattcgcggaagggtccttcgacaattactaaatggtttgtttaaaagtttaagctttgtttaaggcatcagtgaaattatttataatttttaaacaaagttaacttgttattttttgtctgtattttctatactatgattaaggattcgttttattaaagtttcagttacctgataaaaaacctgctgtaattgctgtaaaaacaagtgatttaccccaataattgtaccattgtatgtttcataaagttgttctaaaagttgtgtgttttttaatcgttttatttatttcccatacatcatttaatacaattaacaattcacatacaataattaagtttacttgccattgattgtgtgtgttcctctttttctgtgctcaaatattcatgtgtaaatttgttgatattcaaattttacttgtctattgaaataattctgacacataatcgtagttggtagcaaatgttacgttcatatacctagatattaagttattcttcatagttttcattcagtgttgattttttggttttgcatttccgctggcctgcttgttcacacataaataaatgttgcattacacttatgtaggaaatggctgggcttcctgttcggacctagactaattcgatttcgactatatacaaattcaactgttgctgccttggcttgttaacttttcacttggctcgaaatcctgcgaatcgccccatttattttatttggcgcgtgtgtctatcttatttctcctaatttttgagtgtctgcacttggaggcaaatcctggaaacttaggccaggaatagagcgccagtcagtgccagccactaactctgggtgctgtgccagcgtaggatgtggacaaggctcaggagccaggcggccagggaggctggaaaacacaacagaaatgtagaattttaagtaatattaaatctttctcagaaacccaacaaaaggtaagccgctactcaacatgttctgttaaaatttagcgaaacgaatactcgaggaggattatttctgggtgaatctgcttgccaactcacctggttggccggtcatgcaggatccgttctcggtgagtcgctgcttggtgccggcatccctgagcgccaggatggtggtccgtaccctgctctcccgcctaacggctgccagtcccatgatgtccgccgtgcagcggagctccaacatttcgctcttgctgatgaaccgctggtcgtccaggtggagtcgcaagtgcaggtggctggcgaacaggtgaaagccgtccacgttgcgtgagacttcgttgatttgcggctgcaaactgtgcccaggtgcctgtggccggaagcaaacggaaacggaaatggaaatgggaaaaagcgttgggtttaaaagccgaattgtgcaccacatgcgggcgtgcctttcagacctcgcacagtactctgtcaacatttggccaagttcgatggccagaaccaggctggcttagcgactgggccaaagtgctcactaaataaaaaattaggttcctcttattgcactcgaaaaaataaacacaagggaatatactcagcacaagcattaccataaaaagaaatgataaaataattacttttaataattatttataattttctgctatacctaccgtcttattgttaatataccatgttaatttggccatcggacttgacatctccgtactgcaatttgcctcgagatagtcgtgatatttgtatgcgtgtcgcacgcccgaaatgaacggatcgaatttgggcaacactgaaatataaatttaaattatcataagcagtagtccagaaatattaggtctccactttgttccaattgcaattaaaggtctcgaatttaaaatgactacatgagaatgtccattcaggaaaatggcataaagtttcccatctctggtggcaaaagtaaatttgtgtggccaactatgccggaaaatgcattatgctattcgggcaccaaacttatcccaattagagagcctaaagtcgggtcgaaatccgtgcacagttgccgccacagaaatggatgctacatgggaaagtgccggctgcactttcggcagcacaattaccgacacgccaacagcaaatatttatttgaagtgttaattaaccttaacaaataattgcccaggacaaagttttttgatgaaaacaagcgtaatttagtttatggcgagtgtcccccatatccattccctcccccaccaaccaaaccaaccacaatggcaacaacaaatcccgaatccaaatgaatgttgttgtgggaaatttgtgaaatatgctaaggacctacaaggcctccagagacaatggacggtggggattgggacttggagtggctgtgggtggggcatcagaagtcaggcagtcagcaggactgtaaactttttaattgacttaatacaaaccactttggtggaaagtttctgacctgtttcaagtacaacttacgggtcggaggactgacggaccaacggtccgaaggacggaatccagagttgaagttgatgattgcggccatgttgtgcctggtggcacgccccctttgccggtttgccgcccccaattgtgtgacttgcattgcgggcgaaacaaaagcagcaaaaatgaaaattcaacgaaaacaaagcaatcaactagggtaaataaaccaaaaatggctatgttgtatacccgagtatagccagtaaagcaccagaaaccagattgaaaaaatacacacaccaaaaagtagggggaaaccccctcggaaaaccaagaaatacaaagcaaagtccgtatttcgggggcaaaaattgtattgttggtatgctaaacgaggctaaacgagcaaaaaacgaaaaaaaaaaaaaaaaacggttgaggatttccactctaaacaggtgtaaccattttcgagagtgagtttattttaaggggaaatctaaactcgaatgataagccactttcattaaatgtcaaaagtcagaggggcaaactggacacaaacactggaaattgaatatttaatattcaatcagttctttgagtttttccttactccgtaaggatatcgttaggccaagaattgtttcatttttataattatacagataggccgtatttattttatttattttctaagccgaatatttatattccacaatttttattagaatattgtcgttgcagaccagaccaatgcttagactgtacatatataaatctccttctctaatatattcccaattattccctatgaacatatgtattgcattccttgtagactatttgctctataagtagttatccgctctttcaacacaaatttctctcagtgaaaaacagggaaaacagaaactaagcagcttgtccctgaaaatgcggaaaatctccgaagtaattaagtgcggctcagtcaccgtttaatggtcagtgtgtgttgaccggcaggtccaggcatatcctgccgtatcctggagtatcctggcgtatcctgacatttcccggcccactgttgagctgtgcaaacttggcaaagt

SEQ ID NO: 34727 - DNA, 546 bp, DROSOPHILA
atggccgcaatcatcaacttcaactctggattccgtccttcggaccgttggtccgtcagtcctccgaccctgttgcccaaattcgatccgttcatttcgggcgtgcgacacgcatacaaatatcacgactatctcgaggcaaattgcagtacggagatgtcaagtccgatggccaaattaacatggtatattaacaataagacggcacctgggcacagtttgcagccgcaaatcaacgaagtctcacgcaacgtggacggctttcacctgttcgccagccacctgcacttgcgactccacctggacgaccagcggttcatcagcaagagcgaaatgttggagctccgctgcacggcggacatcatgggactggcagccgttaggcgggagagcagggtacggaccaccatcctggcgctcagggatgccggcaccaagcagcgactcaccgagaacggatcctgcatgaccggccaaccagcctccctggccgcctggctcctgagccttgtccacatcctacgctggcacagcacccagagttag

SEQ ID NO: 34728 - protein, 181 aa, DROSOPHILA
MAAIINFNSGFRPSDRWSVSPPTLLPKFDPFISGVRHAYKYHDYLEANCSTEMSSPMAKLTWYINNKTAPGHSLQPQINEVSRNVDGFHLFASHLHLRLHLDDQRFISKSEMLELRCTADIMGLAAVRRESRVRTTILALRDAGTKQRLTENGSCMTGQPASLAAWLLSLVHILRWHSTQS

SEQ ID NO: 34729 - DNA, 2408 bp, DROSOPHILA
atgtgacgcgctacctgaagacactcatccgccgggagggctttaacttccggtcgactgccgaatttgagattgtgcgctccatcaaggagaaggtctgctatctggccaccaatccgcagaaggaggagaccgtggaaaccgagaagtttgcctacaagctgcccgacggcaagatctttgagattggacctgcacgcttcagggcgccggaggtgctcttccggcccgatctgctgggcgaggaatgtgagggcattcacgacgttctgatgtactccatcgagaagtcagatatggatctcaggaaaatgctctaccagaacatcgtgctgtccggcggatcaacgctcttcaaaggattcggcgaccgtctgttgtccgaactgaagaaacactcggctaaggatctcaagatcagggtaattatttctaacaattgtatagttctgtgccatgagttctgaaactcacgaatttatgttaacagatcgctgcgccgcaggaacgtctgtactccacatggatgggcggatcgattttagcctcgctcgatactttcaagaagatgtggatctcgaagcgggaatacgaggaggagggacagaaagccgtgcacagaaagactttttagcctgtttataagcttaaacgccatttgtaaaaggctaattaaaatgtatatcaaatccttgtgtcagctaacatgaagtaccctataaattgaaaagtaaaatgtgtatgttttacgcatcaagggcgcaaagtatttaaaatgctatttattgaaactgctttcccagcctagaaaataaagtactaaaatttataattcacttgcggataattccttcccaggttaactcttaaacaataaaccaagaaatttcaacaagctattgtatatttggatgtacctaacagatagtaatatcttattgctcgaaagattttttacactaccgcggatacattagctatcaaaaaaattgtactttcttcatctgagatagctagtgacgccaacttgggatgtttgtgaccccatgggaatgctaccacccaaaaacatgctcttgttcggaatcaggggaaaaactatgggctgccggtccacagttgcggcaatcgcctgcgtcatcttgatgacgctctggtccagcttgattccgcacttgcccttgtgcaggtggaagaatgccggacagtggaccttgccgtaggggtcacgatagtgatcccggtacttttggcactccaaatagaatgtgtcaatcctgtagatctctgcacgacttatggtggccaggtcgaccgcctcgggcacgaatttacgaatcatctgacgatctttttgggatttcttcgaaacgtcccagtactgagcctctggtatggcaaattccatggttctttttttttataaatctttcaacgaaatatatttaaatttcttttttaaaactcctaactaaagctgtgtgtaaattgtactgttgtgagagactcagctcactgtgatgcaaaccaaaataagaaatataaataaaataaactcaaaatatcatcaaagacataaattaaaggtaagaactggtctttctaccaaaggatatatgagccatatagaacatgctgaatgaaatcaatacattttcaaaccactgccattagtcatggctactcaaaaacactctttccagcttgtagcactctctttctggccaagtatactgaatggccgaatcattcgaatcgggtagtgctctctggacgggatttctgaattcagttctccgccagttgttaaatcgcttggttgtgtcggcaaccgtcgccacgacaacgccgctccaagcacaaacaattagttgccaatttcaggagacaatgaaaaccgaaacaacttgaattgaatgttgttgtgagttcttttgactgacacaaaaactgatccaaagtgcagtggtgtgtggcgaaaaacaaagctccaaccgaaagcaaaaccgaaaaaccaaagattcattcattatggcatcaggtttgcagcgggttaacgaaaatgaggtaagtcaaaatacaaatatctcatatctgaagatattccaatgtattcacattccgagcacccaccgaccttgatcttagccatatattcctggtcttgaattatttatttgttcgagcgaatgagacacaccatcgtgtccacatccccatttccattccatccgtaattgccagtccgggtaattattgtctttgttccaactgttcgtgcaattcaaaaatgttgtatatccgactcgttggccttatgcacttttaaactgcgatgagctgtgcgaaaagcatttgttctcatattgattttgtaattgttatgggaattgcatccttttgtggta

SEQ ID NO: 34730 - DNA, 408 bp, DROSOPHILA
atggaatttgccataccagaggctcagtactgggacgtttcgaagaaatcccaaaaagatcgtcagatgattcgtaaattcgtgcccgaggcggtcgacctggccaccataagtcgtgcagagatctacaggattgacacattctatttggagtgccaaaagtaccgggatcactatcgtgacccctacggcaaggtccactgtccggcattcttccacctgcacaagggcaagtgcggaatcaagctggaccagagcgtcatcaagatgacgcaggcgattgccgcaactgtggaccggcagcccatagtttttcccctgattccgaacaagagcatgtttttgggtggtagcattcccatggggtcacaaacatcccaagttggcgtcactagctatctcagatga

SEQ ID NO: 34731 - protein, 135 aa, DROSOPHILA
MEFAIPEAQYWDVSKKSQKDRQMIRKFVPEAVDLATISRAEIYRIDTFYLECQKYRDHYRDPYGKVHCPAFFHLHKGKCGIKLDQSVIKMTQAIAATVDRQPIVFPLIPNKSMFLGGSIPMGSQTSQVGVTSYLR

SEQ ID NO: 34732 - DNA, 3137 bp, DROSOPHILA
tgaattcagttctccgccagttgttaaatcgcttggttgtgtcggcaaccgtcgccacgacaacgccgctccaagcacaaacaattagttgccaatttcaggagacaatgaaaaccgaaacaacttgaattgaatgttgttgtgagttcttttgactgacacaaaaactgatccaaagtgcagtggtgtgtggcgaaaaacaaagctccaaccgaaagcaaaaccgaaaaaccaaagattcattcattatggcatcaggtttgcagcgggttaacgaaaatgaggtaagtcaaaatacaaatatctcatatctgaagatattccaatgtattcacattccgagcacccaccgaccttgatcttagccatatattcctggtcttgaattatttatttgttcgagcgaatgagacacaccatcgtgtccacatccccatttccattccatccgtaattgccagtccgggtaattattgtctttgttccaactgttcgtgcaattcaaaaatgttgtatatccgactcgttggccttatgcacttttaaactgcgatgagctgtgcgaaaagcatttgttctcatattgattttgtaattgttatgggaattgcatccttttgtggtaattatccttgcagtatggctgaatcctttgtttccccacagaaaccagtaaaaaatgcttggcaggttagttttcaatgatgtatgctttttatttactatgcacatttgtgtttgtaacccttgccctgaatgttagcctatttttcattactcggagctgcgatgttctgttttcttatcggcacaagatctgacacaaatggcaatagataaggaattactttgaaagcgatctttaagattcattcacttttaaagtgactgttgcagcgccatcatgaccactttcctcgaaaatgtatctttcggttctgcagactttatatcctgaattcaaatactcatatatgtacatatataccctatattttagatgaaggcaatggatgccaataggtatgccaccaagaagacgatcgcccagggcatgctggacatcgccctgctgaccgccaatgcctcgcagctgaagtacatcctccaggtgggcgaacagcaccagttctacaagctgatgctgatcctgatcagtctgtccatagtcatgcaggtgagtatataatcactgtagattcttattctctaagtgtcaggcacagagaaaaacataaatgtgtatcctaatgaaatccatcacactcggaaaaacttggctagatccaaatgacaatatggaactgatagttatgtttttctctgtgcaggtcctgtcgggcgtgctgagcctgtccctgagcctgctgcgggattgccggctgcatcagccggagtttcatcagtcggccaatatcattaaccatgtgcgcacgggcttcgccttcttcacgaccatgatcaatctgttcatctcggcctttgacagtcgattgcctccgccacagggcgactttctaaacaactaggactagagggtgggcatggtagggattgtacgcttccgtttctaatgcattcctcattccccattttgacagcttttggtgggcattctgttcgtggtcatcgggagtctcaacataaacaggcagcaggatcagacggcagcggtcatcctgaacgatgtcattttggtagtcgtgttcataatatccgtggtgaacgttatcatatccggtttcggcatagagtactcatcgcagccgctccgacttctcgatcagcacgaaaagacaccgtaaaatctagagatccaacgatttacacttatattcatacaaatatgtactttaaggctaatgcaaacctaagttgtagagggaaataaatgaatgtattgataccaaggcattgcattttctcttaccttcgcaaacaggtggctgctggactcttgctggtcattcagtccctcatcaatatgcataataccaaggatcgaaatcggggcttcgccatcaaccacttcatagatgccttcatattcctgtccgtgttttgtgacatcatgaagatgaattttggactggatccggcggttcctcacacagatgtggaacttctgaagccctgaatttttgaaatcacagctgaggttaaattttgatgaacgacgtaggctcagtgttttaaatacacttgcttgccacattgtatatataaatttttaccaaaaaaaaagcaaatttctattaagtgataatgctagccgcgttttagtgtaaaatcacagaaacaaaagattagtgctttttaacagttgtttgttgcatatattttggaaggcccgtaaatttaacgttttatttgcttactaataaatcaagatgccacgcccagaagcaggcgacaggtgagcaatcctatatttacacaatttgaattcgatataagttcgcgcttgcaagaaaagtgtgaccgccgcgcaaatgtggaccgttatcgataggcgccgattatttatgttcattgtcaatgacaatttgttttaaagcgaaaaatatagtacaggaataatagttagttagttacgataaatatgagtataatttcaaaattagattaattagtttaaattaaggccgttgacgggctggtatttctttgacgctcttggtatattgcagtatttatccgaagactctgtggtatttcttcgttgtctctggcgtggtcacgttgattggtccgctatctggaccgaaaaaagtcgtattccaaaaataatacgtatacgtacgcgcgtgaatcactcgccacacgacccagcgcagcgcgacaatcgagtgtagacacataacataactgccgtagtcgtcgcctccgtgacatccgcgccagcaccaacccgaatccggccgcgtcccccgtttccaaatccaatttcccctttaatttcggtggctaatattagagtcttgcgacatgtttagctttctgaagcgcgagaagaacacccaggaggtagtggagaatgtgatcggcgagctgaagaagatctatcggagcaagttgctgccgctggaggagcactaccagttccacgactttcactcgccaaagctcgaggatcc

SEQ ID NO: 34733 - DNA, 699 bp, DROSOPHILA
atgaaggcaatggatgccaataggtatgccaccaagaagacgatcgcccagggcatgctggacatcgccctgctgaccgccaatgcctcgcagctgaagtacatcctccaggtgggcgaacagcaccagttctacaagctgatgctgatcctgatcagtctgtccatagtcatgcaggtcctgtcgggcgtgctgagcctgtccctgagcctgctgcgggattgccggctgcatcagccggagtttcatcagtcggccaatatcattaaccatcttttggtgggcattctgttcgtggtcatcgggagtctcaacataaacaggcagcaggatcagacggcagcggtcatcctgaacgatgtcattttggtagtcgtgttcataatatccgtggtgaacgttatcatatccggtttcggcatagagtactcatcgcagccgctccgacttctcgatcagcacgaaaagacaccgcattgcattttctcttaccttcgcaaacaggtggctgctggactcttgctggtcattcagtccctcatcaatatgcataataccaaggatcgaaatcggggcttcgccatcaaccacttcatagatgccttcatattcctgtccgtgttttgtgacatcatgaagatgaattttggactggatccggcggttcctcacacagatgtggaacttctgaagccctga

SEQ ID NO: 34734 - protein, 232 aa, DROSOPHILA
MKAMDANRYATKKTIAQGMLDIALLTANASQLKYILQVGEQHQFYKLMLILISLSIVMQVLSGVLSLSLSLLRDCRLHQPEFHQSANIINHLLVGILFVVIGSLNINRQQDQTAAVILNDVILVVVFIISVVNVIISGFGIEYSSQPLRLLDQHEKTPHCIFSYLRKQVAAGLLLVIQSLINMHNTKDRNRGFAINHFIDAFIFLSVFCDIMKMNFGLDPAVPHTDVELLKP

SEQ ID NO: 34735 - DNA, 6820 bp, DROSOPHILA
tgatattgttgttattatggtccgctctttctcttctttctctttgcttttatcttatggccaacaacttcgacgttttgagcccgttttagtcgccgtgtggcattcaacgaactcggacggatttagcccggcttcggagcccagttacagcacctcgaatgcagttgcggattaccaaaagctagaccagtatttgtacggattgggtcgcgttttttacgagtgacgatgtggtgcagtggagttgaagttcaataaggcacaagtaaatggcatttcgaattggctcattcgagtgtgtgtgtgtgtgtgtgtgtgtgtgtggtgtggcattttctaattaccgcgaatatttctgcagtgaaagtatctcatagatgcagctcgaatcccagtccgtagtgcgtggctgcaaatagcaaccagcatttttccgatacaacaatcgcatttcattgggcaatttatcagccgaaacggtgtacaaactaaaaacgtaaagctggaaaacctcaaaacgcggatcatatatatattattaacaacgattttgcaataccttttcctactcgtgaattatggccaaatggttttgggggcctgtgtcttaatctaataatgctaaagtctgtcggtttttggttttgcttgcagttaattaatgagccggttccagtgcgatgattgaatgatggccccagtggagcacgccatgcaaatgcaacaccttcgccggccatcttacagtgtgcctaatatctcatgcccagtgcgattcgctaacatgttgggaattaacgttcattgcgcctaaacggattgcattcaccgctaattgctcacaaattgctagctcctccgccgccgaaataaaccaacaaagagatcaagttaaaaaccaataataaccagtcagtgaaacagtgaaaatttgcatacgcagctgaggcattccgctagtgtttagcacgtcccaccaggaagaaggagtaggaggatggtcacctgcaaggtggactctcagaccgcggtcgctgtgcccaaaatgaactcggtccggacccgtggaaagccccccgccgccggcagcaacagcaatagcaactcctccggctttcggctcctggacggcgaccagctcgaaaacaattcgagtgtcagccgcaactcgatctacaaactgaagatcgatctcatgtttgacgattccaggtgagttacggatatgatgttttcggtcatagtttcggggtgaaatttggtaattggtagcaaattgcctggggaggtgtgttttggtgggccattagcctcgctctccatctccaagcaaaacaaatcaattagcctctcatttccccagctgaccacccaacactttcgttctcgaaaccgcgactcaccagatacagatacagatacaaaaactagtttcaagagatatttcgtttaccgtttggcatttccataaccaacataaaactacagttagttccaaaattaaaaactatattgtccgatggagcagattcccaatccgaagtggggccatcaaaagatagagcgacacttgctctttgaataaacaaatattcatcggcgacacacattcgccggcggacgaactactaaattgattgagaaagaaaaccaagagctccccctcccccagcaccactcatcttcatcttcattcccattcaaaactcggagacgttctatggaaataagcatttccgattttatgtcagctagcggtaaacggaatggctcgaattgggaacaccttaagctgcattcggtgttcggcacttggtcatcggcctccaagacgcctctatcccggcaacctctctttgaccatttcatggttctcgggctctgacccggtcagcaggatgtggccaatttggcttccagccaacaagttcacaaatacctgacactcggactcaaactccgcggcgctgcgaatatgctaatctcggcttgcttttgcgttaatcagtcaaactttcacaaaaatggaaccgttttctcgattcaagcactaaacgtgttgactggagaacggcaataaaataagaagcggaatagatcaacttttcaatctaatcgatgatctagataacattctaactaatgagttttgggaaaattaaattaggtacctgttcatcgccaaggatgcttttcggatgggcttggctatcaaactagtttgataatatcaatcgaaattggggacttaagggagttgtaaatgaatgaaattctcgttgttaacttttgttaactttcattcataaaatgaggcaatcctttctctctaactagatccatgcgaagcagccgccttgacgatccccgtggatcgcatcgcacccgctccatcatcatgtatgggcgcagtgagttggccagcacctcgggcgacacgccgcgctccctgagcagcttcctgcaggacaaccagcagggaatgggtcagggtcaggggcagacggccaaggtgctggccgaggcggccaagaaggacgtgcagcggatcagcaacagtgtgcaggcccagatcgagcagatgttcacggacgtggccaaagatgcgaccagcagcttcgatgtcacctgtctaggttcgctgccactgaaggacaaggtgaccagtctgcagggcctgcaggagccactgcgtcagctgtacctcagtgaggtgaccaagaaggtatgcatgttctcaaattctccacccaactggccataatattctgcttccaatcaacagaagctcaactctggatcgctggatatctgtgccaccggactgagagtgaagatcagcgctctggccatctcaaatggagcggctgctccggaggagaacgaggccctcataacgcccttccacaacattgccgtgtggtcggcggtgaagttcgtcatatctgacgacgatggtggtgccgcctttctgcccctgatcaccgatccagaaaatatcgacaagactgccctgttccagccactcaggtgagttatcattctaggttctttggagcacttattcttaaccatatgattaatttacttaaaatatatttcaaggatatatctattaattataaactattttatatatcaaatttatagctccagcgagcagctggcggtggagcacagcatccatgtgcacgcgcccattttcgcggtggtaatgcggtcggccagttcacccaaggtgctcgagtgccatggtttcatttgcaagagcaccgaggacgccatagtgatcgcggccacgctctaccagagtctgatggctcacgtaagcagcagttcccggcggagcacccagcggagggcaccgcgtcaacagaacggagttagttgcatcagcatcgccagcagctcggcattggccagctcaaactacctgtcgcggtcgcagattgtgcctagtgcctctggacgtcgcagctccttccggggcagtgccagtggtgctccatcccgttctggtcgaaagaagcgggtgtccaatagctctctaagctcacacagtaatgtcatcaacgagacggcagagttggaaacgtcgacggaggagcgcaggcgcaaatcccacaagtctaagcgagctcctccggttcccacaaccgttcctggtttgggtaaccacagaagcggcggaggaggagggccatcgcgaagtggcagcattgtatgtggcaatggtcatgtgacccggctgcatcaaagcgctcatcacggcaagaagacttccgtgggttcggaactatctgccactgtcgacgtggcacccgccaacggggacatactcacgcgtgtggccattcccagatccggcagctttctcaacaccggaggactgacacgctacaagtcgcgggcggcgagacgccattccggcaagctaggcggtggaggcggcggcggaggagggtgagtattgccaccggtccggtggtcagatgcaactggcgcactgcaccactgcttctggcccatgggcacgggcggcaactttttgcaatatgggggagaaggtttggtctggttgattggcatcgcttgaattgtgcttctagttccccacttggtttcagcgaactgtttaacgaatttcgcctgcacgagaacctgcactcgctggacgacatcctgtacgccatcatcgacgcggacggcatgtccttcaacgatctaaagcccatctacaaggagtttctgctgaagctggctgtcacactgacccaggatgagctcttccagcgttccaagaacatcatgaggcgccagaagaaaaagaagcagaagcgcaaggctagtgttaatggatcacaggtgggtttccttttctgaactttggatggtccaagtacataatacatatttcatcttagaagaaagcaaagacgagttttttcggcacaaagagtttgaagaaggtgctccaactgggccagtttcgctcgtgccgcggcaagttggcaaagccgacggtgaaggagtccacgctagacagcaagggcaagcccaggatcagttcgcccatcatcattggaccgcccatcaaccacagccacgcccagcaacagcaccagcggaatagggcggccacaagcggttccgatgtctccgtggtgcggaacgagcacacccaaggactcaatcgaaacagcagcagcgggtacgtttccaccattaggtactacatgttttactatctatttaaaaacgggcttcatgaaaatctttactttctactctaatcccagtatttttggattttaactaaacccctcgtttatatcccccagatacgtgtcctgttctgagtgcagctatgactccgagtcctgcgcctgcgcctccgccgatcgctgctactgcagcctacgaacggagcacctgaaccacaagttgcgccagaagaatgaacggaccatggccctggcctcacccacgcgaaagccctcgaacggagctgtcctgccaaccaatacagcaggaactgcagccaacaaccggcactcgttgatatcctgccgctcggacgacaagtgttactgctccatggtggaggaggagccggccagctcgatggaacgcgactcggccaacaacacgcacacggaaaccactacatcgtgtgactccgacagctgtgtgagcgccagcaaatgctattgcaagcgaacccatcgtcgccagcgatccgcggcggcggcagccatcagcgaggattccctgtcgcaacagcagcgcaaatcccgcccaggcaacgcaggagctggaggggcacgcaagggaaagtctgcggagaagttgggcctggactacgagctctttagcatcagcggaagcggtcaaccggtgcagccgcacgaggcactgagcgtgaagaagagcgtggaggcggcggcggtctttgcggacatgaagctcagccagacgactgacattaaaagcctgtgcccaccgaagggtcctggatcgaggattggcaatggtagctgtcggtcgtacgcctcttccagaaggtcctcgtaccgcacccgcgaatcctttagcacggatcggttgggtggaggcctcccaccgccgatgcctctgggcagtggcatgggtttggcgggcggaggaagtgccgacaatctgctggcgaatctaaaggccatggaggccaaggccgcctccattcgtagcaccgccagcaggagccgcatgggcagctatcagtcgatgcgggcggtcagcgcctcgctagaggattcgctgggttacttgccatagaccaggatgagagatccgacactagaagctggttctgataagattgtacatagttcataagcttatatttaaaggaaataatttactccatcgaacggcttatgtttcccaaggcgattttcaagcctaccgtataaacgatcaattatcttgggaaacgtaatcatcattagctttaagtacctcctatagaaaattcagtgagactttatctctaagatcgtatccgtagaaatcaaggtgcaatataatgaccaatcttttggacattcaagagttccaattatttaaagcagtgcaatatttttaaatactattttaaataaaaacatatatactcaacaagaaatatcagtttgtggtttacgtaagtcctgggatgatttagcaatattcaatattctatatatgaatctttgtgtcggaaatgactcctatctcaaaaaaacagtgatttggggaaatccaaggaaaatatagagctctttgagcttatgcgatgtacagtgagtactaatcagagcagaccttttatagtttatgaactataatttgttatatatatatggacaaatataataacaatattttagtgacgcaacacagattggaaccgacaggatctaataatatctgtgatttttataagttttacagattacagatttcactgtaagctgacatgcttaactatttgcttcgtcattctattttgaccaggggatgcgatcgctgactcctaatcaaaaccggagggtcagggtcagaagcaagtcacaaaagcgaaagcccgccggcgagagcacgttccgtcgggaacagatgttgaagctctagccgtcatcccgcccatgggtcatacgtcaaatgggcggaactgataagattatgaagtgctatgtatgtggccgaagtcggcactatgtgggagcgccagctgttggcttctgaatcccaggaaaggcgacgtcgaacgtgatggtggaacggcaaattattc

SEQ ID NO: 34736 - DNA, 3180 bp, DROSOPHILA
atggtcacctgcaaggtggactctcagaccgcggtcgctgtgcccaaaatgaactcggtccggacccgtggaaagccccccgccgccggcagcaacagcaatagcaactcctccggctttcggctcctggacggcgaccagctcgaaaacaattcgagtgtcagccgcaactcgatctacaaactgaagatcgatctcatgtttgacgattccagatccatgcgaagcagccgccttgacgatccccgtggatcgcatcgcacccgctccatcatcatgtatgggcgcagtgagttggccagcacctcgggcgacacgccgcgctccctgagcagcttcctgcaggacaaccagcagggaatgggtcagggtcaggggcagacggccaaggtgctggccgaggcggccaagaaggacgtgcagcggatcagcaacagtgtgcaggcccagatcgagcagatgttcacggacgtggccaaagatgcgaccagcagcttcgatgtcacctgtctaggttcgctgccactgaaggacaaggtgaccagtctgcagggcctgcaggagccactgcgtcagctgtacctcagtgaggtgaccaagaagaagctcaactctggatcgctggatatctgtgccaccggactgagagtgaagatcagcgctctggccatctcaaatggagcggctgctccggaggagaacgaggccctcataacgcccttccacaacattgccgtgtggtcggcggtgaagttcgtcatatctgacgacgatggtggtgccgcctttctgcccctgatcaccgatccagaaaatatcgacaagactgccctgttccagccactcagctccagcgagcagctggcggtggagcacagcatccatgtgcacgcgcccattttcgcggtggtaatgcggtcggccagttcacccaaggtgctcgagtgccatggtttcatttgcaagagcaccgaggacgccatagtgatcgcggccacgctctaccagagtctgatggctcacgtaagcagcagttcccggcggagcacccagcggagggcaccgcgtcaacagaacggagttagttgcatcagcatcgccagcagctcggcattggccagctcaaactacctgtcgcggtcgcagattgtgcctagtgcctctggacgtcgcagctccttccggggcagtgccagtggtgctccatcccgttctggtcgaaagaagcgggtgtccaatagctctctaagctcacacagtaatgtcatcaacgagacggcagagttggaaacgtcgacggaggagcgcaggcgcaaatcccacaagtctaagcgagctcctccggttcccacaaccgttcctggtttgggtaaccacagaagcggcggaggaggagggccatcgcgaagtggcagcattgtatgtggcaatggtcatgtgacccggctgcatcaaagcgctcatcacggcaagaagacttccgtgggttcggaactatctgccactgtcgacgtggcacccgccaacggggacatactcacgcgtgtggccattcccagatccggcagctttctcaacaccggaggactgacacgctacaagtcgcgggcggcgagacgccattccggcaagctaggcggtggaggcggcggcggaggaggttccccacttggtttcagcgaactgtttaacgaatttcgcctgcacgagaacctgcactcgctggacgacatcctgtacgccatcatcgacgcggacggcatgtccttcaacgatctaaagcccatctacaaggagtttctgctgaagctggctgtcacactgacccaggatgagctcttccagcgttccaagaacatcatgaggcgccagaagaaaaagaagcagaagcgcaaggctagtgttaatggatcacagaagaaagcaaagacgagttttttcggcacaaagagtttgaagaaggtgctccaactgggccagtttcgctcgtgccgcggcaagttggcaaagccgacggtgaaggagtccacgctagacagcaagggcaagcccaggatcagttcgcccatcatcattggaccgcccatcaaccacagccacgcccagcaacagcaccagcggaatagggcggccacaagcggttccgatgtctccgtggtgcggaacgagcacacccaaggactcaatcgaaacagcagcagcggatacgtgtcctgttctgagtgcagctatgactccgagtcctgcgcctgcgcctccgccgatcgctgctactgcagcctacgaacggagcacctgaaccacaagttgcgccagaagaatgaacggaccatggccctggcctcacccacgcgaaagccctcgaacggagctgtcctgccaaccaatacagcaggaactgcagccaacaaccggcactcgttgatatcctgccgctcggacgacaagtgttactgctccatggtggaggaggagccggccagctcgatggaacgcgactcggccaacaacacgcacacggaaaccactacatcgtgtgactccgacagctgtgtgagcgccagcaaatgctattgcaagcgaacccatcgtcgccagcgatccgcggcggcggcagccatcagcgaggattccctgtcgcaacagcagcgcaaatcccgcccaggcaacgcaggagctggaggggcacgcaagggaaagtctgcggagaagttgggcctggactacgagctctttagcatcagcggaagcggtcaaccggtgcagccgcacgaggcactgagcgtgaagaagagcgtggaggcggcggcggtctttgcggacatgaagctcagccagacgactgacattaaaagcctgtgcccaccgaagggtcctggatcgaggattggcaatggtagctgtcggtcgtacgcctcttccagaaggtcctcgtaccgcacccgcgaatcctttagcacggatcggttgggtggaggcctcccaccgccgatgcctctgggcagtggcatgggtttggcgggcggaggaagtgccgacaatctgctggcgaatctaaaggccatggaggccaaggccgcctccattcgtagcaccgccagcaggagccgcatgggcagctatcagtcgatgcgggcggtcagcgcctcgctagaggattcgctgggttacttgccatag

SEQ ID NO: 34737 - protein, 1059 aa, DROSOPHILA
MVTCKVDSQTAVAVPKMNSVRTRGKPPAAGSNSNSNSSGFRLLDGDQLENNSSVSRNSIYKLKIDLMFDDSRSMRSSRLDDPRGSHRTRSIIMYGRSELASTSGDTPRSLSSFLQDNQQGMGQGQGQTAKVLAEAAKKDVQRISNSVQAQIEQMFTDVAKDATSSFDVTCLGSLPLKDKVTSLQGLQEPLRQLYLSEVTKKKLNSGSLDICATGLRVKISALAISNGAAAPEENEALITPFHNIAVWSAVKFVISDDDGGAAFLPLITDPENIDKTALFQPLSSSEQLAVEHSIHVHAPIFAVVMRSASSPKVLECHGFICKSTEDAIVIAATLYQSLMAHVSSSSRRSTQRRAPRQQNGVSCISIASSSALASSNYLSRSQIVPSASGRRSSFRGSASGAPSRSGRKKRVSNSSLSSHSNVINETAELETSTEERRRKSHKSKRAPPVPTTVPGLGNHRSGGGGGPSRSGSIVCGNGHVTRLHQSAHHGKKTSVGSELSATVDVAPANGDILTRVAIPRSGSFLNTGGLTRYKSRAARRHSGKLGGGGGGGGGSPLGFSELFNEFRLHENLHSLDDILYAIIDADGMSFNDLKPIYKEFLLKLAVTLTQDELFQRSKNIMRRQKKKKQKRKASVNGSQKKAKTSFFGTKSLKKVLQLGQFRSCRGKLAKPTVKESTLDSKGKPRISSPIIIGPPINHSHAQQQHQRNRAATSGSDVSVVRNEHTQGLNRNSSSGYVSCSECSYDSESCACASADRCYCSLRTEHLNHKLRQKNERTMALASPTRKPSNGAVLPTNTAGTAANNRHSLISCRSDDKCYCSMVEEEPASSMERDSANNTHTETTTSCDSDSCVSASKCYCKRTHRRQRSAAAAAISEDSLSQQQRKSRPGNAGAGGARKGKSAEKLGLDYELFSISGSGQPVQPHEALSVKKSVEAAAVFADMKLSQTTDIKSLCPPKGPGSRIGNGSCRSYASSRRSSYRTRESFSTDRLGGGLPPPMPLGSGMGLAGGGSADNLLANLKAMEAKAASIRSTASRSRMGSYQSMRAVSASLEDSLGYLP

SEQ ID NO: 34738 - DNA, 2759 bp, DROSOPHILA
ttgcttttattgtatagcttactgaagttcactcggtagatatatatatattcttaactgaactcgtttccattttgtcccacccatgtccagttgcaactcagccacacctcatcacaccaaacgctgttcactttattatgggacaagtcggcagcaatttcctcgaaataaaataaaatgtacattattgtatgtacattattttaatgctaagccacccggggtaatttgtaacggcaggactttagtacagagccaattactctagttggagtgagcagatcgctctatctgcacctgaactgacatagttcgcggatccttagggataggcttggctagtttccaacacgacagcattatttccttttgtagcaactttaagggaccccgaccacgacttcaatacgcgttgaagtcacttgttgttcccgtttctattccgttgccttcgcttttcttttctgtgtgtcatgctccaatcataaaagcttataagcgttacgcgtttcaatggcaacatgtgacttgtataaaaggggaagttggaggaagaaatcgcggaagtggccaactttgtccatctaccccaaaaaggacatttggatccagacgtggtaatagcgtctggcagggaaagcgggcttgggtctctacacccaaaaaataaaagctaataaaaaatgttgtttgaagaattggaatcatttacacttgtgtctgaaagtttgttatgagagatggaattacgtgttttaatataccttctctaaggtaaccaacgtagctcaaagcacagtttttttcatagtgcatccgagagttgattgcgtgtctaggaggcgttcatcatgggcgaattctataagcccgcacccagtgaccggccagacagccggcagacgaacagtctgcctggcgtgagtctgcttggtatgctcctacccctgatatcttcctctcatttcgtagtcccgctcctcttaacccctaaccgctaaccccctgcaacttttaaactcaccgcttggaagtagggctgctccagatagaaatcaaacttagagctactctcctgcaacttgggtccattatcattgcgatccagtaacttgatatccaagatgcgcgagaattttctctgatccctgctggacaatttaaccgtgcaggtaatcctggcctgcagctgccctgccttggcattcagtccattgagctcgtcgtgatccaaggtttgtcgggtgtagagtcgattttgtttcaaaacaaaatgggaactaccagcgttcagggaatattccagggatacatgaggacacagatacttcgcagcgcgggaattaagggcgccgataagtacgggttcaaaaaaatccttccgccgatatggaccgtgcgactctgctatagtgtactgagcactgctccagaagcaaatgtgctccagttccgaacagtactcctccaggggctgaggtgtaacctccaacgaaagatgcgaaacattcagcagctcgtgatccggttgatctctgggaaatgcggtcaccaagaatgtggcacttgagtttggtgagcggtagtcagtgcgcatatatatctcgccggaggaactgtttattcggagtagtggattctgctccaggctatacaagtaatcactggctaaccggttgtcctccatccgcagcacttggaactgggctagcgggattttggagaatatgctctccgattcctcattgatgggcatattgaatttcaccgacgtggtgggaaagtaaacatcgacggctgaaaaggagcaagagggtagaaaaatcaagttaatacggtcgcgtcataagggattttgcatagggtggtggtcattgtttggcatgctgccacaagtgtttgaccacaattggcccactcagtttaagtgggtttccaattccatttgtggcttaatattcaattcattgactagcaaagctaggaaatgttggtggaaatcgaaatatattacttaaaggaaattttatttattccgactaaaagggattaaaaccactgtgccgcaatcaatgaaatatatttccgagggttggtttcagattttggctttatttgcatcaacgaagggacacacgctggcagtcgttaataaatccaatcaaataatttcgtttaataagcttgggttgaccctaatagatctggcaataattcccaacttcccctgtcgaccaaattgaacttggcgtatgcgtaatttgataagagctccatcctaatgaccgactattgttgtgtccgtgtgtttgcatacgaggcaaagtccaatacaagcgataaataaatataatgctgatattaggtattagcgtatgggttatcaaaatgacgaaggcaacaccgcccttcccatttcattgttgtcatcccaattgaagtgtcggcgtcatcgggttgcgtattgattttgtgataacgataaagtttttgttagccggaaaaatacaaccccaggcataattggatacaaattttcctcgccctttgcccgagaacttcatgccccaaattttatgccacaatatttgtattaaacattgggggaaaccgaaacgacgaactcgtgtattgttatggtgtaaatcggttgggatatcttgttgaataaatagcaatcaaatgcattgaaatataactgatttatttgaggggtaatttgggaagttgatcgactaaattgttttagagttagt

SEQ ID NO: 34739 - DNA, 759 bp, DROSOPHILA
atgcccatcaatgaggaatcggagagcatattctccaaaatcccgctagcccagttccaagtgctgcggatggaggacaaccggttagccagtgattacttgtatagcctggagcagaatccactactccgaataaacagttcctccggcgagatatatatgcgcactgactaccgctcaccaaactcaagtgccacattcttggtgaccgcatttcccagagatcaaccggatcacgagctgctgaatgtttcgcatctttcgttggaggttacacctcagcccctggaggagtactgttcggaactggagcacatttgcttctggagcagtgctcagtacactatagcagagtcgcacggtccatatcggcggaaggatttttttgaacccgtacttatcggcgcccttaattcccgcgctgcgaagtatctgtgtcctcatgtatccctggaatattccctgaacgctggtagttcccattttgttttgaaacaaaatcgactctacacccgacaaaccttggatcacgacgagctcaatggactgaatgccaaggcagggcagctgcaggccaggattacctgcacggttaaattgtccagcagggatcagagaaaattctcgcgcatcttggatatcaagttactggatcgcaatgataatggacccaagttgcaggagagtagctctaagtttgatttctatctggagcagccctacttccaagcggtgagtttaaaagttgcagggggttag

SEQ ID NO: 34740 - protein, 252 aa, DROSOPHILA
MPINEESESIFSKIPLAQFQVLRMEDNRLASDYLYSLEQNPLLRINSSSGEIYMRTDYRSPNSSATFLVTAFPRDQPDHELLNVSHLSLEVTPQPLEEYCSELEHICFWSSAQYTIAESHGPYRRKDFFEPVLIGALNSRAAKYLCPHVSLEYSLNAGSSHFVLKQNRLYTRQTLDHDELNGLNAKAGQLQARITCTVKLSSRDQRKFSRILDIKLLDRNDNGPKLQESSSKFDFYLEQPYFQAVSLKVAGG

SEQ ID NO: 34741 - DNA, 2204 bp, DROSOPHILA
tcataaaatcgtatacccataaaccacaattaataaaattctcattatcaagccaggctttggcgatctctacgccttgcaaagtgccatgaaccaccgacaagccatgagttggcagcttgaccgaagggcggccatgtatgccggacttttagtttagccaactacgaaagcgcttgtgccgcaagtggcaatatcaagtccaaaacttacataatcggccagaaacgagcggcggcggtcgccactgccggttatccaattaaaagcaaagatcagggatctttttgcagccatggcgctggaaaatgcaagtatttctgcagcatagtttttctccccgcagcacgcgacatctaggaaatggcaagcacatgacaactgagttttgccacggcagacaaatagaaactcccagtggatccagtagtcgtggccgccagagaaattttagaaaatctattaaattatgaatggttttttacaaaattaatctaatcatagcctttggctaaacagaccaagtaattggtactacatacgtacaagttatattaaacccacattaaaaaacaatacatttgcataatacaaatgaacttaaagcgtattaaatagcgctatacggagccacacacattgattgccaacacagattattggatcttggttcgtcgtacggacgtatgactgtgatatatataaagccccgtcagctgacttggccaacaagttgtcccgctccagagagtgaaaagcggtcatttaggcgtggactggatgcgggactgtggatgggggctatgcgtgtgtgtgcgtgacaggcggaaacgtgtagtattatatgcacgacgcaattatgtaataatcatcatgatagtaccttaagccgagcaagtgtaatccgtcagtcagccgaacttaacgaggcgtgatcttctccacccgttcaaggtgcctcctgcccggtcgcttcttctggtcagctttcattgtgacgatggtgggtctatccgcaacgatcgaagctagaccccagaggaatctgcagcacatcgccgtggtggagaatgccgcctgggaaaagacccttccgcagcagttccagaaccccttctacaataccccaagggtgagagatgccctggccagatccagttggtttggacccggcgaggaggtggtgagtgtcaaatgtgattagcttattctgattccccttaaaatatcctcccaattttcctttaggtttatgaccgccaggctgaaaaaattcctcgcatggaaatctacaatgtgttgtctcatgctggtttgataccacgccggcgttttctttaaattatgaatatttcaataccgcatatctgttgtaaaattataaaaataaaagtcagtcattagtgtaggaaaaattgaagtgtgattgtgtggtggtatgtggagccgaattagcaactacattccaacaggtgggaccacctgggtatccaagtaaaaaacacatttttgtaataaaacttgtattatctcgctgtcttatacaaaaatagaagaattaataattggttaggaacaactaaatgatttgtttacgttcaaatcctcagtttcgtcctcaacgccgtgatggtccttaatcgattatcaaggccctgcaggtcagtttctccctcaagcggcaggtccaccagcttttcattttgctccagcagcgttttccgggtgtccagcgtgttccttgcctcctcacccagctcctcgtcctcgtgctccccatcactgtcctggtgccccaccccattgccattgacggttaccccattggtcaaggcggcatcactcgcggcagatgatgagtgcctcgaggtggagtccgccggaataagcagcgatttcacgaattcgccacaaatcaggctcatggcaggcatcgtgtgggcggaaagattgacaaactgtaacacaaaatataacattaattgacattgaccttgctgaagttcaaaaactgtgttactattggctgtgctgcccgatttttttgagagtaaaagtaactagaaaaaatataaagtttttttatacatcaaactaggtagcatgctcaaaaagtgttaaatgataataatgcagtgctcttttaacgattgtgcattaattattgacctcatgtagttgagaactcaatcaatgttagttta

SEQ ID NO: 34742 - DNA, 204 bp, DROSOPHILA
atggtgggtctatccgcaacgatcgaagctagaccccagaggaatctgcagcacatcgccgtggtggagaatgccgcctgggaaaagacccttccgcagcagttccagaaccccttctacaataccccaagggtgagagatgccctggccagatccagttggtttggacccggcgaggaggtggtgagtgtcaaatgtgattag

SEQ ID NO: 34743 - protein, 67 aa, DROSOPHILA
MVGLSATIEARPQRNLQHIAVVENAAWEKTLPQQFQNPFYNTPRVRDALARSSWFGPGEEVVSVKCD

SEQ ID NO: 34744 - DNA, 9604 bp, DROSOPHILA
aagattaaggtaagaactctccatgaatacacgtaaatatagacactacatgtaatcatcctccaactctccaggtaaccaccgccggacctttggagcgcagtgtgcgagtgcctacggtgagttcctggcgcgtgaccattttcgccattgtggtgattggattgggcattgccctatgcattgccgggctcatgatgcactgggctccggcagcgttgaccggagggattggggttcttatcgtgaccattatgatgggttttatacccaaatacacgggcagtgtgatcaacgtgagtcccgtgatctgtggaatgtcgctgctgatgggcgtgatcctattcagtggctgtgctatacattcctggccgggattgcttatctggctgatggctggactcattctggtgatcagatgcgataaatactgttgcaattgttttgagcacaccaccataatgaatgcccagctgatacctagtgtctcgggaaagagcaacatggggtcagcgtcgggatcggcatcaaatttagcgggtccctccaccagcatccggatacccagaccgcccaagggaatgggcgtagtcggcttgccacagcgcatcaacgagcacagatgacagtcggagtcctcggaggaggaaggcgaagacctgttccacgaggacttcaatgtgcgcgactttgacgaggaggatgacgaagattgctggactgattagcttgcgccttttaaaatccgtttagaaaactatttaattgctatgcggatccccaggacgatccagcttcgagccacatatgcctgaaattttctagctagctaaattgattgtcgaaatttacttatgtatttacaaatatatagctaggcgactctctgtacaactaagttcagaataaattaaatttttcaaaacgaaaatgtataatcaatcgttacatcattttacattgtaagagtttcgtagctgcatagaatgttatctgccatctaaatatataaattctcattctccatgaggtaatccaccagttccctgataggcgtcataatggtctcctcgtaaccaggttgaatctcgattaccctgagtaataactcactccgatcgcagttgaggtaatagtcaaacttctccggttcttcggatcgttatctatttgaaatactgggtgacatttttgtctgaggttcggtgagagcccaaataacaagggctgccaatcgagttctttggcactcttttctaaagttattttctgttatgagattcttgtccaaacccagacgatccaggtgatgctgtagattcttataatagtgctcgagacactcatcataaatcgcccttctgacttcagcggaggctacaatatagagtaggaataaaacatctaaggtgggagaacaatactgggtgagttgaaaatctacaatgcagcaggcattaggtaatactgaagattccttgttgaaatagtacacaatattatgatcccaagtgtctcgatgacagagtacatttcttatagtctttgagggggcgaccagttcttcagccttggttagaagattgtagagcttatcttgaataaagttctgagctttcattgtttgaaaatgcggattacgtgctgctaaaaaaacgattgcctatggaatttataaagtgtaacaattcagttttcatatttcgtaaccgatctaccaaccttaagtccagttatgtaccacgagttatttgaatccaaatgtaactcaatgagcacatttttgtaactttcgtaaatctttacattttctttttcttcccaagcgatactagctgcatgtaattcagataggtgttccaaaacgattttataatgatctaaagtatagtattcattggctctaagatgtctgtagtcctgggtaagatcttctaacactaggatatcattccgactgtagtaacattttggataaagcttcttagtggctaaaaaaatgtacgtaaatacgtcttcctagaacaatatatagatttttaatagacttaccatatttttgaatcttaggtaatatctggctatatagagcagactccttttgaaaaactcccttgcgttcgcattcctctctttgtggctcattttttcggggtaggcttttaataaaatagttaaggaaatattttttcttgtcgcctttaacctccgcttccaagtgcaatttgtagtattctcccatatagcccatgagatccttggagcctgcatccacctgtgagtttataagtatcacattgtcttttttgacaactgaaagggttctctgagctattagatggcattcctctgaacttagtaaatccatatttggagcgaaaaaaactatcttatccgctacgcttctagattcaaactgaaatgcctccagaaacgaacctttaaagatatctctttaagattatgggggataagaaaggactagctatcttaaatgaaaataaatgacatagatttctgcctccatctaggataatgacctacaaatgcaattgtacaagcattttttcgcttttgtaattatacaaaagtctacgtttatgagttcataaccttataaacaaccatcttcacacgtgagcgataagataatcgcataagattacaaaaattatgggtaaacagatagcacagctgcaactgataggatcccgattgttaccagggggaacagcagaagctcgtgggaaagtgtcgtttaatcagtgtagtttatgatatgtcagtgccagtaagtcacccacacagtcatacatataatctgcaaactccggatgatttttcatcaaacggagaacatctgcacttcgatccacattgcagaagcgatggaagtcctccggtcgttcatccttaaggtttttcagataattatcgggcaggcggagtacggtagcggctatgcaattgtaagtggctccgaataaggaaaagtcattgagagactgctcaaattcctgtttactcagttgctcttgataaggattgacacccatttctctgaattcctcagccaatgcgtcatagtacgtctcgattagactacctatcatcttttttcgactaaagggttccagatttagataagtaaccagatgaaaatccatggcaggtgggctatatcgacacagttggaagtccaccaggatggatctctcttcgtggggcttctccttgtggtagaacacattcgcattccatgcatcacgatgaacaaagacattcctatgaactggtgatggattcaccatacagtaaaccttgtccagacatctaggcagctcctgtgctatatactcctgcgcctcgggattatccaggacatcaggatggatggcagccactgctaagacagcctgagcagatcaacatgtttaaacgtgaaatgtacattgatatataaaagatgatggtacatactcttaggcccgtggtataccattcaacttccggatcaacagacacttcttttagccactttctgaactcaacgccaatggtttttccctgctgcttttcgtaggcaatactactggcatgcaaggtagccaaggatttcagaatgggtcccatctgattctcatttaggaagcgagttccagggggtagtgcgacatatcccatgtcctctacattttgcattacgaacagatccttccgggtgaaatagcacttggcactccacacatgtttagctgtcatagggtatatgttaagatttggcccgcaaaagaaaaacgaaaacttacaaaatttcttcagctcgtttagcaaatcgtagagctttatctccttttcaatgagacccatcttttccatatagaattccatattcgcattttggaatatcaccgacttgacaaacagtcgagaggtttgtacatctttctgatcctccaactgatactggaagtacaagtgaaagtattcacccaaaaaaccagtgtgttccgtagcgggcactatattaaaattgagtagaacaccctgctcgttcttatcggccaataaatttgctaaaatcttgttacactcttctaaagtaaacaattctgtgcggttttctcgcgtgaaaacggggctatatggttccgtactcatttttaacaattgagcgattacgattaaactgctcccaagttaattttgtactggtttcatttttatttggcttttgcaagcttaagagtagaaacttactctaaaataatggggtttatatgacttgggaaaccaaacatacgagaggaaaccatattatttcatattgcaattaaaacacattcaattattcaatttatgtgaaaggtacatgtttcatattttaatcggtatctgttggttgttgactgtttttaatagtaaaactattttaagatttccttgcacgcctcataaataaaagagtattaaagattcggggactgggtttatttgtccaattttctacaataacgtgttatcaccttagcgaacagctagtgaaactctctttcttatcagcagtataacgacacttcctcacatgttcgccctggccaaggccatttccatgacatccacacagcactcctccatatatgtagcgaattctgggtttgttttcatgtaagaaaggatcaccttactgcggtccacatacttaaaatcgttggttatgaagtcggtggggacctttacgaccgtagcagctaccgctctgtagaccactccgaataaccgaaactcttcgtaggattccagcagctctgacttagaaatcactagttcctcaaggcccaaatccgaaaggttctgcagcaaatatgtgtggtataaatcaatgccttgcttctccatttgcttgcgtttgctggagctcaaattcatgtaaagacaaaaattgaggtcggatgctgggggagcgtaacggcaagtctgaaaatcaatcagtaaagcaggcccagaattttccgggggaaagaaaatgttaccagcccaaatatctcgatgacagaggacattcctgtatttttttgaaggtgccgcttgctcgtagattgtctccattatgcccataagtttgtcaccgatgaaagattgctccctatttccctgatactttgcaagacttcgaacgacagctagaacagccgagagtcctgtagtgaaccaggcaatttcagagtctactgtgatctctaacaagttatcaccataggtgtgacctatattggtttttgtctgatgttcgtagaccaaactggcagaatgaaatgcggcaattgatttaattaatggtttcacgaaaacctcattgagttccgcggatccagctgatgtgaaaccctttagcttaatgttctccagtaccattaggtcttttcggctgtaaacgcaatttggactccactttacgttggctagaaagatgctcgtcaataatttaaatttgttgtatatctaaccttacttacaaagagcttgcagtttttttataagagtgtcgtagagccaggattccttttggaaaatactttctttggacaattccgcactttgctggggcatagcctttacaaaaagttcaatttccctaatgatttcttcttcctcctaaaagtaggcaaacatattatcgttgtaagttacctttcacgtggaaacatctacgtctatctttgatagatctgaccatatgtgattgatttatgaatgtcaaataaataattaacaagtatactgtaatatacaaggcatcgataacgaactgatagtcgtggtttcggtttacttcttcctccttatattttattttatttaattcttatctaatctaaaatgttaaaattattagaacaaatccgtttagggcttttcatttcaataactaacccaattaacataactatgcaaaaacgaccaccactagaaattgtaatctttcactatcatttacgatcgacacactttcccattttgtatctccatgaaggcttacattgtatatcaaatcaagagataaaacaatgatattgtaatgtcaagatcatacttacatggcaatatcttagcgtcagtgcgtagtaatcccccaggtaaccgatcgcactgagatccctgactaaatggtagtccaacagcttgactctaacggcactttcttgtgcattttccaatattttttgacactctcggtaacaaagcattatgttgccgtatacgtaacgtgggcgtattacgtatacgttagattaagctgtcgctctcttcgttctagaaagctagtagtggcctgaggcgacttttccgacgatttccactcagccaggtatagctggccgcgcacaactgagcagaaatagaatttcgctcagtttttattttctcacggtaacatctttcaaatgatcagctgttcagcctcaaatgtagcagaaatgaagtatagtgtatagtattatctgagtgataagattaaggctgtgtttttcgatacaaaattataatttagagtataaatacttttagaaacggtatagttcattacaattaaagtcataacattgaaagcgaaacatatgtatgtatgtatgctgttctctaaaagacaaggtaacaattatcttaatcctttaaaaactgtttatcttctccaatgttgttctagattatgttctcatttattagattaataaagattaaggtacaataagtgaataccaaatgtttgctcattgaaatctcttgggtataatcaatcgctttagtcgacgtttctcgttaatatacgtggtatagggacgtatagtgatgtagtaaaatatctccacaaagctgagaagactggcgcccacaaacaagccagtagtgccgccaatggacacttaaaaagggatgtttagcttgtatattactatataacatacatacgttcattcactcacccactaaatccagtttgccacgcactaaatttcttttataccgttccgtgggcaattctatgaggcccacttcgattctggagatggcgttctgactgccagccatattttctttgctgtcgtacaccgtagtgatatccacttccgtacaagagggcaggcaatcacagaccagaccctttcgaccacggagcttcgaccattttgcgattatcaccgataggtcctcgtagttgcgattgaggcactccagaccctccatgttgcacagctgccaatcgggcgaattcggggacaggtgactggagcagttgcacaactccatctgccgatccttccgacactggaccgtgcaggcactgtagctatagaacttgtgcacatccaggatgttctcgtcggcgaaacgacaattcctctgatggacgctggtctggcggatctcttcatcgttctcaatgtcgcgcttagagatgtaacgcctaaaaaataaaactctgccccactgaatacttatgtttactacttttatgtcatctactaacacaaaggagatatatggtcccacaaccaggaaatccgttttaggggtgaccagggtgggaacttcttcggtgccgagtataaagacctttcagaagagaaaccagtgctgaattcatattttgataaggtgagctaatgtgagcttttaagtcttttaagcgcacttttaggtgcaatgcgtaatatatctgcttaaagctgtttatttctgatcaaatttaccgtggcctcagtgtgcaattccatttttaaggcgcctggtccactaccacgattcgaatacatattgagcttgggcattttgggtttcctaaaagtgtaaaacggtccatcaaagctgtaatacattcaacgcatttattccagacgaacccagcttgcattgaattaatggcatagcaaattcccagctcagtctccatgcgatgaaagtacttgcagcactcaaatggtttattattccactcgcaattgctgattgagtcaacacaactgctcctaaccaattcggcgtaatatgagaaattggagtaaaaacatgaggcagttacctcctcgccactgcattcgtggactgtgtggtaggattcaccgcggaagaaggcaatctcgctgagaacctcctccaaagtaaagtcgtgatcagcgccccacagtctgaaatatatttaataatacattcttcatagcaataactattttttttcgaatttacacttactgttcagccacctcttgaatgcgatccatattcttcgattcgcagactattatggcaggaaaattggtattccaatcgcgaaacgaactttccacaacgaaactgatggcattgttctcgaaggcacctaaagataatgcaagtatttgttgaagatccgagatatggcagtgtctcaagtcacttactcaacgaagctttaataagcaaccaggaggcgtaccaagaagcaacgagacaaatgacccaaaagatcctctctatccaactggcatccttgtctactataaaccgcgctccatgcaaagtggagttctttagatactcctctataactcggctaaatctcatggcgatggtgtcccgttgaagttcggtcgatgaatgtttatttagaaactattactgaaactttattcctcattaatgaccataatcggctgttcatctcatttgattccctcagctgttgattttcccagacttcaaacacgcaagtgtccaggaatcaaatcaacatttgcctaggcggattaaacactgtttgcccatacaaacagcttatttgaaaaacttaccaaattagctgtataagttatgactcccataaattcgagcaatttgtcgacaactggaaaaaggcgtcggctggcttagaaatgattatcaagtttaataatcatatttaaatgaaataatacaaaaagtgttcaaatgtaagtcgttattagtgaaaaaataaatttaaaatgttcattacataaaatttgccgacaaaggccaacctattatctgtacatataaacatatatgtactaatcatatacatatatgtacaaaatctgtaaataattttacacatcaaaatgagaaatgcttaaaagaacaacttagttacttagttagttagttaattttcacgaaataccttttggtaccatcagctaagcacctgttcgcctcaccaccaaaagctgacccctaatttcacgatccccagtctaggccaaaagcaaacaccccaacttggatttcagctaacgctttcagaggttagattgtacatacttctattgtatatttgctgactttatcttgggacggtttacagcagtaaagattatagccgcacagtgcggatataaaaggttaatgccaccttcggaagtccaacaggtgacttcgagatggcgactgctttggaactgagtccaaccgagattcgcggcctgtgccagcggtactttcatcaagatgtttccaattcggatacggggttcgatatagtcaactatactcttaagcccacctcggatgctccagccggatacttgggcagccacctctacct

SEQ ID NO: 34745 - DNA, 3171 bp, DROSOPHILA
atgagatttagccgagttatagaggagtatctaaagaactccactttgcatggagcgcggtttatagtagacaaggatgccagttggatagagaggatcttttgggtcatttgtctcgttgcttcttggtacgcctcctggttgcttattaaagcttcgttgagtgccttcgagaacaatgccatcagtttcgttgtggaaagttcgtttcgcgattggaataccaattttcctgccataatagtctgcgaatcgaagaatatggatcgcattcaagaggtggctgaacaactgtggggcgctgatcacgactttactttggaggaggttctcagcgagattgccttcttccgcggtgaatcctaccacacagtccacgaatgcagtggcgaggaggtaactgcctcatgtttttactccaatttctcatattacgccgaattggttaggagcagttgtgttgactcaatcagcaattgcgagtggaataataaaccatttgagtgctgcaagtactttcatcgcatggagactgagctgggaatttgctatgccattaattcaatgcaagctgggaaacccaaaatgcccaagctcaatatgtattcgaatcgtggtagtggaccaggcgccttaaaaatggaattgcacactgaggccacggtctttatactcggcaccgaagaagttcccaccctggtcacccctaaaacggatttcctggttgtgggaccatatatctcctttgtgttagtagatgacataaaagtagtaaacataagtattcagtggggcagagttttattttttaggcgttacatctctaagcgcgacattgagaacgatgaagagatccgccagaccagcgtccatcagaggaattgtcgtttcgccgacgagaacatcctggatgtgcacaagttctatagctacagtgcctgcacggtccagtgtcggaaggatcggcagatggagttgtgcaactgctccagtcacctgtccccgaattcgcccgattggcagctgtgcaacatggagggtctggagtgcctcaatcgcaactacgaggacctatcggtgataatcgcaaaatggtcgaagctccgtggtcgaaagggtctggtctgtgattgcctgccctcttgtacggaagtggatatcactacggtgtacgacagcaaagaaaatatggctggcagtcagaacgccatctccagaatcgaagtgggcctcatagaattgcccacggaacgccgaaaagacctaatggtactggagaacattaagctaaagggtttcacatcagctggatccgcggaactcaatgaggttttcgtgaaaccattaattaaatcaattgccgcatttcattctgccagtttggtctacgaacatcagacaaaaaccaatataggtcacacctatggtgataacttgttagagatcacagtagactctgaaattgcctggttcactacaggactctcggctgttctagctgtcgttcgaagtcttgcaaagtatcagggaaatagggagcaatctttcatcggtgacaaacttatgggcataatggagacaatctacgagcaagcggcaccttcaaaaaaatacaggaatgtcctctgtcatcgagatatttgggctgcatccgacctcaatttttgtctttacatgaatttgagctccagcaaacgcaagcaaatggagaagcaaggcattgatttataccacacatatttgctgcagaacctttcggatttgggccttgaggaactagtgatttctaagtcagagctgctggaatcctacgaagagtttcggttattcggagtggtctacagagcggtagctgctacggtcgtaaaggtccccaccgacttcataaccaacgattttaagtatgtggaccgcatgcccgctacggaacacactggttttttgggtgaatactttcacttgtacttccagtatcagttggaggatcagaaagatgtacaaacctctcgactgtttgtcaagtcggtgatattccaaaatgcgaatatggaattctatatggaaaagatgggtctcattgaaaaggagataaagctctacgatttgctaaacgagctgaagaaattttctaaacatgtgtggagtgccaagtgctatttcacccggaaggatctgttcgtaatgcaaaatgtagaggacatgggatatgtcgcactaccccctggaactcgcttcctaaatgagaatcagatgggacccattctgaaatccttggctaccttgcatgccagtagtattgcctacgaaaagcagcagggaaaaaccattggcgttgagttcagaaagtggctaaaagaagtgtctgttgatccggaagttgaatggtataccacgggcctaagagctgtcttagcagtggctgccatccatcctgatgtcctggataatcccgaggcgcaggagtatatagcacaggagctgcctagatgtctggacaaggtttactgtatggtgaatccatcaccagttcataggaatgtctttgttcatcgtgatgcatggaatgcgaatgtgttctaccacaaggagaagccccacgaagagagatccatcctggtggacttccaactgtgtcgatatagcccacctgccatggattttcatctggttacttatctaaatctggaaccctttagtcgaaaaaagatgataggtagtctaatcgagacgtactatgacgcattggctgaggaattcagagaaatgggtgtcaatccttatcaagagcaactgagtaaacaggaatttgagcagtctctcaatgacttttccttattcggagccacttacaattgcatagccgctaccgtactccgcctgcccgataattatctgaaaaaccttaaggatgaacgaccggaggacttccatcgcttctgcaatgtggatcgaagtgcagatgttctccgtttgatgaaaaatcatccggagtttgcagattatatgtatgactgtgtggaaccggagaagtttgactattacctcaactgcgatcggagtgagttattactcagggtaatcgagattcaacctggttacgaggagaccattatgacgcctatcagggaactggtggattacctcatggagaatgagaatttatatatttag

SEQ ID NO: 34746 - protein, 1056 aa, DROSOPHILA
MRFSRVIEEYLKNSTLHGARFIVDKDASWIERIFWVICLVASWYASWLLIKASLSAFENNAISFVVESSFRDWNTNFPAIIVCESKNMDRIQEVAEQLWGADHDFTLEEVLSEIAFFRGESYHTVHECSGEEVTASCFYSNFSYYAELVRSSCVDSISNCEWNNKPFECCKYFHRMETELGICYAINSMQAGKPKMPKLNMYSNRGSGPGALKMELHTEATVFILGTEEVPTLVTPKTDFLVVGPYISFVLVDDIKVVNISIQWGRVLFFRRYISKRDIENDEEIRQTSVHQRNCRFADENILDVHKFYSYSACTVQCRKDRQMELCNCSSHLSPNSPDWQLCNMEGLECLNRNYEDLSVIIAKWSKLRGRKGLVCDCLPSCTEVDITTVYDSKENMAGSQNAISRIEVGLIELPTERRKDLMVLENIKLKGFTSAGSAELNEVFVKPLIKSIAAFHSASLVYEHQTKTNIGHTYGDNLLEITVDSEIAWFTTGLSAVLAVVRSLAKYQGNREQSFIGDKLMGIMETIYEQAAPSKKYRNVLCHRDIWAASDLNFCLYMNLSSSKRKQMEKQGIDLYHTYLLQNLSDLGLEELVISKSELLESYEEFRLFGVVYRAVAATVVKVPTDFITNDFKYVDRMPATEHTGFLGEYFHLYFQYQLEDQKDVQTSRLFVKSVIFQNANMEFYMEKMGLIEKEIKLYDLLNELKKFSKHVWSAKCYFTRKDLFVMQNVEDMGYVALPPGTRFLNENQMGPILKSLATLHASSIAYEKQQGKTIGVEFRKWLKEVSVDPEVEWYTTGLRAVLAVAAIHPDVLDNPEAQEYIAQELPRCLDKVYCMVNPSPVHRNVFVHRDAWNANVFYHKEKPHEERSILVDFQLCRYSPPAMDFHLVTYLNLEPFSRKKMIGSLIETYYDALAEEFREMGVNPYQEQLSKQEFEQSLNDFSLFGATYNCIAATVLRLPDNYLKNLKDERPEDFHRFCNVDRSADVLRLMKNHPEFADYMYDCVEPEKFDYYLNCDRSELLLRVIEIQPGYEETIMTPIRELVDYLMENENLYI

SEQ ID NO: 34747 - DNA, 2162 bp, DROSOPHILA
ttaagtcaaatgatttaataaatatactaaataagtaaatatgcaattaactgtttattgcaaaagtaatatcaaagacactagaattattctagtgtcttagctttgttcatatcttgaggcacgaagtgcggacacaagcactcaacaattattgccttattaatttttcacacgccgcaagatgaatactctaatgacaaatattcttatataaagtcatttttgaaatttatttttgtgataatatgtacatagatttggctatttctaatctattttcaaataataataacggttaaggcaatgcaaaagaagaatttttcgcatggtgccaattgatcaaaaataatatagatttaaagccaaagaacttctaaggtgaagggcatattttgtcaaatttacaatgcatgtgaatacgtgtgcacacatacagatgtctgctatcactttgtgcgttgaaaagagctgttcgctgtagcgctcttcgctctctcgctctctaacaaaaattcgagagagcctggagccacctctagagccacggccaaaaaatcgtgtgccaaaaaatcgtatggcgttacgcatcttgttattctagggtctttggtataactttatcatttcataaccaaaccaggtgtaatggacctgagagtctccgcgtcctagtagttccttgaatcctagccaacgaacattttgatctttatagagtcgacgatgtggaggaggtggccttatgcgcgaaccgcccatcaagtcctataagcccaatcctggtaaacaaactttttgttttattttatttacctatacccataatttttgaacacatattcatacgaataagcgcttttttgtgcctattaataatatatagaatactaattatgtttggaaccatattgacatttacctttttttttttgcaaagcaaaagctagccccgacgaaattcttccgataaatacttcaaaacaatttgtaaaaatccctagtactcaccagtttgctttggtaaattgtagaagtcgagggttttgatctcggacgtctcgacatgcggggcgaacccttcgtacagatcgctctcctccacgatgccgctcagcttgtcggcctgggaagaggcatctccgcctcgatggtatggcatcttcttagccaggtttgcggtctctggatccgggtcctctgtcaagttttgatttgggtttgcgtccactcggatccgttctgccctccaggcagttggcggctttccttcgttgtctctgtttgactagatggctttttaccttgcagtgctttgctgtccgcggtgtggcaaccgatatgcgggtcttgtttgggcttgtagtcgggctaagtataatattactattatatttaagttttaattttatgtaaacggtggccaagttatggagacagaaatactccaatacgatggtgccgcgcggaattcattatagtaaacgttttagcacgagtactgcaaaagcatagcggtgtgtgaatcaaatcccaattgtcggcgttttcgagtctgcaatgagatagaagtggggacgcttgttaattattttcgaacacgaacacgattaatcgacgatatagcgaaagcatatggaatcaattccttcgactcaaaatcgaaattagttcaatgacatgacccaaccgaactgtacagtagataatgccaaaggcgccattggctcataaaatacttggtccgctcattatttgcgagccggctataaaaagccaactggccagatttataatatatataaaatcacacgcatatataagacgtttttgctgctgaggctgactctaccgacaacagcagccggtttgataactaattaaatccaacagaaattagaaaaaacaacaatatccagcgcaaatatttcactcggccataaacaaaaatgtacttatattgcacaaaaaaaaaaagcagacatttatttaaaccatgatggaagttaatatattttaaataactgaattatcaaataaatttaaaaaaattatcatacaaaaatgatattaaaattatttgtttaaagagtaaaacacctaacttttatggcttagggaacaattacgattagtcgaataaacttcggcacacgctgcgt

SEQ ID NO: 34748 - DNA, 162 bp, DROSOPHILA
atgccataccatcgaggcggagatgcctcttcccaggccgacaagctgagcggcatcgtggaggagagcgatctgtacgaagggttcgccccgcatgtcgagacgtccgagatcaaaaccctcgacttctacaatttaccaaagcaaactggtgagtactag

SEQ ID NO: 34749 - protein, 53 aa, DROSOPHILA
MPYHRGGDASSQADKLSGIVEESDLYEGFAPHVETSEIKTLDFYNLPKQTGEY

SEQ ID NO: 34750 - DNA, 2702 bp, DROSOPHILA
tgagcagcaccagaagcatcacctgcagtgctggcactgtagctcggacacaattggggcggaggacttctgcgacgtgaccttccaggaggacaacattcccactgacctgatcaaggagcggaatataaatctgctaaggagctgcaacggcaccattaactccgatcacgagagggccgtttgccgcaagaccgtggaggaaagtgagtaatcagaccgaggcacttccgcatacacattgaaagcaatcttaacaaattccagataatggcaagctgatcaccaagcgattctgctactacaccaacaaatcagatcccgtggagctgtgcaacatcaccagtccggagaagaacgtgcggcggatattctgcgaggactgcctcaccgatcgctgcaacggagccttagcaggtgcatccattttggagatgctgctgctcctgcccatcgcgggcctcatccaacagtttgccatctaagcaaaagatccccaggtcgattttcagttggaacgtgatattttgcctggctctcgggccgagctgttgctgatttacatttgcgtttagctcgaattaacttagtttcggggacacttgccccccactcattagcttacattcaaatggaagtttagggttcgattataggtttatagtttgcctggccgagtgccgatgtttgccaagctcaaagctcaaattccgaatgaaatccaattcaaacatttaccaaacaacacaataccataacgaaagaaattataaatagatgaaacaataatcagtagagattaaacccccaagcacagtaaatactcacttattagtctatgtacaacatgatattttaatgtaaagaacacaagccctcacctatgtaattatctcagaagctagacaaacagaaacacacacttaaaatcaaagtattaaagcactcgaatatacaaaaccgaatcaccgaataaagttcgcacataaatgggttggacttagaggaatttcagaaggtctataattgcgtcaacaagtcgttgttttgtgttttgatccaaccccggatagaactcctcaatttggatactttgccagagtttagccatgtatccgctgaattcttggctatttttttcaccactcttatatcgctcgtaaagcatcaactcggcttcgaccattgcagcataggactctcgattgccgatatacagctggtagagaagcgcagccagcctggtggatctctccagggtgtacgtccgacgaatcactgccttcaggatccttgtcagttggtctggcttaaacacacagtggagtttacgggaatgctgtcctatagccaactgccacttgcccagctcatgatcctcggattgcaatgcttgctggaacagatcagagcagttgagggtctccagatgctcgcggatctgttcgcggatgagataaccctgcaggtgatgacgaactgtcacgtttctctccttccggcacaccacatgctgcagagtctcctccaaatcctcgatcttagccacatctctagggtagtcggctttcagttttccccacgtggacaccaccaggaagagctgctcggatacggtgccgttaaagtcctcgatcagctgaagcatccgcttgttgtcatagctgatcacctgcgttcctaacgttgcatcagacggcataaacagcagggggaatactaaaagcaacgtagcaatcatctcggaactcaaactgcaactgaaccaaaagtagctgggttatctttgaactcggcttatcagcttggttctatcgcaaagttctctcgtgccaagatgagcatctacgttttcaaataactatggtttaaaaacacaaattatggctataatattatttatattcctatagccccacgttctgttagtaattatactacgttctctttttctcctacctattgtagtaatcttctgtttaagatttttatcatatatctttttgaaaagccaaggaggccccaattcgataataccatcaaaactgtcaatgtgtaagccaacaccaccagacgggtcttccaaagagccagtcccgtggagagctactgttttgcttcctgtttaccacaatgacgggaaacactaatccgaaatacatagaagttgaatccaattagacaacctccgtacgagacaatggaaccctcacagttatcctgttgtccttgttcctcacagttccaacacagccttccgttcagccattctgagccccatgtctgcccagccggccacatctaattaaatttatgcaaattattggccgtccttgttgattagtgacaccccatctcatccgtgcctcattaggtttcgatcgtgctcaatgagattaggggccaaaagaatgtttgtcagccttgccaacgtaaaatcgttctacttttggtgacatacttttgggcggatgctgaaatggctagcatgagttagctatcctctagaagcactcaattgtctggggtataataatcattcgccactttgtactgattccacaaatagacgtgtagtttctgtcactttagagaacgaatgttaatgatgaatctacttctgactcattacacgcccagatcattctcaaagatgtagtatatttaaaggtaagatacatttcaataacaagtaaatgtga

SEQ ID NO: 34751 - DNA, 702 bp, DROSOPHILA
atgccgtctgatgcaacgttaggaacgcaggtgatcagctatgacaacaagcggatgcttcagctgatcgaggactttaacggcaccgtatccgagcagctcttcctggtggtgtccacgtggggaaaactgaaagccgactaccctagagatgtggctaagatcgaggatttggaggagactctgcagcatgtggtgtgccggaaggagagaaacgtgacagttcgtcatcacctgcagggttatctcatccgcgaacagatccgcgagcatctggagaccctcaactgctctgatctgttccagcaagcattgcaatccgaggatcatgagctgggcaagtggcagttggctataggacagcattcccgtaaactccactgtgtgtttaagccagaccaactgacaaggatcctgaaggcagtgattcgtcggacgtacaccctggagagatccaccaggctggctgcgcttctctaccagctgtatatcggcaatcgagagtcctatgctgcaatggtcgaagccgagttgatgctttacgagcgatataagagtggtgaaaaaaatagccaagaattcagcggatacatggctaaactctggcaaagtatccaaattgaggagttctatccggggttggatcaaaacacaaaacaacgacttgttgacgcaattatagaccttctgaaattcctctaa

SEQ ID NO: 34752 - protein, 233 aa, DROSOPHILA
MPSDATLGTQVISYDNKRMLQLIEDFNGTVSEQLFLVVSTWGKLKADYPRDVAKIEDLEETLQHVVCRKERNVTVRHHLQGYLIREQIREHLETLNCSDLFQQALQSEDHELGKWQLAIGQHSRKLHCVFKPDQLTRILKAVIRRTYTLERSTRLAALLYQLYIGNRESYAAMVEAELMLYERYKSGEKNSQEFSGYMAKLWQSIQIEEFYPGLDQNTKQRLVDAIIDLLKFL

SEQ ID NO: 34753 - DNA, 2916 bp, DROSOPHILA
agaggctgctacttcggcgaggtaaatgccaccgatgtgtggtgcaaaatggaccccaccctgtcggcggtgcagaactcaagttgtcatgtgtgcgacagcgagaactactgcaacggatcggaaaatcatccagtggataaatggaaaatcttcggcagtctggtcttgtttctcttggcaactcaactactctgaggcgacaggagacgaagtggaaatgtggaaatgtggagcgtgaaatgaacattaaaaggcacagtagcttaagtaaacctagttcaatttagatgtattcccaaggcccaggactatcaattagtaaagcccacattagtagagcacaccatccacaaaaccgtttagccaaatctgcccggcccactgtattaatggctaatcaacgccgaacatggcgtatgagcaacatcagcacaccgaaatgagccgaaaagctggcaaacaaatttcgaacgatccaaatacaaactaataaaaactaattttacacagaatgccaaattgtttatttgttcaaatgccactaatgaaccttgcctgaaataaatggattggcgaggaaagggcaaagggaatggcagggcagggtagggcaaggcagagcacgatgtcaacacgcattggccagggaaaagccaacgatggagaagtgaaaatgtgaaaaaatctgttatgaaaatcaaattcacattctgaatgcgattgttcgcacgttcagttcagtttctgtttagttcagtcgcgtgtgtgcatcgcttcgagtcggtggtcggtggtcggtggtcggtggtcgttggtcggcggcttgtggctatatagcgcatctatcatgtgattaaaatcggtccggcaaccgagaagacaacatctgtattcgcgcacgtatcggcatcgccaagctatagctatagccatactgactcaccgcgaccgccggacgacagtggaatcaactgttttcgggggcggtacgatggcgatgatggcagcgcttgcctcgctctttctgctcgtcacgctggccagctcaggtgagattctcgattcgcgcccgccactcatcacattcctgccccgaaattgtagttcatattttgaaatatctcagaagcagaagactgtcaacacgatttattgcgaatcagtgaatttagggttttaccgactgttttgcgggaaactgttcagtaaagaaaaacatataaacagctttctttgtttatttcattgtttacgtatagagtctaaaaagttcaagaattatattacaaattttaattaacttacatctgaaaagaaattaacgttttggaacattaagaatggttttaaagctaattgtttactttaagataaagataaggtctaccaaaatgctcatccattgttttcctttctgtgcactctcgtggacacacatttttacggatgtcgtcatcagcccgtgccattacctgctacgaatgtgattccgtcaataatccagggtgtggggagcgatttgtgggcgatgacatatccacgacggattgcgatgtggtggcgaacatgcgatccctgggagcggaggccacttgccttaccaagtaccatgagggaagtgagtatacgagtatggtttctggaaaatatgtcaaggaaatcccttataaaatgactcacttttcgcagtgccaggagacacgcgcttcgtgaggcgctcctgttactttggcgatgcctccccaataggcgtcagttgcgacgatggaccagatcctgtggtgccctttatgaacttcctcggctgcacactgtgcgatacggatttgtgcaacgcagccgctggattatccacactacccttggtcattgccctttcgatactcggactgcttgtcctactggcgacctaaggaagatgagtcgcgtggaacggcggcggtcgtatttcaatgtttcctattaaaagtaatatactccagtattgtataaaagattgttgttttcttggtcgactaactaacatgacttcttatactcatgcaaagggcgcagaacaagaacgacccaaagtttatccttatattcttaattttctaaggcaaatggcttaagttataaaaagcctactgaatatgtaataaatttaacttaaagcccctagaagaatgaaatagaagcaaatattttttaatttttattttatttgattttctttccattgtttttatacatccactaaaatgatttaacatacatatatatttatataattatacttgtttgatttaatataatttattgaataaaatttactcgtttcctactctactagcgtgtgtatgtaagtatgtgtatgtgtgtattgcaattaggatcattaattacaaaatattcataaaataaattaaaataacactttcaaatcgatacacacaatttctgtttcaatatctagtccattgatttcttgatcgtcaaacaattctagttttacatttatttccagtttatagcataaattattttatgtaggcaaacagataacatctttgcttattatcttaatgggtttagctgcggattatattcataacacttctgggctacacataaataacattcaaatataaatatatggatatttatcaagatattgtatataaactacacattgagaacaattcagatagaaaacaatttatgtacaaaagattgtgtttgtttttgcttcaccaatactgtccatgctggcgttgtccggcggaatctctacgatcccagcgaggaccactgccgcgtcaatgccacaaacaatcgtcgtccatctttccgcgtcttaaagtctatcaacaattcatatcatcagcgtgtaagcattagtcaaccaaatatagtaaaacttattgtttc

SEQ ID NO: 34754 - DNA, 435 bp, DROSOPHILA
atgatggcagcgcttgcctcgctctttctgctcgtcacgctggccagctcagcccgtgccattacctgctacgaatgtgattccgtcaataatccagggtgtggggagcgatttgtgggcgatgacatatccacgacggattgcgatgtggtggcgaacatgcgatccctgggagcggaggccacttgccttaccaagtaccatgagggaatgccaggagacacgcgcttcgtgaggcgctcctgttactttggcgatgcctccccaataggcgtcagttgcgacgatggaccagatcctgtggtgccctttatgaacttcctcggctgcacactgtgcgatacggatttgtgcaacgcagccgctggattatccacactacccttggtcattgccctttcgatactcggactgcttgtcctactggcgacctaa

SEQ ID NO: 34755 - protein, 144 aa, DROSOPHILA
MMAALASLFLLVTLASSARAITCYECDSVNNPGCGERFVGDDISTTDCDVVANMRSLGAEATCLTKYHEGMPGDTRFVRRSCYFGDASPIGVSCDDGPDPVVPFMNFLGCTLCDTDLCNAAAGLSTLPLVIALSILGLLVLLAT

SEQ ID NO: 34756 - DNA, 2474 bp, DROSOPHILA
tgctggcagcagccttccggcacttgccgctgtgcaaatgagccaaaggatctggcccggacttaactgcgggacttcaggctgaagttgaactggccgggaatttcggtgcttagcccggacttaactgaatttcttcaacaagttttagtcactttgccctcacgaatctgcacaaatcacagacgaacaggatgccccggttaggcaaagcccgtcaatcggggtcaccctttcgtcatcatccgcgtaaatgttactgggtcacctcagccacgaaaaatcaaacagttactcgtagtcagtactctacacccatcataaatcactcgatcacacttaactttgttgtaatatgtacatcatgtaatatctttattattgtatttgtaattgaacggcgctgcctgaacgtatataaataaatcgtaattagatggtatgccagaagtggatttattatattgttcggattactagtgacttgaaaagaaaagaatttttaaacaaataaaatgggggcaatggagaagtagcaaggcttaatattggtcaatcggagataagatgtagcttccccgaagtttggtatccaaaatcagttggccttgaaacacctagcactcctacaacaacatccgaaatgtggcaaggacacaaggaaaaacccacttccacccgttcgatggccagggaagtagtccaccctgagaggcctttgccgccgtggagtcgtcttctggagcacaatgccgaaggttgtctgcggaagagaagtggggaaaaggaggagcactacgaggtggagatctcgaaccacttgtggtcactttggggcagcacacagcaagtgaaaccaggggaaaatagttcctcgtcggagtccggatctgaaaggacctcacctcctggtcaggcattggcatgctgcgtgttagcctgttgtgcaggcagttttcagtccttggattcctggaactccagtgcgctggacaagatcatgtcgaatgggcggggctactatgacgaaagcttggcgaccaggcaacattgggatcgtacaggagagctctgtctggagtgcttgaacaccacctgcttccttgatggtcacgagttttgggtggacatcgaaaagctctgtaccggtaaattgtacagcagaaccaagagcctgggatccgcactgagtaagttcttcggccagcacttgcaaacgggaattcttcagcttagggatcaggctctggcctttgggtttatcccagagttcgcctccggcggagccttcttcctcttccactgccaggcgaggggaaggccgcttttcaaggactgcgaaagtgccccgtatgtgctcaggatgcgaaagctgcagcaactgctctactgcatgctcatcacattggacgagaggcgccacaatgtgcccttcaggatctacaaggtgggatgtgtgccccgtgctaattagctgcgtgtggccaagctgaatatgcatatccactcccccttaaaatttaatctcaccaggccactgaattatataattaaaattatagtgcactattaaggccaaaaaaaaccccatcatattgatattgatacaatataaacacacaaatgtacagtgcctgagaaggtaagtgacatcagcccgattacaccgcgttttgtatactatgtaggtgcacatagtcaccgacttgggctctcgtaacccacgttaagtatacattttgccaggcaaatcaagagtaattgtctcacatcactgcgcttgacattgcatttgatttgaggagcgttcgtttgccttcttcatgctgtggtgctgtttgtatcctcatttatggtctgcaagcggaaatgagttcagtctttcattcaattggcggaattcgttaattggcaaccacgcaaattcaaaatattcgcaaaactccctttttgcgaatcgcaatgacgtttgaccccgtcaattgagcgtaggatttgctggatgctaagacaaattgctactaaattcgggtgccgcatggtagcgtgataatttcattatgcttgaattaaaatcgcataaaaccagcggtgtgtataaataaagtttgtcacatggcacgaaatgtgaaggctgtcataaaaaagaaaaacacttacaacatcgagtgaaataacgcaaaataaatatataaaatgggtggcagctaggcttttggccatttaaacttgtcgcacggcttttatttgttttggcttttagttttatttttgttgttgctgctttcggcgtgtgttgttggctggcgaaaatgtcgtacagagtttccaataaaactggccatttatcatggcgcagccgctttggaaaatatattgagaatcgacaatcgaatgttacgcatacgccccggagggcagctgttggctgttgatcgctgcgcatgcgcagtcagtggactcgaatgcggttt

SEQ ID NO: 34757 - DNA, 474 bp, DROSOPHILA
atgtcgaatgggcggggctactatgacgaaagcttggcgaccaggcaacattgggatcgtacaggagagctctgtctggagtgcttgaacaccacctgcttccttgatggtcacgagttttgggtggacatcgaaaagctctgtaccggtaaattgtacagcagaaccaagagcctgggatccgcactgagtaagttcttcggccagcacttgcaaacgggaattcttcagcttagggatcaggctctggcctttgggtttatcccagagttcgcctccggcggagccttcttcctcttccactgccaggcgaggggaaggccgcttttcaaggactgcgaaagtgccccgtatgtgctcaggatgcgaaagctgcagcaactgctctactgcatgctcatcacattggacgagaggcgccacaatgtgcccttcaggatctacaaggtgggatgtgtgccccgtgctaattag

SEQ ID NO: 34758 - protein, 157 aa, DROSOPHILA
MSNGRGYYDESLATRQHWDRTGELCLECLNTTCFLDGHEFWVDIEKLCTGKLYSRTKSLGSALSKFFGQHLQTGILQLRDQALAFGFIPEFASGGAFFLFHCQARGRPLFKDCESAPYVLRMRKLQQLLYCMLITLDERRHNVPFRIYKVGCVPRAN

SEQ ID NO: 34759 - DNA, 2183 bp, DROSOPHILA
ttcagataatgcatttcatcggatgtaatggtattttgataaataattaaattaattaaaatttaaagttatggcgctgtgtgcgtttgacaatttccaagcggaatttttggcctgtctgctccagcgagcggtgcacgcggcgtatgcgcaatgtggcacacacggcggttgctgcattctgatggttgtttctgagttttgagccttgtttgatgctacggccgtgataaggcgacaattgtcaacaattttattagtccgactgtggtccactgtccaccgtctaagccaatcacaaaaatggctagctctgtccatttcaagcggtttttaaagttcgcttttgccgtattccattggaaatgtttttactagtttgtcgttttgttctatttgccgcgcacacacatatcacgcaatttgttttggattttttgtgcgatttcggtttttgtttttcattcgccgtctcattgcaaattgtctctagtttcgtcgagttttccaaatcgtgtgtgtttcttgctaaagtatatggaatcaataggagccttgaacacattagtgggtaaaaagaggtcagcagacacccctcaattcactttcttaaaagattaccatacaataccatggaaacagtttaattaattttagttcgacttagaacgcaactctggaacccaagaaaaacaatttaatatttcttttgaccaacttaaatgatcagatggacatggctagcccgtctcgggtagtaatccctatgttcactgctgccacatcgatttttttttttgccgtgcggcaatttcaaatgacattctgaggttttatttatgactcaaatatgcagtccgcgcgaatttaatgtaatgcgcatgcaagcagaagacattaattaaaattaagttaagtgaacattttaaaacgtactgctctcctttcattttcagtctacggcaagcgggtgatttcgcgttcctgtttttacgaggacatggacgactcggcggacaagtgcgccaatgaccagacatcgtcctacataaaaaccgtctactgccgcacctgcaccacggacggttgcaacggagccagtggcgccactccacgggtcctgctcctcatgctgcccctgttgctggcagcagccttccggcacttgccgctgtgcaaatgagccaaaggatctggcccggacttaactgcgggacttcaggctgaagttgaactggccgggaatttcggtgcttagcccggacttaactgaatttcttcaacaagttttagtcactttgccctcacgaatctgcacaaatcacagacgaacaggatgccccggttaggcaaagcccgtcaatcggggtcaccctttcgtcatcatccgcgtaaatgttactgggtcacctcagccacgaaaaatcaaacagttactcgtagtcagtactctacacccatcataaatcactcgatcacacttaactttgttgtaatatgtacatcatgtaatatctttattattgtatttgtaattgaacggcgctgcctgaacgtatataaataaatcgtaattagatggtatgccagaagtggatttattatattgttcggattactagtgacttgaaaagaaaagaatttttaaacaaataaaatgggggcaatggagaagtagcaaggcttaatattggtcaatcggagataagatgtagcttccccgaagtttggtatccaaaatcagttggccttgaaacacctagcactcctacaacaacatccgaaatgtggcaaggacacaaggaaaaacccacttccacccgttcgatggccagggaagtagtccaccctgagaggcctttgccgccgtggagtcgtcttctggagcacaatgccgaaggttgtctgcggaagagaagtggggaaaaggaggagcactacgaggtggagatctcgaaccacttgtggtcactttggggcagcacacagcaagtgaaaccaggggaaaatagttcctcgtcggagtccggatctgaaaggacctcacctcctggtcaggcattggcatgctgcgtgttagcctgttgtgcaggcagttttcagtccttggattcctggaactccagtgcgctggacaagatcatgtcgaatgggcggggctactatgacgaaagcttggcgac

SEQ ID NO: 34760 - DNA, 183 bp, DROSOPHILA
atggacgactcggcggacaagtgcgccaatgaccagacatcgtcctacataaaaaccgtctactgccgcacctgcaccacggacggttgcaacggagccagtggcgccactccacgggtcctgctcctcatgctgcccctgttgctggcagcagccttccggcacttgccgctgtgcaaatga

SEQ ID NO: 34761 - protein, 60 aa, DROSOPHILA
MDDSADKCANDQTSSYIKTVYCRTCTTDGCNGASGATPRVLLLMLPLLLAAAFRHLPLCK

SEQ ID NO: 34762 - DNA, 3097 bp, DROSOPHILA
ccgacttggaacggacgcgcaaataaacaattctgcaaacgatctgaaaattcagctgtcaattaatttcaatatattgtaaatgattataattttcatctcggttacgccgcttttcgcggcagtttttcggctctcaatagcattcaattgccaattgccaattgccaactgccaatgcgaatgcgaatcgaacgcaaattgcaatgtttatgctggttgtttatggccaaatgcggtcgctggccgaaaaaaaatgaaaacacgttttcggccaatgcgttggcacacttctccggcctttccccgcttccccactttccgctcccctctccaccattcccactggcacaccccttcgccgcctttcgacttatctaggctttcgtttaaacgcacctcaaagtgttggctaagtgcatttaacccgaacgttaacgtttgacgtttaaattggccagagaaacgagttttatggccgccatcacagacgcagtcatcatcatcactcaaacattttcagaaccacgaacacttcaaaatatgcgatcaaatatcaaatattaattaacgtcaagaagcagtatcattttttagttcactagaaaaaggagtgaaaaacccctttgaagcccctttgctttaaattaaacaaattaaatatatttactttgcaaatacgacaccaatcgtatacattttttgcggtgtatgcaacaatcgttggctcagtttaatcaaatgattacttacacactagtcgcagcggctaatcgcacgcataaagcagccaaagtcgaactttttgacacttttataacgcagttgccccatcgcctgtcgcataaataactcggccaaaagactcccgacggaaatcggtggcggctcggcaatatttcaaagatatccgccaacggcatctaacgcagcaggaaactacggcttggcggctactccgtctgaatatgatgggatgcgattcattagtggaacgattatggactgggaaagtaggaataagtcagttactttactgcgattgctatagcaggtggtctcaagaatactgagaatcaattagagcttagaacagccactgaaacaatttatacatatacgtgtatattatgtatagtagaacagaaataggtattaccaaaaaaagttatttagttatatttaattaaactaagagtcagataagaaactgattattgtgtatcgaaccatcagaatcagaagagtatggaaaggacacgttttaaaaattaatttcagcttgtagacttcccctgtaatgcaccgatgattatctgaattgaaattgcctcgactaattgataccattcatccatttcagcttccgcggtgctgcgatgttggcgctgttcgacggacgtctccaatggcgagttctgcaacgatcccttcatgccggagaccatttcggagcagcagcggtactggagctacgtgaactgcacctactcggtgggcgccaaatcggtgaatgcccggcctgtctgcaagaaactggtgcaagaaggtgagatcgagcccccacacctatggaggctccacacacgagtatggcacataaaacactcgatgtcagtggacctcaaaaagaaaagcacgggcatgaataattggttacccgttgcattggcattgttgtgaccgcgtgtgcggtctgcggacagcaacacttgaaaagacagacaagttagacgaacctgaaatttcagaagtaaccataccacatggaattgcatatggtatttctttcactgtagattcctatcggtgggcagtgggggatcgctggatcgacgcaactcacacccggctgtggccgagagccgaacaagattgaaatttattgccctgacaaggttcaaacaagtgcaggcgacaatgcagcaacaatgccaacggaacgaattggatctgcaactgcagctgcccctgttgctgggcgtttggtgggggcgtggcaggtggtgtttgggcggggccacaacaaccactacgactacaacaacagtcacaacaagtggcgacattttggcccgcaattgcatgtgccgctaatttgcggcaaattgatgcggagaaagagccggcgaacggggcgtatgagtgatattgcgttgtgggctttggcgatcttaagtccgattttactggtgcctttttacagctagtttttttttttttttgtttgttattgtccgcaactggtggtatatgtacatttgcatatgacaagaaaagcaaactaaaaacaaggcacaagaaataaatttgtgaagcgatccgtgtcgttacattttgatctaaattcactttgcattgttggccactgaataaattaacttgccggcagacgattcgggctcggattttaaatgtgggtcagtcgaacaaacaacgatgtaaacaatatgaacccgcgcaatgatgtaattatgttgtatttggaaaactttactgcacgctctacataaaaagcagttagttatagttatagaaaaaatgcatatacttgtataaatacaaatatctgagatataaaccattgtgtatatagacaagggttatttagaaaggtattataaagggaaaccatatgcgatagcaatcagttgacttaatagttcccattgtgatacataaattcaaatagcttgttaattcattgcaattcaataaccatcagaagcggacacaagaagcggcgactgagatttcttaagtcgcatttaggcaatttcttatggccaattaatgaacaccattaaatttttgcaattaagcgtctacaaattggttcgccgagtctttgcaagatttgagcctggcagttggcaattaaaattgcaattgcagactctcggccatcgctatacgagtatctatatctccgactgagttcggtccccagctacatgagcagcgcttgtaatgcgcaaaatacataatatacgggccgagctatacgggctaggaaaaaatacacaaaatacatataaattaattaagttgttgcacagcgtgaagcgctcaattacgactccaagatgaggggcaa

SEQ ID NO: 34763 - DNA, 561 bp, DROSOPHILA
atggactgggaaacttccgcggtgctgcgatgttggcgctgttcgacggacgtctccaatggcgagttctgcaacgatcccttcatgccggagaccatttcggagcagcagcggtactggagctacgtgaactgcacctactcggtgggcgccaaatcggtgaatgcccggcctgtctgcaagaaactggtgcaagaaggtgagatcgagcccccacacctatggaggctccacacacgagtatggcacataaaacactcgatattcctatcggtgggcagtgggggatcgctggatcgacgcaactcacacccggctgtggccgagagccgaacaagattgaaatttattgccctgacaaggttcaaacaagtgcaggcgacaatgcagcaacaatgccaacggaacgaattggatctgcaactgcagctgcccctgttgctgggcgtttggtgggggcgtggcaggtggtgtttgggcggggccacaacaaccactacgactacaacaacagtcacaacaagtggcgacattttggcccgcaattgcatgtgccgctaa

SEQ ID NO: 34764 - protein, 186 aa, DROSOPHILA
MDWETSAVLRCWRCSTDVSNGEFCNDPFMPETISEQQRYWSYVNCTYSVGAKSVNARPVCKKLVQEGEIEPPHLWRLHTRVWHIKHSIFLSVGSGGSLDRRNSHPAVAESRTRLKFIALTRFKQVQATMQQQCQRNELDLQLQLPLLLGVWWGRGRWCLGGATTTTTTTTTVTTSGDILARNCMCR

SEQ ID NO: 34765 - DNA, 2717 bp, DROSOPHILA
atgttatttaatcctgagtgcatagtgaacttgttaagcgctaaattggtataaaatgcaaaaccattataagattagaccatcatatactgttatgttaaccacatcctttggcaatcccctatttttgtatatccctaccgttttggaacaagccctgctatcagaaaaaaaaacgttaaaaaagtctccagtgacctggttattgcagttggttcccaaacccgcaattgtcgtggatcaatctgaaactggccctcgaatgggagtcctattcagtaactcttattccgaaagcgttcgagtcctcggaaaggtctattcgcagaaataaattttcgttttcgacctaatcgaaaactatgtatgttgtccatgtccaaggcttccaagacggtaatccagccgggcgaggcagtcatacatggcggctatacttccggatcctcgaccagtaaatagtaatccgtggctcaatcgctgtgacaatgaacaacgtgagtggtaaaatcttaccttatatagctattgtagttggcgaaaaaggctgtcattattaaggaataacattacattgtgagcgtataaacttaaaatttaggtagtctatagtcgtgctcggtcgaccatgttgttaataacatttaattgttacgaatccagcgatatctgatttcctaaaaatacaaatattatataaatatttgtaatcagtttagttgcttccatagcaacaccaagttacaatatagggcttattttcaaaagaaaaaaaaaggaataggatttcttattcttggctagttgcaaattatttatttacttgtactagctcgcccactaagtaactggtatctgatggtcgagaaaatcgactatagggttacctcttgctttaaaattaccatttctctcacatatgttgttaaatgtgtgttgaaagcaacattttctatttttatttccaattatgacaattaggaaccaaaattcgaaactatcaattctttattttttcagcatcgcccgtgatctcgaagcacacggatgaaggctgccgttcgtcctgttcgttgaaggcttcgaacaggaaaaccactttgtagcgtcctttgagagtgggtcccaacacgttatttagtcggggaaccacaacgaaggggttgtacaccaaaacggtctgaaaagagtactccatttcgaaaggattgctatattggaatcgagtttgctgtacttacaccttgcgtagcgaggcacttctcttggatctcctcgcggttttcaaaatttttgaaccagtatttataccaaaacagattcggattgaacattgcgtcgcagaagtccggcgtcagagtgttaaatacggtcggctcccagttgccgcggttaaagtggagcacactcatcctagcctaaaaaacaataaagttattgtttcgaaacccatagggctagggccgaataaacgtacagaaattcgataggtgggcggcaaactccatctagttgtaatatttccggacacatgaatcccttcttcgtccatttcaacctgcatttcgcttacgtcgaaggcttcattgagaccaacagaaccaggaggaccatccgtgcacggcgtgtagatgtctggatcctcgaccagtagtatatagtctgtggccaaaatgtcagtcgaccccaagatgagaatcagcagagtagcaaacattgttgtgtgccaagcaattattgttccggccttatatagcatttggtaaaagttatagatccaatacggactaacattacattgtattttatcaggaatgcaatcaaatctactcattgcacgcttttgaccgacaaactatgcagtgctctgcattacatttttaaataccagaaatacctagcatcacaactatcgtgtgtagcgtacatcaaaattgtggacaatactttcttcagtgaaataagaataatcaagattgagtgcgaagccccatagtaaaatataaacattgaaacacaatatggtctagacttccaccaaatcgaataaaaaggtgcccaacgcaaaaacaggttttttgtttgagcttaagaaacatacatatgtatgtacatatgccgcgagcatgggtcaatttaacaccccacccccccccacccctctgcagtgaccctggacgtgttcccaattcttaaccgcaagcaagtgcagcgaaaacaaaacacttgcattcccataattatcatgtgtggtaagcaacggggactgctgcaacacaaaaaccaagcagcagagacatgtaaattaagacccgtgcctgacgtcagtcaatgttaacatcattacaaagccaacagagctggattagctacctaagtatgttggtatatatgtatatacacaagtacacacttccatgagcaactgaaatctggggaatgactacagtggtactttactagtttgctagtctcttttcagtttagtgcttactgttacagaggacgcactgtacttgcacatatgcaagtgcacatcaactcccacgctcaccaactctacttgtctctctctcttctagagctcgtggtggagctcactcccgctcccgctctcgtgctcgttatattcatagagctgtgccgtgtgtaggcaccgccatcgacttggggcccaccaccacacgcgcagacacacagacacagctcgctctcgc

SEQ ID NO: 34766 - DNA, 501 bp, DROSOPHILA
atgtttgctactctgctgattctcatcttggggtcgactgacattttggccacagactatatactactggtcgaggatccagacatctacacgccgtgcacggatggtcctcctggttctgttggtctcaatgaagccttcgacgctaggatgagtgtgctccactttaaccgcggcaactgggagccgaccgtatttaacactctgacgccggacttctgcgacgcaatgttcaatccgaatctgttttggtataaatactggttcaaaaattttgaaaaccgcgaggagatccaagagaagtgcctcgctacgcaaggtaccgttttggtgtacaaccccttcgttgtggttccccgactaaataacgtgttgggacccactctcaaaggacgctacaaagtggttttcctgttcgaagccttcaacgaacaggacgaacggcagccttcatccgtgtgcttcgagatcacgggcgatgctgaaaaaataaagaattga

SEQ ID NO: 34767 - protein, 166 aa, DROSOPHILA
MFATLLILILGSTDILATDYILLVEDPDIYTPCTDGPPGSVGLNEAFDARMSVLHFNRGNWEPTVFNTLTPDFCDAMFNPNLFWYKYWFKNFENREEIQEKCLATQGTVLVYNPFVVVPRLNNVLGPTLKGRYKVVFLFEAFNEQDERQPSSVCFEITGDAEKIKN

SEQ ID NO: 34768 - DNA, 1614 bp, DROSOPHILA
tttcggcactctaaatggctaagaatatttgggagttaacaaaccaacaaatcttgcatactgaagtcaaaaacggaaattcgggcaagcttcaatcactttcgctcagatttgggggtgcagaagagaaaagggtggccagaataaccacaaacgagcggagatcggttgaacatagccattaatgtacaatatatggctgtacttggctatatatatatagctggggatcgtaccttcatgatcttgcattgagccactccggtcaccgttagcggaacaccttgcgacgtttccacattctcgcacatcggattcagggtcatcacattgagggacagtcgctggacatcggttaccagccaccacgcccacgcccagccgcccacaatcgtgcgcttcttggtcgatccacagcagccacctgaaagattattgccgctgaggtggctgcaccactggccaaaaccgatgagattgtcctaattggcggcaacgataatataaccaacgatgtgactcgcttggtggcccagctaccgccatcgatcaacgccttgaccggagtggatttgtccaaggttctgtccaagataccgggggccaaggcgtgaaacctaatggaatgggatatccaggaaatggcaatgacaacgtaacgcagcgtaaaggaattgtaaccgatacaaaaaccagataaggatagacaaccgaattaagaaagagacgacaggaagcgacaaaataagatggcgatagtttgctaaagagggggcgtgcatttgttagagagagaaagaggggaaacagcgaaacgaacttgaaaaactcaagtttcgaaatgaaatcgaacgtgtagctaaatgtactccgatattataatatatttatatataatatatatatatatatatctatatatatatatctatatatatatatttgtatatttatatgcacacatgcaatacacacatacacttgtctcgtctgtgtggtgtcctagtgtgtgtgtgtgatgtttggcggcgtaacaatcaaaaacagaacacaaaaaacaaccaacgttaatctcagctaaagttatgcatttcgaacgcaacattttgtggccttttctctcgaaaacgaaaaaccgataactataacaagaaatcaacgtgaaatttgtataactttaaaacgaaaaccatttaagcagagtgttagctatttatttactatgctatatatactatatacatgcagacttgctatacacaaagagctctttcaataaacacatagaattatataacagacagtgttgtacagcatatatgtattattttacagtgctgtagagatctgtataagtagtctctctccatctccttcttatacaatttctatctgcaactaaaaacaaaaaaaaaaaaacaaacaaaaagcttacatacttccaggcaaattaaattatacattattatttttttaatacataactaactatttatttgttgattcgtgcctgtttctttcgttgaattttgttaaacgattactttttacggaattgtgccatataaggtgcaaacattttatatttgtttatttttgattattataccaaat

SEQ ID NO: 34769 - DNA, 1245 bp, DROSOPHILA
aatctttcaggtggctgctgtggatcgaccaagaagcgcacgattgtgggcggctgggcgtgggcgtggtggctggtaaccgatgtccagcgactgtccctcaatgtgatgaccctgaatccgatgtgcgagaatgtggaaacgtcgcaaggtgttccgctaacggtgaccggagtggctcaatgcaagatcatgaaggtacgagccgacgagcttctaggcactgccagcgagcaattccttggaaagagcgtcaaggagatcaagcagacgatcctgcaaaccctcgaaggacatttgagagccatattgggaacgcttacagtagaagaggtgtacaaggaccgcgaccaattcgctgccttggtgcgcgaggtggccgcaccggacgtgggtcgtatgggcatcgagattctctcgtttacgatcaaggacgtctacgatgatgtgcagtacctggcctcgttgggcaaggcccagaccgccgtggtcaagcgggatgcagatgccggcgtggcggaggccaatcgagatgccggtatccgtgaggcggagtgcgaaaagagcgccatggatgtgaaatactcgacggacacgaaaatcgaggacaacaccaggatgtacaagctgcagaaggccaatttcgatcaggagatcaacacggccaaggccgaatcgcagttggcctacgagctgcaggcagccaagatccgccagcgcatccgtaacgaggagattcagatcgaggtggtggagcgacgcaagcagatcgagattgagtcgcaggaagtgcagcgcaaggatcgcgagctcactggcacagtcaagctgcccgccgaggccgaggccttccgcctccagacccttgcgcaggccaagcaatgtcagaccatcgagggtgcccgtgccgaggcggagcgcatacgcaagatcggatcggcggaggcccatgccatcgagttggtgggcaaggcggaggcggaacgcatgcggatgaaggcccatgtgtacaagcagtacggcgatgcagcaattatgaatattgtactcgaatcgctgcccaagattgccgctgaggtggctgcaccactggccaaaaccgatgagattgtcctaattggcggcaacgataatataaccaacgatgtgactcgcttggtggcccagctaccgccatcgatcaacgccttgaccggagtggatttgtccaaggttctgtccaagataccgggggccaaggcgtga

SEQ ID NO: 34770 - protein, 378 aa, DROSOPHILA
MTLNPMCENVETSQGVPLTVTGVAQCKIMKVRADELLGTASEQFLGKSVKEIKQTILQTLEGHLRAILGTLTVEEVYKDRDQFAALVREVAAPDVGRMGIEILSFTIKDVYDDVQYLASLGKAQTAVVKRDADAGVAEANRDAGIREAECEKSAMDVKYSTDTKIEDNTRMYKLQKANFDQEINTAKAESQLAYELQAAKIRQRIRNEEIQIEVVERRKQIEIESQEVQRKDRELTGTVKLPAEAEAFRLQTLAQAKQCQTIEGARAEAERIRKIGSAEAHAIELVGKAEAERMRMKAHVYKQYGDAAIMNIVLESLPKIAAEVAAPLAKTDEIVLIGGNDNITNDVTRLVAQLPPSINALTGVDLSKVLSKIPGAKA

SEQ ID NO: 34771 - DNA, 2618 bp, DROSOPHILA
tactttaatttaaagcaataaactaatttttaaaccgagcaaacgatggctgcgttggctttcatatatagagtaaacttgcaacaaaaaacgtgttactcgtgcaatgggagaacctttataaatatatacataatacatttgccaatcatgagaaggtatttatggatatgatagaaaaacgatcttgcaacctagataagcccttcgagaactattaagttaaatgcatgcctggctaatggccacatatggcattggattttttcttttttttttcgcctgagagtcaacgaatgcagccactgcgattagtaatccatatatcaattgaaactaaccatatagtataatggagaactattcattgttgtcattccgcaggtcagctaatttgctttggtaatgatcttggcattcatttgactcatggtgctgtttgtttcccattttcaattcaattcatttagtttttcatttatgctcaattctctgttttaaagtgtgagaacttgtaatagcacttcccagcgttcggaactttcgcaattttgtagtgattacttatgattttgtattccggtatagtttcgattggagagcatattcgttttgtggcttagtagcttaaaaattaaataattaaaaagatttttaaaattattcccttttattttgattacttatgttaatctaactattttcctataaacatttctttcaaatatttttttgtaattatggaaatatggcaaggagtatctgttagtttcattcatgatatgaaagcattgttctcaatcgattttgctcgtaatttatgagcggccactgaacctaaatggcaaatggcagcgcgagcttacgagttttaccagtttgagtgtctcagtgggccatggctttgcattgggccgcaaatcggaagaggttttcgagacttttcatgcgagtgcgcggcgattgaactggtcattccacgtccgccactgaacgcaagatgacgctccacaagctgcccgccaagtgcattctgctcgtggtgttgctgctcctgctggactccagcctggccaggtcgcaacagttcttcgtcgccgaggatgtgataacaggaacggcaactgaaacgggaactgcagctgcaagcagaaccgtatttggtgatgatcaattgcccatcaacgatccatcgggtatgtgttgaaatgttccgaaaaatgtaatcaaatcacaagaaataccagacatttcaatcttttcgaatgcaaaagatcttgttttctgcagcactttgcagccttcttaagaatagataccattcaaagatatagttcggattattattttcatgaatgaacacagtattgtaccagaattttcaactattttcgtaaactcaatccagtttgttcgtaaactttgaatacattttaagatacaattacaaaagcttgaaattacataaatatttttattgatctgacattttttctgtatagatctaagtgctggtttaaatttggcgcccgttggcagtctgattgcggcagcagcgaatgccgtaccccctgcccctgttcaatttattcgcacggccatgaacagcgggctctgaccgccaggtggcgctaacctgaattccaaaataacccaaaaataattgtctctaatttttaagcgccttttcgggcaagcgttttaattactttgtaaagctgcatttttgttttgtttttttttttctttttgtttttcattaagctgaactgctttgattttttttgccgtcttaatgtttgtttgtgtcgagccaagtgctataaatgattttataatactcgtttaatctggttacgactttttcggagcgataaaaactgtgcagtttggaactcagttttcaaagccatttttcttatctaaatgtgttatcaaggaaatctctgttacgttgttttttttttcattctaacttggctgcagctcttaaatggcgagcaatgctattcaaatatatattatattatattttaattatatatgaagtttaaaaaatgttataaaattttaaaaacaattttcttattttttaaatctatgctttgattttagaaatatagcacatatgtaattattaatattatattatattatggctatttgtttatatgcacttcatcaaaatattccaattgcatccagaatgcgaagcgatcgaaaaatatataaagtaattggaagaaagtagttcaaatgaccgatgaactcatttcgattgctattctggttctcatcgtgatgatgccgattcagaaactgaacaatttctatacactactaacatttatttaaaacgtataatgcttcactctttatcgttaaaaataaagacacacacaaaaaagacaaacaacgatgtttcgataagcattaaagtcaaagtaagctttttacagttttcacattgattaaagttttataaagctgctaagaatgtttaaagaaatccgcaaaacatttttacaacatttacattaaaatttagtttggtttccttaccgttttgtattttcttcttgtgtattgaaaaattaaattaatcaccattaagcgta

SEQ ID NO: 34772 - DNA, 312 bp, DROSOPHILA
atgacgctccacaagctgcccgccaagtgcattctgctcgtggtgttgctgctcctgctggactccagcctggccaggtcgcaacagttcttcgtcgccgaggatgtgataacaggaacggcaactgaaacgggaactgcagctgcaagcagaaccgtatttggtgatgatcaattgcccatcaacgatccatcggatctaagtgctggtttaaatttggcgcccgttggcagtctgattgcggcagcagcgaatgccgtaccccctgcccctgttcaatttattcgcacggccatgaacagcgggctctga

SEQ ID NO: 34773 - protein, 103 aa, DROSOPHILA
MTLHKLPAKCILLVVLLLLLDSSLARSQQFFVAEDVITGTATETGTAAASRTVFGDDQLPINDPSDLSAGLNLAPVGSLIAAAANAVPPAPVQFIRTAMNSGL

SEQ ID NO: 34774 - DNA, 3503 bp, DROSOPHILA
aatgtagcttattacattttaaacgttcctacatataataagatctttttttattttccaaatattatctggacttaaacagagatggatcaaggttcaaaacggaattgccatttctaaaacaatgcaagaatgctagaaattacagtatttaagcccaaataatataatcaaacttttcaaacttttaaaagtcatcattttcaattacaatgttacaaattgtttaaatattctaataataagcactagctagcaaaattcattaattttaagctttgttcgaaatcatatacacccaccaccgaatccccaactaccctcgctaaattacagggtatgcggcttatatggcacacggggtgggtggggcctcgtttggcatcggtggcgctggattaacagccactgagagagccacagaaaacaaaagcaacccaccgacgtgtatggaacgcaattatggcacctgactcactcgctgccagtgcaatccagtccaggagccatggcttaaaagcaactcccttcaggcgatagcagctcatttgcccaccattagccaaatgcagtccacacagatctcacagctcttcctgctgctgcacttgctcatcttcacgaccgttgctcgtggcgatgtcaatcgactggtgctggatcagctcaaccaggtgggattggtcaatctcatagagcaggcaacgcgaccgaatggtaactaaagtctttcgatttggttagaatcaatgttccaatactttcacttgcagtacccagagatctatccaactatgattttattgtgattggagctggagcagctggttgcacattggccgcccgcctctcggagaatccccaggtctcggtggccctcatcgaagctggtggagtggagaacatagcgcatctgacgccagtggtggctggttatctgcagcagacatcctcgaactggggctacaagtcggtgccgcagaagctatcctgccacggtatgaacaataacgagtgtgccctgccgaggggcaagattctgggtggcaccagctcgatcaactacatgatctacaatcggggcaatcgtagggattttgatgcctgggcggcagctggaaatcccggctggagttacgacgaggtgttgccctattttctgcgaagtgagcatgcgcagcttcagggattggagcaatcgccatatcacaatcacagtggtcccttgagtgtggaatatgttcgttttcgatcgcagatggtggatgcctttgtggaggcatccgtagaatcgggtctgccgcgcacggactacaatggcgagtcccagcttggagtctcatatgtccaggccaatacactaaatggacgcaggcactctgcctactcggcgtatataaaaccagtgcgggatttgcgctccaacttgcaaatattcaccttttcgcaagtgacccgcattctgatcgatgaggctacgaaatccgcttacggagtggagtttcattacaaaaacaaggcgtataccttcaaggcgagaaaggaggttattctatcggcaggcagtttcaactctccacagctacttatgctgtcggggattggaccagaagataacctgcgcggcattgggatacccctgatcaaggcactgccagtgggtaagagaatgttcgatcacatgtgccactttggacccacttttgtgaccaacaccacgggccaaacgaccttcacatcgagggtcactccagctgagttgatatcattcctactggccggaaatccagccacacgcatgagttccattggcggcgtcgaggctttggcattcctaaagacccagcgatcgaatctgccaaatgattggccagatatcgaattgatcatggtcaccggcagtttggctagtgacgaaggcactggtctgaaactgggtgcgaatttcaaggacgaaatatatgatagaatgtacagggaactggcgcaggcgcaacaggatcactttaccctgctgatcatgcagttccatccgaagtcagtgggtcgcctctggttaaaggatcgcaatccattgggctggcccaaaatcgatcccaagtactttgtggccgaagaggacgtggaatatctgttggacggcatcaaagccagtttaaggatcatagaaatgcccgccatgcaaaggattggcgctagattgctaaagcgaactgtcccaggatgcgagggtcaccaatttgcctcggatgattattggcgttgctccatacgcacgctatcctacacactgcaccaccaggtggccacctgtcgcatgggcgccgaaagtgatcccaccaccgtggtcaatcatcagctaaaggtgcatggagtgaggaaacttcgggtggtggacaccagtatcataccatttccacccaccgctcacacaaatgcagcggcatttatgattggggaaaaggcggctgatatgatacgaaccgactgggagttgatctaggaagacttaggagaaacgccatagaattctaactctttttttttactccgtgtagttagtaaccattatctttgggactaattacgaaattaaagataagttaatatagaacccatatgacattatttcaatttttatttatgttaatatctcaaaaatacacaccaaactgcgtgcccaaaaaccattaaattcaatatgcgtgtccatgtccattatgctttacgagtgttaagcatcaagtgggaaaggaaatacccattaaaggattatcgatatcctattaagtgtattatttcattatggcgttggcaaaaaggcagcaaaagtgcagagtaaactcgtctattggtcgccagttattgtttgacttggcaagttaattaaataaaattaccttaacgagtcgtgcgagttgcaattgggtttcttgttttggggttgccaacttgatgggcacgggagtcggaggaggttgcccctgggggttggacagagtgcattaacccatgcccgcacaaccgcacgggggttgaaaaagtttggctaggctcaggaaaatggcaacatacatggaaagaacatggaatacaaaaacacaccagggggtggtttcccttttcgctcgggatgctggggatggtgggtggtatggtgcgatgggtactgggtactgggtactgggtggttgcatacaagtggttatcactgtcctcggcatcggggagttttctgtgccgccgaagggagcgacttccggccccagggctgcacaatagataggcaaggttgcaccggaaaaaaaaatttagcaaatgtgatatcgatcggtgagaaacattaaaatatcccttatgctttgtcgaaatgaaggaactatgctatctatctatctattttaagtttataatttctcttttaattaagacatcaaacaatacaagtgaatggttttagtttaaattcagttaggttatcagaatgataagaaagcatttcc

SEQ ID NO: 34775 - DNA, 1503 bp, DROSOPHILA
atgaacaataacgagtgtgccctgccgaggggcaagattctgggtggcaccagctcgatcaactacatgatctacaatcggggcaatcgtagggattttgatgcctgggcggcagctggaaatcccggctggagttacgacgaggtgttgccctattttctgcgaagtgagcatgcgcagcttcagggattggagcaatcgccatatcacaatcacagtggtcccttgagtgtggaatatgttcgttttcgatcgcagatggtggatgcctttgtggaggcatccgtagaatcgggtctgccgcgcacggactacaatggcgagtcccagcttggagtctcatatgtccaggccaatacactaaatggacgcaggcactctgcctactcggcgtatataaaaccagtgcgggatttgcgctccaacttgcaaatattcaccttttcgcaagtgacccgcattctgatcgatgaggctacgaaatccgcttacggagtggagtttcattacaaaaacaaggcgtataccttcaaggcgagaaaggaggttattctatcggcaggcagtttcaactctccacagctacttatgctgtcggggattggaccagaagataacctgcgcggcattgggatacccctgatcaaggcactgccagtgggtaagagaatgttcgatcacatgtgccactttggacccacttttgtgaccaacaccacgggccaaacgaccttcacatcgagggtcactccagctgagttgatatcattcctactggccggaaatccagccacacgcatgagttccattggcggcgtcgaggctttggcattcctaaagacccagcgatcgaatctgccaaatgattggccagatatcgaattgatcatggtcaccggcagtttggctagtgacgaaggcactggtctgaaactgggtgcgaatttcaaggacgaaatatatgatagaatgtacagggaactggcgcaggcgcaacaggatcactttaccctgctgatcatgcagttccatccgaagtcagtgggtcgcctctggttaaaggatcgcaatccattgggctggcccaaaatcgatcccaagtactttgtggccgaagaggacgtggaatatctgttggacggcatcaaagccagtttaaggatcatagaaatgcccgccatgcaaaggattggcgctagattgctaaagcgaactgtcccaggatgcgagggtcaccaatttgcctcggatgattattggcgttgctccatacgcacgctatcctacacactgcaccaccaggtggccacctgtcgcatgggcgccgaaagtgatcccaccaccgtggtcaatcatcagctaaaggtgcatggagtgaggaaacttcgggtggtggacaccagtatcataccatttccacccaccgctcacacaaatgcagcggcatttatgattggggaaaaggcggctgatatgatacgaaccgactgggagttgatctag

SEQ ID NO: 34776 - protein, 500 aa, DROSOPHILA
MNNNECALPRGKILGGTSSINYMIYNRGNRRDFDAWAAAGNPGWSYDEVLPYFLRSEHAQLQGLEQSPYHNHSGPLSVEYVRFRSQMVDAFVEASVESGLPRTDYNGESQLGVSYVQANTLNGRRHSAYSAYIKPVRDLRSNLQIFTFSQVTRILIDEATKSAYGVEFHYKNKAYTFKARKEVILSAGSFNSPQLLMLSGIGPEDNLRGIGIPLIKALPVGKRMFDHMCHFGPTFVTNTTGQTTFTSRVTPAELISFLLAGNPATRMSSIGGVEALAFLKTQRSNLPNDWPDIELIMVTGSLASDEGTGLKLGANFKDEIYDRMYRELAQAQQDHFTLLIMQFHPKSVGRLWLKDRNPLGWPKIDPKYFVAEEDVEYLLDGIKASLRIIEMPAMQRIGARLLKRTVPGCEGHQFASDDYWRCSIRTLSYTLHHQVATCRMGAESDPTTVVNHQLKVHGVRKLRVVDTSIIPFPPTAHTNAAAFMIGEKAADMIRTDWELI

SEQ ID NO: 34777 - DNA, 3473 bp, DROSOPHILA
gagagagaaggagagagcgagtacgttagaaggagagcgagagatggggcgcgtcttatcaatgagctcatcattcttgcactgagaaaaatcagaacaaattcccagcaaccacaacaacaacaaaagaacacggtgtgtataaataccaaacaacaaaaataacccgcacacacagacacgcacacgcatacacactagaaaattaacccttagtgtgtgcgtgcattctgattggggtggctgattggagtttctaaataaacaaagtttgttattgccgctttgttgttgctgtaccaatgtttattagcaattgtttttagctagaactcatgacttagaccgcgtttagcaaaaaccggctttacactagattattcgtaaatcatcgaaatgcgagccgggaaaaaagtttatcagcatcccacagtttgttttccgtttttgtagttgttgctctgccactgcaacttccaactagtttttcattcactcactggcacagtaaaaaaaaaattcaaaaaatatttcgactttaattgatcgcgtcgacgcagtaaattaattcctgattttcaattaaaacgaatcaattgacgaaatttttaccgttcttaagaaccgagtccctttacgctggagatggaaaaacgccgattgtttgcttgcatcgatgctgtcgcttcaaaaagtaagattatcgattgttagcgatgtgtcgaacatctcgacgatattttaactatttatagtttcaattcgaatatatttcaagaaaataaaattaaaacgaataattcactaggtttttaatcaatgtttttattcgctttcacacttaataatttaaccaatagtattgtgcacccctcgtcacgtccagtcgatatgtattgcatagaattagccagtctggttatcgataactagtccaactggagtctcggatgtaaacaaaactgaaataaaaaacaaaaacaagagagtgaatttaacaatgtcgcgcggcaacgaattggtattcaaagcgaagaaaacatcagagaagatatcggagaacatacacatattcgccaacgatccatcgctggcgtttttccgtgtgcaggagcacgttcgcaaggttaccccagcgattttcgagaaacgcgatgaagtctttcagctgcaaaataatctccagggacattgctatgatatggaatacggcatacagtaggatcaactactaaataataaaataatatataattgaatctatttaaccgcagagcgctgcgaacgattgaaaaatcggagagcatatttgagaacatccaggaaatgatcaaggcttcaatattcctcaagcagcagctaaagtacgaggagagcagaaagaaagtgaagaaggatagcaccaaatcttccgtctacaagcgattctccgcccatctggcactggatctcccggatttacccgatttcggtggcgttatgcgggaaactagccagcgaatggagaatatgataggtcctggcacggcaacaggacgtactgaggcccaggccgcgacatccagtaatcctggcgagctccaacgatcctatacgacactccactagattaagtaggttctagcattgtactcatagctatgtatgcattattattctaaaatacatttattttaattgtaagacatgtacttttatcataactgactactcctgctttatagtttctataatatgcataaaaaaaagtattaaaatattatgaaaattcttgaaatgcttataatcgaaaaccgttcgatagtcgataggccgttcagtcgccactcgagcgagctatcgatacctttttagctgacacttgaacagcacttgttttattagataatattgctaatattattattacctcgaccaagtcgctgccgtcaagatgaaccgaatttgccagagtctccgccatccgagataccagattctcgccaccacagcaccgcaatccctgctcacccgctttcttgcggcggatgcggccaccggcgcggcagtggacaaggcgacaatggacaagctggtgcgcaccaacaaggtggtcgtcttcatgaagggcaacccacaggcgccacgctgcggcttcagcaatgcggtggtgcagattatgcggatgcacggtgtccagtacgatgcccacgatgtgctgcaaaacgagtccctgcgacagggtgagtacgctccacatatgcattagcgtgccagcgttaaaccttattgcttgcgtgcaggtgtcaaggactacaccgactggccgaccattccgcaggtgttcatcaatggcgaatttgtcggcggttgcgacatcctgctgcagatgcaccagagcggcgatctcatcgaggagctcaagaaggcgggcatcatttcggagctgctgaaagcggaggaggctaagcagcaggacgacaaggctaagtgatgattcaaaaagagcgcccaaagatcaaattcccttcctaaatctgttagtcacgcaacgtttttattattaaatgtttaactcataacgacaatggtgtgcgttgttccgtgtgatttaaatggcagccaatggcatataatcgcaggcgctcatttatgattgtgattaagatatagcaggctttgtaaaagtaccattataatgtaagcaagcattctataggatgaattcagttgcgcgtcctgcgcctctcgtcgatttgctgcaggaggcataggattcgactgcgtgcctgcagagcatcgtccacctgcaagagggaaaagcactgttgtcgatgctgcggattagtcatattcaccaggatctccatcaggttgtcggctatggagtggcgcatcgtttcctccgatggcattggtggaatcacgcgacttggacgagttggagtcgattgagcgggatttctaagtggcaactgattcccgacgtactgctcttcattgggatactcatcagtttgcttttccagatcctttggtacctgattttccatctcaatatcttggttctcatttagaagcattttctgattaatctttaaatattctgaattgtcgagtttatctgcagtctttgcatccttttctgcttttaaaatgcggttgtttgccagattctcaactttaacttccattatttcatgctttaagtccaaatatttatcatttcttgttgatagcttcttattttgagattcatgattccgttctgtaattataatgattttcattgtgtaatcctttatgtccttgaacgtatttgtattacccatttcgctgagtgtttaatctagtttctcgtgccaataataaattataataatagcatatttataaattcattataacttctatgtgctatgattataactgaaagtccaagcgaactataaaatgaaatcataaataaaaatcgggaattaaacagttattta

SEQ ID NO: 34778 - DNA, 1002 bp, DROSOPHILA
atgtcgcgcggcaacgaattggtattcaaagcgaagaaaacatcagagaagatatcggagaacatacacatattcgccaacgatccatcgctggcgtttttccgtgtgcaggagcacgttcgcaaggttaccccagcgattttcgagaaacgcgatgaagtctttcagctgcaaaataatctccagggacattgctatgatatggaatacggcatacaagcgctgcgaacgattgaaaaatcggagagcatatttgagaacatccaggaaatgatcaaggcttcaatattcctcaagcagcagctaaagtacgaggagagcagaaagaaagtgaagaaggatagcaccaaatcttccgtctacaagcgattctccgcccatctggcactggatctcccggatttacccgatttcggtggcgttatgcgggaaactagccagcgaatggagaatatgataggtcctggcacggcaacaggacgtactgaggcccaggccgcgacatccatcgctgccgtcaagatgaaccgaatttgccagagtctccgccatccgagataccagattctcgccaccacagcaccgcaatccctgctcacccgctttcttgcggcggatgcggccaccggcgcggcagtggacaaggcgacaatggacaagctggtgcgcaccaacaaggtggtcgtcttcatgaagggcaacccacaggcgccacgctgcggcttcagcaatgcggtggtgcagattatgcggatgcacggtgtccagtacgatgcccacgatgtgctgcaaaacgagtccctgcgacagggtgtcaaggactacaccgactggccgaccattccgcaggtgttcatcaatggcgaatttgtcggcggttgcgacatcctgctgcagatgcaccagagcggcgatctcatcgaggagctcaagaaggcgggcatcatttcggagctgctgaaagcggaggaggctaagcagcaggacgacaaggctaagtga

SEQ ID NO: 34779 - protein, 333 aa, DROSOPHILA
MSRGNELVFKAKKTSEKISENIHIFANDPSLAFFRVQEHVRKVTPAIFEKRDEVFQLQNNLQGHCYDMEYGIQALRTIEKSESIFENIQEMIKASIFLKQQLKYEESRKKVKKDSTKSSVYKRFSAHLALDLPDLPDFGGVMRETSQRMENMIGPGTATGRTEAQAATSIAAVKMNRICQSLRHPRYQILATTAPQSLLTRFLAADAATGAAVDKATMDKLVRTNKVVVFMKGNPQAPRCGFSNAVVQIMRMHGVQYDAHDVLQNESLRQGVKDYTDWPTIPQVFINGEFVGGCDILLQMHQSGDLIEELKKAGIISELLKAEEAKQQDDKAK

SEQ ID NO: 34780 - DNA, 6270 bp, DROSOPHILA
gcagcaaaactcgaattatcgaatcttttccattcacgttattttcgaggggggggggggggtgtgataagtttttatcagttggaacgcaacttaccgttcggattactacctgtgtgtgcgtgtgtgtgcgagcgatcgccgttttgttgttgccgctgccgctgctgctgctgcggctgttgtctctggattttggattttggtatttcggatttcgaacttcgaatgcgtttcgagcggggtcactcgttgttggggtcatccaagtgcaccatctggcgcctgcacacacgcaccgtcgctcgcaatgtgcatttatttacttatttttattcgcgcacttggtcgccacaattcatacgacacactgacacacacacgcacacacatgcacgcacatgacactaggtgcaatcggtgctgtgtgaccaggcgccgtcgattccagtatttcgtgagcgcgtcaagcaaacggcgatgactaagcgttgctcgtggaacgatggaaagtgaaaagtgtggcagttctttttaattttaatttgctttagaattttacattattttatttatttagtttttcgtttggcggtgaattcgaataaaataaaaatgattaatcttactatctaccacgacttaagtttataggactcaagaaggtatataaaatatgcaattaaaaagaattgcaattgaatagactaccttaaaggtaatttctttaaggacatttcagaaaattttatagaataattattcacagtttttgagataatggcattacagtgggaaccgcccatattctgagttccaatcgcaagtgaataaaagaaatttgtttgtttttatttgatatctcgtaataatatattcgtaataactgagaaattttttttatttacttatcgatatttgcctaggaatagaagataacgatagtttctacgcgctttgcaacggtaaaaagcagctgaccagagctttttgcgcttgccaaacgcaaaagctccggagcgtgttgtcataattgtgtctgcaaaagctcgcttgattccattccacgattgattcgatttgctttgcttttgctattcgcgatgtgccgtggaaaatgaatcgcattcccagatgcaattgacccactgaacgagcccgctgccccgctgccctgctgcactgcatccattacggcaactccacggtgaaatccaggcaagacccgagaatcgaccaccccaatccccctcccccacaaatcagccaggcaccatgtcaacggagagcaacacgcccgtggatccgagggtccaggtaggtaccacctacacacatacatacatacacctacatatgccaaacaacctaatcctcgggagcccgcttaggtggagctggagaagctgaactccgccacggacaacatcaaccgatacgaagtggagctcgatgtgagtgggcgagtattgatttttccccagttaccccagttacttaccattattgcttgcgatctctgtcccaaaacaaaccaaaaaaaaaaggaggccaagtgcgaattcaagcgtttgctggcggaaagtgtggtgagaatcaaggcagccgcccacaagctgggcaactcgattgatgccgccaagccgtactacgaatctcgcatctacgccgcccagttggccaaggaaacgcaattggccgccgccaaccacgagaaggccaagtccattcatgccgccgccaaggagatggtctacctggccgaacagggtctgggcgagaagtcgacgctggacaccgcctgccaggagatgcttagccacgccgccagcaaggtcaatcagtcccagctggaggtcaccgacacccgcaatgccctcaagatgtgccagctgaagctcgaggtggccaataaccgggtcggcaagctccagggtcagcttaagcaagcgcttcgggcatccaggtaaagttcatggggttcccttcaaggaatactgcttaagaaccaagaaccaggtcacagaaacctctttccaccgaaagtcgaatgctggtgacccagaaactccattcgattttgaatcaatttgttataaagaatttagaaacattactttcaaaatattcaacagaaagttgcagaaaactatttcaaatttctgagatgatctcttttattttgcattaagaaaactccagagaatttgcaatcttttaaatcatatattactttgtgaaaaataacagtaagagttagatgaaatattaggttttgatcttaaggctaatatttttttttaccaaactgcaagttgacatagtttttaaaactcacgatgcttataagcaaatatacctgaaatcctgagaaattttcgaatttcggtcttttgccgaacttacgcttttcttattaaacttgttttttggtttacttttaagttttatatttgtttattaaattctaatttgttgtatgcctttttgttttgttttttctttttccggtggactgccctgtcttccgaacttttatcttccttttagattgcagctcaagcgcaatttacttttgttgagatattttagcattatgcacgctttgtattgtaccctctgttcgtgagtatcgccgatttgatttggccacatgtaggcaggcactgcgactaacctaatccgctggaatccttccccgataccataggccatactacgagacccgggcgaactacaatggactgctgaaggcccagaagacgcgcgtcaacgagctggaggcgaaggtcagtgcggcgaagttaacgtacaacgaggcgcttaagaatctggaacagatttcggaggacattcaccgtcagcgacagcagcgcaataatctgctcaactacgaggccatgctgcgtcaggtggatgccgtggacacgttgacggcgggtctggagaggagctcctgcggaactgctgccaatcgccaggatctcgaggcgaaggcagccgccgaggagcagaagcacgtggaggcggaggcggaggaggaggaggaggagtacctgcgcatgcccgagcgtctgggtcaccacgagtgcccccacctgctaaccgatttcgaggcggtgctcaccttcccgcagaaactggccggtggcatgcacaagtcggccagcacaggtgctgcggcggatggggaagccggattgggaccgctgggcctgcacgctccatacgaggtgaagtcgggcagcggatctctggcatcgggatccgcttccgtctcaacttcggctggcggtgctccggcggacaacgacattgagcagtggacggagatccggctatcgcattcggatagcaccagttccagctactccaatcagtcgctgctcgagcagcagggcctggattccacgggcggcatgtccggcggcttgggtctcggcctggccaggaatcatctcgatgcagatgcccagtcccagcactcgacctcgtcgtccgatgagcccaagcgcaaggtgacctgcacgacgatattccaggacgatagcagtgcatccagcggcggtggccagcagatgagccgcaagcagagcctcagccagtggttgtcccgctcgaatagcttcaagggcagcggacgtcgccagagcctcgatctgctaatcgatgccggcgacaaggtgaaggatgtgtttagctacggcttccagaaggtgggacgcagcctggagcgacgcaacagcgaatcggagatgtccggcgattgtgcagccgaaggtgatgcactgctcggcggcacaacggacgcactggcgctgagcggtggcggagcatccggcggaaccggcagtgcaaccggtgcagcaggttccggttcaggatctggcggcggtgccggtgattttttcctcttcagcaggtcagtagacggtaatggggcaaagggtggcggtcgtagtctgctcaactcgctgcacagccgccttgccaagctcatttgaactcagaactcagaaatcggatttcgattccgaaaccgaatttgaatttgaatttgaatttgaatttcgaaaaaatatatgtatacccgaaccgaaacagcgatgatcagcgcaatttttgcacccatctaatccaaccaaccaaccaactacaaaaatgaaccaccaaccaaccaactgcaaaatttataaaatagtactcaatttactaattactaatatgaacgaattggctgctttgatttggtctctgcttttgctactttcaatctcacaaaaatatatctttcaaaaaaaaactaactgcaacaactacaacaacaacagcaacaacaagaacaacaacaacaacaacaaaagcacgaacgcacactcgctttaacctcaaattctgtatgtactgctcaaaacgcaaaaaccaaaatcgagaaatatctgttgtgtttttgtttctaaacgttacctttttcccactcattaatcgctttgaatcgctattgccttctccctctaagccgagtcatcttcatatcgctatccctgtctaattgaatgtacctacgttgaatagcctgtactctagttttcaaaattaccacttttgagtttagttgaatttgaaagttatcttaggggatctgcccatgaacttaaatcttattatttcaattgaaaactttttaataagagtcttttgaaattagttttccaagtctgtgaagtatattatactataatggatcataagtatataaaggtatacacaaagtgtattatttgccaatttgtattattttcttcattgtttttaaatgaacttgtagaacttggagtaccggttatctgtaagtcggataacatcgacttttttttgtttaagtgttgtaattgcttacctgtcctatcacccactgtatatcatatgtgtacccaattatctatctatcgaatctcagttctgtgtttttcgttcagttttaactatgcaaagctattacatacaaaactaactaactttgcagatcttcagagccaaaagagttactgtccgatgagcaggttgagaatttactattaaatcacttggtggatgagaatggtgccattatagtggaggaactcaaatcgccaacaacaaccacaagcatgtaccacacacaccaacatcaacagcaacagcaacaacaacaacagaatcagcagcagaagcaacaacaaaagcaacaccaccaggcactaaacgtggttggagccttgctgttttgagccgacagcgaaataccctacacttagaaaaaaaaatcaacaccaaaaccgcctcaccatcacacacacacacacacacacacatgaatgcggtgatgggaaaagtcacttttaaatgaataattgcaatatagttcatagataatgatcgaaagtgccacaagaagtatttaaagtttcaaaactatgcactatttttgagcatttttgtaacggaattttcgaaagtacctttcttcaatttagaaaactcttgtttggccgctgacacaacttcccccatcactgcacgcatacaaatatgaaaattatggcaaaattttactctatgagtattagggcatacttacgatcgatccaaaaaatccaattagtcaaaagcgtagcgtacatatcattcaaatacaaaaagacatcaatcccaggtggatcgaaatggatgcgagatgatggatgagccagcaggaatctttttaaatccacaccaacgcactcaggcacgtgtggcaaactatgttctaatcctaaataaatgatgtgcaataatttagtttatgtagtggcatatacataattaagaaagttacattttatgctgtttacaaaaagcaaataactaaatgctagtcaacaaaaacgaaatcagtttaatagttttagtgtgtacgagctaaatattcggcaaaatgatttacaagaaacccacaaaaatacataagagtgtacaaataatggtaaatgtggtgtgcactgaaagaaaacgaggagtgcgttgacaattcgcaccaaaagccgaatcagcaatattactttatggagacatttgaaatacaagcgacttgcaaattgtccgcgaattcttcggttttcttctgtttgcgccactgagtgttaaataattgcatatataaatacctgcataaaattatatgaagtgtattatacaaaactgaatgtttcatttcgaaaactgggcagttagtgaataaaatggggctgc

SEQ ID NO: 34781 - DNA, 2330 bp, DROSOPHILA
caaacgcaaaagctccggagcgtgttgtcataattgtgtctgcaaaagctcgcttgattccattccacgattgattcgatttgctttgcttttgctattcgcgatgtgccgtggaaaatgaatcgcattcccagatgcaattgacccactgaacgagcccgctgccccgctgccctgctgcactgcatccattacggcaactccacggtgaaatccaggcaagacccgagaatcgaccaccccaatccccctcccccacaaatcagccaggcaccatgtcaacggagagcaacacgcccgtggatccgagggtccaggtggagctggagaagctgaactccgccacggacaacatcaaccgatacgaagtggagctcgatgaggccaagtgcgaattcaagcgtttgctggcggaaagtgtggtgagaatcaaggcagccgcccacaagctgggcaactcgattgatgccgccaagccgtactacgaatctcgcatctacgccgcccagttggccaaggaaacgcaattggccgccgccaaccacgagaaggccaagtccattcatgccgccgccaaggagatggtctacctggccgaacagggtctgggcgagaagtcgacgctggacaccgcctgccaggagatgcttagccacgccgccagcaaggtcaatcagtcccagctggaggtcaccgacacccgcaatgccctcaagatgtgccagctgaagctcgaggtggccaataaccgggtcggcaagctccagggtcagcttaagcaagcgcttcgggcatccagattgcagctcaagcgcaatttacttttgttgagatattttagcattatgcacgctttgtattgtaccctctgttcgccatactacgagacccgggcgaactacaatggactgctgaaggcccagaagacgcgcgtcaacgagctggaggcgaaggtcagtgcggcgaagttaacgtacaacgaggcgcttaagaatctggaacagatttcggaggacattcaccgtcagcgacagcagcgcaataatctgctcaactacgaggccatgctgcgtcaggtggatgccgtggacacgttgacggcgggtctggagaggagctcctgcggaactgctgccaatcgccaggatctcgaggcgaaggcagccgccgaggagcagaagcacgtggaggcggaggcggaggaggaggaggaggagtacctgcgcatgcccgagcgtctgggtcaccacgagtgcccccacctgctaaccgatttcgaggcggtgctcaccttcccgcagaaactggccggtggcatgcacaagtcggccagcacaggtgctgcggcggatggggaagccggattgggaccgctgggcctgcacgctccatacgaggtgaagtcgggcagcggatctctggcatcgggatccgcttccgtctcaacttcggctggcggtgctccggcggacaacgacattgagcagtggacggagatccggctatcgcattcggatagcaccagttccagctactccaatcagtcgctgctcgagcagcagggcctggattccacgggcggcatgtccggcggcttgggtctcggcctggccaggaatcatctcgatgcagatgcccagtcccagcactcgacctcgtcgtccgatgagcccaagcgcaaggtgacctgcacgacgatattccaggacgatagcagtgcatccagcggcggtggccagcagatgagccgcaagcagagcctcagccagtggttgtcccgctcgaatagcttcaagggcagcggacgtcgccagagcctcgatctgctaatcgatgccggcgacaaggtgaaggatgtgtttagctacggcttccagaaggtgggacgcagcctggagcgacgcaacagcgaatcggagatgtccggcgattgtgcagccgaaggtgatgcactgctcggcggcacaacggacgcactggcgctgagcggtggcggagcatccggcggaaccggcagtgcaaccggtgcagcaggttccggttcaggatctggcggcggtgccggtgattttttcctcttcagcagatcttcagagccaaaagagttactgtccgatgagcaggttgagaatttactattaaatcacttggtggatgagaatggtgccattatagtggaggaactcaaatcgccaacaacaaccacaagcatgtaccacacacaccaacatcaacagcaacagcaacaacaacaacagaatcagcagcagaagcaacaacaaaagcaacaccaccaggcactaaacgtggttggagccttgctgttttga

SEQ ID NO: 34782 - protein, 684 aa, DROSOPHILA
MSTESNTPVDPRVQVELEKLNSATDNINRYEVELDEAKCEFKRLLAESVVRIKAAAHKLGNSIDAAKPYYESRIYAAQLAKETQLAAANHEKAKSIHAAAKEMVYLAEQGLGEKSTLDTACQEMLSHAASKVNQSQLEVTDTRNALKMCQLKLEVANNRVGKLQGQLKQALRASRLQLKRNLLLLRYFSIMHALYCTLCSPYYETRANYNGLLKAQKTRVNELEAKVSAAKLTYNEALKNLEQISEDIHRQRQQRNNLLNYEAMLRQVDAVDTLTAGLERSSCGTAANRQDLEAKAAAEEQKHVEAEAEEEEEEYLRMPERLGHHECPHLLTDFEAVLTFPQKLAGGMHKSASTGAAADGEAGLGPLGLHAPYEVKSGSGSLASGSASVSTSAGGAPADNDIEQWTEIRLSHSDSTSSSYSNQSLLEQQGLDSTGGMSGGLGLGLARNHLDADAQSQHSTSSSDEPKRKVTCTTIFQDDSSASSGGGQQMSRKQSLSQWLSRSNSFKGSGRRQSLDLLIDAGDKVKDVFSYGFQKVGRSLERRNSESEMSGDCAAEGDALLGGTTDALALSGGGASGGTGSATGAAGSGSGSGGGAGDFFLFSRSSEPKELLSDEQVENLLLNHLVDENGAIIVEELKSPTTTTSMYHTHQHQQQQQQQQQNQQQKQQQKQHHQALNVVGALLF

SEQ ID NO: 34783 - DNA, 3815 bp, DROSOPHILA
gctaggctcaggaaaatggcaacatacatggaaagaacatggaatacaaaaacacaccagggggtggtttcccttttcgctcgggatgctggggatggtgggtggtatggtgcgatgggtactgggtactgggtactgggtggttgcatacaagtggttatcactgtcctcggcatcggggagttttctgtgccgccgaagggagcgacttccggccccagggctgcacaatagataggcaaggttgcaccggaaaaaaaaatttagcaaatgtgatatcgatcggtgagaaacattaaaatatcccttatgctttgtcgaaatgaaggaactatgctatctatctatctattttaagtttataatttctcttttaattaagacatcaaacaatacaagtgaatggttttagtttaaattcagttaggttatcagaatgataagaaagcatttccaatggcttagggtcagcatgttgataagaaacgacatactattattatatgattaatatgacacttcacagacttatattttcgggttttttcattattattatgtgcacaaacaacgcaattaagagtgcccatgagatatatttttaatgtatgaataaaatttaaagtgcatttacattataagtaataaagcgaaattcagagtaatataaattgaagtacaaaatatataacaccaacatgcctgaactttattagacaggtaaggcaactttttgcgaaaaagaaaatgtcaaaagtggcctaaacaataataaattttacatatttcaattactaattctctttatttatttgtaaattatatggcttgcagattgagatttttgctatattgtattttaatatgaatatacagagacctgtagcttaaagtgcccgagcaaaagtgctagcatactttaagacaggttttttctttcagtgttgtcattatagcgaacgaaacgaaacgccatcgcagatcaaagcaaagtcgaacgtcactcgcaagcgggcaaatgcaaatgtggatgggaaccctgactgaattcgcaatgtcctgtcaacatgcggtttcctaattgcagcatttcaaaatcagtcaacaggcgtttgagccaacagtggtggcaaaaaaaaggattaagcccttgcaggctggcagtgggtgggttggtgggcgtttggttggttggttggttggttggttggtgtgaagggttccgactcacctgaaacaattaacgcctcattgggacccgtcgtgtgtatgttgcccatcgttgagtcgttcctcgtcgccgtctacttgttggtctctatttatgttttatttgtttgctgtttactccttttgccgaaagctccgctgaaaagttctgccgcaaaaacgaaacaagagcgcacacacgaatgtataattagcacaccgggaaaaaaaaccatctaaatattgctagcaattttatggaatttataccgatttttagtagttattagttattaattagttattagtaaaagctttgaaggtttggtataatataggaaactttttatcttgtaaaaatattattattaaaatattattttatgcatgttcttaatattttctcgctgtgtgtaaatacatttaaaaaaacaagatagaagctttcaatgggccgcccgaaagtatggtacttattatatttccagattgccatcaaaacacacgcgcaattttcttgtttttatttacatttggtctcgattcttgttgtacttgaattgctattcttcttttttttttgtttttgttttatatcgtttttattaaaagcttttttttatctgtctctagggagcagcaacaacaattagcaatgtgcggcaacttgttctgcatataatacctgctatatacaatacgtatatatatacgtatattctatagtgtatctgaacgatcgaatcggaatgtggtgcctggaattaggaacacttgaggagtttggcggggtggggggaaatgtagagcggccacttgaaaattgtaaactgtgctggtgatttttattagttttatggcgctgctgggggacttttgtgagcagctctctatcaaagttctaataaaacacaaataagttgcgaataaaaagtagagcaagggggtgcggcatgacgtaagcagccatgtgtgcgtgtgtgtatgtgtgtgtgtgtgagggggagagagagaaggagagagcgagtacgttagaaggagagcgagagatggggcgcgtcttatcaatgagctcatcattcttgcactgagaaaaatcagaacaaattcccagcaaccacaacaacaacaaaagaacacggtgtgtataaataccaaacaacaaaaataacccgcacacacagacacgcacacgcatacacactagaaaattaacccttagtgtgtgcgtgcattctgattggggtggctgattggagtttctaaataaacaaagtttgttattgccgctttgttgttgctgtaccaatgtttattagcaattgtttttagctagaactcatgacttagaccgcgtttagcaaaaaccggctttacactagattattcgtaaatcatcgaaatgcgagccgggaaaaaagtttatcagcatcccacagtttgttttccgtttttgtagttgttgctctgccactgcaacttccaactagtttttcattcactcactggcacagtaaaaaaaaaattcaaaaaatatttcgactttaattgatcgcgtcgacgcagtaaattaattcctgattttcaattaaaacgaatcaattgacgaaatttttaccgttcttaagaaccgagtccctttacgctggagatggaaaaacgccgattgtttgcttgcatcgatgctgtcgcttcaaaaagtaagattatcgattgttagcgatgtgtcgaacatctcgacgatattttaactatttatagtttcaattcgaatatatttcaagaaaataaaattaaaacgaataattcactaggtttttaatcaatgtttttattcgctttcacacttaataatttaaccaatagtattgtgcacccctcgtcacgtccagtcgatatgtattgcatagaattagccagtctggttatcgataactagtccaactggagtctcggatgtaaacaaaactgaaataaaaaacaaaaacaagagagtgaatttaacaatgtcgcgcggcaacgaattggtattcaaagcgaagaaaacatcagagaagatatcggagaacatacacatattcgccaacgatccatcgctggcgtttttccgtgtgcaggagcacgttcgcaaggttaccccagcgattttcgagaaacgcgatgaagtctttcagctgcaaaataatctccagggacattgctatgatatggaatacggcatacagtaggatcaactactaaataataaaataatatataattgaatctatttaaccgcagagcgctgcgaacgattgaaaaatcggagagcatatttgagaacatccaggaaatgatcaaggcttcaatattcctcaagcagcagctaaagtacgaggagagcagaaagaaagtgaagaaggatagcaccaaatcttccgtctacaagcgattctccgcccatctggcactggatctcccggatttacccgatttcggtggcgttatgcgggaaactagccagcgaatggagaatatgataggtcctggcacggcaacaggacgtactgaggcccaggccgcgacatccagtaatcctggcgagctccaacgatcctatacgacac

SEQ ID NO: 34784 - DNA, 324 bp, DROSOPHILA
tcaattgattcgttttaattgaaaatcaggaattaatttactgcgtcgacgcgatcaattaaagtcgaaatattttttgaattttttttttactgtgccaaacttttcagcggagctttcggcaaaaggagtaaacagcaaacaaataaaacataaatagagaccaacaagtagacggcgacgaggaacgactcaacgatgggcaacatacacacgacgggtcccaatgaggcgttaattgtttcaggaaaccgcatgttgacaggacattgcgaattcagtcagggttcccatccacatttgcatttgcccgcttgcgagtga

SEQ ID NO: 34785 - protein, 41 aa, DROSOPHILA
MGNIHTTGPNEALIVSGNRMLTGHCEFSQGSHPHLHLPACE

SEQ ID NO: 34786 - DNA, 2357 bp, DROSOPHILA
gactactcctgctttatagtttctataatatgcataaaaaaaagtattaaaatattatgaaaattcttgaaatgcttataatcgaaaaccgttcgatagtcgataggccgttcagtcgccactcgagcgagctatcgatacctttttagctgacacttgaacagcacttgttttattagataatattgctaatattattattacctcgaccaagtcgctgccgtcaagatgaaccgaatttgccagagtctccgccatccgagataccagattctcgccaccacagcaccgcaatccctgctcacccgctttcttgcggcggatgcggccaccggcgcggcagtggacaaggcgacaatggacaagctggtgcgcaccaacaaggtggtcgtcttcatgaagggcaacccacaggcgccacgctgcggcttcagcaatgcggtggtgcagattatgcggatgcacggtgtccagtacgatgcccacgatgtgctgcaaaacgagtccctgcgacagggtgagtacgctccacatatgcattagcgtgccagcgttaaaccttattgcttgcgtgcaggtgtcaaggactacaccgactggccgaccattccgcaggtgttcatcaatggcgaatttgtcggcggttgcgacatcctgctgcagatgcaccagagcggcgatctcatcgaggagctcaagaaggcgggcatcatttcggagctgctgaaagcggaggaggctaagcagcaggacgacaaggctaagtgatgattcaaaaagagcgcccaaagatcaaattcccttcctaaatctgttagtcacgcaacgtttttattattaaatgtttaactcataacgacaatggtgtgcgttgttccgtgtgatttaaatggcagccaatggcatataatcgcaggcgctcatttatgattgtgattaagatatagcaggctttgtaaaagtaccattataatgtaagcaagcattctataggatgaattcagttgcgcgtcctgcgcctctcgtcgatttgctgcaggaggcataggattcgactgcgtgcctgcagagcatcgtccacctgcaagagggaaaagcactgttgtcgatgctgcggattagtcatattcaccaggatctccatcaggttgtcggctatggagtggcgcatcgtttcctccgatggcattggtggaatcacgcgacttggacgagttggagtcgattgagcgggatttctaagtggcaactgattcccgacgtactgctcttcattgggatactcatcagtttgcttttccagatcctttggtacctgattttccatctcaatatcttggttctcatttagaagcattttctgattaatctttaaatattctgaattgtcgagtttatctgcagtctttgcatccttttctgcttttaaaatgcggttgtttgccagattctcaactttaacttccattatttcatgctttaagtccaaatatttatcatttcttgttgatagcttcttattttgagattcatgattccgttctgtaattataatgattttcattgtgtaatcctttatgtccttgaacgtatttgtattacccatttcgctgagtgtttaatctagtttctcgtgccaataataaattataataatagcatatttataaattcattataacttctatgtgctatgattataactgaaagtccaagcgaactataaaatgaaatcataaataaaaatcgggaattaaacagttatttatcgaagcttgtaattatgttaacccttatatggctccttttttttaaattataaaatcttaaactttttattgagttacattaagaacccaaaattattcagaatagcaaacacaaatcgtttcgaaagccaaactgttagtcaattattttatcttttcaattatccaactatccacttcaatttaaaatcataagcttacatattaatgcgattttttttgctgactcacccatatatattcatagttcctaattcgtttaattctcaaaagttgccgcaatcagaacacattttgttgattttacacatttgatttatttaaatatacatatcgatcaatagtctttcatatatttagttacatacaatataatacatattgatttaattggtgttttcgtacgttttcgtttttgcggatttgtgttttgaattcgttttacatcaattgcttgtcgttacgtttgttaatcgtattatttacgtttaattttataatgcagcgatgcaatgcagtttggtggtagtaaaacgaaataaaaaaaaacttataccataacttgcttattagttaacaataatcaaa

SEQ ID NO: 34787 - DNA, 357 bp, DROSOPHILA
atgcttctaaatgagaaccaagatattgagatggaaaatcaggtaccaaaggatctggaaaagcaaactgatgagtatcccaatgaagagcagtacgtcgggaatcagttgccacttagaaatcccgctcaatcgactccaactcgtccaagtcgcgtgattccaccaatgccatcggaggaaacgatgcgccactccatagccgacaacctgatggagatcctggtgaatatgactaatccgcagcatcgacaacagtgcttttccctcttgcaggtggacgatgctctgcaggcacgcagtcgaatcctatgcctcctgcagcaaatcgacgagaggcgcaggacgcgcaactga

SEQ ID NO: 34788 - protein, 118 aa, DROSOPHILA
MLLNENQDIEMENQVPKDLEKQTDEYPNEEQYVGNQLPLRNPAQSTPTRPSRVIPPMPSEETMRHSIADNLMEILVNMTNPQHRQQCFSLLQVDDALQARSRILCLLQQIDERRRTRN

SEQ ID NO: 34789 - DNA, 5139 bp, DROSOPHILA
taattataatgattttcattgtgtaatcctttatgtccttgaacgtatttgtattacccatttcgctgagtgtttaatctagtttctcgtgccaataataaattataataatagcatatttataaattcattataacttctatgtgctatgattataactgaaagtccaagcgaactataaaatgaaatcataaataaaaatcgggaattaaacagttatttatcgaagcttgtaattatgttaacccttatatggctccttttttttaaattataaaatcttaaactttttattgagttacattaagaacccaaaattattcagaatagcaaacacaaatcgtttcgaaagccaaactgttagtcaattattttatcttttcaattatccaactatccacttcaatttaaaatcataagcttacatattaatgcgattttttttgctgactcacccatatatattcatagttcctaattcgtttaattctcaaaagttgccgcaatcagaacacattttgttgattttacacatttgatttatttaaatatacatatcgatcaatagtctttcatatatttagttacatacaatataatacatattgatttaattggtgttttcgtacgttttcgtttttgcggatttgtgttttgaattcgttttacatcaattgcttgtcgttacgtttgttaatcgtattatttacgtttaattttataatgcagcgatgcaatgcagtttggtggtagtaaaacgaaataaaaaaaaacttataccataacttgcttattagttaacaataatcaaaagtgttaaaagcgatatgccatgtatatgtgaggaaattgcacctctgtgtgtgtgtgtgtgtgtgtgttttttcttcttcttctcaaattatattctgttttttgtgtaatacttcgaaagttcagcgttttgaataaacaagtggaacgagtgtgtgtgtggtggtgtctccgatttgtgtgcggatcagacaatggacgacttgtccagaaaggatgaggtctccatcagcagctcgctgctgctgctcagaatgtcgtacagctggagcggtgcatctccggcgatgggattcccgaagggaaagaacgacgacagggtcgatagctgcagattgccggtaaccgatgtgagtccgctagtgggtgtggcggccttcgccgtcggcttcctgcgccgctccacaccgtcgacgaactcggcctcgtcctccttgtcgggcttctcgtccttgtgctgattgggacgcgattcgccggcgaactcgtaatacgcatcgggtagatcgtcaaagttttgataatccaggcagcgctgtacctttgctatgttgctcagcagcaggcgatgatagagatccacctgcggctggccgccgccgcgtatatccaaaatgggcagccagcggtagtagcactgatcccacacctgcagatcgaagatgcgatgtgccggctgcaggtaacgatcctgcggcactgacgaagcggtcgcaaagagctgcggattgatggtgttgcgcgagggtgtgacaccactagcggcgccatgcgctcccttactacccaccgccagggatctgcgatgcgccacggcagccgcctgggcgccaagatcgcccctttggcgctggtacagcggattgctaaagaacattttgtccttgtccgagaactgctcgccccaatcccaaacgggacgcaggacgagctgcgagtcggtcaccgccttcagtcgctgggcctgcgtatcgaactggaaggtatcgaagatgggcatgaagcacgagtcccacagcgtggtcaggtatgtctgcgtgaactcgaactcgtcggggaactgctgcaacagctgccacacgcaatcgaggaagagcagaaacactggactctgttcgctgtcgaatagttcggcattaccgccggccggctgggcaggatagacatgacccaggcgtcgctgaaacggatgctccagggccacccactccttctgcaccagcgattggaagccatcgatagtacggaaatgcggatcgagcaatagctgcgccagactgctaatcacacagcagagatcacggccattcgactcctggaggacacaggtaacgccgctgcgcagcgtggcagacgcttcactagcatagcgtaggcacaacgacacatagaacagccagttggtcttttcgagtagtcccaggtacttgtcatcctgcagcataaacttctccggcgtttccggcgtgcataggcgcctcagcttctgataggcgcgcagcacatcctgaatgctcggcaggcgatccgtcagctgtaggagcttcagctgtcgccccgcatcacatttgcgcaccagctccagcatcacattctccgatttggtgtcctgctgcgcagccggctgcagttcagctaatctgaccagtgccgcgctgctcccatagctatacacccagaaggcagctcgtgaatcgcagaaggcgcgcgacagatccaggaatcgatccacgctgcagctcttcggtatgacaaaatgcggcggcacagtgtacttgcccgcctggaggggattctgcagcagctggacactggcacagctaaccacctgccactcggtggcgccgcagcgtatcagctctctggcccagtcgtttttcgtcgcatacatactagtgccggatgcgcccagtgtcgaatagtatggctctcgatgagcataggcgaagctcagatcatgccgcattggataagcgaaacgcaccagggccgaggcaatcagtttgccctgatcactggccccaaacatcttcgaatcctgctgctggaaggcgaatttcagcaggcgaaagttcttgcacacgatatgcagggcggcgatgcgaccgctgatgttctgctgcttgaagggctccagttttttgcgcctgctcatgcccgcatggctggccatgcctcgcgccgcctgcagcgcactggccgcccgtcccagctcggtaatggtatagatatgatcgatgttgtttagcgtaatctcattgcggcccaaataggtattctcctgatatagatcgatcagtggcgctgtgatcgcttgattacgcttttcatgcagcggcacaaaggccagcttaaaattggtgacactcaacagtccgaaggtggcctctttgtgatgacgatccgctggcgtaccggacgcagatgatatggcgctgagcgtagagccactgcctccgctgctgtccatcggatcgatcggtgagtacatgtaggctggtgccgatgccactatctgctcgccgtgcagcagtcgcggcttggccagatggacgtccctcaaatcgctgggcaggcaccattcgttcgtgtccgctgtggcgcgcaaatctccgggtagcggtgccacatagctggtgaaggtgttgcgcttgtggtggtcagcatttccggcggatcccgctcccccgtggccgctgccaccgccgcccgtggccattatttagtcggtggtacgttgttggaatattcaattattcaccacttcctgtctggcggggagggggggggtgggtgtcggcgctagctttaccgttattccgctgctgtctgtgtgccatgcaagcaacgaaagaaagcggaatttggagcaaatgaatatatgacaaatggaaacagatgaggtgacaagtggagcagcaaaactcgaattatcgaatcttttccattcacgttattttcgaggggggggggggggtgtgataagtttttatcagttggaacgcaacttaccgttcggattactacctgtgtgtgcgtgtgtgtgcgagcgatcgccgttttgttgttgccgctgccgctgctgctgctgcggctgttgtctctggattttggattttggtatttcggatttcgaacttcgaatgcgtttcgagcggggtcactcgttgttggggtcatccaagtgcaccatctggcgcctgcacacacgcaccgtcgctcgcaatgtgcatttatttacttatttttattcgcgcacttggtcgccacaattcatacgacacactgacacacacacgcacacacatgcacgcacatgacactaggtgcaatcggtgctgtgtgaccaggcgccgtcgattccagtatttcgtgagcgcgtcaagcaaacggcgatgactaagcgttgctcgtggaacgatggaaagtgaaaagtgtggcagttctttttaattttaatttgctttagaattttacattattttatttatttagtttttcgtttggcggtgaattcgaataaaataaaaatgattaatcttactatctaccacgacttaagtttataggactcaagaaggtatataaaatatgcaattaaaaagaattgcaattgaatagactaccttaaaggtaatttctttaaggacatttcagaaaattttatagaataattattcacagtttttgagataatggcattacagtgggaaccgcccatattctgagttccaatcgcaagtgaataaaagaaatttgtttgtttttatttgatatctcgtaataatatattcgtaataactgagaaattttttttatttacttatcgatatttgcctaggaatagaagataacgatagtttctacgcgctttgcaacggtaaaaagcagctgaccagagctttttgcgcttgccaaacgcaaaagctccggagcgtgttgtcataattgtgtctgcaaaagctcgcttgattccattccacgattgattcgatttgctttgcttttgctattcgcgatgtgccgtggaaaatgaatcgcattcccagatgcaattgacccactgaacgagcccgctgccccgctgccctgctgcactgcatccattacggcaactccacggtgaaatccaggcaagacccgagaatcgaccaccccaatccccctcccccacaaatcagccaggcaccatgtcaacggagagcaacacgcccgtggatccgagggtccaggtaggtaccacctacacacatacatacatacacctacatatgccaaacaacctaatcctcgggagcccgcttaggtggagctggagaagctgaa

SEQ ID NO: 34790 - DNA, 2956 bp, DROSOPHILA
ctagtgtcatgtgcgtgcatgtgtgtgcgtgtgtgtgtcagtgtgtcgtatgaattgtggcgaccaagtgcgcgaataaaaataagtaaataaatgcacattgcgagcgacggtgcgtgtgtgcaggcgccagatggtgcacttggatgaccccaacaacgagtgaccccgctcgaaacgcattcgaagttcgaaatccgaaataccaaaatccaaaatccagagacaacagccgcagcagcagcagcggcagcggcaacaacaaaacggcgatcgctcgcacacacacgcacacacaggtagtaatccgaacgacagcagcggaataacggtaaagctagcgccgacacccaccccccccctccccgccagacaggaagtggtgaataattgaatattccaacaacgtaccaccgactaaataatggccacgggcggcggtggcagcggccacgggggagcgggatccgccggaaatgctgaccaccacaagcgcaacaccttcaccagctatgtggcaccgctacccggagatttgcgcgccacagcggacacgaacgaatggtgcctgcccagcgatttgagggacgtccatctggccaagccgcgactgctgcacggcgagcagatagtggcatcggcaccagcctacatgtactcaccgatcgatccgatggacagcagcggaggcagtggctctacgctcagcgccatatcatctgcgtccggtacgccagcggatcgtcatcacaaagaggccaccttcggactgttgagtgtcaccaattttaagctggcctttgtgccgctgcatgaaaagcgtaatcaagcgatcacagcgccactgatcgatctatatcaggagaatacctatttgggccgcaatgagattacgctaaacaacatcgatcatatctataccattaccgagctgggacgggcggccagtgcgctgcaggcggcgcgaggcatggccagccatgcgggcatgagcaggcgcaaaaaactggagcccttcaagcagcagaacatcagcggtcgcatcgccgccctgcatatcgtgtgcaagaactttcgcctgctgaaattcgccttccagcagcaggattcgaagatgtttggggccagtgatcagggcaaactgattgcctcggccctggtgcgtttcgcttatccaatgcggcatgatctgagcttcgcctatgctcatcgagagccatactattcgacactgggcgcatccggcactagtatgtatgcgacgaaaaacgactgggccagagagctgatacgctgcggcgccaccgagtggcaggtggttagctgtgccagtgtccagctgctgcagaatcccctccaggcgggcaagtacactgtgccgccgcattttgtcataccgaagagctgcagcgtggatcgattcctggatctgtcgcgcgccttctgcgattcacgagctgccttctgggtgtatagctatgggagcagcgcggcactggtcagattagctgaactgcagccggctgcgcagcaggacaccaaatcggagaatgtgatgctggagctggtgcgcaaatgtgatgcggggcgacagctgaagctcctacagctgacggatcgcctgccgagcattcaggatgtgctgcgcgcctatcagaagctgaggcgcctatgcacgccggaaacgccggagaagtttatgctgcaggatgacaagtacctgggactactcgaaaagaccaactggctgttctatgtgtcgttgtgcctacgctatgctagtgaagcgtctgccacgctgcgcagcggcgttacctgtgtcctccaggagtcgaatggccgtgatctctgctgtgtgattagcagtctggcgcagctattgctcgatccgcatttccgtactatcgatggcttccaatcgctggtgcagaaggagtgggtggccctggagcatccgtttcagcgacgcctgggtcatgtctatcctgcccagccggccggcggtaatgccgaactattcgacagcgaacagagtccagtgtttctgctcttcctcgattgcgtgtggcagctgttgcagcagttccccgacgagttcgagttcacgcagacatacctgaccacgctgtgggactcgtgcttcatgcccatcttcgataccttccagttcgatacgcaggcccagcgactgaaggcggtgaccgactcgcagctcgtcctgcgtcccgtttgggattggggcgagcagttctcggacaaggacaaaatgttctttagcaatccgctgtaccagcgccaaaggggcgatcttggcgcccaggcggctgccgtggcgcatcgcagatccctggcggtgggtagtaagggagcgcatggcgccgctagtggtgtcacaccctcgcgcaacaccatcaatccgcagctctttgcgaccgcttcgtcagtgccgcaggatcgttacctgcagccggcacatcgcatcttcgatctgcaggtgtgggatcagtgctactaccgctggctgcccattttggatatacgcggcggcggccagccgcaggtggatctctatcatcgcctgctgctgagcaacatagcaaaggtacagcgctgcctggattatcaaaactttgacgatctacccgatgcgtattacgagttcgccggcgaatcgcgtcccaatcagcacaaggacgagaagcccgacaaggaggacgaggccgagttcgtcgacggtgtggagcggcgcaggaagccgacggcgaaggccgccacacccactagcggactcacatcggttaccggcaatctgcagctatcgaccctgtcgtcgttctttcccttcgggaatcccatcgccggagatgcaccgctccagctgtacgacattctgagcagcagcagcgagctgctgatggagacctcatcctttctggacaagtcgtccattgtctga

SEQ ID NO: 34791 - protein, 843 aa, DROSOPHILA
MATGGGGSGHGGAGSAGNADHHKRNTFTSYVAPLPGDLRATADTNEWCLPSDLRDVHLAKPRLLHGEQIVASAPAYMYSPIDPMDSSGGSGSTLSAISSASGTPADRHHKEATFGLLSVTNFKLAFVPLHEKRNQAITAPLIDLYQENTYLGRNEITLNNIDHIYTITELGRAASALQAARGMASHAGMSRRKKLEPFKQQNISGRIAALHIVCKNFRLLKFAFQQQDSKMFGASDQGKLIASALVRFAYPMRHDLSFAYAHREPYYSTLGASGTSMYATKNDWARELIRCGATEWQVVSCASVQLLQNPLQAGKYTVPPHFVIPKSCSVDRFLDLSRAFCDSRAAFWVYSYGSSAALVRLAELQPAAQQDTKSENVMLELVRKCDAGRQLKLLQLTDRLPSIQDVLRAYQKLRRLCTPETPEKFMLQDDKYLGLLEKTNWLFYVSLCLRYASEASATLRSGVTCVLQESNGRDLCCVISSLAQLLLDPHFRTIDGFQSLVQKEWVALEHPFQRRLGHVYPAQPAGGNAELFDSEQSPVFLLFLDCVWQLLQQFPDEFEFTQTYLTTLWDSCFMPIFDTFQFDTQAQRLKAVTDSQLVLRPVWDWGEQFSDKDKMFFSNPLYQRQRGDLGAQAAAVAHRRSLAVGSKGAHGAASGVTPSRNTINPQLFATASSVPQDRYLQPAHRIFDLQVWDQCYYRWLPILDIRGGGQPQVDLYHRLLLSNIAKVQRCLDYQNFDDLPDAYYEFAGESRPNQHKDEKPDKEDEAEFVDGVERRRKPTAKAATPTSGLTSVTGNLQLSTLSSFFPFGNPIAGDAPLQLYDILSSSSELLMETSSFLDKSSIV

SEQ ID NO: 34792 - DNA, 4319 bp, DROSOPHILA
agcaaaccaattgttcagtgccgcgtgtccgcagtcagatatccttcgtccctcgtcctgcgtcctttgtgcagcggacttctggattcctcgattcctggcatcctgttttacgtgcaggaaaatggcgataggctcgcggccaggactccatttagtccgccaactagttcatttgtgtgtgtaattgtttgccggcgacactgattacggtgtctaaaaacactagttaacaatgcaaaataatgaatttataattcatattcaagtgttttcgtcatcgacaagaattacatgtctggaatagttatagaaatttatagcgaatgggaacaatgcgattatcgcaaaacattttacttctttctgtgtaaaatgttgaacgttttattttgttgactagtgaatatgttcatatgccacgttagggtcttttgaactttgacctctcacacactgcatgtaaaagtcagtcaccacttttggacactttcacatttattaaattcatcttaacactccttacagctaagcaaaaaaaggaaatcataaaaataacatatcgcagtaagatacgataattacaacgaaaacgaaaatatgtttcgttaaacttaggtctaaataaaaaaataataataacaatattgtacacattgtttaggtgaatagtaatggaaacaggttaaggttcgagaataaaacggaaaatctaggcgagtctaaagctcttagacaggaattttaatttaaaatagtaacatgtatctaatcagtttaagattttcgattttaaggatgtaggttcaaattcttggactttgttgctgtaaaactcggatagaatgtcacattaaatcgatttaataacttttaaaaattccgaaaaagaaattccaactctttccgattactccaactctcgatctccaatttcctcagcggaatgtgagtatgtacatgaggatgggataatactttgattcccttctcatctagcctaacaatcccgatccttgaccttctcctcctgaacgaacccatggttctcgatgccccgttcgatttgttgtgcggtgtttgtgggtggtgtcgatataggatctgcgtgctccaaggactcgtgtatcacattggcgatgatcccgttcatctgacccttggcctcgctggccaggaccaacgcttcgatagcattgatattgccattgggatccttcacggcggcactttcagcatccgcggaggccagatttcgccgctggcgaacctggaatcggtacatccatctgaggaagtgatcacagtgttattattaatcctgccagagtaacgcaagctgccacttacaggaatatgaagacagagaacagggtaagaccaccgccgagcaggaagaaggcacctggcaggactctcaatgtagcggcatacaaggtcgtgtacatgggcgcaaacaccatgggcattagggcctctgccactccgaacagcgagttcaccttgcccagttcgtccttggacaccaacttggtggctatcgaacgcatcgctataaacgccgtgccattgaagatctccaccagtccgcccaggtacatatgccatggcagtgtggcaaaagcgtagacaaaggacgataggatcttcgaggtgctggacaaaacgccgaccagtgcatcatcgatgttcagcttgtgggagagaatgcccacgcagaaaatcacaccgatgagacccgtaaacatggcataagtcgagaagaaactaaactccacttccgaccaattgaaccggaatcgcgtgaatagatacgtgactgccatctcgccgtgcagtggaccaatgatgaccatcaccacgatcatcagcaggatcacgcgtttgcggcgctgattttcgcccttcttgaaggccacccggaatgtctgcaccacgtgctccttgtcgaaaaagtcggccagcaggctcttttgctccgcacttttctccggccgagattgtggctcctccaggaaaaagaagccgtaaacgaaggctatcacgtagaaggcggcggagatcgagaatacgccgtagaatccaatttgcctgtaagtgagatgatattacagattttacaaaaaaaaatatactatatataaaccatatcttataatttaacaatcattttcggcagtacacaaataaaaactcacttgagcagcactccactgaaggccattccgatcggcacgcccaccgagaagcagacattgagaatgccgatcctcagcgtgcgatcctcctccgtggtgatgtccgcaatgtagctgaagacgcccatcagcatggtgaaccagccgccgctgagggaggggaagatggcttccgtgagggcggctgcctccatgggcgcctgttcgaagtagacgcacagcatcaggcccaccacccccaggaactcgcccaccaccgggatgaggatgcagggcttccgccggcgatggcgatcgctccaggatccccagaaaaggatcagcaggcaggggaacagggactggatcaccgtcttccaggcggccattcgcgccaccatttgctgcactgtttcctcctctctagaaaaaaacaatagccaatcgaaaatcttaatatacaaacagctagaattaattgcattttaaaaattaaacaaataatactcctatttagttcctatacaaatttatgtcattaaaagtattgatttattacttatgaatatagaaagaaacatttggtaaaaaagaaaacctatagtgaagcccaaaagcaagcaacaaagtatagtagtttgaaatataaaacactgcataactttgggcacattgcaaataataagttaattattaaaaatatatataagtatatatattcaatatatgtgaagtgttttagatttctaaggacatggaatgtgaaatacctacagtgtgtagttggctgtttggcggcgggtgagtgcatcgcacacctcatccccgtaggccatgttcactcgacaggccttctccaggttaagattctgggtggccagattggagagcacgctgggcatgatgtaggcggccaggatcggttccacggtgacattgttggccaccaggcggatcttctcgcgccaggatcgtttcacgggcggattcgttgtgccattgtccttttccttagctatcggtttatccacaccactgttggtggactgtgtcgtcgtcatcgccgaaggaggtggcggctcatggttcaccgtatacttggcgaatttagcatcgcccaggctgccgtccttgggtgacatcctgctggaagtaaaaaaaaatatatatatattaaaaatctaagtaaatgaagaattatgaagatttaaaaagaaaatttgtaaatataacataatattttataaggcaagcaaaataagtcaatttttaataatatttgtttaaagcattttattgtagtgtgtactattaagtttctaataatataatataattgcactactggaagagagataaatatacccaattagttttgaacacatgcaatgcaaattttcattataaacaattaaacccacgaaagttactgatctcattcgtgggatgcacaaactcttcggattttttaactgtttacatctctatataatccctttttttatagcaaacacgtggataaatatataattatatatgtatctttatagcttagtctgcatttgattttttttttttatcaatctgaagtgaatgaaggcgaataacctatgaaatgttaaatttaaccttttgcgttttttcgagagtaatctagtattgctaccccttgaagacaaatttgctgttgttatctaaaacgaattgtcataaacacaaaattgataaatttaatgaaaggcccattaccaaggttttttgcaccgctattcttgtatatggttttataagcacaattgggtgtcttgcaaacattaaaatcttcgcatttaaaaatgtaattactgctcttatccctaaagcatatcgccttggtctttttgattaagtaaaatatttgagttgaataaattacgaattttgtacagagtactagagtacgctgacttaatttcaagttaacttaaatgcctttcgtttcgccctgttttctgtgtcagcgttttgggattgaatgcctttcgtggagtcaaagtcaagcaaagtggggcgtcagcatgcgatctctgaaggctgtggcgttatcattaagggtggggtatctgttatcggaaccccagcctgatttcgcagcatccgctt

SEQ ID NO: 34793 - DNA, 1800 bp, DROSOPHILA
atgtcacccaaggacggcagcctgggcgatgctaaattcgccaagtatacggtgaaccatgagccgccacctccttcggcgatgacgacgacacagtccaccaacagtggtgtggataaaccgatagctaaggaaaaggacaatggcacaacgaatccgcccgtgaaacgatcctggcgcgagaagatccgcctggtggccaacaatgtcaccgtggaaccgatcctggccgcctacatcatgcccagcgtgctctccaatctggccacccagaatcttaacctggagaaggcctgtcgagtgaacatggcctacggggatgaggtgtgcgatgcactcacccgccgccaaacagccaactacacactagaggaggaaacagtgcagcaaatggtggcgcgaatggccgcctggaagacggtgatccagtccctgttcccctgcctgctgatccttttctggggatcctggagcgatcgccatcgccggcggaagccctgcatcctcatcccggtggtgggcgagttcctgggggtggtgggcctgatgctgtgcgtctacttcgaacaggcgcccatggaggcagccgccctcacggaagccatcttcccctccctcagcggcggctggttcaccatgctgatgggcgtcttcagctacattgcggacatcaccacggaggaggatcgcacgctgaggatcggcattctcaatgtctgcttctcggtgggcgtgccgatcggaatggccttcagtggagtgctgctcaagcaaattggattctacggcgtattctcgatctccgccgccttctacgtgatagccttcgtttacggcttctttttcctggaggagccacaatctcggccggagaaaagtgcggagcaaaagagcctgctggccgactttttcgacaaggagcacgtggtgcagacattccgggtggccttcaagaagggcgaaaatcagcgccgcaaacgcgtgatcctgctgatgatcgtggtgatggtcatcattggtccactgcacggcgagatggcagtcacgtatctattcacgcgattccggttcaattggtcggaagtggagtttagtttcttctcgacttatgccatgtttacgggtctcatcggtgtgattttctgcgtgggcattctctcccacaagctgaacatcgatgatgcactggtcggcgttttgtccagcacctcgaagatcctatcgtcctttgtctacgcttttgccacactgccatggcatatgtacctgggcggactggtggagatcttcaatggcacggcgtttatagcgatgcgttcgatagccaccaagttggtgtccaaggacgaactgggcaaggtgaactcgctgttcggagtggcagaggccctaatgcccatggtgtttgcgcccatgtacacgaccttgtatgccgctacattgagagtcctgccaggtgccttcttcctgctcggcggtggtcttaccctgttctctgtcttcatattcctatggatgtaccgattccaggttcgccagcggcgaaatctggcctccgcggatgctgaaagtgccgccgtgaaggatcccaatggcaatatcaatgctatcgaagcgttggtcctggccagcgaggccaagggtcagatgaacgggatcatcgccaatgtgatacacgagtccttggagcacgcagatcctatatcgacaccacccacaaacaccgcacaacaaatcgaacggggcatcgagaaccatgggttcgttcaggaggagaaggtcaaggatcgggattgttag

SEQ ID NO: 34794 - protein, 599 aa, DROSOPHILA
MSPKDGSLGDAKFAKYTVNHEPPPPSAMTTTQSTNSGVDKPIAKEKDNGTTNPPVKRSWREKIRLVANNVTVEPILAAYIMPSVLSNLATQNLNLEKACRVNMAYGDEVCDALTRRQTANYTLEEETVQQMVARMAAWKTVIQSLFPCLLILFWGSWSDRHRRRKPCILIPVVGEFLGVVGLMLCVYFEQAPMEAAALTEAIFPSLSGGWFTMLMGVFSYIADITTEEDRTLRIGILNVCFSVGVPIGMAFSGVLLKQIGFYGVFSISAAFYVIAFVYGFFFLEEPQSRPEKSAEQKSLLADFFDKEHVVQTFRVAFKKGENQRRKRVILLMIVVMVIIGPLHGEMAVTYLFTRFRFNWSEVEFSFFSTYAMFTGLIGVIFCVGILSHKLNIDDALVGVLSSTSKILSSFVYAFATLPWHMYLGGLVEIFNGTAFIAMRSIATKLVSKDELGKVNSLFGVAEALMPMVFAPMYTTLYAATLRVLPGAFFLLGGGLTLFSVFIFLWMYRFQVRQRRNLASADAESAAVKDPNGNINAIEALVLASEAKGQMNGIIANVIHESLEHADPISTPPTNTAQQIERGIENHGFVQEEKVKDRDC

SEQ ID NO: 34795 - DNA, 2710 bp, DROSOPHILA
tatctatactcgcagatgcactagcctaaaaacgcagctatgttatttttatatctgtcacccatacagcaaaagggtacacgacttgcagaaaagtatgttcaagaagaaggactctttaaaatgcatatatacatcactaactatgtatatatatcatatagattctatagaatttgttatgtacaatggttttctacatcttagctaggaaaatacgcaagcaacaactttagaacattgtctaataaccagatattaagaatcaattacatatgctgaaagttatcttttaggatttgtcattttatagtcagcttaaatatgtggctgcaccgccttgaatgatatttattacttagctattcccactcaccaatcccaaaaattcactccagaacgagggagccaccaatgcgctactgaaactggacggaaccagcgtgggaaatcgctcgatagccgtgcgtttggccaagaacattaaatatgtaagcaaagaccttcgagtcaccaagctagctatccaaacttcaaatcgattctgtttcctatatatatataggatgaaacgcagaagccaaagccgcgcctggatataccggccttgggcacaggtaaacgcgaggagaaggtcagcaaaacggaggccattcgggccattgaggccaagctgaaaatgttggagcgccagacagacgacaatctcgagctgaatacagcgggcaggggcgaggccaacgtgcccttcatccagcgctatcagtttaacaaggatcgcgacggttcgcagcgctacggaaagtcatcggctccatatcatcaccagcagcgtcccaagcgccactaggctcaatcgacccacactcgactttgccaccgtctcacgcattagtctgtaaaaatcattagtacttagggcgctacctcagcagacgagccttgcaggtgtaatttacaattaatttattaaaaaaaaaggtacaatcagagcgaacgtctatttgggtgcgaacaagatcttgccgcgcatgtgatcgggcagcggcacggttccgggacagggcacctggccggggatctcgcagatgcagtgcctgccgcatccgtagccaaagttggccggattgtccttgctctcctttaggcgctcctctgcgtccagttgctccctgaaattatggaataggatgtgtattaagttatagcttatgatgctgaaaaggtatcagaactgagctagcttcttcttaactcccaactcatagttctacaaaatgtgatacacgaatagaatcttgatgtgtgttctcaccgggttttgcccaccaccttaaccaggtgatcgatgatgtcgttccgattccgactgtccaaatctataagcatatcgcgtccatcgtcgaagtagcagcgcacaaacggcgagggcgtcatgttcttcagcgtgagcacctggacctcgggattcttgaactggatctgcggtatgttccagaaaacaaagtccctgtgcgcattgcatttattagcgtatatttcagttattagacaattctatgccataacttaccgagcgcccgcgtgatgagcaccatatgtgttgtagttcacgctgaaaatgcgcaccttgtccttcagcaccagcttaccggcattcagatacttcagggtgcggcggatgggctcacggcccttcatgaacggcattttgcacttttaattcaaatacgcctaagtaaaacaaaagaaatccaataaaagagcggctgcttgtgtaatgcgaacagctgatcggtcggctagtggctcccacaaggcgcaagcggaactatcgatataagcgcggtatcgatgcagaccagaaatgtttccacttaaaagaaaaaatacgaatatttatatgtttttatatgggcgtggcagttttgggtggtttgtagacgtaataaagagacatcaggaagaaacctgagctgcttgcataatcttaactttccagcatttgctctgacgagcgttagagtgggtgtggtaacatttggaaacaaacttgcgtctacgtctctagaagctgcatgcttcatctcaatattctagcttttatagttcctgagatcgaggcgttcatacggacaaatggacagacggacagggtcggaacaactcggctattgatcctgatcaagaatatatatactatacatacggaaacacttccttctgccacttacatacttttcaacgaatttaaaataccctttactccacgcgtaacgggtctaaaaatgggtagaactattattgactaacataattagaaaacgcgttaaatcttcaatcttacattttttaaattaaaaaaaaatttttttttttgagcatggtctaaaaaagataaatgcttgcttatatttcatttcagtggagtacgtctattaaatgaaacaacactttcgatttctctggtcatatatcgatagatccgttaagccgaaccggctggctaatttgtttacctcttaaacttaaactttaaagcttcttattctaccacaatcagcaggacatggaaataacactcgctctgataaagccgcacgtgctgcggaatacctatgcaatgcagcagatccgagccctgatctcccagaacttcaccattcttgaccagaaggaggtttgcattacgaaagaactatctgagcga

SEQ ID NO: 34796 - DNA, 504 bp, DROSOPHILA
atgccgttcatgaagggccgtgagcccatccgccgcaccctgaagtatctgaatgccggtaagctggtgctgaaggacaaggtgcgcattttcagcgtgaactacaacacatatggtgctcatcacgcgggcgctcgggactttgttttctggaacataccgcagatccagttcaagaatcccgaggtccaggtgctcacgctgaagaacatgacgccctcgccgtttgtgcgctgctacttcgacgatggacgcgatatgcttatagatttggacagtcggaatcggaacgacatcatcgatcacctggttaaggtggtgggcaaaacccgggagcaactggacgcagaggagcgcctaaaggagagcaaggacaatccggccaactttggctacggatgcggcaggcactgcatctgcgagatccccggccaggtgccctgtcccggaaccgtgccgctgcccgatcacatgcgcggcaagatcttgttcgcacccaaatag

SEQ ID NO: 34797 - protein, 167 aa, DROSOPHILA
MPFMKGREPIRRTLKYLNAGKLVLKDKVRIFSVNYNTYGAHHAGARDFVFWNIPQIQFKNPEVQVLTLKNMTPSPFVRCYFDDGRDMLIDLDSRNRNDIIDHLVKVVGKTREQLDAEERLKESKDNPANFGYGCGRHCICEIPGQVPCPGTVPLPDHMRGKILFAPK

SEQ ID NO: 34798 - DNA, 3306 bp, DROSOPHILA
atatgctttgaaaagggaagagtttcgtgaaaacgtgggctaagccactaatttagttgcatagcatttgttataagcattcaaacaaataactaactaaaaggtttctctgcaaaaatgcaatatatacgatatatggctaaaaacgcgaaattcatttttattccctttgccatattgagaccaaattcctacacaattcgtagtcaacttgccataaaaatagcttgcatatttgcactcacacatccagtcggtgtccagaaatgaagatgtcggaagttgtcctccaaaaatgcggggaatgggggttaaaaagttctggccaagagtagctggcccgggacttatcgcatacaatgcgcattagcagtgtctacatgaggccccatcaactcatgcccatcctgttcctgtccccagaacggctgttgcatatttcaaaggacatggcagggtccgctttttgtcatatcgttttggagcgcctgaatccgtttgcccttttcctcggctggaaagtgtttcttcggctttacttatttatattttaagagatggtttccaaaagtatctattattgaaaaacagataactaaagcacaactttctataattcagcatattatagcaatgtgttatatgttagtatataagtagaagccattattttattaaaaaatagagatttttctatgcacacatattgattagatttttactcgagtttcaattacattttgaatttgaactcacctcacttggtttcgttctcggctaccgtgtggtgaatagctgagcgcggtgtgtgcacttgctggcccatcgataagaagcggttattccaccgatatttatgtctactattccacacactttttgcacatccctaagcccaatagactgcattttaattttcatttattttcgcacacaaaatggctagcactgtccgtaaatccgcgtagaaacgctcgccactcgcatttcagttaacaaaatgtccttgcaggccggaacgagtgggtcgggtggcttaagcggcggcggcggcggcggtggaaaccccgaggaggcgcgtcgcatctgggttgggaatctggactcacggatcaccgagtaagttgtgcctggcatatatgcagtgcgattccatggtgctaatagttcaatttgcattgccccctatcggtttcaactcctcaaactgatgcaaaaatgcggcgccatcgagaagttcgacatgctgttccacaagggcggtcccatggtgggacaatccaggggctacgccttcgtcacctttgcgcaggtgggtgcagtgcctcattggcggcaggcggtgcagcggctttaatcaagaaaggatcaaggattattgtgctttttaacttggctattttggtatttaatcctcagtattctcaagctcatttatgcagtgcggcgaactctgtatctatactcgcagatgcactagcctaaaaacgcagctatgttatttttatatctgtcacccatacagcaaaagggtacacgacttgcagaaaagtatgttcaagaagaaggactctttaaaatgcatatatacatcactaactatgtatatatatcatatagattctatagaatttgttatgtacaatggttttctacatcttagctaggaaaatacgcaagcaacaactttagaacattgtctaataaccagatattaagaatcaattacatatgctgaaagttatcttttaggatttgtcattttatagtcagcttaaatatgtggctgcaccgccttgaatgatatttattacttagctattcccactcaccaatcccaaaaattcactccagaacgagggagccaccaatgcgctactgaaactggacggaaccagcgtgggaaatcgctcgatagccgtgcgtttggccaagaacattaaatatgtaagcaaagaccttcgagtcaccaagctagctatccaaacttcaaatcgattctgtttcctatatatatataggatgaaacgcagaagccaaagccgcgcctggatataccggccttgggcacaggtaaacgcgaggagaaggtcagcaaaacggaggccattcgggccattgaggccaagctgaaaatgttggagcgccagacagacgacaatctcgagctgaatacagcgggcaggggcgaggccaacgtgcccttcatccagcgctatcagtttaacaaggatcgcgacggttcgcagcgctacggaaagtcatcggctccatatcatcaccagcagcgtcccaagcgccactaggctcaatcgacccacactcgactttgccaccgtctcacgcattagtctgtaaaaatcattagtacttagggcgctacctcagcagacgagccttgcaggtgtaatttacaattaatttattaaaaaaaaaggtacaatcagagcgaacgtctatttgggtgcgaacaagatcttgccgcgcatgtgatcgggcagcggcacggttccgggacagggcacctggccggggatctcgcagatgcagtgcctgccgcatccgtagccaaagttggccggattgtccttgctctcctttaggcgctcctctgcgtccagttgctccctgaaattatggaataggatgtgtattaagttatagcttatgatgctgaaaaggtatcagaactgagctagcttcttcttaactcccaactcatagttctacaaaatgtgatacacgaatagaatcttgatgtgtgttctcaccgggttttgcccaccaccttaaccaggtgatcgatgatgtcgttccgattccgactgtccaaatctataagcatatcgcgtccatcgtcgaagtagcagcgcacaaacggcgagggcgtcatgttcttcagcgtgagcacctggacctcgggattcttgaactggatctgcggtatgttccagaaaacaaagtccctgtgcgcattgcatttattagcgtatatttcagttattagacaattctatgccataacttaccgagcgcccgcgtgatgagcaccatatgtgttgtagttcacgctgaaaatgcgcaccttgtccttcagcaccagcttaccggcattcagatacttcagggtgcggcggatgggctcacggcccttcatgaacggcattttgcacttttaattcaaatacgcctaagtaaaacaaaagaaatccaataaaagagcggctgcttgtgtaatgcgaacagctgatcggtcggctagtggctcccacaaggcgcaagcggaactatcgatataagcgcggt

SEQ ID NO: 34799 - DNA, 642 bp, DROSOPHILA
atgtccttgcaggccggaacgagtgggtcgggtggcttaagcggcggcggcggcggcggtggaaaccccgaggaggcgcgtcgcatctgggttgggaatctggactcacggatcaccgattcaatttgcattgccccctatcggtttcaactcctcaaactgatgcaaaaatgcggcgccatcgagaagttcgacatgctgttccacaagggcggtcccatggtgggacaatccaggggctacgccttcgtcacctttgcgcagaacgagggagccaccaatgcgctactgaaactggacggaaccagcgtgggaaatcgctcgatagccgtgcgtttggccaagaacattaaatatgatgaaacgcagaagccaaagccgcgcctggatataccggccttgggcacaggtaaacgcgaggagaaggtcagcaaaacggaggccattcgggccattgaggccaagctgaaaatgttggagcgccagacagacgacaatctcgagctgaatacagcgggcaggggcgaggccaacgtgcccttcatccagcgctatcagtttaacaaggatcgcgacggttcgcagcgctacggaaagtcatcggctccatatcatcaccagcagcgtcccaagcgccactag

SEQ ID NO: 34800 - protein, 213 aa, DROSOPHILA
MSLQAGTSGSGGLSGGGGGGGNPEEARRIWVGNLDSRITDSICIAPYRFQLLKLMQKCGAIEKFDMLFHKGGPMVGQSRGYAFVTFAQNEGATNALLKLDGTSVGNRSIAVRLAKNIKYDETQKPKPRLDIPALGTGKREEKVSKTEAIRAIEAKLKMLERQTDDNLELNTAGRGEANVPFIQRYQFNKDRDGSQRYGKSSAPYHHQQRPKRH

SEQ ID NO: 34801 - DNA, 2778 bp, DROSOPHILA
tgaaagtagtcggggatggtataagatacagatcgggattttgaaatagtttaatcttccagaatgtgttttctgcactcgccatccattagcataatggccaaatatccaaaaggtatattagcaactcgcatccaatcaaaatgaaacacttttactttgctttccgcgtttcgctttaaacgattaacaattcgaaacgaaaaaaaaaaacgaactcaaaccctttctgatctttgttttatgcgcataattcgaaatttattttatgtcttattaattttacataagcgaccgcttccgtgagtctgggaaaataactttgggatgggatggcttcatggcagatgaagcaattaacaggccgagatgaagtggaaaagtaaaagttgaaaaaggctgcagctgcaggtggcaaaagtccgcggctgaattcgaattgatttcgctgccaaacgaaagaaatgtgacaacagccagaaattttaaaattcgaaatttgaattttgaatctgaatctgaatctgactgcgtgggagttttcagctgagttttgccaatcaagctgtcagaccaatcgaaccgaacaataaaataatataaaaccccgtgcttcgatttggttcaacattggcggcccccgtaactttcgatgactttttttggctttggttttggttatgtttttttttttttttttttggggtttcagctggggaagctggaaagctgaaatccgagatctgagcatcaactgtcgtgtcatatgctttgttgtcgtgctgcctgaagagccatcaaatcaaattatatatgaatttgtcacaagttgaaagcgaaagccgcagtcgatcggcccggcgaacaactctataaaggtttcctttgttgcagtcgacaaacggcagttccagcatcagcatcataactcggcaacccaagctcgagactcgatactcgacttttctcccagaggatctctttctacaggcaattccaaatgttgcgcatacgccgtgtgagccacgtgcagctgctcgttctaatggcaatcgttgtggtggtgacggcaaaacaggaaagttcaagtaagtaaaaagatacttaaacaatgaattagtaatttgcgtcttttcactcctatttaagtagttggccatttcaaattgttcttgtatgtgtgtgttaagttaaatttgaagagcaaattgctcacattcaaattaatcaattatataagtgacccaactccaggcttgacttaggcgagtaaacaaccgatttgtggctctttcagcgcgtcaattcggcggtggccagaacttcggcaacggcctgggcccctcctttggtggcgtgggcgctggtggtctagggcctggggccgggtttggacccggttccgcagccggatatccgggacaaggcggctacggaccagcgcagcagccgggctgcccgctgtgcgattcgtcggtttactcgtactgctcgcacaagatggtacacgatgcctgttgctgcgattttccaggtaattaatcaagggcttggtggcgaatgccttttggcgacattatttatgcacgctctttaatcgcctgcatttattaattttattcaatttgacgcccgaccgtaatgcgctttaacccgcaggcggtgccccgcagttgagaccgccccagtgtttgtactacgactgctcgctgctttatgccaaatcctgttacgagcacgccctcatcaagaactgctgctgcaataatccctactgacgcgcccatttatcgggaaaaatcgtgaggtatcgggaaattggaaatggaaaatgggaaatgtgaaatgcggagcgccaagtgatttgtttgcacttcggcttcatttatttattcaatacatttaaaatgcatgtacagctatgatttaaaattaagttgcgtgcgattgcttgaagcgcgctaaattaaattaagtaatttatttgacaacccaaggttttttgtgtctgctttctttgaatgatggaaaatgaagggttttatgcgaaacttaaatttaagctaagcagcgaacttagccataatatatattatatatattaacgcattagttacaatttgaataatcatagcaaccatttttaataagctcagcatattgttaaaccgcaattgccaaagaaaaattagattgggagccatgtttttgggaaaaatatgatttaactttttcgaagcccttaattaaatacattctgcactgcatttgcccatttggacgcagagttgttcgccggattattcggcattaataatgtgttcaattaattcatggcttttgttttcatttcacctattcgctgcctcatttatcaattgtcgtgttttgcctcactcggcgttattagcataatgaatgttttctctccacattaattgatttttaatacgcagccataatcggcacacaaatacgcatctactacggctttttttttttttgtgttttccattatctaatcccaaattatgtggcttaataaattatttacgagaggatcacatgtatatttttaaatgagactgcggccataaagtatacaactttccatttacacgcacatttaaatctaaattaattagtttgagcacaaacgcgtccaattgtgaataaatgaggcccaagaaatgaatgccgagccaaataaataaaatacgataatttcttctctttttcccaaactcccctgctaaaaaataaaaacaaatctgaaaa

SEQ ID NO: 34802 - DNA, 444 bp, DROSOPHILA
atgttgcgcatacgccgtgtgagccacgtgcagctgctcgttctaatggcaatcgttgtggtggtgacggcaaaacaggaaagttcaacgcgtcaattcggcggtggccagaacttcggcaacggcctgggcccctcctttggtggcgtgggcgctggtggtctagggcctggggccgggtttggacccggttccgcagccggatatccgggacaaggcggctacggaccagcgcagcagccgggctgcccgctgtgcgattcgtcggtttactcgtactgctcgcacaagatggtacacgatgcctgttgctgcgattttccaggcggtgccccgcagttgagaccgccccagtgtttgtactacgactgctcgctgctttatgccaaatcctgttacgagcacgccctcatcaagaactgctgctgcaataatccctactga

SEQ ID NO: 34803 - protein, 147 aa, DROSOPHILA
MLRIRRVSHVQLLVLMAIVVVVTAKQESSTRQFGGGQNFGNGLGPSFGGVGAGGLGPGAGFGPGSAAGYPGQGGYGPAQQPGCPLCDSSVYSYCSHKMVHDACCCDFPGGAPQLRPPQCLYYDCSLLYAKSCYEHALIKNCCCNNPY

SEQ ID NO: 34804 - DNA, 2375 bp, DROSOPHILA
taagacagtgggagatatagacacaaataccgagacagccacagacacagacacagacggactcttaagtaacagctcatgatgggcatcaacgaactcgtaaaggacgaacgatgcatgataattgaagctgcagaagctacagaagctatgatgctatagtatccgccacgacgaaagactctcgcgcatttcatgccaaaatttatggctccctatctgccatctgtgcctccagtcacccactgccacccactccagccaatccacccgaaccacctttcagctggcagaaaaagaacaaccatctagtcgagtgccgccaagtagttgggcagtttttgaatgcggctcttgttttttgttgccgccactcgcctttttttttagccagtcttggcgtttttattgccggcaattaagttaataggcaataaagcttctggattttccagggggagggggggttggcaattccaaaagcagaagcagcagtagcatcaccagcagcagatgcagatacagctgcaggcccaaaatcccccatctacattccattttactccattccatttcactcggctcgtcttcttgcgaatcaatgtattttagtggatctgagtctgcgaaatgggctttcgcctttactgcactgcaagtccacttccgaattaacttcttgtgtgctgactttattggtctgcggcggattttcatcgcatccggtctgttgattgttttccaactatttgaataacattttcgtggagatttatgtgctcacttggctagcagattgggttgcatgcgagttaatcatttggcagtgagattttttacagaaagtaaatatttatttatagtaagatagaatagttcttgggaagaaataatacattttgaggatatgtgaacttaatgtttcagtgtcagttagcagaattaattataagcggagtgtaatattttcttatacaagggcatgagcgcttctagttgtatgtgtcactgttccactaaacgtcatgtaccgcccactgatcatttccgtttccgtttcgttctaggcgagcatccggcggcaatgcatacgggcaacaacggtaactctacggcgtcccagccgccggtcttgctgccgctggtcctgctcacctgcagcacactgatgctcctccagctggtggccagctgctccacccttgtcccggccacgccacccggctgtaggaccgtccaacaagcaagcaccttcgccgaggaaaaggcaatgggacaacgaagcaaccggaactgccaggatctgcaggagttggaggagtcgcaggatcttcgccgcagaggagtcgagaggagcgcggtgcccgggacatagctctttagcggatcgagaaccggaagcgctgacgaattgccaacaggaatcgcattttaggatgccctctcttgcgcacaccacccgcccctgtttcttgattctctggttttccagctgccggtccttggtttccggtttccagtgtccgatttgatcctgctctctcgccccacctgtgggcctctttctccaccgccaccggactttgtgagcgggctggagcttatcctgttatcactaaattaagtagccagacttggtccgcgacaaaaaaatacaacatatttatcagacttttctaaaactaaccaatgatgatagctaatgcagcggggtaagaatggaacaagattgggctccaaaaagaaatattgagctagaacgtatgagatagaacgaaatagcagaggtaagcagatgattttcgtaatggtaatgggtgaagatgggcgtgttcatgggggcaggtaaaaataactaatacacgttgtaaatagagccactgacacgagatttctcttccattgataagtaactggtaaacggaaacggcgagtttatgaattctcatctacttaacttctttcggttggtaacaacttttacacacacacacacacatacaaaccacattctctagtacaagaataagctataggtgtctaaacatattataaataaactgcaagtggaagtttcgatggaaaaccccgtgcgatttgcggagtgtctaagtacgataaagataatgaattttttttaaataactagcataagttcaagactatagtaaaatgtaagcaaactgagtggagtaaccgaaaaatagctaaaacggatggcagattagctaagattagcaatggattgttgaattaaatgtgtacatattaaacaagtcagcataattagtctatggatattttttttgttttttttttttggctactcagatcagaataatctctacctatatatagggcattttgatgtgttt

SEQ ID NO: 34805 - DNA, 375 bp, DROSOPHILA
atgtgtcactgttccactaaacgtcatgtaccgcccactgatcatttccgtttccgtttcgttctaggcgagcatccggcggcaatgcatacgggcaacaacggtaactctacggcgtcccagccgccggtcttgctgccgctggtcctgctcacctgcagcacactgatgctcctccagctggtggccagctgctccacccttgtcccggccacgccacccggctgtaggaccgtccaacaagcaagcaccttcgccgaggaaaaggcaatgggacaacgaagcaaccggaactgccaggatctgcaggagttggaggagtcgcaggatcttcgccgcagaggagtcgagaggagcgcggtgcccgggacatag

SEQ ID NO: 34806 - protein, 124 aa, DROSOPHILA
MCHCSTKRHVPPTDHFRFRFVLGEHPAAMHTGNNGNSTASQPPVLLPLVLLTCSTLMLLQLVASCSTLVPATPPGCRTVQQASTFAEEKAMGQRSNRNCQDLQELEESQDLRRRGVERSAVPGT

SEQ ID NO: 34807 - DNA, 2832 bp, DROSOPHILA
gaagcattgaatattcgttttctaggaaatcctatttgtgctgcggttcttgggttatgaaatattttcttggaaattaggtttttgtttaaggaaggttttgatgtttccgtgcaataatcgctacaattaataagtacgttttttccactgcacgtgtcacagtcttttgagtcggttttcgggtccggttcatggtttattttcacggtttatgggcgggcaagatatccttgaacttgccacagtcggcggcaggatatcatgttgccatatttcgtctggtccctggtgcccttttcttatttatataaaattgtgcggcaagtccttgacttggccgaatccaaaccttttgcccttgcttatcaattgttctcaaaaagaaaaaaaaacttgctaaaaaggggaaaggatttttcaggtcgcaccattttgttttacgtgccacgcgaaaagtttcagggtcaaacgtttatataaaatacctgcataaacgttcgcacatacatacatacatccatacttacgtatatccgtggacaagtgccttttgttcttgcccaatttgccgtaaaatatggcgaaatgaaattttaaaccacttcaagatattccattatttgtcagcacacctttgttctctgctcttcgagtgaagagttacgcaaaaatgtcgctgaaatttaaattaaagtaatagaaatgtagttggattcaactttaaggaaaaaaaaacctagtgtatttattttattcatatccaagttatcttcttgaaatctttgttttatttagcatatatttttggcctgaaaagtaagagaaaaatataaccactttcgatttacttgtaatccacacaagctgttctatattttgtttatacaatttcaataatcattgctgaatctggttgggatttaaattgctttcatgtttgttatagcacttaaaaaaaaggaagaaaaaaaaagaatttatagctacaatggttaagttagttggcgatttggaagcgtcgccagatgcgctgcaatcgagaatcggaggtggactgaccaccagcttgggattggcctcgatcttgatggtagggttcgatgaagtttaccgcgggctccgagttgcgttgctgattcgccgccgactgttttttgttgagcttcctcttctgatgtcgcttctttttctggggatgcttgtgcacccgtcgatgggtcttcttcaccaagttcttctttctgttattcaactttacgctcttcatattgaatttcttcggcttttgtgtatgtttgtgggtcaccaattcctgcggctcctcctcgccatccggaagatccaggcgatcatcgagcacccggccagtcagtgtggtcacgccggtttcctgggcctcatcgtcatcctgcggctgctggcgatgcacactctcctgcagtgagcgacccgtactgttggacgtgggtgtggttgtagtcgttgtcgaggtggttgtcgtgggcgagccagtgggcgtggtcgtggtagttgtggtcgatggctgtgtgataacgatcacattgtcactgggcggttgctgaaaaaggccccgcatcagcatgaacttcttcataaaatcccgaccagatcccacatcctgcggcgccggactgccggaggcactgcgtccctggagttttggcaagcggtaagctgatttgtagaaatatgaatcaatcagtagctaccattaatatcactcacttaccgcttcgacgcgcatcgcagttggctaaaatcgccagaaggacgacgagaagtgcgaataagttgtgaaggatctgcattctgacgtggttccttgggcaatgctggcaatcggattgaagagctacgttcttatagcacctagcacctaacgccaatcattcggtgcaattaaaaatttcaccctcctcagaaagaagggagtgacacatcttgcgtgatgcctcgatgacatgcaattattgggcggcctagaacgggaagtcgatcttgatggggtcttgatggggaaagtcttcgatatacagacctactggatacgctcaggcaaactgagaggtctctccgaccaccggacagtaaatcaaatctaataaactcgacaataaacatgcgttcgcataaatctgcactggccaaaggggaaaaactcgaaggcaaagatatattccaggctgtataaataaataaacgaactcatgtctgcccgccacgaaaatacacattcgttcagaagagcaaggtaaacaactccaataccaatatgttataatattgtaataattttgaaaaaaaaagtctattgaaataatgtgtgaaatttttgattaccatatttatatgcataaacttaatgagatattgattgctagtttacctttcactttttatatatttcttattgaggtatctggggattcctttagctcagctcttaaatataaatcatatgtactagtgggtcactagtttttcgagctcgattgtactgaatgtatttggcttgcacatacatatttatatattacacgaccagtatctgtggcataatgtgactttctcggaggatagtgtcgagtgcgtgagccgcaccagcaggcaaataactttggcataattcacttaaatctttttgttttaatcttgaaaagtgtttcccacaaaactctcgccagccagcacgcacacgcagagcttcctgacaggcgagagatacggagtacagaaagcaagatacaaaacacaagatacaagatacaatatacaatatacaatatacaaagatacttgtctacgtga

SEQ ID NO: 34808 - DNA, 777 bp, DROSOPHILA
atgcagatccttcacaacttattcgcacttctcgtcgtccttctggcgattttagccaactgcgatgcgcgtcgaagcgcttaccgcttgccaaaactccagggacgcagtgcctccggcagtccggcgccgcaggatgtgggatctggtcgggattttatgaagaagttcatgctgatgcggggcctttttcagcaaccgcccagtgacaatgtgatcgttatcacacagccatcgaccacaactaccacgaccacgcccactggctcgcccacgacaaccacctcgacaacgactacaaccacacccacgtccaacagtacgggtcgctcactgcaggagagtgtgcatcgccagcagccgcaggatgacgatgaggcccaggaaaccggcgtgaccacactgactggccgggtgctcgatgatcgcctggatcttccggatggcgaggaggagccgcaggaattggtgacccacaaacatacacaaaagccgaagaaattcaatatgaagagcgtaaagttgaataacagaaagaagaacttggtgaagaagacccatcgacgggtgcacaagcatccccagaaaaagaagcgacatcagaagaggaagctcaacaaaaaacagtcggcggcgaatcagcaacgcaactcggagcccgcggtaaacttcatcgaaccctaccatcaagatcgaggccaatcccaagctggtggtcagtccacctccgattctcgattgcagcgcatctggcgacgcttccaaatcgccaactaa

SEQ ID NO: 34809 - protein, 258 aa, DROSOPHILA
MQILHNLFALLVVLLAILANCDARRSAYRLPKLQGRSASGSPAPQDVGSGRDFMKKFMLMRGLFQQPPSDNVIVITQPSTTTTTTTPTGSPTTTTSTTTTTTPTSNSTGRSLQESVHRQQPQDDDEAQETGVTTLTGRVLDDRLDLPDGEEEPQELVTHKHTQKPKKFNMKSVKLNNRKKNLVKKTHRRVHKHPQKKKRHQKRKLNKKQSAANQQRNSEPAVNFIEPYHQDRGQSQAGGQSTSDSRLQRIWRRFQIAN

SEQ ID NO: 34810 - DNA, 2993 bp, DROSOPHILA
aagccagacaatgtacggcatacaattcaattatagaattttctattaacttaaaagctccttatatttatttaatttgttattgtgtctcagtcaggttttagactatgcgaaatgtggggaggtaggtgtacatttatctgttgttgttattattgagtttcttgacagttgagagcccagaatgttgccatcaattagaaacacatacacaaaattgagcggagagtgggggctggaaaacgtctactatttgccattttgccgtttgggattttcttcatttcctacgcaaacatttgtcagataatttggcataaccctctctcatcccatggtttcgcataaagttccatattcctgactgattgaattgtctttgcagcaaattaaaatcgatctatttagcgcatctatttcattgggttttcctttggaaaaactttctccttccgagctcatgtaaaatgcttatgggtaataagtgaagctctgctggaaaattgaaaagttttccctctggccaatggaaaaacttatcaacttaatgttattgggatggagagtttcgcgaaaagaggtctgccttttttgcacttcctgtgttttattttttttacacacagatgggctcacataaatagttgtagcctatcaaattatcatatatttctagataaagacgaaaagatattaaactgaaagtttccgcattaaagaaagaaaaataggtaatatattcattattgatttctttttcaagtgagccctgcattttaaactcagctgtagtttaaagaaaacatctaaaacatctgacaacttggattagttggggtgattatattgtcagtaattgatttcaattaaaattggccactaagctgagtttggattctttatcatttcattttatttcgggttcgtaaaaaaaaaatttgtttaaatctaatggtcattatggtcattatggttgcatcttggtatcttggtccgcccattactttctgacgtactgcacccggcgaatattctgggccagtgtctgcagtggtcgcctcctgaccaatggtcgttgtctcagccgctggccaaggattccaaagcctggtgaatcggcgaccgagtgaccagaacctgcgacctcttggcctccttcattggggctctcgtcgagtacttccagttcggggcccaaggacaaggcggatatgtcgtcgtcctccagctgatcatcctgctccctgatggacggcggtggtggggaagcaaccgtagtgggatcaccgacaagctgccggaacatgcgaagattcattggcacatacctcacctcgttgccaacggtgatgggtaccaaagggacgcccgacagaccataggccccattggagccgctcaaacccaaatctccgccatagaaagctgcctcgttccagcggaggaattccggatatgacatcgatgttccgtcatcctgccgctttcggaagtactgcatgggcaatccggccgggtatgcaattggtgtacggataaactccgaggttcgagtgcccgttgtggttgtgcttgcaggagtgctcacaaaactgttgttgttagtgttgttggcagcgccaccaccggtgatcaccaccacggtggtaccgccgcgtccaaagaatctaccctcattgttccggccctgactgcgctgggcaatctgggcgggagtcagtccactggtcagcatgagcacctgctgcagatcatccgcctgctgtccatcgggactcatatcatccagactcacagagaacgcacgcggctcgggaatttcatgggatttttcctgcggctctgggaaattgaacgtcccaatcagatcgttccaagacatcggaatgacgtaggtacttgtcgcctgacgcggcgctgtcctggccaggctaatgcccaaaaggacaagcaagaggagcaaccagttgtatgtcttcggtggtggctgcattttgctttggcttgcggtgaaaactgtgaatggtgagcagcagctatctggcttttatagctccagttcgttggtcggtcctaatgaggcaccatttattcgcgagcttatcactgatttttcgcgattaaatccattaatctcacttcgtttcgacttgttctcgactcgcgcaccgtatctcttcttggccgtctgggacgcttgttagttttggcaaagagctgatgttaattacacgtaccgcggataaggcaaattaatggggcacgcggagtgtttctgtaacgcgcagattgttcaataagttttaagggtaaataaaatattaaattattgtagttgaaaagagcgaataacggtgacctagttgaatggtgttcgaaaaacggaattttatttgctaataaatttattagaatttaattgctttgccaaagtgaagaaataaaatatgaatgcatttatttatcagtctgtttggttatcaattgaaaaggcttgtgctttcattggttaggtttattaaatgcattaaatgcattctcgttttctctgctttgacagccggcaatatgcattttagagtacattttctccataagttctttatgtccactctcattttgcttaatgcaacacaaataaatattctgctgcacttattttcgggcattttcatgcttgcagtaacttggcacctcgcccgtctctttcgcgcagcagctagctggccgtctctttcttaaagcagtttgtccgtctctttccaacaactgtgtgttggtggccctgtgtttgtgtttggcccaatgtgtcaaagtcaacttggtaaaaagttagctttttattattttgttggcacttttttaacgccgctttttggctgcatcttcttatatttttatttttctttcctccttgttttcagttcttgcctcctttagtttagttcttcttctttttgctctacttcctggtcagatgctccagttatttt

SEQ ID NO: 34811 - DNA, 993 bp, DROSOPHILA
atgcagccaccaccgaagacatacaactggttgctcctcttgcttgtccttttgggcattagcctggccaggacagcgccgcgtcaggcgacaagtacctacgtcattccgatgtcttggaacgatctgattgggacgttcaatttcccagagccgcaggaaaaatcccatgaaattcccgagccgcgtgcgttctctgtgagtctggatgatatgagtcccgatggacagcaggcggatgatctgcagcaggtgctcatgctgaccagtggactgactcccgcccagattgcccagcgcagtcagggccggaacaatgagggtagattctttggacgcggcggtaccaccgtggtggtgatcaccggtggtggcgctgccaacaacactaacaacaacagttttgtgagcactcctgcaagcacaaccacaacgggcactcgaacctcggagtttatccgtacaccaattgcatacccggccggattgcccatgcagtacttccgaaagcggcaggatgacggaacatcgatgtcatatccggaattcctccgctggaacgaggcagctttctatggcggagatttgggtttgagcggctccaatggggcctatggtctgtcgggcgtccctttggtacccatcaccgttggcaacgaggtgaggtatgtgccaatgaatcttcgcatgttccggcagcttgtcggtgatcccactacggttgcttccccaccaccgccgtccatcagggagcaggatgatcagctggaggacgacgacatatccgccttgtccttgggccccgaactggaagtactcgacgagagccccaatgaaggaggccaagaggtcgcaggttctggtcactcggtcgccgattcaccaggctttggaatccttggccagcggctgagacaacgaccattggtcaggaggcgaccactgcagacactggcccagaatattcgccgggtgcagtacgtcagaaagtaa

SEQ ID NO: 34812 - protein, 330 aa, DROSOPHILA
MQPPPKTYNWLLLLLVLLGISLARTAPRQATSTYVIPMSWNDLIGTFNFPEPQEKSHEIPEPRAFSVSLDDMSPDGQQADDLQQVLMLTSGLTPAQIAQRSQGRNNEGRFFGRGGTTVVVITGGGAANNTNNNSFVSTPASTTTTGTRTSEFIRTPIAYPAGLPMQYFRKRQDDGTSMSYPEFLRWNEAAFYGGDLGLSGSNGAYGLSGVPLVPITVGNEVRYVPMNLRMFRQLVGDPTTVASPPPPSIREQDDQLEDDDISALSLGPELEVLDESPNEGGQEVAGSGHSVADSPGFGILGQRLRQRPLVRRRPLQTLAQNIRRVQYVRK

SEQ ID NO: 34813 - DNA, 3068 bp, DROSOPHILA
tacgtacatacacatatatctgaatgcaagagggtgtgtgcgcacagtcgagtcgaaaatctagttacaattaaagtgacaagctggcaacgccgaacacaaagtcggtccccaaattcaaacaaactgcggtcgctttgatcgtcctcatgcgggagtgattaaaaaaataagaaacaagggggagattttataagatgtcttttagaatgaattctgacattttaatattagtacttgatttgtatggcgtagttatgcatagttatacgaatgcaagttccctgccagaaagcattttatattatatatgctgatgctggttattcattgctggaaaagagtttattttcaaaacgaaaatccgaaaatcactttcatgctgatatgcggggcatgaatattttgccagcttttccatttttcaagggtctgtacatttaagggaaattggaacttttacgggtttaattaccagaagattggaatgtttacaccacaacccctttgctatatgacattcgatatttggataaacagtctcgactgttgtagaaataatactgactatttgttttttttttttttttttttgtgaaaaataaacaacatattttctggagtaatctccggttcatgccacccgctgttgccttggatcagatataagcatccatttcgattccagtgaattaaagttattctcggacttaagctgaccccgtcctagcaacctcctaaccgcccgacatctccttctcatcgtggactgcacttgttttaattactgcccctgtgttgattccccaggaccaaaaagaccaactcaaagtgaattttccatttggggctttcgtttgtaatgttgctttcgtttgttgttgttgttgttgttgctttattcgtggagtttgtgtgttcagaggtcgtaggtcgtagattgtgggccgtgggccgttggtcgtgggccgtggctagcttaacccatttcttaacccattcagatgttgtcgtcgtgaaggcgacgacgctgctgctgctgctgtcgattgatatttctgtttggacggcgacggcgttgctgttgttgctgctgacggcggtgttgctgctgtcgctgcttgttgttgttgttgctgttgttgttgttgaggcgtcgcctgttgttgttgttgttgttgccagggcgacgacgtctctgctgctggcgtttcaggttgttgttgttgttgttgcggttgcgacgacgacgcaaactgttgttgccattgccgttgccattgcgtcgtcgctgctgcaacttctgttgctgctgtcgccgacggcgttgctgctgcagcctttgctgctgctgctgctgctgcggacgacggcgacgtcggcgattgttctgctgacccctgggatggtttgactgcacggactggtggtcttggtcctgctcctgatcctggtcctcagctgcatcctgctgctgctgctcctgttgcatgtcctgcgattgctgttcgccttcgccatcggcatgatttttctcagtagtaacctcgacgcgatcatccttcaagggtttgacctcgcccacgcgcacattcttcacctgatcacagggcacatcgctgtagatcaccacgttgccatagttgcagacaatctgctcctgatccgcctggcgaccctcgatggagccaatggagccccgtttgtcctcaatctcgtagatgttgccggatttggtgatgaaaccggtgacctgcagcggcttgctgccattgcttttcggagctgcttccgtgagttgcactttctttggcggagcattcacaatcatgggcttcgtgggcttgacctccattttgggtggagcactcgtggagctcgtcagcggcgccaccgtttgacctttggcatcacggaaacaaaaaaaggggggagacacattcatataccttcaagttgcaaggaaaacagggcaaaaaaatttaccgctcaccagcgagaggtcgctggaaagggccgtggcccaaatcaggaccaggatcatcccgaatcccttgccgcacatcattatcttagctcttgttcgcttctcgatcgactgaatcgcatttcaagctgcgatcccgggttatattaactctgtgactctgtggctaacggcatttcgaccagaatcatttttcggcctctttcgctttgggatttttgcataattaagtctgcgagttcaaagcgtgtcagccggagaatggttaggagcgacccatttagccagggcgtacactgtaccaaaatcataactagtttattgtgaaaagaaacaaaagctatgcaatgcgttctacggggctttctacggttcatgtaccagtaatttaattaatacatatattttaattgaagacaaagacaaagttatgctaagatgctatgatttctttcagttatctagtgttaattcctacaccacttccgccactttcccctccccaacgagcagagttcaatggctcaaactaattagcattcatatttcttcttcgattttcgccgctgtccaaaaattctcgtctctttgcgcttggttttctcatatgttgattatgcaaattgctttcttggtcggcagcccgcattttcaaattgacctcaagccaaagctggccaacagcaaaaaggtgttcaactatgcagaaaagcaaaagaaaaaaaaatatagagaatagtgaagcgtgtttactcgaagatctaagcaagtcgaattaaatacaaacataatttgttgggctggaaagttgtgtttcgtgttaatttttgatttcctccgtgcgaactgcccgtgtaaaattggctgttacagcgttagatatgtggtttttttttttaaaacgggtctggttttattttgatttagctcgagcttggcggctgtgtgtttttttttagaaataataattaatctttataaacgtgtttgccaagctaagaagttaggcgcgacttgcggtagatacaacaaatagtttggcttaatcagggaagcaaaagcatacacagatatgcatatg

SEQ ID NO: 34814 - DNA, 984 bp, DROSOPHILA
atgatgtgcggcaagggattcgggatgatcctggtcctgatttgggccacggccctttccagcgacctctcgctggtgagcggtcaaacggtggcgccgctgacgagctccacgagtgctccacccaaaatggaggtcaagcccacgaagcccatgattgtgaatgctccgccaaagaaagtgcaactcacggaagcagctccgaaaagcaatggcagcaagccgctgcaggtcaccggtttcatcaccaaatccggcaacatctacgagattgaggacaaacggggctccattggctccatcgagggtcgccaggcggatcaggagcagattgtctgcaactatggcaacgtggtgatctacagcgatgtgccctgtgatcaggtgaagaatgtgcgcgtgggcgaggtcaaacccttgaaggatgatcgcgtcgaggttactactgagaaaaatcatgccgatggcgaaggcgaacagcaatcgcaggacatgcaacaggagcagcagcagcaggatgcagctgaggaccaggatcaggagcaggaccaagaccaccagtccgtgcagtcaaaccatcccaggggtcagcagaacaatcgccgacgtcgccgtcgtccgcagcagcagcagcagcagcaaaggctgcagcagcaacgccgtcggcgacagcagcaacagaagttgcagcagcgacgacgcaatggcaacggcaatggcaacaacagtttgcgtcgtcgtcgcaaccgcaacaacaacaacaacaacctgaaacgccagcagcagagacgtcgtcgccctggcaacaacaacaacaacaacaggcgacgcctcaacaacaacaacagcaacaacaacaacaagcagcgacagcagcaacaccgccgtcagcagcaacaacagcaacgccgtcgccgtccaaacagaaatatcaatcgacagcagcagcagcagcgtcgtcgccttcacgacgacaacatctga

SEQ ID NO: 34815 - protein, 327 aa, DROSOPHILA
MMCGKGFGMILVLIWATALSSDLSLVSGQTVAPLTSSTSAPPKMEVKPTKPMIVNAPPKKVQLTEAAPKSNGSKPLQVTGFITKSGNIYEIEDKRGSIGSIEGRQADQEQIVCNYGNVVIYSDVPCDQVKNVRVGEVKPLKDDRVEVTTEKNHADGEGEQQSQDMQQEQQQQDAAEDQDQEQDQDHQSVQSNHPRGQQNNRRRRRRPQQQQQQQRLQQQRRRRQQQQKLQQRRRNGNGNGNNSLRRRRNRNNNNNNLKRQQQRRRRPGNNNNNNRRRLNNNNSNNNNKQRQQQHRRQQQQQQRRRRPNRNINRQQQQQRRRLHDDNI

SEQ ID NO: 34816 - DNA, 2588 bp, DROSOPHILA
gagaatagtgaagcgtgtttactcgaagatctaagcaagtcgaattaaatacaaacataatttgttgggctggaaagttgtgtttcgtgttaatttttgatttcctccgtgcgaactgcccgtgtaaaattggctgttacagcgttagatatgtggtttttttttttaaaacgggtctggttttattttgatttagctcgagcttggcggctgtgtgtttttttttagaaataataattaatctttataaacgtgtttgccaagctaagaagttaggcgcgacttgcggtagatacaacaaatagtttggcttaatcagggaagcaaaagcatacacagatatgcatatgtatatatgtaatttatgctacgaaaaattgactttctccttccgcaaaatatgaataaaaaaaaaaaacttttcccgttttcaacgatttattttgacgtatgcagtgctaatgtacaggcaaataaagctaaaatcgattacaaatcaaatttgtttgtactttctactatttcgttgctttactcgttggaatagaaacgataaaaaagggaaaatctaaacaaatttgattagatttattcgatttcattcagaaagctgccgcgtcggtttttcacgtgctcatttcatgtttaaatccatattcaaaaatctacgacaaaaatgaatacttttgtatcagcgcatatttttgtttgttttatacagcatatgggttcattagtctagtacaaaacataaggtacgcttttagtcgaatcgaggtggataatactatgctaactacttccttactttttttaaggaaactgttcttaatcagagaatagtatagcatttaaatttacattttgatattataaaaatgaagcaagaacgtgtgctttttatttaaagatccattttattggcatactttttgataaatattataaagtacactaaaaacaaagaaaaaaaatgtaaaaaaaaagatttattggcacattagttcttctgcttttggttgtagtttttcaaggcctcggccagttccgatagtgccgatttctgggccttctcctgcttgcgctcctgctgcttcttcaactgcttgcacagtttcttcaactgcttgcgctccttctttgccgatttcttctcgccactgtcgtcctcttcggacgaggaagatccaccccgcttcttccggcggctcaactcggcacattgttgcagcagcttggcggcctcatcatcatcgggctttggagtggtggtcgtagtagtggttgtggtggtgctcggggtggtgctgggagtggtgctgggagtggtgctgggagtggtgctggtggtggtgctcggggtggtgcttgtggtagtcgtactggcagttgtggactctgacttgggcttttccgttgtcgtcgtcgtagtcgtagtggttgtagacgactctttaggcttcggagtcgtcgtggtggtggtggttgaggtggtggtgctcggcgtagtgctctcctgtggcctggccaaaatcgtggagcagctggccaccagcagcaggccgaaaaacagtatggaagcgcgcattctcgtctgatttggtttccctcgactagacaactaaatggagatcatcgcctggcgtttgtttatatagacggcacttagcgcgtttttgttgccccagcccctctacccccccgcccccccttgcataagatgggcgtagacggtacgactggttttttttttttggttggccgatagaaaaacgtctataaattgtcattatacattgaaattttttaaagcaattctgtagttttcgggggttttttggtgatacccaacttttcaagttaccgagtccatagatattttgaaaatctttcaaattaatgctatggtatttaatacgttttactttatattaatgtactagtagttaaattttaaaataataatcgtagtatatacagctagttgtaaactatcatataattgtttcaagatactatccatccatattattcattcccatcgattcgtagacataagaccaattttgtgaagggtatacaactaatatatacatatgtatttatgcatatgtttatgtaccgagacgctgaccaaaagtaatgccaatataaacattttttcgtgtagttttcgttggtcattagcgctttctgagaattggctgctggatttattaacaaattattctcgccttatcaagcattaattgtacttgtgtatcatatgggcttcacatgcgatagatacccttactcacgcttatcaaaaataatgctttggacatttcgatgcttgttattaaacaggttttggtttggcctagggcgtttaatattattttattgattgtattctgtatgcttaatgattttctagagtctggagtacacttcgatgggaatttgttttcttggtttgagcatcgagtttcctttgtttatacgtttgcacatttgagtatgcatttttttcgcattgcggctggctcataatgccgctaattgtttatcaattacacttgttaattgtttaatgcgactgcaaa

SEQ ID NO: 34817 - DNA, 588 bp, DROSOPHILA
atgcgcgcttccatactgtttttcggcctgctgctggtggccagctgctccacgattttggccaggccacaggagagcactacgccgagcaccaccacctcaaccaccaccaccacgacgactccgaagcctaaagagtcgtctacaaccactacgactacgacgacgacaacggaaaagcccaagtcagagtccacaactgccagtacgactaccacaagcaccaccccgagcaccaccaccagcaccactcccagcaccactcccagcaccactcccagcaccaccccgagcaccaccacaaccactactacgaccaccactccaaagcccgatgatgatgaggccgccaagctgctgcaacaatgtgccgagttgagccgccggaagaagcggggtggatcttcctcgtccgaagaggacgacagtggcgagaagaaatcggcaaagaaggagcgcaagcagttgaagaaactgtgcaagcagttgaagaagcagcaggagcgcaagcaggagaaggcccagaaatcggcactatcggaactggccgaggccttgaaaaactacaaccaaaagcagaagaactaa

SEQ ID NO: 34818 - protein, 195 aa, DROSOPHILA
MRASILFFGLLLVASCSTILARPQESTTPSTTTSTTTTTTTPKPKESSTTTTTTTTTTEKPKSESTTASTTTTSTTPSTTTSTTPSTTPSTTPSTTPSTTTTTTTTTTPKPDDDEAAKLLQQCAELSRRKKRGGSSSSEEDDSGEKKSAKKERKQLKKLCKQLKKQQERKQEKAQKSALSELAEALKNYNQKQKN

SEQ ID NO: 34819 - DNA, 2984 bp, DROSOPHILA
gatccgaaaatcagatggtacacacatatatacaaacaatggtagagaaactcatttgagaacatctctatagaactgtaaaagtttcgtagtaaactatttttgctaatcgtttggccaacaaaataggtactaccgaaaaataaccgtttagagataaaattcatttgattgtcgtatattggaaccaaagatacttttggtcttatccaaatatatatattaatcaaatgaaagttttaaaaagtcacgaaataattacacaataacagtatgtacaatacaaatgttatatggaaaattaaaatatatatttattgaaataatttgatgtcgcattctgattatattttgtcattgtttttgggagagcaaacatacaaaaatagataagcacatattttggaatcgttgtcaagaaaagatttgcctccgaactatgcaataaatcgcgaaccctttgtaaattataaattttgagatttcattaagttttgattttttcgaaacgaatttggagacttcagttgagtactccattctttggtgtggaaatgccgagcactgagtgagctgaagcaagcagagaactgacatcccagaacatctgtgtaagccagattccgtgggtcaatctcggcttgacgtcaatcaatcatcggctactcggcgatggatagaagaatggttttggcaaaagagatgggaaattagcataaaattcgtacgcctctgacccgcgacccggttcactttgaccccgggcgaacttttgctaatagagctggccaagaagtgggaactgaaaggaaatggggatgcggggcggatgatagccatcgatcagctgtatgagctccaagtgggtataaaatcccgggtcagtccatcagttgtcagtcagttgtgagtgaaaactcaaagacaacaagtgagttaggaaccctcgatccacagtcaaggaagccgattatcccgataaggagaatccatctgcagaatgcattgcctgcttcaactgagtctggctgtggccctttgcgccctcttagccccatccactaccttgggtgagtcctcaaatattaacagaaagtcgtcagtcaagtcacaactactttctttatatgttccttaaatatttcgtataattttaaaatattttatctcagccgaacgccgcaatgtgtaccgcctgggtggacgcgcctccgacgctcagatggaggcccgcttcacctcgtcgattgccaacaagctgacatctctgaagggcaccaccacgacgaccacggttgcccccactaccaccaccacgcccacctccactacggagacgaccacgccgactgcaccaacaacgtccactggcacctcgacgagcaccacgacgcccacaacctccgacaccaccaccggtcgtgccttccccgcaattcaagacgatgttgaggaagatgatgaggagatgcccagggcgtttgaagatgaagaagacgaaggtgatgacagcctggaggacgaagatgatgacgacgatgaggagagctactttgtggccgctccttccgccggtggcaatagcaatgccgtgcagcagtcctcagagtccggctcgttggtccgcccctcggaactccagtggcgccagttccagcaggaacagcgcaaccgtcgccgaatccagcgcctccagcgtgagcacaaccagcggatcaggtccctgcttcgccgccagagggccgccgagaagcgaagccagcaacgcttgcgccgccagcgccaacagagccgtaagcgcgtctcacagcgccagcgccgcaacaggaaccgttccaaggcccagcgccagcgccagaggaggaacaacatgaaccgtcgtcgccgccagcagcagcaacgccagcgcagacaccgccagcagcagcgccgccggctcgtgcgcctcatgcgccgtcgtcgtcgtggcggacgtcgcaactaaggagttgatcccagatccccaaccgatcccagaacccccgaaataaactgaacttgtatgcaaaaaaaaagcaaatttttttttttcattattacgaaaacaaatagcgaagggtaaactacaatgttagatcattgcagcattaagatctaaaccagtaagaaatggaattctgtatgtaatctatacctatagatcagtcttgatttatggaaagactttatgacaaacaattggacaaaacaatggatgaaaccatggtcatcatatgagataactaagattctaaatatccccatgattttatacaccaacttagattagatgcaagaaatttgtattgggtcacattggtctaaatggacattctgtgctattggaaaaactgcagcttaggataccaaagatgctacatttatctaagaaccaagccttagtctcgtaagatctgcgactctgtcgttgcccaacgtgtgaatgtctttctccgcggaattctcggggggtcactgcctatgcggttcattgacacctcacctccactttcgcccttcggtggaagagaagctgtccaaagacagagtatctaaaatcagaaacgaatatgaatatgcaaatggtgtcgattcgcgagctatatgcaaatgattagcggcgatcgatcggatggctgaggttacgggtcagatcgcgattatttatggcattatgcaaaacggttacaacgccaataggctggctttttctttgccctttcttcgtaggcccaaaaacaaactagctctgtctcctttgctcggcttacacatctcttttttttttttttttttgatttttgcatatgttccttctctttaacaagtccatttgttgtaacctctagggaactagggctatgtaggggccatggttacatataaatatgccgcggatcgacccaagaagtcagtcacagcagctcagccatccaagagatactcagattccagccaagctaaag

SEQ ID NO: 34820 - DNA, 882 bp, DROSOPHILA
atgcattgcctgcttcaactgagtctggctgtggccctttgcgccctcttagccccatccactaccttggccgaacgccgcaatgtgtaccgcctgggtggacgcgcctccgacgctcagatggaggcccgcttcacctcgtcgattgccaacaagctgacatctctgaagggcaccaccacgacgaccacggttgcccccactaccaccaccacgcccacctccactacggagacgaccacgccgactgcaccaacaacgtccactggcacctcgacgagcaccacgacgcccacaacctccgacaccaccaccggtcgtgccttccccgcaattcaagacgatgttgaggaagatgatgaggagatgcccagggcgtttgaagatgaagaagacgaaggtgatgacagcctggaggacgaagatgatgacgacgatgaggagagctactttgtggccgctccttccgccggtggcaatagcaatgccgtgcagcagtcctcagagtccggctcgttggtccgcccctcggaactccagtggcgccagttccagcaggaacagcgcaaccgtcgccgaatccagcgcctccagcgtgagcacaaccagcggatcaggtccctgcttcgccgccagagggccgccgagaagcgaagccagcaacgcttgcgccgccagcgccaacagagccgtaagcgcgtctcacagcgccagcgccgcaacaggaaccgttccaaggcccagcgccagcgccagaggaggaacaacatgaaccgtcgtcgccgccagcagcagcaacgccagcgcagacaccgccagcagcagcgccgccggctcgtgcgcctcatgcgccgtcgtcgtcgtggcggacgtcgcaactaa

SEQ ID NO: 34821 - protein, 293 aa, DROSOPHILA
MHCLLQLSLAVALCALLAPSTTLAERRNVYRLGGRASDAQMEARFTSSIANKLTSLKGTTTTTTVAPTTTTTPTSTTETTTPTAPTTSTGTSTSTTTPTTSDTTTGRAFPAIQDDVEEDDEEMPRAFEDEEDEGDDSLEDEDDDDDEESYFVAAPSAGGNSNAVQQSSESGSLVRPSELQWRQFQQEQRNRRRIQRLQREHNQRIRSLLRRQRAAEKRSQQRLRRQRQQSRKRVSQRQRRNRNRSKAQRQRQRRNNMNRRRRQQQQRQRRHRQQQRRRLVRLMRRRRRGGRRN

SEQ ID NO: 34822 - DNA, 2789 bp, DROSOPHILA
tccccaaccgatcccagaacccccgaaataaactgaacttgtatgcaaaaaaaaagcaaatttttttttttcattattacgaaaacaaatagcgaagggtaaactacaatgttagatcattgcagcattaagatctaaaccagtaagaaatggaattctgtatgtaatctatacctatagatcagtcttgatttatggaaagactttatgacaaacaattggacaaaacaatggatgaaaccatggtcatcatatgagataactaagattctaaatatccccatgattttatacaccaacttagattagatgcaagaaatttgtattgggtcacattggtctaaatggacattctgtgctattggaaaaactgcagcttaggataccaaagatgctacatttatctaagaaccaagccttagtctcgtaagatctgcgactctgtcgttgcccaacgtgtgaatgtctttctccgcggaattctcggggggtcactgcctatgcggttcattgacacctcacctccactttcgcccttcggtggaagagaagctgtccaaagacagagtatctaaaatcagaaacgaatatgaatatgcaaatggtgtcgattcgcgagctatatgcaaatgattagcggcgatcgatcggatggctgaggttacgggtcagatcgcgattatttatggcattatgcaaaacggttacaacgccaataggctggctttttctttgccctttcttcgtaggcccaaaaacaaactagctctgtctcctttgctcggcttacacatctcttttttttttttttttttgatttttgcatatgttccttctctttaacaagtccatttgttgtaacctctagggaactagggctatgtaggggccatggttacatataaatatgccgcggatcgacccaagaagtcagtcacagcagctcagccatccaagagatactcagattccagccaagctaaaggataaataactcaagatgcatttgttgaagggacttttgatcgtggcgtgcctggctgcctttgccagcggtgggtgatctaacaaacagcgagattatcaaaagtgattaacaatgtatcgcatttttatctaactcacagccaagccccagaacttccagatcttcggtcgccagcgagatgagcccgccgcccaaggacgcctgagcgccactcagctgaccgatctgttaaacagcctgaagggcagcagctcctccactacagcggctcccactaccaccaccttgccatccacctccacggtaacgacctcgccaactggacccaccacctcaaccggcacatcgaccaccacaaccacacccaccaccacctcacccactggaaccaccaccgctcgccaattggagccgctcgatgatcaggaggacgacgacgaggaggagcaacaattgggccaccatcagcgcttccagctggaggatcagaacgatgacgaggaggagcatacccaggtggcccgctcgcaggccaaccgccgtcgccaggtgaacgcccgccgtcagcgccagcgtctgcagcagaagtaccgccgccgccagcagcagcagcgtcgccgtcgccagcagcagcagcagaagcgccgccagcagcagaagcgtcgccagcagcagcgccgcaggaggcagcagaaccagaggcgccgccagcgccgtaaccgccgcaccaacatgcgcctggtcagccgcttccgccagagcacccccaaccggaaccgcgtcatccgcatcggcgcctaaggcggggatatcccggaaatcgatttgaaacgacaccgaataaattgcaatgatagaatagtttttgtggctatctttgggaaagtggggagtcgggtgccaaaagacattcgtcacttgagcatattgatatggatccatatattaatatggatccacaaatgtatctggtatatatcatacctcatatatttgcaaaatatcaccatcaacatatcaacatgaaaacgattttcaatcgagcttcgatgcgtaagctctaatctctttgataaaatctcaaaattcacaattaacccgaaccaagtgaattgatactatacggttttctaatttaaaattatgtgaaaaagccgacacattggctcaacatttttttttttaggatttataaggatttgaaaagagatagcaaatgggttaccactttaaaagtgaaggtagtattttttttataatatagctttgaactgtgctatctttattagccatttgaaaaaaaaccgttgtgtaatacttcaaatatctaaagcggcctaataattgaaataaaaattgtaaatttttaaacataagcaattcacaaaacatgaattttataatatatataagcctatttaatgatccttagttacaaaaaccctttaaatgaatatttccaaaatcctatgcatcctgagtattgacgaagcagaaagctgaagagcaaaaatatttgaaccaatatttccaggatcctatgtgatgaaaccttcgaaagcaaaaattcattggtatataaacattttcagtttgcattaacagaacgtcattgttttgagggcaaaacctagtaacttattgcaggaattttgaaatctgtgtttatcaatcagattccaagtgaaatactatagcgaactttggttaatatatgtcgcatgggtcaaactagttcaacgatcggcaagcggtcaccaaaatttatgcaaaaactttggcgaatgtgcaaatttgcgaa

SEQ ID NO: 34823 - DNA, 717 bp, DROSOPHILA
atgcatttgttgaagggacttttgatcgtggcgtgcctggctgcctttgccagcgccaagccccagaacttccagatcttcggtcgccagcgagatgagcccgccgcccaaggacgcctgagcgccactcagctgaccgatctgttaaacagcctgaagggcagcagctcctccactacagcggctcccactaccaccaccttgccatccacctccacggtaacgacctcgccaactggacccaccacctcaaccggcacatcgaccaccacaaccacacccaccaccacctcacccactggaaccaccaccgctcgccaattggagccgctcgatgatcaggaggacgacgacgaggaggagcaacaattgggccaccatcagcgcttccagctggaggatcagaacgatgacgaggaggagcatacccaggtggcccgctcgcaggccaaccgccgtcgccaggtgaacgcccgccgtcagcgccagcgtctgcagcagaagtaccgccgccgccagcagcagcagcgtcgccgtcgccagcagcagcagcagaagcgccgccagcagcagaagcgtcgccagcagcagcgccgcaggaggcagcagaaccagaggcgccgccagcgccgtaaccgccgcaccaacatgcgcctggtcagccgcttccgccagagcacccccaaccggaaccgcgtcatccgcatcggcgcctaa

SEQ ID NO: 34824 - protein, 238 aa, DROSOPHILA
MHLLKGLLIVACLAAFASAKPQNFQIFGRQRDEPAAQGRLSATQLTDLLNSLKGSSSSTTAAPTTTTLPSTSTVTTSPTGPTTSTGTSTTTTTPTTTSPTGTTTARQLEPLDDQEDDDEEEQQLGHHQRFQLEDQNDDEEEHTQVARSQANRRRQVNARRQRQRLQQKYRRRQQQQRRRRQQQQQKRRQQQKRRQQQRRRRQQNQRRRQRRNRRTNMRLVSRFRQSTPNRNRVIRIGA

SEQ ID NO: 34825 - DNA, 3021 bp, DROSOPHILA
ccatcaacatatcaacatgaaaacgattttcaatcgagcttcgatgcgtaagctctaatctctttgataaaatctcaaaattcacaattaacccgaaccaagtgaattgatactatacggttttctaatttaaaattatgtgaaaaagccgacacattggctcaacatttttttttttaggatttataaggatttgaaaagagatagcaaatgggttaccactttaaaagtgaaggtagtattttttttataatatagctttgaactgtgctatctttattagccatttgaaaaaaaaccgttgtgtaatacttcaaatatctaaagcggcctaataattgaaataaaaattgtaaatttttaaacataagcaattcacaaaacatgaattttataatatatataagcctatttaatgatccttagttacaaaaaccctttaaatgaatatttccaaaatcctatgcatcctgagtattgacgaagcagaaagctgaagagcaaaaatatttgaaccaatatttccaggatcctatgtgatgaaaccttcgaaagcaaaaattcattggtatataaacattttcagtttgcattaacagaacgtcattgttttgagggcaaaacctagtaacttattgcaggaattttgaaatctgtgtttatcaatcagattccaagtgaaatactatagcgaactttggttaatatatgtcgcatgggtcaaactagttcaacgatcggcaagcggtcaccaaaatttatgcaaaaactttggcgaatgtgcaaatttgcgaaaaagaaatgataatgagaattatggttgccgattctgggttggattgttgttgttagatccgcaactggagcgttgggtatataaacccggctggccgctggcaatatcacagttcatcgaagaccttcccccaggcagagtcccagccaatccaatcctaaggtcaagaccagttccgcaggaaataccaaggaaaaccacaaaatgaagatcttctacggagctctgctggtgctgggcacagcaattattgcccaggcggctggtgagtttagtttttactcggttttacgaaaatatcagtcactacttaaggtagagacatttaagcggactacggaagagatgattgaccattattgagttttatgagctacattaatgttttcatcaattaccagttgcccgttccaacgacgagtccgcccaggataccgcccaacagtccaagtaccgcctgttcaagcagccagtgcagatcgaggcacgcagcttacagcagcttatgtccctgaagaacccaccttgtcctccggcagccaccacaacaacatctgtgcccaccacaaccacagtgacgacctcacccactgggcccactaccacaactggaacgtccacaacaaccaccacacccacgacaacttccacaaaccctaccaccaccgctcgtcgctcattcaaccagaacaatttggtcgacggaaacgaggacgacgacgatgaggagtttgaccaggatgtggaggaagagaagtatctgaaggacgaggatgaagtgcaggaggacgaccaagatgatgacgataacgaggacgacggcttccagcttgtggctcccaaagcctctgcatcctcatcctcttctattcgccgtcgcaacagcgctagcagctcctacggatcgtccggcaacaagaatctgtccaacagcgaattgatgcgcgaaatcgaactgcgccggcagaaggaactcaacgagcagctgcgcaagcagcttgccagctcccgtcgccgttccaaccagagccgccgtcgtgccctaaacaaacgccgtcgtgcccttcgccgccagcagcagaagcgccgccgcctgtcccgtcgccagcagcagaagcgtcgctcccagaaccgccgtcatcgcaacgcccgccgccgtcagcgacgcaacaatcgcctgagccgcctccgtcagcgccgtcgcgccaaccgtcgccgcaactgagcgaccagtgaccagcaatgacctctgaaccacgacatgtacgattgaaataaagcgaatatatatagaaaacaaaaatgcattgtcttatcactattctcatattcagtttagtcaaagaatattctatatatgcctcctcgaaatgaattgcaactatcatctcatattaataagcccataatatctatcctactcgataaaacccaacaacatatatccaacatatatatttattatatcgcacatatttatattccgtattagataagatttgatttatgcgataggaacacggtaatcaaatggatagtagcaggaaaatgctatttattttatatggagttatacatacattcatatgtatttactcaatatattaataataataatttatttcaggcacctaaaagacgaaaagaacatagattgaatgattccttttttttattagataaaaacatgtggaatattgaagatcgttaggcgcacatttatggcactttgtgggtcactttcgcaggctttgcgccaccttcgacccaacggcttcaattagaaatggatttcaatagattttcactttttttcagcccactctagcaaaagcccaaggcgctgcagaaacctgaagaccaaaaccccaattccaataccaaatccaaaaaccgaaaacccaaaggcgttccgcttggccgaaaacccatgggatgaccggcagaatgatgatgacggagaatttggagaatatacattatagctggcagcgatttgactatttgagccctaccacggatcaatttaatttcaattgtgtacacagatttaccgttcggcacttacttatttgcattccacagcgtattttgcgggactataaaaagcctcattgctggccgataaagtatcaaagcctgattgtccagccatcggcgagcaacagaaatcgcagcgattttggtctatccgaaaagttctcttctttaaccagagtagtttc

SEQ ID NO: 34826 - DNA, 885 bp, DROSOPHILA
atgaagatcttctacggagctctgctggtgctgggcacagcaattattgcccaggcggctgttgcccgttccaacgacgagtccgcccaggataccgcccaacagtccaagtaccgcctgttcaagcagccagtgcagatcgaggcacgcagcttacagcagcttatgtccctgaagaacccaccttgtcctccggcagccaccacaacaacatctgtgcccaccacaaccacagtgacgacctcacccactgggcccactaccacaactggaacgtccacaacaaccaccacacccacgacaacttccacaaaccctaccaccaccgctcgtcgctcattcaaccagaacaatttggtcgacggaaacgaggacgacgacgatgaggagtttgaccaggatgtggaggaagagaagtatctgaaggacgaggatgaagtgcaggaggacgaccaagatgatgacgataacgaggacgacggcttccagcttgtggctcccaaagcctctgcatcctcatcctcttctattcgccgtcgcaacagcgctagcagctcctacggatcgtccggcaacaagaatctgtccaacagcgaattgatgcgcgaaatcgaactgcgccggcagaaggaactcaacgagcagctgcgcaagcagcttgccagctcccgtcgccgttccaaccagagccgccgtcgtgccctaaacaaacgccgtcgtgcccttcgccgccagcagcagaagcgccgccgcctgtcccgtcgccagcagcagaagcgtcgctcccagaaccgccgtcatcgcaacgcccgccgccgtcagcgacgcaacaatcgcctgagccgcctccgtcagcgccgtcgcgccaaccgtcgccgcaactga

SEQ ID NO: 34827 - protein, 294 aa, DROSOPHILA
MKIFYGALLVLGTAIIAQAAVARSNDESAQDTAQQSKYRLFKQPVQIEARSLQQLMSLKNPPCPPAATTTTSVPTTTTVTTSPTGPTTTTGTSTTTTTPTTTSTNPTTTARRSFNQNNLVDGNEDDDDEEFDQDVEEEKYLKDEDEVQEDDQDDDDNEDDGFQLVAPKASASSSSSIRRRNSASSSYGSSGNKNLSNSELMREIELRRQKELNEQLRKQLASSRRRSNQSRRRALNKRRRALRRQQQKRRRLSRRQQQKRRSQNRRHRNARRRQRRNNRLSRLRQRRRANRRRN

SEQ ID NO: 34828 - DNA, 2918 bp, DROSOPHILA
catgtacgattgaaataaagcgaatatatatagaaaacaaaaatgcattgtcttatcactattctcatattcagtttagtcaaagaatattctatatatgcctcctcgaaatgaattgcaactatcatctcatattaataagcccataatatctatcctactcgataaaacccaacaacatatatccaacatatatatttattatatcgcacatatttatattccgtattagataagatttgatttatgcgataggaacacggtaatcaaatggatagtagcaggaaaatgctatttattttatatggagttatacatacattcatatgtatttactcaatatattaataataataatttatttcaggcacctaaaagacgaaaagaacatagattgaatgattccttttttttattagataaaaacatgtggaatattgaagatcgttaggcgcacatttatggcactttgtgggtcactttcgcaggctttgcgccaccttcgacccaacggcttcaattagaaatggatttcaatagattttcactttttttcagcccactctagcaaaagcccaaggcgctgcagaaacctgaagaccaaaaccccaattccaataccaaatccaaaaaccgaaaacccaaaggcgttccgcttggccgaaaacccatgggatgaccggcagaatgatgatgacggagaatttggagaatatacattatagctggcagcgatttgactatttgagccctaccacggatcaatttaatttcaattgtgtacacagatttaccgttcggcacttacttatttgcattccacagcgtattttgcgggactataaaaagcctcattgctggccgataaagtatcaaagcctgattgtccagccatcggcgagcaacagaaatcgcagcgattttggtctatccgaaaagttctcttctttaaccagagtagtttcccgaagacccaaaagagtttataaatttatccaacatgaagttgtacgccatcgttatcctttcggcatgctgtcttctggccgcacaagcggcacccgagaagaagatggccctgaagtcgcgtcaagtcgaccaggatgccaaggtgggccaggccgcttccagtgctggtgcatcgacctctgccaaggatccctccagtggcaggctgtttctcaaaaagttcctaaccttcaagaacctgtttagcagcaacaatcaacccgtgattccgatcattatcaccggcgccggaaccgggactagcacaggagcctcacccacttcgcccacggtgacagtgacctcgacaggcaccattccctcggccactggcaccattaccacttcgcccacaacacccacctcgacgacatcgagcgcacggcaaacgattatcaagggtgcccgatatggcagcaacgatgacgaccaggagcagaatcaggaacaggatcaggatcaggaccaagaacaggaccaggagctggcccaacccgcacaggcctaccccgccgagttgatggacgagcaggctctgcaggccgccctggccgctggcgcccaggaatacgaggtggtcaccactgagcacgaggtccagggaactggcggagccaccgtcgaaggcggcaaggccacccaaagcaataaccatatcagtctgcgacgcaaaggcgcccgccgcggccaggtgatcagcgttcgcatcccaccccgctaccgccgctacttcaagaacggccagaaggtgatgctcaataccggtagtcgtcccgtctccaagcgtcgcgtggttcgcaagcgagtgcctgccaagaaaatcaacaagaacaaccggaggcgcaacggcaacaagaagaatcgtcgcaatcgcaacaagaaccgtcgcaatcgcatcaccgccgtctaaggatctaggattcaaggtcaggatccaacgatccgacacattccggcaagataatttttttttctaatttattgtagcctaacttgctactgccacacttcctgcggcaggataaacgataaataaagcccttcaagaataacaaaactgcattcttactttatctttgcgcggtaataatactaataataaaaatagtaaattgtataacaaaataataagattataagagaataagaacgggctaaaatatagttgcgaatagcaagtaaggtaggaattaaactgaagaaactgagtacataccttacccacaatttactttaggctcatttacatcttcatattaattgcttatacaatttttcaaaaaacatccctctaaagatcggaggttacagcgatgaagcaccaaagatcaatgatcgttgatcttcagaagcaaagaaaggcaaaaacaatagttggtacaatctcctttatgggcatagaatcaaagaaaaaacaaaagtctgtgaaaagtacgcacttgacccacatttttgggacgaaatcaccaaagagatcagatcgtgacgaatgatggggcaattttcgggtatttaagcggctgtttagcccggggctcagtacaaacatggctggacagcgatttatgatcgtactgatcgtggtttcaatcttgttaccatcaattccggaggcttctgccaaagcctgtggatcgagactccagttgcgggctcaaaatgatcccgttgacctcagtcgtttgagcgagaagcagctaaaacagctggctgagcagttggcaaaattcaaaacgcagaaggacgaatatggcggtgatctggtggaggaagaggatgacccagaacaggatcagcagctggaggatgccgaggacgatcaccgcggcggaagtcgtccatggaacagggtgcagcggataatccgaagacagctgataaaaatacccaagagatatctcaagaagctc

SEQ ID NO: 34829 - DNA, 918 bp, DROSOPHILA
atgaagttgtacgccatcgttatcctttcggcatgctgtcttctggccgcacaagcggcacccgagaagaagatggccctgaagtcgcgtcaagtcgaccaggatgccaaggtgggccaggccgcttccagtgctggtgcatcgacctctgccaaggatccctccagtggcaggctgtttctcaaaaagttcctaaccttcaagaacctgtttagcagcaacaatcaacccgtgattccgatcattatcaccggcgccggaaccgggactagcacaggagcctcacccacttcgcccacggtgacagtgacctcgacaggcaccattccctcggccactggcaccattaccacttcgcccacaacacccacctcgacgacatcgagcgcacggcaaacgattatcaagggtgcccgatatggcagcaacgatgacgaccaggagcagaatcaggaacaggatcaggatcaggaccaagaacaggaccaggagctggcccaacccgcacaggcctaccccgccgagttgatggacgagcaggctctgcaggccgccctggccgctggcgcccaggaatacgaggtggtcaccactgagcacgaggtccagggaactggcggagccaccgtcgaaggcggcaaggccacccaaagcaataaccatatcagtctgcgacgcaaaggcgcccgccgcggccaggtgatcagcgttcgcatcccaccccgctaccgccgctacttcaagaacggccagaaggtgatgctcaataccggtagtcgtcccgtctccaagcgtcgcgtggttcgcaagcgagtgcctgccaagaaaatcaacaagaacaaccggaggcgcaacggcaacaagaagaatcgtcgcaatcgcaacaagaaccgtcgcaatcgcatcaccgccgtctaa

SEQ ID NO: 34830 - protein, 305 aa, DROSOPHILA
MKLYAIVILSACCLLAAQAAPEKKMALKSRQVDQDAKVGQAASSAGASTSAKDPSSGRLFLKKFLTFKNLFSSNNQPVIPIIITGAGTGTSTGASPTSPTVTVTSTGTIPSATGTITTSPTTPTSTTSSARQTIIKGARYGSNDDDQEQNQEQDQDQDQEQDQELAQPAQAYPAELMDEQALQAALAAGAQEYEVVTTEHEVQGTGGATVEGGKATQSNNHISLRRKGARRGQVISVRIPPRYRRYFKNGQKVMLNTGSRPVSKRRVVRKRVPAKKINKNNRRRNGNKKNRRNRNKNRRNRITAV

SEQ ID NO: 34831 - DNA, 3121 bp, DROSOPHILA
gctacatgtgaaaagttctcaatttccagttgtttcatatgaaaattaattgtggatcgaatatcgctcttattagatttctaattttgtaaaccaaactatgggatttcatagttgttcatagtatgttctagtttcctatttccggcagatttagttcatttttggcatatgtttaaggacattctctattcgtggtttcacattagaatggcaggttaacgtgtcccatctttgtggcgcttttgttgtgcggctgcctttctttgcgcctcgtgtgccgttgacttttgcgcctaagcaaaatttgtgccatgtgttttgtggccgctttgtttgttggctcaaaattgctggcaggctgccacacgaggactctttgggactgcgatttggactgggatcgggacaccgaaaccgaaactgagactgagactgaaactgaggatggggatgaggataaagtcgaggacgaggccgagtacgaaacgagacacagacaggacttgtcacgtcagcggcacaaagcccgagcacaaaggcctgataactgcagtcgcctgataagcagcgccccaaacaaggatctgcccatctacttggcgacactcgaaaaaggggtggatatttaaatgtttataaacataaaacttagattaattgaaccttttaaaaccagtgctttttgttgtaataaattggttggtttaccattgagacaacttttttctttttaaaggttcttctttgacccccaatttatccaagtgtggcctttttaccccagggcccactgaagacccttcgccacccggaagcacaagtcccttcttttgtcatttcgctcataacgttaatttatattcagttcagtctaaaaaaaaaatgtagaatagccagtggtagtgtaagtacacctagtacagtgaagcccgtgtgacagccatcgagagaaggaatgtggaagtttggataggttgcttgtttaaattaaaggatcctagttgtagaactgctggcgacggcgctgtgccggagcggcggccacaaagcgacgtcccgagtttccggcggaggaggagccctcgttggcggagtacagaagcaggggtatctcctccacgctggtctgctgctgctgggcagagttgcgcacgccggagcggagcagctcgtcggcggataggcggcgcagggcggcgggagcgacggctacaggagcggcgactggagcggctccgtctaacagctgatcctcatcgttctctggctgctccagtaccacatcctcgggctgggctacggcaatgctgttgcccacgggggcctcgccttcattgtcggcagccgagatcgagctgctctgcagcagagcctcgatgttctccaggttggacagaccgttgatctgcagctggtcgtgcagctcggcaggaatggcgatggcctggacatccttgtgaccggaaattccattgggtgtcgggatgaactgaacgttctcgggaatctgatcggtgggatagacgggcaccagctcggcctcgttctcgttgcttgacttcagcaggatcagagagatgggcacgatcttcttgaacttaagcagaaccagcttcttaatggccacggcaccggggaagactcgtccctggggaccactgtggggcttcgctatgagggcacgctgctcaaaatgctgcctgcgatggtgtccgctcacatggcgggctaatgggatacaaagacatggggttaggaaatagggttggcagaaatggtttaaattcgccctgacgaactagtttagcttttaatatcatcgtatattaggaacacatattaaaaaaaagtcaatgcacttcaacaaaagtctgtcattattaacaaagaactatgaaaattgcttgtttctcaaaaactatgaaagcaatttattaattaataaccgtcacttaattatgatttcgaagagaatgtatgatactgatggatattggaaaagcgaacataattcatcaaagattatttttcgtctcctaaatcaccaaccaactcaccttcgcacgcggcaaagattgccagtccgatggtcaaaagggctaccaacttaattgccataatgatgtatatatgggatcttcttgtgaacttggatttgatgtggacttggacttggacttgggcttgggtctgtcgctggacgagggcctctattaaatggtccatcaagtgcccggcaaagacattttatacagggaaggaacattcacctggccggcgaaaagcaggcaaaacagcgtagacacataaaaatcacacgaaaaacaaaagaaattaggtggccaggcagcagaacaaagtaaaatgtagcgaaattggtggggacttggacgattggcaaattattaaactatgcaaatgtccgtcgactgatttatgcacaaaaaccagtaatagaaaacccaaaaagcagagaacccaaaaactcctaacatcccagagatcgcagaacgttgacttctggtggctacatttccatttccagttgcatttgactctttaccaaaatcgagaaatttgcattttgggtcgcctggagaaatacggaaaaatacaaaaaccgtctggcgaattcttgagccaattttgaggtcaaaagtgagattttcaataagtcaaaccgtttccatttgtcaatgtccgaagtgggcgaggtctcactgttcttccccgcagatgtcagagttcgaggcttatttgggccacattcatttgcctgcctgtctgccatatagccatatacaaagatattctttggccagccagcatgtgttccccattcggatcgaggaacgagcatttaaatcaatcaagtggatcgagtccatagtgcgaaatttattcttttctccgccattctctgcattgaaagcaggctcaacttagtgccagagattaagtggctaatctatcgaactattagtgataagctgcgcgaaataatggcatgacggattatggttttatggaatttatgagtgtctgctctcttttttgtgttcttctattgttggctaatttaaatcaataatcttccttttgtttaggacctatgcaa

SEQ ID NO: 34832 - DNA, 792 bp, DROSOPHILA
atggcaattaagttggtagcccttttgaccatcggactggcaatctttgccgcgtgcgaagcccgccatgtgagcggacaccatcgcaggcagcattttgagcagcgtgccctcatagcgaagccccacagtggtccccagggacgagtcttccccggtgccgtggccattaagaagctggttctgcttaagttcaagaagatcgtgcccatctctctgatcctgctgaagtcaagcaacgagaacgaggccgagctggtgcccgtctatcccaccgatcagattcccgagaacgttcagttcatcccgacacccaatggaatttccggtcacaaggatgtccaggccatcgccattcctgccgagctgcacgaccagctgcagatcaacggtctgtccaacctggagaacatcgaggctctgctgcagagcagctcgatctcggctgccgacaatgaaggcgaggcccccgtgggcaacagcattgccgtagcccagcccgaggatgtggtactggagcagccagagaacgatgaggatcagctgttagacggagccgctccagtcgccgctcctgtagccgtcgctcccgccgccctgcgccgcctatccgccgacgagctgctccgctccggcgtgcgcaactctgcccagcagcagcagaccagcgtggaggagatacccctgcttctgtactccgccaacgagggctcctcctccgccggaaactcgggacgtcgctttgtggccgccgctccggcacagcgccgtcgccagcagttctacaactag

SEQ ID NO: 34833 - protein, 263 aa, DROSOPHILA
MAIKLVALLTIGLAIFAACEARHVSGHHRRQHFEQRALIAKPHSGPQGRVFPGAVAIKKLVLLKFKKIVPISLILLKSSNENEAELVPVYPTDQIPENVQFIPTPNGISGHKDVQAIAIPAELHDQLQINGLSNLENIEALLQSSSISAADNEGEAPVGNSIAVAQPEDVVLEQPENDEDQLLDGAAPVAAPVAVAPAALRRLSADELLRSGVRNSAQQQQTSVEEIPLLLYSANEGSSSAGNSGRRFVAAAPAQRRRQQFYN

SEQ ID NO: 34834 - DNA, 2262 bp, DROSOPHILA
atttgtatacatatacgtgtcttgccttagagctagttacaacaggattcctcccaaaaaaaaagcacaaaaaaccaactacaacatatgggttaaagtgaggaacatacaaaaaaaaaaaaagtagtaaattaattcttgtggtttgagaacataaaagtttcagttgttgtatatggtttcgatgaatgctgatactacgatgatcaatataaggtattcatagttttatatatataagctttttatatataatctttaatttgaagattgccttcatcatacgcttctcaactctctggttatgtacgccataaaaatccgacatttgcggagtttgtggatgatgccgttgccgttgttgaagtggaagttgatgcagccgctgaagttgttgcagctgctgtggtgttgttgaagctgttgttcagatgcagctgctgcaacttgagtgtctgctgatgcagttcttgttcagtcgttgacatattaaaactgaagtcgtgctgcggcgaagtgtggtgattattagtgttggtggtgtgttttctgctacaactgtcgggatcgctgtttccaacgacgccgctgctgcagttcttgctgtaattggtgctgctagctgcattgttggagaagttgctactgctagctgcattactggtgaaatttccgttgctgttggtgtaattgttgctgccagaaagatggttggtaaagttgctgctgccagccaaattactggcaaagtgtccactgtttgtggggttgctgtttgttgagttgttggtgaagttcccactgcttgtgggattgttgggaaagttgctaccgctaatggcaccgttactggtaaaagcgctaccgttgctgtaattgccagtaaaactattggattgattggaattattattgaagctattgttgttgcttatggcaagcaactgattgcccagagtgctactgctgccattgtggtgtgattggcgtgattgttgttgaaacggcggcgaagatggcatagtcaatggctgctgttgctgtgattgttgatcctgcggttgttgcaattgcaattgttcctgaagatagtgaagagcagcaactccattctgacgtattgtattgaagttaatgttattggtgttcgacgtgttaatgttattattgcttccatttggacttatattgtgagcagcaacattgcccaggcgttgttgttgtgtttgttgttgatggtattgctggtggtaaagtagcatgttgttgtcgttgccattaccattgccaatactattattggagctactggtgaagcccaacgcctgctgctgatgttgtagtagttgctgctgctgttgcggtgtcaattataagtaaggataatggtacttcctacggtacaatccgtcaagcaaatcggcaaagttttcgcctagattgataaaaggtgcgaaaacaaaaaaaaaaaaggttaaaaaaatttattagtataatgtttcaatagtgttttaagctatcatgcgtctataaaaacaagtatattagaaaaaaaaaaaacctaatatataactatcccttcattctggtagagccctgatttaactagcctaggtgagagagattaattaggtttagtattttttttttagagttttgtttgccttcttgatttagatggtgttgggttagtgtttattgttgtttgttttcttgtatttttgttacttttggtttactttagggattttgtagttttaattcaagctgaagttttgtaattgcgttatatttatttgtttttttttgattacaaaggatttcccactcgataagacacacgatttaagggttttcgtaattttcattcaacgtgccatgttttctgtttccatttcagtttggtggaactattgggatgggacagggacgtggattggtgttatcaaaataaattgatgactgatctgttgatggtctatttatgtgtgttgttatgttgtgactgatctgtgggcgtaagtcaaacactcacatacaaatattcaagtgcgttcaaagaacattagcaagcaaaatatgtcttatatagttgttgataaatatctagttggagatttaaataggtatttggtttagtttaactttttttagcgagaaacatttacgaactggataactttgatgaagtaacaggagttcgcagagcagacaaagcagaccgttaggggattttggattaaacgataatctaatgaaaaa

SEQ ID NO: 34835 - DNA, 960 bp, DROSOPHILA
atgctactttaccaccagcaataccatcaacaacaaacacaacaacaacgcctgggcaatgttgctgctcacaatataagtccaaatggaagcaataataacattaacacgtcgaacaccaataacattaacttcaatacaatacgtcagaatggagttgctgctcttcactatcttcaggaacaattgcaattgcaacaaccgcaggatcaacaatcacagcaacagcagccattgactatgccatcttcgccgccgtttcaacaacaatcacgccaatcacaccacaatggcagcagtagcactctgggcaatcagttgcttgccataagcaacaacaatagcttcaataataattccaatcaatccaatagttttactggcaattacagcaacggtagcgcttttaccagtaacggtgccattagcggtagcaactttcccaacaatcccacaagcagtgggaacttcaccaacaactcaacaaacagcaaccccacaaacagtggacactttgccagtaatttggctggcagcagcaactttaccaaccatctttctggcagcaacaattacaccaacagcaacggaaatttcaccagtaatgcagctagcagtagcaacttctccaacaatgcagctagcagcaccaattacagcaagaactgcagcagcggcgtcgttggaaacagcgatcccgacagttgtagcagaaaacacaccaccaacactaataatcaccacacttcgccgcagcacgacttcagttttaatatgtcaacgactgaacaagaactgcatcagcagacactcaagttgcagcagctgcatctgaacaacagcttcaacaacaccacagcagctgcaacaacttcagcggctgcatcaacttccacttcaacaacggcaacggcatcatccacaaactccgcaaatgtcggatttttatggcgtacataa

SEQ ID NO: 34836 - protein, 319 aa, DROSOPHILA
MLLYHQQYHQQQTQQQRLGNVAAHNISPNGSNNNINTSNTNNINFNTIRQNGVAALHYLQEQLQLQQPQDQQSQQQQPLTMPSSPPFQQQSRQSHHNGSSSTLGNQLLAISNNNSFNNNSNQSNSFTGNYSNGSAFTSNGAISGSNFPNNPTSSGNFTNNSTNSNPTNSGHFASNLAGSSNFTNHLSGSNNYTNSNGNFTSNAASSSNFSNNAASSTNYSKNCSSGVVGNSDPDSCSRKHTTNTNNHHTSPQHDFSFNMSTTEQELHQQTLKLQQLHLNNSFNNTTAAATTSAAASTSTSTTATASSTNSANVGFLWRT

SEQ ID NO: 34837 - DNA, 3955 bp, DROSOPHILA
aagaatgctattcagaccagaagtgcagagtcagcataattagcatgcgcgactgctcgatctttatgtccacatgactctcttagacagcggcgctctcgctgccaaagttaagtacataagagcaaagcaacgtctctgccgacggcctctctgccggcgcagacggattgcatttggctagcttggactcttctagaccaagtacaaggcagtcgtaaaggagtcgtcaaagagccttcaacatgtcctaattgaatattaatgagtcttaacagaagttacaattttactgatatcatactgaatctctatttcaataaaagtaatataaagaacacaaaaatgcattacaattattacacctgtccgtgtgtttcctgcatttccacgagatttaattgctcagccctcgaagggaatgtggatgtgtgcgcgaatctgaaggaattgcggtcggggatctcaatgtggagcaccaaaaagccccaaccagcagaggcattaaaattgtattgttatttgctttcacttgcgctccgctgccttcgctcggcaggcgatttaattgtctggcaaatcattaaaaaaaaaaaagaagtcccaggatcgagataaaagggcgggaaagtgactacaactaaatgctgtatttaccagctagtgtgggcgtggccctcgagggggcgatgccattaatgaacgcttcgaatggcgcacattacgcattagtatttcgattcaccccttggacttggctggcgggattactacatgcgaagctggaggggattggcagtgcgaacagatgtctgcatatgttaaccagttcatttaactgaagtgcgactaagctgtgcattgcgctgctcgagcactaagtgaattaatttgcctattcagttaagtcgaaatgaaagagaaataactttcaaatgtagattttctctctctctaatttccatttgattttcttacagcggatatctttttgcataaattacatacatttcgaaccactgtgcggctcctggcgacgcacaaaagtatgcagcacaagttgcggacactttgagctcgatggatgttcgattttaattgcattcgggctgactgcggaggagggggggtgggggaggagtgttggattggtcggtgggtggttggtgacgtgccaaatgaaaggcaagcaaatgacgtacatacatacccttggcataaatgttgggattataggccgcaaattgacacgtcggcatattgagattgtgcaccatgcccatcgacatgcgcgacacggaggagcgctgaaaaagatgtgcataaatgaaatgcattcaatatgtaaaagttaaggcttttaagttctattaaagtaagctgaaggccttaacagccatttgcatttgtccttaatttcaaattaaagcatactattaaacacctttcaaaagtcattctcgctcacctggtgcgtggtaacagcatccaaatcgaccagcggacaggaactgcgatgctgctgctggaacttgggctgatacggctccagcatccggatcttgccccatcgattgaagaaaagcataatggcgcccacccagaggaccaaaaccaggcccacaatcaatacctcctcggtgcgcacaatgatcttgggtcctgcaaaataacgagcacatgctcggtttgtttatttgtacatcattttcaatgtaagcgcagatagcttctcgcgttcgccataaacattatggatttgttcggattgcaaactggtcgcacgtaccgcacgtaaataactcaagagtcaggctcgaattcaattatcgtcgacgtgaaatctgcgccgataaacaaatggattgcgactgcgattggtactggaattgggattttggcattgggatttattaagcaaccgaatcggcgactttagtctggctaaatccaccgaaggggatttatttccaggtgtttgaagttgcgcgagtgtcatgaaaattcaatatttgcgaggggaaaatatatataagtcctcggcatacaacgcttgcatgtgtcgcatatcctttgaaaattattattccgcgtatggaaacacctctaagtcgggcctaatctatgcacatttggaattggttattaccaaaattaggattttcttaatgtaatcagggtaagaatagagtattcaatagcacatgtaataagtaaggaagggatgcatatttccaaattttttgatagccaaaaagcgtggtagtattaccgaactagttttttaactcagccaattaaagtttggcattggtttttgatgctgaaacttttatgatatgccgttcaaatactacaactttttattgcgttgcatatatgatgcgatggtatgttgagtacgctttaaactttaatgtgttaaaatgattttcgtccaatcaagttctttaatgaggaaggaagtgaggaatgagtgagacatacctgtttccaccgtggtggcattggaggctcctgttgtggcacctgttgtgaatccatcgtccacctcctgactccccagctcacccaaataatcatcgctgccattcgaggacgccgatgacgaggagggcggcgaaatgggtgcggtttgctcgacctccaccaggaaattggtgccccgccagccggagccccattctgcggcgattcaataacaatttattgaatcagattcgaaactgatcgttgcagggggtaactcaccttctgaaagactcgctgctgtggttacctcttcggcgaagacctccagacgcacaactgcaattagaagccaaataatgccataaatgactatctttttatatttaattcaattatccttaacttattcgcatttgcacagatttcgccatgcgcaaactttaaagaaaatcaaagaagtaacttgagaccagcaagaagcataccaaagtcaacttgagtttgtggaaagtggcaacttggaaaatattatcccacgttcggaaaagcggacaccacccaccacccaccaccaaacgcccggccaccgtcttcaagaaaatgcaataaacactctgcaaactgatttgatggccaaggaattatgccaagtcgtgcacttcaaaattccctccataatgcaattgtggagcacttaaaggatcgtatatggccatgcttatccccagatgattgcgcccaaaggactaaagcgagtggtgcgtttgcgtgagttacgttcgtgtgggtggtgtcaaggatagaaagttttccagacgctgacgtcggtgaaagttcgaccaaagtgctgcaactgcatttctcactcagccagctcatgcaaatgtgggtggtcaggagctgggatggtcttcttctggctgggatggcagcactggtctgggcatccacatattccactcgcacccaactttctatagttatttggtgcattacaagttggcgtacaaaacattggaacattttgttggagcgaatggccttgacgttgatgcgtgtgttctcgggtcttccaatgataaatgtacccagatgggtccgggctcaaaatggaagccagaagcagcccaaggaccgcaacaaccacagagaccatcacttggccggcgaacaggtgggattcgcaaacaccactcgaaatcctcgtcaaagtgctaatgacacggaagaaaatgtagctaatagtttggctataaaatataattgatgagatacaaggaagtatcctaaaaatgacgtttataagaagatgaactttcgttttgcaagctgcataaaattaattaaaaatgaaatgacttcataagctctataagtagtttctcgattatttgccagtgtagccagccagagtagaatgtattcaagaatattcagggcaatgggtatggcaaatgaccttgaaagtgtttagcgcccagct

SEQ ID NO: 34838 - DNA, 672 bp, DROSOPHILA
atgcttcttgctgttgtgcgtctggaggtcttcgccgaagaggtaaccacagcagcgagtctttcagaagaatggggctccggctggcggggcaccaatttcctggtggaggtcgagcaaaccgcacccatttcgccgccctcctcgtcatcggcgtcctcgaatggcagcgatgattatttgggtgagctggggagtcaggaggtggacgatggattcacaacaggtgccacaacaggagcctccaatgccaccacggtggaaacaggacccaagatcattgtgcgcaccgaggaggtattgattgtgggcctggttttggtcctctgggtgggcgccattatgcttttcttcaatcgatggggcaagatccggatgctggagccgtatcagcccaagttccagcagcagcatcgcagttcctgtccgctggtcgatttggatgctgttaccacgcaccagcgctcctccgtgtcgcgcatgtcgatgggcatggtgcacaatctcaatatgccgacgtgtcaatttgcggcctataatcccaacatttatgccaaggtcagcccgaatgcaattaaaatcgaacatccatcgagctcaaagtgtccgcaacttgtgctgcatacttttgtgcgtcgccaggagccgcacagtggttcgaaatgtatgtaa

SEQ ID NO: 34839 - protein, 223 aa, DROSOPHILA
MLLAVVRLEVFAEEVTTAASLSEEWGSGWRGTNFLVEVEQTAPISPPSSSSASSNGSDDYLGELGSQEVDDGFTTGATTGASNATTVETGPKIIVRTEEVLIVGLVLVLWVGAIMLFFNRWGKIRMLEPYQPKFQQQHRSSCPLVDLDAVTTHQRSSVSRMSMGMVHNLNMPTCQFAAYNPNIYAKVSPNAIKIEHPSSSKCPQLVLHTFVRRQEPHSGSKCM

SEQ ID NO: 34840 - DNA, 2642 bp, DROSOPHILA
gctcatctacaccagcacacacacacacacacgcagagacagagggagaattgatgaaggcagctgctgacatgcaaaggctgattgacacacaaagcgagcattctactgggatgcttaaccatggacctcgaacctcgaccctttggcatcacccaatctcctgcccctctgccacgccccatatccaagtgcagagcaaaaaatcatagggtagttctcaatgttgtaaccacatttgttgaagctattctaacttagcagtttgatttaatagtacttaagaccatcgctcacacttactgtccgttatttttcactgtgcactttgctccctttatggctttgctgcaattcattaagaatttccttctgcgatgacagccaagacttaagtggctgtaccactgccagcgccttgaaggtggaggcgctccattgctccatggccatggcttcgccccatcagaactgcagctccttacagtgggcaattatgtctcgaggatgttgagacatatcctggccagcgagcagcgagcgacagcaaatgacaggccattaaatgcccgttgcctgctccgaccagcctcatcgttatggcgaccctcaagagttaacccatcgcaacccaagctctcttgcacgtgcaaggattgcaggggcaataaaatggaatcgcgactcttgcaaaaccccgaaatcgtggccaaatgttgcctcataaaactatgcaaaacaaggggattatggtcagggctaggggttaggattttatgaaggtcgcgcgggtagcgaataagacctgatccctattagggtcctgcccaccccgggtacctgatcctttcagattttcggtatatatgcccgccgctcgatggcaatcagcatcagttgtccaacaacagttacaccgctaacaacgttctccaaaacaatattatatatattaatatattacgaacttgtgactataccattctcaagaaatctcaaaatgggcagcacacattccgctgagaaggtaaagagcgtcgaggactcgaccagtcctgcaaatcctggcatcttctgcactcccctgcccggttttataagcaacatccagagactcgtcctccgcaaactgagcatctcggccagaaaacaaaagcgactaaacaagcgctccaagcatctcctgcgccccatgccacgctgctcgtccttcggatcctgcggcaccctactgacgcccaccaagaagtccgcatccaacatagccgatcgccgctacgcccaatggaagtgcagtttcgagcatctggcccaaaagcagccgcgtctccatgacatcagcgaggccatgaccggacagaccacaccacgcggcttcccctcccacacggatcccaagaggtgtctgatggttatggactccagttcgccggagtcaccgctctacgacatggtcggtgggcagaaagttcgccgccgcctgagtctgcgcagccacgcccttgtgcgacgcccatcagcccgccagaaggccgaacaggccaagctggacgcccagtttcagcgggatctgcgcgatctggaggattactacggtggattccactttgcccagcgccgcgagcgattggtgaaggtttaagataagataaaaagattaacatagagccatttgtatagccaatattgtgatagctcgtaagcccaaaaaaaagttctgaataaaattcatattgaaaatcaaactgaaaaaagtagcccactttattatttattcgtttattcatatttattagttaagtgtttattgtgttaccgtacaaacagtgataaatcgaaatacttgaagcagaccaaaaaaaaaaaaaatcatccattttgtgcggcaagtgacatgaattattcatttggccagcggaaagaccaacaggttaaatctgaaaaagtgcaattttaatggcaacgtgcttcgattgccaccgcaaacattttgccgcttagcacatttttcgattttcggtttttcacttttccccatgccaattagaggcggcatagttttcaacgccgcgtgttttccccagtatttttagcgaattaaattgttgcaagaaatctgaacgcataacgcaagctcataaggcacactcgatgcgaatcaaaaacgggggcagggtcagaaggggcgtggcacagagtgggggcaattaatcagttgccaactaacacataacaaaagcccccctccctaccaaaataagcaacataaaaaaaaaagttgcagcaaaaacagacaaaaggcagacagaaatgaaaaatgtgcaagtacttgaggcgaagggggcgggaaaatggtgagaggggagggggcgggaaaagcgctggtgccaagggaagctcttcgaggccttgtccgattttcttgcttatttgcttctcactgccactgagcacaaataatgaaagcccaccgataaatgaacatttaaaccaattcaaattcaatccgtagatttaaaaaatttctttccgtgtacgtattatttgtgtacttttgccagccgtgatatataattattttttctctactttttggcagctcactttcatcttcagccagccaatttgccacgctgcagatt

SEQ ID NO: 34841 - DNA, 642 bp, DROSOPHILA
atgggcagcacacattccgctgagaaggtaaagagcgtcgaggactcgaccagtcctgcaaatcctggcatcttctgcactcccctgcccggttttataagcaacatccagagactcgtcctccgcaaactgagcatctcggccagaaaacaaaagcgactaaacaagcgctccaagcatctcctgcgccccatgccacgctgctcgtccttcggatcctgcggcaccctactgacgcccaccaagaagtccgcatccaacatagccgatcgccgctacgcccaatggaagtgcagtttcgagcatctggcccaaaagcagccgcgtctccatgacatcagcgaggccatgaccggacagaccacaccacgcggcttcccctcccacacggatcccaagaggtgtctgatggttatggactccagttcgccggagtcaccgctctacgacatggtcggtgggcagaaagttcgccgccgcctgagtctgcgcagccacgcccttgtgcgacgcccatcagcccgccagaaggccgaacaggccaagctggacgcccagtttcagcgggatctgcgcgatctggaggattactacggtggattccactttgcccagcgccgcgagcgattggtgaaggtttaa

SEQ ID NO: 34842 - protein, 213 aa, DROSOPHILA
MGSTHSAEKVKSVEDSTSPANPGIFCTPLPGFISNIQRLVLRKLSISARKQKRLNKRSKHLLRPMPRCSSFGSCGTLLTPTKKSASNIADRRYAQWKCSFEHLAQKQPRLHDISEAMTGQTTPRGFPSHTDPKRCLMVMDSSSPESPLYDMVGGQKVRRRLSLRSHALVRRPSARQKAEQAKLDAQFQRDLRDLEDYYGGFHFAQRRERLVKV

SEQ ID NO: 34843 - DNA, 2759 bp, DROSOPHILA
cgcccagttgaaatttacataaagatcacgcacactaaaaatgtgccttttaattgtaaattagatttgttattccttgttattcgaatttctttggtcattcatcgcaaacgtttttcattgaagtgcgaaatacattttcaattttcattctccatattgcccgtgttgatttccatttgcatccagatgccaaattcgatttcttttggccttgagttatacgttgagtccaagaatggtagagtcgttccattgaggagttttcttccgaaatagatcgaagtcggtgcagctgcgtggtattcgaggttacgacttttctggtttttgattcggttggcaaaaggtccttcccgctgattcgagacttgtggccggcgtcaacggcgttccgaggactgcgccacggcgtttacacaacaattggccatggcaaggaccaaggatccggccaacacacaatggcccaaggacgccgaccaaaatgactgaccgaccatgatcggtatacatcggtcatatatctgcagccataactcatagtttcacaaataaaaaggctgataaaaccgaaaagagttatggccaggaaagtattttaaatatgaaggtataggatagtaagagtaagcactacgacagtccaaccttaactcgttggccagatcgaaagtgctcgaatcaaggacttttcaaacaggatcgcaggtactctcccaatcgcagtgtttttgaccaaattgccgggccataaagtatcgcgtattttcatgaaatcccgttcgcggattaggccagaaaatatctgaaaaactaatcaggtagccgcatgcggtacgggtgattccaggaactccgggatcctcctgcctctacctgctggacatatataagcccgccggtttatggccatgcagaacagtcgacaaggaattgtcaagcgagtaacatcataccagagtttactacactacaactttcaaacgaaaccgaaatcatgggttgttgtgcaagcaatctgaagctcaaggagctgagcagcctgaatagcagcatctatgtggcctccggcggatcggcaagtcgctcccagaagcgtttgtacagcagtcgcaacagcagcggagtgggcagcagcagcagcggtagcagcagcggtagcagcagctcctcatcgtccagtcgcagcatctggagccgctccagccagccgatttgcgatgatttcgcagagcaaccacaactggacaaatcctgcggttactacacctgcagcagcgccaattcatcgccgagaaagggccaggagaatgacgaggagatggagggagtgcttatgcgcacgcaggacatgagtgcatcatcccgagactctacacaatccgatcaaatggtgggcaatctggagtgggagatgcacatgatgcagcaggcgcagcgcattatgcccaagacctcgtcgccgatttgccaaagaagggataatgctcagatgcctccctcatcgtaccagaagtggagaaactatctgcaatccacgccagcgcacatgctgcacaatgtcacccacattccggaggcaattgccggccacttttgccccaccagctttccgggcttcagcgacctggaggagatggagagtgcggccaagaggttcaaggtggatttcgagaaggaaccactggaggagcccatgtacaccacctaccaattgctagccgggcacacgcacaccatatccacagatctgtgaggcgtgaagacccaaccaatcgcaccatctccgcctggttcggagtggttcggcgattggtgtagcccatcgatgtaatacccggcgaggactggcaacaggtgtgccagctgtcaaacagttgggcaattaataattacaaatccgctacgattgcattgcccagcaatggcaaatcgacctatacgattttacaaaaatacctattattttttttgactgtatatcatacaaactagacttaaggacaaggacaatcaacgatgtgtacattgttggataatcaaattgtgctcgcaaatatattttacaatctctaagctattgacttttcaatcaaactaattagatgcgggtcaaaggtcaggggccaattaaactgctggctggctacacggctagacggcatttctgagttttacagcaatttcccaaatatacatatttttaaaaaaaattgaaaattttttagatttttaatactgatatattataaccaaaaaaaggacgaattaatgtgcgaaatttatgcgtttttttattggttttttagttgtaatatttataaattaagacgcacagacaagaaatacaccgttttttgcagctaacaaccaaacctagcgatccatatcactttttaactaatttggtaaaaatatttttttgacaaatttttaataatttttaaggcatgattttttttcgaaaaatttaaaaaattttttgttttcagctgtgaatgacacatgatagaaaattaagccacgaactcaacgagatatgacattccaaattcactcttataaccaaagttgtgagtaaaacaatcattttttttagaaaaaaaatcagaataaattttttgatactggtataattactgataatttgctcatgaaaaagaaacatttcatttgcccaagtcttgtgtttgcacaactttcccaacccagcccattaactgattgcgggccacaaaatgttttaattggtcttt

SEQ ID NO: 34844 - DNA, 759 bp, DROSOPHILA
atgggttgttgtgcaagcaatctgaagctcaaggagctgagcagcctgaatagcagcatctatgtggcctccggcggatcggcaagtcgctcccagaagcgtttgtacagcagtcgcaacagcagcggagtgggcagcagcagcagcggtagcagcagcggtagcagcagctcctcatcgtccagtcgcagcatctggagccgctccagccagccgatttgcgatgatttcgcagagcaaccacaactggacaaatcctgcggttactacacctgcagcagcgccaattcatcgccgagaaagggccaggagaatgacgaggagatggagggagtgcttatgcgcacgcaggacatgagtgcatcatcccgagactctacacaatccgatcaaatggtgggcaatctggagtgggagatgcacatgatgcagcaggcgcagcgcattatgcccaagacctcgtcgccgatttgccaaagaagggataatgctcagatgcctccctcatcgtaccagaagtggagaaactatctgcaatccacgccagcgcacatgctgcacaatgtcacccacattccggaggcaattgccggccacttttgccccaccagctttccgggcttcagcgacctggaggagatggagagtgcggccaagaggttcaaggtggatttcgagaaggaaccactggaggagcccatgtacaccacctaccaattgctagccgggcacacgcacaccatatccacagatctgtga

SEQ ID NO: 34845 - protein, 252 aa, DROSOPHILA
MGCCASNLKLKELSSLNSSIYVASGGSASRSQKRLYSSRNSSGVGSSSSGSSSGSSSSSSSSRSIWSRSSQPICDDFAEQPQLDKSCGYYTCSSANSSPRKGQENDEEMEGVLMRTQDMSASSRDSTQSDQMVGNLEWEMHMMQQAQRIMPKTSSPICQRRDNAQMPPSSYQKWRNYLQSTPAHMLHNVTHIPEAIAGHFCPTSFPGFSDLEEMESAAKRFKVDFEKEPLEEPMYTTYQLLAGHTHTISTDL

SEQ ID NO: 34846 - DNA, 2186 bp, DROSOPHILA
agcgcgctgggcgtcaaggaagtattcgcacacagatctcgagacaaccgagcgccaatgcttttccaggaagacctcgctgaaatgcggatatatgggtatatgggtattacatcgtcttcacatttcacttataggtatggcttacccgccgctgtttacaataaacagactgtgtatcataattcgacctaaattgcttgctagtttaagctatgtttttttttcagggatgaatcattagcgatgacagcgtgaaggtgttctactaccatgctcccgaagcgcttcagtaactgttaaataatttcattaaattgaaattaagataggctgaaataaacgaacatttatttaaggggccttatacatagttaacttatgaatttatttactaacgttgtgttgtcatcacatcagctcatcactagctcactcgctcatctctaatcgaacagctgattgctgcgaaccggaacaaatggaaattgtatcgtgaggcaagtggagtttcccctttacttttggcaaataataaataaacaaaggaacaagcctaaacattttcaattaaaccatatacagaactaacgcacacatgtgacggaggcaatacacaaacacggcacctttgaatctcgccttaaaattggcgaaaccaacacggaattatataaccgccggctgaaaacacatgagtccgtacagcggatccgtgcgtcgtctgctggacagttggccaggaaagaagcgcttcggtgtctaccgcttcctgccgctcttctttttactgggcgccggcctggaattctccatgatcaattggacagtgggcgagaccaatttctgtgagactgctacgcttaaaaccttacttttatttactaatacggaatcttttccatgcagaccgcacttttaagcgccgccaggcgaagaactacgtggaagagcagcagcatctgcaggcgcgagccgcgaataacaccaactaagcaaaatgcccgccggagtttcctggggccagtacctgaaattcctcggctgtgccctggcatccatgatggccggatcgcaggctgttcacctttactataagcctctggaggacttgcgcgtctacatcgaacaggagcaacacagcacacaggtggatcccaccgcaaagccaccggaatctgcataacactgtgtactagacaagttattggtgactaaagctatttaagtgaatgcctgctgtttgttgaggaaagggttgttggcatagcaccttcatgtcctacgaagagcgttacctgttccagaacattcaaaagacgccacgtttccacttaatcagtctattttaaaatcttttccactaaggctagctaagactacttctcgtgcaccttccggtggtttttaagacacgtctgctgccggaaggcctgtccacaggtgtcgcaaatgtagggcttctcacccgtgtgtatgtactcatggtgccgcagggttttcctagaagcaaagctctccggacagtggtgacagggaaagggtttcagctttaagtggactgctctcacatgggcttcgagctcgaatcgcctggcaaatcttctgccgcagtgctcgcagggcaacttgtcgttcgagtgcatcagcatgtgctgcagcagcatgaacttcttggccatccggcgtccacagacctggcattcgtggggcaactcttcctgcacctcgtgctgctgcaaagtgtggtacttgagggtgtatcgtgaatggaactccttttgacaaatgtcgcagaaatggcgctctccggcgccgccctccctggcggccacctcgtcctccgtgggatgctttgtcttaaggtggtatttaagattcgccgactggttaaagctggctccgcactgctcgcagatgaatttcttcaaagcatcgcggtcacgcggactgtgcttcagccttttgtgcttctgcatggctatgcggctggtgtagattctctcgcagcctggctggtcgcagggatggcgtcgctccttgggggcatgcacctctcgaatgtgggtatacagaccgcccatgaaactgtaggccttctcgcactgatcgcattggaagggccttttgctgccctcgtgcaccttacggatgtgcgctgctagggtgatctggtgggcaaagct

SEQ ID NO: 34847 - DNA, 186 bp, DROSOPHILA
atgcccgccggagtttcctggggccagtacctgaaattcctcggctgtgccctggcatccatgatggccggatcgcaggctgttcacctttactataagcctctggaggacttgcgcgtctacatcgaacaggagcaacacagcacacaggtggatcccaccgcaaagccaccggaatctgcataa

SEQ ID NO: 34848 - protein, 61 aa, DROSOPHILA
MPAGVSWGQYLKFLGCALASMMAGSQAVHLYYKPLEDLRVYIEQEQHSTQVDPTAKPPESA

SEQ ID NO: 34849 - DNA, 2301 bp, DROSOPHILA
gccagtgggaagccattatcgagcatctcgtccagcagctcgtaaacgaccacatagttgtccttgatcacggactcggagcagtcgccgaaatagtcctggaaggtgtccaccacgcgatgcaggaactcgatgacaaagagcggcggcacctcctgcttgcaggcggcgaccaaagacaccgtgtccctttgcactgtaatcaggtagtagtggggcgtggctatcaccggcggcacatcctgcaacaaagagatatggtcagcatacaacccatacgtggcacgggcgactcacatatggagcagcgcgctgggcgtcaaggaagtattcgcacacagatctcgagacaaccgagcgccaatgcttttccaggaagacctcgctgaaatgcggatatatgggtatatgggtattacatcgtcttcacatttcacttataggtatggcttacccgccgctgtttacaataaacagactgtgtatcataattcgacctaaattgcttgctagtttaagctatgtttttttttcagggatgaatcattagcgatgacagcgtgaaggtgttctactaccatgctcccgaagcgcttcagtaactgttaaataatttcattaaattgaaattaagataggctgaaataaacgaacatttatttaaggggccttatacatagttaacttatgaatttatttactaacgttgtgttgtcatcacatcagctcatcactagctcactcgctcatctctaatcgaacagctgattgctgcgaaccggaacaaatggaaattgtatcgtgaggcaagtggagtttcccctttacttttggcaaataataaataaacaaaggaacaagcctaaacattttcaattaaaccatatacagaactaacgcacacatgtgacggaggcaatacacaaacacggcacctttgaatctcgccttaaaattggcgaaaccaacacggaattatataaccgccggctgaaaacacatgagtccgtacagcggatccgtgcgtcgtctgctggacagttggccaggaaagaagcgcttcggtgtctaccgcttcctgccgctcttctttttactgggcgccggcctggaattctccatgatcaattggacagtgggcgagaccaatttctgtgagactgctacgcttaaaaccttacttttatttactaatacggaatcttttccatgcagaccgcacttttaagcgccgccaggcgaagaactacgtggaagagcagcagcatctgcaggcgcgagccgcgaataacaccaactaagcaaaatgcccgccggagtttcctggggccagtacctgaaattcctcggctgtgccctggcatccatgatggccggatcgcaggctgttcacctttactataagcctctggaggacttgcgcgtctacatcgaacaggagcaacacagcacacaggtggatcccaccgcaaagccaccggaatctgcataacactgtgtactagacaagttattggtgactaaagctatttaagtgaatgcctgctgtttgttgaggaaagggttgttggcatagcaccttcatgtcctacgaagagcgttacctgttccagaacattcaaaagacgccacgtttccacttaatcagtctattttaaaatcttttccactaaggctagctaagactacttctcgtgcaccttccggtggtttttaagacacgtctgctgccggaaggcctgtccacaggtgtcgcaaatgtagggcttctcacccgtgtgtatgtactcatggtgccgcagggttttcctagaagcaaagctctccggacagtggtgacagggaaagggtttcagctttaagtggactgctctcacatgggcttcgagctcgaatcgcctggcaaatcttctgccgcagtgctcgcagggcaacttgtcgttcgagtgcatcagcatgtgctgcagcagcatgaacttcttggccatccggcgtccacagacctggcattcgtggggcaactcttcctgcacctcgtgctgctgcaaagtgtggtacttgagggtgtatcgtgaatggaactccttttgacaaatgtcgcagaaatggcgctctccggcgccgccctccctggcggccacctcgtcctccgtgggatgctttgtcttaaggtggtatttaagattcgccgactggttaaagctggctccgcactgctcgcagatgaatttcttcaaagcatcgcggtcacgcggactgtgcttcagccttttgtgcttctgcatggctatgcggctggtg

SEQ ID NO: 34850 - DNA, 240 bp, DROSOPHILA
atgagtccgtacagcggatccgtgcgtcgtctgctggacagttggccaggaaagaagcgcttcggtgtctaccgcttcctgccgctcttctttttactgggcgccggcctggaattctccatgatcaattggacagtgggcgagaccaatttctaccgcacttttaagcgccgccaggcgaagaactacgtggaagagcagcagcatctgcaggcgcgagccgcgaataacaccaactaa

SEQ ID NO: 34851 - protein, 79 aa, DROSOPHILA
MSPYSGSVRRLLDSWPGKKRFGVYRFLPLFFLLGAGLEFSMINWTVGETNFYRTFKRRQAKNYVEEQQHLQARAANNTN

SEQ ID NO: 34852 - DNA, 2450 bp, DROSOPHILA
aaaggcaaagtatctttgtatctgtatctgtgcactgggactctgtgtgagcccgtttgtttgttttttatgctctacgcgtcacgtactaagtgccttttacctgttgctggctgcacagcaagtttcaggtggggtcaatgccgataaccgatgggcccggcgatagcgattgccgattagcgatagccagggcgccagaaaaggatatctgggtataccatatctagccctagaggctctagccctgttacctggcaacccgtttaaccaacaacaaataagcgaagtgagagagcggagtcagcgtcagtgatggcaaaagtattttaatgaggtttaaaatagacaaaactgtaagccatgtgcttattatattaagtcgtatctgaattggttctttctttatcagctgtgttctgaaaatcccaataatatacatagacttacttggcgccggacttcaagtccagacctttggggtttattagccttactttattttaaaggctaacatagttggaattcggaattcaatatactctcaaaataactaaaaaaaatagtaaacaataatctgacacactggttttgacttcactgacccttattgacctctggaaatacctctggatgaagtgcaaattgtgttgatgattttaagtttcgatatactgatagtatttcatagttaagcttgattgtttgggtcagcacttcgtctaaaaataaccacaaattgattggctgacctatgctgacctctgaaactggctagatcttgctaaagctaaacttggcttgaaaatagccgaaatatttcgccgctcaagcctcctctctcgctctcctcgctctttttttgttggccagcgaaacgaacgggaacggagtcgcagcggcgtttcagttccagtataaacttggcatttgctgacgacgctgactgtttgatttacctagagtagagaatcgtaaaacgtactgctgtgacgtaatcatgtggccgcccaagcacgcccacattggctggctttcaagccttgctctcgtcgttctcctgatgagcctgcaaatggtaatggtatcggggatcgagtgctacgtgtgcgacacgagcgatacggagcatccgttccagtgcggcgagtggttcgagcgatacgacataccggacattcaaccccaaaattgttccagtgtccatggcgcccagttctgtgtgaagcacgtgggtcgttttgagggtggaatcggggcgaagaggttctgcagttcgaaggacatgggcaactattgtgactatgtgcgaaacaagggcgatcgcatggactatcgcagctgcatttacacttgtgatacggacggttgcaatgccgctggaaggctggaactggaatggggcgtggcagcggccctcctcactctcacatggctcttacggcactgacagcatcgggcggatagatataagtgacgaaagagctgcatcgctacattaattttttttcgttaattataagttgtaacaaagtaactgacacacaaaacagacactctagtataggtaaaaacgaaaaccaaaaacaaaaatatataaacaaatacggagaaaaaaaccaatattttgtttttctatttgcgggatccgaaaccggatggaaacggatcgacaactcaatggggaacggttggcagtggaacagcaggtaaatgccgatgaaattcgctctcacgaatctcctctctctttgagctacgcttgcgcaattcgagagagtgaacataaaaggtttttattttattgaagaaaaccatgcataccctagaaaagagcttgatttaatcagattttagaaacatttaatataatggcttcattttgaatgcttctcaattattttaacatatagacgctaatatttttctgggctaaagagaagtgtcatcaaagtatttaaaagccacgaatctccgtaaaattgtttaattgctcacacgccgagaatggaaatgcccccggagcacttctaccagacccataaagaacaccttgagtcggccgacggtgacacagtttggttttagcagaattcccagggcgatgcgaagattgcctttttaaaagccgacgacgatctggtgacctccgatcgaacggcgaacgcaatcaatcggaattggatttgacattcctccatttggcaattgaacgagatcatttaagccagctcaatttgcggctgattgattaagctcaaagagagcgcaacctgaggcagaaaaaacatctactcccgctaaaagacgggcggacagctcaacggacagacagacggacggacagttgcgtaattgcttaaattgaaagcgccttgaggcgctatcattgggcatgcgacactaattcaagctggccaccacgatctcggtgacagccacgcccataa

SEQ ID NO: 34853 - DNA, 450 bp, DROSOPHILA
atgtggccgcccaagcacgcccacattggctggctttcaagccttgctctcgtcgttctcctgatgagcctgcaaatggtaatggtatcggggatcgagtgctacgtgtgcgacacgagcgatacggagcatccgttccagtgcggcgagtggttcgagcgatacgacataccggacattcaaccccaaaattgttccagtgtccatggcgcccagttctgtgtgaagcacgtgggtcgttttgagggtggaatcggggcgaagaggttctgcagttcgaaggacatgggcaactattgtgactatgtgcgaaacaagggcgatcgcatggactatcgcagctgcatttacacttgtgatacggacggttgcaatgccgctggaaggctggaactggaatggggcgtggcagcggccctcctcactctcacatggctcttacggcactga

SEQ ID NO: 34854 - protein, 149 aa, DROSOPHILA
MWPPKHAHIGWLSSLALVVLLMSLQMVMVSGIECYVCDTSDTEHPFQCGEWFERYDIPDIQPQNCSSVHGAQFCVKHVGRFEGGIGAKRFCSSKDMGNYCDYVRNKGDRMDYRSCIYTCDTDGCNAAGRLELEWGVAAALLTLTWLLRH

SEQ ID NO: 34855 - DNA, 3193 bp, DROSOPHILA
ttttagttgtaacttcgcaaaattaagactcacggatacgaaacatactgttttttgcagctgacaacccaacctaaccgacccattaccttttttagatgatttggttaaaataatttttttcgaaattttcacttttttataaggcatcacgttttttttcgaaaaatcgcgaaaattaaaaatttttagctgggaatgccactggataggaaattaagctacgaatccaacaaggtatggcattccacatttgaactttcattacaaaagttgtgatagaaattccgatatttctttactaaaaattaagactagttttttttggtgaataattggcgagaccaagaaaaaaaaacacgtcgctcaagttttggaactcgcctggtaatttaaaccgaaaaatctcacaatttaccttaccaaatgcgcacttttgtgaaaaatgggaaaataaagttccgatctggaaggcaggacactttccgttttttaataataattttcaaaatagtgtacaaaacaatggactcttttacggaaaaattataaaattatatatttttggtacatcaaaataattcagaaagctaaagaaccgaattttatgtgtaaaagtattcatgaaaagataaaaaagaatttcgtttaatcattttgacgttgtcaaatttaaatgtacaatttcatttccgttcctccgcgttctgcaaccgacctatgacctccgaaaagacacattgggcgcaatcaaatactttgcttctatagacaaggcatccgcatccacatacatccatatagccagtgtcggatggtttggcagcaagcgggggattgattttgcaaattgattggtttttgaggctgtcacagctggacgtctggcagtcaattagttatgggcaattaaatgaaccgaagtggaattttactcaaccctcgtgacctggaagagatgcaaccgcaacttaaatagtttttgttttttttttttgacctatcttatatttagtcataaaaacttcttgacaaaattataaaaggttacattgcgctgttagacttcatttttaattccaaaatactaaaactgtcatgattgtaattaataaaataaacaaacataaaacaataaaacgctatatcctagaatgcgcgtagcacactagacgaacacgagtttaaaatctagcagaatattccgttactcaatgtacaacaaatccatcgttgtagaattataagttattttggtatccaacttcaaaacctgttgacttaaactttcagttaaaataagttaagtaatggtagaaaaaaaaaaatagatagctaattgctaatgctagactgagttattgatttcgctttcgatggccactcgaattttgtgggttgtctgcttaaatccctagaccttgcgatgctcttgggcgtattgtaaagctccggcgagaatgcttcgctctaaacggcgatacaggaagagcatgagctcgatctcctggccatccttgagttccagctccttcacttcgtcggcctcatgcatttccttattaaagacggccagaagcagcttcaacctgtcctccaggaactgccacgttcgtgtctcgtgatccgtctccagggcgcagtcgatgtgcagcaggtccccggcccggtccaagtcgctgcaccagtgatccaactgctcggcgctcatcttgaaaacccgaacgaatgccagcaactccttggaaatgaaatccggcgcaggcagcacacgcagctctgcggtgtgccggatgttcagcttgtccagaatgcttgccctcttcgcagcaagagcgtccgtgagactcaggcctacacgaatattaacatagtccttggtgttgttagggtctacgaaactataaagtaaatgatgaatataagataagatgataagatgtaagatgcttacccattgtgcactagaagatcagtattcgaccgatcgccatagtagatgaaaaactgttctccagtgttaacagcttcctgagcggtgcattccagttgcctggacacggtggcatagaaggaggttatcttgcccggcctatggttcgccatatcccagtacggaatcaaagccgagatcaattttggcccgtcctctgattcttgtttttcgctgggcaccaaattctgccgggtcatcactgtggaaacggcccatctgaaagatacaatgtaaggtgctatgaaaaaaactgttaaaaaaaacctttaaatattataattatttttgtctcccaaactatagagcagagtaccatttggtcgacttggttccaagcatttcttttcccccgtttttttttttttggctatgtttggcttcttttttcgctttactgcggtttctgctgcttcggccacaaagaaaagtttttcatttaattgtgcataaatttttcaatttaattatgaaaagcagcaacttgtttgaagtggtttggggtgtgagtagccactcactttgttagaaatcaccatggacaagatctagaaaagctattgcagtaagttttcaccctttttccctctcttcaccatatttatttctgggcagcagtggaaagaagcagagaagttgtaaactttttctcgaagcctttgtattggctgttatgtcttaccaaccagcctctttacagaagcggcagggtatttttattaaaagtaataagttatcaggtggcagtgctgccagtgttggaaaggctcgagcgagtgcggccctttgtggcgtctgtacctagaaaaaagttaatcagcattcaagggtctgctgctttactttctacctttctactttcctaatttcctagttaatcggataactgaacttgaatgcgccattaagttatttagtatggcaagctttttcctttgtcgacatatatacattttcagtgatggctgcaccgggggcaattgtacagttttccattttgtatccgtaagaggtttatgactttaagtgagaaacacgcattgtgttcaactaaagacgagagaaatataaattatattgcgtgctagttttgattgacatttttgtgataatttcgtaactatatattctttgtagggaaaacggtgtttttttttgttaatgtatcctgacatttatcgatgaaaatcgactggctta

SEQ ID NO: 34856 - DNA, 1140 bp, DROSOPHILA
atgacccggcagaatttggtgcccagcgaaaaacaagaatcagaggacgggccaaaattgatctcggctttgattccgtactgggatatggcgaaccataggccgggcaagataacctccttctatgccaccgtgtccaggcaactggaatgcaccgctcaggaagctgttaacactggagaacagtttttcatctactatggcgatcggtcgaatactgatcttctagtgcacaatggtttcgtagaccctaacaacaccaaggactatgttaatattcgtgtaggcctgagtctcacggacgctcttgctgcgaagagggcaagcattctggacaagctgaacatccggcacaccgcagagctgcgtgtgctgcctgcgccggatttcatttccaaggagttgctggcattcgttcgggttttcaagatgagcgccgagcagttggatcactggtgcagcgacttggaccgggccggggacctgctgcacatcgactgcgccctggagacggatcacgagacacgaacgtggcagttcctggaggacaggttgaagctgcttctggccgtctttaataaggaaatgcatgaggccgacgaagtgaaggagctggaactcaaggatggccaggagatcgagctcatgctcttcctgtatcgccgtttagagcgaagcattctcgccggagctttacaatacgcccaagagcatcgcaaggtctagggatttaagcagacaacccacaaaattcgagtggccatcgaaagcgaaatcaataactcagtctagcattagcaattagctatctatttttttttttctaccattacttaacttattttaactgaaagtttaagtcaacaggttttgaagttggataccaaaataacttataattctacaacgatggatttgttgtacattgagtaacggaatattctgctagattttaaactcgtgttcgtctagtgtgctacgcgcattctaggatatagcgttttattgttttatgtttgtttattttattaattacaatcatgacagttttagtattttggaattaaaaatgaagtctaacagcgcaatgtaaccttttataattttgtcaagaagtttttatgactaaatataagatag

SEQ ID NO: 34857 - protein, 241 aa, DROSOPHILA
MTRQNLVPSEKQESEDGPKLISALIPYWDMANHRPGKITSFYATVSRQLECTAQEAVNTGEQFFIYYGDRSNTDLLVHNGFVDPNNTKDYVNIRVGLSLTDALAAKRASILDKLNIRHTAELRVLPAPDFISKELLAFVRVFKMSAEQLDHWCSDLDRAGDLLHIDCALETDHETRTWQFLEDRLKLLLAVFNKEMHEADEVKELELKDGQEIELMLFLYRRLERSILAGALQYAQEHRKV

SEQ ID NO: 34858 - DNA, 5875 bp, DROSOPHILA
ggaaatgctagaaacttagaacaaattgaaaatggtgcagaaaggaacaaaaaaaaagttaaagaaagctgactcgaaagagatgtcacagcaaatgacgtgagagaaatgcgtgtaatggtcggaggttgcagtctgggaatccattccataccatgccatactattcggaacgactcgattcgattttccggggcttatgcaacgattgtttcctgttctccattatttgtgcattgtttgcatgtttttgccagcaggatttcttgtatttcttttggcattgtaatgagttgtttccgtacaagttttccataaatagtttgccttctggcttttggttcaattatttcggcatctgtctggccaatcgatggggtcaaaaaggtgaaaccgcaaaggggatgtcataatgcattagtctgattaaatgacaaggatgtccatcgcctttgccggcagttaatcaaaggcaaacataccgagcactcaaatacatatattattcatggcctaatatatatgcatgcattccgcctgttcgtaatcaatcctgtatcctgtatgcatctttatctggtcttccgttcgcttctcttgccagtcgaaaattgaaaattaattacataagctcatgccagctgcagagacacgccccttttggcccacctccctggcaatacagtatttctcataattatgtgcaaaggttttttgaataaaaatatatatatacaattatcgacaaattttctgaatagaaatataaacgtacaaatgaaatctatccgcattttagtatttgaataatacacataaaaattggagcgtcagcatcatttagtcttctataacaaaaacatccaactatgaccttaatgttgatgactttcgtttccacaaatgtttcttgttttcgaaaggaaatggcaaaggagtgcagcagatggctttttctccaacaaacaacagacatttgattaaatgtcaataattcgaaatgagcgaaggttttcacaagcatgttcgggaaactgattatgaaggaaagccaatgaagagcgatccaaatatttattgattccatcaatcagatggcacgggctcatccatcacaccgtttatttatgtggtttaagttgagaaagtgtttttgtacacttagagaactgatatggggacttccaatagcaatatacttaatacattcatttaggaaaacaatcgtttgattattaacttctttttttcttacagctgctgcagacaggtgtttccctgattgtggaggattcaaagggctcgggcgatggtagcggaagtggaattggtgccacatccaaccgtcgtcgtactgctcagttggcaactcgtaagcggaaacgacgcccccaacttccgctggccacaatgggggccacggaggaggattctggtccagaaccgacatcagcttactggcgcggtcatgtggaggatgatgcagacgcactgcgaagaaggaatcaacccttggtgagggaacccatggccgctctcgaaagagatcgcgaacgggagaaacagcgcaagcgagtagagcccacggatgccagtccgcagggcagtagtcccagcaaagcctatcgtcgcccatatggccaggccaaaaaggaacccattgtcgatgctggcgctgcgacacctaccaaaacttctgtggatttgaagaacatcctgaagaattccggaggtctgagtctcagtgaaatcctgcagcagaaaaatctttcgttggacgatctgctcaagggtaaacagaatgctctgttggcactgcaaaccacagccgttgccccaccagcctccacgtattcctccccaggctcacgagcggatcccccgaaaaagctgtctaaccaacagaacaaacagggtgtgcggagattgcctgctgcgtataccacaactagcaccactggcaacgatgaggatgaatccgtgatagccaaaaacaaggccaaattccctaacgccctgcagcgccttaagctctttggcagctcttcgcgggagagcggcactacaagacgcattttgggtggagtcaatggtcacagtagcaccaccatggccaccagcaccactgcaagtgcaagcgccactagcaccaccacccgggtgccactctacaagaagcggcagcatcttcggtccaccctaaagccaccaggacttttcaagccgatcactagcagcaccactagcaccaccacagcaacggcagtgaccaccactcaggaagtggaaactagcaccgcttactcctactccactagcaccacggtggttaataacgtggaggaaagtcgtgaggaggagagggaaaactcggaggaaagcgaacgggaagatgagcaggatcaggaacaaagtcaggagaatcaggagaaccaggaggtggtggaacccgattccagtgaggcagagtctggagaaggcattccgcccaccgagacaccagaaccaccagctgctccttcctttgcgcccggaagtccgcgctatcgtctgcgaaattccagtgtgaaagagaatcaaaagcgattaaaggataactttatagggagcaataatggagagagtagtgaggaggtggatccggttgaggcttcacctagttctaccacatcagctacaccatcaaacaaaaacagcgaagaacttaattacggagaggacgagctggagaactttttcgacgaagtggagagtcacacgcatcacactcgcgtgccagcaccaccagcacttgcgcctgcaccaccagcaaggtcgcccactcctgcagcagcagcaccaccacctccaccaccaccaccctctccctcctatgaaccaccaccaccgtcctatgcaccaccaccttctttatcggcggcaaagccaccgcaattgaatgtcatagacgatgtggacgaccgcaccgatctgctggaactcattgaggatcggcggtcgggtaatcgactgtttaaggttctggagcagcgcaacatgaccctggaggagctgatcgagcaccgcaaacgcggctctagccaactgcatctgtccaccatcgtgaacggcggcgatgagcactcgcgtctgtatcccggccagaaggttctgctgcaggataacatggacattgttacggccttcgagaactttccgcactttaatctaatggatctgaagagcgtcaagcccgatgagatcaagaccgactcgcaaggctcaagctacttcacctccatcatcgatatcgagccaaatgacgaggtcaaaccgatgggaagtcgaggtattacggctttaaggttgcgccagcaacgccagcgattggcggaggccaggggcgtggcaggaagagggggcggggccgggaaagggggcagtggcaggaggggtgaaaggtcgggatgaggtcttttgctccttcgcgggcttccacatatagaaacattagctaacaacaactaaatatatattgaaagtacgagtagttggcataagcccctcaaaacaataaaatctaatcaaatagtttgcttaagttcaattagaaagtagaattgtattgtaatggcataaataattgttggttaaatggatttacataaatagccattaagatccctgcctgccagctgccctatgattcttcctaacttgaccctttacttttttgaattgccttcaaagactaaataacttcctccgtttctcgccccgctcgctctgtcttaatctcgttcagcttcctgtcgctcaaatgctttcctttcaggtcccgcctacgcacagacatcttcctcatcggcgaccattggagccggaactggaaccatttcgatcaattcgcgtggcgaaaagtcgctgggattcttcccgtcgtggaagacgctggcactcgcctccttggccacggccaccgaggagaggaatccttatttcctgccaccgcctcgactgctgctcgacggaagttcccaggaggcggactccaacgttgattcggagcccaccagcattgacattgatctaagcgtgagtccttatggcggcaactcctcctcgatggcggataacagtcggctgccgccgaataacgatgtgatcgatgagatcgagaacgaggtggcgcgggcacacgatctcctggatctggagctctccggtccgggattccatcgcagtcctgctgcagcggcggccacatccgccgtatcgcagcagcatttgagcagcttgtacgccagcatgccatccgggatcaagtccgcgattgtggccagcacggcgatagtggtcaccgcgttggccaccttcctggtcatcttcgtcgtgtgccgatggaaacagcagcgcaggagaaagagcagctacctgcgcacctacaatgcgatgaagagcaagctgccgcagatggcgcagccatcgcgtcgttcctcgatgcgccagcacatggaagagctggtcattggatccagttcgggaacaggggctggatctggatcaggatcgggatctaagacgggcatagccagcatctccacttcggtggcctgttgcacgcccgttcatcagctgcagcggcagagttcaatgctctttgcccgcgatggatccgccacgatgagcaccgccacctcgctgaccacgaatagcaccacgaataccaccattacaacgggggcgcagccacctgctccaccggaggcgctgagtgggcgtggcctggccatttcgctgagaagtgctcaacagaagctgaacacaatggatcccagttcgccggaggtgcaggaatatctattcgacacactgcgcaaatccttcgacaattaggcaataggcagtaggctcctctagtaacaatagaccgttgtttaggccaagttttatataaatgtacacttaacacacacacacacacaatgacatccccccaacacacacaagcatacacactctaacgcgaaggagcaaaagttagtcgattaattagtttaagcaggtaggaggtggaatttttttgaactcgattagaggaacattctgtgagagaaagtaaaactaacaaaaaaccaacctagaaaacacatttagacagtgcgtggcatggccataaggcgctttgtaagaaaaggttcaaaaagattgtgcagacatacagtttaaaaagaatagtgttcatttttaaatattttcatgacagattggaatgtaaactgtatagtccactttatgttatttatttttactttatttattttctgattcatttgtatcgttgtagaccgcaaaacctagttcaatccgccctacgtttatggcgcgcactgttgctagtctctaagctcggcaaactatcgtttccaactatctagacctaatgtacgattatgatccatcaactaacgcgactctatcaactaaatcataggacacggcattcaaatgggtttcttagcacgagataaagacgaaaactaacttaaatacagaacaacagaacaggatcttagccaaacaaggtacagttgtgttcagacactttcccaaaaaaaggcccaaatcgaataaatattgaaattcgagaaagcaaaataaaaccatttatgaggacaataaatattaatgaggaaattacgaaaacaaaataaataaaaaccaaaagaaaatgaagaaaactgtgttcgatacgatttaactgaagcaaacttctttctggcactgactaaaataccaaaatttaattgaatttagatcaaggcaaggcataaatgggcgctatgtgggcgtggtcattagcacaacaataccaacagcaacaacaacaacaaca

SEQ ID NO: 34859 - DNA, 3261 bp, DROSOPHILA
atgagcgaaggttttcacaagcatctgctgcagacaggtgtttccctgattgtggaggattcaaagggctcgggcgatggtagcggaagtggaattggtgccacatccaaccgtcgtcgtactgctcagttggcaactcgtaagcggaaacgacgcccccaacttccgctggccacaatgggggccacggaggaggattctggtccagaaccgacatcagcttactggcgcggtcatgtggaggatgatgcagacgcactgcgaagaaggaatcaacccttggtgagggaacccatggccgctctcgaaagagatcgcgaacgggagaaacagcgcaagcgagtagagcccacggatgccagtccgcagggcagtagtcccagcaaagcctatcgtcgcccatatggccaggccaaaaaggaacccattgtcgatgctggcgctgcgacacctaccaaaacttctgtggatttgaagaacatcctgaagaattccggaggtctgagtctcagtgaaatcctgcagcagaaaaatctttcgttggacgatctgctcaagggtaaacagaatgctctgttggcactgcaaaccacagccgttgccccaccagcctccacgtattcctccccaggctcacgagcggatcccccgaaaaagctgtctaaccaacagaacaaacagggtgtgcggagattgcctgctgcgtataccacaactagcaccactggcaacgatgaggatgaatccgtgatagccaaaaacaaggccaaattccctaacgccctgcagcgccttaagctctttggcagctcttcgcgggagagcggcactacaagacgcattttgggtggagtcaatggtcacagtagcaccaccatggccaccagcaccactgcaagtgcaagcgccactagcaccaccacccgggtgccactctacaagaagcggcagcatcttcggtccaccctaaagccaccaggacttttcaagccgatcactagcagcaccactagcaccaccacagcaacggcagtgaccaccactcaggaagtggaaactagcaccgcttactcctactccactagcaccacggtggttaataacgtggaggaaagtcgtgaggaggagagggaaaactcggaggaaagcgaacgggaagatgagcaggatcaggaacaaagtcaggagaatcaggagaaccaggaggtggtggaacccgattccagtgaggcagagtctggagaaggcattccgcccaccgagacaccagaaccaccagctgctccttcctttgcgcccggaagtccgcgctatcgtctgcgaaattccagtgtgaaagagaatcaaaagcgattaaaggataactttatagggagcaataatggagagagtagtgaggaggtggatccggttgaggcttcacctagttctaccacatcagctacaccatcaaacaaaaacagcgaagaacttaattacggagaggacgagctggagaactttttcgacgaagtggagagtcacacgcatcacactcgcgtgccagcaccaccagcacttgcgcctgcaccaccagcaaggtcgcccactcctgcagcagcagcaccaccacctccaccaccaccaccctctccctcctatgaaccaccaccaccgtcctatgcaccaccaccttctttatcggcggcaaagccaccgcaattgaatgtcatagacgatgtggacgaccgcaccgatctgctggaactcattgaggatcggcggtcgggtaatcgactgtttaaggttctggagcagcgcaacatgaccctggaggagctgatcgagcaccgcaaacgcggctctagccaactgcatctgtccaccatcgtgaacggcggcgatgagcactcgcgtctgtatcccggccagaaggttctgctgcaggataacatggacattgttacggccttcgagaactttccgcactttaatctaatggatctgaagagcgtcaagcccgatgagatcaagaccgactcgcaaggctcaagctacttcacctccatcatcgatatcgagccaaatgacgaggtcaaaccgatgggaagtcgaggtattacggctttaaggttgcgccagcaacgccagcgattggcggaggccaggggcgtggcaggaagagggggcggggccgggaaagggggcagtggcaggaggggtcccgcctacgcacagacatcttcctcatcggcgaccattggagccggaactggaaccatttcgatcaattcgcgtggcgaaaagtcgctgggattcttcccgtcgtggaagacgctggcactcgcctccttggccacggccaccgaggagaggaatccttatttcctgccaccgcctcgactgctgctcgacggaagttcccaggaggcggactccaacgttgattcggagcccaccagcattgacattgatctaagcgtgagtccttatggcggcaactcctcctcgatggcggataacagtcggctgccgccgaataacgatgtgatcgatgagatcgagaacgaggtggcgcgggcacacgatctcctggatctggagctctccggtccgggattccatcgcagtcctgctgcagcggcggccacatccgccgtatcgcagcagcatttgagcagcttgtacgccagcatgccatccgggatcaagtccgcgattgtggccagcacggcgatagtggtcaccgcgttggccaccttcctggtcatcttcgtcgtgtgccgatggaaacagcagcgcaggagaaagagcagctacctgcgcacctacaatgcgatgaagagcaagctgccgcagatggcgcagccatcgcgtcgttcctcgatgcgccagcacatggaagagctggtcattggatccagttcgggaacaggggctggatctggatcaggatcgggatctaagacgggcatagccagcatctccacttcggtggcctgttgcacgcccgttcatcagctgcagcggcagagttcaatgctctttgcccgcgatggatccgccacgatgagcaccgccacctcgctgaccacgaatagcaccacgaataccaccattacaacgggggcgcagccacctgctccaccggaggcgctgagtgggcgtggcctggccatttcgctgagaagtgctcaacagaagctgaacacaatggatcccagttcgccggaggtgcaggaatatctattcgacacactgcgcaaatccttcgacaattag

SEQ ID NO: 34860 - protein, 1086 aa, DROSOPHILA
MSEGFHKHLLQTGVSLIVEDSKGSGDGSGSGIGATSNRRRTAQLATRKRKRRPQLPLATMGATEEDSGPEPTSAYWRGHVEDDADALRRRNQPLVREPMAALERDREREKQRKRVEPTDASPQGSSPSKAYRRPYGQAKKEPIVDAGAATPTKTSVDLKNILKNSGGLSLSEILQQKNLSLDDLLKGKQNALLALQTTAVAPPASTYSSPGSRADPPKKLSNQQNKQGVRRLPAAYTTTSTTGNDEDESVIAKNKAKFPNALQRLKLFGSSSRESGTTRRILGGVNGHSSTTMATSTTASASATSTTTRVPLYKKRQHLRSTLKPPGLFKPITSSTTSTTTATAVTTTQEVETSTAYSYSTSTTVVNNVEESREEERENSEESEREDEQDQEQSQENQENQEVVEPDSSEAESGEGIPPTETPEPPAAPSFAPGSPRYRLRNSSVKENQKRLKDNFIGSNNGESSEEVDPVEASPSSTTSATPSNKNSEELNYGEDELENFFDEVESHTHHTRVPAPPALAPAPPARSPTPAAAAPPPPPPPPSPSYEPPPPSYAPPPSLSAAKPPQLNVIDDVDDRTDLLELIEDRRSGNRLFKVLEQRNMTLEELIEHRKRGSSQLHLSTIVNGGDEHSRLYPGQKVLLQDNMDIVTAFENFPHFNLMDLKSVKPDEIKTDSQGSSYFTSIIDIEPNDEVKPMGSRGITALRLRQQRQRLAEARGVAGRGGGAGKGGSGRRGPAYAQTSSSSATIGAGTGTISINSRGEKSLGFFPSWKTLALASLATATEERNPYFLPPPRLLLDGSSQEADSNVDSEPTSIDIDLSVSPYGGNSSSMADNSRLPPNNDVIDEIENEVARAHDLLDLELSGPGFHRSPAAAAATSAVSQQHLSSLYASMPSGIKSAIVASTAIVVTALATFLVIFVVCRWKQQRRRKSSYLRTYNAMKSKLPQMAQPSRRSSMRQHMEELVIGSSSGTGAGSGSGSGSKTGIASISTSVACCTPVHQLQRQSSMLFARDGSATMSTATSLTTNSTTNTTITTGAQPPAPPEALSGRGLAISLRSAQQKLNTMDPSSPEVQEYLFDTLRKSFDN

SEQ ID NO: 34861 - DNA, 2682 bp, DROSOPHILA
ccgcttttactccgcatttaattgaaaagtgaaattgatttcttcatcgcctttcttctgcgcaaaagaaagaaaatggttttgttttttcatttcgacttgtgcattcattatggaaaaatcatatttttgatttttgcacgcagacattttgccaattggcactcattatttgccattttcttttgttttaattgccgcgtttcttttcgttgtttcctatccatttcttttttttatgttcgctatgcgtttgcgtttgctgtggccatttccatttgtggccacaattattgccatggaatattaagatgatacatgccccaactactcgaaatggtgcttaaaaattccattaacttgcaccagcaacaaattcgtaggccaaattggagaaaaagtctagaagtcagttttttttttacattttttaaattttaaatgtattaagtgaagaatcttaacatcacagactggagaatattcttaagaattatctagaagaatatctaaaagttatttagttattatcaaatgttgagtttttgcctatgcatagtgctactttttttttgtgataagcattaaagcagctatttggcaaattcccctatattcgaaacactcacaaatgtatccctatatgtctgacacttaagaacaagctgtatttatttgcgctctactcactcgttcaacaaatgtttttcttccagtggggcaggagcaaaaacacttgcaactgttggaggcgaggaaatccaaatccagaaaccagagacaggaaaacacagcggcaaaccaaagtgttgcatacttggcacaaatagaatagcgtgagcgaagatacggatacgaatatacgtacagatacagatacatatccgccactccatagacgcagaggagcggcaacatgccgtcgtcagcaataaataaagcagcacgcagtgttgccaatgcgattcaattgctggcaatcgttctctattgctgctgcatggtgcatggacaacagcagcagcagcagcagcagcagctacaaccacaacagcagcaacacttgaagtaccagcaattgcaataccaaatgcagcagcaatatgaataccagcagcagcagcactaccagcagcagtttcagcagcagcagcagcaacagcagcaacagcagcagcagctgcaacagcaacagcagcagcagcaacatctgacacccacggcagcacttgcccagcagcagcagcagcatgaggagcaaatcgacttgctgtccactcaaccaactcaggtgagtgataatctggccatcacaatttataacaattattgtgggttgaaatgtgcggaggattggtgggtagttgctggttttttgcaccgaaaagtaaagccgacttcagctcattttgcaattaattgaacttcgagagccagccagagttgccacagctggcgcacatctgactgtctctctctttagctctctctctctctctctctctctcgctcgcttgctggcaaattgaatttgatttgagttcttcttccaaagcagcagctgcaactgcttaaaaaccaaatccccaattgccaacttttcgttttgccagcccggcttttccaggagattggcccacagccaggcagtgaacctcaagttcaataagctgattaactgaatgaaatcagcaatgaaaatgaaatagaaagtgcctccagctttttggcttggcttcttttgttccgttgaataaaccaaggcaaccgccgccatccaactgatgccctctcagtctcagtcccaggcgcccatttgccaaagttgccacccagaagtaaccacttctggcagccgcacttctggcaatttgcggctgttaaatgattaatttgtttttgatagactttaagttatatttaattagcagagcaagaaagaaagaaaggaaatcggaaaggaaagaaacttttacccaggaggaagcatgcatttgaaatgagttggcagctcagtttggaaggctgttgtggaacagtctggtcagattaagtttgccaatggataagggataattgataagcaaaatgaacaatactagccctttggctatatttgttaatttaatgcatctaagcttaggttattaacccatcataagccagtctggcaccgcagttagtgcagttttcagcttcgaagagcaacaaatattttgacacttttgcacacattcggaggcatttcaattggtgtgtctgtcgtactttttttttttttcaaagaccacttcttgtgggtggggtagggctgttctggctgcggcaagccggttaatttcacacacgatttgctgcttagtttttgcactttccacactcctgtcaactgacttctcacagccttgactgcttcttctcctcctcccaaacaccgcccccctcccgatttggacaaaaggcgcgccaagcttttgtcaggggcacgaccaccgactttccatcccaacgcaatcctgaaacaccaaccctcccctctttttcctccattccgctgaaactgaaacccagagctctaaaccaactttgcaggacaaaacgtggcagcgttttgtagattttaagtcccataaattttaagtgtcaatatataaaaccgcatatgtgcggggccaacaatgg

SEQ ID NO: 34862 - DNA, 360 bp, DROSOPHILA
atggtgcatggacaacagcagcagcagcagcagcagcagctacaaccacaacagcagcaacacttgaagtaccagcaattgcaataccaaatgcagcagcaatatgaataccagcagcagcagcactaccagcagcagtttcagcagcagcagcagcaacagcagcaacagcagcagcagctgcaacagcaacagcagcagcagcaacatctgacacccacggcagcacttgcccagcagcagcagcagcatgaggagcaaatcgacttgctgtccactcaaccaactcagcccggcttttccaggagattggcccacagccaggcagtgaacctcaagttcaataagctgattaactga

SEQ ID NO: 34863 - protein, 119 aa, DROSOPHILA
MVHGQQQQQQQQQLQPQQQQHLKYQQLQYQMQQQYEYQQQQHYQQQFQQQQQQQQQQQQQLQQQQQQQQHLTPTAALAQQQQQHEEQIDLLSTQPTQPGFSRRLAHSQAVNLKFNKLIN

SEQ ID NO: 34864 - DNA, 2706 bp, DROSOPHILA
cattgccggaaacggaatgccccaatgtctatatacaccaggcggtaggcacgcggttcatcatcctgcgacccaccagtgagtgccggcaccgctgtcgcaccttgtctctgcgacttacccagtcctttgtgcgtgagtatcgtttcgattgcttttgttccggggccaacacatcacatcagaaggttcactgtttaaggataccttagatataccttattttttgagttatttaacaaaggcagtagataagctcttggtcagctataactgacaaatattatagttttgttataatttcaattgagtatttgttgcagcaagttttcaatgaacctttcagtgtgggatttcttactaattccctatgcttttgcagtcagttacaattggttgtactggaaaccgatctctgcgccggatcccatctccgaaacgctgtccatcagcctaattggatcttactgctagaggatgcctattcagatggcagtccacgtttcccgcttccctcgctcctagctttaagcgcaatatacttatatatagatatatacacacacgacaaccaggacttttaccaagccaaaattattttacgaattttgccgctccattggataagcaagcaaaacaaaagtatggaaacaagggaagctagaagctgccttcgttttcaatttactagacccttaggccaccggctcaattcgtcgcccattgtaatcctcaagtcctagatcgtaagcctaagtttagttaaacagttaacagttagctcctggcagccgcgcttcatccttgtgttcgtcgttctaaccattttgcatttaaaactctcgactctacgttctgttcacaccaactagcgtagccaacggaaagcgattttgtaaatatccattgccagacttgagtttgaatttgtgtttttgcaacaactcacgaaataaaagatacctattatacactaatactattaaaagttcatttacatacatacattttttgtttgcctcacagaatgttttatggataacaaatgttggtaattctatgatacaagacagagtcccattttttgggtacagaactaatcctaacgaggatgtacaaaatgaatgattaatgattgagctttctgagagcatcgaaatacgagccgatcatgaggtccgcctcctggatacccagttccctggacagtttctcggcaatggcttgaccctcctcgagggtttgatcctctgtcaggcacacctccagttccatgaagtatcccagatcctttacctcgtccaggtggatgcgcgtctgtccgcaaaggaacaagtgccgtcgcttggccaggacaccaagtacgccgttcgactggctcaggatcttctccagcacctccggttcgtccacctccgtcttgttgaacttggaaagcttgggaccggccacatcgggacgatcgtagtagaccaattgggagcgcgatggcgtctgtaagtagcgcaatttaagccgtccacccagcggagattcaaagaagacgtccctctgctcgattaactgcgcatcctggctgccgctcaggtttctggccaagattaggcgctgctcaaagccctcagatccacccggaatccgtgccttcacctccacattgcgctgatccgccggagtaaccgattcgcacatgttgtttacgcttttgttttttgcaacgtatcgtcgatagccgataattggcgccacaagatgctttcgataacagaacattacaatgcccaatataatgttctcactgtccaaattcggccaaaaggaaagtgtacttaactgctatatgtttagttcttgtattttaatgaagatgcaagtttgggctttgcaaatattgaaattatttctgttttgcttgacacccgcatctacagttacttcagaagagcaaaagaaaaatgcagccaagtgtgaatgctataatatcggttttagtttggcgccacttttaaaagtaccggtttcgatctgaaatggcgggaaaatcaaattgtatattaatcttgagttataatagacaaagcagattatggttctgtttggaaactttacaccccatcactttaaaacatgattgttttcactaaattattctaattttgcaacgaaacataaatataatttcaaataatctatgtagtttacttaacataaggcttccgtcttaaatcgaatatttaaatgtagtttaggaatcatcattacagtctttgctatcccgctacccaaacacttacatatgtacatatatatacgattatatacatacatatgtagctgcatatctacataaattcaaattaaacaaaaaaaaaagtccaacaacaagggattataaagtaaaacagcaaccaaataaaattcgaaaaaatctgtatgtccgggtacgtgtacatacgtacatacataagtgtgtatggatgtatatacatacatacatatgtatactcagtgagcgtgcaacacacaacttgaatagtctcttgtcgaggccccgtttcgtgaacatacggatacagcaataaagaggtggtggaaagggggaggagaagaagaagaagaggaggtggagaaacgatgccgcggaacgaaccaatacattcacacgtatttatggctgccagtgtccgtgtgtatgtctatgtgact

SEQ ID NO: 34865 - DNA, 706 bp, DROSOPHILA
aaagcgtaaacaacatgtgcgaatcggttactccggcggatcagcgcaatgtggaggtgaaggcacggattccgggtggatctgagggctttgagcagcgcctaatcttggccagaaacctgagcggcagccaggatgcgcagttaatcgagcagagggacgtcttctttgaatctccgctgggtggacggcttaaattgcgctacttacagacgccatcgcgctcccaattggtctactacgatcgtcccgatgtggccggtcccaagctttccaagttcaacaagacggaggtggacgaaccggaggtgctggagaagatcctgagccagtcgaacggcgtacttggtgtcctggccaagcgacggcacttgttcctttgcggacagacgcgcatccacctggacgaggtaaaggatctgggatacttcatggaactggaggtgtgcctgacagaggatcaaaccctcgaggagggtcaagccattgccgagaaactgtccagggaactgggtatccaggaggcggacctcatgatcggctcgtatttcgatgctctcagaaagctcaatcattaatcattcattttgtacatcctcgttaggattagttctgtacccaaaaaatgggactctgtcttgtatcatagaattaccaacatttgttatccataaaacattctgtgaggcaaacaaaaaatgtatgt

SEQ ID NO: 34866 - protein, 187 aa, DROSOPHILA
MCESVTPADQRNVEVKARIPGGSEGFEQRLILARNLSGSQDAQLIEQRDVFFESPLGGRLKLRYLQTPSRSQLVYYDRPDVAGPKLSKFNKTEVDEPEVLEKILSQSNGVLGVLAKRRHLFLCGQTRIHLDEVKDLGYFMELEVCLTEDQTLEEGQAIAEKLSRELGIQEADLMIGSYFDALRKLNH

SEQ ID NO: 34867 - DNA, 3582 bp, DROSOPHILA
agtagcaaacgaaatgtaattagcactgtcagcgtttcggggtgaaaaaaactgagtgctcgcagtacaagcgcccattatgcgagcatacttatttttaaatttatgaccccaaaagggggcgggatgaatgaaaattcaaactcagacactcctcaatttctagttattgactctttgttctgcgttttgtttgttcggcttgcgccagcttttttcttaaagggcaagtttcgtgattacttttcagataagattgtaatttcctactgtgcgggtttacaaccgtctgcaataaactaactaaactagctggagaatagtttataaaatattgaaacttttatctgttttatataaccaagaaccaagtttagttgcaaaaacccctatttctcattttccttaaaaaaatcaatatttctgccatatcatcggtaaaaaattaaaaaaaatatttttttaatatttcaaaaaatgttaggcattgttagtattgctcttgagcttcataaaacagtcaatctttttgtcgtgtgacgacttttgcccaagttatgtttaaaaaccctttaaaaaatcaattttttttcaaaactcattttgtctattttttgaatgaacaattttttgtttttttggtttttttgccataaaaagggaaatattggtccaaatatgaagcggcatatctcgttcagcttgttatttgatttcgtatcaaatggtgttcataattgaaaaatttaatttttgaccaattttcgctaattttgatggtcttaatatcgcccagtgaaaaaaacatcagaactttcaaaataattgatagaatcttcgaagttatggttcgttaaatttgtagattaattttccatcgattggattttaaatataaatatttaaatatttcctacagtgccatcgaaagtagtaatagtttgaaagtatcccacatttaagtgccctaattactgagattttagagatccccgcgtgctcaccctttgtgatatatgcagaggcatggcagccgggcgatggtgtcccccggactcagatcctccaggcaaatgacgcactcgcccttggcgtccgagagtacgtcctctggaataacataaacatatacaataggcaatctgataatatggtcagggattgattgggattatgtaaagagcgtaccgttatatgagagtcgtggtttcgttaggcacatgactaaatggcattcgatgtcgtctggcaacacaaacttattgcacacgggacacttgatacctgcaatgtttgaggaaatttagcaaaatcagagatttagcgcaggtgcggatggcaggatggcaatgcttgactcaccattgaaggaccaaatgtgcgatggaagcgaggtggccgtgtagacacgaccgatcccattggcggacgtggcggaagcggccagggcgatgctctcggcgatgctgccgccggtcattgacatgtcctggaacagaggataacgggaatatgcgattagaattggtaacacggtgcgcatacgtaatttctacaactgactgactgactgaggagattcatttacaacaatcgctccactctattcatagatcaaactgcaccaaattggtttttaagtactttaagcaagtgaaaactacacaaatatctttgctgtctgaagttctagatacaattgcagggatctttaaagccaactgaaaattatgatggtatacaaatatgccaatatttgaggtatataaatccatataagttgattagtacattcaatgtgaatatacattcttggtattcggcttatttgcccaactattaagtgcttattaatggaattacccttggtaaatccaaaaatagatatcgaacaaattggacaatgacttccattagacaggcacataaatcaaggagtaacccgctgaccttcggtatatccgaataccaatggtattcccgcgttttttaacttattcaaaactggccctgctccgagttgtaatcccctccagaatgcccgcaacccgactcacccttatggaatcgccgagagtgcgtctctgctgcatgtaggactgcatggcggatccattgttgttcccggcggctgtgaagttgctgttgctattggcattcgcattaccggacacggatacggtgacaccgacggccggatggccgtgcgcggcatgcggatgcgaatgcggactgctgccggacgaggtgatcgatccctgttgctgctgctgctgcgcctgctgctgtatatccggcacggagctgagactccgcgcccgctggcgatcgatggacgtggagttttggttgtggtacacctgcaggccgggcaaagtgcgcagcagattgaaaccctgaccggtggtatcattgccgccaccgccgccgccgttaccgccacgattctggccgggattcgagtgctggtgttgctgctgctgcagcgcagaatcggcggctcctgttgaactgctcgagaatgtcctggagcgtgggctctgttggccactggtcgccggagtgctcgccttttgacccatagatgctgatggaattattaactgggcgacgaacctttgaccacctgcgcctgctccagctgctgctcctgctgctgctccagcagcgccttctgcaattctccgcctccgcgaggcgtcctctttgtctgctccttcgcgtgcgaaaaacggagcagacaacaatagcaaacaatgcgatgtgcgatttgcgatgtgcggatgataaatgcggtcgcttttttgtcgctcgcttgataagtgtatgtgtgtgcgtgcttgtgtgtgtgtgtgcgagtgtgtgtgtgtgtgagtgtgttttggtgtttgtgccaaaagtgatggtgctcgtggagtggatggggggcgggggtgggagtaggtggcaaggacggggggcgggcgtcaatcggtgcgtagttgagtcgcgattgttattgttgctgccccgttttcttgtcctccgcctgctgattccggggactcagatgtttcagatgtttcagatgctcaggtgttcagttgctctggttctccggtatatttggaactcgagtcggctctgcggtcgccggatgatgactcccgatgacaaccgatgactgatggatgatgggcactagctgctcctgcgcctgctactacttgctacttgccacttgcaacgggctcctgctgcctaatcctatggaatcggatccaaacgctacgcggtgcactactgctgctctcgccgactaaaaaataggtgtgacgcgacacgacgctgctggccaatctgccttgattacactctcaatttaaatgaccgttttccatatttttttttaatttttttttatacattacattaaaagagtttctcgatatcaacagaggcgttagtccaattgggagggccaatcgattgtcgacgggtattctaataagaatggtgtcggtattgtgtaggcacctagctgagacatgaacctagatggggtattcttcatttgcgcatttataaaatataaattttaaa

SEQ ID NO: 34868 - DNA, 858 bp, DROSOPHILA
atgggtcaaaaggcgagcactccggcgaccagtggccaacagagcccacgctccaggacattctcgagcagttcaacaggagccgccgattctgcgctgcagcagcagcaacaccagcactcgaatcccggccagaatcgtggcggtaacggcggcggcggtggcggcaatgataccaccggtcagggtttcaatctgctgcgcactttgcccggcctgcaggtgtaccacaaccaaaactccacgtccatcgatcgccagcgggcgcggagtctcagctccgtgccggatatacagcagcaggcgcagcagcagcagcaacagggatcgatcacctcgtccggcagcagtccgcattcgcatccgcatgccgcgcacggccatccggccgtcggtgtcaccgtatccgtgtccggtaatgcgaatgccaatagcaacagcaacttcacagccgccgggaacaacaatggatccgccatgcagtcctacatgcagcagagacgcactctcggcgattccataagggacatgtcaatgaccggcggcagcatcgccgagagcatcgccctggccgcttccgccacgtccgccaatgggatcggtcgtgtctacacggccacctcgcttccatcgcacatttggtccttcaatggtatcaagtgtcccgtgtgcaataagtttgtgttgccagacgacatcgaatgccatttagtcatgtgcctaacgaaaccacgactctcatataacgaggacgtactctcggacgccaagggcgagtgcgtcatttgcctggaggatctgagtccgggggacaccatcgcccggctgccatgcctctgcatatatcacaaagggtga

SEQ ID NO: 34869 - protein, 285 aa, DROSOPHILA
MGQKASTPATSGQQSPRSRTFSSSSTGAADSALQQQQHQHSNPGQNRGGNGGGGGGNDTTGQGFNLLRTLPGLQVYHNQNSTSIDRQRARSLSSVPDIQQQAQQQQQQGSITSSGSSPHSHPHAAHGHPAVGVTVSVSGNANANSNSNFTAAGNNNGSAMQSYMQQRRTLGDSIRDMSMTGGSIAESIALAASATSANGIGRVYTATSLPSHIWSFNGIKCPVCNKFVLPDDIECHLVMCLTKPRLSYNEDVLSDAKGECVICLEDLSPGDTIARLPCLCIYHKG

SEQ ID NO: 34870 - DNA, 2471 bp, DROSOPHILA
tgtattttcattcgcttgcggcatgccaaaatatcgttggcacatacgaaatatatatatgatatattatactacatatctatatcccaaatgctggcaatcccaatcccaacaatgtggacatttgttgacgcaggcacggagtcgtcgggtgattagattagatactatcaacgaggtgtgtgcgatatccgatcgtctaaggaacgaacacccaacagtgactaccaatgactaatatctgcggaatactatcttactattactattttgtggaccagcagccaatatctgtactcaaacacaatcagacggattagataggaatccaaataccctagattcagatacatttaaggatttcccaagcaactaaatcacactccccacacccattgccatttcacaaatgcaatatatacatatatcacaatcagtcagttgctcaatttatcggacaaattgattcatcttcgatcggatccggacataaagagcccactatggtcgcattcgatttggattctgatcaatttggccgattatgctcgcctaatttgtggcaattgcagctagatgaaaatgatacaaatgatgatttgcccgtggccattattccattatctcgacgaaacgatcgcattccacaaagagcactatctcgatcactatctctatctctatctgtatatagttatatccatctccatctggctggctcaaggccatttgcacattcaactgagctggaactgaaaactactggccagcgggaagtgaaaaaaaaaaaatgaaaactagcaattgttttgtttgttgcctttcgtcagcggggaaattgcacatggaaaaataatcatcacaagttatctatatatctaaatatgtttagtttttatatttgccgtcagagctatcacatcgataagagcaatgataaattaagttgcttagagtgaaatcccagtttttaaattggttatgtgttgatgacacctatctagttgtccaaccacttgtaaagccagataacgtgccacaacagttctgcaatatttgcgagttattagttaacaccttgtttaactttactatctgcaaacataattaagctgctctgggtggcagtacaattgtttgccagacaaagtcgactgaatttacaagtcataagttgtgaatatattgtgctattttccttggtggcctaaactatgatcttgtcacattaatcctaattacacggcatatgtttcatacgatacgtactcatactggtggctccattcagtcgctgatcgaggggcattatcgtggcccccacaccgataccggctccattcgcgatgccagtgcccactcccactcccgatcccaaatccatcgcatcatcggcactggcagcgcgattaaagggtcgcggtttgcgatttttgaagcgcaggcgcagctccgtgttgagaacgcgcattatgtcgatgggcggaaatcgatgggaatatatatatatatacacactatataaccactacgtatatataaacaaaaaaaaacaaacgacggccttttgctattgtttagctgatttgtttggggcgcgggaattggagcaaacgcatcaacgactccaactcaatttgtgccccgcatcgattgctcttcgatccccgatcactggtacccgaaaacaaaaaaaaaaaatcgaacacaaacgaaaatagaacttaaataggaaaatgatttcggggatcgcccctctatatgatatcacacacactgcctgcaaatcacgagctattcaacaacgcgtatttattctcaacttgagcatttatattcaacttggctcgatttgtgcgatgtgttgccgtgcggtaaacggagacggatggcaaacaacaccgttgttgtgaaaatttcgcgtgcgactgaccggccgagctgagctgagccgagccacccaattcgaagcaacccaactcaaagcaatccaactaaccaacgaaaccgagtcaacctaccataccataccatacaatacaatactataccgcaccagcgagcggtaagcggcgagaggtgagcggtgagcggtgagcggtacgcggggtaaagcgatgagctgcgagcgcacaacttttacaatctaatcgcggggccactgggcagagcgcttagcagagcgacagatctgacagtctagctactttccccgccccacctgctgcctttgtgaacttgcacaactatatagtactatatattatatattatagcatgcgcctaacttagtaaagccactactataacaatacattgtgacttcttttttttttttagttatgataacctgcactattcgttgcgagttcagtaaactgtcgactgctgctattcagatgtacgcgagtgtgacagcttgtgactgttatcagcgtgagtgactcttatcaggctaatggaaacattca

SEQ ID NO: 34871 - DNA, 249 bp, DROSOPHILA
atgcgcgttctcaacacggagctgcgcctgcgcttcaaaaatcgcaaaccgcgaccctttaatcgcgctgccagtgccgatgatgcgatggatttgggatcgggagtgggagtgggcactggcatcgcgaatggagccggtatcggtgtgggggccacgataatgcccctcgatcagcgactgaatggagccaccagtatgaaactgttgtggcacgttatctggctttacaagtggttggacaactag

SEQ ID NO: 34872 - protein, 82 aa, DROSOPHILA
MRVLNTELRLRFKNRKPRPFNRAASADDAMDLGSGVGVGTGIANGAGIGVGATIMPLDQRLNGATSMKLLWHVIWLYKWLDN

SEQ ID NO: 34873 - DNA, 3679 bp, DROSOPHILA
cccagcaaccagcaacttggatcaacactaacaccacaacattattataatttttttttttttttatttcttctggaccccatttatgcatatttcgtactagtttcaaactatttaagcattttttttttaaacataattatgagatcatgtttactacatttgtaagatcaataatgataagataggactctaactgacaacggcttcaaataattaaactattgttttaactgaatcaattcatgtattctggtataacatggcaaggaataaagatggacatgaactaactctgatgccaacgccgtctgaaagctcaaggaagctgggttcggaaaaatcgaaattgaaatttgactgctggaatcgtttagaactttgatacgaaaagcattttggacaattagaacacgcatgataagtaagaatcgattttgtttaataaaaacgacagtgcgtctatcccaagaccagcagtgttgtacataccggcttcctgtttatcaatcagttactgcgacacttgtagagcgaatctcatggtgtggcgctagcatcacgcatttgaatccaccgcgccacaatctcctagcgggtagttacccgggacgattgtggtaattttcattgagatacacatagaatccgcatttaatgctttatgttgcatctcagatcaatcacatatgtatatacatatatgtatgtaatttgtgagttgcggcacagctgattgcgttactatcggctatcgtcggatgatcggtcagggctgcaaatgtgtaaataaattcgtagtgtttttgatctaatcaaaaccataaagttgagatgttctatggtgttgctgctatcattaaaataatatgaaaatataaaataaatatatgaacagtttgagtcaatggtcaatggcgtgactcacgaacgtggtgcgataccggtggcaggcacgtgaggatggcccatccctggattggattgcgcaaaaataaacagaacgcaaattgtttttgtgctcggcaattcggcgaattgcactttacctaataatttatttattcaacacaatacatctcgtggaaagctgcaaattagcaatgagtaagtagactgcactcagtggctcacaactgaccctcgaaatcttcgctagatcacgacgcattaactcttagattttgtttttatttaaaaatgttatgttaaattacaaaaaaaatgtatcacaattagaattattttcgtttcttccttttgtcgctgttgctgttgttcttgtcgtgctggtttagtagaaaagtgaaaagttgattgaatattttggatcgtgtgcgccggtagccctagaacttggagtcatcgtttcggtggacatgtcgtcgcttgcctgaaaacgatgagattagcaaatttttataagcccatcctgatcaccggacattccaggatcaacgctgcacttacgaccgttgcagtggcgtccatagaatcccggatggcacttgcagtgcttgtgggagacgcaggtgccattgcgacacttgcagatggagcgctgcttgcgcccgatctcgcagtgatcgcctcgtagtccgttggggcagcggcacaggttgttcccgatgcaccgtccctcgttcttgcaggggatcacacacttggctgtgagggaaatgggtgggcaaaggttcagtgtttcgcctcgataagagttgagccgtttgctactcacagtactcgcaacgcaggccgtagtaacccttggagcactggcacttgtccttctgtatacacttgccgccattcaagcacttgtccttgcaaatacctgttgattacaatgggatactattagttgcgcgccaggcacatttcattcttatataatgcccagttatcttgccccaagtgtacttaatcatcgcgtatcgtatcaccctccttttctacgcagatggaatgctgagaagaggtcttagccggcccgagccacgcctgctctccaagcgctatctaagctcagcaactggaggaggatcagcaggcacgaccgaaggaggcagctctgaaaccaccccgctgcgtccacgtccaaatgcgctcacagatgagattatacgcgtcgatcatgccggcgaattgggagcagatcgcatttacgccgggcaaatggccattctgggcaacggaccgctgggcaagaccatcggacacatgtgggagcaggagaaagagcatcgtaaacagttcgagcagctcattcaacagcaccgcgtgcgtccaacgatcatgacgccaatttggaacgtggccggatttgtgctgggcgccggaaccgccctcatgggcgaaaaggcagccatggcctgcacggtggcagtggagacggtgatcgtagaacactacaatgaccagctgcgtcagataatggaggcaccgaacccggataaggtaagtaccatttgcaactgccccaagcaacggacgaagtaacaacgttatatgattttgcaggagctgttggccaccatcaccaagttccgggacgaggagcaggagcaccacgacacgggcattgatcacggtgccgagcaagcgcccttttaccaggccatgaccgaggtaatcaagtttggctgcaagacggctattgccatctcgaagaagatctaggctgaaacagttgggccccctgtatatatcaaaatcaaattatctgttccgctaagctaaccgtgttaagcattaaagatagagctaaatgtccataatagtcgcgtctacttaccaccttcgcactgcgtgccctggtagccctccggacaggtgcagacggacggcgccgtgcagttaccgccattgagacactgcggaaaacagaaggccgtctcgcagtattggcccgtgtagcccacgttgcacttgcagatgtggtgctcgttgcagtacccgttcttgccgcacttcaagctgcattctggatcgggagcttaagtttttttagtttagttcaatcgttcgcatgtcacgaggcataaacactcattttaacactcatttggactcacacttaacggagcacatcggaagcacaaagaggggcaggttcgagtagacagtggatacatagatcatagatagatagatacaaaagcggttggcgtgggagcaaagggtagatcgtatcgaattatatattttttgcgggctatcaatcaataatttactatcgaaaaatttggaacaaatttgaagaattttcgaattcaagaatgaatgcaattaaatttacaatttcatataacatatctcataaaggctatatagttccttgtgacttgaatatgtgataatgtcattaggtagttactttcgccagattctctttgatagcccgagtaatttagtgctgtggaaagagtgaagagctgggtgcaggggactcgtgaaaagcgactacgtggggtaatggaatcggattgaatcgaatcgaatggaatggaatcgtgtgggcggggatggcatgctgggatggcgcatggatggctgatgggcggagtgtgcacaacatgtatgtataatgctaatttacaattactatcgactagataaaagcattgcttgatatttcatatacactaccttgcaaagttgttagtgaagtagggttgga

SEQ ID NO: 34874 - DNA, 758 bp, DROSOPHILA
agaacgcaaattgtttttgtgctcggcaattcggcgaattgcactttacctaataatttatttattcaacacaatacatctcgtggaaagctgcaaattagcaatgaatgctgagaagaggtcttagccggcccgagccacgcctgctctccaagcgctatctaagctcagcaactggaggaggatcagcaggcacgaccgaaggaggcagctctgaaaccaccccgctgcgtccacgtccaaatgcgctcacagatgagattatacgcgtcgatcatgccggcgaattgggagcagatcgcatttacgccgggcaaatggccattctgggcaacggaccgctgggcaagaccatcggacacatgtgggagcaggagaaagagcatcgtaaacagttcgagcagctcattcaacagcaccgcgtgcgtccaacgatcatgacgccaatttggaacgtggccggatttgtgctgggcgccggaaccgccctcatgggcgaaaaggcagccatggcctgcacggtggcagtggagacggtgatcgtagaacactacaatgaccagctgcgtcagataatggaggcaccgaacccggataaggagctgttggccaccatcaccaagttccgggacgaggagcaggagcaccacgacacgggcattgatcacggtgccgagcaagcgcccttttaccaggccatgaccgaggtaatcaagtttggctgcaagacggctattgccatctcgaagaagatctag

SEQ ID NO: 34875 - protein, 216 aa, DROSOPHILA
MLRRGLSRPEPRLLSKRYLSSATGGGSAGTTEGGSSETTPLRPRPNALTDEIIRVDHAGELGADRIYAGQMAILGNGPLGKTIGHMWEQEKEHRKQFEQLIQQHRVRPTIMTPIWNVAGFVLGAGTALMGEKAAMACTVAVETVIVEHYNDQLRQIMEAPNPDKELLATITKFRDEEQEHHDTGIDHGAEQAPFYQAMTEVIKFGCKTAIAISKKI

SEQ ID NO: 34876 - DNA, 15188 bp, DROSOPHILA
tatttaaatcctaattataaatataaaaaaaatcaagatgctatctttaaaattgtaattaataccaaaatttccggctttttacccatagtgcaacgtaccagtttccttcagtatgaccatgttgcatctaagccaaaaagttttgtttgtccataaccatcgatagctatcgataactaacttaataaaatagttgcatgtatgacaacaacatcaaagtacgtggcttaatttctttcatttctatgccttatggccagctccttcgagtaacatctacaaaaaaataagaaaaattttctccccgaaacgaaaaaccctagtttttcccaactttcacttacgacgaaaatcatcgcggcgaattgcagacacgtagccttggcagagtgagcattttgctctgctattcgtgtctatcgtattcgccggcaattgcgcattgtgagacacgggcatagttccctcacttcggcgtcaactttggaagtgttcggatcggctcgtatttcgacacctccgcagacaaggccaaattgctgagcatcgcacaaaactccagaaataacggaggaaagtaatctaaagtgagtacagttgaatattactaatcaagtggtagttgtaataacgggaatgtgcatcaacgacgaaaacaaaaacgaattgtagaggccagcaaaaaagtcgtgctcttgtttgtctttgtgttcgtttgagtttgcgtcttatgtggacgagcttttgcgactgtgtttgtgtgtgtgtgtctgcataagtgttccgcagaacttatcgtgtgaagaatccaaccgccgtttatataaacattcttccataaatcatttctcggacgagagcggaaaggacgtttacaatcaataatggcgtattgcgagctctactatgaaaagtggatttaagttaatcgcgtaatgataacttcgtttctttaaatgtttatacacacattactaacgttactaacttttttttttaagtactgtggtggaaggaaactcttctgaccttatgtagtacataggattttaaccatgactattatgtccgtttttctgtccgtatgaacgacctaaaaagctgagataggaaacacattctaatgacgaaaacgcgacacaatgattcgataccaacggtcaaggtagtgccaaagacaagatgcgtaacgctatacgattttttggcacactattttttcgccatggctctagaggtggctccaggctctctcgattttttgttcgagagcgagagagcggagagcgctacagcaaacagctcttttctacgcatacagtgatagttattatagtgtgtttggtagtgcgcactagcgcactaaaggctgaatgctacatttgtgtcgccaaaaaccgatgtttcaaaagtccaaaatacaaagtgacccactttttctaaatcgttggaggagagaattctgtagtcaaatccccgactatcagatacccgttactcagctagtgtgaatgcgaacgcgaaatttcatcatttttctgggatatcgaaagatattggggaataaaatgagaaaaaattttcccaaagtgaccgtattggcggctttatggcgttagagtgggcgtggccaaaagttgtttgccaaaccgatagaaatttacaagtctaataaaattatgaacaaatttcgaaaaaaaggttcaaaagcgtgggcaattttttgcggtttgtgggcgttagagtggacgtggcaacatgggtcaacaaacttgcgctccgtccatgtctctggaatctgtatgttgaatctcaacctactagcttttatagtttctaagatgtcgacgttcatacgaacatacggaaatggccagatcacctcagctattaatcctgattaagaatatatatattttatatagtcggaaaggcttcaatctgcctgttacatacttttcaacgaatctagtacccttttactcttcaagtaacggatataataaagaaatagaatagcaaggatgatctgtataatttttagaacttgtaaaaggcaacgagagttactttgtcacaaaatatggataccttgccacatactttatttttaggaaaaagaaaactacttgagagtatcagatttggaaaatgaaaggcacttctgaccttttttttttaataatatctgtaaatgcacaaataaatgcagtgattactcactatgtgcataaaatacttatttaaatcaagcttaaagtaaatgcttatacgttttaagcatagcaaatggactttgatagctgatagataaaagaatcaagctaagttccgtattctatccacaagaacaccgattggttcattcgtaaaggaatgtagtcgttttgctgaaaaaatcccatcgctactcgagggttaccatttgttgttggttttgcgtggactgagtactttgaccttgtactctacctactacaatgaaaccacaaaagtaaacatggatattttattcctcaaatgaaagaaatgatgatagtgctacagtaatagttatcaaggataagaacaacatgcttccgtcgttgcgaacacattttcagattatgtactagaccttcctgtgctccaaccctattgatttatattaaaaatcaaggtcataataaggatcgcgattggcttggtttatatcagctggtgtatcaagacttaaatggcacacagtgtttggtattcgccgatcgacgaaccagaccatgagtcgtgttagaagtattgttcgtaatactgtgaagtggcgcctactaaatatgttttgtgtgttggaagagttcaaactgaaacggtacataagtttaattatcccattatcccatacagatatattgtgataatgcgggttaaatatgattaatgatcaacaataatagggttggatggtttcagtgttgctcttctaggcggtctgttctgtactctcgatcagcgcgtactgccacgtcgatttagaattcttggcttccttgggcttttagatatgcgcaagagtcgagtcgctgaaagtttaaatgtgtgtgtgtgtgcgtgtggtcatcgtttcgtagaaaactaggtagacgcttcccgtttatattattattgtgctatctgcttcgttctgtaggtacgggatttgtggacggcgtatgtatggaatgtgcttatgtctcatgtttgctgttttatttacgctatcgatcgcaacgtcgaaagattgtttagtctgcaaaaacaataacaacagcgaaaaaatcgatcgtcttacgcaccaatacaatgacacttgggcactgccaaacgcacacaactgtcgcgtgcggcgaattcacttcgactgagtgggtgcgcgagtagtgatggcactttagaattatcgatagtccgttgtgcaaatttgtgagatacttgttttgttgtttgttagttttaaaaacaattagggattttagtaatgggagttgatttgcgggctgcatcgggctgcatcgcaacgtactataaagatattttatttccgtttggagttatcgattgttattgaaaccacccgcctcggattcgacgccacagatgttgttgtcattcctttgacgacgccgttttgtgctgcctcctttagaaacgttaattaagttccaagaaatgaatggaaatgtgttttattttatacattgcgtattcttatataagaagtcgcagttttgagggatattcatggcgcactagttgtgttcgtccggtgagtgatgtgagcggaaagtgtaggaagtgctgagattgaaaccatgccgcatagttaaccaatgtaataaataacaccaaacaccctcagaagagtcggatacgaacagtgcctgctgcaaaatggaggatagcgaggacgacgtggtggtggtgagctgcgatacctcgatgaaggagaaggtaaaggccaagctggtggagatccgtaagtttgtgccctttatccggcgtgtgcgaatagacttccaggatactttgtccaaggttcagggtcatcgtctggatgccctggttaacctgctggatcgcgagtaagtcatggaccaagggacgcccaccaaactcggttatccatcatatccactccttcgtttcagggacgtatcgatgagctctcttaacaagatcgaggtgatcattgataagctaaggacgcgcttcaatccggtaagtcgagtatgcgccacagctatgaccacatcttcacgttctaaccctaattttcggtctgtagaggatcgaaattgacactggcgaaatcattgatatcactgaaaacactgagtatgattccactgcgtcgagttcctccgggtcaagcgcacaaccaccagctcaaagagcgaagtcctcagataagggtggcctgttgaacggctcatctctggctggcaggttaaatgcttcacttaaccccgcatcagatgctaccaaggaccatctatcgacaccaaagcaactagaattggagcgcaactctaaagtctcttgctcaacttcaaaaataaagacttcttccatttctgccaagatttcagtttttccagccacttcaatggatttgaacatcccaaaaactaccagcgccaaggcatcggatgaggggcagcggtcacctgcagaaccacgtgccgcccttcaagctatagttcaagatacgaaaacaccaaccattccagaaccaacatcaccagcggcgcttaagcattcctcccttcgtggcagtcgtggatttctggctgtcatgcagaaggccttaattgaagagaagaagcagcgagctagcgaacagaaaactgataaagaaactaacggtgtaacgcagctagagacaaacttctcgcggcgatcttatacaacatcgtcacagtcaacctgccgttcttcagaaatatcggtaagagcagaaaacccagattttaagcgacgaagcacatcgcttgtgcagcatgctcctctacaggaggcctccccagggcaatccaaaaaagacttgcccatatccttgtcggtacagggtctaccagctttggtcagtgccagcactgcaagtccagcaaatacgcttgaggaggcccgcaagaagctggcggccttgaaatatggactaggaacaacggtaccaagcatgcctccactggcctccaatataaatgatccacgcggtagaaaaggaataaacctgcctgaaactaacaacaataaagacaacgacttgggtatagcgctgcaatccccgccgcctatgcggactccctcgcctattccgccgccaccaaggatgaaggccggtacgtgggcctcattttcaaatgttccccaggaaagcgcatttacaggccagcatgctgtgcagcgcaactcggtacctccgggagattctcgagcctttggggatgctttggcacatgaaccaaggtccttctatggcactgattcccgagaaccccgagaccctcgtatctggaagagcaagacttcccaacagcagcaacatcagcaggcgccacaggcacaaattcctccgtattccagtgacccgcgtcgttctataagcacttacagcggtttcgaagagtcagccaatagagggcaaactaatagtaaaaataataataatcataatcagaatcagaatgttaccgccaatggaagtgcatacattgcgaactggagtggcaatccatatggaaacggtccaaacccaagaccgccctttcctagcaatcaaaacgggaatgaatatgctggtggttttaatggttcgcatagtttcaggggcggatttcgcggcggtcacaacaaacggggctttggacgacacaatgacgtgccacgcacatatggggaacaccgcaaagccaaggcccgtgctgaggcggaggccaaggctaaggctgaggcggaggccaaggctaaggctgcggcggaggccaaggctaaggctgcggcggaggtacgccaattagaaacggaagtttcgcgggagatggaagcccaagaaaaaaataaacagcaaaaggaaaagccggaggagagcgaggcggagaagtcgacgatcgcagtgactcaggttccggaattggacacctcctaccgcaacgttaatctgggggtgctaaacaagaagctagactttcgaataccgaagaaaaccctcccaccggcaacaacaataacctcaacaagtccagtcaatggtaatggggagaatccaagctgcccctcaaattcccccacaagcaaaagctgtgatgccaaccaggacaaagatacttataagaataaagataggtatttaaataaggctaaggctaaagacaaggtagataagggcaatgaggtgtcggagaacaatctggataagtctgagaagcttgaaaaatcgcaggataagaaggcaaatgacaaggagaacaagtccgacaaaaaggagaagaagagactgaacagggagcctgaaaagaaatcaaaggttgagaaccccctcgagattgtggactcgaatagcgtggtcagtgaggaaagctcggaaaatacagacaatgtggaaaatgaaccgcctcttagcgagactaacgcgtctccagttccagagctagctaccagcactcaggacagtcaacaggaccagtcagtgagtgaagagttggacatccttgccaaaaaccgtagaatgtccggaactagaataaagactcccatttcgtctactggaaaccctgcactaaagcgacgggcagatgatgatgttgaggacaagttggaaaatccgactaaaaagaactgcgcaaagtgggaggcaaagcctgacaaggaaaaatcggaggatgataccatcgacaagattaaatccatgaaagtaactaaattcgctgatgtcgagatgaaggttacagaagaaagccagagtgctgaggaggaggagattactgagcagaaagagagtactgaggaggaggaaggtactgagcataaaaagagtactgaagagaaggataagccgccaaaaatctccaagataaaaattgtccttactcccattgcccatacaacacaagtggttcgtcctaatgatggcttcaagaacaatcaagaaaagatcttggacaacatggcaactgatgagcacgatgatgaggaggtccccgggcccccagctcaattcctacgccggattatgcagcgtcggaactccttggctcctacgtatatgaagccgatggtggacaaggataagattgcttcttccagttttacctacgaggatctgccggagcagaagcgcggaaatcagaacgcccgaaacctggccatcattttcgaaaaaactagtgacaactgcagcgtgtccactcaaaacattattaatggcaaacgtcgcactcgtggatgtgagacctcttttaacgagacccaattgagccgaaacatctttggcatgggccagataaacaggtcgcggccaaaggccacccgagggtaaagctaccagggcaaagatttctgtccctgcaaaagattcaacccgtgctgatgatgatcctattcccactccaaatcttaagcggaaaaggcaagctattcacaaggaaacagaggatgatgtggagatgaagcctaagaaggctcgattggaagcacaggagataaatggggtcagtgttacgcctgatgaacagcaggtagagaacaacgtggaagtcacccaaaaggaggtggaagcaatatcctcagagccacttctctcttctgaggttgaaccgacacgaaagcctcgcacgaaaccgcgaaaaaacgagctggacaagctaaacgacgacattgcgcaaatgtattacggggaggaagtgatgcgtgccaccagtcgcagggcttgtacccgtcgatcgcgcacgtcctcgcacacgcgcaccagtagccagcattccaggacgtcctctgtatcgcgaaccgatagcatatccaccgtatcggatattagttccataatcgtcaggaacacggcgcgaaggggtagaggcatcagatcatccgaaaatggcatcaaccgtgccacgtttaatgcatccttgaatgcaaaaaaaccaaagttgtgccgtgttagaataaagcgatgtgctgcattgatggagatgataaaggaccaggaaaaggaggaacaggagaagaaggagcagaagaataaagaaccgaagaagaagaaagtgggtgtgcaaaaaaagccattgaaaagtaagccgaaaagagagaatagcgttattcttaacacaaatcccgaatggcactccatttcgaaggctgttatcaagtgtgtcgtctgctcgaagtgggttcgcaggagcccactctctcattatatgatgtgccataaggagcactatgccgcccgattgccacccgatgtgcttaaagagctgcgggccgggcgcggaaatcgaccggattactgggtttcgcaacgcggcggctacacattgcacttcacttgcccgttctgccagaagccactgctactctgccaaaaaggcatgatcgagcacttgatcggccatatgggcgagtctcgtttttactgctccaactgtaatatgccacagaaccgcctcagtaggctgctggaccacaccgcatcctgtgggccaggtgcgaagcctttaagtagcaaaaccgtctgcctaccgatgagtgttcacgtgtgccacatctgccagtttatgcagtacagcaaggaaaatatggaccggcatcttactgttcagcatggcctaacgaaggaggaactagaaagtgtggagcgcgaggagttgatgctctgcgacacaacagacgtaccatatgcagattcgaataaggatggcagcgccgttgggcctgaaattcaaaaaaacaaaccgaagtcgaaagcaagtgcagcactttcaaatacaaccaaaaaaaataaacagcaaaagaagacaaacaacagtcgcttcatgaaaatggtcaaaaaatccgtaagtctattgaagcgagaaagagaagagcaggatgaccagaacatgacccaggctaacgaagggtcggaagtgccggaaataccgccgcctccgccagaaattgagcccttgtttgtggtcaatgagtgtctaatgacctctgaaatggacacggacatggaagaagtcttggaacagcccgttcaacatatgagcttaatggtagacgaaaagcctgtgacgctactcagtggggccacagaacagctggagcctagtgtccctgatcccgagcctgttgttccatctgcacaagatgatggcaaagatgtaaatgaagatgaagacgtagacgtggaggcagtagtggattcccttcagtcacacactgaccagacggctacttctatgttagcagaagtcagtctagccgaattggctggggatgtacttgatggtattggcagcgacgcgtccgactatgagatggatgataattcagagcaagtggatacaactaacaaaaacggctacggtgatgatgacgatgatgcgcttaccgacgattgggtggatctggagactgccaagcgcaattccaagtccgccaagagcatttttagagtgttcaatcgcttctgctcgcgtttaaacaaattaccccgatccagcagagcagtgccctcgaatgggagtgaaaacagcgatggcagcgacaacaacgacgacgacggcgataatcctgatcccagcgagctaatgccaacaatgcaaccattggagccggagccagagatgggggattcatccacatctacaggtgctaagtcgctatccgaacgggtggagaatgtgggctttcaaaagccctcttcagacgaggatcaaaatcgcgtggcagcatcctattactgcgtgcagccgggttgcactttcctcttttccaatgagctggaaggcctcgagaatcattttgcgttagagcaccctcttgttcgatggagcggcaaatgtggcatgtgccgtcagaaaatcacggcaacggaaacgaatctcagaatttctgaagagttgcgccacatgagggacgtgcacatgaaggacatatccaccctgcctcctcctcagtcatctgcggttgaaagcccagccgttattgaatcctgcctgaatcagcgtgaaccagtacctgaatcagaacctgatcccgttcctgagcttcccaagctgcgtgttcgacgcttcactggggatcgccttgttgtggattcacaagcggaaaagagccaaccggtagcaatagttgtcagtgatgatgataatccgcgaaatgggatgctaagggacttgctggcggcggatccacggccacccaatcagcagttggacctccaagccgctggactgggcgagttcctttgcgccaagcccgattcaccgtcaacagaaccggtcaagcagacgcccgtaattgttggctattcgagtggcttgggcttgaaaatcggccaggtccttagcagaactcagatttcagctaactcacggctatcgccagtcgttaacgatcccctgccagagaagtcttctgctcctgctgccgttgaagagaatcgtaatcgattcaggtgcatggccaccaactgcaattttgttgctcacaagctcatgttcatgcgggagcacatgaagtttcacagctacagtttcagcagcaccggtcacctgaactgcgcgtactgctcccatgtggcagtcgatgtggatgattacttgcgccacggagtgatcattcacgacctggcaccacgctccgaactggagagttcaactggaccaccatctgttacccagaaaatccgggatatgctcagccagcgggaaaatggtcgtgttccaccaccaactcctcaagtcactctgtctgatgtggtcctgggtcttttagaatgcaccggatacagcggtgagtgaactagactaatgctaatatctttaaattacttaggctttcatctttattccagaggataaactgtacgcctgtccccaaaagggctgcatcgtgcggctgacagatgagcagcttgtaaaccatttgcgctaccacattcgtagcactcatcagggcagcgagttggtgaaatgcaagttttgcaccaaggcgatgcatccgccggcacttcgtacgcatctgcagcagtaccacgcccggcacagcatcttctgcggcatttgcttagccacatcggtcaaccagcgcataatgatgtatcacatgagcacggtgcactccaaggcctacggccggcctaacgcgcggctggcgtttgtgtcactgcccgtgaagatcgacgcgagtaagaagaacgtagaaagcgagttctacgtggccgtcgtggaacagccctttggcaacctccagatgcaggatttccagcgcaagctgttcgatgaaatggaccgtcggcgttcgggaacaaagacgtacttccgcagctccgaggtgcatatcctgccaacgcagccaacattccagcgaccgctatactgtacggagtgccccttctccaccacgtcaagggttaacatgcagatgcacctctatgagcacaaggatgagaccattcgggaagcctccaaattggcggacttgatagttccagcaacctcttcggtattaactgtttcggcgagtacgttggtggcaccgccgaggccaggcaaagattcagaaaaaccatctacttccggacaaagtggtgatgcagcgacggagcagctgaatccagatgttcctggaacccacaagcccatcaagccaccgttacgctatgtgcccccggaccaacgctaccgctgtggcttcctccgatgtagcgtcctttgtttttcggaatctgcggtgcgcaaacacatgcaggctaaccacaaatactcggaggtggtaaggtgcccgcactgcaagaactgccagggtcagtttggagtagataagtactttgaccatcttgcaatgcataagcggcacatcttccaatgcggcgcttgctcacgtcacaatagcaggcgtgtcatcgagcggcacatacaggaacgtcacaatattcaagatgtggacatgatcgtacaccgccataatgacagcaacaaaacgaccgaagcccgctggctgaaggcgcgtaagtgttgaatttaactgaccttcatttgaaaaagcccactcaagtgttatatccccactctttagctaaattggcacgtcattcgctaatggagtacacgtgtaacctgtgcctcaagtactttccaacgaccgtgcagatcatggcccatgcggcgtccgttcacaaacgcaactaccagtaccactgtccgtactgtgaatttggtggaaacctcgccaccgcgctcattgaacacatccttcgcgagcacccggaaagggaagtgcagcctgtgcaaatctaccagcgcatcgtgtgtaagaacaagcagacgctaggcttctactgcaccacctgtcacgaggtggccagcagcttccagaagatcgctatgcactgcgacaaggagcataagtcgcgcaatccggtgcaatgtccccactgcattttcgggcatttggccgaacgccaggttgtcttacacatacaagagaagcatccccatgaacgcggactggcaatggtgcagttcgaacgcgtgcttaatgacatcccgaacagcataagctgggagataggtcggcccatcgaagtggagcctgagaaggagatcccgaacaatggggagagtgcattcctgccgctaagccagagacaggttgtaacggaagtggtggacctgctggattcagacgacgaggcggacgagtacggtgaacaagatgacgcggtaagtaaagtgtggctgatgcaggcccaattttcaattttgttttccttatgctcattattattttgctacagaaaatcgtggagttcgcctgcacacactgcgacgggacaaacaccaacttgccggacctacgctcccagcactgggcccgcgaacatcccgaccagcccttctatttccgcgttcagccgatgctgctctgctccgagtgcaagagatttaggggcaatgcaaaggcacttcgcgagcacctgcgtgcgacacactctatccggagcatagtggctgcggacattcgtcgaccgatggagtgcgcttactgcgactaccgctataaaaacaggcacgatcttgcgaaacacatcagtgagataggtcacctgcccaatgacctgaagcacgtaacagatgatgaaattgatgccctgatgctgctcagtgccagtggaagtggtggggctgttaacgaatactaccagtgcggattgtgcagtgtggttatgccaacgaaggagacaattgtccagcacggccaagtggaacactgcaagcccgacgagcgtttctgcttccggcagctagtgtcgccagtgatataccattgttccttctgcatgttcaactcgaccgatgagctgactacgctgcgccatatggtggaccactacagccgcttcctggtctgccatttctgcacacgctctcagccgggtggtttcgatgagtacatccagcactgctatacctaccaccgggacgatatcaaatccttccgggacgtgcacacgtttagcgatctgaagaggtaccttagtcaggtgcattaccaattccagaatgggttgattatcacaaaaagcagtctccgttatacacgttacaaatccgacaaatgtatgcttgagctagacgctgagctaatggccaaggcccagcggccacccattccgcgtctgcatatcagactcaagtcgaccggcgttcagatgcagagccccgagggggctgatgtggagaaacctgtgtcgttgttgcggatcacaaagcgacgaaaaacgcttaatcctggcgaattgctccgctcattccgcgaggagaatgaggtacagccacagccaccggcctcttcaacatcgtcggggacggctccttctcctgcggcaggttctgtgttcaacctgttcaagcgccgcaacagtctcgttgtccgcccagcaaccagcaacttggatcaacactaacaccacaacattattataatttttttttttttttatttcttctggaccccatttatgcatatttcgtactagtttcaaactatttaagcattttttttttaaacataattatgagatcatgtttactacatttgtaagatcaataatgataagataggactctaactgacaacggcttcaaataattaaactattgttttaactgaatcaattcatgtattctggtataacatggcaaggaataaagatggacatgaactaactctgatgccaacgccgtctgaaagctcaaggaagctgggttcggaaaaatcgaaattgaaatttgactgctggaatcgtttagaactttgatacgaaaagcattttggacaattagaacacgcatgataagtaagaatcgattttgtttaataaaaacgacagtgcgtctatcccaagaccagcagtgttgtacataccggcttcctgtttatcaatcagttactgcgacacttgtagagcgaatctcatggtgtggcgctagcatcacgcatttgaatccaccgcgccacaatctcctagcgggtagttacccgggacgattgtggtaattttcattgagatacacatagaatccgcatttaatgctttatgttgcatctcagatcaatcacatatgtatatacatatatgtatgtaatttgtgagttgcggcacagctgattgcgttactatcggctatcgtcggatgatcggtcagggctgcaaatgtgtaaataaattcgtagtgtttttgatctaatcaaaaccataaagttgagatgttctatggtgttgctgctatcattaaaataatatgaaaatataaaataaatatatgaacagtttgagtcaatggtcaatggcgtgactcacgaacgtggtgcgataccggtggcaggcacgtgaggatggcccatccctggattggattgcgcaaaaataaacagaacgcaaattgtttttgtgctcggcaatt

SEQ ID NO: 34877 - DNA, 9583 bp, DROSOPHILA
caacatcaaagtacgtggcttaatttctttcatttctatgccttatggccagctccttcgagtaacatctacaaaaaaataagaaaaattttctccccgaaacgaaaaaccctagtttttcccaactttcacttacgacgaaaatcatcgcggcgaattgcagacacgtagccttggcagagtgagcattttgctctgctattcgtgtctatcgtattcgccggcaattgcgcattgtgagacacgggcatagttccctcacttcggcgtcaactttggaagtgttcggatcggctcgtatttcgacacctccgcagacaaggccaaattgctgagcatcgcacaaaactccagaaataacggaggaaagtaatctaaaatggaggatagcgaggacgacgtggtggtggtgagctgcgatacctcgatgaaggagaaggtaaaggccaagctggtggagatccgtaagtttgtgccctttatccggcgtgtgcgaatagacttccaggatactttgtccaaggttcagggtcatcgtctggatgccctggttaacctgctggatcgcgaggacgtatcgatgagctctcttaacaagatcgaggtgatcattgataagctaaggacgcgcttcaatccgaggatcgaaattgacactggcgaaatcattgatatcactgaaaacactgacgccaaggcatcggatgaggggcagcggtcacctgcagaaccacgtgccgcccttcaagctatagttcaagatacgaaaacaccaaccattccagaaccaacatcaccagcggcgcttaagcattcctcccttcgtggcagtcgtggatttctggctgtcatgcagaaggccttaattgaagagaagaagcagcgagctagcgaacagaaaactgataaagaaactaacggtgtaacgcagctagagacaaacttctcgcggcgatcttatacaacatcgtcacagtcaacctgccgttcttcagaaatatcggtaagagcagaaaacccagattttaagcgacgaagcacatcgcttgtgcagcatgctcctctacaggaggcctccccagggcaatccaaaaaagacttgcccatatccttgtcggtacagggtctaccagctttggtcagtgccagcactgcaagtccagcaaatacgcttgaggaggcccgcaagaagctggcggccttgaaatatggactaggaacaacggtaccaagcatgcctccactggcctccaatataaatgatccacgcggtagaaaaggaataaacctgcctgaaactaacaacaataaagacaacgacttgggtatagcgctgcaatccccgccgcctatgcggactccctcgcctattccgccgccaccaaggatgaaggccggtacgtgggcctcattttcaaatgttccccaggaaagcgcatttacaggccagcatgctgtgcagcgcaactcggtacctccgggagattctcgagcctttggggatgctttggcacatgaaccaaggtccttctatggcactgattcccgagaaccccgagaccctcgtatctggaagagcaagacttcccaacagcagcaacatcagcaggcgccacaggcacaaattcctccgtattccagtgacccgcgtcgttctataagcacttacagcggtttcgaagagggcggatttcgcggcggtcacaacaaacggggctttggacgacacaatgacgtgccacgcacatatggggaacaccgcaaagccaaggcccgtgctgaggcggaggccaaggctaaggctgaggcggaggccaaggctaaggctgcggcggaggccaaggctaaggctgcggcggaggtacgccaattagaaacggaagtttcgcgggagatggaagcccaagaaaaaaataaacagcaaaaggaaaagccggaggagagcgaggcggagaagtcgacgatcgcagtgactcaggttccggaattggacacctcctaccgcaacgttaatctgggggtgctaaacaagaagctagactttcgaataccgaagaaaaccctcccaccggcaacaacaataacctcaacaagtccagtcaatggtaatggggagaatccaagctgcccctcaaattcccccacaagcaaaagctgtgatgccaaccaggacaaagatacttataagaataaagataggtatttaaataaggctaaggctaaagacaaggtagataagggcaatgaggtgtcggagaacaatctggataagtctgagaagcttgaaaaatcgcaggataagaaggcaaatgacaaggagaacaagtccgacaaaaaggagaagaagagactgaacagggagcctgaaaagaaatcaaaggttgagaaccccctcgagattgtggactcgaatagcgtggtcagtgaggaaagctcggaaaatacagacaatgtggaaaatgaaccgcctcttagcgagactaacgcgtctccagttccagagctagctaccagcactcaggacagtcaacaggaccagtcagtgagtgaagagttggacatccttgccaaaaaccgtagaatgtccggaactagaataaagactcccatttcgtctactggaaaccctgcactaaagcgacgggcagatgatgatgttgaggacaagttggaaaatccgactaaaaagaactgcgcaaagtgggaggcaaagcctgacaaggaaaaatcggaggatgataccatcgacaagattaaatccatgaaagtaactaaattcgctgatgtcgagatgaaggttacagaagaaagccagagtgctgaggaggaggagattactgagcagaaagagagtactgaggaggaggaaggtactgagcataaaaagagtactgaagagaaggataagccgccaaaaatctccaagataaaaattgtccttactcccattgcccatacaacacaagtggttcgtcctaatgatggcttcaagaacaatcaagaaaagatcttggacaacatggcaactgatgagcacgatgatgaggaggtccccgggcccccagctcaattcctacgccggattatgcagcgtcggaactccttggctcctacgtatatgaagccgatggtggacaaggataagattgcttcttccagttttacctacgaggatctgccggagcagaagcgcggaaatcagaacgcccgaaacctggccatcattttcgaaaaaactagtgacaactgcagcgtgtccactcaaaacattattaatggcaaacgtcgcactcgtggatgtgagacctcttttaacgagacccaattgagccgaaacatctttggcatgggccagataaacaggtcgcggccaaaggccacccgagggcaagctattcacaaggaaacagaggatgatgtggagatgaagcctaagaaggctcgattggaagcacaggagataaatggggtcagtgttacgcctgatgaacagcaggtagagaacaacgtggaagtcacccaaaaggaggtggaagcaatatcctcagagccacttctctcttctgaggttgaaccgacacgaaagcctcgcacgaaaccgcgaaaaaacgagctggacaagctaaacgacgacattgcgcaaatgtattacggggaggaagtgatgcgtgccaccagtcgcagggcttgtacccgtcgatcgcgcacgtcctcgcacacgcgcaccagtagccagcattccaggacgtcctctgtatcgcgaaccgatagcatatccaccgtatcggatattagttccataatcgtcaggaacacggcgcgaaggggtagaggcatcagatcatccgaaaatggcatcaaccgtgccacgtttaatgcatccttgaatgcaaaaaaaccaaagttgtgccgtgttagaataaagcgatgtgctgcattgatggagatgataaaggaccaggaaaaggaggaacaggagaagaaggagcagaagaataaagaaccgaagaagaagaaagtgggtgtgcaaaaaaagccattgaaaagtaagccgaaaagagagaatagcgttattcttaacacaaatcccgaatggcactccatttcgaaggctgttatcaagtgtgtcgtctgctcgaagtgggttcgcaggagcccactctctcattatatgatgtgccataaggagcactatgccgcccgattgccacccgatgtgcttaaagagctgcgggccgggcgcggaaatcgaccggattactgggtttcgcaacgcggcggctacacattgcacttcacttgcccgttctgccagaagccactgctactctgccaaaaaggcatgatcgagcacttgatcggccatatgggcgagtctcgtttttactgctccaactgtaatatgccacagaaccgcctcagtaggctgctggaccacaccgcatcctgtgggccaggtgcgaagcctttaagtagcaaaaccgtctgcctaccgatgagtgttcacgtgtgccacatctgccagtttatgcagtacagcaaggaaaatatggaccggcatcttactgttcagcatggcctaacgaaggaggaactagaaagtgtggagcgcgaggagttgatgctctgcgacacaacagacgtaccatatgcagattcgaataaggatggcagcgcccgagaaagagaagagcaggatgaccagaacatgacccaggctaacgaagggtcggaagtgccggaaataccgccgcctccgccagaaattgagcccttgtttgtggtcaatgagtgtctaatgacctctgaaatggacacggacatggaagaagtcttggaacagcccgttcaacatatgagcttaatggtagacgaaaagcctgtgacgctactcagtggggccacagaacagctggagcctagtgtccctgatcccgagcctgttgttccatctgcacaagatgatggcaaagatgtaaatgaagatgaagacgtagacgtggaggcagtagtggattcccttcagtcacacactgaccagacggctacttctatgttagcagaagtcagtctagccgaattggctggggatgtacttgatggtattggcagcgacgcgtccgactatgagatggatgataattcagagcaagtggatacaactaacaaaaacggctacggtgatgatgacgatgatgcgcttaccgacgattgggtggatctggagactgccaagcgcaattccaagtccgccaagagcatttttagagtgttcaatcgcttctgctcgcgtttaaacaaattaccccgatccagcagagcagtgccctcgaatgggagtgaaaacagcgatggcagcgacaacaacgacgacgacggcgataatcctgatcccagcgagctaatgccaacaatgcaaccattggagccggagccagagatgggggattcatccacatctacaggtgctaagtcgctatccgaacgggtggagaatgtgggctttcaaaagccctcttcagacgaggatcaaaatcgcgtggcagcatcctattactgcgtgcagccgggttgcactttcctcttttccaatgagctggaaggcctcgagaatcattttgcgttagagcaccctcttgttcgatggagcggcaaatgtggcatgtgccgtcagaaaatcacggcaacggaaacgaatctcagaatttctgaagagttgcgccacatgagggacgtgcacatgaaggacatatccaccctgcctcctcctcagtcatctgcggttgaaagcccagccgttattgaatcctgcctgaatcagcgtgaaccagtacctgaatcagaacctgatcccgttcctgagcttcccaagctgcgtgttcgacgcttcactggggatcgccttgttgtggattcacaagcggaaaagagccaaccggtagcaatagttgtcagtgatgatgataatccgcgaaatgggatgctaagggacttgctggcggcggatccacggccacccaatcagcagttggacctccaagccgctggactgggcgagttcctttgcgccaagcccgattcaccgtcaacagaaccggtcaagcagacgcccgtaattgttggctattcgagtggcttgggcttgaaaatcggccaggtccttagcagaactcagatttcagctaactcacggctatcgccagtcgttaacgatcccctgccagagaagtcttctgctcctgctgccgttgaagagaatcgtaatcgattcaggtgcatggccaccaactgcaattttgttgctcacaagctcatgttcatgcgggagcacatgaagtttcacagctacagtttcagcagcaccggtcacctgaactgcgcgtactgctcccatgtggcagtcgatgtggatgattacttgcgccacggagtgatcattcacgacctggcaccacgctccgaactggagagttcaactggaccaccatctgttacccagaaaatccgggatatgctcagccagcgggaaaatggtcgtgttccaccaccaactcctcaagtcactctgtctgatgtggtcctgggtcttttagaatgcaccggatacagcgaggataaactgtacgcctgtccccaaaagggctgcatcgtgcggctgacagatgagcagcttgtaaaccatttgcgctaccacattcgtagcactcatcagggcagcgagttggtgaaatgcaagttttgcaccaaggcgatgcatccgccggcacttcgtacgcatctgcagcagtaccacgcccggcacagcatcttctgcggcatttgcttagccacatcggtcaaccagcgcataatgatgtatcacatgagcacggtgcactccaaggcctacggccggcctaacgcgcggctggcgtttgtgtcactgcccgtgaagatcgacgcgagtaagaagaacgtagaaagcgagttctacgtggccgtcgtggaacagccctttggcaacctccagatgcaggatttccagcgcaagctgttcgatgaaatggaccgtcggcgttcgggaacaaagacgtacttccgcagctccgaggtgcatatcctgccaacgcagccaacattccagcgaccgctatactgtacggagtgccccttctccaccacgtcaagggttaacatgcagatgcacctctatgagcacaaggatgagaccattcgggaagcctccaaattggcggacttgatagttccagcaacctcttcggtattaactgtttcggcgagtacgttggtggcaccgccgaggccaggcaaagattcagaaaaaccatctacttccggacaaagtggtgatgcagcgacggagcagctgaatccagatgttcctggaacccacaagcccatcaagccaccgttacgctatgtgcccccggaccaacgctaccgctgtggcttcctccgatgtagcgtcctttgtttttcggaatctgcggtgcgcaaacacatgcaggctaaccacaaatactcggaggtggtaaggtgcccgcactgcaagaactgccagggtcagtttggagtagataagtactttgaccatcttgcaatgcataagcggcacatcttccaatgcggcgcttgctcacgtcacaatagcaggcgtgtcatcgagcggcacatacaggaacgtcacaatattcaagatgtggacatgatcgtacaccgccataatgacagcaacaaaacgaccgaagcccgctggctgaaggcgcctaaattggcacgtcattcgctaatggagtacacgtgtaacctgtgcctcaagtactttccaacgaccgtgcagatcatggcccatgcggcgtccgttcacaaacgcaactaccagtaccactgtccgtactgtgaatttggtggaaacctcgccaccgcgctcattgaacacatccttcgcgagcacccggaaagggaagtgcagcctgtgcaaatctaccagcgcatcgtgtgtaagaacaagcagacgctaggcttctactgcaccacctgtcacgaggtggccagcagcttccagaagatcgctatgcactgcgacaaggagcataagtcgcgcaatccggtgcaatgtccccactgcattttcgggcatttggccgaacgccaggttgtcttacacatacaagagaagcatccccatgaacgcggactggcaatggtgcagttcgaacgcgtgcttaatgacatcccgaacagcataagctgggagataggtcggcccatcgaagtggagcctgagaaggagatcccgaacaatggggagagtgcattcctgccgctaagccagagacaggttgtaacggaagtggtggacctgctggattcagacgacgaggcggacgagtacggtgaacaagatgacgcgaaaatcgtggagttcgcctgcacacactgcgacgggacaaacaccaacttgccggacctacgctcccagcactgggcccgcgaacatcccgaccagcccttctatttccgcgttcagccgatgctgctctgctccgagtgcaagagatttaggggcaatgcaaaggcacttcgcgagcacctgcgtgcgacacactctatccggagcatagtggctgcggacattcgtcgaccgatggagtgcgcttactgcgactaccgctataaaaacaggcacgatcttgcgaaacacatcagtgagataggtcacctgcccaatgacctgaagcacgtaacagatgatgaaattgatgccctgatgctgctcagtgccagtggaagtggtggggctgttaacgaatactaccagtgcggattgtgcagtgtggttatgccaacgaaggagacaattgtccagcacggccaagtggaacactgcaagcccgacgagcgtttctgcttccggcagctagtgtcgccagtgatataccattgttccttctgcatgttcaactcgaccgatgagctgactacgctgcgccatatggtggaccactacagccgcttcctggtctgccatttctgcacacgctctcagccgggtggtttcgatgagtacatccagcactgctatacctaccaccgggacgatatcaaatccttccgggacgtgcacacgtttagcgatctgaagaggtaccttagtcaggtgcattaccaattccagaatgggttgattatcacaaaaagcagtctccgttatacacgttacaaatccgacaaatgtatgcttgagctagacgctgagctaatggccaaggcccagcggccacccattccgcgtctgcatatcagactcaagtcgaccggcgttcagatgcagagccccgagggggctgatgtggagaaacctgtgtcgttgttgcggatcacaaagcgacgaaaaacgcttaatcctggcgaattgctccgctcattccgcgaggagaatgaggtacagccacagccaccggcctcttcaacatcgtcggggacggctccttctcctgcggcaggttctgtgttcaacctgttcaagcgccgcaacagtctcgttgtccgcccagcaaccagcaacttggatcaacactaa

SEQ ID NO: 34878 - protein, 3067 aa, DROSOPHILA
MEDSEDDVVVVSCDTSMKEKVKAKLVEIRKFVPFIRRVRIDFQDTLSKVQGHRLDALVNLLDREDVSMSSLNKIEVIIDKLRTRFNPRIEIDTGEIIDITENTDAKASDEGQRSPAEPRAALQAIVQDTKTPTIPEPTSPAALKHSSLRGSRGFLAVMQKALIEEKKQRASEQKTDKETNGVTQLETNFSRRSYTTSSQSTCRSSEISVRAENPDFKRRSTSLVQHAPLQEASPGQSKKDLPISLSVQGLPALVSASTASPANTLEEARKKLAALKYGLGTTVPSMPPLASNINDPRGRKGINLPETNNNKDNDLGIALQSPPPMRTPSPIPPPPRMKAGTWASFSNVPQESAFTGQHAVQRNSVPPGDSRAFGDALAHEPRSFYGTDSREPRDPRIWKSKTSQQQQHQQAPQAQIPPYSSDPRRSISTYSGFEEGGFRGGHNKRGFGRHNDVPRTYGEHRKAKARAEAEAKAKAEAEAKAKAAAEAKAKAAAEVRQLETEVSREMEAQEKNKQQKEKPEESEAEKSTIAVTQVPELDTSYRNVNLGVLNKKLDFRIPKKTLPPATTITSTSPVNGNGENPSCPSNSPTSKSCDANQDKDTYKNKDRYLNKAKAKDKVDKGNEVSENNLDKSEKLEKSQDKKANDKENKSDKKEKKRLNREPEKKSKVENPLEIVDSNSVVSEESSENTDNVENEPPLSETNASPVPELATSTQDSQQDQSVSEELDILAKNRRMSGTRIKTPISSTGNPALKRRADDDVEDKLENPTKKNCAKWEAKPDKEKSEDDTIDKIKSMKVTKFADVEMKVTEESQSAEEEEITEQKESTEEEEGTEHKKSTEEKDKPPKISKIKIVLTPIAHTTQVVRPNDGFKNNQEKILDNMATDEHDDEEVPGPPAQFLRRIMQRRNSLAPTYMKPMVDKDKIASSSFTYEDLPEQKRGNQNARNLAIIFEKTSDNCSVSTQNIINGKRRTRGCETSFNETQLSRNIFGMGQINRSRPKATRGQAIHKETEDDVEMKPKKARLEAQEINGVSVTPDEQQVENNVEVTQKEVEAISSEPLLSSEVEPTRKPRTKPRKNELDKLNDDIAQMYYGEEVMRATSRRACTRRSRTSSHTRTSSQHSRTSSVSRTDSISTVSDISSIIVRNTARRGRGIRSSENGINRATFNASLNAKKPKLCRVRIKRCAALMEMIKDQEKEEQEKKEQKNKEPKKKKVGVQKKPLKSKPKRENSVILNTNPEWHSISKAVIKCVVCSKWVRRSPLSHYMMCHKEHYAARLPPDVLKELRAGRGNRPDYWVSQRGGYTLHFTCPFCQKPLLLCQKGMIEHLIGHMGESRFYCSNCNMPQNRLSRLLDHTASCGPGAKPLSSKTVCLPMSVHVCHICQFMQYSKENMDRHLTVQHGLTKEELESVEREELMLCDTTDVPYADSNKDGSAREREEQDDQNMTQANEGSEVPEIPPPPPEIEPLFVVNECLMTSEMDTDMEEVLEQPVQHMSLMVDEKPVTLLSGATEQLEPSVPDPEPVVPSAQDDGKDVNEDEDVDVEAVVDSLQSHTDQTATSMLAEVSLAELAGDVLDGIGSDASDYEMDDNSEQVDTTNKNGYGDDDDDALTDDWVDLETAKRNSKSAKSIFRVFNRFCSRLNKLPRSSRAVPSNGSENSDGSDNNDDDGDNPDPSELMPTMQPLEPEPEMGDSSTSTGAKSLSERVENVGFQKPSSDEDQNRVAASYYCVQPGCTFLFSNELEGLENHFALEHPLVRWSGKCGMCRQKITATETNLRISEELRHMRDVHMKDISTLPPPQSSAVESPAVIESCLNQREPVPESEPDPVPELPKLRVRRFTGDRLVVDSQAEKSQPVAIVVSDDDNPRNGMLRDLLAADPRPPNQQLDLQAAGLGEFLCAKPDSPSTEPVKQTPVIVGYSSGLGLKIGQVLSRTQISANSRLSPVVNDPLPEKSSAPAAVEENRNRFRCMATNCNFVAHKLMFMREHMKFHSYSFSSTGHLNCAYCSHVAVDVDDYLRHGVIIHDLAPRSELESSTGPPSVTQKIRDMLSQRENGRVPPPTPQVTLSDVVLGLLECTGYSEDKLYACPQKGCIVRLTDEQLVNHLRYHIRSTHQGSELVKCKFCTKAMHPPALRTHLQQYHARHSIFCGICLATSVNQRIMMYHMSTVHSKAYGRPNARLAFVSLPVKIDASKKNVESEFYVAVVEQPFGNLQMQDFQRKLFDEMDRRRSGTKTYFRSSEVHILPTQPTFQRPLYCTECPFSTTSRVNMQMHLYEHKDETIREASKLADLIVPATSSVLTVSASTLVAPPRPGKDSEKPSTSGQSGDAATEQLNPDVPGTHKPIKPPLRYVPPDQRYRCGFLRCSVLCFSESAVRKHMQANHKYSEVVRCPHCKNCQGQFGVDKYFDHLAMHKRHIFQCGACSRHNSRRVIERHIQERHNIQDVDMIVHRHNDSNKTTEARWLKAPKLARHSLMEYTCNLCLKYFPTTVQIMAHAASVHKRNYQYHCPYCEFGGNLATALIEHILREHPEREVQPVQIYQRIVCKNKQTLGFYCTTCHEVASSFQKIAMHCDKEHKSRNPVQCPHCIFGHLAERQVVLHIQEKHPHERGLAMVQFERVLNDIPNSISWEIGRPIEVEPEKEIPNNGESAFLPLSQRQVVTEVVDLLDSDDEADEYGEQDDAKIVEFACTHCDGTNTNLPDLRSQHWAREHPDQPFYFRVQPMLLCSECKRFRGNAKALREHLRATHSIRSIVAADIRRPMECAYCDYRYKNRHDLAKHISEIGHLPNDLKHVTDDEIDALMLLSASGSGGAVNEYYQCGLCSVVMPTKETIVQHGQVEHCKPDERFCFRQLVSPVIYHCSFCMFNSTDELTTLRHMVDHYSRFLVCHFCTRSQPGGFDEYIQHCYTYHRDDIKSFRDVHTFSDLKRYLSQVHYQFQNGLIITKSSLRYTRYKSDKCMLELDAELMAKAQRPPIPRLHIRLKSTGVQMQSPEGADVEKPVSLLRITKRRKTLNPGELLRSFREENEVQPQPPASSTSSGTAPSPAAGSVFNLFKRRNSLVVRPATSNLDQH

SEQ ID NO: 34879 - DNA, 2851 bp, DROSOPHILA
ttgctgggtgcaaggacacctgctccggattcgggcatatttgttaagaactgatatctgatgtaaagcagatatcgaattatcagttagccgaatttgaagcaggtatcttaacaacctaacataaaaattgcataatattaattaataaaaaaaaaaaaacactccggagcttaagctaatctatagtctactgctctccgcgccattttgtcgtggcggagaaatctgggacttgtcgtatccattgctggacatctgcagatgctgcggaagttgggcaggacgtccgttggagggcaaggtctcgtccacggagaacacggagttgtcgtgtccgtgcatgtggcgagcattgagcacggcatccggatggctcttcggcgactccggctgtcccacctcatcaggcttgccttccagcaggaaacaggtgatgaagaagagaatagaacctgtgaccagaggtgttagtaatattggtatccaaaagtggccagatcaagccgacttactgatgccgtagaatccagcgtagaagatcatgatcgaaccgcgatagcccaggatcttggccaccggatccaccaggatgggcaggttgccgccaatgttgttcatcacaaacagaaagacgccaatggtcgaggagcgaacgcgcagcggaacaatctccacaacaatggcaaagacaataccgaaccacatctcggcgaagaaataactcaggcccagcgtgatcatggcccacagcgggtcaaagtagaccgatccgaaggctggtagtgtggcaattagctggctaacagccaatacaaaggcgcgtgatcgaatgcccatcttggcgacaatcttgtccgacacaatgccaccgacgaccacacccacgctgccaatgccaatggtgaccccaaagagccaccagcccaagtccacgtcggggaagtacgtgttgtagtagagatcggcgttgtaggcaaaggtcatgccaccgcagtgacggatggacgcggcaatcatcaacatgatcattgccggattcttgataacttgccacaggctcactggtttgccgctagacgtctggcggtcaccctcaccgatggccttgcgctccggctcccgcaaagtggttccggtcagtgcggccataattacggtaaggacaccggcgcccaagtagcaaacgcgccatcccagattccagaaattcagcttggtgatgtagcgacccacggggaaggcgattccatatcctccataaattccccagttgaagatggccatgactagtgctctcttatcctccggaaagatatcggacataatgcccgtggccaagggattgcaacccgactcgccggctgccatgatcatacgcaaaattaccagctgccagtattccttaacggtgccctgcagaatcatggcaatgccgaagatcactgtgcacacagtcagcatgttgacgcgattgtacttgtccgctgcgaagcccataaatacgccggcgatggtgaaaatcaggatgaaggtgggtccggccaggatctggtagtcgatgcccagtccattgtagttccactcgcaatagccagtgccgttgaaatcaagggcatagcagctggtctcattcataaccgccgagcactgggtgggcaactcgtggcgattgaacatcgaggtgttctgctggcaggcatgatcaccgtagtccaactcaatggccgtctgcttggaggtcactccgatcagatagtgacccaattcgcccaggatataaccaatggtgagtacggccaagacgtaggtgttgtagaacccgctgagtttctccagaataggtatcatattggggccgatgactgcgggagacacaaggagatcgccattgattaatacgactattcaatatactataaaaaccaagaacaagaagatacacaaacccaattggcgagctatctaactacaacgcatacccaaatgagaaccatcactatcgcatttctcatttgcaataaagaaaatattcaagtggctcgacataatgacaaataatctgcgagcactcaattaatgagtctaccagagtccgagtgtcagctcgcaggtcagctgcataatgcaatctcgctatagcacttgacggatccgtcgtgacttgaatttcgaaaggaacttggcgcagtgtccataattctccctcgcagcgtagcgaaagtgaaggcaattacgcgtacgtgatacgagaggcggtgtctaacgagcattatccggatacttatactgatataatgaactccaatcggagctctgccggtggtgacaattaagttaagatcaacaacattttactataaaataaagtacttatttgataataaatcagttaatggaatgataatggaaatgcgttttaaaatgaaacgaatcaatatttaatggacttcaagatcaagatatgaggaagcaaattgtgcccgcttttctgtagctctggccttacattgagtattttaagcctcagagctttcaaggaaatcggaactgggaaaattgtataatttatatatctatgggatttatgggttctccaagcgctcagttggacttatccaaaagcgtttacctgccgtaccgcgcaaagtgcctcgattaatttgtctttttcgttgtacgctccattctcgcaggcggcaattttttattttttttatttttttttttttttttgccaaaccgccattaggcaagcttcataatgggttaagcccggcaagaagccagctcttttgggcttcgacttcacttttgacagtcaaacacccgccccgccaacatgcgtacc

SEQ ID NO: 34880 - DNA, 1608 bp, DROSOPHILA
atgatacctattctggagaaactcagcgggttctacaacacctacgtcttggccgtactcaccattggttatatcctgggcgaattgggtcactatctgatcggagtgacctccaagcagacggccattgagttggactacggtgatcatgcctgccagcagaacacctcgatgttcaatcgccacgagttgcccacccagtgctcggcggttatgaatgagaccagctgctatgcccttgatttcaacggcactggctattgcgagtggaactacaatggactgggcatcgactaccagatcctggccggacccaccttcatcctgattttcaccatcgccggcgtatttatgggcttcgcagcggacaagtacaatcgcgtcaacatgctgactgtgtgcacagtgatcttcggcattgccatgattctgcagggcaccgttaaggaatactggcagctggtaattttgcgtatgatcatggcagccggcgagtcgggttgcaatcccttggccacgggcattatgtccgatatctttccggaggataagagagcactagtcatggccatcttcaactggggaatttatggaggatatggaatcgccttccccgtgggtcgctacatcaccaagctgaatttctggaatctgggatggcgcgtttgctacttgggcgccggtgtccttaccgtaattatggccgcactgaccggaaccactttgcgggagccggagcgcaaggccatcggtgagggtgaccgccagacgtctagcggcaaaccagtgagcctgtggcaagttatcaagaatccggcaatgatcatgttgatgattgccgcgtccatccgtcactgcggtggcatgacctttgcctacaacgccgatctctactacaacacgtacttccccgacgtggacttgggctggtggctctttggggtcaccattggcattggcagcgtgggtgtggtcgtcggtggcattgtgtcggacaagattgtcgccaagatgggcattcgatcacgcgcctttgtattggctgttagccagctaattgccacactaccagccttcggatcggtctactttgacccgctgtgggccatgatcacgctgggcctgagttatttcttcgccgagatgtggttcggtattgtctttgccattgttgtggagattgttccgctgcgcgttcgctcctcgaccattggcgtctttctgtttgtgatgaacaacattggcggcaacctgcccatcctggtggatccggtggccaagatcctgggctatcgcggttcgatcatgatcttctacgctggattctacggcatcagttctattctcttcttcatcacctgtttcctgctggaaggcaagcctgatgaggtgggacagccggagtcgccgaagagccatccggatgccgtgctcaatgctcgccacatgcacggacacgacaactccgtgttctccgtggacgagaccttgccctccaacggacgtcctgcccaacttccgcagcatctgcagatgtccagcaatggatacgacaagtcccagatttctccgccacgacaaaatggcgcggagagcagtagactatag

SEQ ID NO: 34881 - protein, 535 aa, DROSOPHILA
MIPILEKLSGFYNTYVLAVLTIGYILGELGHYLIGVTSKQTAIELDYGDHACQQNTSMFNRHELPTQCSAVMNETSCYALDFNGTGYCEWNYNGLGIDYQILAGPTFILIFTIAGVFMGFAADKYNRVNMLTVCTVIFGIAMILQGTVKEYWQLVILRMIMAAGESGCNPLATGIMSDIFPEDKRALVMAIFNWGIYGGYGIAFPVGRYITKLNFWNLGWRVCYLGAGVLTVIMAALTGTTLREPERKAIGEGDRQTSSGKPVSLWQVIKNPAMIMLMIAASIRHCGGMTFAYNADLYYNTYFPDVDLGWWLFGVTIGIGSVGVVVGGIVSDKIVAKMGIRSRAFVLAVSQLIATLPAFGSVYFDPLWAMITLGLSYFFAEMWFGIVFAIVVEIVPLRVRSSTIGVFLFVMNNIGGNLPILVDPVAKILGYRGSIMIFYAGFYGISSILFFITCFLLEGKPDEVGQPESPKSHPDAVLNARHMHGHDNSVFSVDETLPSNGRPAQLPQHLQMSSNGYDKSQISPPRQNGAESSRL

SEQ ID NO: 34882 - DNA, 2823 bp, DROSOPHILA
tgtagcaaattactaaaagtctcgcttcgtgacaagggcctggcataaagtaactaaagtaaggagcacgcgagcatttccacgtgcaaccgcaacgcgttggatgtgacgtcacgcggtttgaagcggcttaagagctgaactataattactattatgggatggataccaagcttaaagaagaaatatgtataatgcaaacgctgaatataaattaacataatcatgtatgtgtttgaaattctggataccgaaattaaaatgaaagcatggtatcatgttaatcaaagaacattgtaataaaacgcccgtatatgtgagcaatcatttccttgaaaatatattaaacttacaaagaataacgaaagttgatctaagaataaagcactttaaaacttgtattgctttattaaaaacatatgcaactttttaacaaatagtgcaaacataacacaaaaatgtcggctctgcattgcatacaaatcattacatatgatgttcaaaactttaactaacattttacctaaatgtttaaaaaagaaaacataaaatattgtgcagtaaaaatttatgaatttatattttacccctaaacaaaaaggatcatgcatttgtttttcagttaatgatttgttttcaatattaatttaaaggggagtgccgcaatgtggctgtggtattatttcgcctttgatggtcggtcactctgcgccgaaagcttccgcgaaattattgaaagctatttttaaagctattttggaccagctctgcagcttttttccatattgattagttatgtcgcttttgttgtttactcgccacattttttttgcccaggccagttaattgtgttaattcccggcgcgcgggaaaagaaaaagaaaagtaacgaacgacggtggaaccacggaaggacataacttccgtcaaaaaataaccatcacaagcaccaccaaccggatcccaaaggcgagtcgcgagcgagcgcacaaatcccccgatgtcagcgggtgtgggtggcggagggagcattaccaccgagcaccacagtcgcctctacttcctcaactcgccgacggcgccgctcaccgcccgcgatccgttcttcatcaagccggagtatctcagctatgagagtcccatgcaccatgccctctactcgggcaatcggggcctcttagagtacaacaactataccagttcggcggccgcggcggcagccgttgcctcatccgtagccacctccgtatctgtgtccggttcgggttcgggatcaggatccgcgggaaccgcagccagtgcctcagcaagtgcagcgaacagcggtggcagtgcgtctggaacggcggtgctgagcctcgagaacaatttcgcacagcagggtaatccccaccagcagcagcagcagcagcaacagcagggcaatccccaccaggaggtactccagcagcagcagcagcagcaccccctgcatcatcatttgtccgctggcgttgtggtcgaggccagtcaacttggtggcgttccgggtcttgccaatcttggcgtgccacatctcagcgcccagcagtcagtgacgcagcagggccaatcctcgagagcgcaaaaggccgcccgccggagaagcaacgaatcgattgaggccagggaaaggcggctggagagaaacgccgcccggatgcgggacaaacgggccaaggaatcggaggccgagtaccgcgtgcgtttggccaagaatgcggaggcgaatcgagtgcgacgccagaacgaaacggaagtacaaagaaccctaagactgatgaagaatgcagcgcggcagcgactgcgccgcgcctcggaaaccgtcgaggagcgtaagaagcggctggccaaggccgccgaacggatgcgaatcgcccgggccagtgcgcccaaggtcatcaagccgccgctggccgacaggctaaagggttactaatggaggatcgtataatcggttagcctggattcaggcaaatacgcccatttggagctggctctccggcagagcagcttggccgagcagccctaaaagctggccaggatcggcagaggaacacagacacatctacaaattatatatatatataaacatatatatatattgtatacagcctataagaaaaaagtttgagataaggaaaccagtccgaaaccagaaggattcttgaggacttgcaaatgaatgggcagcaggcactctaggattaaagccaggcaatttttttttttaagttaaaaattaacaagatgaagtaacgtaatgtaatcataaagtaaagtatttttataatgcatgcattatattcgtacgatatgtatacacacacgacacaaaaaccaatcacacacacacagacacacacacacccccaacccccacacacacatgcactagcatagtcattgccacacatatagagcccccaaaaaagggcagtaatatcccccactcccccaggaaaaaggaagcttacagcgccagggtgcctcactgtaaataaaaaaaaaaaaaaaacggagggaaaatcgccaacgactggaggtacacctcccaagcttaacaaaaagaaacccgaaaaactaaatattaaaataattactgagcatcgcggatggacgaggcaacaagtgcctttcgaggaaatcctcgggcgaaacttgctataacattcaaaaatcgtatttttccacaacaactgaggcaccctagtgacgaacaacccccatatgtgtgtgtaagttggtaaaggcatgtaacccaaaacggacagcgccactcacataaggataatatacacacac

SEQ ID NO: 34883 - DNA, 957 bp, DROSOPHILA
atgtcagcgggtgtgggtggcggagggagcattaccaccgagcaccacagtcgcctctacttcctcaactcgccgacggcgccgctcaccgcccgcgatccgttcttcatcaagccggagtatctcagctatgagagtcccatgcaccatgccctctactcgggcaatcggggcctcttagagtacaacaactataccagttcggcggccgcggcggcagccgttgcctcatccgtagccacctccgtatctgtgtccggttcgggttcgggatcaggatccgcgggaaccgcagccagtgcctcagcaagtgcagcgaacagcggtggcagtgcgtctggaacggcggtgctgagcctcgagaacaatttcgcacagcagggtaatccccaccagcagcagcagcagcagcaacagcagggcaatccccaccaggaggtactccagcagcagcagcagcagcaccccctgcatcatcatttgtccgctggcgttgtggtcgaggccagtcaacttggtggcgttccgggtcttgccaatcttggcgtgccacatctcagcgcccagcagtcagtgacgcagcagggccaatcctcgagagcgcaaaaggccgcccgccggagaagcaacgaatcgattgaggccagggaaaggcggctggagagaaacgccgcccggatgcgggacaaacgggccaaggaatcggaggccgagtaccgcgtgcgtttggccaagaatgcggaggcgaatcgagtgcgacgccagaacgaaacggaagtacaaagaaccctaagactgatgaagaatgcagcgcggcagcgactgcgccgcgcctcggaaaccgtcgaggagcgtaagaagcggctggccaaggccgccgaacggatgcgaatcgcccgggccagtgcgcccaaggtcatcaagccgccgctggccgacaggctaaagggttactaa

SEQ ID NO: 34884 - protein, 318 aa, DROSOPHILA
MSAGVGGGGSITTEHHSRLYFLNSPTAPLTARDPFFIKPEYLSYESPMHHALYSGNRGLLEYNNYTSSAAAAAAVASSVATSVSVSGSGSGSGSAGTAASASASAANSGGSASGTAVLSLENNFAQQGNPHQQQQQQQQQGNPHQEVLQQQQQQHPLHHHLSAGVVVEASQLGGVPGLANLGVPHLSAQQSVTQQGQSSRAQKAARRRSNESIEARERRLERNAARMRDKRAKESEAEYRVRLAKNAEANRVRRQNETEVQRTLRLMKNAARQRLRRASETVEERKKRLAKAAERMRIARASAPKVIKPPLADRLKGY

SEQ ID NO: 34885 - DNA, 9261 bp, DROSOPHILA
ataattgcacttatgttgctatgttgctagctctcttaactttcaatctagctgctgtttgttctgcttccgtttgttttgttctgattgttatttaatcgtttgatgcattaatttaactaaattatagatcagtactcagtaattgcttgtgtgtgtgtgtgtgtgtgtgtgtgcgcgcgcgtgcgtgagtaaaataaataaattaaacatggtggaaacctttaaatacatttctcagttgaaaagcacacacacaaggatatgcgatcaataaatataaatatatatttaaattaatcaaattatcaactaaatgtgtgttgtatgtgagtgtgcgtgtgcgtggatggaggacgaggaaaaggaagctgctgaaattaaagaaaggaaattatttcctcacttggaatgaacgtgtttttgggcgtgtttttatcttttttgtgtgtgacattctaggaatgcttaccatatattctcgaacatatatatatatatataatcgaatatatatgtaaatctaatacagaatcataccatatatgctatctcatatcgattacaaatacaaatacatctcaagcgcgctctccctttcaaatactatataaaaaatacaagttgttgttgctgtgctgatctatgcatatggatttgggtggctcgaataaaatatctaatataacgcaaaagtaattgcggacacgatgcaagacattttgtcttggaaatcgtaagtcttaaatgctcaatatttctctacttatttcaaacagtatctactagaatttgatcctatcaacctaagatggtccggcttgtttaatttctttgaaaatgtgaaatgtgaagttttagatctacaatttccaagacaaactgttctcaataaattgccctttactactactcgctgacctacgactctgatacactccaatgagtgtaatatttaacatctagatgtatatgatgggaaggacttctcgtcgatcgtttagcgcgtgaaggcactgagaaagtgcggcccgcccatgtcgaactgctgctgctcgaagctatcgtcggccaggccaaaactactgccacccagtccagcactgccaccaacaacaccgccgacgccggccaagccagctgccgctgcagcggccgccactgtggccgctttcagctgactgatggccagcatgggtggcttgtcgcctggcttccagcgcctgtggatacccatcgacttgagcttctggcagacggacgagggcgatatattgatgcccttctcagccaggcgggccgataccttccagtactgaatgttgctatcctccttaatcagctcgagtatttcacgtgtgatctccttgtcgcgcagctcacgttccgcggccttcaggcggcggcgaggatgcagcagctttggtgtcgtctgctgttgctgctgttgctgatagtgtgatgtgtccgctggtgtgtggtggcgcagctgctgctgctgctgctgctgttgttgttgttgctgttgctgctgttgaagtagcagctcctgttgctggcgttgctgcttgagccgctccatttgctccatttgctgttgctgctgtcgttgcatctcctgctggcgttgctgttgctcctgttgctgttgatgctgctgctgctgttgctgctgttgctgctgctccttgacgctaaactcatccgaatgcctgccatcggaacgcttattgcggtaggagagcggcactccctttagaatggcatcgcgcactttccaggccgtcatttgggatacattgagtgccctggctatctccatggtggaggagttctgggccaccagcaacttggccatggcatacttttcgtcatcgatgaacacgttcggcttgcgtggcttcttgccggttggcgttacagttgccgaggcagcagatgagcctggaacaggcactggagctgcagtgttgctgctggagctgccattgctgcgaagggagatttaagagttaatggaagtgttcaatgggctgagcaatcgcttgaaactcacctctcgttgctgttcatgtggggcattgaacgcagggacaggttgacgggcagggcgtgcctgttgaatggaaacacgattacgattagatattgagcctattttgaattgtaaatatatatcttatctcttgctatcattttttttataaacttcgaccgactggtttgtgtaaccgttttggtttcttgttagttcttatttcaaatatggaatattttatcaattaacatacagagataggggattgcattccgtattttaatctttaattccaaagttatatagtacagaaaatcagatagaagaatttatgaagaaaaagtcaatatttgtagggttttacgtcataacttggctaaaaatgaacatattggtaaatgaataactgttttgtgcagctaattaccatttctaaataacagtatcacatttttgttgatttaggaaaataatatttttggtcactttttgtatttttttttttttttaataaaaatttgcaaaaaaattaaaaaaaataaaattgccttttttgaacacagttcgattgggattttaaatacgagctcaacgaggtatgacattccatatttagaccattatttgccaatgtttttgcaaaaaaactgatttcattatgtcggaaattcgggaaaacggcttttgcgaaaatctcaatatttacgtagtttttttttcatatcttggctaaaagcggtcgtaaagataaaataataactgcttttaacagctaattaccaattctatcgacccctatcattttttgacggatttggagaatttaatttttgtgtacgtttttgcattttttgtaagggatcaattttgccaaagcaaattttcatatttttgatcattaaattctgcaaaaaatggcacaaaattgaaattttcaattttcaatatcagtcgactggaaattttgtcacgagttcagcgaggtatgacattccacgtttagaccactatttttcgagttcggccttaaaaactgtataaacgagccaccagaaataaactataaaatttgataggaacggcgctaatcatattatcatagctaaaatatttatgacgaattttgagtgataagactatttatacctttatgatttcttaaataaaatcgatgcttgtgacatttaaataatcttgaacggcttttatggctatgaccgcgtgatttatggtttaagaaaaatgtcttacatgacggagggcggataacgtgttagcatcggcattccaccgttgtgggccttctgctgctgcagttgctctcgcccgcgatcgcgctgctccctttcacgctcgcgttgctgctgctgcatctgcaactgctgggcgttgacgatgtgagggaagtgctgtgactcggccagcagacgtttataggcctcgacatcgggccgcgcggcagcatgtacctgcacaggcactggcatcccagaatttcccagcgttggcggctgtaatggcggcgcaggcgaaacggatccgggccgtccaccatttgaatggtgctcattgttttcggtgccctcgaagggatcgtgatcaatgtgatcggaatcgggatccggatcgtagccattgtgaagcaatccacaaacggcatcctcatcgcccatataaccagccgtttcctcagctccgatctcgtccgctccgcactcatcaactaggcccagttgatgatgcgaaggatggtgatgctgttgctgctgctgatgctgatgctcctcatcctcgctgtcctgtcgttcctctttgataagacccaagccgaggtggctatagggaagacttaaatgatggtgttcgcgttcacgttccgcttgtgccgctgcagcagctgctgcctgctgctgatcgtcctgctgatgatgttgcagctgtatttgctgatgatggtgctgttgctgcagctgttgaaggtgctgctcctcctgcgatggatccaccacgcgctcatgcaaactgactccatttaccaaacttttcctcaagcgccaggcgaaggtgcgcgagatgttcagctcgttggcgatcaccgtcgtggtggcctctcgcaatattaactgcttggccagggcaatcttctttgcatccaacttgatgcgagtgcgcccctttctcttgttggccagcccaagtcttaaagatcaaacacaataaatcagaaaagttccttaagttatatgcagtatctcctacttacttgcgattatttatgtgcagatcgggagccgtgggcttgcgtgctcctccagcggcaacccgcttggggaaattattgaactgcacaatgttttgcttgaatagctgttgcagtggcctgttaagatgaaaaaccaaatattttgactcacatatggtggttattttccgatgtatcacttacattttggccgcctttgaaggacaaccggtgcgcttatgccaacccagatgatggcctgtggggaagaggacatgacaatccgagcactgcatcggtcgactgaaaccccaagaaatgcaatggataattgaatatacgaaataattctttggcactcacgtttgattgcgacgcttcttgacacaccgaccgcgtcgtatgtgcttctccagaaaacgcttgtagaagtaggttttgcggcaattgctgcactcgtacaccggacccggtgctccatggacgctctgcatgtgcgctttgaggatctgcttcatctcgaagatctggtagcaatgggggcattggaaacctggatcctgcaatccttgaaccacgccaacgccgggctccattgaccaaatcatttggattcgacggatcccctaaagcttcatcacccggcgtaatcaattcaatttcgggtataagcggcagcgacatttcctcatcctcatcatcgtcgccgtcgtggtgctgctggtcgagatcgagctccaagtcctgacccggcggaccggtggcggagccattgggaaacttgttcatctgatgttgcatatactcctgcatcaggcgaatggaattgaagtcgaatggttccttgggatgaccggcatggccggttatctcgccatcgtcgctatggtgctgatttaaatgattgatctcctccacatcattgtcatcctcgtggtttgcttcccttaactccatgccgtttcggagaagatcctcgcctccaccggcattgcggcctggttcgtgatggtcatcaatctcatcgtgtatctcatcagcctcattcccacgatggccattaatggtttgtccatgaccattttgaaggcgcttttgttcctcgtcagcaacgacatcattgtcgttatcctgctcctgttcattgtcctcatcctcgtcatcggaggaggaactgctgctggtggaactgctgccgcttccgctgctgctcccgctgccactgctgcagccgctgctcttggcctggtcggcagcagcattcgcctccagcggatccgcgccctcgatcttctggagcctcagttgctggcgataaaaactgtccgcctcctcgcactttttcttaaacacgcaggccgatatggccgtcttagcacatccgacgcacacctgttgcggtaaggtgtcgtttttgctaatctaaaaagtaaagaacaacgtgggaaaataggttttaaattcacatttaaactctggcaaatgtaatggccatctaaactaacaattgtaacggccatctaaactgccatatcgatggaaaataccgctaatcgatttcaaaactcgctgtgattcacagtgattagtcatgacaacaaacggaaatgacggattttcaaatttgatcataatacatattagtaaaatgtttaagctataattaagcaatcatttttgtatatttaacaaatctgtatctaacaacttgtaatacatatatgtaaattgcaggacaacggtattcccaggcgttgccagacctacacgaatgcccaatgacaacataaaattccttgaattggcaacataatctactcaagtgggaaaattgcacaaataaaccagaaaattgcagcatttcaacggttaaggaaaaacacataaggagaaaatcaaattgaaatatgcacatgaattgtaaaagcaccaaatgcgaacaaggggccgaagacaaacaggcgagaaaacacacagagccaccccattcacattcacgtgccgcccctcactttaccccttactttgccccttgctagcccagaatcgaggggccaacgaacgtctaagccgaacataaagtggaaaatgggcaaagagcgagtacacagagcgaaaagtaccaggtccattgttgcataacaattcctatactacaatatttcaaggaccgagttcgcatcccaaaaaatagatgaattatcttttagctcttgtatctgaatcaaatctatctatatgcaagccagataatctcgttagtcacgttaaagattgtctctattacaccattcgtttcttttcgtgtacgagagcgacagagattaggaggagctggcgaaagagagtcatcaagagagccaagattgtaaagttaagtaaaggaaaaatgtatggaattaagccaagcacatatacaaacattcaaacatacaagcaaacacttctaaacagcaattcaaacggtaaattattttacaaaagccaagacaagacaagacagagtagagaaacgaagagatacgaaatgaaatgaagaaatacaaaatccgaagacaagacccacaagaaattccatcgaacggcaaacggaaaaaatatgaaatgctcgttgaaaaaattgtatacacaatacacaatatgaataaaataaactaaccaaagctgaagccgaaatcattccaacgaacaaataaacaccaaacagaataaatggccaaagaggagtggagcaacaagacaaagcaatgaaaactgattccaaattacacacacacttatgcggcttggatataagatataagatatattatgtacatacgtacgggcgaatgtgtatgaaaattaatatgaataataaatacgccgagtggctgtgttggtgtgaataactttcatgtgtttgcttttttagttttagtattccacgaagaagaacacaacaacaatcttggattacacacaaacagtgggctcaaatagtcgacacacctcgttaaaaataaatacatacatcctatacaccctaaaaacatctttcagctcaactatgcatgtgcgaataagaccaaacacaatttgcttcctgccattgcatgtgtttcgattttgatttattctaagccctcttggaaacgctgatgggcaggtacatacatacatatgtgtatgtatggaatacaaattaggatcgattttataggcaaacagctcgaaaagctctccagaatcaatgggatagaaaagaaaacaagccgttcgcagcaaaacatcaaaatcaataactacactgttcgcaagccaaaaaaaaaaaaacttataaaacgcttcggaaattatataaaaataagtgtacaccttgtggaatgaacagtttttatgaatattagggcactccacgcgctagtttattttaatcagccatcatgaaagcggccctaaaacatttcttatcaaaaagtttaccatctgtagatgataagaggtctatgtaaatggaaagccataatacctgttctacaaactaaatttaattatgtaaaccagcgtatgtctttagacttgagcctaacttcttaacaatacgttgcaatactgtatagtatctctgtatcgtaacagagttttcttttgcgtgtgaccactgtatgggaagtctgcaactcttgaccttcggttcacccgcttcttctttgtcacctgcttgcttgctcttccgtccggttttcttggtgtttggattgctcccctttttactgtgagcccccatttcagttgccccctttttcagcgatttccactcaccttgacgttggccagcgtggtaattttctgccagagagcatcctcgccgaagatgggtatcattggcaggttggctgtggctgctgttgtggtgttgttctgctgctggtgggtggtgatgcagatgcgacataggggcgcacttccgcccacaacctccggctgttcgcactccatcgcgggagtttggaacggagggaactggaactggaatcaaaggagatggagctgctgcaggagtaacaggagtaaccgctggccatcaactgcatgccttccaatggttctgggtccttcggcttccactaagcgtcgtcgtaccgcgaatttccgccagtgggtggaccagatcaatcagtaaccaagtccgctatcgatggattgatgggatgaagacgaccggcaacaagtggcactctctcgcgcgagagagcggcgggcggaacgaacggaatggagagacaacgcacggaacgcagaaaagaaacgttgcgattgtaccgacgacgtttggtaaactgaaatgggaatgcagagcagaacaagaaaactatttattaataatggggcataaacgaaaaaaaatgtgtgtacgaaaaaaaaacaagaaaaaatacatacaaggaaatataatacaaaggcaacgacgttcaagacgcaaagaaaactaaataagagttaacaaaacactgagcgagcaaactagaaaataaatgtgaaaaataaaaaaaaaaacacaggcacacacagttatggcaacacaatggcacactgatacaaacatactccttgccccctgcgtacaaacatacgtacaagcatatatttattgtgtggatttcaacaaaaacaacagcagcaacaacaaaacaattcttactgtcgtagccgacgtacaaaagttatgaacttgatacacacacaggcacatacgaaaataaaattacacaaaagaaaacaagtcgaaactaaaaaataacattcatgcacacacacacacacgacctcacacgcacacttttacaacgggggtatctcacagatacagcgacagtgagacacgaacaaataataatagcaaaaatcgtaacgaaacgaaatgaaataaactttatatctacaaagttgaaattgatgggtggagggccgaggttcgggggggttatagacgagatag

SEQ ID NO: 34886 - DNA, 3378 bp, DROSOPHILA
atggagtgcgaacagccggaggttgtgggcggaagtgcgcccctatgtcgcatctgcatcaccacccaccagcagcagaacaacaccacaacagcagccacagccaacctgccaatgatacccatcttcggcgaggatgctctctggcagaaaattaccacgctggccaacgtcaagattagcaaaaacgacaccttaccgcaacaggtgtgcgtcggatgtgctaagacggccatatcggcctgcgtgtttaagaaaaagtgcgaggaggcggacagtttttatcgccagcaactgaggctccagaagatcgagggcgcggatccgctggaggcgaatgctgctgccgaccaggccaagagcagcggctgcagcagtggcagcgggagcagcagcggaagcggcagcagttccaccagcagcagttcctcctccgatgacgaggatgaggacaatgaacaggagcaggataacgacaatgatgtcgttgctgacgaggaacaaaagcgccttcaaaatggtcatggacaaaccattaatggccatcgtgggaatgaggctgatgagatacacgatgagattgatgaccatcacgaaccaggccgcaatgccggtggaggcgaggatcttctccgaaacggcatggagttaagggaagcaaaccacgaggatgacaatgatgtggaggagatcaatcatttaaatcagcaccatagcgacgatggcgagataaccggccatgccggtcatcccaaggaaccattcgacttcaattccattcgcctgatgcaggagtatatgcaacatcagatgaacaagtttcccaatggctccgccaccggtccgccgggtcaggacttggagctcgatctcgaccagcagcaccacgacggcgacgatgatgaggatgaggaaatgtcgctgccgcttatacccgaaattgaattgattacgccgggtgatgaagctttaggggatccgtcgaatccaaatgatttgatcttcgagatgaagcagatcctcaaagcgcacatgcagagcgtccatggagcaccgggtccggtgtacgagtgcagcaattgccgcaaaacctacttctacaagcgttttctggagaagcacatacgacgcggtcggtgtgtcaagaagcgtcgcaatcaaactcgaccgatgcagtgctcggattgtcatgtcctcttccccacaggccatcatctgggttggcataagcgcaccggttgtccttcaaaggcggccaaaatgccactgcaacagctattcaagcaaaacattgtgcagttcaataatttccccaagcgggttgccgctggaggagcacgcaagcccacggctcccgatctgcacataaataatcgcaaacttgggctggccaacaagagaaaggggcgcactcgcatcaagttggatgcaaagaagattgccctggccaagcagttaatattgcgagaggccaccacgacggtgatcgccaacgagctgaacatctcgcgcaccttcgcctggcgcttgaggaaaagtttggtaaatggagtcagtttgcatgagcgcgtggtggatccatcgcaggaggagcagcaccttcaacagctgcagcaacagcaccatcatcagcaaatacagctgcaacatcatcagcaggacgatcagcagcaggcagcagctgctgcagcggcacaagcggaacgtgaacgcgaacaccatcatttaagtcttccctatagccacctcggcttgggtcttatcaaagaggaacgacaggacagcgaggatgaggagcatcagcatcagcagcagcaacagcatcaccatccttcgcatcatcaactgggcctagttgatgagtgcggagcggacgagatcggagctgaggaaacggctggttatatgggcgatgaggatgccgtttgtggattgcttcacaatggctacgatccggatcccgattccgatcacattgatcacgatcccttcgagggcaccgaaaacaatgagcaccattcaaatggtggacggcccggatccgtttcgcctgcgccgccattacagccgccaacgctgggaaattctgggatgccagtgcctgtgcaggtacatgctgccgcgcggcccgatgtcgaggcctataaacgtctgctggccgagtcacagcacttccctcacatcgtcaacgcccagcagttgcagatgcagcagcagcaacgcgagcgtgaaagggagcagcgcgatcgcgggcgagagcaactgcagcagcagaaggcccacaacggtggaatgccgatgctaacacgttatccgccctccgtcatgcacgccctgcccgtcaacctgtccctgcgttcaatgccccacatgaacagcaacgagagcaatggcagctccagcagcaacactgcagctccagtgcctgttccaggctcatctgctgcctcggcaactgtaacgccaaccggcaagaagccacgcaagccgaacgtgttcatcgatgacgaaaagtatgccatggccaagttgctggtggcccagaactcctccaccatggagatagccagggcactcaatgtatcccaaatgacggcctggaaagtgcgcgatgccattctaaagggagtgccgctctcctaccgcaataagcgttccgatggcaggcattcggatgagtttagcgtcaaggagcagcagcaacagcagcaacagcagcagcagcatcaacagcaacaggagcaacagcaacgccagcaggagatgcaacgacagcagcaacagcaaatggagcaaatggagcggctcaagcagcaacgccagcaacaggagctgctacttcaacagcagcaacagcaacaacaacaacagcagcagcagcagcagcagctgcgccaccacacaccagcggacacatcacactatcagcaacagcagcaacagcagacgacaccaaagctgctgcatcctcgccgccgcctgaaggccgcggaacgtgagctgcgcgacaaggagatcacacgtgaaatactcgagctgattaaggaggatagcaacattcagtactggaaggtatcggcccgcctggctgagaagggcatcaatatatcgccctcgtccgtctgccagaagctcaagtcgatgggtatccacaggcgctggaagccaggcgacaagccacccatgctggccatcagtcagctgaaagcggccacagtggcggccgctgcagcggcagctggcttggccggcgtcggcggtgttgttggtggcagtgctggactgggtggcagtagttttggcctggccgacgatagcttcgagcagcagcagttcgacatgggcgggccgcactttctcagtgccttcacgcgctaa

SEQ ID NO: 34887 - protein, 1125 aa, DROSOPHILA
MECEQPEVVGGSAPLCRICITTHQQQNNTTTAATANLPMIPIFGEDALWQKITTLANVKISKNDTLPQQVCVGCAKTAISACVFKKKCEEADSFYRQQLRLQKIEGADPLEANAAADQAKSSGCSSGSGSSSGSGSSSTSSSSSSDDEDEDNEQEQDNDNDVVADEEQKRLQNGHGQTINGHRGNEADEIHDEIDDHHEPGRNAGGGEDLLRNGMELREANHEDDNDVEEINHLNQHHSDDGEITGHAGHPKEPFDFNSIRLMQEYMQHQMNKFPNGSATGPPGQDLELDLDQQHHDGDDDEDEEMSLPLIPEIELITPGDEALGDPSNPNDLIFEMKQILKAHMQSVHGAPGPVYECSNCRKTYFYKRFLEKHIRRGRCVKKRRNQTRPMQCSDCHVLFPTGHHLGWHKRTGCPSKAAKMPLQQLFKQNIVQFNNFPKRVAAGGARKPTAPDLHINNRKLGLANKRKGRTRIKLDAKKIALAKQLILREATTTVIANELNISRTFAWRLRKSLVNGVSLHERVVDPSQEEQHLQQLQQQHHHQQIQLQHHQQDDQQQAAAAAAAQAEREREHHHLSLPYSHLGLGLIKEERQDSEDEEHQHQQQQQHHHPSHHQLGLVDECGADEIGAEETAGYMGDEDAVCGLLHNGYDPDPDSDHIDHDPFEGTENNEHHSNGGRPGSVSPAPPLQPPTLGNSGMPVPVQVHAAARPDVEAYKRLLAESQHFPHIVNAQQLQMQQQQREREREQRDRGREQLQQQKAHNGGMPMLTRYPPSVMHALPVNLSLRSMPHMNSNESNGSSSSNTAAPVPVPGSSAASATVTPTGKKPRKPNVFIDDEKYAMAKLLVAQNSSTMEIARALNVSQMTAWKVRDAILKGVPLSYRNKRSDGRHSDEFSVKEQQQQQQQQQQHQQQQEQQQRQQEMQRQQQQQMEQMERLKQQRQQQELLLQQQQQQQQQQQQQQQQLRHHTPADTSHYQQQQQQQTTPKLLHPRRRLKAAERELRDKEITREILELIKEDSNIQYWKVSARLAEKGINISPSSVCQKLKSMGIHRRWKPGDKPPMLAISQLKAATVAAAAAAAGLAGVGGVVGGSAGLGGSSFGLADDSFEQQQFDMGGPHFLSAFTR

SEQ ID NO: 34888 - DNA, 7179 bp, DROSOPHILA
aatcaacaaacaaaacacaacaccaagaaagtgaaaacagaaacagaaaaatataagcgaaaaaaaacgagaataacaaaatgaatatacttgaataaagttgcattcacaatttttaaatgctgcgttctgagctttggtgggaatttaatagggaatagtgataatctaaaaaaaagtaaaagcgttatcaaccggaaatgatcaggaatggttgataataacactacaattttgaaaatttccttcaaatctgacagaatgtcctcgatgaacctgaagggtgggtcccattctcaggatcgccatccgtatgcttgttgtacatttaagtatcacagcaattaaacaaattaaaaactcccatctaaaatacatttaaatataaaatataaataatttacaaactccattcagcacatgctactgaactaatcctattatatatacgattatctacgattatcaacgaaatgctcttattggaaataatatagtttctaattttatataaatagtttaattcacttttataaatcgcatttattcatttcaaaaagatttgaaagctttggaatgttaatgccctgttaacataacataacatagttgattgttatgtaaagtaagctttaaaacagtgtggccaagaggcgaaaatttgttacaattgaaatagaattatccatgtcttgacgttacgcttgatttttaaaaaatcgatttcaaacatcaagctatcgacaagctgatctaactataacattaagtatggaaaaatagtacatatattctgtaatatggtactgcaaaactgcagccaaataataatataaatattatctgcctgcaagactaatttccaaattgtaaaataaacccgggcgatatttcaagcggaacatcggttaatcagttgcattttccaatgaatcgacagcctgctcaactatcgatgtatcgatactttttaccatccctactgtgaacagaacgattgttgaaatgaaaacaactgaaataagatgaattaaattaaattaaagatacagtaccacggattgcgaacaagtacgcatacttcaagttaatgacattacggtgcgatcggaagtggcagatatacgctggtcccagctatgtggaaaattcccggtagttaagttaacgctgcgccgccacagaacatccttttaacccaccaagagaaaaggcgcctggatgcaccgcagcacggcgaataaatggaattacaaatcaaagggttaaggtttgtgcaaaaagcaaaataaggagcggaaaaaaactcgcacacacgtacgttgcgtattgcttcgttgcgcgtgtgtgtgtgtgtgtttagcagtgcgtgcttgtgtgtgcggacggcggctgcatgggtgtgtgtgtataatcatgtgaaaaatcgattggcagcgcagaagcagcgcggcggcggcgccaattgtcactgactcgcaagaagaagcacgcttttatgaaaacgcacgaaaaattgtaatggccaaatacgaacggtaataaagtgcataatgctaaaaatggagaagaagaataccgctcatagccaaaaagggaacgaaagaaatgcccgaggaccacaataacaatagcggagtgatcgccgcaaaaatagagtgcgagagagaaacggcgccagcacacacatattctttatataactactagtaagcaaaaagcgaaacaaaacaaacacaaagaggaaacgccaaggagcagcggacgaaaaaaagagcgggagacggcccagagcgtgcgaaagagagggggcgagcaagagcgcggcccctagatgttatcgaaacaatcggaaggactgcgctcatcctttcgataaccaaatacccatcgtctatatacacatatatagatatatatctataaatatatatataaatatatatatatacataacaaacagtacacttttggagccccgatagacgacaatttcgattgttgttgccccggcttttgaccaagaatggaaccagatcccaatgggataaaaatagagccctcacttgatcagcagcagtacgccacccatgtgctggccatcaatggctccaatgcccgcctgctcatcgagcatccctcagctttgttggtaccactctcctcgcatcaccagctgcaattgcaacagcagcaacaacagcagcagcacgtacagcagcaacatcaacaacagcagcagcagcatcagcaacaacagcaacagttccagcagcaacatcttcaccagcagcaacaggatcaactgcagttccagcaacagcatctccagctttatgcaccactgaagcaacagcaattgcagcagcagcaatcgcagcagccacccactccattgggacccaccagcagtgccagttccgcatccataacaggtgcctccaccactggccaccagcagaggtggaacgagagccccgaggcacgccagcgccgtctggccagaaatgctgaaaggatgcgggaacgccggcagcgcgagagcgaggaggagtatcgcaagcgactactccggaatgcagaagccaatcgccagagacgccagaatgaatccgacatagagcgggccatgcggctagtgaggaatgcggccaggcaacggctacgccgggccatggagtcgccggaccagagggccaaacggctggccaaattggccgaaaggatgcgcatgtatcgcgccagcgagacgaacgatcagcgaaagctccggctggcagaaatggcggcaagggcgcgccaaaggatcgccaatgagtcaccggaggagcggaaggaaagactgagaaagctgaacgattatgccaaaaaggtcagagaaaagaagaaggtactgaagcatgttgtggtgcacggtggttcgtcgtcggtggtcgtctcaacgccgacatcctcctcgtcgtcaacggaccagcagcaccaccaccagcagcagcagcagcaacagcagcaacaacagcagcagcaacaacagcagcaggtgctggctgttgcagcagcagccgcagcagcggcggcagccaattgtactaacgaacacactatcaatctaaaccaggcgaccaccacagcgacgacgacgacaacggacgaggcaggcaccccgcagcccgcggaggatcagcagcatctggtgacagcagccgcctatcagcaacaccaggccctggccggagtggagtatatgggacagggcatgtttctggcgcccggctccctacgtccacccatgcaactgaagcaggagccacagacgccgcagcagcagcagattacacagcagcagctgcagcagcagcatcagcgatacaccatcaccggacagcagcagcaacaggttacggctgctctgctcgagggcaccgagccgggcagcatctttgtgcagcagatctatggcgatgagggtggcaagggcaccgcaaagctgctccaggcccatgtgccgcacttcagcatcgccggtggccagctggaactctacccgcacaaatatgctgccaagaagcaggaacttcaggtgcgtatgcagtaggcgtagtagatagcaagaatgatcggcgatagcaactaaatcacgcacacacacacaaagtaacgcagcaaaactaaagtttggcatcctccaggaacctcatcttgcccatgaatccatcaatgtaatttgttatctagaaacactatttatttgaaatctaatcggtattagaaaaaaagggcactatctacttccagtaaacgtaaaatcaaaacatgattagcctaatttagcttgattcctgaataataacaataaatgatttttacagttgcagaggaatttggaatcgaatacaaattcgtagcgctggtaaaatatcaaacaattgccaatactcgtaaatttcaaatattttccttgcagttggcgaaatcaactgcctcaaaggaaaatgcttgaaaccggaaagtaggaattttgaaaatatatagaattcaatggaaattggcagaagaagcggccaatggacctctctttttttttgcgcgttgccttacccgcattttaactcctcttttgatcaaaagcgaaaatcgtataagtttatttcagttaacattattgttcgttgttcatattacttgtgttagttcttttttttggtcagaagcaaatgaattaatcaatcgtatagagtgtagatatatgtagcaatgtaaatcttgaacctaagaacaaaatacttttaccaaccagaaacaaacaaaaagtggttttaattcccttgtacaggtgtgcgttcgtgtgtgtgtgtgtgtgtgtcctccatctatccctttcgctctatcactcgcactcggttcttttcgaaaaccaatctataagaccaccttcaatcacatcaatcaatcttatcactcaaattacgaaattaggttgcaatgatttgtaaaattcaattaccgaagattgctgtgattgcgaagattaagatttataccagaattccaaaccgatagtcccataacccgcagaatcaaaccgactcacccgttggcttgccaatcccttctatcccttcttgcagtcggacaacgatgctacggtatcagcgggcggcaatgataacagcgggtctgttagcctcggccacaacgagaccaaggtgatcgtgacgacggccagcggggaacagaagctgcttaaggcgacgcccggccaggcgcagcagctgtataatcaattcccctacctggccaccttccctaacaccaccagcagcggcaacagcaccaccagtaccaccaatgtcggacacgtgggcgtggtaacggcgggtacaacaacgggcgccggcggtacaaccaccaccgcctactatccaatgtaccacaatggcttccagattggcatcgggccgaatgcagtgccgccgccgtttacgcccgtcaactttgccaacgccagtggtggcaatagtcccggacagtataacatactggcggcgaatccaacgctaacggtcactggattgggacagcaggagcaacaacagacaggcgcgtcgtcggcggcggcgccacaaattgtgaccacacctgttggcaggggcaggccgcgaaagaatccgttgcccagcgaggagcagctaaaggtgaacagtctgctggagcaggagctcaatcagatgctgtccgcaccgcagctggccaccagtacgccgcgtcgcggcaggccactgtcgcaggcatcgcagcaacatcatcaggagctcagccagattcatgtacattccacggccgatggcgacagtcgaacgccagtgttgacgccgcgacgcagcggtgctaacaaatacgagacggaggaggagaagcgaatacgtttggacaagatggccgcacaccagcgagcggtgcgtgccaatgagacgcccgagcagcgggccacgcgtctacagaagctgagcgaacgggcacgactgaagcgggcccagatccgagccaccgagaatacggacgagcgcaaggagcgactgtccaagcaggcggaatatgcgcgaatgcgacgcatgcgcagccacacgccgcgcagcagcagcgccaccagcaccgagttccgtgccaaaaccgaggaagaagatgagtgccaggacgatgacaccagtgccgagcatcatatgtacgaaagtgaagccgtttcggtcactggcacgggcagtgatggtggcttcgtttcggtggtgaaggccgacaacgacgattcaccattgggcggtggcgatggctccaacgatcacgaacagttgccggcgctgcaattgcagcagcatgagctgcagcagattgccggcagccttcagcagcaacatttggtgccgcatccgcatcacgaggcgattgtgttgaaccagcagcaccgcctggtgaccatcagtcagcaccagcagcagcagctccatcagcagcagcatcctggcttcagtaaactgcagacggtcaaggattatgcaaatgcagccggcggtggaggcggaggaggagctgctggttctggcggcggcagtggaacgggagcacccgaaaacaatgacatgctaaagatactcgagccaatcattgtgatgaagaccaaatgaggttcgcggaggcgtcacagtcgcagcaccaatcgctagaagggatatgtgtggatgacgtgctagccaggcctccatttccgccggaatatcaggcgttggacgcacaaacgatggagatatctgcgaacagtagggattgtctatagttatcaataagcgtatatttttttttaatctgttttttaaagtgttaatgtacttcaatggtagattttgtaaaaagtcagagtaagcggagatcaaggatcaagtgcaatacggatgcctggcaggcacaaaagtccaccggaaacccagaaagctaaatgaaatgaaacactgtgacgccccgaaagccactgaaaatcgaagaaatgcagctaaaataaaaagataactacgatcgatggtggagatccaactaaacctaatccagaatatgtagcgcgtaaacagagcactaagtagttgtatgtattaactattaattttttaaattagcaaaaaaaaagcaaaaaaaaaacccaaaataacaaataaatctaataagatcgaaacaaaacggtcaatggcagcggtgtatgggatgtatgtgtggtcagccagtggctatcggttatcgatagcaaatgcagaggcgaacgtgtttttgcatgttgcacgtctggcgcgcacatgacgcgcatgacgcgcaccacatccgctggaaattttttccaaaggcagcctttctttctttctattcctactcattacggtagtggttgtcagcgtgcaggtgatggaaaagctctggaggatctgtataaaaatcataattaactttttaaaaatgtgttcatattttttcacatttttattggtttggcaattttctattgatttgcaaaaaatctgttttccactcctagattattcttcgttttactgtttgtcttgcagatttttatcagtagaagcccaaaataacaaataaatctaataagaacaaaacaacacggtcgattggcagcgatgt

SEQ ID NO: 34889 - DNA, 4233 bp, DROSOPHILA
ttgaaatgaaaacaactgaaataagatgaattaaattaaattaaagatacagtaccacggattgcgaacaagtacgcatacttcaagttaatgacattacggtgcgatcggaagtggcagatatacgctggtcccagctatgtggaaaattcccggtagttaagttaacgctgcgccgccacagaacatccttttaacccaccaagagaaaaggcgcctggatgcaccgcagcacggcgaataaatggaattacaaatcaaagggttaaggtttgtgcaaaaagcaaaataaggagcggaaaaaaactcgcacacacgtacgttgcgtattgcttcgttgcgcgtgtgtgtgtgtgtgtttagcagtgcgtgcttgtgtgtgcggacggcggctgcatgggtgtgtgtgtataatcatgtgaaaaatcgattggcagcgcagaagcagcgcggcggcggcgccaattgtcactgactcgcaagaagaagcacgcttttatgaaaacgcacgaaaaattgtaatggccaaatacgaacggtaataaagtgcataatgctaaaaatggagaagaagaataccgctcatagccaaaaagggaacgaaagaaatgcccgaggaccacaataacaatagcggagtgatcgccgcaaaaatagagtgcgagagagaaacggcgccagcacacacatattctttatataactactagtaagcaaaaagcgaaacaaaacaaacacaaagaggaaacgccaaggagcagcggacgaaaaaaagagcgggagacggcccagagcgtgcgaaagagagggggcgagcaagagcgcggcccctagatgttatcgaaacaatcggaaggactgcgctcatcctttcgataaccaaatacccatcgtctatatacacatatatagatatatatctataaatatatatataaatatatatatatacataacaaacagtacacttttggagccccgatagacgacaatttcgattgttgttgccccggcttttgaccaagaatggaaccagatcccaatgggataaaaatagagccctcacttgatcagcagcagtacgccacccatgtgctggccatcaatggctccaatgcccgcctgctcatcgagcatccctcagctttgttggtaccactctcctcgcatcaccagctgcaattgcaacagcagcaacaacagcagcagcacgtacagcagcaacatcaacaacagcagcagcagcatcagcaacaacagcaacagttccagcagcaacatcttcaccagcagcaacaggatcaactgcagttccagcaacagcatctccagctttatgcaccactgaagcaacagcaattgcagcagcagcaatcgcagcagccacccactccattgggacccaccagcagtgccagttccgcatccataacaggtgcctccaccactggccaccagcagaggtggaacgagagccccgaggcacgccagcgccgtctggccagaaatgctgaaaggatgcgggaacgccggcagcgcgagagcgaggaggagtatcgcaagcgactactccggaatgcagaagccaatcgccagagacgccagaatgaatccgacatagagcgggccatgcggctagtgaggaatgcggccaggcaacggctacgccgggccatggagtcgccggaccagagggccaaacggctggccaaattggccgaaaggatgcgcatgtatcgcgccagcgagacgaacgatcagcgaaagctccggctggcagaaatggcggcaagggcgcgccaaaggatcgccaatgagtcaccggaggagcggaaggaaagactgagaaagctgaacgattatgccaaaaaggtcagagaaaagaagaaggtactgaagcatgttgtggtgcacggtggttcgtcgtcggtggtcgtctcaacgccgacatcctcctcgtcgtcaacggaccagcagcaccaccaccagcagcagcagcagcaacagcagcaacaacagcagcagcaacaacagcagcaggtgctggctgttgcagcagcagccgcagcagcggcggcagccaattgtactaacgaacacactatcaatctaaaccaggcgaccaccacagcgacgacgacgacaacggacgaggcaggcaccccgcagcccgcggaggatcagcagcatctggtgacagcagccgcctatcagcaacaccaggccctggccggagtggagtatatgggacagggcatgtttctggcgcccggctccctacgtccacccatgcaactgaagcaggagccacagacgccgcagcagcagcagattacacagcagcagctgcagcagcagcatcagcgatacaccatcaccggacagcagcagcaacaggttacggctgctctgctcgagggcaccgagccgggcagcatctttgtgcagcagatctatggcgatgagggtggcaagggcaccgcaaagctgctccaggcccatgtgccgcacttcagcatcgccggtggccagctggaactctacccgcacaaatatgctgccaagaagcaggaacttcaggtgcttggcgaaatcaactgcctcaaaggaaaatgcttgaaaccggaaaaatcaaaccgactcacccgttggcttgccaatcccttctatcccttcttgcagtcggacaacgatgctacggtatcagcgggcggcaatgataacagcgggtctgttagcctcggccacaacgagaccaaggtgatcgtgacgacggccagcggggaacagaagctgcttaaggcgacgcccggccaggcgcagcagctgtataatcaattcccctacctggccaccttccctaacaccaccagcagcggcaacagcaccaccagtaccaccaatgtcggacacgtgggcgtggtaacggcgggtacaacaacgggcgccggcggtacaaccaccaccgcctactatccaatgtaccacaatggcttccagattggcatcgggccgaatgcagtgccgccgccgtttacgcccgtcaactttgccaacgccagtggtggcaatagtcccggacagtataacatactggcggcgaatccaacgctaacggtcactggattgggacagcaggagcaacaacagacaggcgcgtcgtcggcggcggcgccacaaattgtgaccacacctgttggcaggggcaggccgcgaaagaatccgttgcccagcgaggagcagctaaaggtgaacagtctgctggagcaggagctcaatcagatgctgtccgcaccgcagctggccaccagtacgccgcgtcgcggcaggccactgtcgcaggcatcgcagcaacatcatcaggagctcagccagattcatgtacattccacggccgatggcgacagtcgaacgccagtgttgacgccgcgacgcagcggtgctaacaaatacgagacggaggaggagaagcgaatacgtttggacaagatggccgcacaccagcgagcggtgcgtgccaatgagacgcccgagcagcgggccacgcgtctacagaagctgagcgaacgggcacgactgaagcgggcccagatccgagccaccgagaatacggacgagcgcaaggagcgactgtccaagcaggcggaatatgcgcgaatgcgacgcatgcgcagccacacgccgcgcagcagcagcgccaccagcaccgagttccgtgccaaaaccgaggaagaagatgagtgccaggacgatgacaccagtgccgagcatcatatgtacgaaagtgaagccgtttcggtcactggcacgggcagtgatggtggcttcgtttcggtggtgaaggccgacaacgacgattcaccattgggcggtggcgatggctccaacgatcacgaacagttgccggcgctgcaattgcagcagcatgagctgcagcagattgccggcagccttcagcagcaacatttggtgccgcatccgcatcacgaggcgattgtgttgaaccagcagcaccgcctggtgaccatcagtcagcaccagcagcagcagctccatcagcagcagcatcctggcttcagtaaactgcagacggtcaaggattatgcaaatgcagccggcggtggaggcggaggaggagctgctggttctggcggcggcagtggaacgggagcacccgaaaacaatgacatgctaaagatactcgagccaatcattgtgatgaagaccaaatga

SEQ ID NO: 34890 - protein, 1068 aa, DROSOPHILA
MEPDPNGIKIEPSLDQQQYATHVLAINGSNARLLIEHPSALLVPLSSHHQLQLQQQQQQQQHVQQQHQQQQQQHQQQQQQFQQQHLHQQQQDQLQFQQQHLQLYAPLKQQQLQQQQSQQPPTPLGPTSSASSASITGASTTGHQQRWNESPEARQRRLARNAERMRERRQRESEEEYRKRLLRNAEANRQRRQNESDIERAMRLVRNAARQRLRRAMESPDQRAKRLAKLAERMRMYRASETNDQRKLRLAEMAARARQRIANESPEERKERLRKLNDYAKKVREKKKVLKHVVVHGGSSSVVVSTPTSSSSSTDQQHHHQQQQQQQQQQQQQQQQQQVLAVAAAAAAAAAANCTNEHTINLNQATTTATTTTTDEAGTPQPAEDQQHLVTAAAYQQHQALAGVEYMGQGMFLAPGSLRPPMQLKQEPQTPQQQQITQQQLQQQHQRYTITGQQQQQVTAALLEGTEPGSIFVQQIYGDEGGKGTAKLLQAHVPHFSIAGGQLELYPHKYAAKKQELQVLGEINCLKGKCLKPEKSNRLTRWLANPFYPFLQSDNDATVSAGGNDNSGSVSLGHNETKVIVTTASGEQKLLKATPGQAQQLYNQFPYLATFPNTTSSGNSTTSTTNVGHVGVVTAGTTTGAGGTTTTAYYPMYHNGFQIGIGPNAVPPPFTPVNFANASGGNSPGQYNILAANPTLTVTGLGQQEQQQTGASSAAAPQIVTTPVGRGRPRKNPLPSEEQLKVNSLLEQELNQMLSAPQLATSTPRRGRPLSQASQQHHQELSQIHVHSTADGDSRTPVLTPRRSGANKYETEEEKRIRLDKMAAHQRAVRANETPEQRATRLQKLSERARLKRAQIRATENTDERKERLSKQAEYARMRRMRSHTPRSSSATSTEFRAKTEEEDECQDDDTSAEHHMYESEAVSVTGTGSDGGFVSVVKADNDDSPLGGGDGSNDHEQLPALQLQQHELQQIAGSLQQQHLVPHPHHEAIVLNQQHRLVTISQHQQQQLHQQQHPGFSKLQTVKDYANAAGGGGGGGAAGSGGGSGTGAPENNDMLKILEPIIVMKTK

SEQ ID NO: 34891 - DNA, 3317 bp, DROSOPHILA
gggtctcttttggcttgcagtctccgggagttcgaagttaaaagagttaagagtttcggactgccagttggttcccgtctggcagttgtcggtacaaattgcaccgttaataaagtcaaaatcggattagacacggtccaccgccctcttgtttttttttttgttttttttttctgtctgaacaaaactcagctgcaagccgagccacctgtgatatctgttgtagatatagccgcgatacacacaaccccttcacaccccaatcgggcaaacggaaaacagcccaggcgatcgattggccagaaatttgatctcgcttgggaccgaaatcaaatggccaacacaataaattcacctctaatgaattttgattcatttccatttgcttttggcgcaaacaactaaataactctatggcaatcaatgggccaaaaagtaggggggtttgctggctgactggctgtatagaaaatattgacccatatatgtcagaatttgaacggtaggcgaaccagcgaattggtgacagaagcccaaatgattcgatatggatcgagatctaggcggattttcacaatttataacgatagaaaacgtattaagtttgaatatcctatgacggttcttaaaactttaaggtacgcataaatacataaatggcacatgtaaatatcataagggatttagtatgaactgaaaccgtatttgaatattgatgcgcctgccatgcattttacttagctgcacttcacttgcataacatcacgtcttctgagctctggatgcacaactttctttgcggacgtgccatccatgcctcccattcgtcattaccccattttttagtccccccccccctcccaaaaaaaaaaaaaccatttcaactggcctagttaaatcaataaacatttaaagggttaaatccattatacattaacaatttaagttagttaagccatcaaaatgtttgccaataacatatatatccgctatatcgaccctaatgcatgcgattgtagcgttgcggacgatggcgccttcgttgacggggaccaaacatcttttcttcagcgagctgaagaagatgcggtccaatttcttgtttacagatcttaagaaaatcgaccacttccgtcacgagcttgtagtttgccatggtaaagaagctgatgacctcgcagttacggttatacgacaggcatcccgttctgctcatgcgttgaacatacttatcaatgttgtccgggaaatcataattgatcacataacgaatgcctggcacatccaagcagttcgatgtcatttgcgtggccacaatgatattgtaggcgccagtgccaaaatcatggattattccttgattttcttgggcagtgcgtccaccatggatgccctcgcagggtacacaattccggatcaaatccaccagttcttccacgaccttttggcgcttcacatagatcaccaccttaccgggaatatcgcttgtatcgtaaatagcagtcagctccttcataaggcgttctactttcgatagcccattgactacctccacccgctggcggatgttttgtaatcgcacgcctatattgtttatttcacccacgcgaattgcggtgtattggcccaaaaacttgttggccatccgtttcagattagatgaccacgacgtgctgctgacgatcaattgggcatgcggacgtagacggcatagtagtcggcaaatgttaccctctaagcccacatcaatcatgcgatcaatattgtccagaaccaaatatgtgcagcgttccagttctacaacatgttttttgttatcaatcatttgaagcaggcgaccagcagaggccaccagcagatcgcattcggcatgaccttgccattgactgttgcccaagaggcaatgcgtcctaagctcgagaggatttgtatagtacaatacctctctttggaccatgacagcagcctcacggcagtccaccaatatcaagacaatcggtcctttcttgtgctgcattaatccgcgctgattgtgcatcttcattatgcccggcaatagatagcccaatgttttacccgtaccctttccagaaatcatcacaatatttttgccctccttggcaatcgaccatgtttgtgcctgaatgggcgtgggcccatcatagccttgatcctccagttgctgtaatatggttgcattgaatccgctgcgctcgaaactcagcacaggctccggaaggtttcgcatattccagctggtcaaggtgatattgtggcgtttccgataattagcggcattattatacacctcatccatcggctgcttccaggtattgtaattactagggcggcttgggtttttggattggtcctgataacacaaagtattccgatggggactgcggcttctggtgaaggagcggctaaccaaaatcttttgaatggagctgcaactcatgctcctcgattgactcttcttccagggagtgcgcattccgaccctccacgaattgcggccgcgattggacggacttttgggttctggactcccgtacgtcagatcattttgggtcttcgaaggacaaaagcgcttttgcggtagactgctgctcctgcttcttgattctttattttcacgagaggttttcacggccttgaaagaatttggcgattgccaagtttcatgaatgcgaaaaacagcgcttcgcatgcgtggcctctctcccgtatcgctaccgtgagaacttgatcccgtagtggaatccgaatcggatgacgagccggaattggaatcggatgaactcgattcggatccggaagaatgagcagactcagaactggaccgcaaatgggattttcctctaaacttgccattacccatgctcctgcttttcgaccgggattcgcgcgtagacttggaaaatccgccagcagaatgcggaccactgaaactctcgctcctgattttgaaatttggtttctgtccctcaattccgtgttgtattgtgaaaagccttttcgtaacgaatttggaggacaagacagagcttgaggattttaaagatctggactgaccgcttatgtccgaagcgctggagccccaaatcgaagacttcgtacccttaaggaacggctttttctgaaccttttctgcatcggtttcgttgtctttccagtttccaatcaccagtttcttagctttctcacacattttctgcagcacttatttgcgtttgttcacttccaatttttgccaaggcaataaaaaaatctccttacgaacacagcgaaatgccacgtgttatgaaaaaagttga

SEQ ID NO: 34892 - DNA, 1317 bp, DROSOPHILA
atggatgaggtgtataataatgccgctaattatcggaaacgccacaatatcaccttgaccagctggaatatgcgaaaccttccggagcctgtgctgagtttcgagcgcagcggattcaatgcaaccatattacagcaactggaggatcaaggctatgatgggcccacgcccattcaggcacaaacatggtcgattgccaaggagggcaaaaatattgtgatgatttctggaaagggtacgggtaaaacattgggctatctattgccgggcataatgaagatgcacaatcagcgcggattaatgcagcacaagaaaggaccgattgtcttgatattggtggactgccgtgaggctgctgtcatggtccaaagagaggtattgtactatacaaatcctctcgagcttaggacgcattgcctcttgggcaacagtcaatggcaaggtcatgccgaatgcgatctgctggtggcctctgctggtcgcctgcttcaaatgattgataacaaaaaacatgttgtagaactggaacgctgcacatatttggttctggacaatattgatcgcatgattgatgtgggcttagagggtaacatttgccgactactatgccgtctacgtccgcatgcccaattgatcgtcagcagcacgtcgtggtcatctaatctgaaacggatggccaacaagtttttgggccaatacaccgcaattcgcgtgggtgaaataaacaatataggcgtgcgattacaaaacatccgccagcgggtggaggtagtcaatgggctatcgaaagtagaacgccttatgaaggagctgactgctatttacgatacaagcgatattcccggtaaggtggtgatctatgtgaagcgccaaaaggtcgtggaagaactggtggatttgatccggaattgtgtaccctgcgagggcatccatggtggacgcactgcccaagaaaatcaaggaataatccatgattttggcactggcgcctacaatatcattgtggccacgcaaatgacatcgaactgcttggatgtgccaggcattcgttatgtgatcaattatgatttcccggacaacattgataagtatgttcaacgcatgagcagaacgggatgcctgtcgtataaccgtaactgcgaggtcatcagcttctttaccatggcaaactacaagctcgtgacggaagtggtcgattttcttaagatctgtaaacaagaaattggaccgcatcttcttcagctcgctgaagaaaagatgtttggtccccgtcaacgaaggcgccatcgtccgcaacgctacaatcgcatgcattag

SEQ ID NO: 34893 - protein, 438 aa, DROSOPHILA
MDEVYNNAANYRKRHNITLTSWNMRNLPEPVLSFERSGFNATILQQLEDQGYDGPTPIQAQTWSIAKEGKNIVMISGKGTGKTLGYLLPGIMKMHNQRGLMQHKKGPIVLILVDCREAAVMVQREVLYYTNPLELRTHCLLGNSQWQGHAECDLLVASAGRLLQMIDNKKHVVELERCTYLVLDNIDRMIDVGLEGNICRLLCRLRPHAQLIVSSTSWSSNLKRMANKFLGQYTAIRVGEINNIGVRLQNIRQRVEVVNGLSKVERLMKELTAIYDTSDIPGKVVIYVKRQKVVEELVDLIRNCVPCEGIHGGRTAQENQGIIHDFGTGAYNIIVATQMTSNCLDVPGIRYVINYDFPDNIDKYVQRMSRTGCLSYNRNCEVISFFTMANYKLVTEVVDFLKICKQEIGPHLLQLAEEKMFGPRQRRRHRPQRYNRMH

SEQ ID NO: 34894 - DNA, 4258 bp, DROSOPHILA
cttttcgcacactgctttcaaaagaacataaacaaaaaatcccgcgtcacggcccaaaatcgattgggttgtgaggagtatatatagcaatcattataacaatatatcctcttgaaagaaatcaaatatcatcgtgtgatatcgttttcccgcaaaattgaacgcatgttttcgagacaaattttcgaaaagatctaacggaaaccgagacacaaccatcagcgcgcggtgtcggttgaaaaatttcaaaaaaatgggctgccgctgttcattatataggctctgccggcgccgctgcctctctctcgcgacgacgacggcgacgtcgctgttaaaactctcgcgccatgttaaccagctgttagggattatgttaggcatttgagcggttttttaaattataaaatatgaaatcttacaattaatatatattcagtaattcttttaacttatttgctgtatagatactaatactttaatgaattatttctttttttttgcagaaattcaaatgcactaggaaatttgataaggaaatatattaacttctataaagcactgcataaataatgaataaagcgggtaagctctaaatatatattcaattaatctagtttaagccagtgtctacattttgcatatatttttattttgagattaaaattttaaatttggcggcacaatcttttaacaaaaatgtaacattgagaggcatttttaacgggtatgttgattacagtaacagtgccaagagcgtagagaaaacaattaagtggggtacaattcttaataacaaaaaaaaaacattcacttttagacaatggatgataaaggactattgttgtatgtgagacattattattattttttttatggtgaaatgggttttagaaccacgtctctgttattaaagccatgttaacattaacagcgctctccgattaagtgctgacacaatctgcctgctgtaacacgtgcgttgcagcatatcaaacgctaactaatacgacatgccgtctggcacgtcgatccaatcgtgctcatctacatcttcctcctgacctgaccttgcggctgctgaggaggatgcctctcgagaattctccacactctcagcaccctcggcaccctgggcatttgttgcttcacagagcgtggtcaggtcattgatggattgctgattatccatcccaatgtcgtcactttcgtccaggacaggtgattcatcgtcggatttcgccaataaacgtagtcctcgcaaagtgcgcttacttttgggatcttgactgaaattttgcgtatagatcatatacgttataagctgcttccacgaccagacccgaccacccaacttaccgcaatgccttgtaatagtattccatcgccttgacgggttccttttgctttcgcattatatcgccgagatggttgagcagattcaccttcgggaagataataacgtgtttctcgagcagttttatgatggccttggtcggaccttcgacttgacagatatcggcaattagattcaccgccggcgtgtagatatgattgattttcagtgacttttcggcaaacttccgcgcagtccttctcatccttggatccgggaaaagaaagagcgtgcgaccaaacatctgtcgataaaagcgaagccacatacatatgtataaaaccatgtaaatggaagcattatatagcacgtaccgtgaagctccttggcgaattttgaaagaggcgtatcgtccagttgcacaaggcattggcctccttgaatcgcttctgagccaaatagctgtggaagagtcccctgtagatctcgaaacgatacggtgccaccatttgtgctgtgcgaaaggcacacaccgcctgcgtgtgccgctccagcgcgattaacagacgtccgcgcaggattagggcttcatggttacgcggctccgaatccaggcatttttctacgaaattcaagccccgctcgaattttccctcatcgtacaacagctgggcatgcgcaaaccaatggctggccgtgtatttcacttcggaggacacctttgcgaataggtaatccatatccgcactgtcctgctcacaaccgccctcctgaccacatagcaccgccatcagtccgatcgcctcgacgttgtccggattggcacacagcgtcgacgagaagatatcctccgcttgaaagtaatcgccgttgtagtagaggcacttgcccagtgccatcattaggtgctcattgcatcgcaacgtggtgttgtcatgcagcatgaggaaggtctgcgatgcgtccgagtgcttgaagttgaacatttgggcgagagccttgatccacttgctcagccagtcaaagtgatcgggcaccgtggcagctagttgataaggcgaagatatgaatggattacacagcctttgaaaagcttttcatgaaatcaggaacatatagggtgcaaactacaggaatcactttgaatgatctaatggaaaaagtatgatttatgtacatatgtacatatatatatatgtagctaccgtgcatcaccagcgagttaatctcattgccattgactcccagttccaaaagcgcctcgatcacctgcagcgccattgggcactcgcggatcacttccttgtaggcgagcacggcctccgattttttggtggttccatgtctgctgccatgatgctgcagtctggccagcatcagattgattctcggcgatcgcaatgttggtggcacctgaagcaatgtctctatggccatgtcggtattcccaatttgacgataacactcggcagcacggcgacgctgctccgcgtctccgaattccggataggaactttcgatggccaccaagacggcattcttgtggcgcatcattagtcgccgcttatggatgatctcgtcgaaatgccttagagctgcgcgataatttcgttccttgtagtttgcattgagcagatagagcagcacctggtattccacatccagtgtggccacatagcgatcattcttaagcacggttctcagcagatccgcctgccaaattgtaggcaatggagcgcattacaaccatgtgggaattatattagatattattgaatattaccgctggaataacgcactcgtaaagcttgtgatcgtaaagctttttagcattcgcgaatagcgcgatctccatcttttccacgactatcaaaaatgatgccatacagagtgccacctgctttccaatttccagatgctttccaatttaaaaaatcgtgattttgcgatatcgattcgaaatttaaatagtgaccaaaaaggttaccccatcaaatttcgtaacatttacaatacacagagttacaccattgatttttgcatttattttatttgagatttacgacgacggtcttaaactaaaacgctaagtaatgccaaaaagagttttgcaacttcaattgtgtattattaagtatcgctctaggtagcaaatgttaatggtataaattgtcttaattcataggcattcatttatatttatttatgtgaagaatatgtatatgtattataaaccattttctattaactggaagctgtaatattcaacccgagttatttacaacgcttgcccgtcgcctttcgcaatttttgggggctgcgacaatacttttcatgcatttttttttcttctttttttttttaatgcgaacgcaaagaaatatatatatatttattatatcgtttggattaggacttagactatacaatgggcatacttcttgcactctatacaactttaaatcttataaagggtagggggagtggggggtattacaaactgaaacaaatacacgtgctactctaacgaaagcaaactttgtcctctggcggcgactggcccttttttttgtggttttcgaaaaaatacaaaagttgaattattcgaggcgaaagtccagaaaaacttttaacatttgtacatggaacaaaacgcggggaatattacaatatatattacttacaaaaaaaaaaaaactatttgctcaacgatctcccgattaagcggttaaccgaagctccaacaatactactacatcttagcctaggtctatctgactgaaaaaactggacttggcatccttgaaaacttcgggaactaggggtactggacgtattcgatgatgactggaacacagtgaaaaatttgctgagctgacccacactctcgttacgatgtaatacgtatagtagttcggttataac

SEQ ID NO: 34895 - DNA, 1888 bp, DROSOPHILA
tggaaagcatctggaaattggaaagcaggtggcactctgtatggcatcatttttgatagtcgtggaaaagatggagatcgcgctattcgcgaatgctaaaaagctttacgatcacaagctttacgagtgcgttattccagcggcggatctgctgagaaccgtgcttaagaatgatcgctatgtggccacactggatgtggaataccaggtgctgctctatctgctcaatgcaaactacaaggaacgaaattatcgcgcagctctaaggcatttcgacgagatcatccataagcggcgactaatgatgcgccacaagaatgccgtcttggtggccatcgaaagttcctatccggaattcggagacgcggagcagcgtcgccgtgctgccgagtgttatcgtcaaattgggaataccgacatggccatagagacattgcttcaggtgccaccaacattgcgatcgccgagaatcaatctgatgctggccagactgcagcatcatggcagcagacatggaaccaccaaaaaatcggaggccgtgctcgcctacaaggaagtgatccgcgagtgcccaatggcgctgcaggtgatcgaggcgcttttggaactgggagtcaatggcaatgagattaactcgctggtgatgcacgctgccacggtgcccgatcactttgactggctgagcaagtggatcaaggctctcgcccaaatgttcaacttcaagcactcggacgcatcgcagaccttcctcatgctgcatgacaacaccacgttgcgatgcaatgagcacctaatgatggcactgggcaagtgcctctactacaacggcgattactttcaagcggaggatatcttctcgtcgacgctgtgtgccaatccggacaacgtcgaggcgatcggactgatggcggtgctatgtggtcaggagggcggttgtgagcaggacagtgcggatatggattacctattcgcaaaggtgtcctccgaagtgaaatacacggccagccattggtttgcgcatgcccagctgttgtacgatgagggaaaattcgagcggggcttgaatttcgtagaaaaatgcctggattcggagccgcgtaaccatgaagccctaatcctgcgcggacgtctgttaatcgcgctggagcggcacacgcaggcggtgtgtgcctttcgcacagcacaaatggtggcaccgtatcgtttcgagatctacaggggactcttccacagctatttggctcagaagcgattcaaggaggccaatgccttgtgcaactggacgatacgcctctttcaaaattcgccaaggagcttcacgatgtttggtcgcacgctctttcttttcccggatccaaggatgagaaggactgcgcggaagtttgccgaaaagtcactgaaaatcaatcatatctacacgccggcggtgaatctaattgccgatatctgtcaagtcgaaggtccgaccaaggccatcataaaactgctcgagaaacacgttattatcttcccgaaggtgaatctgctcaaccatctcggcgatataatgcgaaagcaaaaggaacccgtcaaggcgatggaatactattacaaggcattgcgtcaagatcccaaaagtaagcgcactttgcgaggactacgtttattggcgaaatccgacgatgaatcacctgtcctggacgaaagtgacgacattgggatggataatcagcaatccatcaatgacctgaccacgctctgtgaagcaacaaatgcccagggtgccgagggtgctgagagtgtggagaattctcgagaggcatcctcctcagcagccgcaaggtcaggtcaggaggaagatgtagatgagcacgattggatcgacgtgccagacggcatgtcgtattag

SEQ ID NO: 34896 - protein, 605 aa, DROSOPHILA
MEIALFANAKKLYDHKLYECVIPAADLLRTVLKNDRYVATLDVEYQVLLYLLNANYKERNYRAALRHFDEIIHKRRLMMRHKNAVLVAIESSYPEFGDAEQRRRAAECYRQIGNTDMAIETLLQVPPTLRSPRINLMLARLQHHGSRHGTTKKSEAVLAYKEVIRECPMALQVIEALLELGVNGNEINSLVMHAATVPDHFDWLSKWIKALAQMFNFKHSDASQTFLMLHDNTTLRCNEHLMMALGKCLYYNGDYFQAEDIFSSTLCANPDNVEAIGLMAVLCGQEGGCEQDSADMDYLFAKVSSEVKYTASHWFAHAQLLYDEGKFERGLNFVEKCLDSEPRNHEALILRGRLLIALERHTQAVCAFRTAQMVAPYRFEIYRGLFHSYLAQKRFKEANALCNWTIRLFQNSPRSFTMFGRTLFLFPDPRMRRTARKFAEKSLKINHIYTPAVNLIADICQVEGPTKAIIKLLEKHVIIFPKVNLLNHLGDIMRKQKEPVKAMEYYYKALRQDPKSKRTLRGLRLLAKSDDESPVLDESDDIGMDNQQSINDLTTLCEATNAQGAEGAESVENSREASSSAAARSGQEEDVDEHDWIDVPDGMSY

SEQ ID NO: 34897 - DNA, 3281 bp, DROSOPHILA
tgaccaatatccttaagatctgcaccaaagtgggcctgccattttaaagcctcctcacttcaagcaaaacaatgtggacaaaaataatttaaatcaaacaatgcccagcctgctgtttctcttttcatataaaaccattaaatgttattactacgaatttaaggaaaacattaagcgaagcctcaatttggtatgtcagaaatataaacttcatttttttcgattaaaaaaattggaaaataaacaaattacaatgtctggaaatgaaagtgttggccaggcagcctcttgctgtccgtttcaaattattttttcaattaatatttgggcactcaacaattcaatttacatgcgaattttttttgattacaaggatgtgctcggcatgttaaaaagcgatgggcatgcatcttaaccatcttttccttattaggcggcgcagggatggcagatgacagaaggactctcgactgcttagcccccgggttacttataactaattgaaatcagacagccaaaaaaaaaaaaaaaaaaaaaggaaaagtcaggcaagcgcattggtaaattgaacgaaaaaaaaaaacaggggggtaaaaatgtgtgtggccaggaggccgagcgatcggaatcgatgctgtcagttgacagtttgttaattaaaaacagcagccgttcgttgggcggtcagttggttggtaagtgggtggtggcaaatggcaaatggcgaatggccagtggagcggacatctctggtccggggcggtcactcaacgtctcacgcacacacgcacacatgacggggttcatgcacttggcaggctcggatggcaaacgtcagatgcccgggctaataaattgcccagagtatcgaaggagcaccgaacaaaggaaatgggaagaggttcgcagtggttgtagagggctactagtggcacacacgacccgtgtatgagcgatgcgtccagggtggcaatggtgggttgtatgcgaaaggcacttctcactcacctatcgttgtaattaatgtcagggagtagagaaaggccgaggcgtaggtccatttgtgtgtgggcgcattcaactggattcccccggggggataaaccttcgactgtcgcaccgcccgcagcaaagtgtcctgaaaaaggcgccaaggagttgctcaattagtgccccgaaaatggccaagatgttgttgtgtttgtgtatgctcacctgaaatagctgcacctcctgtgcggcgagtcgcgtccaattctccttatacaatatattcaggtcctccgttatcgaccacaaacgatccacagttctgtggtggtgtggtaagtaaagtaaagaaactgatatttctagcaaacaaataatataattcacctggatcgtatctccgcgttggccagttcggtgcggggatatggcttagaagcggccacagcggtttctagggcgccaccatcctccaattcgccctcgagggtcacgaatacaatggaacccatggccgtgtagagcagcaccaacaaaagtacgcctgccaaaggataaaggtgtcattgaatgcaactcacactgcattttgtgtcgaataaaacagtcataattcaatttagctaaaatttcaacagctgtattaaatcactttttgtgatagttgaaaactatgccaactgccgtatttaaaaataattgaacagggcaacaaggcgtatgatgaatactaatatttatgctgcgtacacacttcgcttgcagcatcatacacatgttgtcaataaatatttttaatgaagcaattttaaaatggtaatataaatcattttctgaatatgtcgctacaaaaaaaaaaaatcttaccgtacaacatggcgaatgagtaatattgcattttattacccatacgccctgtgtattttcacacagcgtagcatactttttcgggcctttaaggttagtagtagtagtggatttaggtcatattttgcttacctgttgctgatatgcagtgtgacttgggcgccttttggcaaccgcataaactgcctccgccgccgcccgcctcccgtgccgcctgcttctccgacttggatcccccgccgccgctcgacgagccgcccgtcgacgtctgccgaccgccgacacgtccgccggaaccattcgcagccgccgatgctgcagttgctgcaacattgctgctaccgctggcggcacagtttccgctgccgccgctgccgtcgccgccgagaaatgccgccaacggcagtggcgacttcttgttcattgtgctgctgccgctgcttctgccgctgcctctgcctctgccactgacctctaacctccgacccctggccaatctgtcaatcaatcaatcaattggtgccagtcggtccgttggaggtgtaaactcgcgcggtaaacgattcgcttcccttcacttcacttcgcttcacttctcacacttctgccgctgacaatcaaatcaaacgctttgacgcttcatgtgccacgtaatttgcatcctcctctgcgccttcggtttgtgcaaaagtgggcggggcctttttcgatcttattatgtgaccgtcataaaatgttcttattgctgtacagcagcgcccttttacgagcctgtcgcttgttgtttttttttttcgttctctccctttattttctcctttttagccctcagttggctgaatgtgagcgtggatgtggaaatgagacagcctgtcgcgccggatgctgcaaatgcaaaatattttcatgaaaacctggccaaaatgaaaatgaaaattgcgatgtgagtgttttggagcgcaaattgcacggcaaacgccgtgtaattgagtcaacagcttcaggttagcacaaggaaatgtaatatcccggcaaatcgcatacacatatatacatatatacacatatatataaacttcgctggcaataagcaagttcagaatatttgacataatgccaaactaggtgcttacccaattacagatcatttaaccgttgcataattaggatgtgcactccaataaatattctcttacaaatatgaaattacaatagttctatgaaagatcagttttaatggtcagcgggtgaaacaagctcattatcctgctaatcacagtccatatctttatgtacatccgcatttatgcacacacacacatacatatccatatatccgccatgtttgtcgcaaataatctgatagacgtgaagatggctggcatttaaattaaagattgcgccacccaagcacaaaaacttgc

SEQ ID NO: 34898 - DNA, 684 bp, DROSOPHILA
atgaacaagaagtcgccactgccgttggcggcatttctcggcggcgacggcagcggcggcagcggaaactgtgccgccagcggtagcagcaatgttgcagcaactgcagcatcggcggctgcgaatggttccggcggacgtgtcggcggtcggcagacgtcgacgggcggctcgtcgagcggcggcgggggatccaagtcggagaagcaggcggcacgggaggcgggcggcggcggaggcagtttatgcggttgccaaaaggcgcccaagtcacactgcatatcagcaacaggcgtacttttgttggtgctgctctacacggccatgggttccattgtattcgtgaccctcgagggcgaattggaggatggtggcgccctagaaaccgctgtggccgcttctaagccatatccccgcaccgaactggccaacgcggagatacgatccagaactgtggatcgtttgtggtcgataacggaggacctgaatatattgtataaggagaattggacgcgactcgccgcacaggaggtgcagctatttcaggacactttgctgcgggcggtgcgacagtcgaaggtttatccccccgggggaatccagttgaatgcgcccacacacaaatggacctacgcctcggcctttctctactccctgacattaattacaacgataggtgagtga

SEQ ID NO: 34899 - protein, 227 aa, DROSOPHILA
MNKKSPLPLAAFLGGDGSGGSGNCAASGSSNVAATAASAAANGSGGRVGGRQTSTGGSSSGGGGSKSEKQAAREAGGGGGSLCGCQKAPKSHCISATGVLLLVLLYTAMGSIVFVTLEGELEDGGALETAVAASKPYPRTELANAEIRSRTVDRLWSITEDLNILYKENWTRLAAQEVQLFQDTLLRAVRQSKVYPPGGIQLNAPTHKWTYASAFLYSLTLITTIGE

SEQ ID NO: 34900 - DNA, 2552 bp, DROSOPHILA
gcatgcgcgcatacggatccaccagctgcggcggaatgcgcatcgttgtggccagatgggaaatgaatttggcgaacttcttgatgagcacgttcaggtactgggtgcggcactggcgctccagcttggtcagcatgttgtagtacagttcctgcttgcgcttcaggaaatcctccttctttcgctccttggtcttgttgctcttaaggatctgctccagctgtctgtttttgggaatgagatgagatgattagatcgcgttagcaactgatgcaagcgctgcacttactccgtggtaatggctttgtatttgcccagcatgcgcttgatccgcttggcccgcagcttcggatcgtatacatccttgaactgctcgtagttgtcgatgagcgtgtgcaacttgggcttggacagggccacgtcgtagggctttaccttgggcggcagtgtcggctggtaggccatgcgccgcacatacaactccagcttgtccagttcctcctcccgccgcttctttacgttctcctctgcgcacacatccggatcctcctcctcgggcagcgactccgtcgacgtgggcatcggctcatcccaatccgagacattggagctggccatggctgaagagtactacacggaactgaactaaacgaaacgaaacggaacggctcgtctcggcttggtaaatttgtacgtattggaaatttagctttgaacttggttacttataaacacaaaataatgtttcgaaatcttttttgtgtacgaaaaatttgggtaaacgggagcactaacaattttatgtattcacgctgcgatagtggatcaccttatgagcagtcccagttgaaatgtgagcgaggtaaaaccaaaggactacttgatagtcagaaaagttctacatgttttcaaagaaatggaacattaattgtatggcaacaagattaaggaattccaatgactcacaccactaacaagcaaaagagcactgcatatgtggtttacaattaaataagcaacgttttattatatgtaatgtaatgtaatgtatgaatattaaccagtggatctatggatctaaagctagtaacactcgttctgcacggatcgctccagggcgaaggtgtactcctcggccagctcgtccacggacaattggcgcgttagtagcgccaatatgctgtccacctgcatttgggtgctggtgtagcgatccttgttggccaatccgggtgccagctcgaatggaatgtcctgcaagtaattgacgggtccttgggctccgggctgcttcacttgatcgctgcgcggtcctggcatcggcggatagggcagatagcccgctggcggcataggtggatacatggagccggctggaacacccggatgaggagcatccggtactggtttgcgctctatgaacacgaaatcatcgacactggtgcctggacgggttgcctccgccggtccctggatgggctggtcatccgtgggcgtttccgcgggcttgcgtttgccaaatatcgaaaacattgcactattttgttctattgtttggtaaaatcaactggcaaattgcgtcgtccgccagctgtgatgctcttttagcgggcgttggtccaaaacagcgagtgctagctagtggtgtgcccaaaagatgtaaacatataggtgtctatagtgaggtctgagcgaaatatgagaattttgggtatttaatttttaactatttgtttgcttgggtatttttcggttacgaatgtgtatacccaatataaactttattaattgcaagtagttagatttggagtgaaatgcagtctgcactgaatttccgttaatcgcctatcggtgggcgcgcagtgtggccattcgctcgtcggatgcgcagggctggacaaccgacactgcgcccgcctccgtcgccaagtgaagtcgctccgagattgattgtgtacaccggataagaggagcgagcgaaaaagatgtcaaaattggaccaggacccgaacgcctcactgagcatcatggaggtgagtgtgccgccgggacgccattcagagcttcagtgtgtccactgcccggagctccaattccaatcggcggtggctactctagagctgccacattaacgcattcacaactgtctccatttcccacatttaacataactttactacttcgcgcagcaaatcaagcagctcatccgcccgccgcccaacgaggacgagaagatgatgcagcggtccaccaacacgaagcatccgtactacaggcgcccgggcaggggccacaaccacgactattgtgacgcctgcgaggagggcggcaatctgctgtgctgcgatcgatgcccctccagcttccacctgcaatgccagtgagtatatacacgcgcatatagctgctcattttgagtgctgatttcgtgctttcgccacagtgatccaccgttgagcgaggaggacatacccagtggccagtggctgtgccacagctgtcgcatgagcaagctctcccagccgccggcctcctcatccaaggccagttcc

SEQ ID NO: 34901 - DNA, 552 bp, DROSOPHILA
aatagaacaaaatagtgcaatgttttcgatatttggcaaacgcaagcccgcggaaacgcccacggatgaccagcccatccagggaccggcggaggcaacccgtccaggcaccagtgtcgatgatttcgtgttcatagagcgcaaaccagtaccggatgctcctcatccgggtgttccagccggctccatgtatccacctatgccgccagcgggctatctgccctatccgccgatgccaggaccgcgcagcgatcaagtgaagcagcccggagcccaaggacccgtcaattacttgcaggacattccattcgagctggcacccggattggccaacaaggatcgctacaccagcacccaaatgcaggtggacagcatattggcgctactaacgcgccaattgtccgtggacgagctggccgaggagtacaccttcgccctggagcgatccgtgcagaacgagtgttactagctttagatccatagatccactggttaatattcatacattacattacattacatataataaaacgttgcttatttaattgtaaa

SEQ ID NO: 34902 - protein, 149 aa, DROSOPHILA
MFSIFGKRKPAETPTDDQPIQGPAEATRPGTSVDDFVFIERKPVPDAPHPGVPAGSMYPPMPPAGYLPYPPMPGPRSDQVKQPGAQGPVNYLQDIPFELAPGLANKDRYTSTQMQVDSILALLTRQLSVDELAEEYTFALERSVQNECY

SEQ ID NO: 34903 - DNA, 2959 bp, DROSOPHILA
tgagattctagtcagccagcgggtggcgatacgattgcaggagctgtccagccaggtgccccaactgttgcacaccaggaccacccatttgggaggtctgggcaagtgccagtcctgccagcagcacctccagccggtggccatcagcgatgaggagttccggcagctaagcgaatgttttctggagcgcgtgctcatacgacgagacgtcttccagcgctccacgcccgaggaggtggccaggttcaagaagtttgtcgaaaagacggcgccatacgactgtgtgatcgatggcctcaatgtggcctactctacgggcaccaaaaagacgccgcagcagctggccaagctagtggctacggtggtgcgtcatttccgggaacaggacaagcgtgtcctcgtcctgggacgcgagcacatgcgcaactggtccaagcaggccatgcactatgtgcactgcaatgccagcctcttcttgaccagcaatctgtaagggaattcatctcgaattggaaagggataggtagactaattcgttcgttcgtttgcttataggtcgcacgatgatcccttcctgctgtatgccacgctgcgcagcggccaggagacagacttcttctcccgcgacctgatgcgcagtcacgcctttcatctgggcaccgagctgaagcccatctttcgtcgctggcagcaggagcaccagttctccctggtcacccaaacgcaaacgggtcagattatagtcaaggagcccgttcgtcatcggctgtgtgcccaccaagtggcggacacctggcatgtgccctactgcgcgcagtacacgccgcatcccacagacagcttcgaggtgcccgccaactggctgtgcatccagatgaaggagcagacgatacccgccaccaaaaccaagaccaaaacaacgaggtgaccatgtgagcaagacttcttatgcgaataaatagtagccaaatgttaacacgaatacactgaaggagccgtcctagtcgcagtcatagcgggtgcacttctcaaaggctccaagaccctgcggctggggcttcttgcgacggcgctcgtacagcagcttcttctcggcggcgcacatgagccgacgcttgatgtgattgtccatctcgaagtccaagtcggccggcttggccagctcgttgggatcccttgtggctgccgagtccagcgccttaatgatcaaactgagcagcgcgtgcgcgaggcgatggcacacatcgtactcgatggcatcctggctggtgtagtagatggccgactgtgaggtgggctgcacaccaatggccaacaggatgttgcagaagatgccgcgctgcatgcgcgcatacggatccaccagctgcggcggaatgcgcatcgttgtggccagatgggaaatgaatttggcgaacttcttgatgagcacgttcaggtactgggtgcggcactggcgctccagcttggtcagcatgttgtagtacagttcctgcttgcgcttcaggaaatcctccttctttcgctccttggtcttgttgctcttaaggatctgctccagctgtctgtttttgggaatgagatgagatgattagatcgcgttagcaactgatgcaagcgctgcacttactccgtggtaatggctttgtatttgcccagcatgcgcttgatccgcttggcccgcagcttcggatcgtatacatccttgaactgctcgtagttgtcgatgagcgtgtgcaacttgggcttggacagggccacgtcgtagggctttaccttgggcggcagtgtcggctggtaggccatgcgccgcacatacaactccagcttgtccagttcctcctcccgccgcttctttacgttctcctctgcgcacacatccggatcctcctcctcgggcagcgactccgtcgacgtgggcatcggctcatcccaatccgagacattggagctggccatggctgaagagtactacacggaactgaactaaacgaaacgaaacggaacggctcgtctcggcttggtaaatttgtacgtattggaaatttagctttgaacttggttacttataaacacaaaataatgtttcgaaatcttttttgtgtacgaaaaatttgggtaaacgggagcactaacaattttatgtattcacgctgcgatagtggatcaccttatgagcagtcccagttgaaatgtgagcgaggtaaaaccaaaggactacttgatagtcagaaaagttctacatgttttcaaagaaatggaacattaattgtatggcaacaagattaaggaattccaatgactcacaccactaacaagcaaaagagcactgcatatgtggtttacaattaaataagcaacgttttattatatgtaatgtaatgtaatgtatgaatattaaccagtggatctatggatctaaagctagtaacactcgttctgcacggatcgctccagggcgaaggtgtactcctcggccagctcgtccacggacaattggcgcgttagtagcgccaatatgctgtccacctgcatttgggtgctggtgtagcgatccttgttggccaatccgggtgccagctcgaatggaatgtcctgcaagtaattgacgggtccttgggctccgggctgcttcacttgatcgctgcgcggtcctggcatcggcggatagggcagatagcccgctggcggcataggtggatacatggagccggctggaacacccggatgaggagcatccggtactggtttgcgctctatgaacacgaaatcatcgacactggtgcctggacgggttgcctccgccggtccctggatgggctggtcatccgtgggcgtttccgcgggcttgcgtttgccaaatatcgaaaacattgcactattttgttctattgtttggtaaaatcaactggcaaattgcgtcgtccgccagctgtgatgctcttttagcgggcgttgg

SEQ ID NO: 34904 - DNA, 894 bp, DROSOPHILA
atggccagctccaatgtctcggattgggatgagccgatgcccacgtcgacggagtcgctgcccgaggaggaggatccggatgtgtgcgcagaggagaacgtaaagaagcggcgggaggaggaactggacaagctggagttgtatgtgcggcgcatggcctaccagccgacactgccgcccaaggtaaagccctacgacgtggccctgtccaagcccaagttgcacacgctcatcgacaactacgagcagttcaaggatgtatacgatccgaagctgcgggccaagcggatcaagcgcatgctgggcaaatacaaagccattaccacggaacagctggagcagatccttaagagcaacaagaccaaggagcgaaagaaggaggatttcctgaagcgcaagcaggaactgtactacaacatgctgaccaagctggagcgccagtgccgcacccagtacctgaacgtgctcatcaagaagttcgccaaattcatttcccatctggccacaacgatgcgcattccgccgcagctggtggatccgtatgcgcgcatgcagcgcggcatcttctgcaacatcctgttggccattggtgtgcagcccacctcacagtcggccatctactacaccagccaggatgccatcgagtacgatgtgtgccatcgcctcgcgcacgcgctgctcagtttgatcattaaggcgctggactcggcagccacaagggatcccaacgagctggccaagccggccgacttggacttcgagatggacaatcacatcaagcgtcggctcatgtgcgccgccgagaagaagctgctgtacgagcgccgtcgcaagaagccccagccgcagggtcttggagcctttgagaagtgcacccgctatgactgcgactag

SEQ ID NO: 34905 - protein, 297 aa, DROSOPHILA
MASSNVSDWDEPMPTSTESLPEEEDPDVCAEENVKKRREEELDKLELYVRRMAYQPTLPPKVKPYDVALSKPKLHTLIDNYEQFKDVYDPKLRAKRIKRMLGKYKAITTEQLEQILKSNKTKERKKEDFLKRKQELYYNMLTKLERQCRTQYLNVLIKKFAKFISHLATTMRIPPQLVDPYARMQRGIFCNILLAIGVQPTSQSAIYYTSQDAIEYDVCHRLAHALLSLIIKALDSAATRDPNELAKPADLDFEMDNHIKRRLMCAAEKKLLYERRRKKPQPQGLGAFEKCTRYDCD

SEQ ID NO: 34906 - DNA, 3098 bp, DROSOPHILA
tatgtatgcactttcattatttaacgatttcatataggcgatgaagatgattatgctgaagagcaggcagaacattaattgaaaactattcattaaagtggcaaaaacatatttaaacaaactatgtgtggttttatcttgggccttgtttcggatatcattggggtttatcgcttcccgtccgctagcatgcgacttggacatgagaattggactcttatcgcaatctaaggcttaaacggcccaccgttggcaatcgatcatgattacacctatttaacatgcatacaggacttagccgtaagccgctgagcgattcaagataaggacttttgggcgactacgtcaaacgctgacggactcctttctattatctgcatttttacaagttactggtgagcttatacagctttgttgtttcacgaattcattttgtatgaagagaactttaacgttgaaaatagttcgcattgtgttgcatttatttattggttctcatttcgcgttttggcgacacgtgtaaacgtgttgcactgagcgtcgctctcactgcgcatgcgcgctcactttttctagacggagagtgagagcaccatgcatacacttgcaaaaattgtaacggaactagatcagaacattgtgggtgtgattgattcagtttattgatcaacaacctacaacttatacaataataaaacaataacaaaaaaagtgcattacaaatatttgttaagtatttagtgaaatacctacatacctaacatatatgttattaaaatgttatacagtgcgtataagtgattagattgtcgaatatgttgtaggtgaagtgaatatgagtaagtgcaacgatgcgtatgagtaataaactttaaaagagttttacgctacatatacactaacatcaggttattgttctctcgccactctctcagtgtactctcccgccagtcggtcagcgtataagtagaagcggccacagcgggacggcctcaaaacgaacagagccatcgaacggcgaaggtgcgcgcattaaaactctcccccgcaaaaaccaaacagaaaaaagtgaagaacgaaaaccgaaaagaaaacgaaaagacaggaaaatccaagcaaaacgagccgaaagaccgttttatttctttttgttttgtgttctgaaagagagagggaaaaaggcaagcagcagaaagtgatcgagatggcgttcatgatgcccgtgatgaagaacaattacgatatttacaaggacacgcgttcccgcaaaacgtcagaatgttcgaatgcgagtagtaacggtacaacggctttggccaccgctcttggaacgcccgcccagggacaacaacaacagcgacgccgcaaggtgtccgaatgcaagtcggagagcttcgccacctcaccatcgcacggtcaactgggcgtgtcctccccccaccaaaggatgcaaatgcagcgctgccacagttcgcgcgcttttccacgcaacgcatcgcgcagttcgcacggttcgctgcagcaaatggtgtcgcccacgcgcagtagtccgcccagccgctcgcacaccgcatccgcactggaaaggcaggcggccgcccaggcagccgcgattaatcaaaagcaacaacagtcggccgctgcagctgctgctgttgaatcttcaaatgattatacgaagtttcatttgcgtttggtcgacaagctgcgcaagtcctttcgcaaggatagcggtaagcggtcatgagagcagcgcaatcacagcaacaacaaccaaatctacgacaacaacaatgccagcagcagcagcacggcgctcctttccatttcccacaacaataacaacgacaacaacggagccgggtggaaagttagtgacggtgccgatgccatttccagaggaagatcgcctggaagagatgtggaggagtgcagttctgcaacgttcgaggcactggaagcgtgttcgagagcagccgaagcgacaacacacagagaacgagagagaggcatggtcagtcgtttggggatacgcttccggcgatactgtagattcctggcccactccccccatggaagcgctgcggcgccagaagacgagacagaggcggaggctagctccttggagcagctgaccggcagcaggagcagcagtcgcagtcgccgacggcgcagcagcagcattgggagcgccggcagccggctgaagatgcgactgcggcgctgcacttcgtcgccaggataagagcgagatgacactgatgatggtcggagcgacagagaacgagagagagaggacagactggaagtgaagtgcagaagaagagaaagagagtgcagtggcgtagccaaaagggaaagggggtcgggtcacaacaaagagtcacttaacctagttattatttgccccccgggaaaaaggaaagtgagttggcgtacagagttgttggtgcaaattagattgggcataatctacataatctatacctaaatcaatttcggtgtacatatgcaaactactaaatatctacatatatatacaagttaaagtcccaaatgtataattacattaattatatgtatttatgtatgccaggcttccaaatagaatagagagcatagaacctatcccaaaacccaaaccaaaacctctcccaaataattcaaactttttttgtacctgcggtttcgcgacaagaggaaaacagagaattgcaactgccaattgcattgtataacaaagaccacatcagcaacaacccacaacaagacaaaacacttaagaaaataaacagcaaccagaagaaaagaaccacggatttttacccttcattttataattgcataattacgaagagcaattgacaatatacttttgaaagcattgcgaacaacaacaaaaaaaaacaaataaacagaaaaacgaagcagctgaaaacagacttaatattatatcgtataacatatacacacatgtacttgtaaagaattatatatatacaaaaatgtacctagataacagctacttttaaggaacaattaatgttattcgtttttttttcttagctagtaattttgtaattacacaaacatacacg

SEQ ID NO: 34907 - DNA, 1098 bp, DROSOPHILA
aacagagccatcgaacggcgaaggtgcgcgcattaaaactctcccccgcaaaaaccaaacagaaaaaagtgaagaacgaaaaccgaaaagaaaacgaaaagacaggaaaatccaagcaaaacgagccgaaagaccgttttatttctttttgttttgtgttctgaaagagagagggaaaaaggcaagcagcagaaagtgatcgagatggcgttcatgatgcccgtgatgaagaacaattacgatatttacaaggacacgcgttcccgcaaaacgtcagaatgttcgaatgcgagtagtaacggtacaacggctttggccaccgctcttggaacgcccgcccagggacaacaacaacagcgacgccgcaaggtgtccgaatgcaagtcggagagcttcgccacctcaccatcgcacggtcaactgggcgtgtcctccccccaccaaaggatgcaaatgcagcgctgccacagttcgcgcgcttttccacgcaacgcatcgcgcagttcgcacggttcgctgcagcaaatggtgtcgcccacgcgcagtagtccgcccagccgctcgcacaccgcatccgcactggaaaggcaggcggccgcccaggcagccgcgattaatcaaaagcaacaacagtcggccgctgcagctgctgctgttgaatcttcaaatgattatacgaagtttcatttgcgtttggtcgacaagctgcgcaagtcctttcgcaaggatagcggtaagcggtcatgagagcagcgcaatcacagcaacaacaaccaaatctacgacaacaacaatgccagcagcagcagcacggcgctcctttccatttcccacaacaataacaacgacaacaacggagccgggtggaaagttagtgacggtgccgatgccatttccagaggaagatcgcctggaagagatgtggaggagtgcagttctgcaacgttcgaggcactggaagcgtgttcgagagcagccgaagcgacaacacacagagaacgagagagaggcatggtcagtcgtttggggatacgcttccggcgatactgtagattcctggcccactccccccatggaagcgctgcggcgccagaagac

SEQ ID NO: 34908 - protein, 180 aa, DROSOPHILA
MAFMMPVMKNNYDIYKDTRSRKTSECSNASSNGTTALATALGTPAQGQQQQRRRKVSECKSESFATSPSHGQLGVSSPHQRMQMQRCHSSRAFPRNASRSSHGSLQQMVSPTRSSPPSRSHTASALERQAAAQAAAINQKQQQSAAAAAAVESSNDYTKFHLRLVDKLRKSFRKDSGKRS

SEQ ID NO: 34909 - DNA, 9365 bp, DROSOPHILA
tttcaggccagatgccagtgttttggggtgttgccttgcccaaagcgaaaccgaagcccaatgcaggacacttcagtgcaaggataaaacccaaaaaaaaaaaaaaatccccctttaattatgaggggcaacctctggcaaacaattgcggccacatgaagacaaagcaaatcatcgtttcgtttaaaattcacatgtgacaatgtgcgagccagaatgaaaagccaaaatgaatggttggaaaatccgcagaggaaacgccgcgggccagctcctccatgtacatacatgtacatctgtatagaggaaactgtgtcaaaagcggttgatttcaatttgcgaaatgcaatccgaggggagattatagtgggtgttgggtgtgctcatccccaatcgaaatgacccagcagttttcaatttcactacattttcccctggacttttccaccatctaatgcggcttcccttgacatcgccatggcaaacaattagattaaatgtttgtttttcgaatttcgaaagcaatgcatatatactaaaattgcattactttacctgacttaaaaagcttagaaatcgctgtgataagagcgcataatatcatctttctctatacttacttaattttcatttataacttgcatgaatcgttttgggtgccagcttgcataattttgcaaccacaatttaaacaaagctccttttttcccaatctagttgcaaaagcagcaaaaacttgcaaccaaactgtggcccaagctgcacaaactgtcccgcaagttgcaactatgtatattgcaaaactcacttcttggctgcttaaaatgacagtttgcacacttttgcaactattgtatattgctgggcagcttttgatgataatttgtgatccatctaaggatgtggcactgtttttgctccaaaatatttgcgtaaattaagggtaaaatatttctccaattatgtacttatctattgttatattttttttttgtttcagatgatggagcagagtgtacgaaatcagacaacgatgtcgaagacgacgaatcgcaatagaaccgccggcggcatagaagcacccagcatagccaatgcatccgcaacctcaactgcatccgcatccgcattagcaaatgcaagtacagccgcctccgcatccgcagcatccgcctcctcctcatcgtcgtcatcggtttcatcggccacttgctcggcgacgattgtccaggcgaagcagcgaccgccgccactgaaaacggcaacgacaacggtgaccaccaccttggtgagcagcagcgagggcggtcagcccattccacccagcgcccatgcgactggtgctgctggaggtgggtctggaggcggtgcgaatgccagtggaagttatcgcggagccaccaccctgaccacgccctcaacgccccgcatcgagctgagtcgcgcctccagttcgtcgcatcacgaggaggatagccgggagagcagtccggaaaatgtattcgagcaggtgagtcaatggctaacttagtccactcccaaaatggggcatagggtatgaaatgttctatccatgatatgcaagtacctcgtaaaagggaataccatatgccccatatatgatccttgtggattttgttttgattgggcaaagcatcatctaatgctaattaagttgtactttgctcttgtttgcttcatttggatttgtttatctgttttgtcgcttctgccgtttaaacatcaatcaatcaatataaatatatatcttaaccattcatcgatatgtatatcatcgtctatatctatgtacatctgtctctttctctgtctgtaacactctgtgatgcgctcgctaccccttgcacacacacgcttccccccaaaaaaacacacacacactgtggaaaccccataacccctgacctataacacgtatacacatacatatgtacacacatatgtatgtatatcctttaaccaacccacgaaaaacgcaaccattcgaaaaacaaaaatcccgaccgaaccacaaaacgaaacctgcacacaaattggctgttgatttgttgatttcgtttctgttttcgactcttgcctccatttccttaaacgccttgcatgcttcttaacccccaaccacatcctcacctcacctcacctcccctgcccgtgacctgacctaacctgatccccaacgaataaaccaaatcgaaaaaatcgaaaaaccaaacaaaactatcgctctgactgccgactgacgactcgatgtgtgtgcgtgtgtgtgtgtgtgtactggctggtttatgtggttgaactaatgctctgaaggtcggcactggcaccctacaggaaacgattggccttggctttcgggaggatggcgccctggagctacgcagctccaccgaggagctgtacttcatggattccgagcaaaagaaggaggagcaggaacggatccagcagcagcagcagcaggtgagcggcggctagcaaagaaagcgatcgatttcagcatcgataactgtcgcaattcacacgataagtacacaacaaaatgcgataatagcagcgatcaagtcgattgcaagcaaaccacacacactatacctaacaccaaatcgacttttaatcgagtatttacacgatttaacacgtaccagtatgtaagtcatggtcatggtatttatgctcaacttaaaacattaagtctatttgcctttaccctctggaaatgaaataacgactcttttaaacacatttgcgtgaaggaagtgtgttatttttttttttcaagttgcttcgacatttcctattaaacaaacggatgcgcttgacattgaaggggtcgccacgattcgacgcgggtcgaaggggtcggtttggttgggtgccagcaaccgcatcgcaagttgaattaataatgcaaaattgcattcgagtggctgggaagtgcagcagcagtggtgccatcaacggaaatgggcaggcggatggacgagcaagcaccgagtgacagctgacaagtgtaaccacccacccaacaaaggcccaaggaccaccataccacatacccatacccatacccatgaccatgcccctatccaagccaagcagcctcaatttccccagttgcgattgtttggcaaaagtttattcctgcactcgggcaaaaagtttgtgggaattatttacaccccggtccagttttattccccgggagaaatgagtaactctgtcagctgggcgaaagccgtccaacttatcaattgctggataagttggatgagttaaaggtggaggtggaggtgctaaaagttgcaattgattagttggacacgtgactgcgttaattggccccaaaggctattgctaaattgcgtatgatgtattttcgatacgcagctaattgccactgttgatagccatttgaaatataggtgtctagaagtatgcaatgaaaagtatagatttgccatttaggcgttatataacgccaatgaaaagctttcccgaatggcaaccaaaatgcaatcccatttccatttgcattttgcactttctttcactttcgactgtagctccattcctttgtgctcctccatctctgtgtttgcctcagctgattggcagccccgggtagtgagtccagattgaagtgccgcgattgacgtggactcgaatggaatctcatgattgccagcagaccgctgtccaactccatttccttgttttagtgtgtacactgcgggaaattggtgttgtgattcaattcggtgcaccatttttgtcttaaattgagaaaaaagttatgcagtaaattgaaatttttatttgacagttcggatttctatttccacattgcacgatctactatagttttctatttcaatggtcactccatccatttttctcccacttcttctccagtttagagtccttcttctataaaatcttgtcatgtctttcagttctttccctaatttgaatttcaagatcatgggacaacttagatttcaagtaatatcttgtacacatctgtgttaaaaattccacgagattatgaaacatgaaacactactatatatgtacaaactaggtatttctttaacctcaagtgacatgcttccaaaaatatttgattctgttgatatatctttcgcgttctcgtaccttcttcttttttttttcttgcaggccaagcgctcatcgccgcacatctttaagttcgatgaccaccagagttacctgcaacagcatcagcgcaaggactcggccagttcagaggtggctgccctgctgtgcatctcgggtcgcaccagccgcatctcgagcgtgggcagccagggttcggcggttagtcgcctctcggcgatatcgggtgtctcgcgctccccctcgccgcatcgcatgctgctggagacctcgttctgtggccccaagcccgtggagctggccggtagtggtggcgccagcaacgcctccacggcagccagttccgcacatagtcaggccgatggaatgccaggtgccggtactgtggccgcaaatgcagcgctattggagcaactgttgctggcacgtaaacatgatcccacccaggcggtactggccgagggcataaaggtgctgccacccgcaccaacaggttccacagccaccacctcgagtcgcagcagaagcagacagaccagcacgctggccaacggcgaacggaacgagaaggagccaaaggtgaagcagacgattggcgcgcaacgcaggagcaccaagagcccaggtcaaatggttgtgggcaagacggccagcggcacggagtacataaggatcaatctcaggccggatcatatgtacagtgacaagggcattgcctccaatgagcgagtggtggaggcaccaaatcaactggcaccggtttattccaagcccgcctcgctgagcctgcagggtgcacccatagaggagcatcgtttgacacccacagcgagtcccaagccgggtcgacgattgaccagtcgttcaccttcacccgccactggagctggcggcggaccaggtggctccgtgtcccgaaagagctcctttagctcgctctttcgtttgggcaaggactcaccggattcacccagggaaacggctcgttcgcgtagcaaaagcaaagaacgacctgccacggcaacgggaggattgggaggaggtggcggttcccagaatgtgacgcccagcaagcagaagtccgtgctggccattttcaagccgggaaagaggggtagccagagcagcaagagctcgtcgccaatagagtccagtgttgagccagtgccaccgcctcctccaccggcaccgggttcggggtccaccaatcgcagtcgtaccccagtgggctctcgacccggcagtcgcctgcgttactacgatgagcccgtggagggtgttatccacataccgctgcatacgccgcccgaggaacgcgaggcacgcactctgctgcaaggcatccagcagttgacccatgcggcgcaggccagcatggatccgtcgccgctgcccacccaccgagctccgcccgcttccgctcagccggtggcgccgggcacgcagatcacagccacccaattggcagccgcagcggctgccttgcgtcccgtggcccaaaggagggtggcccaacgaccggatctggacgccatacaatcgctgcccagccaggaggatccaccaacggcgcctggcgaggagcagatccttcagcagccggaaccgcccaactggagcctggaggtccagcgacacagctcacaggattcgcaggagacgacagccgaatcggtgggctcggtggttagtgcccgggcagctaatcttgcccagcaacgggagcaggcagccatgcagcgactgccctcggtggagagcacacagagcgcctgcgagccgagattagtgcacacggtggccaccgtgaatgcgcccaatcctgattcggaggcagcagccaaggagcgtagacgtctgctgttcgccactcggctcggttccggcagtcaggagcagctcttctccacccagttcagtatttcgaagacagagagccagtcgagtcagctatccgagcaagtggagcactctggttctgaaaccacggagggattgcagcgccagggaacagtgattcggagaatggagaccgtaccaccaccgccaccgccaaggggcgtctgcagttcggaggaggagcagggcggagttatgtccggttcggtggtgatgcgtgccaagcgcaccaagtcgcgtcccagctcggaggatgaagctgctccaacggcagcggcagccccagcggatgtgcgacactcgcgttacttggagaacttcgatgtgcgccgcaagctgcacgagaatcttacggaggcggaagtgggtcgatcgggtgaaatgccaggcggtcagatagccatacccaggaagccaaagcgacagagtgtcccagaaccgagacgtaagtggtgtccttagatctctagagatttaagattaatatattgttgttcatccttgtaggtgaaacccctagctatagttctggcactgtcacgcccaccactcccacaccaacccaagccactccagtgggccaagccaagcagccaccgtcttcagcaaccactcccacatccaaaggaactccagtgaccactacacccgccgacgctgttcaagcttccacttctgttacgggtcctccaggcacttccttcaatgagccaataaataccacccgcagggatcagcccagcacttcctataaggagccaccaactggtacctctagggaaccagtaaccacttccattagggagcacccaagcacttcccatcacgattctctgaccagtgtatcctacccgccaccagaacgtcgtcattcccagtcaacggatgagcacgagcccgtggaatcttcggaaagtgaaagggactcggacatggccggtagctcctcggtgactacggctgttcctgccggtggagaagcaggacgacggcaccacaacttcccgcgcaacgtatgcgtcatcgaggagcacgagagcacgggcctggtgtctcaagagtcattcgaggacgagctgccttacatacccaccacgctacccgaggaacgggcccagggtgtgtctataatccccatgagggaacgagcgaatatggagctgaaaacgtgcccggtggacaggccaagatccaccacgccgctgaatccttcgcatctggaggaatactgtacgggaatcatgacgccgcaagaggccataccaggtggttatcaagagacagatggcgtaggaggtgttaccactggaattgcaggcggaggagtggcgggaactccagtgcggggtgagaagctgaggattagtttaccacgcaaggagtccatcggcaaggagcgcattcagaactccaagtcaccgcgtcgtgtttccaacaccagtggcaagtcctggtttgagttcgccgaggagggtctacgagccaataacaacctggagcgcaaggattccgccaaacagttgctcccggtggtcacaccaccaccagctgctccatctaccctggaggaaccgaagccgaaggcctcaacccaacgaaagctctccggtcattggatcgactttgagaacatacccgaaaagaggaaaccggccaagaggatcaccaccctgcccaaggagacgttgacgagcagtgtacccgccacggccaccaccagttcctcctccgcctgcggcagtggtcatcgatccggaagcggagctggccatcatcatcatcaccaccaccatcatcagcaggcgacgaaaacgaatccggatggcggagataagttgcactacaactacgtaaagccggaggactgccagtgcgagtgtcacgaggcggaacgcggcgaatcctctcaagcaacggccggagcgggagataccagtacagaaacgggcactggaacgggaacgggcagtgagtctctggcgtccgtggagctgttgcagcagggtgaggacatgttgccactactcgaacccgatacctcggcggagggcaggtaagcgatcttgaacggaaagaagttaaaaacttgaagttactaaccaactttaatctttgcagaatttacggggacgaggagcaggcgcctctaatgcgtcacagtggcaagggagtcaaccaacccagggtgagtttatagtcctttgactttgactgccgaaagtagtccacttatgatccctttccattgcagagccagcacgaggagttctcaagtcctcgcaatcgcaaatttcccgacaggaagtaagcaactcttttctattcgttcgaaatggatcggttcgttctagaccttcagggtagctaagccggtaatctaactctatgtaagtcgagtcactaaactaagggccagcgtgtcctactggcccatatccttaatgtacctcaagcagagtggttgttatgttatgatcgcttgacaattatgcgtattatctaactctcgactcgattagctacacactctatatggaatacagaaggcaaatcaaataataatatgaaaaaaatatacatatactttaaacgtacgattatatgcatacgatactcggtactatatatagctcatgaatgtattgtatgtacatggttagggtaatttttttgatagcaacaattacaacactcactctatatgtagcaatcctgacggacgatcgttttccctagaaactttttgctggcaattttactatatgtgatctcggatagagtgttaggcatgtgtggtggtcggtcaaggcgatttggacatccggaacggattctctagctgtaagtcggtgtatttgtgtgtagtttgttaactagctcagacaaatccaggatctagaatccagaatccagaatttagaatcgagaatgcagaggcttagtcactaatctctctatcaatatagctgtatgtgtctatatccgattctatatgcgtgttgtggagatcggtagcaccactcctcccgattttgccccatatccctagaaatctcacaatgagacacattgaacgatctatgaacgagttgtaatcgttttcagttggtcaaatacaaaagttagcctgattcatagcctttagttgagttcgaagcgttagttagtcaggcccgatttactgggtgcgctgtaaatacatacatacataagtcaaaactagattacagtattcgatgaaaattgattttcgaaattacacccatttttttgcagcccaaagaaaggccgccaaaagtttgtcaact

SEQ ID NO: 34910 - DNA, 4632 bp, DROSOPHILA
atgatggagcagagtgtacgaaatcagacaacgatgtcgaagacgacgaatcgcaatagaaccgccggcggcatagaagcacccagcatagccaatgcatccgcaacctcaactgcatccgcatccgcattagcaaatgcaagtacagccgcctccgcatccgcagcatccgcctcctcctcatcgtcgtcatcggtttcatcggccacttgctcggcgacgattgtccaggcgaagcagcgaccgccgccactgaaaacggcaacgacaacggtgaccaccaccttggtgagcagcagcgagggcggtcagcccattccacccagcgcccatgcgactggtgctgctggaggtgggtctggaggcggtgcgaatgccagtggaagttatcgcggagccaccaccctgaccacgccctcaacgccccgcatcgagctgagtcgcgcctccagttcgtcgcatcacgaggaggatagccgggagagcagtccggaaaatgtattcgagcaggtcggcactggcaccctacaggaaacgattggccttggctttcgggaggatggcgccctggagctacgcagctccaccgaggagctgtacttcatggattccgagcaaaagaaggaggagcaggaacggatccagcagcagcagcagcaggccaagcgctcatcgccgcacatctttaagttcgatgaccaccagagttacctgcaacagcatcagcgcaaggactcggccagttcagaggtggctgccctgctgtgcatctcgggtcgcaccagccgcatctcgagcgtgggcagccagggttcggcggttagtcgcctctcggcgatatcgggtgtctcgcgctccccctcgccgcatcgcatgctgctggagacctcgttctgtggccccaagcccgtggagctggccggtagtggtggcgccagcaacgcctccacggcagccagttccgcacatagtcaggccgatggaatgccaggtgccggtactgtggccgcaaatgcagcgctattggagcaactgttgctggcacgtaaacatgatcccacccaggcggtactggccgagggcataaaggtgctgccacccgcaccaacaggttccacagccaccacctcgagtcgcagcagaagcagacagaccagcacgctggccaacggcgaacggaacgagaaggagccaaaggtgaagcagacgattggcgcgcaacgcaggagcaccaagagcccaggtcaaatggttgtgggcaagacggccagcggcacggagtacataaggatcaatctcaggccggatcatatgtacagtgacaagggcattgcctccaatgagcgagtggtggaggcaccaaatcaactggcaccggtttattccaagcccgcctcgctgagcctgcagggtgcacccatagaggagcatcgtttgacacccacagcgagtcccaagccgggtcgacgattgaccagtcgttcaccttcacccgccactggagctggcggcggaccaggtggctccgtgtcccgaaagagctcctttagctcgctctttcgtttgggcaaggactcaccggattcacccagggaaacggctcgttcgcgtagcaaaagcaaagaacgacctgccacggcaacgggaggattgggaggaggtggcggttcccagaatgtgacgcccagcaagcagaagtccgtgctggccattttcaagccgggaaagaggggtagccagagcagcaagagctcgtcgccaatagagtccagtgttgagccagtgccaccgcctcctccaccggcaccgggttcggggtccaccaatcgcagtcgtaccccagtgggctctcgacccggcagtcgcctgcgttactacgatgagcccgtggagggtgttatccacataccgctgcatacgccgcccgaggaacgcgaggcacgcactctgctgcaaggcatccagcagttgacccatgcggcgcaggccagcatggatccgtcgccgctgcccacccaccgagctccgcccgcttccgctcagccggtggcgccgggcacgcagatcacagccacccaattggcagccgcagcggctgccttgcgtcccgtggcccaaaggagggtggcccaacgaccggatctggacgccatacaatcgctgcccagccaggaggatccaccaacggcgcctggcgaggagcagatccttcagcagccggaaccgcccaactggagcctggaggtccagcgacacagctcacaggattcgcaggagacgacagccgaatcggtgggctcggtggttagtgcccgggcagctaatcttgcccagcaacgggagcaggcagccatgcagcgactgccctcggtggagagcacacagagcgcctgcgagccgagattagtgcacacggtggccaccgtgaatgcgcccaatcctgattcggaggcagcagccaaggagcgtagacgtctgctgttcgccactcggctcggttccggcagtcaggagcagctcttctccacccagttcagtatttcgaagacagagagccagtcgagtcagctatccgagcaagtggagcactctggttctgaaaccacggagggattgcagcgccagggaacagtgattcggagaatggagaccgtaccaccaccgccaccgccaaggggcgtctgcagttcggaggaggagcagggcggagttatgtccggttcggtggtgatgcgtgccaagcgcaccaagtcgcgtcccagctcggaggatgaagctgctccaacggcagcggcagccccagcggatgtgcgacactcgcgttacttggagaacttcgatgtgcgccgcaagctgcacgagaatcttacggaggcggaagtgggtcgatcgggtgaaatgccaggcggtcagatagccatacccaggaagccaaagcgacagagtgtcccagaaccgagacgtgaaacccctagctatagttctggcactgtcacgcccaccactcccacaccaacccaagccactccagtgggccaagccaagcagccaccgtcttcagcaaccactcccacatccaaaggaactccagtgaccactacacccgccgacgctgttcaagcttccacttctgttacgggtcctccaggcacttccttcaatgagccaataaataccacccgcagggatcagcccagcacttcctataaggagccaccaactggtacctctagggaaccagtaaccacttccattagggagcacccaagcacttcccatcacgattctctgaccagtgtatcctacccgccaccagaacgtcgtcattcccagtcaacggatgagcacgagcccgtggaatcttcggaaagtgaaagggactcggacatggccggtagctcctcggtgactacggctgttcctgccggtggagaagcaggacgacggcaccacaacttcccgcgcaacgtatgcgtcatcgaggagcacgagagcacgggcctggtgtctcaagagtcattcgaggacgagctgccttacatacccaccacgctacccgaggaacgggcccagggtgtgtctataatccccatgagggaacgagcgaatatggagctgaaaacgtgcccggtggacaggccaagatccaccacgccgctgaatccttcgcatctggaggaatactgtacgggaatcatgacgccgcaagaggccataccaggtggttatcaagagacagatggcgtaggaggtgttaccactggaattgcaggcggaggagtggcgggaactccagtgcggggtgagaagctgaggattagtttaccacgcaaggagtccatcggcaaggagcgcattcagaactccaagtcaccgcgtcgtgtttccaacaccagtggcaagtcctggtttgagttcgccgaggagggtctacgagccaataacaacctggagcgcaaggattccgccaaacagttgctcccggtggtcacaccaccaccagctgctccatctaccctggaggaaccgaagccgaaggcctcaacccaacgaaagctctccggtcattggatcgactttgagaacatacccgaaaagaggaaaccggccaagaggatcaccaccctgcccaaggagacgttgacgagcagtgtacccgccacggccaccaccagttcctcctccgcctgcggcagtggtcatcgatccggaagcggagctggccatcatcatcatcaccaccaccatcatcagcaggcgacgaaaacgaatccggatggcggagataagttgcactacaactacgtaaagccggaggactgccagtgcgagtgtcacgaggcggaacgcggcgaatcctctcaagcaacggccggagcgggagataccagtacagaaacgggcactggaacgggaacgggcagtgagtctctggcgtccgtggagctgttgcagcagggtgaggacatgttgccactactcgaacccgatacctcggcggagggcagaatttacggggacgaggagcaggcgcctctaatgcgtcacagtggcaagggagtcaaccaacccaggagccagcacgaggagttctcaagtcctcgcaatcgcaaatttcccgacaggaagtaa

SEQ ID NO: 34911 - protein, 1543 aa, DROSOPHILA
MMEQSVRNQTTMSKTTNRNRTAGGIEAPSIANASATSTASASALANASTAASASAASASSSSSSSVSSATCSATIVQAKQRPPPLKTATTTVTTTLVSSSEGGQPIPPSAHATGAAGGGSGGGANASGSYRGATTLTTPSTPRIELSRASSSSHHEEDSRESSPENVFEQVGTGTLQETIGLGFREDGALELRSSTEELYFMDSEQKKEEQERIQQQQQQAKRSSPHIFKFDDHQSYLQQHQRKDSASSEVAALLCISGRTSRISSVGSQGSAVSRLSAISGVSRSPSPHRMLLETSFCGPKPVELAGSGGASNASTAASSAHSQADGMPGAGTVAANAALLEQLLLARKHDPTQAVLAEGIKVLPPAPTGSTATTSSRSRSRQTSTLANGERNEKEPKVKQTIGAQRRSTKSPGQMVVGKTASGTEYIRINLRPDHMYSDKGIASNERVVEAPNQLAPVYSKPASLSLQGAPIEEHRLTPTASPKPGRRLTSRSPSPATGAGGGPGGSVSRKSSFSSLFRLGKDSPDSPRETARSRSKSKERPATATGGLGGGGGSQNVTPSKQKSVLAIFKPGKRGSQSSKSSSPIESSVEPVPPPPPPAPGSGSTNRSRTPVGSRPGSRLRYYDEPVEGVIHIPLHTPPEEREARTLLQGIQQLTHAAQASMDPSPLPTHRAPPASAQPVAPGTQITATQLAAAAAALRPVAQRRVAQRPDLDAIQSLPSQEDPPTAPGEEQILQQPEPPNWSLEVQRHSSQDSQETTAESVGSVVSARAANLAQQREQAAMQRLPSVESTQSACEPRLVHTVATVNAPNPDSEAAAKERRRLLFATRLGSGSQEQLFSTQFSISKTESQSSQLSEQVEHSGSETTEGLQRQGTVIRRMETVPPPPPPRGVCSSEEEQGGVMSGSVVMRAKRTKSRPSSEDEAAPTAAAAPADVRHSRYLENFDVRRKLHENLTEAEVGRSGEMPGGQIAIPRKPKRQSVPEPRRETPSYSSGTVTPTTPTPTQATPVGQAKQPPSSATTPTSKGTPVTTTPADAVQASTSVTGPPGTSFNEPINTTRRDQPSTSYKEPPTGTSREPVTTSIREHPSTSHHDSLTSVSYPPPERRHSQSTDEHEPVESSESERDSDMAGSSSVTTAVPAGGEAGRRHHNFPRNVCVIEEHESTGLVSQESFEDELPYIPTTLPEERAQGVSIIPMRERANMELKTCPVDRPRSTTPLNPSHLEEYCTGIMTPQEAIPGGYQETDGVGGVTTGIAGGGVAGTPVRGEKLRISLPRKESIGKERIQNSKSPRRVSNTSGKSWFEFAEEGLRANNNLERKDSAKQLLPVVTPPPAAPSTLEEPKPKASTQRKLSGHWIDFENIPEKRKPAKRITTLPKETLTSSVPATATTSSSSACGSGHRSGSGAGHHHHHHHHHQQATKTNPDGGDKLHYNYVKPEDCQCECHEAERGESSQATAGAGDTSTETGTGTGTGSESLASVELLQQGEDMLPLLEPDTSAEGRIYGDEEQAPLMRHSGKGVNQPRSQHEEFSSPRNRKFPDRK

SEQ ID NO: 34912 - DNA, 2443 bp, DROSOPHILA
tgtgtgctaaaggaaacaggatgtcattgaaatagcatatttgccaaactccatgaaacttgaggtctttataaggctacatttaggggcttgttaatccaaatcttatggcttagcataaactgtgtgcacatggcaaccctgtacgtatacttaattaaaattgttggctttaacgaatttatatatagatagtgtcgcaatctacaatggttaacaacaatagcgctgaatatttaaatgggaatttccgagaattacagtataacatggcaaccctgaatggccgcgtctttaaatattcatcaattgttgatgttattatttcacttccggttcgcttgcggctgccatgcggttcaatgaactgttgacacggaattacccccttttctctgctctcttctcctgccatctcactctgtcgccgcatttgtctcgctcgcttgcagtggcgaataattcgatggcaatgcagacacgtatgtattgcctcatatatatttagtttggcttatttttccaaatgattcccgaatgattgatggggcccaacgcgagcaacagtatgatatgtgattgcaaccgttttgctgtagttgctcgtgcactgtgacaaaacataagtaaactctttgtcctttataacttttaacgagcagagaatcgatttcgatttttattttaaaatatatcgatattatcgatacatctagactcttatgcaatgtctaccattaataaaaggcgtatttagaagttattacaaacggaattgcgttttttttttcagtgcattattgttgccaaaggcaattatgaaaagccacgccaagagagaaatcgtgccaacggccttctaatgtgtgtccctccgcttttttttccctctcttccttagacggtgctccatttaaaggatattccatgccgatgccgtgctgcttgctaaataaatagcatcgaggagcggcactgggcactggcaaacggttacggaatggatgctcgccggcagaaacgacttggcccagcgccaattgcatccttcgagaagtcattcgaggacaatgccacgacaaatgcacagcagcagcagcagcagcaggagcaacagcatcaccatccacatccctatcaccatcagcatcctggccaagtggcggtgagtcctttagcctatttaccaaaaacaccccataagaacattacagtagatgtatgggtcaacattactgcatttatattgatagatgtgtgcctgctttaagcgtaatggtggtagcataaatatgatatactatattcgtgtgagagggaagaccctatcatccagtgaccaccaccgtaacagctaccacctcatgtcgtatgcacataatgcagggcttaaattaattaaccaaaacacgaaatcagctaagtcgctcctgggcgctgtaagcttggccaaagctttccgctctccaaaaaatatgggtgtataaatgggggtggcaattggtgggttggggagctcaaaggtcggtggatgtatgccgcaatcatgcaaatggccacttaaaaggcagccaggcaggccaaacgcttgcggccaataaacaaaatgaatcttaaacgacaaaacagcagaaacatcgattacactgcaagaaagaaacgaacaagggttgaaaaggctatagacagtagcatgcgtcgctgatcggtgactgaaaacccgtgagttttgcacgcattcgaaaatattgtgacacgcatccgccttggatgtgaagtgctctaaataatgtcattttgccagtggctaaagggacgaaggacgactactgataaggcagcaggcaagcaaacgggttgacagtgtgggaaaaggaaataggacaaacaccgaaatttaaaatcaatttccaatttattacatcaataatttcgaagtttaactatctttcatagaaacagctgataaataaatatcttcttagttaataccccgagagagatgatattcatctgcccgctgctgtattccccatcgcagtcgcacccacacatttgcacacatggctagttgactcttgaagcttcgcaggcgccacagctgagtcctcagagctttccggccgcagtctctctttactgctctcccctccctcttccgttaatttcccgagaagctttcgaagcgaattgaagcgagagagtgagtgagagaggaagtggggtagagtggtgcaaagaaatagcggaaaagcgaagacggcgaagctttcgtcgcattcccattcacattcaccgttagcatacttttcggggcagttcgacgctggcgctgcgtgcgtgcggtctaacggtgaacggtgctcctgcgagagagtggaatagcgaggcagagagagcgcgtgtgtgtgtgtgccagccagacgccagacagagatagcac

SEQ ID NO: 34913 - DNA, 189 bp, DROSOPHILA
atggatgctcgccggcagaaacgacttggcccagcgccaattgcatccttcgagaagtcattcgaggacaatgccacgacaaatgcacagcagcagcagcagcagcaggagcaacagcatcaccatccacatccctatcaccatcagcatcctggccaagtggcgctaagtcgctcctgggcgctgtaa

SEQ ID NO: 34914 - protein, 62 aa, DROSOPHILA
MDARRQKRLGPAPIASFEKSFEDNATTNAQQQQQQQEQQHHHPHPYHHQHPGQVALSRSWAL

SEQ ID NO: 34915 - DNA, 4771 bp, DROSOPHILA
ccagctgggaggccactgcacgggccagcagggtcttgccggtgccaggaggtccgtacagcaaacaacccttcggtggcgtgatgccgacgcgcaggaagagctccggattcagtaggggcagctcgatcacttcgcgcagctcgcgaatttggtcggttaggccgccgatggccgagtaggtgacatccccgggatcctcgtgcgacatattgtacaccagtgggtccacctcgcgcggcaagtagcgcataatggtcagtgtggtcatgtcgagggccacacgagttccggacttcagcttggctttgtccagctgccggcggcagccgaccacgtagcggggtccattggtggccttcacaatgactgtgtggcaagtaagtagttagaatagaggcaatcttagacagaatatgggagagttctcacatttatcctcggtcagctgcttcagcacctcaccaacgatctgtcccacgctctgcagggcctttagatcgttctccgacttgtcgtacagcttggtcagatccttgatctcctcgcgctctgaaaatagccaggttaatacgcatttgctggcggagatcagcggatagacgaactttctttgaggcgtccctcgatttccttgtgctctagcaacttctttcggtactcggataaggctttcacccgcagattgtccggcatcggtgtggcggtcacggtcatcttgttcgaggatttacgctgtactttcggctgtgcaacgcttaaaataaattaaattcagaaaagtagtgagttgcaacttttgtcgcaatgcagtgtgcccgtaacgtggcacgcaataaatgtacacttacttcggtatatttcatttggcatataccaaatgcggtgcgtgcactggctaagtgcagcgtgtgactggccacaccgccagccggcataattcttattggaattattgtgttaagcgagaataattttaatctaaatttaaatttaactaatgtataatttacgcctgctacgaaatctcctgccgatcgccgggcacgcccatccgcgctggctggctagccagcacaagcggcgcccgcagccgggcagcctgccggccgatcggctggaccagctgcgcagtgatctcttcgagcgtcgccatgagctgagtggcgcggagtggacggaggtgcggaggtcgctcgtggacgggtacaagcacatcaacgggcacaacgtggacgccgtcattctgggcgtgtgcagtgcacccaaccaattgtcgttggccaaaagctatgtggagttcctgaggagcaggggctccaaaccgaatgcagcgacactgggtcgcctgctgagggtctacaatgccgcctaccacgagcgaccgcttagcgaggcggaacagtcggagatactgcagatctgccgatcattgcaggcggagcacgaaactctggacgccagcagctgcgagaatgtgattcatggactggtggccaccagcggcgatgattggcagcgcggactgccgctgctcgagatgatgaaggtcaccagtacgcccagtgtggccgcctactccgcgctggcggagaaggccttcagtgtggcgacaccggagcaggaattggcctggcgcctactggaagagatggccacggcacggaagccgcccaaatgcgaggtctatctggcgctgctcaatcgactggccaacgaaacggcacaacttcctgcacagcttagccttttgttgcaattcctcgaacgccatgagattctagtcagccagcgggtggcgatacgattgcaggagctgtccagccaggtgccccaactgttgcacaccaggaccacccatttgggaggtctgggcaagtgccagtcctgccagcagcacctccagccggtggccatcagcgatgaggagttccggcagctaagcgaatgttttctggagcgcgtgctcatacgacgagacgtcttccagcgctccacgcccgaggaggtggccaggttcaagaagtttgtcgaaaagacggcgccatacgactgtgtgatcgatggcctcaatgtggcctactctacgggcaccaaaaagacgccgcagcagctggccaagctagtggctacggtggtgcgtcatttccgggaacaggacaagcgtgtcctcgtcctgggacgcgagcacatgcgcaactggtccaagcaggccatgcactatgtgcactgcaatgccagcctcttcttgaccagcaatctgtaagggaattcatctcgaattggaaagggataggtagactaattcgttcgttcgtttgcttataggtcgcacgatgatcccttcctgctgtatgccacgctgcgcagcggccaggagacagacttcttctcccgcgacctgatgcgcagtcacgcctttcatctgggcaccgagctgaagcccatctttcgtcgctggcagcaggagcaccagttctccctggtcacccaaacgcaaacgggtcagattatagtcaaggagcccgttcgtcatcggctgtgtgcccaccaagtggcggacacctggcatgtgccctactgcgcgcagtacacgccgcatcccacagacagcttcgaggtgcccgccaactggctgtgcatccagatgaaggagcagacgatacccgccaccaaaaccaagaccaaaacaacgaggtgaccatgtgagcaagacttcttatgcgaataaatagtagccaaatgttaacacgaatacactgaaggagccgtcctagtcgcagtcatagcgggtgcacttctcaaaggctccaagaccctgcggctggggcttcttgcgacggcgctcgtacagcagcttcttctcggcggcgcacatgagccgacgcttgatgtgattgtccatctcgaagtccaagtcggccggcttggccagctcgttgggatcccttgtggctgccgagtccagcgccttaatgatcaaactgagcagcgcgtgcgcgaggcgatggcacacatcgtactcgatggcatcctggctggtgtagtagatggccgactgtgaggtgggctgcacaccaatggccaacaggatgttgcagaagatgccgcgctgcatgcgcgcatacggatccaccagctgcggcggaatgcgcatcgttgtggccagatgggaaatgaatttggcgaacttcttgatgagcacgttcaggtactgggtgcggcactggcgctccagcttggtcagcatgttgtagtacagttcctgcttgcgcttcaggaaatcctccttctttcgctccttggtcttgttgctcttaaggatctgctccagctgtctgtttttgggaatgagatgagatgattagatcgcgttagcaactgatgcaagcgctgcacttactccgtggtaatggctttgtatttgcccagcatgcgcttgatccgcttggcccgcagcttcggatcgtatacatccttgaactgctcgtagttgtcgatgagcgtgtgcaacttgggcttggacagggccacgtcgtagggctttaccttgggcggcagtgtcggctggtaggccatgcgccgcacatacaactccagcttgtccagttcctcctcccgccgcttctttacgttctcctctgcgcacacatccggatcctcctcctcgggcagcgactccgtcgacgtgggcatcggctcatcccaatccgagacattggagctggccatggctgaagagtactacacggaactgaactaaacgaaacgaaacggaacggctcgtctcggcttggtaaatttgtacgtattggaaatttagctttgaacttggttacttataaacacaaaataatgtttcgaaatcttttttgtgtacgaaaaatttgggtaaacgggagcactaacaattttatgtattcacgctgcgatagtggatcaccttatgagcagtcccagttgaaatgtgagcgaggtaaaaccaaaggactacttgatagtcagaaaagttctacatgttttcaaagaaatggaacattaattgtatggcaacaagattaaggaattccaatgactcacaccactaacaagcaaaagagcactgcatatgtggtttacaattaaataagcaacgttttattatatgtaatgtaatgtaatgtatgaatattaaccagtggatctatggatctaaagctagtaacactcgttctgcacggatcgctccagggcgaaggtgtactcctcggccagctcgtccacggacaattggcgcgttagtagcgccaatatgctgtccacctgcatttgggtgctggtgtagcgatccttgttggccaatccgggtgccagctcgaatggaatgtcctgcaagtaattgacgggtccttgggctccgggctgcttcacttgatcgctgcgcggtcctggcatcggcggatagggcagatagcccgctggcggcataggtggatacatggagccggctggaacacccggatgaggagcatccggtactggtttgcgctctatgaacacgaaatcatcgacactggtgcctggacgggttgcctccgccggtccctggatgggctggtcatccgtgggcgtttccgcgggcttgcgtttgccaaatatcgaaaacattgcactattttgttctattgtttggtaaaatcaactggcaaattgcgtcgtccgccagctgtgatgctcttttagcgggcgttggtccaaaacagcgagtgctagctagtggtgtgcccaaaag

SEQ ID NO: 34916 - DNA, 2705 bp, DROSOPHILA
atgtataatttacgcctgctacgaaatctcctgccgatcgccgggcacgcccatccgcgctggctggctagccagcacaagcggcgcccgcagccgggcagcctgccggccgatcggctggaccagctgcgcagtgatctcttcgagcgtcgccatgagctgagtggcgcggagtggacggaggtgcggaggtcgctcgtggacgggtacaagcacatcaacgggcacaacgtggacgccgtcattctgggcgtgtgcagtgcacccaaccaattgtcgttggccaaaagctatgtggagttcctgaggagcaggggctccaaaccgaatgcagcgacactgggtcgcctgctgagggtctacaatgccgcctaccacgagcgaccgcttagcgaggcggaacagtcggagatactgcagatctgccgatcattgcaggcggagcacgaaactctggacgccagcagctgcgagaatgtgattcatggactggtggccaccagcggcgatgattggcagcgcggactgccgctgctcgagatgatgaaggtcaccagtacgcccagtgtggccgcctactccgcgctggcggagaaggccttcagtgtggcgacaccggagcaggaattggcctggcgcctactggaagagatggccacggcacggaagccgcccaaatgcgaggtctatctggcgctgctcaatcgactggccaacgaaacggcacaacttcctgcacagcttagccttttgttgcaattcctcgaacgccatgagattctagtcagccagcgggtggcgatacgattgcaggagctgtccagccaggtgccccaactgttgcacaccaggaccacccatttgggaggtctgggcaagtgccagtcctgccagcagcacctccagccggtggccatcagcgatgaggagttccggcagctaagcgaatgttttctggagcgcgtgctcatacgacgagacgtcttccagcgctccacgcccgaggaggtggccaggttcaagaagtttgtcgaaaagacggcgccatacgactgtgtgatcgatggcctcaatgtggcctactctacgggcaccaaaaagacgccgcagcagctggccaagctagtggctacggtggtgcgtcatttccgggaacaggacaagcgtgtcctcgtcctgggacgcgagcacatgcgcaactggtccaagcaggccatgcactatgtgcactgcaatgccagcctcttcttgaccagcaatctgtcgcacgatgatcccttcctgctgtatgccacgctgcgcagcggccaggagacagacttcttctcccgcgacctgatgcgcagtcacgcctttcatctgggcaccgagctgaagcccatctttcgtcgctggcagcaggagcaccagttctccctggtcacccaaacgcaaacgggtcagattatagtcaaggagcccgttcgtcatcggctgtgtgcccaccaagtggcggacacctggcatgtgccctactgcgcgcagtacacgccgcatcccacagacagcttcgaggtgcccgccaactggctgtgcatccagatgaaggagcagacgatacccgccaccaaaaccaagaccaaaacaacgaggtgaccatgtgagcaagacttcttatgcgaataaatagtagccaaatgttaacacgaatacactgaaggagccgtcctagtcgcagtcatagcgggtgcacttctcaaaggctccaagaccctgcggctggggcttcttgcgacggcgctcgtacagcagcttcttctcggcggcgcacatgagccgacgcttgatgtgattgtccatctcgaagtccaagtcggccggcttggccagctcgttgggatcccttgtggctgccgagtccagcgccttaatgatcaaactgagcagcgcgtgcgcgaggcgatggcacacatcgtactcgatggcatcctggctggtgtagtagatggccgactgtgaggtgggctgcacaccaatggccaacaggatgttgcagaagatgccgcgctgcatgcgcgcatacggatccaccagctgcggcggaatgcgcatcgttgtggccagatgggaaatgaatttggcgaacttcttgatgagcacgttcaggtactgggtgcggcactggcgctccagcttggtcagcatgttgtagtacagttcctgcttgcgcttcaggaaatcctccttctttcgctccttggtcttgttgctcttaaggatctgctccagctgtctgtttttgggaatgagatgagatgattagatcgcgttagcaactgatgcaagcgctgcacttactccgtggtaatggctttgtatttgcccagcatgcgcttgatccgcttggcccgcagcttcggatcgtatacatccttgaactgctcgtagttgtcgatgagcgtgtgcaacttgggcttggacagggccacgtcgtagggctttaccttgggcggcagtgtcggctggtaggccatgcgccgcacatacaactccagcttgtccagttcctcctcccgccgcttctttacgttctcctctgcgcacacatccggatcctcctcctcgggcagcgactccgtcgacgtgggcatcggctcatcccaatccgagacattggagctggccatggctgaagagtactacacggaactgaactaaacgaaacg

SEQ ID NO: 34917 - protein, 544 aa, DROSOPHILA
MYNLRLLRNLLPIAGHAHPRWLASQHKRRPQPGSLPADRLDQLRSDLFERRHELSGAEWTEVRRSLVDGYKHINGHNVDAVILGVCSAPNQLSLAKSYVEFLRSRGSKPNAATLGRLLRVYNAAYHERPLSEAEQSEILQICRSLQAEHETLDASSCENVIHGLVATSGDDWQRGLPLLEMMKVTSTPSVAAYSALAEKAFSVATPEQELAWRLLEEMATARKPPKCEVYLALLNRLANETAQLPAQLSLLLQFLERHEILVSQRVAIRLQELSSQVPQLLHTRTTHLGGLGKCQSCQQHLQPVAISDEEFRQLSECFLERVLIRRDVFQRSTPEEVARFKKFVEKTAPYDCVIDGLNVAYSTGTKKTPQQLAKLVATVVRHFREQDKRVLVLGREHMRNWSKQAMHYVHCNASLFLTSNLSHDDPFLLYATLRSGQETDFFSRDLMRSHAFHLGTELKPIFRRWQQEHQFSLVTQTQTGQIIVKEPVRHRLCAHQVADTWHVPYCAQYTPHPTDSFEVPANWLCIQMKEQTIPATKTKTKTTR

SEQ ID NO: 34918 - DNA, 3275 bp, DROSOPHILA
gggatgccccaacgtctccatggctttcttgatgtccttctccgtgatagccgagaagtgggcacggtatgtcacctgatcgctgtacacattgttgatgacatgcttcacggcgtccatcacctcgaagcagatgttctcgccctccttgtcgcaatccagccagagcaccagatagtcacagccgcgcgcctcgtgggccagaaatttgcgcatgttctgcttgggattcgtttccttcttttcggtggcacaaccgaagagctggatgggatccaccttgtcccagcagttgtacttcttattgaagtccagcgacatgacatgaccgcacacggaagtcatccggaagtggacgctgccctcgttccgaaagttgcccgtccactcgtgcgtggagcagccgttgccggtgcctggagaggattacatacaatttcggttgcttgctgagtttgggagttcgtgttgatctactggcacttaccacgcttggccgtgcagcgtccgtttgagagaatccccgccagcgaggccgccagcgagggcttctcggccaccatcagcacgctcttcatggcccaaatccaagtcccgcaatccaatggcctatataattgatgatgagatttttgcagcgcttcctcctgcccactcgttcactcgcatgggattcgccggtttcgtgctgcacacacactcacacaaacgcacacgcacagcataaacgcacacgaacacgggctaatggatgaattggacttcctcgctatacatccgtataatcccctctatttaacaaatttcacgggcattattttccagccaataatacggtctcactgccgttggcagcaacagggtcacactacattctaacgaatgcatcaattggtcataccgcagcgtgcagccctggtgagcagatcttatcgctcgtcgataccagtagtcagtagttgtgcaaacctatcggtggctatcgaatcgagtcgcaagaatgtgcacaacaatttcgttcgcggaacccgaaatcgtgctcggccatggccgcagggtgctcttcgtgaaccccgacgacctgcagatattcaaggagatcgagctgccgcccgaccttggcctgaaaggccatacatcccagtcgcaggaatcgtgtacagccgcagcagccgcatccacagccacagccgcatccggtcaggcaccgggtggcaaggagcaacagcttgccaatcagccagaggagggcggaacctctgccagcgcctccggtttgggatgtgccaccagcacatcggtacagaatgtggcctactcgccagacggacagctgctggccgtgaccaccagtggaaaacagaaagctctcctgctctatcgttcacggccggagaacgcccgcctgctctccgcccgcccactggcccgggcgtccagtgccctgcgcttctgcagcgacagcagctccattctggtcacagacaagactggcgattgctatcagtacgactgcgttgaggtggaggctccgccgcgcctgctgttgggccatttaagtgtggtatacgacatcctgtggtcggaggaccagcagcatatcatcacctgcgatcgggatgataagatacgcgtgaccaactatcccgccacctttgacatccacagctattgcctgggccacagggagtttgtctcaggcctggcactgctcacggagcagcatatcgcctccgcttcgggggacaagaccttgcgcgtatggaactacattcagggcaaagagctgctgcagcacgagctaccagcaccggcggttcgtttattggtacgccagctggagccggagaaggtcttccaggcggcggtgctcttctacgagcacgtggacgccctgggattgtatcgcctggagcgcagctccgatgacacctggagcgtgacggccacacaactggtttgcgccgaagcgggctcatggagcattagcaactttactttaaccagcgaccggatctacatcaccggcgcagagaacgaacgcttaagcttgcgcgtctacgacatcgcaactggccagccggcgagcagcggcgtgcccgagggctggctgaagatggtgctagacggattgggtgccaacgaggagggcgcaccgccattcattcccgaggacttgtccgtttggtttaagaagcgcttcgacaacgttagcgactatttggagcgcaagaagcggcgcatcgaggagcagcagcagcagaagtgcggctaatccccgggcgcccacatacccaaaggaaattaaatgaacctaatctttacatagcatttaattagcatatggagaagaagcaacggactttgtgtgacaggcccgttgtgggcataatatatatatatctgtatatgtgtgtaaatggtgtatggttatctctatggggggcggtggcgagcactggctcctagacgggcttgtagtccagcttgctctccaacttcttgttgtccgacaccttgcgcaccgccttcatgaagtcctcctggatgacgtactcccgctccgcactggatttgcaagaatagttacattttagggagcttatcaagcggtggaaacttcgcacttaccgaatggcaaagagacccgcctccgtgcagacattacgcagatcagcgccattaaagttgtccgacagcttgacaatggcctcgtagtcgatttcgccgtgcttggcgatcttcagtgcgtgaatcttgagaatttccaacctaaaaggagttggggttttaccatcagtatgacaaagtatgtaagtatctaatctgagaaatccctattcatatttcaccaagaagacatcaaagataagagccaatcaatgtgggaatatagcttacctagcctgctcgttgggcagcggaatctcgatcttcctgtccaagcgacccggacgcagaagggcaggatcgagggtgtccggacgattggttgccatgatcatcttgacttggccaagcgaatcgaagccgtccatctggttgagcagctccatcagggtgcgctggatctcgcgatcggcagaggtgccctcggagaagcgccgaccaccgatagcgtcgatttcgtccatgaaaatgatgcagggctgatggtcgcgggcatagttgaacatctcgcgaatgagacgcgcactctcgccaatatacttgtcgacaatcgccgaggacacgaccttgaggaagttggcgtccagctgggaggccactgcacg

SEQ ID NO: 34919 - DNA, 1275 bp, DROSOPHILA
atgtgcacaacaatttcgttcgcggaacccgaaatcgtgctcggccatggccgcagggtgctcttcgtgaaccccgacgacctgcagatattcaaggagatcgagctgccgcccgaccttggcctgaaaggccatacatcccagtcgcaggaatcgtgtacagccgcagcagccgcatccacagccacagccgcatccggtcaggcaccgggtggcaaggagcaacagcttgccaatcagccagaggagggcggaacctctgccagcgcctccggtttgggatgtgccaccagcacatcggtacagaatgtggcctactcgccagacggacagctgctggccgtgaccaccagtggaaaacagaaagctctcctgctctatcgttcacggccggagaacgcccgcctgctctccgcccgcccactggcccgggcgtccagtgccctgcgcttctgcagcgacagcagctccattctggtcacagacaagactggcgattgctatcagtacgactgcgttgaggtggaggctccgccgcgcctgctgttgggccatttaagtgtggtatacgacatcctgtggtcggaggaccagcagcatatcatcacctgcgatcgggatgataagatacgcgtgaccaactatcccgccacctttgacatccacagctattgcctgggccacagggagtttgtctcaggcctggcactgctcacggagcagcatatcgcctccgcttcgggggacaagaccttgcgcgtatggaactacattcagggcaaagagctgctgcagcacgagctaccagcaccggcggttcgtttattggtacgccagctggagccggagaaggtcttccaggcggcggtgctcttctacgagcacgtggacgccctgggattgtatcgcctggagcgcagctccgatgacacctggagcgtgacggccacacaactggtttgcgccgaagcgggctcatggagcattagcaactttactttaaccagcgaccggatctacatcaccggcgcagagaacgaacgcttaagcttgcgcgtctacgacatcgcaactggccagccggcgagcagcggcgtgcccgagggctggctgaagatggtgctagacggattgggtgccaacgaggagggcgcaccgccattcattcccgaggacttgtccgtttggtttaagaagcgcttcgacaacgttagcgactatttggagcgcaagaagcggcgcatcgaggagcagcagcagcagaagtgcggctaa

SEQ ID NO: 34920 - protein, 424 aa, DROSOPHILA
MCTTISFAEPEIVLGHGRRVLFVNPDDLQIFKEIELPPDLGLKGHTSQSQESCTAAAAASTATAASGQAPGGKEQQLANQPEEGGTSASASGLGCATSTSVQNVAYSPDGQLLAVTTSGKQKALLLYRSRPENARLLSARPLARASSALRFCSDSSSILVTDKTGDCYQYDCVEVEAPPRLLLGHLSVVYDILWSEDQQHIITCDRDDKIRVTNYPATFDIHSYCLGHREFVSGLALLTEQHIASASGDKTLRVWNYIQGKELLQHELPAPAVRLLVRQLEPEKVFQAAVLFYEHVDALGLYRLERSSDDTWSVTATQLVCAEAGSWSISNFTLTSDRIYITGAENERLSLRVYDIATGQPASSGVPEGWLKMVLDGLGANEEGAPPFIPEDLSVWFKKRFDNVSDYLERKKRRIEEQQQQKCG

SEQ ID NO: 34921 - DNA, 2758 bp, DROSOPHILA
tagttgaagccaaatgcgacgcgctggttaattggcctgaaaagcgaccaaaatgccagcggctcacagtgggtcaaacaggcgtggaaatttggcatttcaaaacattttcgcactttaattgcaataaaatatttgtgaatatggattttcctgtacgaaacttagttatctcgcactgtgcaaatgcagcagtggttttccttgaagtcgttaaaaagtctgaacaaacatggttttcatatcgttgactttcttattattgacaagtcaataaatatccgttttttggcttggatatatttatgaaaaatacttcctacaattggccaattgattaactatgtatttgccccactgtgccagttttgatcccaatttctcagcgggccatacaatcataaaaaaaaaccgcatggagctgactataaacaaatatatatgtatgtgcatatatatatgtatgtatgtttcccctttgactaaacaattagtaggaacttgaagatggagtggggctaatattttgtgggaaattcgttgccggctggctggaaactgcagccggcgtcgcttggaaagggaaaacttcgagttgcagcaacaaaaaacgcgtgtatgccgcacaaaccgcacacaagcaaacaagcgctgtttcacacacacacacatatatatatatatttacacggacgcttgcagaatgttgggcgtttccacgtgaggttatgtttgtcgataaaaaaaaaatgaaatgaaatggagaaaagaaggaattatgaataaagtttactgtacatggtgcaacaaacgtggggcggtgggcttactcaatggtaaggagagcgagaaagagcgggagagagcgagggaaagccgtatgaatggggttagagaaagaggcggaatggaatcatgttgccgggaatggcgagaatggaaagggagtcagtcagttggttgggaagagtgcggaggggggaaaatggacgtggaaaacttaccgctccagcgtgtagcggaccagcatgacaacagcggcgaatggaatgggccatatgaggtccttgtagttggcgtgcaccacatctggacgcgagccgggcgcaatgtccgcccaggttgtgttcggcggcagccaaatgtgcgtactccagaatacattgctgaactcattcaatatgtccatgttgctgcttcagttgccgcttcttaatttctcaattgtttgttttctttttcttggttttcctttgcttagctttccagtttttccttggcgtttgttgtcacatatgtatatgctttgctttttctaaatattcgcaattgtatgagcctgtgttattgtgccttgcgaacaacagcaacaataacagcaagaacaacaataagcgacaacaacagcaacaagaacaacaacaggagcaccggacactaatgcacactcacagcgtagcacaaacacacactggcaaaaaaacaaaaaccgccgaatcgaattgttgttgtcttgtctcgttaacttgcgcttatggcttttctaattctacttctatttctatttggatttcgatttaattcgtttttggaaatgctacctttgccgtttgtttgggagcgtaaatgaagtgaagttccctgacaatctgttctcgaccaaagcaatagactttctgaatttcggctcggtgtcgagtcggccgccgctcgtttcgtccacttaaactttcaggatgaacgaaaaaaaatactaatagtatttcctcgtcgagcaacaacaatacagtgtgcccagagacggcggagcagtaaatgtaactgcagcgcgacaagtgtgcccgtgtacgggaagacaaggaaagccagcaaaaataaggctttagaagctacacaaaataccaaatgcactaataattttaaagaacttttaattcacaagtttgcgaattttgtttattgcttattattattattgttcattacgtttaccactagtttttgagagaaattattatgcgctacaattagtgttggtttttcggtaagaactcataaaagtcaactatgtaaaggaagtatgccatggactataatggaaattagcaaacttcatcgttgagaccaaagggcatatgtgtgttcccatataggggaattttcccgcttatcaatacaagtatgtgtgcaaaattcttgtccaattgttgtcagcacatgaaaacggataactaaccataggttataggaaggatccactgtagttctgcaatgcaaaccagggctggcagcgagaacactgctgtaagctaacagcaaactgtactgtaaacagtagaaaactgttcgtggtatttagtatttagctagtattttaataccaacttttgtgcaatgcgatgagaaataaagaagaagagaagaggaagaaacgctcacaaactcttcgtttctctgcattaatacgcactttattattaagttaagctttattccattatattatggccgaatttctggactccgaggccgaggaatcggaggtaggtgtctgcggaaccccaaaaacactatttctagaagcgcgtaccgttcgtgcgtcgttatgtgtgcggtgtgcgttgcgccttgcgtgtgtgtacatacatatgtgcctacatatatattgaattaaccaaatggcttttcttcgtttttcccgcaggaggaggaagaattggacgtcaacgagcgcaagagactcaagaaactgaaggcg

SEQ ID NO: 34922 - DNA, 472 bp, DROSOPHILA
attagtattttttttcgttcatcctgaaagtttaagtggacgaaacgagcggcggccgactcgacaccgagccgaaattcagaaagtctattgctttggtcgagaacagattgtcagggaacttcacttcatttacgctcccaaacaaacggcaaagaaaaagcaaagcatatacatatgtgacaacaaacgccaaggaaaaactggaaagctaagcaaaggaaaaccaagaaaaagaaaacaaacaattgagaaattaagaagcggcaactgaagcagcaacatggacatattgaatgagttcagcaatgtattctggagtacgcacatttggctgccgccgaacacaacctgggcggacattgcgcccggctcgcgtccagatgtggtgcacgccaactacaaggacctcatatggcccattccattcgccgctgttgtcatgctggtccgctacacgctggagcggtaa

SEQ ID NO: 34923 - protein, 62 aa, DROSOPHILA; identical to SEQ ID NO: 29040

SEQ ID NO: 34924 - DNA, 4647 bp, DROSOPHILA
ctgatatccgagtgcccataagcgatcatcatcatcatctcgctcgttatataattcgcaattcggcggggcatgtggctccattttggggacgagccgtgttcttgaattttacgcaacagttggcgccgcagcagcgtgatcttggctatatagccatgtcgatggcgtcaacctgcggaaccccacgaacccatctgcaccatcgaaccaaaccaaaccaaaccaaaccgatccgatacgttcccatcccatcagcatcgcatcgcatcgcatcgcagcttttggttcgcccactccaccgggagaggatcaataacagacaataatgtgccgttgtctaattgtaagaaccaacttccaatttcagagacatccgacatgagcgcataacccgtgcccacagctcggggaaaactggtagcgctgcaagatttagttaatttccgaactatgatgggctagaaatgttccaatatgatttttacttatgcttcatagttggaagtaactacgtatacgtaatttttttcagggcatagctaataaatcgcgtatacgacccgttttacctgtttttaaacaaaaagtcatataaatttgattgaaatacagttttgaaaatggtatctataattcttacttttctttatgccatagataatatttagaaaattcgaaaattaggcctaatagttctgccatcttgcccccagttgtacgcgtgtgtgggactttcatttcgctgatcggtgcccaaacctagaagccaaagatgcgatgcgaagcgggcccattcgagcgtataaaagcgctttggaaacgcagctacatttcagttgcttcaaaattatcgccccaaccgccggcaccctcagcgaattgcgatcgttttcgaatcgtttttcgaatcgttttcgagtagatatccgtttgttttttttttttttttgcgttccaaaacagttttttcctgtgccgcattttctgagcttcaaacatgtcgttcctgggcaacacatccgatctggagtgcgaaaagaacgagttcccgaggcagcgaccctcgggcatcatcaccaaggtggccgcccacaagctctccgcggagcccaagtggacggacaagcgggaggatgactccgattcggaggtctcgtcgccggataatttcctgaccaaaggtggacatggcccaactcatacgctaatcataaaagccaggggattgcgattataatattatagcagtgcagggtgatctataatctatctatatctctatataacacctcctgttttattatattattatgttcgagttatgttcagttagaatgctaatttgtaagggtttagaaaagcaagtaaccaattggaagcttataggataatttggataataatactaatatttaacgtagcaatcaacagtctttcaactatcattacccatcccactaatctagtagttgaagagactaaccacgtagcctaaccagaacgtaatcgtacttacaggcgccttcctattgaccccatcctacgagttgtccatggaacgggcggccctcatctgcgagaagatggcattcaagggatgcttcagcttgaccaaaaccgctacaggcattctgtttaaattctcacatccagatgactatcaggcggtgttcaagaagggcttccacaaggttaccggggcgcgattctaccgcaaggtgagcccacccacccacacccacatctccagtgattggaagggcattatggggcacaaggtatgtgccacagcagtgaggttagaggtgcaacaccttctcgattcagctcgaatgtcctgagagagtatctatcataagtgtgactaaatacgtgcccacaaacatttcaaattgtgatccaaaattttaaattcaatactcaatgctttaatggtttacaaatttctatccgaaattgtagtaaagtacaaaaaataattttaaattcgataagttcaaaacgaaaatgttaccacttgcattcagtaactgagcaaattagaaaattatctattgaagattcgttgcacctgaagtgggtttcgttgccccgagacccagaacttcccatcactgcccattcccatgccacatcccacatcatcagatccgatcccatcatcatccgagcatcttcggccagactaacccaaccgacaagtgaaatatgcaaattttattttaccccattttgcagcaaacattctcgcgcagcgtgagtatatccatataaccacatcgaccgatgactctcctccactgagattggaattgacccagcacagacatagacataacactcagaaaaatataagaaaccccccatatatccatcgatcgacctatgtagcttagcctaaccatgcgcatgcgcagcagtcactctccgttctcccttcgttctcccttctgtgacccacagattgccataccgtgtcggccgaggaagaccttcaccctgtacgtgctggatgtgcccgaggatctgcccgtggaggatatccggcatgccatgtacaagttcgattcggtggtggaggtggtgcgcctgcacatctactcgagcctcgccagcaatgccgccaatgccacctcctcctccgccgttgccgccagcagctcctccggcggcggtgataagggcgtcgaaggtgagcagattcagctgctgcacacgccaacccagacgctgcgccgagcggcactccgaagtaaagtaccctccaattggtaacatgcgaaaatatattgaaattgtgaacccgccctcgtttccatgttctctgcaatctctagatggtaaatcctgtcgtgaaatgttcaataattcctctcccctctcccctttgccaacacatttgcaggcgtctccaagagcgtgggttctgtggtgggcgatgccatcgagaaggccgagcgtcctgagcgcagagaactgcctccagccgttatccgggtcaccctggcctccatggatgagtacaacattctgttgcagaacggactcaacttctacgatgccacgttctttcccactgaggccaacatctcgctgaagggcgccaagatcgattataagcgcaggtatgcgaacaaaatgtaaaatcttcaattttggggacaccagacccaacattggattattgtaacttgggtttaaagcgtcttaaaagcgattgttatacctttcgtaactcagctcaatgagtactctcacctagaatcaaaaagtggatgaaaaaattttgaccaattttttttgaaaattttgaggtggttcgttcaggaaatttcgaaaaaaatttgaaaaaaattaaaattctaattttgaatacagatgatgaggggatgaagttacgagcattttaagatatgccaactaaaattcagtttgattttagcgaagttatgggcttatacacagttgtttctagagtaatattttcctttgagccatcttattcaagccctcttttcgtccccagaatgctcgatggctcgattcccggacgggtgagggaactgctgcccgttttcgatgcggctggcttctgcaagctgccaccgcccaccagcaagctaattaagccgccgaggtcgtagattcgatacgatgcgattacgattacgatgacaacgctttccggccaaatacacgggcccccatgacgaccacactccggattcggtactacccagtttatcttaccctacttcgatgtatactacatactacataatgctctttttaacggatgccaacgtttccgctcgatccaccaatccgatccaattcgatccataataattaccatctatgtttttgttgccttctccttcctatctatctatctatctgtctctttcccctgtgaacttttcaaccttcttcgctctgttttttttttttttctttttgctagttttattattaaaggcccatataaggcgtagcgtctaattcgtttgattgtctaacaatgaaaaaaaaataagcaaaaacacagaaaagaaacataataaagatgaaataagaaaaaacacttttcaatggcaaacggaaatggaaacattcagtgaatttgatgtgtatattagtgggcaaataatggatgtcatcatatatggcaagcacatcctgttcgcgatgatatagaaaaaaagtccgactttgggccgtttcacattccacagagaaagaaaggcaagaagcagatttttggtttaaataattgttttttttttattcattttgcactttatttatttttagttaattcatttagtttcgttttaggtatacatatatcttgattgattcaacaacagacaaatttttgcacaaagctcaacataaagacatagatcgtaatatatatattcgtaagcatatcaattaccatactgtcgaatgtcttgtatatcgtataataataataattaattgatttaaagcatataatagatgtatataatatatgtatgtatatatatatatatatcttgtatctgtatagtagtgtatagtatatagtctgtttaggaaatactcaaagaacatgaaacgaatcaagcgaatcgagtcagacacaagcttcggttt

SEQ ID NO: 34925 - DNA, 1143 bp, DROSOPHILA
atgtcgttcctgggcaacacatccgatctggagtgcgaaaagaacgagttcccgaggcagcgaccctcgggcatcatcaccaaggtggccgcccacaagctctccgcggagcccaagtggacggacaagcgggaggatgactccgattcggaggtctcgtcgccggataatttcctgaccaaaggcgccttcctattgaccccatcctacgagttgtccatggaacgggcggccctcatctgcgagaagatggcattcaagggatgcttcagcttgaccaaaaccgctacaggcattctgtttaaattctcacatccagatgactatcaggcggtgttcaagaagggcttccacaaggttaccggggcgcgattctaccgcaaggtgagcccacccacccacacccacatctccagtgattggaagggcattatggggcacaagcttagcctaaccatgcgcatgcgcagcagtcactctccgttctcccttcgttctcccttctgtgacccacagattgccataccgtgtcggccgaggaagaccttcaccctgtacgtgctggatgtgcccgaggatctgcccgtggaggatatccggcatgccatgtacaagttcgattcggtggtggaggtggtgcgcctgcacatctactcgagcctcgccagcaatgccgccaatgccacctcctcctccgccgttgccgccagcagctcctccggcggcggtgataagggcgtcgaaggtgagcagattcagctgctgcacacgccaacccagacgctgcgccgagcggcactccgaagcgtctccaagagcgtgggttctgtggtgggcgatgccatcgagaaggccgagcgtcctgagcgcagagaactgcctccagccgttatccgggtcaccctggcctccatggatgagtacaacattctgttgcagaacggactcaacttctacgatgccacgttctttcccactgaggccaacatctcgctgaagggcgccaagatcgattataagcgcagaatgctcgatggctcgattcccggacgggtgagggaactgctgcccgttttcgatgcggctggcttctgcaagctgccaccgcccaccagcaagctaattaagccgccgaggtcgtag

SEQ ID NO: 34926 - protein, 380 aa, DROSOPHILA
MSFLGNTSDLECEKNEFPRQRPSGIITKVAAHKLSAEPKWTDKREDDSDSEVSSPDNFLTKGAFLLTPSYELSMERAALICEKMAFKGCFSLTKTATGILFKFSHPDDYQAVFKKGFHKVTGARFYRKVSPPTHTHISSDWKGIMGHKLSLTMRMRSSHSPFSLRSPFCDPQIAIPCRPRKTFTLYVLDVPEDLPVEDIRHAMYKFDSVVEVVRLHIYSSLASNAANATSSSAVAASSSSGGGDKGVEGEQIQLLHTPTQTLRRAALRSVSKSVGSVVGDAIEKAERPERRELPPAVIRVTLASMDEYNILLQNGLNFYDATFFPTEANISLKGAKIDYKRRMLDGSIPGRVRELLPVFDAAGFCKLPPPTSKLIKPPRS

SEQ ID NO: 34927 - DNA, 7144 bp, DROSOPHILA
gtttctcgatttatgattggtattaggtattgggcttcgattgccaacttataaagcgacgatttctgttcaagtttccattttacacaatgtagcattttggattatcctttgatttgctttaaattttagcgcgcgctatataatcataaatatatatatatatatatttatatatacgtgtgtatagcatgtatattattcagtttttaagttctagcgacttttgggagcggtgcccggcacattttggaaactctcctctttctcttaacttctctctgtcgctgtctccctcactttcgctctcgctcgctctctctctctctctatctcactttctctggcgcacgcacacacacacacgcacgcaaaatgcactcacactcacactcgcacagacacaacagagagtaagatataggatatgcaagatcgggcagagatcgtctgaatatatataaatatatatatagaaaagttgaatcgaaccagacagatgggacatgcgacattatctaaggatgcgtgtgtgtgaagcgaagagaatggaaaaaaatgtctggattaagctatgctttagatggctgatccttaactacaccatagtacttatgcagatactgatacagatacagatacagttacagttacagagatatagatagttgtatactatatatgcttgcccgtcgattccgattgtgtcaggcacgcgctcctcgagatacacttggattatatctccacgtttacatatgcctataggtgtatgctttaaatatgaacttagcctagcaataaatatgtttatccatcgacttatctccttttgccttgcccctatgctcggctgaccaagtccgtttccgggctgccttgctcgaccacagcatggattcttttcggagttgatggaacggccttaaggtttgcttttagagtactgagtgggggggttattgctagaattgcgtttagatgtgtgccaggatgacgtctagaactgcctgctctcgatgtccaacgctccatcgtaggcatcgaatgcatcagccgactcgtctccctctccaccatccaggaccaatggtgttggcttggctgcggtgatggctgtggccgttgccacgccggcgaccagttcgtcgagcagctgcatctgctgtcgagtgggcgaggtcaggggcgtggcaaccgtttgatatcggtgatggaacgtcgacaatatctcgcgaattttagcaatgatctcctgtactcaggcatttgactcctgcggaacacaagtgatgcatatcaatcaatatcaatatctggatgtttacccacctttaggttgtcaaagtagtgcatgatctgctcgtaatccatgtcgagatcgtccaggccaagacgctctccgggggcgacagactcatcgacggtggccgagaacatcggattgcccaccacggtggcgcgcttaacacgcgacgatttcgtggtgggctcctggctgacggcgctggctggcagccttataatctcgtccgttccatttgagttggccgcatccccagtgctgctggccatgctatggttttctgttcacaaggccggaccgtccgtttagaagatgtttaatgctagctacaagatatatgcctacctttagctttgccctggactgctgatgtggacggcgttgccggcgaggacgcggctgctttggtaactctctttggtgtcagcgaatcgaactggaacgcgttcttctggtgcggattcgtgtactccaccagcttctcggcgttgtgcagctcctcgtgttgctgctgctgttgttgttgttgctgctgcttgattttgttgtgcgccgccttaatgagtggctcctgactgaagttgtggctatggctatggctgcgctgatgctgatgtggatgaggatgtggatgggcttgggccagtggatgtgggcgttctgttggcaattgctgattcggctgcggtgtcgactgttggctattggcattgctatcgctgttctgcaaatgctcacgtctgtacagctgactgtgtcgcttgttgggtgccgcatcctgataagtaaaagcaatcaatctaagtttatttgatctgcattttgtttttgagaacatacctttacagatccagtaccgagcacaggctgtaccggcaggcaggctcgagcgcccacattcctgtgcggcggcactggtggcttgtagtccagggcattatccttgcgctcgttggccaaatagctgcaagtatttttttttagatgagagtcggctggtgcaaaatacttttgaacacaatactcactggtcggcgtgctgcttgtttagattggaggccggcacgatatgtgtctgcagcttgggctgttggtcaaaggagctaacacggcgtccattgtcgtagttgacaatcggattgctagtgatgcgcatgcgggaatctgctgaataataaagccttaagtaagttaaacccttttggaaaatatcgaatgtcacctctcggattcagatgcgtgttggtctcggccacaatggactggcggtcgatggtggagcgtcccagccagacccaatcgtgtgcattcgttgtcgactccttcaggcgcacatcccggaagccacccgatccaccagaaccattgctcttgcccgccgacagaggatccaagccagattcaatcattgctggccgaaatttggaggcatacacaacgcaagagatcacaaacacaataattgcgaagcagaacgccgtgagcagaacgtacatgcccagttccatggtggtcatggtgcctgtgccagctagtcccttgccatgatgacccttatgaaccgcctgaatgctgccccgatgctgacgcgcctgaacagtaggctcgtacagctggctggagtccctcaaggggatgcccactgaaacggggattaggatagaataagtataaagagatacaatcataatattatctacaccaacctataatatcggccagatctcctgtttgcctatagttctttctctccctgcccacagtgccatcattttggatagcctcctgcttgctcacgatatccacattgttgaaatccacttcaatagatgccaatgcactggccaatggtgctgcattcgatttgttctgtttggagctgctcaacgtgccacgtcgctgacggcattcctcggataatagaagggtcacgcgcagcaggttaccattgccctcgccgacggctatgacacgtggatgatgggaagccagcatgggagcaaatgccaccacctcggtatccaaactctccaccagcaggaagtagtcctccacggcaatatctctgtaatcacatagtaacacaattttaatgaatatacgcgaattgaaagtcgtataatgttcactcaccgcaaaggagttttggagccatcggtaaactccagatcgatgtcaagcaatccctcctggtactgagcagttagcttgtgtgtgacagaagtctccgccaggtagccgttctcaatcgtgttgtccggactgatggtaagctgcagacccgaaataacgcgcacgatgagcttggaaaggttcaccttgtcgctgcccacacggatttccttggtgccaattactcgacccgttatgggtgacaggacctggacatcggtgcgtcccatggacttgccctgcagaattcgacccttcagagatgcgatcttgggatcggccacacggagcagcggttgcaccagatccgtcactcttaagcctgtacgccgtgagataaagtagctggtgcgtccagagttctgtttcaaatggataagaagagaaacatggctatataatcacttttgacgcttatgaagctcaggaattcccacctggtccacggccaggaacttggcatacacctccacgggactttgctggtagcgagcgcgacaaatcgtcttgtccgctcccagattgttatagtagttcgttccatgctgaccccaaacgtaggatctcttctttcttcgacgagactgcttgttgtgtctgccatgcaatgaataagaatgataagtaagatattcaaactacaggataataaacttacagatagtgattgtcatcggttactttccatcctttgatttgggagagacggaaatcggatatgtaaacttccagcggaaactcgggcatccaaacgatgaacttggccacgcccacataggtgccatacttgacaatgaccgaggcattggatgagccgcgctgctcggagccatccacataaacagagctgcaggaggaggagacctgaaagaagttgattggttatttagctagcaattgcacgattcacagtcatcagacgcaccttgattacactttcatcttcggcgtgacaggagctctgtagcgtcacatcggccaccttgcctgcctgcgaaacgatgaacaccttcatcgcctgggccacctgtctgcccgttagcaccgccgtgttcatcacctcccagattttggccatcggtagcaccgcctgaatgtcatccttgttgatctccagcttggcaattagtcgcttcttgttgtcatcgggtataaccagttccccggaatccttgtcctttggcgtgtcatagacatgcgtcacggaccacacaatcttgccaccgtccacaatatcattggtgtcctcggccacctcgagcagccatgagaatacttcaaacacctcgctggttaggttgccaccactttccagactggattcggcctctttgcggaaagcagtaacgcgagcggtagtgtgtttgggattttccttctctacagaaacgctccattggtctgtggaggcggtggcgcccagaatctttaagcccgccttaacacgagctctcacagtgaaggcggccacccgctgatcgggatattgatgtaaaaagacgggcacatgtagacgggagagtggatacagcggatgttgtggcaggagaaaggtgacggcatcatcggcgcgcaacatacgatagggagtcctggcggccaacaaaggcacctgggcgaatgtggtcaacggttggatctgcaccttcggctcgcattgctcgggattacgcaaaggcggttcaaagacactgtacgagacctgggcataccgctgcggtactttgggtggcgcctgaccactgccatcttgtgtgggcgccggcagctggggccaccagcccaggggcacgaccacttcggctacgcagacaccgtcctcgccctccggcatgcagcgtcctttgagcggctgctccgaacccatcgccacgtgcaggagtacacagaccttctggcgctgcaaatgaccacccggatcggctccggcgtggaatagtacccgaagcacgggagcatcctgcgatacactggagcgaaccaaatgggcggatatgtccaggtgcatatttggctgctggagctccagtagagtggcattctgtgggagagaaagtggtatgacaaggcgtccttttgttgcttgccaggatttggggataactcacgttcatataatcgcccgactggctgtccattgtgtccggcacaatgtagcgggctggcaccgtttgtttcgtggaaaacggtccatagctggcgcgtatggacaccggctgcgtggtctcgaccacagtgaatctgtccagagataacacggaatcataggaggatcgttgccgtaacggcggcaccgccgaggatgtctgcacattggcgatctccggcgtcacaggtggttggcgggcgtgcttcagaaagaagccgctgtccggcgcctcgaagtgcacctccacggagtctggcgaggattcggcatggatttgttatgggttgggagtagatgaaggagtcaattagttgaattttggtaatggtaacataggggttggggattttcttaaacccggaggtcacccactcctcctttatccccctcccactggcttactccctcctcccactccatcgctttttttgtaccacccccctgggtttggaaactttatttgatacttacatgccaacgacagctgcaaagcaattatgaggcagtatctcatcatcttgttcgtgtgcaggaatccaaaatatatcgaaatcctgaaatcctgtgcccacccactcgttaatttgctaattaactgtgcccgcactttcgttattttcactgttctctcgcttgtgtggcttatttgaccgttattccgttaatcgtgccaaaagtcaaccgttaattcgcgctggctagcacttttcgtccttttttctcgctcagcaatccgcagcacatcctttattgattctttccagtgtgcccacacacccacacaccaacacacactcacacgctgctcacacacacagccgtgggccacctcacacacagatacacatgcacatgcaggtatagacacatcttctcctgcaaatcgcgcagttcagttcgaaattaattggaccgcaaccgtgccaatcgattcgatttttcactcgactcgcttttcacgcgctggcaaggatctgctgggctggaaaatccctcgttcgacgccctaatgcatgcctcttttcattcaggtctctcagaattttacacaaatatcgaacattccaaacactttgcagtgtgtccataccgtattgaaaacaatatcctaagatagtggtactaccgtatttggaagtgctgtaatatggggctgccagactgtgcgcatactcctgaaactccaatcagaacgcgggcaattcaaaaagttaataccaaaaaaaaaaaaataccatgtttgacagtgaagaataaagaaaaataaaattaattgggattgcttaagaaaattttttgagaaactttagattctacaagaaaagagcttcttaggaacgaatattttaaaacaagatctggtagcacaactgacaataggtttttaggattctaatagccatggtcctagtctcagtagtattcacatttgtaatataattttatattttataatataatttatagtcttaatatttatttattttaggagctccaacaattagcacttttgcaca

SEQ ID NO: 34928 - DNA, 4200 bp, DROSOPHILA
atgatgagatactgcctcataattgctttgcagctgtcgttggcatactccgtggaggtgcacttcgaggcgccggacagcggcttctttctgaagcacgcccgccaaccacctgtgacgccggagatcgccaatgtgcagacatcctcggcggtgccgccgttacggcaacgatcctcctatgattccgtgttatctctggacagattcactgtggtcgagaccacgcagccggtgtccatacgcgccagctatggaccgttttccacgaaacaaacggtgccagcccgctacattgtgccggacacaatggacagccagtcgggcgattatatgaacaatgccactctactggagctccagcagccaaatatgcacctggacatatccgcccatttggttcgctccagtgtatcgcaggatgctcccgtgcttcgggtactattccacgccggagccgatccgggtggtcatttgcagcgccagaaggtctgtgtactcctgcacgtggcgatgggttcggagcagccgctcaaaggacgctgcatgccggagggcgaggacggtgtctgcgtagccgaagtggtcgtgcccctgggctggtggccccagctgccggcgcccacacaagatggcagtggtcaggcgccacccaaagtaccgcagcggtatgcccaggtctcgtacagtgtctttgaaccgcctttgcgtaatcccgagcaatgcgagccgaaggtgcagatccaaccgttgaccacattcgcccaggtgcctttgttggccgccaggactccctatcgtatgttgcgcgccgatgatgccgtcacctttctcctgccacaacatccgctgtatccactctcccgtctacatgtgcccgtctttttacatcaatatcccgatcagcgggtggccgccttcactgtgagagctcgtgttaaggcgggcttaaagattctgggcgccaccgcctccacagaccaatggagcgtttctgtagagaaggaaaatcccaaacacactaccgctcgcgttactgctttccgcaaagaggccgaatccagtctggaaagtggtggcaacctaaccagcgaggtgtttgaagtattctcatggctgctcgaggtggccgaggacaccaatgatattgtggacggtggcaagattgtgtggtccgtgacgcatgtctatgacacgccaaaggacaaggattccggggaactggttatacccgatgacaacaagaagcgactaattgccaagctggagatcaacaaggatgacattcaggcggtgctaccgatggccaaaatctgggaggtgatgaacacggcggtgctaacgggcagacaggtggcccaggcgatgaaggtgttcatcgtttcgcaggcaggcaaggtggccgatgtgacgctacagagctcctgtcacgccgaagatgaaagtgtaatcaaggtctcctcctcctgcagctctgtttatgtggatggctccgagcagcgcggctcatccaatgcctcggtcattgtcaagtatggcacctatgtgggcgtggccaagttcatcgtttggatgcccgagtttccgctggaagtttacatatccgatttccgtctctcccaaatcaaaggatggaaagtaaccgatgacaatcactatctacacaacaagcagtctcgtcgaagaaagaagagatcctacgtttggggtcagcatggaacgaactactataacaatctgggagcggacaagacgatttgtcgcgctcgctaccagcaaagtcccgtggaggtgtatgccaagttcctggccgtggaccagaactctggacgcaccagctactttatctcacggcgtacaggcttaagagtgacggatctggtgcaaccgctgctccgtgtggccgatcccaagatcgcatctctgaagggtcgaattctgcagggcaagtccatgggacgcaccgatgtccaggtcctgtcacccataacgggtcgagtaattggcaccaaggaaatccgtgtgggcagcgacaaggtgaacctttccaagctcatcgtgcgcgttatttcgggtctgcagcttaccatcagtccggacaacacgattgagaacggctacctggcggagacttctgtcacacacaagctaactgctcagtaccaggagggattgcttgacatcgatctggagtttaccgatggctccaaaactcctttgcgagatattgccgtggaggactacttcctgctggtggagagtttggataccgaggtggtggcatttgctcccatgctggcttcccatcatccacgtgtcatagccgtcggcgagggcaatggtaacctgctgcgcgtgacccttctattatccgaggaatgccgtcagcgacgtggcacgttgagcagctccaaacagaacaaatcgaatgcagcaccattggccagtgcattggcatctattgaagtggatttcaacaatgtggatatcgtgagcaagcaggaggctatccaaaatgatggcactgtgggcagggagagaaagaactataggcaaacaggagatctggccgatattatagtgggcatccccttgagggactccagccagctgtacgagcctactgttcaggcgcgtcagcatcggggcagcattcaggcggttcataagggtcatcatggcaagggactagctggcacaggcaccatgaccaccatggaactgggcatgtacgttctgctcacggcgttctgcttcgcaattattgtgtttgtgatctcttgcgttgtgtatgcctccaaatttcggccagcaatgattgaatctggcttggatcctctgtcggcgggcaagagcaatggttctggtggatcgggtggcttccgggatgtgcgcctgaaggagtcgacaacgaatgcacacgattgggtctggctgggacgctccaccatcgaccgccagtccattgtggccgagaccaacacgcatctgaatccgagagattcccgcatgcgcatcactagcaatccgattgtcaactacgacaatggacgccgtgttagctcctttgaccaacagcccaagctgcagacacatatcgtgccggcctccaatctaaacaagcagcacgccgaccactatttggccaacgagcgcaaggataatgccctggactacaagccaccagtgccgccgcacaggaatgtgggcgctcgagcctgcctgccggtacagcctgtgctcggtactggatctgtaaaggatgcggcacccaacaagcgacacagtcagctgtacagacgtgagcatttgcagaacagcgatagcaatgccaatagccaacagtcgacaccgcagccgaatcagcaattgccaacagaacgcccacatccactggcccaagcccatccacatcctcatccacatcagcatcagcgcagccatagccatagccacaacttcagtcaggagccactcattaaggcggcgcacaacaaaatcaagcagcagcaacaacaacaacagcagcagcaacacgaggagctgcacaacgccgagaagctggtggagtacacgaatccgcaccagaagaacgcgttccagttcgattcgctgacaccaaagagagttaccaaagcagccgcgtcctcgccggcaacgccgtccacatcagcagtccagggcaaagctaaagaaaaccatagcatggccagcagcactggggatgcggccaactcaaatggaacggacgagattataaggctgccagccagcgccgtcagccaggagcccaccacgaaatcgtcgcgtgttaagcgcgccaccgtggtgggcaatccgatgttctcggccaccgtcgatgagtctgtcgcccccggagagcgtcttggcctggacgatctcgacatggattacgagcagatcatgcactactttgacaacctaaagatcattgctaaaattcgcgagatattgtcgacgttccatcaccgatatcaaacggttgccacgcccctgacctcgcccactcgacagcagatgcagctgctcgacgaactggtcgccggcgtggcaacggccacagccatcaccgcagccaagccaacaccattggtcctggatggtggagagggagacgagtcggctgatgcattcgatgcctacgatggagcgttggacatcgagagcaggcagttctag

SEQ ID NO: 34929 - protein, 1399 aa, DROSOPHILA
MMRYCLIIALQLSLAYSVEVHFEAPDSGFFLKHARQPPVTPEIANVQTSSAVPPLRQRSSYDSVLSLDRFTVVETTQPVSIRASYGPFSTKQTVPARYIVPDTMDSQSGDYMNNATLLELQQPNMHLDISAHLVRSSVSQDAPVLRVLFHAGADPGGHLQRQKVCVLLHVAMGSEQPLKGRCMPEGEDGVCVAEVVVPLGWWPQLPAPTQDGSGQAPPKVPQRYAQVSYSVFEPPLRNPEQCEPKVQIQPLTTFAQVPLLAARTPYRMLRADDAVTFLLPQHPLYPLSRLHVPVFLHQYPDQRVAAFTVRARVKAGLKILGATASTDQWSVSVEKENPKHTTARVTAFRKEAESSLESGGNLTSEVFEVFSWLLEVAEDTNDIVDGGKIVWSVTHVYDTPKDKDSGELVIPDDNKKRLIAKLEINKDDIQAVLPMAKIWEVMNTAVLTGRQVAQAMKVFIVSQAGKVADVTLQSSCHAEDESVIKVSSSCSSVYVDGSEQRGSSNASVIVKYGTYVGVAKFIVWMPEFPLEVYISDFRLSQIKGWKVTDDNHYLHNKQSRRRKKRSYVWGQHGTNYYNNLGADKTICRARYQQSPVEVYAKFLAVDQNSGRTSYFISRRTGLRVTDLVQPLLRVADPKIASLKGRILQGKSMGRTDVQVLSPITGRVIGTKEIRVGSDKVNLSKLIVRVISGLQLTISPDNTIENGYLAETSVTHKLTAQYQEGLLDIDLEFTDGSKTPLRDIAVEDYFLLVESLDTEVVAFAPMLASHHPRVIAVGEGNGNLLRVTLLLSEECRQRRGTLSSSKQNKSNAAPLASALASIEVDFNNVDIVSKQEAIQNDGTVGRERKNYRQTGDLADIIVGIPLRDSSQLYEPTVQARQHRGSIQAVHKGHHGKGLAGTGTMTTMELGMYVLLTAFCFAIIVFVISCVVYASKFRPAMIESGLDPLSAGKSNGSGGSGGFRDVRLKESTTNAHDWVWLGRSTIDRQSIVAETNTHLNPRDSRMRITSNPIVNYDNGRRVSSFDQQPKLQTHIVPASNLNKQHADHYLANERKDNALDYKPPVPPHRNVGARACLPVQPVLGTGSVKDAAPNKRHSQLYRREHLQNSDSNANSQQSTPQPNQQLPTERPHPLAQAHPHPHPHQHQRSHSHSHNFSQEPLIKAAHNKIKQQQQQQQQQQHEELHNAEKLVEYTNPHQKNAFQFDSLTPKRVTKAAASSPATPSTSAVQGKAKENHSMASSTGDAANSNGTDEIIRLPASAVSQEPTTKSSRVKRATVVGNPMFSATVDESVAPGERLGLDDLDMDYEQIMHYFDNLKIIAKIREILSTFHHRYQTVATPLTSPTRQQMQLLDELVAGVATATAITAAKPTPLVLDGGEGDESADAFDAYDGALDIESRQF

SEQ ID NO: 34930 - DNA, 2978 bp, DROSOPHILA
gtgctgaattacgaaataaattttgaattttaaatttttaagcataatttttctaagtttggagttgccagttaattgtttgcgttttaataaattgtttgatacgaaagtgctattagtgcttgctcaatcgattccatagatccgcacaaatatctcaatagcttttcaaaggagtctcgtcctttgtggcatttctttggcagcctatcaatgagccaattttcacacaattgcaagtgtgtgtgtgtgtgggtgtgtgtgggaaaccacaacgaagcactttttggcacgttaatgtgttagaggtcctcacctcacgccaaaacacaaacacaaacacagacacagacgcacacgagccgtaattaatgattgagcgcacaagggtctcccccaaaaaagtatgctacgtttcttgtctatacgcacaaaatgtgcttctcattatttttacgtactccacacgcacacacccacacatagccacacacatacatcaagttttcacaaaaagcaacgcacgtgcgtataaattatgttttggcttcattatgtgggtgagaggttgggtggctggctcacttggtgggtgggatggtgcccattgctgacgccaagtatcgcattaaaaatcaattcccgaaactttgcacgtacaccagaagaaaattgttcaaatggactcattaacgcgtaatgtaataagtaatgcgcttaaaatttgaaagaaatagcagaaacgggatctatgaaatgaaattaaagaagtattaatttaatcttacatatatggttgtatggatcttttttttggggtattatgtaaattttttatgtatgtatctcgtcactttgtttcggtgtaagctgacgttgcacttataatttaatattcgattttaatgactctactaattgctcactttcccctttttcaattttagcaatcggcaggaagatggaatgaccaaaattcgcttagttggcaccccagaaaatgctgccacagccagcggcagcggtggcaacagcaacaacaactaccactcaatcagcaacatctgcaacatcgacagcggcaacatcggcggcggcagcagcagctaggaatggccagcgacgtcgcgtggcagcagcaacagaaggctgcaacagcaacatcggcaacagcaacagcaagctcagcagcaacaccacaaccaacaccaccaagagagtaagtcaaatgcattccaacgaagagccgcccatgacggtgatcgtcgatgggggcggtggcagcaacgtatccgtttccggtggcagcagccatcggcgtggcagccagcggttgcggaaaaccagttcctccagtgccaatgccaagtcggcgtcggcgaatcctacggaaaggacgagcagcgggcagaggtcatcgcatcgccagacatcgaatgcttccgatggtggtggcagcagcaggcgtcgctatcagggaaaggagcaccacgatcgacgcgatcgtcaggatcgccaggatcgtcaggatcgccaggagcgttcggatcgccatgagcgccgcgatcgtcgcgatgagcagcaggcggcacgtcggcgaacaggacgccggcatagtggagcctcatcgctgagcgatgctgccgcagcaacagccgccggacgatcccggtcgaggggaggaggacgaactggtggagcggtcagctcatcgaccggctccagctgcaatggcagctgcagctccgacgacggcgactcctcgcacacctcgtcatccagctcgtccagttcgtccggcgaaccgaatctgccgtatccgggattccccgagatctctatcagggcgctgacgcagtacacccggccgcgcaactggtgcctgatgctcatcaccaatccatatcctttgcacaaacaaaaacgaagtgagagtgtgttcgtttggtggattgatggggtggctgggatgccctaattgccattgtccttcgctggcaatttacccatgggtgtgtgtgctggagtgtccttgtcacacatttcacaggatgtgcgttgtgagcctattgatttttctcttcttttttcgcccttttgctcctcgcttttctcttcactctacgttgtatttttttatttttttattactttttttaaatgcgcctaaggacacttgattcggcgcaggatgcgattttttacaggtgtattcttttgtaatcatcaattggtttagggcaatcaagatagattaatcgaaatatccaattttccaatccaacttcaagcttacaatgctaagctaactggttgcctcaaattcaaaaaatatatatcctattttttatttacggggtatctcatattcgatctactcgactatttctctgtcttttttttttttagctgcctgttgcaaaattcatgctacaatgtcagcagttgcaaaaggtattgcgtgtgtgtgtctatgtgtgtgcgagttcgctgggcataaataataaatatctgaatgggcatcgtcattgagagacggaaccagtggatatatgtcccccagtcgcagttgccggatcctttcgctgccgacttgttttcatatttgccccatcctccgccccattcattttctgggggataatgtgcgccaatcagtgggatgtgggatatggcggaggcgtaggcggaaggaagaagttgacaaccctggcgattcgatgttgtttatctgccagtgccagtggcactcctcctgctaccactccatctccagatccccgctgctacgtcgagtggcatgtggcacatgtgcatgaaaaatcgctttgcatatttcttggcgcgcacttcacatttcacttggagcgaaattaaaattgactgacgtggatatttatttatgcccgtggttctgtgtctgagtctgagtaaattatgataattgagtttcgaacgtcaagtcgcttctccggtga

SEQ ID NO: 34931 - DNA, 978 bp, DROSOPHILA
atgctgccacagccagcggcagcggtggcaacagcaacaacaactaccactcaatcagcaacatctgcaacatcgacagcggcaacatcggcggcggcagcagcagctaggaatggccagcgacgtcgcgtggcagcagcaacagaaggctgcaacagcaacatcggcaacagcaacagcaagctcagcagcaacaccacaaccaacaccaccaagagagtaagtcaaatgcattccaacgaagagccgcccatgacggtgatcgtcgatgggggcggtggcagcaacgtatccgtttccggtggcagcagccatcggcgtggcagccagcggttgcggaaaaccagttcctccagtgccaatgccaagtcggcgtcggcgaatcctacggaaaggacgagcagcgggcagaggtcatcgcatcgccagacatcgaatgcttccgatggtggtggcagcagcaggcgtcgctatcagggaaaggagcaccacgatcgacgcgatcgtcaggatcgccaggatcgtcaggatcgccaggagcgttcggatcgccatgagcgccgcgatcgtcgcgatgagcagcaggcggcacgtcggcgaacaggacgccggcatagtggagcctcatcgctgagcgatgctgccgcagcaacagccgccggacgatcccggtcgaggggaggaggacgaactggtggagcggtcagctcatcgaccggctccagctgcaatggcagctgcagctccgacgacggcgactcctcgcacacctcgtcatccagctcgtccagttcgtccggcgaaccgaatctgccgtatccgggattccccgagatctctatcagggcgctgacgcagtacacccggccgcgcaactggtgcctgatgctcatcaccaatccatatcctttgcacaaacaaaaacgaagtgagagtgtgttcgtttggtggattgatggggtggctgggatgccctaa

SEQ ID NO: 34932 - protein, 325 aa, DROSOPHILA
MLPQPAAAVATATTTTTQSATSATSTAATSAAAAAARNGQRRRVAAATEGCNSNIGNSNSKLSSNTTTNTTKRVSQMHSNEEPPMTVIVDGGGGSNVSVSGGSSHRRGSQRLRKTSSSSANAKSASANPTERTSSGQRSSHRQTSNASDGGGSSRRRYQGKEHHDRRDRQDRQDRQDRQERSDRHERRDRRDEQQAARRRTGRRHSGASSLSDAAAATAAGRSRSRGGGRTGGAVSSSTGSSCNGSCSSDDGDSSHTSSSSSSSSSGEPNLPYPGFPEISIRALTQYTRPRNWCLMLITNPYPLHKQKRSESVFVWWIDGVAGMP

SEQ ID NO: 34933 - DNA, 1548 bp, DROSOPHILA
cttggcttagctacgtaaaatacactcgaatacatatgtttacatacaggccttctatatacagatcgcaggtgtttgtttgtgtttttggttttgtttggtattgttttgtttttggttttggtgtctgcacggcttctcatataaacgtttaaactttaagagctaatcacagagttgatgattctttgttcacaaatttccatcatttttggtttcgaatgcagtatcccctataagtaactgtatatgtaatataactgtatatatgtaaatcgcatataacacattgtatataatccatcaccctcgtcggggctatcatcgttttcgacagctactatttaaacggaaaacactctaatcaacttgaaacttagctattcatctccaccgatctctggcgatctattagttttgaattcttcttataagttttgcttgttaaagttatgaaaaccgtaggattgcactaaaaacagttgacaattttgcttactagctgtaatttactttttatttcatgggtttacttaactttgctttcaattcttatttacttgttttcatccatatttacggctgagagtgtgccatttaccatttgacctgcatcatctctatagtatattagctatcgaataatcattacttctgttttctcaccacactcttcgatctttatgcctaaagcctaatgctatagttatagtttttagaaaattccctaaagtattctttaatggcggccaggttttcgaattatggagaatatatgtatatgtatgtatatagagttctagaggttgaaagtaagctccttcgcttgcaggtggaccaacttagagatttcgaaatcaagggatatcttaactgttatcctagctattatccttgttagtcagctctacagtaatcattattgttgtaagcctggccctatttaaagataactacttgtaacgatctagagagtgtttgtgtgtgtgtgtgtgtgcatttagtccatggaggattggggtgacttgaccaggagcagctccttgtagtcgctgtctctgtcctccgcctcgttgtcctgatcctgctcgggctccctctgctcccgctgatccatgcgcctccgctcgctgatgatgcgcaggatgtccgaggagtcggacttactgacccccagtgcgatgtctggaaggatctgcttggagctgccgctttgatctggcaggtccagcgaactcgaggctatgactgccaccgatccgggtccagagccacctccagctgctgttggaaggagcagcgagttctcatccatgtcggcatcctcgtccagggcctgttgtttgaacagctgcttggtgctgccactgcgactgcgcggcggcatggatctgggaacggagaggagcaggttgctccgcagacatccttggtccacagactgcgaccatccaaagggtctccgtggtggaggatgtgccatcggcatgggcattggcattggcaattgcaggggcgtgggcgtcgacgtgggcgtgacaatgggca

SEQ ID NO: 34934 - DNA, 495 bp, DROSOPHILA
atgcccatgccgatggcacatcctccaccacggagaccctttggatggtcgcagtctgtggaccaaggatgtctgcggagcaacctgctcctctccgttcccagatccatgccgccgcgcagtcgcagtggcagcaccaagcagctgttcaaacaacaggccctggacgaggatgccgacatggatgagaactcgctgctccttccaacagcagctggaggtggctctggacccggatcggtggcagtcatagcctcgagttcgctggacctgccagatcaaagcggcagctccaagcagatccttccagacatcgcactgggggtcagtaagtccgactcctcggacatcctgcgcatcatcagcgagcggaggcgcatggatcagcgggagcagagggagcccgagcaggatcaggacaacgaggcggaggacagagacagcgactacaaggagctgctcctggtcaagtcaccccaatcctccatggactaa

SEQ ID NO: 34935 - protein, 164 aa, DROSOPHILA
MPMPMAHPPPRRPFGWSQSVDQGCLRSNLLLSVPRSMPPRSRSGSTKQLFKQQALDEDADMDENSLLLPTAAGGGSGPGSVAVIASSSLDLPDQSGSSKQILPDIALGVSKSDSSDILRIISERRRMDQREQREPEQDQDNEAEDRDSDYKELLLVKSPQSSMD

SEQ ID NO: 34936 - DNA, 2180 bp, DROSOPHILA
aatgccttaactggcataaatcccagccgcctttttcctcgcgtccatcctggcggcacttttagatcattaatccgcgaaagatcaacggaaaagctgaaaataaaaagagaacagcgttcgcggaacggcttttaagatcctcaaaaaggggtgtcctatctagatctcaacttatgataggtcaaagttgaaacagtagccatggaggtgggcgaaactgatactcttttcttccaagctaatttattataggtacaccaaattctcggtatttctctttgagattgcgcaatccattcaattaggtcttccttcaattgatgggaaatgcatctgatcatctgcttatctgatcagctccaattagtcatgatatatagagcaatatagcagcgaaccgttgaacttcactgatttggcaatccaattcgattgccattcgatggccgggtaatccatcaaactgcctgctgatcctattaaaccaatcgctgggtaatcaagggtcaggtcacccagctccatcggctccatggggggtttctttatttctttgagggaaggggcgttgcaattgacaaatttcgagcgatcggaaaatgaaaacgaaatgcgagcaattactttcaattgaaaatgtcaaacattgtcttggcccacaagcacacactgagcgaaaactatattttcaacagcacttggatgcttggatacttggatatagagatgcaaacacaccgtcggatatttgtatacaaatctatatctaaagtcaagcacttgagggccaaacgcaagcaccttgggcggaaatgcgataaccctgagcgggcggggaaaagacggaaagtcggcaagtcgaaaaggcggaaaagcggaaaatgggagcgcacatgttgggcgcttttagatgatttttggctggctatctgctgtggaaggaagtgggttgggggaaatgggaaaattggaaaattcgaagattgggaaagccccatcacttaccggataacatgggcgccaaggcagtgtccgtcggcggatgatggtgtccattgaaggagttgttgtgcgactcctgttgctgttgttgttgctgctgttggtcctgttttagggcggccgattttccgggcacacagccaccaatgggcttcttcgatttccacagtttcatcttgagttttcttttctccaacttctccccaaatgggaaaacgcagcgatctctacgatttttcaacactcatggcaaatttggcattttcacaaaaaaaaaactgtatatttaaaaaaaaaaaaaaggtaaagtaaatttaaaaacgaattcggtttccaatcgatatcgggaaattcgaaaacaatttggaaattcaacggctgcggcggcgacggcgactgcgatgcgactgaacctgacgatgcgcgcacgtccgcggagcacggccaaaagttgcacaatgagcgatcttgccgccagtactagaggtggtagaattaacgatgtaacatcgatagtatcgatgttgcagaacatttttgttaactttgatgttgaattttgttattgaatcctttattgcaaatgagtttatatttttagataaatttgtagataatagttaatcgaaagtttttgtataacccgtattaaatgtgtgtatgtatatatatgaaaataaataagtaataataaaatatatttgtatgttttaattttcatatttattaatacgaatacgaatgcacacaaaaagaacagaaagagtaatatttttcgtttatttttcgatagtcaatgttctcgccataaaacatcgaaaacatcgacggcgacgagcatcgatgtttttccagctctagctctagctgcgtgactcactcgcgaggagaaaaggaagagaaaaaggagagcgagagtggtgcgtaagcggagcgctttttggggagttttggctactggagaaagagttttctctcgctcttactctcgtcctctctctggcagaagagtatcccattggggaggcactcaaatcacagaccgccactccaaaagcgccgttatgagcccgctgatgagccgcaggcatgacaatcagctgcttctgttaaccgttaagcggtagtccgaaatggttaatggtttagtgtgttgggggaggggtgacttgggt

SEQ ID NO: 34937 - DNA, 180 bp, DROSOPHILA
atgaaactgtggaaatcgaagaagcccattggtggctgtgtgcccggaaaatcggccgccctaaaacaggaccaacagcagcaacaacaacagcaacaggagtcgcacaacaactccttcaatggacaccatcatccgccgacggacactgccttggcgcccatgttatccggtaagtga

SEQ ID NO: 34938 - protein, 59 aa, DROSOPHILA
MKLWKSKKPIGGCVPGKSAALKQDQQQQQQQQQESHNNSFNGHHHPPTDTALAPMLSGK

SEQ ID NO: 34939 - DNA, 3219 bp, DROSOPHILA
attgggatgcttacaaataacaattgtaggtggctgcaagaccaaacaatgcatttaaaaaaatagttatgttcacattaaaaattgtaagatgaggacattttaaaattaaaatattactgaataaaagattctgcagacagtttgtgtatgttatgtttatggtattttacgccggtttccgcaagccggtggcctcacactaaatacatgacggagtaacttttaagaactctttattgagcagagcaagtgctgctgcaagaattaaattaaatttttaagagctacacgactgaaagcgaaacacattgttgctgtttcatattcgtagcggccatgcaaataagctgtgtctgccggctacgtaacgacatccggtctaatgcttacgttgcagaatgccgttgttgccacacggtcgtcgtagcggcgttaacttaagttaacttgtacaaaacacatgtttaggcttgtaccaaagacactaaaataacagtatgcgtaacggccatgcattctacattattctagagtatttgcttgtacccttttgaatgattggaaaataatattgtcgtactctaatccttattttacttatttgatgacaagtacgcacatagacattttctttgggatctcgaatttgccttctcccttgtttccgttgattttgcgcgatgttcccaatacaaaaacctttcacgaaatgtcactgatgcgttattactggagggttttaagaatgattccaaaagaattgttcttctctactggtacctccattttttattaaacagcccagactgaacaatttttttatttgaaaattttagatttcccgaaaatagtttataaataaatgaaaaatctattttatcatattattcgttattcatacagtttttgggtttaaaacggtattgtcactaatctcaccccgtttaaatgagtttttttttttaattttaaatatttgtttgtgggccttattcctttaccgaaactgtcgatatactaaaagagataatcaagcacaatacgtttaccaatttatattaagcgatatactgagctcagatactacatcatggtaacgggtgtgcagcacgtcatatgatttatcactttgaaagccgtctaaaaagtcattgtaaatatgttttgttaaggagttttcgggttcggaccgtggaagattctggtataattcctccagtttccgggtaagctcgcgaacgtgctgtccggtagtgggacgtatttgtgctcctccgtttatacagcccgagggacaggccattacctcaacaaagtggtaatttgataccttttcacgcttcagtttttgtaccaagttttgtatgttccggaaaccgttagcaattgcaaatttcaggacagttttgccattctgtttaagtataatttctctaaagtcgcggtttttgagctgtttgaattccaactctgtttttaaatcttcgttgaaaatatgttttgcggcgtacttaaatatgtgttctgcgtaaccgccagatagcgtcttctcgtgagcccataccatgaattctgggcgtacattagaccatggccagtctaaatcaaggagatcgtactgcgacagcggctgctgagcctcactaagcaactgttccacctcaactgcaaagatatattatttaatattaggtcaaattgtacttttggctctcaaataacctgaagtgattacacagtctacgtcgcgtgagttatttgccttgctgaaaaagtcctctcgagaggcctcaagcttcttgtcgtagcaaggcatcacggtcacatggtagattcgtgacgcaggaacattcatcttatcggcaaggatttgcttcacaagcactcccattatttgctgaggagatcgggtcgtggaaacgtaaggcaataagaagtttccgtgtgttttctccgcgtaacaaacccaccccggacaagaggagctaagcatggtcaagttctcattttcgcggtacctatctacaaattcttgacgacattcgagcagcgcaatatcgtccgccaccttagtggacaaaacatagtcggcacccaaactgcgaaaatacccattaagatgacgggcagcatcctccacacctatctgatagcgataggctaagcttagtataggctgggtggcaagggtgaacacgatcgtacgcacgttatcccagtcttcagaggccttattctttgaattctcttgaaggaccttaagcaactcttctcggctctgctgcgtgataaggacttcttcagctgaagtgatgcaaccagaacacgcaagacagtcttgcagagaaatatcaactttattaagttttagatttccactctgtaacgaaaccatttcattcaataaaaaatgggctccagcgtgatacttacctctgattcctcaaagcagccgtcaccttttatctttatctttgccccagtctttgaccttgccttatctatttgcacgggcttaatgcatatctgagtacaattaaattggaattaatttttcggtatattgttgtttcaaacctgtgagggcgtaataaaatcatctatatctgtaagctgcagcgctctgctcaacctcgacatggttttcgtaataaataatatttaactttttattttatatattcaccaaaccgctttctgaacttattcaaatatttagtgcagtgagccaagctatcgtcaaaacatagcggtaattgtggaacgggcggtaaggaacatgacaatatataagaatgttttgggttatgttacttctgaaacctatatctgtcataacaatgcattcctacatgtgtgtacaattgtaagctaattgtgtgggtgttagagtttgttgattcattttaatacgcccactctaacgctcacaaaccgcagaaacctccaatgcccacacttttgaactattttcaatgttttctaattttattcattaatatctatgggtatccaagaaaaattttgaaatattgcgttcgcatttccactcgctgagtaactggtatctgatagtcggggaagtgacgtatttgggaggtccaaaccggcaccttcaattatttctaagaaaatagtaatgcactttagtgattttccaaattgtatcccagctgcgcagcatccgtttctaataaataattttttggcagcggc

SEQ ID NO: 34940 - DNA, 1424 bp, DROSOPHILA
cggtttggtgaatatataaaataaaaagttaaatattatttattacgaaaaccatgtcgaggttgagcagagcgctgcagcttacagatatagatgattttattacgccctcacagatatgcattaagcccgtgcaaatagataaggcaaggtcaaagactggggcaaagataaagataaaaggtgacggctgctttgaggaatcagagagtggaaatctaaaacttaataaagttgatatttctctgcaagactgtcttgcgtgttctggttgcatcacttcagctgaagaagtccttatcacgcagcagagccgagaagagttgcttaaggtccttcaagagaattcaaagaataaggcctctgaagactgggataacgtgcgtacgatcgtgttcacccttgccacccagcctatactaagcttagcctatcgctatcagataggtgtggaggatgctgcccgtcatcttaatgggtattttcgcagtttgggtgccgactatgttttgtccactaaggtggcggacgatattgcgctgctcgaatgtcgtcaagaatttgtagataggtaccgcgaaaatgagaacttgaccatgcttagctcctcttgtccggggtgggtttgttacgcggagaaaacacacggaaacttcttattgccttacgtttccacgacccgatctcctcagcaaataatgggagtgcttgtgaagcaaatccttgccgataagatgaatgttcctgcgtcacgaatctaccatgtgaccgtgatgccttgctacgacaagaagcttgaggcctctcgagaggactttttcagcaaggcaaataactcacgcgacgtagactgtgtaatcacttcagttgaggtggaacagttgcttagtgaggctcagcagccgctgtcgcagtacgatctccttgatttagactggccatggtctaatgtacgcccagaattcatggtatgggctcacgagaagacgctatctggcggttacgcagaacacatatttaagtacgccgcaaaacatattttcaacgaagatttaaaaacagagttggaattcaaacagctcaaaaaccgcgactttagagaaattatacttaaacagaatggcaaaactgtcctgaaatttgcaattgctaacggtttccggaacatacaaaacttggtacaaaaactgaagcgtgaaaaggtatcaaattaccactttgttgaggtaatggcctgtccctcgggctgtataaacggaggagcacaaatacgtcccactaccggacagcacgttcgcgagcttacccggaaactggaggaattataccagaatcttccacggtccgaacccgaaaactccttaacaaaacatatttacaatgactttttagacggctttcaaatatatcgacagtttcggtaa

SEQ ID NO: 34941 - protein, 241 aa, DROSOPHILA
MGVLVKQILADKMNVPASRIYHVTVMPCYDKKLEASREDFFSKANNSRDVDCVITSVEVEQLLSEAQQPLSQYDLLDLDWPWSNVRPEFMVWAHEKTLSGGYAEHIFKYAAKHIFNEDLKTELEFKQLKNRDFREIILKQNGKTVLKFAIANGFRNIQNLVQKLKREKVSNYHFVEVMACPSGCINGGAQIRPTTGQHVRELTRKLEELYQNLPRSEPENSLTKHIYNDFLDGFQIYRQFR

SEQ ID NO: 34942 - DNA, 1995 bp, DROSOPHILA
gcattccacttttcgtaaagtttcaatagtttgtcggtacatatgtgaaagtcgcgcaatggtatgcgcgcttgttgtcagaaaattgacacggcaatcactgttaattttgaagtttcccttgagcttaattttacgattcacatattataaagaaacaactgcagagcttgccgattggaaggtaattttgcaaccagtgattgcaaacttgatattttgttattaagcacttttcagcaaaaaattacaaccaacaaagtaacgcgcacaaaaaaccggcggtttagaaatgactctaaagttgcattttgatattttgcatatcgatatatcgtaagtaaaaaatacgtcaactcgattatggcgcgataataaatacatgtagtcgtggactccaacataagtaagtgaatgaaggcttttaataaatattgttgtgatttctccttaattatataatgaaattatgatacaaaaattattttttttaaacagaaaacaatatgttttaatcataaatcatttttaaagaaaaaaaagcttacgtatgagtaatttttcatataaaccaaattttccagctttaggtcgatttggcggccattaaactttttccgaaaggccccacattttttgtaggttgttttgggctctagtagaaatgaattctgctcggcggtttaaaaaacaaacaagaaaagaaaatattgtaaaatattataatattataaaaatattattctgcttatgaagcaggcctctcttagttggtcgaggatgtaatttattctgggtgtcgagctgccttaatgctcattggcttagacaaatgaagatggttttattctatagagaaacaaattacttaactacttatcgatagccaacttatccgttccgcgacatcccctcccccgtgaagcaacagcattcaccacatccagaacggctaacttcgaagagggacgcaccactaatttggctcgatcgctagtcctcaccgaagcccgccgtggcactccatctttcccggtgaacacctcttcaacgacaactcttttccactccctgcgtggtatggccggatcgcagatgtataccaggtcttctcgacgcatgggctcaacacgctggcatcatttcgaacaagtttaagcaagcactcgtgcacccatcgtttccagaaccgatctcttatcatccgagcgatacgccactgtttccttgttgtgcatctctcagatgccaattcatcatctccaggaagatttggcacgtcgggcattcctttcaacaggtcgtttggtgtcagtggagcctcctggtccactgtgatcgggcaagtacgtgagcgggcgggaattctccggctcgatcagcaagttctccagcacgtgctccttgggtgcaagttccttcatcgtatgcgccaaaaccttcttcacgcactggtttgatgggcagttaaagatccattcgattgctttagatgacaactcgccctgtatcttcgctgagtcaaatacatcgctgaatcgtctggcctctttatcggctcccacgaagttcttgccattatcgcttcttatcctaactaccggtccgcggcggcacatgaagtttctcatagcaatgatgcatgaatccgttgacaaatcatgagccatctccaagtggacggctctcgtagttaggcaggtgaatagcgccacccacctcttctctgtttggcgcccaatcgacacaagcaatggtccgaaatagtccaggccagtgaatttaaatggccatccatttgcctcaaggcgattctccggcaatgggcccatctccgtttgtgtcggtcgtgccttccgcaacttgcatacgttacaattagccaccaccttttgtagtagcctcctcaggttagttatccaaaactttcgacgaatctcgccgatggtggcctccacgttttggtggcacatcctctcatggttgtgacgaacg

SEQ ID NO: 34943 - DNA, 973 bp, DROSOPHILA
atgtgccaccaaaacgtggaggccaccatcggcgagattcgtcgaaagttttggataactaacctgaggaggctactacaaaaggtggtggctaattgtaacgtatgcaagttgcggaaggcacgaccgacacaaacggagatgggcccattgccggagaatcgccttgaggcaaatggatggccatttaaattcactggcctggactatttcggaccattgcttgtgtcgattgggcgccaaacagagaagaggtgggtggcgctattcacctgcctaactacgagagccgtccacttggagatggctcatgatttgtcaacggattcatgcatcattgctatgagaaacttcatgtgccgccgcggaccggtagttaggataagaagcgataatggcaagaacttcgtgggagccgataaagaggccagacgattcagcgatgtatttgactcagcgaagatacagggcgagttgtcatctaaagcaatcgaatggatctttaactgcccatcaaaccagtgcgtgaagaaggttttggcgcatacgatgaaggaacttgcacccaaggagcacgtgctggagaacttgctgatcgagccggagaattcccgcccgctcacgtacttgcccgatcacagtggaccaggaggctccactgacaccaaacgacctgttgaaaggaatgcccgacgtgccaaatcttcctggagatgatgaattggcatctgagagatgcacaacaaggaaacagtggcgtatcgctcggatgataagagatcggttctggaaacgatgggtgcacgagtgcttgcttaaacttgttcgaaatgatgccagcgtgttgagcccatgcgtcgagaagacctggtatacatctgcgatccggccataccacgcagggagtggaaaagagttgtcgttgaagaggtgttcaccgggaaagatggagtgccacggcgggcttcggtga

SEQ ID NO: 34944 - protein, 238 aa, DROSOPHILA
MCHQNVEATIGEIRRKFWITNLRRLLQKVVANCNVCKLRKARPTQTEMGPLPENRLEANGWPFKFTGLDYFGPLLVSIGRQTEKRWVALFTCLTTRAVHLEMAHDLSTDSCIIAMRNFMCRRGPVVRIRSDNGKNFVGADKEARRFSDVFDSAKIQGELSSKAIEWIFNCPSNQCVKKVLAHTMKELAPKEHVLENLLIEPENSRPLTYLPDHSGPGGSTDTKRPVERNARRAKSSWR

SEQ ID NO: 34945 - DNA, 2618 bp, DROSOPHILA
atcttaggcataaaatgaattttccaatggcaaccatacatttaatattaatctgcggaatatcgtgaaacaagtatgtatttaccgaatataataaactttatgtagtacagtattttggaggtcattgtctttaatattttttttaaaatggtgttgagggccttttcaataaaaaataaaactggtggtggtttcggtaaatgtgtcagttttggcattatttgtaatgtcaaaagcgcatttgttaaaatttgcgggggcaagcatgccatcccatcgctgctgtagctgaagaaacgtactttaaattttgcaaaggtattaagaaatttaaaattaaactttttagtcggaagttctgcgaccatataaagtaccaagtcgagtagcctgcccatatagcgcaaagccatcagttttaaagcagttttaatttaatcaaaatcggacaaccaaaatattaattaaaaataatatttatgaaatcctagtttagtttttttttcacaatttgtagacctgttactcgtaaagtaaagtgtgtaacaggtagctgagtaacgggtatgtgatagttgcgaagagttgataagaagagaagagaagagaaaagaagagaagagaagagaaaagaaaaaaagagaaaagaagagaagtagataagtagaaacagtagaaggaagtgctttcgactccataatgtacatatgtatatattgcccaactgagcaatctcgaaaagagtcttctgttgtttatttttgggatatcttcatatcatcactagttgagtaacgcataactaataataactaataatgttttttttctatcttcctctctctttaattttgattgggttagatttgtctttccaaagtaccaaatccaaaattagtggtaagctaagaaggccaagacttttaatgtagttttaatttttgaactaatcgaccgtgtacatttagtagtaacatttttttcatattggctaaggatgaacaaaagccaaaagtccctggcggacgacatggcctcgacgcctttcggcaaggaggtgctgattggcaactgggcggagcgccgctacgcagtcgaggagcagagcaatgccatcctgccaggactccgtgtgagtggttgcgagctccataggtcgctctgccacgacacctacactactgcacccttcgttggcgccgaggcagtacccttgtttgtggatcatcgcaaattggcttacaagaactttataaggaataggcgatctagcttgaacctggtggacgatgagctactcaagaggaacttcactaccaccaataccctggagttccaggaaattcctcgactgcgtcttatacacgcgagtggcgaaaaggacaaaaacggtcctccgaagcagccgctggacgtggacagactgcaagccttcggaaatcttacgaagacacacaattacctctttcggttcaagtgcgagaaaatgctggacgagatcagtaacatgcagaccacctactccgcgagctttaaccgaccgtgggaaaaaaagccaatctttgaatttggtccagactacgacggagtcgttaagtttgacttgacgtgctagcagccagaactatattttctccttagattgtgtataagaatctacaaatttccttaccaaaaaaattgcaaccgtcttcccaaagaaactagttcctctatattacaagactcaatttatttcaaatcattttcttgtataataatatgggttcgtattttagtagttctatattttggatgccagaaattctttgattttttttttgttgcactcgccgtagcattggtttttccattttcatatttggtgagctattgaaaaattggtttcttctttcttttcgaaattagtaattcaatagatgtttacaatacttttgcgtttaccatttcttttgcttggtacagaatatatatttaaatgttaattaattgttacaaaaagtaaaattttacgacattaaactagacgacgcaagattttgcataagtttacttgcttaaatattaatttttgacgcggtaatatttgcttgccttaaaatcttatttattcttttgtgagttcgattaattttggactgccatgataggattctttttgtatttttctgtttttttttttttttttggctgacgattaagtttaaaatgatgcttaaaatctaaaccaatggaagttgtgtgggtctgagtgtgtgtgtggtggagaatgttggtgtgtgatttggtggtagttgcgtgtcccatggtgtttctttttggtatgcgtaatctaagggattacttatagtttggctggtgtaatgaattgtctggatatatagtgtgtttttatttgcttataacaattataattttgaatttgaccttttttttggatttagtagtttttattttcatgacggtgaattttgtttattcactattcgcttttcatctaaccttttacgtttcgttcatactcaaagttgcttatcgctttttggatgtcctcttttctttcatttaatttttgcttatttttaagtcctagagtatttacttgtagtattacc

SEQ ID NO: 34946 - DNA, 618 bp, DROSOPHILA
atgaacaaaagccaaaagtccctggcggacgacatggcctcgacgcctttcggcaaggaggtgctgattggcaactgggcggagcgccgctacgcagtcgaggagcagagcaatgccatcctgccaggactccgtgtgagtggttgcgagctccataggtcgctctgccacgacacctacactactgcacccttcgttggcgccgaggcagtacccttgtttgtggatcatcgcaaattggcttacaagaactttataaggaataggcgatctagcttgaacctggtggacgatgagctactcaagaggaacttcactaccaccaataccctggagttccaggaaattcctcgactgcgtcttatacacgcgagtggcgaaaaggacaaaaacggtcctccgaagcagccgctggacgtggacagactgcaagccttcggaaatcttacgaagacacacaattacctctttcggttcaagtgcgagaaaatgctggacgagatcagtaacatgcagaccacctactccgcgagctttaaccgaccgtgggaaaaaaagccaatctttgaatttggtccagactacgacggagtcgttaagtttgacttgacgtgctag

SEQ ID NO: 34947 - protein, 205 aa, DROSOPHILA
MNKSQKSLADDMASTPFGKEVLIGNWAERRYAVEEQSNAILPGLRVSGCELHRSLCHDTYTTAPFVGAEAVPLFVDHRKLAYKNFIRNRRSSLNLVDDELLKRNFTTTNTLEFQEIPRLRLIHASGEKDKNGPPKQPLDVDRLQAFGNLTKTHNYLFRFKCEKMLDEISNMQTTYSASFNRPWEKKPIFEFGPDYDGVVKFDLTC

SEQ ID NO: 34948 - DNA, 2638 bp, DROSOPHILA
agttacctaatattttaaaccactcacaccttagagcattcaaataataattttttcccccaatttataccgatattcctgaaaatgttgataattctcggtcccacttggactagctgagtaacgggtatctgatagtcggggaattcgttatagcattctctctttttttaaaacagagactggaaattactagaacaatttatttcgtacgtttatggttatggtgtgttatttatttcatactagtacataattataagctttaagatgcctgattcttaatttaaaacactataaatcaacactactctcacatatgaatttctcatgtgtggtaacccctaaatcaagtccattattgcttgtcacttacaaacgggaaacttaatggtcatacctctggttgtcttaagccccaacgccctgcggctttgcagccaacgaccgcatatctctgactggccattgcgcccaactattatccacccaatccaccctccgcgactctcaaggctcaataaataacttatcctgcgcatattagattgttgtactgaggactttgtgaccaccctccagttacgtaaatcgagtcaattgacaggtgttttttaaattgaattttttaccatacgtaaagagcgcttgttcgttgcagtttccatttgattttgattcggtttgtcgaaaataaacgatttaaaatctggctctgggaatagtttagctccagagtggtttgctgcccagtacttactgttcaaactttacgcagaatgaagagaagaaggtgttttccatatggcgacactttaaggttcccaccccggtgggccgataattagattacttatgtcccgagatgggtaactctatggaccttatcaagagaaggacacgcgtagggtattaacgtaaatggaagggcagttcattgctctttacgaggcggcgccctctgcttcattgagtcttacttcagtacaaattcgcccgaatgtccaaaactccaaagcccttgacgtccaagcgtaggacctcgccggcaagtcctggctccacggtcctgattgaaagcccaacaacctcgagtggcgtacgcaatcgccgttccaagatcaagggcgtcgacagtaagcctaacccacagaggaccatcagccacgtcaaggactcaagggctgttccgcaaaatgtgaagccgggcaaagtagcagacatgaaggattgcaaagagccggatgaggacaatgtggatcaggtgagaggtgatgaaaaatatgttttgactatagtgatgagatatgacggggttactttgctatgtacgcgtatttgttcagggaattcaagttcctcgaccaattctccccattctcactgggacgtgtctccgcataacttgggcataacaattttaatacttattattattatgacgaaattcataatgcaaggggcagaaactcttgttcttctaaagtatatatgttttggaatcgctttaattaataaataatttgggtgggatttgtgtacgatgtttaaaaggttatattgaacaaaatgtgaaaaaagattacattatgtggctgatgtctgcaatgctaccttttttaggtgactaattcctaatacaactactttttataataattattattaaagtaaaaagaccttctcataaggccatttgttataatttatctatcaccttttccgtcttttaccttttcaggtatgtatgtaaaacttgagtttcctcttaattctaagcatcacacttttcacgtgtatacaacaacaaagcaaaatggaaacattattcaggctctcaggcttaactgtcgtaattaaaattcacacaaaaactaattaacaccacacagatgaaaatcaagagaagttgctaaattcgagttccccgactatcagatacccgttactcaactagtggaaatgcgaacacgaaatttcatcatatttctgaagtatcgatagatattggagaataaaagaaaaaatttaaaaattgtttaaaagtgtgggcgtgaccgttttgggcgttttgtaggtgtgagaaggggcgtggccaaagtgtttttggtataccggtagaacttggcaagactgtgggcgttgcaatatggatcaacaaacttaaatctgtatgcctaatctaaaccatcctggtaagatgaacatggccagtttgactcagctattgatcaggaatatatatatactatatatagtcgaaaacgcttccttctgcttgttacatacttttcaacgaagctagtatacccttttactttacgagtaacgggtataatcttaaggatccaaggatgcatagccaaaattaaatagttagaaaaatgtcgacagtacttctacgattaccaagtccataagtctttacaccaaaataatgtagctaaagtactggtgtatatttgcaacgtcaccgactatctctcttcgagtgcggacgtctgtgtctttccaattgtgtgagctttgcttatcgcgtaattaccatcgccgttacattgatatttatcatcttatcttcttgatcttcttatcaacgcgtacgtgcaaatcaaaaacattcaatatccataaattt

SEQ ID NO: 34949 - DNA, 279 bp, DROSOPHILA
atgtccaaaactccaaagcccttgacgtccaagcgtaggacctcgccggcaagtcctggctccacggtcctgattgaaagcccaacaacctcgagtggcgtacgcaatcgccgttccaagatcaagggcgtcgacagtaagcctaacccacagaggaccatcagccacgtcaaggactcaagggctgttccgcaaaatgtgaagccgggcaaagtagcagacatgaaggattgcaaagagccggatgaggacaatgtggatcaggtgactaattcctaa

SEQ ID NO: 34950 - protein, 92 aa, DROSOPHILA
MSKTPKPLTSKRRTSPASPGSTVLIESPTTSSGVRNRRSKIKGVDSKPNPQRTISHVKDSRAVPQNVKPGKVADMKDCKEPDEDNVDQVTNS

SEQ ID NO: 34951 - DNA, 2501 bp, DROSOPHILA
tctcgatacctttctttttttttagggattattcaagagaaggtaagaagtaagttatttaaaggccatgcattttgttataatatagttatcataaatggtgcactgtacgtgtctaacgtacatttttactatacgtaaaacgaatgtaataaaatcacttttcggataaccaaatctggtttttggacaacaacagctacaacaacaatgcgatgctccgtttaaatattttgaaattagcaccgattcgcagtttacagtttacaaaatatttgaaaaagaaacactttgtttcagaggaatctattatttgtccgtataaacctcggatttctgttgatatgctatatatgtacatattggcaacgtgtgatcacggccactgtaatgctcacaaatcgaaaagttgacaaattctcaatttgaaaaaaaaaaatgttttgattttattatttgtgatgccaatttgccaaacaaaattcggaaattttgatagtaaaggaactcaaatagaccattgccttagtttgttttttaatatattacataattttgagaaataaaaataatcttcactcccagcagtcaagtttttcaacacgcagcttggaaggcacattgcaaagtaatgtaaagtaaaagtaaggaaacggtgcaatggactcgtccttctacagtaaaatactcctttccgccagtgaccaaacagagtggtatttttaaggatacccgcttagtacattccagccgggtggtatattgcctcggcccaatcgtggccacactaaagctgcctgcgaacgtgttggatgcgaccgagcacgcacttccattcgaaagcctgacgatgtgccatcttccgggccgttgttgacgcggtgaatcgaggcggaaaaatcgattgtgctcgtgtgattatttttgttttgatttgcggcctcccgctctcgtaatcctcgcgcggccgcggccacatgactcatgccaggcaggaacaatgaaaaatcacaataagtacgtcaaattgccccaagacctcgatctgagtttccacagtgatttggacctgctgccggatacggcagccgacatcgacgtagaactagacccggctgcggacacggatgtggccgcgctcagtgtgaacgtgcccgcgtctctgggcctggacgaggacgacgacgacgaggtcattatcgcccccggcggcggaggccttcgactagctcccacggcggcggaggcagtggcggcacacaggcagcatcatcagcagcaccagcagtgcaagcagctaaagaaccagctggagcagaagcagattctgcccaagagcaagatctgcggactaggcagcgacagcatcgtcgaggtaagttatgatcagcagcaacaatggaaggaggagaacgactacatcaaattattgttggggattcgggatttgggattcgggcttcttcggcgcctgcaacttgtggctggcggagattcctaggcgcaagaaaaatgttgcggattgcgcggcgtagcaaaacaaaacaaagagcggaaaaatcgataagcaacaaagggaatattctggcgcttgtgacaaccccgagtgccgctggcaaaggttttcccgtaaatccctgttgacttttaatcggcgagtgggcacggcacttgaaaagggccttgccgatgggtacgacggacaagggggatatcttcggcggaaatttgctttaatgctaatgagctctgatattaatggaatttgtgttgacacactccgagaactgttttggcttggcaagccatcaagtagaccacgtaggtcggcgtcctagaaagacttgaaaaatcaattgaaaaatccatagttcgcccccgtttaccttgttaatatttaacgtggcacggggccgactgtactacccacgcatttgcaatcagtaatgcgtcagacccgtgtcaatcataaccctgtcctgtcccctttgtcgacgataaaaagcatagttaattgtgtcgagaagtgctgacttggtggcgttgtatattataaatatacatatattatatattagtaagctaaatttaattagttcgcctgggactcggcaaattcctaagaaaaccgtgtttaaagcccttttcggacattaacacccgatttcgaaatcgtttttattttcggggctcgtttctatacatactactcttggaattaccaaccatactagactccttgaaaagtatgtaaaaggtagaaggtagagttcccgaacacttaaagtatatattcttgaccaggatgaatagccaagtcgatatgactatgtcccattatgcccgtccgtatgaacggcgagatttcatgaacttttaaagctagaaagttgagattgaatcaatcatgcagaatcaatttttatctgatattcgaggagctcgactacagtcttctctcttgtttttttgagcgcattttgatagaatattaaaatgag

SEQ ID NO: 34952 - DNA, 501 bp, DROSOPHILA
atgaaaaatcacaataagtacgtcaaattgccccaagacctcgatctgagtttccacagtgatttggacctgctgccggatacggcagccgacatcgacgtagaactagacccggctgcggacacggatgtggccgcgctcagtgtgaacgtgcccgcgtctctgggcctggacgaggacgacgacgacgaggtcattatcgcccccggcggcggaggccttcgactagctcccacggcggcggaggcagtggcggcacacaggcagcatcatcagcagcaccagcagtgcaagcagctaaagaaccagctggagcagaagcagattctgcccaagagcaagatctgcggactaggcagcgacagcatcgtcgaggtaagttatgatcagcagcaacaatggaaggaggagaacgactacatcaaattattgttggggattcgggatttgggattcgggcttcttcggcgcctgcaacttgtggctggcggagattcctag

SEQ ID NO: 34953 - protein, 166 aa, DROSOPHILA
MKNHNKYVKLPQDLDLSFHSDLDLLPDTAADIDVELDPAADTDVAALSVNVPASLGLDEDDDDEVIIAPGGGGLRLAPTAAEAVAAHRQHHQQHQQCKQLKNQLEQKQILPKSKICGLGSDSIVEVSYDQQQQWKEENDYIKLLLGIRDLGFGLLRRLQLVAGGDS

SEQ ID NO: 34954 - DNA, 3200 bp, DROSOPHILA
taagattctgttcccaattctgataacccctagttgacttccttcctgattacttttgcagtaccacgaggataatgatcgaaccaagtactgtacccagagtatggtgactagatgggcgtataccttcactgattttatgtgcggagacctggccataaccgtccaacccggaaagcacatacctgcccaaacaaaacccaactaccttatcataagctcgtacgcctcctcactcgaccacgagtcctccttcgactctttttattcgcttcccggatctggggtcaagaaggaaagccaacccgaagcttgttcgctttctagcagtcgactttccgtcgcatcaagctcctacaagcccatagaccacacttcctttgccgcaaatttaaacgaagtttctgaattccccagcctcggcatgcgtaattctagtaagcatcacggtatcgccgctagtgctcagcgggaatggaacgctaggaacttaccgacgcactcgcgtttaattcggaaggtttcagacaacgacttctccgtaaacggcgctgatgggaaacttaaaaaataagccactttggtctatcaattggactaagaaacaatgattccttatagataattttcttatcgcattaaactgtacaaatactattacttgtatttaaaaataaattcgttcaaacggacagggccagcatcaagtatttatttattttagttctgctaaataaatatttttaagacctaatatgtgggcagtaatgaaagaaagacatgatatttttgatggcgacaaattctaattagctaagtggggccaagctcaaaataatctatgtttatggtattccatggaaatgcagttgtgccattagaaactgctcctattaaaacccctgttaaatattgtgcataaaattgttcaacgggtcattataatacaaagtgcaaaggccaaaaagagtcgagttcatattcttacacttgtagctttttaagtggctcgacttggagaggagtttttagagttgcgagatacagatgcaatgctttgcggatcttgctgaagcacgagacgagtaaaggctaagctgaggagaagtgcctggcctagaagctcgcgctggtagcgctcttgttgtgagaattcgaggcgtaggtcagcgggaaagtcgatctgtttgtgcagcttcaacgggggctctgtttcggggatctgatgttccacgttgtaatgggttcgcatcatggccaatatcgtatcctcggacgacacgcgctcagtacccaccatgtgattaaatagtcgggctgagagaaaacgtcgcatgtagtagacgttgttcgtcttgttctcgtcgccatctgatcgggccatcaaggagaagctcatgattgcggaaacctgggccttctggatgttcacgttctgttgatcgatgctccctgggttgctgctggcctgggccatttgtggactctccatgacgtagcaatcggccacgggtatctggtgagatacatagaggcatcggcgggaaagttctgacaaatgcagcttcttgtcgttcagctcatggtgctgccagtgcgtgagcagacagggagcttcgttgcttccgatctttaatcgcgcccagcttacactggtcactccgatgcgcacccctacagcagatacaatacgtgaacgctgtccctcgtccatggccggtgttataaagggcgcgactcgtgcagtctttggtctattttcccctacttgtgcgctcccactgctcggcggcgcaagcagactcttaaagaacttggtggtcaccttcagtccgaatccctccacatacaggatgtcgctgagttcctgcagcggtccgtgacggttcttccagttttgcagcttggttgcccttgccttggttatgtcgtagctgggcgggataatcagtatttgtgcaaggcaaagtgcaggagtggctacctacttggctatctgattcatgctgctttcattaatcgtcttcaagatcttcaaacgatctgcatccgagtaggcgggcaagaggccgatggcttggtcacattccggctgacccgatctgtgttgctgcgtggacgaaagtcttaggcattttgtcgttacgcccaacaatgatcgccggcacaacatattttccagtatatgatttatatttgttgttacttaatttgatatcgtctatacagctgttcggttagtgggaccaagctcattttttcagtttttctaattaatcgatatacaatgctacaccatcgacggctacaaacaatttatagcaactaattgttaagtgaaaaagatgagagaaaaggcatgtatttcacacagcaatcattatacattttaggtaaaactacaaaggaaataatttataaatataatataaatcacattattaattaatttttaaagaagaagaaactggagcagtccgtatagtatggctaaagaaaaatgctaaaatcgcagcactgcacgctctctgtcctctcacattctctttcactctcgctgcgggaactcgaagttccagtcggaacgtcaacgtcgagtgggcagtcgtacgtcgattgttgagcggctgtggcacatatataaacaataaatacaattcgtaattttaattgaattaagacaataacaacaacggtttctgggactcggttgccttgccatatgtgacacaaagcacacacatgcgaccgtaaactcagaactctgtatttgcgcgaatgtgggtgcataaaagtgaaatttcacagcgacaagtggaaaagaaaacggagaaaggcagagctgtggccaaaagaaaatcctggtcatgtcatgcaacaataacaacaactataaaaacaaaaccacgtacggctattcgaacaacaatgataccaactgcatcatgcagaagccagtgcccgcctccaccgcacccgccttccctcagctgatccaggccagctgttccaacgccgtggaggtggatccaccagacagcattgtgggggctgccggcaactccgaagctctcttcgccgcccagcgcacaccggacacgtcggaggacagcgaatgtgacccgtttctagccagtcggagagctacccgctcctccgccaccacctctgtgctacacaaccggaagcgcaactcgtgt

SEQ ID NO: 34955 - DNA, 1146 bp, DROSOPHILA
acaaatataaatcatatactggaaaatatgttgtgccggcgatcattgttgggcgtaacgacaaaatgcctaagactttcgtccacgcagcaacacagatcgggtcagccggaatgtgaccaagccatcggcctcttgcccgcctactcggatgcagatcgtttgaagatcttgaagacgattaatgaaagcagcatgaatcagatagccaactacgacataaccaaggcaagggcaaccaagctgcaaaactggaagaaccgtcacggaccgctgcaggaactcagcgacatcctgtatgtggagggattcggactgaaggtgaccaccaagttctttaagagtctgcttgcgccgccgagcagtgggagcgcacaagtaggggaaaatagaccaaagactgcacgagtcgcgccctttataacaccggccatggacgagggacagcgttcacgtattgtatctgctgtaggggtgcgcatcggagtgaccagtgtaagctgggcgcgattaaagatcggaagcaacgaagctccctgtctgctcacgcactggcagcaccatgagctgaacgacaagaagctgcatttgtcagaactttcccgccgatgcctctatgtatctcaccagatacccgtggccgattgctacgtcatggagagtccacaaatggcccaggccagcagcaacccagggagcatcgatcaacagaacgtgaacatccagaaggcccaggtttccgcaatcatgagcttctccttgatggcccgatcagatggcgacgagaacaagacgaacaacgtctactacatgcgacgttttctctcagcccgactatttaatcacatggtgggtactgagcgcgtgtcgtccgaggatacgatattggccatgatgcgaacccattacaacgtggaacatcagatccccgaaacagagcccccgttgaagctgcacaaacagatcgactttcccgctgacctacgcctcgaattctcacaacaagagcgctaccagcgcgagcttctaggccaggcacttctcctcagcttagcctttactcgtctcgtgcttcagcaagatccgcaaagcattgcatctgtatctcgcaactctaaaaactcctctccaagtcgagccacttaa

SEQ ID NO: 34956 - protein, 372 aa, DROSOPHILA
MLCRRSLLGVTTKCLRLSSTQQHRSGQPECDQAIGLLPAYSDADRLKILKTINESSMNQIANYDITKARATKLQNWKNRHGPLQELSDILYVEGFGLKVTTKFFKSLLAPPSSGSAQVGENRPKTARVAPFITPAMDEGQRSRIVSAVGVRIGVTSVSWARLKIGSNEAPCLLTHWQHHELNDKKLHLSELSRRCLYVSHQIPVADCYVMESPQMAQASSNPGSIDQQNVNIQKAQVSAIMSFSLMARSDGDENKTNNVYYMRRFLSARLFNHMVGTERVSSEDTILAMMRTHYNVEHQIPETEPPLKLHKQIDFPADLRLEFSQQERYQRELLGQALLLSLAFTRLVLQQDPQSIASVSRNSKNSSPSRAT

SEQ ID NO: 34957 - DNA, 2795 bp, DROSOPHILA
acaaattttcaaaaatgtagacgaggccgttgggagttagagcgtggcaacatgggtcaacaaacttgcgctgcgtctttctagaatctgtatgctgaatttcaaccatccagctttaatatgtagttcctgagatctcgacgggcagacgaacgtggccagatcgactcggctattgatccagatcaagaataaatatactttatatgttcggaaacgcttccttctgcctgttacatactattcaacgaatccagtataccctattaccaaagacactagaataacaagatgcgtaacggccatacattggtttggcactatgcagccacttttttggtgacggccaaaattgctctctttctgctcgctcacgctgagaacataagaaatctaaaaatagaatttgcttgcttgtgtgagtaaaaacaagagacgagaacgcgtatatgtgtgcgtgttgtgctagaagacgattttcgggccgaaatcaattctgatcaaagaaatgaatttacattgtacatattagggtagttttttgccaatttcggtagcaatatgatgaaataaaataatttttcaaaattcggcgcccttcttattataattttaaagctgtttaaatttgtttgttaaaatcatacgtgcatacgagcatacgtgtgcacacataaagttgtctgctatcactgtatgcgtagaaaagagcggttcgctgtagcgctcttcgctctctcgctctctaacaaaaattcgagagagcctggagccacctctagagccacggccaaaaaattgtgtgccaaaaaatcgtatggcgttacgcatcttgttattctagtgtctttgctattactctacgagtaaaggggataacaaacctttagttcgtaacgatggacatacagccagcaatgaaactgttagacaacactaagcttaagtgttgagcagcaaataacaacaatttggttatatttggtcgttacaaataatgtcactttatttctaaatcagaatcctggatttgctgaagcaccggcaccagagaggcgagttccgtgagcaacaaagggtcccgcacaagcccgtcgtcaatgccgcggacaagctgctccatttcaaacagaaagcgccagtcttccgcctgcaggtacctggatttaccgtgggtctcctgactagactttctgaagatgagacggtcagactgaaagcttcgctcggttcgtacacaacagcgatgggtgtcaacatattccttgttgcattgcagacacaccgtgtcccttatatccttctggtcctccgtcggagtatttggtgttccatgctggcagcaggtgaggcgccgttgtagggcgcccagatgcgtgtagccttttttgcacacatgcctccccaaagtgatggcggactgactatccctgatggctggatgcctcagccgacatctgtgggccaccagcgctgacttcagttgaaactgcttctggcagtactcgcacgtaaggtgtcctgtcatgtgcttctcctggtagtggcggcggagccttccaatttgccgaaaattctgtactccgggtccatgcttgtggaatctgcaatcgctgcgtggacagtggaagcagttgaccaactggtgatccggaacaggtaacttgtgggtgcatacaatgtggttgtggtagcggacaagactcttgtacaccttgccacaccactcgcaacagaagccaagctcatccacaaggtcacccacggcaacgacggtgcacctcctgttctccatttccacgctctcctatttccatagtaaaacttatctgatatggcgccgagctatcgacagtgttgggtaaatttgtgcaaggcccttatggtaaattgaaatatcttaggtatagccatttgattggtaatgcctcaatattctaaattttagagtgcataattgatcaattttttaattaagctattcctaatgacgtaggaccaaatacattagaataaaaagatgcgtgacggccatacattgaccatacaaacgagaaattgtatatgtgtgcgtacttgtgctagaagacgattttcggcccgaaataaattttcattcaagaaaatttacatacatattctacatatttggagtttttggcaatttttttgcaaaatttcaacagggcactgtgagcaatactttttaaagcattaacattaatttcatcaatatttcaacttataaataaagttgctatctagaactataattattagttttgtaatttaaaacataaatttaacaaaatgagaaaatacatatttaaaaatatattttgtaaaaataatacaaacatacatagttaaaagttaatatttataaaataaataaaaatatgcgacctttctattgtaaaatgtgcacagatgcacttgtcggttgtcactggatgcgtaaaaacagctgatggctgtagagttctccgccctcttgctcctaaacaaaaattaagagcagaatactttatatccaccttctacttcctgaattctagacatttcttactgagagacaggcggcccaagagatcttaatcttaattgcttgtaccttttgaaagaatctagtataacttttactggacgaattctagactattaaaaatgtgatgatatatcaacacatttattaaaagtgcgatcgtgacagttttatgcggcttgtgagcgctagagtgggcttggcaaaatgggttaacaaacttgcgctgcatctttgtctctaaaatctg

SEQ ID NO: 34958 - DNA, 795 bp, DROSOPHILA
atggagaacaggaggtgcaccgtcgttgccgtgggtgaccttgtggatgagcttggcttctgttgcgagtggtgtggcaaggtgtacaagagtcttgtccgctaccacaaccacattgtatgcacccacaagttacctgttccggatcaccagttggtcaactgcttccactgtccacgcagcgattgcagattccacaagcatggacccggagtacagaattttcggcaaattggaaggctccgccgccactaccaggagaagcacatgacaggacaccttacgtgcgagtactgccagaagcagtttcaactgaagtcagcgctggtggcccacagatgtcggctgaggcatccagccatcagggatagtcagtccgccatcactttggggaggcatgtgtgcaaaaaaggctacacgcatctgggcgccctacaacggcgcctcacctgctgccagcatggaacaccaaatactccgacggaggaccagaaggatataagggacacggtgtgtctgcaatgcaacaaggaatatgttgacacccatcgctgttgtgtacgaaccgagcgaagctttcagtctgaccgtctcatcttcagaaagtctagtcaggagacccacggtaaatccaggtacctgcaggcggaagactggcgctttctgtttgaaatggagcagcttgtccgcggcattgacgacgggcttgtgcgggaccctttgttgctcacggaactcgcctctctggtgccggtgcttcagcaaatccaggattctgatttagaaataaagtga

SEQ ID NO: 34959 - protein, 264 aa, DROSOPHILA
MENRRCTVVAVGDLVDELGFCCEWCGKVYKSLVRYHNHIVCTHKLPVPDHQLVNCFHCPRSDCRFHKHGPGVQNFRQIGRLRRHYQEKHMTGHLTCEYCQKQFQLKSALVAHRCRLRHPAIRDSQSAITLGRHVCKKGYTHLGALQRRLTCCQHGTPNTPTEDQKDIRDTVCLQCNKEYVDTHRCCVRTERSFQSDRLIFRKSSQETHGKSRYLQAEDWRFLFEMEQLVRGIDDGLVRDPLLLTELASLVPVLQQIQDSDLEIK

SEQ ID NO: 34960 - DNA, 2390 bp, DROSOPHILA
gatgtgctgctactgccctcctgagccaggagcagacacaggagcacgctgagaagtagagcgaataggaagcgcattttgttgtgtctaatctaatctaatcagacggccttttatactcaatacggggtaacaattaaacaaatatcatgtatcggaaatcggaaatgtgtgcacagcctatccagctcgtcaatgtcttgggcttgtaaggtcaacagagtaaaagagtcgatcgatatattattgatagtgagccgggtttaactcgttgaaaacgagataaaaaggtaatattataacgcttcttacgcctaattatgtatggcgaccacgtcacgtctgaaggaaatatttggtataacctatttatgtacattcacatcttatctgagtaaaaatcgcagcacttgacgagttaaaggtgttttatttgttcttcatttgagctttgcgtacccaattaacagttttgtgctgttgcattttggcttatatccatttaagttctccgaaattagagatttattttccaaaaaaacaaatacgtggtttacattatttttaaaccaaacacaacaaagatgtgtataattatattaattttataccagttaccgatttcaaaattcgtctcgatttgaaacaggctactcctggaatgagactaaactagatttgttgaaaagtatgtaacaggcgtttccgaccctattaattatacatatgtatatgcttgatcactattactccgtctgtccgaacgaatgtctcgacctcagcaactctaaaagctagagagttgagaacgttgaactccctcaagccgcttaaatatgccactcccacacgtttttgtgctccaataaagtagaattatcagaatgtacaatcaaatgttttattatcttggcgaacttgaacaatgaaagaatttagctttcacatatttacaacagcttttcctaaattgtcataagccgagtctttccgaagaccttcatccgctcagctggttgatctgtcgacgttgattctccagttgctggcgcagcctctgagtcctgcgctgccttctgcgctcccttcgttgcctctcacgcgccagacgacggcgacgggcgcgcctgcgcctcctggcctccgcagaggaagaggatgaggaggaggcagtggtcgtggtggatgcggaagaggcagtggtggtagtggtggcggacgaagccgtggtagtggtggcagaggagtcggtggttgtggtcgtcgtcgaggatgtagatgtgctgctactgccctcctggctaagcaggaggcatcctaggacggaaagaacaattacgatcgagaagcgcatgctgaatgtctttgacgcatttgagacgttacgcatgtttttatagcaaatttgaataatggtggtttaccaaaagcgtgtaagctaataggtctgctggattgttagctttaactaaggtaaattttggtaatgtttattcagattgagaaattatgtgtgccgccatatagtttaaacgttgctcttgagtcttaacacacataataatgtaatagatttacggtaatgagcgcgtttctcaaccaagtttccgggttcaacatcatataaataggctattctccaaatcataagatataactgcttagaatgcgattcatatttgttctgctcttggcccttctcggctgcctcctgtttgcccagcagggctgcgaagctacgggaacgagcactgaaagctcctcggatagtaccagcgcctcggacacctccactaccgcgtcctcttcctccgacacaactgaagcctcaacgtcttccgacaccaccacagtggcctcgtctgccacgactaccaccacttcttcgtcctcgtcctcgtcgtcgtcctccagcgcggccgcccgtcgtcgcagggccgccgcccgtcgtcgtcgcttggcccgccaacggcgcaggcgccaacagcgccaaaggcgccaacagcgccaaaggcgccgccgccaacagcagcgcagaagacgccagcaaaggcagcgcagtggatagacgattgctacagtcgaagaggaggctgctgcagctagaaacctgtcgagtcagacagctaatacaagccaaagattgatgttttaactaaattgcagttgcgttgctgtgggatattccgttttttaaaaataaagaaaattttaaaaaataaattatttatatttacaacttagagggggtctcttacctcaatgggaatttctgaaatggagttgtttgttttttcagtctgttcaagctttctgttctggcaaaactaagtaaagtatgtctgctttctcaattgatgattgtgtcgtgtctaattattaactcaaat

SEQ ID NO: 34961 - DNA, 390 bp, DROSOPHILA
atgcgtaacgtctcaaatgcgtcaaagacattcagcatgcgcttctcgatcgtaattgttctttccgtcctaggatgcctcctgcttagccaggagggcagtagcagcacatctacatcctcgacgacgaccacaaccaccgactcctctgccaccactaccacggcttcgtccgccaccactaccaccactgcctcttccgcatccaccacgaccactgcctcctcctcatcctcttcctctgcggaggccaggaggcgcaggcgcgcccgtcgccgtcgtctggcgcgtgagaggcaacgaagggagcgcagaaggcagcgcaggactcagaggctgcgccagcaactggagaatcaacgtcgacagatcaaccagctgagcggatga

SEQ ID NO: 34962 - protein, 129 aa, DROSOPHILA
MRNVSNASKTFSMRFSIVIVLSVLGCLLLSQEGSSSTSTSSTTTTTTDSSATTTTASSATTTTTASSASTTTTASSSSSSSAEARRRRRARRRRLARERQRRERRRQRRTQRLRQQLENQRRQINQLSG

SEQ ID NO: 34963 - DNA, 2354 bp, DROSOPHILA
tccacaaaaggattatagatccttggggcttggcttgtgaaaaccaactcaataggatccaggttatccagaatagggctgcgaaattggtcactggttgtgtatatgtgtatttcattaaataaaccagcactcgagtctctactatgaaaggctaaggcaccacaggaatagtctggcaaataccctgtatagtacacgcccaccaatgaggcttaatagaaggcaaccgaaagacctcattcttcgatctccttcaaggagggccagtagaccctgtcctttatacaactgttattgtccctttttgttttttagattttagatacagataactttagtaagctaaattaatagcttccatggttccaaagggggaggtggaaaccaaataataaaatgaaaatgcaaaaattgttcaaaagtgtgggcgcgacaggtttgggcggtttgtggacgttagagtgcgagtggcaaaaagttttatgacatatcgaaagtaatttacgaaactaacacaaaaatcacaaaatacaatacaaaaacatttttcaaaagtgtaggcgtggcatttttgggcggcttgtgggatatagagtgggcgcgtccgtctatgtctctagaatctgtgttcctaatctcaacctattacgccgtgtgttattattttagcatgttaataaattatttgaaatgtattttttaagaacgtttaattttacttacggcttccctttttccaaagtacgtcatggaaacaccaatttgaaaacaccattttaaattgtaatctttatttataattttagctgaagggctatttttttttgtagaataccaattaatcaaataatatcatagaaaatatttcgccaaggaaaaaacaaaagaatacaaatcgaaaagctgagcaaacatatctgaatgtcaagtgtaagaacaaaataattacaatctagtataaaagcgcccacttttttccatcttacacacattcagcatgcgcttctcgatcgtaattgttctttccgtcctaggatgcctcctgcttagccaggagggcagtagcagcacatctacatcctcgacgacgaccacaaccaccgactcctctgccaccactaccacggcttcgtccgccaccactaccaccactgcctcttccgcatccaccacgaccactgcctcctcctcatcctcttcctctgcggaggccaggaggcgcaggcgcgcccgtcgccgtcgtctggcgcgtgagaggcaacgaagggagcgcagaaggcagcgcaggactcagaggctgcgccagcaactggagaatcaacgtcgacagatcaaccagctgagcggatgaaggtcttcggaaagactcggcttatgacaatttaggaaaagctgttgtaaatatgtgaaagctaaattctttcattgttcaagttcgccaagataataaaacatttgattgtacattctgataattctactttattggagcacaaaaacgtgtgggagtggcatatttaagcggcttgagggagttcaacgttctcaactctctagcttttagagttgctgaggtcgagacattcgttcggacagacggagtaatagtgatcaagcatatacatatgtataattaatagggtcggaaacgcctgttacatacttttcaacaaatctagtttagtctcattccaggagtagcctgtttcaaatcgagacgaattttgaaatcggtaactggtataaaattaatataattatacacatctttgttgtgtttggtttaaaaataatgtaaaccacgtatttgtttttttggaaaataaatctctaatttcggagaacttaaatggatataagccaaaatgcaacagcacaaaactgttaattgggtacgcaaagctcaaatgaagaacaaataaaacacctttaactcgtcaagtgctgcgatttttactcagataagatgtgaatgtacataaataggttataccaaatatttccttcagacgtgacgtggtcgccatacataattaggcgtaagaagcgttataatattacctttttatctcgttttcaacgagttaaacccggctcactatcaataatatatcgatcgactcttttactctgttgaccttacaagcccaagacattgacgagctggataggctgtgcacacatttccgatttccgatacatgatatttgtttaattgttaccccgtattgagtataaaaggccgtctgattagattagattagacacaacaaaatgcgcttcctattcgctctacttctcagcgtgctcctgtgtctgctcctggctcaggagggcagtagcagcacatc

SEQ ID NO: 34964 - DNA, 354 bp, DROSOPHILA
atgcgcttctcgatcgtaattgttctttccgtcctaggatgcctcctgcttagccaggagggcagtagcagcacatctacatcctcgacgacgaccacaaccaccgactcctctgccaccactaccacggcttcgtccgccaccactaccaccactgcctcttccgcatccaccacgaccactgcctcctcctcatcctcttcctctgcggaggccaggaggcgcaggcgcgcccgtcgccgtcgtctggcgcgtgagaggcaacgaagggagcgcagaaggcagcgcaggactcagaggctgcgccagcaactggagaatcaacgtcgacagatcaaccagctgagcggatga

SEQ ID NO: 34965 - protein, 117 aa, DROSOPHILA
MRFSIVIVLSVLGCLLLSQEGSSSTSTSSTTTTTTDSSATTTTASSATTTTTASSASTTTTASSSSSSSAEARRRRRARRRRLARERQRRERRRQRRTQRLRQQLENQRRQINQLSG

SEQ ID NO: 34966 - DNA, 2402 bp, DROSOPHILA
actaaactagatttgttgaaaagtatgtaacaggcgtttccgaccctattaattatacatatgtatatgcttgatcactattactccgtctgtccgaacgaatgtctcgacctcagcaactctaaaagctagagagttgagaacgttgaactccctcaagccgcttaaatatgccactcccacacgtttttgtgctccaataaagtagaattatcagaatgtacaatcaaatgttttattatcttggcgaacttgaacaatgaaagaatttagctttcacatatttacaacagcttttcctaaattgtcataagccgagtctttccgaagaccttcatccgctcagctggttgatctgtcgacgttgattctccagttgctggcgcagcctctgagtcctgcgctgccttctgcgctcccttcgttgcctctcacgcgccagacgacggcgacgggcgcgcctgcgcctcctggcctccgcagaggaagaggatgaggaggaggcagtggtcgtggtggatgcggaagaggcagtggtggtagtggtggcggacgaagccgtggtagtggtggcagaggagtcggtggttgtggtcgtcgtcgaggatgtagatgtgctgctactgccctcctggctaagcaggaggcatcctaggacggaaagaacaattacgatcgagaagcgcatgctgaatgtctttgacgcatttgagacgttacgcatgtttttatagcaaatttgaataatggtggtttaccaaaagcgtgtaagctaataggtctgctggattgttagctttaactaaggtaaattttggtaatgtttattcagattgagaaattatgtgtgccgccatatagtttaaacgttgctcttgagtcttaacacacataataatgtaatagatttacggtaatgagcgcgtttctcaaccaagtttccgggttcaacatcatataaataggctattctccaaatcataagatataactgcttagaatgcgattcatatttgttctgctcttggcccttctcggctgcctcctgtttgcccagcagggctgcgaagctacgggaacgagcactgaaagctcctcggatagtaccagcgcctcggacacctccactaccgcgtcctcttcctccgacacaactgaagcctcaacgtcttccgacaccaccacagtggcctcgtctgccacgactaccaccacttcttcgtcctcgtcctcgtcgtcgtcctccagcgcggccgcccgtcgtcgcagggccgccgcccgtcgtcgtcgcttggcccgccaacggcgcaggcgccaacagcgccaaaggcgccaacagcgccaaaggcgccgccgccaacagcagcgcagaagacgccagcaaaggcagcgcagtggatagacgattgctacagtcgaagaggaggctgctgcagctagaaacctgtcgagtcagacagctaatacaagccaaagattgatgttttaactaaattgcagttgcgttgctgtgggatattccgttttttaaaaataaagaaaattttaaaaaataaattatttatatttacaacttagagggggtctcttacctcaatgggaatttctgaaatggagttgtttgttttttcagtctgttcaagctttctgttctggcaaaactaagtaaagtatgtctgctttctcaattgatgattgtgtcgtgtctaattattaactcaaatgcactataatcttagagaccatgttacgtttttcaaattattattatttgccaaagataatacggacttaaaatcacgaaaacgtgctaagatggcaaagcacgaaattgtaaactaaattgtcgctatcaaataagttgactatccacaaaaggattatagatccttggggcttggcttgtgaaaaccaactcaataggatccaggttatccagaatagggctgcgaaattggtcactggttgtgtatatgtgtatttcattaaataaaccagcactcgagtctctactatgaaaggctaaggcaccacaggaatagtctggcaaataccctgtatagtacacgcccaccaatgaggcttaatagaaggcaaccgaaagacctcattcttcgatctccttcaaggagggccagtagaccctgtcctttatacaactgttattgtccctttttgttttttagattttagatacagataactttagtaagctaaattaatagcttccatggttccaaagggggaggtggaaaccaaataataaaatgaaaatgcaaaaattgttcaaaagtgtgggcgcgacaggtttgggcggtttgtggacgttagagtgcgagtggcaaaaagttttatgacatatcgaaagtaatttacgaaactaacacaaaaatcacaaaata

SEQ ID NO: 34967 - DNA, 402 bp, DROSOPHILA
atgcgattcatatttgttctgctcttggcccttctcggctgcctcctgtttgcccagcagggctgcgaagctacgggaacgagcactgaaagctcctcggatagtaccagcgcctcggacacctccactaccgcgtcctcttcctccgacacaactgaagcctcaacgtcttccgacaccaccacagtggcctcgtctgccacgactaccaccacttcttcgtcctcgtcctcgtcgtcgtcctccagcgcggccgcccgtcgtcgcagggccgccgcccgtcgtcgtcgcttggcccgccaacggcgcaggcgccaacagcgccaaaggcgccaacagcgccaaaggcgccgccgccaacagcagcgcagaagacgccagcaaaggcagcgcagtggatag

SEQ ID NO: 34968 - protein, 133 aa, DROSOPHILA
MRFIFVLLLALLGCLLFAQQGCEATGTSTESSSDSTSASDTSTTASSSSDTTEASTSSDTTTVASSATTTTTSSSSSSSSSSSAAARRRRAAARRRRLARQRRRRQQRQRRQQRQRRRRQQQRRRRQQRQRSG

SEQ ID NO: 34969 - DNA, 2383 bp, DROSOPHILA
cgactcctttaagatttcgcatgccacagcaatttaaaaaaggggttcggatctgaaggaaataatctgatggaaagaacacatttttctccgttttgtgcttagaatcggcattgatggcagaatggcaatctggaaaatgacaacaataagggttggcccagcctaacgtactttaccttttggctggcggcattttgcttattttcgtttccctcaattgctgcccagtctgcggacgaagttccctgaaatgcaattttgtagcgagaaaatccgataaaaaatttcttcagccttcagagatggcggcattctctatgcgtctgatctgagcaattaatgggcacaaagaagcaaatgtggattcgaatattgttaacagaatataaccccaatcttgaactgctttcaagcagttatgcaaaaaaaaaaaagaccaaaaaacatcgattccccctgtcagtctctatgttatccttggctttttgaaacgtctaagaatatgatgacgtgccgtcaccaaaccgcactctttatatatgcacacattcagcgtaatttttattcacatccaatagatttaagtatccagggcttgggtggctccatcacttcgtgaacagcagcacatttatgcacagttcaaagaccaaaatgaatattttatttgatttgattccaggcgggctgactgctgagcttggctgcaagaaaagcattttcgagcgctcaagctctggtataataaactccagggatagggccaattgtctgccgccttggaattgcgcggattcgccgcttgtcggatagaatatgtagatgtgcgtgggaatgcctgtggaaacgtcttaaatgctctaatgcccacaacgaaaccttgctcaacgctgcaggcatgccttctcaaaaatacctccaaagaaagagatcaatctaataatctgattagttggtgcagcgcttatatttctattgaacggccgaagattctatcttaagggaccaagcccccacttatccctgaagctgattgatcaggcgacgctgcctcaccagcagctgctccatcctgcgcctcctcttttcctggcgctgtctccgctcctggcgacgacggcgctcacgagccaggcgacgacggcgagcacgtctgcgcctcctggcctccgccgaggaggaggaagaggaggcagtggtcgtggtggatgcggaggaggcagtggtggtagtggtggtggcggatgaagccgtggtagtggtggcagaggagtcggtggatgtggtcgccgtcgaggatgtagatgtgctgctactgccctcctgagccaggagcagacacaggagcacgctgagaagtagagcgaataggaagcgcattttgttgtgtctaatctaatctaatcagacggccttttatactcaatacggggtaacaattaaacaaatatcatgtatcggaaatcggaaatgtgtgcacagcctatccagctcgtcaatgtcttgggcttgtaaggtcaacagagtaaaagagtcgatcgatatattattgatagtgagccgggtttaactcgttgaaaacgagataaaaaggtaatattataacgcttcttacgcctaattatgtatggcgaccacgtcacgtctgaaggaaatatttggtataacctatttatgtacattcacatcttatctgagtaaaaatcgcagcacttgacgagttaaaggtgttttatttgttcttcatttgagctttgcgtacccaattaacagttttgtgctgttgcattttggcttatatccatttaagttctccgaaattagagatttattttccaaaaaaacaaatacgtggtttacattatttttaaaccaaacacaacaaagatgtgtataattatattaattttataccagttaccgatttcaaaattcgtctcgatttgaaacaggctactcctggaatgagactaaactagatttgttgaaaagtatgtaacaggcgtttccgaccctattaattatacatatgtatatgcttgatcactattactccgtctgtccgaacgaatgtctcgacctcagcaactctaaaagctagagagttgagaacgttgaactccctcaagccgcttaaatatgccactcccacacgtttttgtgctccaataaagtagaattatcagaatgtacaatcaaatgttttattatcttggcgaacttgaacaatgaaagaatttagctttcacatatttacaacagcttttcctaaattgtcataagccgagtctttccgaagaccttcatccgctcagctggttgatctgtcgacgttgattctccagttgctggcgcagcctctgagtcctgcgctgccttc

SEQ ID NO: 34970 - DNA, 383 bp, DROSOPHILA
atgcgcttcctattcgctctacttctcagcgtgctcctgtgtctgctcctggctcaggagggcagtagcagcacatctacatcctcgacggcgaccacatccaccgactcctctgccaccactaccacggcttcatccgccaccaccactaccaccactgcctcctccgcatccaccacgaccactgcctcctcttcctcctcctcggcggaggccaggaggcgcagacgtgctcgccgtcgtcgcctggctcgtgagcgccgtcgtcgccaggagcggagacagcgccaggaaaagaggaggcgcaggatggagcagctgctggtgaggcagcgtcgcctgatcaatcagcttcagggataagtgggggcttggtcccttaa

SEQ ID NO: 34971 - protein, 120 aa, DROSOPHILA
MRFLFALLLSVLLCLLLAQEGSSSTSTSSTATTSTDSSATTTTASSATTTTTTASSASTTTTASSSSSSAEARRRRRARRRRLARERRRRQERRQRQEKRRRRMEQLLVRQRRLINQLQG

SEQ ID NO: 34972 - DNA, 2668 bp, DROSOPHILA
gcgatgtgcagtgcatccttaattacagattcggcgcgaagggatgggatgggatgcgggatgccaggagatgccccttctaggactgtgcttcgcgaaaaatgttaaacattcgcaagtttttattatcgcgctcaaacttgtgggaaagttccttcccctgcagtcgtacgccttcttacgtggcctgtttgggtaattcgagatagttaaacaagggccaacaatgcggctgtgccgcattcaggggaaaatacctaaatgaggaacagaacacttgattcagactgactttcaactcaaaatttagttttacctaacgttaaaacggtatcacagcaattgaggaaatccactttacaaacgtaagccataaataagattcaattatattaaatgcattagcaagttaaattaaaattaatagtatatgtgtaaagatttatgtaattatcacgtttccattttaagtgaatattcatgattttaatattatcccaattttattagaccagtctagtctagtgctggaagataaagacccgtatttctttctctgtgtgaatgtgaataccttatctacgactatcgcccctactggtatcagcccaatcatctcgtcggaatatgcatttgcatggagcttctctgcgctccacacacaccctaaatcattgtcgtctgttgctcatcagcagcccctccgacgccattatcgtcgtcatcaattgcgctgctggtggctgcctgcagacagcttgtcaccgtcgggtaaacatgcgaatttcgcagtcgagcaggcaaacacgtgacaagcggctaaggaggattgctggggcggttagatgggaggacaagacgaggcgacaatgacgacgtcaatggtgcgacaaaaggcagtttgaatactaaaacgaggcagtgttggacgcgcatcaaaactttattggatctcctgcgggcaggagataccatgaggaacatgcgaggtatatgtatcttagccgagactgaaccgcttcaggttgtcgaagcctttggacttgtcgatgcggccgaagatggtcgaccgtacgatcatgccgcccttgtccgtcgaaattttcatgccgaagcggaacttagcctccggcaggaagctgggcagcatctcctcgtccacattgtagttggttaggctgtaggtgccgctccggattgggcactccttgaagagggtgccgtgcttgagaaggtcctcgtagatcgcgcgcaccagcggatccgagttgcgctgcttcatcagcttgcagaagttgagcgtacggtttatcagggtagagtagttgcccttgtccgtctccaaaccaaagtctaccaccagctgaacgtcctctatgtcctggtgcgtctttatatcgatgctcagatttgactcgcccgaatcgttttgcagatcgaccttaaggtccaggaacttgtcgttggcctcaaagtcaatgctcgtgaggatgaccttgaaagagcgctggcgaaggcaataaatcagaactgtgcccatgtcccgcaccagcccgatccaccccaacttacccacgctccagtcaagggcatgagagccaccaaaatgaaggccacggcacagcagcttcggatgacctccttacgcatcttgctccaactatccattgaggctggctcttattcaattagtcagtttttatatgtatgcaattagaattagtcaggccccactgggcgacaaagcgctccgaacattaggcccagccacgttgtcgtggtgaattaagtcaactaagtgggtggactttggaaaagcattcagctgtttcgaaacgtagtcaatttccgataagatcgaactgaaaatcgctcagcccatttgcatataaatagtgccgtcgccggacaaaaccagacagtgaagacagcttactgcagtcgttccataatgttgctgtataccgcggtcctggttcccgtcctgatggccatgtgccatggctccctggccgaggtgagagttcgcagagtagcgccttgccactgaactaatccctcagctggcttctattccagaaaatgatgagacccaagttcaaggacatcaagttctggagcgacgagaagttcgtcagccacaaggtggtctacgacaacagcgacccgcatctgaacttctccatggaggtgcaccaggagctgcacgacgtagacatccacgtcgaggtgcgcatcaccaacaagcaggacccgtactacaacactaatctaaacaccacgctgaatgtctgccgcatcctgggcttcgccaacaagtcaccggtggggcgcttcgtgcacggattcatccgcgagttcggcaacatcgtcgaaacctgcccaatcgccaaggtgagtggagcactcttgtcagggttccagctgaccctcccccactctcggtcacgttctagggccgataccattggcaccgcattcatttaaaacgcaaattacagggctcctacttcatcaacaagttctggtggccagaggacccaaccaccgccatgctgcccgagctggagttcgagatcatctggcaggccatgcacgtggacgccagcaagaagcgcacgctgataatgaacgaccatttcggtggggacttcgtcgtccaggacgt

SEQ ID NO: 34973 - DNA, 603 bp, DROSOPHILA
atggatagttggagcaagatgcgtaaggaggtcatccgaagctgctgtgccgtggccttcattttggtggctctcatgcccttgactggagcgtggcgctctttcaaggtcatcctcacgagcattgactttgaggccaacgacaagttcctggaccttaaggtcgatctgcaaaacgattcgggcgagtcaaatctgagcatcgatataaagacgcaccaggacatagaggacgttcagctggtggtagactttggtttggagacggacaagggcaactactctaccctgataaaccgtacgctcaacttctgcaagctgatgaagcagcgcaactcggatccgctggtgcgcgcgatctacgaggaccttctcaagcacggcaccctcttcaaggagtgcccaatccggagcggcacctacagcctaaccaactacaatgtggacgaggagatgctgcccagcttcctgccggaggctaagttccgcttcggcatgaaaatttcgacggacaagggcggcatgatcgtacggtcgaccatcttcggccgcatcgacaagtccaaaggcttcgacaacctgaagcggttcagtctcggctaa

SEQ ID NO: 34974 - protein, 200 aa, DROSOPHILA
MDSWSKMRKEVIRSCCAVAFILVALMPLTGAWRSFKVILTSIDFEANDKFLDLKVDLQNDSGESNLSIDIKTHQDIEDVQLVVDFGLETDKGNYSTLINRTLNFCKLMKQRNSDPLVRAIYEDLLKHGTLFKECPIRSGTYSLTNYNVDEEMLPSFLPEAKFRFGMKISTDKGGMIVRSTIFGRIDKSKGFDNLKRFSLG

SEQ ID NO: 34975 - DNA, 2766 bp, DROSOPHILA
tctcctgcgggcaggagataccatgaggaacatgcgaggtatatgtatcttagccgagactgaaccgcttcaggttgtcgaagcctttggacttgtcgatgcggccgaagatggtcgaccgtacgatcatgccgcccttgtccgtcgaaattttcatgccgaagcggaacttagcctccggcaggaagctgggcagcatctcctcgtccacattgtagttggttaggctgtaggtgccgctccggattgggcactccttgaagagggtgccgtgcttgagaaggtcctcgtagatcgcgcgcaccagcggatccgagttgcgctgcttcatcagcttgcagaagttgagcgtacggtttatcagggtagagtagttgcccttgtccgtctccaaaccaaagtctaccaccagctgaacgtcctctatgtcctggtgcgtctttatatcgatgctcagatttgactcgcccgaatcgttttgcagatcgaccttaaggtccaggaacttgtcgttggcctcaaagtcaatgctcgtgaggatgaccttgaaagagcgctggcgaaggcaataaatcagaactgtgcccatgtcccgcaccagcccgatccaccccaacttacccacgctccagtcaagggcatgagagccaccaaaatgaaggccacggcacagcagcttcggatgacctccttacgcatcttgctccaactatccattgaggctggctcttattcaattagtcagtttttatatgtatgcaattagaattagtcaggccccactgggcgacaaagcgctccgaacattaggcccagccacgttgtcgtggtgaattaagtcaactaagtgggtggactttggaaaagcattcagctgtttcgaaacgtagtcaatttccgataagatcgaactgaaaatcgctcagcccatttgcatataaatagtgccgtcgccggacaaaaccagacagtgaagacagcttactgcagtcgttccataatgttgctgtataccgcggtcctggttcccgtcctgatggccatgtgccatggctccctggccgaggtgagagttcgcagagtagcgccttgccactgaactaatccctcagctggcttctattccagaaaatgatgagacccaagttcaaggacatcaagttctggagcgacgagaagttcgtcagccacaaggtggtctacgacaacagcgacccgcatctgaacttctccatggaggtgcaccaggagctgcacgacgtagacatccacgtcgaggtgcgcatcaccaacaagcaggacccgtactacaacactaatctaaacaccacgctgaatgtctgccgcatcctgggcttcgccaacaagtcaccggtggggcgcttcgtgcacggattcatccgcgagttcggcaacatcgtcgaaacctgcccaatcgccaaggtgagtggagcactcttgtcagggttccagctgaccctcccccactctcggtcacgttctagggccgataccattggcaccgcattcatttaaaacgcaaattacagggctcctacttcatcaacaagttctggtggccagaggacccaaccaccgccatgctgcccgagctggagttcgagatcatctggcaggccatgcacgtggacgccagcaagaagcgcacgctgataatgaacgaccatttcggtggggacttcgtcgtccaggacgtcaataatctgaagcccggcatcttcgcaatgctgcccaaaatcgcctagaagccccgctaggctcggccctgccccggaatgagctacccatctgagtcgcgtgtcccaatggtatttacttaatgtttgtcagtgtcacttcgtgttatccagatagcaagcaaataaagctgccgcagaaagagcaaaccaatgattttgtttaaagggtcgcatgattttttaattaccgaattgttaaattcgggaagaaagagcgataactacataacttgaaattaaaaagtttccaacgtctatagttttcatgtcgtatccaaattgcaacattccctttttatctacttcgttttaaaagaatactgttgataactattaaacgactttaaagttatactaagaatatttattatcttgcactatattacattgtaattatttaattgaaagaagacatttttgtttataacttcttttcaatactgaaagaagcgtttaaagtgcttatgaagctcatagaatttgcccattgtcagtttcctgcaaaaccatcatcaatgacaataaatttttttatattattcacgtgctgctctcgaatttcgacactcggcgggattcgtgtttttgaaccattcccaaattgaattaaaatggtacggattcgagagaaacaggaggcccacaacatcaaattattattcaatatagtcgcaacgaaatgtttgtgacttgtgccctgcccattgtgatccgacaatgacagtttgcgaattttaaaccgcttttagctattttttgcccaaatgaaggtgccacttggtatgatttatgcgagtttgagtttgccgagctttggatttggttatttggtcatttgttgattggcatattgatgcagtgtggctgttatcgaggaagccataaaacgacagtaacaatgaggaatgcaaaaaagttctcggcgcctctgcctcgttaaccgactcgatgattcccctcaataaaatgttcaatttcaattaccgggtataataggcccggaatg

SEQ ID NO: 34976 - DNA, 597 bp, DROSOPHILA
atgttgctgtataccgcggtcctggttcccgtcctgatggccatgtgccatggctccctggccgagaaaatgatgagacccaagttcaaggacatcaagttctggagcgacgagaagttcgtcagccacaaggtggtctacgacaacagcgacccgcatctgaacttctccatggaggtgcaccaggagctgcacgacgtagacatccacgtcgaggtgcgcatcaccaacaagcaggacccgtactacaacactaatctaaacaccacgctgaatgtctgccgcatcctgggcttcgccaacaagtcaccggtggggcgcttcgtgcacggattcatccgcgagttcggcaacatcgtcgaaacctgcccaatcgccaagggctcctacttcatcaacaagttctggtggccagaggacccaaccaccgccatgctgcccgagctggagttcgagatcatctggcaggccatgcacgtggacgccagcaagaagcgcacgctgataatgaacgaccatttcggtggggacttcgtcgtccaggacgtcaataatctgaagcccggcatcttcgcaatgctgcccaaaatcgcctag

SEQ ID NO: 34977 - protein, 198 aa, DROSOPHILA
MLLYTAVLVPVLMAMCHGSLAEKMMRPKFKDIKFWSDEKFVSHKVVYDNSDPHLNFSMEVHQELHDVDIHVEVRITNKQDPYYNTNLNTTLNVCRILGFANKSPVGRFVHGFIREFGNIVETCPIAKGSYFINKFWWPEDPTTAMLPELEFEIIWQAMHVDASKKRTLIMNDHFGGDFVVQDVNNLKPGIFAMLPKIA

SEQ ID NO: 34978 - DNA, 2497 bp, DROSOPHILA
agcaagcaagccactcaaatcaagttttttccgccaaacgaatgccgcgcagaaaatatgaaaatgcaagtggtatcattcagttttcatttgctgctcgctgacgctggtcgcttggccattccacgaatatcgaccactaatttggtttcggattaatttggcgatggcccgtttggaactgattgtgctgctggtgacatttaccacttgcctagttcgagctgaagatggttttttgaaagagccgcgtaagtgctgcctgattactagatcggtcaattaaaatggtgttacttctgttaatgaagtctgcttattcttagacccaagtcctgaaacagttttaacaccccccgtttttggctaacacaaatgtgactaacccgcttagcagctggaactcgctgttcaaatagcgccaaaaatattgcaccactaaaccggatttgtttttctgaattctctgtgggtatattgtttgcctcactcgcactcgcacccgcgctcgatccgaaaccaaatccgaattcgaatccaaatccaatatgaactgaactgaacaaaattctaaccgaaccgcagcagattacatcaaagagtgtaggatagccgacaaggactttgtcaactgctcgacccacagcatccagcagcttttcgataaactcaacgatggtgggtagagtcctgcgttgagggttctgtgtgattactatctggtaccgattcataggcattcccgggctcactagcataaggagcttcgatcccttctatctcaaccgcatccggattacgcagggcaatagcaacgcgatcaatctcaaggtggagctggccaacgtcaagatcattgggttcgggcacacgaacgtcctggacagtcagtgagtgcgagcttactgagtcgtactgagtcgtattctgtaaggcagccatctttttcagggtatttaagaaggactacagctggaagaccacctttacactgcccgagatgaagctccaggcggactacagtcttttcggtcggatcctgctcatcccgctcaacggaaagggccaggtgttcctggacgcggagaacatgacggtcaccatgcacacgaagactcggctctactccaagggtgggttcactttctacaacgtgaccaacctgcacgtggattttaaaatggacgggctcaagtcgtacttctccaatctgtttaatggcaataagcagctgggtaagtagctgcaatcttcagaacccaacctctgaccactcttggaactccttcggccgcagaggacagcaccaacaagttcttcaacgacaactggcggatgctggccgatgccctgtacacggtcatcacccagaccatcgaggacattctgctggatgtgctgaagaagatatttcacttcattccagccaacttctttgtgagcgacatcccgacgccggaacagctttatggaagagccaagccgaaaccgaaatgaggaaattgtccgtagaatttgggagtgggaattctgtgaaaagtagccaataaagtttgtgtaaaaacttgaagagaccccttctaagagcatcacccatagattgcagctcgttgcaattgtgaaatggtttcctgcctgctctcaaaggcattagtgtcggtcaactgttgccttagtcctggaactgccgtctggtagggtagagtgaaaatctaatggcggcaccttaatcagacattgttcggccgtgtcctggaaaatatatcaggattgccgtcactgcacagatagtcggcaaacgatggctaggatcgactccactgggtaaaaagtacacaaacctgtattacacaattgcactcggcaaataaagccgtaaaccggcagcaggaggcgggaattctcgccgagtttaaccgcacatatggcaaagtcaaaaccataaccagaaccagaaacacagaaaaaggcggagccgcgtgttcaaattaattgccgcaaaaatagtcccagaccccaaattaatttaaattttttgagcctgcctctgtttttttttccggccaatgtgtttgtagcctgccaataatttgctgcaactgctgatgctgcggccgcaattaaatcgtttggcgcagcggtagccattacaaatgccgaacaattagtttaaatttaatgcgcaatgcatttcggcattttagttgcgcaattctgcggtttcaggcgcccttccgactccgtggtatctcattttttgccaactgcaagacaggccaaagccaaagcgacaaatcccgtgcgtgattgcaataaattcggtggcccctggaccgaaggcagcccaaaatgcagtttgcccacaaggtaaacaagcagcagcacgatccgctccccgaagaatggaggggctacctcccctccaccaagccaaaaggaccaccagttgacaatggagggcagaaaaaacacagaagacaaacacggaaggaaaact

SEQ ID NO: 34979 - DNA, 435 bp, DROSOPHILA
atgaagctccaggcggactacagtcttttcggtcggatcctgctcatcccgctcaacggaaagggccaggtgttcctggacgcggagaacatgacggtcaccatgcacacgaagactcggctctactccaagggtgggttcactttctacaacgtgaccaacctgcacgtggattttaaaatggacgggctcaagtcgtacttctccaatctgtttaatggcaataagcagctggaggacagcaccaacaagttcttcaacgacaactggcggatgctggccgatgccctgtacacggtcatcacccagaccatcgaggacattctgctggatgtgctgaagaagatatttcacttcattccagccaacttctttgtgagcgacatcccgacgccggaacagctttatggaagagccaagccgaaaccgaaatga

SEQ ID NO: 34980 - protein, 144 aa, DROSOPHILA
MKLQADYSLFGRILLIPLNGKGQVFLDAENMTVTMHTKTRLYSKGGFTFYNVTNLHVDFKMDGLKSYFSNLFNGNKQLEDSTNKFFNDNWRMLADALYTVITQTIEDILLDVLKKIFHFIPANFFVSDIPTPEQLYGRAKPKPK

SEQ ID NO: 34981 - DNA, 6016 bp, DROSOPHILA
tcatataactgaacaccagataggatcctaaattgcggaatattactctatgatggcatatatggcatatcccagtgactaaacgactaggattctgcgagtatttccgtaaaaacaatacttcacccataaattcaacaacgacactaaaatccattcagttcgaaaactaattttgaatcgcttgtagctcggaactaattacaagtttagttcggctgaacaattaatgctcagaacgagtagctcaattttgtaaatgtgcagattgtttactcgatccattcaaatatttaaagtaacatgcactgatgagcagctgcaattaacatgatcatatcaggtatctttttgggccaaatatgcaaaggttttagaaaatgtatattattttttaattcaatgctggtctttaaaggtctttaaaataatgacacttatcaatattgttattgataacacttaaaatttggcttttaaaatacgaaagcagtgttaggtgcaaaataaaaaaaatccgctcttgatagctcttaaaaatgttttgctctgatcataaatgtcgatttttacacaaagccgacacttatatgctaaagcttttgacacacaccttagtaaaagtcaacactccagcagactccgtttttaaaaatggcaaaggtagttcttagtatttcgatgtcattaatatgtcttataatcgtgccaatacctgtggtaagtagtactcactaagtactccgggatctgaactgcacttagtaaatcacactttgaaatgttttagacgaataaaatcctattgctggagagtcagtgtggcaactttaatcgcagctatttttccaattttacgatgtttgtaaaaaactctcagatgaatatggaatttttcttgttacgagttttggttccgggtgtcacaatggatattgaattctttattagcatgcaaaactcctatgggtttcagaaaattttccaatataccctggatatgtgcagccttctggcacagagaaggaacaacatgttcaaaaaatggtttgctacattcttcgattccggtaactttaaaaaatactgcccggtcgaacccaacttttactacctgaagaactacaactataacacactgtttattccgaagttcttgtatgcaggcaagtatagagtaaagttcgacatgaaccagttaaggaaaatagatggtgtccggtactttctggtggggtgtgcctttgaagttgaaataaagtaagcaatgactaattcccttaattttacatgtggccatcaattaaaattagtttagtctggtttccgtctggatggaaatgtattttaggcatcattattcgctcgacatcagcattgaaatgttgaaagtttgcactcttgtctccatcatatttgtccacaaactggctatcacaggggcagtgagtatttattaattaatcgttatagatcatgcttaagtaatgtttataatcttcgtgggacaaagtcatccctcatcttccaggcgggaaagtccaatttcagtccgacgtattttgaaaacttcaccttagaaattcaaaacaacacattgtttatggatatgaccacctccaagccgattcaccgcggtctcaaggtcctcctcaacactcagatcagccttgacaaaggcaggagctatcaacgccttttcgcccatatcttggacacctgtggtgtggtttcctcggtgaggggaaacctctttaagagctggttcgatagtatgctgaagcacgggaacttcatggtcaactgccctgttcccgctggtcactactttttgagagattggaagctggactcccacttggttcctcactatatgcttccaggagattattgtatcactgctcactttttctttggtaagcacaagtcaaagcaagaggaattttttctcgacttggaggtctatgcccttttaaaagcatcctagttattttattgtatataattcagccaattaattcgggatcataaataaacgaaaaggagtaccaagttctaaaaataggcattgaaaatgcgccattttgaagtaattaaaatccaattagcgaatcaacttgtgcaatcgaataacatggcaccgttcggaaaacattgtcgctgcactcagacctcacatcggaagtaccaatgttgaaaattgtgtgtgtcctaatggtaatattcgtatcgcaggcagtggtaagcacatttcagcaagaaagccgatcctgaacgtaatttacgacgcctcctacagtccagctcggtgaccctgaaccgcgtacagtgcgagaaaaacgcaaaattcttcgccaccctaaacgtgacgtctgtaaatagtacgatctacgcggatatagagctactccaagcactcaaggcgggcttccgaggacacgtcgatgtacaactccgtctcagcaatgccaaaaagttccagagtctggtccaagcggacaccgactactgcgagctcctctcgaccctcaaggactcgctcttccggcgctggatcaagagcgtatccaaaaacagcaatttcatggagaactgccctgttccggcggggcactactacctaaaggggtggcacgtcgagatgggcctggtgccctcctatctactgagtggcgactacctattaagtgccctggtttactacgggaagtatcggtccaagaagcagatgttccttgttcggtgcatggtggaggcaactatgcataacaaatagaaacgagttcaatgtttggcttgtgagtgtgtaattatatgattcaacagcttggccaaataatcaatctatcacgcaattcaaacagaacaacaatccgatcaaatggctttaattgcaataactaaaaatcagttgtgttggtgtgtggcaatgatcaagttgacattaccacgcaatgtgtgcagggaaactcgtaccctttgttctgggatgtgttgttgtaactgttgtcataaagcagagcgtggtgagtcaatgagtttttctgcaaggtccattcaagaacatgctaattagggccccagaatgaccttcagggccggtgactgcacatacaacagatcgactttctccaacttcagtatccaaataatcaagacaaaagtaatcatggatatgattttggtcaccactctacgacagggcctgaaggcgcacttgagcttcgagttccgcctgaccaaggccaaaccctaccaaagtgtctaccaacacgatatgaactactgtgctttgatcaagggctctcaggagtcgatatatcgacggtggtttacgtccatgctgaaggtgggaaacttcgctacgagctgtcccataagagaaggatactattacttgcatggctggaccctagatgcgaacaatgtgccatcctttctctacctcggtgactaccgaatcagcggatccttctactacggcaggttcaagaaacacttatacaatcccctactggagtgcagtgttgaagcggtgttaaactaaaagttactttagttactaaaccattggaatgaacgatcgcgtattggataaatggatagtcaggctccgatacgctggataattaaaatatatggatcagacaaaagtatttattgaagcacttctcttcacttctcttcttgtttattgcgatggctcggcctatatggatctcgcaattagccaggctggagataccgttgtgcctggccattgctcttttctcgatcagggcggtgagtactttatactgtgtggtactcaaattcttaagaccagggttgcttttcctaggaaggtagcgtcaaattcatagccggcgagagccggttcaacagaaagtactttgaaaactttacgttcactattcgcaatgataaaatcttcctggacatgtacctgcgaaagcctctggttaggggctggagagccagactggacttcaggactcgcgtaggcaactcgaaaagtttccagagtctcttttccaccagcatcgacgtgtgcaacatcgtgaacgccgccaagatcaacctgtttaagaagtggtacaagaatcttttgaagtacgggaacttcctccgccagtgtcctctaaatgcgagccactactacttgagggactggcagttcggggagggcttggtgcctcctttcataaccagtggatcgtaccgattggagacgtataacttttttggaaagtacaagggcaaagacgaggacttcataatgagttgtacggccgatgctatcatatatatctgatgcactgattccgatggctaatggcttggaaataaaaatgccatgctcgtgaccgtcatttgtaattgatttgagagctttcatttgggtttcatcgagggcataaaaatgtggaaattgcttacgctctttcttcttgtacaattggtattcaaaaccgaaattgtcgtcggggtaagtcaactcgtgaaccttatacaaaattcctcagaaaattttaatttaaggagcgcagtgtagagtttgttaccggcaacagcagctacaatccgaagtattttaaaaacttcacgataaccatagctaacaacacaatgaatatggacatgcacctgaaccgacccattcagaggggttttaaggcccatgtcgacattctgctacgtctggccaacgccaagaactttcagtccatgttcagccagaagagcgacgtgtgcgccgtaacatccagtgtcaaaaacagcctgttcaagagctggttcaaggacatgagcaagaacagtaacttcatgtacaattgtccggtggaggtgggccactactacatgcacgactggcgcatggggtcctcgatgacccacaagtttcttattcctggcgagtatcgcggcaaactcacattcttttacggcaagtacggaaccaagttattcgaagaagcactgagcctgacgatcgacgccatcctgtccaactagtccactgacacctggcgttacgcgtagaatcagactactgctcccagatctttgaacatcgtaaatcaattactaaacgcgtataccaacaatggcctttttttatttgtgttgaccaatatgtagtatgaaatatatttgcgtttgcgactatgaattgttaaatggagttaagggaaatcgttagcaggggcatatggacatataatcaaagctttcatatatccactttgtggtattgatatgatctattaaaataggtttctatcatttttaaatattttctctaaaaactaataagatacgagatctgatgacttaaatgccaacactttattcctaaataaaatatttattaaactagcagcagcggatagttgtgttttgtgcaggatgtctactcgatgcaaggatgatgctaacaacttccgctctcactcagcgataatcttcaaatcattttcagaatgtctgcacaaatattagctgcaattttatggcgagaaataataatatcctgaacaagacggcaacatgttgcacggcgttcgcttgtgttgattatcgatgcagcggaaaaagaagacattgagcattcaatttggctctaatgtccttgctgtcacactgggagcgcagatgtcgcatacagcaaagaagttgtaaagagaatggtgaaaaaagaaattggtaactttagaatcgtttccctacgttctgcttaacgtgtgacttgcccttggagcgtttatctttattgcttcctaattgctggccgaggcacatccaaaatgattcgccccaggcctcatgctcgccaatttgttcggattcccgctggtataattatacgatgtgtggtgtgtggtgatgattgctccctctaaaacgcatcccccgatttatccgccctcactcgaattctggccctgacaaccccgcaggcatgtctgatgactaatgagtgtggaccagaggacgagtgagagccaggtgagct

SEQ ID NO: 34982 - DNA, 2313 bp, DROSOPHILA
atgtgcagccttctggcacagagaaggaacaacatgttcaaaaaatggtttgctacattcttcgattccggtaactttaaaaaatactgcccggtcgaacccaacttttactacctgaagaactacaactataacacactgtttattccgaagttcttgtatgcaggcaagtatagagtaaagttcgacatgaaccagttaaggaaaatagatggtgtccggtactttctggcgggaaagtccaatttcagtccgacgtattttgaaaacttcaccttagaaattcaaaacaacacattgtttatggatatgaccacctccaagccgattcaccgcggtctcaaggtcctcctcaacactcagatcagccttgacaaaggcaggagctatcaacgccttttcgcccatatcttggacacctgtggtgtggtttcctcggtgaggggaaacctctttaagagctggttcgatagtatgctgaagcacgggaacttcatggtcaactgccctgttcccgctggtcactactttttgagagattggaagctggactcccacttggttcctcactatatgcttccaggagattattgtatcactgctcactttttctttgacctcacatcggaagtaccaatgttgaaaattgtgtgtgtcctaatggtaatattcgtatcgcaggcagtgtccagctcggtgaccctgaaccgcgtacagtgcgagaaaaacgcaaaattcttcgccaccctaaacgtgacgtctgtaaatagtacgatctacgcggatatagagctactccaagcactcaaggcgggcttccgaggacacgtcgatgtacaactccgtctcagcaatgccaaaaagttccagagtctggtccaagcggacaccgactactgcgagctcctctcgaccctcaaggactcgctcttccggcgctggatcaagagcgtatccaaaaacagcaatttcatggagaactgccctgttccggcggggcactactacctaaaggggtggcacgtcgagatgggcctggtgccctcctatctactgagtggcgactacctattaagtgccctggtttactacgggaagtatcggtccaagaagcagatgttccttgttcggtgcatgggcctgaaggcgcacttgagcttcgagttccgcctgaccaaggccaaaccctaccaaagtgtctaccaacacgatatgaactactgtgctttgatcaagggctctcaggagtcgatatatcgacggtggtttacgtccatgctgaaggtgggaaacttcgctacgagctgtcccataagagaaggatactattacttgcatggctggaccctagatgcgaacaatgtgccatcctttctctacctcggtgactaccgaatcagcggatccttctactacggcaggttcaagaaacacttatacaatcccctactggagtgcagtgttgaagcggaaggtagcgtcaaattcatagccggcgagagccggttcaacagaaagtactttgaaaactttacgttcactattcgcaatgataaaatcttcctggacatgtacctgcgaaagcctctggttaggggctggagagccagactggacttcaggactcgcgtaggcaactcgaaaagtttccagagtctcttttccaccagcatcgacgtgtgcaacatcgtgaacgccgccaagatcaacctgtttaagaagtggtacaagaatcttttgaagtacgggaacttcctccgccagtgtcctctaaatgcgagccactactacttgagggactggcagttcggggagggcttggtgcctcctttcataaccagtggatcgtaccgattggagacgtataacttttttggaaagtacaagggcaaagacgaggacttcataatgagttctaacaacacaatgaatatggacatgcacctgaaccgacccattcagaggggttttaaggcccatgtcgacattctgctacgtctggccaacgccaagaactttcagtccatgttcagccagaagagcgacgtgtgcgccgtaacatccagtgtcaaaaacagcctgttcaagagctggttcaaggacatgagcaagaacagtaacttcatgtacaattgtccggtggaggtgggccactactacatgcacgactggcgcatggggtcctcgatgacccacaagtttcttattcctggcgagtatcgcggcaaactcacattcttttacggcaagtacggaaccaagttattcgaagaagcactgagcctgacgatcgacgccatcctgtccaactag

SEQ ID NO: 34983 - protein, 770 aa, DROSOPHILA
MCSLLAQRRNNMFKKWFATFFDSGNFKKYCPVEPNFYYLKNYNYNTLFIPKFLYAGKYRVKFDMNQLRKIDGVRYFLAGKSNFSPTYFENFTLEIQNNTLFMDMTTSKPIHRGLKVLLNTQISLDKGRSYQRLFAHILDTCGVVSSVRGNLFKSWFDSMLKHGNFMVNCPVPAGHYFLRDWKLDSHLVPHYMLPGDYCITAHFFFDLTSEVPMLKIVCVLMVIFVSQAVSSSVTLNRVQCEKNAKFFATLNVTSVNSTIYADIELLQALKAGFRGHVDVQLRLSNAKKFQSLVQADTDYCELLSTLKDSLFRRWIKSVSKNSNFMENCPVPAGHYYLKGWHVEMGLVPSYLLSGDYLLSALVYYGKYRSKKQMFLVRCMGLKAHLSFEFRLTKAKPYQSVYQHDMNYCALIKGSQESIYRRWFTSMLKVGNFATSCPIREGYYYLHGWTLDANNVPSFLYLGDYRISGSFYYGRFKKHLYNPLLECSVEAEGSVKFIAGESRFNRKYFENFTFTIRNDKIFLDMYLRKPLVRGWRARLDFRTRVGNSKSFQSLFSTSIDVCNIVNAAKINLFKKWYKNLLKYGNFLRQCPLNASHYYLRDWQFGEGLVPPFITSGSYRLETYNFFGKYKGKDEDFIMSSNNTMNMDMHLNRPIQRGFKAHVDILLRLANAKNFQSMFSQKSDVCAVTSSVKNSLFKSWFKDMSKNSNFMYNCPVEVGHYYMHDWRMGSSMTHKFLIPGEYRGKLTFFYGKYGTKLFEEALSLTIDAILSN

SEQ ID NO: 34984 - DNA, 2740 bp, DROSOPHILA
ctggagttcaaagctcttctatacaactccgtcttaaaacctatctggacttatggctccgagctgtggggcaacgcatccagaagtaacatagacattattcagcgagcacagtcaagaattctgagaattatcactggagcgccgtggtaccttcggaacgaaaacatacacagagacctaaaaatcaaattagtaatcgaagtaatagctgagaaaaaaacgaagtataacgaaaagctgaccacccatacaaatcccctcgcaagaaaactaatccgagtatgcagtcaaagccggctgcaccgcaacgacctcccagcccagcaataaacttattagggcattaatgaaaaaaaaaaactatcactaagtgaaagttaattaagttagattaagatttgaacacttattgttagtctcttaacacaaagggaagattcaataaataataaaaatttaaaaaaaaaaaaaaaaaaaaaaaaaacttggtgagcaggatgggaggggaattggccacttgaaatgcaaattgcgtgcaaattatggcaagctggcatccagccgggcaggtgaacaagttcctctgaccactgcccctgattcattgcgaaggttccggaaaaggaaatattacttggcagttccggaaagttgtgtttttaattgcacgagtcctaattcaatttgcagccctgcactttatgcaaccatccaaccagacagctctcaatttctctatttcctccaagatcgtgaaaataaacttttaacttgctgttctgcataaaatttttatataaagttatatataaagtttatataaagttttttccaaatcatcgagactaatcctatgtgactatattacataaatagcgtttaaattacattgactaagttatgtgcgtttcgacgacagcttttatttcatttgtaaacggacagcagcggagattttcaatctgcgttggtattagttgaatattttcaatagctcttaactctgcccatattcaccaataattaataaacaatgaaacacaagacgtacacccagtttgaatccattgcccattagagactcaccgttattatgagttaggaaggcgttttcagcttccaacgaggatgatccctggtgctcattgttgccgttggaggaggacgatgagttggagaagtcgtagggatgggtcaggctgttggtgccgccagcggaggcagctagcgccttgaacaggtgggcggtgcgctgctgcgtctgctgctgcagctgttgctgctgttgctgctgttgctgctgctgctgctgcggcggaatataggggttgttgtagatgttgcgactgtcattcgatggctgcaggttgtattggttctgctgctgctgctggaacgtgttattggcactcagaagaccgttgaccgtgaaatgccgggacttggctgaaagaagaaaagagtatgaaaggtaaaatggggcccgatggaaggttctcgaaggtcggtaaggaaagtttaacttttttccatgtcaaggcaggtgctgcttgctaaactccacccccacccacaccactgcctccttgcgcctaattgcattcattgaaatatgcaaatgagcgccgttgtgtgtgagtgactgcgtgtatgtgtgtccgtgagggtttgcttcaattaaagcacttgcgcagttatctcacaaaggtttgaggttttcacttttcctccgctcattgtcgtcgcctattgttacttttctcatatgaattatgcatggcaataacaaaaacaacaactctgatacaccgcaccgaaccccaaccacctagtgttgctgttttgcggaaataatgttgacgcagaagctgtgataatgaagcaggcaaaagcaaagtgtcgcctcggcctaagccccaacccctccgatgtccgcaaaaaaattatgctaaccctttcaattttccacaagcaattcgctcggaaaagttgctccttgccgtctactcctgccattgtggttgttgttgtagtggttgttgccgctctttgcatattaattatgcatgttttggttggtgtgaaggcatcaacacattgtttgaattttaagcaacacaagcgacaaaattaggggtaaactgtgcgttggaaggggtttgcctcctttcggtccttttcgtttggcttttacactgatttgttcagcttttgggagccaactgtgtaaatataaagtgcaaaagataacgagctaataactctgttcactctgttcggtgttgatatgtgtgagtttggttgttctgaatggtcgaatccaagacagcactagttgtggtatatttgacagatttcaagcgatttgatgagccacaaactaaaacctattcctactctacgcccccataaaacgattacatccgaacaattacccattcactgaacatatcccgcttcaaaggtcagttccactcgctcgtcggcaagccatcaatgtcaatttcctggagatacaaattcaggggcagcacgcgtcgcggtttaaaaagcaatgtcaataaattttcactagatcgaatttattggtaaatccccaccgtaggcggctttatgacagaagccaggccaactggaatcaacacgatgagaccgggccaaatctgcgacgcgtctaaatgtcaataaaaaacacattcggccacccagcgacttcagatgcgaagaggcgaatttg

SEQ ID NO: 34985 - DNA, 483 bp, DROSOPHILA
atgagcggaggaaaagtgaaaacctcaaacctttccaagtcccggcatttcacggtcaacggtcttctgagtgccaataacacgttccagcagcagcagcagaaccaatacaacctgcagccatcgaatgacagtcgcaacatctacaacaacccctatattccgccgcagcagcagcagcagcaacagcagcaacagcagcaacagctgcagcagcagacgcagcagcgcaccgcccacctgttcaaggcgctagctgcctccgctggcggcaccaacagcctgacccatccctacgacttctccaactcatcgtcctcctccaacggcaacaatgagcaccagggatcatcctcgttggaagctgaaaacgccttcctaactcataataacggtgagtctctaatgggcaatggattcaaactgggtgtacgtcttgtgtttcattgtttattaattattggtgaatatgggcagagttaa

SEQ ID NO: 34986 - protein, 160 aa, DROSOPHILA
MSGGKVKTSNLSKSRHFTVNGLLSANNTFQQQQQNQYNLQPSNDSRNIYNNPYIPPQQQQQQQQQQQQQLQQQTQQRTAHLFKALAASAGGTNSLTHPYDFSNSSSSSNGNNEHQGSSSLEAENAFLTHNNGESLMGNGFKLGVRLVFHCLLIIGEYGQS

SEQ ID NO: 34987 - DNA, 2288 bp, DROSOPHILA
tttccatgctgccgccactgggaatgttttaattaaatccattccagcgttcctgtaaaagtttccccaaaaagtaggcccagcaattgttggccaggcgggcagggcccaaagacatgagcccctaaaccgacccataacaaagccaaccgcagaagcagcagcaacaacatcatctgccgggcttaagagcggagcagccactgcagcaaggaaatagttggccagaactatttaccaggccgccattttcgtatgcagcaagttgtgccataatttcatgccacagcagagaaaacttgtgcggtccttgccaccacgccagccacgcctaataataagaaattagaacttacgacagccactaagactgtccgcagcagcagcggcgaccggaggagcagagcggcagaggagcaggagccaggactataatcgtcttgtacttggctgggtaaggaactttaagctaaccgcaaaatgtcctgccaagtggggatagagccggatggaatgggagtgcagatgggattgggaaaaggattggaagtggaagtggaagtgggcagtgagcaggaaggcggtccagatggaatcgagactgcagactgtagtgtcctagcaccatgccagacgatctcactagaaagggctaagaataatataatgacaatggatgttagcaattgtttccctgttcagttcatacaacgaacaagagatcttaacaatacatttaaatatattgatttaaaattatatttctatttatccatatgcataaaaatgtttttcgttaaaagagtatccacttcggtaccttcgtttgcttcgactgacttgttgtcctcgcaactggggctctaactagcgccaccacaacgacaccaccttcacggcgagtccttcatgggctattcccgcggcgacatcctcgtcgcttctcagatgctgtgaagtgagcgcaacgcattatttaggatttacctttacgttgttgtcagcgtggctgttgctgctgtcgctgatgctgctcctgcttctgctcctggtccttctgctggttccttttgctgcgctgcattcgagactgagccaggacgacctcgccacccccacgacgacctcccccctgtagtgggtcgtttataaaggtggagtcggcccactatccgcctcgtctttgttgtacctcctgaagcaacgacagcgccgttgccgttgtcgttgtcgttgtcgtcgtgctcatgatgctgggtgatgagaaaatgcgaggctcgtgtgacattttcattatcgttctgggatatgcgcttttctgtggccagccttcgacctccgcctagtccgccctctcttcccggcacgccccctttccccgctttgtggacttgtgacaacaagagcagcagataaggttacaaaattattagttgggatttacaatgctccagttttagtggccggtgtgtgggtggtgtgcatctcagtgttcgagtgggcggtttcctgatagctggcttgcaatgaggaaaagtacttgactgaagcaaagtaagaacttcagagtttcacgacaaagcgtagttcgatggcagcgattacccattgcagcagcatcagctcctaactatgctggccaattcaataatcgtaaagaccctcagctgctcggcgattccccaccaaattgccatcaatttgccatctctgctcgctggctgagtgcaatattttccaccagagactgggaaacttatgagctcaaagattaacacaatttcgacaaataatgaaagcgtaatgaaagtagcggcggtccggaagcttccgtaaaggaagtgagcagaatcaaatagacgaataagccatgaggcgaggtggtgaggagtgatggtgggaaggaggggaggcgatattttcctttatcatcacataaattccatttcagcctgataaagagtgatgacgaaggggaggggcagaaatggcgagcgagcggcgaaaaatgcaagcaggaatttgaaaattttcaattacgcgtgcaatgaaaattacaaaaacccacaaaagtcatttttcttgatcgattttttcttcggcgctttttctttcgctcgcccgcaacccatggggttgccctcaaaagaatcggaggccaacaatgacagaacagccggagcagcggggaacggggagcgggtcagagtccttgccacatccccacaaaggtgaaatggcgctaaagctgaggttctgcgcggggggattggcaatggctgtgggcc

SEQ ID NO: 34988 - DNA, 228 bp, DROSOPHILA
atgtcacacgagcctcgcattttctcatcacccagcatcatgagcacgacgacaacgacaacgacaacggcaacggcgctgtcgttgcttcaggaggggggaggtcgtcgtgggggtggcgaggtcgtcctggctcagtctcgaatgcagcgcagcaaaaggaaccagcagaaggaccaggagcagaagcaggagcagcatcagcgacagcagcaacagccacgctga

SEQ ID NO: 34989 - protein, 75 aa, DROSOPHILA
MSHEPRIFSSPSIMSTTTTTTTTATALSLLQEGGGRRGGGEVVLAQSRMQRSKRNQQKDQEQKQEQHQRQQQQPR

SEQ ID NO: 34990 - DNA, 3449 bp, DROSOPHILA
acttgcggttagggcaatttaaaaacgtaaacaaaccgagcggactgaatggaagaactcatgcggggggatcgatgtaggattatgggacgcaggaggtaaagtttgcttggtaccactgtcgaaaaaactggaccacataagtaagtatgtagtgtgtggaatcacatcccattcgggataagcacactgtgtggcgaagggtatcgaactaatgggttgcgtcaacaatgaggcccactgtgcccgcacagtgggaacgcgaatagtgaggccatccccgaacggctcacatattggagcagctcgttacggttcgataaatttatttcctgcctgtgagagacacgtggaatacacgcggcgtatactttatgttcatattttatccgcatgagagtgatgggaaagaaaactggaaaaaagcttactttactaagtcgaagctggtatgccctttaatattatttcattaattgtcaatttatatttttatttacattacaggcttatactgtgtcactcagaaatggaacctaataccattttgtcaatacaaattaaatgcatttggtcgagttacttcgttactcagttgagagattgagttgagatatcttaacagaaaagcgttaaagagacgtcgctttccaatgagcagtattagttaacgtttctagtagtccgtcatgaacacgtcttgaaataaacgtgtggtcgaactttatacaaaattacggacggacggacacgcccagctctatttgttaaaagatcctgatcttctgatcatgtctcagtgtcagttcatgtcaagaacattttttttgaagatgaagtgttcaagtgatcatgaagtgatcgaaggaagtttatcttataatattggcaaatatggtatttgtagccgaaaatagaaatatatactaaattcttatattaattttatagcacaataaaaatgttttaccaaatagggacaacgatatcgatgaagtacttacagactgacgaatgggccgcgcagtgccggcatatcccgccgtcggttgagcggcggcgacagcgacagcgagaggaagtcctgctgggccttgtcctcgtcgacgatgctggtcggggtgctgtagatgcgcgtagttggcagatagccaatctgctgcagaaagtcgtcgcggtaggagagcttggtggtggactgagaggaggtcagcggcagggacagcggggatccatagagcggagccagtggcagggccgctgtcatcgaggccagcgacagaggctgctggtagagtcctcctgcaccgctgccagatcccggtcccgatcccacaccggaacctgatcccgcagctgtgccgttcccatggtggtgtaggtggaggtggtgcggcgtggtggccgcaggctgagtaccgtgaaaatgcggatagggaatgccgtgggtgtaggctggagcgcgcgacaagtacggcgtattgatgatcttgtcgtcgaagctgcgacggaaactaaagcccttcagtgagttgctgtagtttcggtgagaaagcggcgagctgcccaggtcaatgctggccgccgggcccaggatcccggcagttagaccgcatcctgaggaggcggtaacgccgctggccgtcgccgtggcgctacccagcatactcagcgcaggtgaggtgcgcagctgagggctgccgcccactcctccgcctgcaccggaggccgtggtggtcgaggtggagagtggcggcgagatggcactcaaagtggagatgccgctgtcactactacatatgccggccggcagtgacgtgtgggtgggcgagatgaggtgtgggtggtggtgtttgccatttgcggcaccgatgaggccggccatgccgctactgggcagtacgggagccaggatgcctcccgggatgagtttcctgatctgcgcggggctggtcctcgccctgtcctaatgaatgctgggaagctagaagcagcttcctcgcgtctttgtcctcatcgttggcctgcgccctttgttcctggtgaggacttcgtatatcattccttgtgcgtaggaaaatcaatgaagggacgcgcttaaaacatgcattttaagcagcgcttttctcgctttgtaacccaaattgcgcatgaaaaaagtaaggcgaaaatccacacacgcacgcacacactgccacgaactggttcgcgatagaagagggtttttccacggtctgccctcaattgggcctattggattccctttcgcctttcttcgatgcttttggccaggtacgtgcccgtagtctagttaatagcggaattgatttatcctcgacaaataaagcgaacacatcacattttccactttgtgtttttggcagaagcagcagcacggaaaagtcttctttgtccgcacttggctcgaactctccgacggtctgccctccgggttctgaagcggaaaactctgcggcgaagttcagcgattccggggagcgggcaaagcgcatgtgccggctgtggcccgttactgtcccaaaacaaaacaaagcccgagcggagagagtgaaagctaactgcaagcagctggcgtcgtcgaaagttccatccccgaaaatcagtttgtttaccatcctggcagagcttttcatgggcaaagccgactaggcaataccctttgtaaaacaaagcggtgagtttgtataataaatttatttcggcttcttcgtgttagaccagaatacaattgaaatttggaaacaattgttaagtttaaatttagtttacttagtatttttgctttgacttgtacgaacaataaatacacacgcaagaccgtaaaatgtaattattaataattgaattttatatatgtatgcgtgtttatactatagatgagccggcgactctcggatcccggccctagacccaggcgcccaaggacttttatcctggcccggagctgatcggcaataattgatgtcaatgatttagaatgggatactacaatataaaagttaattactgctggactaatcgcattcatttacatttaaaagcgggttaacaatcaaacaaaaattaattagattcaattcaattttgaaacaatttggaatacataaatatgtgcaatactttcgggggttacaattcaacttttgattactcgtatttaattgttttatatatagaggggattattaatatctgttatataatttatatttgcgttaattggatcgcccttcaaagtgtcctcttcttcgtcctcctctgtttaactgtgtgatgcttaattgtttaactcgtatttacatttgcattagaatcggatcggagcaatctgctgggcgcgtcgctcgacaattcatcctttttacataagtagttctggctttaacaatttagtgcaaaataacagaaacaatcggtgaagaggagat

SEQ ID NO: 34991 - DNA, 1449 bp, DROSOPHILA
gagggcagaccgtcggagagttcgagccaagtgcggacaaagaagacttttccgtgctgctgcttctgccaaaaacacaaagtggaaaatgtgatgtgttcgctttatttgtcgaggataaatcaattccgctattaactagactacgggcacgtacctggccaaaagcatcgaagaaaggcgaaagggaatccaataggcccaattgagggcagaccgtggaaaaaccctcttctatcgcgaaccagttcgtggcagtgtgtgcgtgcgtgtgtggattttcgccttacttttttcatgcgcaatttgggttacaaagcgagaaaagcgctgcttaaaatgcatgttttaagcgcgtcccttcattgattttcctacgcacaaggaatgatatacgaagtcctcaccaggaacaaagggcgcaggccaacgatgaggacaaagacgcgaggaagctgcttctagcttcccagcattcattaggacagggcgaggaccagccccgcgcagatcaggaaactcatcccgggaggcatcctggctcccgtactgcccagtagcggcatggccggcctcatcggtgccgcaaatggcaaacaccaccacccacacctcatctcgcccacccacacgtcactgccggccggcatatgtagtagtgacagcggcatctccactttgagtgccatctcgccgccactctccacctcgaccaccacggcctccggtgcaggcggaggagtgggcggcagccctcagctgcgcacctcacctgcgctgagtatgctgggtagcgccacggcgacggccagcggcgttaccgcctcctcaggatgcggtctaactgccgggatcctgggcccggcggccagcattgacctgggcagctcgccgctttctcaccgaaactacagcaactcactgaagggctttagtttccgtcgcagcttcgacgacaagatcatcaatacgccgtacttgtcgcgcgctccagcctacacccacggcattccctatccgcattttcacggtactcagcctgcggccaccacgccgcaccacctccacctacaccaccatgggaacggcacagctgcgggatcaggttccggtgtgggatcgggaccgggatctggcagcggtgcaggaggactctaccagcagcctctgtcgctggcctcgatgacagcggccctgccactggctccgctctatggatccccgctgtccctgccgctgacctcctctcagtccaccaccaagctctcctaccgcgacgactttctgcagcagattggctatctgccaactacgcgcatctacagcaccccgaccagcatcgtcgacgaggacaaggcccagcaggacttcctctcgctgtcgctgtcgccgccgctcaaccgacggcgggatatgccggcactgcgcggcccattcgtcagtctgtaa

SEQ ID NO: 34992 - protein, 294 aa, DROSOPHILA
MAGLIGAANGKHHHPHLISPTHTSLPAGICSSDSGISTLSAISPPLSTSTTTASGAGGGVGGSPQLRTSPALSMLGSATATASGVTASSGCGLTAGILGPAASIDLGSSPLSHRNYSNSLKGFSFRRSFDDKIINTPYLSRAPAYTHGIPYPHFHGTQPAATTPHHLHLHHHGNGTAAGSGSGVGSGPGSGSGAGGLYQQPLSLASMTAALPLAPLYGSPLSLPLTSSQSTTKLSYRDDFLQQIGYLPTTRIYSTPTSIVDEDKAQQDFLSLSLSPPLNRRRDMPALRGPFVSL

SEQ ID NO: 34993 - DNA, 2892 bp, DROSOPHILA
gcacacagacacgggaaaagctatggcctagctttggggcagtcaggaattgagaccagagcgagctattaaagcctcaaatttatgcataacacaaaattgcacattttatgcttttcaacctgaatggccatggaaacaaacaaacacacattccttttcaattaaaattaaaatgtctgtcggtggtggcaacaaggcgaacgcttctccaacacacacctccacacctacccgcaggtggactttgatgtggatgtgtctgtcaagcatttgaatgctcccatggaatcccaaccccactctgcttcttttcggtcctcttttgagcgtacccaaaacgattcacaaaatgccttttcaaaaattcaacaaccaacaacgagctctgccatcgtcgtcatcgtggccgtcgtccgatttgcataatattattagtaaacactcgttatgaagtcagccacgcccaccgaccaccggccaccgatgtccgcccctcatacaaatgcagacattcgctagatttagattttcgactgggcataaaatatatatatatttgaccgcagcgcaagtccccaggatctccctgcaaccacctatttataaacacaaatttattcagcgtaattaaaacacaaaatttcgcagtgaattcactggggactccaggagtaagcaccgcgtgagcgtgagaatcgggaggagtgggtgtggaacctgctccagagcttcattgttccgcaattgtcccggggttaaacttgtgagctgtttaccctgtctcctttgaatctctgtttcgaaaatgtttttgctttgattaggatttttgataatgttatttggctcttggaatgttactattgactcttttaaaagtacattataataaaacggataaattacacttaaggtaaacatggctttgagaattacctattttaattttgttagtttgggatacaaatacgagttatttgagtagaatttctgtagcatgtgggctgaaatcagtgacggtacaaccctatgtcagttgtccttggtgtgggtcctttaccttttttgttgcactgtcaacggcataaataaaattttcaatttcctcgctggctcctccgtctcggaaggacaacagccgaaaaagcgttggaaaaggagaaaaatgtaattaatgtcgtaatttattatatacagatctagagccgcagccgctaatgtttgccatttccttctctttatcaccccacagggctccgagtttctcgagggctacagcataaatgtgaccaaaacgtacaagaagcaccgtcggtgcaaacccaagcggcccctggccccgcccaccgagcgcaccgccccgccacccgcgtccgacctcagcgagctcccggtgctgcacgagttggacaacaacaacatcatcgagggagcggcgcggagcagtcgcagctcggcgaccgacgtccacagcctgagccgcgggagcggtcgccacttcatcagctgcctgctctggctgggcgcctcgtcctggtggctcctgctaatgctaaggacgtgaggggattgaaagggattcggcggcagacgaagcaacagcagcagcaccacaggcaccaccgtctcaatacactaaactaaccgtacagctgaagtgcagttgaaaatcagtgaaaagcgaaaatagggtactgaaatagcaaacgaaactcaactacagctctctctctctctctttaactacaaatgacatctcttaatcctactacagatacagatacaaatagaagcagaatgaaaatgcgcaaaagaggaaaacatgaaatattcataataagctaacgtataacagcttttccagacccccaaccccgtacacctgctagtccctaacgcccatttatttatgctcctccctccacagttttgttgattttgttctagagttttagtaaattattaatgatttttttaagtagtctaagctgcaaacaaaataaaaacaaatgtcaaaagcaaaaactaaatcaagaaaatgaaaaaaatggaaaaataaggaaaacaatgtcgagaaaaaccgaaaagcaataattagttgttgttgtcgttataaaatatacaaaatgcgaaattgtaaaagatacagatattatagatatacaccgtggctacatatatagcagtcattccttcaaacataatggatataaaccatacacctatatttatatatctatgtatacatatagggactgacttatgtaaagcttgagcgtctgatgggttttgttgggcattgcaagaaacaatcgtagaagggaatggcatcaagtggcaagtagaggagcgtgcatcaggccattcatccctcccccggttaagtttagtccgatctactaggtggaactaagttcgagcggaattatacatactcaagcaaacacacaaacaaagacataagcatgcatcatctttatacgtccatttaagagaagcaaatcgagagagatagaaaggatttggttaaacgtaaatttaaaaaagacttgggtgaatttactctgttttgcaaaagactaagaagggaaattaattaacggaaagcgagagctaactcacacaattcaatttagtaatttagggtgatttaaaggcaagttccaacaaggacgcaaataaacggatacattttgacacccgattattcgtttttgaaaacgctgtcaactgacaactatccatttaatctgactacaatttgcatgtatcttattccttttcgttaacctattcaaatgacactacactcgcgctttatgctaagttttattcagttacctaatgcaaatctacctgctctttcaactacaaaacgaaattaaggaa

SEQ ID NO: 34994 - DNA, 381 bp, DROSOPHILA
atgtgggctgaaatcagtgacggtacaaccctatgtcagttgtccttgggctccgagtttctcgagggctacagcataaatgtgaccaaaacgtacaagaagcaccgtcggtgcaaacccaagcggcccctggccccgcccaccgagcgcaccgccccgccacccgcgtccgacctcagcgagctcccggtgctgcacgagttggacaacaacaacatcatcgagggagcggcgcggagcagtcgcagctcggcgaccgacgtccacagcctgagccgcgggagcggtcgccacttcatcagctgcctgctctggctgggcgcctcgtcctggtggctcctgctaatgctaaggacacccccaaccccgtacacctgctag

SEQ ID NO: 34995 - protein, 126 aa, DROSOPHILA
MWAEISDGTTLCQLSLGSEFLEGYSINVTKTYKKHRRCKPKRPLAPPTERTAPPPASDLSELPVLHELDNNNIIEGAARSSRSSATDVHSLSRGSGRHFISCLLWLGASSWWLLLMLRTPPTPYTC

SEQ ID NO: 34996 - DNA, 4340 bp, DROSOPHILA
caccattaaaataattccctatcctgaccatatgggtatcagttaaactatttagataaaaaaaacatattttttgaagatgagaatacaatttatcataacaaaaaagaagttaacaatgaatgcattaaaaatataattaagcggaagaatccaatttgaaattatatgccgactccctcaaaggaaattatctagtacgttgaaccaaatattatacttacatacaatctctcaaaataaacaatgtaaaataaagattggaaatgctattttaggcgaaaattaatgaatcgactaaccttcttatacatccccagtctaaatttggaaaacaagacaaagtaatcaagaaccactacaagaaatagaaccggcacaaaactagttgcctaccctgtaataccagcccaagcattataatttttaagagaggagaagggatacacataattagcactgtccaaagaaataagaatattcttaatatcaatataccaagccggcggtctcgctctcgaaataatataaacaactgggcaatgagtgtcctattcacataatcccacgccagtgtacatcacatccgctaattgctatcgataatactgtctatgtcaaaataatgtaaacaaaagggcagtgtaagaaagatatttgtcactaacatttagtcttaaactgtgatcaaaagaataaagacgttatccttagtcaactgacgggacattagttccactcaataaacacaagcatttcactatatatatttttataattctttagagagttttctttagacgagttttagaactcgtctatcgttcattatggaatctgttcgttctgagggtgacagttactcaatcaaactaaggtcgaacatttttgaattttatgctgttcatggtgttcctatcatcatcgttcctaataattataatattaaatttgtcgacatgcatatatatgtatatagttttcattctagacctctggtcacattaactttatctgaatatatatacacaattttataacttatgctagaatggattttaataatgacttatcgcctattgatattttgacatttataacagatgaactgttgcaagcatacaaaagcagtaaaggagaaaatgaaaaggctgggacaattgtcaagtttcttgaccgatggaatgacgatatctccattgcaaaactcaaggatctcactgttgaatttgaatcaggtaaaaggaaattatagttatcaatgcttcatattattaattgctttacttcagatttagagtggttcaatgtaagttgccccttatcgataaaaggactgcaaggaaaagttatcatattagactttttcacatattgctgcattaattgtatgcatgtgctgcaagagttgcacttattggaagaacgctttccaatagaaagtggtgttgtagtaatcggtgttcacagtcctaagtttgaaaatgaacgcaatgcggcaaacattctgtccgctgtacaacgatatggaatatcacatcccattgtcaatgattcacgatctggaatgtggcgcgctcttggaattcgttgctggccttctcttttgattctaagcccgactggtgttccgatgatgttattaatgggtgaagggcatggaaaattcctacaggattttttttcttctgccctatcgtattttagccgtcagggtataattgaccataggggtttacctttaaaattatttaatgactttcaaccagcatctaacttgcgttttcccgcaaagattgttcaaggccctaatggcctgtatgctattgctgatacggggaacaacagggtgcttgtgcttacagcaggcggtgtggtacagcacagaattggaggacaccagcctggtttcgtggatggagacctaacagtggcacggtttaataatcctcaaggcattgcgtttcttaatgaaaacgttttgattgtagcggacactaaaaaccacgccattcgtcagatctctctaacaaatgcaatggtggaaactcttgctggcacaggaattcagggaaatgatcgaataggtggacgtctaggaccattgcaaccactgtcgtcaccgtgggatgttgccatatttcgaacgagggacatggatatgtcctttcatcttgatgaacgtaacataccagaaaaaacaattatccttatatccatggcaggcacccaccagatttggggctattttcccgaaggaattatttggtggaaatttcgtaaatttgagccttgttgctgtgtctcactaataggaaatggtttggaagagaaccgtaataattcttacccacagaacgctgcattcgcacagccatctggcctggccatagcgggagacgttttatatatagctgacagcgaaagctctagcatacgcaaagcttctatgatagatggaaaggttatgcctgtcgtcggaggagatcgaaacccacttgtatgttccatgtcatgaatatgagttatatagtcttcaaaattaatgtatgatttttctagaatttatttgcatttggcgacattgacggtagactattcagcgcgaaactccaacatccgttaggagtgactttcaatgataccaataacaaactctatgttgctgatacctataatcataaaatcaaaattattgacatcgattcaaatgatatatctactctacaaattaagagccaagaaaatactaacctgattttaaacgagcccgccggactgtgcttggatgccagcggacggaatttgttggtagctgataccaataaccattcaatacatacaatagatttggtaacgcttatagcacaaccgtttggcttagatttcagacaaatagcgtccgctagtgaaattgatgcgccacaagatacacaaaagcctacggaaaataatatagttaaagcattgcctcttgatttaattaaaccaagtaaaattttttttaaccttcggctttcgcccagatttaactttacaaaggaagctcctcaaaaatggatagtgaaaactgtatgtcaatctgtaatagtaaatccaacgtgcggaaatctacttgatgggatgtgccacatgcaggtgcaggctactaggcctgattttatgtgtgaaagcagtcaaatatttaccatcgaattcgtattaaatttatgcctttcaaattgttgcctagtaaaaaaaatcacggtttctataaaacgcgatgacatacaagaagaatatatatccatccacaacgtaaatattgacattgaacaataaaaaatgttttgatagaaaagttttgcatatatccataataatgtttcggtatgtacatttatatcctttactctcagtgtaaatagttcgaatgtttgttttaaattaattataaccgcagagtataaacaaagatactagaataacaagatgcgtaacgccaaagattttttggcacacgattttttcgttgtggctctagaggtggatccaggctctctagaatttttgttcgagagcggagagcgttacagctcctttctacgcatacagtgacagcagacaactgtatgtgtgcacacgtatgctcatgcattgtgaatttgacaaaatattcccttcaccttagaagtttttaggcttaaatctatattatttttgatcaattggcacgttattattatttaaatatagctgagaaatagtaatagccgaatcataataacacaaaataaatttcaaaatgactttatattagaatatttatagagtattcagcaaagcaaagacactagaataattctagtgtctttgatatgacttttgcaataaacagttttcatatttttttttattttataaatttataaattttttttataaatttattcgtattatttttatgaaatatttatttttcaatgtaatgtcttctttttggaaaatttatgttttaaattacagtagttatcataatttcctttgtatttgctttaattattttatatttataaagtcatttgacttaatatgaagtatgtaaatgatccaattttattatttaaaatgcacattagattcagttgtttttcatattcatttttttttttttgtattccaatttgatatagatataatatatagatataaaattccgatttaatatgatatgatgattttttgtatcggcatacgtattttgacaagcctttaatgccaaaaaaggttaaacgtacattaggagtattgaaacaattaataaaatatataccctcctttggcacaaataactttttgta

SEQ ID NO: 34997 - DNA, 2224 bp, DROSOPHILA
cacattaactttatctgaatatatatacacaattttataacttatgctagaatggattttaataatgacttatcgcctattgatattttgacatttataacagatgaactgttgcaagcatacaaaagcagtaaaggagaaaatgaaaaggctgggacaattgtcaagtttcttgaccgatggaatgacgatatctccattgcaaaactcaaggatctcactgttgaatttgaatcagatttagagtggttcaatgtaagttgccccttatcgataaaaggactgcaaggaaaagttatcatattagactttttcacatattgctgcattaattgtatgcatgtgctgcaagagttgcacttattggaagaacgctttccaatagaaagtggtgttgtagtaatcggtgttcacagtcctaagtttgaaaatgaacgcaatgcggcaaacattctgtccgctgtacaacgatatggaatatcacatcccattgtcaatgattcacgatctggaatgtggcgcgctcttggaattcgttgctggccttctcttttgattctaagcccgactggtgttccgatgatgttattaatgggtgaagggcatggaaaattcctacaggattttttttcttctgccctatcgtattttagccgtcagggtataattgaccataggggtttacctttaaaattatttaatgactttcaaccagcatctaacttgcgttttcccgcaaagattgttcaaggccctaatggcctgtatgctattgctgatacggggaacaacagggtgcttgtgcttacagcaggcggtgtggtacagcacagaattggaggacaccagcctggtttcgtggatggagacctaacagtggcacggtttaataatcctcaaggcattgcgtttcttaatgaaaacgttttgattgtagcggacactaaaaaccacgccattcgtcagatctctctaacaaatgcaatggtggaaactcttgctggcacaggaattcagggaaatgatcgaataggtggacgtctaggaccattgcaaccactgtcgtcaccgtgggatgttgccatatttcgaacgagggacatggatatgtcctttcatcttgatgaacgtaacataccagaaaaaacaattatccttatatccatggcaggcacccaccagatttggggctattttcccgaaggaattatttggtggaaatttcgtaaatttgagccttgttgctgtgtctcactaataggaaatggtttggaagagaaccgtaataattcttacccacagaacgctgcattcgcacagccatctggcctggccatagcgggagacgttttatatatagctgacagcgaaagctctagcatacgcaaagcttctatgatagatggaaaggttatgcctgtcgtcggaggagatcgaaacccacttaatttatttgcatttggcgacattgacggtagactattcagcgcgaaactccaacatccgttaggagtgactttcaatgataccaataacaaactctatgttgctgatacctataatcataaaatcaaaattattgacatcgattcaaatgatatatctactctacaaattaagagccaagaaaatactaacctgattttaaacgagcccgccggactgtgcttggatgccagcggacggaatttgttggtagctgataccaataaccattcaatacatacaatagatttggtaacgcttatagcacaaccgtttggcttagatttcagacaaatagcgtccgctagtgaaattgatgcgccacaagatacacaaaagcctacggaaaataatatagttaaagcattgcctcttgatttaattaaaccaagtaaaattttttttaaccttcggctttcgcccagatttaactttacaaaggaagctcctcaaaaatggatagtgaaaactgtatgtcaatctgtaatagtaaatccaacgtgcggaaatctacttgatgggatgtgccacatgcaggtgcaggctactaggcctgattttatgtgtgaaagcagtcaaatatttaccatcgaattcgtattaaatttatgcctttcaaattgttgcctagtaaaaaaaatcacggtttctataaaacgcgatgacatacaagaagaatatatatccatccacaacgtaaatattgacattgaacaataaaaaatgttttgatagaaaa

SEQ ID NO: 34998 - protein, 717 aa, DROSOPHILA
MDFNNDLSPIDILTFITDELLQAYKSSKGENEKAGTIVKFLDRWNDDISIAKLKDLTVEFESDLEWFNVSCPLSIKGLQGKVIILDFFTYCCINCMHVLQELHLLEERFPIESGVVVIGVHSPKFENERNAANILSAVQRYGISHPIVNDSRSGMWRALGIRCWPSLLILSPTGVPMMLLMGEGHGKFLQDFFSSALSYFSRQGIIDHRGLPLKLFNDFQPASNLRFPAKIVQGPNGLYAIADTGNNRVLVLTAGGVVQHRIGGHQPGFVDGDLTVARFNNPQGIAFLNENVLIVADTKNHAIRQISLTNAMVETLAGTGIQGNDRIGGRLGPLQPLSSPWDVAIFRTRDMDMSFHLDERNIPEKTIILISMAGTHQIWGYFPEGIIWWKFRKFEPCCCVSLIGNGLEENRNNSYPQNAAFAQPSGLAIAGDVLYIADSESSSIRKASMIDGKVMPVVGGDRNPLNLFAFGDIDGRLFSAKLQHPLGVTFNDTNNKLYVADTYNHKIKIIDIDSNDISTLQIKSQENTNLILNEPAGLCLDASGRNLLVADTNNHSIHTIDLVTLIAQPFGLDFRQIASASEIDAPQDTQKPTENNIVKALPLDLIKPSKIFFNLRLSPRFNFTKEAPQKWIVKTVCQSVIVNPTCGNLLDGMCHMQVQATRPDFMCESSQIFTIEFVLNLCLSNCCLVKKITVSIKRDDIQEEYISIHNVNIDIEQ

SEQ ID NO: 34999 - DNA, 2405 bp, DROSOPHILA
tcagcgatgagtctgcgacacttgacgacaaacattgtcacgctttatgccccaaaacccccttcaacttgtagtgcttgcggggcacggggctcctgaccaaatcccccaccccacccacttgggggcgataaaattttgttgcctagagttacgctcaacgattgtgttcattgactttggtctaacgattttgttgagtaggctaatgtgtcaggacgggccctatccctattgtagccactttatggtggcagatttcggaagtgcgactttcggcggtgggagccaatgccagtgcgtgcggactggggcttatcaagcttatcgtccaataattccccgatagcgcattgcgcacattcgactggcccccatgaatcagccgttggatccgtgagcgtgatttgataactggcattttggcttcatctgcccgcctccgcgctccgaacgtgacattccaaaaagtacgttctagacgaagggtagggtatctggcgaggttcttcagttttgacagcagtacagcatagctcaaggtactcaaaaactgtaaatattataacaatactctctaccgtgagtatacagctcttcaaatatgtgaaaaaccattgtaagccattcaaattttctttaaatatattctgtaaattcccttaaactttcactttccccgtagtcatttcattggtcgctacaacaaatcagatgcattgcttcattggtttttatcaggttcttaaataacctattaataaaagcacacacaccaacatattatttgtgtgtccatgggtttatcaaagtcaaattggtatcgctataaaaacacggcacttggcgcccaacatttagttgcagagattctgtcgaacacacaggctctgtgcagtgcagggaaactaatagtattaattaaagtcattgaacatgccgtagctggcgaataaattataataattgacagtgcgagcgataaattaagcagcaaaaaatgccgaacattgtcgcactaaagctgagcgccagctatccgctgatgccgggccacaaggacgagggcaatatccttgcgctggaccaattggcgctgcagcagcaaatcagtgcgaacttcattttccatgcgatctcgaactacaagaaaacgccatccgagcgaaaaacgctggtcttcattgccaaaaaatggctgcacatccagatgctgtggcgcgagttccggctgagggataagcaaatacggcggcttggccacaaggatgcacgcgttctggagcacggctacttccagcaggaactcttcgagctggtccacgaaaagtatatggttgtccgtggattcctgagtcgtgacaaaagaaatctgctcgctggtcagccagcaacacggccataatgtttattcagacgacagtcgacggtgacaaggcggcgcaagaacgcttcacacaaaagcgaaaaggagccggcaggaaaaggatgagccaaaaaggatacggcgacacgtgaaaacttattcccctgaaaaaacaccattcgattgtgtgtgtgtgtgtgtgtgtgtgtgtggcctgcactgagtcaacagttcgattccggctccgagatgatatccgtcaacagcgattccatttccattccccaatgccaattcgaatccgaatccgaatccgaatccgtatccttccaataacaatcccaatccaatgggcaatcaatctgactggactctggacgccatctatgcccaatcccaatgattgattgcactcggccatgattaccacaattattatgatttgccaaaaggttatacaagtcacgctgatgacggcgattggggcgaccgccgattttggccataggcactttaactgcttgaaggcaccttgaaatttaaataaagtatcgaacttataccacttactaaaaatatgatcaattcgatggggaattcctagtcgactggccgaaaacacttgacgattgtctcggtcaaatcagcgattagataagtcgtgccttgggaattccgctttttaacggggggaaatgcctttgccaattagggggatagcccgcagctgtctgcggggcaaacttaatttactgtccggaattattctgttttggccagcttctttgagcacggaaatcaatttccctggccaagtgcagcgctacacataacagctaataaaaattggccgcacacaaaaacaaactaattcgataatttgctttagatggccaggcgaatgagcaaagggcatcgcaagttgggtgtttagccacgttcttggcattcgcactgctttgggccatgaccatcggcttatatctaatttagcgcgattaagggagagccggcaaaaaagcggcgaaacaaaatcgag

SEQ ID NO: 35000 - DNA, 405 bp, DROSOPHILA
atgccgaacattgtcgcactaaagctgagcgccagctatccgctgatgccgggccacaaggacgagggcaatatccttgcgctggaccaattggcgctgcagcagcaaatcagtgcgaacttcattttccatgcgatctcgaactacaagaaaacgccatccgagcgaaaaacgctggtcttcattgccaaaaaatggctgcacatccagatgctgtggcgcgagttccggctgagggataagcaaatacggcggcttggccacaaggatgcacgcgttctggagcacggctacttccagcaggaactcttcgagctggtccacgaaaagtatatggttgtccgtggattcctgagtcgtgacaaaagaaatctgctcgctggtcagccagcaacacggccataa

SEQ ID NO: 35001 - protein, 134 aa, DROSOPHILA
MPNIVALKLSASYPLMPGHKDEGNILALDQLALQQQISANFIFHAISNYKKTPSERKTLVFIAKKWLHIQMLWREFRLRDKQIRRLGHKDARVLEHGYFQQELFELVHEKYMVVRGFLSRDKRNLLAGQPATRP

SEQ ID NO: 35002 - DNA, 2811 bp, DROSOPHILA
actcgtaaccacttcagccattccaccctcgatgtccttcgaaagttagttacggactggctttagcgtctgtatgataagataaagctttattctgttcgcggttctttgtgactgctctgttggctgagcagattgcagctgtctccggcatgtttcagaactgcattctgaggtttcaacatcgagctcaagatagccgaatcacatgaggatgtggggctgcggttgagggactccctttatttgtcataattggtttatgaccttgccaaggcaagaacttcggacatttgtcttccagctcgtcatcctaagcgaatgtaattgcgataacagtttaataagaagaattacattacatttattttaggctgaaagttcaacaatatattaaagcctaagttcttttgaacagaccgaagtattagtcgttggagttaccccagatcgtaatcaagaccatggtttttcacaagcattgacatggtcattttttaaatagattgaaaacctgcagattcagtcatcgattgctgtgggattttttttttttaacaacaataacccgtaatcaatagaattataaaaacgttgagattgatttataatcagccgtgattggcacgcgatctgttctatcaataagaacccctaaccaaagtacgctttggttattttgaatgtttcgttttccaaatgaaagtatcccaaaatagaacaactacaaggaagtatataatacttgggttaccccatatataggcactagttgagctccttgtctaatagattaactatctgcggttattgccgagagctataaaccttaatcgaacagcgtcatggacctagactcctgatagagaagctctgatttacaacttcggagccagccagtcgcatggtcgcctcgataaggcccagtgctgggatcacttggctttggctataaaagtcgaggtctcgaacggatttggtgttagtgatcacagtgagaatgaatcgtttgctattgagtgtggtggcgctggtcgccctggctgcttcctgccatggaaatccgggactggacttccccttcggtcggattgtgaacggcgaggacgtggatatcgaaaactacccctaccaggtgtccgtccagacgaccaagggctcccacttctgtggcggaagtctgatcgattcggagaccgtcctgaccgccgcccattgcatgcaatcctacgccgccagcgagctgcaggtgcgagtgggttccacttccaggagctccggtggtgaggtggtcaccgtccgcgccttcaagtaccacgagggctacaacagcaagttgatgatcaacgatgtggccatcatcaagctgagctctcccgttcgccagacctctaagatccgggccatcgaactggccgactccgaggccgtttccggaaccaatgccgtggtctccggctggggcaccacctgcttccttttctgctcctcccccgacacccttcagaaggtggaggttgatctgctgcactacaaggactgtgccgccgacacgtacaactacggcagcgactcgattctggagaccatggtctgtgccaccggcgagaagaaggacgcctgccagggtgactccggtggtcctttggtcgcggacaacaagcttgtgggcgtggtttcctggggcagcggatgtgcctggaccggctaccccggcgtctatgccgatgtcgccagcctgaggagctggatcgttgacaccactgactcgttgtaaatggaaataatataatataatgcaagagtatttcaagacatttgtgtataagcatacattgcgttgatgctttaatttcctagctgcttaaatgggtactgggtacaccacaagtcctggtaaacaatactttattttaaatagaatcaatcgatttcttaaaaccagccagaattcattatatttttcgtacgttttttatactgctctgcaagtctaagtcattgcaattatattagccaaaccaaaaaggccaagtcagctgtggtgatgtgatacaaattgagaccactttccggtcaacttttgtataaaatctgtcaacaaacaaaatgttgaaatccattttggccagactggaaagtaactcaagaaccccgacctgttgctgcacaactgatttgctgtcatcgcgatttctgctagactagccacacacacacacacacacccaggcgccaggagacaccacctcctccgcaatcgggccagactggaattttgatgaaaaatgtatttagatactagataaagttggggatacgtgtgcgacacagggccatgcaaataggaacatgctcgtgcttttggccagaaaagcaattcatgtttcgccgcccattttccattttgtctaaccgccttcgtcggtattttattgcttggctcgatcttgcttttgggggcgtggccagtggttgttttctataaagctgttaaatacttaagtgtaatttatggcatgcgatattattcggctgtgtgttgtcatgtttgcccaaagttttacatatgccaagcccaaacttaaacgagcgaggataagctcacaagggcagagccatgaagttgtatgcccaagtatctggtgagtaatatgctggggcgtcaacagacttacacgaatttcttatgaaattgttgtggccaccacatgtgtgtgtgtgtgtgtgtgtgtgtatatatggcttgtatatgtatgcatatgtgtgaatatgtacacatgtatgcccgagtggccaagtttgtcaact

SEQ ID NO: 35003 - DNA, 811 bp, DROSOPHILA
atgaatcgtttgctattgagtgtggtggcgctggtcgccctggctgcttcctgccatggaaatccgggactggacttccccttcggtcggattgtgaacggcgaggacgtggatatcgaaaactacccctaccaggtgtccgtccagacgaccaagggctcccacttctgtggcggaagtctgatcgattcggagaccgtcctgaccgccgcccattgcatgcaatcctacgccgccagcgagctgcaggtgcgagtgggttccacttccaggagctccggtggtgaggtggtcaccgtccgcgccttcaagtaccacgagggctacaacagcaagttgatgatcaacgatgtggccatcatcaagctgagctctcccgttcgccagacctctaagatccgggccatcgaactggccgactccgaggccgtttccggaaccaatgccgtggtctccggctggggcaccacctgcttccttttctgctcctcccccgacacccttcagaaggtggaggttgatctgctgcactacaaggactgtgccgccgacacgtacaactacggcagcgactcgattctggagaccatggtctgtgccaccggcgagaagaaggacgcctgccagggtgactccggtggtcctttggtcgcggacaacaagcttgtgggcgtggtttcctggggcagcggatgtgcctggaccggctaccccggcgtctatgccgatgtcgccagcctgaggagctggatcgttgacaccactgactcgttgtaaatggaaataatataatataatgcaagagtatttc

SEQ ID NO: 35004 - protein, 258 aa, DROSOPHILA
MNRLLLSVVALVALAASCHGNPGLDFPFGRIVNGEDVDIENYPYQVSVQTTKGSHFCGGSLIDSETVLTAAHCMQSYAASELQVRVGSTSRSSGGEVVTVRAFKYHEGYNSKLMINDVAIIKLSSPVRQTSKIRAIELADSEAVSGTNAVVSGWGTTCFLFCSSPDTLQKVEVDLLHYKDCAADTYNYGSDSILETMVCATGEKKDACQGDSGGPLVADNKLVGVVSWGSGCAWTGYPGVYADVASLRSWIVDTTDSL

SEQ ID NO: 35005 - DNA, 2258 bp, DROSOPHILA
cttataataacatatatacacaattgaaagtttagtccctttcttgacttaaaatagctttagaaacctcagcattgccatccgccacctggcaaccctgtgcaacccactccgctttgggccacggcagctgacagcgaacagtgagggttgcggtctcgttcagttcgccgcgcggctccggcagttcgctttctgagtgagtctcagattcagattcggttccagtctcagttccgagcaaacttcggcggggagcagaaggagctgtggagcccgagcaggacataaaaatagacacgaagtactgaaacaataactcgaggcggcgagctagtgtagaattttttacatatagagttacgaggggaggaatcaggaagtggcggataattaaggacaaaaacgcaatttcaattatcgttagtgtaatcttgaatgtgaatttaaatgtgaactgtgagtgcacgatattcggcaatttttgctagacacttagatactctggatgtggtgtactttgtcccattgcatattagttagtgtggcctaatcaactatatatatgtatatatatatacaaatataattaaattgaacggtgtacacatgtgtgttgttgtgcaagtatttttgctaaatttattaaattgatgttgaatgtatgcttttcgaacgctcgtgcaattattgttatctgaataaagaaactcggaccgctttaatatgacaaaggactagaaatcggagtcccttttcccaaaaaccgtaagggagtaagaccatttgcctttgtcacggggtgtgtccaaagcgggggctaggaagtccttttacataagcataagggcaagctgcaaatgggacagccacctgcggctacaccgcggctactgaacgctggagtccctcgctttgttcgccgctgagtgctgcgtgtccgtgcaacgtgactgtccgattgtgtcccggatatgcaaagaagtcccacatcccgacaatggcacacttaaaactggacaccctccacgtgcagcgaagccctcgcggctcccgcaggagcagtccgagcagcggaagaagcagtgcctgtagttccggtagcatttccccggtgcccatcatacccatcatctccatcagtcacgatggcgacgagtccgagtcggagtcggaaatcgaaactgagccggcgcgcctcttccagcgccgcatgtccaccaagtgcaccaacaacctggtaagttcaaagatctagtcgtactgtacactaatacaaattggtattagttttatagtcatggagatttcgtttctgaaacgcttgatttgcaacagtgatgcagcataatacagtcctaaatatgtttgccttatcgaaggatatgaatatttaacaaatatgtcagtaattatttctgcaacttttctgggtgtgtcaggagtcctgcggctttgtcacgggaccaaccatggtggtgcaccggagcgtcctcgccaaagtttctggagcggaagttgaatgcaaaggggcgagcagctgcgggcggccgctttatatgcgagttgcgtgtgtcgagagtttatgtttcaagtacctcggcgagctataccactgccaaaggtcagaggcgcagttcaagaagtcggtaaaatattttagattgctttgcagattgcttcgccggcttagggggcgcccatttcaatcaccatttaagtgcattattaaaatgtaatacgacactgtccacatcgcccgaaatgaattagaattgtatcgacttgcgactcgcagcggcacaaaaaaaaatgaaggtcggcgaattttaattaaacgttgccatagttccccggcggccaggtttcgcgaataaaagaatcaaaatgatggaaaagctaaagaagggcaagccccaaaactccgcgaagcccgagaaaagcttcaattaagttctttatgccttggtgtcactttgtagcgtccaaggctcgccgctggccgcctatgaacaatgttccagttcccgggttgctggccatttgatgttaattatacgcatcgctgcgctgacccttccgcccaactttggcctttgccaacccattgtatttttatccagctcccgatgaccccaccgcccgagtttcggccaccgttacgccaattcgtctgtccaactgcaatatatgctttaagcgaaggcatttcttatttgtgatttatagcagtcgggagctgggcaaaacacatttgc

SEQ ID NO: 35006 - DNA, 258 bp, DROSOPHILA
atggcacacttaaaactggacaccctccacgtgcagcgaagccctcgcggctcccgcaggagcagtccgagcagcggaagaagcagtgcctgtagttccggtagcatttccccggtgcccatcatacccatcatctccatcagtcacgatggcgacgagtccgagtcggagtcggaaatcgaaactgagccggcgcgcctcttccagcgccgcatgtccaccaagtgcaccaacaacctggtaagttcaaagatctag

SEQ ID NO: 35007 - protein, 85 aa, DROSOPHILA
MAHLKLDTLHVQRSPRGSRRSSPSSGRSSACSSGSISPVPIIPIISISHDGDESESESEIETEPARLFQRRMSTKCTNNLVSSKI

SEQ ID NO: 35008 - DNA, 2808 bp, DROSOPHILA
ggtgcagatggagatggggtttagtacgcatataaaaacaagagagacattagaaattgcgcaaggcgttcgtgtttgaacattgatcggccatcgtgaaaatatatcaaggtcagctagttgacacagaaaccaaacgaatcagctaactaacattaattgatggatctgtgcgttccaagtcgggcaattcaatagccttccagcacgggggaattatctgcactccggatttgcataagaagtggttgaaaattttaaatgaattcaattaagctatatattatatgcattttatttattatttttgattgcccaaaaacacgttttcattcacatgctaagtatggccctaaaactcacgaataacggtaaacggaatgcatttaagataccaatgccagcattgtaattagttcaacttgtaacgaatcaatatgtattcatatttcagaactcggtcatatttccacttgctggtcagagtctcagaaaaacaaattcatgtttcgcgccaataaaatgtgcagcaagtagcttttgtaagacttcgtcaaaacgcatcggaaagatactggataaaataccgatatgaactctaataaggcatactttataaatattttaaattatatgcatataagcttctttttaacaattaaaaaatattcaaaatgcacagatagctgcttaattatatagcaaatatgcgtacatcaaataccataaatccgagtagtggaaacaagttattagcatattatataatggctattttggaacaagctagtttttcccaaatactaaatcaaaaagatatacatgagatgcaagtcctctttgtaatgatataaagaaatataaaattatagacggacttaatacattcactgttatctgtgctgataactgttccatttgaatttagtggcaaaccaccacaactgtttgaccacttgagactaacccgtttcaccatctggtaacacctggtcgaggaatggagcccaaagtgacgatccacagatattatagccggcaagcgaaatatgaaggagccgtggaagcggacttggaactgtgcatcaagcactgcggcggcgacgtggttcgcatcgaactggtgaaccggctgcatggaatccaactgcagcgcaagttgcgtcgactactgctgctcatgttcctatctatcgcttattttgtggggacctgcgggtttgataacagaacgattagtttcctgcagccccgtattctgtacccactgataacgtgtgcttccgtggccatcctgctcatccgatccactctgaacctggtgcaggctgagcggttgttctacagctgggacatggcactccaaatggagacggtgcgctcctttggcagggaatcggtcctctgcgtccaaaggggacacatcgaggacatagtgctaaacgaagttattgaagacgtacgaactattgctgatagacatacgttaaggattcaagttctaatgtttctaatatttattcactttgtttctctttcagttggacgtaaagtacatgcttatattacgtacaaaaggaagtcaattcaagaagcgccctataatacccctattcaatgtgagttcactttcgttcatgtaaacgtatgtatttaatgattaagctccttttttccagagtcaatccccctcaattgagtgtctgcagcacacatatcacgtgctgcataaatattggctgaacagcaccaaagaccggtcagaagagtcctacagcaaggacaagcagtccttagtgaattcgtagtccttggccatatcgctgaactgttaaagtatttattagagacttaataacatttagacaaacttacttgtaccgtggctgtagtcttttcatcttctggaggtagtggtggtaattgtggaacctttaactcggttttgactatattgaaatcagcacggacctatacgagattatatgtaattgtgaataaagtaaatattgcaaatttgagattttacaattgcagcttaccaaattgttcagttctgatctaaatttctttttgagtacttggcggtaggtttttaggtacgtgtccttgttgctgtttagttccttctggatattttgcaactcgatcaactgctgcagtgaaaagtctgtacataatttgtagtattaatgtatttctataacagtaaagattaattttaatgcgcttactttccatggcgtctgttttttgttttgaaaatgtggctgtgttgaaaagcgtcaatggccttcattacagtaagtatgtgataaaaattaccctttttacgtacgcctgtttcgcatcaatagccaatttgtaaagattatatcttgtatgctcctaggcaattgtttctaagatatatctatgtgtacttttttttataatattttatacaacaaacattaattatttcatgcgatattatttctgttttaggggatgcgcactgtgtatcggctggctgccagtgttgcgaaccgacccacttcccagccctgcccgcctgacgtaatttggcagaaacgacgtatttttgtttatgtgagtccgctccccgcccctcataaagtgagtggccagctgctcgtccaatgaccacctctagttgcggaatttagtatctccttgtcggaatcccacccaggccccgtaggaatccatctgttgctgaccactgaacactgaggcatttcatcaaaagtgagtttccatcagtggagcagttccgagaacagtcattcggctgtgctactcata

SEQ ID NO: 35009 - DNA, 666 bp, DROSOPHILA
atggagcccaaagtgacgatccacagatattatagccggcaagcgaaatatgaaggagccgtggaagcggacttggaactgtgcatcaagcactgcggcggcgacgtggttcgcatcgaactggtgaaccggctgcatggaatccaactgcagcgcaagttgcgtcgactactgctgctcatgttcctatctatcgcttattttgtggggacctgcgggtttgataacagaacgattagtttcctgcagccccgtattctgtacccactgataacgtgtgcttccgtggccatcctgctcatccgatccactctgaacctggtgcaggctgagcggttgttctacagctgggacatggcactccaaatggagacggtgcgctcctttggcagggaatcggtcctctgcgtccaaaggggacacatcgaggacatagtgctaaacgaagttattgaagacttggacgtaaagtacatgcttatattacgtacaaaaggaagtcaattcaagaagcgccctataatacccctattcaatagtcaatccccctcaattgagtgtctgcagcacacatatcacgtgctgcataaatattggctgaacagcaccaaagaccggtcagaagagtcctacagcaaggacaagcagtccttagtgaattcgtag

SEQ ID NO: 35010 - protein, 221 aa, DROSOPHILA
MEPKVTIHRYYSRQAKYEGAVEADLELCIKHCGGDVVRIELVNRLHGIQLQRKLRRLLLLMFLSIAYFVGTCGFDNRTISFLQPRILYPLITCASVAILLIRSTLNLVQAERLFYSWDMALQMETVRSFGRESVLCVQRGHIEDIVLNEVIEDLDVKYMLILRTKGSQFKKRPIIPLFNSQSPSIECLQHTYHVLHKYWLNSTKDRSEESYSKDKQSLVNS

SEQ ID NO: 35011 - DNA, 1969 bp, DROSOPHILA
gcaaggaggtaagcggcaaccggacgaaattagcggctggaagggtgcttgaccgacttgatccgttgctctgtcaacagtttcgcaaattagtgctgcgtagtagtcacatgaggtccgagcatgtttcgtactatctttccactttgtcccatagggcacgcacttgttgcagacggacttgcaacgtatgtagggacggaaaagctttatcaggagtgttgatcttggcttcgaagagacatatgcgatcgctgacggcaatgcatttttgcaactctgcggttgcggccgatggcttttctgaggattctattttatgttgcaagattggagtacccttaggaattagtcccaatggcagatggtatatgatatgacatgaagaagtcagatcaaagtagatataggactcggggagaggtctgtactgatgcaactgctaattctacacaacatactagatactgagtattggattttctaatgaaagtgggagcaaggatggagtgcgccggcctgagcgtaacaatcccggttggccgagcggggcgaaacaggccatgcgaaaagcaatcagtagcaatcgtagagacggcagcggacgactcagaggaggataatgacgacttcctgagggcggagttagtagatttaggaagagtgaaaggggcatcaatggtggaggtgcacaatataacgaagaaccctaaaatgcagaacgagttgttacaaaacggatgcatcgagccgtctaagaaaccatatcaccaatattgatggtgtaaaaaagacaggacaatggaggttgtttgcatatatccgacaaataaacgcaagaaccgatgacgatgataaactacattttggcccagttaagggggcgaagtacacaaacagcctggacttaaaggacgaatactgtcagattccgctggaagcgggaagtcggcaatatacggcatttacggtgccgggaaagggcctgtttcagtggaacatgatgaaattcggactgcactccgcgtcgggcaagtttcaacggactttggaacaagtgataagacccgagatgttgccacacctcttcgcatatcaggacgatattatagtgatcggatggacagtacaggagtatgtgcgcgacttgaaagatgtgttccgacagtacagacgttttgtacccgattttgtgacactggtacaacctggtgcattcgaggccgtcaaatccaggctggtcgccgacccaatcctggcatgccccgacttcacaaaggcgtttgtgtttaagacggacgccagcgactatgggctaagtcgctcctcacacagcagtccgatcagaaccggctggtgatattctactttagtagaatggtaaacttttcgaccgtggatagtggccagatatgggtgcgcaaggttatgataacggagaacggattacagttcacaagcagggcgttcgagcggtttctgggggagttggggtgcgcaattcacaggaggcgatctgaggacatgggacgggaactgcccggagctgcagctgcggttaacacaagtttggcggagaccactggatactcgccggcattcatcgcgcagggaagtaagccgagtctgccgaatgcgttattcgacgatcagacaactgggacgggtgtaaaccgacgcctgcagagaacgcgaagaatcggggaagatctttgaactataatctccggaaacagccgtggaagcccaaggtgggagacacactatggtctaaggagcaccacctttctaaggcagtcgctaaagtttcacgggccgttcagaataaaaaattctcgtcacgatttatttgcatcctggagcacgcggcaaccagaaaggtaaagataccatccagaaatagggtaaacagtttcagtagaggtttgcacacggcttccgcacagaatctgagcacacagccagggat

SEQ ID NO: 35012 - DNA, 360 bp, DROSOPHILA
atgatgaaattcggactgcactccgcgtcgggcaagtttcaacggactttggaacaagtgataagacccgagatgttgccacacctcttcgcatatcaggacgatattatagtgatcggatggacagtacaggagtatgtgcgcgacttgaaagatgtgttccgacagtacagacgttttgtacccgattttgtgacactggtacaacctggtgcattcgaggccgtcaaatccaggctggtcgccgacccaatcctggcatgccccgacttcacaaaggcgtttgtgtttaagacggacgccagcgactatgggctaagtcgctcctcacacagcagtccgatcagaaccggctggtga

SEQ ID NO: 35013 - protein, 119 aa, DROSOPHILA
MMKFGLHSASGKFQRTLEQVIRPEMLPHLFAYQDDIIVIGWTVQEYVRDLKDVFRQYRRFVPDFVTLVQPGAFEAVKSRLVADPILACPDFTKAFVFKTDASDYGLSRSSHSSPIRTGW

SEQ ID NO: 35014 - DNA, 2411 bp, DROSOPHILA
ctccttcgttgtctttcctttattgtcccgcttcgtccttgacaacggatcctgttccggctcgtatgagacttaggatgttatgggccaggattttttgtcctctagttcaggccaacgctcttcccgggaccacctttgccgactattggctcgactgtttctactaaccgctttaggtatttgtgttctcctgctcctaagatctaaaattaaaattaaatgctaaaaaaaaaaattagtaattgtgcatgtgtgcgtacttgtgctagaaggcgattttgaagccgaaatcaattttgatctaagaaacgaagaattttggttaatttcgttatactacaacatgtactactactacaacattatttaataataaatgccttgactataatattttaaagctatatatgcatactgattctagagaaatagacgcagggcaagttttttgacaaatgttgtcgcgcccactcttacgcccacaaaccgcacaaaaactttttgccacgcccactctaacgccataaagcagtccggtcacgagcacactttggaacaatttttaaatttaaattgaatctatcgatatcccagataaatgttgaagtttcgcatcattgttgtgcgtttggtgctcctttgtccgccaatgggcacttccgtgtgcctgcttggtggttggtcgcttggcttcctctgcttgcgcacagaaagcacttagcctcgttggggtactcagcggccttatgtcccgcggatccgcatctgaagcagcattggcttctgtctacggcgcttctacaatgggccgctatgtgcccttcctccagacatttgaagcatctttggcggggctccagttccttgatcagacattgggactatcctaccctcagcttgccacgcttgaatcgccgtgcgattctttggtttgggaccatccttgccattactcggttcttcgtagctgtagggtcgcttaggggtggtctgtgggctagcatcggctcttgtggtgcgtccgacatgcgaattctccgcctccggcagcctcgatttctagctggggggtcatttgctggttgggctctgatagtgggatgtcgcttctaatggcctcttgggggtgccatcgcttgggttctggggtggggtcctttggacctttgaccttttcccgaacaccaagttttcttcgtccgttgtaggtgcacttgttgcattgcttggtccgacggtgtggcgccgtcggtgcgggcttggggagaatgtttggtagggccttcagaatccgtgccctagcctcgggattatctgatggtggatttccatatgtggatgtgcattttatacctcctgctaggtttgcggcttgatacctttcccccggttttgagacgcagaccattccgccggccaacttggctcaggcactgaatgggtttttattttgctgctgcttggctggtcaagagaacaggcgcaggcctgtctctcactctcactgttcgctcactttgcgctgacgagccgaggacttatctgatggtggatttctatttgtggtgaggtgggtgagcaggggaaagttgcgacggtgggagatataccactacagcttggtcgccagagtcccggatttaaagtgtgccgctaaggcgggaggtgcctgcgattggatttttatttattcgacttacggtaggtaaaattaaaatattctaaagataccaactaccgtcagtaggtggcatgcacgattcataaactctactgggattatgcctacgaactaaaacaaaaacctcggtgtgctctgcagtccttgcttgctcaccagtcaacgtatgaatgcggtgagcaggatgtgaggccaagtcgcacccccttccttcattgtagtccatgagggctccttcttccaccctttagtcgacttttacgacaagccgggaacgctgaggtagtatttttcgtttgccaccacactctgttgaccatctcgtctgatcggactcgtttcatcatattaatgattattctgtgacccagctcccacgcctctctgttcgccaacataaccgcgaagaggccactagggctgaacggggtacctgacagcgtcttaagctgctccctctcctccggaaacctggagtagtgcattagcaagtaatcagctatttcttcatgatcgacgcaaaacaagcattgggctgactctgcgtggcggaaccttgagtagataggcccgaaattatccatggtccgtgaggacctgggttagatggtagtcaaggcatttgtgttgacactctgcccaggccgtcaactcagggatgtgctggtgtgaccaccacccccgttacgacgtttgccatcagttctgccactcacccagcatccac

SEQ ID NO: 35015 - DNA, 411 bp, DROSOPHILA
atggtctgcgtctcaaaaccgggggaaaggtatcaagccgcaaacctagcaggaggtataaaatgcacatccacatatggaaatccaccatcagataatcccgaggctagggcacggattctgaaggccctaccaaacattctccccaagcccgcaccgacggcgccacaccgtcggaccaagcaatgcaacaagtgcacctacaacggacgaagaaaacttggtgttcgggaaaaggtcaaaggtccaaaggaccccaccccagaacccaagcgatggcacccccaagaggccattagaagcgacatcccactatcagagcccaaccagcaaatgaccccccagctagaaatcgaggctgccggaggcggagaattcgcatgtcggacgcaccacaagagccgatgctag

SEQ ID NO: 35016 - protein, 136 aa, DROSOPHILA
MVCVSKPGERYQAANLAGGIKCTSTYGNPPSDNPEARARILKALPNILPKPAPTAPHRRTKQCNKCTYNGRRKLGVREKVKGPKDPTPEPKRWHPQEAIRSDIPLSEPNQQMTPQLEIEAAGGGEFACRTHHKSRC

SEQ ID NO: 35017 - DNA, 2658 bp, DROSOPHILA
tggagctgttaaatgctcgatttcttttaaaattaccgatctgcatttatcgcaacaacaagtcacatcaaagacactagaattattctagtgtctttgttttggtcatatcttgaggcacgaagtgcggacacaagcattcaacaatcattgccttattaatttttcacacgcctcaagatgaatactctaatgaccaatattcttacataaagtcatttttgaaatttatttttgtgataatatgtacatagatttggctatttctattctattttcaaataataataacgttaaggcaatgcaaaacaagaatttttcgcatggtgccaattgatcaaaaataatatagatttaaagtcaaagaactttgaaggtgaagggcatattttgtcaaatttacaatgcatgagcatatgtgtgcacacatacagttgtctgctatccctgtatgcgctctctcgctctcgaacaaaaattcgagagagcctggagccacctctagagccacggcgaaaaaatcgtgtgccaaaaaatcgtatggcgttacgcatcttgttattctagtgtcttttgttcaccggtgacggtgagattttatacttcaccggaccagcgtgcacatttcccttaatttcatcacggtactattggcgcttttcgtcgggttctcctgtgggttgtatgaagccgttagattgtgtcgctccccagctcctatacgcttgaagctcttgaacgccttgcttattaacttaactccgtgttcggttatcagcacctttggcacgacgtactattctactatctcttgcaagcggtcctatgcagaggacaatctcgcaccatttcgcgaatcgaaccgccctattttgatctttcacctttgtataactgtttttacagtcgactaattattataccatcaaaaatgtacttatacttatacggtagcaataataaaagtgtataacaattgataaagcacgcaaaataagtacaagtacaataagtcttcaccatagctgctgaagaatttactttatttttggaatcatttcctttcaattagcacataatgtatttttctgaagcaataactttgttaagaattgttatatgtgatgtatttcgtctgaatgatagtttaatgctcgtttggctgttcattaatacttatattaagttacaaatatttaattaatacatgtgatttgcttaactttatcttggtatatatttattttgaatatttaaatctttaccgtcatatgttatgtcctcataaaaaaactttcgattcgagcgacattggggaccacacctggtagagccacaacttcggcaattataccagcaaccatcacattcttgattcatacagtcgcctgaattacgtgttttattaataacaaccacgtaaggagtgatttgtacttacatatgtccagaccgtttgagcgaatatttccgtattcatcatatgcgctattttgacatttctttctgcctttttttttattttcggaatctaaataatttgagtattcgttagaaactcctttttttctatgtctctgacgcaaattgcgactgatggaataatctgaatctaaatacggcttcatatcttggcgagaatttgttatactaaagtgcatggcctcctttcaaaaatcaatttaacccacgctattggtgtccactaatagtgtgcacacactgccatattattatttatagggtctttacactgcacttgtgcttctgattatgccacgttatgtcactgacttaatcaattataattacagtatattcgttagattattctgcctcaacatttaactggacattaagataactgcgcaatcatatttttttgaataaccaaaatctattttgtttgaaaaatattaatttaattaaaaactttataagggcaaagaacgttattcaaaaattgatatcagattatttgaagtaaataagtattttaagtaataggaatcgcatcatatattgaggttgttttaggaacagcattcggggatacctgaagcaacagaaatcaattaattatatcagcaaacgtaccaagcatatcaaaataccaaaccaaccatttaaactacatgcgactgtgtccttaatttttatacccgttactcgtaaagtagaaggatatcctagatttactaaaagcttgtaacaggcacaaggaagcgtttccgaccatttagagtatatattgtacatacatatgtacatatattctattgaagtcgattcgagatgggcatgtccgtctgccgatgaacgtcttgatttcaggcgctataaaaggtagaaagttgagattaagaatatagattctagagacatagactcagcgcaaagtttgttgccactccaacgcccattaacagctcaaaactgccacgcctacacttttgcaaaatgctttgatatttatttacatttttattaatttctattgatttgccaaaaaacttattgccgcgcccactctgaagcccttaaacctcccgaaaactgccacctgcacattttttgggatatttcttcataattttataagtcttgtaattttcaatggattggccaaatatgtttatgctgaaaatatttatgcac

SEQ ID NO: 35018 - DNA, 605 bp, DROSOPHILA
cactttagtataacaaattctcgccaagatatgaagccgtatttagattcagattattccatcagtcgcaatttgcgtcagagacatagaaaaaaaggagtttctaacgaatactcaaattatttagattccgaaaataaaaaaaaaggcagaaagaaatgtcaaaatagcgcatatgatgaatacggaaatattcgctcaaacggtctggacatatgcgactgtatgaatcaagaatgtgatggttgctggtataattgccgaagttgtggctctaccaggtgtggtccccaatgtcgctcgaatcgaaagtttttttatgaggacataacatatgacggtaaagatttaaatattcaaaataaatatataccaagataaagttaagcaaatcacatgtattaattaaatatttgtaacttaatataagtattaatgaacagccaaacgagcattaaactatcattcagacgaaatacatcacatataacaattcttaacaaagttattgcttcagaaaaatacattatgtgctaattgaaaggaaatgattccaaaaataaagtaaattcttcagcagctatggtgaagacttattgtacttg

SEQ ID NO: 35019 - protein, 116 aa, DROSOPHILA
MKPYLDSDYSISRNLRQRHRKKGVSNEYSNYLDSENKKKGRKKCQNSAYDEYGNIRSNGLDICDCMNQECDGCWYNCRSCGSTRCGPQCRSNRKFFYEDITYDGKDLNIQNKYIPR

SEQ ID NO: 35020 - DNA, 8522 bp, DROSOPHILA
gcaacactcgggcgcgtcaacgaatgtcacgttgcgcctggttagcacttatgctagctgcccgagggctcgacgctcatagctggcgagcgaagtgacactcttggagaagaaccgaactcgagcggattgttaccaaaatgcaaaccaatcaagcggaataaagacaaagactaaagacaaatattcgattgatatcatttcatatggaaccgacatttaggtaatatcaaatctattgccgacctggggtcattcctccaggtcctcggcacttaacttatataagttctccaatccttaaatatagcactctgccccagttgataaacaaatttcaaactccaatctcagcagcatttcaattatccaaccctgtcaattatccaagttaatccccagttgataaacaaatttcaatctccattctcagcagcattttcattgcccgttttgggtgccagcacttagccacccgataaataaccaaacttaaagtaatcaccagtcagcaaatttcgatttcacaatgctgtgaaataatttcagtataaagcttttatccttaacatatttgaaagttcaagaaaatcctaaagaaatgcttctggccgagggtgagtggattaggattaagatttaaaagatcagtctaaatcgggacgagatcgtgagcagtttcaaaacaaagataagctattaaaaaaagtgtcttgtaatagtataagtgcaaacgtctatcaccgaataaatttaaataataataaaaaaattatttattataaataattaaacagtaacaatttaaatacattctacttcatacattttaaatttttaaattagatagggcctgaaaaaacgaataaataagaacctaattttccctcttttccaatattccttaatcggcgtaaaatcatcgacgatatcttgacggcgtgaattttatataggaacgagtttcgaaatctgttgcggcccaacggtgtatgtgtggtgatatcgaagcacggtattacaattaaagcagtttacatttgtgctaaagattattattaaatataatatccgttttgaattatcttttgacaaacaataagttttttacattttgtttaggcggaatgattcaatgaaaaagaattgtaaaaaagtatatttaataacagtgttcaatttagtattattgacaggtaaatcaattttagtttgtgctataacgaatgtcgaacacggttaaaaaactaaaacatgctgacatcataaatcaccttgagcgaaaatccataagtaaaattccggtataatccttttgtgtgaataactataaaattgtgtacgcaactcagccgtacaggtttcaaggtacaacccaaaaaatacattgttttgacatcaggtgagagcattaaagatgtcaaataacatcctctttaaagtacgcattgcgaccaaatatatttaacccgtccccttaacagcgtggcaaagttttgcatttattaattctccactgtgctatcaaattgaagttcgtctgtgcattgattggagtgtttaaaagactggtgtcccttacaaccattttcaatgcagggtattatggtttccagcttatttcaatcaacacaagcagcctataaaacaaccagccaagcaaaaatatttttactgcacgatattattgcaatgtttatacttacacatttacttattatatattattacccttgcgaagggtatattggtttagacagaagacatctgtgtctggccgtccgttcctaagcaaactagtctcccagtcctaaaactttaaaacttttctattgctggtagtatataaattaagtcaattagattattataataaaataggtatttattgagccaacttctcttgttttcggtctcttacaaaataacttctagagctcacttatttatctcacaaagtcttccgttgagggcagcggacatgcccgtcccgtattgaactgaacgttgcacatcgcttttgctgaaggggaaagaagctcgcccggcccggtaccgtcgatgttactgttgacggtgccgcatccggttctgggtggcattacgcaggaccacttcgaggcaacttgaaggcatccggattctatgtccttagatggttgtttacgtttgaagcggcaaataagacaaatgatgaggactatcgatatcacagaaaaatgatgatagtcgcagaactcaactatagcattctctcatgtttttcatatatttaatagtattataaatttctatggatctgccaaaaaactttttgccacacccactctctctctcccacacttttgacaaattttaaattttttctcattttattcaccaatatctgtagatatcgctgaaaatatatggaatttcgagttcgcatttccactagctgagtaaggggtatctgatagaaaaaaagcttattttaaagggtgggcaaacgaaattattcattttaaagagtgagcaaacaaaaaaactaatgttaaagtatgtgtaaatgataatttatttttaaaggctaggcaaacgttttttattcttaatttttattttcaagaggtaggctaacgaaactggtaatattttaagtgtgggcaatcggaaaaaactttggttaaagatttgtttaaggatgggcaaaccataaaaactaataataatggttgggcaaaaaatatttattgataatatttcgtttgactttaatctctgagtgaagtctaaagtttttttgaaatatttttgaatatttttttacatttttactagtcttgtaaaattctatctatttgcaaactcccacttcaacgccctaaaaccgctcaaaactgccatgtccacatttttgaaaagtggaagaaaagaattggacttatcaaaacaaaagaaatggcggcgataaattgtcgactatagaaaattaaactcgcaaaaaatcgaaattcgatatcaaaaaaagttgggctataaaatattttcttctttattcttggcaaaagacttggcgatatcaatcccatgcaaacagttaaaataaatgacgaacaaaacaacgacttttcgtttgacctaatagaccaattctcaacccaatctatttgaatctatctgacaatttatactatcttaaaaatacagaaaacatattaaacatataaagtacaatagttattgttctgagccgaataaatgatccgtatttgaactaagatcaacgttgaaataaataaaaactccgaatgaatccactttgcgattttattgattgaatatcagcttaagactgaaacaattgtggtgagaaaatcttagatgtactgggttagtgggttgttcttgcttatgcttatgtttatgtgcatacatgttaaaaagaattcttatgtgctacgtggctatgtgcctgcctaatggctgggttttggttacggcttgagtgaatgcgaaatatagagaaatgttttttttatttaacgggtaatcgatacgacggcggaccatcgcggtcggtcttttgtataagtgaattatgaggaaggcataattacgttactatataagttgcagtactaaaagagtcggaaaaaatattacgaggcaccaatattgtataaataaaaaaaataagataccttgttcacacaacaagaagtaatgctaccattttagaaaaattacgaaaaattataccagggaaaaggctaaatagccatttactgtaaagtcataaaattgtacctaaaattccaataatgctatattcaatatttcatattcaacaacaatttacaacaaataagttaagttaattaaattaacaacttaataaattaattgatttctttttaatagacgtcacagaaagagaacaaatatctatgataggctagttttttgtatgtcgcagaagctggccttctctcgttacaggctttcgatacaactcgtatttcggtggatggggaagttgaagttttcgcataagaatatgttatttatgtttcaacatttttcttttagagggtaaattttacttttgtttttttacaaaatattattgggtgctttttattggtagggaaattattttcgcaattttgtattcctacttcttaaatataggtattttgacattgaatatgatgtttgaattgtaataggtagtatatgattttaaaagactgtataattgctcatctaattggacatatatattttggtttataaatatatttgctatttttagtattccttcgttgtttataggaattatattaagttttgcgtagattctgtcttttaatggtagtgagtgtagtgcctcctcttctctttcttcaaatctatattttcaaggtctactggaatttctggaatagagaagagagagagagaagagttcttgttacgatagtttcctttaacgattgggtaaagttttccttggaaagtatgtagtttttctaggtaagcatgttcggtgctcattgggtcaaggtgttagtggaattaagaatgagatttgcttaatagcaaataattttgatatttccgtgaggaaaaaagctaatttatttaaatgctgggttattggaaaaattacggcgtatacgtgttccagtgttttgagaatgctttcgtcggcaaagacagcgcatgtcttatttggctttaatttttgtttgagtatatttgcacaaccggtaaagtcaaataagggcttgtagtattctcttctaattttctcttttaagtgtgtaactgttaagtgtttattatcgggggaaattctttgagaggtttgtcggatgtatggaggtttaggggcaggttcgggaatcatttcgttatggttcaagttaacgtctgccctggttaatgcaccagttataacattttgggagccttttttgaaaatggtctcgaactcatattctagcagttaaagaccccaacggatgatcttagaattcggttccttgaaattcaatagccagattagaggcttgtgatccgtcattttttacctaataaatatggtctgatatggtacgcccaaatgatagccagcatttctttttctatggtcgagtagtttatctcggtgtcgttaaggattctgccggcccaccaatatctatcagtcttccaggaaaattatgaaattctgtgttctcatatccattagctgagaaacgggtatctgatagtcggggaagtcgactatagcattctctcgttttaaatgtattaaaaaaaatcgaagtataaaaatcacagactgcttattcttcacacttaatttctttcttgcttcagcatggaattagagaaagtaaagataaacagccttcattgtaatgatgctgtgctctcttcacttcaagcatccccttctgcgacatcccctcagagcgttccttcaaaggcgaatgtcgtcaccgaggcttctattatcgaaaagacgaatcaaccacataatgttcaggaagataataactacaatagagattgcgacagccccgaaagttctagctcggagcaggataaggagttggatgatctgcggaacttgcactcctcctctctaacaaacagcgtagtggtggggaaatcgactggctcgctaaacggcgtctactctatcacatcagtcacttccgaaactaaaacgcttgaaagtgttgtcacgaccaactctgctagtgggtcggcatgcttaagcaatacacccaccgctgatcacataaagaaacgtatcccaagcagtcgaacgccgacaagaaaggcactaagaatcaaattctaccggaacggggatcgtttttatccgggtataacaattcccgtgtctaacgaacggtacagatcctttgaaagactttttgaagacctaacccgtctgttggaagagaatgtaaagataccaggtgctgttcgcaccatctacaacttgtgtgggaagaaggtggatacttctcgttatttttactacacatacttttattatttatttgcccttgtagattacctctctcgatgaattggaagatggacagagctatgtttgttcctgcaataacgagaattttaagaaggttgagtacaacactggttcccagcctttgtccaatctgccgctgagcaatagtcgttccaacagtcatcgattggctaagtgtcgaccatcgtctcccctaaaaaatggcttgcttgcaggcagcagtcctttcccagcttgtggcggaggaacgggaaacggaagtccacttatcgcttccagattaagcgatcgagttacagtggttcatcctcgtattgtgacgctgatacgtagtggaactaagccgcggcgtattatgcgattattgctaaacaagcgtaacagcccgagcttcgatcatgtgctgaccgccattacgcaagtggttcgcttggacacgggctatgtgagaaaagtattcactctttccggtatcccagtggtccgactatctgatttttttgggtcggatgatgttttcttcgcttatgggacagagcggattaacactgcggaggactttaagttagaggcggaggagcagcgagctattaatgtcattcgtaagaccatgcgcacgactggaaccacatgcaagggacctaagcctaagatgcccataaagagcaaaaaagtgtatcctcctttggttgattcggagccatttaaggcagaaaccacaccagaagatgataggcatgcggctttacttacgagcactggtatggagatcaatgaattgccatcgaatattcgtaacacttactctctgggaagaataattggcgacggcaactttgccattgtgtttaagattaagcaccgccaaactggtcattcctacgccctaaaaataatagacaagaacaaatgcaagggcaaggaacactacatagacgcggaagttcgcgtcatgaaaaaattaaatcatccgcatataatttcgcttattttgagtgtagaccaaaatacaaatatgtatcttgtactggaatatgtaagtggtaagttgaatgtgaatacattcacagcttctttctgcttaaatttgttgttaaatttgtaacaggtggtgatttattcgacgctataactcaggtaacgaggttctcagaaaaccagtcgcgcattatgattagacatttgggtgcggccatgacttatctgcattcaatgggcattgtgcatcgagatataaaacctgagaatcttctagtatgacatgactaatgaaaaatactgagcaataataggactaatcattggaactatttgcaggtgaaattggatgagcatggaaacgttcttgaactaaagcttgctgattttggattagcatgtgaggtaaacgatcttctatatgctgtctgcgggactcccacatatgtagcaccagagatattgttagaagtcggatatgggctaaaggtaatagtaaataatagctttcttaaaaattaatatacttatatattcttaaagattgacgtttgggccgctggaatcattttgtatatacttctatgcggttttccgccgtttgtagcgcctgacaaccaacaggagccgctattcgacgctattatctctggcatttatgagtttccagatccttactggtctgatataggggacggagtgcgcgatcttattgccaatatgcttcaggcggatccagacgttcgtttcacaagcgaagacatccttgatcacagttggacgattggaaacaaggggaacgagtgtaccacatataaaagatgagtcgtagctgtgggaatttaaaaaaagcaactttcactcttaaacgacgaacttttgtatttctgatctaaaaatgcttttatattagccctaatttatttttacatataaattatatgtgaattcttacatattgcaataacaacaaagaatgaccatcgaaaatgaataagaaattcgagcaacacaatcgtcatcagttggtttccattaatgtttaactttttgaaccatttacacttgtacatgaaaatatacatatttttattttagaccgtttaagtgaatcaaattccgtttaatttaatttcaacaccatctaatttttttgtgaacacaatgtgtctgcggaggtaaatttccttcaaagaggagtgtggtaaaactacaatttatcataagctttttaactaaagaaaaaattgaggtctatattttaaagtattgttttacttttctattcgcatatcactagttatgatcgaaacaacttcagcattttcttatcttcgtgtatatagtttagtgtagcatccctcccacaatataatataatgaaaaatataatactctataataaaaagtatattactatatattaaaaatatataatattatgatgcctgatgatgccttcctggatgcgccaagctgccatctcaac

SEQ ID NO: 35021 - DNA, 2222 bp, DROSOPHILA
tgatatcgaagcacggtattacaattaaagcagtttacatttgtgctaaagattattattaaatataatatccgttttgaattatcttttgacaaacaataagttttttacattttgtttaggcggaatgattcaatgaaaaagaattgtaaaaaagtatatttaataacagtgttcaatttagtattattgacaggtaaatcaattttagtttgtgctataacgaatgtcgaacacggttaaaaaactaaaacatgctgacatcataaatcaccttgagcgaaaatccataagtaaaattccggtataatccttttgtgtgaataactataaaattgtgtacgcaactcagccgtacaggtttcaaggtacaacccaaaaaatacattgttttgacatcagcatggaattagagaaagtaaagataaacagccttcattgtaatgatgctgtgctctcttcacttcaagcatccccttctgcgacatcccctcagagcgttccttcaaaggcgaatgtcgtcaccgaggcttctattatcgaaaagacgaatcaaccacataatgttcaggaagataataactacaatagagattgcgacagccccgaaagttctagctcggagcaggataaggagttggatgatctgcggaacttgcactcctcctctctaacaaacagcgtagtggtggggaaatcgactggctcgctaaacggcgtctactctatcacatcagtcacttccgaaactaaaacgcttgaaagtgttgtcacgaccaactctgctagtgggtcggcatgcttaagcaatacacccaccgctgatcacataaagaaacgtatcccaagcagtcgaacgccgacaagaaaggcactaagaatcaaattctaccggaacggggatcgtttttatccgggtataacaattcccgtgtctaacgaacggtacagatcctttgaaagactttttgaagacctaacccgtctgttggaagagaatgtaaagataccaggtgctgttcgcaccatctacaacttgtgtgggaagaagattacctctctcgatgaattggaagatggacagagctatgtttgttcctgcaataacgagaattttaagaaggttgagtacaacactggttcccagcctttgtccaatctgccgctgagcaatagtcgttccaacagtcatcgattggctaagtgtcgaccatcgtctcccctaaaaaatggcttgcttgcaggcagcagtcctttcccagcttgtggcggaggaacgggaaacggaagtccacttatcgcttccagattaagcgatcgagttacagtggttcatcctcgtattgtgacgctgatacgtagtggaactaagccgcggcgtattatgcgattattgctaaacaagcgtaacagcccgagcttcgatcatgtgctgaccgccattacgcaagtggttcgcttggacacgggctatgtgagaaaagtattcactctttccggtatcccagtggtccgactatctgatttttttgggtcggatgatgttttcttcgcttatgggacagagcggattaacactgcggaggactttaagttagaggcggaggagcagcgagctattaatgtcattcgtaagaccatgcgcacgactggaaccacatgcaagggacctaagcctaagatgcccataaagagcaaaaaagtgtatcctcctttggttgattcggagccatttaaggcagaaaccacaccagaagatgataggcatgcggctttacttacgagcactggtatggagatcaatgaattgccatcgaatattcgtaacacttactctctgggaagaataattggcgacggcaactttgccattgtgtttaagattaagcaccgccaaactggtcattcctacgccctaaaaataatagacaagaacaaatgcaagggcaaggaacactacatagacgcggaagttcgcgtcatgaaaaaattaaatcatccgcatataatttcgcttattttgagtgtagaccaaaatacaaatatgtatcttgtactggaatatgtaagtggtgaaattggatgagcatggaaacgttcttgaactaaagcttgctgattttggattagcatgtgaggtaaacgatcttctatatgctgtctgcgggactcccacatatgtagcaccagagatattgttagaagtcggatatgggctaaag

SEQ ID NO: 35022 - protein, 560 aa, DROSOPHILA
MELEKVKINSLHCNDAVLSSLQASPSATSPQSVPSKANVVTEASIIEKTNQPHNVQEDNNYNRDCDSPESSSSEQDKELDDLRNLHSSSLTNSVVVGKSTGSLNGVYSITSVTSETKTLESVVTTNSASGSACLSNTPTADHIKKRIPSSRTPTRKALRIKFYRNGDRFYPGITIPVSNERYRSFERLFEDLTRLLEENVKIPGAVRTIYNLCGKKITSLDELEDGQSYVCSCNNENFKKVEYNTGSQPLSNLPLSNSRSNSHRLAKCRPSSPLKNGLLAGSSPFPACGGGTGNGSPLIASRLSDRVTVVHPRIVTLIRSGTKPRRIMRLLLNKRNSPSFDHVLTAITQVVRLDTGYVRKVFTLSGIPVVRLSDFFGSDDVFFAYGTERINTAEDFKLEAEEQRAINVIRKTMRTTGTTCKGPKPKMPIKSKKVYPPLVDSEPFKAETTPEDDRHAALLTSTGMEINELPSNIRNTYSLGRIIGDGNFAIVFKIKHRQTGHSYALKIIDKNKCKGKEHYIDAEVRVMKKLNHPHIISLILSVDQNTNMYLVLEYVSGEIG

SEQ ID NO: 35023 - DNA, 15125 bp, DROSOPHILA
tagtagacagatctgtgtcgaataatccccaattccagaaaatcaaacggttcagcttattaccaggagcgacggagcgtttaagacaccagaaaatatgtcgtatcactgcactcgtgttcagaagataaatatgactgagacactcgatgctgagcagttaattggttggatcagcgtcagtcatgttcaggtggaggctttccggagggccaacgacactggtttctcagttggacacgattgcgatagctcggaaacttcggatgtggttcccattgccgttggaattgctttagctgcattaattttggtggtattaatatcatatctgtgtgctaggcgtcgttccacctcccgcggttacatgagcttctaatagaaggacatcagcttaattgggcaggttgcgaatcaaaggagtatggacagcaaattgttagagagaaatttaagattgatttttattattggaagccaaaattgattagttgaagttgaattagtttttttttcaagagggtcatcgaaatcatcaagcgcaattgggtttagaataataaaacggttctttaaaaacttttttacgtctctgtctttgtaagtgtccgatattggttcttgtatgctgatatttgtgttttatttaattggtttgagcaatgtaaatgtaaaataaaaaaaaaatttctaaataaattaatctctataatgtagctaccgtgttaaccctaaaaaggtggtgtcagagaggacatttctattgttaaggcaaaaacctgtacgcaataccaacaagtatacattctattcaaatgttatattttttaaacattattattggggcatataaatgtgtgtattcctgaccttaactgtaataaataatatttaaaaccaagcacaataatgattttcgtttgctggaaagggcttatgggaaaaatcttaaaatcatttttaattttatacaatttttattttaaattattttaattggttaattattgcgctgttcctgtttagatgaaattctacgctcctgcagctgacaaaatacatgacctgagctgggcatcataagttgttcctttagcaactcgaaacgctcctcggctagttcataatcattctgcgccaaggccactaggcccagattgtacctggcttcaaagttcatcggctgaagttgcagagctccctcaaaccgttcgcgtgctaatattaggttgtgcgagtccaattccactatgccggcgttgatcaatcctggcgcattgttttttagcgatcctatttcatgtaactggttaacgcaatgggaggccatttctaggttgcctaactgaaatatacgttatgtttttaagtacaaagtgcatgtactttattacacggtacctataaactgctagagtaaaatgacatttaaattagagttcgatagagtaaaagggtatactttattcgttgaaagatatgtaacagatagatagatagaagcgcatgcttatatcctaaacttgctacgcctactcaaacgaccacaaactttcccaaactacggcgcccaccctaggaagtatataaattaagaaaagtaagccccgcagagggttcctcgctgcagtcactggaacctgtccgatcgccgatggatgtttctccggagatcggaggtgataattcccaattgatgaattaggatggcttctggcctagatgagcttatgagctggtaggtgctctttattcactggatctcaaataagaactgacttaaaagctaacatataaagagcttcatagcttccggccaaatgcttggtcagcaatttgacaggtgctggagtgcggacgatcagtccggttaactcagttgacttatatgttctttatctagccaagttgaactcgccatgtccttctgtccacctgtgtgaacattgaaacctcgggacttataaaagataaaaagttaaaaaataatacaaaatgtttacttttctatatttacatttgccttgccaatttctatcgaaataccaaacacatttgttaaacaacgttaaacctaaaatataaatatccaaaatgtaaacgattagcttatgtatatgcatattggaaaagtgaaatatttattgttttcgtgtagtattgcaccaattgcagacttgtctacaaatataagaggatttcttcaaataggcaataagctttcgggattcatttccgcgtcgtcatctacatcgtctctgctttgtagtggtcggccagttttgggacgttctgcgggaggtcccaaaggatcaaactgcagaactgtaatgatataaagtataataggatacaaaattcgctagcagtgtgacaaaactttactggacgtgtaggggctctgagtatggactacgctattaaaattttcaccaacttctttcaagtgttcttcatttgactgtctgatagctatagggttaacttaaaataatcactggaacagagtaaaatgtacaaacttacatcgcaagcggttgctaaactttgccgctgaagggaatcgctgctgctggtatcgctgctcgctctgacgttcctgctgttggctttgcagacgggtgtattccgatgcgtacctctcatacaggtcccctaattccagcgacttggtaacttgcataagagctcgtatgcaagttaggttgtctggaaatcgtgcgtgtatcttttgaaaaaggccgaggtactgtttggtaggcagatatgagttgcgaaagcagctggcaatacgtaacattaggttgggatcattaggatcggctaataccgctctttcatagtaaaaaagtgcccgttccgtggcctgaagcttgatgtaatatgaaccgattgagcttgcgattccgatgtcgctcatgtttatgcggtacgcctcgttatagtactgatttgcttcttgatggtcttgaatctgctcgtaaagcgagccgaccttttcaaacagccttgaatcgatgtcagaggcagaaatgccaactacctgaaggtaggcttgaagagccgcccctggcgtaaaattagatataagtccgctttccaatctgcgctcctgcagcttggcaagctggtaaaatacatgactgtgctgaactgagctgggcaacataagttgttcctttagcaactcgaaacgctcctcggctagttcataatcattctgcgccaaggccactaggcccagattgtacctggcttcaaagttcatcggctgaagttgcagagctccctcaaaccgttcgcttgctaatattaggttgtgcgagcccaattccactatgccggcgttgatcaatcctggcgcattgttttttagcgatcctatttcatgtaactggttaacgcaatgggaggccatttctaggttgcctaactgaaatatacgttatgtttttaagtacaaagggcatacactttattataataaacggtacctataaactttgggctagagtaaaattacatttaaattagagttgatataataaagaattatcagcagatagttttttttaagtaagtgcattcgtattatctttgtgcgttgtcatttgcaatgctggcaattggccttttttttgctgtaaaatctgcacgaaaggtggcgggatgtacttttgaactgccagaaacgggaattctcgctactcttaaagtataagggtattctttattcgttgaaagaaatgtatcagatatatacatagatagaagcgcatgcttgtatcctaaactttccactcctactctaacgatcacaaactgtcccaaactaccgcgcccacccttggaagtatatatgttctttatctagccaagttgaactcgtcatgtccttctgtccacctgtgtgaactttgaaatcttgggacttataaaatataaaaagttaaaaaataatacaaaatgtttacttttctatcgaaataccaaacacattcagggcacgaacactctagcgcctacaaactgcaaatttttaacaaaatttaaaaatctttcgatttatttaccagttactcatagggtatactagattcgttgaaaagtatgttacaggcagaaggaagcgtttccgaccctatatagtatttatattcttgatcaggatcaatagccaagtcgatctggccatgtccgtatgaacatcaagatctgaggtactataaaagctagaaggttgagattcagcatgcatattcatacggacagacgaatatatgtcccttctgtctgttacatactttttaacgaacgttgtatacccttttactctacgagtaacgggtataatgtatggtgctagtagagcccttgggcgaagacaatttcgacacatggaaaattcaggcgttattaataaaaaactatttgttaaatgatgtcaacgagactcttttaaaatacaaagataacttcgcacagtcctcaagcgaagattcaaaggctaagttcgacctcattttggccatgtcgacatcggaactaaggcatactaagaactgcggaactgcaaactagttacatacttttcaacaatgtttagttttttcttcgttttattgtttgtcctgtgcatttttatctgtactccaaaagcactgtggccacgcccctcctttcacctacaaaacggtaacgcccacaatgaagctgaatgctttaaatcaacattttagttttcatagttcctaagatcgaggcgttcatacggacagactcgaaaattgatccaggtcaagaatatatttactgcatatggtcaaaaacgttttcttctacctatactttgctcttactttttactttcttctattcttttactctatgagtaacatgtataacaatgattattcatttatatgtgtatcactcgtcaagattccttatcaaactaattttgtcttataacattcagtttgttttattatttttgtaagcattggaaaaaaaaccccaaaaattgataaagaagtacaagtaacgaccaaatacttataataattcattggaaatcaaaaacaagtcgccgagactactgcatgaattggtagcttcttgaatttttgacttacgctgctgatcaaacttgctgctgcgacatccaaaacaaaagtgttggcataacagtttttggcggtttttgagcgttgcgtgtgacgtcactagaacctacatgcttagtctgaaatttcttgcttttatattttccgagatctcgattaaattggctagtataccttttttatctactaaattgcctgacacccactatctaagtaagaagtatctgagagtcgagaatcttgactaaagctttttctcttgttttgtacttcatatgaaacttacactaatataaataaaactcaggttggtcagagcgctggcggtcatggatccctcactcttgcggtcgtacatttgcaacgtctcaattgcttgatgaacgtcattttgtcggagatatactaaggctttgttaagttcaagttcgttggccaaccatgcaagatttgaagttttaatgatttcaatgcaccaattataccctggaaaacaaaaaatatatacatcagcaatatttgaatgtacgtcaaattagctgatttgaatggtggaatttagaaaatgactttttgtgcccgttactcgtagagtaatgtataatgtaatggtaaagagtatattagattcgtagaaaagtatgtaacaggtcgaaggaaaagtttccgaccaacgaacacctgcacaagccgagctccaagaatctgtttggcagcccgtgggattctaggaagactgcagttggtctattgggaacagcgaagccgacgtcgatcctctgccaacaagggcagcagagccgacagctaaagactcacagcttgttcgggacagtataggtagtcttagtttctaattagattttaataaataatgtcgttgttctcacttcaacttgaagtctaattcatttactttaataccacatttgtggtataaattttttacccgttgctcgtagagtaaaagcaaagaccctagaataacaagatgcgtaacgccatacgattttttggcacacgattttttggccgtggctctagaggtggctccaggctctctcgaatttttgttagagagcgagagagcgaagagcgctacagcgaacagctcttttcaacgcacaaagtgatagcagacatctgtatgtgtgcacacgtatgctcatgcattgtaaatttgacaaaatatgcccttcaccttagaagttcttagactttaaatctatattatttttgatcaattggcaccatgcgaaaaattcttgttttgcattgccttaacgttattattatttgaaaatagattagaaatagccaaatctatgtacatattatcacaaaaataaatttcaaaaatgactttatataagaatatttgtcattagagtattcagcttgcgccgtgtgaaaaattaataaggcaattaatgttgaatgcttatgtccgcactttgtgcctcaaaatatgacttttgcaacaaacagttttcatatttttatttattttataaatttgtattttatacaacgtattatttttatgaaatattttttttttgttctcaatgttaaattaattaattaaattacagtagttataataatttcctttgtattttgtcgttttgttgcaatagtagagaacggaaatataagcgcaaatagtaatggcgataagtaataattgcgataacggcctcctcgtggtgttccctgagtaccgattattacgtatattacatataattaattattagcataaatataagtatgtgaacggtagcttcgcgtggcgattttagcaaacgaatattaaaaaactttgaagttgtaatagtcacggcgtgaatttttaattattaatttatttcatcatattgatacgaattggccaaaactccaagatggaaattcgtttcttggatcagaattgatttcggcccgaaaatcgtcttctagcacaacacgcacacatatacgcgttctcgtcttttgtttttactcacacaagcaagcaaattatatttttagatttcttacgccctcagcgtaagcgagtggacagagatcaattttggcgtccccaaaaaagtggctgcatagtgccaaaccaatgtatggccgttacgcatcttgttattctagtgtctttggtaaaagggtatatatatactataatagattcgttgaaaaggttttaacaggcagaaggaagcgtttccgaccatataaagtatatattcttgatcaggatcaatagccgagtcgatctggccatgtccgtctgtccgtatgaacgtcaagatcttagaaactataaaagttagaaggttgagattaagcatataggttcaagagacatagacgcagtgcaagtttgtagatctatgtagccaatcccactataactcccatatttttgcccaacgttttgatattttttcatatttttattagtcctgtaaatttctaacgatttgccaacaaactgttttacaaggctaataaaaacatgaaaaaatatcaacacatttcttaatggtgtggccgtggcagttttttgtggtttgtgagagttagaatgggcgtcgcattttttgttgcgtggcaacgtctctataatctgtatcgacggatcaagaaaatatatacttaatatggtcggaaacgcttccttcagcgtgttacatactttttaacgaacgtagcataccctactctacgagtagcgcgtataatgagtattgctagtagagctcttgcgcgaagacaatttcgacacctggaaaatacaaatgcaggcattattgataaaaaacgattcgtgaaaatatgtcaacggaactcttttaaaacccaaaaaatacttcgcgcagtcctcaagcgaagataaaaaggttaagttcgacctcattttggccatgtcgacatcggaaataaggcatactaagaactgcggaactgcaaactagttatggaaatagctgtatagctacagggccttaaagccgcactgttgaaatccctggttgtactgaaaatgaatgcaggcagagatatgagaagtcacatagatataatttcagatttagtagactaaataaaagaagttgatctcatgaatatgacatgtactcaaacatctgttaaccatcttgctactatccagtatcccgttaatctcaacggaggcatttaaaataaatttaatagacgagtacgaagcaagaaatagaaatacaagcgagtcaacgccttgagcattactggtgcataagaagtacaatcccaagaaaccgaacctattaaacctatttaggttcaaatgttacagctgcggaaaagtcggtcaccgtgcagctgagtgcagttcaaagccaataaagaaccagactgataacatgtacatcaacatagctaattatttaaacagtgattttattaactctggaaaaacatcagatcctggagactgcagaaggatcaaagctcagactggcaaataatgaggccacccaagaaaaggatgtggatccgtacagttctccccaaacaacaagttcaccactagcctgaaaatcactttttacggaccagtttacgaaatatgcatcaaggagaagcaaggggaagaagccgtttcacgttcctaatcaatatcgaccttaaaccagtgtcaggcgatcaagcagaaaatgacaacccagatgacaaggcaatcgaccagttgatccagaggactctgagtcagatgatacacagacggaacttgaatcagagatgaaacgtggtcgcggaagacctaagaagctattaacaggtaaaccaggaaggcccaaactaagctcataatggtaaaattaaagtcattgaaaaagaacaatacctggatagttgtcgatcgtcagaaaaaccatatcgaaaagaagtgggtgttacaaacaaaatatttgcccgacagaaagatatataccgaaaagctcgcctgctcgcaaaagggcttacgcaatgccaaggcaatgattacgacgagaccttctctccagtgtccagaatgagctccatacgatttttaaaaaccttagctacggaactcggattggatgttcatcagttctaattcaacagcgcctacttaaatggagatatcgaagaagagaacatccccctgaattccaagaaatattgacagcaaaggagaagaagatatacatatggccccgagaatgtttgcaagttgagaaaggctatatatggcctaaagacgagtggacgaaaatggtacagaatgctggaaaggaaactcaaagatttgaatcttaacggaatacatatcgtatcgcttgccgtagacctcgtaatagcgacgaatgacacccgaatgctgcgtcagttgaagcatgagttgtccaaaaaacagatgaaagatttgagcaagctatcgcattgtttgggcatagaatttaaacaaagtgaaggcaagacagagtttaccatgggctagtcgaattatatagcagacgtcctgaaacgtttcaaaactgcaagcccgtaaacacgccaatcaacacgattgaaaaattaacaacagaaatttcccccaccaccgaaggcgaaaagaaagaaatcttcaatgtgccatatcaatgtggttatcaatgcctaaatgtggttagcagtattaacgcgccctgatattaaacttgcagtaagcgcactaaaccaatataataccattttttttttcaaaaatgtgggcgtagcagttttgggtggttttaggtttaagagtgggtgtgcaaaaagtttttttttggaaaatcgattaaaatttacaagactaataaaattatgaaaaaatatacaacaatttttcaaaaatgagggcgtcgtagtttgtagtagtgtgggcgtgtcagttttgtgcggtttgtgggcgttagagtgggcatggcaacctgggttacatactgttacatactttttaacgaatctagtatacccttttactctacgagtaacgggtataattatacaacaataattattataataccctgaatttatgttttatcctacctgctgtattttatctcagtcgtactcaccatcattatagttatcttcgataaaaggtgatattaagtctacaatcattgtaatagatcgtttaacggcattacgacgttcatttctatatacggccagctcgtctttcttaagtgcttggacaacataacgatgtttcactgtggctgcaaactttacggtctcgttcagtttaccgccaccttctgccttaataaccgagcccgtgactggttcgttgtttaaagactggtacccgtcggtttcgccaatttgttgaatcggctcagcctgctgttgaagtttaatgatattcgtctcactctccatatccgattctattgcttcggtttggacatcacaaagtctccgaaaggccaactttactttctccacatcgcccaaggcgaagtagcagagtaagaggtgaatgctacttctaatgtttgcccgctccgtcatgatgaactcaaagctagaagcagcatctgaataagagcccatgcgaataaaaaggattccaatgttttcacggatctttagccttaactgacttaagctctttggtacagaatcaagggccatgcggtacattttaaccgccttttggtaaatacccatgctgtagtagatgttacccatatttagttttagctgattgacgtgtggaaacatcttgtttttggccataatgctgtaggtattgagggcttcgatgtgcatctcactccgttcgtattgctccgcgagattaaaaaaaacctatagtccatatatattaaagttttaaattatccttctagtcgtgcttaccgcatatgtcaaatcgaagttgtgataaacattttcaccgtgctggtctcgaaattggtgtaatgttctatccaatgagaatgcttctttggctttactcaatgcctcggccaattttgtatccaggttcaataatttattgggtgagccttgccaggccaaaactatagatgactccaagagcttcacaattttttcctctagatttttatacttcatttgtgggctataatttgaattatgtaaaacgtaatataagttggttagtattcagactttggttaactcgctacataataatcgactaaaaggatcagatcattgctagttcctgataagcttggaaatgcttaagacttttccttgttgttttgtaaaatttacagagagaagaatgaaaaaagacagaattaaaataacatttttaaattccactatgtttaaaaattatgttatgttaaaaaattcataattatttacacacagcttttttaattcatttttgccttttttattgaatttaaacgaaatattttatatggaatatgagcaatggaagtaccgcctgatttatgtctttcaagaacttggttggtactcggcccttgtggcatggagcattgccctgctgcaagatccagtcattcttggagaacagtctatttcctgaggtcaatgcgtgctcatttaagatatggaggtatcctgtttgatttactgtaccctctatcggtaccatgtctccaaacccatagtagcttaaacagccccagaacatcaccgtgacaccaccaaaccgattgattggctgaacggcattaccctttagttgtattgggaaatgcataaattgcttgctaaaggatccctgaaactgaaacgcaacttcatcagtccataaaatatcaaaccagaattcgagaggcttctctttttactccaaggcaaatgccagacgattttccttgtttcttggggtaatattaaatactgcacgaataacataggagttgatgtcaacttccttcattctgcgacgcagtgtactatcgctaatatgttctctaactaaatttttcgatgctgcggcaattttaacgggacttatggtgggattatatagtacaactcctataatgtgtctgcagtctcttgggttcaatgcaacttttcggttagttctctttttattttccaaaattcccaatccaatgtcctttttttttacctaattgtacacagttttacgtgatattttgtataactcagctaatttggatgcagaagtaccagccttaattttagtgacaatctcggctcgatgctcaactgatagctcctttgtttttgccattttacaaatttaatgcttagttttatctattaacataactgttaacagttagtttaagttccaattaagcgatcaacatcaactagaactttactagactaatcttcaatttgcactgtgcaaataattttgaagcttaaaaattgtgtgtaaatacttctgacaacagacaagtttaatgcttctatttttagcccatgaacagttattttttccacttcttgacaattgacaacagaaaaaaagcacgttgtgtaaatacttttgaccacctctgtatgcttgtaagtttataaggtgcaagtgaataaatacatgaatatagattcagtatacctttaacttcagtacctttctatttattttttttttacgatttttgataacccctttgatgcaaccgtcctctaaaaataattttcttacttactttacatcctttatggcatccacagcggctcttgacgagagcgtttgttgcttcgccttctccaggaaaaattgttcgaacctttgatgagcagactcgcaattagcagcgtagcccacagcccggactgctgttgatggtcttgcaagacctgatttatcgcctcctgttgcccgactgctggccagattgccgcgctgaattacagaaattacacagcgttttaaattttttttttttcaaaactcactgaaaaaagctgtgaagtggggggtctgggtctgcccgccgccgtgggtgggggaggcggaaccgcttcatgttcggaaacaggctccggtaatctttgcgttccgttagcagttatttgagaagtcatttttgtctcaccgcactacacgcgtataataaggttctcaatcaatatgaacggttttgggggttggtctttgttttggttgagttgccttggtgatcacgtataagcagcacatgcgtaaaagaggtgaataaataccaattaaatgtataatgtaagaaggttgcggtatttattaaaccaaatcattttggtttattttatcattttatactaagacatttctataaaagtttgaataagtttagttaattgttatctgatttaatataaaacataaaacccaatttcaattgttaaaatattattatcagtcggaaacgcttccttctgtctgttacatacttttcaacgaatctagtatacccttttactctacgagaaacgggtatggaccataccgtatggtttacctccaccttctgcgcttataaccgagctcgtgtcttgttcgttgtctggtgcacgtcgatttcgccacattgttgaatcggctcagcctgctgttgaagtttaatgatattcgtctcactctccatatccgattctattgcttcggtttggacatcacaaagtctccgaaaggctaactttactttctccacatcgcccaaggcgaagtagcagagtaagaggtgaatgctacttctaatgtttgcccgctccgtcatgatgaactcaaagctagaagcagcatctgaataagagcccatgcgaataaaaaggattccaatgttttcacggatctttagccttaactgacttaagctctttggtacagaatcaagggccatgcggtacattttaaccgccttttggtaaatacccatgctgtagtagatgttacccatatttagttttagctgattgacgtgtggaaacatcttgtttttggccataatgctgtaggtattgagggcttcgatgtgcatctcactccgttcgtattgctccgcgagattaaaaaaaacctatagtccatatatattaaagttttaaattatccttctagtcgtgcttaccgcatatgtcaaatcgaagttgtgataaacattttcaccgtgctggtctcgaaattggtgtaatgttctatccaatgagaatgcttctttggctttactcaatgcctcggccaattttgtatccaggttcaataatttattgggtgagcgttgccaggccaaaactatagatgactccaagagcttcacaattttttcctctagatttttatacattatttgtggtctatagtttgtattatgtaaaacgtaatataagttggctagtattcagactttggttaactcgctacataataatcgactaaaaggcaggagtagatcattgcttgttcctgataagcttggaaatgcttaagactttatatacatacatatatgctcgaatatagcattctcccttgtttttttttttgtagagtttacagagagaagaatgaaaaaagacagaataaaaagacagttttaaagcccactttatgtttaaaatttttccaataaaataaatataaatttctttagtacactcaggggtatcattcgggatttgacccaaacattaagagcaagacacctacacattgctgacgtatcacaatcacaactacatcaaatattgttaatttcaattttcaaaatttcaatatttggaagcaaactagcgctgcgggtttgtctctagaaaattcatgcttaatcctgagatctccacgctcatacggacagacagacagacggacattactcggctattgatcctgatcaagaatacagatacatgtacattataatgtcggaaacgcttcattcttcctgttacatacttttcaacgaatctagtagttactctacgataaacgggtataaaaactcctatttattgaagtacaagagaaaacgcttccggcct

SEQ ID NO: 35024 - DNA, 2682 bp, DROSOPHILA
atgcacatcgaagccctcaatacctacagcattatggccaaaaacaagatgtttccacacgtcaatcagctaaaactaaatatgggtaacatctactacagcatgggtatttaccaaaaggcggttaaaatgtaccgcatggcccttgattctgtaccaaagagcttaagtcagttaaggctaaagatccgtgaaaacattggaatcctttttattcgcatgggctcttattcagatgctgcttctagctttgagttcatcatgacggagcgggcaaacattagaagtagcattcacctcttactctgctacttcgccttgggcgatgtggagaaagtaaagttagcctttcggagactttgtgatgtccaaaccgaagcaatagaatcggatatggagaaacattacaccaatttcgagaccagcacggttttttttaatctcgcggagcaatacgaacggagtgagatgcacatcgaagccctcaatacctacagcattatggccaaaaacaagatgtttccacacgtcaatcagctaaaactaaatatgggtaacatctactacagcatgggtatttaccaaaaggcggttaaaatgtaccgcatggcccttgattctgtaccaaagagcttaagtcagttaaggctaaagatccgtgaaaacattggaatcctttttattcgcatgggctcttattcagatgctgcttctagctttgagttcatcatgacggagcgggcaaacattagaagtagcattcacctcttactctgctacttcgccttgggcgatgtggagaaagtaaagttggcctttcggagactttgtgatgtccaaaccgaagcaatagaatcggatatggagagtgagacgaatatcattaaacttcaacagcaggctgagccgattcaacaaattggcgaaaccgacgggtaccagtctttaaacaacgaaccagtcacgggctcggttattaaggcagaaggtggcggtaaactgaacgagaccgtaaagtttgcagccacagtgaaacatcgttatgttgtccaagcacttaagaaagacgagctggccgtatatagaaatgaacgtcgtaatgccgttaaacgatctattacaatgattgtagacttaatatcaccttttatcgaagataactataatgatgggtataattggtgcattgaaatcattaaaacttcaaatcttgcatggttggccaacgaacttgaacttaacaaagccttagtatatctccgacaaaatgacgttcatcaagcaattgagacgttgcaaatgtacgaccgcaagagtgagggatccatgaccgccagcgctctgaccaacctgagttttatttatattagtatggcctcccattgcgttaaccagttacatgaaataggatcgctaaaaaacaatgcgccaggattgatcaacgccggcatagtggaattgggctcgcacaacctaatattagcaagcgaacggtttgagggagctctgcaacttcagccgatgaactttgaagccaggtacaatctgggcctagtggccttggcgcagaatgattatgaactagccgaggagcgtttcgagttgctaaaggaacaacttatgttgcccagctcagttcagcacagtcatgtattttaccagcttgccaagctgcaggagcgcagattggaaagcggacttatatctaattttacgccaggggcggctcttcaagcctaccttcaggtagttggcatttctgcctctgacatcgattcaaggctgtttgaaaaggtcggctcgctttacgagcagattcaagaccatcaagaagcaaatcagtactataacgaggcgtaccgcataaacatgagcgacatcggaatcgcaagctcaatcggttcatattacatcaagcttcaggccacggaacgggcacttttttactatgaaagagcggtattagccgatcctaatgatcccaacctaatgttacgtattgccagctgctttcgcaactcatatctgcctaccaaacagtacctcggcctttttcaaaagatacacgcacgatttccagacaacctaacttgcatacgagctcttatgcaagttaccaagtcgctggaattaggggacctgtatgagaggtacgcatcggaatacacccgtctgcaaagccaacagcaggaacgtcagagcgagcagcgataccagcagcagcgattcccttcagcggcaaagtttagcaaccgcttgcgatttctgcagtttgatcctttgggacctcccgcagaacgtcccaaaactggccgaccactacaaagcagagacgatttaggcaacctagaaatggcctcccattgcgttaaccagttacatgaaataggatcgctaaaaaacaatgcgccaggattgatcaacgccggcatagtggaattggactcgcacaacctaatattagcacgcgaacggtttgagggagctctgcaacttcagccgatgaactttgaagccaggtacaatctgggcctagtggccttggcgcagaatgattatgaactagccgaggagcgtttcgagttgctaaaggaacaacttatgatgcccagctcaggtcatgtattttgtcagctgcaggagcgtagaatttcatctaaacaggaacagcgcaataattaa

SEQ ID NO: 35025 - protein, 893 aa, DROSOPHILA
MHIEALNTYSIMAKNKMFPHVNQLKLNMGNIYYSMGIYQKAVKMYRMALDSVPKSLSQLRLKIRENIGILFIRMGSYSDAASSFEFIMTERANIRSSIHLLLCYFALGDVEKVKLAFRRLCDVQTEAIESDMEKHYTNFETSTVFFNLAEQYERSEMHIEALNTYSIMAKNKMFPHVNQLKLNMGNIYYSMGIYQKAVKMYRMALDSVPKSLSQLRLKIRENIGILFIRMGSYSDAASSFEFIMTERANIRSSIHLLLCYFALGDVEKVKLAFRRLCDVQTEAIESDMESETNIIKLQQQAEPIQQIGETDGYQSLNNEPVTGSVIKAEGGGKLNETVKFAATVKHRYVVQALKKDELAVYRNERRNAVKRSITMIVDLISPFIEDNYNDGYNWCIEIIKTSNLAWLANELELNKALVYLRQNDVHQAIETLQMYDRKSEGSMTASALTNLSFIYISMASHCVNQLHEIGSLKNNAPGLINAGIVELGSHNLILASERFEGALQLQPMNFEARYNLGLVALAQNDYELAEERFELLKEQLMLPSSVQHSHVFYQLAKLQERRLESGLISNFTPGAALQAYLQVVGISASDIDSRLFEKVGSLYEQIQDHQEANQYYNEAYRINMSDIGIASSIGSYYIKLQATERALFYYERAVLADPNDPNLMLRIASCFRNSYLPTKQYLGLFQKIHARFPDNLTCIRALMQVTKSLELGDLYERYASEYTRLQSQQQERQSEQRYQQQRFPSAAKFSNRLRFLQFDPLGPPAERPKTGRPLQSRDDLGNLEMASHCVNQLHEIGSLKNNAPGLINAGIVELDSHNLILARERFEGALQLQPMNFEARYNLGLVALAQNDYELAEERFELLKEQLMMPSSGHVFCQLQERRISSKQEQRNN

SEQ ID NO: 35026 - DNA, 2330 bp, DROSOPHILA
tagtagacagatctgtgtcgaataatccccaattccagaaaatcaaacggttcagcttattaccaggagcgacggagcgtttaagacaccagaaaatatgtcgtatcactgcactcgtgttcagaagataaatatgactgagacactcgatgctgagcagttaattggttggatcagcgtcagtcatgttcaggtggaggctttccggagggccaacgacactggtttctcagttggacacgattgcgatagctcggaaacttcggatgtggttcccattgccgttggaattgctttagctgcattaattttggtggtattaatatcatatctgtgtgctaggcgtcgttccacctcccgcggttacatgagcttctaatagaaggacatcagcttaattgggcaggttgcgaatcaaaggagtatggacagcaaattgttagagagaaatttaagattgatttttattattggaagccaaaattgattagttgaagttgaattagtttttttttcaagagggtcatcgaaatcatcaagcgcaattgggtttagaataataaaacggttctttaaaaacttttttacgtctctgtctttgtaagtgtccgatattggttcttgtatgctgatatttgtgttttatttaattggtttgagcaatgtaaatgtaaaataaaaaaaaaatttctaaataaattaatctctataatgtagctaccgtgttaaccctaaaaaggtggtgtcagagaggacatttctattgttaaggcaaaaacctgtacgcaataccaacaagtatacattctattcaaatgttatattttttaaacattattattggggcatataaatgtgtgtattcctgaccttaactgtaataaataatatttaaaaccaagcacaataatgattttcgtttgctggaaagggcttatgggaaaaatcttaaaatcatttttaattttatacaatttttattttaaattattttaattggttaattattgcgctgttcctgtttagatgaaattctacgctcctgcagctgacaaaatacatgacctgagctgggcatcataagttgttcctttagcaactcgaaacgctcctcggctagttcataatcattctgcgccaaggccactaggcccagattgtacctggcttcaaagttcatcggctgaagttgcagagctccctcaaaccgttcgcgtgctaatattaggttgtgcgagtccaattccactatgccggcgttgatcaatcctggcgcattgttttttagcgatcctatttcatgtaactggttaacgcaatgggaggccatttctaggttgcctaactgaaatatacgttatgtttttaagtacaaagtgcatgtactttattacacggtacctataaactgctagagtaaaatgacatttaaattagagttcgatagagtaaaagggtatactttattcgttgaaagatatgtaacagatagatagatagaagcgcatgcttatatcctaaacttgctacgcctactcaaacgaccacaaactttcccaaactacggcgcccaccctaggaagtatataaattaagaaaagtaagccccgcagagggttcctcgctgcagtcactggaacctgtccgatcgccgatggatgtttctccggagatcggaggtgataattcccaattgatgaattaggatggcttctggcctagatgagcttatgagctggtaggtgctctttattcactggatctcaaataagaactgacttaaaagctaacatataaagagcttcatagcttccggccaaatgcttggtcagcaatttgacaggtgctggagtgcggacgatcagtccggttaactcagttgacttatatgttctttatctagccaagttgaactcgccatgtccttctgtccacctgtgtgaacattgaaacctcgggacttataaaagataaaaagttaaaaaataatacaaaatgtttacttttctatatttacatttgccttgccaatttctatcgaaataccaaacacatttgttaaacaacgttaaacctaaaatataaatatccaaaatgtaaacgattagcttatgtatatgcatattggaaaagtgaaatatttattgttttcgtgtagtattgcaccaattgcagacttgtctacaaatataagaggatttcttcaaataggcaataagctttcgggattcatttccgcgtcgtcatctacatcgtctctgctttgtagtggtcggccagttttgggacgttctgcgggaggtcccaaaggatcaaactgcagaactgta

SEQ ID NO: 35027 - DNA, 330 bp, DROSOPHILA
atggcctcccattgcgttaaccagttacatgaaataggatcgctaaaaaacaatgcgccaggattgatcaacgccggcatagtggaattggactcgcacaacctaatattagcacgcgaacggtttgagggagctctgcaacttcagccgatgaactttgaagccaggtacaatctgggcctagtggccttggcgcagaatgattatgaactagccgaggagcgtttcgagttgctaaaggaacaacttatgatgcccagctcaggtcatgtattttgtcagctgcaggagcgtagaatttcatctaaacaggaacagcgcaataattaa

SEQ ID NO: 35028 - protein, 109 aa, DROSOPHILA
MASHCVNQLHEIGSLKNNAPGLINAGIVELDSHNLILARERFEGALQLQPMNFEARYNLGLVALAQNDYELAEERFELLKEQLMMPSSGHVFCQLQERRISSKQEQRNN

SEQ ID NO: 35029 - DNA, 2979 bp, DROSOPHILA
tcaagcgtggcagggtaggatggtcccaatgcctgatcaaggagctggagccacgccaaagatgcttcagatgtctggaggaaggccacatagcggcccactgcagaagcaccgttgacagaagccagtgctgcttcaggtgtgggaccgcgggacacaaggctgagtgccctaaggaagctaagtgcttcttgtgcgcaagcagaggaaaccaagcgaccagtgcagacggtgcgccagacgtcgctaccaaagcgcgagaggtgcggagtcctttgccgaacgccaatccgagtacagagcccgcagaaaagctctcaagatagccataagggagagcaagcgaaaatgcttcatcgacctatgcgaatctgccgacagcgacccatggggaagtgcctacaaggtggtggtcaagaaggcgtacacaaggactcccaagctactggacccagcgatggtccgcagtgtagcggaacatctgttccctgtgatggttgggttacgccccgccgacccagctacagcggaccacgtcgaaaccaccccacggttagcagtgaagagatcctggagaaaactgctgaaggacggcaaggcacccgggcccgacggcatcccgatcagggcgcttcggcttgctctctactccagccagactcgtttgcgaaggcattcaccaagtgcctgacggaaggagtcttcccgagttgctggaaagttcaaaagctgctgctcctcccaaaaccagggaagccacccgaagccacccttgaacgttccggccaatatgcctcatcgatggaactggcaagctcctggagaaactggtgtgcattcggctagagaggggtatcgccgacgcgggtgacctctcacggtcccagattggatttaggaaagcgcggtccaccgtcgacgcggtcaacagagtggccgaagtagcgtcccaagcaatcgaggggaccagatggaagggggtagctaagagtactgcctcatggtcacactagacatcaggaacgccttcaacgcagcgagatgggaccgaatccttgaagcactaattggcttcagcgtcccagcctacctagtcaggataatccgcagctatttttctgatcgggtcctactgtgcggtcggaaggagtcttcaggcaccaggtcaccggtggagttccgcaaggctcggtcctcggcctgcttctgtggaacaccatgtacgacgggatacttcgcctatcgctggtcgggaggagcgagatcgtaggcttcgcggacgacgtggccttgctcgttgtgaatcccggcaaggccgaggaaaggtgtaaccaaaatatcagggtcattgaacattggctcagctcaatggggctagagctcacgccggagaagactgaggccactgtcgaagtaggcagtaccacggtgtcctcctctcgggcaattaagtacctggtcatgatagacaccaggctttcgttccgggaagacctagcctacgctagatcgaaagcagcagtagtaaattgggcgctatcaaccataatgttgaacacccgagatccaaaacaggcgagatccagaaggctgctgacgagcgtcacccgagcgaccatgctatatgccgcctcggtgtgggcaaaggcgcttggaaccgaaagctacgcctacgtatctgctgcgccttcagaacagtgtccaacgcggcggcattggtgatcgcagaaatacaccctatagacctgttagcgcaggacaggtggaacaacgagcttaggggtcgctggacgcagcagctgatacccaacctcaagccgtggctagaacgttccacctaacgcagctcatcagcgggttgctttcgcagctacctgaagcgccttggacacgtggaggcggatgattgcccatggtacggaagtggacgtagcgaaacagctgagcaccaggagggttcacgagtgagcaaatcctgatcgtcctcgcgaaaaaatgcttcacggccataccgcggggagtcctggatttgcccaccttaatgttatattgttatttaaatagttaatcttaatggttcaataaacgaataaataaaaaaaaacacacagtagtttgatatgtcagaaattttttgtttttgaataatttaccatttttaattggtatcattttatgagttagggcgtatagatgatcccggtgccttgtcagcgattgatgtacaaatatacggtcatcaaacacagcaacttgttggtataattgttgaaaattgtgccgcacaggcgatcccggtgccttataagcgattgatttacacatatacggtcgccggtgaagcaatttgtcgatgccgaaagttacgcccagggcctaaatgctacccacagactgtcggtactacatatctgctgctccttcagaacagtgcccaacgcggcggcggctttggtgatcgcaggaataccgtctctagatctgttagcgcaggaaaacaaagtggtcttcacggcctccacggtcgaagcctctcccctacgtcaagagggcaatacgagctgaagcaaggcagcacaccctgaagacatggccgcagcagctgatacccaacctcaagccgtggctagaacggaagcatggcgaaataaggttccacctaacgaagctgatcagcgggtacggttgctttcgcagctacctgaatcgctttggacacgaggaggctgatgattgcccatggtgcggaagtggacagcttctctgagcacgttctcttctcgtgcgataaatacgctaggaaacggagctggaaaccgtacttctacaatttcgaaataattcacaagaagggttcacaaaatgtaatcgcagacgccttaagtagagcggacccaaatttaaaccacaacgaaacactgactgttaagccttgccccacatccgaaaaacctattaacgaatttaacacgcaactct

SEQ ID NO: 35030 - DNA, 851 bp, DROSOPHILA
atggtcacactagacatcaggaacgccttcaacgcagcgagatgggaccgaatccttgaagcactaattggcttcagcgtcccagcctacctagtcaggataatccgcagctatttttctgatcgggtcctactgtgcggtcggaaggagtcttcaggcaccaggtcaccggtggagttccgcaaggctcggtcctcggcctgcttctgtggaacaccatgtacgacgggatacttcgcctatcgctggtcgggaggagcgagatcgtaggcttcgcggacgacgtggccttgctcgttgtgaatcccggcaaggccgaggaaaggtgtaaccaaaatatcagggtcattgaacattggctcagctcaatggggctagagctcacgccggagaagactgaggccactgtcgaagtaggcagtaccacggtgtcctcctctcgggcaattaagtacctggtcatgatagacaccaggctttcgttccgggaagacctagcctacgctagatcgaaagcagcagtagtaaattgggcgctatcaaccataatgttgaacacccgagatccaaaacaggcgagatccagaaggctgctgacgagcgtcacccgagcgaccatgctatatgccgcctcggtgtgggcaaaggcgcttggaaccgaaagctacgcctacgtatctgctgcgccttcagaacagtgtccaacgcggcggcattgctcatcagcgggttgctttcgcagctacctgaagcgccttggacacgtggaggcggatgattgcccatggtacggaagtggacgtagcgaaacagctgagcaccaggagggttcacgagtgagcaaatcctga

SEQ ID NO: 35031 - protein, 89 aa, DROSOPHILA
MVTLDIRNAFNAARWDRILEALIGFSVPAYLVRIIRSYFSDRVLLCGRKESSGTRSPVEFRKARSSACFCGTPCTTGYFAYRWSGGARS

SEQ ID NO: 35032 - DNA, 2177 bp, DROSOPHILA
cctaatatggtcggaatcgcttccttctgccttttacatacttttcaacgaatctagtatacccttttactctacgagtaatgggtgtaaaaatgttgcatcgcctactgtgggttcgataattagtaatccatatatattctactatagcatattcgactacattattttctcttgtaaatgtttggacttatgtattacgtgttccaaatatcatataatcgaaaaactaattttgaatatacatatatattcgtcgatatcatctcaactattcatggatttatataaataaaaaacaatatatgtgttgagctaacaagcgtttttaagttattaagctatttttagaaaagagaaacacggattttatataggtagcgatttccaaatgtgttttattttgtgagcgaaatttggtacccatgtgcgcttgcatgggttacaaaagcgaatgtgttaagcacttaattgcactgcgaacagcagagagagagagagagagagagagagcgtgggagagacaaacttagataacaacgaaatattatcgcacagctgacgtgccgtagtgtttgagtgtgtatcccaagttatcaataaataaattaataaatttaagaacggctgggataccccaaaattcaagcatatttcggaaaaaacacaattcaaatagccgtgacggcagttggcaattgaaaaatgtttgtatttaggtaaaaacacttatctgtttttgaaaaatgttacattttgagctttaaattttattcgaaatgtaaatgcaatgatttgcatttgtattaataccatttaaataacatatagcacgtaaggttctcagaaagtgtaagcacggaattcttgcttgtaagttttcaaaaaattcgctgaacattttgagcttgagccgtacaaccaaaaaaaaaaacgaatccactttttatatttaattctagagtgcagattcttacctagttcccatgatttaagaacgtcaagcatacgcttccctttgcactttgcacaatataatatatagtttaaacagagccttgaaatacattttgatcaggatacagactttcagctttacggctctagtctccttacgcaccacttctcgtggcttaacgttcctacgtaggctgccgttcacaatgatattcaccatttgaacggtttttaatatgtacatatatattcattttaattgatgtttatttaaaaactagttgtgttttgcggaaacgtagaacaaacgtaagcttatctgacaaacttgtgacgttgcaatctcactctttttttaattcttctattccataacaaatattgacttatcctaacaaactatttttctggcgtcaggatgagaagaatttactttaaaggacagaagctgcatataagtattacaaatgcctgagtttatcttatattattttacaaaaaacccgagtcagtttgctgacagtctttaatttacgtatccaactaactaaagctagtcgagttttctgatctgtttgaagagttcaaacgagggtgtccataaatatacgactccgacaaagcattcgatgggggtcttcgccgatccggagaaaagttacgtacgttaaaggagtctaacaaaaaaaaaagaattgaaaatattaaatattagtaaatattactgtttacagctggcctagttaaacgcaccaccaaatgtatcgtcttgactgcttcttccagattgttgcatcaactccgtcctcgacttccctttcttgaatgctgtaattagaggttatttatattcactatttaaaaagaaaatatcaaattgtaatttggattctacaggctattataaagagtcactagacacctaataaaaggaattcgggagtgtttctcgcaaaaagtttacgggagcaagtctcttagaaataaaactcgcgatttcatttatttcttttattgtactttccccgatttgcttgttccattgcgcagcgaagaattaaaattttgaggtctctacgattgccgaataagagcgtcggctcagcttaagcttctcgctaaatcaaataccatcacgacttcatcccattacatttttcgaaaagagatagcgcgcaagtgcctagctgtgtcgacgtagccgtcgattttgtgatgtt

SEQ ID NO: 35033 - DNA, 177 bp, DROSOPHILA
atggtgaatatcattgtgaacggcagcctacgtaggaacgttaagccacgagaagtggtgcgtaaggagactagagccgtaaagctgaaagtctgtatcctgatcaaaatgtatttcaaggctctgtttaaactatatattatattgtgcaaagtgcaaagggaagcgtatgcttga

SEQ ID NO: 35034 - protein, 58 aa, DROSOPHILA
MVNIIVNGSLRRNVKPREVVRKETRAVKLKVCILIKMYFKALFKLYIILCKVQREAYA

SEQ ID NO: 35035 - DNA, 2714 bp, DROSOPHILA
gataccttttttgtcctttattggatactctgcacccccgttcttccctaaaacgagacccccacaaacaatatatttgcaaaatgtttgcttaaataggaattttttagaattctctaaataaagacttctattagcgatttcacgcaaaactgccgcggacacacttttgagaaacgattttatttttatactcattactcgtagagataaagggtatactagattcgttgaaaagtatgtaacaggtagaataaagtatatatattctttatcaggatcaaacgccgagtcgatcgccggattgtactccgtatgaacgtcgagatctcaggcactataaaaatagatttagcatacatatcatcaaaccgcccaaaaatgcaaagcccacacttttgaaaaatattttcacatttatattagtcttgtaaatttctgaaacgcccacacttttaaaccaattttgaatttttgttcattatttattactattttttccctatttctaccgataatccaaaaaatttaaatttctccttcccacttccagctgagtaacacgtaactgatagtcgggaaactcgactacagcattctctcttgttctttataatattttgaactgtcactttctatcgatttcctatctccactcttacgccctttcatgagaacttagaaaaaatgttgggttttgttacgatattgctgccaaaatgttatctatatacttacattgcgttgcaaaataccatcctaacctaccttgagtccttcatttcggtttaggtcaggcgacctgaaattcagatttcaggatcataatttatagcttcagatctaatcagtgtatttacctttgtcgcaaaaaaataaatatacactgtatatgccctaaaggcatgggtaatatcacattcaaaatagtatttatgtacttgaatgagggggaccatataaaagcaattgggaccggcacgactagatgggatggggcttattctttggcgtccgagtcgtctaccagttctgaagactcatccacatcactagtgtcgtcgagcgattgcacatctttaaagtgtaaaaccatgacgatcatcgccacaaacaagagaacggatacgataatattatcccttgccacatccatctcgatagtccacaggtactggctaagcttcgcagtgcagccggtgcagttctgcttcccgcagcaagagccaatgggccaggtgcggttgctcgatgctgtctggtagtcaactacgctggaccttccgcagcactcgaactctacttcaaccttgccaagtctatctctcacccacatctgcagcaccagcatctcggcaaagaactcgaatcttttgcggtacatgaagcgagtcactccgatgcttattgtgtacagcaacaccacgcttccaacgagcatatagccagcgtacttcaagacggtgggttgtcgggccatgtgaatcccaagaacagcgttcaaaatgtaggcaaccattgtcaaagcgcgcacccaaaagagccaggggcgcaaggctaccgggtatagacgaaggcctggaaacatgaccgccttcagataaaggtggctgagcacgtcaagcagaaagatcactccgaccaccaccagaaccacattaatctggaacacgcagtcgtgcgacactcgacaccagcgaaacggattagccatttcgccgggttaggctccagttgatgaaagcgccgcgtcagttgcgcaacacgaattcctgttgtttaactttgaagtaacgagacttctgcctgctgtcgttctgacgattttcacctggcttcgctgctgatttaagccagtttgacccgaatcaagttcgtaatataaacatttagattgcaagctcttttgccaccaatgacactagttgccatggctttaagtgcaaatgagtttacctctctcgaaaacgaaattatgcacctgttgcagatagcgccctatcgagaatcggaacgaggcgcgaaaaaggggaaaaatatgtttgtgacttgacgtaagtcaaccctgcttacaggaatataccaaaaaaaaaagcatgacgaagcgaaatatccttacctaactatatacagaggtggtcaaaagtatttacccaacgtgcttttttttcaattgacaagaattgtcaccccattgaaaaatagttcgttgtgtaaatacttttgaccacctcttgtaattgaaaaacaaaaaagaatgcttagtcaagttccccgactatcagatacccgttactcagctagtgggaatgcgaacgcaaaatttcataatttttctgggatatcgatagatagaaagaaaaattttaaaaattgtttaaaaaagtggaccgttaggaaaatgtggggggagaggcgtgaccagtgtttttggtataccgataaaatttgggaaggcaaacaattaaacgaagttagagtgggtgtaacaaaaagatatttggcccatcgatagaaatttacaagcctaataaaattaaaaaaaaatatccaacatgttttcaaaagctaaagttataagttcattagtcttcatgatttgaccgattgggaatttcctgctgcagagtgtatatggtatggtagtatcatcggatacatagtgtggtatcgaaatactctatagctttatcgcagtagttccttggtccacg

SEQ ID NO: 35036 - DNA, 714 bp, DROSOPHILA
atggctaatccgtttcgctggtgtcgagtgtcgcacgactgcgtgttccagattaatgtggttctggtggtggtcggagtgatctttctgcttgacgtgctcagccacctttatctgaaggcggtcatgtttccaggccttcgtctatacccggtagccttgcgcccctggctcttttgggtgcgcgctttgacaatggttgcctacattttgaacgctgttcttgggattcacatggcccgacaacccaccgtcttgaagtacgctggctatatgctcgttggaagcgtggtgttgctgtacacaataagcatcggagtgactcgcttcatgtaccgcaaaagattcgagttctttgccgagatgctggtgctgcagatgtgggtgagagatagacttggcaaggttgaagtagagttcgagtgctgcggaaggtccagcgtagttgactaccagacagcatcgagcaaccgcacctggcccattggctcttgctgcgggaagcagaactgcaccggctgcactgcgaagcttagccagtacctgtggactatcgagatggatgtggcaagggataatattatcgtatccgttctcttgtttgtggcgatgatcgtcatggttttacactttaaagatgtgcaatcgctcgacgacactagtgatgtggatgagtcttcagaactggtagacgactcggacgccaaagaataa

SEQ ID NO: 35037 - protein, 237 aa, DROSOPHILA
MANPFRWCRVSHDCVFQINVVLVVVGVIFLLDVLSHLYLKAVMFPGLRLYPVALRPWLFWVRALTMVAYILNAVLGIHMARQPTVLKYAGYMLVGSVVLLYTISIGVTRFMYRKRFEFFAEMLVLQMWVRDRLGKVEVEFECCGRSSVVDYQTASSNRTWPIGSCCGKQNCTGCTAKLSQYLWTIEMDVARDNIIVSVLLFVAMIVMVLHFKDVQSLDDTSDVDESSELVDDSDAKE

SEQ ID NO: 35038 - DNA, 3485 bp, DROSOPHILA
tagtattgcacattttcagtcagctgtgtgccttgtggttggagctgcatgatttcctttttatttacacaatttgaataaattttccagcacactccgtgcagcccttgtgagtgcgtgtgagtggtgtgccatttgcaataaaatgtatgtacaaacttaataacataattaattaataagggttgatgctgtcgtttttatgctcgttaacgttaatatcgcccctgttctgtatgccccattttggcttttgggctggacgtgcccgatgcattttgtttagttttcaattagccattagtaacagttataatatcgttttaatgcctttctgttcataaaccgattcgtatatatgtaccttattaaatggacttaatttggctacttatgcaatttccgctcacagtaaacatttttgggtcgcaaagcattgatcttggccgaacgaacaaaggcatgtaaaataagtttaagcaccgaaatcaatcagtgaaattgcactacacatatacataacattacatcgatggcggtaaatgaggagtctgtggaaatctaaccgagcgataactcgtaaaaagaaactcacatactctgaagtccttaaacatactgtacaaaatcaatgggaagaaggttattaacataaccaattttcatccaaaccggtgtggatggatgtacgggtaactgtctggcacacaaacaagtcgagtacacagcgacgattggtttaacatgatttttacacttgagtgcgcatctcttactgagcttagcttagcaattatcctagactggggttattcagttattaactgtgtttcggctgccgtagttttagcactgaaatagcttaaataggatttccttgttgccgtccttccgttcgcctcgtcagccagcaggtccgcttaggtcaggaagatatgtctaatggggtcggagttcaggacttgcacatcactgcagattagatatcagcttggaccactcacctcacaacaaccgtgttcagcaggagacagggcgccagcatcgacctaaatatgtgcgtcaggcgatcggccgaggaggtcttccgccgcgagattgccgccatattgtcgcctgcaggtggcataaaatggtgggataaatttgcaatttgaaatttgaatttgaatttgaatttgagttagagccagagttcgcttagcgacagacgggcgaatgcaattatgtgcaccaacaaccgagctgtgcagttccattttgcccgcccgccgcatttcccattttcattttaataagctgcaggctgcgccatttgcatactttcatttacacgtcttatcgttattatcaaaaagcgtgccatgtctatttaaatgctaaaattacaaggaacgcagcttggtgaagcaacaagagtgccgagggctaattgtctatgatgggcaacaaaacatctgcattgatttaaactaaatatcacggacgcttggtttgaggaattcaccgtaaaatatcagaatgttttgttttagtccttaaataaatattgccaatgagcaaaataacaacacatttttaaacaaattcagagcatgttaaagtaataaataaaactattatcgaattcatcattcccctttttgacaaaaaagtacgttattttaatattaagaaatttgaaaaataaacagatctcgcttatataagtatattctaaaacaacctaataaaagtaaaatgaacagtaccatttttaaatcggaaaattgaaatttataattgcaaaaaaaactatattttagtcagtcttaagtgagtttcttattttctgattttcgtcatcatgtgaatgcagacattgattactgaccaaaatattcgcagtaaataattgatttgttaagtataaaagaaacccgaatttggaaatgcctggcacttctgactcttcacagaaaagtagataggtatttcatacctttcgaaacgaagacgtatatgctcgccggctccgtgttgctggccgagcaggtgtagttgccggagtccgtgacctgcggttcccggatgatcaggcggctctgagtgcggggtcccggggtcgtctcaatggttatgtcgcgccgggagtcgacgtagttgatcaggcgatcgttcttttgccagtatacgtactgcggtggtgtaggactctgtggcaaggaagtgatggggtaaccggagttgggacttttaagctcacttctcgacttaccttctcaataatgcaaactaaattgattgttgagcccatgtcgacatgcagctcgccggagcccagaatgaatgcctctggaacaaccacttgaagattcacaaagtgggaaatgatgccagtcggtgtcgagacctgtgtgttggtgtttgattttatggcggatggtccgggggagcgttgaacgaaagcgacgggagtggaaagagcaagagcaagtgtggccattgagtgcgattggtattcgtaatcaacttgaatcttaatgcttcagcaaactgcgagcaggaattactttcctcccagctagttccgaaaaatcgttgcgagtgcaagaaatgttgcactcattgaaatgcaaatcaaacaatttcaatttggcacgcaaaaaagaaacaaaacgaacggattctattctatataagtggagcgctttctacacgtcccagctcggagctcatctccaaaatatccggcaggcagcgatttcaactgcagtttctccggatccgctgccgcaatggagtaggaaaataaccatttcggcatatttgcatgcagctctcgtttgctgctcagcttcatagtccatattctgtattccgtattccgtactccgaggtccttagtccgcagtccgttgtccgaagacaggagtccggaggggacatcgcccgacccactgactctgagcctgactcggtgactgactggtttgttctggcatgcggcttctcatattgaaattgcatgcaaacaattttgaaattgaagctacgtttctgaaattgcaccacgctcccctgcccatcatccatctagtcaaagcagggcgaatggcacttgtgctgctgcacaaacagagttgctgtcaagtgtccatttcagcagtgtctaactttgttgcttttcggttagttgtctcccctttcccgagtccccctctaagctgtttttcttttcttctccccgaccccgcacgaccgtgcaccttccctatttgcattctcatgactttcgggcttacttgtaaattacttcgtgaggtggaagaccttggttctatggtacttgcagggacccgtatgtgtcggggtccggtttatctggacccgttttctgggtccaaatttgtcgcagcctgccggctgacgctcacacgcccaggcggactcgtcaatgtcaccgccactatcccaatcccaatcccactcccaatcggactgat

SEQ ID NO: 35039 - DNA, 558 bp, DROSOPHILA
atggccacacttgctcttgctctttccactcccgtcgctttcgttcaacgctcccccggaccatccgccataaaatcaaacaccaacacacaggtctcgacaccgactggcatcatttcccactttgtgaatcttcaagtggttgttccagaggcattcattctgggctccggcgagctgcatgtcgacatgggctcaacaatcaatttagtttgcattattgagaagagtcctacaccaccgcagtacgtatactggcaaaagaacgatcgcctgatcaactacgtcgactcccggcgcgacataaccattgagacgaccccgggaccccgcactcagagccgcctgatcatccgggaaccgcaggtcacggactccggcaactacacctgctcggccagcaacacggagccggcgagcatatacgtcttcgtttcgaaaggcgacaatatggcggcaatctcgcggcggaagacctcctcggccgatcgcctgacgcacatatttaggtcgatgctggcgccctgtctcctgctgaacacggttgttgtgaggtga

SEQ ID NO: 35040 - protein, 185 aa, DROSOPHILA
MATLALALSTPVAFVQRSPGPSAIKSNTNTQVSTPTGIISHFVNLQVVVPEAFILGSGELHVDMGSTINLVCIIEKSPTPPQYVYWQKNDRLINYVDSRRDITIETTPGPRTQSRLIIREPQVTDSGNYTCSASNTEPASIYVFVSKGDNMAAISRRKTSSADRLTHIFRSMLAPCLLLNTVVVR

SEQ ID NO: 35041 - DNA, 3340 bp, DROSOPHILA
ataatatggtcgagatctttggaaccataaatgccagaaggttgaggttaagcaggtacagattctagagacatagacgcagcgcaagtttgatgacccatgttgccacgcactctaatgcccacaaatcacccaaaattgccacgcccacacttatgaaaaatgctttgatagcttatcatatttctatcgatttgccaaaaaaaagtgttgtccccttacgtcaacaaacctcacacttaaaaaattttttttgcccttttatcgttttattgtttatctaactaatttcaaccgatttgacaaacaactttttggccacacccactttaatgcccaatgagaaaaattttcctaattttattccccaatatcatttttgcgtttgcaatcacactagctgagtaacgggtatctgatagtcggggaactcgactagatcattctctcttgtttcctcacaaatttctatttacaaaatattttaaaaaatgttgaaacttctcgttcgcactccccactaatggtttaaataaatatattttaatattattattattttttctatattttccataaatgtgctaccgatgtcttaaacagaacacaaatgcaaactaaatcctcttctttgtgaacgattgcagcctgttaattttttcgtcgtgctaagggaatcatcatttattaatggaatagtgtaaacttttacacttatgtgaagcgttatccaatgggctttcattctttaggtcatttgaattgtgtcaaccctctgcaatgactaatagagagaagggtatttcaatctatacactgcagactttagtaaactttattaccccttgagtaattgatttccacaaacgagttttcaagtgtcgcctatgaattatctaattgacgattgatggacttataatcacgccattggcggccctataaaaggacattgcagacggtgctttagttcaattgttgaaattagagtgcattcactatggatctgcgaaggtggtttccgaccttgtacacccagtcgaaggattcgccagttcgctcccgagacgcgaccctgtacctcctacgctgcgtcttcttaatgggcgtccgcaagccacctgccaagtttttcgtggcctacgtgctctggtccttcgcactgaatttctgctcaacattttatcagccaattggctttctcacaggctatataagccatttatcagagttctccccgggagagtttctaacttcgctgcaggtggcctttaatgcttggtcctgctctacaaaagtcctgatagtgtgggcactagttaagcgctttgacgaggctaataaccttctcgacgagatggataggcgtatcacagaccccggagagcgtcttcagattcatcgcgctgtctccctcagtaaccgtatattcttctttttcatggcagtctacatggtttatgccactaatacgtttctgtcggcgatcttcattggaaggccaccgtaccaaaattactacccttttctggactggcgatctagcactctgcatctagctctgcaggccggtctggaatacttcgccatggctggcgcctgcttccaggacgtttgcgttgattgctacccagtcaatttcgttttggtcctgcgtgcccacatgtcgatcttcgcggagcgccttcgacgtttgggaacttatccttatgaaagccaggagcagaaatatgaacgattggttcagtgcatacaagatcacaaagtaattttgcggtgagtaaacggaaataatgtacatataaatataaattagggtgcactgtggaaaattcacgcacttttttgggacaaaacttattttctgttgggctagatcgacttgatttgtgatcctggtcgaaaatatatttacccttaaaatgtggcaacctttttcaataccatgacctcttttacagatttgttgactgcctgcgtcctgttatttctggtaccatcttcgtgcaattcttggttgtggggttggtgctgggctttaccctaattaacattgtcctgttcgccaacttgggatcggccatcgcagcgctctcgtttatggccgcagtgcttctagagacgactcccttctgcatattgtgcaattatctcacagaagactgctacaagctggccgatgccctgtttcagtcaaactggattgatgaggagaaacgataccaaaagacactcatgtacttcctacagaaactgcagcagcctataaccttcatggctatgaacgtgtttccaatatctgtgggaactaacatcagtgtaagcagatgtgccctttaatgaaatttttgacatttgttttactcttggtttccttgaaggtcacaaaattttcgttctccgtctttactctcgtaaaacaaatgaacatatctgagaaacttgccaaatctgaaatggaagagtgaaaaagtttattcgaatttaaaatcacacatgaaagaaattaaagtacacggtaataaaattttgatagttttttaacactgttgctagcgggttgggtaccgatttttaaaattactttaaattaaacaaaaacactactgcaattaggtaaggtaatgtaagggttatgaatttcatagtttcctttttaccgcaacataatataatataatcatgcgtatcttgaaaaatatatatttattttttgaaaagtgagctttaaacctacttggtacttatctacatataaagagcagggaaatctgaagagcaaataccattacagccgtaccgggatagagctagtaaattttggaatatcaataaaaatttccaaaaattaaacaagagagattgctatagtcgacttcgttactcacctatgactcgttactcacctataatttttcagcgatatcgatagatattggtgaataaaatgagaaaaaatttaaaaattgatcaaaagtgtgctcgtggcagttttgagcgtaaaagtgggcgaggcaaaaagttttttcgcaaatcgatagaaacttacaaaactaatacaaatatgaaaaaatatcaaaacattttgcacaaatgtgggcgtggcaacatgaatcaacaaacttgcgctgtgtcattgtctctagattctgtatgctgaatcttagcattttacagttccagttagttacttcatatggtcggaaacgattccttctgcctgttacatacttttcagcgaatcaagtatactcctttactctacaagttacgggtataataataaaagaagtacattatatgtatgtatttttaaaacgttggcattttctgagtgtta

SEQ ID NO: 35042 - DNA, 1155 bp, DROSOPHILA
atggatctgcgaaggtggtttccgaccttgtacacccagtcgaaggattcgccagttcgctcccgagacgcgaccctgtacctcctacgctgcgtcttcttaatgggcgtccgcaagccacctgccaagtttttcgtggcctacgtgctctggtccttcgcactgaatttctgctcaacattttatcagccaattggctttctcacaggctatataagccatttatcagagttctccccgggagagtttctaacttcgctgcaggtggcctttaatgcttggtcctgctctacaaaagtcctgatagtgtgggcactagttaagcgctttgacgaggctaataaccttctcgacgagatggataggcgtatcacagaccccggagagcgtcttcagattcatcgcgctgtctccctcagtaaccgtatattcttctttttcatggcagtctacatggtttatgccactaatacgtttctgtcggcgatcttcattggaaggccaccgtaccaaaattactacccttttctggactggcgatctagcactctgcatctagctctgcaggccggtctggaatacttcgccatggctggcgcctgcttccaggacgtttgcgttgattgctacccagtcaatttcgttttggtcctgcgtgcccacatgtcgatcttcgcggagcgccttcgacgtttgggaacttatccttatgaaagccaggagcagaaatatgaacgattggttcagtgcatacaagatcacaaagtaattttgcgatttgttgactgcctgcgtcctgttatttctggtaccatcttcgtgcaattcttggttgtggggttggtgctgggctttaccctaattaacattgtcctgttcgccaacttgggatcggccatcgcagcgctctcgtttatggccgcagtgcttctagagacgactcccttctgcatattgtgcaattatctcacagaagactgctacaagctggccgatgccctgtttcagtcaaactggattgatgaggagaaacgataccaaaagacactcatgtacttcctacagaaactgcagcagcctataaccttcatggctatgaacgtgtttccaatatctgtgggaactaacatcagtgtaagcagatgtgccctttaa

SEQ ID NO: 35043 - protein, 384 aa, DROSOPHILA
MDLRRWFPTLYTQSKDSPVRSRDATLYLLRCVFLMGVRKPPAKFFVAYVLWSFALNFCSTFYQPIGFLTGYISHLSEFSPGEFLTSLQVAFNAWSCSTKVLIVWALVKRFDEANNLLDEMDRRITDPGERLQIHRAVSLSNRIFFFFMAVYMVYATNTFLSAIFIGRPPYQNYYPFLDWRSSTLHLALQAGLEYFAMAGACFQDVCVDCYPVNFVLVLRAHMSIFAERLRRLGTYPYESQEQKYERLVQCIQDHKVILRFVDCLRPVISGTIFVQFLVVGLVLGFTLINIVLFANLGSAIAALSFMAAVLLETTPFCILCNYLTEDCYKLADALFQSNWIDEEKRYQKTLMYFLQKLQQPITFMAMNVFPISVGTNISVSRCAL

SEQ ID NO: 35044 - DNA, 2315 bp, DROSOPHILA
ttgctagttttcaacacggagctgcgagtcatcaatttcattatcatcgttatcaccatcactggcaacagctcgcagtcattaccaacggtaaaaggaggaaaaaaggagggcgaacagctgacgcagaagggcgctggttgcgaacagtggaattaatcaaaaaaccgtaacccgttaatatgaacgatctaaggcccgttgagaaaacgacgggcctgccacagaaaaggaaaagtgtgccaataaattctgttttgctgtattccatctctatctctctctgcttaatgttaagccgttttggggcccacttcaataacatcgcgcccacataagcccaattgattagcattgatttaaagttaatgagcacttcatttggacagtgttgtctggccctcgattgcagcccacctttgcctagctaccacctactaccttagagccaacgccaactcaatgggattccaaacgcgtgccacaaagtatgctatgcttttctgcccgctccagcacgctttgcggcctgagagcaaattaattaaaaatactaaggcgaggacccagcctgaccaacccacgcttttcaatcggaacggcagctacaacaaagcagaaattctatttcaattagtggcaaaaattgcaaaaagctgtgcaaacaaaagattttccttagcaacagcaacaccgatagaaacaacaaacaaagggcaaaaaaattagaagtggaaaaatagcgcacccttgtacacagaaaataataagattggagattaaaaacaatataatctagctcaatctgataatatttaagtttgtttctttaacttatttttcggaaaactaatctaattccgatactatatttattatttatactaggcgagtcggatatttgaagttattttcagtgatactcgtagtggtaagaagttcagtgttgattccttaattctgatgagcgtaagtcccagtataaaactcgtgtgtgtactcacctggaacctatgactttctttgacgactcggtcgtcttctcgtctcggacatcggatgtggatgaggatgtggatgtggccagtgaatgcttggaaccttcttcctcttccggaaggggtgactcatagacgaatgcgggctgtaggtgcggactggcggagtggccccgctgactggacgacgacgaggtcgtcacataggtgaccagtgccggctgtgactgggtgtttggatagcccagaatgccgggggtggccaagggtagcacggcccagagccaaagcgctggaaaagtgcgcggtagacgcattgtggagtggtgaagtcccgggcgtttgtttgtgtttcagcctcgttctaatcttaaaatggctttccacttccttctgctttcgagaggtcaggacctttggctcactgaatccgattggtgcttggtgtcgaaggacgatgcataaacatcaagaaaaagctgcaaagtggaataaaaaactaattaatgaaatgttaatgaaggcgagcgtaaagaatgccgtgggaaatttgcataaaacgcggtacccttaaagaaactgcgcaactttaagcgcttaagcggcactgcaggaggtgcattgtggatgcgtctcgcttttaggccctgtcataatcaggcgtcctggcagcaggcaaattgccaagcacctgaaacccggcacgctaatgcgcctgtaattatgctaataataacgagcagccacatgaggcgagtgggtgaagtaatgccattgaagtcggcgtctttgcagtaaagcatgttttcggtgcggtgccctaagtgcctggcaatttggtcttaggcgagggagtacgaaggcactgcctaccaaaaatggacgggtgcattgcggaatgcatatacctgacggaaattagagattcgcaatatcttagagcggctgtgaatgcagcagggaagattttgaagaccaatacgcatctaggcacagggagaaatcactttatttctatccagcaacctcttttgctcttttgggctccccttctgtcctcgttgtctgtcacttgttatcagcttcaagaatctgtgtcaatacttggcagccattttgacagttttcctgctctgcgctgtggcactaagcttcttctgtacgcgtgtgtgtgataacacaaatgaattgacaatggcgcgacacgagggaaacaacaaacaggcaatatgttaataagcacaatggccaacagcagcagcagagccgaagaatgcgctgacaacttaaagcccatgctgtcaaaatgttagctaa

SEQ ID NO: 35045 - DNA, 315 bp, DROSOPHILA
atgcgtctaccgcgcacttttccagcgctttggctctgggccgtgctacccttggccacccccggcattctgggctatccaaacacccagtcacagccggcactggtcacctatgtgacgacctcgtcgtcgtccagtcagcggggccactccgccagtccgcacctacagcccgcattcgtctatgagtcaccccttccggaagaggaagaaggttccaagcattcactggccacatccacatcctcatccacatccgatgtccgagacgagaagacgaccgagtcgtcaaagaaagtcataggttccaggtga

SEQ ID NO: 35046 - protein, 104 aa, DROSOPHILA
MRLPRTFPALWLWAVLPLATPGILGYPNTQSQPALVTYVTTSSSSSQRGHSASPHLQPAFVYESPLPEEEEGSKHSLATSTSSSTSDVRDEKTTESSKKVIGSR

SEQ ID NO: 35047 - DNA, 7931 bp, DROSOPHILA
atatttcgacgttcatacggacagacggatatgaccagatcgacttggctatttatcttgatatagaatatatatactttatatggtcgaaaccgcttccttctgcctgttatatacttttcaacgaatctagcatacccatttactctattgtcttgtggattcctatcggtttaccaaagccattttatctcttcaaactcccacatttatgaaataactaaaaatgcttttcctttttttttttctgattttcccaattcctttcgttatgcgttttttattgcacaagcagctaggtaacttgtaactgatagtcgaggctctcggctacaacgtttcaaatttttgtgatgcaagttcgcaggtaaggtcgactggagaaacattctcgcaaggtatcagttatcagttcatatgggtttgcttttaggtaatatgtgtttatattttttattaagagtttttatttaagcttacataatagcatacataacttttagtttgcgcatttgtaaagtttattttactaaattacatttgttcagttgccaaaacattgacgcatttcatgattgcatttgcatttaattttcgattgcgttggcaatcgccgcctacgtatttgttcaacatttgtttgccaatccggcaattttttcagtgaacaaaaagggaaataaaagtgctgttcatataccacgccgcatctgcgttgtgtgccgcacattaaatgcaatccagaaaaattgaagatatatttacgcaaactgcacttaagtatttaaaatatttgctttcattttggcaaatgcaatcgtttgctgcacatcaatctcgtatcggaccaatccatcaaattcgggacgcgggattaaggcacagcaagcagggttcattacagataaaattatcattatgcgtacggtataaattcactaagtcacattccaaggtttaacaagaaaacgacccacacttgcttgtgagtcttttagcttcacggcagcagtcggggattaaaacgccccatgaatagaatcatacccgtagggttgtggcgcacaaagtataagaaaggcttgtcgaagcgcagtcgtggagcgtcagggacacgagcctggcgtggacggagtggcaacggcagttccaagtatttcgggtccagaaggtcatcgtagaagcctcgtcccagtgcagattcctgcaccaacgagccgaagtccacgaccctctccgaagaatcaaaggcgtcgtcatctgtggcatctacgtccttgtttcgcttacgcagtggtggcgcggggtacatttccacatggtggtgttccgagatcttctcctcgccgcaggtgctgaacgtgttgatctgtatcatgtcggacaggaagatgtcgcgatttccggcgccagttagaccccgcaggtcggcaaagtcagacttgaagagaccgcgtagacccatcttttgcagacccagagaggcgttaacgaaagagcggtgtgaaaagcgcggcagttgcacctccattcctggtcgatccataagggacgtgagcaacctacgccaggcctgcttgtcactaaacgccgtctccactagactgcgctcgagtcggtcgaggttgtccatcggagaaatggagctctggtggccaggcattacatagactgtgctaacagtgttctgaactcgaccgaaggaaacgacggtggcgtccaggctgggttcataccctgccaagaagccggaacggtacaacactgctggaataggcacgagccggcgctggcgaactgtaggatgcacttggaagaacatctctccatcacgatcagtggtggagccatgcgagcagtctgtctggaaaagattggccgagatggtggccaatggtccgtttacccatacgctatttgtacgtagatactcaagaaccttccccatcgtgtggcgtttcaccagaaggttggttcgacgtctcacgatgtcgttaaccacgtgaaagttaacctcctcaacatgtccggcgtaaagctgctgggtcttctccttaaagaagggtagaatttttccgttggccctatcgctgaatatttcacgcacaaaagcagcagtcgctatatcgctgtccgaagcttgttccactgagttggttatattcttgaagatgaggtgcggattgaaggtgaccatgtcgtccaatttcaggatctcgttcatctcgccagaagtgctaccgcgcgctcccagaaagaccatagaaagcatggacgtgagggcaaatggggatatgaccaaacttctggcggagctgatcttctccgaggttatagctcgccagtagctaaaggccagctcgttgcagaggcgggcgaaggattgcagatcctcatccatcatcgcggtggaggcctccagcccctgagaggactcgggacttgggtctagctttacgggtggtcgagttgattgtgtggagctggccatcagattgattagcaaaggtggccgttgggagggacgctgctggttgagcatcgattgactatggatcgggacttgtagttggaccgggtctgccttattcgcattgtaaggcagaacctttggcggctgcatatccagttggttgtatccccccattagcgagggttgaacgtagtaggaaactggctttaaagtgcttagtcgctttgttgttggtggggggacactagtagtacttgttgacctagctggggcttctgtaatagttattttagtactgctcgtcgttacagttgtactgctagccagcatgggaggtatgtggtaagctgcttgatcatcctcgtcttcttcatccgcttgatctactggcggattcccgtagttgctaaggggcaatttcaccttgtagttatagttatcctcgtctgattcagttgcgctcttattctcgccgactccttcggaattggggttcagaggcctaactacagtcgctgttgtttcgcctagctttacgtagggatcctcattgtccagctgtatttcttgggtacttgttactggctccgcactttcagcatcctgttcttccgaaatggtagctgtaagttcgtcggaaatttcttccatcgactcgtcgttcagttgttgcgatttcactgtgctcaactcgattttctcagtaacctgctcggagcttagcgacatgtcagaatctgaagatgccaaggacatatcaccgggaatttgagtgaccggtgatttatcctcctcccgttctccgctgggtggatattgatactcaggctgcagttgcgcggcgttggtgtcagtgacctccaccacaatttgggcttcctgcggctgtggttctaagtacacatgcttttccgtcgttgatgattgctcttcttcctgggcatcttggtaaatattagttggtagtgttatttcttctaccacggacagctgcgttgttgacccaggctcttccgacgtggaaggctcgggctctgtctccttttcttggatatctatgttcggcgtctgcttctgctccttggtatcattttttaagagctgcagtatttcctcttcattttcccggttcgtgttgctttcaggaatgttgctataggtagtcgttggttcttcgctgccggaaccctcctcgctagaagtggtctgctgggtgggatcttgtggttgaggctcgatgggtgtggtggattcaacactgtcagcatcggtggtttccacggaaggggtttctgtgtatatctcctctgtcgttgcaacggtttcctgcccaatggtctccatagttgattgaacttctattcgttcattggcaaaaacttgctgctcctcatcttcgtcttgctgttgctgcgcataaatctgggacagcgataaaatcggtatacggtgggtgcttgtctctaagtgcgttggactttcaggcaaagcttccggatatgtggattccttcttgaacggacccgcggttgttgtaccgtgcgtctgctgtatttggtttacctccgttttttctatgtttggctggagcaagaaggaggtattcagttgggcgaaactggtcaggcgattggaatcgtcggctggttgggcgtttggcgggagcttgttttgatcgccttgggttatttgctggataacatcggatataaggaattccaactcatcctttgtttcgttcgagtttaaaggaacgtctgagacaagagtattgctgccgtcaactaacgttgaggccacagtggccgcctgggtctgaaaattggccattgatatttggtccgtgggcttgagcatttctaggttgagttgctgaacgaggtcggcgatcaggggggttacttcggtactgtccatttcagcgactgtgctggtctccgagactggaagtttagtagtctgttctgtggtgacaaccgctgcaggcacctcctccttcacttctaggtcagtggggtatgattggctagcttctgatacgttttcgtgaactgactctacaacagacttatctgtactttcgtcaacgtcatcatccacttgtgacatctgcgttgtaactagaaactgtgtcagtccgggcaactcggtggtctccgtctcctcctgtctgtgatcagtctttatgtgctgtagtggctccggcacccttgttactgtaaagtattgtggtctagcggtgatcacaactacaggtgtttggtcctcgttttcattctcaaggctgctgatagtggtatctgctggttgctgctggaccactgaagattctgtgaattcggtgatatcctcatcttcctctgagagcatcgtggccaaagtactgcctccgtagtgggaagtaagcggcttgtggctggtcgataatttggtgggcttgctgggggttgttgtaatagaagaacttgaaggcgtagttgttgaagccggagtggtgctggatacgactgctactttcttcttgttggctagtgcctctatctcgagcttgctctctgcactgtcgtatttcaccggacttgcaccagaagcctcttcacccttgtctgacgccgacaagtcctgggtaagtgactgcactatttgatccatggagagaatctgatctggcgagagctgtggagccggcgatggtgagccaaggtgcaattgctgctgcagttgtgacagcgaaggaagcggcgtctttttcagaggcttatgttgcactggtggtggagttagtaaagtagacacattttggacggcgtcatcgttgtagcttggtagcggataaaacggtttgtgtgtggtggtggaggaatgaatgacgtaaactatgccataggtctcggtttgcggctccccaacaatcttgctcgactcagttgtggtgtaatgaactggacgacctaatccatggttgtgttgctgggacagtggacggtttgcaggtttgttgtgcaatttctgatggtgtaatgctggtggtattgccgtggtcttagccggtgcaatgcttgttgtagtaggagcagtcactgttgttgtgggcgcctcggtggatgttgttgtgtatgtttcagttgatgttgtagtagaagcctgtgttgaactcgttgttgtaggctctggttcggaagtggtggtaaccgtactctctgccggtggctctgttgtttggggctcagtgcttgtgatcactggtttgaaagtggtagttgtagtggttacttcttgcgctggcattgttgaagtgatagatgggttacttgttggtctctgcggtctggaaggcttttgaggtaccacaatctgcgatccacttacttcctggatctgtggcctgggcttagacgttggcttacgttttggcttggaaggcttggagctgccaccagaagatcctgtacccggtgttctggtgggttttcgtttcttctttttgggtgtggtcgatgcgggtgcttgtgtcgttgttgtcgtactttctgttgttgctggaacaggctcctcctgagtgggtggctgtgtttcaggctctggagccggtgtggttgttgttgtcgtcgtcgttgacgtggtagttgtctttcttttgatcttctgctttccggcttgagatgtagtttgagttgtaccattaccgttaggctttttcactcgatgtggctggttcggcttgcgctgcacactagccggcttcttggccagctggtgggtgagcacaacttctgtggtagaaggggcgctgctcgaggaggtgggcgtgtggattatctcttggttgttgtaaaatacccttcgtgtggtcgtttccggacgctctgatgtgctgctcggttgcttctggtagatgggctgcatgtgcacgagctcaaaatgtggcatatttgcggcaacctgctggtattgctgcattcccgtgtacacggactccattgggtccagctcctcctgcaccacctgcggagttacagcggtagtgctgggagttgtagtcgtcttacgctttgtccccggcttacgcttcgcgggcttcggtttctttgtggccatcgttgttcctgtcggcgtcttattgggcgtttccagaagttccgattcggccgtcatcacaatttgctgtgggcgctgctgagggaaaatatccccaccagtgttgccgaaaatggcgggcaaaattagtgaccaagacgatgagacgtcgggcgtgtccaacagaggaagaagcagttccccagagctattctttgctgagctggaggccatctccttattcaagacattttgcacactgttcactatgtcttggacattcttatcgggatggctctcagctagcggagccggatgaattatcgatggtccctcgccgtcaccgttagcaacgatactctgaatctcctgcatggtcatcaaccgcttgactagctcgccgtgatcgtcgaacgtatagaattcgtagcggtctgggttaaggagatcgattggactagccacttgcaatgatggctgtggtttgggaactttgtgtccaagggcatctgtaaattgcggctcatttccgtcgagaatcacggacactgaagggtttgcactaaaatgacaagagattttaaaaaaattttagtcgtttatttttatttatttgggaatgttttatagatcaacacactgtttcccatgcgctaactaacgttgatctgcttaaagtataccagtttttattgcgggcttgttacttaaaactagcagaagttttaactgcggaaaattctataagcttatgatccaatttgttacattttacctttgtaattttattttttctaattatagtagtatatgacaatagtagtatatgttgtagatttatttgtagatttatatttgacgatttaaacccatcaggagagatgtggaatgtgcgatcttccaggcgaagtagtacaaatccagtagtacaaatcctgcctgttgtatgtctaaaagggctgctactgcatagcctttcttttccatagccccgaggtgaaagttcgctactcaggcatgcaaatggaaaccaaaatagaaattcgggcttgtaacatcctggcatgtaagcagtctgttaaaggtctgcctctcaatcatttttcccagggaagggagtagacctgtaagagtcaacgtctggcggtggttattcgagtttacggatcattattcatttctaattgaatcttttatttctaaggtttcggaaaaaatactgttgaacattgaaacaaggaactgcaatgcttgatgtgttagcagtctgatgattctattgtaaagaagagctgcttttggagttttcttggatgaaagttttggtattagttccatcacgtcgtccagtgttatagcactagcagataggctcatttga

SEQ ID NO: 35048 - DNA, 5931 bp, DROSOPHILA
atgaccatgcaggagattcagagtatcgttgctaacggtgacggcgagggaccatcgataattcatccggctccgctagctgagagccatcccgataagaatgtccaagacatagtgaacagtgtgcaaaatgtcttgaataaggagatggcctccagctcagcaaagaatagctctggggaactgcttcttcctctgttggacacgcccgacgtctcatcgtcttggtcactaattttgcccgccattttcggcaacactggtggggatattttccctcagcagcgcccacagcaaattgtgatgacggccgaatcggaacttctggaaacgcccaataagacgccgacaggaacaacgatggccacaaagaaaccgaagcccgcgaagcgtaagccggggacaaagcgtaagacgactacaactcccagcactaccgctgtaactccgcaggtggtgcaggaggagctggacccaatggagtccgtgtacacgggaatgcagcaataccagcaggttgccgcaaatatgccacattttgagctcgtgcacatgcagcccatctaccagaagcaaccgagcagcacatcagagcgtccggaaacgaccacacgaagggtattttacaacaaccaagagataatccacacgcccacctcctcgagcagcgccccttctaccacagaagttgtgctcacccaccagctggccaagaagccggctagtgtgcagcgcaagccgaaccagccacatcgagtgaaaaagcctaacggtaatggtacaactcaaactacatctcaagccggaaagcagaagatcaaaagaaagacaactaccacgtcaacgacgacgacaacaacaaccacaccggctccagagcctgaaacacagccacccactcaggaggagcctgttccagcaacaacagaaagtacgacaacaacgacacaagcacccgcatcgaccacacccaaaaagaagaaacgaaaacccaccagaacaccgggtacaggatcttctggtggcagctccaagccttccaagccaaaacgtaagccaacgtctaagcccaggccacagatccaggaagtaagtggatcgcagattgtggtacctcaaaagccttccagaccgcagagaccaacaagtaacccatctatcacttcaacaatgccagcgcaagaagtaaccactacaactaccactttcaaaccagtgatcacaagcactgagccccaaacaacagagccaccggcagagagtacggttaccaccacttccgaaccagagcctacaacaacgagttcaacacaggcttctactacaacatcaactgaaacatacacaacaacatccaccgaggcgcccacaacaacagtgactgctcctactacaacaagcattgcaccggctaagaccacggcaataccaccagcattacaccatcagaaattgcacaacaaacctgcaaaccgtccactgtcccagcaacacaaccatggattaggtcgtccagttcattacaccacaactgagtcgagcaagattgttggggagccgcaaaccgagacctatggcatagtttacgtcattcattcctccaccaccacacacaaaccgttttatccgctaccaagctacaacgatgacgccgtccaaaatgtgtctactttactaactccaccaccagtgcaacataagcctctgaaaaagacgccgcttccttcgctgtcacaactgcagcagcaattgcaccttggctcaccatcgccggctccacagctctcgccagatcagattctctccatggatcaaatagtgcagtcacttacccaggacttgtcggcgtcagacaagggtgaagaggcttctggtgcaagtccggtgaaatacgacagtgcagagagcaagctcgagatagaggcactagccaacaagaagaaagtagcagtcgtatccagcaccactccggcttcaacaactacgccttcaagttcttctattacaacaacccccagcaagcccaccaaattatcgaccagccacaagccgcttacttcccactacggaggcagtactttggccacgatgctctcagaggaagatgaggatatcaccgaattcacagaatcttcagtggtccagcagcaaccagcagataccactatcagcagccttgagaatgaaaacgaggaccaaacacctgtagttgtgatcaccgctagaccacaatactttacagtaacaagggtgccggagccactacagcacataaagactgatcacagacaggaggagacggagaccaccgagttgcccggactgacacagtttctagttacaacgcagatgtcacaagtggatgatgacgttgacgaaagtacagataagtctgttgtagagtcagttcacgaaaacgtatcagaagctagccaatcataccccactgacctagaagtgaaggaggaggtgcctgcagcggttgtcaccacagaacagactactaaacttccagtctcggagaccagcacagtcgctgaaatggacagtaccgaagtaacccccctgatcgccgacctcgttcagcaactcaacctagaaatgctcaagcccacggaccaaatatcaatggccaattttcagacccaggcggccactgtggcctcaacgttagttgacggcagcaatactcttgtctcagacgttcctttaaactcgaacgaaacaaaggatgagttggaattccttatatccgatgttatccagcaaataacccaaggcgatcaaaacaagctcccgccaaacgcccaaccagccgacgattccaatcgcctgaccagtttcgcccaactgaatacctccttcttgctccagccaaacatagaaaaaacggaggtaaaccaaatacagcagacgcacggtacaacaaccgcgggtccgttcaagaaggaatccacatatccggaagctttgcctgaaagtccaacgcacttagagacaagcacccaccgtataccgattttatcgctgtcccagatttatgcgcagcaacagcaagacgaagatgaggagcagcaagtttttgccaatgaacgaatagaagttcaatcaactatggagaccattgggcaggaaaccgttgcaacgacagaggagatatacacagaaaccccttccgtggaaaccaccgatgctgacagtgttgaatccaccacacccatcgagcctcaaccacaagatcccacccagcagaccacttctagcgaggagggttccggcagcgaagaaccaacgactacctatagcaacattcctgaaagcaacacgaaccgggaaaatgaagaggaaatactgcagctcttaaaaaatgataccaaggagcagaagcagacgccgaacatagatatccaagaaaaggagacagagcccgagccttccacgtcggaagagcctgggtcaacaacgcagctgtccgtggtagaagaaataacactaccaactaatatttaccaagatgcccaggaagaagagcaatcatcaacgacggaaaagcatgtgtacttagaaccacagccgcaggaagcccaaattgtggtggaggtcactgacaccaacgccgcgcaactgcagcctgagtatcaatatccacccagcggagaacgggaggaggataaatcaccggtcactcaaattcccggtgatatgtccttggcatcttcagattctgacatgtcgctaagctccgagcaggttactgagaaaatcgagttgagcacagtgaaatcgcaacaactgaacgacgagtcgatggaagaaatttccgacgaacttacagctaccatttcggaagaacaggatgctgaaagtgcggagccagtaacaagtacccaagaaatacagctggacaatgaggatccctacgtaaagctaggcgaaacaacagcgactgtagttaggcctctgaaccccaattccgaaggagtcggcgagaataagagcgcaactgaatcagacgaggataactataactacaaggtgaaattgccccttagcaactacgggaatccgccagtagatcaagcggatgaagaagacgaggatgatcaagcagcttaccacatacctcccatgctggctagcagtacaactgtaacgacgagcagtactaaaataactattacagaagccccagctaggtcaacaagtactactagtgtccccccaccaacaacaaagcgactaagcactttaaagccagtttcctactacgttcaaccctcgctaatggggggatacaaccaactggatatgcagccgccaaaggttctgccttacaatgcgaataaggcagacccggtccaactacaagtcccgatccatagtcaatcgatgctcaaccagcagcgtccctcccaacggccacctttgctaatcaatctgatggccagctccacacaatcaactcgaccacccgtaaagctagacccaagtcccgagtcctctcaggggctggaggcctccaccgcgatgatggatgaggatctgcaatccttcgcccgcctctgcaacgagctggcctttagctactggcgagctataacctcggagaagatcagctccgccagaagtttggtcatatccccatttgccctcacgtccatgctttctatggtctttctgggagcgcgcggtagcacttctggcgagatgaacgagatcctgaaattggacgacatggtcaccttcaatccgcacctcatcttcaagaatataaccaactcagtggaacaagcttcggacagcgatatagcgactgctgcttttgtgcgtgaaatattcagcgatagggccaacggaaaaattctacccttctttaaggagaagacccagcagctttacgccggacatgttgaggaggttaactttcacgtggttaacgacatcgtgagacgtcgaaccaaccttctggtgaaacgccacacgatggggaaggttcttgagtatctacgtacaaatagcgtatgggtaaacggaccattggccaccatctcggccaatcttttccagacagactgctcgcatggctccaccactgatcgtgatggagagatgttcttccaagtgcatcctacagttcgccagcgccggctcgtgcctattccagcagtgttgtaccgttccggcttcttggcagggtatgaacccagcctggacgccaccgtcgtttccttcggtcgagttcagaacactgttagcacagtctatgtaatgcctggccaccagagctccatttctccgatggacaacctcgaccgactcgagcgcagtctagtggagacggcgtttagtgacaagcaggcctggcgtaggttgctcacgtcccttatggatcgaccaggaatggaggtgcaactgccgcgcttttcacaccgctctttcgttaacgcctctctgggtctgcaaaagatgggtctacgcggtctcttcaagtctgactttgccgacctgcggggtctaactggcgccggaaatcgcgacatcttcctgtccgacatgatacagatcaacacgttcagcacctgcggcgaggagaagatctcggaacaccaccatgtggaaatgtaccccgcgccaccactgcgtaagcgaaacaaggacgtagatgccacagatgacgacgcctttgattcttcggagagggtcgtggacttcggctcgttggtgcaggaatctgcactgggacgaggcttctacgatgaccttctggacccgaaatacttggaactgccgttgccactccgtccacgccaggctcgtgtccctgacgctccacgactgcgcttcgacaagcctttcttatactttgtgcgccacaaccctacgggtatgattctattcatggggcgttttaatccccgactgctgccgtga

SEQ ID NO: 35049 - protein, 1976 aa, DROSOPHILA
MTMQEIQSIVANGDGEGPSIIHPAPLAESHPDKNVQDIVNSVQNVLNKEMASSSAKNSSGELLLPLLDTPDVSSSWSLILPAIFGNTGGDIFPQQRPQQIVMTAESELLETPNKTPTGTTMATKKPKPAKRKPGTKRKTTTTPSTTAVTPQVVQEELDPMESVYTGMQQYQQVAANMPHFELVHMQPIYQKQPSSTSERPETTTRRVFYNNQEIIHTPTSSSSAPSTTEVVLTHQLAKKPASVQRKPNQPHRVKKPNGNGTTQTTSQAGKQKIKRKTTTTSTTTTTTTTPAPEPETQPPTQEEPVPATTESTTTTTQAPASTTPKKKKRKPTRTPGTGSSGGSSKPSKPKRKPTSKPRPQIQEVSGSQIVVPQKPSRPQRPTSNPSITSTMPAQEVTTTTTTFKPVITSTEPQTTEPPAESTVTTTSEPEPTTTSSTQASTTTSTETYTTTSTEAPTTTVTAPTTTSIAPAKTTAIPPALHHQKLHNKPANRPLSQQHNHGLGRPVHYTTTESSKIVGEPQTETYGIVYVIHSSTTTHKPFYPLPSYNDDAVQNVSTLLTPPPVQHKPLKKTPLPSLSQLQQQLHLGSPSPAPQLSPDQILSMDQIVQSLTQDLSASDKGEEASGASPVKYDSAESKLEIEALANKKKVAVVSSTTPASTTTPSSSSITTTPSKPTKLSTSHKPLTSHYGGSTLATMLSEEDEDITEFTESSVVQQQPADTTISSLENENEDQTPVVVITARPQYFTVTRVPEPLQHIKTDHRQEETETTELPGLTQFLVTTQMSQVDDDVDESTDKSVVESVHENVSEASQSYPTDLEVKEEVPAAVVTTEQTTKLPVSETSTVAEMDSTEVTPLIADLVQQLNLEMLKPTDQISMANFQTQAATVASTLVDGSNTLVSDVPLNSNETKDELEFLISDVIQQITQGDQNKLPPNAQPADDSNRLTSFAQLNTSFLLQPNIEKTEVNQIQQTHGTTTAGPFKKESTYPEALPESPTHLETSTHRIPILSLSQIYAQQQQDEDEEQQVFANERIEVQSTMETIGQETVATTEEIYTETPSVETTDADSVESTTPIEPQPQDPTQQTTSSEEGSGSEEPTTTYSNIPESNTNRENEEEILQLLKNDTKEQKQTPNIDIQEKETEPEPSTSEEPGSTTQLSVVEEITLPTNIYQDAQEEEQSSTTEKHVYLEPQPQEAQIVVEVTDTNAAQLQPEYQYPPSGEREEDKSPVTQIPGDMSLASSDSDMSLSSEQVTEKIELSTVKSQQLNDESMEEISDELTATISEEQDAESAEPVTSTQEIQLDNEDPYVKLGETTATVVRPLNPNSEGVGENKSATESDEDNYNYKVKLPLSNYGNPPVDQADEEDEDDQAAYHIPPMLASSTTVTTSSTKITITEAPARSTSTTSVPPPTTKRLSTLKPVSYYVQPSLMGGYNQLDMQPPKVLPYNANKADPVQLQVPIHSQSMLNQQRPSQRPPLLINLMASSTQSTRPPVKLDPSPESSQGLEASTAMMDEDLQSFARLCNELAFSYWRAITSEKISSARSLVISPFALTSMLSMVFLGARGSTSGEMNEILKLDDMVTFNPHLIFKNITNSVEQASDSDIATAAFVREIFSDRANGKILPFFKEKTQQLYAGHVEEVNFHVVNDIVRRRTNLLVKRHTMGKVLEYLRTNSVWVNGPLATISANLFQTDCSHGSTTDRDGEMFFQVHPTVRQRRLVPIPAVLYRSGFLAGYEPSLDATVVSFGRVQNTVSTVYVMPGHQSSISPMDNLDRLERSLVETAFSDKQAWRRLLTSLMDRPGMEVQLPRFSHRSFVNASLGLQKMGLRGLFKSDFADLRGLTGAGNRDIFLSDMIQINTFSTCGEEKISEHHHVEMYPAPPLRKRNKDVDATDDDAFDSSERVVDFGSLVQESALGRGFYDDLLDPKYLELPLPLRPRQARVPDAPRLRFDKPFLYFVRHNPTGMILFMGRFNPRLLP

SEQ ID NO: 35050 - DNA, 2616 bp, DROSOPHILA
agcaagatcgaaagtgatttgtctgcacgatgtccagcatcatgacatccattggtttgaatcgatgacttgaccactttgtctcaagagttcattttgtcggctcagcatcaatctgttgcctttccttcgagaaaagagagttaaccttaaaggggagatggacaatattatctttgctgtgcatacaaataactaaaactaaatgatcagctgaaagacagcttcagacactgcacagaatttttctacggatctcgcaagggtcgtcaagtaaataaccgcgtgatctgacgatcaattccatcgcatgctgcatacaatatatacgcaatggaagattttttccccgttacaccttcgaagttaaaaaatgggatccaaaaagtggttgctaatatctcaaccagatattttatttggttatacttgggtataaaatggacatattgttctttctttgtttatttttcgtaaattttcccgacaattgattagtgtaatcattgcaatttctgaaggacaagtacacaacaacacttaatgaagacgactttttggttcgattttgggtatgtttatcacgtttagttcttgcgtgtttttttttaaacattcctcaagttttacgtgatcggaaatccgctctaattccatcgcattcaaatcacaaatatttctaacggcttgactgttcttcatgtccacgccgccaagaatttaaatatgtaaaaaaaatttgcattaccaatcctctcataataaaataaagcacaacaaataaatttttgtttgaatattttggtcacacaacattctttgttgtacatgagaagtcacctaagctttgtgctcaaataatctcagaaaatccaatcagcgaagctcaaaaacagtaaagaaatcccaagaaagaaatcaaatctctccaattatcaagtactcaaccgttttctttactcacagccgctatacgcattaatctgcacaaggaaccatcatgacggccatgcccgtggtgtggtgcaccgatcccaactcggtgaacaataagcccacagccttcgccttgcacggaattcagctgcaaggaaatgtaaccaagaaacaggtccatgccctccgggagctggtaaatgccgccgctgagggccgcctcatcctcccctcggacggtacttttactctgttggacactgggcttagcattgaaagctctatcgtagagcaggagtcaaacaactctaatagtcctggtgagcctagtacattggctcaaccaaagaattccaagaacacctatatcctgatgcccgtcagcaaggcagatggatcgagacaagcaggtgtagtgaacggaggtcttgactcgtccgtacaatcgattgcagccgccgccgcgcaactggagttcctgctcgatcccaaatactcgtccacccctgaagccagcccagatgttgaaccaagtgtagaactggctgagggtggggcggcaggagagattttgtacgagttcctgtgctgcgccaagtgcatgaacgaacagcggaccggactcacttgcgctggacgtcgcctgcagcgctatttaaggacatgcagcagtggaagtggcaacgccagtggtagaaaccgcgacttcgagacgatcaacgatccagctacatggcagctgaaacttgatcctgtcagcagcatcgccagcaagtacgcccgccgacagcagagacagaggcagcatggcaccgtttccatgggcatcgcacgtaatcgcacccaacgccatcacaaattacccatgcacagtgttaaaatctttcataatcgcagcacttacatgccagctactacagcaacaggagcactagcaatagctggggggggcccagcttgccttgtgggcggaggccgggaggtgtcatcaattccgatgccgattccaagtccgagctcgaatccaaattccaaacccaccccagcgaatagaccgatcgtcggcagtgaagcgtttagtttgttaccgacaacggcgagatctacatcgttgacggaaacagcactcgcgaaaacggcagcaacagttctacctctctacgctgttgttagtaaaaatcgtgaattagagagcattacaaagactgtggaggtcccaacctcagctatgctagccgtcgtgcttgaggagacgtcttcacatactgcagatggacgcgatctgatcagttttgacgacgaccaggcgcaggtgtgtgctgaggcggggtatgtaagctaccaggccggaagtcccgtggatcttctgtgcgccccaaatgaagaaaacacactggtggagactccgccggccacttcggccaagccctgtatacccggaagcaacaattcaagccgaaaaaccagctttgattctaccagcaccctcagttccatggactctggtttcatggagatgcagaacaaattggatgccttggcagcagcagcagcagcaacactaataggcgaatcaacaccacctttaggcgaagcagcagcacctttaggcgaagctgcaccatcgtcggcgatcggcgagaaaattgaccgacggaactacaaggaatgtctgacgca

SEQ ID NO: 35051 - DNA, 1500 bp, DROSOPHILA
atgacggccatgcccgtggtgtggtgcaccgatcccaactcggtgaacaataagcccacagccttcgccttgcacggaattcagctgcaaggaaatgtaaccaagaaacaggtccatgccctccgggagctggtaaatgccgccgctgagggccgcctcatcctcccctcggacggtacttttactctgttggacactgggcttagcattgaaagctctatcgtagagcaggagtcaaacaactctaatagtcctggtgagcctagtacattggctcaaccaaagaattccaagaacacctatatcctgatgcccgtcagcaaggcagatggatcgagacaagcaggtgtagtgaacggaggtcttgactcgtccgtacaatcgattgcagccgccgccgcgcaactggagttcctgctcgatcccaaatactcgtccacccctgaagccagcccagatgttgaaccaagtgtagaactggctgagggtggggcggcaggagagattttgtacgagttcctgtgctgcgccaagtgcatgaacgaacagcggaccggactcacttgcgctggacgtcgcctgcagcgctatttaaggacatgcagcagtggaagtggcaacgccagtggtagaaaccgcgacttcgagacgatcaacgatccagctacatggcagctgaaacttgatcctgtcagcagcatcgccagcaagtacgcccgccgacagcagagacagaggcagcatggcaccgtttccatgggcatcgcacgtaatcgcacccaacgccatcacaaattacccatgcacagtgttaaaatctttcataatcgcagcacttacatgccagctactacagcaacaggagcactagcaatagctggggggggcccagcttgccttgtgggcggaggccgggaggtgtcatcaattccgatgccgattccaagtccgagctcgaatccaaattccaaacccaccccagcgaatagaccgatcgtcggcagtgaagcgtttagtttgttaccgacaacggcgagatctacatcgttgacggaaacagcactcgcgaaaacggcagcaacagttctacctctctacgctgttgttagtaaaaatcgtgaattagagagcattacaaagactgtggaggtcccaacctcagctatgctagccgtcgtgcttgaggagacgtcttcacatactgcagatggacgcgatctgatcagttttgacgacgaccaggcgcaggtgtgtgctgaggcggggtatgtaagctaccaggccggaagtcccgtggatcttctgtgcgccccaaatgaagaaaacacactggtggagactccgccggccacttcggccaagccctatgcagaacaaattggatgccttggcagcagcagcagcagcaacactaataggcgaatcaacaccacctttaggcgaagcagcagcacctttaggcgaagctgcaccatcgtcggcgatcggcgagaaaattga

SEQ ID NO: 35052 - protein, 496 aa, DROSOPHILA
MPVVWCTDPNSVNNKPTAFALHGIQLQGNVTKKQVHALRELVNAAAEGRLILPSDGTFTLLDTGLSIESSIVEQESNNSNSPGEPSTLAQPKNSKNTYILMPVSKADGSRQAGVVNGGLDSSVQSIAAAAAQLEFLLDPKYSSTPEASPDVEPSVELAEGGAAGEILYEFLCCAKCMNEQRTGLTCAGRRLQRYLRTCSSGSGNASGRNRDFETINDPATWQLKLDPVSSIASKYARRQQRQRQHGTVSMGIARNRTQRHHKLPMHSVKIFHNRSTYMPATTATGALAIAGGGPACLVGGGREVSSIPMPIPSPSSNPNSKPTPANRPIVGSEAFSLLPTTARSTSLTETALAKTAATVLPLYAVVSKNRELESITKTVEVPTSAMLAVVLEETSSHTADGRDLISFDDDQAQVCAEAGYVSYQAGSPVDLLCAPNEENTLVETPPATSAKPYAEQIGCLGSSSSSNTNRRINTTFRRSSSTFRRSCTIVGDRREN

SEQ ID NO: 35053 - DNA, 2390 bp, DROSOPHILA
ttagaaaatatttaaaaattgttccaaagtgtgggcgtgaccagcttgaccgctttagggcgtgggtgggcaaaaagtttttttcaaatcgatagaaatttacaagactaataaaaatgttaaagaataccaacacatttttctaaagtgtgggcgtggcagtttgggcggatttggggttgatagttggcgtggcaacatgggtcaataaacttgccttgcgtctttgtctctagaatctgtatgcttaacgttctagcattaatagatcgtgagatctcgacgttcatacggacaaacggaaatggccagatggagtcggctattgatcctgatcaagaatataggtacattttatggtcggaaacgcttccttctgcctcttacatcattttcaatgagttttatatacccttattagtttcgcacctacacccatggtttatcgttcaactgttcgctctgcaattaagtcgctcattatcattcgcttttcgttacctatacatatcgcatcggtgcggaatctattttgctaagcccaatatcgtttgaaatcgctaaataaacctcggcttttcattgcttcaaaaatagctataagtatatatatacagtacaaatcaaacatagcattaagcattaactttaattagttcgctattgttgctcagagcgttgttcaacaacaatttggatctgcaatattcagacaaatttaaggcagtggaatctgaacttcgcaagattgcatgtacataaaagctcaaggcggctgcactttatattcgtgtgaaacatttagcggactccctatttaaatctccgttaatttcgtttaataaattcgttcttcatgtgaggttggagctgatcaatgagcttcaacaaatattcggattcggatgaaatcaaaagtgatttggcagataaatttgatgacattctcgtaacgcttaaatcctctatttggggggagattttaaaaaagtgctcgcaaatgcactccctctcaactattgttgatatcattgctccgtttgattgtgtccaaaagcatcgttcactcaggaatagggcaccgtcgctgccccttcttgagcttcataaatttcctggaggctatgctgactcggtcaacatgggtccacctaccagcacgctaccgcactccctaatgcttcgggactgccaaagcggtggatcggcgcatatatcgcaggacaaaagaataaacgagcaatgcagcaacagcccttgcagaagcagccttcctcgtatcaacgatcacattcccatcaggaccccgagcaccccgtgctgcggcacctcggctgtgcagcaatatcttcgggttcttagatcccctctctcacgatcactctattagtttcgcacctacacccttggcttatcgttcagctgttcgctatgcaattaagtcactcattatcattcgcttttcgttacctatacatatcgcatcgatgcagaatctcgttcggtaaacccaataaaacatatcgttcgaagttactaaaaaatcgcgtccctttatttcttaaaaattgctaatgaaacaacttattagctcaatagccaaaaaaaaaaacgtaagtaatattacaaatcaagcacgtgtactgaaattcgcaacctaagtctatacgtgttcacacttttttatgcgcattttttgtatatgtatgtatgtttatttttacgtatctttatatgtataagttatgtatttctcttcagtgtccagaattatgcaagttaggtatttctctccagtgtccagaattatgcaacttaggtatttctctcctgtgtccagagttacgtatttctctcctatgtccaggggtcttccttctcaagattaggtataattgctggagttaggaagattacgttggagggcttgacttcgcccccttaattatcttgctagccttgtggcttagcaatccaatgaaaataagtacaaagtgattttacggctatgcgccggagtcgtgctgtgttttattgagcagcctttctagaactgaagcacagacaatattcttgcttagtctaccctacgcgacaatgcatcgcgccaccaagacatgagcggtaagccgactcagcattccttgcggcacagcgcgacactccaaatgggaagcgtcggacttctaccgccgaacggtctcagaatagagcgctgaacttcattatgggcgcgtcagcattactttgcgaggttacttagttgctaaggaaatgtgaacttgatgatttgttaactatcctcccctcaggtttttgaccgtcctcggtcaagctgtatttgtcgatggtccgatgcatctccacgaatgctcgtcttctccttaacg

SEQ ID NO: 35054 - DNA, 390 bp, DROSOPHILA
atgcactccctctcaactattgttgatatcattgctccgtttgattgtgtccaaaagcatcgttcactcaggaatagggcaccgtcgctgccccttcttgagcttcataaatttcctggaggctatgctgactcggtcaacatgggtccacctaccagcacgctaccgcactccctaatgcttcgggactgccaaagcggtggatcggcgcatatatcgcaggacaaaagaataaacgagcaatgcagcaacagcccttgcagaagcagccttcctcgtatcaacgatcacattcccatcaggaccccgagcaccccgtgctgcggcacctcggctgtgcagcaatatcttcgggttcttagatcccctctctcacgatcactctattag

SEQ ID NO: 35055 - protein, 129 aa, DROSOPHILA
MHSLSTIVDIIAPFDCVQKHRSLRNRAPSLPLLELHKFPGGYADSVNMGPPTSTLPHSLMLRDCQSGGSAHISQDKRINEQCSNSPCRSSLPRINDHIPIRTPSTPCCGTSAVQQYLRVLRSPLSRSLY

SEQ ID NO: 35056 - DNA, 18603 bp, DROSOPHILA
gaatctgcaacaggatacagcaatgcattcacgtagtttaaaaacagaacaaattttcggactgatttagatgaattttcatttggctaaatatgtaaactaaaagataatttaaaataacccaaatcataagcatctggagcaatgacctagtgaaatgtgaagatgcagcagattaaatttgatacagtaaaaaagtacttataggaatgtcaattttatcgcgcaacagaatgtcgtacaataacatttagaagccatatgaagaacaaagaaatcaagatatacgtattaattatagtatactgaaagtgtcatagcaattagacgttggtgattccaaaaacacataagtgcatgtctgtcgctcaaataggtttctttttagatatgtacgatattatttgcatacctagtatataattgtattgtataaagtattaattatgatattccttcccagttgtggtggctagcatttgctcaattagttctttagctctctactgcgcactcttacgcaccggtgtacctactattttaagaacgagaaactatttttatgatcaatccagttttttacacacacttgttatgtttacacaaaagctcactgacacaaaaatggctgggtaaattggaatgatatccaattttgaaatatttcgaaatatttcccagctgcacatcacaaacgaacaaaatcctacagaatctttcctaatctctgtaaccaaatggttgtaagaaattctcactatatcaatttagtttacaattccctccctataatgtggtactatttttgtatatttgagtttacaaaattagagaaatttttagaactgatgtatattagaaattaatcaattcgtcccgttttgcaatatatttataccctattttataatttgtatttgtttttttttgcaataaagaagatatgatatataaacgaatgactttgtcttttattcccagctcaataaatacaagcacttcactacattgtgcaaacgattaatttttattgattaaatgtttaggatgtgttaaatataaatttatgctgtatgtttatatatacgcagcaatcgcttaaagttctgcaatttatttggttagaaacagcgattgcattttaattagagctcgatgttgaaggcagggcagcgaggatttcttcgatgaagttgtccgggtgctcgatgagatgcaggagacctaagatgttgaacaatttaaattaaatgacgaaattcaaatggagctgccacggacactcacctgcaacatcacagaattcgacaaaggaagtgcagggcaggaactcctccgttagggtctgcaggatgctatccgtggacttgagcaaagcctcatcgttcttacgaagatagtcgaacagggaaatcggccaatcctcctccttgggcgtgcttaccgtcttgaacagattgtcgtagatcaagtccaccaatgcccacatcataaggaagggcttgtaaacagtgtaatccttgacctggcggtctgcaggagccaacaaggctttgcacagcacggcgggtgagacgtggcgaccctgggccactgcaatcatcctcttcagatgtgctagcttatgcttattccatagctctcggctgtgcagtgacagcgaaatggttgccatgaaaagcggaccatccacctcatatccgcattccaaccacttctcgctgggcggcgcctgcaaatacgtcagcagagtcttgctgtctctagccgctgatcgcgacgaaagcaacagatagacggagtagaagagcaggtagggtacgaagtgcatgttcgattgcggaccacctccgccggcatcgtcatggaagctgcgttcccaagcaaatcgtaccaacagcagcttcaagtcatgcacactgctggtgtaggagatgtcacagcgctgggtactctcctgcatataactgctgtggcgggtcatgcaagcggagaaggccgcctctccaacggcgggtccccaaaggggcagcagtccattacatctggtgttggcattttgcaaactagcacgctcccattcatccctgccacgtgtcaatcttatggctgatgtgtggcagtccacatggaccacattgaagtgtgtgacggtggtatagccaatggtttttctcgacttcagctcaaactcctcgacattgcagcgcttggtgaaggtgtagataccaagcaccttgtctggctggcaggcgtagccttcgcgacaaataaagcaagttagtcctgtttcgtcgcgcagtttttcgatcttctgcaggatggagcccttggccgtcacctggcccttttcattcgtgcgcattcccaatgcatccaactgtttctcgcgcgtggccattgccagccgcttcttctctgcccttgtgaagtcacgcacttgctgcaccctcgctgctgtcgccgaatcggtggagagagcttccaaaaggttctcggccagactgcccacatgctcatcgctggatacttgttccaggcgatgaataatgggtataatgtccttgctaatagccacctgagttgcctcatgatgatttgagaggccggtgaggaaacgaagaatatacttcaagcttggccgcgagatgaattctttcagctcatcggagtcggttcgcaggagagtgggcttgacacaaggcgcatgctcggtgatgtaggctagcgatcgctcaacgatgccgagacttactatgtagtccttgagagtgccgccaatgcagttgtgctcaatttggttagtcagcacgcagaagagttccagcttgaactcttcttcaggtgtgcgctcgttgtcaaagcgattaaagttcaaagtgtcctgaaaatataacaatattaatcctcgatcgtataagcaagaagtaacaccttaccttgaaatgctcgcaaagtagagccatcttcacctcgttgccatagaccaaagcggctaggacacgaataagatggcggagcaccgaaggattgtttctaacattgggacagtctgtgcacgatattagtgcgcttacatactccggtccaccgaatgtcaaggagaactgcaggaacgagtccaacgtatcgctggccgccttcgatagtattgtttccatgatctccaataactgctcggtaaccgccgattgaatcgaatcgttctccgactggagacacatttgtagcaccttaagcagcgtgttgatggctccgatctcgggttggcaaagcacctcttggcaacggcgcactttcacacaaataaggaatagcttaagcagtacctggataagttctcggttgcgcgatatgcgctgcaggctgccaattctttccaacattacgcgtaggccgttgcaatcagccagcacattggccatgcgatacagctgctcggtgtccacctgctcctggcttttgttgttcagcgtttccacaaattcctctgtggcgtctcccaggagaccgcgcatgcgatatacaattctcatggcatctcggtcgcctccttcagctaaccaaactttcttgtaaacatccttaacgggcagatccaagcttattattttgttgttgaccagcaattccatgccgttatcatcttccaacagggcgattagttcacaatccgtacaaatcttattcttcacatcccgcatcaatggacccaatcccatttcactcgaggggtaaggattacccagcatgcgaccttgcagaaagtcctcctgctggggatctttctctaatgtcatatagaactcgctttcgtcatgctcctcgggatgaataatggaatataagcgctcgaagacaaacaccggtgttttaatgtcattcatgcgggtcttctctacggtgtcaataaggatttccataaaggcacgtgtctcctcctcggttccgctggtcatatcctctagcatctctaacagcttctcctgtgcgtcgtcaatgagtcgcgtacgctgcacgactaagcttcttagggcaagatagctttccagaactggtcctagcatgcgagtcttgtaggttctgcggatatttggacactctaggagtagccacaacaattccacatactggcgcagtgcatatcctaaggataaatctgaagaaagcgagtactcctccatgcggtgcaccttgctgatttcaatagccagaagctgtgagatttgacttaatactcctttcaggaccaaatactgcagccagggttgctctgtggccatgttcttgtacagcattaagtactctgcactggcttcccctgcttcgcctacatgtttcaagaacgatgtcagcatattcagagcctgttgccgccgttcgttagttcggctcaagctgctcagcaaggagcaggccagctggcgaccgaatctggagtttgcattaaatagcaacggttgtatccacttggcgttgaatacaagaggtttaatcactcgttgcttgtccagcacacgttcccgccagcgttttccgtacttttcgctaaggaatgcgactcgcacctccctcctgctcttcggcggtgcatctgatccgccggatgccgccacattctgatccttggcattctttagcttagcctggttgtttgacggcatccgcttgctccacgctgcgtattcatgattacggtctgagttcagccaggccctatagtccaccgtgttgccctcaaacatcttcatgctacacaaatctgtagtggccaccttctgattgggcttgctgccgggcagaaccgggcagatgagattctgcatgatgcgcagacaggggtgtagtactgctgttaccggaccacgaggcaaactgtagaaagaatttaaattatatcacatttatattattttctaatataaaacttaccggcagttgctaatgaacagctcaaagatgacctttagcttgtattcccagcagatgtcgtcctggcccaagagcacctccaaaagtgtcatttcttggtgcacagctgcctctaaacttatcagaggaatcgatcccatcagagcattcttcacccttgtggtcaccaactgcaacagatgcatgcatgcctcggcattatccttagtcagtacgaccaacaggttgcgcacttcctcctgaattaggggagtgcctcgtcgcaggttgtgctcagccagttcactgacgagtccctgactatacaagcacacgcgacaatcgtaattgtaagccatggctcgcagaagcgtcagacactgctcggtagatgccagtgcacagccgtagcagcgatttgtggtgggattttcggcaccggttgttgagccgggattaaccggcggctggtcctgctgttgacgatcgtaggccactagttcgctaaaattaaaattattattagccaaaaattataatttctaaatcagtgatagtaccttcgacatgccttgaccttctgaacgatcttgcttagctcctcgaaactggtgcgcgattccacacagtatttctgggcgagcagctgtataatcttgtttacttgagaagtgctgtgcacgctggccatgttgtcctcgaccattcgatcactgctacgatgctcggccaccttttgaataagaagctccagcatttgcttgttggtcagcagctggcggtaatttctatcggctcgttctagggagctgtgaatcagtgaaacagtcttgaccctatcctctgccgattctataggatcaacagcgcagcaaacacgggcatacatgctgaaatcaaatttggcatatttgcagaagccacaggagtggcacaggaacgggtccttctcatcgtagttaatggcccgacatttgtggcactggaacacgttctcaccgcaatttccgcagactcccggataagccggcactgctgcactacaacgtggacattgtaaattctcactggatccactcacagtttcaaagaaatcagcaaactcgatcatcaaattgcatgcggtgattggtagtggaaaatcgatcttcagttcggtctgtgccgattgcagggatactgagcgagctttgtgccacagagctgggcgattttttagctccactaccgcctggacactgcggttgttgtagtaaacattaatggttctcaccatctttgtccgctttaagtcggcaatccgcacgatcaacttggaaatagtatggcattggactagcttataaatcattgtggttgtggtgtacttagagtctgatttaactgatggcaactttatattagccatcggcacctctggattgttgcacactaaacaaggttccgattctaggtagtaaccatttacttgaagtatagactccaaggtggtgtatattggggcatttggatgcttgcaaagcagttcgttctgctgcctgagaacatccacagcgcgggaaacgaactctggcagtcgttctgttatacttctggtacttagggttagataccccaataggtcgacaaactgcgctgtcctacgaccgtaggtgggcaccaatggccacaggttccaaaatatgttgagaagtttctcacgctgccgttcattggcatgctcaaaaagtccggtcataaatgagtgggcctgccatctcagctgagtaatgttgttctccaacaggaatattcgcacaaatctgattatcagcgcatcgcatgcgtatctaaagatctggtgcacaaatgtaccacactgggctggatcaaacttggagtagtaggcgtctgtatcctcgctcttctcacgatctgttcgaagttttccggaggcagacgaggtcgatggctgcggctgggcctgcttagatccactaggagggggtaagttgcaaacggccgcctgtagcaattgtataataataggcgacacgccatcatccaactgataacaggcgatttccatcagcatggccaacgcatcttcatggacgacgcagaacttctgccagttgcccgtgcgcatttggcttatctcctggcaagtacgtaggtgttccgtcaactctaccagtgcatcgtatgaaagcataggaggattagcgttgtaaggagcaccagtctgaatgcaaaaattaaagaatattaatatttaagataatagttacaatataccaaatcaccttgctgctgacaatgttgcacacccgcttgaccacccggaaatgagcgtcgagggagtgaccgtcgcgatacatgcggaacttttccttgctgccgcaaatgtacatcaggagctttcgcacttgccgacgaagcagtgtgttcaaatttagcatcatgtactcacaaagtgtaaaggtcatcgcttcgcagaatccactatcgtagttatccggatgggcgctacttaagcgcagaatttgatatggcaatcgcacgataatttcagttaggagtccatcgtaggactcgaaaatatccgggtagtttttcagatagttgtgcggtataagtatggatatgtcaggtttaggaccatgtttaatgggcttcagtagctgaactccgggacctgaagctccgccactggcttgtgccgactgtgaggctaatccgccaccggctgcataaggatctcctagcacattcttccagtgcaccagtagcgtgtttagtgcttctagggcgtaaacgaatgctccactcttactgagaacatttgctgtggtactggccacaaaggagctattgtccttaaattgatgcggcggcgatgttgttccagtttgctttgactttgttttgcccatcagaactccgaacagggaaagcaatgcgaggcgcacctcattgccaggacactttgtctccatctgcaatttaaatgtttagatatattttatagaataattttttatttacccttgcggcagctcctcgctttccaatttccacatagtccactagagcagtaagcagatcgtgaagcacttgttgatccctttcgttgtttccattgagatcggtagtcaacatgagtataacctggatcagtgggattgcctgcaggccattgcacaagtcgaatgttcctagatgttggataatgctctccagcacagcaattctataatggaacataattgatataccctaacagcatatgatatatttttacacttacctaaggtcatgtagcttgctgagcttatcgtcctcgtttgcttcattatcctcactgctgctcatggcactcaaaacagcaacaccaccggagccagcaacgccactgggacctggctgctcttgatcgtccttggtggatccctgacgcggcggcgaggcattcgcgtggtcgccaaagttgctgctcctggcggatgttccaccaatactctctactccactgcctccactctctgatccaccgctgccagcaggctctgctggagaagtacgcaatgttgatccatcggttgccacattggaaccttcatcatcatcggatccacctagggagacattggcagctgcgttcacagctgctgccatggcagtagcttgacggatgccctgaagattggccaatccttgctgaagagactgcaaggcgtttgcatccccaccgtgctgttggagactcaatgcgatggcaatatccatgatggcctcatcgtcggcatcttcgggtaggccgagtaagcgagggaaaccgccacccatgaatgcctccagattgagcatttgctgctgaccgactcctcctactccaactgcagcaccttccgcgtccgcattcggttcgggtaatccacctcctccaactgacccatcaacaacaacgccagctgcttcctcgatgatatcacttgcagctgaagaagccgctgcttgcagtgcctgcatggtagacgttgagggagtcggtgttgaacatgctgggggtgtaactatggccacctttctgcgcttcattcttggactaagcaaaaggatcagggcctctttggcgctgtggctaatcacgctagcatcatgcttcagcaaatcaatgaagtacttggtcatgcgaccaacctgtccgggatcggccaaggcaaatccgtacattatctctaccagacaatggacaatggtctccggctggcacaagcctcgcttcacaatattcacgggttcgtctagcgtcggtgtaaccttatgcaactccaagacaattcccatgagggttggaacaatatcatagttgttctccacgcagatcttcgctagcgattggggtcgtgcgttggcaatgccacggaccatcagaactaggcggtagaaagcctcagggtcgatctcccgcagagtttcaagtttttcaagcttcggctgcattgactgtagttctctatttacaaactgaagaagcactccatccttgtagttatggtacaatgctctagttccgtatagagtggccagcacgtagcgcgcctgggtctgaacaggattgggcgttggcagtagcaatagggcactcgctgttttaactgccttttgacgcatagaagcaggtactccagatcccaacaaatgcagtgcacaatccattacttccaaaaggtgattagccattcgatccagctgagtaatgcaattgaatccttctccaaagttagcgctacttgcctgggaggaagatactgctggcgcactggatcctgggacagtaacatcctcgctttcgtcgggccagcccaccagctctttcgattttccatatacctcaatgcaatccagtaatgtcacatgctccggatctggagctttagcaaacacgactttcaataacttgtcggactggagcatttcttcccgggtcagggggatatcgaaccaacgtgccctcctgaccggtgtgggtatagtacgtcccagaatagtcacagattggggagcacgctgtacgtcctgagttccaattaacactcttattcccacgattacaacattgggatcattattgatcacctccagagtaaagccattcgatcgggtgctggccacaaacattcccgttgagaacagacgcgtctttagtttttgtttgttgtaaatctggagcagatcgttgcctccaaattccacatcggctagcatgttgcagtgctcgaaaaagtcaattgggaaaacgggctgacctccagctgtgggttgcttctgttgttggcttgcctttctgctggtcatctttccagatgctgtatttgatttggactttgaagtcgaaccagatccacctcccttagccatcaaggtggacgagtacaactgattaccaaatggctgaacctgtggcgatagccagaagctagtgtattctggttgagcggaaaagatcctcaagcttccatcctcgcagaggagcaaaagcgtagttttttccactccggcaaccgcatgacgaatgccaacaacgtccatgattcgtgacttggccgattgtgccttgatctcttgcaggtaaatccgttcaggggttatcatcaatataatcggattattcgatgtctgcatgctggcgtaaaccaatcctggatgccctgtaacctctgtccactgcacgagaggctgtagtggtcccttcgaagctgacttactagccgaatttgtgtccaggtgatatattcccttcacgccttcacttacattggtgagtggtgaaaagaagctccttccgcaagaataactgtagaagagcagctgtagggtatgcgaatagtagatggatactccaccgcctccgatatgaccggcaatatccttgatatgttggtggctcagctccaaagtgttggttacatagaaatctccatgaaccgctagactctgttgatccaactgctgagtatagatgtatccgctgcttgcaaaggtcagcatattgtagttgccatcctggtacacaaacgtgcaatctctaattttgccaacggccactaggtaatagtactttgggctatatgtatccactgccaaatcgtaaatctttacataatccgaagttacaacggcaagaagagtctgtgagccaggcagccacacagctttcttgatgtagtttccattttccagttgggggttcactactatgtgttcgttagtactgccactgcttgagaaggtgagaatgtgacactcttttaggccacaaactgcaaggcaatcctcattgcacggattagcagctagggagataaccgtgcaggcaatgggtgcagaactcaattgcgttagagttaactttctcttggaggcatctgcttgcttcaacagtgccgacagctggaggatggtcacctttcccttctcatgggatacagccaactgttgacgacgtccatgtggcgaggacaaacagcagaaggcaacacggcggacaactccggatgatagtaggtgctttatagtctgaccttggtcgccagaatagttcattcgaacattctcaaaagctccctcttgtgagcccaaagttgcaaacatcagttgatcggttacctggaagctctgttcaagcaggtggagtctctccaaggccgcagttgctctcttgtggcagccgacaatggagtatagcatacaattttcgtttattgatggtagcagcaggtcaaaatactctaggatgcatcttacgaccagcagccactgatcctggtgctgaagtgtctctctgtaaggttccaacagtttggtaagtactgcgatccgttcattagtcaatgaatcctttcgcgtaagtactggctggccaactggtaagctgctcctcttctttccagcgagtaagctcatgtgggacggtagatagctgccaattccagctgaatctctaacctcattgctgccgatacgcctactcaatgcctgacaggatccgtcctccttggctccgcagtcacagaagaaatttccatatttggcgtaactgacatcatgtcccttatggcaaacccttgcgcacacagaacagacgccaactgtgtttatcatgttgcaagtatgacaatgataccaatgttggttcatgaactccttttgggtctgcgagaaggtacacagcttgttgttcaacgtgtcctcgtcggaatcgtcaagcaacgagtcttgctcaccttcctcggctagctcgtcatatagctcatcaatatcggtctgtagttcatcatcccacggcgggttatgttgcctactgcctcggaagccaatgctctgaagaagttcgcttaaatagcgcaactgggcacttacgttctctgcatgtttcaagtgtttgtccggtaattgcaatttggccagttccagccaaaggagggtggtattgaacaaggcgacatggccgcgtgctggactggcgtcagctagagtaatcattatctgtagtacatctgcaaaatcgcagccttcctggggtggtgaaattaatgtttgtccgagctgaagcaaagcttggaacagtggtggagctatctgcgatgctttgctttgatctttcaccaatgacttcacgaagcttaagagcaacgcgccatttcgttcgctatcactatgatcgcaagcctgtgaagattcttccgacggatttggctgcgcagcctgccacaaactcagaatctgcgaggtattggctgcagctcctccggttcctgggttactttctccgcctcccgctgcagttccgcaatcgtattcaatttccatgggatccaactggtctgagatacttggcatagccgaaacggtggccatatttgttggcgtctgagcattgctgctggagctactcgacggctgcaaaatgctggtgagcatccggcaggtggtgtctaatgcctcggaggtgcttacatcggtactcacattagggccgtagataatgtggcccaaccattgctttaaacgagctacgtcaactgtggccagttccgagaaacactcaaccagatcttcatgctggaactgtgaatccgcttgtaaggatagctggaaaagtcggttaacaaattgcagcatcttgcgcgcatagctaacaggcagactggtgccagtgaacgatagcaaaagtgtggtaagactcccagagcgctgatctttgaaaaactggcgcatggcctgaactgccaccggcttttccagcattttgaacatagttttaagcacggcaaacagcatggactcgttaaacatagcacgatcctgatcaagaggagctccgccactaggccccgcagactggggctgacgaagatcggcagcaaactctttgagcatgcgatagcaatatccaaccatgtgctcgtaaagcagcagcttttgtgcctcttgtgtcagaccactgaggatctcgcgcagacaatgctcgctgtgtccttgcaagtaatccgttcgcatgtccagcattgaggagataagcaattgctttagctgagtctctacttctgcgttcgcggtgcgatgtggtagcagcaactcaaacaattgcaggatagactttaagcagtgtttcagagtgtgcagggtagagtaattggatcctcgtgtcagctcaataatgtgagcatcaataacgttcaaaatatatggttccaccggatgttgctttccattgaatgcaaaatcattgaccattaggcactttggccattcgtttgctattagttgtttgtcctcgttgggcaggagttttagaaaagctgcatggagttctaacataattgctggcttatcgcttacaatgggcacaatcaaattcagtgccttctccggtgttgaacttgacaactgctttagcatttggccacgcacgatcaccgaaagcaattggtaagaattcatgagctttaccattagctcgtttacaagttgattatacttttgcaaatcacttgacagcttaccgtcgtcgtcttgtttcaatttttgatcatcaattgattcgttggaagaataaagttccggatcgtttgacgatgaagttaaggatgtaccagcggactgctcgccagcggcatcttcgctctcttttcgcggccacttgaggccctccttgtttgcccaggctaccgcctgcatgtgcgccaccaaagaatcaaaaaggatgagatcggagaggcggggagttcctgcaaaatgaatattttcaatacattgtggtttgtttttaaccatattataagttttttagtacttaccatttccattcatttgactattgaacgcctccacaccaagaattgtttgcttgagactatattttatatcggcacctatgtcgcccacatgagtccacaacgtctcagcgtactgggtatacattccctgcttgattaggctgctaacgactaggtagtgagaactggccaggggtagacgtatactccacatcagtgagtgcagattgggtgatcgctctgccttcagcgactctacgtgagaagtagagggcggcaaacccaaattcagcttccaggcaatcgtaaagcaatactgtatagcgcaaagattatgcatgctcgcttccttgtccttttccttggaatacattgacatgtcggtgatggatagtatgtcagtcaatgcatccaccagtagcggatatttaagcttatccggtgtgcagagaataaagttccaagccaaaccatccagcttaaattcctgagcccagtaggatatctcgggatcacccattaccagagagtaaaaagttgggcgaattgctaaaaaaaaaatcaagatggttgagtatcgctggaattggagattaaattctccacttacatgagccatattcgccggccgacttgcggaaattctcttcaatatcatggcggcaataggaattcagtttggttcggcagtttagcagatccgtgatcttttgggtgtccggcatgctgctcacactaaaaagattccagcgcacctggtctagcaattccggaggcgcattgtacaagtgcttcataagatactccaaaaagagcagcaagcgagacagcagcataatttggctgttttttacgggtctatcctcgctgattccacgacaaacttctgcgcaacggataacaccgccagccgttaaaagcagaatggatttcttttgcatcagattgagcgaatgaaataggaaaagcagcagttgggcgtgctcaatgttaaggtcttcatagtcagaatcactggcggtattcgaagaacaaactccttccaccaacgtgttaataaggcggtgccacacggacaggcaggcggcttccttctcttgtgttggcttcagcaaaagaatttgcaccagtacagacagagtactcggataaacttgtaaaggccaggtgtttgtatcagtagaccatggcgatatagacaagtgctgcagcagatttgactgcaattgctcggacagcaatgaagtggaaatcaaattgtgaatatatcggcctgcagctcccgaaaatcgaatcatcgacgtctgccacttggtagaagctcctgcagaggttcctgctcctgcactggcagctggggcatttcccgacccctgatcgctctcatttcgcatcacgtcgcggtcaaaatctttgattatatttgccattaacagcatttgctgatcactaacgcctgcctttacatagcgctgcatgtaggcatgtcgattggccaaaaattgatccaggaaacagaatatgtctgcggccaagtctaaatactcatgtggctcatctagcttggggacaagggcgctcttctgttcagcacgctcttgtgtggatgtgtttgcattatcatcatgggtttctggagaaagagtttccttaaaccagtggcccaggtaactctcactatcgtcctcctcggagttgtccgaacaggagagagaatcgttgaaataagtcgtagaatctgagtagcttatgggttcgcattccgtacgatccttggcggaagcgcgctttaaggtgcatgccttgcgataagccacagtggctagaaaagtgaaaagttgatgcagagtggctgtattcagcacgcggacaatccgctccagcgaactgtagttctgcaaaatatcgaactgtgcaggctccgggagctctgtggattcgagactctgtccgcatgcggcttcaacctttagatcttctattagctctgagagcaatttaatgctgtggttagcaatagctgcattgagttctccaaatccttgctgtaccttgaaaaggttgactctggcaataggtgtagtaggtgcggttccagcctcactaccagacttggtcgcttttgacgccgacttcgatgccgaatccgagctagatccaccgcttccagaggcgcccattgctccttgtataccgctaattagcagccagctgccatagcagagatggttctgatatacatgaatcctggccgaagttttgaacatgtgaccaatattggagtagatctctaaagctttgttcactatgctacaggcctgatcctcaaagtcgtcatggtctttgttggattgcccaccactagaacctcctactccgcttccttgactagtggatgcagtctgtttctgagagctgctggcctggctcataccgagaacactggtggctattgaggtcaacacagcattgtatagcgcagcaataccacacattgatagtcgttcaattctactgggagtcagtggctgcatctcgatcagggcttgggcctgactcaaaatagtcagatcagtaagcatgtgattcatgctcgatttcactgcagtggcctccacttgggtcagtggcaaataaagcgatttaccgccgttgatggtctccatatatttggatcggtatcgattgagtatgggcaggctcacacacacatccagcagggtatccactccgttttgctcctggaagtactccacattggccgccaggatttgttcctgaaagaagtaagcttttaatattgcgtatctcgtttttaagaaaatataaatttgctcatagctaatagttatacacaacttctaaattgatcgagtaggataaatattttcattagatagaatattgcattttagtttagttgtgtaatatatccgtacctactcaattcaagagtaatttataataataacagacaaatatgaccgatcttagggaagctattaaaacaggagtttaagttatttgctcacagtgcagtcggtgacctcctcgctgagtggaacccaagtcatcttgccgggctctaaaggagcaatcagttgctgcagaataaccgaggacaggtccgaccgggatcgcttaatctccgacttgggcgactccttgtcgttgctggccccacttccggaggaactgctgctgggcataatgctcttggtggtcgactcgggatgtttgcagcttttaagaacattagccaccgcattgtagtcgaacatggatgacgacgctgatgctgggcactcccggccctcgcagagcatcttgagggcgcccaggagccacttggtctcgtagacggacaccctgggcagtctatagataataaaccggataagcacggcggtggcatcgtgcaactgacaaatctgcgtctggcaaactgaaaagcaccaagatgataaatgtagcgaacgcgaattggcgcaagtgaatcactcgattcttggccaaacatttctttgttttgttttcatttggcgaaaaatcattagggtgcacttacttgtcttgatttgcataagtttgtccgccgccagggccgcaaaggccgtgtaaaactgcgtgaaattgctttcctcctcgaaaaagtcatgttcgctatgcaaatatcggaatagagcgttgttagttctcgatattaaagaattttcaaagctttttgctatttcgtcaccggagcggccatatttaattttgcaagtcactttttgcactagcagaaaatttttcactacgccattcggtaggcgaaaagttctagatgatcgtttgtacttaccatcgcgtgatagctttgagcaaattaacaacttcgttcttgtttaaggctcctgtacggttaagtatcagggctttaacaacggaattccaatccgttccgccgctgtgggccgacattattgtttaaataatctcgtcaatttgcccgatagtactgagtactcggcctactgtgtggccagatttcattaacggtaaaatgccgtgcgagcagggataccacacagctttaatcattattccaatcagctgttttaaaaatacataaaaaagtagtgaataaccaatatatgaaaaaaactgtacactgcacaaaatatatatatatatatatatataactataatattttaaacgtatttggacaagctaataaatgttttgtttattcgtctaaaatatgtaaagcaaactagtgatgctagctttaaaataatgattatttaattattaaatattagcgacatatgtatattttttttgtttaaattatcttctaaacatcttaatcggctgcaggctc

SEQ ID NO: 35057 - DNA, 16135 bp, DROSOPHILA
aattgacgagattatttaaacaataatgtcggcccacagcggcggaacggattggaattccgttgttaaagccctgatacttaaccgtacaggagccttaaacaagaacgaagttgttaatttgctcaaagctatcacgcgatgcgaacatgactttttcgaggaggaaagcaatttcacgcagttttacacggcctttgcggccctggcggcggacaaacttatgcaaatcaagacaatttgccagacgcagatttgtcagttgcacgatgccaccgccgtgcttatccggtttattatctatagactgcccagggtgtccgtctacgagaccaagtggctcctgggcgccctcaagatgctctgcgagggccgggagtgcccagcatcagcgtcgtcatccatgttcgactacaatgcggtggctaatgttcttaaaagctgcaaacatcccgagtcgaccaccaagagcattatgcccagcagcagttcctccggaagtggggccagcaacgacaaggagtcgcccaagtcggagattaagcgatcccggtcggacctgtcctcggttattctgcagcaactgattgctcctttagagcccggcaagatgacttgggttccactcagcgaggaggtcaccgactgcactgaacaaatcctggcggccaatgtggagtacttccaggagcaaaacggagtggataccctgctggatgtgtgtgtgagcctgcccatactcaatcgataccgatccaaatatatggagaccatcaacggcggtaaatcgctttatttgccactgacccaagtggaggccactgcagtgaaatcgagcatgaatcacatgcttactgatctgactattttgagtcaggcccaagccctgatcgagatgcagccactgactcccagtagaattgaacgactatcaatgtgtggtattgctgcgctatacaatgctgtgttgacctcaatagccaccagtgttctcggtatgagccaggccagcagctctcagaaacagactgcatccactagtcaaggaagcggagtaggaggttctagtggtgggcaatccaacaaagaccatgacgactttgaggatcaggcctgtagcatagtgaacaaagctttagagatctactccaatattggtcacatgttcaaaacttcggccaggattcatgtatatcagaaccatctctgctatggcagctggctgctaattagcggtatacaaggagcaatgggcgcctctggaagcggtggatctagctcggattcggcatcgaagtcggcgtcaaaagcgaccaagtctggtagtgaggctggaaccgcacctactacacctattgccagagtcaaccttttcaaggtacagcaaggatttggagaactcaatgcagctattgctaaccacagcattaaattgctctcagagctaatagaagatctaaaggttgaagccgcatgcggacagagtctcgaatccacagagctcccggagcctgcacagttcgatattttgcagaactacagttcgctggagcggattgtccgcgtgctgaatacagccactctgcatcaacttttcacttttctagccactgtggcttatcgcaaggcatgcaccttaaagcgcgcttccgccaaggatcgtacggaatgcgaacccataagctactcagattctacgacttatttcaacgattctctctcctgttcggacaactccgaggaggacgatagtgagagttacctgggccactggtttaaggaaactctttctccagaaacccatgatgataatgcaaacacatccacacaagagcgtgctgaacagaagagcgcccttgtccccaagctagatgagccacatgagtatttagacttggccgcagacatattctgtttcctggatcaatttttggccaatcgacatgcctacatgcagcgctatgtaaaggcaggcgttagtgatcagcaaatgctgttaatggcaaatataatcaaagattttgaccgcgacgtgatgcgaaatgagagcgatcaggggtcgggaaatgccccagctgccagtgcaggagcaggaacctctgcaggagcttctaccaagtggcagacgtcgatgattcgattttcgggagctgcaggccgatatattcacaatttgatttccacttcattgctgtccgagcaattgcagtcaaatctgctgcagcacttgtctatatcgccatggtctactgatacaaacacctggcctttacaagtttatccgagtactctgtctgtactggtgcaaattcttttgctgaagccaacacaagagaaggaagccgcctgcctgtccgtgtggcaccgccttattaacacgttggtggaaggagtttgttcttcgaataccgccagtgattctgactatgaagaccttaacattgagcacgcccaactgctgcttttcctatttcattcgctcaatctgatgcaaaagaaatccattctgcttttaacggctggcggtgttatccgttgcgcagaagtttgtcgtggaatcagcgaggatagacccgtaaaaaacagccaaattatgctgctgtctcgcttgctgctctttttggagtatcttatgaagcacttgtacaatgcgcctccggaattgctagaccaggtgcgctggaatctttttagtgtgagcagcatgccggacacccaaaagatcacggatctgctaaactgccgaaccaaactgaattcctattgccgccatgatattgaagagaatttccgcaagtcggccggcgaatatggctcatcaattcgcccaactttttactctctggtaatgggtgatcccgagatatcctactgggctcaggaatttaagctggatggtttggcttggaactttattctctgcacaccggataagcttaaatatccgctactggtggatgcattgactgacatactatccatcaccgacatgtcaatgtattccaaggaaaaggacaaggaagcgagcatgcataatctttgcgctatacagtattgctttacgattgcctggaagctgaatttgggtttgccgccctctacttctcacgtagagtcgctgaaggcagagcgatcacccaatctgcactcactgatgtggagtatacgtctacccctggccagttctcactacctagtcgttagcagcctaatcaagcagggaatgtatacccagtacgctgagacgttgtggactcatgtgggcgacataggtgccgatataaaatatagtctcaagcaaacaattcttggtgtggaggcgttcaatagtcaaatgaatggaaatggaactccccgcctctccgatctcatcctttttgattctttggtggcgcacatgcaggcggtagcctgggcaaacaaggagggcctcaagtggccgcgaaaagagagcgaagatgccgctggcgagcagtccgctggtacatccttaacttcatcgtcaaacgatccggaactttattcttccaacgaatcaattgatgatcaaaaattgaaacaagacgacgacggtaagctgtcaagtgatttgcaaaagtataatcaacttgtaaacgagctaatggtaaagctcatgaattcttaccaattgctttcggtgatcgtgcgtggccaaatgctaaagcagttgtcaagttcaacaccggagaaggcactgaatttgattgtgcccattgtaagcgataagccagcaattatgttagaactccatgcagcttttctaaaactcctgcccaacgaggacaaacaactaatagcaaacgaatggccaaagtgcctaatggtcaatgattttgcattcaatggaaagcaacatccggtggaaccatatattttgaacgttattgatgctcacattattgagctgacacgaggatccaattactctaccctgcacactctgaaacactgcttaaagtctatcctgcaattgtttgagttgctgctaccacatcgcaccgcgaacgcagaagtagagactcagctaaagcaattgcttatctcctcaatgctggacatgcgaacggattacttgcaaggacacagcgagcattgtctgcgcgagatcctcagtggtctgacacaagaggcacaaaagctgctgctttacgagcacatggttggatattgctatcgcatgctcaaagagtttgctgccgatcttcgtcagccccagtctgcggggcctagtggcggagctcctcttgatcaggatcgtgctatgtttaacgagtccatgctgtttgccgtgcttaaaactatgttcaaaatgctggaaaagccggtggcagttcaggccatgcgccagtttttcaaagatcagcgctctgggagtcttaccacacttttgctatcgttcactggcaccagtctgcctgttagctatgcgcgcaagatgctgcaatttgttaaccgacttttccagctatccttacaagcggattcacagttccagcatgaagatctggttgagtgtttctcggaactggccacagttgacgtagctcgtttaaagcaatggttgggccacattatctacggccctaatgtgagtaccgatgtaagcacctccgaggcattagacaccacctgccggatgctcaccagcattttgcagccgtcgagtagctccagcagcaatgctcagacgccaacaaatatggccaccgtttcggctatgccaagtatctcagaccagttggatcccatggaaattgaatacgattgcggaactgcagcgggaggcggagaaagtaacccaggaaccggaggagctgcagccaatacctcgcagattctgagtttgtggcaggctgcgcagccaaatccgtcggaagaatcttcacaggcttgcgatcatagtgatagcgaacgaaatggcgcgttgctcttaagcttcgtgaagtcattggtgaaagatcaaagcaaagcatcgcagatagctccaccactgttccaagctttgcttcagctcggacaaacattaatttcaccaccccaggaaggctgcgattttgcagatgtactacagataatgattactctagctgacgccagtccagcacgcggccatgtcgccttgttcaataccaccctcctttggctggaactggccaaattgcaattaccggacaaacacttgaaacatgcagagaacgtaagtgcccagttgcgctatttaagcgaacttcttcagagcattggcttccgaggcagtaggcaacataacccgccgtgggatgatgaactacagaccgatattgatgagctatatgacgagctagccgaggaaggtgagcaagactcgttgcttgacgattccgacgaggacacgttgaacaacaagctgtgtaccttctcgcagacccaaaaggagttcatgaaccaacattggtatcattgtcatacttgcaacatgataaacacagttggcgtctgttctgtgtgcgcaagggtttgccataagggacatgatgtcagttacgccaaatatggaaatttcttctgtgactgcggagccaaggaggacggatcctgtcaggcattgagtaggcgtatcggcagcaatgaggttagagattcagctggaattggcagctatctaccgtcccacatgagcttactcgctggaaagaagaggagcagcttaccagttggccagccagtacttacgcgaaaggattcattgactaatgaacggatcgcagtacttaccaaactgttggaaccttacagagagacacttcagcaccaggatcagtggctgctggtcgtaagatgcatcctagagtattttgacctgctgctaccatcaataaacgaaaattgtatgctatactccattgtcggctgccacaagagagcaactgcggccttggagagactccacctgcttgaacagagcttccaggtaaccgatcaactgatgtttgcaactttgggctcacaagagggagcttttgagaatgttcgaatgaactattctggcgaccaaggtcagactataaagcacctactatcatccggagttgtccgccgtgttgccttctgctgtttgtcctcgccacatggacgtcgtcaacagttggctgtatcccatgagaagggaaaggtgaccatcctccagctgtcggcactgttgaagcaagcagatgcctccaagagaaagttaactctaacgcaattgagttctgcacccattgcctgcacggttatctccctagctgctaatccgtgcaatgaggattgccttgcagtttgtggcctaaaagagtgtcacattctcaccttctcaagcagtggcagtactaacgaacacatagtagtgaacccccaactggaaaatggaaactacatcaagaaagctgtgtggctgcctggctcacagactcttcttgccgttgtaacttcggattatgtaaagatttacgatttggcagtggatacatatagcccaaagtactattacctagtggccgttggcaaaattagagattgcacgtttgtgtaccaggatggcaactacaatatgctgacctttgcaagcagcggatacatctatactcagcagttggatcaacagagtctagcggttcatggagatttctatgtaaccaacactttggagctgagccaccaacatatcaaggatattgccggtcatatcggaggcggtggagtatccatctactattcgcataccctacagctgctcttctacagttattcttgcggaaggagcttcttttcaccactcaccaatgtaagtgaaggcgtgaagggaatatatcacctggacacaaattcggctagtaagtcagcttcgaagggaccactacagcctctcgtgcagtggacagaggttacagggcatccaggattggtttacgccagcatgcagacatcgaataatccgattatattgatgataacccctgaacggatttacctgcaagagatcaaggcacaatcggccaagtcacgaatcatggacgttgttggcattcgtcatgcggttgccggagtggaaaaaactacgcttttgctcctctgcgaggatggaagcttgaggatcttttccgctcaaccagaatacactagcttctggctatcgccacaggttcagccatttggtaatcagttgtactcgtccaccttgatggctaagggaggtggatctggttcgacttcaaagtccaaatcaaatacagcatctggaaagatgaccagcagaaaggcaagccaacaacagaagcaacccacagctggaggtcagcccgttttcccaattgactttttcgagcactgcaacatgctagccgatgtggaatttggaggcaacgatctgctccagatttacaacaaacaaaaactaaagacgcgtctgttctcaacgggaatgtttgtggccagcacccgatcgaatggctttactctggaggtgatcaataatgatcccaatgttgtaatcgtgggaataagagtgttaattggaactcaggacgtacagcgtgctccccaatctgtgactattctgggacgtactatacccacaccggtcaggagggcacgttggttcgatatccccctgacccgggaagaaatgctccagtccgacaagttattgaaagtcgtgtttgctaaagctccagatccggagcatgtgacattactggattgcattgaggtatatggaaaatcgaaagagctggtgggctggcccgacgaaagcgaggatgttactgtcccaggatccagtgcgccagcagtatcttcctcccaggcaagtagcgctaactttggagaaggattcaattgcattactcagctggatcgaatggctaatcaccttttggaagtaatggattgtgcactgcatttgttgggatctggagtacctgcttctatgcgtcaaaaggcagttaaaacagcgagtgccctattgctactgccaacgcccaatcctgttcagacccaggcgcgctacgtgctggccactctatacggaactagagcattgtaccataactacaaggatggagtgcttcttcagtttgtaaatagagaactacagtcaatgcagccgaagcttgaaaaacttgaaactctgcgggagatcgaccctgaggctttctaccgcctagttctgatggtccgtggcattgccaacgcacgaccccaatcgctagcgaagatctgcgtggagaacaactatgatattgttccaaccctcatgggaattgtcttggagttgcataaggttacaccgacgctagacgaacccgtgaatattgtgaagcgaggcttgtgccagccggagaccattgtccattgtctggtagagataatgtacggatttgccttggccgatcccggacaggttggtcgcatgaccaagtacttcattgatttgctgaagcatgatgctagcgtgattagccacagcgccaaagaggccctgatccttttgcttagtccaagaatgaagcgcagaaaggtggccatagttacacccccagcatgttcaacaccgactccctcaacgtctaccatgcaggcactgcaagcagcggcttcttcagctgcaagtgatatcatcgaggaagcagctggcgttgttgttgatgggtcagttggaggaggtggattacccgaaccgaatgcggacgcggaaggtgctgcagttggagtaggaggagtcggtcagcagcaaatgctcaatctggaggcattcatgggtggcggtttccctcgcttactcggcctacccgaagatgccgacgatgaggccatcatggatattgccatcgcattgagtctccaacagcacggtggggatgcaaacgccttgcagtctcttcagcaaggattggccaatcttcagggcatccgtcaagctactgccatggcagcagctgtgaacgcagctgccaatgtctccctaggtggatccgatgatgatgaaggttccaatgtggcaaccgatggatcaacattgcgtacttctccagcagagcctgctggcagcggtggatcagagagtggaggcagtggagtagagagtattggtggaacatccgccaggagcagcaactttggcgaccacgcgaatgcctcgccgccgcgtcagggatccaccaaggacgatcaagagcagccaggtcccagtggcgttgctggctccggtggtgttgctgttttgagtgccatgagcagcagtgaggataatgaagcaaacgaggacgataagctcagcaagctacatgaccttagaattgctgtgctggagagcattatccaacatctaggaacattcgacttgtgcaatggcctgcaggcaatcccactgatccaggttatactcatgttgactaccgatctcaatggaaacaacgaaagggatcaacaagtgcttcacgatctgcttactgctctagtggactatgtggaaattggaaagcgaggagctgccgcaaggatggagacaaagtgtcctggcaatgaggtgcgcctcgcattgctttccctgttcggagttctgatgggcaaaacaaagtcaaagcaaactggaacaacatcgccgccgcatcaatttaaggacaatagctcctttgtggccagtaccacagcaaatgttctcagtaagagtggagcattcgtttacgccctagaagcactaaacacgctactggtgcactggaagaatgtgctaggagatccttatgcagccggtggcggattagcctcacagtcggcacaagccagtggcggagcttcaggtcccggagttcagctactgaagcccattaaacatggtcctaaacctgacatatccatacttataccgcacaactatctgaaaaactacccggatattttcgagtcctacgatggactcctaactgaaattatcgtgcgattgccatatcaaattctgcgcttaagtagcgcccatccggataactacgatagtggattctgcgaagcgatgacctttacactttgtgagtacatgatgctaaatttgaacacactgcttcgtcggcaagtgcgaaagctcctgatgtacatttgcggcagcaaggaaaagttccgcatgtatcgcgacggtcactccctcgacgctcatttccgggtggtcaagcgggtgtgcaacattgtcagcagcaagactggtgctccttacaacgctaatcctcctatgctttcatacgatgcactggtagagttgacggaacacctacgtacttgccaggagataagccaaatgcgcacgggcaactggcagaagttctgcgtcgtccatgaagatgcgttggccatgctgatggaaatcgcctgttatcagttggatgatggcgtgtcgcctattattatacaattgctacaggcggccgtttgcaacttaccccctcctagtggatctaagcaggcccagccgcagccatcgacctcgtctgcctccggaaaacttcgaacagatcgtgagaagagcgaggatacagacgcctactactccaagtttgatccagcccagtgtggtacatttgtgcaccagatctttagatacgcatgcgatgcgctgataatcagatttgtgcgaatattcctgttggagaacaacattactcagctgagatggcaggcccactcatttatgaccggactttttgagcatgccaatgaacggcagcgtgagaaacttctcaacatattttggaacctgtggccattggtgcccacctacggtcgtaggacagcgcagtttgtcgacctattggggtatctaaccctaagtaccagaagtataacagaacgactgccagagttcgtttcccgcgctgtggatgttctcaggcagcagaacgaactgctttgcaagcatccaaatgccccaatatacaccaccttggagtctatacttcaagtaaatggttactacctagaatcggaaccttgtttagtgtgcaacaatccagaggtgccgatggctaatataaagttgccatcagttaaatcagactctaagtacaccacaaccacaatgatttataagctagtccaatgccatactatttccaagttgatcgtgcggattgccgacttaaagcggacaaagatggtgagaaccattaatgtttactacaacaaccgcagtgtccaggcggtagtggagctaaaaaatcgcccagctctgtggcacaaagctcgctcagtatccctgcaatcggcacagaccgaactgaagatcgattttccactaccaatcaccgcatgcaatttgatgatcgagtttgctgatttctttgaaactgtgagtggatccagtgagaatttacaatgtccacgttgtagtgcagcagtgccggcttatccgggagtctgcggaaattgcggtgagaacgtgttccagtgccacaaatgtcgggccattaactacgatgagaaggacccgttcctgtgccactcctgtggcttctgcaaatatgccaaatttgatttcagcatgtatgcccgtgtttgctgcgctgttgatcctatagaatcggcagaggatagggtcaagactgtttcactgattcacagctccctagaacgagccgatagaaattaccgccagctgctgaccaacaagcaaatgctggagcttcttattcaaaaggtggccgagcatcgtagcagtgatcgaatggtcgaggacaacatggccagcgtgcacagcacttctcaagtaaacaagattatacagctgctcgcccagaaatactgtgtggaatcgcgcaccagtttcgaggagctaagcaagatcgttcagaaggtcaaggcatgtcgaagcgaactagtggcctacgatcgtcaacagcaggaccagccgccggttaatcccggctcaacaaccggtgccgaaaatcccaccacaaatcgctgctacggctgtgcactggcatctaccgagcagtgtctgacgcttctgcgagccatggcttacaattacgattgtcgcgtgtgcttgtatagtcagggactcgtcagtgaactggctgagcacaacctgcgacgaggcactcccctaattcaggaggaagtgcgcaacctgttggtcgtactgactaaggataatgccgaggcatgcatgcatctgttgcagttggtgaccacaagggtgaagaatgctctgatgggatcgattcctctgataagtttagaggcagctgtgcaccaagaaatgacacttttggaggtgctcttgggccaggacgacatctgctgggaatacaagctaaaggtcatctttgagctgttcattagcaactgccgtttgcctcgtggtccggtaacagcagtactacacccctgtctgcgcatcatgcagaatctcatctgcccggttctgcccggcagcaagcccaatcagaaggtggccactacagatttgtgtagcatgaagatgtttgagggcaacacggtggactatagggcctggctgaactcagaccgtaatcatgaatacgcagcgtggagcaagcggatgccgtcaaacaaccaggctaagctaaagaatgccaaggatcagaatgtggcggcatccggcggatcagatgcaccgccgaagagcaggagggaggtgcgagtcgcattccttagcgaaaagtacggaaaacgctggcgggaacgtgtgctggacaagcaacgagtgattaaacctcttgtattcaacgccaagtggatacaaccgttgctatttaatgcaaactccagattcggtcgccagctggcctgctccttgctgagcagcttgagccgaactaacgaacggcggcaacaggctctgaatatgctgacatcgttcttgaaacatgtaggcgaagcaggggaagccagtgcagagtacttaatgctgtacaagaacatggccacagagcaaccctggctgcagtatttggtcctgaaaggagtattaagtcaaatctcacagcttctggctattgaaatcagcaaggtgcaccgcatggaggagtactcgctttcttcagatttatccttaggatatgcactgcgccagtatgtggaattgttgtggctactcctagagtgtccaaatatccgcagaacctacaagactcgcatgctaggaccagttctggaaagctatcttgccctaagaagcttagtcgtgcagcgtacgcgactcattgacgacgcacaggagaagctgttagagatgctagaggatatgaccagcggaaccgaggaggagacacgtgcctttatggaaatccttattgacaccgtagagaagacccgcatgaatgacattaaaacaccggtgtttgtcttcgagcgcttatattccattattcatcccgaggagcatgacgaaagcgagttctatatgacattagagaaagatccccagcaggaggactttctgcaaggtcgcatgctgggtaatccttacccctcgagtgaaatgggattgggtccattgatgcgggatgtgaagaataagatttgtacggattgtgaactaatcgccctgttggaagatgataacggcatggaattgctggtcaacaacaaaataataagcttggatctgcccgttaaggatgtttacaagaaagtttggttagctgaaggaggcgaccgagatgccatgagaattgtatatcgcatgcgcggtctcctgggagacgccacagaggaatttgtggaaacgctgaacaacaaaagccaggagcaggtggacaccgagcagctgtatcgcatggccaatgtgctggctgattgcaacggcctacgcgtaatgttggaaagaattggcagcctgcagcgcatatcgcgcaaccgagaacttatccaggtactgcttaagctattccttatttgtgtgaaagtgcgccgttgccaagaggtgctttgccaacccgagatcggagccatcaacacgctgcttaaggtgctacaaatgtgtctccagtcggagaacgattcgattcaatcggcggttaccgagcagttattggagatcatggaaacaatactatcgaaggcggccagcgatacgttggactcgttcctgcagttctccttgacattcggtggaccggagtatgtaagcgcactaatatcgtgcacagactgtcccaatgttagaaacaatccttcggtgctccgccatcttattcgtgtcctagccgctttggtctatggcaacgaggtgaagatggctctactttgcgagcatttcaaggacactttgaactttaatcgctttgacaacgagcgcacacctgaagaagagttcaagctggaactcttctgcgtgctgactaaccaaattgagcacaactgcattggcggcactctcaaggactacatagtaagtctcggcatcgttgagcgatcgctagcctacatcaccgagcatgcgccttgtgtcaagcccactctcctgcgaaccgactccgatgagctgaaagaattcatctcgcggccaagcttgaagtatattcttcgtttcctcaccggcctctcaaatcatcatgaggcaactcaggtggctattagcaaggacattatacccattattcatcgcctggaacaagtatccagcgatgagcatgtgggcagtctggccgagaaccttttggaagctctctccaccgattcggcgacagcagcgagggtgcagcaagtgcgtgacttcacaagggcagagaagaagcggctggcaatggccacgcgcgagaaacagttggatgcattgggaatgcgcacgaatgaaaagggccaggtgacggccaagggctccatcctgcagaagatcgaaaaactgcgcgacgaaacaggactaacttgctttatttgtcgcgaaggctacgcctgccagccagacaaggtgcttggtatctacaccttcaccaagcgctgcaatgtcgaggagtttgagctgaagtcgagaaaaaccattggctataccaccgtcacacacttcaatgtggtccatgtggactgccacacatcagccataagattgacacgtggcagggatgaatgggagcgtgctagtttgcaaaatgccaacaccagatgtaatggactgctgcccctttggggacccgccgttggagaggcggccttctccgcttgcatgacccgccacagcagttatatgcaggagagtacccagcgctgtgacatctcctacaccagcagtgtgcatgacttgaagctgctgttggtacgatttgcttgggaacgcagcttccatgacgatgccggcggaggtggtccgcaatcgaacatgcacttcgtaccctacctgctcttctactccgtctatctgttgctttcgtcgcgatcagcggctagagacagcaagactctgctgacgtatttgcaggcgccgcccagcgagaagtggttggaatgcggatatgaggtggatggtccgcttttcatggcaaccatttcgctgtcactgcacagccgagagctatggaataagcataagctagcacatctgaagaggatgattgcagtggcccagggtcgccacgtctcacccgccgtgctgtgcaaagccttgttggctcctgcagaccgccaggtcaaggattacactgtttacaagcccttccttatgatgtgggcattggtggacttgatctacgacaatctgttcaagacggtaagcacgcccaaggaggaggattggccgatttccctgttcgactatcttcgtaagaacgatgaggctttgctcaagtccacggatagcatcctgcagaccctaacggaggagttcctgccctgcacttcctttgtcgaattctgtgatgttgcaggtctcctgcatctcatcgagcacccggacaacttcatcgaagaaatcctcgctgccctgccttcaacatcgagctctaattaaaatgcaatcgctgtttctaaccaaataaattgcagaactttaagcgattgctgcgtatatataaacatacagcataaatttatatttaacacatcctaaacatttaatcaataaaaattaatcgtttgcacaatgtagtga

SEQ ID NO: 35058 - protein, 5322 aa, DROSOPHILA
MSAHSGGTDWNSVVKALILNRTGALNKNEVVNLLKAITRCEHDFFEEESNFTQFYTAFAALAADKLMQIKTICQTQICQLHDATAVLIRFIIYRLPRVSVYETKWLLGALKMLCEGRECPASASSSMFDYNAVANVLKSCKHPESTTKSIMPSSSSSGSGASNDKESPKSEIKRSRSDLSSVILQQLIAPLEPGKMTWVPLSEEVTDCTEQILAANVEYFQEQNGVDTLLDVCVSLPILNRYRSKYMETINGGKSLYLPLTQVEATAVKSSMNHMLTDLTILSQAQALIEMQPLTPSRIERLSMCGIAALYNAVLTSIATSVLGMSQASSSQKQTASTSQGSGVGGSSGGQSNKDHDDFEDQACSIVNKALEIYSNIGHMFKTSARIHVYQNHLCYGSWLLISGIQGAMGASGSGGSSSDSASKSASKATKSGSEAGTAPTTPIARVNLFKVQQGFGELNAAIANHSIKLLSELIEDLKVEAACGQSLESTELPEPAQFDILQNYSSLERIVRVLNTATLHQLFTFLATVAYRKACTLKRASAKDRTECEPISYSDSTTYFNDSLSCSDNSEEDDSESYLGHWFKETLSPETHDDNANTSTQERAEQKSALVPKLDEPHEYLDLAADIFCFLDQFLANRHAYMQRYVKAGVSDQQMLLMANIIKDFDRDVMRNESDQGSGNAPAASAGAGTSAGASTKWQTSMIRFSGAAGRYIHNLISTSLLSEQLQSNLLQHLSISPWSTDTNTWPLQVYPSTLSVLVQILLLKPTQEKEAACLSVWHRLINTLVEGVCSSNTASDSDYEDLNIEHAQLLLFLFHSLNLMQKKSILLLTAGGVIRCAEVCRGISEDRPVKNSQIMLLSRLLLFLEYLMKHLYNAPPELLDQVRWNLFSVSSMPDTQKITDLLNCRTKLNSYCRHDIEENFRKSAGEYGSSIRPTFYSLVMGDPEISYWAQEFKLDGLAWNFILCTPDKLKYPLLVDALTDILSITDMSMYSKEKDKEASMHNLCAIQYCFTIAWKLNLGLPPSTSHVESLKAERSPNLHSLMWSIRLPLASSHYLVVSSLIKQGMYTQYAETLWTHVGDIGADIKYSLKQTILGVEAFNSQMNGNGTPRLSDLILFDSLVAHMQAVAWANKEGLKWPRKESEDAAGEQSAGTSLTSSSNDPELYSSNESIDDQKLKQDDDGKLSSDLQKYNQLVNELMVKLMNSYQLLSVIVRGQMLKQLSSSTPEKALNLIVPIVSDKPAIMLELHAAFLKLLPNEDKQLIANEWPKCLMVNDFAFNGKQHPVEPYILNVIDAHIIELTRGSNYSTLHTLKHCLKSILQLFELLLPHRTANAEVETQLKQLLISSMLDMRTDYLQGHSEHCLREILSGLTQEAQKLLLYEHMVGYCYRMLKEFAADLRQPQSAGPSGGAPLDQDRAMFNESMLFAVLKTMFKMLEKPVAVQAMRQFFKDQRSGSLTTLLLSFTGTSLPVSYARKMLQFVNRLFQLSLQADSQFQHEDLVECFSELATVDVARLKQWLGHIIYGPNVSTDVSTSEALDTTCRMLTSILQPSSSSSSNAQTPTNMATVSAMPSISDQLDPMEIEYDCGTAAGGGESNPGTGGAAANTSQILSLWQAAQPNPSEESSQACDHSDSERNGALLLSFVKSLVKDQSKASQIAPPLFQALLQLGQTLISPPQEGCDFADVLQIMITLADASPARGHVALFNTTLLWLELAKLQLPDKHLKHAENVSAQLRYLSELLQSIGFRGSRQHNPPWDDELQTDIDELYDELAEEGEQDSLLDDSDEDTLNNKLCTFSQTQKEFMNQHWYHCHTCNMINTVGVCSVCARVCHKGHDVSYAKYGNFFCDCGAKEDGSCQALSRRIGSNEVRDSAGIGSYLPSHMSLLAGKKRSSLPVGQPVLTRKDSLTNERIAVLTKLLEPYRETLQHQDQWLLVVRCILEYFDLLLPSINENCMLYSIVGCHKRATAALERLHLLEQSFQVTDQLMFATLGSQEGAFENVRMNYSGDQGQTIKHLLSSGVVRRVAFCCLSSPHGRRQQLAVSHEKGKVTILQLSALLKQADASKRKLTLTQLSSAPIACTVISLAANPCNEDCLAVCGLKECHILTFSSSGSTNEHIVVNPQLENGNYIKKAVWLPGSQTLLAVVTSDYVKIYDLAVDTYSPKYYYLVAVGKIRDCTFVYQDGNYNMLTFASSGYIYTQQLDQQSLAVHGDFYVTNTLELSHQHIKDIAGHIGGGGVSIYYSHTLQLLFYSYSCGRSFFSPLTNVSEGVKGIYHLDTNSASKSASKGPLQPLVQWTEVTGHPGLVYASMQTSNNPIILMITPERIYLQEIKAQSAKSRIMDVVGIRHAVAGVEKTTLLLLCEDGSLRIFSAQPEYTSFWLSPQVQPFGNQLYSSTLMAKGGGSGSTSKSKSNTASGKMTSRKASQQQKQPTAGGQPVFPIDFFEHCNMLADVEFGGNDLLQIYNKQKLKTRLFSTGMFVASTRSNGFTLEVINNDPNVVIVGIRVLIGTQDVQRAPQSVTILGRTIPTPVRRARWFDIPLTREEMLQSDKLLKVVFAKAPDPEHVTLLDCIEVYGKSKELVGWPDESEDVTVPGSSAPAVSSSQASSANFGEGFNCITQLDRMANHLLEVMDCALHLLGSGVPASMRQKAVKTASALLLLPTPNPVQTQARYVLATLYGTRALYHNYKDGVLLQFVNRELQSMQPKLEKLETLREIDPEAFYRLVLMVRGIANARPQSLAKICVENNYDIVPTLMGIVLELHKVTPTLDEPVNIVKRGLCQPETIVHCLVEIMYGFALADPGQVGRMTKYFIDLLKHDASVISHSAKEALILLLSPRMKRRKVAIVTPPACSTPTPSTSTMQALQAAASSAASDIIEEAAGVVVDGSVGGGGLPEPNADAEGAAVGVGGVGQQQMLNLEAFMGGGFPRLLGLPEDADDEAIMDIAIALSLQQHGGDANALQSLQQGLANLQGIRQATAMAAAVNAAANVSLGGSDDDEGSNVATDGSTLRTSPAEPAGSGGSESGGSGVESIGGTSARSSNFGDHANASPPRQGSTKDDQEQPGPSGVAGSGGVAVLSAMSSSEDNEANEDDKLSKLHDLRIAVLESIIQHLGTFDLCNGLQAIPLIQVILMLTTDLNGNNERDQQVLHDLLTALVDYVEIGKRGAAARMETKCPGNEVRLALLSLFGVLMGKTKSKQTGTTSPPHQFKDNSSFVASTTANVLSKSGAFVYALEALNTLLVHWKNVLGDPYAAGGGLASQSAQASGGASGPGVQLLKPIKHGPKPDISILIPHNYLKNYPDIFESYDGLLTEIIVRLPYQILRLSSAHPDNYDSGFCEAMTFTLCEYMMLNLNTLLRRQVRKLLMYICGSKEKFRMYRDGHSLDAHFRVVKRVCNIVSSKTGAPYNANPPMLSYDALVELTEHLRTCQEISQMRTGNWQKFCVVHEDALAMLMEIACYQLDDGVSPIIIQLLQAAVCNLPPPSGSKQAQPQPSTSSASGKLRTDREKSEDTDAYYSKFDPAQCGTFVHQIFRYACDALIIRFVRIFLLENNITQLRWQAHSFMTGLFEHANERQREKLLNIFWNLWPLVPTYGRRTAQFVDLLGYLTLSTRSITERLPEFVSRAVDVLRQQNELLCKHPNAPIYTTLESILQVNGYYLESEPCLVCNNPEVPMANIKLPSVKSDSKYTTTTMIYKLVQCHTISKLIVRIADLKRTKMVRTINVYYNNRSVQAVVELKNRPALWHKARSVSLQSAQTELKIDFPLPITACNLMIEFADFFETVSGSSENLQCPRCSAAVPAYPGVCGNCGENVFQCHKCRAINYDEKDPFLCHSCGFCKYAKFDFSMYARVCCAVDPIESAEDRVKTVSLIHSSLERADRNYRQLLTNKQMLELLIQKVAEHRSSDRMVEDNMASVHSTSQVNKIIQLLAQKYCVESRTSFEELSKIVQKVKACRSELVAYDRQQQDQPPVNPGSTTGAENPTTNRCYGCALASTEQCLTLLRAMAYNYDCRVCLYSQGLVSELAEHNLRRGTPLIQEEVRNLLVVLTKDNAEACMHLLQLVTTRVKNALMGSIPLISLEAAVHQEMTLLEVLLGQDDICWEYKLKVIFELFISNCRLPRGPVTAVLHPCLRIMQNLICPVLPGSKPNQKVATTDLCSMKMFEGNTVDYRAWLNSDRNHEYAAWSKRMPSNNQAKLKNAKDQNVAASGGSDAPPKSRREVRVAFLSEKYGKRWRERVLDKQRVIKPLVFNAKWIQPLLFNANSRFGRQLACSLLSSLSRTNERRQQALNMLTSFLKHVGEAGEASAEYLMLYKNMATEQPWLQYLVLKGVLSQISQLLAIEISKVHRMEEYSLSSDLSLGYALRQYVELLWLLLECPNIRRTYKTRMLGPVLESYLALRSLVVQRTRLIDDAQEKLLEMLEDMTSGTEEETRAFMEILIDTVEKTRMNDIKTPVFVFERLYSIIHPEEHDESEFYMTLEKDPQQEDFLQGRMLGNPYPSSEMGLGPLMRDVKNKICTDCELIALLEDDNGMELLVNNKIISLDLPVKDVYKKVWLAEGGDRDAMRIVYRMRGLLGDATEEFVETLNNKSQEQVDTEQLYRMANVLADCNGLRVMLERIGSLQRISRNRELIQVLLKLFLICVKVRRCQEVLCQPEIGAINTLLKVLQMCLQSENDSIQSAVTEQLLEIMETILSKAASDTLDSFLQFSLTFGGPEYVSALISCTDCPNVRNNPSVLRHLIRVLAALVYGNEVKMALLCEHFKDTLNFNRFDNERTPEEEFKLELFCVLTNQIEHNCIGGTLKDYIVSLGIVERSLAYITEHAPCVKPTLLRTDSDELKEFISRPSLKYILRFLTGLSNHHEATQVAISKDIIPIIHRLEQVSSDEHVGSLAENLLEALSTDSATAARVQQVRDFTRAEKKRLAMATREKQLDALGMRTNEKGQVTAKGSILQKIEKLRDETGLTCFICREGYACQPDKVLGIYTFTKRCNVEEFELKSRKTIGYTTVTHFNVVHVDCHTSAIRLTRGRDEWERASLQNANTRCNGLLPLWGPAVGEAAFSACMTRHSSYMQESTQRCDISYTSSVHDLKLLLVRFAWERSFHDDAGGGGPQSNMHFVPYLLFYSVYLLLSSRSAARDSKTLLTYLQAPPSEKWLECGYEVDGPLFMATISLSLHSRELWNKHKLAHLKRMIAVAQGRHVSPAVLCKALLAPADRQVKDYTVYKPFLMMWALVDLIYDNLFKTVSTPKEEDWPISLFDYLRKNDEALLKSTDSILQTLTEEFLPCTSFVEFCDVAGLLHLIEHPDNFIEEILAALPSTSSSN

SEQ ID NO: 35059 - DNA, 2950 bp, DROSOPHILA
cgaaaacaaaatccttcactagatgtgacgggcggaagatatacctttttgaatcgtggatctaacaaagatgttttgaccagtgttttggttctttgcaatgaattaaaacgctcttgcgatactctaagtggactcgatttcgttacagctccttcagaagattcaatttttattttgcgaattttatcaaacaatagtgatattaatggtatagccatctgacagtaacgtaatattcattgctttagcaaatgacaaaagtcttggtaaatagaaacttcattggatgttagtaagccttttacagaagacacagacaaaaattgacaaaatacaatataatcacaaaaatttaacgaagttgtaaaatgattagctgttttattctaacaaccacttattggtgaatatcacaaaaacgagtctaacgatttctttttttcaaccttaatagtaaaagttttaatggaaataaaaacataaccctttttcatcaataaatttattaagagctctaccaattctccaactcttgatatataacacgtaaggatgcttttcggaatattaaccaatcaatatacatataaataatcataataatagtatctaagagctacttcttggtctcagttttgaggtatgtatactttaggtaacagtgggaagtgtataataattaaatatcttcttatgaagcatgaacacaagaaagtaactgaagtcataaaatacctgatataaacctgtaaatgtagaaaatttgcgggtgaacaataaatatataagaagtttgttgtaataaaataattttataataataaaatataaaggatattggaatgctacttttaaagcacacttttaactgtatgaaatggaaaaagacgttattaatttataacgatagaaaaatatttttatccgaaaaatatcgataaatgtcttattgcactcccatcggtctacagcaattgcttgtagttgggttggttagtcggcttgataagtttaatcagaataagcttttattttgcatttgccaaatacaatgtacatcacaacgggcaaaacgtttgcggtgctgaaaggacctttacgtgattgtttttttcttagtaagagatggccaggtaacgtacgcttttttgtcgccgtctaaaataggcaggtacatagataatgtatgcatctgtagctatacgaaatagtataaagtacatttatacatatgcacacattttttattaaatgcgcaatagttacacatacgtatacatatgtatgtatgttcatacgaattagtactaatatttgtatattttaatctacttccatacacacaaagctgttcaacaactgcacttaagtgtcgcaatgggaaattatgtgaatgaagcctcaattccccttccaatcaatgtggactctgcggaaacaactcgattctccccccagcgctcgcgtgacatttcgtctacagtgattaatgcacaagcaccaatctcaagcattgatatcacaactgacaacagttttcatgcagtcctaagcgatccaaatatttgtcaagatccacatgtacagtcctatgattgtttcgggttgatcagtcttaattccgcgatgcaaagcaatgtaccaacaccgtttggggggcttaacaagttttctcatctgaacatgcctggcggacaatggtcccaggaattcaagtttacagcgcaaaacatgcagtgctctcactacagcggtcttcgcgaaagtttgcgagcggattgggcgacttacgatcagaatgctactcttaaaacgaatgaccaaggtgagaaagcttcgttcaaaaagtaaccagtaaaaatatgtaactgtataagcattttttcgtatatgaatattttcatgtatacaatatatttacatatatatatgtatataacattgtaattagaaatgcatctacatgtctgcatatatcaggaactcattctaaggattggctttcagttcccaggaaccctattatatagaaattagaattgaccaaagaatttattaaattgcaagaaaaccgaaacaaagtgtgaaatagacaattgtgtttggagtgggcatgcccaacgtatttttcgaataccatctttttagctttttgaggtataaatatttggactttcatacggacggacatgaacagatcgatcctgatagagattcaagtctaaaacacttttcttttatctgtaagatacttttcatcgaatataaagaaccgttttaaaatactagtaatgggtatataactctaaaataaaatagatatattttgtatgaaatggtgtttttcctatatgcattcttaacacataacctaaatatattttaaactaattttacagggttgtttaatcgaagatattatagcacccaatcacctatgcaaaactcttccacaaaaacacctacaggtgcaaaactaagtaaaagtgagcagctgaagagggcatttaaggaatatggagcgccaattgttgcgtttcacgtaggaatttcactgatttctcttgccggtttctatgtgcttgtatcaaggtaaggtggtactacaattagactgctgtccaaattacaatactgtgtttccgagttgtactttacacgtagagcaaaaggttatatctaacagactaatggaagcattctcgtttgcacttctgtctatcattttgttcggttcagttcagacttacaataaactgaaaaacaagagagagctatagtcgacttccccgactatcatatacccgatactcatgtagtggaaatgcgaacgcgagatttcataatttttgtgggatatcgatagatgttggtgaataaaatgagaaaaaacttaaagtcgttgaatatatatatgaatatatatactgtatatggtcggaaacgt

SEQ ID NO: 35060 - DNA, 735 bp, DROSOPHILA
tcggcttgataagtttaatcagaataagcttttattttgcatttgccaaatacaatgtacatcacaacgggcaaaacgtttgcggtgctgaaaggacctttacgtgattgtttttttcttagtaagagatggccagctgttcaacaactgcacttaagtgtcgcaatgggaaattatgtgaatgaagcctcaattccccttccaatcaatgtggactctgcggaaacaactcgattctccccccagcgctcgcgtgacatttcgtctacagtgattaatgcacaagcaccaatctcaagcattgatatcacaactgacaacagttttcatgcagtcctaagcgatccaaatatttgtcaagatccacatgtacagtcctatgattgtttcgggttgatcagtcttaattccgcgatgcaaagcaatgtaccaacaccgtttggggggcttaacaagttttctcatctgaacatgcctggcggacaatggtcccaggaattcaagtttacagcgcaaaacatgcagtgctctcactacagcggtcttcgcgaaagtttgcgagcggattgggcgacttacgatcagaatgctactcttaaaacgaatgaccaaggtgagaaagcttcgttcaaaaagtaaccagtaaaaatatgtaactgtataagcattttttcgtatatgaatattttcatgtatacaatatatttacatatatatatgtatataacattgtaa

SEQ ID NO: 35061 - protein, 194 aa, DROSOPHILA
MYITTGKTFAVLKGPLRDCFFLSKRWPAVQQLHLSVAMGNYVNEASIPLPINVDSAETTRFSPQRSRDISSTVINAQAPISSIDITTDNSFHAVLSDPNICQDPHVQSYDCFGLISLNSAMQSNVPTPFGGLNKFSHLNMPGGQWSQEFKFTAQNMQCSHYSGLRESLRADWATYDQNATLKTNDQGEKASFKK

SEQ ID NO: 35062 - DNA, 2486 bp, DROSOPHILA
cgggtacaaggtccaactattgtaccgttaattcacggtgcgtcctctttgtacacgcaccgttcccggtcgacccctgtgcccttggacaacttgagtccaaggtccagagcggtaccgttagttcacggtgcgtcatctttgtggatgcaccgttaccggtcgacctctgcgcccttggacagctcgagtccaaggtccagcgtggtacggtaagtttactgtgcgtcttctttgccggggtccaaagtccattaaataccgtttgacccgaccgcccgtgactcctcctacatcgcggctgttgccactcccctgcacgagattttaaggagttaaaatactcctcatcgacatgccaataaatttttgccacgtccactctaacgccctaaaaccgcctgaaacaaccacgcccacatttttgaaaaattgttttttcattattattagtcacttaaatttctatcgacttgcaaaaaaaaaactttttgccacgctttaaagtcgccaaacctgtaacgcccacacttttcaacaatttttaaatttttatcccaatatctatgggtatcaaattatgaattttttcatttgcaacgggacaagtcgactatagcattctttttggatttatttttcgactcgttagagcagcagaatataaatttagaactaaacttggagcacagcgcaccgaacacgattcaactgtggacttacaggcgataaaatacttaaaatcgaacatatatagtatgttgttttgtggctggtgttgctcgcatcgacatcaccacactgacgatgataaatatgtgtatcactcaaaaaacgtaaattgtctgctgttcgggaatgaacgatagtgatcgaatatggccaagctgatccagctcaagagcgttcgcctcaaattcggcgcggcagctgtataccctcgggcatgattgtcactcgcttggcgtgaatagcacggaagttattgttttcgaagcctctaggcaggaaaaattcctggaagctttgtatgaactcggcccatgtctcccagaattttttggcaatgaaccacttcaaggccctttagtagttccggcatcgctcttgggatctggttgatgccgagtccatacttcattgctgacaactccacctgttccagaaactccagcggcttctcgttcccgtcgtaacgaaaagtaccttctcgcaccttctttgtcacctttgcgtagtcctgcggtgctgcccttgtcgtctcccgcctatcatcgacgtctcgacgttcctgccttacggacctgcttacgctggcctccgcattgctagcaaagtcgatgctcctcaccaggccttctacgccggttactttgacctctacaggcggtctccttccatattccttttttagtgcttccagaattgcgactgattctggctcgtctgtggtctggtcgatgaaatcggacaacgtcttccgcatttcctcgaccaaaccttccagcttgatcccacatgcacttgctatggcgagaaagtcatccctcttcaagctgtacacgacttccccatcttgctctattttccttttgcccagacaatcagggtaagaaacagtaagaaacagaaaatttatgatttgtctgattgcccgaccaagaaaaattagatttatagtcgatttctcgatttgtactgtgtttacggctgactcctccggtgatcttcccttcccaaggtccttctgccggctggaacgggattaggatgtgtgggacagggtgtatcgtctacgggcgacgcaacgctcggcctgggaccaccattgccgaccactgactccactgttccttgctcctctactccaaggatcacttaacactttcactgctcgtccttccgtgtcctgcgggccacttgcggccgacacttccaccgtttgctcttcaccaagttcttccgttctattccgatctccttctttacacgttctgactcactgactccttccacgcgcggtctggttcactaactgcctgctcattccttctacgcagaagcctttgcgaagccaagatcaacactcctgaacaagcttttccgcccctatatacgttgcacgtccgtcagcaagaagtgcgagtcctatgggacaaggtggaaagaaagtacgaaacatgctcggacctcattccccttaaatgatccctcgacatgttgccctttctcctggccaaatatgactacttatattcagtgtatgagtcatacgcagcacaaattggcgaaaatatttagagagcaactcctcagtagcgcaagcaccgtcccagcggctaatttcgtccggttgccgcttgttgctttcttgcgatacggaagtcttcgatagcgactccgatgccccacattctgggacttattcacggcagtttatattaacaaccccagaatggcaccggtcgagaagctgtttaatctcc

SEQ ID NO: 35063 - DNA, 486 bp, DROSOPHILA
atgcggaagacgttgtccgatttcatcgaccagaccacagacgagccagaatcagtcgcaattctggaagcactaaaaaaggaatatggaaggagaccgcctgtagaggtcaaagtaaccggcgtagaaggcctggtgaggagcatcgactttgctagcaatgcggaggccagcgtaagcaggtccgtaaggcaggaacgtcgagacgtcgatgataggcgggagacgacaagggcagcaccgcaggactacgcaaaggtgacaaagaaggtgcgagaaggtacttttcgttacgacgggaacgagaagccgctggagtttctggaacaggtggagttgtcagcaatgaagtatggactcggcatcaaccagatcccaagagcgatgccggaactactaaagggccttgaagtggttcattgccaaaaaattctgggagacatgggccgagttcatacaaagcttccaggaatttttcctgcctag

SEQ ID NO: 35064 - protein, 161 aa, DROSOPHILA
MRKTLSDFIDQTTDEPESVAILEALKKEYGRRPPVEVKVTGVEGLVRSIDFASNAEASVSRSVRQERRDVDDRRETTRAAPQDYAKVTKKVREGTFRYDGNEKPLEFLEQVELSAMKYGLGINQIPRAMPELLKGLEVVHCQKILGDMGRVHTKLPGIFPA

SEQ ID NO: 35065 - DNA, 6045 bp, DROSOPHILA
cagcgcagtttgacactgcttaaatattcgtaaaagaataaaaacctcgattaatatataaatatatagcaaatatatttgcaaaatatgataaactgacctattaatcccaacacagatagttaattttcataagttcgcttgcattcctattgatgtggttgaggaaacgcaaaactcttgtgaacacagtgtgaacacctattctatttttcgtttatccaaaactgtcattcccacacttttgaaaaatattcatttttttaaataaaatttttgtcttgcaactttctatagatatgcaaaaataatgtcgaaaattttccgtcgcactcccactatctaagtaacaggtatcttaccttactttgagcattagtatttttttaatatatgcataatatgaaaaacacacctattaatcccaatgtagatagttaattcagttgatttggtgttcatttttacaaagtcgcatactttcctattgctgtagttgaggaaacgcaaaacttttgttaacacagtgtgaaaacatttcctgttttttgttgacgttatagattttgcccacgctgcagacaggcaaattgtgtttgcaagtcatgaaaagtcatgcgcttatggttcgagttctatactattttcttaatacatttgaatgtcagtcagtcaaacaaaaatgtagggaattaccatgcacacaatttaacagctataatattctcgcgatatacagaagtactgtttcaattctaaattttcgcaataacttttaagcacttccaaagagcatcgtcgtgctatttttagcatgcttttaattatttcacaataaaatctttggtctgctcttttttttccgccgtctttccatcactttgcttatattactatggccagtgtgaaatgtctataatatatttaatactaaaaacgattttcgaaatatgtgaaaaatatcgatatatttacatatattttgacatccctacttaagttttttacttcagtgcagtacgattctttctgtgacctgagcagtgaaaaattaaattacaaaagcgaaaaagcgaattacaaaagtgaaaaattaaattacaaaaaaaatcaagatgaagcgaaatcgtcgtgcatttgctggaaacaacaagccatttgtctttggaggcatttacgtaagaatcttaattttttttgcaagtgtgtgcaggagtgtgagttaagaattccctgtgacgtcacgaagatatgtattccgagtgaaaatgcatcacgaaaacaaaaaccattgttggaatcatccatatttgatttgtgaaataacaaagttttcgtttttatttctataatttgcagcgcacaaagtgaaagtgttcattcacaattcaccacaattgtgaactcatttgcaatagccactaaaagcgggttaatcgaaagtgcagaccgttgtccgaattccaccagcattcacaatgcaccccccagacatccaccaccttcccctctccccttacattcgtaacccacccatttgcattgcactcattccactccgttcgtgctttcgatcaactagatatggccagcactgctatagtttcacgctggacttgcggttatcgctaacttttatggctactgaaaatgcattcacccgaaactgtaactaaaattattagttttgggtcagatagcaatgcccattcactccaccgaaagtgcccgaaacgagccggcgaccatgaactcagccgatgaccgaaggatccccataactattgtttcatgctaaaatagacagaattgtgaaacgtataggtcgatagtcaattattttactctatttttgcatatcggagaaaattctattagaattagaattagattttctcgaacctctctgcaaacagaatacattagcgaaaagttaactcaccatgagactgaatttatttgttaaccggactttgcggtttttatgcccattgaattaaagagacattggttaccctaatagtgcagtacacctgattttcatagattagcatagactacctggtcccggagtcctcggctggatccgataaacggagatccacagtcgctgggcagttggctccgttggtgcagagcttcgtttcggggcacttgggtcgcaggaatggccatggctagttccggaactatggttttaagtagaccagccgaccaccctgacggttccgggtaacttgacgacttgatggtttccgttggccagcgagtcgcttttttgtcgacccactggaccagtccgctgcaagtgattttgtctagggtagcctggcgagccaggcggaacccgttgccttcgctaactaatcgactaatgaaactctttcgcaaacgcagaatcccaatgccaccgtcaagcctttgatccaaatgccgttgcaggccgccaatgtccaggagcagcagtcttctccggtggctttatatccgacatcggcctccccggtggctgttcaatcgccacaggacgcatttttggctgttcagtcgccaggggctcctgcccccgttcaactggccaactcgtccgaccagcagaataatccggatgcggacgccattgcctccaaactgcccatgccagttatcatcaaggaggagccgatctctgtcaacgatgaaccgtccgtcgacaatatagaggacaataccagtgccagtaccagtgccagcggcatcgggggcaagatcccatttaaaaaaatcttccaaaagcgcaagaagtcgtctggtaagcgaggaaacctttggtgatcagatttcccagaattttcacacgctcacacaaagcactaggtttcttatggaagggcagaccggaaattacttacagttgtgttgcgagtttaagataaaaaattcctatgttttatagttttattggtccattttttttataatatcattaggtatttaattttgaacaattcaaaacatgtttcacatttattccttcaatagtttcaaaagtgtagattaaaacaacataataggcagaaattctttttctttttaatatgttaattacggcataacacttggttggatagcctttgttagctagcacagccttacacccatgcggcatggtgtccactaggtcctggcaacgcttggggggaatttcgaccatgcatcctgcacaacttgtcaaatctgagccttaggcgtcgggcagttcttcgacacatattgtttaatgtccccccacagggtttcaatcgagtttaaatcggaagatggtgctgtcctcggcatctattctattttgggtgaacctagccgatttgcttctacgtttcggattattatccttttggaatgaccattttaagggcatattatattaagaatatgacagtaagacatcactaagaatatttacatatgcgcttttggtctataataccaaaaatcatattttatggactcataccattgtaaaaaaaactagcccatagcgaagtttatccttgtctgaatatgcctttggctaagtaggggcacctttcgtgggctcttcgcacttaaattttgattaagtagtcgtctccgaattgcaacgtcactgattcccaagttcagctcagacttcatgtccctagagtatgcaaaagaatagactttgttttaacgaactatgcgtcgatcctctatatctgtggttttacgtttggtatggttttttgaatgtccttatatgtttttcctttcttttttagcttaagaattaacattcttttctcctgggagcagtgctgtcctttagccactaaaatatattttttttttatttttttttttaatttattgcccttttaaatatacgaattaacttaaccgaactcactttttagaaaatattgataatttcgggactttacgttggtcaaaaccagacactgctattcttatgaacagcctaaaagttgtgattttactcaagaatgaaaatgaaaaataaaaaataaaaaaggatggcatgtaaagctaagggaattttcttttttttttattcctatctacacattccattttacactaacaagtggaacaaatagtcgattccgaaaagggacatggaaaaatttgtattacttagtttccctcgcactgctatttttatgaacacagctgtacttacaacttcaaatttcatttttatatattcttgtatatatgtctattaactctatcgtagaacgcactcgggacaagaagttgcgacagaaccgccagctgcgcaagtccatgctccccaagaacgctctgatggccctcaacgaggtgaagggcgtgaccatcagcgatttcaccatcgacagcaataccgacgggggattcacggccgttgtcactgtcaactcgaatcagtacgagggcaagggtacctcgaaaatgacagccaagaacgcggcctgcgagaaggcttggcgcgattttattattgcaaaaatgacccccaagccgccccgtattcaccaggtggagatgggttcggagccaatggatatcaacgaggatgaggccgatgcaccggatgatgatctgcccatgttgaatctggcctcgtttgccatctacaagctgttcgcggagtgggaacgggagggctatgtcgtgcccgagatgcacccttcggccaatgctgcccaacaggcgggaggggatgccggaactccagttccccccgtgccgaaggagccaaagaagccgccagtgcgcaccgagctaccctctggctgggagaccatgcacccggcgaccattctttgcattgtaggccagcccaccttactaccttactatgtacagtgtcagtaatcaattcctctgcagatgcgtccgggactcaactacgtggactacgggtcatctggcgacaagaccaacggcatgcagcatctgggaatcatggtggacaacccaggagttccacgccaacggcagatcaaagaaaatcgcccgtcgcaacgtggccgtgaaagtgtgcaactctctgttcggcaccaacttcacctacagcgacaccacttaagacaccaactccaaccgcagactccaactgccgacgacaacacacataacggacactcttaacggacagcaatcagaagattgcgaccctgacgtcaattgcgcaactttaagcgacaccacttaagacaccaactccaaccgcagactccaactgcagacgacaacacacctatgcctctcttaacggacagcaatcagaagattgcgaccctgacgtcaatggcgcaactttaagcgacaccacttaagacaccaactccaaccgcagactccaactgcagacgacaacacacctatgcctctcttaacggacagcaatcggaagattgcgaccctgacgtcaattgcgcaactttaagcgacaccacttaagacaccaactccaaccgcagactccaactgccgacgacaacacacctatgcctctcttaacggacagcaatcagaagattgcgaccctgacgtcaatggcgcaactttaagcgacaccacttaagacaccaactccaaccgcagactccaactgccgacgacaacacacctatgcctctcttaacggacagcaatcggaagattgcgaccctgacgtcaatggcgcaactttaagcgacaccacttaagacaccatgtccaggcatagacaacaagtgcttcccacattagtttgtatttgggacagctcttacttatgattttttaggtgggccggagccgttttcaacaacgaataattttgaactgcaagagccgataagattatccgaataatctaaacgcaggattccttggtaatgctgattaattttttccgtgtattttgcgacacactgtgggtttggtttttttgaaaacgcttccacagaagaggatttcagtggcagattgggtatcaaatattaattatgcttaccagtgaattacatttttgtcgtaaactagattaag

SEQ ID NO: 35066 - DNA, 2194 bp, DROSOPHILA
ttttttacttcagtgcagtacgattctttctgtgacctgagcagtgaaaaattaaattacaaaagcgaaaaagcgaattacaaaagtgaaaaattaaattacaaaaaaaatcaagatgaagcgaaatcgtcgtgcatttgctggaaacaacaagccatttgtctttggaggcatttaccgcacaaagtgaaagtgttcattcacaattcaccacaattgtgaactcatttgcaatagccactaaaagcgggttaatcgaaagtgcagaccgttgtccgaattccaccagcattcacaatgcaccccccagacatccaccaccttcccctctccccttacattcgtaacccacccatttgcattgcactcattccactccgttcgtgctttcgatcaactagatatggccagcactgctatagtttcacgctggacttgcggttatcgctaacttttatggctactgaaaatgcattcacccgaaactgtaactaaaattattagttttgggtcagatagcaatgcccattcactccaccgaaagtgcccgaaacgagccggcgaccatgaactcagccgatgaccgaaggatccccataactattgtttcatgctaaaatagacagaattgtgaaacgtataggtcgatagtcaattattttactctatttttgcatatcggagaaaattctattagaattagaattagattttctcgaacctctctgcaaacagaatacattagcgaaaagttaactcaccatgagactgaatttatttgttaaccggactttgcggtttttatgcccattgaattaaagagacattggttaccctaatagtgcagtacacctgattttcatagattagcatagactacctggtcccggagtcctcggctggatccgataaacggagatccacagtcgctgggcagttggctccgttggtgcagagcttcgtttcggggcacttgggtcgcaggaatggccatggctagttccggaactatggttatggtttccgttggccagcgagtcgcttttttgtcgacccactggaccagtccgctgcaaaatcccaatgccaccgtcaagcctttgatccaaatgccgttgcaggccgccaatgtccaggagcagcagtcttctccggtggctttatatccgacatcggcctccccggtggctgttcaatcgccacaggacgcatttttggctgttcagtcgccaggggctcctgcccccgttcaactggccaactcgtccgaccagcagaataatccggatgcggacgccattgcctccaaactgcccatgccagttatcatcaaggaggagccgatctctgtcaacgatgaaccgtccgtcgacaatatagaggacaataccagtgccagtaccagtgccagcggcatcgggggcaagatcccatttaaaaaaatcttccaaaagcgcaagaagtcgtctgaacgcactcgggacaagaagttgcgacagaaccgccagctgcgcaagtccatgctccccaagaacgctctgatggccctcaacgaggtgaagggcgtgaccatcagcgatttcaccatcgacagcaataccgacgggggattcacggccgttgtcactgtcaactcgaatcagtacgagggcaagggtacctcgaaaatgacagccaagaacgcggcctgcgagaaggcttggcgcgattttattattgcaaaaatgacccccaagccgccccgtattcaccaggtggagatgggttcggagccaatggatatcaacgaggatgaggccgatgcaccggatgatgatctgcccatgttgaatctggcctcgtttgccatctacaagctgttcgcggagtgggaacgggagggctatgtcgtgcccgagatgcacccttcggccaatgctgcccaacaggcgggaggggatgccggaactccagttccccccgtgccgaaggagccaaagaagccgccagtgcgcaccgagctaccctctggctgggagaccatgcacccggcgaccattctttgcattatgcgtccgggactcaactacgtggactacgggtcatctggcgacaagaccaacggcatgcagcatctgggaatcatggtggacaacccaggagttccacgccaacggcagatcaaagaaaatcgcccgtcgcaacgtggccgtga

SEQ ID NO: 35067 - protein, 392 aa, DROSOPHILA
MVSVGQRVAFLSTHWTSPLQNPNATVKPLIQMPLQAANVQEQQSSPVALYPTSASPVAVQSPQDAFLAVQSPGAPAPVQLANSSDQQNNPDADAIASKLPMPVIIKEEPISVNDEPSVDNIEDNTSASTSASGIGGKIPFKKIFQKRKKSSERTRDKKLRQNRQLRKSMLPKNALMALNEVKGVTISDFTIDSNTDGGFTAVVTVNSNQYEGKGTSKMTAKNAACEKAWRDFIIAKMTPKPPRIHQVEMGSEPMDINEDEADAPDDDLPMLNLASFAIYKLFAEWEREGYVVPEMHPSANAAQQAGGDAGTPVPPVPKEPKKPPVRTELPSGWETMHPATILCIMRPGLNYVDYGSSGDKTNGMQHLGIMVDNPGVPRQRQIKENRPSQRGR

SEQ ID NO: 35068 - DNA, 2061 bp, DROSOPHILA
taaggggccattggagccatgctcttaaggaaagtggacataggtagggtagggcaatctgcgaacacaattacacctgtgtttcgcaggcaacaaattcgcatgcttttcctcctaagcttccaaaaggactagaactgtcttctcacgaacatattaatttgcttcctccgattttgtatttcgctagcacgctcaattcttgatcttgatattcatgaatgtctgtagcgaaaaggaatctgtacaagcaaggccaccacacccaatgccatcgagctagagccggattctaaagcatgcacccgccaggtacaggtccccttgccttcgatcaatttatttcgttacacgttactagagcaccaccttttgaaggcagtcgaattcttcgcggcgaagttggcgctgagttttgacaggccgttcaaaataaagaaaatcacattaccggttatctgcttcctggagcacaccgcaaactgctctcatctctcaacttgaacagtagcagaaaccctttggcgaagaagggaaaaagacgatacgaggcatcgaatcagcatagaagtcactcacacacattcagacccgttgaagcgcaagcgcgacagggagggtacgcagcccagaaccgttaacagataacgcacaaagctacgaattccgtgggaggcgagtacgcgaaaggtaaagtcccgttaccagtacaggccccacgaaataacggcagaaggaatataaagaaaaaccaagatttcatcgcggagagagaggctggagtccgtcttttcaaaacgagatttcgacatggcagcacacattgttcacgctcgggggattggcagaccagcgtcagggaacagcccggagcgatatggagtagggattccgattcctatctccagttcctgacgtcatacgtggtgtcgctattccgtggtgtgtggaggacccagaggagattccggatggccgattggagaacgacgtgctgacaatggagaccgaaggagcggccgaggtcgtcaccctcttctccgaaagtgaggaggacgacgagggtgagacggtcactggggcggataccgctcggagtcctgcggagacgcgacaggccgccgccgcccaggccacatcgcaggatcagaacggagagaacgcatacgcctcatgcgttctctccaaagcagccgataggtaaaaccgaggatgctattatgtgcggaccgtgaatcaaaactttgtggacagttgctaagatcggataccatttatagtgactcatatgcattggtcgttgtattgggctttgggtagagagctgtcaattaaaaatggtgaattgataaattggtgtgagcggttctggctctgagaatatcaatttctatctaatttcattggatgcagttgaagttgaaatggtttgctttaatacaaaagcagtatcgcccattttttcctttttggctgaaatggatgctgcatggacaagaagacttgtattattttcttcaatattagccagatccgttgctttttccttttgaggcgtgatcctgcaacactttaagagagtcgaagtcatcccattagacagtctgaagcgacttggttgttgttttggtgcacgacaaccatcatcgtggataaaagccaactggaatgtatttttttaaatgcttcaattgtaaagttacatttaggcagatttttcattatattttttttttttttttttttttttttaatttttattatttattgaatcttccctttgtgttaagagactaacaataagtgttcaaatcttaatctaacttaattaactttcacttagtgatagttttttttttcattaatgccctaataagtttattgctgggctgggaggtcggttgcggtgcagccggctttgactgcatactcggattagttttcttgcgaggggatttgtatgggtggtcagcttttcggttatacttcgtttttttctcagctattacttcgattactaatttgatttttaggtctctgtgtatgtttcgttccgaagga

SEQ ID NO: 35069 - DNA, 204 bp, DROSOPHILA
atggagaccgaaggagcggccgaggtcgtcaccctcttctccgaaagtgaggaggacgacgagggtgagacggtcactggggcggataccgctcggagtcctgcggagacgcgacaggccgccgccgcccaggccacatcgcaggatcagaacggagagaacgcatacgcctcatgcgttctctccaaagcagccgataggtaa

SEQ ID NO: 35070 - protein, 67 aa, DROSOPHILA
METEGAAEVVTLFSESEEDDEGETVTGADTARSPAETRQAAAAQATSQDQNGENAYASCVLSKAADR

SEQ ID NO: 35071 - DNA, 2180 bp, DROSOPHILA
cgtatgctaggtgacttaagctttttgacctttttgacatttttttatgtatttgtttagacatacctttccaatattaacgacatttccggttgcaagaagagtcaagggcggtcaggtcgaacggtaattaatggagcttggaccccgttagagcggggacacgacaaggacctggcgtgtttgaaagatacagtgaagtcagtggccggcagtaagtcagtaaccgagccttgccttagcccgtccacgatacaccctgtcccatttgagccggcacgtggtctgttgtcaaggacacgcagaacaaagaaggcaaggcgtcgccgaaacagatggcgaccttcggaggaatcagctgtaaaatactcctgtaaagctactttagtctgtaactctgtcttttccttggccgggcaatcacataaatcataaaatataaattatgtggtaccggtgcaactcgtagcgagcagaagcaagaaatacagttcgttacatctggcgcccaaccgtgactgtcctggccaaaggaacagagggcaagatggggaagtcgtgactgtaccgattaaagaaggatgactttcccaccctagcaagcgcccttggaatcaagctgggtttggtggaggaaatgcggaagacgctgttcgagttcatcgaccaggccacagaagagcacgattcgcaattctgggggcattagaaaaaaagtgcggaagtcactgacgttgaaggtccgctgaggagcctcgacttcactagcatggcggaggccagcggaagcaggtccgaatgggaggagttcgaacaggaacgtcggaatggtagtcgcgaaagaatggagcggggggaaggcagccgtgatcggcgggagaccacaagtgcagcaccgcaggattccgcaaaggtcgcaaagcaggtgcgggaatggagttttcgttacgacggaaacgagaagccgttggaattcctggaataggtgaaatggtcagcaatgacgtatggactgggcatcaataagatgtcgctaaaggagacgctggcaaggataaaggagaacagcaccctacccttgcgcatcttcatacacctgtacgaccgccaacacctaaatgccctgatggccaacaggagagagccggactcggcgcggcgtgccacaagcctgccatagatgcggtggccagagccactatacgaaggagtgccggaaccggccgatcaatttttgttggacctgcgggagaatcagtccgagaaccatggagtgctgcccaagatcgggaatcaactcgaaagttgaaagtaaaaaagtagacgggacaatagaggttgtgtgtatatttccgacaaataaacgcaaggtccgtgaaggacgcgtacccgatgccgatgataagctacatcctgcaccagttaaaggaggcgaagtacataagcagtctggactagaaggaccgttaccggcagatttagttggaaagggaaagagagtcggcggtatacggcatttatggtgctaggaaaggtcctgttctaatggaaagtgatgccattcggactgcactccgcgttggcaatatatcaacaagcattgcacccggaaagtttttggataatttggttatcgtaaatagattgactttcagctgatcgtgatttccgctgatggccttaaccccggcttgagtttccgttatatttcttttataattaatcgtcgtggaatgaagtcgtgaaatgttcgtgttgttgtaaaattataacctgcgggcagaaatatattattagagtaaattttcttcgtccgcccagaccccatggttcgactggggcagtcaaaggatagtggatagcgggggaagagtgatcagttagttgacgccaaggctctaacttttaaggcgggctgaaaaaaagaaaagaaccgagtcaggcctaatggaggcccgtggagcaccacttcccatcgattgaccgaagcctatggaaggtaggtatctaggtattttaaattttatttaaattgaatttttttagtttttataatctaacctaatttaattatttttcctaagatgaatacattttaaaatataatttaaaattttcgggttaaattttacaagaaaaagtttattaaatgtcgttttactttgaaattcgagtgaaag

SEQ ID NO: 35072 - DNA, 180 bp, DROSOPHILA
atgacgtatggactgggcatcaataagatgtcgctaaaggagacgctggcaaggataaaggagaacagcaccctacccttgcgcatcttcatacacctgtacgaccgccaacacctaaatgccctgatggccaacaggagagagccggactcggcgcggcgtgccacaagcctgccatag

SEQ ID NO: 35073 - protein, 59 aa, DROSOPHILA
MTYGLGINKMSLKETLARIKENSTLPLRIFIHLYDRQHLNALMANRREPDSARRATSLP

SEQ ID NO: 35074 - DNA, 6670 bp, DROSOPHILA
agaggcatttatttcgcagcttggctccgttaaaaaatgaagatttttcaaaatttgttttgcggttacgccaacaaatgtataatttggagaatctaaaacttagatagagcagatttgcctcaaagataaaataattgactcgtgtgctccatagagttaaagaaaaaacttctggccaaagaatattcactagatgaaataattgaaacgtgccaagtagaagagcatattaataaacagtctgaggtaatggagtcgaaatccgattctacttggaaggcaaagccacaaggtgaatgttcaagatgcgaacgttttggtcacgctagttactcatcatgcctcatcatgcccagcaaagcaagcgaagtgcaacaaatgtccaaaaattggtaatttttcccgaaactgtagaaccatccttaagagaaaaggagaaaagagaactttaaaagagaaattttaaggaaagttcatgctaagctggaggaagcccttaaacgtgacataattgaaccagttatgggtccaagttcatggatctctcccatcgtactggcatttaaagagaatggaaacattcggctatgcgtggatatgcgattaacaaatagggcaattcagcgagagaactaccctttacccatttctgaatcctttatgacactgttaaaagacgcaaagttcttctcccgccttgatcttaaggatgcctatcaccaaatggaattggaagagtctagtagggagattacaacgtttataacgtcaaaggggctcttccgatataaaagattgaggtttggggtgaattcggctactgaaccggctggaacaactgctagctgcattcccgaatgccatgaattatatcgatgacgtgataatttttggtgccaatgaactcgaacatgacgaaacagtaaaatcagtttgcaaaatgtttaaagacaataatgttttgttacacagacaaaagtgcacttgaaaaacaaaaatgctaaaattcttggggcacattttgtccgactcgggaattgaagttgaccccgagaagatacagattattaattcttttagagtccccaagaataaagaagaaacccgcagttttctcggcctcattacctatgtcggaaaatttattcctgatttggccgagaacacggaacctctacgccaattattacgaaaaggtaacaaaaggtaccgaggaaaaggcttttcaaaagttaaaatgtcatttagcacatcttgcctattttaacccaaagagccgcagccgcttaatagcggacgctagtcctgtagctcttggatcggcccttctgcagtttgatatggagggcgatccgttgattatttcatttacctaaaaagccctgtctgaggttgaaaggcgctactctcaaacggagaaagagagtttagcacttgtctgggctgtagaaaaattcctagctggtctacatttcgagctggtaacagatcataaatccttagaggctatcttcaaaccgacatcgaagcctccgactcgcattgagagatggttaccacgccttcaatcatacaactttaaagtaatctataaaaaaggaaaggaaaatatatctgatgtattgtcccggctttgccaatcatcgccaagtccagctacgaatcgcattgtaatcccaacaactcttcgcaaacgggtacttgaattggcacatgaaggacacccaggagaatcagctatgaaacgccgcttaagatccaaggtatggtggccgttgatcgacagagataattcccaaacatattttaaacaaagaaatattaaaaataaaaaacttattttaaaaccaaaatttaaaaatccaatcagatgagcaattgtaaaacattttaaaatactgctgttaagctaagcagcttttttgttcgctgttttggagcatttaaaatacggggtttatctttccatttcgaacgtttttattgattgtagcgaaggagattttgcatatatgcgatatgtataggtaacgaaaagcgaatggtaatgagcgacttaattgccaagtgatctgcagaacgccaaaagtttaggtgcgagcttacaagagaaagagatagagagggaagagcttagatgctcgcatatttgcatgtttgttagccgctaagaacaaaacgcaaataaatttgaattcgttcttgacttccaaaccgatcgatcgctttattgcaaatattaagaaacttacttcaacatctaaactatcaaagatagactgcccccaacccttcttcaacagctcctcctctcaagatagggatgtaactcgcccatatgtagggaaatatcatacgaaatgggatcaacatttaagcgatatgagctatctttgagggattattttcaccgtagcacggcgatctactctcctcaggctaacgctagcgaacggcttaataggtcggtgttgccagcagtgcgcgcatatgtaggacaagatcacacgacttgggattaacatttaagcaaaataagcggatcgttgagggctaactttcaccgtgatacaggtttgtcaccttattagctttgcttcggtcagaatatgattttgaacgaaagagattacgaactacttcgcaagctcaacaacctggagtacgctgtagccttgaaatatccagatattttatagttagctcgacaaaaagctaaagctaagatagccacgacccacgagcaattaactgtgggtttaggatccaattaatatttgaagccgtaaagggtagcatctagcccaaaacatctgcaagttcgcaaatattactgagagagcggccaagatccagaaaattcctggatcgctttgcaaaccacatgcgcgatttattaccggcttagacatctgcatctgccttctgtcagatatctctcgaggaataatctcaccaatgcacagctttcaccgaaccgcatcgacccttataccagtataagtaaatgccgtttggtagagtatttgtctatctagacgttctcctgctccctgaaactatagaggaagtggcaggatatttttaaagggctaagtggacaatcaatattgcgaaatccaagtttcgcatgaaatagataaggttttattagcggggaagggcagctgaaagctgatccagacaagatctcagcaataaggactttccaatcaatattactgccaagcaattcaggagattcttaggtcttgcgggatggtataaatgatttcttgaaaatttcgcctccatcgcccgagcgttaacagatttgttaaagaaaagccgttcgtctgattagggtgcgctttggcgcaaacagataaacagatgaagacgggaccgagcttcccatagcattcccattaaacattggaaaggaacacaaaacgtagtgacggacacactttcaaggctaggcgaaatcgtagtcgttaaaatccaagataggggtaatatgattgatttgtcgtgacatgaatttaaatcattaagtcgcattttgactttattacgagaatacaggaaaaccagtaaaatttatagatctacaagtatctagtttatttacatgaaattatttaagtcactaaaatattcagatattttacagttagctcgacaagactataaagctaagatagcaacaactcaacggtacaatctacgaagtcgaatcgaggaagtgccgccgtattcggcgtatgtatgtcgtatgccgacggtcactatgacagtaagtccagtttactataaattagcgaatgaaaattatcgggagaagataggcaaatttcagttaactttttcgctcgcctcagacacacggaaagaaaaagaattacagattgtacacgtgttacacggctagcacataagacaatatgagtaaaagtgagaacagctgggaaaagtggaaattgaaggtaaagcccgttttgtgtgctattttttatagctgtactggagtaaagtagtcattagatataagcaaccgcatacactacaaaagactaaaaatcaaacgtactttggtttgaggagaagcattagtgctttgagattattgtatttcgggagagcattactcttgggtgcttaagtttgggagaagcttcaaaaagagcaggtaaactgcttcattcaggctttaggacttgttttcaagaacggcttagccccgtatctcgtacaaaactggtttgatttcatcctgaaggaaccaacaactgcttcgaagggaccaacgaacttaattaaaggattaatgagagtaattactgtgtatgagtagacgtggaatggaatgttcaggtgcttaaacacattgagtattgaaccgataagcggcgtaatcacttttctcttatattttggatacgtttttattcggatatgtagcctgaccaagcgaagggtgaaaggagcgactcgaagaacgctgcaggtacagtggtacacctatgcgcgcattggtctccatgtctgaccaaggaactggagccacgccaaagatgcatcaaatgcctggaggaaggccacatagcggcccattgtagaagagccgttgacagaaaccagtgctacttcagatgcgggtccgcagggcacaaggccacagagtgccccgactaggctaagtgctttctgtgcacgaccaaccaccaagcaggcacgcattggcgggtgatgcgtttgattcagctcaatctgaaatactgcacggcagcccaggacctgctagtgtagacgatgtcagaacgcagagtggagcttgcttacatagagagccctaccggaaggcggctagcccagactgagcttttgatagcaataggaaagcagtaatctggaggtgcagcagcgtaacacgacaatttttagggcaaaggtgggcagatggtgtgtgtacagcgtgtacctagctcccagccggaccttaaacgaattcagtcaggcattggacagactggcaacgaatgctagaggccgcacccaagtccttattgctggagacttcaacgcatggtcagagagctgtggcagttcaaccactaacccgagaggcaggatggtgctcgaggcattcccgacgctggacctggctctatcaaaccaagggaacaaggggacctcaccttcactagcggctcgtcgttcatgcgtacgagggcgagactcagcggggactttactggcagtgaccatttggccataatttgtgatctggaatgcccttcctcgacccaagcccagtcagcatctcaagtattcctagaccagttcctaacctcggtgagtgaagaaggagctgagctgacggcagacgcgctgatgaggcacttgaagaccgcgtgctatgccagcatgaaatcaagccagactagccagcctacaccattccggcctatatgcctcatcgatggaactggcaagctcctggagaaactggtgtccgttcggcaagaaagggctatcgcagacctctcacgggcccagtttggcccgcttctgtggaacgccatgtatgatgggatacttcgcctaccgctggttggtaggagggagatcataggcttcgcggacgacgtggctttactggttgttgacaagcatcccggataggttaaggaaacgtgcaacagaaaaatcagggcatcagaacagaacaccggaaaagacggaggcagtcctgataagctccaggaaggtagtggagacggccactgtcaaagttggcagtacctcggtggcctcctctcgggcaattaagtacctgggagtcatgatagacaccaggctttcattccgagaacacctagcctacgctagctcgatagcagcaggagtcaatcggtcgttatcaaccataacgttaaacacacgatgtccaaaacaggagagcagacaactgttgacgaaagagcttccgggtgatattcctgtggaattcaaggcttatgcaaacaaaagggtaacgataaaaaaataaaataatgcgccgacatgctgcgccacttctgatctttctttactcttctcgcttattccatttttcttcttaaatgcccgtcaattttgggctgcactacactctctttcttggtcgacccctaaactaaatgcggcgtctcgctttccggtccggaccggaacgagctcgctccctagttacggcatcctttcgcggtcgccaacttggccttaagattttagtcgacgcatccacgattttcaaagtaaaaagaaaaaaagaaaggccgcgaccattgctttgggccagactccgggaactaatcagttcgatcgccgtgttctcttcccgaaccgtttggaaacttagaacgcgggcgggaatcgtaaatcacgctgctcttaaattcccttaagcatatgcgaacttttcccgttgcatcgagccaaaattgcggtagttcgcaaacttttttggcgagcttcggagagtggcggttcgatcgctatttctttcgagctttgatatttcctaagaaaaaccaacggtgaccctcagaaatgcatgccaattttccgtgatttcatttaaatttataattttgaactttctcgggcctctaggccccttgttctggtttcccgcaaaaac

SEQ ID NO: 35075 - DNA, 1266 bp, DROSOPHILA
atgctaaaattcttggggcacattttgtccgactcgggaattgaagttgaccccgagaagatacagattattaattcttttagagtccccaagaataaagaagaaacccgcagttttctcggcctcattacctatgtcggaaaatttattcctgatttggccgagaacacggaacctctacgccaattattacgaaaagccctgtctgaggttgaaaggcgctactctcaaacggagaaagagagtttagcacttgtctgggctgtagaaaaattcctagctggtctacatttcgagctggtaacagatcataaatccttagaggctatcttcaaaccgacatcgaagcctccgactcgcattgagagatggttaccacgccttcaatcatacaactttaaagtaatctataaaaaaggaaaggaaaatatatctgatgtattgtcccggctttgccaatcatcgccaagtccagctacgaatcgcattgtaatcccaacaactcttcgcaaacgggtacttgaattggcacatgaaggacacccaggagaatcagctatgaaacgccgcttaagatccaagttagctcgacaagactataaagctaagatagcaacaactcaacggtacaatctacgaagtcgaatcgaggaagtgccgccgtattcggcgtatgtatgtcgtatgccgacggtcactatgacaaggcaggatggtgctcgaggcattcccgacgctggacctggctctatcaaaccaagggaacaaggggacctcaccttcactagcggctcgtcgttcatgcgtacgagggcgagactcagcggggactttactggcagtgaccatttggccataatttgtgatctggaatgcccttcctcgacccaagcccagtcagcatctcaagtattcctagaccagttcctaacctcggtgagtgaagaaggagctgagctgacggcagacgcgctgatgaggcacttgaagaccgcgtgctatgccagcatgaaatcaagccagactagccagcctacaccattccggcctatatgcctcatcgatggaactggcaagctcctggagaaactggtgtccgttcggcaagaaagggctatcgcagacctctcacgggcccagtttggcccgcttctgtggaacgccatgtatgatgggatacttcgcctaccgctggttggtaggagggagatcataggcttcgcggacgacgtggctttactggttgttgacaagcatcccggatag

SEQ ID NO: 35076 - protein, 421 aa, DROSOPHILA
MLKFLGHILSDSGIEVDPEKIQIINSFRVPKNKEETRSFLGLITYVGKFIPDLAENTEPLRQLLRKALSEVERRYSQTEKESLALVWAVEKFLAGLHFELVTDHKSLEAIFKPTSKPPTRIERWLPRLQSYNFKVIYKKGKENISDVLSRLCQSSPSPATNRIVIPTTLRKRVLELAHEGHPGESAMKRRLRSKLARQDYKAKIATTQRYNLRSRIEEVPPYSAYVCRMPTVTMTRQDGARGIPDAGPGSIKPREQGDLTFTSGSSFMRTRARLSGDFTGSDHLAIICDLECPSSTQAQSASQVFLDQFLTSVSEEGAELTADALMRHLKTACYASMKSSQTSQPTPFRPICLIDGTGKLLEKLVSVRQERAIADLSRAQFGPLLWNAMYDGILRLPLVGRREIIGFADDVALLVVDKHPG

SEQ ID NO: 35077 - DNA, 5740 bp, DROSOPHILA
ggcggaggccacccatcagggcctactaaagacgcgctgcaccctggaggtggatctgcgcaacaaagtcaatgccctgttcatcgaccgagagaagtgcatgagtctccggcgctccttcccggtcagcaatctgatcaagtactgatccgtatccgtaactgcacgccggtctctggactccgcactcccactcgctttttccgccaccagttttcctgacatgtcatttgtgtgtgtaccatcaagagataaactgcagattgcatttgttgaaaactccttcgagataatccaactttctctttctgattggcactataaaacatgcaagcgatgggccacaaatgctatagctcattagtttgccttataggtaaaaataattaatacatatgcatgtgtgtatgttcaaaagatttgtaaactattaatgtgaccgccgctagatggcgcgtatgcgcaatctttgaatctatcgattttctacttatgtaagtatgtaagatggaccttcatctcgctcacacaccatttagctgagtaacgggtatcagatagagagtaactcgattccagcgttttttccttcaaagaaaataaacgtccagtttttcttaatgaaatcataaatacgcataagattatgcatcttgcgcacaacagttactaaattttactataaaagaaagcttatgtatattgcatgtacaaattacgaaagtttggtctgtgcgtttctgaagttttctcctcccaattttgattattggagtctttctcattagctcttagcttctctgagaatttcgaatatctgcttaaaaataaaaagcttaaaagggttttgctgcttttgaaaaaataagaattgacattttttaaaattggagccataaaataaacgtacaggcacactaatagtagggttggtattttttgctaagtttggtattaagtgcacacttcggcgtatgtactgcatatttaaacagccaagcgacggtcacattgcttgggtcctctgcaaaatttttaatgaaagttattaaccagaattcaaccggaggtgagctgtttgaaacttaaaggtttggagtcccacgaagacttaaaaacgaccaacgctatactggatccgcggatctcccaaaagtgaagcagcgtaaagtgcattaataaccgccggcatatttttacgaccataatccatacttttccctgcaagtcagctgcaccacacaccaacaccatctgattttccccgcaagtgcacatatcccccgccagggtttgattagagggtaatccgtagcccagctgcatgcaagctgcattttccggccattttcgcctaacggttccgtcccacctattggggcacgactgacgtgtacattaattttgcagcggtggggcccacacacacacacaatggcttaaaagaatgccttttgtttgtgtgtaagcaatgtataagcgaagccacaggatcgaattccctgtaaacttgacagttacagttataggtactgttactgttacagtaggccgcgtcgtgtagagcaaataagataatactagaaaacaaaatcgaaaattgcccgagtccctggtagtttgttaattatatattttcccgctcttcagtttgaaacacgggacaagccgccatgcgattcgctctggccaccgtggccatcatctgggctttattcgtcctggccgacggagtggaccccgggaactttaagacctgcgagcagagcagtttttgtcggtgagtctggctttgtacacgatgcactgcatacgtacgtggttcgggttgcaaggatttcattagttggctaaaaaagattgcgtttccgactatattaagtatatatattcttcatcaggatcaatagccaagtccgtctgtcagactgtccgtctgtccgtatgaatgtcgagatctcaggaactataacagctagaaggttgagattcagcaaacagattctagagacaaagacgcagcggaagtttgtagacccatgttgccatacccacaaccccacaaaacagctacgcccacacttttgaaaaatgtgttgatattttttcacatttaattccccaacaattatgaaatttcgcgtttgcgttcacactagctgagtaacgagtatctgatagtcggagaactcgactatagcattctctcttgttttttttttaatcgaaatattcctattttcgtcaatgaaacgcagtaggaaggcagacttttccgtctgtagctttgtgttgtttctaaatttccacttaaagagaaagtggaaagtgtcttcacaatgtttaaactctacactttgggactcaagtatcatcgatgtgattttcactcaaagtgctagtccactgtaatttcgaagatatttagcgaaataagtccacatattgataattcaggttgttgtttatagaacaaccataacttgatgatgattttattaatggttttcagacgctcccgaaagattcagggatcgggcagcaagtacgccttaattcccggcaccttgaacacctatgcggattcgttgaccgctgatctcgttaacaaggaaaaccatcaccagtttgcctttaagctagaggctctggtgggcagtaccttccgcctgcagatcgatgaaaagcagccacttcggccacgatatcgcgtcgagcacgctctgaagggcccaacccaggccggacgcattcgtgtccagcgggaaacagatggagagatcgttatcacatcggagaagaacaaggctgtgatccacggagacccgttccgcatcgatttcttcgagaacgacgtgctggtggtctcggtgaatgccaagaactggttgtactttgagcatctgcggcagaaggcccaggaaccgacctcccacccggcggaaaacgagaatcagcaggagcaggatgccgctgtcgaaactcctaaagcagcagatactatcgatgatcctggtgcatgggaggagaacttcaaatcacaccacgactctaagccctacggtccggaagctgtggctctggacttttcgttccccgcagccaaagttctattcggtattccagagcacgccgacagcttcatactaaagtccacctcgggtacggatccttaccgcctgtacaacctggatgtgttcgaatacgttgtggacagcaagatggccctgtacggctcagtgccggtaatctatggtcatgggtgagtttcttttgagtttttttaaaagcttaaaaactggcgaatagcctgctgattgcgcatatacaatagtatgctgtgcacattgtttaatgttataatacgaagttctaagaacaaattttaacatctaatttgtaatatcttccagagcgcaacgcacagcgggcgtttactggcagaatgccgctgaaacttgggtggacattcaaacgtcggagaccaatgttgtatcttcgctggtaaattttgtatccggctcgcagaagactcctcctccggctgcccactttatgtcggagtcgggcatcgtggacgccttcatcatgttgggacccaagcccatggacacttttaagcagtacgcggctctgactggaacacacgagttacctcagttatttgctctggcctaccaccagagccgctggaactacaacgacgagagggacgtgacctccgtgtcagcgaaattcgacgagtacaatatacccatggacaccatgtggctggacatcgagcatacagatggcaagcgctacttcacctgggacaagttcaagttcccgcacccgctggcaatgatcaagaatcttacagaactgggtcgccacttggtggtgatagtcgacccgcacatcaagcgggataataattacttcttccaccgcgactgcacggatcgtggttattatgtgaaaacgcgcgagggcaatgattacgagggctggtgttggccgggagcggctagttatcctgatttctttaaccccgtggtcagagagtactacgccagccagtacgcgctggacaagttccaaacggtcaccgcagatgtgatgttgtggaacgacatgaacgagccatcggtgttcaacggccctgagatcacggcgcccaaggacttgatccactacggcaactgggagcaccgtgacgtgcacaatttgtacggtcacatgcacttgatggggtccttcgcgggcctgcagcagcgcgatcccaaccagcggcccttcatcctcacacgcgcccactttgctggttcccagcgttatgctgccatttggacgggtgacaactttgcggactggtcgcatctacagcactcagtcaaaatgtgtctcacggaggcggtggccggcttctccttctgcggtgccgatgtcggtgccttctttggaaacccagatactgagctgctggagcgctggtatcaaaccggtgccttcctgccctttttccgggctcatgcacacatcgacactaagcgccgggagccatggcttttcccagaacgcactcgccaggttatccaaaatgctgtgatcaagcgttattcatatctgcccctgtggtacaccgcattctacgagctggagctgactggcgagccggtaattcgcccattattagcccaatatccactggataaggaggccttcggcgttgacaaccagctgttggtgcaagatcgcctgcttgtgagacccgtcatgcagcagggcgtcagcaaggtggacgtgtacttcccggcaattgacgacaaaaagaatggcgactggtggtacgatgtggatacttaccagcgccaggaacgatccggctatgtgtcggttccagtagatgatttcaaggtgagaggcgttattgtgtttttgaaaggtcacattttttagtttcttccgctttcaaactacttacagatccccgtttggcagcgtggtggcagcattgtaccgaagaaggagcgacagcgccgcgcctcaaccttgatgttgcacgatccgtacacactgataatctgcttagaccgtcagggcaaggcatccggttccctctacctagacgacgagaagtcctacgcttaccgccagggccagcgcatccacgtgaactacgagttcgcccacgaccagctggtcaatagcttcgtgggcaagcccaagtacaagacccttgcctggatcgagcgaatcgtgatcgccggacttgagaaggtgcccagcagcgccagcatcacggtgaatggtgtcagccagcagctggaggtgctccatcatgataacaccgtcgtcgtgcgcaagccgggcgtcaagatggacgtcgacttcgccattaaactcaactttgcgtagtctgtagtcgcaacgtgcgccgtgtattattgttctcataaatattttaattgtgtgcaccctaaaaattgctattaaatgttttaagcctcctattccaggcaaacccaaataatagattccctaactaccttcgattagtatcccccgttccttctctcaattccatcaattcaacattcggagagtgtaactcaagttgaacgcaatttatgtttcaataaatataaaaacttctctgtacgaacgatttattattgctaaaatatttacccagaggtaaaatagcattaaaaatagaaatagccccattcaaagtataaagtatatatatatatat

SEQ ID NO: 35078 - DNA, 3109 bp, DROSOPHILA
cgacggtcacattgcttgggtcctctgcaaaatttttaatgaaagttattaaccagaattcaaccggagtttgaaacacgggacaagccgccatgcgattcgctctggccaccgtggccatcatctgggctttattcgtcctggccgacggagtggaccccgggaactttaagacctgcgagcagagcagtttttgtcgacgctcccgaaagattcagggatcgggcagcaagtacgccttaattcccggcaccttgaacacctatgcggattcgttgaccgctgatctcgttaacaaggaaaaccatcaccagtttgcctttaagctagaggctctggtgggcagtaccttccgcctgcagatcgatgaaaagcagccacttcggccacgatatcgcgtcgagcacgctctgaagggcccaacccaggccggacgcattcgtgtccagcgggaaacagatggagagatcgttatcacatcggagaagaacaaggctgtgatccacggagacccgttccgcatcgatttcttcgagaacgacgtgctggtggtctcggtgaatgccaagaactggttgtactttgagcatctgcggcagaaggcccaggaaccgacctcccacccggcggaaaacgagaatcagcaggagcaggatgccgctgtcgaaactcctaaagcagcagatactatcgatgatcctggtgcatgggaggagaacttcaaatcacaccacgactctaagccctacggtccggaagctgtggctctggacttttcgttccccgcagccaaagttctattcggtattccagagcacgccgacagcttcatactaaagtccacctcgggtacggatccttaccgcctgtacaacctggatgtgttcgaatacgttgtggacagcaagatggccctgtacggctcagtgccggtaatctatggtcatggagcgcaacgcacagcgggcgtttactggcagaatgccgctgaaacttgggtggacattcaaacgtcggagaccaatgttgtatcttcgctggtaaattttgtatccggctcgcagaagactcctcctccggctgcccactttatgtcggagtcgggcatcgtggacgccttcatcatgttgggacccaagcccatggacacttttaagcagtacgcggctctgactggaacacacgagttacctcagttatttgctctggcctaccaccagagccgctggaactacaacgacgagagggacgtgacctccgtgtcagcgaaattcgacgagtacaatatacccatggacaccatgtggctggacatcgagcatacagatggcaagcgctacttcacctgggacaagttcaagttcccgcacccgctggcaatgatcaagaatcttacagaactgggtcgccacttggtggtgatagtcgacccgcacatcaagcgggataataattacttcttccaccgcgactgcacggatcgtggttattatgtgaaaacgcgcgagggcaatgattacgagggctggtgttggccgggagcggctagttatcctgatttctttaaccccgtggtcagagagtactacgccagccagtacgcgctggacaagttccaaacggtcaccgcagatgtgatgttgtggaacgacatgaacgagccatcggtgttcaacggccctgagatcacggcgcccaaggacttgatccactacggcaactgggagcaccgtgacgtgcacaatttgtacggtcacatgcacttgatggggtccttcgcgggcctgcagcagcgcgatcccaaccagcggcccttcatcctcacacgcgcccactttgctggttcccagcgttatgctgccatttggacgggtgacaactttgcggactggtcgcatctacagcactcagtcaaaatgtgtctcacggaggcggtggccggcttctccttctgcggtgccgatgtcggtgccttctttggaaacccagatactgagctgctggagcgctggtatcaaaccggtgccttcctgccctttttccgggctcatgcacacatcgacactaagcgccgggagccatggcttttcccagaacgcactcgccaggttatccaaaatgctgtgatcaagcgttattcatatctgcccctgtggtacaccgcattctacgagctggagctgactggcgagccggtaattcgcccattattagcccaatatccactggataaggaggccttcggcgttgacaaccagctgttggtgcaagatcgcctgcttgtgagacccgtcatgcagcagggcgtcagcaaggtggacgtgtacttcccggcaattgacgacaaaaagaatggcgactggtggtacgatgtggatacttaccagcgccaggaacgatccggctatgtgtcggttccagtagatgatttcaagatccccgtttggcagcgtggtggcagcattgtaccgaagaaggagcgacagcgccgcgcctcaaccttgatgttgcacgatccgtacacactgataatctgcttagaccgtcagggcaaggcatccggttccctctacctagacgacgagaagtcctacgcttaccgccagggccagcgcatccacgtgaactacgagttcgcccacgaccagctggtcaatagcttcgtgggcaagcccaagtacaagacccttgcctggatcgagcgaatcgtgatcgccggacttgagaaggtgcccagcagcgccagcatcacggtgaatggtgtcagccagcagctggaggtgctccatcatgataacaccgtcgtcgtgcgcaagccgggcgtcaagatggacgtcgacttcgccattaaactcaactttgcgtagtctgtagtcgcaacgtgcgccgtgtattattgttctcataaatattttaattgtgtgcaccctaaaaattgctattaaatgttttaagcctcctattccaggcaaacccaaataatagattccctaactaccttcgattagtatcccccgttccttctctcaattccatcaattcaacattcggagagtgtaactcaagttgaacgcaatttatgtttcaataaatataaaaacttctctgt

SEQ ID NO: 35079 - protein, 924 aa, DROSOPHILA; identical to SEQ ID NO: 29055

SEQ ID NO: 35080 - DNA, 4759 bp, DROSOPHILA
ggacaccgagatcctcgaggacgacgacgagacggtaatgatgatcaaggagctgctggacacgcgcatccgacccaccgtccaggaggacggcggcgacatcgtcttcatgggctacgagggcggcgtggtcaagctaaagatgcaaggctcctgctcctcctgtcccagctccattgtgacgctgaagaacggagtgcagaacatgctgcaattctacataccggaggtggagtccgttgagcaggtcttcgacgaggcggacaggatgatcgagagcgagtttgagcgctcgaaaagaacctcaagacgctcaagcagcaggagcccagtggcggcggtccccattagagggactcattttaatttccctgcttacgttgctaattcgctagtgaaaccaatagttagttgtatacataacgtacatgtagttgattacttaaataaatctacggctttaagcttaaccgttagtgcatgaaccgatgtacagaaactcatgttcgagtttgatctgtggggttacaaaggaaatttacacttgtttaaactattaaaatgtattatattatttgaagtttcactaagaacatatattcaatgctttcattctatactattgaaaatgtgggctggataaggataaggcccacatgctaatcaactgaaaaccaacagcctaattaattcggcaccaagcaaggtcaataattgagaaactaacttaaaggggcctgcggcctgcggcccagtctgacccccattggcaagtgggtcaataacccgtgtcattgccatcgattctacaactcgttgaagggaaccattaccaggcgataccgctgccaggctaccgtttaatcaataagcccgccggagaagaagccaccgaggactggcgctgggaccattctatccagaaccgcaggaccccacagacccaaagtaaagggatctccgaggaagagaagtggtaatatatcgagtccgtcgacaaatgctctgctgggccaacgaggatcactatctgagccaacgctacccgaatccgcagcaaaaggcgccagaaacgcttaagaacctgctgttgcgatccagtgtaccgatagtgggtgctccgaatcccgagaaggactcgcatttcgccggcaccatggcaccgctcaagggtcaggaggtgcttaagttccacaagcactcctacctcgagaaccgcatcttcgatcaccgcctggtcaaggacaacctgctggacaagtggcccaccgctgacatgaacgagtacaacgagcgcaaggaccaccgcaacctcatggagtcctatgtaccactaaccaccattgcaccactaccattacccattgcacctatgtattgtatgtatgtagtttcgtatcttggcattcatctaccatagtagcactgaaaagttgtggagcacctggccaagatgtagctggttgagatgtaggtaggcacccagaaggtgcatatctatatgcctgcttcctgcatggaggactatcactttactttagatatcgcatcagccatgtcatttgatcctattttgttctatatatgctgttctaagcgagctggagttatgccacatgccgcattatgcattctagctaactttatttctgttgcaatgccacttgtcttaaattcggtgagcaatcggagtaggccacttttggacgctgggccctgtcacccggtcccagtctgagattggtttagtttactccctttctcgaatgggaacgtatctgtgctctgtgctttttgaaatcatttgtttgttcccaacacccagtccaaattccaagtggcacaaattattagtacttcactatcccaacgattcgacttataaccgataccaataccgaaacctccgaccacgatgagtcacaatggggctggtttgggagccggatccggcggatcgcccatcccgccaaccacggtcatgtattcccaattgcagccatggagccaggcgggcgctccgccctgcatggagcccgtcatggggccttcgatcccgccgagagttggcgccgcctacgagacgcccacgaagcacccgtggcgccctgctatggcctatgagctaatccaggtgaagcatatgcccgagcagccggtgaccaaccagctgaccaagcagtgcttcctgcccaagggcatgaagacggacggcatgatattccccaacttggtcaccgggttcgatcgcaatccacagcacgccgcccgggctgccctctacacgcggtacaccagcaacgagtggtacaacaacaacatgaccaagtactccgagtcgaacatgaatcggtaagtggcttctctagcggagcacagagctccttattgaagagacagatatgtatgtatgtgtacctggtaccatactactattgcaaggagggcaaccgcatgattcatcgtgtctttcagcaacctctcggagcgcatgcggaatgacgcagtgcgtctgatgcgggagacggacgagaaggccacctcgggccagagggacgccggccgaaggctgggcgagcgcatcaccgacctgaccttctggcgcaacgagctgaacgcggagctggagaagctgatcgccgagatgtcggacatcaacgagctgcagcggcagtgcggcaaggcacttctcgacctggagataccactgcacatcgcccaggagtgcctctttcaccgagagtcgcgccagggcacggagaaggtgcatgacatcgtggagaaggccctcctcgttgagatcaacaacttgaggaactcccgtgaccggctaggcggcctgcacgagaagatctcgaagcaggccctcgactgccgcggcgcccagcatctcctcgaggacgatgtgtcgcacaaggagtcctcgctcggcatcgactccatgtgccaccagctgaacaaccacagccgcggcatcacctactacgcggcatcgagaagttcgatccctcggtcagcacccaggagtcctgggcgcaggccagcagcgagcacgtccgccggtgagtatattagtcatgtgccacgcctatcgaatacccattatttaccttaaagtagtagtagtagtagtagtagtagtagttcattgagccgaaagataatcataattgcatccaagatcgatattcttttaccctagtctttcccttgtttccacagttcccaggcggagcgcgcgaagctttcccagctgcggagcgatgcccagagtgtggtcaactcggtggccaccaccgtgtgggacttctggagcaacacgaacaacgccttcgatcgccgctcgcaggagatggccgaggcgaagaccgggtgcagctgcaccttcagaaggtccaacaggagctgttcgacatggagaagcatctcttcctcctgcagaaggccatccaggacaagtccgggccgttgaaagtggcccagacgcggctggaggcccgctcccaccgcgagggcgtcgagctgtgcaaggaccacgcccaggaccgccttgtccaggaggtgcaggacatccagggtgcagtggagacgctgcaccacaagctgatggaggcggaggccacccatcagggcctactaaagacgcgctgcaccctggaggtggatctgcgcaacaaagtcaatgccctgttcatcgaccgagagaagtgcatgagtctccggcgctccttcccggtcagcaatctgatcaagtactgatccgtatccgtaactgcacgccggtctctggactccgcactcccactcgctttttccgccaccagttttcctgacatgtcatttgtgtgtgtaccatcaagagataaactgcagattgcatttgttgaaaactccttcgagataatccaactttctctttctgattggcactataaaacatgcaagcgatgggccacaaatgctatagctcattagtttgccttataggtaaaaataattaatacatatgcatgtgtgtatgttcaaaagatttgtaaactattaatgtgaccgccgctagatggcgcgtatgcgcaatctttgaatctatcgattttctacttatgtaagtatgtaagatggaccttcatctcgctcacacaccatttagctgagtaacgggtatcagatagagagtaactcgattccagcgttttttccttcaaagaaaataaacgtccagtttttcttaatgaaatcataaatacgcataagattatgcatcttgcgcacaacagttactaaattttactataaaagaaagcttatgtatattgcatgtacaaattacgaaagtttggtctgtgcgtttctgaagttttctcctcccaattttgattattggagtctttctcattagctcttagcttctctgagaatttcgaatatctgcttaaaaataaaaagcttaaaagggttttgctgcttttgaaaaaataagaattgacattttttaaaattggagccataaaataaacgtacaggcacactaatagtagggttggtattttttgctaagtttggtattaagtgcacacttcggcgtatgtactgcatatttaaacagccaagcgacggtcacattgcttgggtcctctgcaaaatttttaatgaaagttattaaccagaattcaaccggaggtgagctgtttgaaacttaaaggtttggagtcccacgaagacttaaaaacgaccaacgctatactggatccgcggatct

SEQ ID NO: 35081 - DNA, 1824 bp, DROSOPHILA
atgctctgctgggccaacgaggatcactatctgagccaacgctacccgaatccgcagcaaaaggcgccagaaacgcttaagaacctgctgttgcgatccagtgtaccgatagtgggtgctccgaatcccgagaaggactcgcatttcgccggcaccatggcaccgctcaagggtcaggaggtgcttaagttccacaagcactcctacctcgagaaccgcatcttcgatcaccgcctggtcaaggacaacctgctggacaagtggcccaccgctgacatgaacgagtacaacgagcgcaaggaccaccgcaacctcatggagtcctatccatggagccaggcgggcgctccgccctgcatggagcccgtcatggggccttcgatcccgccgagagttggcgccgcctacgagacgcccacgaagcacccgtggcgccctgctatggcctatgagctaatccaggtgaagcatatgcccgagcagccggtgaccaaccagctgaccaagcagtgcttcctgcccaagggcatgaagacggacggcatgatattccccaacttggtcaccgggttcgatcgcaatccacagcacgccgcccgggctgccctctacacgcggtacaccagcaacgagtggtacaacaacaacatgaccaagtactccgagtcgaacatgaatcgcaacctctcggagcgcatgcggaatgacgcagtgcgtctgatgcgggagacggacgagaaggccacctcgggccagagggacgccggccgaaggctgggcgagcgcatcaccgacctgaccttctggcgcaacgagctgaacgcggagctggagaagctgatcgccgagatgtcggacatcaacgagctgcagcggcagtgcggcaaggcacttctcgacctggagataccactgcacatcgcccaggagtgcctctttcaccgagagtcgcgccagggcacggagaaggtgcatgacatcgtggagaaggccctcctcgttgagatcaacaacttgaggaactcccgtgaccggctaggcggcctgcacgagaagatctcgaagcaggccctcgactgccgcggcgcccagcatctcctcgaggacgatgtgtcgcacaaggagtcctcgctcggcatcgactccatgtgccaccagctgaacaaccacagccgcggcatcacctactacgcggcatcgagaagttcgatccctcggtcagcacccaggagtcctgggcgcaggccagcagcgagcacgtccgccgtctttcccttgtttccacagttcccaggcggagcgcgcgaagctttcccagctgcggagcgatgcccagagtgtggtcaactcggtggccaccaccgtgtgggacttctggagcaacacgaacaacgccttcgatcgccgctcgcaggagatggccgaggcgaagaccgggtgcagctgcaccttcagaaggtccaacaggagctgttcgacatggagaagcatctcttcctcctgcagaaggccatccaggacaagtccgggccgttgaaagtggcccagacgcggctggaggcccgctcccaccgcgagggcgtcgagctgtgcaaggaccacgcccaggaccgccttgtccaggaggtgcaggacatccagggtgcagtggagacgctgcaccacaagctgatggaggcggaggccacccatcagggcctactaaagacgcgctgcaccctggaggtggatctgcgcaacaaagtcaatgccctgttcatcgaccgagagaagtgcatgagtctccggcgctccttcccggtcagcaatctgatcaagtactga

SEQ ID NO: 35082 - protein, 607 aa, DROSOPHILA
MLCWANEDHYLSQRYPNPQQKAPETLKNLLLRSSVPIVGAPNPEKDSHFAGTMAPLKGQEVLKFHKHSYLENRIFDHRLVKDNLLDKWPTADMNEYNERKDHRNLMESYPWSQAGAPPCMEPVMGPSIPPRVGAAYETPTKHPWRPAMAYELIQVKHMPEQPVTNQLTKQCFLPKGMKTDGMIFPNLVTGFDRNPQHAARAALYTRYTSNEWYNNNMTKYSESNMNRNLSERMRNDAVRLMRETDEKATSGQRDAGRRLGERITDLTFWRNELNAELEKLIAEMSDINELQRQCGKALLDLEIPLHIAQECLFHRESRQGTEKVHDIVEKALLVEINNLRNSRDRLGGLHEKISKQALDCRGAQHLLEDDVSHKESSLGIDSMCHQLNNHSRGITYYAASRSSIPRSAPRSPGRRPAASTSAVFPLFPQFPGGAREAFPAAERCPECGQLGGHHRVGLLEQHEQRLRSPLAGDGRGEDRVQLHLQKVQQELFDMEKHLFLLQKAIQDKSGPLKVAQTRLEARSHREGVELCKDHAQDRLVQEVQDIQGAVETLHHKLMEAEATHQGLLKTRCTLEVDLRNKVNALFIDREKCMSLRRSFPVSNLIKY

SEQ ID NO: 35083 - DNA, 3128 bp, DROSOPHILA
tatcgtttgcctctcgcttgtagtaaatcgttgttgcaaaaataggacgtgactgtacttttttcatcttcatcctcatcgttttcgttatcgttatcattatcgttattattattgttattgttaagtgtttattattagttgttcttgctgcttatctatggcctatgtagattctgtttttgattaattttgactatttgccatggagaacggtttgtcaggcttaaccttagctaatattaacactcctcactatatgtttatccactttaatgtacctttatctttattcacttttatttgtattttttatttgcattgaaatatggaacactagagtttaaaatagtttgtaactaattttaatgcaactgcgctctcctccaaagttctttctcttgtaatattaatttcaatttttaattgctaattttctttagtttcttttcgcatttaacaacactcgtattattcatctcttctgtttgggttttgcaatattgtagagtcttcactcaatgttttccctctaatgcatgtcacttgatgtgtaaatgagatgcttacacgttaaagtcttgctatacgtacgaaaaagttcagttgagtttacctttctcctttcccccaaaagtactttcggttcttattttttgtaaatagttcgtatcaacctttaattttcatcaaaaacttccattactgctttgtgtttgtgtttcgtagaatgtgattgtttgaagttttatttactagcttagacctttttcagacaagttctgcatttgctttttgatttctttcaatttagcttggagtctcgtgtagagcatcgcttggggagtattcatgattggtatacgtattgtgttgcttaggttttgaggattatgcaatataagtatctaggtgaactggagttgacaaaaacgagtattcaatggataaaggtaggtgacaaacttttaataaagaaaaaccctatacgatgtgtttcttgggcctcttggtttttgaaaacatcaattaaggtgcttaaaagtatgctagactttataaaatgaacattttagttcctcctatggctaacaggataatatttcaaaattatgttaattaaaagtgctcaaataactctttagttttaaatatttcacttttcacttttgggcgccataactaatgttttcaaatctatagggacttcgcaggaaacacatccctatgacctaatatacgtctctggtaaaataaacagagctgccccctgcggcagataagaaacccccttcttctagatgcatgtcgatggagacgccactgttgccggcgccaccgttatcgtggtggccggaatggccgccacagtagtggccaccacctggcccatctgcgtctggtagtggtgacccacaaaggcatgctgctgcgcctgcggtggcggtgcctgggtggtgtacttcagcagatgttgctgcggagcagcctgcagcgagatgaacggcgtcgcctggatggggatgcagttggagttatagtcgctgctcagcaccagggtgggcgtggcatcggtataataggcgggggcctttagaaaggtcgccgtggccgccgggccctgatactgttgctggggcgtgggcatagtggccgtcgaggtggtggatagcgtggtggccgacgagagggtcggcgaggtggctatcgagcaggaggatgaagaggatgccgacgagggggagtagggcgagctgcagtggtaggtgatgtgtgtttgctgctgcgcgtgttgctgatgctgcagatgttgctgatgttgctgctgttgctgatgctgctgctgctgctgttgatacatgttgctggcgtgtgctgcctgcttgctggcattgctgtggtagtagttgttattgctgctgttgctgtgatagctgaactgttgctgctgctgcggcggctgttgctgttgctgctgcggctcgatgattatcaagttgctggtgccgttgtagccggctgctgttgctgctgctgccgccgccgccgctgccgccggattggctgttgttgtggccaccggcacagctggctgctgatcactgggactggtgatcatggccgccatgatgttggccggcggcaggacaatcggtatgtggtagtatttacactgcttgcggcggcactggctgttggcatgatcgcggcagacagcaacacgttgatcaatcacctcgaccttgtcatctgggagatcgaatcggatcggatcggatcggtttggaaagcggggatagaaagaaagagcggggcgttagtaagtcggacttttggcggtgagctagtaagtttggtttggcattagaaaacagtgaaagcttttccaaaaatttgttcaagtttttcggtaatataaaagtgatcttaaactgcagctgactttcacacaattacatgagagatcttatgaaagtgagtggtgaagactttgcttcagatttagctgcccgaaaacagaacctcttgcactcggctcgaaaacgttctttacaatattatttcatacttctgtgtatttttgtgtgtgtaattatcttgacggaaagccaaacttaaaatgtagacaataaattatcacgaaaagagtcgaccatttttacgaaaacaaaaattcgcagccaatttatcataactaaatagaattacttgtggtgtcatcctaactacaacttaggataaaatcggaaatcatctcaacagtgtctaggaaaaggtagcactaaaagcgtttagatatagatttagactaaacccaagattgggaaacgtaaggaagggtagggaacatatagaaagataatgtgaactgaagaaaaggaagaaacttaggcacatgcacttaccttcagttaaatgaacgaatctacaatttaaccgactgcacatagatctattaaaatcttggcacaccgggagggtgtccagtaactatattgggcatgaaagttggttggttgtgtttcagacatagtttttgtattgttttggatatggcaggatgcaaacggaaaccaattcagaaaatcaaaaagagtttttggatttgttgtgtgattcgtgttttt

SEQ ID NO: 35084 - DNA, 1128 bp, DROSOPHILA
atggcggccatgatcaccagtcccagtgatcagcagccagctgtgccggtggccacaacaacagccaatccggcggcagcggcggcggcggcagcagcagcaacagcagccggctacaacggcaccagcaacttgataatcatcgagccgcagcagcaacagcaacagccgccgcagcagcagcaacagttcagctatcacagcaacagcagcaataacaactactaccacagcaatgccagcaagcaggcagcacacgccagcaacatgtatcaacagcagcagcagcagcatcagcaacagcagcaacatcagcaacatctgcagcatcagcaacacgcgcagcagcaaacacacatcacctaccactgcagctcgccctactccccctcgtcggcatcctcttcatcctcctgctcgatagccacctcgccgaccctctcgtcggccaccacgctatccaccacctcgacggccactatgcccacgccccagcaacagtatcagggcccggcggccacggcgacctttctaaaggcccccgcctattataccgatgccacgcccaccctggtgctgagcagcgactataactccaactgcatccccatccaggcgacgccgttcatctcgctgcaggctgctccgcagcaacatctgctgaagtacaccacccaggcaccgccaccgcaggcgcagcagcatgcctttgtgggtcaccactaccagacgcagatgggccaggtggtggccactactgtggcggccattccggccaccacgataacggtggcgccggcaacagtggcgtctccatcgacatgcatctagaagaagggggtttcttatctgccgcagggggcagctctgtttattttaccagagacgtatattaggtcatagggatgtgtttcctgcgaagtccctatagatttgaaaacattagttatggcgcccaaaagtgaaaagtgaaatatttaaaactaaagagttatttgagcacttttaattaacataattttgaaatattatcctgttagccataggaggaactaaaatgttcattttataaagtctagcatacttttaagcaccttaattgatgttttcaaaaaccaagaggcccaa

SEQ ID NO: 35085 - protein, 276 aa, DROSOPHILA
MAAMITSPSDQQPAVPVATTTANPAAAAAAAAAATAAGYNGTSNLIIIEPQQQQQQPPQQQQQFSYHSNSSNNNYYHSNASKQAAHASNMYQQQQQQHQQQQQHQQHLQHQQHAQQQTHITYHCSSPYSPSSASSSSSCSIATSPTLSSATTLSTTSTATMPTPQQQYQGPAATATFLKAPAYYTDATPTLVLSSDYNSNCIPIQATPFISLQAAPQQHLLKYTTQAPPPQAQQHAFVGHHYQTQMGQVVATTVAAIPATTITVAPATVASPSTCI

SEQ ID NO: 35086 - DNA, 2202 bp, DROSOPHILA
aaagtggatgtgcctcagccttacattgttgagaagaaggtgcctgtccatgtcaaggagtacgtgaaagtacccgtccatgtgcccaaaccctatgaggtgatcaagaagatcccctatgaggttaaggtgccagtcgacaagccgtatgaggttaaggtgcccgtgccccagccctacgaagtgatcaagaagattccctatgaggtcaaggtaccagtgccccagccctacgaagtgatcaagaaggtgccccatgaggttaaggttgaggtcccggttcccaagccatacgaggtgatcaagaaggtgccctatgaagtcaaatacgaggtggagaagccatacgatgtggaagtgcccaagccctacgatgtggaggtcgagaagccgtacaccgttgtcgtagagaagaaggtgccctatgaggtcaaggttcccgtcgacaagccctacaaggttgaggtgagtgaggatcaattaaaaaacgtataaatcgaaaataaatcaatacaatcttaataaaaccatcataggtttcatgaaattccatcaaatatcacccacaactgtttaaacttaacatttctcgcaattttcaaaccaggtggagaaaccctacccagtccatgtgaaggtgcccgtgccccagccttacaccgtcgagaagaaggttccttataccgtcgagaagcccgtgccctatgaggtcaaggtgcccatcgagaagcccattcccgtctacacggaggtgaaggtgcccatccacaaggagattccagtgccggagaagtaccacgtcgaggtgccaatcttcaagcaccaccaggaggaccatcacgactaccacagccacggccatggacactactagggatcgtccgctgatatcaagagccagacgcacagaaagcgagcacaagaagaaggaggacgaacagggaggagtacgaggagcagcaggcgtgacactgacagccagtccatctgtgtctctcagatgcatccacgcagcaacgttgagctggacgttgaacgggtgacacgagcgggaggaaatgtagccgatgagaggcctaaagaattcgctgagttctttggccaggaggaggatgaggagaagatgatgatgatgaagaagaagaggagccagagcagaagagggagagccagcggggagtagcagtcagaggacaaactaactagctactcccattgagatctggcggaaaccggcgtaaacggtttccgcatcagttttaagccaaatgtgttagtacttttatcatcgtgttagaccctacgatttctatttaaattataagctaaagaaacaccgaccagctggcgtaaattaatgggttttcgggtgcaatgatggggaagtgaaagtgaaaattaaccagcgagccatggccgaatccccatgcgaaagacacgtaacgctcgtggcggaaaatgaaaatgaatgcgaatgaaaaccagttaccacttactgtcagtgcagattgtgtattcttggggccagttcattatgcaaggagcgatccgttgcgtcatcggactgccaaattaattgcaggaagcactcgccaacactcgctgaaatcttggcaacattttcgcaattaaggcgggctgtcataatggcataaaagattgagatggaaaacaaattcatagatagcgaacaaattgatggttacactgctagaaaatttttttttagatttagtagcatactttaaagaaatatgcagttatatcctaataggattagttattaagctccgttttttttttgttctctttaaaagttttagtttttttagatataaataatggcgttctttgtacacatttttctctgtgcacattaaacggctctatttgcaattgaactgcaatagtaacagtcacgaaaggcagtcaaaaacaaagaaaaacggcacttcaagtgcgcaatggcctcatttttgggggcagtaaatgtagcgcgtagccaaattgctctgcatttcgaaatatcagacattgcaattatctatcgagtattcactaaatgtagttaattttgtaagctttggctttcgagctttcaaaattggcgcgtacttttaacagtaactgttagcagtgtactgttaagtctgcatgcgatctggcagctcagttatagaattatttttggccaaaccagag

SEQ ID NO: 35087 - DNA, 202 bp, DROSOPHILA
atgcatccacgcagcaacgttgagctggacgttgaacgggtgacacgagcgggaggaaatgtagccgatgagaggcctaaagaattcgctgagttctttggccaggaggaggatgaggagaagatgatgatgatgaagaagaagaggagccagagcagaagagggagagccagcggggagtagcagtcagaggacaaactaa

SEQ ID NO: 35088 - protein, 60 aa, DROSOPHILA
MHPRSNVELDVERVTRAGGNVADERPKEFAEFFGQEEDEEKMMMMKKKRSQSRRGRASGE

SEQ ID NO: 35089 - DNA, 9142 bp, DROSOPHILA; identical to SEQ ID NO: 27805

SEQ ID NO: 35090 - DNA, 3021 bp, DROSOPHILA
caaagtcgaggaagacggattcgtgtgtcggtgaaaacccgtgagttttgcgtacttgcatttaaagaaaacccctcaacggaatagtcaataaattgattggagagcccaatcagccaccgtttcgacccagtgtacgcgtgtgcagcgagttaagagatccaccgatcgatcaaatcgtattgaaaaaaggtaaatcgacgtcgacaactgcggaatacctaagagccaaagcagcgaaagaataaagaaacaaggaaacatttgcacgccagcggagcaactgcaccagagcaccaccagcgacaagaaaaaccacttcaacaaaagaggataacatactggaagtgctccactcgcatcgcacacacacacacacacacacacacacacacacacaaacaaacaaacactcctgcccagcaacatacacacacacattcatactgtacgtgcacgacggtgggaaagtaaaccgacatctttttacgaccgccgagagttttgcaatcagaagaagtcggagagccaagccgagtcgatcggtcagccctttgataagccagagagagggagagagaagggagcagctcagctcagcgcagcgcacagaaacggagaataagagaggaacaggttgccaagtcgaacgcgcaacgaatttggaaatcgagacagccgaaagtgcgtgagcgtgatcgtttgtacgtagcccccaaaaaagttgaaacaaacaaaaaaaaattcagatacccgcagacccggacttgcatttaggccagaccagcttaaagggtttccaacccaagcccatgagcagctgagccagcggcagcagctaaaacggaaaccagacttataccttgaacacatccgatcccgtgcacattcaaatgaaaacgttagtgctcagtcccgaggacctgcagaacttcaacaagttcatctatgacccaaagtcggccgcccagctggccgccagtgctggtgcaattggagcagcggcggcggcagcagcagcggtccatggtccgccagctggaaccacagtacagctgctccagagcggtggagtcggcggctcaatgaatccgggcgtagtgccagtttctgtgcccgtacccaccagtacagccaacagtgccaataatctgatggcgctgcactactacctgaaacatcccggtatccagcagatgcccatcccacagcagcaacatcagcagcagcatcagcaacagcagcaacaccaccagcagcatcagcaacagttgttggcccagtcacagacgcagctgaaacaactgcagcttaagcagcctacgatccaccagcaccagcagcacatcagctatcatcatcatccatactaccagcagcagccacagcaggcaccgccaccgcaaccacagcctctgaaaagccagccgcagtcgcacctgcccgttcacgccctcaatcagaactcgaacttctcggcggccagttccagtacgggcgggactgcctccagccatgcgcccacccagcaatcgaatggttccagcgtatcacccaccattgtgtcgagggtggcggccgttgggacacccagcagcagcaatattgcagccgcggccaatgctctactacgggcatcggccgcatccacagctccgagctcctccgcctcgtcgtcctcttcgtcctcatccgcgtcgtcgagctcctcgtccagcagctcctcctccagcgccagcagttcagcgaactgcgccaaaaagctgaagacggaaccaatactgtcgcagtacaatcaaacggagcgccttaattttgcgaacacgtacatcgtgtggagcgaagagcattggcgacgggtggtgttccacgacgagcgtaggttcaatctggacggaccagatggcttctcatactatttccacgatttacgcaactacgagcgaacgttgtcgcagcggccgcgaggaaactctgtgtacatttacctgatggtctgcgtgggaggagccgtgcttctggaggtgtcatccgccaaacagcgaccagaatcctgcatcgaggccatcatgcgcgagcggcccaatattgtaaccaaattgggtggcaattcggagtttgtgctgcaggatcataattggatgtcgcacgccctgcccaccgcccaggatcttctcaatgccgaaggcctcaagacccagaaatggcccaccattgcccatgatttgaacatcatggagaacgtgtggggctggctcattcgcgaggtattcgacggcggacgaaagttctcgcgcaaggacgacttgatattccgcatcaaggaggcgtggtcccacctgccactcgacctgatcaccaacctgtacagcacgttaccggaacgaatcacggagctctactacacacagggcgtctacacgaattgttgacaccggcgtccagagcaaccaggatgtggacagggcttagagcacttgaccgctatggcggtcgtgcaggcggacaatgatcgtgttccagaacctgatccgaggagtaggcgctcctcggcgtctgtcagaggccggagagcgaaggaagaaaatctttatatacaatttaacttaactttttgtgtatagctttaagatgtgtgcaaaggagctgacaggactgcttggagaccgacggactgaaagcgagaaagacagacgattggccggacggaaagacggacgcaccgactttatacgttataagttatacagttttttagttatctaaacaattatgaagagcagaaaacagcagattgtgggcagaacactcgttaagtgttgccatatcgctttgtaattagtgttttttatcccgcccctatttcccacaaattgcacctaaaaaaacaacccttctcccacgaaatcctcgttattcgtaagccttagtttaagttgtcgttttcctttttacccccacgtccccccactattaagaatataacaaatatattagttacaaacaagtttatttgaactt

SEQ ID NO: 35091 - protein, 512 aa, DROSOPHILA
MKTLVLSPEDLQNFNKFIYDPKSAAQLAASAGAIGAAAAAAAAVHGPPAGTTVQLLQSGGVGGSMNPGVVPVSVPVPTSTANSANNLMALHYYLKHPGIQQMPIPQQQHQQQHQQQQQHHQQHQQQLLAQSQTQLKQLQLKQPTIHQHQQHISYHHHPYYQQQPQQAPPPQPQPLKSQPQSHLPVHALNQNSNFSAASSSTGGTASSHAPTQQSNGSSVSPTIVSRVAAVGTPSSSNIAAAANALLRASAASTAPSSSASSSSSSSSASSSSSSSSSSSSASSSANCAKKLKTEPILSQYNQTERLNFANTYIVWSEEHWRRVVFHDERRFNLDGPDGFSYYFHDLRNYERTLSQRPRGNSVYIYLMVCVGGAVLLEVSSAKQRPESCIEAIMRERPNIVTKLGGNSEFVLQDHNWMSHALPTAQDLLNAEGLKTQKWPTIAHDLNIMENVWGWLIREVFDGGRKFSRKDDLIFRIKEAWSHLPLDLITNLYSTLPERITELYYTQGVYTNC

SEQ ID NO: 35092 - DNA, 2444 bp, DROSOPHILA
ctgggataagcacagggaaattgataaaaacaaaaaaaaaaaaaaataaggaatataaagccagtttgttcgctatcgggaacaggaatgggaacaatgctggtgggtaatcgatgagaagagagctctcagcgaagactagagagtgaagactctggacccgaagaatcgatgcaaaaacatcgagcagacttaatgactgcgactctgattcggaaataatgatgggaatgcatcactcgtttcgccagaatcttttgcctttccttgttttattttttttcaggcttggctgggtactttttttgcagtgctttggaacttcttttgtttacttgttaaatgggagaaggtaggaataattgcaggggtttcttcaagattgaattatcattgagacggacaggggtaagccgtcaattagcaaggcatttagagatgcggaggctgaaaacttaataattccgtaataattcccaagttctgggaagacgtttaattggttgggcagttagtcacgttcttaacgagttaagcacttgaaaaattgtagaaaattttagatatagcagactatagtagactatatatgatatagtaaaataaagtttacaatcaatctttaattagatagttttgatgttttaaaaagcgagaacgaagaaacactagtgtgttaagtttgcagatatctgtttatgtttcttattaaatccaaaactaacaagctttcaggataaaagaactaagaattaatttttaaaaattcataaaatcctatacttggcttgaagttacttagccttccgccattataaatattactacaattttgatttaatccatctgtattctttaagtttgaaaaaacccattgagttgagcaactctacaagcaataaaggaatacaaattttgtaaataattttctactaacctgcagcgcatgccaagaggctcagcaggcagaagagtacgattttggccatctttgcttcgaatgggttggattggtgggagcgcggagcactatctaattgccactggcgacgatcggggaatacgaatcgggttctcagcgttttggggacgcgcgatcgaggtggctccaaagaagaagtgtttggagttcgtagagtttggagagttcagcacttcacgtcgcgttcactgcaagccttcgtcgtcgactgatcgctcaactgatcaggccaatatcacgcagccgcgaatgaagtccgccaagaagtcgggaatggaaatgggaatgaagtccaagaagccgaagaagccaagaacgacacgacgatcagactcgctgcttccagaagaactccagcgattccagttccagtttcctcttccagttgaaaacacacacactcacatacacgaacggcctaaacagacactgatgcagatgcagatgcagatactgatttagagccagcgacttgtgttaatccttggatcccgaaattggtaattggaaattcttgatccgccgagcttctgttctggccaagttagcgctggtaaatgtcggttggtgccgaaagcagttagcttaagaaggaaattgctggctgaaaacgggaaaagaccgtggaaaagaaagaagaaatggccgaatcgtaccgaacagaaccaactatttgcttatttcatggatgtgattggaaattggcctcgctgtgcgagtgtgtgtgtgtgtgtgtatgggtgtccgagtttgtgtgcgagttcttcctgtgtttcgtagtgtgcgtgattgcccaagtcagtgctagacaaagagcgcaataaaccaaaggcacacaaaagcgggctcaaaccgaaatattaatacagagcaagaaattggaaccgcattaaggattaccagaaaattacttcgaactcctgaaaactgcagcatagcttattacagtcctaagcaatacattcgatgatatttttaaatggtattagataccctaagctctctctttgtgggcagcagtcaacgtagtgacgaggtgcacctgtactacacaggatcaaatgacaatctgctgtgtcttccgaccatcaccagtgatacatcaatggaaagatctgttaccaaagaaaatacttttaacaaaggacaaaggttgtaggtgtaaaagaaagctgctttagtttctttcagtgcatactcacacctataaacacgactgcacgtcgctgtcatcattccaatgggagacgtcgacgtcgacggaggagtcatcgcagtccattgttagtttcgttctttctcccacaacgacgctttggttttgggctctttctgctggtctttcgccgtcttcgctacagtcttacctgtagggctcgccgcacgttcttccctgcccctgctcccccccccccttccgtgcgtcccgttggccctagcccccctcgcgagaacccccatc

SEQ ID NO: 35093 - DNA, 444 bp, DROSOPHILA
atgggttggattggtgggagcgcggagcactatctaattgccactggcgacgatcggggaatacgaatcgggttctcagcgttttggggacgcgcgatcgaggtggctccaaagaagaagtgtttggagttcgtagagtttggagagttcagcacttcacgtcgcgttcactgcaagccttcgtcgtcgactgatcgctcaactgatcaggccaatatcacgcagccgcgaatgaagtccgccaagaagtcgggaatggaaatgggaatgaagtccaagaagccgaagaagccaagaacgacacgacgatcagactcgctgcttccagaagaactccagcgattccagttccagtttcctcttccagttgaaaacacacacactcacatacacgaacggcctaaacagacactgatgcagatgcagatgcagatactgatttag

SEQ ID NO: 35094 - protein, 147 aa, DROSOPHILA
MGWIGGSAEHYLIATGDDRGIRIGFSAFWGRAIEVAPKKKCLEFVEFGEFSTSRRVHCKPSSSTDRSTDQANITQPRMKSAKKSGMEMGMKSKKPKKPRTTRRSDSLLPEELQRFQFQFPLPVENTHTHIHERPKQTLMQMQMQILI

SEQ ID NO: 35095 - DNA, 3373 bp, DROSOPHILA
cgtccgatgtgctgcttcaggttcttgatgcccgcgatcccatgggcacgcgctcgaagtacattgaggagttcttgcgcaaggaaaaaccgcacaaacatctatttttcattctgaacaaggttgatctggtaccggtgtgggtaacgcagcgttgggtggctattcttagtgccgaatatcctactattgccttccatgcctccctacaacatccttttggaaaaggtaagtttataaagtaaaaatatcaattatttgtcataaaaatcaattatttttataggtgcgctcatcaatctattccgtcagttgggcaaactgcatttggacaaaaaacagatcagcgtgggcttcattgggtatcccaacgtgggtaaatcttctgttattaatgcgctacgatcaaaaaaggtttgcaaggtagcaccaattgcgggggagacgaaagtatggcagtatataacgctaatgaaacgcatcttcttgatcgattgtcctggcgtggtgtatcccaccgcggagactgacaccgagaaagtgttgaagggtgtggtgcgggtggagctcgtcacaaatcctgaagattacgtagactctctgctgaaacgcgtgcgtccggagtacatttcaaagaactacaaaattgaacactggaacacatccacgcactttttagaacagttggctcaaaagaccggcaagttgctaaaaggcggtgaaccggacgttacggtaacagcccgtatggtgcttaacgattggcaacgaggcaaacttcctttctacgttccacccgaaggattcgcagttcccaaatcccaggagggtaaggaggaggaagtagttgcagaggatcccaacgaagatgctaaatccgaggcacctacattcgtcagtgagtctgtaaagaaggcgcgcgagtttaagcagatccaagattttcgaaaaatacgcgtgggtcttgagtatgagcaggaagatgtgaaggatcttgatcacatagatctagagcttttagagcaacagaaggccgagcgtgcggcaaagaaaaaggctcgcatccacaacctcggtgaagaggacgaggagtctagcgatggagcggacgagttttactcggaggacgagtacaatgaggacttgcaacgcgttgtgcacaagaaggccaagtcaaagaagccacaacagctggccatcacatcgtctggtaaattccgagtggccaaaatacaacctggtgattcggatggtgctggcagctctgacgacgatggacccagcacttcaaaggctcctcggttgactgcaaagcaaaaacgctccctggagcgcagtcagaaacgcaagaagattggcagcaacttttacgagacgacaaatgttaagaatcgcaatagaaacaaaaagaaggacgcgtaaaatattacgtttacactctaggctatattttcttgcaaggaaaaactacactttaagaatccaaataaaaagttgatcctactctgagcactgcttcttcttgggaattttgcggccacataagtcggttcggctgcacatactgggttcctcctcatcggtgctggcctccgagtcactagactccgtgtaggagccgatgcccggaagtatagcgatgcactttagggccccctggttgtatttgtttgtaattaatgtggtgttcgttgtcttatcagcagggtccttggttgcttcatttgtcgctgtctgttcgacctcattctcagtgattttggctactttactggtggtgggcagttcgccgttttttctcttgatgccctggccgagcagcgtcttctgagtgctacgcccgaccgaagctcccgcggacttcgctgtggtttttagttcagcttgcagtttctgagggttgcggaagttcgggtgattgtaaaatcaattgattgttgctgtaactttacccaccttgtctacactctcctcctgcagcttttccacacgattgcgaaaatcctttagttctagctcctcgtcgcgcatttgctggcgctccgcgtgtattttatgggcatcgaccaattccagaaactgcacctcatcatcgtccagaccacggatgaggttttctatacgtatattacgcatgttaggatggccagattgcattgtttatggcatagtcttactcagcttgtgggcttcctcgaactccatgtccttcttgtccttattttgtttgaggcgttcataaagtgagcgcccatcgtagggttcctcaggtcgttctagtggatcctccggctggcgtacacgctcccattcctcctgacgtctctgcctttgctcggtcgcctcagcttcagtcacaaagcccgaactcatgctgtactttcgtaaaattgctcttttttacagaccacaactattgccagtgtggtgaacgtcgaattagcagctgtgcgatgatatagaagtgttggtagtggctcgtgaaaatttgaactagtggcgggaattgctaatgcttctgtgtcattttaagttaaacgttgaaaaactttccaagtcccactaaaatgaactatccttataaactcttttaatatgacagcgccttactctaccaactggaacactggggcgaccacgggccctaagcctggctcgatttatttcggctatctgcacaaaaactgatttttgggcggttgtcatttctcgccattttctgccggctattttggccaaggaaatcggtttcagatggcaaatgtcccgcttttgaagattaatccgaaagtggtcaaagaaaataaagtagggattagcggatgggaacttgcttggtcgcattgtccatggtaaaggcgagacactcatccggaacattctgaaattttgaaaattcttcctcaggtaaatcgaaacaaatacccttcacatgaaaatcactggttacatgactttatttcaggaatatctcaataggaaacatctatataggatggggctttgctaaattctccaataaagagctacaggattagcaaaatacacgatattcatacacacatatgcaggcgttttaggtgaagacggtttctcgtattttgtttatacatccataaattctcggttcgtccgtttccaatgtatatacttagtttatagacataattgaggtcagcacacttacaacgaacagcaaataggtaatacgactgattctgaacttcgccgtgattgagtatacattataggataatactgttaggattgggtccggatcatgatgtatccgaatctacaggatgctgcaggagcttttctcgcgaaacggattcaccttctgtgtgaagccgctgagcaggcagtcttcctc

SEQ ID NO: 35096 - DNA, 1250 bp, DROSOPHILA
atgagttcgggctttgtgactgaagctgaggcgaccgagcaaaggcagagacgtcaggaggaatgggagcgtgtacgccagccggaggatccactagaacgacctgaggaaccctacgatgggcgctcactttatgaacgcctcaaacaaaataaggacaagaaggacatggagttcgaggaagcccacaagctgaaaaacctcatccgtggtctggacgatgatgaggtgcagtttctggaattggtcgatgcccataaaatacacgcggagcgccagcaaatgcgcgacgaggagctagaactaaaggattttcgcaatcgtgtggaaaagctgcaggaggagagtgtagacaagaaactgcaagctgaactaaaaaccacagcgaagtccgcgggagcttcggtcgggcgtagcactcagaagacgctgctcggccagggcatcaagagaaaaaacggcgaactgcccaccaccagtaaagtagccaaaatcactgagaatgaggtcgaacagacagcgacaaatgaagcaaccaaggaccctgctgataagacaacgaacaccacattaattacaaacaaatacaaccagggggccctaaagtgcatcgctatacttccgggcatcggctcctacacggagtctagtgactcggaggccagcaccgatgaggaggaacccagtatgtgcagccgaaccgacttatgtggccgcaaaattcccaagaagaagcagtgctcagagtaggatcaactttttatttggattcttaaagtgtagtttttccttgcaagaaaatatagcctagagtgtaaacgtaatattttacgcgtccttctttttgtttctattgcgattcttaacatttgtcgtctcgtaaaagttgctgccaatcttcttgcgtttctgactgcgctccagggagcgtttttgctttgcagtcaaccgaggagcctttgaagtgctgggtccatcgtcgtcagagctgccagcaccatccgaatcaccaggttgtattttggccactcggaatttaccagacgatgtgatggccagctgttgtggcttctttgacttggccttcttgtgcacaacgcgttgcaagtcctcattgtactcgtcctccgagtaaaactcgtccgctccatcgctagactcctcgtcctcttcaccgaggttgtggatgcgagcctttttctttgccgcacgctcggccttctgttgctctaaaagctctagatctatgt

SEQ ID NO: 35097 - protein, 249 aa, DROSOPHILA
MSSGFVTEAEATEQRQRRQEEWERVRQPEDPLERPEEPYDGRSLYERLKQNKDKKDMEFEEAHKLKNLIRGLDDDEVQFLELVDAHKIHAERQQMRDEELELKDFRNRVEKLQEESVDKKLQAELKTTAKSAGASVGRSTQKTLLGQGIKRKNGELPTTSKVAKITENEVEQTATNEATKDPADKTTNTTLITNKYNQGALKCIAILPGIGSYTESSDSEASTDEEEPSMCSRTDLCGRKIPKKKQCSE

SEQ ID NO: 35098 - DNA, 3455 bp, DROSOPHILA
aagtagagcaccgccgatatgggatcatccgcctcgtctgtgagacactctgtgtcgtagacaaacacaatcatcgtctccctgtaaatttaataaagttcaagggttattgttattgagactttgagacggggaaatatattttagcttagtttctaatgttaaggaaaagctttggagaaattacgttcaactattttcccttgtaaaatgtgagctgaatcttaaaacttgttcaagaattgatacaacaagtgctgtagcaaaaccggtatgcaaaaaaaactttacacaaatacaaattggatttatgcaatctcaatttgtttgacgttgtttaatgcaattcattgtagatatttgtgcactggaaacacagtttgagtatgaaatgagcaacctttcggtgaggattgaggtctgctgcttctgctgcaccttctgccatcgcttgtgcttggttttgcgccaatcccgaaacattgctcctgaaatctagtggatttcggtgcttccaagtctagcgctgcatcgtggctccttatcacatttaacgaccgacgattctgataagtcaacaagccaatagcgccgtacaatgccaactgtctgatttcgatgtggcccagctgcctgatacgaccaactgtgatacgagagcgtgatcagaattccgctcacgcccaagtgaaccagcaggtgagaagtgaggtgaaagcttccgagtgtttccatcattgcggttgagcgggtgggtatacgagcaactatgctctcgtataatgtattcatccatgtggtgaccacttcaatgacgaaggtatcgattccagttttagagtgtaacaaattcgattaccaatgctatattttataaaaagctctcggaggcaaatgattttcaaatatcattaataagattttatatatgtttaacaacagagaccttgtctgttttattgcgcgtaatacaatgtttatttaaactatcataacaactctatccagcagctgttttcaacacattgggtggcaactgttgaatctggttcacagtatccgattggctagatatgctatacttggccacatatccatcgggaccagctttgtaggtgaccagcaggtatttcgaaccaggaaaacgctggctataagtacccttaacttgaagcacatctggcgcaatctgttcaacaatctcatcccgcgttgaaccgtcgagatcaatcctacaatatggaagccatttggttgagcttacagcattatcttaacttcattttttgtttacctcagggaataattattctcagatggcactagcacaactccattatcgtttatgggcggcacgaatttggtaactgaagttgtgggcgccgaattcaccagacttagaaacagaatcaaaaacacctgtagcaaatattatacaacgattggcaggcaaacttatgagaaaaactcactgagcttaacaataggttagccatgatgatcttttggcttttggttagcgactgatgtttttagatagctgacagcaaacagctaacaaataaacagctaaacttaaaccaagttcaaaactggaatcattaataaacacattcaaaaatcgttctccgcttatagtatagctataagatgtgatttttgaatactgtcaacagggatttacataacataacaataaaacttgccacagtgaatcattgaccgagtcacctaataagttgctttaatagggcttagccaattaacaataataagtataacaatttgttatagttaagaaagtctagctagtttattgatttctataaactagtgagtgattataaacttacttattgttacttataaatacagaattggtttaatataaattacggcaagttgtggttttaatgttttctaaatattcagtcaaaatcctatcccgctgcagttttcagagcaccgggactgaggaataatggtgtgtcaggaggcggtgttggaggacccttgccgaagctgtatttggcaacatatccattcggaccagcctcataggtgacaataagattggcatcctgatcctcgaagggctggttaatcacacctttaacctgcagatgtccggcttcattctggctcacggattcctggcgaatagtgccacccggatgttcgattctacagattcagaactaactaagtaaagggaagctctcttctggactttgattagctacctgagaaagtattcttgattgaggggctcaagttgaaagccatttgtgcggatttgcggaacgatagttggtgaaatttgcggtgccgcgttgaccgcagtgaagatgaaaattgccaacagctaaatattattatgatttgaaaatggtatgtttaaactttgatttgcatatgcgaaaagactactcaccgcgaaaaaatcgcgagacatgatgacctgtctgtggttgaacaaaaactatctgaatatctgaacgcttggtcagttttgagcccaaaacgaaggctggttgatttaagtagcaagcaaacgagttttgatttttacgatgaagatacaaaaaaatcacacatctgcttcgcgagaaacacttcagtacacctactaattcaaataattgcaaaattcccatcttataaggcaattgaaaaagggacacaataaaatcgactcatctagcaaaagcattcggtagccttcgctgtgacaattaacttggttcaaatcaatctccacacgtcatgcccaatgcaaaatcattctgtcatgataaacttgtgactacattaaacacctggcctatgaaattttcttggggagttcccaagtcaaattttaattctttctacgtgagattcttacagttctaaaaagtctaccccggtatatgactaataggattttgacctttaagacacggtccaattgggacttgtaaaaaatgatttctaagaatttgctaaaaataatttgaaatggaaaaatacttaactgaaaataagaaataataagaaaatatagaattgtttacccaaaaataaaaaaattttaattgtaaaattgtcaattaatttatttttaacaatatatgtatgattacacagtttttatagttgaataataaaaacttttcaataattaaaaatttgacatagagacaaacttttgcattatatatgcactttctgtatttattaaatgtttatactaaaaggttttttccattataataatatctataaaaaatttttatagaaaaacacttaagaccaatcaaatttcattttaccggtttgccaatcttttgaactttgacattttatcaatttcaccgatcggaatcgatacttatctcggtcttcttcttccccctttccatcacacttcctgtgtatgtgaatgcaaatttaatgggcgagggggtggtggg

SEQ ID NO: 35099 - DNA, 513 bp, DROSOPHILA
atgtctcgcgattttttcgcggaatccgtgagccagaatgaagccggacatctgcaggttaaaggtgtgattaaccagcccttcgaggatcaggatgccaatcttattgtcacctatgaggctggtccgaatggatatgttgccaaatacagcttcggcaagggtcctccaacaccgcctcctgacacaccattattcctcagtcccgttaccaaattcgtgccgcccataaacgataatggagttgtgctagtgccatctgagaataattattccctgaggattgatctcgacggttcaacgcgggatgagattgttgaacagattgcgccagatgtgcttcaagttaagggtacttatagccagcgttttcctggttcgaaatacctgctggtcacctacaaagctggtcccgatggatatgtggccaagtatagcatatctagccaatcggatactgtgaaccagattcaacagttgccacccaatgtgttgaaaacagctgctggatag

SEQ ID NO: 35100 - protein, 170 aa, DROSOPHILA
MSRDFFAESVSQNEAGHLQVKGVINQPFEDQDANLIVTYEAGPNGYVAKYSFGKGPPTPPPDTPLFLSPVTKFVPPINDNGVVLVPSENNYSLRIDLDGSTRDEIVEQIAPDVLQVKGTYSQRFPGSKYLLVTYKAGPDGYVAKYSISSQSDTVNQIQQLPPNVLKTAAG

SEQ ID NO: 35101 - DNA, 2302 bp, DROSOPHILA
cgacattgtttttgttcgtcttctgcgtagttgtcttctttgtttgttttggtttttcggccagacttcaggactatcggattgctggtgcgtatgggcaccaggaagtgcgcaggacacgatcaaaacccgcaatatccgtcgataagtaagcgtttaaacaattagaaagccaaaaattaccttaaaatctttgactggactcacttcagtgagaaggttcgctacaaacgcgaaaataccaacaaggggtgggtgtgaccaggtggttcaaaatatgattcatattgcaattaagtttttgtttacttttaaaatatttccaaatatatgaaaattgccgaaagctacaaagaaaaaacaaaatatgaaatgcagcccacaaaggtttattgtcttttttcaaaaaccctcttctattcatcacacaatttgcatacatacatatatgcaataaaagtataaaagatggtgggccctggtaatccaacccggcacatagtctacgtatccttttgcttctctggttcgtagtcttgatagcaattaatgggatccttggccgtataaactgagtatgccaatttgctgcccttgaagttctgtaaactcagggcagaaagggaaaattacttaaaattaaccattctgataagcactatctgccgtaccttcatatcgccagatatcagagtccaaaggaaaacgaacaccgccggtatcacagtggacaggacaaacagctcgaatgtgttaagctccccaaaaacggatattttcattttaatttcgtaatttttgatgagttctttgcgaatattagtttttgttgatgactagttgttgttctcacgtaggccgcacagtgttgtcacaccttgcttttaaagttttacgctatcctacggtcacactgtagtggtattatttaggacatttgaaactattgcgttcattgcgaacattttggtgcgtgtgaaaagttattaaatcaacaaaaatggctttccgcataccttttggcaagaagcacgctgagatagcgagttccttgtaagtatatgctgtcgtgcttgattctgcatcatgaattcattagtgttcccgctcttttactgctaccaaagcacacattgcataaccccatccagagaactaaactagtttcttttaattcgtagcatccgatctggagccggattcggaggagctgctggcctggccgtgctttactacaccgactggaagctggtcctacagtacgtgcccatctacggatccaagttcgaaaaaagcgagtaaccttgcctgccgtagttgaatccacagttagcctcgatgttttgcttggtgaataaaataagttaaaacgaccaaagggtattactgagtatcgtatattacaaataactttgtagagggcacaaggatcggttagattatttctctagctaactaatcgctaaggcttaagtaactgttccctaagtcttacatggctagcctattttgatcaagcattgtataaaaaagtacaacggcgagctgcccattcgattggaagagtacaaaacggtttcttttttgaaaagagaaatatgagattgcgtatttggaagcccgaatagaccgacgattgaatccttttagacaagtaatttggaatttcgcttaataaattctagtttgaaccataactttcctaacaatccggttcaacaaaggaggcggggaacagcccggttttgtgggtacgggcatgggtgcccttataccagccgttcttctgcttccgctggacgtagataatgtcgcccaaatgtagctctagttcaatgtcactgtttggtggatacggcacaatgcagcggaatcgactacgataaaaggttgcattagtaaatctctaagctcacaataatgtattgcaaaacccacctttccctcgtgcagtaaggagacttagtggtggcgctggccttaatggccgcctccgtgatcatattgctgctgggactcagcacatgactcgcatctaggctgtgcgacttccgatggctgggtgcaataatcatattggcatgcaactgggattgcgctccacctccaggaatcacctgttgctgaccgccggcgtagacagctggggccacggaagtagtaggtggcggcggcgacgcggcattgttgtacatactgcgaaatgtagctgcatctaatgattgtctcgcgctgaatcaaaatccaagagtcagttaaaagttaaagcattcaaattaagcctaacgaaccaaatcaagtg

SEQ ID NO: 35102 - DNA, 174 bp, DROSOPHILA
atggctttccgcataccttttggcaagaagcacgctgagatagcgagttccttcatccgatctggagccggattcggaggagctgctggcctggccgtgctttactacaccgactggaagctggtcctacagtacgtgcccatctacggatccaagttcgaaaaaagcgagtaa

SEQ ID NO: 35103 - protein, 57 aa, DROSOPHILA
MAFRIPFGKKHAEIASSFIRSGAGFGGAAGLAVLYYTDWKLVLQYVPIYGSKFEKSE

SEQ ID NO: 35104 - DNA, 2249 bp, DROSOPHILA
taatacccagggaatatttgctaacgcgcagtgttcttaccgccagtccggctgatttatcatttgccagtcggtcggatgatttcggtggagccagcaccacgcaggacatcgacgacttggacgagtccgatctgagccccagtctgctctactgcctggacggaaatgagccaactttagcctcaccctttggcaacagcaacggcaggaagcgatcggcgggcacacccctaaagtctacgctaattaccaaccttgacgccgacaacaaggaaaacatggagaatctacaggaggatcattcgcgcaccaaaaagctgctaattacttctcccgagaagtatccgggcgaaacggccctctagctttaaattgagcttttcgcacagatatatatatatattttttcataatctaacgttaaaaccgttgtacggttttaaaaaatcatctctcatcaaaatatttaagaaaatgtttgcttccgtaaaaaatgtttttggtatgacacgtttagcttggccgcgttctaaagtttagcataagttctacattttaaatgcatgcctcaaatattaagagatacatacatatataactatatataatcgaaaaataatcgctgttttattggaagggcttaagttgtaaatgaaatgagttagctctgtggggggttaatgcagtattaactgataagttgttccaagtacttcagatagttgcgtgttgagcaaagtcataatattgtgcaatttccaggtgaacgggtaagttcaaattaaggattttaaattgtttttcctaaaaacggttttaggacaactgtcccaaaatatatgttcgccttaaccaacacagctcgccctgccctcaacgacaggcaacactgagttaattgtaatcagctgttttttgttgatattttcgaggaaaacacattttattcgacgaaaattacgttttatcacaactatccgagtaatattacagcgaaatgggaacctgggtgctggaggtggccaagatgggcatgtacatggcctttccggtgacgctattccacttgtttaaccagccggaatactttgaagaatgggtgaccaagaagaagcgggaactttatccgccggaaagcaaaagccaccacgaggagctgcagcgggcaatccgtgaacaccacgcccagcacgacgccaaaatgatgcgtgctatggaggaggcggagggcaagcagaagaagtagatatttcgttatcaacaatcatccggctaatcccacgttatataatcgggggcaagcaaacaaccgatgctccggatggatgtgactaactgatctgtaacgacgtaataaaaacatattgtatttaaccgaacaacactcggttaatcatcaggaaataactatgatgtggctccagggctccacttgaaatgcattttggagtccattatctggcgaaaacagctcgatttcaggccaagagagcactcagtgtgtggggtggcttgataaggccattacatgaccattgacatggttgcaagtggaatccacaaggactgggggcaacttgaaatcgctatacgagtgttctatagtcgaattattatcattatcacccagtaatcgcttatctacagccaagcccgctctgcactgcccgcctatcagaggatccgtcctccaatccgttcggtgggccatcaatggttccatctagttcgctgataaccgatagtgccgcttgaccgccaggtgaccgttgcgacttaagtgtacgtacaggtattcagctattctgcgattttgtcacagtttggggtccaatctggatcgatccaatagcggattttcctacatgtgttttgggcgtgatgcgatgcgttgctggttacgccaaagattagatgcactccccgcgattttcgctcattcaattattttgttgagtctgtctccgctattatctgcttttcacacggcagcgccgaatcaattgtgccgtaaataacaaaataccggaaaaggtttgacttaatcaagccgaagatagggtaccctcaaatgggggatgagatttggtaaaagtcttgccagaacctttaaggcatgcaagtagtaaatacttaacaatttgtgattaaataactcgctaatcttgatcttatcttactgcaaatcatcgattttgctaatacaattgttttcatttaaatttctaactgttgcagatatttat

SEQ ID NO: 35105 - DNA, 249 bp, DROSOPHILA
atgggaacctgggtgctggaggtggccaagatgggcatgtacatggcctttccggtgacgctattccacttgtttaaccagccggaatactttgaagaatgggtgaccaagaagaagcgggaactttatccgccggaaagcaaaagccaccacgaggagctgcagcgggcaatccgtgaacaccacgcccagcacgacgccaaaatgatgcgtgctatggaggaggcggagggcaagcagaagaagtag

SEQ ID NO: 35106 - protein, 82 aa, DROSOPHILA
MGTWVLEVAKMGMYMAFPVTLFHLFNQPEYFEEWVTKKKRELYPPESKSHHEELQRAIREHHAQHDAKMMRAMEEAEGKQKK

SEQ ID NO: 35107 - DNA, 2357 bp, DROSOPHILA
cacgccgcagccataaatctgttacataaagccccattgctactcatggcccgattttcacttgcttggctttaatggaaacttagcacgtgttttgggttcaactttcgaaaaagggaatacgaaattagtcagctgtagagagaagcatttaattaacgaacgagtgtagagcgcatttctgaaatcctttcccacgaaaatttgcaaatttgcatctgcgatgcaattatacagtttagttgaagaacaaatgcatttcaatcgtaaatggaataaatcacacaacgccagagcagattagatgaaaagttcatgctttgtacatgtatctcaaatttaaatgttatttgtaatgaagctttcgaaatttgatattcaattgaatttgcacaaaggcgcatttgaattgtcgcaatgattttaaattccgcttaaaccattcaagcaataatattattcagtttatgtcgttgctgcttcaaaaatcgccataacgacaacaattgacattttataggtcccaagaaaatatagttcaatttaggtttaatttagcctttcgatttccgtgttcaacacacaggtttgcctaagaacaatagaaatttgtttgccatagaaccaaaaccaataaattgatcccacagcaaatatatgaaaagtaaacaaacacgaatggattcaaccatttaatagcattgaaaatatgcacagcatttttggactattgggcagcaagaatttaataccgaataattgcattttctacaaacccattaaagcaaaacagaaagcaaattgaatcaatttcatgtaacaaagtgtattgtttttcccctactttcagctgaatagtattggatgcaaaaatgcagcaggcaacgagccatgaaaaaatcaaattaatcatgttggcttaaacaatttccgttttggttgggcaaggaaacgcattaaacgagggcaaaatcgagcggactcagtacatttcgcccagatgatagccaacttggtgagcatggaaacggacttggccatgaacatcggcctggacacttccggtgaagcccccacagccctacccccgatgccgaatgtcaccgagacgctgtgggatctggccatggtggtcagtcagtccacacagtggcccctcctggacaccggctcgtccgagaacttcagcgaactggtcaccaccgagacaccctacgtgccctacggccgtcgaccggaaacctacatcgtgcccatcctctttgccctgatcttcgtggtcggtgtcctgggcaatggcactttgattgtggtcttcctcagtgtgcgacagatgcgaaatgttccaaacacgtgagttccccggggtaaagttttcataactttggaaaagctaggtttagggtgggtagatacagctaatggtggacggaaaataaaatttgtgcatcaaatatttttataagctgttaaagaatgaatatatataaaattgtttagcttgccaaaaagtttaagatgaaactactactacttacatataacccttataggatatgaactagtcgttgcatcagctccgatcgttttgttggaaaatgtctttttgatttacgggcaatttaaattgaatttaattatatgccacacgcctggcagcgaagagtctgcgccaaattatgcatgcaaaaggcaaatgtcacgagttggccaagaacaacagtgactgaaaatagtcctgccccagaccatcggttaattaagtggcaagcaggaagaggaacaggaagtgaaagaggctgccaggcggcgttgataatggtaatgtcgttgccgcctccgcatggaaattgcttaaaatttcccattcacatatgcacccacatattcgtatatctagatcgattggcagctgttgatgttttcacagacgacgaacaggaaaatggcataactaattactaagtcatgtcggggtagattttggtacatacatacatatatgtacatacatactcggatgtagtaccccaaagcgtagtgtgtcataaaacaagttattctaccaggcttacgaacgagataaatatgattttcagggagacacaataacgcaaaccttatgtgacttacataaacgagatgttgcctactttccgggaagccaaagtaagtccttaagggcgaacgaaaatgaattgtatgagcactttgagaccaaaggaagccagttggcatattcaggcattcattgtgactgccttgtttccttccttccattcacaaatgcttttttgggaatttaaaagcaaactctattgaattgcttcaggttaaattgtttcaaagcgagtttg

SEQ ID NO: 35108 - DNA, 357 bp, DROSOPHILA
atgatagccaacttggtgagcatggaaacggacttggccatgaacatcggcctggacacttccggtgaagcccccacagccctacccccgatgccgaatgtcaccgagacgctgtgggatctggccatggtggtcagtcagtccacacagtggcccctcctggacaccggctcgtccgagaacttcagcgaactggtcaccaccgagacaccctacgtgccctacggccgtcgaccggaaacctacatcgtgcccatcctctttgccctgatcttcgtggtcggtgtcctgggcaatggcactttgattgtggtcttcctcagtgtgcgacagatgcgaaatgttccaaacacgtga

SEQ ID NO: 35109 - protein, 118 aa, DROSOPHILA
MIANLVSMETDLAMNIGLDTSGEAPTALPPMPNVTETLWDLAMVVSQSTQWPLLDTGSSENFSELVTTETPYVPYGRRPETYIVPILFALIFVVGVLGNGTLIVVFLSVRQMRNVPNT

SEQ ID NO: 35110 - DNA, 3942 bp, DROSOPHILA
gcgcaatcacgcatacgccatgttgtacacttggtaaacattttagcgaaacaagtgaaacttcgtgggataaataaaaaacaaatttcggttttcagaaaatattgaaatacaggtctgagcctctgttttatgtgtacattttcaatttggcaattatacttaattaatgataattgacagtccaagtcactcggagaaagagtgtcgattctgtcagttaggattttggctttataaagcacatatgcaaaatagcccacgaatttcaatatttgtcgttcccaaaaacgttaccacttctaatcaaacaaagctgctacgtggatttttaagtaaatatttttggtgttattatatttcactttgtgtattgttgagtttaacgccttgaacgccagttgttaattgtcagttagagcccacttagtacccttcggaaaacgcgccggggtatattagaagatgatgtatgtattttctcgcggcatccgaatgtttattcaatgataaactcgaagatatattaacgatagaaaatttgtttcggaaataaagccatagatatattaccaaaaattttccccgacctacctctacattcagcaatacagttgggtgaaaaaccatacttgaattgcggaaacgtgtctcgaaaatgatcccggactctgtctcctggctgtcaaccagcaatgtagcacctagggatgtgctaaatgggcatcatgtgatatactttggttctcggttcgctaatagaaccgccatatagacaaaacaaacaagattttcatactacgcaggttgtatgcgagttgagttgagctaccgtttagattacaaatatttatatatatatatatatatttatcaagtcggttggctaaaagcagtttggagtgcctaaaacccattcatggctatttttaaaggtgggatgataaaatagatcatagatctactatagatcttaatatatcaacacgcaacatgttcaatgaagcaaatttcctggcagtggggtgaaaatataaaggaaattaaatagttagtatctctagttgcgtatctgtgtattccccaagcaattaagtcttgcctggcgtctgcttatcgtgttggccctaaaagagaggcgcactgcggctaaattatcaccaatttgagggctgtctgacccaaaaatagcatcatgagatagagatttatttacttaccaattatctgttacttaggctgagccgtgccgcggatgacagccatgagacgagcactttgttagccaccatcactaccataaccaccgagatcattccgatgcccgattctgggcgcagctgcttcggttggtcctccgcgccggaggcagcgggcggcaactgctccagatcgaaccggaatggaacacttaagtgctatggcggaatgaataacctggctgcgctgaagtgagtattgttagatctttgtttgagtgaacatataactaagagatctatttaatacaagtacccatcgtatccgataggtggcgcatcagataattgaagcactctaacgctctactaatctctataatggtttttcattcccattatagccaatctggaaagttgagtagagtccagcccgcactggaaatgcttctgtgcggctggccaaaggatggtctaaatcatttcagggatcttcagaaattgcctcgccttcgatcactgaccatcgagtacagtggcttcaccgaattcaaattcgactttcccgaaatgttggagctacatactatcaacatttcgtggacgaatctctcgtacatctcatcgcgaaccttcaaacgtgtgcatccgctcaaggtcttagatctgcgatggaaccagctcattcaactggatggaccactgttgctgccccgcaatttcgagcaactctatctggcgggcaatccgtggaactgtacgcgcaacttcaagtggttgctgctgcagccggaaaagggacgcctggtggtggatcgcgacgaactaatatgcacagatcgaaagtataaggaacgccagatgctcatggtcatgcactacaaactggtgggtagctgcttatcaatcctgcatcactgtgattacctgattgattttatttgcaggagctgaagagacaatgccaatcgcatgaggatctaaggaactgcacttgcctaatgcatcacatcttacccaagactcacataccgctctatacggtcaactgttcccatttgcagttccatcgcttgcctgactttttgccggacaacaccaccactttagttataaacgataatatggtaagagcatatttaatatgagcatattaaagctcaatgaaaagtaacttacttgatttgtcatcagatcagtgacataaatccgctgcgggacaatccccactaccgccacgttgtggatatgcagctggagaacaatcagatatccaatgtggacaacttggaggacacttactggctgcagaacttccgcttgctcaatctgcgtggcaacaatctgcgcaagcttcatgtctacgccctggacaacgctctggatgacaacgagaatgccaatctgctattgctaagtcgaaatccctggcactgcacctgcaagtttggcagcagaatgcgtgagctgttgacgaagtacaaggacatcgtgcgtgatgcctggaatgtgagctgcacctaccgcctggatgacgaccagctgctggccaaggtgctgaccctcagtcgccaggagatgtgcaatttaagcgtggagggcggcactcagatccatcccatcgattggctaaacggggtgctggccagcctcatatttcttatcctgggcaagcttgcctacgattactactactacaagtattacggtcgagttccttggattgtgatgaaaatgccctagtctctagatctaatgttaaaggaagttcaactcgaaagtatttctcaaccaccgacgatggctttcggtttattcttgaaaatctacaaaaacaataccggtctttgtatcatatatgaatatttatatatatatatataaataatgttgtttaggtatttatgtatgtatatttaagctaggtcaacgcaaaactctcaaaatagttgttttccacactattgcactgttcaaattgttttgtatggttaaaaacattcgttctcacgttcctacatatttgacggtttattttaagcatttatcctgcatttaaattggcacaaagcgcttaatctttgataatgagaaacagctaagataggtttatgtttgcaactggacagaacggaatctgtgtgaattttaggttagttacacattattccatttaaatgaatctaattttgtataatgtatatttacaattaaaaaccttgatttaaattctttggctctcgaaatcagtgcaaaatgtcgcatcttttcggtcaaagcaaatgcaaaatgattaaaataattgtataggatacaagcttataaattaaacaacagtgctggacattgtaaacaaagcttaaaacatttttgtactttacatcaatcaagtgaaaattcaaacaaggcttaatatttcgctggctgtaagcggcatatctaaaattcttttggtttccttcgtgagtccattgaatggcggtaaaaaaggtcggcaatgtttcttataaatttgttgtataaaagtcgaagtaaaatttagatcgtttaaaattgagttcccttggtttgcattgtatatgatatggaatcattatctaaccactatacaaaagaaaagactcacgaaggaatcagccagagatcgcaaatgaaataacagtggatggcattaagttggctattcttcggggacccagactatctggtgtccccgattacattatctgtttttggctaagca

SEQ ID NO: 35111 - DNA, 1446 bp, DROSOPHILA
atgaagcaaatttcctggcagctgagccgtgccgcggatgacagccatgagacgagcactttgttagccaccatcactaccataaccaccgagatcattccgatgcccgattctgggcgcagctgcttcggttggtcctccgcgccggaggcagcgggcggcaactgctccagatcgaaccggaatggaacacttaagtgctatggcggaatgaataacctggctgcgctgaaccaatctggaaagttgagtagagtccagcccgcactggaaatgcttctgtgcggctggccaaaggatggtctaaatcatttcagggatcttcagaaattgcctcgccttcgatcactgaccatcgagtacagtggcttcaccgaattcaaattcgactttcccgaaatgttggagctacatactatcaacatttcgtggacgaatctctcgtacatctcatcgcgaaccttcaaacgtgtgcatccgctcaaggtcttagatctgcgatggaaccagctcattcaactggatggaccactgttgctgccccgcaatttcgagcaactctatctggcgggcaatccgtggaactgtacgcgcaacttcaagtggttgctgctgcagccggaaaagggacgcctggtggtggatcgcgacgaactaatatgcacagatcgaaagtataaggaacgccagatgctcatggtcatgcactacaaactggagctgaagagacaatgccaatcgcatgaggatctaaggaactgcacttgcctaatgcatcacatcttacccaagactcacataccgctctatacggtcaactgttcccatttgcagttccatcgcttgcctgactttttgccggacaacaccaccactttagttataaacgataatatgatcagtgacataaatccgctgcgggacaatccccactaccgccacgttgtggatatgcagctggagaacaatcagatatccaatgtggacaacttggaggacacttactggctgcagaacttccgcttgctcaatctgcgtggcaacaatctgcgcaagcttcatgtctacgccctggacaacgctctggatgacaacgagaatgccaatctgctattgctaagtcgaaatccctggcactgcacctgcaagtttggcagcagaatgcgtgagctgttgacgaagtacaaggacatcgtgcgtgatgcctggaatgtgagctgcacctaccgcctggatgacgaccagctgctggccaaggtgctgaccctcagtcgccaggagatgtgcaatttaagcgtggagggcggcactcagatccatcccatcgattggctaaacggggtgctggccagcctcatatttcttatcctgggcaagcttgcctacgattactactactacaagtattacggtcgagttccttggattgtgatgaaaatgccctag

SEQ ID NO: 35112 - protein, 481 aa, DROSOPHILA
MKQISWQLSRAADDSHETSTLLATITTITTEIIPMPDSGRSCFGWSSAPEAAGGNCSRSNRNGTLKCYGGMNNLAALNQSGKLSRVQPALEMLLCGWPKDGLNHFRDLQKLPRLRSLTIEYSGFTEFKFDFPEMLELHTINISWTNLSYISSRTFKRVHPLKVLDLRWNQLIQLDGPLLLPRNFEQLYLAGNPWNCTRNFKWLLLQPEKGRLVVDRDELICTDRKYKERQMLMVMHYKLELKRQCQSHEDLRNCTCLMHHILPKTHIPLYTVNCSHLQFHRLPDFLPDNTTTLVINDNMISDINPLRDNPHYRHVVDMQLENNQISNVDNLEDTYWLQNFRLLNLRGNNLRKLHVYALDNALDDNENANLLLLSRNPWHCTCKFGSRMRELLTKYKDIVRDAWNVSCTYRLDDDQLLAKVLTLSRQEMCNLSVEGGTQIHPIDWLNGVLASLIFLILGKLAYDYYYYKYYGRVPWIVMKMP

SEQ ID NO: 35113 - DNA, 6627 bp, DROSOPHILA
atgtttggagcgggcacagggatacccgagttgcccacaatcctggagcacgaggccatggtgtttgaggccacttccacaccgctgcagtattcgtcgaacaacagcacagagaccaccaactcgcccagcgactcgaatgccccgaatactctgacccagaatgcctcatccgacgagtcgacgaccaccaccacgttgacgggtccggcaacgggaaattcggccacaagccaggagaaccaggccgccagcgagaatatcgccgcactgagtgtggaccaactctgggagcagctagatcgagcacgcgatgagaaatccctgctaaaatccaccattcgggagtacgagtcgctgttcgaggagcagaatggacgcaagatgctcaagcaggatcgtcgctcactggagacggaaacctatgcccagtacaaggagaagaaggccaaggtcagactactgcaggccctgatcaagaagcatattgggcattaagctacggctacagatatccttcttccattcatccacgcatgcaaaactatttatttcatacccaaccaaacaaatacagacctagatctatacaaattacatgtattgtagtttttagacttatatttaccatatattctataatgatacattttatgaatattgttgattccttattgttttttgaaaacacatctattgagtaattgtaataaaagaaaattaaatttgatgagacaaaacgaaaaaggagtgattgagaaagcaaacgctagacatttgattcagacccattctcctctccacattattcgcacggaattgatatctatgtgtaacccaagaatctgcaatgtatatgttcgcactcttcccatttgtgttcttgtaaatcgtcattgatgttaaaaaatgacttggcctgatttgtcccacttctgaaacggggagcacacattattcgattagctatagtttcgaacgatctatgcgtggaggaacacgttgcaaccgcaaatcaaatagataaactttataaatgttgtctagtagaattgaacattttatatcgatatgcaaaccactaactagcaacctattaaccgaaatacccgaattatagttgtgctttcttccattaaatgtttcagtgtgcaaatggcacgcaaccacgcacgaaaaatcgaaaacatctgaatatttgatagcgttggaagcggaagttaagtttagacgatcataaagttaggttcgtacactggccgaaaaagtcgggcaaatgatttttgtgcaacaagcaattgggtttttttgaacgtgtatactcggccctaaccaacgcatacaatatatgattatacatacatatatatatttacaatgataaagaatgtaaggcgcaagccaagcaaacacatatgtaacgtgtatttgaaccacgtacttatatatttacatgtttacatatacgaacatccaaagcaaaggtatatacacgtataggactcaacatttacaaattcaatattcttatatgtggaaagcagagcgttacgattatctcccagctaactgaagcgattgaatgtctatacataatttgtaatgcaaaataaaataaaatatatcacgttatattaaacagtatcttttgagtttttatttgtttaaatgactacagcaatttggggtttggagtgaaatggcgttggtcgatctttgcaattcgcacgatacctgcaagaacagataagatggaaattagtttcagtattaaatggttaatcacattgatggaaataaatatgacttgatcagtcgcgtgagttgtcgacagagaaattcagctatatgcttgtctaggttttcatcaagaaaaaatgataagctggcaaaaatttaaagcaaatacttaccacaaaagttcagctgaatcacaaagccagatgtcaggtattacctaaaaggaaaaataacaatgtggatttaaaacaaatgtcgatttatcaactataacgaaatgcgttatgttgtcagctgaatatatcatcaattattcttatgacagggataactgtttggcttaaataaggtgttcatcacatcataattgcttctttctattattcaattacataccttattaatattctgcgttcatttgggatcttccatgcaaaacgaccgctctttagttcaagcctaaaaagaaaaagttttgattaaaattggttcgtgcaattgattccacaaaactaaaaatatttgtctagttcagtcaaaaatgttagcaacacacgtgaattcaggtatatgcttgtctattggtttgtcatcagaaaaaggtaggtaaattttaggaattaatttttcaatacacaccttaataatcttgcagggtagatagactttttccctggtaatcttcaaacatctgtaagaaaaataaaacgctgttttaataaacgcttctattaagtgacttaaatgaaaagcattgattagtcagtatgtttaaccaatcgacataatttctccgactggggcggtatccttaatcatcataatatctacatatgtaactttaacgtatttttagtgatggacctaccttggaaatacatattataatccaaaccaacttgggtactgcatattatgaagacctgtaagttaaaaaacaaaacacctttaataaaaagaagggtctcaatattctcctcaattaaaaggataattatatatcagtatattattccaatcgacatcatttctccgactggggcggtatacgaaatcatcacaaaaataaaagtaagtagcatcaaagattgagtgataatagatcaacataccttgtactaaaaagccattgcaaatcggctgtcagtcaacacggggaatacctgcaagataaaggaaaaacgactttagcaaacagttcaaattgataatcacaaatatttaagcaattggctaatcagtaaataattccaatcgacatcatttctccgactggggcggtatacgaaatcatcataaaaattaaatggtgcgtaaaaaatagtatttgaaagttgacttacctttagatttttagccatcctcaatcgggttttattttgtaatatgttgatattagcgaatctgaaatattaaaaacaatattattagtaagatggtagacatacagtcaatgatttaaaaagatattgtgtcagattattgtatcatcaattattcttatgacagggataactgtttggctttaaaaggatgctcatcacaaaggtaatttttataggcagcaaagggtaggaggaaaactaaccttcattaatcaccaaaattccttcgcagcttgatttatatagtgtgcaaatacctgtaacaataaaaacattaattattatcagtagaaaataggaaagtactaaggagaagagtttcatatatgaatcagcaacttttatcatcaattattcttatgacagggataactgtttggcttaaataaagtgttcatcattgcccatatgaaagtcttttgctagttatatgcttaccatttttaaattttattcgttcaatatctaagctttcctgcgttccctgtaaaataaagcaacacgttttaatttaaattcaccaaattgttttaaaagtagagagtgttcattttggctcagtcgtgtgaaaatcaacatgattgttcggttatatgcttgtctattggtttgacatcacagaacaattatattattattataatagagaaatttacttaccgtttaactacaaagcgcaaaacccagtgaaaacaacgagtaaacttgaaaaaatatttctggaaagacaaaagaaagatgtttaagaacatattcgtaaaggtcaaatataatattcttgtatgatttaaatcagcattttagttttgcgttggatatggaacagttctcttcattgtatatcaaagcgagctgggtaaatgtttcatcatacttttttaaaatgttcttaaatcttatttaaaattacctcatatttccaaacttgaccgcatttctgtgttccattgttctataaatataagataaatcgaataataataagttagtactgaatgtgtacatttgtgatgatttaacacttgttaatatataattgactcagtttctaaggtgtaagtattcatcaaagctcttcaagagtagcaaataataattaatcatcattttcacgtttggttagtttgcttataagaattgattacacacctgagaaaagatttatccgtggattgtatattttgtttgattatgattatgatttgtgtcaaccattttctgtaaatatattaagagaaaaaaatctttgtaataggggtttaggaaaaatcacatttataagcgtatgataaaagtcagcaagataattttttgcgttggatatggaacagttttcttcatagaaatcaaagcgagctgggtaaatgtttcatcatacaaatatataaatgctagtttataaactatacttttaattacctcattttctcatttttccttaagcagacggccaggatcactgacttaaattctggaaataaatttaaatattttaagtgttaaaatttgtgttaaaaaatttcttagatctaatctattataattgaagtcagcaagttatttttgcgttggatatggaacagttctcttcatagaaatcaaagcgagctgggtaaatgtttcatcatactaaatatgtattacaaataatataataatgttattacctaaacattttgatttttccggaattaaggaaaataggagtccgacattacagatccctaggaatttataagaacttatttcgaatcatataatcttccgtctatctgcaaacacacaattaaaatattttaatacaataaataaacaattcttgatgagatttttatttttagaattttacatcaggttttaaggtgaaagtattcatcaatgaccttcaagagtagcaaataataataaatcatcatttacaagttctttaccatttaaatgtatgaaaaacccacctttgccgtaagcgaaatctcttttattcgaatagaccatctgcaaaaagaaacacaaccatgttaatacatatattaacaaatagcgcatggcttgctgcaagagtcaagtcagcagtttatttttgcgttggatatggaacagttctcttcattgaatatcaaagcgagctgggtaaatgtttcatcattgagttatgaaagatttcaagcaacaatagtttacaatatggttacagtacagtactatcgaaaaatccacttcttaaattaaatctttgggattcgaaataagaaacacgtgaagttcatgcaaccaaagaatatttttgtttcgcatgtttcacggatactgtaccggtaccggtagatcttaaaaggagcatccggctattctattgcaaactattgttaagtgaagttcaaataattttaagtcaaaactaaccttactttgagacacgtgtggataaatttgacagaaagccataaaaactgttttttccatagttattttcagttccatttcctgctaccgcacaacatcctgtaaattaaagaacaatatgagtatattgcaattttatcacttcgatctgtcggcaacttgcgggttttttctatcagtataaataaccaatcaacacgtctcttcagactggggcggtacgaataaaatcatcatgtaagcctgcctattttatacactttattacaacgttggcttacccatttgttaaattttagttgagaattcaagcagaaaacgcgaccgtccattttgaacgaaaaaaagaagtggaagaatgcacgtggcgatgtgaccgcactacgattctgtaacgataattcatttatcgagcatgtaatcgatagttatagagggtagttccaagaatcgtgtgccacggaaagtgtaaatagcttgttttttagtaatcattatttatagcatcggcattttaaataaaggtaaatgcgcttatagcaataagcttattgaatttttaaaatagaatcccctgttaatttgcttcttataaaatattatgttcatttatttttgttccttatattaaattaaaataaatataatccttagtaaaattggttcttattaaaatattgaatgctctaacaatcttgataagtttttgtatgcaagttgtttctctatcaagctctcgattcaaacccctcgatctcgattatgctatcgtgtttctatagactatataattaattctatcgatattagtgttacctataatctaatacttatacacctttcacacttcattttattatacacagtttacgatgcattattttgttgatgttcactttacttacgatatcaaaactgttgtcattattatatgaattcatttaattaaattattaaaatattgttacggtcttatcgatatatttgtcaatggttcttgacactgctgatatttcaacgaagtgctccacctctccgtgcactctattccaagtcccgaaatgtatttaaacagctgctgcctggccacactgcgtat

SEQ ID NO: 35114 - DNA, 1199 bp, DROSOPHILA
gatgttgtgcggtagcaggaaatggaactgaaaataactatggaaaaaacagtttttatggctttctgtcaaatttatccacacgtgtctcaaagtaagatggtctattcgaataaaagagatttcgcttacggcaaagcggaagattatatgattcgaaataagttcttataaattcctagggatctgtaatgtcggactcctattttccttaattccggaaaaatcaaaatgtttagaatttaagtcagtgatcctggccgtctgcttaaggaaaaatgagaaaatgagcacaaatcataatcataatcaaacaaaatatacaatccacggataaatcttttctcagaacaatggaacacagaaatgcggtcaagtttggaaatatgagatgtttgaagattaccagggaaaaagtctatctaccctgcaagattattaaggtaatacctgacatctggctttgtatcgtgcgaattgcaaagatcgaccaacgccatttcactccaaaccccaaattgctgtagtcatttaaacaaataaaaactcaaaagatactgtttaatataacgtgatatattttattttattttgcattacaaattatgtatagacattcaatcgcttcagttagctgggagataatcgtaacgctctgctttccacatataagaatattgaatttgtaaatgttgagtcctatacgtgtatatacctttgctttggatgttcgtatatgtaaacatgtaaatatataagtacgtggttcaaatacacgttacatatgtgtttgcttggcttgcgccttacattctttatcattgtaaatatatatatgtatgtataatcatatattgtatgcgttggttagggccgagtatacacgttcaaaaaaacccaattgcttgttgcacaaaaatcatttgcccgactttttcggccagtgtacgaacctaactttatgatcgtctaaacttaacttccgcttccaacgctatcaaatattcagatgttttcgatttttcgtgcgtggttgcgtgccatttgcacactgaaacatttaatggaagaaagcacaactataattcgggtatttcggttaataggttgctagttagtggtttgcatatcgatataaaatgttcaattctactagacaacatttataaagtttatctatttgatttgcggttgcaacg

SEQ ID NO: 35115 - protein, 57 aa, DROSOPHILA
MEHRNAVKFGNMRCLKITREKVYLPCKIIKVIPDIWLCIVRIAKIDQRHFTPNPKLL

SEQ ID NO: 35116 - DNA, 3200 bp, DROSOPHILA
cggtcgcactgtgtctttaccgtggacatactaaagtacaatcggtcgggcatcaccacacagagttcgtacaaattctgcgacctggcgggttcggaacgcgtcaacaacacgggtacctccggccttcgtctcaaggaagcaaagaacataaatacgtcgctgatggtgctgggtcgatgtttagatgcggccagtacagttcagaaaaagaaaaacgccgacatcattccatatcgcgactccaagctaacaatgctgttgcaggctgctttgctgggcaaggagaaattggccatgatcgtgacagttacccctctggataaatactacgaggagaacctgaacgtcttgaactttgcttccatcgccaagaacatcatcttcaaggagcccgtaattaaacagcatcgcgtcagctactgtggtttcatggaattctcaaagatgtcgacgtgcgagggcggcgactacaccaaggaacttgaggacgaaaacgtgcgcctgcagttagagattgagcaactgaagtacgatcatgtgctgcaaatgcagctgcttgaggagaaactgcgaagggaactgactgccacctaccaggagattatccaaaacaacaagaagcaatatgaagacgaatgcgagaaaaaattactaattgcgcaaagagaatcagaatttatggttagtaaatataacaatataatataatagtatataatataaactatatatttaacagctttcctctcaacgccgaaggtatgaagaacaaatagaagacctcaaagatgagatagaggaacttaagaatcctgcaagcgacacggacatttctgatgatccaaacgaatctaagtctcccatcgaaatcctcgatgatgattagtttctttaattcacaatttttaatttgttaagtgttagtgattttaaaatttaaatttgaaacttgatatgttgcagagttggccacgttttccaataaacatgtgaatgatcaataaactagtgacacaaataatgatgtgattctgtgccaagaaacttcgagcaagaataccagaatcgcaattaccataaatgttccgtacgcctgccacatccactgaaaatccacaatccttagcgaggtagggtgctctctttccttcaactgcaggctgggatcctccagaccggacaatccagctgctgtcatgtcgtagtagtgcattcccacccagaagtcatagagtccattggcatttacctccaaaataagttggctgacgggctctgtgaacaaggaattctgcggccattggaaagagagcagcgccagggaccacaggcagtcatccgtggagtagataaacagctctcgggtgaagcgcttctgctgctcactgaacaaattccaatacagtcgggaggcgaagtaggcattgcttgtgttccttccattcctcaagtgattgtactcactcacattgaccaccagcatgggcacacgcagtttcatccatgtgggaaagtcttcctcggtcgtaaccaatggtattttcgtgcgacgcagaccagcgaaacttcgtgcttgaaattgccgtggtggatgagccattaatgtgtccagtcccgctccaaaaatgctgctcacattaagacccactattccaagcatcagaaatatcaacctggtggagaagcttctcgacaagggcaaattgaaggattggcccaagattccgcgtaaagctttatcatttagcacaaagtccaccagacgcacatcgcgatgggtcatgtttcgaaggagattcaaagccaatccataactggaaacaataacaatagccaggaacatattggaagcactgctcaggataaagtaaatatccttaattggaattcttctggccaccggtaccataaggcagacgtgggtcacctccatcggatagcttgtgctggccaactgctcgactcgctccattatcgtcagactggcaggaacatcaactgaaaagctctcgctcagctccttgagggcagtggcatttagaaagcgcccggtggtcaccttcttggacagctgcagcgtggcgttcagcttccacgacagcacgtgaaagaagcgtcccacagatccggctaggatttgcttacccgttcgtctgtccacgtagagaacggaacgcggaagccattggtcgggcataacagtaagagggtgaccgtgcatgttgggaaaatccttgtcgaatatggttgaagattcaagagagcgatactccgttcggaagctaggatataggtgatatctataaaagtaacgatgttcatctgaagctaaaagtccaacaatgttccaaattcggcgatgatagcacgtttcgaaaatatagtccattctagttggatcagagaaattgtttgatatatagacaatcttcttctgactcggaaaatccattagcgaactcgtaaagttttcgagtaacgccaggtccttttgcagctcatgtccaggcaggcaagctacgtgtagcggccgagaaaacatccgaatgtttataaaagtctcgctatctgaaaggacaaccactggaatggtttgattctcaaagatatcctttgcccagttgtacggacaataatcaatacgaatcattattactgagagcgagtgctccgctgctgctctaaagatgaagtccacagcggatcccgcaaccaggacgggtgcccataaaactattcctgttatcactgtccacatgtcctttcaattatgttgcccatcagacttagctgctttatttatattgtgcgggaactgctccaagttgaagggaaatgccttgtcaagcttttcacgccctcgatgataagacacaattcgcattgtttgtaatatgcatatctcaaaatatgtattctttgttattttgttacagttgctaaatagttaatggtgtgtgatcgtgggaggcgcgcaaatcaaatcgatacgctgccccttacatttaagttgttttacaattatttgtctgtttcctgctgcaaataaatattacaaataaataggtatcttaattatacgtgttttgtgtgtacatatatatatatatatgtctgttttctctaggtacttaagtcatggtgaatggtaaaccaattgccaattatcaattagaaagattataggatagattgca

SEQ ID NO: 35117 - DNA, 1200 bp, DROSOPHILA
atgcccgaccaatggcttccgcgttccgttctctacgtggacagacgaacgggtaagcaaatcctagccggatctgtgggacgcttctttcacgtgctgtcgtggaagctgaacgccacgctgcagctgtccaagaaggtgaccaccgggcgctttctaaatgccactgccctcaaggagctgagcgagagcttttcagttgatgttcctgccagtctgacgataatggagcgagtcgagcagttggccagcacaagctatccgatggaggtgacccacgtctgccttatggtaccggtggccagaagaattccaattaaggatatttactttatcctgagcagtgcttccaatatgttcctggctattgttattgtttccagttatggattggctttgaatctccttcgaaacatgacccatcgcgatgtgcgtctggtggactttgtgctaaatgataaagctttacgcggaatcttgggccaatccttcaatttgcccttgtcgagaagcttctccaccaggttgatatttctgatgcttggaatagtgggtcttaatgtgagcagcatttttggagcgggactggacacattaatggctcatccaccacggcaatttcaagcacgaagtttcgctggtctgcgtcgcacgaaaataccattggttacgaccgaggaagactttcccacatggatgaaactgcgtgtgcccatgctggtggtcaatgtgagtgagtacaatcacttgaggaatggaaggaacacaagcaatgcctacttcgcctcccgactgtattggaatttgttcagtgagcagcagaagcgcttcacccgagagctgtttatctactccacggatgactgcctgtggtccctggcgctgctctctttccaatggccgcagaattccttgttcacagagcccgtcagccaacttattttggaggtaaatgccaatggactctatgacttctgggtgggaatgcactactacgacatgacagcagctggattgtccggtctggaggatcccagcctgcagttgaaggaaagagagcaccctacctcgctaaggattgtggattttcagtggatgtggcaggcgtacggaacatttatggtaattgcgattctggtattcttgctcgaagtttcttggcacagaatcacatcattatttgtgtcactagtttattga

SEQ ID NO: 35118 - protein, 399 aa, DROSOPHILA
MPDQWLPRSVLYVDRRTGKQILAGSVGRFFHVLSWKLNATLQLSKKVTTGRFLNATALKELSESFSVDVPASLTIMERVEQLASTSYPMEVTHVCLMVPVARRIPIKDIYFILSSASNMFLAIVIVSSYGLALNLLRNMTHRDVRLVDFVLNDKALRGILGQSFNLPLSRSFSTRLIFLMLGIVGLNVSSIFGAGLDTLMAHPPRQFQARSFAGLRRTKIPLVTTEEDFPTWMKLRVPMLVVNVSEYNHLRNGRNTSNAYFASRLYWNLFSEQQKRFTRELFIYSTDDCLWSLALLSFQWPQNSLFTEPVSQLILEVNANGLYDFWVGMHYYDMTAAGLSGLEDPSLQLKEREHPTSLRIVDFQWMWQAYGTFMVIAILVFLLEVSWHRITSLFVSLVY

SEQ ID NO: 35119 - DNA, 2594 bp, DROSOPHILA
acagcatacccgagacgccagctcctccaccgccgccaaaaacggcgccaccagaattgcccgttctgaagccaaccgaggaggatcctccaacgcccgacttgcgacgaaccttgtccgacaatgagcatcgaaagagccgtcgggtcacacgacctctgtcccagctggaaacctttaaggatatgctgctggttaatgcccagctgtacatcaaagagaatgtcccacatccgcccaagcttctcattggcaggctcaaggacgaggatcccgaggagcacactgttctgattccccaatcacccaaaccatcacctctaacgcccaaggatgtggtggacttttatttcccgcgacccacgaaaatagtgaatggtatccaacaggatgatttcgctggcaggacggtgtccttcttcggatggattgccttcatcaccatgagaatgctttcgttgtccactttctgtgtcttctatccgaaggcattctttatcctggtgggcgtacactatgcgctgatgctgggttgcctggcattggaaacccgttgtcgtggtagttggagtcgcagcctgttcctccttcttcttgcctacatctatatatttgtgttaatggaattccgcgtgtccttcaagaacattcgattgtggtatggtggatacctggtgctcacgctcgtcgagaacattaccatatcgtccatttggtatgcaaacgaggagtttgagtcctggtggttcggtttcatctgggagtggatcgtttacagtggaatactatttctggctactttaatcgtttactactgtatactccgacccaaggaagtatccctcatcgtggaggacgatttcccgcaaggggatcaacaggaaagtcctgaggaccaggccgttgcctagcagtttccggctagtttgttatatcgaagtaggtagagtgtaagccgtcagtctgtcactggcaaacgaataaattatttaccttagtattagatcgaaaaaatatataaattttgttctgcaatggttgatcgtggaaataatttggtactcccagtgggcccatgttcaacggaactaacggaatctcaagcgagttttgctccacccaaaattaagaaagtgctccgtaagttaagactgcagtattctagaacttttctaatccgaatggtcatgcagccactagagcaaatcgcatggaacagtttctatggcaggaactctttgccgaatacaaccgacaggcctccgcccaagtggatttgggtgaggatcgcacggagtactacgaccagttctgcaaggatgtgccaccgaaaaacgaagagaccgaggaagttctggtcaacaagtatccactttactgcactactgccgtaacagtatggaatcacgagggagatttcaccaagactttcaaaagaaaatattctattaccagacctatagatctgtgtcctgataagtttgcactttagatgtggaaattgtatgagagtagtgcccacagaatattatttaattttgatctttcattgtaaatgttacataaaaattaaacttgcagtttgagaaattctatgcaattagtttaaattaacattttatttaaattcaatctaaacgtaatgttttataacggttgagtttacagtagagcatgcatacggtcactcttgcagcgggcatcgatggttcttcgtttacgcatcgatgtttgttgatccagaaacatatcgatagttgtctcggccgctgacgtgtataaaatatcgagggacaggcggtgatttttgagcgatttaattttattttcctatagaatataagcggcgtgtgaaagcgcaaccacaatataggaaaatgttaaagctaggtgcgtagcctgctcggtgtttgagccggagaactttaatttgacgctaaattcagtggaaacgccggctgcaaagtcgtagctctcgtgctgtctctctctgattttcgtggttaagcgattgccggcgacttggaacctaatggtttttttttttattcaacgccaggtctggtcatcttctgcgtgttggtcgctagtgggccgacgtggagcgcccgcaccgtggacagtcacctggggcaaaaggatctcagccgcctgcaaaaagttttcgtggacggatttggttccagtgacctgcagtcgatcttcttctccagcctaaacattcaactgactgatgccactcagaaggagccgttgtgcaagaagattgctacgctgcattccgaatccaagctgaacgtgagtttatctaaatatgcccatttatcaatagtcatacttatttatgctcctttaactccttgcagagcttcgaaaaagactactactacattggtgctagcagaaacctgggttgctccgctaagattgacgagggtctgctttccaaggtgtatagttccctgaactcggagctcggcagctctcaggagatcttctaccgcgtggtcacccacaaagtgctcggcgtggagatcaatgaagccactcaggaaaaactagtgaagcgtttgcaagaactgctcaagaaggac

SEQ ID NO: 35120 - DNA, 541 bp, DROSOPHILA
ttagatcgaaaaaatatataaattttgttctgcaatggttgatcgtggaaataatttggtactcccagtgggcccatgttcaacggaactaacggaatctcaagcgagttttgctccacccaaaattaagaaagtgctccccactagagcaaatcgcatggaacagtttctatggcaggaactctttgccgaatacaaccgacaggcctccgcccaagtggatttgggtgaggatcgcacggagtactacgaccagttctgcaaggatgtgccaccgaaaaacgaagagaccgaggaagttctggtcaacaagtatccactttactgcactactgccgtaacagtatggaatcacgagggagatttcaccaagactttcaaaagaaaatattctattaccagacctatagatctgtgtcctgataagtttgcactttagatgtggaaattgtatgagagtagtgcccacagaatattatttaattttgatctttcattgtaaatgttacataaaaattaaacttgcagtttgagaaattct

SEQ ID NO: 35121 - protein, 93 aa, DROSOPHILA
MEQFLWQELFAEYNRQASAQVDLGEDRTEYYDQFCKDVPPKNEETEEVLVNKYPLYCTTAVTVWNHEGDFTKTFKRKYSITRPIDLCPDKFAL

SEQ ID NO: 35122 - DNA, 3732 bp, DROSOPHILA
cattatcggttatcaggcggctataccatatttgtttggcatccgaataagcgggtcagcgagaggggttagggcccaataataataataataataatacacatgtggagcaaacaatatttttgcatgccctgctcccgtggttagcacgtcttgaatttgaatcttgacttgtgaatgtaaacaattgcgggcaattgaaatcaataagcgatccgagtgccgcagactttgtaatcccttatgggtctttcaattcccagctgtacccgatttatgtacatttaagtacatatttattgtttcccccgcttggggcaagcgactcaagatgccaagtcatttggctattaataaaacttcgctcagaaaccgactttagataagaagaaaaacaaaaaaatcacaaacaatgccaacaccatgaatgtgtgtctgtgaacttcgggtgtactaagatgtatgtaaatatgtacttatatcgcaaatagatttgttcaactacaatatatgtatgtacatacatatgtacataaacaatcatcgaaaatgaattgtgacgcacatttcgcattttgaagtcgagagtttggagaaacggcgatttcttggaagcgaactcaaataatacttgaaatactcttgaaatcttgtttaccttaaatgtttttattggtgctaattatataacgcgggaaagctctgcttaattaaatactctgtgtaacttttgaccagttacaaagtccccttaactgaacggcaattattgcgtattgtgtttgaaatggaaacttctggtttattttcttggaaacgtgaacattctcaatcgattcgtacgtatcttttgaaactggaatgcttaagctattgttttgttttgtaaataaacatctgctgcagaccgcaatctgctcatgttttatgtaaattgtaggcctttaaacctgccgccttagaataaaaccataatcataaatataagaaacagaaacgccaaatgcttaaaatgtctcataaaatatcatctttaatacatgcttaaaacaagttcacaatagttgataataatacaatagtacagttaaacagctaagtacgcggcacttgtaatgactaatggacaagacaagatgatcacatgggtcacaggtcaaaggtcacccataaccccgcttggcaacaattaacgtaagcgaaagtcctctatttggctgactatcttatgttgtatggctaagaattcaaagggctctattgtatgctgggcttaatggagcccatggagtttttcctatgatgattgacctcgaatcgcttcataatgctggccacaattgaggagggcggcatgtccggatttccggttagacccctatagcccagaacactcgaatcggccagggatcgcgccagagtcagtctttgcacaaaggcatccgtatcgatgccaggcacttgcgagggcttcagaaacctccgcggtatccgcgacagcatatcctcggagctgagcggtccaaagcccaggttgatgagtatggcctcgggatctggcttgcgtgcctccagcaagctgtccacgctggaatatcgactcgagtccgactgcacggatacggagctgtcacgcaggagcagactactgaagcgctgttgcctctgcgcctgcggactcagttcgggcgccgtgctggatgactcaaaggactcctcgtggcgcaggcaacgcgtactggtggcagatatatggcgcatgggcatggtgacgacgggcgacatatgctcatgtgcatccggatcggcattctcctccagatcggcggcatattccatgtcatccgtatcgacggcactctgctgtcgctgcaattttctgcgcctgcgcagcggcttgctgggcggaaagtggacgctgggcaggtgctcactgctgccggccaattgctccactgcgccaacgatgaccttggctcccgtcctgccctcgaaattgctacagctgtgcgaacgttccatggcgtacggtatatatggatagtgggttatatatgtatgtatgtatatctactgtgcggatatctagtatctgcaatgagttttctgtggtcacggctgctcgggttacaagctagctgctgctcgactcgccgcgatctcgattcaagctcggcttttggacatatttggtaatggccagaatcagggcctttaatttcaaatgcgtgtgcgcaagtatcgtattcgaaataacaaaagcgatgacaatttgtgttatttgttgttatttagctaaattgtttttttgctttttgtttttttttcgctccgatcgcctttttgtggaaacgtgtttttctatattccgcgagtttctgttaatttgttgttgctgttcgcatttgccgtatttgtgtgtttgtctgtttgtttttttgtttattttcatttatttcgctcgcagcgcgtagatgcggagtgtgttaatcagccgtagagcttctgaccccggatttggaacgatcgagtgttttcacgatcgcatgacattgatattgggctactttgttttgtggtgaaccaaccacctttgttggatctggttcaatatttgttcacatttaagtacacacaagtgttaaaaaagttcggaagtgaagatcgatttgttatttttgccaactatatcttccagctttcacttgccgctgtgctaagcgtccgcttcgcaacgagtgatcttcaaaactgaaactgaaatcacaagccccaaacgaaacgccccaagcacgaaccgatcgaagctttttacgccggagcaaaagagagggcgatgcatatgaatgtagagtgagattggcggaggatggagtggggagggtggagagagaaaatccaggagagtgaaagagcagcgtagctatcggcctgagctggaattactttgcgacccgatgacaatttcctcaagcgcaacgccaatctattaggaaactttgatactccactccccataaattctccccatttccccacgcaatcactttgtcgtcgtcgtcgtcgttcgtgggggaaaaaccatcgtgcgggcttttttcgtatctccacgataaaaagtaatactttagtattattggcacgttctggggctctgggagtcgtcgtttcattccgtttattgtgatgccctctcgcagcattgcccttatttgcttaatgagttactttttacggctcaaaccgattgtccattgtcaagcaatttgggcatcgtaaagatctatttggccaactgctgcaggatgatttcgggctaattgtaaaagtggatcagactttacgatcgtgcaagcgaatgaacggcttttgatcttcggccttgtttgtttgagttggtgccactctcgcccagttgcacagttgcagatgcggaagagtcacgcgaacggaaaacacaaacaggggaaattgtttaaaccagttaatgagcggcgcgggaaaagcttgcgaacctaaagcttttggcctcaaaacagctgagactgccggttaaccgattcaaacagaaacgatctttcgccaggaatgtgcatttcttctgtgcactgcgagaatctggggaaaagtttggcaaaaaattttgtttttaacattttcttgcttttcctaatttatgagaaatattaaaacactttgtacgatgaggccagtgacacttgatgaatattt

SEQ ID NO: 35123 - DNA, 1732 bp, DROSOPHILA
cgaagcggacgcttagcacagcggcaagtgaaagctggaagatatagttggcaaaaataacaaatcgatcttcacttccgaacttttttaacacttgtgtgtacttaaatgtgaacaaatattgaaccagatccaacaaaggtggttggttcaccacaaaacaaagtagcccaatatcaatgtcatgcgatcgtgaaaacactcgatcgttccaaatccggggtcagaagctctacggctgattaacacactccgcatctacgcgctgcgagcgaaataaatgaaaataaacaaaaaaacaaacagacaaacacacaaatacggcaaatgcgaacagcaacaacaaattaacagaaactcgcggaatatagaaaaacacgtttccacaaaaaggcgatcggagcgaaaaaaaaacaaaaagcaaaaaaacaatttagctaaataacaacaaataacacaaattgtcatcgcttttgttatttcgaatacgatacttgcgcacacgcatttgaaattaaaggccctgattctggccattaccaaatatgtccaaaagccgagcttgaatcgagatcgcggcgagtcgagcagcagctagcttgtaacccgagcagccgtgaccacagaaaactcattgcagatactagatatccgcacagtagatatacatacatacatatataacccactatccatatataccgtacgccatggaacgttcgcacagctgtagcaatttcgagggcaggacgggagccaaggtcatcgttggcgcagtggagcaattggccggcagcagtgagcacctgcccagcgtccactttccgcccagcaagccgctgcgcaggcgcagaaaattgcagcgacagcagagtgccgtcgatacggatgacatggaatatgccgccgatctggaggagaatgccgatccggatgcacatgagcatatgtcgcccgtcgtcaccatgcccatgcgccatatatctgccaccagtacgcgttgcctgcgccacgaggagtcctttgagtcatccagcacggcgcccgaactgagtccgcaggcgcagaggcaacagcgcttcagtagtctgctcctgcgtgacagctccgtatccgtgcagtcggactcgagtcgatattccagcgtggacagcttgctggaggcacgcaagccagatcccgaggccatactcatcaacctgggctttggaccgctcagctccgaggatatgctgtcgcggataccgcggaggtttctgaagccctcgcaagtgcctggcatcgatacggatgcctttgtgcaaagactgactctggcgcgatccctggccgattcgagtgttctgggctataggggtctaaccggaaatccggacatgccgccctcctcaattgtggccagcattatgaagcgattcgaggtcaatcatcataggaaaaactccatgggctccattaagcccagcatacaatagagccctttgaattcttagccatacaacataagatagtcagccaaatagaggactttcgcttacgttaattgttgccaagcggggttatgggtgacctttgacctgtgacccatgtgatcatcttgtcttgtccattagtcattacaagtgccgcgtacttagctgtttaactgtactattgtattattatcaactattgtgaacttgttttaagcatgtattaaagatgatattttatgagacattttaagcatttg

SEQ ID NO: 35124 - protein, 254 aa, DROSOPHILA
MERSHSCSNFEGRTGAKVIVGAVEQLAGSSEHLPSVHFPPSKPLRRRRKLQRQQSAVDTDDMEYAADLEENADPDAHEHMSPVVTMPMRHISATSTRCLRHEESFESSSTAPELSPQAQRQQRFSSLLLRDSSVSVQSDSSRYSSVDSLLEARKPDPEAILINLGFGPLSSEDMLSRIPRRFLKPSQVPGIDTDAFVQRLTLARSLADSSVLGYRGLTGNPDMPPSSIVASIMKRFEVNHHRKNSMGSIKPSIQ

SEQ ID NO: 35125 - DNA, 2715 bp, DROSOPHILA
agagaattcccagctgcaatgcttgtactttgtaacgggctgtctacatgcacgtctccgctttctgcagagaaacagcgaacaattggacgaattctatggaagagcgcatagttggatgcaggaaaaacctccgatgagtagcgctttgtatcccatgttgcatgcccagcagctgtatcatctgaactatcttcgctttgcgcgaaagcatgtagaggctatatcaacggctcaattgggccttaaaatgcgatcacgcgcggtcgacattaacttcgagtacaattttttggctcagctaaagacggctcagttagaactcaaacccgtgggtcaggataagccacaggtcaaaatccttcgacgtgctttggtattcaatcactcacccgaagataagaaacgaaccgcaataggatcggtttcagcagtcaagaatacggcgtctaaagttaaacagtcggccaaaaaggcacctcgattcagaatttacgaggagctggaactacgaccaccaagtgctaccagttgcagtagcagcggtggcagcggaacagagaatacaccgccttcggatcacgtggatctaaatgcctgccaagcgatcgagataagcgacgatgacgattcacctttggtgtccacaaagaagacacaaccaaaaagtagggagaaggcaaaacccaaggccacatccaaagcttgtaaagtcctaacattggataatagcttggaaatagtagaaacgccgacaataactacaagtacacggagcaccagagccaggctgcgccaaccagtagagacaccaaagacagcgactctttcatccaagcgaacgaggcgccaggttttggaagcacaggctcccgaaacggagtccattagcacacgcacacggcatcggcactgattagatagtagtctccttagttcgtatttattcttatcgaaaatgtcttggtatttaaatatatatatatattgtgtgtaagtgttacaaaagagcttttgacataaattcattgtttttatcttgtggcagggacagtagtgacgttctacagatgtccttgctccaaaaaccgtgctgaatccgctgtccattgctggcatggtaaaatacacctgagcccgatttgcagcctccttcaaattgacccacgtagcgatttcccgttgctatggataacatattaacttattatctataatctttatgcatttttaaagttgcgaaaaaataaataaaatgaaacaaatacatccaaaggaacatatcttatttctttatcacactcacccgtgaaaagtaaacccttttcgtgcatcttgtcccgaagccactcgcccacatagatgccgccatccgcctgccataggatgccctctccacttcgctggtccgctagccactgaccaaagtagacggatccgtccggatagaactgcttgccctcgccactccgcttgttctcccgccactgacccacgtagatgcgttccatgcggccatcgagctccttgcgacgcaaacttccgatgccatgccgttgacccttctgccagtgaccctcgtagacaagtccactgctcgtttgctttaccccaaacccgtgaggctgctggcccaaccatttgccctggtactgcccaccaggataacgttgagagcgaactccactactatatccgctcgtacgcgacgacatgtcttcgatgactgagcgcgggagcaagtccgtccaattgcggcggtgccatgtggtgtcgtccgactttaggcggcggtgtgcgtgcggtggtgtcacttgtctaatcgaacccccccagccagcagcagcatgtcttgccaccatttggcttcctccagcagcgacacgctaacttaaggaggccaaagacattggctcaatagaaaatcgtttgttccggttaagtgtatgtagtaaaaatcgtttaatcagtcgtatataaattacagcgctatttagcttacatcggtaaagatcgaaaatagactgttatattttccaaaactattggaatacctatgaatataattcgtatataaatattgcagtacattttcaaatactttattttacaattgttttatgttgcatataaaatatatcaaattgtctctaaaattttgcattcttttaatccgcatctattgttcagctatatatcacgattaaaaataaaactccaacaccatatatatagaaaattcttttaatcataaattatatggtataaattacagcgcggtttcgcttacacaattggcttaatattaaatttgacaatcaagttgtgtcttaaacgtaaaaagggaagactgcctaaggatggttgcaaaaaaagaaaatccggcatggcatacaatttaaaatacacgcaatataaatatgtaacaaatatcagctaattttttgaggaatattcatccgaagtattgctttaattggggtcttttatcattgtcaatatccgtgctaatccgcaattgccataagtaaaataaaggactacagcagcactcgcacatatatatatatatatagtagaaatctactgaattccgcgtatcacaattttaatcaactacaaatttacaatatgtgtgtttcactaaaaataatctgaagcttaccctgagccgctgtctttttcgttcgatccacttgtgcggatacgccaagt

SEQ ID NO: 35126 - DNA, 594 bp, DROSOPHILA
atgtcgtcgcgtacgagcggatatagtagtggagttcgctctcaacgttatcctggtgggcagtaccagggcaaatggttgggccagcagcctcacgggtttggggtaaagcaaacgagcagtggacttgtctacgagggtcactggcagaagggtcaacggcatggcatcggaagtttgcgtcgcaaggagctcgatggccgcatggaacgcatctacgtgggtcagtggcgggagaacaagcggagtggcgagggcaagcagttctatccggacggatccgtctactttggtcagtggctagcggaccagcgaagtggagagggcatcctatggcaggcggatggcggcatctatgtgggcgagtggcttcgggacaagatgcacgaaaagggtttacttttcacggcaacgggaaatcgctacgtgggtcaatttgaaggaggctgcaaatcgggctcaggtgtattttaccatgccagcaatggacagcggattcagcacggtttttggagcaaggacatctgtagaacgtcactactgtccctgccacaagataaaaacaatgaatttatgtcaaaagctcttttgtaa

SEQ ID NO: 35127 - protein, 197 aa, DROSOPHILA
MSSRTSGYSSGVRSQRYPGGQYQGKWLGQQPHGFGVKQTSSGLVYEGHWQKGQRHGIGSLRRKELDGRMERIYVGQWRENKRSGEGKQFYPDGSVYFGQWLADQRSGEGILWQADGGIYVGEWLRDKMHEKGLLFTATGNRYVGQFEGGCKSGSGVFYHASNGQRIQHGFWSKDICRTSLLSLPQDKNNEFMSKALL

SEQ ID NO: 35128 - DNA, 2501 bp, DROSOPHILA
ctgcttctgtgtgtcgaatcaaaactaactatgtaaatttaccaatttcataaatgtgcattgcatattttcattcaccgaacaagtattaaccaggaagataaccttgtatatgaaatatttgcattcaacaaaagctcgtatacaaaattgaaagcttgtagggaaaatattacatttttacaatatttttcaaaatcgaataactggttatttatgctgagaatgaagaaagctaaaaggtttaataatgcaatttagtaatgcagaaaaaaactcatttgcataaaaaactccatgactttggtaaatgggctacgtcctgtccatccaccatatatgtatgtgaacagaccacattggccgaaaggaaattatttttaaagaagattaacaacaaggaagtaaatgcaaacacccacgggactcgagatatggccaacatctgggagttacctcacgccaaagggccggcattcatttaagcaaatttggcttatttggcagcagagctacctaataaccacgttaagacgaaatcgccttgtaagagggcgaaacgagtttggaatttttaattccgcctgccgcatgtggcgttttttcggggaatgagatctgcagacttccggaaaaccagcacgtgcccacataaaaagaagcgaggaaaaacggctgtcagggaaacggaaaagcagaaaaagcgaaaatatgcttttctggactgcccacacacacacacacacacgcacacttgcctggccaataaaggaagaagcaatggaactcagaaggtaactcaattgctccaattttattcatcccatttgcaacctgcccacatgaattacacggtgagttaaaatcgctttgattctgaaagcttgagttcaagtaattatttaaatacggaaaattttctattaaataaaatttttatttaacgaacatttgagcagcataaaaacaatgatagaatttacttgatgcaaatcaccgattaatccccacgagcagcgcctttggcattctttctgcgttgcactctgctctggataaatccgcgaatcaacttgtgctgattcacaacaagctcgaaccacagattcatgtccgtttcgaaattaaaggccggcatggtagccatatccgaacggaatccacgaatatagtagttcacatccttgggccaaggacatcgcttgggtatgttactaaatcgatccatatgcttgcggcccagttgaatgaaggcgatctgattcttgttcgacagcagactacaaccatcgattccggatagattaaacagcgtaaagtcatcgccaaatcgtcggggtaaaacaattcgcatgttcacaaagaacttggccaccggctttttgaattgcagctcgatattgaaggacggccttttcacgcttttgcttaaaccacattttaatagggatagcattccctcgggatcctcactgctgcaggagcagttcgtgaagaccatgtcaaagctggactgcaaaaattagaacttataagcttgtactccaaggtcctgtgtcacaaaatgttaccttatcggctttggtatgattaaaacaggccaatatgccaataattatgacagcaaatttgttaaacattatgttgctggctatgctcacaatttcggaataatgtaatttgtagcatattatttttcataaaatattgcctgacaatttttaattacaagcagctctcatttgtaataagctcttttttttcgggctgaagcgttaattgacaaagagattatgggtaattatgaagcaatgtaattattgattcgatcacaaaactaagccattagcaatttaaacttaaatcagctttgtttaatgaagcattcggagagctcattggatgcttaataatgcaaattatgttttcacttgaaaaataaaaatgtagatgctaagacagcctcctttgcacaatttaaattacctgctcattgtttatttattatacttatgaaagcagcaaatgagattgttcagctccataaactcatcatccattcaactgtatttaagtcgagccttatggcactattataacaataatgattgttattggagcattagtcacgcatcagcagattttggtttgttaattcccatttagaggatgcatttgggcattaagtctagttgaattgcataatttgagtggttttgttcgggacacgcgtaggatggagatgaaaccaaagacagctgaattttggatggtaattttcctctacctgctccctaattggaaattggaggcggaggccaaggtgcgtataattagcacattgagtatattcaatttctgcagctgaagtttgcgtttctcagaataattttgagctgcaaacggataattttacatgcagcagcgatgatattagttcaagtgtcctcaaggagttcacttgtggcataagcaaaagtaccaaacgccgcacttggcac

SEQ ID NO: 35129 - DNA, 501 bp, DROSOPHILA
atggtcttcacgaactgctcctgcagcagtgaggatcccgagggaatgctatccctattaaaatgtggtttaagcaaaagcgtgaaaaggccgtccttcaatatcgagctgcaattcaaaaagccggtggccaagttctttgtgaacatgcgaattgttttaccccgacgatttggcgatgactttacgctgtttaatctatccggaatcgatggttgtagtctgctgtcgaacaagaatcagatcgccttcattcaactgggccgcaagcatatggatcgatttagtaacatacccaagcgatgtccttggcccaaggatgtgaactactatattcgtggattccgttcggatatggctaccatgccggcctttaatttcgaaacggacatgaatctgtggttcgagcttgttgtgaatcagcacaagttgattcgcggatttatccagagcagagtgcaacgcagaaagaatgccaaaggcgctgctcgtggggattaa

SEQ ID NO: 35130 - protein, 166 aa, DROSOPHILA
MVFTNCSCSSEDPEGMLSLLKCGLSKSVKRPSFNIELQFKKPVAKFFVNMRIVLPRRFGDDFTLFNLSGIDGCSLLSNKNQIAFIQLGRKHMDRFSNIPKRCPWPKDVNYYIRGFRSDMATMPAFNFETDMNLWFELVVNQHKLIRGFIQSRVQRRKNAKGAARGD

SEQ ID NO: 35131 - DNA, 2672 bp, DROSOPHILA
gtcaaagctggactgcaaaaattagaacttataagcttgtactccaaggtcctgtgtcacaaaatgttaccttatcggctttggtatgattaaaacaggccaatatgccaataattatgacagcaaatttgttaaacattatgttgctggctatgctcacaatttcggaataatgtaatttgtagcatattatttttcataaaatattgcctgacaatttttaattacaagcagctctcatttgtaataagctcttttttttcgggctgaagcgttaattgacaaagagattatgggtaattatgaagcaatgtaattattgattcgatcacaaaactaagccattagcaatttaaacttaaatcagctttgtttaatgaagcattcggagagctcattggatgcttaataatgcaaattatgttttcacttgaaaaataaaaatgtagatgctaagacagcctcctttgcacaatttaaattacctgctcattgtttatttattatacttatgaaagcagcaaatgagattgttcagctccataaactcatcatccattcaactgtatttaagtcgagccttatggcactattataacaataatgattgttattggagcattagtcacgcatcagcagattttggtttgttaattcccatttagaggatgcatttgggcattaagtctagttgaattgcataatttgagtggttttgttcgggacacgcgtaggatggagatgaaaccaaagacagctgaattttggatggtaattttcctctacctgctccctaattggaaattggaggcggaggccaaggtgcgtataattagcacattgagtatattcaatttctgcagctgaagtttgcgtttctcagaataattttgagctgcaaacggataattttacatgcagcagcgatgatattagttcaagtgtcctcaaggagttcacttgtggcataagcaaaagtaccaaacgccgcacttggcacatggaattcgtactcgaacaacctgttgccgaacatgatttcttcataaaaatcgtcctgccgcgcaggagacctctaccggatttcgtcctgctcaatgtgaccaccgatggctgtcagttactcgcgaatcgcaatcaagtgccccttatgcgcctgggccggaatatcatggagcgtttcagcaactttcccaaacagtgtcctttcaagccaaactttacctactacattaggggatttcgcctggacctgaaccttgtgcccgccgtggacatggagacgccagttcaaatcgagttcagtcatcagaacaaacagcagggaatcaggtggattaccggttatctgatggcacgtgttcaacggattagcgagaaaaaacggtccaagtaaagtattgaaggagttaataatcaccgatatataataaaatctagatcctggttatcatgattcctttaaagggaaataataatgaaaatcccttttacttcgatttttaattttcagataattaaaacattttacatttctacaaaaactttctttaaatggattaagaattgaaattgaattccttctcttttctttctttcgccttgtctctgtctaatttagcatttgacaacttttagccctaatgaaagtgccttctgcaagggcacatagcattcatgtgcgtttgacaaatctgcagaggtgagcatatggccattgagttaatatcgcagaaaatcatttgacacatcagcccaagactctgtctctctctctttcgacccgcatgtctccgtctctttctcagtccccttttttatgacagttcagccagatgatgttgctcctgttgttacagttgccgtcgctacctttccactcactttccattctttccgtgtcattccacaaatgttgttcaattacctgcgcacagacagagacggacagatggctatgcactgggagaaaaagtgcattgcaccagcaatgaacaagaaaaggacaaaaaaaaaacttcatcaaaatcttattactgtcatccctgctctgcataattctttaaaaccataaaactacaaaagtttgctttcttgaaaccaatatgatttctacgctaacttaatatttctcccagtgtatacagagaacattgtggcggcaactggttgagtatgagtgcaagtacaactgagtacaaactgaaaccagctgcctcaatttggcatttgacagatgacgaggcagtgggcaactaataacccacccacccaatccgcccacctgtctgggcggaaagcgaaatgaagtgagaaatgtgacattgtcgtcagttggtgatttgttacagttaccgagtgaaacagtcgccggtaaatgtaactgaatggacttccggcgggccatgtgttgcagttgccacaggggagattggtgcacctacccatcgcaaattgtcagtaaaaatcagtaaaaaggcctctgagaaactaggtattcacaggcatggcacaatgataccctgtatcaataccctgtaaagtagaactaacagcttttctttatcgtgaccttttctggctttttcatctcggccctaaagagattacttacttgcaccctttattaatccctcctactctttattttcgctcactgtcactttcacttt

SEQ ID NO: 35132 - DNA, 426 bp, DROSOPHILA
atggaattcgtactcgaacaacctgttgccgaacatgatttcttcataaaaatcgtcctgccgcgcaggagacctctaccggatttcgtcctgctcaatgtgaccaccgatggctgtcagttactcgcgaatcgcaatcaagtgccccttatgcgcctgggccggaatatcatggagcgtttcagcaactttcccaaacagtgtcctttcaagccaaactttacctactacattaggggatttcgcctggacctgaaccttgtgcccgccgtggacatggagacgccagttcaaatcgagttcagtcatcagaacaaacagcagggaatcaggtggattaccggttatctgatggcacgtgttcaacggattagcgagaaaaaacggtccaaccctaatgaaagtgccttctgcaagggcacatag

SEQ ID NO: 35133 - protein, 141 aa, DROSOPHILA
MEFVLEQPVAEHDFFIKIVLPRRRPLPDFVLLNVTTDGCQLLANRNQVPLMRLGRNIMERFSNFPKQCPFKPNFTYYIRGFRLDLNLVPAVDMETPVQIEFSHQNKQQGIRWITGYLMARVQRISEKKRSNPNESAFCKGT

SEQ ID NO: 35134 - DNA, 3538 bp, DROSOPHILA
ttgtttgtttgtctatttacagttaggtagccaatttgaactttgaacctaggatcaatcaatctgctattatgtttattgttgctgttgtagtaattcttacacgtaattgctttttgattttttttcccaagccgttttgtatctgtgtgcccttcgaaaattgcatcatcatcaagtcgttgtcatcgtcctagtcccatcttgatggattggcaaacatttcaacaggacagagagaacctggacccatcttcggatggtccgggcatatgttaaacattcgaaagcccccccaaaaaaaaaaaatggaagtccttgaggcaaacgaatcccattgtatttggctaatggcgcccctctctcgatctgaacaccgaaccctaacccgcaacccatccatctatttttaggtatcgtggatacgcaaaaaggattatcatctgcttacggtcggcttaacaacgtacagcagcgatgagcggttcagtgccacgcacttgaagcattccgaggtgagtcctgttcctccatttaatttgcattgctgatgcgaaaggggtggcgaaatcggaagatgtgctgattgcatcggttcggagacctgcataccagattaaatatcttacagtcacgaaaaaaaaaaataaacctatctaactggtgatattaatccaggcttaaaattttcttcggtgttatataaatatttgttttatagaatctgcctacattacgtatacttaacattttgtttttcatatttttttcttaaaatgctactattcttttcttcataatacgtgtcaaatatattatttttcccctgtgcatccagcagttttccatctatatgcctcctggtgaaaatttgctgcattgtgaacttttgcagtggtcggcctcgaatagccgatacgtgacaaaaattcagtgcagaatattgcaaaatattttcacaacggcagcgcagcaaattgacttccaggcggcctggccaatgtctctgttcctctttaattctaacaatttttttggcctcctttttcgcctacaggactggacactgcaaatcaaattcgtgcagttacgtgacgccggcgtctacgagtgccaggtgtccacccatccgcccacctcgattttcctgcacctgagtgtcgtcggtaagtagaggccagaattgcctcagttatggcttcgattttagattttcggtctattgctttggtttccatttctatttgtgattcgctctgggcactggtgattttctataatttcacgccttgatggcttttctcttccggagtaaacaaatgacggcaaaaagcctaccgaatgagctagtttttgccacattttcgttacgttctgaatgcgctcaagctgaaattagaaatgtccatatgccaaaggtagaatgggttaagatgggtttggatttgggtcttcgagggggggttaaaaaggggttcggttcaaatgggattctcgagttgcaaactcggtttcgggggcaaatggcaacgactcagcaagttctcaactcatcgcgctgtccttggctaactgacgcacattattctgaatttaacaaacaatttactttgaatgtgctgcgcctaatggccttttctgcctcttgctccttcatcttggcagtttccccaaaaaacaaagccactctctttgcccaacagtcaaacatacatacatacatgcgtacatggaaactgatgtgacaggccagcaatagattttcctctttcggcaaagtggagctgggctgtctgccagatgtatttcataaatttgtggagcactttcgccgggctccgagggaaattgataactgtcagggatgctagccgatttagccagataatgataaaggagttgagtcgatttgaccccagggaagctggtatataacctttgaactaggaatccaaatatagaaggtatacaaaatataagccaaatgtgaaacgatgggataagttaagatgttattaacgaactaattatgtgcatattagttaagctggcttttatggataatataagattattgtgatagttctggcagcaaaccaactaaaacgcttttccactcttacttttcctttcccccaaaaacccacatcgattggttagaagcccgcgccgagatcacgggtcctccgattcgatatctaaccccaggttcaacgctgcgcctgcagtgccgcgtggtgcagaacacagaggcctcggagtatatcttctggtatcacgataaccgcatgattaactacgacatcgatcggggcattaatgtgtcaacggaaccgggtgagtgctggttacccttactccctgccattgttcactaacccatcattttcaacaatgacgtcccttgcagactttcaatcttcggagcttaccattcagcggacacgacgtgagcactcgggcaactttacctgcgtcgccagcaacacgcaaccagccagcgttctggtgcacatcttcaagggtaagaatccatgaacatatgtatatatatatttaaaaatattttcgttttttttttttaattaaaatgtgaaccataaaagagcccataatagtcattcaatattaatattacacctcctgctgagcattgcattgtcaatgaaaaactgcaaatcttatgatttaaccaacatcccgttgggataccgaaaagaatgattaaattaacggcgaaattaaaagagcaccattttttttgtccgtgcacaatcgagttaagcctcgctgtgtgccagaaaaatttcaattatgtgcgccaaatgaaattaaaactttgaataaacaaaggactgctcatttgagtatctgtaattttcgtacatctgtatcactgcggcgttatctgtatctgcatctgtatcagcggcatcctgtgtctgtttcagtatccggttgctcttttgcagttcatatatccggcggcgtgtggttggttctgttggctaagagggaaaacaataaaagtaatttatgaaaattacacggccgcaagcatgtggattaaaaatgctcgcgcacggtgcgccagatccagccatttggcaggcaaactgccattaaagccaggctataaacacggcgaaaacgtaaaggaatgagacggccactgggcggaagaaagagagggaagtggctaacacaaacaaagagtgcccacgtagttagtgccagtcataatttataagtttctggcgcgatgaagcgacgacgctcattagcattttgttggttaagctcacactttgcttttaaccggccatgtgtgtgtttagctctgtgtctgtgtgtgtgtgtgtttttttaattaaatttttgtgcaaatctcattttcatattctccggacttctctcctgcaggcgacaatccggcagccatgtatcacggacatgtgggcggttccacgaagacaacgcagtcccaactgcatatgattatgataatcattgccagcggctatcggatattccacac

SEQ ID NO: 35135 - DNA, 423 bp, DROSOPHILA
atgtctctgttcctctttaattctaacaatttttttggcctcctttttcgcctacaggactggacactgcaaatcaaattcgtgcagttacgtgacgccggcgtctacgagtgccaggtgtccacccatccgcccacctcgattttcctgcacctgagtgtcgtcggttcaacgctgcgcctgcagtgccgcgtggtgcagaacacagaggcctcggagtatatcttctggtatcacgataaccgcatgattaactacgacatcgatcggggcattaatgtgtcaacggaaccggactttcaatcttcggagcttaccattcagcggacacgacgtgagcactcgggcaactttacctgcgtcgccagcaacacgcaaccagccagcgttctggtgcacatcttcaagggtaagaatccatga

SEQ ID NO: 35136 - protein, 140 aa, DROSOPHILA
MSLFLFNSNNFFGLLFRLQDWTLQIKFVQLRDAGVYECQVSTHPPTSIFLHLSVVGSTLRLQCRVVQNTEASEYIFWYHDNRMINYDIDRGINVSTEPDFQSSELTIQRTRREHSGNFTCVASNTQPASVLVHIFKGKNP

SEQ ID NO: 35137 - DNA, 2579 bp, DROSOPHILA
cccactgagctgcactggtcttcaaattcaatcatcgtcaggccgaacataataaatttctcatgattggcatacattattcatggtgtgagcgcacagaacaatgacaaacgagtctccatggacgtggacgtactggccgaatgaaagccaaacatcacaaaatttcaccagattttgtggccaagaaatcaaattcaaaatcaaaaacgagcccaaatgcattgccataattgaatttacagcatggtgaattcaacctaattaccgttgctaaacaagacgcaaacatgtttgccaaaagcaattatctttaattgtgaaatatttttttttttttgcccaaaaattttacacaaattacgcagcgcaaataaaaccaaaacccgaaacgggtaatatgttatgtggtaggtgttctgcgggtgtcctttcgcctgttccaaatgctcatgtgtctgtgggcacgaaaccatgaccaaataaaacgataagtacagcacgggaaatttacttgtagatttgggaaaagaaggcttttatacgtagcttatttgtagtgaactcttaattcactgagtttaacatatcttactcgtaattcactgattttgacatataatcaataaaattattacctaaaccactttggggactccttaaatatttatcgcgctggttacgttaaaaaatttctatgcttcgacttaattttccttctttttagctttccatttttaaatgtgctaagctttttatataatttatccataataatccatagcagccgcaggaatccctgataaggtcggcggcttaattagtcctgtcactttatgcagattcgtgctgggcccaggctaatgagaatccgttgtaaaatattacgtatacgcacgcgctgggtgctcattcaaattaattgacttcacgctgttattgtttatccgacaaactgttgcggcgccggcggacagcgcatatattaacacattttaaaatgtcacctcacctcacctcctctgtctttccctccgcagaccacacagcatccgcatcgccaggaggaggaaaaacagtagccgccaccatgacgacgccggctagcgagccatcagtgaggcatataaatcaaaatttaattatgtcacagtcgaaggagggtgaaccggtgcccgtgccacagccgtatgcccaaagtgccgcatccgccgggggcagcagcatcaccagcttcgactcgaccaatgtgatcgatggccaaagccagccgacgcccacacacctgcaggaagcggtgctccagacgcattcgcactcccggatccaggccaaagatacggccggaccatatcccatcccagtacatcggccggagcccgtggagaaccatctggaggctaacaacggcatcgagggcggcatggagagcctcttcggcacgcccatgtacttcggcaccgagaactcgacggtggtcaccacgcagatcggggccaccgcccacgttccctgcaccgtgcaccacatcggcgagggggtggtaagtacgcccagtattgttttaatattttattaaatataaatccatcactgttgctttgtttgcctccgccaacgacaacggtgatgatgatgacttttgtgtcggtgccttttgtcaatgtgaggctgcctgactttgtcctcgtggaaatggaaaagcattcaatgttaattgatgagacccagatcgatcaactgcattattttcgattctcttcagatttcatcaagtatacatacaatatgcgtacatacttcgtttttacgatattaaaatttgcttataagatactttcatacaaaatgaactgccctgtatttaaaggcttagtcaggtagttacttatatgttatatttttttgaaattttttgtcaattgtatttatcttaacgtaagaatttttactttcaatgacaatgttatatgaaaaagatttttgtatagattttgaataagcaatgcttccttttgttttttatttctaaaagcatgtggttatatttaaactttcattttctttctcaaggaaagttgccgagttccggctaaagtttacttatttgttttcaatttccacctgccaactgcgacagaatttaattaagacactccgcttatcgagggcacttgtgtcagcccagaggcaaactaatagtagtagtaggcacacagatttcggacattttgggctgagcaaaatgactgcgtgggtcatttggcagcacaatgaaaacacacagacacactggcccataggggatgatggcactgggagacaaattacacctttcgccagcactgtggagtggagtgggtgtgtgggtgggtgtgtggctgtgtgtgggtatcggcattgacatgccatagcctcaagtggtattaattttccgcttgtctagagttattactcatacgccgtggtgtgcgtcacgtctcgtatatttgctcctcgtgcccgaggacacggaggtgtttatctcgccccacccgaaaagtcggacactcgattaggccagccagctgctccgtcgc

SEQ ID NO: 35138 - DNA, 579 bp, DROSOPHILA
atgtcacctcacctcacctcctctgtctttccctccgcagaccacacagcatccgcatcgccaggaggaggaaaaacagtagccgccaccatgacgacgccggctagcgagccatcagtgaggcatataaatcaaaatttaattatgtcacagtcgaaggagggtgaaccggtgcccgtgccacagccgtatgcccaaagtgccgcatccgccgggggcagcagcatcaccagcttcgactcgaccaatgtgatcgatggccaaagccagccgacgcccacacacctgcaggaagcggtgctccagacgcattcgcactcccggatccaggccaaagatacggccggaccatatcccatcccagtacatcggccggagcccgtggagaaccatctggaggctaacaacggcatcgagggcggcatggagagcctcttcggcacgcccatgtacttcggcaccgagaactcgacggtggtcaccacgcagatcggggccaccgcccacgttccctgcaccgtgcaccacatcggcgagggggtggtaagtacgcccagtattgttttaatattttattaa

SEQ ID NO: 35139 - protein, 192 aa, DROSOPHILA
MSPHLTSSVFPSADHTASASPGGGKTVAATMTTPASEPSVRHINQNLIMSQSKEGEPVPVPQPYAQSAASAGGSSITSFDSTNVIDGQSQPTPTHLQEAVLQTHSHSRIQAKDTAGPYPIPVHRPEPVENHLEANNGIEGGMESLFGTPMYFGTENSTVVTTQIGATAHVPCTVHHIGEGVVSTPSIVLIFY

SEQ ID NO: 35140 - DNA, 2213 bp, DROSOPHILA
tatttgtaaatgctttttttgtcgccttttatttaattgatgacagcgcagagatattaaagcaatttaattacctaatggcaagtcacatgccggaatttagctaatgttatttgccaaatttaaaacaaacgagaaaatttatttttaaaaccactgaaagccttgtttcgttaatttcatcaaatcacaaaaatccattcatttttgaagattcgcttgctgaaaatgagacttggaagtcgttcattcgacatcacgcatacgccgtgtgtgcgctagcaaacttaattaatgtcaaaccatgatgtcacaaggagcataaatattccaccattgccgcagtggggcgtcgacacgagcacatgagaaatcattgatattagttgagcagcgggactgccggaaggactaaggggtcggaatggaggggtagatctgctgctgcggaacgggaatcacgcagcttgcagcgaacttttgattaaaatgttgaagcaaacacgatggacgagaatcgtggagcggagcaagccggggatgaaactttagcgaacgcacacacaaattgcgaatgtttcgccaaacgaaaagttggcaaatcccaccaaaaatgttgttttatctgtatggctttggtgcaacatgtttgtggttccttgtggcttgcgtttgagtctgcactttcagccagggaatctttttgctgctgttgacaatccgcagctagcagcggttgcacactgcggaccgattgtaaatccaaagcccaaacgccggaaacaagaaaaatacgaaccagcaaaccggatagatgtagttcaacaattcgccgtgaaaaattcaattacaaagtcgcaccagcgccatcgaaagaatgcaaatttacacggcagaaagtgggtcgaataccgcaacagctctaaaaactggcaactagttcagaagctgttttgcggtccgccagcgaccattacgattacgattacgtatgtagtggatgaagagcggagagttggaaaacccggaaaataggaaggaaaagctgaatgtcgcaggcagtcagtcacgtgcgaacgtgacgaaaatgccacgattcagttttggccaactgctgcgtgccaatgagcagcaacagtcgcagcagcagaagcagcagcagcagcagcagcagcagcagcagcagcagcagcagcaaaagaagcagcaatagcaatcgcattgtgccgggctgttatttgtttgttttgtgcgtgcaggacgtgaagtcctgccagctaatgcacttggagaaatttttcgtttgaaaaaattcatacaaacgtatgaattgccattgaagattgtttttttttttggatatataactatagagattctggcaaatccccttgaaggcaatttcactgaaaaagtcgagagtagaaaaactttctcctgagtgtgacatattccggagtgctttttcgtattcataaggccggaggaccacggcacaacaatacagaaaccgcaaagtgcaaaatccgagatgcgagacctggttgacctggcgaatcaggaatccttcttctgtcgcaccgctgcaattgcaaattgctgtggcaacacactctcacatgtcaattcgaggagctatcgggcgatttctaaggtgtcaatcagaagaaggtgcattgattgactcgattgttcgctgagatcacagctgggtaaattgattttcaaacatctctgcaaaggactcgaacgaaattcctttcgagtgcaggaggtgagagattctattaaaatttctttgaataattcgattagtggcatatctggcgtcttagcaacgtgctaattaaaggctgagtctgatgcaagcctggcccctggcgaattccataactaattaattttgcattattcaatgcactcgatgcaggcgctttgcccactgagctgcactggtcttcaaattcaatcatcgtcaggccgaacataataaatttctcatgattggcatacattattcatggtgtgagcgcacagaacaatgacaaacgagtctccatggacgtggacgtactggccgaatgaaagccaaacatcacaaaatttcaccagattttgtggccaagaaatcaaattcaaaatcaaaaacgagcccaaatgcattgccataattgaatttacagcatggtgaattcaacctaattaccgttgct

SEQ ID NO: 35141 - DNA, 213 bp, DROSOPHILA
atgaagagcggagagttggaaaacccggaaaataggaaggaaaagctgaatgtcgcaggcagtcagtcacgtgcgaacgtgacgaaaatgccacgattcagttttggccaactgctgcgtgccaatgagcagcaacagtcgcagcagcagaagcagcagcagcagcagcagcagcagcagcagcagcagcagcagcaaaagaagcagcaatag

SEQ ID NO: 35142 - protein, 70 aa, DROSOPHILA
MKSGELENPENRKEKLNVAGSQSRANVTKMPRFSFGQLLRANEQQQSQQQKQQQQQQQQQQQQQQQKKQQ

SEQ ID NO: 35143 - DNA, 2558 bp, DROSOPHILA
ccactacacctgtagctccatcgactactgaagctccagtgcccactacacctgtagctccatcgactactgaagctccagtgcccactactcctgtagcttcatcgactactgaagctccagtgtcaactactcctgtagctccatcgactactgaagctccagtgtccagtactccagaaagcactaccgaagccgcttccactaccgagcgttcccctgaggaagatatcgacagatctgggcgtctcggtcagaggagaacttggaacctgtttaagcgcttcttctaagcgtgagaaactttgtattatttattgcattcaatgagaaaatttagctacgtataaagcgtagaatacttttgggtttgatttcaaattgttttcatagagggacgcgtgcaggatttctgcggaaggggttccaaaaatatcaacaaattgctgtattagtagattaaaacttttgttaaatatatagaaactgtatgcacactttttgttttgaattccaaatatattcaatcaagtcggttgactagtggattaaccctcttgagtacgacgctgggagtaatcttatctctgatagatgacggagtaatgagctttatctcgcctgtccaaccagacaagcgccacactattgactactggtgtttgccactactcttagatcagagagcttcgatccaccggacgacactggcaatcacattgtgcacgtctatagataagtggtgcacctgaacctttcataaataactggccttcgggctggtcaataaaaccgaatggggcagaaccgagttattaggaaatgatcaattagacgctcggcacttgagcattttcgttggttcttgagcgcattcgagacggacgatcaaatggaagcactacgtcgatttttaagaacggagactcgttgtcgcctcaacgggatacataccctaatattgtgtgtcctatttttgggtttttcggtggctggtgagatgccggatttgttcactcccgaaccggatctcacgatagacgaatgccacgatgagttcaccattgcctgtgccaacgcttcactggtcttctccgattcctacgatctgtgcgaactgaatgccaatgagaccatcatcaatctagaggtcgatgttgaactggagcgactccaaatcgagttgggatccagtgcggtgtgcggcaatatgcaaatctgcgatacattggttgacgatctggagtactttcagtgcatcaataagaacgtaagtttttgaattatgttaaagatgactattaagtgtgtagagttcgaaattttaagtgcaaatttaaccatttgtttttagggaatccataacctcgacattctgaccgaaataaattacaatgccacaagtgcttacacacgacttcacgaggactatgatgcagtgcatcgggcgcttctgctttgcggcctcgatgcccaaaaaaagtacatggaggacataagacaggcccacagagaactcactaaatgtcgatccgaaatcgacgagcttaacgagtagtcgtcgcttatctgtcactatactaacaaaatgattaagggtgaataaacaccatcatataagcagctaaatcactatagtttaccaagaattgatattattggctgataagaataaaacttttaggatttgttaattgccagatccatcttagatatattaagtcagtatatatatataacttccatagttaagttatattatacatggaagtacaataaatatttattaatgttcaactcagtgtgtatcattttgctgcagacactgatccaaagatcgaaagattgtattggttcctttgacataattttgttcggtttgatttgtgcagcgatagtgctccaattcgattctacttaatttcttatttaggattaaagcctgctcggtggcattaaatgatatactgtagacattcgccaactgtaacttagcctaggggggaaactaaaaaggttaagaaggtttcgaatcaacgcatagccactcaccattttggcaaagcagttgaaaaagtccacggcctccgtcaggaccaaacactgatcaataaatgatgatatgcccagggcagcctctcgaatctcctcctgagcctcagtggcatccgttagcaaggacagccgctcgttaatggtaatcttctgacaggcattatatccttgcgaccaggtagccccttcactttccagttccggtaggtaacgagcaaaacacttcttggtgttgcccagactcgaaacagtttcctttccatcgtctaagtaagagcaaaatgagtttagagttcggggagaaggctcagcagcacatgcctagaaatgtagttggaattattgaaaaataacaatgatattacttctttaccccaagggctataagcagaatgatagctgttttcatggcactgatgaccataaaacactgacggaaatcgaagcaaaatttccgcgtcaagttaccgaaagttggtaatgtaatcggacagtgatgtatg

SEQ ID NO: 35144 - DNA, 474 bp, DROSOPHILA
atgccggatttgttcactcccgaaccggatctcacgatagacgaatgccacgatgagttcaccattgcctgtgccaacgcttcactggtcttctccgattcctacgatctgtgcgaactgaatgccaatgagaccatcatcaatctagaggtcgatgttgaactggagcgactccaaatcgagttgggatccagtgcggtgtgcggcaatatgcaaatctgcgatacattggttgacgatctggagtactttcagtgcatcaataagaacggaatccataacctcgacattctgaccgaaataaattacaatgccacaagtgcttacacacgacttcacgaggactatgatgcagtgcatcgggcgcttctgctttgcggcctcgatgcccaaaaaaagtacatggaggacataagacaggcccacagagaactcactaaatgtcgatccgaaatcgacgagcttaacgagtag

SEQ ID NO: 35145 - protein, 157 aa, DROSOPHILA
MPDLFTPEPDLTIDECHDEFTIACANASLVFSDSYDLCELNANETIINLEVDVELERLQIELGSSAVCGNMQICDTLVDDLEYFQCINKNGIHNLDILTEINYNATSAYTRLHEDYDAVHRALLLCGLDAQKKYMEDIRQAHRELTKCRSEIDELNE

SEQ ID NO: 35146 - DNA, 2642 bp, DROSOPHILA
tagttgaggtgagcgctggtttaaattagcacaaaaaaggcggctggcattatacggttttgagttcttgcaacagcgaataattgtggttttgatgtgaatgctttctaagagttttatctaaatcgatttttgctgacagcttagcttttgccaaaggaatctgtgggatttgtatttaaccaaaatatttctgaccttaaggatgtactcaaaagtggcagggtatcctttctactgagcacaactgcaatgacttattttttcctcttcaaggaatccacagtcatatttcggtgggtattccttttatattgctgcttttttggtgcatgcaagacgcagattacgtaatccctggctcagagtgcacatgatccttgcagctcctgatctcgttcaatctgacaaaggggataaagcgcagtcaactggaggaatcagcttaagcgcttacgtttgtgctcacgcttacgtcatgcgatgttgtcattgacttttagttgatatgcaaccagcaagccagagagcccagattagtcggactgcagactgccggggtggactctgcagatggaataggatcggataagcaggaggaggcgcaggagaagcaaatgcaagtggtacgggcggagaagagcaagctttacggcttggttccccttctgtcggctccaatcatatgcggccacatttccacggaatctgaactcattgaatgcgcgctacacgccaatgcctctaattttccatactttcgctatatagtgatgacttggatacatgaatcttttttaacgtacttatcacataatatttttgaaacaatttaaaggctctacaaatagatacatttggcaagcttactttcacagtatatgcaaattgaattaactaaattttcaaattttggtctttgaattggttttaatactttggaattacttgttgcaaaatatacagattgaagtaaatgttacctttctcatcactggtcttacctttggttgatgttgctgctgcggctgcgacgctccagcaacaattgctcctgctcctccatcggctgcagccagtcgatgttgctgttgtccttgatgatgctgttgctgttgccattgctgttgctattactattgctgttgtcctggtctttgttctggtcctgggtaacagcaaacctgcccataccttgaacggccgcatttaagtcggacaattgcagacggaagtcgttgcgagcattctctggatcatcatcaaactgtcccagtcccatttccattcccaatccctgttgctgctgttcgagttgctgctgttgatgttgctgttgttgctgctgctcatgttgctgctgctgctgccgttgtagatgttgctgcctgtcgtatatgctgtggatgggatttccgtagagtttttgctgctgttgctgctgccatttggccggtgctttgttgtagttatagttgtcattgttgtcgtcctcgttgctatctgcaatgccatcaacgtccacatccccgtgctcccacttgtagttgtaatcgttgtagttgttgtccgtggcgcttctatagccatatctattgtttttgagccccggcgtcgattccatcgtctcctcgcaggccatggcgagcgttcgtctggaagagccactaccaaaacagcgagcagctagaatgacggccaggagcagctgcaaatgtggcagaaacaaagagatttgctcgataagaagggtgcggcacaaggcaacggaaatgttaaacaattgttgtgtggctaataaactgcaaagtgtcaacagttgtcgaaggggaaagtgggagggggcttgatatgcaaatacccctcaattcgaatggcaaacaatgcatgtggattaatatttatcacatgcgattaggcatcgcaatgaataggtttataaaaatatttgttgggtatttgggcatcaaaggcttattcaaacccctggattagtgggtaagtcaatgagattcttataaagggtttatagcaagctatatgcattatggttattcattgtagtcttagttgttattaataccttatcagttgaatgaattccttaggtactatactttgacaatgataccaattatcttgataaataactctttaatttcttgaaaaataaagttcttccccaatttcgcattttattgttttgcacgtgacgtagatattttattcttatcaacatgaagatacttaaggaaagccttgcgataggaatcaaatgataatcaatacgctctgctgataggcatggttatcagttgtacaaatattacaacatgtctaaaattaccacagtaattacgaaacacgattgttgctacgttataaaattcctagaaaatccatcgataactttttaatttcattacaactacgaatttagtttttattcctaattttttttggaagctctgcagtctactactgccaaccgaaaatcgaccgctaattcaactaagaactcaacaaaattccgattgacgaaaccgaaaacttaagcctaaacagcctccaagttcccactgagccggctgaaggggaaagttgaattccctgctggatgttgacaatcaatgtgcttgggg

SEQ ID NO: 35147 - DNA, 642 bp, DROSOPHILA
atggcctgcgaggagacgatggaatcgacgccggggctcaaaaacaatagatatggctatagaagcgccacggacaacaactacaacgattacaactacaagtgggagcacggggatgtggacgttgatggcattgcagatagcaacgaggacgacaacaatgacaactataactacaacaaagcaccggccaaatggcagcagcaacagcagcaaaaactctacggaaatcccatccacagcatatacgacaggcagcaacatctacaacggcagcagcagcagcaacatgagcagcagcaacaacagcaacatcaacagcagcaactcgaacagcagcaacagggattgggaatggaaatgggactgggacagtttgatgatgatccagagaatgctcgcaacgacttccgtctgcaattgtccgacttaaatgcggccgttcaaggtatgggcaggtttgctgttacccaggaccagaacaaagaccaggacaacagcaatagtaatagcaacagcaatggcaacagcaacagcatcatcaaggacaacagcaacatcgactggctgcagccgatggaggagcaggagcaattgttgctggagcgtcgcagccgcagcagcaacatcaaccaaaggtaa

SEQ ID NO: 35148 - protein, 213 aa, DROSOPHILA
MACEETMESTPGLKNNRYGYRSATDNNYNDYNYKWEHGDVDVDGIADSNEDDNNDNYNYNKAPAKWQQQQQQKLYGNPIHSIYDRQQHLQRQQQQQHEQQQQQQHQQQQLEQQQQGLGMEMGLGQFDDDPENARNDFRLQLSDLNAAVQGMGRFAVTQDQNKDQDNSNSNSNSNGNSNSIIKDNSNIDWLQPMEEQEQLLLERRSRSSNINQR

SEQ ID NO: 35149 - DNA, 2909 bp, DROSOPHILA
cattggtcaggtgataaactcctatttaacgaacagcaaggatcttccggatgaggtgattcacttaatgttctccgccaaccgctgggagcacataaaccaggtgaaggagaagctgcttgagggcaccacattggttgtggatcgatattcgttctctggcgtggcatatagcgcagccaaaggattagactttgattggtgctatgctccggaaagggggctcataaaaccagatgctgtattttacctaagagcaccaccaaacgaccttacacatcgaggacaatacggcaaagagcggtcagtgcaacatctgcattaaaatgattatcaagattacaataccatatcttataccattgcagttatgagaaagtagaattccaaggtcgtgtggccgaagtattcaaccgcatttgctccaaggagggcagctattttcaccagttcgatgccagacagtctgtagaggatttacatgcccagatagcgagcattacggaggaactcctgcccaaagtggccacccgacctctggacacgttatcgtagcacacgtcctcgcgtcgccattcattagaggggatttacattgatttatgcaatacacgaatgtttgttataaatgttttaaatgccgcttaacttttaatttacgataaagccgcaggcaataaatcctagcatcgggcgattggaaggatatcgttaggtgttgagcgaaatgcatttacagaattgcacaccaaactggattaagcagggggattaagtgtaagccaggtggcacatgcaatttaatttccataatcccccttcatgaaaagccaatttttgttgctccattgtagttcgtttattttatacaccattactaagggactctctcttcactctaaatgctaagctaaagcgaaaaataatttatgcggatcaaacttagttgctaaaccaccaaaataagcacgcgaattcaattaggcgcaatccttcaaaactagttgaaatctgagctctcatagcccatatcctcgcgtcgactgcgaggagctggcttgggattcctcgtcctcagggtcagctggcggtagcccactcccggcttgtaatccacattgattggtgcatggggtcgcagactggacacgccggcccgtctcttctgcgcctgatggtagaaggctatatcgccgtagctatgcttcggccacatgcactcacaaccagagggcaccgtccgcgtctctgattcccagcagccggaggcgtcattcagtcgaatcagatggatggtgcggttgagctggatgcacgagaagcccgttgccgagcagatctaaatgcacgtaacgcaaaggtcatttaactgaatattcgctttctatctatgtagctcacctctcgtttctcgcttcgctcggagagcagagctcggagcagttcattgcccctgtaaccatattcatagttatagttcctcgagggctgcggtgagtagttgtgggcacatgtaacctccacatagtgattgggacggtaatcgccgctttccaacttcacggtcacccgatttgtggggcacaacgactgataggtgactacctgtgaatgggcaagtacattatatggagttcattattatattcaattaaattgagttacttaccccatctgagctgggattggggcccagaaatggtaccggtggcattacactgcgaacgcggcgcttgcgcacgttctgtatcccgtagggcatctgtgaactcagttcgtctgcgtcctcctcttgacctgcgtaatcctcctcgccctcaatgtccacatcatctagaccgccagatggtaactcattgttggtgtactcgggctgacctggttcccctgctccgcctgcttcatccatggctgacctgaaattgcatatgcatggaaatttgttagttttggccatgaattagcgctgctctcatctcgcggccactggagctgctttcgcctccacgactgcctgatgtcgccgcaggcaagcggaaatgactgcaaaagcggttttacacatgaagaaaaaaaaatgtaagcatccaattgcaaaaattgtaactaatcctatcatgattaaaagacttcataataaataaatctgataattttaaatgaacttttttatataattatattatagtcgggaaacttttgagtaatttaaggaaacatgtaaaatgatcttacattttaaaggacttttttcctatgtgatattgcctgcggtggcgtggttaaaaaaaaaaataagttcgtttttgacgtttgttatttgcatggccgccgtttcttttctgcaatttttccagttggccaacaaaagcgcatcattttgcattcaactgcagcaaatgccaatgaattttttagctttcgctttggcgcgcggctttgtctgtggatggagctgcggccatggggatgtgccgggagattcagattggtgggcaggagatgctcgtggtgatggcgttgtcctgagcctgtggcgcggcacaaagctctccgcttcgcgaatgtcgttggctgccagcggatttcccccttcgttgtcgatgcctcacagtacatctctcataccccgagtccccatacagataccatcccttaccctattcttcctgccccgaagctttatccctctgatccagcggcgttggcatttttgaagcccgctttcagggcaacaacggctttgatagttttgtcgcaaagtttgtgaaaatgttttgaaatgaatgcagatggaatagttgaggtgagcgctggtttaaattagcacaaaaaaggcggctggcattatacggttttgagttcttgcaacagcgaataattgtggttttgatgtgaatgctttctaa

SEQ ID NO: 35150 - DNA, 783 bp, DROSOPHILA
atggatgaagcaggcggagcaggggaaccaggtcagcccgagtacaccaacaatgagttaccatctggcggtctagatgatgtggacattgagggcgaggaggattacgcaggtcaagaggaggacgcagacgaactgagttcacagatgccctacgggatacagaacgtgcgcaagcgccgcgttcgcagtgtaatgccaccggtaccatttctgggccccaatcccagctcagatggggtagtcacctatcagtcgttgtgccccacaaatcgggtgaccgtgaagttggaaagcggcgattaccgtcccaatcactatgtggaggttacatgtgcccacaactactcaccgcagccctcgaggaactataactatgaatatggttacaggggcaatgaactgctccgagctctgctctccgagcgaagcgagaaacgagagatctgctcggcaacgggcttctcgtgcatccagctcaaccgcaccatccatctgattcgactgaatgacgcctccggctgctgggaatcagagacgcggacggtgccctctggttgtgagtgcatgtggccgaagcatagctacggcgatatagccttctaccatcaggcgcagaagagacgggccggcgtgtccagtctgcgaccccatgcaccaatcaatgtggattacaagccgggagtgggctaccgccagctgaccctgaggacgaggaatcccaagccagctcctcgcagtcgacgcgaggatatgggctatgagagctcagatttcaactag

SEQ ID NO: 35151 - protein, 260 aa, DROSOPHILA
MDEAGGAGEPGQPEYTNNELPSGGLDDVDIEGEEDYAGQEEDADELSSQMPYGIQNVRKRRVRSVMPPVPFLGPNPSSDGVVTYQSLCPTNRVTVKLESGDYRPNHYVEVTCAHNYSPQPSRNYNYEYGYRGNELLRALLSERSEKREICSATGFSCIQLNRTIHLIRLNDASGCWESETRTVPSGCECMWPKHSYGDIAFYHQAQKRRAGVSSLRPHAPINVDYKPGVGYRQLTLRTRNPKPAPRSRREDMGYESSDFN

SEQ ID NO: 35152 - DNA, 2294 bp, DROSOPHILA
gcaatttcatacatagttttaaggtcaactgggaaagaagacagatgtttgttttcgaaatcgaaaaaaaaagaatccacgtaaccgcttgaagaacgttcatcaaacaattgcgttcttcttctacttaggctatgtgtactagagaatcgatcgcaaaaccatttccatttcgcctttcctcgcaatagtctcaagtatttagaagtgcgcaaaactgagaccagcagcttcacaaatcaattataaataaatatttatacatacgcatgtaaccaagtatttatttagttccatcttagccaattatttatactgcaaagagcgtctgtacttgctttgtatttgttaatcaacaaaaccagctagcaccgatttagtttcggttcgcattgctttgctgtgattttgccctctttaaaacaaaaaaaatatgactaaacaccaccatgtatttatgtatgtataactgccattgcttgcttttattcggacacaattttttatttcgtttatagaactccaatccatttaggtcaaatcaaggcgataatcaaatgaaattgtttttaaaccgtaatcctagatcaaaacacatcttcacaagaattctgatgtaagcaaaaatcagtatattttactaggtaagggcaatttattgaaacatttatatttatacgtggccaccctaactgtaattgaaccgagcaattgtatacgctctaaaaaaaataattatatacacaaactgtaaatgtgcaaacccaagagaatttgtgttttatttataaacaaatggaagtcgttgggatttgaaactgaatttgggcgggcgttcttcaccgttacaccacactgcccggcgggggtgttctcccgcctgtgcgcgcttttcaacactactactggctgaatcagctgcttgaatcacaaaatacgcacaaattgagacaaaattttgtttttgaaacgaaataagcgataattgaagcctaccaagatgattgtcccacgcctggcacttcccattagccttgccctgcagcgcgtgtcgcgccgggtggcggaacacccccataacctaaggatcctgcagcgccacatgtccagcgtgtactttcgcagtggagccatcaaacccaagcccgaggagatgccattcggcctgctggccatcttctgtgccgtcataccgggactcttcgtgggcgccaccatcagcaagaacgtggccaactttctggaggagaacgatctgttcgtgcccgcggatgacgacgacgacgaggattaagcatccggacacttgacaatctccatgtgggagtgcctcctagtcgggataaatgtgttggcaacgcggcgttctcccacgcagaggaaaccagctcacggccatatatttgttcatccattagcctcctttttctacatacatatataagaatccgcgcagctcttgcattttttgtgtattgtcgtgtattcttcaagtcccgctttgatattttcgctttctgaatgttaactatgctcgttaaatacttgaatgtactagaattaaataaagtttattcgactatgcttaaaacctgtctgttattatataataatgctctgctacaacctacatacatatatggcatctcatctcatatgaaagcaatatcatatatgtatgttaatattaaatagatattaaacataaaaatccatcccacccacattccgctgaaaaatgaaaacactcgcttttgccgaagtggaattttattgtaattaaatttgttgggtgtacaaaggtatgttttaaggactttctctctgcatttattacaatttcttcaaatggttttaattgctgggcttttgcttcgaagacgggcaatcaagtttcaagaatcctattttctttaatcatacaaattatgttttatttcgctttaatatataaggatacatatatatatctgctatatatagaagtgtgttgacttgcgtatatttcgtgaaaagtaaaagttttcttcttcgcaatttcccttgaactaacattccaattcgggttttggttatgttttttttttctgttttactctcattattttgtttgtttgttttttttaaataattttgcattttctgcatacatgtggttttgtgttttgcaattttttcaatgatttttccttgggtttttatttgtttttagttttcgatttgtttaataaaaaaatatgtatttcactgcccagagcgaaagccatttcttacttccgcttgcgttaatatat

SEQ ID NO: 35153 - DNA, 294 bp, DROSOPHILA
atgattgtcccacgcctggcacttcccattagccttgccctgcagcgcgtgtcgcgccgggtggcggaacacccccataacctaaggatcctgcagcgccacatgtccagcgtgtactttcgcagtggagccatcaaacccaagcccgaggagatgccattcggcctgctggccatcttctgtgccgtcataccgggactcttcgtgggcgccaccatcagcaagaacgtggccaactttctggaggagaacgatctgttcgtgcccgcggatgacgacgacgacgaggattaa

SEQ ID NO: 35154 - protein, 97 aa, DROSOPHILA
MIVPRLALPISLALQRVSRRVAEHPHNLRILQRHMSSVYFRSGAIKPKPEEMPFGLLAIFCAVIPGLFVGATISKNVANFLEENDLFVPADDDDDED

SEQ ID NO: 35155 - DNA, 2450 bp, DROSOPHILA
catatgcgtggatatatatatatatataatctattatatatctgtggggtatgtatataattatcatatattgtggctgttacttgttatgagaatcgcacggccttgtacaaatgttcggttactacgtacggaattacatttaaagtcgcttgtctcttggcttggcccgcggaccgccaacggcattgtaaaatgtatcgttcgcttggtaaaaaacaataactaaactaaaccaaacttagacgataggccgcctggggggggagtcgcactgtatactatcattctaattcttaacaaacttctctcctaaacgttttgtatgccaaatcacgctaggcaacagaaaatactcaaataatcgcatccttttcacttttaagaagattttagattactttttaggattccaatctcgaactgacaatgaagtcgattgtataaatgagtaaatatcaaagtatatataaaagagacttttaaattgaaatcttttgtaagctacaatctaaactgaataatcacaataaacaaaaaaaaaatgaagacatgtacgaccataaaattttaacattttaaagacaagagaacatgaaagttgtcagttcgggatggaggatcctgttgcccagcgcggtcaccgagggactacgccgcttgagtatttcgcttatcgctacgcccaatatcggttattaatgtaagtctgagtgtaggtgtctaattctgcttcgccgtgcccgcggccgtggtggctgcggtggcagccgctatggcactgctgcccgttatcgagcccagccgggagagcgatggctcccgcttgggtggcacgatcggcttggttggtatggggggcggtgctccgcgagcgcccgctggcggcaccgtaaccggcggcacggcaatgggaacgggatgaggatgcggtgttgttgtctggtcgagggcagctgccgcagccagtgcggcatacttgccgccgggcgcccgctggatggtggccgtcggctgcatctttgccggagagggtgagggtggcgccaccatgggcacggtgaccgtagcagccgtctcaactgatgcagctactgctgcagctgttgctgctactccaatgctgccgctcgagttgctgttgctgctggtggtggtgttattcgtggtggttgtgatggtggtagtgtggttgagcacggcagttagtggtgctattgctgctgtggccgtgcccgtgggcgccgttgcgattccagcgctccggatgttctggcccggcgcaatggagcgggcgatgccggtctgtggtcccgagaccggcatgctgctaaccgtggctgttggctgcacgatcttggcgatgttcaccatggggggcgtggcacaggcgtcgtctgtaaaagcgcagagaaatgggattagcattcggcttatgacagctccgtaaaacactagattttcggatctccgaggcggattggcctaaccagaagcccatatagagctgcaaagccattgcagatgagttctgggaaggcctggcttgtgtggaaatgctttggcatggtcgtgaaaagtctacagacgccactggtgtcaattggctacgttctggcttttgtcagggtgctccaatcgctggggtgcgagcgtgcggggtggacgtgcgaatgcgtgatctttgggttggtgcaacgtgaggtgcacgaggaacatcacaaaacaaaaaacaaatcaccttgcaattgcgtaacattttttctaacaaaagatttcggcttcaagaggagttcgaaaaaaaagtaatatatatatatagagttaaagtttgtatatagaaaattataaggagggcaaccatatgtataattacaacagccagtttccaggtggaattgccttgtctggctaactcaccgctgaactgtcgcgccttggcggcggccacggatgagccgctgccacccagttgctgctgctttttcagagcctcgtgctcgctccgtagggcgttgagttcctgctccagctccttgaccctgaaaaatagacgtagaagatgatatagtttgttcattcgaacgtaacgactggcgtcgtgacgaaccggagttcctccttggctagtttggcaaacaggactttacgctcctgctccatggcatgcgtttgcttctccagttcctcctccatgcgcagcgactttttgctctcctcctcgagaccctcggcaatggtatccgagcgctgcttctcctcggccagaatttgggccagatcctccgatcgtttccctgtataatcccatagatattattgtatgagcaaagtggatatcttcatatcttatcttcatacggtcatacgcaccctcttcaatatacttcatgaggatctttttgcgctccgcaatcaacagcagcacaatctgcttttgtcgattgcgc

SEQ ID NO: 35156 - DNA, 450 bp, DROSOPHILA
atggtggccgtcggctgcatctttgccggagagggtgagggtggcgccaccatgggcacggtgaccgtagcagccgtctcaactgatgcagctactgctgcagctgttgctgctactccaatgctgccgctcgagttgctgttgctgctggtggtggtgttattcgtggtggttgtgatggtggtagtgtggttgagcacggcagttagtggtgctattgctgctgtggccgtgcccgtgggcgccgttgcgattccagcgctccggatgttctggcccggcgcaatggagcgggcgatgccggtctgtggtcccgagaccggcatgctgctaaccgtggctgttggctgcacgatcttggcgatgttcaccatggggggcgtggcacaggcgtcgtctgtaaaagcgcagagaaatgggattagcattcggcttatgacagctccgtaa

SEQ ID NO: 35157 - protein, 149 aa, DROSOPHILA
MVAVGCIFAGEGEGGATMGTVTVAAVSTDAATAAAVAATPMLPLELLLLLVVVLFVVVVMVVVWLSTAVSGAIAAVAVPVGAVAIPALRMFWPGAMERAMPVCGPETGMLLTVAVGCTILAMFTMGGVAQASSVKAQRNGISIRLMTAP

SEQ ID NO: 35158 - DNA, 2357 bp, DROSOPHILA
gcccagcttgtttccggatgtccagaactccggctggtatggtgcaatgatcggcagccattcgttgatgacattgaattccgttggattgctaatgctcagaagtccggcgttaagggatcgacaatggcgatccgactcgtagaagttcttccaactgccatccaccaggagacacttatccgccacctgggtaaagttggtgggacaaagggtaatggtttcctcgctggccaccagataaacttggccaaaagccaggctgaccagtgcgatgcaaactaacttggtcgataacatagtgggtaactgacccacggctggccactcgaactcttttatatggctaaccagctggggcagcgataagtcagatttttgataaggactcgtaaagtattcgcgtggctgaagttatcattttcttatcaatcgaactaaggtgtcttagcagtaaaaagtaaaaatcgcttgactacaggggatacttatattgttttggagaattccccttgttcaaaataaagggattccacctatagctgacaaatgattataaaatctgtcaaatcgtttctgactcatttgtttgtctgtttttcttaaattcatttaaagttttagaataaactaatttgtttaccaatacatttgcaaaaaacccaataacttaacaatgtttttttgtaaacaaacaaacgaaagatcactttaatctctttttcaaatattttttaaacaatgtaatcacataaaaacctaactaaaaagtaaagtttcaacattaccttaaatacattgatttaatttaaactttatttcattttatgcaacttaaaaacgcgagttataaacttatttcgtgctagtgtgcttaaaatgtcaataaacgcttaatttgcaaattttgaaattttttttcattatagttgtttttagtcatataaaaacgattgaaaacaaacaactattgccattaggaggaaccccttcaattgacctaagcgggtaccttggcctcgaagaaagcagtggtgttaagacaaagctgcgtcttgaagatttgcagtggggcctggcagacgtgtggtgcccatttggtgcagcccctcacggacaagcggtgctcgctcattgtggtcccttcggcagtcatggtgacattggccaacagtgtgaggcaatcaccggtgatgggagtgggttgaccagcctgccagggaaggtagaatgccttcttcccagtgctctgccagtagtaatcttcacttccgcccagcttatttccggatgtccacagctctgggctttggggtacaacagttgtcagccattcgttgatggcagtgaactccattttattgctaaagctcagaagtccggcgttaagggattgacagtgacgatccgaagaagttcttccaactattatcaaaaaggaggcatttgcccgccacctgggtgaagttggttggacaaacggcaacggtttcctcgctggccaccaggtaaagttgacccaaggccaaactggccagtgcgaaacaaactaacttggtcgacaacatcttgagtaactgatcaacagctggcccatggatctcttttatatggccaaccagcttggggggcagcgataagtcagctatttgataaggattcttagaacatgcgtggttaaagttatcatttccttatcaattcaactgagatgtcgtaaatggcatgactagaagggtatagtacgaggaatcccctagaaaagaagtatataagccagcttgtatgtatttcaataaggatagttaacaatacgaacaagcagagtaaaagattttactagaatcgtccgcgaaataagcacacttttccagggtctaagtcaaatctaattttgatttcaggtaaccatcgccactgacttgggaaaagtagtaactcgtctgcaattggaacgctccgaagtagccttctacatcttcaccaacggcagcaaacagcggtaggtcttcttacaattcccgaattaataatccttactctttaaaaacagagccaacctcactttgagatttgcgaatacggatcacgccctaaacaacatgaccacttggagtgaaatcagtgttcccacagcaccagacgaggatgaagatgatcgggaaatgatgctgaatcggtacgagttccagagccgactaaacgaatttagagatcgtgtgcgtttggaaccggaggagagctccatcaccgaggtgatgaactggtacacatccattaatcgtggattgctccatcatctgagtgaacagattaaggaaacagataatagcggcgtatggcggtgagtatagttg

SEQ ID NO: 35159 - DNA, 357 bp, DROSOPHILA
atggagttcactgccatcaacgaatggctgacaactgttgtaccccaaagcccagagctgtggacatccggaaataagctgggcggaagtgaagattactactggcagagcactgggaagaaggcattctaccttccctggcaggctggtcaacccactcccatcaccggtgattgcctcacactgttggccaatgtcaccatgactgccgaagggaccacaatgagcgagcaccgcttgtccgtgaggggctgcaccaaatgggcaccacacgtctgccaggccccactgcaaatcttcaagacgcagctttgtcttaacaccactgctttcttcgaggccaaggtacccgcttag

SEQ ID NO: 35160 - protein, 118 aa, DROSOPHILA
MEFTAINEWLTTVVPQSPELWTSGNKLGGSEDYYWQSTGKKAFYLPWQAGQPTPITGDCLTLLANVTMTAEGTTMSEHRLSVRGCTKWAPHVCQAPLQIFKTQLCLNTTAFFEAKVPA

SEQ ID NO: 35161 - DNA, 2573 bp, DROSOPHILA
atcggtgacactgcaagagatcctggaataccgttccgctgtggccgacatcgagacacaggtgagcaggtggttgggtcaggttggttggattccgagtggccgagtgactgcgtcgatgaaaagaagcaaacaaagggaaagacggacccggaaattgtgtctttgaggcgtaattataatttattacaacgattcaatcaaacgccaagtatgtagatgataggggggaacccatgtccagcttgttcaatgttcacttgaccatcgagcgaaaccttgaaatggtttgtttgctcaggtaagtgccatggaagtccttgtgaagggttccggagcacgagctcgtggccaggcactcaactaagtccctccgccccactctgccccatcgcccacttcatctatccataatgcaaatgcgaagaaatatgaaagagaaaacggaaagtattgaacgtacttacatatatgacccaaaggggatgaggcggtggagaccaaagtgaattgataaggacgtaatgccagctatgcagcgacagtcgccaatgcaggatgggagtgcggaaaatgggaaggaaaatgagaaggagaatgagaaggagaatgagaagtggaatgtgggtggtctatggaggtggtccttgaatggggtcacgtacttagaatgcaaaacacacaataaacaaatcaaaaaaaaaaaaaaacagataaggaaaatactctgattctaaatttaagccacttacccaagataaaactacttaaaattcactatctttaccagcttaattcattattttatgataaggtaacttaaggtatttctcagatatttttttttcgtccactgaccattacacactaatttaaatttgattatattcaaatactccgacatatttcaaaagttgctcaagtttatttaaaacgtagtttttagttatgacaatttataattattgaaaaacgaacaattatggccccctgaatttacttaaacgggtatcttcgcctcgaagaaagctgtggtattgagacaaagctgggtcttgaagatttccagtggagcctggcagatgtggggtgcccattgggtgcagggctttaccgttaggcggtgcacactcaatatggcttcttcgggagtcatggtgacgttggccatcagtgtaagacaatcaccggcggtggtagtgggttgaccagcactccagggaaggtagacagccttctgcccagtactctgccagtagtaatcggaagttccgcccagcttgtttccggatgtccagaactccggctggtatggtgcaatgatcggcagccattcgttgatgacattgaattccgttggattgctaatgctcagaagtccggcgttaagggatcgacaatggcgatccgactcgtagaagttcttccaactgccatccaccaggagacacttatccgccacctgggtaaagttggtgggacaaagggtaatggtttcctcgctggccaccagataaacttggccaaaagccaggctgaccagtgcgatgcaaactaacttggtcgataacatagtgggtaactgacccacggctggccactcgaactcttttatatggctaaccagctggggcagcgataagtcagatttttgataaggactcgtaaagtattcgcgtggctgaagttatcattttcttatcaatcgaactaaggtgtcttagcagtaaaaagtaaaaatcgcttgactacaggggatacttatattgttttggagaattccccttgttcaaaataaagggattccacctatagctgacaaatgattataaaatctgtcaaatcgtttctgactcatttgtttgtctgtttttcttaaattcatttaaagttttagaataaactaatttgtttaccaatacatttgcaaaaaacccaataacttaacaatgtttttttgtaaacaaacaaacgaaagatcactttaatctctttttcaaatattttttaaacaatgtaatcacataaaaacctaactaaaaagtaaagtttcaacattaccttaaatacattgatttaatttaaactttatttcattttatgcaacttaaaaacgcgagttataaacttatttcgtgctagtgtgcttaaaatgtcaataaacgcttaatttgcaaattttgaaattttttttcattatagttgtttttagtcatataaaaacgattgaaaacaaacaactattgccattaggaggaaccccttcaattgacctaagcgggtaccttggcctcgaagaaagcagtggtgttaagacaaagctgcgtcttgaagatttgcagtggggcctggcagacgtgtggtgcccatttggtgcagcccctcacggacaagcggtgctcgctcattgtggtcccttcggcagtcatggtgacattggccaacagtgtgaggcaatcaccggtgatgggagtgggttgaccagcctgccagggaaggtagaatgccttcttcccagtgctctgccagtagtaatcttcacttccgcccagcttatttccggatgtccacag

SEQ ID NO: 35162 - DNA, 573 bp, DROSOPHILA
atgttatcgaccaagttagtttgcatcgcactggtcagcctggcttttggccaagtttatctggtggccagcgaggaaaccattaccctttgtcccaccaactttacccaggtggcggataagtgtctcctggtggatggcagttggaagaacttctacgagtcggatcgccattgtcgatcccttaacgccggacttctgagcattagcaatccaacggaattcaatgtcatcaacgaatggctgccgatcattgcaccataccagccggagttctggacatccggaaacaagctgggcggaacttccgattactactggcagagtactgggcagaaggctgtctaccttccctggagtgctggtcaacccactaccaccgccggtgattgtcttacactgatggccaacgtcaccatgactcccgaagaagccatattgagtgtgcaccgcctaacggtaaagccctgcacccaatgggcaccccacatctgccaggctccactggaaatcttcaagacccagctttgtctcaataccacagctttcttcgaggcgaagatacccgtttaa

SEQ ID NO: 35163 - protein, 190 aa, DROSOPHILA
MLSTKLVCIALVSLAFGQVYLVASEETITLCPTNFTQVADKCLLVDGSWKNFYESDRHCRSLNAGLLSISNPTEFNVINEWLPIIAPYQPEFWTSGNKLGGTSDYYWQSTGQKAVYLPWSAGQPTTTAGDCLTLMANVTMTPEEAILSVHRLTVKPCTQWAPHICQAPLEIFKTQLCLNTTAFFEAKIPV

SEQ ID NO: 35164 - DNA, 3442 bp, DROSOPHILA
gtgcgcgctgggcgatttattgggaatctgccggatatagcacataaagcccctcaatacgttacagatgtgaaatataatagcatttcattcacatatcttttgagtttttttttttttttcattttaattatttccgagtgtgtaggcaattaaaactttaatcaataaatgtgctcatgataagtgtgtaaagtcaaccaaccattggacattgcgacaacagaaacaacaagggacaaaggatgtgtgtccacatagatacaaaaactcaggccatcgcgcaaattgtttactttggcgctacactggacgaaaacccttgttccgcccggggagcagcaatcaaatgtgctttcaattaaactcaaagccccaacccctttgctaaactcccacccttaacgcttcggtccgcaacgcttggttgcttggctgctcatccatcaaatttgtcgtccaccgtcccgtcctgacgtcctgacgtctcgacgtcctgacattcgtttggcggccagcgaatgggcggcaacggggcgggggcgtggcccggccacccatatgtgcttatatgccattctttgcaattattctacgagccctcctcattacggccccattgaaactcaacaagtgtcgccggagtgaaactatcagatacaaattgaacacgcaacaattatgtacagtcccagtgacatttgctcttcgagtgcactggcaaaaaaaaagcctacccatatcttcttctagttcagttacttaagtgacgaagtatacaaatatttaaattattatagttttttgttcttggtttaaaatacttttgtacacagtttaagttgtcactgaatttgtaaatagtcataatttaaaatatgatcaagaatggagtttctgcaacatagaaaatgaccttatgtgcaacattttctcccagtgcagcaatcgggtttatgaggcactggcactacacatcctcgcctgaacaatcagcaatatgctaaatggaaaagcgcacaagtccggcgagaaccctgaccctagcccttgcccagcgggcggcagcaggatgccgacccccagcgttaagatcgacattagcacttgccaatcgaaccgtccgatggaatcgcgaacggctcccgacgacgtgaatccatcgggggagggtggcctgctcctggtgcccacacatcacaatctgcagctcgataaaatttccgtgcgctcgattagttccgaggatatatcgaatgggggcagtggaagatgttgcaatgccgccgcccgtaatccggctataaaaacgggtcgacgactgcagctgatgcaggtgagtttatccgtcggccctgggcgccactacaggtgcctagggaacaacttatccggagcagcataaattagcgccagcgtatgcatcttaattaggacgactggtcagagtcacgtgcctgggaaaccacagagtgcgtctaatgaatgtcgcgattagcgggccacgataaagactaatcacgcctcctttgccgcctttaccaccgcccttacccactgtgctgttccattggcattgcctctaccgctcggtatcagtttcagataaagccgagattggtccggactctttctccgctgagcacatattgatgccaaatgaaaatatatggcacagtgggccaagagcgctagaacaattatttcaaactccttgtaggaaagtcaatttctaaggtttcgcaagaagttggtaatctacagaattaaaaaggatttttgttcagcgcaaaaatcttcatttaatatttttgctaattaatttaaagcatttgctattcaaagaaactagttaacttaagttatgcttatttacagggtattttaaaaataatttatattgtctactttaaaccgactttcaaagttgccttttgtttgatacaattatttaagactaccaaatctcgaactttcaagcccactgtaagcgaaaatttactcattgacatgcgaatccatttccagatgataatactaccatttataccaatactggcattgattgtgcaaacatcggtgacactgcaagagatcctggaataccgttccgctgtggccgacatcgagacacaggtgagcaggtggttgggtcaggttggttggattccgagtggccgagtgactgcgtcgatgaaaagaagcaaacaaagggaaagacggacccggaaattgtgtctttgaggcgtaattataatttattacaacgattcaatcaaacgccaagtatgtagatgataggggggaacccatgtccagcttgttcaatgttcacttgaccatcgagcgaaaccttgaaatggtttgtttgctcaggtaagtgccatggaagtccttgtgaagggttccggagcacgagctcgtggccaggcactcaactaagtccctccgccccactctgccccatcgcccacttcatctatccataatgcaaatgcgaagaaatatgaaagagaaaacggaaagtattgaacgtacttacatatatgacccaaaggggatgaggcggtggagaccaaagtgaattgataaggacgtaatgccagctatgcagcgacagtcgccaatgcaggatgggagtgcggaaaatgggaaggaaaatgagaaggagaatgagaaggagaatgagaagtggaatgtgggtggtctatggaggtggtccttgaatggggtcacgtacttagaatgcaaaacacacaataaacaaatcaaaaaaaaaaaaaaacagataaggaaaatactctgattctaaatttaagccacttacccaagataaaactacttaaaattcactatctttaccagcttaattcattattttatgataaggtaacttaaggtatttctcagatatttttttttcgtccactgaccattacacactaatttaaatttgattatattcaaatactccgacatatttcaaaagttgctcaagtttatttaaaacgtagtttttagttatgacaatttataattattgaaaaacgaacaattatggccccctgaatttacttaaacgggtatcttcgcctcgaagaaagctgtggtattgagacaaagctgggtcttgaagatttccagtggagcctggcagatgtggggtgcccattgggtgcagggctttaccgttaggcggtgcacactcaatatggcttcttcgggagtcatggtgacgttggccatcagtgtaagacaatcaccggcggtggtagtgggttgaccagcactccagggaaggtagacagccttctgcccagtactctgccagtagtaatcggaagttccgcccagcttgtttccggatgtccagaactccggctggtatggtgcaatgatcggcagccattcgttgatgacattgaattccgttggattgcta

SEQ ID NO: 35165 - DNA, 510 bp, DROSOPHILA
atgctaaatggaaaagcgcacaagtccggcgagaaccctgaccctagcccttgcccagcgggcggcagcaggatgccgacccccagcgttaagatcgacattagcacttgccaatcgaaccgtccgatggaatcgcgaacggctcccgacgacgtgaatccatcgggggagggtggcctgctcctggtgcccacacatcacaatctgcagctcgataaaatttccgtgcgctcgattagttccgaggatatatcgaatgggggcagtggaagatgttgcaatgccgccgcccgtaatccggctataaaaacgggtcgacgactgcagctgatgcagatgataatactaccatttataccaatactggcattgattgtgcaaacatcggtgacactgcaagagatcctggaataccgttccgctgtggccgacatcgagacacaggtaagtgccatggaagtccttgtgaagggttccggagcacgagctcgtggccaggcactcaactaa

SEQ ID NO: 35166 - protein, 169 aa, DROSOPHILA
MLNGKAHKSGENPDPSPCPAGGSRMPTPSVKIDISTCQSNRPMESRTAPDDVNPSGEGGLLLVPTHHNLQLDKISVRSISSEDISNGGSGRCCNAAARNPAIKTGRRLQLMQMIILPFIPILALIVQTSVTLQEILEYRSAVADIETQVSAMEVLVKGSGARARGQALN

SEQ ID NO: 35167 - DNA, 2838 bp, DROSOPHILA
attaccaataataaagagattctattttgtaaaatgaaataagaacaataatttattactcattggatttatttataggattataaaaaaatagaatcttaaatattaacatatctagaaaattttgttagtcagcttaaaaacggctgtgaaaccccaagttggctgcccaggaccaaatttagtgaatacgatcttgtagaatcctggcggagcgatttccggcaatccatcaccaccgattttgcacttgtcaagcttataggtgttctttggccagggaggctgaaatttatcttcgtatttgggtagattggagcagtagccgaggttttttgagatcacatccttatagtaggtgttgatgtaatcatagaagggctgtttgggtattgcccagggtagcagcttgtaatcactctcatcgcccgaattactgcgatacgcttgtgcctcaacctagacaatatattgtgaactaaattataaataataaatgatttggaatgacccaccatcgtttcctcattcgtgtcatatttccactctaagatggccgaaagtccgtaatctgaacgccccagacgttcgattttagcttcaaatttaagcttgctttcatccgaagaggttgcggttaataatataggctcgtagtcccattttcgctaaaaacataagaaacattaggtattgaaattaatttttttatgcccaaacttactgatgctgctgtcaaatgaaataatatacacactattccgattctagttgaggttgtaaccaactcaaaagctaacatttcgctcgaattaaatttgatacattctggcaaaacaaggcccttatataccggattgataatctaaattcaacaaactcacgaacttatcatgttcgcaagatatttataatgtttgcgtttcatatttaaacattctattctgtacaacgaacaatttcgtgactgtaattgtccaataattaagttttttgaagtgtctttgatgcttcatttattgctttttatgtcaactactctctacgtgctttataataggaatatacataggtacttttgataatacctatttaagtgatcgcccacgtggaaatcagacaagttttgtggttatcttcacaatcagaatgaatccccaatccacgggattcgtcaaggtgaaattgaccttgtagtagccctcgggaaccatatccggaaaaccatcactgtttgccacacacttttccaacacgtacgtatcctggggccacggtggctcgaatttgccatcaaacttgatgagattggaacaatcgcccagatttggtagcactacgttcttatagtggctgttcatgaactcaacatatggctgtttcgggatgctaaacggcataatcttgtagtcattttcgtccccggaggtgcttcgataggccattgcttcaacctgagggaaatttacagcattaattctttacattcttaaccatatctttgggaatgaatagatagttgtctttattccacttgtacatatttaccatggtattatcttctggtgtgtacttaaattcaatgttgccagaaagggcatattctcccctaccgactcgctccactttggccgcaatcttcagcttagtctcatccgtggtataggtttcaatggacagcggttcgtagtcccacttgcgctgttaaatcaagcttaagatttttatcaaacttaaacgcaaactcggttttggttacctaccttgccattgcattgatcaactatcaaaagtattaatactcctccaatgatgggcagtagcaaacgtggtagcattttggttcaaattcaattacattgagcagatttttatggtttatatagctggggttttataaatttacctaacgttaaatgttttcggcttgttttcgatttatcagattgtacaaatgccaatttgggttagcaacaagcacgccatataagtgttctggtttgttttttgttaaatatgaataactataaatctacatttcaattgatgacatcagttacaccttataaaagtaacttttaatagaataataataatttgcacgaatattttaaaagtatattatagtttttttaacgaatcgtacccttgcaaatattcaaagcccaagggacttcaattaaaacagaaccctcaacggatcgataattcttgattcccctgacgaaaatcggggaagtataaacaaccgaatcgatggctccctgcatcccaacaacttgtgtgtgcaactcattagatggcgagatccagaaagggaaactcgtaactcgtaattgaggacagcaaattgctggtgacacgaacaaaagatctgttgagggaatgaagtcataaattcccggagcccatcaatggacggaaaggggcgcgcacatacacatttctttcaagtgatcaatagattggaaaagcaattgaatgttgtgtgtctactagcccggtctgctcctactccctcttcatcttgtgctcttggcatctcgggctcgttttcagaccgtcgcctaagtggcatgatcgccacttgagttgagttgagttgagttgggttgggttcagttgagcggagctggtgtggcatgccacaaggaaaataataataaaaaaaaaaaccaaaaaggaaacccgctgcacttaatttaattgaacgccgagcagccgccgcctcgagcgtgttgatcctaaacagccgccgccaacgcaatcgcaatcgcatgggctgctcttgggggaaatcaaattatcgcgattcgagccgaatcaaaacagaaacaa

SEQ ID NO: 35168 - DNA, 682 bp, DROSOPHILA
atgctaccacgtttgctactgcccatcattggaggagtattaatacttttgatagttgatcaatgcaatggcaagcgcaagtgggactacgaaccgctgtccattgaaacctataccacggatgagactaagctgaagattgcggccaaagtggagcgagtcggtaggggagaatatgccctttctggcaacattgaatttaagtacacaccagaagataataccatggttgaagcaatggcctatcgaagcacctccggggacgaaaatgactacaagattatgccgtttagcatcccgaaacagccatatgttgagttcatgaacagccactataagaacgtagtgctaccaaatctgggcgattgttccaatctcatcaagtttgatggcaaattcgagccaccgtggccccaggatacgtacgtgttggaaaagtgtgtggcaaacagtgatggttttccggatatggttcccgagggctactacaaggtcaatttcaccttgacgaatcccgtggattggggattcattctgattgtgaagataaccacaaaacttgtctgatttccacgtgggcgatcacttaaataggtattatcaaaagtacctatgtatattcctattataaagcacgtagagagtagttgacataaaaagcaataaatgaagcatcaaagac

SEQ ID NO: 35169 - protein, 188 aa, DROSOPHILA
MLPRLLLPIIGGVLILLIVDQCNGKRKWDYEPLSIETYTTDETKLKIAAKVERVGRGEYALSGNIEFKYTPEDNTMVEAMAYRSTSGDENDYKIMPFSIPKQPYVEFMNSHYKNVVLPNLGDCSNLIKFDGKFEPPWPQDTYVLEKCVANSDGFPDMVPEGYYKVNFTLTNPVDWGFILIVKITTKLV

SEQ ID NO: 35170 - DNA, 2177 bp, DROSOPHILA
ggatagtggatggtgcatagtggatatggagaggtgggcagtggcaataacacatcagtgcctgcctgctgacttttattggaatcgcaggtctcgaattcagcgcagtctgcaccttcgaatacgggggccgaaacttaacccattttcacaccagctgtttaaaaagtgacattaaaacgtttaatccatttaaaatagttaacaattaagtcaatcttaattagggtataggttgagcattagaagttatggttcttagccatattagaaaacaaacagaaaagaccaatttccaataagcttatccgcatcatgcgaacacgacaaattgcttccaaaaactgtgagtaaaaccaatttgagttgcaacaatgtagagacttcctttgtctcgaaaatcgaatctttttttttaaggcaatcgaaaatcgaaaccagtgacgggttaaactttttgctgatgagcatgagaatgatgttgctgtcgggctcctctggctttcatcctttgggctcccttggtttttatctttttgttcgttttggttgaggtttttttcttcttttttttttttgtctttccctcactttggtttgaacttcattgttggctcgcttaaaattccaaacagcaaattgcaactgccaacaatttcgaggctatcagtggcatagcatcaggcaaccacgtcgctggtggctgctgctcctgctcctgctgttgctgctgctgctgctgctggtggtggagatgctgatgttgctcctaccactggcagtaattttatgcaagatgctatctcaacacacctcaacacgcctgctggcggagaggcacagagaaatgcatgtaagccatttcactgggttctgcttcttggccatgcttggcctgctgttgttgctgttgcaagtatgacaaacagcctgctgccgtcttttgaatggaattcaattcccatgcagcaggggcagcagtggcggcacagcagcaaccctagacgtctctcacatctcgtgccttttgtctgccttttatctgctgatgttgctgttgctgctgcggctgctgttgctgttgctgctgctgctgctgctgctgcttctcggcacagcaatacttgtttagcttgtttgccgccgctgctgctgctgctgctgcagttattgccattgtatcttgatgcctttcaagtgccaattgtgcgaccgccccgaacctttttatttctgtcttcccatttaacccccccccccccccattcgtttttttgcgagacaaactcattgcttatttaatttaaggtgggaattttagcgttttccccttctttacttttgtgtcacgagcgaatttattcaaattgagttgataatagttgcgctacagctactgctgctgctgctgctgctgctgctgctgccggcactgccattcaagtgttaattgttgtcggcacccttttgaggatctgagaagatttgttgggtatttaataaatatttgcacagcacaacaaagactgtcaggtttaatcaacaatgagaacggcatttgctctcttatggccagctagtagctctagtcccccagtaattcacgatttcctgctgtaattgaaaagataccaagacaagttgctgctgctacggcagcaacatttcaaccagtcgacggcagtcgcggtagtgcattaattattcatgagttgtcgcgcaggcgacattgcagctacagctatagcagcaacattagcagcagcagcagcaactcgtagacagcggcaacataattattcatgcgcgcttatcgccagaaaggtaggcaacaccattttaaccacaagcggattataattatcaacagttgccatcagagctgatggacggactgacggtcagttgctgctacttggaggcgcagcagcaacatgttgctggcggtgcacaatacatggctaatgaccatgatgatgatgatgatgatgatgatggtgaagccaaaaacgcgctgcagcaaatataattacacggccagcaacaagacagacagctgctttaattgatgttgattgctatcaacaacactgcctccgagttcttcgcatttttgcaagcaagcattttggagcaattttggccgaaacaacaaaattagcattactaaattgtgc

SEQ ID NO: 35171 - DNA, 177 bp, DROSOPHILA
atggcaataactgcagcagcagcagcagcagcggcggcaaacaagctaaacaagtattgctgtgccgagaagcagcagcagcagcagcagcagcaacagcaacagcagccgcagcagcaacagcaacatcagcagataaaaggcagacaaaaggcacgagatgtgagagacgtctag

SEQ ID NO: 35172 - protein, 58 aa, DROSOPHILA
MAITAAAAAAAAANKLNKYCCAEKQQQQQQQQQQQQPQQQQQHQQIKGRQKARDVRDV

SEQ ID NO: 35173 - DNA, 2300 bp, DROSOPHILA
gaggacgaggagatggccgccaggaggtgaggcgacgaaatgagggacaacgacaaatcgacaaatatgcaaaagaggggcgcaccacaaaaggggaggggggtgtgtgtgtgtgtgtgttggttcgaagccttatcgcatttatttatgcatatgcagtgatttggccccaaaatcacagtccgaaaaaaaagatctgcgcataaaacaaaagactcagagcacaaactcgttttgctggccatcgcgaatcgcaggggatgtagggccccgaaaagtggcacaaaacagcaaggggtttgggtttgggagtcggccgatgaccatgcatcaccaatgccgaggcacgcttatcagtaacctacacttaaagttaatgcatgcccgccaggaccaaccagcagagatgccaatgcagtggttgccgcgaattcactgaaagaaatttcaatatttcttaaaataatacccccaaataccatttctcattcataatacttataccattaacctttattttctaggctctgttaaatctgacactctaattgaagtgaacaaatttcaatttgcttgcatcgttgagttagtttagttccttttgtttaaccactccatagttaatttctcccggtgtacttttcgttgttatcagcgctgggcctgggcttttagcaaacgccgacgcaggccgctgggctggatcaggcagccgatgtcaaaaggcaggcagaaatgaaatcgaaaatgaatgcgactgggcagataagtcggcgaatgacacagagcgacaagttgacaatagaggggggggggggcagatggttctgcagggatgggtgagaaaaatgtgtcctcattcgggtcaaaagcgaatgaaacaaggaaccaagtggagggaattcaaaagcctcccggcattcgacttctgaccaaactcgaatgcaaatcgatgcggcaataaaactattaagccattagtaagccaaacacgagtacaatgccagaaaacaaacacgtgcagcagcagcagcagcagcaacagtcaccgccgcagcagaaacagcaacggcaagcgcaggagttgcaacagcaacaagcaattaatgcaaatgcggagagcagccggcagccaaatcgagaaggaggcaggccaagcacatcgagatcaagtcggcagacgtatccgaatgcctggagaatgtcggtctgctgcagcagcaaaagcagcagcagcagcagcatcagaggctgcaacatccaatgcagcagcaacattgtctgcacccaggcagcctgacaatacatggcgaggtgcaaactaattgaaatcattacactagtaaaaatgttaattcaattaaaatgcgcgcaacagcaacagctgcagcagcaacatctcgcgcagctattgacccacaagcagttgcagccgatgctggtgcatctccccactaaaagagatatcatcgcaacatactgcctggccggagctgctactcaaacctccccaaccgccgccacctcgggaacatcagcaacatgttgttaggtcagctgcggcagcaacagcaactgcagcagcaacacgaacatctctaggccattggcagtgtggcatgcaaatgggagctgaacagcgtggttcaatcggcgtggagcagggagccggaaccagtctatccttgaatacttctgttttttttggaggaactgtagctaagcgtacactgataaacaaattgccaagatatagcatagcattatgatacagattcgccttaataagggatacttggtttttcaacttaagatagaatacatacataatgttctgtagtgtttcatatcttccactacgcttcgaaacaacacgaaaaagttaaattccaaaacaacactacattttcaatttaaaacactgtcactcgaataaaactcgagtaaatggaacacttataaaccatttgcgcttactaatgcttattttgacagttaataatttatgtcggtaaatccattgctttaggaagtagtgtgcacgaaggaaactcctctttaagcgcgttttaaatgcctgatttaagatggcgattttccccagagaactcttagatccccattacgtatgcaaattttggccagcaattctctggcgcttccagcttcgccgctgtgatttgtgtgccttccttcgatgcaatgcgatttgagggttttgagggcgagggcttcgcggagagatggcaagaacggcgagtcgcatttccggttggacaagtagctccataacaaatggg

SEQ ID NO: 35174 - DNA, 300 bp, DROSOPHILA
atgccagaaaacaaacacgtgcagcagcagcagcagcagcaacagtcaccgccgcagcagaaacagcaacggcaagcgcaggagttgcaacagcaacaagcaattaatgcaaatgcggagagcagccggcagccaaatcgagaaggaggcaggccaagcacatcgagatcaagtcggcagacgtatccgaatgcctggagaatgtcggtctgctgcagcagcaaaagcagcagcagcagcagcatcagaggctgcaacatccaatgcagcagcaacattgtctgcacccaggcagcctga

SEQ ID NO: 35175 - protein, 99 aa, DROSOPHILA
MPENKHVQQQQQQQQSPPQQKQQRQAQELQQQQAINANAESSRQPNREGGRPSTSRSSRQTYPNAWRMSVCCSSKSSSSSSIRGCNIQCSSNIVCTQAA

SEQ ID NO: 35176 - DNA, 2360 bp, DROSOPHILA
gtccgttccgtctgtcgggtaagccatctctttcccccgccacgtcgaccgtctctttctgtgcgcttaccttccttctcagctcgtatctcaaattgttcaacttcatcagcaaaaaaaaaaagtaagggaaaagatgctgctgctgtggattgtggatgtgtactgtgaaaaatttgaatactttaaagttttctttttttttttttataaaaactcatatttatattctcattaaacgatttaattacatttgaatgcactctgttgtcaaacaaagttgtatctttaaactaaaactgtttcaaatcagagttgtattttgattaatcccatatatagttgattaaaactattgaaatctatatatttatttgctgtgcatcaaatcacaccaagtcaagcttccctcaacccctttacatatacatattctttcgtctctcctcactcttcattcgattgtcatgagtctgagcccgagactccttgcttttgtcctttttgttttccaacggcagcaggcagcgtcaggagactaagaccccgaggtcccagagcacttgagctgggtttctctgagttaaggaagtcaaggcagatatggtagggaatcggttgagggggttgaagggcttaagcggagccgaacgaggagttaagcggatgcataatacgaaataatgtcttgaaaacgaaaagggaatgctgtgcatcggtgggattccgatgctactaagatacccttcagcttaaaaggctgtgcaaaacatatgcatgtgttgcggattattttggattaatttcacgtaattaatattacagtgagatgagggccttattgcaactctttattgatttaattgaggtaataataaattgatggaatgggggaaagaacacaaaacagcaaaccctaactatgtaaactataatgttaaaatctgtcaaaatcccctcgccttttctgtccaaaattcgtgtttagaaatttctatgaatggctctcgtccagagtgatgaaaacgacttccatgcgcttcgagaggcgcaaaggatggttgactcgtgccaggactttgcggaccacttgatcgtggccgaatttctaccccattgtcgcggcgttgcctacatcaatattcgcaccttggagcaggtcatctattgtgtgcaactaagtcgcgctggctatcggatcgtgtcctatgagttcgatgatgtggccgatgaggtggccaattgtgacaccgtctatgagtccgcccatcaattgctggcagggataagtccgctgtatggcgagaaatatggctttggacgagagccactggggaagcgaaaggaaaagcagtcctgaggtgggcgtggcatgtgaagaatttgtctgctaattgctaattgccgccccaaaaagtgataattaagcgttttgcaggtaaatgacttgattgcaataataaagcccgaagctgcgagttggattcggggtctgccatttgattaattgctgccaagtgagcacagacggtggggagatgctggatgcaaggagcaggaacaggggcacggttgccagttgattgactcaacttggcactctccggaccttttgtagcgaaaaaagttaacaagtttttgtgccgttccacttgactgccgccgtcgaaggaggcgaatgaagatgcagacggttggagctacaagctacaagcttcaagcctcgaacacccaaccaaaccaatccaaaacccagcccagcccaactcagtgcctctccagccccacttgtattcctcattttggccgggcaccaagccaactaaggtttttatctagttgagtccatctagtcgcttttccgtccgtcccacgggtgtctgctgtggacaattcacagatacatacgctgaaaacacacagatgaacaaacgcagatacaggcaaacatcaataagaacgctagaacttcagatcaatgcaatgcaataaaggtgaaattaaagtgaagaaagttagtcgaactattttcgcctaaaatgtatgcctcaccctacaatattagatacttgaactgtaaagtgacagtttgctatatgtgagcttcactgtagttgggcgaacgcatttgctttggcgtccgtatcggccatgtctatctgagctggctctccacttgtctatgctcgtatatttgtccattgaagcatgcaattgattgctgcaacggcaacggcagcagcagcagcagcattatccccaacctctgtgttttgccatacccacctccctccccccccccctactggaacctgccccttctccgcctctgcgctttaattgccttttcattgcagccc

SEQ ID NO: 35177 - DNA, 360 bp, DROSOPHILA
atggctctcgtccagagtgatgaaaacgacttccatgcgcttcgagaggcgcaaaggatggttgactcgtgccaggactttgcggaccacttgatcgtggccgaatttctaccccattgtcgcggcgttgcctacatcaatattcgcaccttggagcaggtcatctattgtgtgcaactaagtcgcgctggctatcggatcgtgtcctatgagttcgatgatgtggccgatgaggtggccaattgtgacaccgtctatgagtccgcccatcaattgctggcagggataagtccgctgtatggcgagaaatatggctttggacgagagccactggggaagcgaaaggaaaagcagtcctga

SEQ ID NO: 35178 - protein, 119 aa, DROSOPHILA
MALVQSDENDFHALREAQRMVDSCQDFADHLIVAEFLPHCRGVAYINIRTLEQVIYCVQLSRAGYRIVSYEFDDVADEVANCDTVYESAHQLLAGISPLYGEKYGFGREPLGKRKEKQS

SEQ ID NO: 35179 - DNA, 3411 bp, DROSOPHILA
cgatgagtgactgccgggtttgactgtctaagccgcaggtacgaagtgattaaacgccgagctattgccaccgcaattaggatcgcatcgggatcgggatcgggatgcccgagatcccaataaaagccaaattgaatcggggtcggcaacggaattgagagcgggggcaactagtgcaggacctgcaaggatgcagctgataatggcaaagaattgcgtcgtcacaggttcacagagatggccggccaaaaaggaagacaagtagtgctgggggggggagaaggtagaacaatttttttaacatcaaacgaataaaggtcgctctcgcacactcgtatttactgtggaaaagggagctcctgatttgttgcaagatttcttcgtaaatggcataaaaaactgctcgagaaacaaggcgacaagccgtgggatcgccgtggccgtggctgtggatcgttgttaagattgttaatggcacccgacctgttcacgtccacgctcacacaatgttggacaattaacacggcccagcaagaagaaagccaggtttttggaggcacatccttgggaatgtcgggcagaacagaggccgcgctacagaaatcaaggccccctatttcatcgcatttatcgcattcccgcgccccctctaggaattgttcatattttgtgtatcattcggtcaggggcagtaccgtcatcagctgatccaggggattaattatgttgacaggttgctgcgattcaagtgcctttgaattggaattggaactttttgtgtaatatgttcacgtttcattcaagcagctccattcatatcttccaggaatctaagtcacatccttcggcttccctcaatttagaaagtgtccgacttatgtaatgtatgccatttccttataatgaaagtgttctttgaagtttcttgggaaatattgcttaactattgttatattgaatgatatatgatatgatagatatgatttgcatttggtaattcctactctttctgtgcgtacatctgatccgcaaacatcgaaatgctgggtcggtctttcatctcgctgagctgtaggtcgacgtagttcttggtccgccgataagctgccacattagtgtagcagtgatggacatagttctgacccaaactggctagaacggcgtagcggagatctgacttggaaacttttcgaagaacaggtttgggcttaggcactaggggagtgatcggcagaaggctcggcaaggatgggagcactggactagaggcaggaggtggtggaggtattttaaaaataacttttggaacggctttatcactaggagtttgtggcagggatgggagcactggactagaggcaggaattggtggagctatcttaagagtaacttttggaacggctttatcactaggagtttgtggccactttggagctggtggctcgacagacttgtggggcacggcagccagtttcttccgtatgctcagtaggagctttgccgaactggaaagacccttttccagggccctcacctcgtctgaactgggttcgaatttcaacaagttaaagctccagcgggagattccaatgtcattggttaatgcataggcatagtttcgatcagattttacggcggtaaatggactataggacgtgggttctaccagtttttgaagaagcaatgatctgttaattggtggcttcgaattcttctctaaagatttgtgaccactttgtttggcgtcgtttttctctgcctgccttacaggagctttgtgtggctgcgttatcgttgcctttggtttttttatggtcccagagttttgctgacttcccttatttgtacttttttctttcgccttgcgacagttcaatcggtatcccttgatcagatgtggattcgattcgatggcatgctccatgtatgaagtgcgactaaaccgcaccatggcgtagttaaagttactcatgccattcctcacgctgaccctctccaaatccccaaatttgctgaaataggtgaacacatcccgatgggtaatgtcctggtctaggtcgggaatgaacatcaggcgatcgtgttccggctcgggaggccgtcgttcgggtggctggactaccactgtgccaggttggtacgttttcaccttctcttgtagggaatggaaatttgctaggattgtggataattcaaagtccgtgagaagcttaaagtccccgatagccgttctcacctgccttttccccatagacactagctggttccctgggcatggcttcccccagctgggattcactaatccttgctctttttggcgaaggacacgaatcaagtccaggcaagtccaatggcgtgttggtcactcccaggggttctagggaaatcaaggagctccatgaactatccatgctttttaaagccaagttgaaatatacttggttgatagacaaacccaaagccaactctgatcaatgactatttattataagagtggtgaagtggggagttttcccttaaaaattgccattcatagaaataaattccctaatttttacgcagaatctaaagtctttcccctgaggtttccccaaatccttaaaagtcaaacctactcaaacctttcccattgcataaatgaaaattgcactttcagttcatcgaggcctgggaaaatttttatccgtttcgcacaaggaaatgatttgccaaactgagcacaaatattttcatcggaaatttcataaatattttatgaaactgtaggatcaaagtcaaagccccatttaaggtccccagagtggctgccgtgccatgaatgaatattcgtaacggtcggcattccggctgcgattcatgaaactgttgccaccaaatcgtggccaaatgaaaggaaccagtaggccaaaggcaaaaacccagctggaatgcgttggcagtttgaatgtcgcctcaggtgacaaattgcaaggcttgcacaggttgttcaggttgcacatagccggtgtaaaaaggacgacgactcaatgacgcggcaggtttcgtcgaaaaaatgtgccatttcgcacctccataaaaacgtgtcccgaatgggtttccctgtcatttgccatcaatggactgggcggccttcggtttcggttgcataatgtttgactgctgggcggaaagttgcacatggcttctaatgtgcgatttgcattcgcaatcggtcaagggtgcaccggatgcgatgaatgtttacccaactcgcagaaatcagggcgcgcatccctttcacgaatccatctgccagtgcagatcctgcacatcctttgccacccaggttacgtaagccataaacaagtggaccatggcggactaatagacttgttgccaaggccgcagagatcgcctccttctcacgcctcg

SEQ ID NO: 35180 - DNA, 1329 bp, DROSOPHILA
atggatagttcatggagctccttgatttccctagaacccctgggagtgaccaacacgccattggacttgcctggacttgattcgtgtccttcgccaaaaagagcaaggattagtgaatcccagctgggggaagccatgcccagggaaccagctagtgtctatggggaaaaggcagagaaggtgaaaacgtaccaacctggcacagtggtagtccagccacccgaacgacggcctcccgagccggaacacgatcgcctgatgttcattcccgacctagaccaggacattacccatcgggatgtgttcacctatttcagcaaatttggggatttggagagggtcagcgtgaggaatggcatgagtaactttaactacgccatggtgcggtttagtcgcacttcatacatggagcatgccatcgaatcgaatccacatctgatcaagggataccgattgaactgtcgcaaggcgaaagaaaaaagtacaaataagggaagtcagcaaaactctgggaccataaaaaaaccaaaggcaacgataacgcagccacacaaagctcctgtaaggcaggcagagaaaaacgacgccaaacaaagtggtcacaaatctttagagaagaattcgaagccaccaattaacagatcattgcttcttcaaaaactggtagaacccacgtcctatagtccatttaccgccgtaaaatctgatcgaaactatgcctatgcattaaccaatgacattggaatctcccgctggagctttaacttgttgaaattcgaacccagttcagacgaggtgagggccctggaaaagggtctttccagttcggcaaagctcctactgagcatacggaagaaactggctgccgtgccccacaagtctgtcgagccaccagctccaaagtggccacaaactcctagtgataaagccgttccaaaagttactcttaagatagctccaccaattcctgcctctagtccagtgctcccatccctgccacaaactcctagtgataaagccgttccaaaagttatttttaaaatacctccaccacctcctgcctctagtccagtgctcccatccttgccgagccttctgccgatcactcccctagtgcctaagcccaaacctgttcttcgaaaagtttccaagtcagatctccgctacgccgttctagccagtttgggtcagaactatgtccatcactgctacactaatgtggcagcttatcggcggaccaagaactacgtcgacctacagctcagcgagatgaaagaccgacccagcatttcgatgtttgcggatcagatgtacgcacagaaagagtag

SEQ ID NO: 35181 - protein, 442 aa, DROSOPHILA
MDSSWSSLISLEPLGVTNTPLDLPGLDSCPSPKRARISESQLGEAMPREPASVYGEKAEKVKTYQPGTVVVQPPERRPPEPEHDRLMFIPDLDQDITHRDVFTYFSKFGDLERVSVRNGMSNFNYAMVRFSRTSYMEHAIESNPHLIKGYRLNCRKAKEKSTNKGSQQNSGTIKKPKATITQPHKAPVRQAEKNDAKQSGHKSLEKNSKPPINRSLLLQKLVEPTSYSPFTAVKSDRNYAYALTNDIGISRWSFNLLKFEPSSDEVRALEKGLSSSAKLLLSIRKKLAAVPHKSVEPPAPKWPQTPSDKAVPKVTLKIAPPIPASSPVLPSLPQTPSDKAVPKVIFKIPPPPPASSPVLPSLPSLLPITPLVPKPKPVLRKVSKSDLRYAVLASLGQNYVHHCYTNVAAYRRTKNYVDLQLSEMKDRPSISMFADQMYAQKE

SEQ ID NO: 35182 - DNA, 3399 bp, DROSOPHILA
ggacgagccggaactaatagatcaccaagccactagggaagcacaaagcaagtcaggcaaggacacagcgggaaagccagtaacaatgcaagaaaagacgaccactcagtccgctccggttcctgtggatctgcacgacacagacgaggagtcgtcttcgttgacggacagcagcaagcacgatgaccatccaaggagtgcaaaagctaagcccccggcattgaagctggctctggatgactccaagtcggaactggagctgagtggcacacctcagccaccgtcggcgccagctcgaacgcctttgctacgaaaactgccgcatcgggatcggtccgaaagtccaatggtggacgatgacgccacaacagccagcgatcattccactgctaggtccacacgtcgccgctgctcctccacgcccgttatcgacagcatacccaattctcccgcctccagcgagcacaccgacgatcggagagaaacgcgagccgcctccaagaagctcttcctgtccatttatgccatgttgctggacagcaagcatgcggctccctttaagcgtcccttccacgacgagcacgcccagcgacatgcggatctatgcctacgccccatggatttccccaccatcaagcggaacatcgactcgggattcattcgcagcttgagcgagctgcacagggatgtcctgctcatggcccacaacgttttggtggcctacaaaccacacacggctcagcacaaaacggcgcgtttgttcgtgcaggactgtcaggcgatcaaagagttctcccaattgccggacgtgcaggcagggatcacggccacgccggtgagcaacacgggaagcttgcgagcggataaatcgagcggaagcaaggccaggagcggctcccgaaagagccaaaggcatcactaggctcacttaacttttcacacgtattcatttatgcatttcattttggaacttacatgctacatgcattaacaataaacatcaatcgaagaatattaggttctgtaagcgtcgagatctggacgagtggcaaatggagcgtcggtgtgggcagtagtacctcttgaggcacctggaaagccgcaggtcgcattggcagagacgagcggcacaggagtcggggccaccgaactcgccatgatcgacggcgcacagcggcttgccgcggtagcacttccacacgtagggcacaaagtattccagataggagatgcagttgctctgaccgtagcacttgtcgtgcacgcgacaacagcgatcgatgccatcggcgggcactccgtggccaccgaatccgcagtagcagccgtagcccttgtagatcagcggatcacagcccgtggagcacttgatcatggagtacagccgagcaacgtccctctttccgcgatctccctccggcaaaagctctttttcccggctgctgtcgttggtgaagctccacttcatggagtaaccgaagggatcgtttacccgcgctatgtacacattctgaacattcatcaggtcctccatctcagctggtttactagttgtttgtgttatcacgcgtatgtccgtcacccggccatcgaagtggtggttctggaactccagacgaatctcgtcgtggggatacgagttctgccagctgatcggcggtcgagtgtccctgtaaatcgacttggggcgtaaacattaatttgtcttgcgatggattagatgtttcgaaacatttagctaactagcatatcttagaagcaaaataataatttaaaataaagtattaattagagaacagcagctgtttctctttaattaagaacagcagccagaaattccatttaagttaatgaaccagaacagaaagacatttattttgtaagtaacttttggtcagtaactttttccaaatgccaaatctttttatataggtaatgttccaaggaactcccactcacctatgatcctgctccagcgaggctactggtggcttcagctcccccgtccagccatccagacccatctgctgccaatcctgttgcggcgataccatgagactggtcttcacgctcgtttccggcggaatggtactgggtgaatcgatggccgtggccgactggctgatattggggaagattggttccgcgaaatcggatcgctgcattgttagcagctcgaagtcgtcgccaccgccgttcgatttgctaggcattttgaagacaaaggagggattcgcactgcgcatgctcgccccgtacatttccggtattatgtgattcagcagctccgtgtcgttggtgacgcctctgaaggcgctcctaatgtcttcgattaccgtgacatttgccgcaccgctcgcctgtccattgagccgcacagcggccactactagccccattatccacaacatgttcgcatccaggaactcaagctgaccaccactctgcgccgaactgctcgcctcgagcggctatcgaaaattgaagctggctcggctgggggaaatgcggtagtggctcgtttgcagttggtagctcgttgctagttggtcaacagcagcgagccaagtacaccggcataaatggctcaaaagcgtgttaatagcaaatagcaaagtagcagctgaaaacgaacagtgagagcagaaagaaacaataataacaatgaccgggcaatacttttttggcagatttggtgcaactacacacagaatttctaacattcatattagaaaatatgtataatagaatagtattaaataaatgattaaaaacgaaaactcgaaagccaagtgatggacaacatttttacactatttaaggaactttattaagttgttaggaaacttaattgaaaaatcttcaaaaatacttggacttaaatgattctctctgtgtaggctataaaaataagcccgtgaagttggccaggggctggtgggtggccaaaacggtggcacaaatttgaagccactttatggtgactattcacttgggcaaaactttaagtttgagagttaaggcgaaggtcgggccctagaagccattgaatccgctgcagtcgtaaccagttcacggtcaatttttagtgggccttaattgtaacaatttgcgactgcgtgactggtctgctttcccagctgcaaatttgtgtgtgcaaaccacacagacaacggagataaaatatatccactcgtgtgcatggagattatatggtcattcaagtagctaagccaactttgtttaaccactgccgactggccattgcacagcggtaatttatagagtgcgcccccttttgttacgtcgccccattcggtggtttttggtggttcagtggtccagtgcctcagtggttcagtgcctcagttcgcgtgaaaggaaaagccaaagcaaaca

SEQ ID NO: 35183 - DNA, 1110 bp, DROSOPHILA
atggggctagtagtggccgctgtgcggctcaatggacaggcgagcggtgcggcaaatgtcacggtaatcgaagacattaggagcgccttcagaggcgtcaccaacgacacggagctgctgaatcacataataccggaaatgtacggggcgagcatgcgcagtgcgaatccctcctttgtcttcaaaatgcctagcaaatcgaacggcggtggcgacgacttcgagctgctaacaatgcagcgatccgatttcgcggaaccaatcttccccaatatcagccagtcggccacggccatcgattcacccagtaccattccgccggaaacgagcgtgaagaccagtctcatggtatcgccgcaacaggattggcagcagatgggtctggatggctggacgggggagctgaagccaccagtagcctcgctggagcaggatcatagggacactcgaccgccgatcagctggcagaactcgtatccccacgacgagattcgtctggagttccagaaccaccacttcgatggccgggtgacggacatacgcgtgataacacaaacaactagtaaaccagctgagatggaggacctgatgaatgttcagaatgtgtacatagcgcgggtaaacgatcccttcggttactccatgaagtggagcttcaccaacgacagcagccgggaaaaagagcttttgccggagggagatcgcggaaagagggacgttgctcggctgtactccatgatcaagtgctccacgggctgtgatccgctgatctacaagggctacggctgctactgcggattcggtggccacggagtgcccgccgatggcatcgatcgctgttgtcgcgtgcacgacaagtgctacggtcagagcaactgcatctcctatctggaatactttgtgccctacgtgtggaagtgctaccgcggcaagccgctgtgcgccgtcgatcatggcgagttcggtggccccgactcctgtgccgctcgtctctgccaatgcgacctgcggctttccaggtgcctcaagaggtactactgcccacaccgacgctccatttgccactcgtccagatctcgacgcttacagaacctaatattcttcgattga

SEQ ID NO: 35184 - protein, 369 aa, DROSOPHILA
MGLVVAAVRLNGQASGAANVTVIEDIRSAFRGVTNDTELLNHIIPEMYGASMRSANPSFVFKMPSKSNGGGDDFELLTMQRSDFAEPIFPNISQSATAIDSPSTIPPETSVKTSLMVSPQQDWQQMGLDGWTGELKPPVASLEQDHRDTRPPISWQNSYPHDEIRLEFQNHHFDGRVTDIRVITQTTSKPAEMEDLMNVQNVYIARVNDPFGYSMKWSFTNDSSREKELLPEGDRGKRDVARLYSMIKCSTGCDPLIYKGYGCYCGFGGHGVPADGIDRCCRVHDKCYGQSNCISYLEYFVPYVWKCYRGKPLCAVDHGEFGGPDSCAARLCQCDLRLSRCLKRYYCPHRRSICHSSRSRRLQNLIFFD

SEQ ID NO: 35185 - DNA, 3035 bp, DROSOPHILA
agacccaacagttggccaatctgatgctggccttttacaagaacaataaaaattgaacaggttcatctgtaatttgttggtttttgatcgtttacaaaaggccgcgttggcggaagatctcgtccagcttgagctccaggttggcgttggttcctcgcagattgtccaccacctttttggcccaaacgaagtactgatcacgacgctcctggaatgaaaatatgtgatccataaggttccgtttttcaaaccaagatgggcccaaatacctgtgtccaccctgtcggtgtgttgacttgcagatcccttaggttatccaatttgtcagccagctttatgagctttgctctgcagctgcttttggctgcattttctatttgcaggcgttttctctcctgtttctccagggacttgtcgtccgtcacctccctcactagtccacaaacatccggtccaaagagtttctcaacatcctcgaaagatgcgtccgtatcctccacgacatcgtgcagaagtgcagccattaggactccctcatctgtgatgcaggcctccacggagagaatagtgctcacattgatcacatggttcacatagggggtttcctgaggatccttgaaatgtaaaaaagatagtattcatgttttaaatatatcatttgttgcgttttaataagcttaccttgcgacgttgctgccggtgcttaaaagctgcatattggaggcactccatgaatttggcagatggatatgtggccattgttgtaagaaataattaaatgaacgggcctttagttcaaatttaaagtctaaaccttattttttgcatttatttacatttttaacataacagctgacttaacagaccggcaagaatctataacagagcaattgttggtgctttacagcgcggatggttaggccctggaaaacctatcgataaataaaaagcgcggcattcatttaaattcaaaaacctttatttaaacagttcaccaaacttagtccttcttctcgttctggttctcgcacttgttgcactcctgctccttggccttgcgcgctgctttggcggcctcctccgcctctcttttggcctgggcctccagttcgggaatgaagaagatcttgcgagacttgagcgttgaccacttaaaacgcttgatgtagtaggaaatgccaatcaaaaaggtcgaaatcagagtaactttgatgagcagcaggcgacgttcgtcggtctccggttctgaagtccacttgaggaagacgcacacatccttggcaatttgggcggccgaagcaggcacatttggatcttcaaaggagaccacctcattgtcaactaccttgcccatggcaatcgctccgcccgagaagtacggattgaagtacagtccatcacgaagggcaaaaccagccggaggatcacagtatccggtgagcagggagaacacgtaatcctcgccgcccttgcgagccgacacaatatagctgagatccggcggataggagccattgttggcggaacgggccgcctcctcgttggcgtacggagaggggaagtgatcggacagcttgccgggacgctcgtagtactcgccctcctcgttgggcccatcccgcaccgtgatggcctccgcctcggccttggcctccgcctccgtcatgcacactcccaccaggttgcgataggccatgtactgcaatgagtggcaggaggagcagacctccttgtaaacggtgtaacctcgacgcacgctctccttgtccaaggcggacaaaagccctttgtgattccagtgctggtgggccggatgcacgcagtccgaggaggcatccacgctggtttccagggcgtagatcagcagccctgctgttccggttagggctcccagggctcccagcagcttgcgatttccagtaaagccgcttccacgacccggaaaacttatccgcggacgcaccgatgtccgctggatgccgctcatggccagctggaaaagtttgctgttcagactcctgaatttgttggccattttcggtcggattcagctttatctctcaaaacgatttatttacaatgtcaacgcaaccagtgttggaaagctctgtcgactggggttgtcaccacttggggaaatatgttctgtcgaaatgaaatcacgtgtgttgcggtaagttaatattttaattattatatattaatttaaatataacaccatcacatgcaaaattacggatcaagtgaatggcttaaatgcagtaataacaatatacattatcaattgaaagattaacacttaggaatctatctttactgtactcacctatggcaaaatattagacttcctcctttgatggcaaaaaatcgtcattgcgaagaaaatatgtaattgtttggaaatattgaaatgtgtaaaagtataagctttttcacaacaattttttaatgacatttcacacaaagccggcaagagcaacctttacctactaattaagatacatatcgatcgaaatgcacttaaaagctctgctaaactatttggaaaacatctaagcccctctcccttgtgtaagcagtattaaaaaagttagtttctggaactacagagaaggcaggatgcttagaaatcccagcacagactttcttccacatcaagcccagcttagccagattcttatcggtgatctttctccataaagcatatgtaaaccaaaacccacccaaagtgctgttattcttcacagctaaaaggttgaatcaacgtttttctctattgttgtaacgatcgcctccttctgggtttctttcctgtccaaccagcggagcaacttaaaaatacaaaaaaaaaagcaaatgccagggcactttcatttgttatctggctcagtaatctgtaaatcggtaacagcccaccaaacaacggtgcatacaatatttcctagccattcttcacactgtgtgaccacgaaatcgtcaaagtcaggcccaagccagcttttacaacagccaaggagtaggggcgtcggcttacc

SEQ ID NO: 35186 - DNA, 1035 bp, DROSOPHILA
atggccaacaaattcaggagtctgaacagcaaacttttccagctggccatgagcggcatccagcggacatcggtgcgtccgcggataagttttccgggtcgtggaagcggctttactggaaatcgcaagctgctgggagccctgggagccctaaccggaacagcagggctgctgatctacgccctggaaaccagcgtggatgcctcctcggactgcgtgcatccggcccaccagcactggaatcacaaagggcttttgtccgccttggacaaggagagcgtgcgtcgaggttacaccgtttacaaggaggtctgctcctcctgccactcattgcagtacatggcctatcgcaacctggtgggagtgtgcatgacggaggcggaggccaaggccgaggcggaggccatcacggtgcgggatgggcccaacgaggagggcgagtactacgagcgtcccggcaagctgtccgatcacttcccctctccgtacgccaacgaggaggcggcccgttccgccaacaatggctcctatccgccggatctcagctatattgtgtcggctcgcaagggcggcgaggattacgtgttctccctgctcaccggatactgtgatcctccggctggttttgcccttcgtgatggactgtacttcaatccgtacttctcgggcggagcgattgccatgggcaaggtagttgacaatgaggtggtctcctttgaagatccaaatgtgcctgcttcggccgcccaaattgccaaggatgtgtgcgtcttcctcaagtggacttcagaaccggagaccgacgaacgtcgcctgctgctcatcaaagttactctgatttcgacctttttgattggcatttcctactacatcaagcgttttaagtggtcaacgctcaagtctcgcaagatcttcttcattcccgaactggaggcccaggccaaaagagaggcggaggaggccgccaaagcagcgcgcaaggccaaggagcaggagtgcaacaagtgcgagaaccagaacgagaagaaggactaa

SEQ ID NO: 35187 - protein, 344 aa, DROSOPHILA
MANKFRSLNSKLFQLAMSGIQRTSVRPRISFPGRGSGFTGNRKLLGALGALTGTAGLLIYALETSVDASSDCVHPAHQHWNHKGLLSALDKESVRRGYTVYKEVCSSCHSLQYMAYRNLVGVCMTEAEAKAEAEAITVRDGPNEEGEYYERPGKLSDHFPSPYANEEAARSANNGSYPPDLSYIVSARKGGEDYVFSLLTGYCDPPAGFALRDGLYFNPYFSGGAIAMGKVVDNEVVSFEDPNVPASAAQIAKDVCVFLKWTSEPETDERRLLLIKVTLISTFLIGISYYIKRFKWSTLKSRKIFFIPELEAQAKREAEEAAKAARKAKEQECNKCENQNEKKD

SEQ ID NO: 35188 - DNA, 2668 bp, DROSOPHILA
agtaactacaagattctgctgatgcagggcggtggcaccggacagttcgctgcagtggctctgaacttgattggcaagactggcactgctgattatgtaatcaccggctcctggtcggccaaggcggccaaggaggcggctcagtacggcactgtgaacgcggtgctgcccaagttggcaaagtatacaactgttccacgacaggagacctggaagctggacccaaatgcctcatatgtctactactgcgacaatgagaccgtagagggcgtggagttcgactttgtgcccgaggttccagccggtgtgccactggtggccgatatgtcctccaattttctgtcgcgtcccttcgatgtctccaagtttggcgttatctatgcgggagcccagaagaatatcggaccagcgggcaccacggtgatcattgtcagggacgatttgataggcaagcacttgaagattacgccctccatcctcaactttgagcagatggacaagaacaactccctgttaaatactccgccgacctttgggtgagcccagaatgatacatggctggtgaattctttgttaaactttccccttgcagcatctatgtgatgggcctggttttcaagtggatcaagcggaacggaggagtcgctggtatggccaagctggcggcagccaagtccaagttgatttacgacacgatcaaccagtcgaatggtttctactactgcccagtggatgtcaatgtgcgttcgcgcatgaatgtgcccttccgtattggcagtgccagtggagatgatgccctggagaaggagttcctgagcaaagccgaggccgagggcatgattcagttgaagggtcatcggtcggtgggcggcattcgagcctccctctacaatgctgtaacgctggcggagacccaacagttggccaatctgatgctggccttttacaagaacaataaaaattgaacaggttcatctgtaatttgttggtttttgatcgtttacaaaaggccgcgttggcggaagatctcgtccagcttgagctccaggttggcgttggttcctcgcagattgtccaccacctttttggcccaaacgaagtactgatcacgacgctcctggaatgaaaatatgtgatccataaggttccgtttttcaaaccaagatgggcccaaatacctgtgtccaccctgtcggtgtgttgacttgcagatcccttaggttatccaatttgtcagccagctttatgagctttgctctgcagctgcttttggctgcattttctatttgcaggcgttttctctcctgtttctccagggacttgtcgtccgtcacctccctcactagtccacaaacatccggtccaaagagtttctcaacatcctcgaaagatgcgtccgtatcctccacgacatcgtgcagaagtgcagccattaggactccctcatctgtgatgcaggcctccacggagagaatagtgctcacattgatcacatggttcacatagggggtttcctgaggatccttgaaatgtaaaaaagatagtattcatgttttaaatatatcatttgttgcgttttaataagcttaccttgcgacgttgctgccggtgcttaaaagctgcatattggaggcactccatgaatttggcagatggatatgtggccattgttgtaagaaataattaaatgaacgggcctttagttcaaatttaaagtctaaaccttattttttgcatttatttacatttttaacataacagctgacttaacagaccggcaagaatctataacagagcaattgttggtgctttacagcgcggatggttaggccctggaaaacctatcgataaataaaaagcgcggcattcatttaaattcaaaaacctttatttaaacagttcaccaaacttagtccttcttctcgttctggttctcgcacttgttgcactcctgctccttggccttgcgcgctgctttggcggcctcctccgcctctcttttggcctgggcctccagttcgggaatgaagaagatcttgcgagacttgagcgttgaccacttaaaacgcttgatgtagtaggaaatgccaatcaaaaaggtcgaaatcagagtaactttgatgagcagcaggcgacgttcgtcggtctccggttctgaagtccacttgaggaagacgcacacatccttggcaatttgggcggccgaagcaggcacatttggatcttcaaaggagaccacctcattgtcaactaccttgcccatggcaatcgctccgcccgagaagtacggattgaagtacagtccatcacgaagggcaaaaccagccggaggatcacagtatccggtgagcagggagaacacgtaatcctcgccgcccttgcgagccgacacaatatagctgagatccggcggataggagccattgttggcggaacgggccgcctcctcgttggcgtacggagaggggaagtgatcggacagcttgccgggacgctcgtagtactcgccctcctcgttgggcccatcccgcaccgtgatggcctccgcctcggccttggcctccgcctccgtcatgcacactcccaccaggttgcgataggccatgtactgcaatgagtggcaggaggagcagacctccttgtaaacggtgtaacctcgacgcacgct

SEQ ID NO: 35189 - DNA, 540 bp, DROSOPHILA
atggccacatatccatctgccaaattcatggagtgcctccaatatgcagcttttaagcaccggcagcaacgtcgcaaggatcctcaggaaaccccctatgtgaaccatgtgatcaatgtgagcactattctctccgtggaggcctgcatcacagatgagggagtcctaatggctgcacttctgcacgatgtcgtggaggatacggacgcatctttcgaggatgttgagaaactctttggaccggatgtttgtggactagtgagggaggtgacggacgacaagtccctggagaaacaggagagaaaacgcctgcaaatagaaaatgcagccaaaagcagctgcagagcaaagctcataaagctggctgacaaattggataacctaagggatctgcaagtcaacacaccgacagggtggacacaggagcgtcgtgatcagtacttcgtttgggccaaaaaggtggtggacaatctgcgaggaaccaacgccaacctggagctcaagctggacgagatcttccgccaacgcggccttttgtaa

SEQ ID NO: 35190 - protein, 179 aa, DROSOPHILA
MATYPSAKFMECLQYAAFKHRQQRRKDPQETPYVNHVINVSTILSVEACITDEGVLMAALLHDVVEDTDASFEDVEKLFGPDVCGLVREVTDDKSLEKQERKRLQIENAAKSSCRAKLIKLADKLDNLRDLQVNTPTGWTQERRDQYFVWAKKVVDNLRGTNANLELKLDEIFRQRGLL

SEQ ID NO: 35191 - DNA, 2722 bp, DROSOPHILA
cagcagcgggcaaattctgtgaaagtgttgacaaagtggctggggtgcgctaccgtggaccatgtccgtgacccgaggccaacctttgatggccagagagagcaccaccaaaaagcgattacccaatggccagagccagagtcatatttcaaccggaggaagggcctaaaatctgactacaaattgcacatgtcaggcgagtagaaggcccacattaaacagccaaagctgcaacagagccagcatttataattaaccgaactgggggccgagccattaaagccaactttgcttatttcggcaccatcattaggccgcctaggaaaaaaaaatccatgcgagtacatggaaaacttttcacattccaactagaacacatcgcagacaggccatttaagtttcggatgagaaaactagaagggatgagtatgaggcacgaaacccagcacactggcttaaaagcttttgagcaaatgggctaggaaattgtataaagcattcctgtctgacagtcagtaagtccctctaaggcgttcagcttcttcgagagtttattaaaaaaggcaagaagttcgttcaaggtaaaaactgaggccaactttaagatatgaataaagcattcgagatgcactacagagagaagttgtggagaaaatttataaacgtgaattaacctgacttaattaagttttaattaactagtctggccttgtgctactgaaagactgtatattcctaagagatcgtaacgaacgaaataaaatgtggtacttatacagcctttcccagtttaatgccactatggaacttatgcaattgcaatggaattgccggcagttagatgaacaaaggactgtcaaggcagccgcatgtacatatgtacatatgtatgattatatgacacctcgatgacgccattgcggtctatttccatgctgaaatagggctaagccagtggtaatcccgctccatggcgcatcattcttatctaaaccttggactacttaccgaactctggcgttgtcgtctccggacccgcactaaaggcattcacggcaaagaaattatcgccgtcatcgccgagcgtcagcggcggcagcagggcaataacggaaatcaggcacaggagcaggccgttaaggcgctcccagccccattccgcacccatcattctccgccggctgcggccctgcttcatcggaagtcgcaggccaaggctcttccgctgatgccccacgttgggcgccattaatatggtatgcctggtattgcctctgccgccggttgtttttctaggcgtgggcgttgctgatgttgttctctttggattgcagaccaagttggcttggcaattgttgctgctggtgctgctggtgctgctgctgctgctgctgctgttggtggtcaaacactcagcgtctgtggcctcgtcgtcttcgtcagctggctgctgctgttgcgtctcacatggttcgcgtgtttcgcgcctcaggggctggcggcccttgattgtggcagctccttgacggggccggggctctagagccccatctaatctcatattattcgatcgtcgtcgtgctcctcatccatgctgctccaactatattaatttgcacactattggcgtggctcttctgctttggttcttttttgctgttcgcttggttgccgtctgttcctgtgctcgccctcgtgtccggttcacatcaaagtctgtcactgcaagaagaagcggaggaaatggtatggggttagttgtagtttcggctgggggattcaatcaggggacaaagccaggctaatcactttgcggcgtgtgaaattacaaaccgttgttgaaacaatttccgaaagtgccaccaaaagtctgtaactgaaaccgaaattgacacatagtcggctccacccagggccaggacgaaaactgtcacaactgtgagcggcgttttggccttttggcactgcaaaccggattgagtgacggccaatttgtgtgtctatgacagttaattggattaggcgcacccacagacgccatcagcgagcggatgtggacggtgtaagtccattgtggaaccgaaaatattacagaatttaattaaaacccattttccattatattatttaattgcatgacaatgatttgtgtttgctgcggctgcccagaacacggccgagcgataaataaatcgtgaattttataacatgcaacgcatgttggtcgacaagtgctgcttgtttagtcagcgattatgggccatgtcagggttttgtggccaagtggtggcattcgtctgcatatcaggttgaaacatgcactcggcgcatgtcaaataggccaaaataaacagagatattcagcactaaacagcaatcgagtgggatgaataataggagcttacttataagcttgaactaaattattctgcttagtgtatgcagtcattgctatcagcattttgtggccgacacacttctaagcggacctaaaaccacactgatggttaaataatagactgcagtctgtccaaataacttggaatacagaaccacatggcctaaatatacacacacataacgacattaataaccattcggtttaaaggaagttcgtctgctttgaatgtcttaaagtgtccacacatctatttataaagatttgtcaaaagaatgtcaaccgcaagtatttttagaaatttgtctgcttacaaatggtcct

SEQ ID NO: 35192 - DNA, 722 bp, DROSOPHILA
tgacagactttgatgtgaaccggacacgagggcgagcacaggaacagacggcaaccaagcgaacagcaaaaaagaaccaaagcagaagagccacgccaatagtgtgcaaattaatatagttggagcagcatggatgaggagcacgacgacgatcgaataatatgagattagatggggctctagagccccggccccgtcaaggagctgccacaatcaagggccgccagcccctgaggcgcgaaacacgcgaaccatgtgagacgcaacagcagcagccagctgacgaagacgacgaggccacagacgctgagtgtttgaccaccaacagcagcagcagcagcagcagcaccagcagcaccagcagcaacaattgccaagccaacttggtctgcaatccaaagagaacaacatcagcaacgcccacgcctagaaaaacaaccggcggcagaggcaataccaggcataccatattaatggcgcccaacgtggggcatcagcggaagagccttggcctgcgacttccgatgaagcagggccgcagccggcggagaatgatgggtgcggaatggggctgggagcgccttaacggcctgctcctgtgcctgatttccgttattgccctgctgccgccgctgacgctcggcgatgacggcgataatttctttgccgtgaatgcctttagtgcgggtccggagacgacaacgccagagttcggtaagtag

SEQ ID NO: 35193 - protein, 186 aa, DROSOPHILA
MRLDGALEPRPRQGAATIKGRQPLRRETREPCETQQQQPADEDDEATDAECLTTNSSSSSSSTSSTSSNNCQANLVCNPKRTTSATPTPRKTTGGRGNTRHTILMAPNVGHQRKSLGLRLPMKQGRSRRRMMGAEWGWERLNGLLLCLISVIALLPPLTLGDDGDNFFAVNAFSAGPETTTPEFGK

SEQ ID NO: 35194 - DNA, 5962 bp, DROSOPHILA
ataggtactcctttctttacatccgaacccaattctgttcgggaacgaaaagctaatgccaaaagaaacgaggataagtataaggtgaacgtgcgtgcttcgcaatgaaacgcatattttgattataaaatatggtcccgaggttgttaaatatttcttcaacttggtttctcatcgactctgggtaataatatccatatgtgggagctagagcggcaattggatctataatattagtatatagataaggcgttgtatcagcggtttgcatttggtttcggccaattaaacgcatctgcggccacgatgcagtgcctccgatggctggctaaagaacactacgattgagatcatgccctagtttccctacgctgtgaattctctgttttcctattcctgtgttttaaatccttaaatccttaaagcctttaacccaaagcttagttatataactgcattacaatatgttatttaaataagtaaagtttcccttatcggttgcatcgttttttttcttctttgtatttggtttttgtgttttttttttttggttgaaaaaaagagtagtatgaatttgttatgcaaggtttttttcaattattttttttacggtgtagtcgtacgtaattatttagcatttagcattgttctgggtgtatgtgtgcgtgtgtgtgttttgttttacacgctccatattcatatagtaagtatataattgttttggttaaaaaatttccattaatcgcaaaaatgttctttgtcaaaaagagtcgaacaatggcctccatgtgtaattcgattttttttttgtgttttgttcaccggtgccacgccccttttgggagcgtgcccgccttattatcgcgtgcatataccgtgactaaatcttcctatagtttgtgctgcatttcgtatcctgttgtcgtgtgtcagagagttagccagttaatctttccaatgcaaaatcaagctttgtgctcgaagtagccatcctgttcccttacttctgacccggctcgatgatctcgacggtaacgctctcggccaccggattcgtggtgatgttggtgatcagcgactggtcctgcgactgcggcgactgcggctgctccttcggctggtggccatgtgggtggtgctggcgatgggcggatccgtggcgctcatggtggacgaccttgccgggagccaccgagttgctgcggttggagcgcaccgaggctgcggatgcattgctgccatgcgactcggaatgggagcctgcgggttagatgtccgtgcaaaggaaagggatgagtatctggtggattacgggctcagctactcgctactcggataaccggctgaagggaagttatcgttggcttcacaggacaacagcaatgtggtcaacgggatcccgacactcgacttcgagttcgaaggagtccttcgttctacgtggcatattctatgaacagcaggcgatcgaaggagtttttcctatagcttgtttttttttttttgtatgaagatcttataggagaaaacacttatgcgatcgcatgccgtactgtaaaaatgatatatcttaaggaagccagttaaggaaactatagatagccgtgctagaaaggaaagaaaccaaagcggaaacggaactcaaaatgggatgctgcatggataagttggttggaaaaagagaaagattcgatgaggtattctttggtacgagtatctacgatcgtttatcattgtatctgtagcgctttgtgtctgcatctgagtctgcttttgtatctgtgtgtgtcttctaaggagtggtggaagttggagcagtagtagttttacatacaggttaaccgcaactcttgactacagattaagactagggtaacaacacttcgagccaaaaagaacaacaacgagaacaatgactacgcgtacactgggggaaaagacgctagacaatcaggtatatctatgtatatttcaaaactaaagcttaaagaatttacaaatgatttaattacgttaattctctatttagactaatatttctgattgcagccaacgtaatttcccgcagtgcacagatacttttacggatacgagtacaactgtttggacacaactttcgctagacaagacatcaactttacgagtacactacactgtattgcttgggagtgggtgtggttcgctttctgggctgcctacctctttggaccctgatatggatgcgtttgtttttttagcggtttggttgtgatacgtttacggacacacacggatatgcacgagtatctatgtgtacagcgtggtgatctagagatccggaaccctagaacttgttggtccgaccacaggctggtgctattcccgccggggacacatacgtggtggtggtggtggtggtgttggcggtgctcgtggtgctggtggcattggcatggcccattggcaattggtgacccgccgagggcggtggcgtgggcgtgggcgagggcgtggccgaggcagcatacgttgcgatggcattcgtggccgttgccgtgctggccgtggtcgttggcacgtagggcagaaaatggctgtggaccaggttgtgctggctggcggcactcggatgctccaggagtctcgaacaggtggacacatcgctcacccgcgagtcactcgaccgcgtattgctcttcgaccggatcatacgtcctttttggtttttagttttatttgtgttttcagtttcggtttgttgttgttcgtgtttgtttgtttgttttttggggggaatgagcggttggatacgtttagtatatcgcctttcagctgggcacgcgacatttagtcagtgggttaaatgggtggtttcgggtggtttcgcctttcggtttggtgggggcacaaactcaaactcaaacaggaatataaataacacaaaaaatgtaatttcaaccaactgtccgccgggcttagcaaaccaacaattatcaccgtagtggggttgagtaatacgcttcttaaactgtcagtcaaattgattgagccccccgaagagttgttgttcctgtgttcccgtactttcggataaggtggtcagtttgttggtcactatgctacccagcgcactagttgcatattaaaataaagaaacttaacttaattgaaattgaaaagaacaaaaacttcaaatcgtacaagttccaatcatgttcatatcagaaaaggccaaaaaaagatggttgctggatgattgatagagttcttagtttgtaatttgtgacattctgtttagcattccaagttgttcaatatattctaccgagttgaaaatttattcttagttacatcattttttatcggtcaaattggctgagtaacctattccctaaacactcctttaaaaaacaggtttcttcaaacctctaaaccatagatagttagtcactcttttctatattgtacaatttgagtttcttttgaactctcatcacgtttttcgcgctgatccacagccacagtgaattgagttcagttaggtgattttgtacgtatattgtttggtgactgactggtcaattggctgactgactgactgattgattgattgaataagtaagtttaaggggtttccattctgttctgttcgtatgtattttggctgtaaaagaaagttctgcaagttgtcgagacgaaaacaagaggaatcaacacaaaaatggcaagttgaaatggtaaaagaagaaccaaaaatgcaaccgcggaagaccagaccaaagagagattggaggaggtgctgaccatcgactggggggcatggaatacaaacctgtcttacctagcgacggattgggggagtggggccgcagggaggccatgctgggctgacgagatggcgctcgcaccgacatcctggaccctcggcgctcctggccgtggagcagcttgctgtcccgcagcagggagacgttcatcaggcgaggattgggcgtgttgaagatggttcggttctcacgccagcgagctctgcaaattacggccatgaattagtcacatttcacggaacccacggatcatattatccggttgatgcgggctgggcaagcggtggtgcacgagtaatggtgcgggaatatgggggccatggttactccagcttaatgccaattaatgcagaaacgctgtttattagactggaaattaattggtgctcgagttatgtatctagccagccacaaattaaggaagccccatcaaagcatcgacaggccaattgacccagtttattgacaagccaacggatgagatggttgagctgagtgaaaggagtcttaaggatctttgatttgcaccatatgatgatgtcattacatctagtgaaggcaagagatttgttgtggagcaagggagagtaatagttcattaattggaacttttaataatatatttttctttagaacttcttgggttcgtttcaagggtctaagcaaatgtactttcattttgaaatggcttcctagattatgggtgcactcaagcgattcgatcgatgcctcaaatggtgtgtgactgttgacccagattgaaggcttaaactatttgcgtgggtgtgcgggtgcgggggatggagatgaatatggagatggagatgtttgcattgcaatttactcactggctaaacaatcgcaggacgacacaaataataacaaacatcaatgccattcctaccagcacgccaatcatggccgggtcgatgtaggtctcgggtcccctcttgtcctggcgccctgcaaacagccgaatggcaaaaggacaacaaacaacacagccccattaaccataagcagtgccggcttaaatctacgcgcttcttaaccaccgacctttgcactccacggatccgtccttgccccaaatgggtgacatctcgaaccggcagatgcagcgtccatcgcggcactccgtctggaagtatctcatctcgcactgctcgttaaagaagcaggactcgttcacggcggcctctgcggcatcaggattgcgggtgaaacagaaaggacaccaaaacgaaatcagttaagctgacaaagggtcaacatgcagtcgcgcaaaatataaacaatagcttaagtctataaagtatttataaagcaatttcttgctcctgacgatatggtaatagctgttggtaagtattgaagaatttattaagtattcaagagcatgacccagctaacaccctgatttctttcagtgtccctcaagcaacaggcaacaaacaacaacaggcgatggcccatatcaggaaaaatatttcccggctgtcgcagctgtttgcggattgatttaatggctgattgaagtgcgatatgaccggggcggattgactttccactccgtccactcagtccactcggctgacaaatattatcgtggaacaagaacggaggaggcccggcgattacgcccccgatgcgacgggcagatactcgcctgaggagaagtccactccggagacttctgccttctggcttctgacagacttgatgatggctgtcagccacgttgatgatcaatggccgggagatatttggccgggaattacgattgagtcacgcccataaaaatagatcagcgcctgtcagcggcttggagttcgatccccagccataaatacgcattcgaagtgtccgccgttgcgatttgaatttatagtatcgcacgtgtggcatgggggaatatcaattgtgattatgtcaaatgtgcattagttgcaactctcacaagtctctaatgcggctgccaagtttctattttaatttacagattttctaagaccgcaatcagaaaattccagctttcttgactctttttcaatgagaacttggcagggtgacagctcggaaaaacggatggaagtaatgggcttgcagtaatgactaccacctacctttgccacatttgtcatagtgattggtga

SEQ ID NO: 35195 - DNA, 972 bp, DROSOPHILA
atgagatacttccagacggagtgccgcgatggacgctgcatctgccggttcgagatgtcacccatttggggcaaggacggatccgtggagtgcaaagggcgccaggacaagaggggacccgagacctacatcgacccggccatgattggcgtgctggtaggaatggcattgatagctcgctggcgtgagaaccgaaccatcttcaacacgcccaatcctcgcctgatgaacgtctccctgctgcgggacagcaagctgctccacggccaggagcgccgagggtccaggatgtcggtgcgagcgccatctcgtcagcccagcatggcctccctgcggccccactcccccaatccgtcgctaggacgtatgatccggtcgaagagcaatacgcggtcgagtgactcgcgggtgagcgatgtgtccacctgttcgagactcctggagcatccgagtgccgccagccagcacaacctggtccacagccattttctgccctacgtgccaacgaccacggccagcacggcaacggccacgaatgccatcgcaacgtatgctgcctcggccacgccctcgcccacgcccacgccaccgccctcggcgggtcaccaattgccaatgggccatgccaatgccaccagcaccacgagcaccgccaacaccaccaccaccaccaccacgtatgtgtccccggcgggaatagcaccagcctgtggctcccattccgagtcgcatggcagcaatgcatccgcagcctcggtgcgctccaaccgcagcaactcggtggctcccggcaaggtcgtccaccatgagcgccacggatccgcccatcgccagcaccacccacatggccaccagccgaaggagcagccgcagtcgccgcagtcgcaggaccagtcgctgatcaccaacatcaccacgaatccggtggccgagagcgttaccgtcgagatcatcgagccgggtcagaagtaa

SEQ ID NO: 35196 - protein, 323 aa, DROSOPHILA
MRYFQTECRDGRCICRFEMSPIWGKDGSVECKGRQDKRGPETYIDPAMIGVLVGMALIARWRENRTIFNTPNPRLMNVSLLRDSKLLHGQERRGSRMSVRAPSRQPSMASLRPHSPNPSLGRMIRSKSNTRSSDSRVSDVSTCSRLLEHPSAASQHNLVHSHFLPYVPTTTASTATATNAIATYAASATPSPTPTPPPSAGHQLPMGHANATSTTSTANTTTTTTTYVSPAGIAPACGSHSESHGSNASAASVRSNRSNSVAPGKVVHHERHGSAHRQHHPHGHQPKEQPQSPQSQDQSLITNITTNPVAESVTVEIIEPGQK

SEQ ID NO: 35197 - DNA, 3164 bp, DROSOPHILA
ctgcaccagactgggctcatgcgaccagagcttgtccccaaagaggtggagcatcttgatggccacaccgtgacctccgcacatgtacagttcatcgctggagcgagccaactggcccacgcccaccgcagatttgttgtttgtgaggtttacggccactgaaaaagacaatgagatcaatactcgttacctggggaatcccaagcagatacccactcaactgtccctttttgaagtgcccgtacatgctcagtcccacgcccaggggcaccactccgggcagcatgagatccgctccgttcgtcagcttgggtaacacaccctcgtgggtggtgaaatagggcaggatgtccggaacgatccacagggtgtacagggtgggcacaagttgaccgccgtccagctcgaagaacaaaggcaacttgtccacgcagtagaccatgctctgaacaccgccgtgcgttaggatcttcacctgggtcaccgccgccttcgccggcaccagctgatccacggacacatgggggaacgccgcctccacgcgctgccggaacttcttgctatcggatcccttgagggcagcactgctcttgggtctgtacggcttgagaaacatctgtgtttggtggtgtgcacttgaggagttcgtgaaatggtttggagtggcacatgcacagtgaaaacaaacaactggcaaacgggggtgctgctttagctattttctcgccagtttgtatatttaaaaaaatatcaatgggattcgatattctaaaaccaagtataagaaacataagaataagatgcagaaaaagaaattaacataaaataaagaagtgagtcctgtcttttcttttcacaataactctaccctaaatcaaaattagttaagagcagacgttattacaaggacagcacgcgcagtaaaaatgccggcggtccggaaaatttcgaatcaccaaggacttcctcaggtagcaaacgacagaaaacccaggatcttgtaagacgccattttattcaacaaaacatctgcgtaacaattccccgtacacggccttgtgactcgaagatgcgtgtttgattcatagttttaactttgtacttgaaataaaaattagtagttaaacccccgatatttgaaaaacatagcccggcccggtaacaagattcgatcctagtcagaatccgagtcggaattactgtccttggccgtgtcgcgcgcttgtgtaggtggatcatagatgtggaggcttttgcgccagatcttcacgagcccatcgaaggcgcggcggctgtactttccatacttgttcggggtgcgcggatgatcgcgagtccgctcgtcctttggcaccatttccacatagcgctcgtaggcggcagtattctttccgtaatctatttgcttctgcctgcgacttaggatggcgggatcggcttcggtgtaggaggatgacgatgaggtggaggacgtgtagctgttgtggcgcacccgtttctcctccttgtgggcgcggaagttgccagacttttttgagttcctcgaatggggattgttgccgcctttgggcgcagctgcatctccgttggccgaggagttgctgctgtttggactgttggagcgactgttctcgttgctgggcggcgtgaacgagtgtcggcgcttgtagggcgtttttagcttctcctccttgaccaggcgctcgaactttacctcgttgacgccatccaggaactcaaatgccatctcccggccctcgccatctttggactccagattaccgtcggctgtctcctttttggccaaggaaccgcagctggcagcgctgctattcaaggaactggaggcctgcacgtgcaaacaagagaattaattgtgttcccgatcgtagcagccaaccttcacttacctcgtcactgtggccaaactccgcgcggacctcctgggcccagctctgcatggtgggcttcacatcgatcgaaatggaggatgctgaggaattcaggctgccggagcctttctgcggtgtgttctccacggacatgtgctgatcctcgcagagcatgttgtgcaattatctttcgtttgtttactgtgctgtgtatgatgcggtccgctgctccaggatgttgtcgcggcggtgttttgcgttttctgcgcaaaccttcgcgcgttttttgttgtagatgcgatgctcagtgtgcccagaagtggaggtggtaagaaggcggcaaaaaggtaccacaacacagaacaacctggtcactcacaactaatttcaaactatgctccaaatgtattacatttcatttcaattttgttaaaatttgatgtccaatacatatttaaacatacagaaaattaacagcgatttttaaattgtctgagggaggctcaaacaatatcgatgcatcggtacacatcgatagcaagacatcgagcaaccaaccattaccaacactgtctgcttaccgagtgatttagcattttttcggcacaaaagaaaactgaaaattaaaacggtgcaattgttggttagtacgcaaaagaacgatttgttttcatagcaaacgtaaagttttcgagcccaagttgaacatacgtcactttaaaatccgtagaacatatttttgactggaaacaacgcagctggaaaatgagtcttacgtccgccgcggggataatttccctactcgatgagccaatgccggatcttaaggtgttcgccctcaaaaagctggacaacatcgtggatgagttctggccggagatctcggagtccatcgagaagatcgagatgctgcacgaggatcgcagcttccccgaaaacaagctagctggcatggtggcctccaaggtgttctatcacctgggctccttcgaggacgctctgacgtacgccctgggcgctggtgatctgttcgacgtgaatgcccgcaatgagtacacggagaccatcattgccaagtgcatcgacttctacattgcccagcgggtggagttcatcgagaaccctaaggaggcgagtgtcgtggacgagcggctggagggcattgtgaacaggatgattcagcgctgtctggacgacaaccagttccgccaggctctgggcatcgctctggagacccgtcgcatggacaccttcaaggacgctatcatgaag

SEQ ID NO: 35198 - DNA, 1103 bp, DROSOPHILA
tttgcgcagaaaacgcaaaacaccgccgcgacaacatcctggagcagcggaccgcatcatacacagcacagtaaacaaacgaaagataattgcacaacatgctctgcgaggatcagcacatgtccgtggagaacacaccgcagaaaggctccggcagcctgaattcctcagcatcctccatttcgatcgatgtgaagcccaccatgcagagctgggcccaggaggtccgcgcggagtttggccacagtgacgaggcctccagttccttgaatagcagcgctgccagctgcggttccttggccaaaaaggagacagccgacggtaatctggagtccaaagatggcgagggccgggagatggcatttgagttcctggatggcgtcaacgaggtaaagttcgagcgcctggtcaaggaggagaagctaaaaacgccctacaagcgccgacactcgttcacgccgcccagcaacgagaacagtcgctccaacagtccaaacagcagcaactcctcggccaacggagatgcagctgcgcccaaaggcggcaacaatccccattcgaggaactcaaaaaagtctggcaacttccgcgcccacaaggaggagaaacgggtgcgccacaacagctacacgtcctccacctcatcgtcatcctcctacaccgaagccgatcccgccatcctaagtcgcaggcagaagcaaatagattacggaaagaatactgccgcctacgagcgctatgtggaaatggtgccaaaggacgagcggactcgcgatcatccgcgcaccccgaacaagtatggaaagtacagccgccgcgccttcgatgggctcgtgaagatctggcgcaaaagcctccacatctatgatccacctacacaagcgcgcgacacggccaaggacagtaattccgactcggattctgactaggatcgaatcttgttaccgggccgggctatgtttttcaaatatcgggggtttaactactaatttttatttcaagtacaaagttaaaactatgaatcaaacacgcatcttcgagtcacaaggccgtgtacggggaattgttacgcagatgttttgttgaataaaatggcgtcttac

SEQ ID NO: 35199 - protein, 276 aa, DROSOPHILA
MLCEDQHMSVENTPQKGSGSLNSSASSISIDVKPTMQSWAQEVRAEFGHSDEASSSLNSSAASCGSLAKKETADGNLESKDGEGREMAFEFLDGVNEVKFERLVKEEKLKTPYKRRHSFTPPSNENSRSNSPNSSNSSANGDAAAPKGGNNPHSRNSKKSGNFRAHKEEKRVRHNSYTSSTSSSSSYTEADPAILSRRQKQIDYGKNTAAYERYVEMVPKDERTRDHPRTPNKYGKYSRRAFDGLVKIWRKSLHIYDPPTQARDTAKDSNSDSDSD

SEQ ID NO: 35200 - DNA, 2906 bp, DROSOPHILA
ggtgtaatacaacgcttccctggcgcacttgccatgacgtcgatacagcaactcctgtgtaattcccatgtaggaggaaacaaatagagccagcaccaagagtgccacgcccaacagccaccagaacgtatccgcctcggcgccactatccaaattctccatcttacccaccaaatccggactggagaaatatgtgcagacgaaaatgcccacgctgatcatgagcaccgatatgtactgactcaaccggtaactcctcttcaggatcaacgtgcacaggcacatgttggagatcagcgaaccgccgcgtatgatcatgtgcagtgtcattggaactttgaacttgaacacgtagttgttgcatacgctggtcaggaaaaacatggccacgaggagcgcatagtcgcgcaggctgatcactctctgggccaggccaaacttcgaggtgaagatgaagccctcgagggcaataaatgcaaactgggcgccagttataaggtttccagcgccgggatccagtttaaccaggagctccaagaagacgacgccactgcagcagcccaagaaaacgccgcagatggccgaaatagcgcggatggataaattcatgaactcgcgcaacgaaagtagacgattcccaccaactttaacctacgatctgggccatgacgagcttttaagccaacttactttctcttcggccatacaaaacgtaaacaaatgcaacaggtggttatcgataaagttcggttcgggcacagctgatgttggtctatcgaaagtggttgaaattcaaatattccaagcgaaaaagaaaaaatttatgattttaagagaagaatattttatttaatgtacattacattcaaaaccaaacttaaatatgttgcctaatcacattcgaaatattcgcaccaacagtcttttacaacaattacaaaatacaatgatgacaatgctaagaaagaaattacagattagcaaattaatggtatattacttatttttccttttccagcaaggcaataattttgtttaacttttccgtctgctgggcctcgaagttgtccagtctcttagacactaacagcgtcagcttctcaaatctcatgtcgatgtgctccttgaggattgcaacatcggtggaaggcggtgcagtctcttgggtttggtccttcgcctgcggggaatagcccttcatcaggctcatgaactgctcgaacttttcggcctgctcctccttcttcaagggactcgtgccacccctttgcagcagctcttggattcgctgcgcatccattggcctgggcaactgggtggttatgccgttgggattcggcgccacctggagcagggctccgtaaacgcagatctcgctggccgaggtgagcatcttcaggtttatgtcatttatcccggatcggtcgatttccatgtcatagcgatagggtcgcaccgcaacctctgggtcctcatcgtcgacgcaagtgccgtagatggtctcgcagtactcctgcaagggtccaatgaacagctccaccttgggagcgctgcaaatcagggtgagcgcggcgattttgaagcggttcgggatctggaagcgcagctcacaaggcggcggcggatccgccgactgcatggaaaacagcacggcgcgattctcgtcgatcacgtcgtccaagtcgggcctgcggacaaaggaggtttcaaaattacttgataaaaaccagtttcggggcgtggaatcctttgtctcacttcacaaagacgtcttcgtcggacaagcgggtggccaccagttggtccagcccgttgcccgacagctggggccaagtgcagcgcgcggtgaccttttcgcacatgctttaagtgacaaaaagttggaatttatgggagcaaaatttaaaaacagccaaatttaaaaaccaaaacacgaatatagtgatgacaaacgcgagcgataacatctgcgcgggggatgccaacctgttgcacagcgcaaactaattggacatttgaaggtagcttgacgcgctattccaataagaccatactccggagtccaatcagagaaggcaccgcatctgcgcactacgtttttccaacagaacggcaatatcgcggcctgacagctgcgaccttggacggctcccttgtaggtcaaacttcagcagaattcccacatattgcagtcgcagcaaggcggcagcttaagaacgagtacacaattatccgcagagtgatcaacgcagctaaaatgggcggcaagtacaagatcgtgatggtgcgccacggcgagtccgagtggaaccagaagaatcagttctgcggctggtacgacgccaacctcagcgaaaagggtgagtgattacatcaatttgaaatttaaacctcatatgtgggattaaaaatctgatgtacatctagtttccaatcgatgatcctttgctttgatcagtttcacaatagtattccttttcatttacccaaattaatcttcattgacctagtgcaacattatctcattcaaacttttctgtgataaaaataggtctctacaaacaaaagctttccagtgcaattttcagaagcatcaaaattctagtttgttacactttaaagtcaaaaatttgccatctcatatgtttctaaagttcagattatgcttatgagcataatttgataggttatcgcctttttttaaccctagtaatcaaattaaattaaacgcatgcctttcaattagattaaattggcttacgttcgttacccaacacggcgtatacttaatgttcgctaaacatttgcccaaacaggtcaggaggaggccctagccgccggcaaggccgtcaaggatgccggcctggagttcgatgtggcccacacctcggtgctgacccgcgccc

SEQ ID NO: 35201 - DNA, 836 bp, DROSOPHILA
ttaaattttgctcccataaattccaactttttgtcacttaaagcatgtgcgaaaaggtcaccgcgcgctgcacttggccccagctgtcgggcaacgggctggaccaactggtggccacccgcttgtccgacgaagacgtctttgtgaagcccgacttggacgacgtgatcgacgagaatcgcgccgtgctgttttccatgcagtcggcggatccgccgccgccttgtgagctgcgcttccagatcccgaaccgcttcaaaatcgccgcgctcaccctgatttgcagcgctcccaaggtggagctgttcattggacccttgcaggagtactgcgagaccatctacggcacttgcgtcgacgatgaggacccagaggttgcggtgcgaccctatcgctatgacatggaaatcgaccgatccgggataaatgacataaacctgaagatgctcacctcggccagcgagatctgcgtttacggagccctgctccaggtggcgccgaatcccaacggcataaccacccagttgcccaggccaatggatgcgcagcgaatccaagagctgctgcaaaggggtggcacgagtcccttgaagaaggaggagcaggccgaaaagttcgagcagttcatgagcctgatgaagggctattccccgcaggcgaaggaccaaacccaagagactgcaccgccttccaccgatgttgcaatcctcaaggagcacatcgacatgagatttgagaagctgacgctgttagtgtctaagagactggacaacttcgaggcccagcagacggaaaagttaaacaaaattattgccttgctggaaaaggaaaaataa

SEQ ID NO: 35202 - protein, 263 aa, DROSOPHILA
MCEKVTARCTWPQLSGNGLDQLVATRLSDEDVFVKPDLDDVIDENRAVLFSMQSADPPPPCELRFQIPNRFKIAALTLICSAPKVELFIGPLQEYCETIYGTCVDDEDPEVAVRPYRYDMEIDRSGINDINLKMLTSASEICVYGALLQVAPNPNGITTQLPRPMDAQRIQELLQRGGTSPLKKEEQAEKFEQFMSLMKGYSPQAKDQTQETAPPSTDVAILKEHIDMRFEKLTLLVSKRLDNFEAQQTEKLNKIIALLEKEK

SEQ ID NO: 35203 - DNA, 2969 bp, DROSOPHILA
aatccgtaagcaataaacgaagtaattaatacactcaacacaattccaataaattattacttccttttcagcattgtgccaaatctcaggggagtcgtttactgctctgcgatacaatacggcaccgagtacgaatgggactttgctttcgagcgctttttgaagacgaacgtgcctggggagaaggatttgctgttgaatgcacttggctgctccaaggagccctggttgctttatcgtttcttgcgtcgcggcatttccggacagcatatccggaaacaggacttgttccgggtattcgcagcagtttccaccacggtagtgggccagaacatagcctttgattttctgcgcaacaactggcaggagatcaagacctagtaagtggcgaaattgtcgctttattccgtgcattactaaagggtttgcattttttccagcatgggctcacagatgtccagcatccacacgctgttcaagttcgccacgaagggcttcaactccaagttccagctgggcgaatttgagaacttcgtgaaggacgcccactgggactacgacagacccgtgcaacagatcgtggagcacatcgagaccagcgtcgactggatgaacaagaactacaagtcgatcgtgcggtggctggagaacgaggcgcaagcgtaaggaacggattctgcggcttggctggatcaaggctgcagcagtattagatttcgcagctgcaactgcatgggttgggccaccaatgcatttatgtgtaatatttatgtcgcgtgttttaccaattcagagtcgccaaagagagaaagcccttggcagatcgtccagagcatcacgtttttcattacttttaatgtatgccttcttttcataacaattatgagtcttgtaattttaatttgtacttaaatgtaattgtaaatgtaaatggaattataacattgttcgtcacaaaaaagttttggaaagcctattcctgtttcacagcctggttttttcatttcggaactctgatcacatttgcaaacatcaaggtgcccacaaagactagcgcggtgcccagccagtgccaccaggtgaagggatttcggaagtatacgatcgaaaagaccagcgagatgaacttgcggagtgtgaggatcagagtcaccgtcagcgagctgcactccgtggtcagggtgtaaacggagctgatgcacaaatgctgcgcaagcacgttgcccaataagtatagcaggattaggggcactgccacgcccaggaggggcaactggtaggactcgcccgtgaacgccaaaagccagtgcgtccgtatgtcgtcatgcatgagcaggaaggcgggcagcggcaacaggtgggtgtaatacaacgcttccctggcgcacttgccatgacgtcgatacagcaactcctgtgtaattcccatgtaggaggaaacaaatagagccagcaccaagagtgccacgcccaacagccaccagaacgtatccgcctcggcgccactatccaaattctccatcttacccaccaaatccggactggagaaatatgtgcagacgaaaatgcccacgctgatcatgagcaccgatatgtactgactcaaccggtaactcctcttcaggatcaacgtgcacaggcacatgttggagatcagcgaaccgccgcgtatgatcatgtgcagtgtcattggaactttgaacttgaacacgtagttgttgcatacgctggtcaggaaaaacatggccacgaggagcgcatagtcgcgcaggctgatcactctctgggccaggccaaacttcgaggtgaagatgaagccctcgagggcaataaatgcaaactgggcgccagttataaggtttccagcgccgggatccagtttaaccaggagctccaagaagacgacgccactgcagcagcccaagaaaacgccgcagatggccgaaatagcgcggatggataaattcatgaactcgcgcaacgaaagtagacgattcccaccaactttaacctacgatctgggccatgacgagcttttaagccaacttactttctcttcggccatacaaaacgtaaacaaatgcaacaggtggttatcgataaagttcggttcgggcacagctgatgttggtctatcgaaagtggttgaaattcaaatattccaagcgaaaaagaaaaaatttatgattttaagagaagaatattttatttaatgtacattacattcaaaaccaaacttaaatatgttgcctaatcacattcgaaatattcgcaccaacagtcttttacaacaattacaaaatacaatgatgacaatgctaagaaagaaattacagattagcaaattaatggtatattacttatttttccttttccagcaaggcaataattttgtttaacttttccgtctgctgggcctcgaagttgtccagtctcttagacactaacagcgtcagcttctcaaatctcatgtcgatgtgctccttgaggattgcaacatcggtggaaggcggtgcagtctcttgggtttggtccttcgcctgcggggaatagcccttcatcaggctcatgaactgctcgaacttttcggcctgctcctccttcttcaagggactcgtgccacccctttgcagcagctcttggattcgctgcgcatccattggcctgggcaactgggtggttatgccgttgggattcggcgccacctggagcagggctccgtaaacgcagatctcgctggccgaggtgagcatcttcaggtttatgtcatttatcccggatcggtcgatttccatgtcatagcgatagggtcgcaccgcaacctctgggtcctcatcgtcgacgcaagtgccgtagatggtctcgcagtactcctgcaagggtccaatgaacagctccaccttgggagcgctgcaaatcagggtgagcgcggcgattttgaagcggttcgggatctggaagcgcagctc

SEQ ID NO: 35204 - DNA, 969 bp, DROSOPHILA
atgaatttatccatccgcgctatttcggccatctgcggcgttttcttgggctgctgcagtggcgtcgtcttcttggagctcctggttaaactggatcccggcgctggaaaccttataactggcgcccagtttgcatttattgccctcgagggcttcatcttcacctcgaagtttggcctggcccagagagtgatcagcctgcgcgactatgcgctcctcgtggccatgtttttcctgaccagcgtatgcaacaactacgtgttcaagttcaaagttccaatgacactgcacatgatcatacgcggcggttcgctgatctccaacatgtgcctgtgcacgttgatcctgaagaggagttaccggttgagtcagtacatatcggtgctcatgatcagcgtgggcattttcgtctgcacatatttctccagtccggatttggtgggtaagatggagaatttggatagtggcgccgaggcggatacgttctggtggctgttgggcgtggcactcttggtgctggctctatttgtttcctcctacatgggaattacacaggagttgctgtatcgacgtcatggcaagtgcgccagggaagcgttgtattacacccacctgttgccgctgcccgccttcctgctcatgcatgacgacatacggacgcactggcttttggcgttcacgggcgagtcctaccagttgcccctcctgggcgtggcagtgcccctaatcctgctatacttattgggcaacgtgcttgcgcagcatttgtgcatcagctccgtttacaccctgaccacggagtgcagctcgctgacggtgactctgatcctcacactccgcaagttcatctcgctggtcttttcgatcgtatacttccgaaatcccttcacctggtggcactggctgggcaccgcgctagtctttgtgggcaccttgatgtttgcaaatgtgatcagagttccgaaatga

SEQ ID NO: 35205 - protein, 322 aa, DROSOPHILA
MNLSIRAISAICGVFLGCCSGVVFLELLVKLDPGAGNLITGAQFAFIALEGFIFTSKFGLAQRVISLRDYALLVAMFFLTSVCNNYVFKFKVPMTLHMIIRGGSLISNMCLCTLILKRSYRLSQYISVLMISVGIFVCTYFSSPDLVGKMENLDSGAEADTFWWLLGVALLVLALFVSSYMGITQELLYRRHGKCAREALYYTHLLPLPAFLLMHDDIRTHWLLAFTGESYQLPLLGVAVPLILLYLLGNVLAQHLCISSVYTLTTECSSLTVTLILTLRKFISLVFSIVYFRNPFTWWHWLGTALVFVGTLMFANVIRVPK

SEQ ID NO: 35206 - DNA, 2524 bp, DROSOPHILA
aagttcgactttagtgcccccaaatgttcgtctttaacgcagttaataatatacttcacttgcaggtacagcccattgcaggagcaacttcagatgcagaagccggcggcgtgtccaatagcggctcacacggtggtggcggtggccatgaggaggaagaggagctctctgagatcttcattcaccagagcatccacaccatcgagtacgtcctaggttcggtatcccacaccgcttcctatctgcgattgtgggcgctttccttggcccatgcccgtaagtaatcaatgcagtagtaaaaacctacataattacttaaaccaagcattcttacttggcagagttggctgaggtgctgtggaccatggtcctatcgattggcttgaagcaggaagggccggtgggtggcattgtattgacctgcgtgtttgccttctgggccattctcaccgttggcattctggtactcatggagggcttgtctgccttcctgcacaccctgcgtctccattggtaagtcacctaatcctcgagaagtatgaaatggtatctaattgaacggctttctcatagggtcgagttccagagcaagttctacaagggccagggttacgccttccaacccttctcgtttgatgccatcatagaaaacggagctgccgccgccgaggagtaaataaagcggaatatcggtcagagcaacaaccaaagcacgttgagagtctcattgcgttatatgaaattaactatccaaataagtggaatctaccagttacagtaacaaacatatatgtacgttttaatgtttaattgtcgtgaatttatctatgtatgtatatcgtatagccccagcaaacgttagattgctaacaatatttaatgttcttcgtagacgttctcctgtttattaactatacttgtaaactcaaataaatagaaaaggctaaccccttggggttggcaccaaaagaagcttgcatttgggaatgcttattgggagtcaatgggacatcagctgattgatggcggaaacgaatttgctaagattttccggtttcgtttcatagggctttaaggcttcaaagtccagagtagctagctgggcatccacgtcggtaactttgcagtaatacagatagttttcagcggccagttgcttggccaactccagttgatgattgtccatgagcgtgtcatttatcacaatgagtccaggtttctggttatttagtatatccatgcaagttccggctcccgcatgtccaataattaggtctgcggacttgatgtcctccgtatttggccggaaattgtactgctctatctggattccgtagttttttcttatcaattgtatttcatcgtctgttaatggttgcgaatttccgtgctgtatgacgagtttggtgcatttccggttctgtagagctttgagtgcgggttccgtggatgcagttgatattagagcatcgaatttggtggtaccaacggtaatgtaaacagtgttcaaatgcattttctgtaaatagttaaacaacaagacacagctgttacgagttgtgcttcctcttcgcctttgccattcagccggcgtaactcatacgacgttcaaataaatggcagcctggaagctcgaaacaccggccataaccgttactttatctactaggagtgcagtaaataagtaaaaagagtagtgaaatagttttaagcaatacttgtttaagcaaaatgcttaaattcaattttaaacgtaagtattccgctttcacagcgctcagtttattttgctctcacgcagccaaagtgcgaatttggcgcacgcgatcgccatctcgctcattgtgcttccattccatttccatcgcagcttgtttattccgcttattcagttctcaaccgttagccgttacggttgtgcccgcgctcgtcgggaaaatacgcgaaagaactgtgctccgtttagtgatagtcccttggcaaattgcattttgattagtttggcagctcggccttagtacaagtgatttgtttacatttaattcaattaattaggcgtctgccaggctgccaacagtgtgtgcgcgcttgtgttggtgaccgaccacaaatcagtgtcgcgccagcgtaacggtaaaggtgcgaaagagtccgacaaacggttttccaggacggaggtgaaacggtaaattaaattattcccacgtttcgaatgctgcgtatgtgtgtgtgtgggcgatttgtgcgtgtgtgtgcactgagaaaaatgcactggcatggcgatcattttgcaccaccattaaactaaaaatataagtacattaaacgatttgagcacatttctttttgtgcagtgaaaacgcttcaagtacttaattatcctaggtgcacaagtaatacaacaattttaatatccatttgccatgtgcgtttcgctttgatatttctttctctgcttgccggctgcggtttgcacgtcggaaggtaattgactaatcaacacttcgtttaatttcgtttttat

SEQ ID NO: 35207 - DNA, 524 bp, DROSOPHILA
tacagaaaatgcatttgaacactgtttacattaccgttggtaccaccaaattcgatgctctaatatcaactgcatccacggaacccgcactcaaagctctacagaaccggaaatgcaccaaactcgtcatacagcacggaaattcgcaaccattaacagacgatgaaatacaattgataagaaaaaactacggaatccagatagagcagtacaatttccggccaaatacggaggacatcaagtccgcagacctaattattggacatgcgggagccggaacttgcatggatatactaaataaccagaaacctggactcattgtgataaatgacacgctcatggacaatcatcaactggagttggccaagcaactggccgctgaaaactatctgtattactgcaaagttaccgacgtggatgcccagctagctactctggactttgaagccttaaagccctatgaaacgaaaccggaaaatcttagcaaattcgtttccgccatcaatcagctgatgtcccattga

SEQ ID NO: 35208 - protein, 171 aa, DROSOPHILA
MHLNTVYITVGTTKFDALISTASTEPALKALQNRKCTKLVIQHGNSQPLTDDEIQLIRKNYGIQIEQYNFRPNTEDIKSADLIIGHAGAGTCMDILNNQKPGLIVINDTLMDNHQLELAKQLAAENYLYYCKVTDVDAQLATLDFEALKPYETKPENLSKFVSAINQLMSH

SEQ ID NO: 35209 - DNA, 4195 bp, DROSOPHILA
acacactgtttctgtgcttcctggaggactgcgagcgcaacgacggctcaccggagaagccgttcttcatgtccaagcagctaatgaagattcttggcaagaagaacaatctgccgccgcgtcagcgccgcggaaagtaggagacagcagtgcaaattataactttattgaagtaaaacatatatatatatatttattatagcccaaaacgaaacgatcggggttgtgagcgattgctcaaccggctgcaattgggtttgcattaaatgcacgctcctttgccaatactcttaatctttaatctagtgtatataatacgccagtatccgtatccatatgtaaagttttttgtgcggctagacatgtgataggcgcggaccataaagaccaaaagtaataccatacaataacatgtatacagagacacaaaagtacatatctcacattcatgaagtttaagttaacgataattattataattttcgaatttaataaaaatgaattcattgaagacacacttttcagttttgttcttattttatttctccatcattatattcactcatttttttttatttttatacaatttgtttcatacttttgccgttcattcatctagaacgctcaacccactcatttcagaaagtctgattttgcaaggatgtaacagatcgctgaagccgcaatgaagaacaatagctataagatatgacttttaaaagtatatatataataaaccttaatactgcctcaaaggttgtttatttcaataataatcttaagtcctgaaactcgaatttcgaaaagcctggtatacttatagatgtatttaaaagaagaaaattgctttcaagctgaaagattttagttttaatttcatatgggtaatattaaaaactaaagtaaaaagtatatttcgtttaaaaacctcataaccaattagaaaaagaatacaaaatctattacctaaacaatattggccattcgcgattcccgtggactaaaagataatatccttgagcacgctatcgctgatgttctgcaggtcatcctcaccaccaatctgatcaaaatcgaatttatgcgagacattgaatgcattcttatcgttttcaatgttgaaatcgggatcaagctgcagtgagtcctgtaaaaaaaaggaacttgagattcgtatatttcgtaggcacgtattattgttgatcccacttacattgattgttctgtcgttgagctgaagacgtggcgcgacatcttgctggtggctctcggtatgtggaaccagtgcatctaggcgtccagatggcgaggtgctaagattaagcacattccgtgatacctccaggacctttataaccgcagcgctcttggcgatcagtgaagtgttgttttccgaagtgcgcggaatgcgctcaattcgggtgcactcgctaccactcaagggtgtaaagggatcgctgggatccgttggtgaggtctgaggtgagatcactgctgctcctggcaccggcgcctcatcgaaaccgaatgacgcttgcatttgcttccacttgctgcccagggaggagagattcgcctgcggagctgccttgaccttggaggtgtttttgtgaatggtgcgcagcatttgcatgggatcgttgatcttggatcggtttaaagtgccattaaggtcaatgccggtcgattgatcaagggctttcagcttgcgtgctgatcgaggcggcgcaggtgctgaaaaggaaaactcataaggatgagggtcactaagcgaacggtttagttcactccttaccgagtaagctgttgcttaaggcatcaaactgtttgccattgaagtcatcttgcagtgcaagacgcactggggcattgcgaccgccaccgccgcccatgtcgattctgatgggaggcgtggaaacaaatttggagctgataaccgattcgaagcgaggcgtggccggctgaagcgtctgtaccctggcggagccacttgcattggcacttcccttgtcctttttggacggttcgtttagtttcttgagtaaattgttcaattggacttcggactgtgaaagttccactcgaagagcctgcaaatcggtggtgacaaacgcattcgattcgttgtagtggtcattagcatccagttgctcggcaattgtgccgctgatccgattaaagccgtttaagagcgcatccatttttgatgcgcccaaaggatcgtagaaatctgcgaaggaattgaaaaaccatttaaatttaaagacctgcaaggatgcaaccaaagatgtctcacctccttctgtgactgcatcacagtcgaacagcactcgcatgccccgaagtgccttctccaccgcctccttgctctggttgttctcggcttgcttcacctggaaaagatcgatggcctccttgagaccgcacagagatgcctccaggtcgaatttcctttcggtgggttgggtaatgacccgctccacgccgagtgcagcggtggcctcgaactcatccagaaagccatcgtccgccagttgctcctcgggcactcccatgtctgcagacagatcggccatcaggcgtctgatcttctgggtcttgtcccgcaacagggccgtattctcctccagattgaccacatacgaagaagcgtactccttcatcacggcattttggcgggccatgaccttggcgctcacgtttggtgttcccgcctctaagccaagtgacttctcgcgctgcttgatgagctcctggatcacgaagcccacgaactcgagcaggaagttgatgaacctcatgcctccgggcatcaccaccagatacgacttgatgttggcccaatgcagctggtgcttctcgttcagatgcttcagatactccaccgtgctggagcgaaagttcgcctccgacttcttgtcggtgatgggccagaagaagcggcgtttgaactccgcgggatccagcagacggaagaggtagtgcatcacatgcacgaaggccacctggttgggcttgaggaacatgtcccaggcaatcagcttacgcagctcgtccggcagggggtgcaccagggccagtccctgcagcttcctgtggagcttctcgctctgctccttctcttcggccttccacggtgcaattatggtccgatccatattttagcacagaaattaagtaaaatatggcggtttagtttgaagttctttgtttttgttgctgcccagtgttaccaagtggttgaattcaactgaatgaagacgttcccactgcctgtttatattgacgaaaaatgttatataaaagggataaatctatttattttccctaggaatagtaactgcgaatagcatttgtgttttttaaatgttttttataatatttcccagatatttgtttttaagtacaaatttatttccctagttactcgattggtataaatccaatgacctgccacggtcacactagattcatagttcggaaatttgtcggttgctggagtttgtggacgaatttatatttaatttttaagcacttggtaattaactaatcgacgttcatttcgaagtgaccccctgacaaactaaatagttttcggataaagctcgagcccagtcactggctgacccccaacgagccgaaaaccttggcatccgggtccaacgtagcactttctttttgtccgcggcggagaaaaatcaatatacgcatggggtatagaaatcgaatctcggcgcatatatagtatagattacagacaaataatctgggggacaagcgaacgtccgcccaccgaaacgataaccaaatcagcatgaaaatatgtatgcgacacggccgcaaaacttaggaagaaacccagtttggccatgaatcatgcaattgaatgggcccattgtgtactatatatgtacatatgcattctgatttagtgtctgttctccattcgcagatatcgggaatccggctgccacaatgggttccctattccgcagcgaggaaatggcgctgtgccagctgttcctgcagagcgaggcggcctacgcctgcgtctccgagttgggagaactgggattggtccagttccgagatgtgagtaggatgggttacataaagctgcggtcgaggcagccgcactgactaaccataaaccacaatcataccccttacctcattagcgaattcggtattccat

SEQ ID NO: 35210 - DNA, 2002 bp, DROSOPHILA
taaaccgccatattttacttaatttctgtgctaaaatatggatcggaccataattgcaccgtggaaggccgaagagaaggagcagagcgagaagctccacaggaagctgcagggactggccctggtgcaccccctgccggacgagctgcgtaagctgattgcctgggacatgttcctcaagcccaaccaggtggccttcgtgcatgtgatgcactacctcttccgtctgctggatcccgcggagttcaaacgccgcttcttctggcccatcaccgacaagaagtcggaggcgaactttcgctccagcacggtggagtatctgaagcatctgaacgagaagcaccagctgcattgggccaacatcaagtcgtatctggtggtgatgcccggaggcatgaggttcatcaacttcctgctcgagttcgtgggcttcgtgatccaggagctcatcaagcagcgcgagaagtcacttggcttagaggcgggaacaccaaacgtgagcgccaaggtcatggcccgccaaaatgccgtgatgaaggagtacgcttcttcgtatgtggtcaatctggaggagaatacggccctgttgcgggacaagacccagaagatcagacgcctgatggccgatctgtctgcagacatgggagtgcccgaggagcaactggcggacgatggctttctggatgagttcgaggccaccgctgcactcggcgtggagcgggtcattacccaacccaccgaaaggaaattcgacctggaggcatctctgtgcggtctcaaggaggccatcgatcttttccaggtgaagcaagccgagaacaaccagagcaaggaggcggtggagaaggcacttcggggcatgcgagtgctgttcgactgtgatgcagtcacagaaggagatttctacgatcctttgggcgcatcaaaaatggatgcgctcttaaacggctttaatcggatcagcggcacaattgccgagcaactggatgctaatgaccactacaacgaatcgaatgcgtttgtcaccaccgatttgcaggctcttcgagtggaactttcacagtccgaagtccaattgaacaatttactcaagaaactaaacgaaccgtccaaaaaggacaagggaagtgccaatgcaagtggctccgccagggtacagacgcttcagccggccacgcctcgcttcgaatcggttatcagctccaaatttgtttccacgcctcccatcagaatcgacatgggcggcggtggcggtcgcaatgccccagtgcgtcttgcactgcaagatgacttcaatggcaaacagtttgatgccttaagcaacagcttactcgcacctgcgccgcctcgatcagcacgcaagctgaaagcccttgatcaatcgaccggcattgaccttaatggcactttaaaccgatccaagatcaacgatcccatgcaaatgctgcgcaccattcacaaaaacacctccaaggtcaaggcagctccgcaggcgaatctctcctccctgggcagcaagtggaagcaaatgcaagcgtcattcggtttcgatgaggcgccggtgccaggagcagcagtgatctcacctcagacctcaccaacggatcccagcgatccctttacacccttgagtggtagcgagtgcacccgaattgagcgcattccgcgcacttcggaaaacaacacttcactgatcgccaagagcgctgcggttataaaggtcctggaggtatcacggaatgtgcttaatcttagcacctcgccatctggacgcctagatgcactggttccacataccgagagccaccagcaagatgtcgcgccacgtcttcagctcaacgacagaacaatcaatgactcactgcagcttgatcccgatttcaacattgaaaacgataagaatgcattcaatgtctcgcataaattcgattttgatcagattggtggtgaggatgacctgcagaacatcagcgatagcgtgctcaaggatattatcttttag

SEQ ID NO: 35211 - protein, 654 aa, DROSOPHILA
MDRTIIAPWKAEEKEQSEKLHRKLQGLALVHPLPDELRKLIAWDMFLKPNQVAFVHVMHYLFRLLDPAEFKRRFFWPITDKKSEANFRSSTVEYLKHLNEKHQLHWANIKSYLVVMPGGMRFINFLLEFVGFVIQELIKQREKSLGLEAGTPNVSAKVMARQNAVMKEYASSYVVNLEENTALLRDKTQKIRRLMADLSADMGVPEEQLADDGFLDEFEATAALGVERVITQPTERKFDLEASLCGLKEAIDLFQVKQAENNQSKEAVEKALRGMRVLFDCDAVTEGDFYDPLGASKMDALLNGFNRISGTIAEQLDANDHYNESNAFVTTDLQALRVELSQSEVQLNNLLKKLNEPSKKDKGSANASGSARVQTLQPATPRFESVISSKFVSTPPIRIDMGGGGGRNAPVRLALQDDFNGKQFDALSNSLLAPAPPRSARKLKALDQSTGIDLNGTLNRSKINDPMQMLRTIHKNTSKVKAAPQANLSSLGSKWKQMQASFGFDEAPVPGAAVISPQTSPTDPSDPFTPLSGSECTRIERIPRTSENNTSLIAKSAAVIKVLEVSRNVLNLSTSPSGRLDALVPHTESHQQDVAPRLQLNDRTINDSLQLDPDFNIENDKNAFNVSHKFDFDQIGGEDDLQNISDSVLKDIIF

SEQ ID NO: 35212 - DNA, 2231 bp, DROSOPHILA
tctacctgaacgtgcggctgccacataagatcgcctatggcgacttctgtcgtaagctgctcaacgaggaacagttccggcgcaaaatctcgcgcctcaactccaatatcatgtatctggcctacacacagcaggtgaagttgcgtgccctcatcgaacagcatacgctggaaaacctactagccatcctcgatctggagcgcagcgacttgggtcgatatggccatctggacgtgaacaatgcaccactcatgaagtcagtggactccctactaatcggcatcgagaccgccacggaatcggagtcagagggtgagttggtttagcaatttgaggggaataatcttttcaaactgatgctgatgcctttccagacgaaaactctctgcgcatggactgggaggcggtgcccagcctgacaccgcagccggagctggcggatcccaatctgatgccggcggccaaccagcagtctaccatcgccttcgtgcgaatggcggccacatcggtgctgcgctggatcaaatgatcgcagaccaacagacgtccgatctttcggctatatcatcatgagacacgcgtgttatcttttacaaattagactaagtaatcgtttctgtgacagcacgtcggtgtttatcggcagttgctggttttagcgttatcctttggtttacagaactaattttgtatcaattatatatatacatatatattcgctgtgtgtaaagaaaatgcgccttttggatttatttctattacataacttattcgcctttatttaataaaaatggttctctataaataaatatatataaatttgctttattaatgcttgcatagtacactgacttagtaggtaaacgactcaatgagaaacaataattaaactggtgcaataattggaaaatcggcagacacagctgcgaatgaaacctacctagaatcagcactagaatcttagattagaatcgcaagggaacgagctgagtgaccctagctaaatgaactttgtgggcagttgttgcgtggatgggcgagcagctccagtcgtggtcaccacatcgccgccagcgctgggctgcggcaggctgggtttaacgaatacttgtggcagtgtgttggcagaggctcccacctgggcggcggacatggagacggagccgttggccagcaggtcgtagcgcggcgaggcgtggctcatcgtggagagcacgatggcggcggccatcgcctcctggttgtaaaaggccgtcacagcagccggaaggggctgctgtgcggccgatcccgaatgtcattggcgcgtgggcgtactgggcgctgaggatcccattcctccgcttgcgcccttgacgctgttcggcgagaaagccgcttgaatgaattgcttttccatttccttcagatttgacatagttttcattatatgcggatcggtgagatcgtacactggacccagcgttcttgggctattgtagatatacatgttattcgcgctgtagcccagggatccatttacctgccccaccgcacccaaagacgaccgacctctgttctgagtcttgttcttgggcttagactggactttcttttggggcttagaggcaggaaaaactcccacaatctcaacgccatccgactcgctgctgctttccctggctaccgacgtcgtttgcgcggcctttgagatggcggtgatgacagtggtggtggcagctagctgcttggacgtctgaagtatatcgctggtgcattgatagtcatccaggttgatcacatggggagagggccgagctcccacaatcaccttggcttggccgtctccagaatgcggactgggattcccgctggctgccagggaggcggccgtgatcagattgtagaaattgttgctggtgttaaggtcaattttccggctaggggatgccagatccagaaccgtactggcggctgctacggcggcggcattgagtgctgctgcctgagccgaggtgctcggcatggagagcagcgtgtccaggtggggcaggtggttgttgttattgctaatggctggtatactgacggccgccgtggcagccggcgccagctggaattgcggatgcggagtaagttgcggttgcagcggtacctgcttagccacctttttctttggcggcttgctggtctgcttgggcatctccttcagctttcgcttcagactgttggaggaggcacttgtagctgag

SEQ ID NO: 35213 - DNA, 231 bp, DROSOPHILA
atggccgccgccatcgtgctctccacgatgagccacgcctcgccgcgctacgacctgctggccaacggctccgtctccatgtccgccgcccaggtgggagcctctgccaacacactgccacaagtattcgttaaacccagcctgccgcagcccagcgctggcggcgatgtggtgaccacgactggagctgctcgcccatccacgcaacaactgcccacaaagttcatttag

SEQ ID NO: 35214 - protein, 76 aa, DROSOPHILA
MAAAIVLSTMSHASPRYDLLANGSVSMSAAQVGASANTLPQVFVKPSLPQPSAGGDVVTTTGAARPSTQQLPTKFI

SEQ ID NO: 35215 - DNA, 4924 bp, DROSOPHILA
aagaaaaacccaacaaaagattcaatataaatctcactgaaacgcaacaaacaaccgaaaacccaactgaaaacgaaaactaaataaaaggaaatgcaattaaagttcatgcatttgcgtttgtactgggtgaaatgttcttaggaaaataaagaaaattccatacaattttaaaaacacttgcattttattattggctccgttttacatacattcacaggttgccgtgggatcgaaaatgttctgctcattttcattgagattcatttattcgctacctttaagattacacacaaatcgactttgtgctgagtagtgcaactgattcctaatatcatgctaacataaacatacacgtttaactaccatagattacaaggttaaaacctgctggcggattcgattgatgctactgtctaaaaaatgggtttgcaatgccccaatatcgtgttacagttcgtgcttataataggaaataaataattacaaaataacaattatcagtacacagaatattatacaatcgattgctaacgattttcaaatgacatgtttaataggaagatgggatgatttcgcaaaaattcctggggcgacaaatgcagctttttcttggtgcaacctcaaatctaacaccttccacagataatggattaagattgctggccttctatagatagacttagtaaatattttaactgaattttgttagtagaggtctggcgttaaacaagtgatattgcaccctaatttgttgccccaggggctacaatttctgtctcaatcgatccatcccgatgttgggcattgcttcatccgataagccaactctgctctgcgtatctctaagcttagcatagtatttggcatttacgctaaattgcgaatacgagttaaacgatagttgcggcatgaatgcaccaactccattcggctttcagttagtgtcgcggacgcaactaagttgctctgccctctaattgcttcacttaggcggtagttaagtcttgagcggatagaccggcagtggatggccctccgaattgaagacccattgctccaggtcgatttccttgcggtcgtcgctaaacagcaggtagaagtacttcagggtctcgctcatccaaaagctttccatcagatcgcgcagacgcgtgctctgtgtgttctttacatttcccatcgatgtgtagcctgcatttactttagcgtgagtctcaaacgcctggaagattttccatcccatgtcctggtatgtccgattgccagttattgagtagaagtaatagagactctccacaaactccgggcgcaacaggttgtgggcatcgtttggcttcacataaatgtcctgatcgtccttttcggttagcgcaaaatacgagatctcagcagccaaatgtgtgggattcatcatataggtctgatagcatgtgtccaataaatccctcgcaagtataaggtgcgagtctggcattccgttctggtgacccagaatcaaagtgcccggcagataacacgtaaggtgatccattttcggcttaaagtctttgccattgatcagctcgccaatgtaaacccagtgctcgcgtggcgtgcgccgcatcagttgtgttagaacaccatcgactgcttgcatgtagtccaaaataaggctaaaataaaaaagaggttaaataaagtaaataataaacaattgccacagcacagctgtgataaatcaacaagctgaaatttctacgtcttgatcaagaattctttgttcttaatagaaattcttaacttcaatgtcacactcagatacgtacttatcattatccttgcggccggtctgaatccactgtttgagcaagtactcatagtaggagtccccacgagcaccaagcgagatagtggcgtagtttcggaatgttcctgtgttggcgttaatgaatatgggcaccaaaccatggttcttctccagatcatgcaccttctcgtttactttgtgagcaacctgataagtcatttattttatagttcgttattgcccttatctgatctgtttcgtttacctgttcataaatggagatgtttgtagagcgactcaaatcacgaaactctagctgaatggtggtgacctcactggtggagctatcaggagaccacttcggcgagtgcgccgaaagatctccgagattcacatcagaataggggatatttgacggcgattgaaaggcgggaagtaaacggttgccaagttccgcagccttggccagaaacattgtatcgccgctcaggtgatatgcagacagcagtccgcctaggacacgtatggtgacctcgaataggtttacatcgcgcttggtatcaaagcgcagtgattgctctacccagtcgcgtccttccttgaattctgtgtagatgttattgagaaaaataaggaaagtatttccataaactaatgattttgtgcacattaggatataggcaacttaccatcatccagtcccattatgtacatggtatccaatgagtcaacaatggttagtcccagaccgaaccactcgtgggagtactgggagatgggcttcaggttgtcgtggccccaggcatacttcttgtagccagcccaggagtgcttgaaggcggctacaacagccgactgtctttcgttggtggcgccatggaagtgctggcccttggccagaatgggcttgatctttttgagatgctctttgaagctaacgccgcccagagtgagtgggttcttgatggcttgctcaagctgctcgccctcgctaagcggctctgctggatcctgggcgacgggctcctctacattgtttaggatgtcgattccaccgatgtcctgctccttgttactatcggggggaggcaaggccacggccatggccgaggcctggggaagtccttcagcagccaccgtctccggcagacgggccacgttctccgctgagttcgcttctccataggcaactagctcattaaactgaaattgattgatattgagatatcattaatagattttactggaagtgtgctgcgtgggcaataaatcaaacaccaatagtcaatcgtattgatacgcatgctatcttaataggcaaacaactccagccacttaggcacttatcaattaagtggggggcctacttaccttatcactaaccgcctccacccggggtgctctcttatcggccggaacaggtaccgcagcagtgtctttgggcacatccttatccacccccggatgatggtgcggattgggcaggggcatttgatatgctgccacctcggccttggtgtccacatcctttaagctggcagccagcagctgatcgccacttaggcagagcaacactgtcacgcagaatccggtgatgcccagaataatgagattgcgctgacaacgcggtagctgattccaagcctgaaccgtgagacaaaagatcgtacttataagttctgggtttcttgaggatgtcccaggaccccagcaactggacttctgccaggttgctacctacccgacgcaggctcttcctgccccgctcgtccgtcgtcgccgctgatcccggcgggagtgtgagcgttatgtgaccgccgtccttcatagtgtttcactaaatgccgccgccggaattcagagtgtgggaaagttggatgggaaattccacagcattcgcctcgaataaaaatcgattgctgtgcgccgctggccgcggaggaatcggagctaactaaccaaggttggtccaactactacctcttttatgccttaatcatctctatacgtgccagtgcattaatttatatatgctagttctggcccacactatgcaaaattacaaataagaaattctaaaattatttcacgagagctgcatttttgagctgcaatgctgccaacttgttcttcaacagtccggccaaaactaaagatggggctagcaatcatttacttttgaaatacctcttaaataaaaaaaaagcaaattaaattatattttagatattatcactactttataaaagaatttttctaaagaatatatattaatacgaagtggctaattttttcgaaaatccagctaacacagtatgaatttagccaaatctagagtggccaacactagtcccacttaacagtgatttatttggcagccctggtaagctccaagtgtgcccacaatacggcattaaagtggtcacatctggtcacatcccattttcacatcaaaatttcgacggaagtcggtgcgtaaacccatagcccatttttagttagataatagcacttaaaacccaaaaaataacacctacagccggcaacgatagcgatagacccataggaaagcgaaccgcaaaccgacgatgctccgaacccgactcatccaggcggccagctccgcccagcgagcgttctccaccagccagaaggccctggcggccaagcagatgaccgtgcgagatgccctcaacagcgcattggacgatgagctggcccgcgacgaccgcgtcttcatcctgggcgaggaggtggcccagtacgacggtgcttacaaggtgagatctgcgacttttcctgcccctgcgcgattacgtaaacagcaagcaggcggttgcgacgacgacagctgatgcaggtggccgggatgggggaagttggtggtcagcggggtgatatatgcgtgctatatgtaactactgatagtgattccgaacaggtcgacgcgaatccgaatgcgtgatcggagtgggcaaggtcacgcagaatatgtgtgaccgactgtctgctgattatatagattggcccataaaacaacgatttgtttacccatttgaggtggattgataaccggcgttagcaattctatcctattagattcatttaaactatgattgtggctactggtgtaac

SEQ ID NO: 35216 - DNA, 2365 bp, DROSOPHILA
ttgaagaacaagttggcagcattgcagctcaaaaatgcagctctcgtgaaataattttagaatttcttatttgtaattttgcatagtgtgggccagaactagcatatataaattaatgcactggcacgtatagagatgattaaggcataaaagaggtagtagttggaccaaccttggttagttagctccgattcctccgcggccagcggcgcacagcaatcgatttttattcgaggcgaatgctgtggaatttcccatccaactttcccacactctgaattccggcggcggcatttagtgaaacactatgaaggacggcggtcacataacgctcacactcccgccgggatcagcggcgacgacggacgagcggggcaggaagagcctgcgtcgggcttggaatcagctaccgcgttgtcagcgcaatctcattattctgggcatcaccggattctgcgtgacagtgttgctctgcctaagtggcgatcagctgctggctgccagcttaaaggatgtggacaccaaggccgaggtggcagcatatcaaatgcccctgcccaatccgcaccatcatccgggggtggataaggatgtgcccaaagacactgctgcggtacctgttccggccgataagagagcaccccgggtggaggcggttagtgataagtttaatgagctagttgcctatggagaagcgaactcagcggagaacgtggcccgtctgccggagacggtggctgctgaaggacttccccaggcctcggccatggccgtggccttgcctccccccgatagtaacaaggagcaggacatcggtggaatcgacatcctaaacaatgtagaggagcccgtcgcccaggatccagcagagccgcttagcgagggcgagcagcttgagcaagccatcaagaacccactcactctgggcggcgttagcttcaaagagcatctcaaaaagatcaagcccattctggccaagggccagcacttccatggcgccaccaacgaaagacagtcggctgttgtagccgccttcaagcactcctgggctggctacaagaagtatgcctggggccacgacaacctgaagcccatctcccagtactcccacgagtggttcggtctgggactaaccattgttgactcattggataccatgtacataatgggactggatgatgaattcaaggaaggacgcgactgggtagagcaatcactgcgctttgataccaagcgcgatgtaaacctattcgaggtcaccatacgtgtcctaggcggactgctgtctgcatatcacctgagcggcgatacaatgtttctggccaaggctgcggaacttggcaaccgtttacttcccgcctttcaatcgccgtcaaatatcccctattctgatgtgaatctcggagatctttcggcgcactcgccgaagtggtctcctgatagctccaccagtgaggtcaccaccattcagctagagtttcgtgatttgagtcgctctacaaacatctccatttatgaacaggttgctcacaaagtaaacgagaaggtgcatgatctggagaagaaccatggtttggtgcccatattcattaacgccaacacaggaacattccgaaactacgccactatctcgcttggtgctcgtggggactcctactatgagtacttgctcaaacagtggattcagaccggccgcaaggataatgataaccttattttggactacatgcaagcagtcgatggtgttctaacacaactgatgcggcgcacgccacgcgagcactgggtttacattggcgagctgatcaatggcaaagactttaagccgaaaatggatcaccttacgtgttatctgccgggcactttgattctgggtcaccagaacggaatgccagactcgcaccttatacttgcgagggatttattggacacatgctatcagacctatatgatgaatcccacacatttggctgctgagatctcgtattttgcgctaaccgaaaaggacgatcaggacatttatgtgaagccaaacgatgcccacaacctgttgcgcccggagtttgtggagagtctctattacttctactcaataactggcaatcggacataccaggacatgggatggaaaatcttccaggcgtttgagactcacgctaaagtaaatgcaggctacacatcgatgggaaatgtaaagaacacacagagcacgcgtctgcgcgatctgatggaaagcttttggatgagcgagaccctgaagtacttctacctgctgtttagcgacgaccgcaaggaaatcgacctggagcaatgggtcttcaattcggagggccatccactgccggtctatccgctcaagacttaa

SEQ ID NO: 35217 - protein, 685 aa, DROSOPHILA
MKDGGHITLTLPPGSAATTDERGRKSLRRAWNQLPRCQRNLIILGITGFCVTVLLCLSGDQLLAASLKDVDTKAEVAAYQMPLPNPHHHPGVDKDVPKDTAAVPVPADKRAPRVEAVSDKFNELVAYGEANSAENVARLPETVAAEGLPQASAMAVALPPPDSNKEQDIGGIDILNNVEEPVAQDPAEPLSEGEQLEQAIKNPLTLGGVSFKEHLKKIKPILAKGQHFHGATNERQSAVVAAFKHSWAGYKKYAWGHDNLKPISQYSHEWFGLGLTIVDSLDTMYIMGLDDEFKEGRDWVEQSLRFDTKRDVNLFEVTIRVLGGLLSAYHLSGDTMFLAKAAELGNRLLPAFQSPSNIPYSDVNLGDLSAHSPKWSPDSSTSEVTTIQLEFRDLSRSTNISIYEQVAHKVNEKVHDLEKNHGLVPIFINANTGTFRNYATISLGARGDSYYEYLLKQWIQTGRKDNDNLILDYMQAVDGVLTQLMRRTPREHWVYIGELINGKDFKPKMDHLTCYLPGTLILGHQNGMPDSHLILARDLLDTCYQTYMMNPTHLAAEISYFALTEKDDQDIYVKPNDAHNLLRPEFVESLYYFYSITGNRTYQDMGWKIFQAFETHAKVNAGYTSMGNVKNTQSTRLRDLMESFWMSETLKYFYLLFSDDRKEIDLEQWVFNSEGHPLPVYPLKT

SEQ ID NO: 35218 - DNA, 4682 bp, DROSOPHILA
attttgttcacaatatttcagaggttagaatgcactcacgttcttggtcttccagcagcgacagaaggccgccttctccgcaatatcctccacgtcgatcatgtccaccaccttgggctcgttcttgcggatgtggttgttgcagcgtccgctgtttttggccgcgcagctggcccgtgccgccggacagtaggccaggtaggcggtgtagccgagtccggccaccaccacggtgggtgggatcagggccaaccaatccttgactgcaaacgaaaccaggttaatacggaatgcagtgcattttaagctttataactagatattttggtcgatcagccgtaaccggcacaaggtcgttccctacacacatattgggttataaacgcaccaagatatgcgcatatatgtttataggtatacccatgttggtatgcctgtattatgcgtctatctagttgcctatctgcgagacaaacttgctccaattataaatttcttggcgagctcagcagttgttgcataatcgctgcaacttttttgcctggaagtgcacacactgcacttccaattcccgttagcagctccgcaatatcacgccacatttgcaccttagtagtccatttagttggcccccctagatgctgcgtcattatcgtggatttgggtttatgtggggcgccctttgaaggcaaatcaaattccaatgggcaaaaccacgctcattgcccaaacttacaggagagcttaaaccagccgccgatgctgtcgggaaccggcagacttgacaagtaattgggcagcgaggacttcaccagatgtgatatgggctccatttcgaaacgccttttttatttaactggctattaaattcggaaaacttgtttttgtgttgctatcggttagcggtgctagcaaatcgataagccagtcctatcggtatcgcagtgctagggtcacactgcattttcgacgataggcagtattacagattcgtgtgtagtcatcgatagcattctgttttgtttacgaattattgattgaaatcaataaattgcagtttagaatgtctgccggggtacaagagcgcctgcaactgagccgcatgccgctggacacgtggtcgaagcgggagcagctcatcctggcgtcggcggtctcctgcagcggcgaccagaactggatcacggtgagccgcacgctgaagacgatctgcggcaatggcagcagtaaccgaccggcggactggttctcgcagaagaactgtgccatgcagtacggcaatctgctggagagcgtggaggccaccaagcgcaagaagcgcagcagcgaaagcagtgccggcgtctcctcgccggccaccgtggagacgcccacagaattgctgctccgtcggctcacggaggagcgtcaggcggagatcaaggcgcagatgcgtcaggatcaggagacttaccgacgcatccagcgggagattgagtcgctgcaatcggacgcggtgaccgagcaggagctgcaggacatgtggctggagatcgagaaggagcaggaggcgcgccgcatcgaggagatgaagctggagaatcgcatgcgggagcgcgagcagcgcaagaaggacctggccagcaactggcgaaacagcagtctagccgtcaagcgttccaaccaagctgccgacacgacttccgtcgatatggacgtggaggacataaacaccagtggcaatggcaaacagcagacgggtccttcgcctctactcacatctctcctgaaatcgcccacaggcaatgcacctgcaacgcccaccccaggaggagctgcaccagcagccggaggaactggcagcgtggccagggctacggcgccaaccatcacctcgctgctgaccagcggtccaagctcagctgttgccaatcagccagtcatcaccatgaagagccccacagatgcggcgtttatgtcccgacctattaccggacctccggccagtgaggcttctactacgcccacactcgaacggagtccctcgcaggcggcacccacactctccatgctgctagagaagaacatggctgcggcgaaggccaacgaaagcggaagcttggtaaagccagaggggtcaggaaaccaggagcagggtgtagacgaagccacttcttctgcagctggcacagcagactccgacgaggcggatcccaacgaagcgcagctgctggaagtcttcaaaaacattgatcaaataatagatgacatcgacattgatatggccagtgtcattgacgatgagattctgaaaaatgtggatgacgtcgtagcctcgccatcaaacgataaagccgaagttattgactttgaggacaagctggacgctttgaagcgggagcaaagtaaaagttccccagccagtgataaaccaaaatctgtggagctagtaattggatccagcgatgactccaacgacaatatacccctggctgccgtggcctcccaggagagtaaggatcgtggtcagtccggtggtgaatctactaggggcaccgaggacgcagagtccgagccgttgaccagcgaggtggcggtggaggagattggtgagaccattaccattatcagcacttcaagtgaggatactgcaggatcgccacccacgaaaatggaggaagatggggccactgattcccttccgaagaaggaggatgccgcggaagacaaatccgaacaggaaagtagctcccaaggacaaaataaggcaggaggaagcacggacgagccggaactaatagatcaccaagccactagggaagcacaaagcaagtcaggcaaggacacagcgggaaagccagtaacaatgcaagaaaagacgaccactcagtccgctccggttcctgtggatctgcacgacacagacgaggagtcgtcttcgttgacggacagcagcaagcacgatgaccatccaaggagtgcaaaagctaagcccccggcattgaagctggctctggatgactccaagtcggaactggagctgagtggcacacctcagccaccgtcggcgccagctcgaacgcctttgctacgaaaactgccgcatcgggatcggtccgaaagtccaatggtggacgatgacgccacaacagccagcgatcattccactgctaggtccacacgtcgccgctgctcctccacgcccgttatcgacagcatacccaattctcccgcctccagcgagcacaccgacgatcggagagaaacgcgagccgcctccaagaagctcttcctgtccatttatgccatgttgctggacagcaagcatgcggctccctttaagcgtcccttccacgacgagcacgcccagcgacatgcggatctatgcctacgccccatggatttccccaccatcaagcggaacatcgactcgggattcattcgcagcttgagcgagctgcacagggatgtcctgctcatggcccacaacgttttggtggcctacaaaccacacacggctcagcacaaaacggcgcgtttgttcgtgcaggactgtcaggcgatcaaagagttctcccaattgccggacgtgcaggcagggatcacggccacgccggtgagcaacacgggaagcttgcgagcggataaatcgagcggaagcaaggccaggagcggctcccgaaagagccaaaggcatcactaggctcacttaacttttcacacgtattcatttatgcatttcattttggaacttacatgctacatgcattaacaataaacatcaatcgaagaatattaggttctgtaagcgtcgagatctggacgagtggcaaatggagcgtcggtgtgggcagtagtacctcttgaggcacctggaaagccgcaggtcgcattggcagagacgagcggcacaggagtcggggccaccgaactcgccatgatcgacggcgcacagcggcttgccgcggtagcacttccacacgtagggcacaaagtattccagataggagatgcagttgctctgaccgtagcacttgtcgtgcacgcgacaacagcgatcgatgccatcggcgggcactccgtggccaccgaatccgcagtagcagccgtagcccttgtagatcagcggatcacagcccgtggagcacttgatcatggagtacagccgagcaacgtccctctttccgcgatctccctccggcaaaagctctttttcccggctgctgtcgttggtgaagctccacttcatggagtaaccgaagggatcgtttacccgcgctatgtacacattctgaacattcatcaggtcctccatctcagctggtttactagttgtttgtgttatcacgcgtatgtccgtcacccggccatcgaagtggtggttctggaactccagacgaatctcgtcgtggggatacgagttctgccagctgatcggcggtcgagtgtccctgtaaatcgacttggggcgtaaacattaatttgtcttgcgatggattagatgtttcgaaacatttagctaactagcatatcttagaagcaaaataataatttaaaataaagtattaattagagaacagcagctgtttctctttaattaagaacagcagccagaaattccatttaagttaatgaaccagaacagaaagacatttattttgtaagtaacttttggtcagtaactttttccaaatgccaaatct

SEQ ID NO: 35219 - DNA, 2682 bp, DROSOPHILA
tcatcgatagcattctgttttgtttacgaattattgattgaaatcaataaattgcagtttagaatgtctgccggggtacaagagcgcctgcaactgagccgcatgccgctggacacgtggtcgaagcgggagcagctcatcctggcgtcggcggtctcctgcagcggcgaccagaactggatcacggtgagccgcacgctgaagacgatctgcggcaatggcagcagtaaccgaccggcggactggttctcgcagaagaactgtgccatgcagtacggcaatctgctggagagcgtggaggccaccaagcgcaagaagcgcagcagcgaaagcagtgccggcgtctcctcgccggccaccgtggagacgcccacagaattgctgctccgtcggctcacggaggagcgtcaggcggagatcaaggcgcagatgcgtcaggatcaggagacttaccgacgcatccagcgggagattgagtcgctgcaatcggacgcggtgaccgagcaggagctgcaggacatgtggctggagatcgagaaggagcaggaggcgcgccgcatcgaggagatgaagctggagaatcgcatgcgggagcgcgagcagcgcaagaaggacctggccagcaactggcgaaacagcagtctagccgtcaagcgttccaaccaagctgccgacacgacttccgtcgatatggacgtggaggacataaacaccagtggcaatggcaaacagcagacgggtccttcgcctctactcacatctctcctgaaatcgcccacaggcaatgcacctgcaacgcccaccccaggaggagctgcaccagcagccggaggaactggcagcgtggccagggctacggcgccaaccatcacctcgctgctgaccagcggtccaagctcagctgttgccaatcagccagtcatcaccatgaagagccccacagatgcggcgtttatgtcccgacctattaccggacctccggccagtgaggcttctactacgcccacactcgaacggagtccctcgcaggcggcacccacactctccatgctgctagagaagaacatggctgcggcgaaggccaacgaaagcggaagcttggtaaagccagaggggtcaggaaaccaggagcagggtgtagacgaagccacttcttctgcagctggcacagcagactccgacgaggcggatcccaacgaagcgcagctgctggaagtcttcaaaaacattgatcaaataatagatgacatcgacattgatatggccagtgtcattgacgatgagattctgaaaaatgtggatgacgtcgtagcctcgccatcaaacgataaagccgaagttattgactttgaggacaagctggacgctttgaagcgggagcaaagtaaaagttccccagccagtgataaaccaaaatctgtggagctagtaattggatccagcgatgactccaacgacaatatacccctggctgccgtggcctcccaggagagtaaggatcgtggtcagtccggtggtgaatctactaggggcaccgaggacgcagagtccgagccgttgaccagcgaggtggcggtggaggagattggtgagaccattaccattatcagcacttcaagtgaggatactgcaggatcgccacccacgaaaatggaggaagatggggccactgattcccttccgaagaaggaggatgccgcggaagacaaatccgaacaggaaagtagctcccaaggacaaaataaggcaggaggaagcacggacgagccggaactaatagatcaccaagccactagggaagcacaaagcaagtcaggcaaggacacagcgggaaagccagtaacaatgcaagaaaagacgaccactcagtccgctccggttcctgtggatctgcacgacacagacgaggagtcgtcttcgttgacggacagcagcaagcacgatgaccatccaaggagtgcaaaagctaagcccccggcattgaagctggctctggatgactccaagtcggaactggagctgagtggcacacctcagccaccgtcggcgccagctcgaacgcctttgctacgaaaactgccgcatcgggatcggtccgaaagtccaatggtggacgatgacgccacaacagccagcgatcattccactgctaggtccacacgtcgccgctgctcctccacgcccgttatcgacagcatacccaattctcccgcctccagcgagcacaccgacgatcggagagaaacgcgagccgcctccaagaagctcttcctgtccatttatgccatgttgctggacagcaagcatgcggctccctttaagcgtcccttccacgacgagcacgcccagcgacatgcggatctatgcctacgccccatggatttccccaccatcaagcggaacatcgactcgggattcattcgcagcttgagcgagctgcacagggatgtcctgctcatggcccacaacgttttggtggcctacaaaccacacacggctcagcacaaaacggcgcgtttgttcgtgcaggactgtcaggcgatcaaagagttctcccaattgccggacgtgcaggcagggatcacggccacgccggtgagcaacacgggaagcttgcgagcggataaatcgagcggaagcaaggccaggagcggctcccgaaagagccaaaggcatcactag

SEQ ID NO: 35220 - protein, 872 aa, DROSOPHILA
MSAGVQERLQLSRMPLDTWSKREQLILASAVSCSGDQNWITVSRTLKTICGNGSSNRPADWFSQKNCAMQYGNLLESVEATKRKKRSSESSAGVSSPATVETPTELLLRRLTEERQAEIKAQMRQDQETYRRIQREIESLQSDAVTEQELQDMWLEIEKEQEARRIEEMKLENRMREREQRKKDLASNWRNSSLAVKRSNQAADTTSVDMDVEDINTSGNGKQQTGPSPLLTSLLKSPTGNAPATPTPGGAAPAAGGTGSVARATAPTITSLLTSGPSSAVANQPVITMKSPTDAAFMSRPITGPPASEASTTPTLERSPSQAAPTLSMLLEKNMAAAKANESGSLVKPEGSGNQEQGVDEATSSAAGTADSDEADPNEAQLLEVFKNIDQIIDDIDIDMASVIDDEILKNVDDVVASPSNDKAEVIDFEDKLDALKREQSKSSPASDKPKSVELVIGSSDDSNDNIPLAAVASQESKDRGQSGGESTRGTEDAESEPLTSEVAVEEIGETITIISTSSEDTAGSPPTKMEEDGATDSLPKKEDAAEDKSEQESSSQGQNKAGGSTDEPELIDHQATREAQSKSGKDTAGKPVTMQEKTTTQSAPVPVDLHDTDEESSSLTDSSKHDDHPRSAKAKPPALKLALDDSKSELELSGTPQPPSAPARTPLLRKLPHRDRSESPMVDDDATTASDHSTARSTRRRCSSTPVIDSIPNSPASSEHTDDRRETRAASKKLFLSIYAMLLDSKHAAPFKRPFHDEHAQRHADLCLRPMDFPTIKRNIDSGFIRSLSELHRDVLLMAHNVLVAYKPHTAQHKTARLFVQDCQAIKEFSQLPDVQAGITATPVSNTGSLRADKSSGSKARSGSRKSQRHH

SEQ ID NO: 35221 - DNA, 2438 bp, DROSOPHILA
ccggagccaactcaattcagcgaaatcaacgccaacggcggctgcctgtcaattaaaacattaaaacgcgctgaaaaatgcagcgaacaggcgcaaagtaaacaaactgcggaacatgttgcagtgcggacagcattttccaacattttccaacattttcagcgattagaagcatagaatttcgcaatggagcacttagagcagcaccagagtttcgggcccagaccaccaaaccgagcaaagaaatccgattcgtcgaccaggggagggactaatgtgtgacccagtttggatcactgtgcaggaaaggaactctgtgtgttttggccatttgctttttgatcattaaaaactggttggccgccgccagctgagcgccccactacatttgcggtcagcttaatagcaccgctgcggccataaattagtcaaagaaaatctattgggatggcagctggcatctgtcaatgatttattcttgacacatcattccgtgttagttcttttaagaattaaaaaccaaataaaataatagtaatgatttacggttgggtcttagtgcaattgtttagtaaataaagttatcaaaggctattaattactatttatcataacagttgatcaacagcaaagagttctggaagaaaagcgtggaatattcgtttatatttttgcatatttttgaatatttttttaaacagtacaaataactttttagaaaaagttttatcgtagtcaagaaaaagatgatttagcgcactgacttctccaatagctggctttcttggatagctaaacgctcctattcaaacacccccgactgtggctatctgtccacttgaaccgcccgcccatgtcttcggcggcagcgtcgcttgtggcattgccgcttgggtttataagcggccggcgatggcggcggcgagccgagtttcagcgtcagattagccgagagcgcgcgcgttttttcccacgatcaggaaaatcgaattccagagccatgaaggatcgattcaagtggttgtcgctggagctgctcctgctgataggcgccgcagtcgcctttccggacggcgctccggcggacacgtgcgtgaagcagcgggcgaatcagccgaatcatggcaaggcccggagtcagccggctcactcgaatccgtacgaggtggtggccgatgcgcagacctaccatcccggccagcagatatcggtggtcatctacccgcactcggaccagagcaccgtcttccggggattcttcctgcaggcgcgtgatgccaactcgaacgagtggatcggcgagtgggtgcagagcgagaacaccaagaccattccagagtgctcggccattacgcactcggacaaccgggacaagctgggcgccaagctcatctggaaggcaccgcaaaataagcggggacaagtctacttcacgtaagttggaagttataggaggagtgggttaattatatagctcaagccaatggaattattagaaagatctagaatctataatcgaactaactttcagtgttaagtagtgctcttacagtcacagcaaacaacttaaatgcatgcagaagtttcactaccaacttaataaaataaatgaccgcttagcacccattttttcggacagtttcaatgaagcactttgtcaaaactggcttcgtacaacgcagttcgtgtcttctatggcccatcaccctcataataatcatcattatcatcggaggcgacggtggaagtagcataagccgtggcaacatcattgtgcctcgtgaagggattcattaatcatacgccacgttgacccacataatgtaatgcgcgcataattgtcaggcggacaaaaacttgccggataatcgcacaaaaggcattatgtaattgatttatttggaaagagcacacccctcatcaatggtccacaaaaaaaggcatcaaacggcaaagacgccgcacagtgacaagctcaaaaaagccaaagaaaagctgtcaatgctttttatgcaactttgtcaactttgtcggcagataacactggccaacatagacaagtgccaactgtgaattaaccacacaaaacttattttccggacacttgtctcatttgtcattctaccaaaaccaaaatatgcaaatatgggtattaatcacaaacagacaagcaaagtttatggacacatcttgcacaagatctgaaatcaatcatcatagtacactaagggaattaatgcacagaattataagctataaaatgtattattttctccataaccatttgatttgaaagtactgtagtccagtgtcgtctcaccttaaaaatcatctgctaatattgcctaatcattgtctactaactatttatagacttccttgcgaataaattagaaaaaatcatgacttgcgagcaaccataagaattaacattttca

SEQ ID NO: 35222 - DNA, 438 bp, DROSOPHILA
atgaaggatcgattcaagtggttgtcgctggagctgctcctgctgataggcgccgcagtcgcctttccggacggcgctccggcggacacgtgcgtgaagcagcgggcgaatcagccgaatcatggcaaggcccggagtcagccggctcactcgaatccgtacgaggtggtggccgatgcgcagacctaccatcccggccagcagatatcggtggtcatctacccgcactcggaccagagcaccgtcttccggggattcttcctgcaggcgcgtgatgccaactcgaacgagtggatcggcgagtgggtgcagagcgagaacaccaagaccattccagagtgctcggccattacgcactcggacaaccgggacaagctgggcgccaagctcatctggaaggcaccgcaaaataagcggggacaagtctacttcacgtaa

SEQ ID NO: 35223 - protein, 145 aa, DROSOPHILA
MKDRFKWLSLELLLLIGAAVAFPDGAPADTCVKQRANQPNHGKARSQPAHSNPYEVVADAQTYHPGQQISVVIYPHSDQSTVFRGFFLQARDANSNEWIGEWVQSENTKTIPECSAITHSDNRDKLGAKLIWKAPQNKRGQVYFT

SEQ ID NO: 35224 - DNA, 5718 bp, DROSOPHILA
tgtgcttaaacttttgccaattgataatagcgctgctctacgaggagacatctgtgttcagctacaatctgagaggctgctgaggaaactcgcttttagtatataaagtagtcccaagaatgggtcccctgggccattgacatcgcgataggaacgtcttcaatcagacatagtaatagtaaaccgaaatgtatagctattctagcagattatttttagagcatatacaaatattcctttcttcttaatttaaatgaaacttttcccactttcattgactaaaattcgactttcccaatatcgtactaattgttaagatcacgatcgcgatctattaacatgtatttataacgctcttcctatttaaaaataattcctaagttattaagtgtaaaaatcaattatcgccttgctttaatttacgtctaaaatcatcataattgtgtgggttgcttttggatttgatacggggaattggaaatgccctacgcatattccaactccagcaacaacttctgaatgggaaatattgcgaatttaaatatatatttcagtcgatgacactggcagtgggaaacacccttcccatccagccagttgcaagtggctacccaacggagctccactaaaaaacccgctaggtgacttaagcttatatttaagtcgccgcgtaagccagccattaatattttccagtcttagtgggtgtgtttcatttttacaattgagcacgagcacaaaaactaggtagtattccaaccctttttcatataaacctattaatgacattaatccttacatcaagaacaattgcttcagatttttcaaatactttacccaaccagaaccaagcgctcttggtttaagtagcgtataacaacgtctttatcgactaagatattctgctggataatacatcattttgcttattacgtgagcaatgattttttgctactcgttgtaaaatcatacacttgttttccccatcgacgatgagctaatgaatcagttacgttctctacgaccccttctgagcagcaaactaaacggtctcctactcgaaaaccgcaagccctgttcgcaagccccttcctgtggcttcgcttgtcagccacaaggacatggctcatgcccaatttacgcaatttaatcgaaacaccagatagccaaaggggttggcaccggaccagagaaaccacttaagtggaaccccgagattgcagaatgtgcaacctgcagttggatatcatattacttgggctcatattgaaagctacagcggaagtggttgtggaagtggttgcccagatccttcttcctgtttatgaattgggaactgcatttaccttattaggctacgacttaatcttccgttttagttattggtttatgttcatcattataaagtttgattcatcttctattgcagccatcatggtcgttaaggagataccgctccatgagaatctgaacatggaaagccgacccatgaatgccgctacgcccaccactaccaccacgttctcgaaaggcgggcgtcgctacagtgtgtccctgaccaccgccattctgctagcctccttcttcatctgcaccctgctagcagtgggctttattgtctacaactttgccacttgcgctgaactggagcccgattccgatgaggatgttgtttgcaccagctaccatttgaggaggctaaaggctggacatgatgacacacctaaatacgatagagatgtccgcctgccgcactccatccgcccgcttaaatacaacatcacaatcgaaccgcagctcagcggcaacttcacctttgccggtagtgttcagataaggataagggtgctggaggattgctataacatcactatgcacgctgaggagctgaacatttcgcgtagcgacgcctccgtccaccgagtgcagaacaatggtgaaccggaaggcgacggtctgcggattcacaaacagtacctggtgggggccaaacagttcttcgtgatcgagctgtatgacaagctgctcaaagatgtggagtacgtggtgcatctacgctttgatggcattatcgaggactatctgcagggattttaccgcagctcctacgaggtgcacaacgagacaaggtgggtagcttctacccagtttcaggccacagatgcccgacgagcttttccctgtttcgatgagcccgcgctgaaggccaactttacgctgcacatcgctcgtcctcgcaacatgaccaccatatccaacatgcccattgtgtccagcaacgatcagtgagtattgcctttgctatcaaagtaatcattctatttaagtgtaatctttgatcttcttagcgccaccatgccaagctatgtgtgggatcactttgccgaatcgctgcccatgtccacctatctggtggcctatgccatatccgactttacgcacatctcatccggtaactttgccgtctgggctcgagcggatgccatcaaatcggccgagtatgccctgtccgttggtcccaggattctcacattcctgcaggactttttcaatgtaacgttccccctgccgaagatcgacatgattgctctgccagagttccaagcgggcgctatggagaactggggtctaattaccttcagggagactgcaatgctttatgacccaggtgtagccacggccaataacaagcaacgagtggcctcggttgtgggtcacgagttagcccaccagtggttcggaaacctggtaacaccgagctggtggtcggatatctggcttaacgaggggtttgccagttacatggagtacttgacggccgatgcagttgcgcccgaatggaaacagttggaccagtttgtggttaatgagctgcaagcagtgttccaactggatgccctttccacatcccataagatctcgcacgaggtgtttaatccgcaggagatttcggaaatcttcgatagaatttcctacgccaagggttcaactattattcgcatgatggcccacttcctcacaaatccaattttccgtcggggtctgagcaaatacctgcaggaaatgtaagtccttagagaatgataaccgatttatactcgtatattctaaaattgggccgctttcagggcttacaactctgcaacacaggacgatctgtggcatttccttaccgttgaagccaaatcctctgggttgctggacgacagcagaagtgttaaagagatcatggatacgtggacgctgcaaactggctatccggtggttaaggtgtcaaggcatcccaactccgatgtgattcgtctggagcaggtccgctttgtgtacaccaacaccaccagggaggatgagagtctcctgtggtacatacccattacgtttaccactgactccgagttgaattttgccaacacccgtccgactacatggatgccgcgcaccaagctgtacgagctggagaacagggaactctccttggccaagtggttcattttcaatgttcaacagacaggttactaccgcgtcaactacgatctagaaaactggatggcgatcacagaacacctgatggatgtggacaactttgaggacattgctcctgcgaaccgtgcccagttgatcgatgatgtgatgaatctggccagaggttcttatctgtcctatgaaaccgccatgaatttgactcgctaccttggccatgaattgggccatgtgccgtggaaggcggccatcagcaacttcatttttatcgactccatgttcgtcaactccggcgactacgaccttctaaaggtttgcttttaaccattgggcgtgctataaatattatttgacatttctgattctcacagaactatctgcttaagcagttgaagaaagtctacgaccaggtgggctttaaggactcgcaggacgaatcagaggacatcctggtgaagctgaagcgtgccgatattctgagcatggcctgtcatttaggtcaccaagagtgcatcgcggaggcgagcaggcacttccagaactggatgcagacgccgaatccagattcaaataatccgtaagcaataaacgaagtaattaatacactcaacacaattccaataaattattacttccttttcagcattgtgccaaatctcaggggagtcgtttactgctctgcgatacaatacggcaccgagtacgaatgggactttgctttcgagcgctttttgaagacgaacgtgcctggggagaaggatttgctgttgaatgcacttggctgctccaaggagccctggttgctttatcgtttcttgcgtcgcggcatttccggacagcatatccggaaacaggacttgttccgggtattcgcagcagtttccaccacggtagtgggccagaacatagcctttgattttctgcgcaacaactggcaggagatcaagacctagtaagtggcgaaattgtcgctttattccgtgcattactaaagggtttgcattttttccagcatgggctcacagatgtccagcatccacacgctgttcaagttcgccacgaagggcttcaactccaagttccagctgggcgaatttgagaacttcgtgaaggacgcccactgggactacgacagacccgtgcaacagatcgtggagcacatcgagaccagcgtcgactggatgaacaagaactacaagtcgatcgtgcggtggctggagaacgaggcgcaagcgtaaggaacggattctgcggcttggctggatcaaggctgcagcagtattagatttcgcagctgcaactgcatgggttgggccaccaatgcatttatgtgtaatatttatgtcgcgtgttttaccaattcagagtcgccaaagagagaaagcccttggcagatcgtccagagcatcacgtttttcattacttttaatgtatgccttcttttcataacaattatgagtcttgtaattttaatttgtacttaaatgtaattgtaaatgtaaatggaattataacattgttcgtcacaaaaaagttttggaaagcctattcctgtttcacagcctggttttttcatttcggaactctgatcacatttgcaaacatcaaggtgcccacaaagactagcgcggtgcccagccagtgccaccaggtgaagggatttcggaagtatacgatcgaaaagaccagcgagatgaacttgcggagtgtgaggatcagagtcaccgtcagcgagctgcactccgtggtcagggtgtaaacggagctgatgcacaaatgctgcgcaagcacgttgcccaataagtatagcaggattaggggcactgccacgcccaggaggggcaactggtaggactcgcccgtgaacgccaaaagccagtgcgtccgtatgtcgtcatgcatgagcaggaaggcgggcagcggcaacaggtgggtgtaatacaacgcttccctggcgcacttgccatgacgtcgatacagcaactcctgtgtaattcccatgtaggaggaaacaaatagagccagcaccaagagtgccacgcccaacagccaccagaacgtatccgcctcggcgccactatccaaattctccatcttacccaccaaatccggactggagaaatatgtgcagacgaaaatgcccacgctgatcatgagcaccgatatgtactgactcaaccggtaactcctcttcaggatcaacgtgcacaggcacatgttggagatcagcgaaccgcc

SEQ ID NO: 35225 - DNA, 3054 bp, DROSOPHILA
atgaatcagttacgttctctacgaccccttctgagcagcaaactaaacggtctcctactcgaaaaccgcaagccctccatcatggtcgttaaggagataccgctccatgagaatctgaacatggaaagccgacccatgaatgccgctacgcccaccactaccaccacgttctcgaaaggcgggcgtcgctacagtgtgtccctgaccaccgccattctgctagcctccttcttcatctgcaccctgctagcagtgggctttattgtctacaactttgccacttgcgctgaactggagcccgattccgatgaggatgttgtttgcaccagctaccatttgaggaggctaaaggctggacatgatgacacacctaaatacgatagagatgtccgcctgccgcactccatccgcccgcttaaatacaacatcacaatcgaaccgcagctcagcggcaacttcacctttgccggtagtgttcagataaggataagggtgctggaggattgctataacatcactatgcacgctgaggagctgaacatttcgcgtagcgacgcctccgtccaccgagtgcagaacaatggtgaaccggaaggcgacggtctgcggattcacaaacagtacctggtgggggccaaacagttcttcgtgatcgagctgtatgacaagctgctcaaagatgtggagtacgtggtgcatctacgctttgatggcattatcgaggactatctgcagggattttaccgcagctcctacgaggtgcacaacgagacaaggtgggtagcttctacccagtttcaggccacagatgcccgacgagcttttccctgtttcgatgagcccgcgctgaaggccaactttacgctgcacatcgctcgtcctcgcaacatgaccaccatatccaacatgcccattgtgtccagcaacgatcacgccaccatgccaagctatgtgtgggatcactttgccgaatcgctgcccatgtccacctatctggtggcctatgccatatccgactttacgcacatctcatccggtaactttgccgtctgggctcgagcggatgccatcaaatcggccgagtatgccctgtccgttggtcccaggattctcacattcctgcaggactttttcaatgtaacgttccccctgccgaagatcgacatgattgctctgccagagttccaagcgggcgctatggagaactggggtctaattaccttcagggagactgcaatgctttatgacccaggtgtagccacggccaataacaagcaacgagtggcctcggttgtgggtcacgagttagcccaccagtggttcggaaacctggtaacaccgagctggtggtcggatatctggcttaacgaggggtttgccagttacatggagtacttgacggccgatgcagttgcgcccgaatggaaacagttggaccagtttgtggttaatgagctgcaagcagtgttccaactggatgccctttccacatcccataagatctcgcacgaggtgtttaatccgcaggagatttcggaaatcttcgatagaatttcctacgccaagggttcaactattattcgcatgatggcccacttcctcacaaatccaattttccgtcggggtctgagcaaatacctgcaggaaatggcttacaactctgcaacacaggacgatctgtggcatttccttaccgttgaagccaaatcctctgggttgctggacgacagcagaagtgttaaagagatcatggatacgtggacgctgcaaactggctatccggtggttaaggtgtcaaggcatcccaactccgatgtgattcgtctggagcaggtccgctttgtgtacaccaacaccaccagggaggatgagagtctcctgtggtacatacccattacgtttaccactgactccgagttgaattttgccaacacccgtccgactacatggatgccgcgcaccaagctgtacgagctggagaacagggaactctccttggccaagtggttcattttcaatgttcaacagacaggttactaccgcgtcaactacgatctagaaaactggatggcgatcacagaacacctgatggatgtggacaactttgaggacattgctcctgcgaaccgtgcccagttgatcgatgatgtgatgaatctggccagaggttcttatctgtcctatgaaaccgccatgaatttgactcgctaccttggccatgaattgggccatgtgccgtggaaggcggccatcagcaacttcatttttatcgactccatgttcgtcaactccggcgactacgaccttctaaagaactatctgcttaagcagttgaagaaagtctacgaccaggtgggctttaaggactcgcaggacgaatcagaggacatcctggtgaagctgaagcgtgccgatattctgagcatggcctgtcatttaggtcaccaagagtgcatcgcggaggcgagcaggcacttccagaactggatgcagacgccgaatccagattcaaataatcccattgtgccaaatctcaggggagtcgtttactgctctgcgatacaatacggcaccgagtacgaatgggactttgctttcgagcgctttttgaagacgaacgtgcctggggagaaggatttgctgttgaatgcacttggctgctccaaggagccctggttgctttatcgtttcttgcgtcgcggcatttccggacagcatatccggaaacaggacttgttccgggtattcgcagcagtttccaccacggtagtgggccagaacatagcctttgattttctgcgcaacaactggcaggagatcaagacctacatgggctcacagatgtccagcatccacacgctgttcaagttcgccacgaagggcttcaactccaagttccagctgggcgaatttgagaacttcgtgaaggacgcccactgggactacgacagacccgtgcaacagatcgtggagcacatcgagaccagcgtcgactggatgaacaagaactacaagtcgatcgtgcggtggctggagaacgaggcgcaagcgtaa

SEQ ID NO: 35226 - protein, 1017 aa, DROSOPHILA
MNQLRSLRPLLSSKLNGLLLENRKPSIMVVKEIPLHENLNMESRPMNAATPTTTTTFSKGGRRYSVSLTTAILLASFFICTLLAVGFIVYNFATCAELEPDSDEDVVCTSYHLRRLKAGHDDTPKYDRDVRLPHSIRPLKYNITIEPQLSGNFTFAGSVQIRIRVLEDCYNITMHAEELNISRSDASVHRVQNNGEPEGDGLRIHKQYLVGAKQFFVIELYDKLLKDVEYVVHLRFDGIIEDYLQGFYRSSYEVHNETRWVASTQFQATDARRAFPCFDEPALKANFTLHIARPRNMTTISNMPIVSSNDHATMPSYVWDHFAESLPMSTYLVAYAISDFTHISSGNFAVWARADAIKSAEYALSVGPRILTFLQDFFNVTFPLPKIDMIALPEFQAGAMENWGLITFRETAMLYDPGVATANNKQRVASVVGHELAHQWFGNLVTPSWWSDIWLNEGFASYMEYLTADAVAPEWKQLDQFVVNELQAVFQLDALSTSHKISHEVFNPQEISEIFDRISYAKGSTIIRMMAHFLTNPIFRRGLSKYLQEMAYNSATQDDLWHFLTVEAKSSGLLDDSRSVKEIMDTWTLQTGYPVVKVSRHPNSDVIRLEQVRFVYTNTTREDESLLWYIPITFTTDSELNFANTRPTTWMPRTKLYELENRELSLAKWFIFNVQQTGYYRVNYDLENWMAITEHLMDVDNFEDIAPANRAQLIDDVMNLARGSYLSYETAMNLTRYLGHELGHVPWKAAISNFIFIDSMFVNSGDYDLLKNYLLKQLKKVYDQVGFKDSQDESEDILVKLKRADILSMACHLGHQECIAEASRHFQNWMQTPNPDSNNPIVPNLRGVVYCSAIQYGTEYEWDFAFERFLKTNVPGEKDLLLNALGCSKEPWLLYRFLRRGISGQHIRKQDLFRVFAAVSTTVVGQNIAFDFLRNNWQEIKTYMGSQMSSIHTLFKFATKGFNSKFQLGEFENFVKDAHWDYDRPVQQIVEHIETSVDWMNKNYKSIVRWLENEAQA

SEQ ID NO: 35227 - DNA, 6492 bp, DROSOPHILA
ttccgctgcttcctcttcttctggggatgtctgttttaggttttctgcacgtacaccaagcaaccacaaccacttaataaccgtggcaatttcactctgagctgcactttcttgttgtcgccccacaaacactgctttatcaacataaacaaatggcgaggacctgcgccggattgcactactttaatcgccgcccgctttgcagctgcatccgccgaccacggccacgaataattgtcacttttctgggggaatgaaaaagtggaaactttttggggggtttcaaattggttggcttgccggcacgaaaacaacacagtctgtaaaagcagcgcaccggggattaaacacacgcaatcgacgctaccaaaggggacatttaaacgattcgaccaggcgcttttcgcacggccaggagcgcgattcttaaattgtttcttgttaaaatcctcaacgctacattctctccgctccaccccgcaccaaagatccgaccctgcttttggctttcgcactcgcgttgcgcagcactggtcgcggttttcgcaaattactccgagccgttcacactgcgcgcagcacaagccgagacttgctgcggctggctgcatttggcaatatttagttgttatgggtgctatgtatttccaaaattccgttagttagaaattcattagcttggcatctagctcatttttaaagtaaagtttcgagctaccaagttgataggttacgtaaaatatataggtggcttatgctgttgtaagcttaattgtttaaaaaggacccaaaatcaaaatataatgtaaacttttttataacttacgcggctctaaaactttccaacaagtaacgagatctggcttgaaagcggccaacactcgcactagcttttgtgcatccctgtgcagtgccacattccacacacatttctgctttgttttgaccagaacgggccgttgtgcagcactgttcggcacagctgttcagagtatggggccgcgggtggtgggcagattttcttggggcgattcagtattatttcgattgtgaaggagtttacttcgtagaaagtcaagtgctcgccgtttaattagcgcaagtgcaagtgagtcgcagtacgtgagcttgggggcttaatttcatgcgcccgctccacaacaaaaacaagcgaaacgaaaagagttgcatgcacagaaattcgaattcggtcgaaactgcaaggtgttattataacgggaatggccagtgctcgttatcgggtgaaaacgattaggattgtgcaattaacaaaagtgtgccgtgctgctcttttcacaatccaatccaacccaatccccaactcccccacccccaatccccaagtggcaccacacaaacactagcacataaacacttatgctgcctttatgcttgcagccccactcgagctcttttatgtatgtatgtacatatttatccaacgaatgcaagtgaccgacgtccaaagagcaacgtacgggatacggagctccgacaaaggcttcccgctttcagtggtccggtgactttcgccggagtagtgactccgtcccaggaaaccagctaaacaaaaagcccccagccgctcgtaaaaaagtgtcatgagacaataaaggaactttaagaaagaaaggaaaagcgacgagaagagtggagctcctttgttacatctctggaagaatcgttcggctccgaagcaaaggtgagtaatactgcttcattacgaaattacggggccttgtacatttgtagttccaaaaaacaacaaggggaaatcgttcatatgggaaacaagagactaccattataagataagatcagaactgcgactgctttcttttatctcaagtgacgtagtccaaggtgaacacagtaaacactcgatgcaaggacaacttaggtttaaaccagttttctacactacaaattatgcaaatgggttagatatcaaaacgaacacccgttttcttatcatgtctacaagtttctttgcaagaaaaaaaggttagctactgagagtgttgcccgtagcactgcttgaatgataaactctactcccagacattgaaattcctacaccaaaatggagttacggcaatcgaccttgaaacatgtggccccaaatgccttgccaacccaaattggtttcccattttctatgaaaacttgtgtgtttttttggtaattcatctattaaaggcggcagccagtttttcatctcaaatggacagaagccgcacacaaaaataaagcgatacacataaacaatcaaacaacagcaacaagtgagcgcacaaatttaatttgctttttaatgcgtcattattgccgatttgcgacatgctcgagctgctttactgctacctcttcgcagattttcgcatccccaagaggttcgtacagttgcgatcgctatcgttatcaggggagctcttaaaccgaatgagcgatactttatttatttctgctctctatttgctttcatgattaattaaatgagtctgctgtaggagaatgtattagcaataattatggataattcaccagcccatccaaagccattcttaaagttcatttatccagtagaaaactttgttacagagctaggttcattgatcattaaaaggttaaacagtcttattcataaacataggaagaaatattatttaattgtggttcaatccaaaagggatcgttggccgcctgtcgttgatataatcaaaccgcactttgtcgccgacaatttcatttactcatcgtactttccccaaccaaactaacaaataaactagaacaaaaagagccgctggtggttggcttcaccgccaacacgaccacccactacagattcggttttccatttttaaaacaatgacgcatgcacggaaataaattacatgatatacgcctgacaatctcattacctagagacgacgacccatcgatagtggctctatgtatatacatacataaaacactcggttcttcttggactctttcagtagagagcgatgacggaaagcgtggagctgatgaacaagtacggcgagccactgcgctacgaccggaacttcacgggaccgaggcagagggatcgcagctgcacggatgtgccctgcctgctgttattcgtcctcttcctgggcggatgggccttcatagcccaatacgccatcaggaacggcgatctcaacaaactgctggtgcccacggactcctttaaccgaaagtgtggcatggactccggagtgctgaacaagaaaaacctattctttttcgacttgaatcagtgcatcgatccacttgtacccatcactggatgtgacactccacaggtgagataccattaacatcaaatttgcaaggagttgatcttacttttaatgaaatacgtatttcaacaggtttgtgtggagacttgtccccgagagacgttcgtctgggacactatgaaggacaaacaaagttttgcggagctgcatagtcgcctcatctgcttgtcggaggagcacaaggcgcagattcgcaccaaatcggacattcaggatgccattaaccagaaccagtgcgcacgctggtacatcaagagtgctccattcctcaaacgatgcctcttcgagttctcgcagggcgtgtgtgattatattccctcgtttctgctaaatgggggaaggtcgaggcgggagctgcatatgttgcccggaaacgccaccacagaagttcaaatgcaggccgatgtcatgtaccagaaaatgacggatgcccaggctctcgttgttccacaggcgaatggcaaacagactccagtggacgaggaaccgatcatccagtgcaagcgcagactcaacgaggctgtcatcaaggagaagatgatgcagaccgatacgaggctggccaagctcgttggtaacatggtggcccacttctacaatggcacaaacgacgcccagcttttgggagaaaagattgtcgaggatcttgtcaactcctggtcgatcgttttggtggcttgcttctgcaccctggtagcctcactgatctacatcgctctaatgcgctggctctcggctccgattctctggttctccatcttcggcgtgcttatcggcttgctggtgggtatttacttctccgtaaagcagtacatccactgggagaatacgcctacggttcccgtacacggcttgaatctacactccacggtcaagaatgtcctgcaaaaccagaacacctggctctacctgtccatcttcgtaggcgtgtgcttcgtggttatcctgttgctggtaattgtgctaagaaagcgcatccggatagcgatcgccctaaccaaggagggcagcaaggcggtgagcagcgtgatcagcaccgtgttctttcccatcttctcctggatactcttcattgccgccatagcgtttgccattggcgtgggcctgtatctgggctcaattggcgatccttcgtttagaatggtgcgacagctgacgaaaagtggcgaagtgaccaccgaggactgcgtctgcgaaggtccagccatcaactacacagtgggcggatcctgcaagccagaagtgttccagcaatattgtagcgttcggctgacctcatttttccagaaccgaaacccttgcttgaacaccacctgcagctttgactcgattaacaatccaatcgagattaagtgggccatcttctacaacgtctttggcttcctctggctgagcttcttcatctccgccttcagctacatggtgctggcctcgaccttcgcccgatggtactggaccttcaaaaagagggatgtgccctacttcacccttacaagggcattctttcaaactgctgtctaccatctgggcaccgtggcctttggttcgctcatcctggccatcgtccggctgatccgtctggtgctggagtacatccacgagaagctgaagaagtacgacaatgcggtgacacgagccatcctctgctgcatgcgctgcttcttctggttgctggagaccttcctgaagttcctcaatcggaatgcctacatcatgtgcgccattcatggcaagaacttctgctccagtgccgcggactcgtttaatctgattatgaggaacttcctgcgtgtggtgacgctggatcaggtcacggactttttgttctttttgtcgaaactgctgctaaccgcaggggcgggggcgtccacctactacttcctggacaataatccgagcattattcggctaaattacatagcagtgcccaccacggtggtggtaattgccgcctttctcataacgagcgtgtttttcggtgtgtactcgacggcagtggacacactgtttctgtgcttcctggaggactgcgagcgcaacgacggctcaccggagaagccgttcttcatgtccaagcagctaatgaagattcttggcaagaagaacaatctgccgccgcgtcagcgccgcggaaagtaggagacagcagtgcaaattataactttattgaagtaaaacatatatatatatatttattatagcccaaaacgaaacgatcggggttgtgagcgattgctcaaccggctgcaattgggtttgcattaaatgcacgctcctttgccaatactcttaatctttaatctagtgtatataatacgccagtatccgtatccatatgtaaagttttttgtgcggctagacatgtgataggcgcggaccataaagaccaaaagtaataccatacaataacatgtatacagagacacaaaagtacatatctcacattcatgaagtttaagttaacgataattattataattttcgaatttaataaaaatgaattcattgaagacacacttttcagttttgttcttattttatttctccatcattatattcactcatttttttttatttttatacaatttgtttcatacttttgccgttcattcatctagaacgctcaacccactcatttcagaaagtctgattttgcaaggatgtaacagatcgctgaagccgcaatgaagaacaatagctataagatatgacttttaaaagtatatatataataaaccttaatactgcctcaaaggttgtttatttcaataataatcttaagtcctgaaactcgaatttcgaaaagcctggtatacttatagatgtatttaaaagaagaaaattgctttcaagctgaaagattttagttttaatttcatatgggtaatattaaaaactaaagtaaaaagtatatttcgtttaaaaacctcataaccaattagaaaaagaatacaaaatctattacctaaacaatattggccattcgcgattcccgtggactaaaagataatatccttgagcacgctatcgctgatgttctgcaggtcatcctcaccaccaatctgatcaaaatcgaatttatgcgagacattgaatgcattcttatcgttttcaatgttgaaatcgggatcaagctgca

SEQ ID NO: 35228 - DNA, 2803 bp, DROSOPHILA
cgcgggtggtgggcagattttcttggggcgattcagtattatttcgattgtgaaggagtttacttcgtagaaagtcaagtgctcgccgtttaattagcgcaagtgcaaccccactcgagctcttttatgtatgtatgtacatatttatccaacgaatgcaagtgaccgacgtccaaagagcaacgtacgggatacggagctccgacaaaggcttcccgctttcagtggtccggtgactttcgccggagtagtgactccgtcccaggaaaccagctaaacaaaaagcccccagccgctcgtaaaaaagtgtcatgagacaataaaggaactttaagaaagaaaggaaaagcgacgagaagagtggagctcctttgttacatctctggaagaatcgttcggctccgaagcaaagatgacggaaagcgtggagctgatgaacaagtacggcgagccactgcgctacgaccggaacttcacgggaccgaggcagagggatcgcagctgcacggatgtgccctgcctgctgttattcgtcctcttcctgggcggatgggccttcatagcccaatacgccatcaggaacggcgatctcaacaaactgctggtgcccacggactcctttaaccgaaagtgtggcatggactccggagtgctgaacaagaaaaacctattctttttcgacttgaatcagtgcatcgatccacttgtacccatcactggatgtgacactccacaggtttgtgtggagacttgtccccgagagacgttcgtctgggacactatgaaggacaaacaaagttttgcggagctgcatagtcgcctcatctgcttgtcggaggagcacaaggcgcagattcgcaccaaatcggacattcaggatgccattaaccagaaccagtgcgcacgctggtacatcaagagtgctccattcctcaaacgatgcctcttcgagttctcgcagggcgtgtgtgattatattccctcgtttctgctaaatgggggaaggtcgaggcgggagctgcatatgttgcccggaaacgccaccacagaagttcaaatgcaggccgatgtcatgtaccagaaaatgacggatgcccaggctctcgttgttccacaggcgaatggcaaacagactccagtggacgaggaaccgatcatccagtgcaagcgcagactcaacgaggctgtcatcaaggagaagatgatgcagaccgatacgaggctggccaagctcgttggtaacatggtggcccacttctacaatggcacaaacgacgcccagcttttgggagaaaagattgtcgaggatcttgtcaactcctggtcgatcgttttggtggcttgcttctgcaccctggtagcctcactgatctacatcgctctaatgcgctggctctcggctccgattctctggttctccatcttcggcgtgcttatcggcttgctggtgggtatttacttctccgtaaagcagtacatccactgggagaatacgcctacggttcccgtacacggcttgaatctacactccacggtcaagaatgtcctgcaaaaccagaacacctggctctacctgtccatcttcgtaggcgtgtgcttcgtggttatcctgttgctggtaattgtgctaagaaagcgcatccggatagcgatcgccctaaccaaggagggcagcaaggcggtgagcagcgtgatcagcaccgtgttctttcccatcttctcctggatactcttcattgccgccatagcgtttgccattggcgtgggcctgtatctgggctcaattggcgatccttcgtttagaatggtgcgacagctgacgaaaagtggcgaagtgaccaccgaggactgcgtctgcgaaggtccagccatcaactacacagtgggcggatcctgcaagccagaagtgttccagcaatattgtagcgttcggctgacctcatttttccagaaccgaaacccttgcttgaacaccacctgcagctttgactcgattaacaatccaatcgagattaagtgggccatcttctacaacgtctttggcttcctctggctgagcttcttcatctccgccttcagctacatggtgctggcctcgaccttcgcccgatggtactggaccttcaaaaagagggatgtgccctacttcacccttacaagggcattctttcaaactgctgtctaccatctgggcaccgtggcctttggttcgctcatcctggccatcgtccggctgatccgtctggtgctggagtacatccacgagaagctgaagaagtacgacaatgcggtgacacgagccatcctctgctgcatgcgctgcttcttctggttgctggagaccttcctgaagttcctcaatcggaatgcctacatcatgtgcgccattcatggcaagaacttctgctccagtgccgcggactcgtttaatctgattatgaggaacttcctgcgtgtggtgacgctggatcaggtcacggactttttgttctttttgtcgaaactgctgctaaccgcaggggcgggggcgtccacctactacttcctggacaataatccgagcattattcggctaaattacatagcagtgcccaccacggtggtggtaattgccgcctttctcataacgagcgtgtttttcggtgtgtactcgacggcagtggacacactgtttctgtgcttcctggaggactgcgagcgcaacgacggctcaccggagaagccgttcttcatgtccaagcagctaatgaagattcttggcaagaagaacaatctgccgccgcgtcagcgccgcggaaagtag

SEQ ID NO: 35229 - protein, 796 aa, DROSOPHILA
MTESVELMNKYGEPLRYDRNFTGPRQRDRSCTDVPCLLLFVLFLGGWAFIAQYAIRNGDLNKLLVPTDSFNRKCGMDSGVLNKKNLFFFDLNQCIDPLVPITGCDTPQVCVETCPRETFVWDTMKDKQSFAELHSRLICLSEEHKAQIRTKSDIQDAINQNQCARWYIKSAPFLKRCLFEFSQGVCDYIPSFLLNGGRSRRELHMLPGNATTEVQMQADVMYQKMTDAQALVVPQANGKQTPVDEEPIIQCKRRLNEAVIKEKMMQTDTRLAKLVGNMVAHFYNGTNDAQLLGEKIVEDLVNSWSIVLVACFCTLVASLIYIALMRWLSAPILWFSIFGVLIGLLVGIYFSVKQYIHWENTPTVPVHGLNLHSTVKNVLQNQNTWLYLSIFVGVCFVVILLLVIVLRKRIRIAIALTKEGSKAVSSVISTVFFPIFSWILFIAAIAFAIGVGLYLGSIGDPSFRMVRQLTKSGEVTTEDCVCEGPAINYTVGGSCKPEVFQQYCSVRLTSFFQNRNPCLNTTCSFDSINNPIEIKWAIFYNVFGFLWLSFFISAFSYMVLASTFARWYWTFKKRDVPYFTLTRAFFQTAVYHLGTVAFGSLILAIVRLIRLVLEYIHEKLKKYDNAVTRAILCCMRCFFWLLETFLKFLNRNAYIMCAIHGKNFCSSAADSFNLIMRNFLRVVTLDQVTDFLFFLSKLLLTAGAGASTYYFLDNNPSIIRLNYIAVPTTVVVIAAFLITSVFFGVYSTAVDTLFLCFLEDCERNDGSPEKPFFMSKQLMKILGKKNNLPPRQRRGK

SEQ ID NO: 35230 - DNA, 11716 bp, DROSOPHILA
ttttgatgcatgcttatgctcgcttatcctcctcgttgtctgtccatactcttgtagaggctataacagatggatcatgcattatgtgttggctcatcgtttggagtattggaaaatattcacatgaattgattcatttatcatagaattgttacagagtttgaaaggatatattgaagaccaagttaaaattttgatttcaattttccaaaaaaaagggtgttatcgaacgcaacttgctggcaggttggtaatgttcgagtattatattcccttttgattctcgtttctggagcccttcacttgcatctgctgccgcctgctcccacatccacattcacatttacatcctcgttcctccctcactggtcgacatccagctgcggcaatatatgcaaattattcctgggaagctgcaaacgaagcttcgaaaaggaagggtttaatacaatttacgtgaataaagtaacgaactattgaaccatacggtacgccctggacaaaagaaataatttaataaattcaaatggtttggcaaagccataaggagtccatatccggtggattaactccctctaagctcgattcgctccacgccctcccatcgacgcctcgggtttctttttgaagagctcccaattgaattaaatgcctgtcgagattgcccatgcctttggccaatattttgaaagccaaaagcggacaactactcccagcacctctgaaggcccgaaaatcgaacaaaagaagagtgggaaagatactcgagccgaagaagtgcaaagaactctcgaaatgaaactggttctgggccaaaaccctagccaaattgtatctgtcttcggctcgtgtgtcgctgtgtgtaagcaaagcgaagtggagtggagtggctcccagctctcagctggtgtttgaaaatgtgctaagttctcgcttttgtatgcacaaaggggggccaggagtgcggccggccaaggggtagagtaaacaactttgcgaaatggcggacaattatgggagattcgccgccgccggttggcagtgctatctgcgagatatacttggggcagccggggacagttgccactttggtcacgtaccaaaaaacgattgcagctccagatatgcccacatttacacacactcagtatatgtatatacgtatatatttgggtcaactttgcgcctgattttgtaagcaaatattaatttcgccctggcgctttcgctttgtttcgtttccaggaatattgtctcctccgggtccgtttctgacgcccagtccatcgccatcgatctcagctagccctcgtctgcaaccatcgccatcgctctcgccgttcccacaggatgtggtgctcgtagccggtggcagccaagtaaacgccaacagcaatccccaggaacacgtaagttgatcttggcaagaaagtgcacaatttctggaaatttaataagaatgtatggcaggtttcagtattgaaactgacttcagatttgggaaatactgcacatatttagtagaatctaatattaaatttgatcaattaattcatcacttttaggagcgcaaggcggcgacgcctggcaggagacagtccatccaccagttcaccaatggcagtcccaatgctggaactgtcgtcttccagccgagcccctcacaatcgccggccgctgccacgacggtcatcggcgtgaccagtggtggcctcatagccaccgccgccggaggaactggagccggtctgagtaccggagtaggagccgggagcagttccggagtaggaattggcgtcgcgctgcacggaaatgccatcggcaacgagctgaatgccactctggtgggatcgaataatatccagctcaataaggtatgtagatcttgtacatatagatagtattacgtatattagatacgatatatgttatcatcatattgcacttaataactcgatgtttattatttttcaattacagaagggcacaaagcgggcaacccagcagcagcagcaacaacagcaacagctgggacaccagatcttcagcagcacagttgcacccacctcgatcagcagtgcgactgcggtggcaggcggcggcgggggctatggacagttcaatgccaccgccatcagcacgcccacctcgttcgccacggccggcagtgtggtcagcagcagcgccaaaggtccgacgaagggtcagaaggggcagcagcagcagcagcagcatcagcagttccagcactaccagagcagcagtcccctgatagcggacagtcccatcccgagtcccagcggcgccattgcagcggcggcgattaagcctccaaccccgcagccccaacaaatgcagatgctgccccagcagttcaccatctcccagcagccgcagcagcagcagcaggcgcagcaggtcttccagtttatccagggaccgcagggccagctcatagccaccactccccagcaacagcagcctatccagcagcagcaacagcagcagcctcagccagtccagcagcagcagcagcatcgattcgttagcaatgccggagtcacgggaatgtccaccggcaagaccggcaaggcaccgcagcagatactgcccaagccgcaacaggagctccagcagcagaagaagggcacgaacggcggagcacagatctcgcaatcggcgcagcaaactggccaagccaacaatcccacccaacagcagcaacaacaacaacagcaacagatcctgctacctgccaccaccaaccagccgcaacagttgctccttaaccaaatgcccgtgctggtgcaacagaatccgcagggcgtgcagctaattctgcgaccacctacgcctcagctgacgaccacaccgtccctcgtcatccagcagaatgcccgcgggcaaccccaactgcagacgcagccggcacagcaacaactgctgcggatagtgggcaccaatggagcgacaatgcagctggctgccgcgcccaccttcattgtgtcctcgcaggcgaacctcatccatcagacggcggcaggtcagttccagagcgccatcaagtctggcacccagctcacgggtctgcatgcggctctagcacaggcacaggcccaggcgcaggcgccacgatctcagccgtttgccacgacggccacgttgaacacccagctccttggccagagtgtagccgcccagctgcagaacttacagctggctgcggcccaaattcagatgcccaacggcctcaccgccatatcccaactgccagctcatttgcagcagagcctaggtggagccaccatcaatctgaatcagctgaatggggcgcatatccagcaaatagctaacgcttttcaggcgccacaggctccaggaacgaatagcggaggagctaacagcacgacggagctctttacacaatcctcgccggcacatgtgccgctggccgtcaccccggagccattgcgtcagcccacgcccgtgcccatgatgcagcaacaacaacaggctgcgatggccaccattcagttgcagcagcagcagcaacaacagcagcaggcgcagatacagcagctgcagcatcaactgcagcaaacacagtcccaggtgcagcaagcccagcaatctgtccaggcgacaactataccggagcccaagaagaaaccgcgaccccgcaaaaagaagcaacctccagctccaactccaccagcagcctctccgacagtagcacccgctgaagtgagacccccgacgccacaaaagatagccatcgccgccacgcccgcgccacagccaactgtacgcgccaagtctccatcgccacccccaacgacgatccagcgaagtagcaatggaaagctggatctcggcgatgtgatgaagttttgcggtatcaccggagacgatgacgacgacgaggactatggaatgggcctagaaacagggctagcatcagaatcagagccagctcaagcccacgcgcctgccacagggagtgctgcagcgacgacgggcagcagcggcgacatcatgatctccataccgaaccaaaatggcagcgatggcctgccttttaccttgaccatacccgctccgcagccccagtcatcgacgggatctcaggcggcgggaaacgaatcagccaccgaaataccaaatatcctcatcaaaatcgatccaagtgccgaggcagcggtgccgccatttggtctatccacgccacggttgcccacagcagaggaaattcagaagcaggcgcagcaacatttggcacaacaggcggccgctgcagcagcggcggcaaaggcaaccacagccacgcccaccataaacattagcctgcctagcatgacattgcagccgcaggtagcgccggcaccagttgtgacgccaactcctgccccatcctcgaaccaggtgtccacgacagttgttgtcaaaccaagaaggaagcccgcggtgcgaaggaatgccaagaaacctgacgtgaccagcagcgcaagcaatatgatctcctcgagcagtggcactaccactacaatcagcagcagcactagtaccatcctaaacaacagtcaacccaccactgtaaacaccatcactttaaccacgcccacgccagtgacaagcagcagcaattccaccctgatgctgacccacggaactccgacagcagtgcccagtcagattggcaacattcagatctcacaggtgcataatcatcacccatccgcattgccggtgagcagtgcggtggagaacaagatccagataatgccgatcctgccaccgggagccacagtgatgggcggaacaccaggaaccggaggtcatgcccccaccacccaatcaacccagttggtctttcagccagcggcaccatcggtggcgcctacgattacttcagactccactgggtttaagctctccagcgatggtcggcaaatgcagctagtggccataccacaggcgactcctccatcgccagcagccagttctgcccagccaccggttcccacgcccactcctgcgttaactgccggaggagctacaattctgccacctcagttgacaggaatgcccgccaatgtatcggtttctgtgggatcccctgcctcggctgcggctctggtgccacaactcactggaagtctcacactcaccgtgtcggagcagtgcgagcgattgattctgcgacatgatccgaacaatccccaggaccatcaatcgcagctcatcctgcaggctctgctcaagggcgctctgcccaatgttaccataatcaatgagccgacgcgcgtggatccaaataaacagacaactccgatgttgcagccgcaacagcaagttatccaaataccccagccactaactcaaccccagcaaattctgcagcagcaaccaaaggtttcaacagctcccaaaatagaagttaaaggtgagtaaactcaaaactcagtatttttgcaaaggcaaagcaacctttgacaaatttgtcattttaatacttgcaattattccttgcagtggctaacaacagaaagttgtcaggtcaggtaacacatcctgccagcagtatgttaggaatgaccagcactacaactaccatgtcaacgatgaaaccaccggccaatctacccgccaagcagaacgaagtcgtatctttcccgcagctaccactgaactcgcaggttctcattcagcagcagcctatgatttctgcgcagctacagcctcagttgcaacccgtcactgtgcccgttagcttgcccactcagccggtaccgattccatctccggcgcctgctccacaactggccaacaatggccagcagcggtacattgcactgccgcccattgatcccaccacccagcagttgttctgcctgaacagtgtcacgaatcagataactgcgatgagtgcgggccagacggctgcttcgattggtcccaccgagcggttgcttattgctccggctggtatcaatgctcagcagctggctcaatgtctgcagttggggcaacttcatttcaatgatgtgaatccgctgccggctcagcagcaacagcagcaggtggctaccacctcgtcttcgatgacactttcaatgccactgcgtcctcagccaccgcagcaacaaatagtgcatcccatccagccaatcacaaatggactggccatcaccacaacggcaagtagcacgctgaccaccaccactagcaccacttcgttaacaacggtgaccaagcaggtggccaatgtggcgccgattatagatcaaagcaaagcgaagctggagcccgctaaggcagccaccagtggagccggtggcggagcggtggtcaaaaagaagccggtgaggaagcccaaggcaacgccgaccaatgcctccgaactggccaatctaaagaacgccagcgtagtcaagccaatgccaaagctcgatcccctatcgcaaaagcccaacaataacccggtgcagatcgtgcagcctaatgttgccagtggaaagcagatgattgtggtgggcagctccagttgcacaacaactaccacgacaacgatgagcgccagcatccagcccttccagacaacgagtggcaccaaattggtgggcgttacggtgcccatgcagcagcaacaacccactggcacggcagctatattgcaacagcagcagcaacagaggacgagcttcagcttgacggcaaccacagtggcgacacctgctccgatgccatctccaacggtagcgtctggggtcagccaactccaaatgcagcaacttccatcccagcaggcgcagcaacagttgcagccgcagcagcagcaacagttgcacgctcctaagcaacaacaaccgcaaccaaatactgtgtcccgggtgcaaaccatccaacttacgcctcagatgcaacagatcttcaagcaggtccaaatgcaaattcagttcctcactattaagttacaaaataaatcaaccttcttgcccgtctcgccggaaattgattcggcaactattgccgcctacaacaaaccgatgacagatgcggagataaatctggctctgcagcgtctcttcgcagagcagcaccggattctggcctccggcaaagaggtacccactccagagggtatgttgccaacagcaaatggaacgggcggcttcagtctcatgccacaaccagttcaacaacaacaacagcagcagcagcaacagttgcaatcaactgttcctgagccactgaaaacaatcgttccggccaatgtggttcagccaaacaaccactcatccactcctgcaggagcggccactagtggtgccacaactgctgccaatatccagcagaatataacacagaggatacacatctaccctatgcagcaccaacaacaacaacagcagcaacaacagcagcagcaacaacagccgcagcatcagcaacaacagccccagcatcagctacaacagaccggagccaaaccaaagcaggcacaaccaaagccgccgccacagcaggagcaacaatcgcaactccaaataaaacccaaggaaccggccaacaggagcaaagtgactagccagcagctgcagcaaaatcctcagccacccaatggaaccatcaatatgttgccacaaaaagttagcatgatgccggttgtccagcagcaacagcagcagcagccgcaacaacatcagcagcaaccaatgctcaacaaaagcgggccacctccactgatcttcgccagctctacaaatatgctgagcaacagcaatagcaacaacctccacaacagcaattctgcaatgcaagtaaacaacatgttgcccctgccaccattgcaaccccaacagcagcctcagccacagttacagcagccaccaactccaatcctgccgccagtagcaccaacaatggccatgggagtggcgccaggaccgatgggaaatctagtgccatccctcccgaccataccgagcctgcccctgtatatgccgagcaaaatggacgaaatgccaacacagaaaccaaaaattgcacgcctctccttgtgagtagttggttgatcaatgccgatttctcgaaaagcggccaactggattgcagatatagcaatgcaccatcgagcaacgtactaattcttttttttcgcaggttcgttcgccaactggaggtcgatcaggagagctgtctgaagccggattacgtgaagcctttccgcacaaaggatgaggcggttaaaaggctaatcaggtgagaagctgcttaacttgaaggataggagagcgcattgctaacatgtttcattttccaggtatcattgcatgcatgagaacgacgttgagttgccttctgacgaagacgaggaatttgagtccactgctctggaattccaggacaaattccgccaactgaacggcaagttccaggaaattctgatgcaggagtcaacggtagaaataaaatggcttttttttggtattcgatctaatcgtgtattatttacagctgccacaccgaacttctgagttgctacaaatgcagcagctgatgatcgatgatctcaaaggcgagatcaatgagattcgaaccgctgaaaaggagttagagcagcagctaaaggaggagcagactagcgaaaaatcgacggcggaaagcgatgtactttcggaggcgaaagttaaggaggagattaaacaggaaccaatagataagtctgctcagccagacggcgttgttgacaaatttgatttgctgaaaaacagcgctgatgtcaataaagcattcagcaagtcacagccacagcagactactacagtaaagcaagaggagagcaacgaatctggggaaccttctgtaaatggatctgtaaagagcgaaggccacgataaggagtcgtcgaaatacattaagaaggactacgacaacttcgacattgagtctgagctcaccactagcttcatcatgaagaaggtggagaacaaagcggctttggcaaagagcgctgagaatcgctaccaggaaagaaatatgatggaccaacaacagcagcagcaacatatcaaagccaatggaggagatcccgtagaccaggatgatggctggtactgcctgcaaaaggagcttaacctgatgaataacgatcatatgcagcaatcgcagcaacaactaaatggaaaccaacagcatctgcccatcaatcgtcaaccggcgccacagcaatcacacttcctggacaattcaaattcgaacaacatgatgggcaatagcaaccacatgtcggatctgttccccaatggttgcattgacaagagcaatcaaagcaccaccagcagcagcaatagcagttgcgttagcgaaagccttcctggttctaatcccgtgaagactgtctcctcatgcagcggccagcgcgaacagccggtggtcatggatgctgatcagcaaaacgagcatcccgccatcagtgagttctttagcagcgattcggacgtccagaaatccgtggagacacgactcgaggcaatgttcggggagtcgcccgtccatttggacgttaagagcagcaacgatgccaacgacattgagtccaacctggacgagatttttggcgactcgaaatcgccagctgccaaccacaaaagtaaaatgagcatgtgggtgccagacgcatcatttatgcagcaggcgccgcagcaacagacgtcgcaacagcagcaacaatacgcagggccacaacaaccatcacagcagcaacatcacatcgaactgaactgcaacaacaatccgcgctggatgcaaagcatggaggcgcactacagcgactttctttccaccgggactagcaatggagagctggtgaacggagaatcgcgaaaaagaagctgggatagccagctcatgggctctggcagtgatatggaagatgacaacagcagcaagcgtctgtgcacggcttcatcgtcctcctcttcgtcgcccatgtcgtcgcagcagcagcacgttcaggtggcacagcatggtctcttggactcggacatgttcccccagatgttgatggatcagcagccgcatcagcaacaacagcaggtacagcagcaacacaactttgcctacgccaacataatggatcaacagcagcagcaacagcaccagcagcaacatttccagcataacctgcagcaacagatacaacagcagcagcagatgcatgttagccacatgggcggagcagcagtagtggccggcggagagtacgacgatgacatcagtcggcatgtggccagcgccatcgacagcatcctgaacttgcagaacagcggcgactcgctgcagttctccctgggttcgatcctcggtgacagcatgctggacgatcaacggcaagcaggagccaatttgcccagctgccagcaggagcaggcgatccaacgacgccgccacctgggcgaggagatgaacgactgcctgattagcggcggtggttccgcggttagcggagtggcggacaacagtagtaacatactgctagagcaccaccaccagcagcatcagttgatgcagagccaccaacagcagccgcatctgcagcatcaccaccatcagaacatgtcgcaggcccaggcgcagcacatgggacagctgaacgactttagctgtgtagccggtggcttggacgatcctgtcaagtcgataatgacgtcctgacttggagccccaagcagcacatcagcggcggaaaatgcttcgaacagtctgatactagagtttaatgccaccaccttgtgaaaaacggatgataataatgacttcctgattgtatagatacccgtcttagttgtccttggttattgttttacccccgagtacaacctttaattagatctaagttgaatccgtgtagcataaattgtttttacttattgtttgtattgtttagttcaatgatttgtaccatatttgaacagccctcagataaccaattacttaatgcaaggggacagaacgaagagagcgaggtgaaagtaatggcatctacatacaatacggctgagccccaataaagctacgaaagcaattgacgtggtgaattgaaaactaaacgacgaatagcatcaaatgcttctcacagaggtacactaaaatggaacataatataaaaaattatatagctacagtaactaagagaaagcccctagacaatttatacaaatgaaaccaagaaagtacgtaagataaagggaagaaggtaacgatgggaataaacacgcgcaaagtgagagaaatgaaaggaaaacgaattggttgtataacttataattaagttacttgaagcaattctgagaaacaattaaaatcacgttgccaattttgttgtcgtttgaatatcaggcagagcaatttatccgcatccaatcgatttttaaaagcccagataaaatatatttatttacgcactacgttgcgaaggagttttgtaaatagttagaacatgcagcagtttcagtatatataaatatatagctaagcatttttaaaaggatatcatttaaagcgcttcaagtacgactgcttctgatattacagacaaaccaacaaaccaaccaaccaaccaatcaacctattgacgtgctcaatatgagagtaaagaatatttcggcatagctacgggtgtcattggaaagcaaatgcaaagatcttagggatt

SEQ ID NO: 35231 - DNA, 8934 bp, DROSOPHILA
atggcggacaattatgggagattcgccgccgccggaatattgtctcctccgggtccgtttctgacgcccagtccatcgccatcgatctcagctagccctcgtctgcaaccatcgccatcgctctcgccgttcccacaggatgtggtgctcgtagccggtggcagccaagtaaacgccaacagcaatccccaggaacacgagcgcaaggcggcgacgcctggcaggagacagtccatccaccagttcaccaatggcagtcccaatgctggaactgtcgtcttccagccgagcccctcacaatcgccggccgctgccacgacggtcatcggcgtgaccagtggtggcctcatagccaccgccgccggaggaactggagccggtctgagtaccggagtaggagccgggagcagttccggagtaggaattggcgtcgcgctgcacggaaatgccatcggcaacgagctgaatgccactctggtgggatcgaataatatccagctcaataagaagggcacaaagcgggcaacccagcagcagcagcaacaacagcaacagctgggacaccagatcttcagcagcacagttgcacccacctcgatcagcagtgcgactgcggtggcaggcggcggcgggggctatggacagttcaatgccaccgccatcagcacgcccacctcgttcgccacggccggcagtgtggtcagcagcagcgccaaaggtccgacgaagggtcagaaggggcagcagcagcagcagcagcatcagcagttccagcactaccagagcagcagtcccctgatagcggacagtcccatcccgagtcccagcggcgccattgcagcggcggcgattaagcctccaaccccgcagccccaacaaatgcagatgctgccccagcagttcaccatctcccagcagccgcagcagcagcagcaggcgcagcaggtcttccagtttatccagggaccgcagggccagctcatagccaccactccccagcaacagcagcctatccagcagcagcaacagcagcagcctcagccagtccagcagcagcagcagcatcgattcgttagcaatgccggagtcacgggaatgtccaccggcaagaccggcaaggcaccgcagcagatactgcccaagccgcaacaggagctccagcagcagaagaagggcacgaacggcggagcacagatctcgcaatcggcgcagcaaactggccaagccaacaatcccacccaacagcagcaacaacaacaacagcaacagatcctgctacctgccaccaccaaccagccgcaacagttgctccttaaccaaatgcccgtgctggtgcaacagaatccgcagggcgtgcagctaattctgcgaccacctacgcctcagctgacgaccacaccgtccctcgtcatccagcagaatgcccgcgggcaaccccaactgcagacgcagccggcacagcaacaactgctgcggatagtgggcaccaatggagcgacaatgcagctggctgccgcgcccaccttcattgtgtcctcgcaggcgaacctcatccatcagacggcggcaggtcagttccagagcgccatcaagtctggcacccagctcacgggtctgcatgcggctctagcacaggcacaggcccaggcgcaggcgccacgatctcagccgtttgccacgacggccacgttgaacacccagctccttggccagagtgtagccgcccagctgcagaacttacagctggctgcggcccaaattcagatgcccaacggcctcaccgccatatcccaactgccagctcatttgcagcagagcctaggtggagccaccatcaatctgaatcagctgaatggggcgcatatccagcaaatagctaacgcttttcaggcgccacaggctccaggaacgaatagcggaggagctaacagcacgacggagctctttacacaatcctcgccggcacatgtgccgctggccgtcaccccggagccattgcgtcagcccacgcccgtgcccatgatgcagcaacaacaacaggctgcgatggccaccattcagttgcagcagcagcagcaacaacagcagcaggcgcagatacagcagctgcagcatcaactgcagcaaacacagtcccaggtgcagcaagcccagcaatctgtccaggcgacaactataccggagcccaagaagaaaccgcgaccccgcaaaaagaagcaacctccagctccaactccaccagcagcctctccgacagtagcacccgctgaagtgagacccccgacgccacaaaagatagccatcgccgccacgcccgcgccacagccaactgtacgcgccaagtctccatcgccacccccaacgacgatccagcgaagtagcaatggaaagctggatctcggcgatgtgatgaagttttgcggtatcaccggagacgatgacgacgacgaggactatggaatgggcctagaaacagggctagcatcagaatcagagccagctcaagcccacgcgcctgccacagggagtgctgcagcgacgacgggcagcagcggcgacatcatgatctccataccgaaccaaaatggcagcgatggcctgccttttaccttgaccatacccgctccgcagccccagtcatcgacgggatctcaggcggcgggaaacgaatcagccaccgaaataccaaatatcctcatcaaaatcgatccaagtgccgaggcagcggtgccgccatttggtctatccacgccacggttgcccacagcagaggaaattcagaagcaggcgcagcaacatttggcacaacaggcggccgctgcagcagcggcggcaaaggcaaccacagccacgcccaccataaacattagcctgcctagcatgacattgcagccgcaggtagcgccggcaccagttgtgacgccaactcctgccccatcctcgaaccaggtgtccacgacagttgttgtcaaaccaagaaggaagcccgcggtgcgaaggaatgccaagaaacctgacgtgaccagcagcgcaagcaatatgatctcctcgagcagtggcactaccactacaatcagcagcagcactagtaccatcctaaacaacagtcaacccaccactgtaaacaccatcactttaaccacgcccacgccagtgacaagcagcagcaattccaccctgatgctgacccacggaactccgacagcagtgcccagtcagattggcaacattcagatctcacaggtgcataatcatcacccatccgcattgccggtgagcagtgcggtggagaacaagatccagataatgccgatcctgccaccgggagccacagtgatgggcggaacaccaggaaccggaggtcatgcccccaccacccaatcaacccagttggtctttcagccagcggcaccatcggtggcgcctacgattacttcagactccactgggtttaagctctccagcgatggtcggcaaatgcagctagtggccataccacaggcgactcctccatcgccagcagccagttctgcccagccaccggttcccacgcccactcctgcgttaactgccggaggagctacaattctgccacctcagttgacaggaatgcccgccaatgtatcggtttctgtgggatcccctgcctcggctgcggctctggtgccacaactcactggaagtctcacactcaccgtgtcggagcagtgcgagcgattgattctgcgacatgatccgaacaatccccaggaccatcaatcgcagctcatcctgcaggctctgctcaagggcgctctgcccaatgttaccataatcaatgagccgacgcgcgtggatccaaataaacagacaactccgatgttgcagccgcaacagcaagttatccaaataccccagccactaactcaaccccagcaaattctgcagcagcaaccaaaggtttcaacagctcccaaaatagaagttaaagtggctaacaacagaaagttgtcaggtcaggtaacacatcctgccagcagtatgttaggaatgaccagcactacaactaccatgtcaacgatgaaaccaccggccaatctacccgccaagcagaacgaagtcgtatctttcccgcagctaccactgaactcgcaggttctcattcagcagcagcctatgatttctgcgcagctacagcctcagttgcaacccgtcactgtgcccgttagcttgcccactcagccggtaccgattccatctccggcgcctgctccacaactggccaacaatggccagcagcggtacattgcactgccgcccattgatcccaccacccagcagttgttctgcctgaacagtgtcacgaatcagataactgcgatgagtgcgggccagacggctgcttcgattggtcccaccgagcggttgcttattgctccggctggtatcaatgctcagcagctggctcaatgtctgcagttggggcaacttcatttcaatgatgtgaatccgctgccggctcagcagcaacagcagcaggtggctaccacctcgtcttcgatgacactttcaatgccactgcgtcctcagccaccgcagcaacaaatagtgcatcccatccagccaatcacaaatggactggccatcaccacaacggcaagtagcacgctgaccaccaccactagcaccacttcgttaacaacggtgaccaagcaggtggccaatgtggcgccgattatagatcaaagcaaagcgaagctggagcccgctaaggcagccaccagtggagccggtggcggagcggtggtcaaaaagaagccggtgaggaagcccaaggcaacgccgaccaatgcctccgaactggccaatctaaagaacgccagcgtagtcaagccaatgccaaagctcgatcccctatcgcaaaagcccaacaataacccggtgcagatcgtgcagcctaatgttgccagtggaaagcagatgattgtggtgggcagctccagttgcacaacaactaccacgacaacgatgagcgccagcatccagcccttccagacaacgagtggcaccaaattggtgggcgttacggtgcccatgcagcagcaacaacccactggcacggcagctatattgcaacagcagcagcaacagaggacgagcttcagcttgacggcaaccacagtggcgacacctgctccgatgccatctccaacggtagcgtctggggtcagccaactccaaatgcagcaacttccatcccagcaggcgcagcaacagttgcagccgcagcagcagcaacagttgcacgctcctaagcaacaacaaccgcaaccaaatactgtgtcccgggtgcaaaccatccaacttacgcctcagatgcaacagatcttcaagcaggtccaaatgcaaattcagttcctcactattaagttacaaaataaatcaaccttcttgcccgtctcgccggaaattgattcggcaactattgccgcctacaacaaaccgatgacagatgcggagataaatctggctctgcagcgtctcttcgcagagcagcaccggattctggcctccggcaaagaggtacccactccagagggtatgttgccaacagcaaatggaacgggcggcttcagtctcatgccacaaccagttcaacaacaacaacagcagcagcagcaacagttgcaatcaactgttcctgagccactgaaaacaatcgttccggccaatgtggttcagccaaacaaccactcatccactcctgcaggagcggccactagtggtgccacaactgctgccaatatccagcagaatataacacagaggatacacatctaccctatgcagcaccaacaacaacaacagcagcaacaacagcagcagcaacaacagccgcagcatcagcaacaacagccccagcatcagctacaacagaccggagccaaaccaaagcaggcacaaccaaagccgccgccacagcaggagcaacaatcgcaactccaaataaaacccaaggaaccggccaacaggagcaaagtgactagccagcagctgcagcaaaatcctcagccacccaatggaaccatcaatatgttgccacaaaaagttagcatgatgccggttgtccagcagcaacagcagcagcagccgcaacaacatcagcagcaaccaatgctcaacaaaagcgggccacctccactgatcttcgccagctctacaaatatgctgagcaacagcaatagcaacaacctccacaacagcaattctgcaatgcaagtaaacaacatgttgcccctgccaccattgcaaccccaacagcagcctcagccacagttacagcagccaccaactccaatcctgccgccagtagcaccaacaatggccatgggagtggcgccaggaccgatgggaaatctagtgccatccctcccgaccataccgagcctgcccctgtatatgccgagcaaaatggacgaaatgccaacacagaaaccaaaaattgcacgcctctccttgttcgttcgccaactggaggtcgatcaggagagctgtctgaagccggattacgtgaagcctttccgcacaaaggatgaggcggttaaaaggctaatcaggtatcattgcatgcatgagaacgacgttgagttgccttctgacgaagacgaggaatttgagtccactgctctggaattccaggacaaattccgccaactgaacggcaagttccaggaaattctgatgcaggagtcaacgctgccacaccgaacttctgagttgctacaaatgcagcagctgatgatcgatgatctcaaaggcgagatcaatgagattcgaaccgctgaaaaggagttagagcagcagctaaaggaggagcagactagcgaaaaatcgacggcggaaagcgatgtactttcggaggcgaaagttaaggaggagattaaacaggaaccaatagataagtctgctcagccagacggcgttgttgacaaatttgatttgctgaaaaacagcgctgatgtcaataaagcattcagcaagtcacagccacagcagactactacagtaaagcaagaggagagcaacgaatctggggaaccttctgtaaatggatctgtaaagagcgaaggccacgataaggagtcgtcgaaatacattaagaaggactacgacaacttcgacattgagtctgagctcaccactagcttcatcatgaagaaggtggagaacaaagcggctttggcaaagagcgctgagaatcgctaccaggaaagaaatatgatggaccaacaacagcagcagcaacatatcaaagccaatggaggagatcccgtagaccaggatgatggctggtactgcctgcaaaaggagcttaacctgatgaataacgatcatatgcagcaatcgcagcaacaactaaatggaaaccaacagcatctgcccatcaatcgtcaaccggcgccacagcaatcacacttcctggacaattcaaattcgaacaacatgatgggcaatagcaaccacatgtcggatctgttccccaatggttgcattgacaagagcaatcaaagcaccaccagcagcagcaatagcagttgcgttagcgaaagccttcctggttctaatcccgtgaagactgtctcctcatgcagcggccagcgcgaacagccggtggtcatggatgctgatcagcaaaacgagcatcccgccatcagtgagttctttagcagcgattcggacgtccagaaatccgtggagacacgactcgaggcaatgttcggggagtcgcccgtccatttggacgttaagagcagcaacgatgccaacgacattgagtccaacctggacgagatttttggcgactcgaaatcgccagctgccaaccacaaaagtaaaatgagcatgtgggtgccagacgcatcatttatgcagcaggcgccgcagcaacagacgtcgcaacagcagcaacaatacgcagggccacaacaaccatcacagcagcaacatcacatcgaactgaactgcaacaacaatccgcgctggatgcaaagcatggaggcgcactacagcgactttctttccaccgggactagcaatggagagctggtgaacggagaatcgcgaaaaagaagctgggatagccagctcatgggctctggcagtgatatggaagatgacaacagcagcaagcgtctgtgcacggcttcatcgtcctcctcttcgtcgcccatgtcgtcgcagcagcagcacgttcaggtggcacagcatggtctcttggactcggacatgttcccccagatgttgatggatcagcagccgcatcagcaacaacagcaggtacagcagcaacacaactttgcctacgccaacataatggatcaacagcagcagcaacagcaccagcagcaacatttccagcataacctgcagcaacagatacaacagcagcagcagatgcatgttagccacatgggcggagcagcagtagtggccggcggagagtacgacgatgacatcagtcggcatgtggccagcgccatcgacagcatcctgaacttgcagaacagcggcgactcgctgcagttctccctgggttcgatcctcggtgacagcatgctggacgatcaacggcaagcaggagccaatttgcccagctgccagcaggagcaggcgatccaacgacgccgccacctgggcgaggagatgaacgactgcctgattagcggcggtggttccgcggttagcggagtggcggacaacagtagtaacatactgctagagcaccaccaccagcagcatcagttgatgcagagccaccaacagcagccgcatctgcagcatcaccaccatcagaacatgtcgcaggcccaggcgcagcacatgggacagctgaacgactttagctgtgtagccggtggcttggacgatcctgtcaagtcgataatgacgtcctga

SEQ ID NO: 35232 - protein, 2977 aa, DROSOPHILA
MADNYGRFAAAGILSPPGPFLTPSPSPSISASPRLQPSPSLSPFPQDVVLVAGGSQVNANSNPQEHERKAATPGRRQSIHQFTNGSPNAGTVVFQPSPSQSPAAATTVIGVTSGGLIATAAGGTGAGLSTGVGAGSSSGVGIGVALHGNAIGNELNATLVGSNNIQLNKKGTKRATQQQQQQQQQLGHQIFSSTVAPTSISSATAVAGGGGGYGQFNATAISTPTSFATAGSVVSSSAKGPTKGQKGQQQQQQHQQFQHYQSSSPLIADSPIPSPSGAIAAAAIKPPTPQPQQMQMLPQQFTISQQPQQQQQAQQVFQFIQGPQGQLIATTPQQQQPIQQQQQQQPQPVQQQQQHRFVSNAGVTGMSTGKTGKAPQQILPKPQQELQQQKKGTNGGAQISQSAQQTGQANNPTQQQQQQQQQQILLPATTNQPQQLLLNQMPVLVQQNPQGVQLILRPPTPQLTTTPSLVIQQNARGQPQLQTQPAQQQLLRIVGTNGATMQLAAAPTFIVSSQANLIHQTAAGQFQSAIKSGTQLTGLHAALAQAQAQAQAPRSQPFATTATLNTQLLGQSVAAQLQNLQLAAAQIQMPNGLTAISQLPAHLQQSLGGATINLNQLNGAHIQQIANAFQAPQAPGTNSGGANSTTELFTQSSPAHVPLAVTPEPLRQPTPVPMMQQQQQAAMATIQLQQQQQQQQQAQIQQLQHQLQQTQSQVQQAQQSVQATTIPEPKKKPRPRKKKQPPAPTPPAASPTVAPAEVRPPTPQKIAIAATPAPQPTVRAKSPSPPPTTIQRSSNGKLDLGDVMKFCGITGDDDDDEDYGMGLETGLASESEPAQAHAPATGSAAATTGSSGDIMISIPNQNGSDGLPFTLTIPAPQPQSSTGSQAAGNESATEIPNILIKIDPSAEAAVPPFGLSTPRLPTAEEIQKQAQQHLAQQAAAAAAAAKATTATPTINISLPSMTLQPQVAPAPVVTPTPAPSSNQVSTTVVVKPRRKPAVRRNAKKPDVTSSASNMISSSSGTTTTISSSTSTILNNSQPTTVNTITLTTPTPVTSSSNSTLMLTHGTPTAVPSQIGNIQISQVHNHHPSALPVSSAVENKIQIMPILPPGATVMGGTPGTGGHAPTTQSTQLVFQPAAPSVAPTITSDSTGFKLSSDGRQMQLVAIPQATPPSPAASSAQPPVPTPTPALTAGGATILPPQLTGMPANVSVSVGSPASAAALVPQLTGSLTLTVSEQCERLILRHDPNNPQDHQSQLILQALLKGALPNVTIINEPTRVDPNKQTTPMLQPQQQVIQIPQPLTQPQQILQQQPKVSTAPKIEVKVANNRKLSGQVTHPASSMLGMTSTTTTMSTMKPPANLPAKQNEVVSFPQLPLNSQVLIQQQPMISAQLQPQLQPVTVPVSLPTQPVPIPSPAPAPQLANNGQQRYIALPPIDPTTQQLFCLNSVTNQITAMSAGQTAASIGPTERLLIAPAGINAQQLAQCLQLGQLHFNDVNPLPAQQQQQQVATTSSSMTLSMPLRPQPPQQQIVHPIQPITNGLAITTTASSTLTTTTSTTSLTTVTKQVANVAPIIDQSKAKLEPAKAATSGAGGGAVVKKKPVRKPKATPTNASELANLKNASVVKPMPKLDPLSQKPNNNPVQIVQPNVASGKQMIVVGSSSCTTTTTTTMSASIQPFQTTSGTKLVGVTVPMQQQQPTGTAAILQQQQQQRTSFSLTATTVATPAPMPSPTVASGVSQLQMQQLPSQQAQQQLQPQQQQQLHAPKQQQPQPNTVSRVQTIQLTPQMQQIFKQVQMQIQFLTIKLQNKSTFLPVSPEIDSATIAAYNKPMTDAEINLALQRLFAEQHRILASGKEVPTPEGMLPTANGTGGFSLMPQPVQQQQQQQQQQLQSTVPEPLKTIVPANVVQPNNHSSTPAGAATSGATTAANIQQNITQRIHIYPMQHQQQQQQQQQQQQQQPQHQQQQPQHQLQQTGAKPKQAQPKPPPQQEQQSQLQIKPKEPANRSKVTSQQLQQNPQPPNGTINMLPQKVSMMPVVQQQQQQQPQQHQQQPMLNKSGPPPLIFASSTNMLSNSNSNNLHNSNSAMQVNNMLPLPPLQPQQQPQPQLQQPPTPILPPVAPTMAMGVAPGPMGNLVPSLPTIPSLPLYMPSKMDEMPTQKPKIARLSLFVRQLEVDQESCLKPDYVKPFRTKDEAVKRLIRYHCMHENDVELPSDEDEEFESTALEFQDKFRQLNGKFQEILMQESTLPHRTSELLQMQQLMIDDLKGEINEIRTAEKELEQQLKEEQTSEKSTAESDVLSEAKVKEEIKQEPIDKSAQPDGVVDKFDLLKNSADVNKAFSKSQPQQTTTVKQEESNESGEPSVNGSVKSEGHDKESSKYIKKDYDNFDIESELTTSFIMKKVENKAALAKSAENRYQERNMMDQQQQQQHIKANGGDPVDQDDGWYCLQKELNLMNNDHMQQSQQQLNGNQQHLPINRQPAPQQSHFLDNSNSNNMMGNSNHMSDLFPNGCIDKSNQSTTSSSNSSCVSESLPGSNPVKTVSSCSGQREQPVVMDADQQNEHPAISEFFSSDSDVQKSVETRLEAMFGESPVHLDVKSSNDANDIESNLDEIFGDSKSPAANHKSKMSMWVPDASFMQQAPQQQTSQQQQQYAGPQQPSQQQHHIELNCNNNPRWMQSMEAHYSDFLSTGTSNGELVNGESRKRSWDSQLMGSGSDMEDDNSSKRLCTASSSSSSSPMSSQQQHVQVAQHGLLDSDMFPQMLMDQQPHQQQQQVQQQHNFAYANIMDQQQQQQHQQQHFQHNLQQQIQQQQQMHVSHMGGAAVVAGGEYDDDISRHVASAIDSILNLQNSGDSLQFSLGSILGDSMLDDQRQAGANLPSCQQEQAIQRRRHLGEEMNDCLISGGGSAVSGVADNSSNILLEHHHQQHQLMQSHQQQPHLQHHHHQNMSQAQAQHMGQLNDFSCVAGGLDDPVKSIMTS

SEQ ID NO: 35233 - DNA, 2972 bp, DROSOPHILA
cgccggcaccagcacagtcttcttcttcgtttccaagtcgacttgccatatgccgtagtatgcatcggatacaataagattgtttccctgggtgtccagggctaaacccactggatagccgcacaactcatcgtcaaatatataatctacggtgaatatcaagggcattatggatacaagttgcccctactcctttgttaccacaaggttgccctatttttgtgataggttgaaccgactcctcattgtttagtcgaataacctcgccgctgtgaattcctgtgtaaatcttgtcctcgagtactatgaggcactcgggtccaaatatttgatctttccacaacttccgggcgccatttaagtgattgttcagctccagcgttccattcagatctctagctggctttatactgggaaacgcacgtatatagattatatggcttgatagcaactgaagaaaaacaacttacaaatactgttcgaaggggaaagtggtgctaggatataagacaggtagcagaaacaaggaccccaggaataggaccaaaaacaggctggttttaagcaatgcagcaagaaaacccattattattgactgcggtaacaaagttcaattgtcaaggtattgtcataatgattagtttgatttcgaattggtcgatatatatgtaccctgctgattggagcttttaaagttaatcaacaaaccattagattaaattcaatacatttttattggcagaggcagagcgtgcttaacatgtcgatatccgcttaatctgaggcttctgcattgtacttcaattacagctttgactcctccattcccgtctagcttcttagcctagtgagtgagatatcacgatcgattcggaacgcattgtctaaggcggtaactaatcggttgcgaagcgaagtgcagccaagtataaaacacttcgagataccgactacgaaaacgattggcctacaagctaaatacaataacaaatactggcactcaggtatcaaccaggatgtgcgtgaacaaactgtgcattcgccgctccatttccgtgtacaccagtgagttgagtccatccgcgtgctggcgcagagtcgccgatctcagcagtgccacgcgattggcattcggctgctcctgtttgtgcttcagcatggtgtacttactgaactccattgcgaatcggcaaatgtcgatattcagggcctgcaggcgctcgtagaggtcatcgtcctctccgccccagccgtaatacagattggacatgccgttgatctgctggtactgggcggtgttgatggccaccacgccgccgaaaagaccgcggtaaggcagtcggaatcgccagtgatccagggcagagctcatgtgccgtggacgttcggagcaggcatatatttgacccgaattcagtggcaggaggtccacgtcatgaaggatgaggcagggaaatccatactccgcagccacctgggcgccaatgttgaagagcatcgccctgttaaacggcttatgatcgaactgttcgaccaggaaaatccgatagtggatcagctgctgcggcaggtaattgtgcatgtacgtgaggaaggcgtgcagctgctcctcccgctgcctgtacggcacaatgatggcggtgctgtagcgagcctgacatccttccggacggaactcgccgccaggacggatctccgcgcccctctgcaccgcgtcatggtaatgggccaggtggtagacgaaccggttttcggcaatgatctccgagtaggtgcattcgaaaacttcctgctgggagacatttctggtcacctgcggcaccagagccccctcgatctttgattcctcgatgtagtcgtagtgcgatgcgaaccggaagggcagacacaggtacacgatgagagtgatcagtccgatggcgatgagaagatcatatttatggaagctgcggacccagagccgcacgaacattgttggcaggaaaagttgactcagtgcgatctttggaaactccgcatcctaatttcggacgcaatcttcgcggccggttggcgaataacagctgacgaccagggacgcaacgcataaaccaacagacagtgaaacttcaccagctcgaattgttttttttttggtttattttctcacataatattcattaattttttaaatggtttttacgaacaactaaagtctactaaccaaaaagaaaatgtttatgaaatcaatttttaggatgcctttaatacaaaatagcataagaagttgtttttataaaaagtatgcaaccgattgggcatccatggttctttaaaacggcatgactctaccccacccttattaattaaacaataatttgataaaaagttgtgtttacttatactagattgttgagacttctattgataaggatgcatagttataaatgttgactcattaaagagaaggtaattgaactgaagaaggttgtagccatatgtatgtatggttaatacatgagagacataatcaaagtttttaatttataacatttaaaatgtcaatctttgtttattatcgggttgtactgttcgctcaacaagtacgtactgtataaacaaagcaacagcactctggcaacgccgtgacagtttcccatccctgaaccggcgaagaactcttggtttccttttacaatttcttaaacaaatgcaccggtggtttaattggcaaaaatgacctccattatcaagctgcacactatatctggggcgatggacgagtccccgccatgctatatcctacagatagacgatgtgcggatattacttgactgcggatgggacgaaaagttcgatgccaactttatcaaggaactgaagaggtgacaattgtatacatatttcaggaaaacaataacctaaatattttgtgtattcccaggcaggtgcacaccctggacgccgtgctgctatcccatccggatgcatat

SEQ ID NO: 35234 - DNA, 972 bp, DROSOPHILA
atgttcgtgcggctctgggtccgcagcttccataaatatgatcttctcatcgccatcggactgatcactctcatcgtgtacctgtgtctgcccttccggttcgcatcgcactacgactacatcgaggaatcaaagatcgagggggctctggtgccgcaggtgaccagaaatgtctcccagcaggaagttttcgaatgcacctactcggagatcattgccgaaaaccggttcgtctaccacctggcccattaccatgacgcggtgcagaggggcgcggagatccgtcctggcggcgagttccgtccggaaggatgtcaggctcgctacagcaccgccatcattgtgccgtacaggcagcgggaggagcagctgcacgccttcctcacgtacatgcacaattacctgccgcagcagctgatccactatcggattttcctggtcgaacagttcgatcataagccgtttaacagggcgatgctcttcaacattggcgcccaggtggctgcggagtatggatttccctgcctcatccttcatgacgtggacctcctgccactgaattcgggtcaaatatatgcctgctccgaacgtccacggcacatgagctctgccctggatcactggcgattccgactgccttaccgcggtcttttcggcggcgtggtggccatcaacaccgcccagtaccagcagatcaacggcatgtccaatctgtattacggctggggcggagaggacgatgacctctacgagcgcctgcaggccctgaatatcgacatttgccgattcgcaatggagttcagtaagtacaccatgctgaagcacaaacaggagcagccgaatgccaatcgcgtggcactgctgagatcggcgactctgcgccagcacgcggatggactcaactcactggtgtacacggaaatggagcggcgaatgcacagtttgttcacgcacatcctggttgatacctga

SEQ ID NO: 35235 - protein, 323 aa, DROSOPHILA
MFVRLWVRSFHKYDLLIAIGLITLIVYLCLPFRFASHYDYIEESKIEGALVPQVTRNVSQQEVFECTYSEIIAENRFVYHLAHYHDAVQRGAEIRPGGEFRPEGCQARYSTAIIVPYRQREEQLHAFLTYMHNYLPQQLIHYRIFLVEQFDHKPFNRAMLFNIGAQVAAEYGFPCLILHDVDLLPLNSGQIYACSERPRHMSSALDHWRFRLPYRGLFGGVVAINTAQYQQINGMSNLYYGWGGEDDDLYERLQALNIDICRFAMEFSKYTMLKHKQEQPNANRVALLRSATLRQHADGLNSLVYTEMERRMHSLFTHILVDT

SEQ ID NO: 35236 - DNA, 2971 bp, DROSOPHILA
ctttaactttaattgaaatggaaatcagaggctaactgacgtcaattcgtttgcatagccgacagctattaactttaaaatattagtctatgtacttcgcattttaattaaataataatgtattcttcacatctaattataaatctagaggctttaatgtttattccatttcacaacaataaaatatttaacatttatacctcatatagggtatatacccgtgatttctgaaaagcagtgaaaatgttacgcgaataatagatatccatctatattcgaatttttcgaagcttagcgtgcacttgacttccgactttgactccaaagctaggtgcctggcaattgtttgtttaccgaatctaataatgttgactttcatcaattaataaataaataaggtgggaaaaacacgcgggcaattagccagggagccatatatccatatatcttaagtggcaagtgcggaatcgatttttgaatgtcaatgtcatagtgcaattagaagaggaggcttccaatggccaacatttagagccaagctaacttactgtaaccaaatttaaaagcctattaaatacgaataatgccaaaaaggtcggttttacagggtatcagacatgttgtacaatatatctgttaaaaacaaattcaccgcgcagtgaacccagaaatgtttataaatttaatagggcgagcaaaaatggaaaaaggctataacaattgattgattacccgctaatctatagacgtcggaataactatgtcataattatctgcacggacacgagtaactaatttgttgacagagctacaaatgatataatttcatcgtattcgtaccacttcttcccaagcagccaagtagtcatgaaaatagtgctggttatttggatgctagctcactcacttcagccgccttatcaatgtgtaaatgtcgttgatttgcacgagaagtgcctaaattaagtgttatacttttcaggatgctgtcattttcaaaatgaccaatgcagtatgtgagacctataacaaatcctgggtggaattcgggttgtgccgcctgcgtgctgttagcaggaataaggtttgcctcaatgtcgatgccaatttgctgcatccggttcacgatgtcatagtcaaggccagattgctgaagagggccaatggctataagccttggctatatagcgtcagtttcgacggctgtcagtttataaggcggagaaataatgccttgattcggatcgtttgggagctcttcaaagagtactcgacgatcaatcacacctgtccctatgtggtaagtctgatggacaaaatccaggtataattcatatatacatacagtttgtcaagaaactgtttacacactgtgaaataagttgaatttttgactttaaagcttaaaattaagggttttttgcttaattaaactcaatttttttataaaatataattaaacaatatttattttacttataaatcaaaaaacaaattaaaaatattaaatatacaagaaaataaacaacaaattccaagtttacacacttttgagactgtcaagaaactctttacacattttgttttcctactttgttttgttctttttcttagaacgaactagatttttccgttatttttggctttgcattgctttttacaacgcttttattgaaatttgttgactttgcctgtgaaattttgctgatcaaattattaaatttaataaaatgcctggaaagagattaacttttgaagttacccaattaataaactataaccaccatgtatatatttatcattaactagggcctgcagcaagtcaagaacttctatctcaggtccgagaagctgcccacgcccattcccactggagaatatctgctgatgattgactgggtgttcaacaagaaaccgcaggctgccacaaatgtttacttcacatttgtggaggacctaaaagatagttaacgaatcaatcgttcagaccaaaatgtttaaactgaactgtaattacaaaataaacaatataagtctatattgttttagccgatgaaaattatatggaattttggctttgccatcaacgagaaattgtttctatccgtgatctgtggaatacaaatgcgactattaagtctttgttcctgagaccatcaagagcacttccagcagccagcgcaatatcgtaatcgtaatttaaaacaaacaatacaaaaataattaccaattaagcccattttaaattcacattccgtattgcaaagcacaaaatagccttgtgtccagtggtatccagaaaaccggcccatttaataagcttttaaaaacgttgagggatgtgcaatagttagtttattcgtctctttgggattttagcactgttcgttacactcatcgcccgcgtctgcctttgtccatacggagattttgttgatatttttgcgaatcctgacaaaagccccacaaatctgatcgcagtgatcgcaggcctcgccaatcatgcaaagaagcacgtccagccaagttttgtccagttcggctgtggaccttttatccactttatatgtccaacgacctccgcccttgttcggcggatcctcccacatggggcgaatgcccttcttgaagagcatgtaatcacagccgcggttgagcttggatggcgtatcgatgcggaaatacaggttccagaagtcctcgacggtattgaagctgtcaatctccttcagcatgtcctcccatgatatttcagggtcgtactttacgccccacagggtccatgtgttctgcagccggtgcttgtttgtggcacccaacgatgccagtttgttattatccagagaagtccccattttaaattccgatgactctttggtttgccttaagttttccatttcgcagatactctatgctgaagcccccttttaaaatgcattcgtagaattcgtagaattgtttttaatggact

SEQ ID NO: 35237 - DNA, 462 bp, DROSOPHILA
atgaccaatgcagtatgtgagacctataacaaatcctgggtggaattcgggttgtgccgcctgcgtgctgttagcaggaataaggtttgcctcaatgtcgatgccaatttgctgcatccggttcacgatgtcatagtcaaggccagattgctgaagagggccaatggctataagccttggctatatagcgtcagtttcgacggctgtcagtttataaggcggagaaataatgccttgattcggatcgtttgggagctcttcaaagagtactcgacgatcaatcacacctgtccctatgtgggcctgcagcaagtcaagaacttctatctcaggtccgagaagctgcccacgcccattcccactggagaatatctgctgatgattgactgggtgttcaacaagaaaccgcaggctgccacaaatgtttacttcacatttgtggaggacctaaaagatagttaa

SEQ ID NO: 35238 - protein, 153 aa, DROSOPHILA
MTNAVCETYNKSWVEFGLCRLRAVSRNKVCLNVDANLLHPVHDVIVKARLLKRANGYKPWLYSVSFDGCQFIRRRNNALIRIVWELFKEYSTINHTCPYVGLQQVKNFYLRSEKLPTPIPTGEYLLMIDWVFNKKPQAATNVYFTFVEDLKDS

SEQ ID NO: 35239 - DNA, 2351 bp, DROSOPHILA
cgcacaccaacgcaaaggatatcagaaagagagcggcagcatcgcagagagccgaagaaagagagagcggaacgagtgacagtgaaacactacaccaagcgaaaattcaattcgaggtgattagcctttaaggagattgtcgaatgtgatccgcagtaatgcttttggtaaataatagaagtttcctttcagcatagtaattcatgacctccagagatatgaatatcacccataagggcacttaagagaatgcaacaattaggaacttgctccctgaaaataataatgaaataatatataactttaaaatagcgatcatcatctaactacgtttttcctgtgtaaactaatgcgaggcatcgaaagcaaaacaaagtgccgagcggtcgtaaaaatcgtaacaatatgccctgccacatcgcagcatcaacatcggatgcacagcggcaacatctatagcagcaacaacagcgccaggagcaacataaacattgtggcgcgcgtgctgcgacggttgccgcaatattaatttcacgaatgaacaacccttgaataagcatgcacttcatgtaccgttattatggtccagctacgcgagaggactcgtgctcgagtgcgctctttcgagagagcgaaggcgaggacgagagagcgccccaaactttctctgaaagctttcgtcccttcgttttacttcgtttaacttcgtttagttagccgaaattcgaatgtgtgcgtggtagtgcgtgtaagtactgccgcctgtgtgtgtgtgtgagtttgaggccagttgctttttcattgtgcatttcccagaggtgcatttttctgaaaatctaatttgagagattgagattgtttggtctttcaatgttcagctcgcccgttcatgttgcgacgcttgcaatttctggccagccagtaagtccctatacagctcacatatacatacatacatatatttaagcagctatgtatgtgtatggttagccatatattaatgctgcagcagctggatatcggggagttatggtctcgtctgcgaaaggctccaagtcacagtcacacgctcactttaattggtacagtgcgccgcaacgctgtggcaatttctgttgaaaaatctacatggaagatttgccagcagcagcagcagctacatctgcaacagcagcaacaacagcagctatatctgcaacagcagcagtggaatccgcacggcagcgacttcaatcattgcgcgccacgctcgctgcggtttgacaaacatttttcacagaatgtgcgaaggcaaccgccaagcgccccggcgcccagcagctccttgtttaatggcacaccggcagaataagtgggtttttaggtttcatactacagcttaattcaatttaaaagttcagaagttgaatttagtctttaacaaaaccttagattataggttgtatattttcaggactcttttaaactcttttaaaacagtactggaggtaagtgcttaaatctaaaatactttttgaagattactcaagtgcagatgcacatgaagttagttatggatgctcctcttgacatagtgaagggatttctctcagtgcatgccgccaggatacccacccctttggcccttgcccgtcccttacttattcgtgtatgtttgatgagtatgcgagagttttatggctgtattgggaatgagctgtgagcagcctggggagggggcagggaaatcagtgatgtggcatggggcacgggaagcaggtcctgaaatgaggaccacgacgagctgcagaggctgaaggtcctggagcgggaggaacagccgtcaggctctggctttggctctggctttggctttggctttggcttcacggaaactgtggaggctgattgggttatgctgtgattttaattttgaaatcatacgaatgcgagtgctgcaacgcaaagcgatacgatacatgtgcggatttatttatgcacacacacctacacacagagcaaaataataaaaaaaaaaaaaaaaggatgagagtagaatgaaaaaatgtgcttgtgtgcgagcgtaaagcgataaagcgccttacaggatttttgcatcggactgctgctgttcgcaatttgataagctacctctgggcattatttttacgactcttttccactgctcacacaaacacgcctggaaatatgcaataaaatattccgattttaagctggtgtgtaaatcaaacaaatcttattgttttcaatttgtgctcattcccgaacctccttcgtcctgcgcctctgcccatttgttcagtcaattggtaaactctccgacacttgatcctgttgaaatcgcagcggcc

SEQ ID NO: 35240 - DNA, 351 bp, DROSOPHILA
atgctgcagcagctggatatcggggagttatggtctcgtctgcgaaaggctccaagtcacagtcacacgctcactttaattggtacagtgcgccgcaacgctgtggcaatttctgttgaaaaatctacatggaagatttgccagcagcagcagcagctacatctgcaacagcagcaacaacagcagctatatctgcaacagcagcagtggaatccgcacggcagcgacttcaatcattgcgcgccacgctcgctgcggtttgacaaacatttttcacagaatgtgcgaaggcaaccgccaagcgccccggcgcccagcagctccttgtttaatggcacaccggcagaataa

SEQ ID NO: 35241 - protein, 116 aa, DROSOPHILA
MLQQLDIGELWSRLRKAPSHSHTLTLIGTVRRNAVAISVEKSTWKICQQQQQLHLQQQQQQQLYLQQQQWNPHGSDFNHCAPRSLRFDKHFSQNVRRQPPSAPAPSSSLFNGTPAE

SEQ ID NO: 35242 - DNA, 2598 bp, DROSOPHILA
gcaggagcagtaggagctggtgtcctggctgttcctcctggctaaaatgcgcgcaatctgcgcatcaataaacgctttaatctctgctctgcctgccatgttgctgccgtttctgctgttgctgacttgtttgctctccgctccgaagcaaacccctccaatccagctcgaatcccaatcctgtggcccttgttgcctggctgttgtctgcccgagttggtcgggattggttttggtgtggtctgggttgggttgggcctgccgttgagctttgacctaaagcgattcaataatcaactgccaacaattttaccggactttactttattttcacgctaaactatctcaaagatgcgagcgcatagatacgctacaacgattttttgtgcggattgcagacacactccgacacacacaaagacagctgcacagatatatatatatatatatatatatatatatatatatttgtgtgtctagccttaggccaaaagttaccatactaacttgtttttagtttccagttcgtacgacatcattttactttaagcacttaaaatatactctgccccaccaccaaactagaaccgaactgaaccaaaccaaaccgaaccgagttgagttgagttgagcagagaaacggagcccaaggcaggacaaccgtgccagtcctgctacctccttgctcctttctcccctgccacgccccctcgtcatcctccagcggctaagccagaagtatattctattttattccaccatctatgggcggccgttggcgggtggcggccactcgagcagtccacactttttatatcggcaaacttttgttgcgctgcgagttgtttgtgtttttcttttgcagtttttcagtttgtgtttctcggctgctccttgccccctgcccctgccccccacaccctgctcctttcttcccttcgtcctctggttttcggctcagccagagatttctttggagcccaccagaaggccgtcagtgatggcggccatcgattaccggagagccagattcgagataatcaccgtccaccatctgcaccagatgcacttgcagatgcagatgcagttgcagatgcagttccagttcacacagcagacgacaatatcaactgctgcagttggccatgtcctttgtaagtaatcaacttcatttatcattgcagcaaaatgcttacttatgctgcatattcatatttacaaatatgtctcagcttttcatggaaaaaccaatacctcctaaatttattatgtttataaaagcagataagatgtaaatagctgctcttacatgcttcataaaaatacttttcaaaaccactccaagtttttagacttgatttgaaatttgcaaaaactaatcaaatctggctaaaatccagctgctccgtcatctcctacccttcgccccgcgcactcctttgacgcatttatggagcttggtgcccccgtcatttgactcgaccatatccagttcgaatccgggcggcggcttctatcgaatccatcccttccatcagtggcatccatcccgaaggcggcgtattgaaaagcagcaatggcatcaaaatcgcatttgaatttagtcgcccttttgtgcccactccttgggctccttgttgtgtcctgccttgttgccattgctggccattgctttgctctgccgtgctccttgggggggaattgctgggcgagatggcgatggggattggataagggagtgggtgtgggagcttgggggatttgtgggctctcacttcggacaacgcgtaaagtcaggcgacccttttagactatgcggcgcatataaatttcatctgaagaggggggtggggggtgggtctaggcgggggcgagtgggggaattgtcctgcccacgttgtgttctccacttgttgttgttgctgttgctggcgacatcggcagcatcgttttcagccttgtggggcattaaggcaaatcgggtttaattgaaaataaaaattcttaatggtctttaacccaagattatggtcctgtattgccgacgtcttttagtggccccttttattaaacgaatgtgtgtgtgtgtgtgtaagtgactctgtgtgtgtttcgtataggtatgtgtgagccgaaaaccctttttgaccgagcatcttcgtctacgtttggcctgcaccatttttatgtcgccggaagtggcgtgtaatcgtttttattttgtaattgttttagtgccacttcctttcgtgttttttatgtgctcccttcctgcttccgatcccctcccctcctcccatcaacccacacaaccgaatttcctggccttttcgttttcggtcccttctcgaccaggatttttcacagctcccttttccttggttatccatcgtccatcgtccatgcttttatgttgttcgggcgccgcgcacttttggggccaaataggtggcctcataaatcaaatatgtcacagcaatttaggtgtcagaaattttattttttatttttataacattttcccgtccaaaaaaagaaatgtccactgggtgtggtgcgatgcggggggccaagaggcaaaggggccagtgaaatgcg

SEQ ID NO: 35243 - DNA, 336 bp, DROSOPHILA
atggcggccatcgattaccggagagccagattcgagataatcaccgtccaccatctgcaccagatgcacttgcagatgcagatgcagttgcagatgcagttccagttcacacagcagacgacaatatcaactgctgcactgctccgtcatctcctacccttcgccccgcgcactcctttgacgcatttatggagcttggtgcccccgtcatttgactcgaccatatccagttcgaatccgggcggcggcttctatcgaatccatcccttccatcagtggcatccatcccgaaggcggcgtattgaaaagcagcaatggcatcaaaatcgcatttga

SEQ ID NO: 35244 - protein, 111 aa, DROSOPHILA
MAAIDYRRARFEIITVHHLHQMHLQMQMQLQMQFQFTQQTTISTAALLRHLLPFAPRTPLTHLWSLVPPSFDSTISSSNPGGGFYRIHPFHQWHPSRRRRIEKQQWHQNRI

SEQ ID NO: 35245 - DNA, 4285 bp, DROSOPHILA
ttggttttctaggagtttattggatactacccaaaagaataccgctcggcatctgcgatgttttatgtaagtatttatctttaaatttagcagattatcaaaagaagtgttagacaaaaaatcagagcgaatgctgctgatgtttataagccccaggaaagcaaaataatatgtgtatttaaactgtataaatttctgtttcccagctcagtgatgttcaaatgggtggctatgcctcttttccggatctgggctttggctttaagccccgtcggggatcggccttggtttggcataatactgacaactccggcaattgtgatacccgaagcttgcaggccacctgcccggtgctccttggaaatcaatggggtaagtcgttaaagcagcccatcgattcttctctcttctacttaccgttcaccatccggaaaacagtggccaaaaagtggatcagtgggtcaggccagtggcgcaggaagtcgtgtcggaagtaaagaaaattcagttttccattcggtttttatccacttttgcgataatttattcaataattttgtcgttatttatattatgataataaattttatgcactattttatagtattcatatttaatttatatgcaatgtaacattatttggggctggggagaaatggtagggcttggcattcaattgtccacttttgatatcatccttactttcattagggagcagggagtgggagtttggcaagggctttgagggtttcgagcgggtgggaacaacgcgtttcctgatacgtatgcaaatgatatttgaggcagcgggaggcgcctccggcaatatgtatgcgtgcgtgggcggctggggtccaatacattggagatgggaccacggaaccggaaacggaaacgaacaacaagaacgcaggcaagagagaaagagatgtcgatgtcggtgtccgagggaatctgtaggaatacttgattgccggctcttcttctctcagttttgatatcacgctcccccggttctcagactcagcctcatccacagaagcatcagcatggcgagcaggggctgccacgtcgtccggttgctcctgcccgcattccgagcagcctcctcgagacctgtggcgataaaagcaaaaaaatagttcagattatacagaaaagagttaaaaatcgcttgcttttgtattttttttaatattttcattttaaataactccacacgaaagatttatccttccatatacgtgggactcacctccgatgtaattcagatgatcatcgttgctggcggaggcgcccggatgaagcttgatttctgcaacacagaaccacaggcatcgagaaaaaaaaaaacaacagggacaaacaaaacaaattaaaccctgtgatggcgggagatggtggagtagagattgcgtatacgcaccgtataaccgcaatgtgccctcggcacggcccagcgagtttgtgctgacgcagtgataggtgcccacatcggagggcgagaaggaacgcaccaccagcagcatgacgccccgatagccatcgcggcgctccgttatcccgtacttgggcctgcattggatatgggtcggcatggatggagagcaagggaatggaatggttttcgagatggatatgtatcactgatgtctgccgtccggaattccctcaacttacccgtcgagcagcatttcgggacccggcgagccggactccaggctggccgtggagacgctggcgaatccgttggacgtccgcgcccccttcagccagtaggagacgggcgacggcgaggcctccacctggcattccagctgcacatcggatcccaagggcgtgcccaggagctggctgggggccctcaccatgggagcaactgtgaagtggaatggtgagtgagtgagtgagtgggcggtcggatttcattgattgcagaatatcgcgcagataaattcgcttattgttcttattctcatgaaattgtttaaattttcagcagacggatttttaaagtggctactttaagtgctgaaactttgattacagaattgtggcgtttcaatacttttagcaaatgttaagtaggattgaaagtgactgattcttagtcagctgacaagctatatgtaattgaaaatgataagtcctaattttcggtaaaggcatagggtgcacttgtacttgaagcctaatattctattcatcgagttaatatttgataactcacattgcacactcagcgagactcgtttgctgacggcaggtggaacatcgttggatgctatacacaagtaggcgcccatctgacgcctctccaggcggagcagcctgagcgaggatccattataggactccactggaaaagggtaatgaattaggaatcaaaggatttcagggcatgtttgtacctttcatgagctccctactgcctggcttgcgaatgagtatcatttcgccgtcctccctgcgccaagtgacccttggctggggatttcccgtggctttgcaggtgagcgtggcatcctcgccctcctggacggccagatcggcggatgactcttcgttgatgatatccggtggtactaaaagtatgtgatttctataagtttaagttctatataggaacacgcgatcaaaggacataccctgcacatcgatacaacccacttgtttcttcatgggactcgtatttatttggcacatatagcagccgcggtcactttcccgcagtttgctgatttttagtttccatctttaagttgcaagttgcaagttgtatataagctatattatcgctaaaaggaagttcagtgggcttacgtgtgcatatcctgatgcatgacgctgattctcgcattatgggtgacaacgcgaccttggagagctaaaacggtctgatcggaggctctcagccaaccaacctattatcaggggattatatatcatattatatatattgcaatgcaaggtaaatcattctagctcaccttattcttgccgagattgcgcaccgagcaggccaggatggcctcgcgtcctgccggatatgtgacgttgttgatgaaccctatgaactccggatcgggatccagctgggaactgctctctgcgaatggaggtgaaaatggatgtagtaaggcaaccgctcgcaattaaatgcctcccatgccgtgccccattccatggccacttaccgtgatgctggttctgggtcgagccactgccgcattttgtggccattatcaggatgacaaacagcgtcgattgcagcagcttctccatattgttgttgatgtcgttgttggtggagttgttatggccgttgttgctgctgttgcagttgctgttgcggttcttttatttgctgcagcagctgcttctctgctggcactctttgttttcctattattttatgggtattttagttgctgtttttttgtgcttttcttctgtgggggtctcgcggcaatttctatttctatttgcattcgaatttgaatgcgaattcctatttcaattccgattccgattgcgaattctatttaccgcgtgtttgtgccaattgggctttgattttcagctggttcgactcgccgccccactgccacgcccattgacatctgcaagtaaacaagaaatgcgagcaaaacatcagagccagaatcagaatcagaatcaaatgcggattcagattcagaaacggaatcacaatccccgtccgaagcggaatcatcgatttaaatttatatcgcgataaagcgaaaaaaaaacgaagaatcgagcacaaaaggctgttcaatttgagtgcactaaaaggggggctggtttgctgaggggggggggggttggggttggagttgggcaaaagggggctgcatttgatggcagcagcgcccatcgctaacttgattatcaagcgttgcaacaaatttgacgttgcctgcttttaggggcatccaatatggctgccgggcaagctcaatctcaccaacacagcaatgtaatgcactgagcgaaatcgaattataagattaaataaacatattgccaaaagtaattactattccatctacggtttatttaattggtaattttatatggaaagcctgaaatctgtttatcattgaaacattagataatcttaggtgtttagctatatatttttgcgcagtgcaccaccccctgttgccaccaatttgggatccccggctcagtccagcccgacacaaagtaaaaggcaaatgcaattttcaacacaaacaaaaatttatggctcggcagc

SEQ ID NO: 35246 - DNA, 1242 bp, DROSOPHILA
atggagaagctgctgcaatcgacgctgtttgtcatcctgataatggccacaaaatgcggcagtggctcgacccagaaccagcatcacgagagcagttcccagctggatcccgatccggagttcatagggttcatcaacaacgtcacatatccggcaggacgcgaggccatcctggcctgctcggtgcgcaatctcggcaagaataaggttggttggctgagagcctccgatcagaccgttttagctctccaaggtcgcgttgtcacccataatgcgagaatcagcgtcatgcatcaggatatgcacacatggaaactaaaaatcagcaaactgcgggaaagtgaccgcggctgctatatgtgccaaataaatacgagtcccatgaagaaacaagtgggttgtatcgatgtgcaggtaccaccggatatcatcaacgaagagtcatccgccgatctggccgtccaggagggcgaggatgccacgctcacctgcaaagccacgggaaatccccagccaagggtcacttggcgcagggaggacggcgaaatgatactcattcgcaagccaggcagtagggagctcatgaaagtggagtcctataatggatcctcgctcaggctgctccgcctggagaggcgtcagatgggcgcctacttgtgtatagcatccaacgatgttccacctgccgtcagcaaacgagtctcgctgagtgtgcaatttgctcccatggtgagggcccccagccagctcctgggcacgcccttgggatccgatgtgcagctggaatgccaggtggaggcctcgccgtcgcccgtctcctactggctgaagggggcgcggacgtccaacggattcgccagcgtctccacggccagcctggagtccggctcgccgggtcccgaaatgctgctcgacgggcccaagtacgggataacggagcgccgcgatggctatcggggcgtcatgctgctggtggtgcgttccttctcgccctccgatgtgggcacctatcactgcgtcagcacaaactcgctgggccgtgccgagggcacattgcggttatacgaaatcaagcttcatccgggcgcctccgccagcaacgatgatcatctgaattacatcggaggtctcgaggaggctgctcggaatgcgggcaggagcaaccggacgacgtggcagcccctgctcgccatgctgatgcttctgtggatgaggctgagtctgagaaccgggggagcgtga

SEQ ID NO: 35247 - protein, 413 aa, DROSOPHILA
MEKLLQSTLFVILIMATKCGSGSTQNQHHESSSQLDPDPEFIGFINNVTYPAGREAILACSVRNLGKNKVGWLRASDQTVLALQGRVVTHNARISVMHQDMHTWKLKISKLRESDRGCYMCQINTSPMKKQVGCIDVQVPPDIINEESSADLAVQEGEDATLTCKATGNPQPRVTWRREDGEMILIRKPGSRELMKVESYNGSSLRLLRLERRQMGAYLCIASNDVPPAVSKRVSLSVQFAPMVRAPSQLLGTPLGSDVQLECQVEASPSPVSYWLKGARTSNGFASVSTASLESGSPGPEMLLDGPKYGITERRDGYRGVMLLVVRSFSPSDVGTYHCVSTNSLGRAEGTLRLYEIKLHPGASASNDDHLNYIGGLEEAARNAGRSNRTTWQPLLAMLMLLWMRLSLRTGGA

SEQ ID NO: 35248 - DNA, 3518 bp, DROSOPHILA
tagagaacaccatcaaggttccggtggccctgctacaacccttctacatttggtccgatgtctaccccaatgcgattatgttcggaaccctggcctccctaattggacacgagttaatccacggattcgacgacagcgggcggaagttcgatgagaagggaaactcgaaggattggtgggatgagaagtccagcagcaacttcctgaaacgaagggactgcttcaccaagcagtatggcaggtatgtctacgatggcattcagttaaaggagtcaaccgcgcagtcggagaacattgcggacaacggcggaatgcgactggcctacaccgcctaccggaaatggtacgaaaaccagttgacacttcccaatggggctcaggatatgaccaaggagaccctgcccaacctgcgatacaccgccaaacaactattcttcattagctttgctcagagctggtgcaatgatgcacatcccagtgtgaaggcacttcaggtgtcaaccgaccagcacatgcccggaagattccgcgttattggatctttatctaacttcgaggagttctcgaaggagttcaactgcccagccggatccgccatgaatcctagtgagaaatgcatactttactagttagattgacccgaaatgtcattcctcagtttgaccatgtttaccctatttggatttgctaatattgagggtattaaaattatagtttcgagtaagcgcgaagaaattttgttgactttggtcaagaaattcaaattttaaaatctgtgaaagagataaaatgtaaaaattgtactttaaactaatagaagtgatcaacaaaatccatatttagctgagggtgaatgctatctttagttgtccactttcttatgcatgcccaagccaacctcagtcaaggttcattataaattccgacctaatctatttacgtgcctccacttggctttgaccgtgattgttacgagcagttagacgcggcggatcgataattaagccagtggtgacaggtgggtgggaaagggtcggatgtggaaggttgagggcaaacggaactcaccatgtgtcagtatgttgatggactcgttgtgccagtagaacaggctgaggaggcatcctttgaaggtctgaagcggtctgtaaccccggagtacgtaggggttgaactgaagatacgtgggcatgtcctgccagggcagcagttggaccacattcccgtcggatccggaactgctgctgctgctgctggagttgctggcactgctactaggcaccgatgcagctgcagctggtggatgctccgctgcagggactaccgagcctgttgctgatcccgatcccagcaaggcagacgttggcgtggtggaagctttggcggaagacgtggatgatgtggcgggagtatccggctgagtgggttcagtggatgctattgcggttgctgtttccggcgcctccttgcctttcattccgttcagggaatgggtctcagcgggagcacttgggatgcctggagctccacacgcttccacttggccatcaatggcgcgtgtaggcggcgtgggtggcggagtcagcgacatggtctccacggtgctgcccaggcagtcgcatccagtgcttcctcctccaatcctggtctttgtggagctgcccagcagctgctgatcgggtttcaggtcaacggcgactgcagcggcggcggcggcagcggtgtccatgccgtgctaatccctttgatcgttttcgaaatcggtaacggttacggtctcgggctcactttcagttctaatcactgttccagttccggttccggttgcgtggccgtttccgtttccggttccctagctggccagctgaaagcgaaagcaaacgtcatgaattatggatcgtctatatgcggcgggctaagatgcgatttgttacgtatgtgttggccaaaaaaagcacgtgcgaaagcgaaaaggaaaatgaaaacgagaccaggacaatgtcaacacacacacactcgcacagcagcctcgtgacccaaaaaggcctgcgccatttgtactccttggtgtgtgtgtgtaattgaatattccatgcgaatcacgcgagtctcggattaggccacaaataccagctcccgggcccgggaaaaaatcaataaaaatactcacttctgccatggaacacgcacacgtttttggtacagaatcctcctcgcaaaagtagagggattacgttttttcggggactacaatcctggaccgatgctacgatgagcaggtttctccactcggcttgcagatgttacgtgggcggggcatactatatagtttatcggtattcaagccattccatcggcttccgtgggcttctgtcggataaaataaagtatatcccagctagatggactctttcccagagcgacaaaacgcgggaagcagagttcggggaaatgaatccgcgtacacgaccgttgggataggcacgtcagtatttgactgagcgtgggcacacgataacgataccgttatttttcctcgcgtattgttatgcaattgaatgaatcggaacccgtatttttattgggcgccaaagcagcgcaggcgcagtgccgaacacgaggcagccagctgcttctcgcgcagttactctttcattttaaaaagtcaaatatacaacaattaaaaagatgatttatttgttttggaccagttttgtaacagtcgtccgaggctagttttgaatttgaatacttcccgcctgaattttcattatgtggcaactgcttactcttaccaacactgtgctacgacgacccttaacggttgcattactcaacatcgatatcaacaaaacatcgataagagtcgcccaatcacatgcttctcacatcactaaccaagtgcaattcaatttaatccgttgcaaatacccgcgtattaatcatatttgttggactgcaggctgctgaaaagagctgctaaaaagagcagcccagccaaacgggcaccgccatgcggtaattttatcgcagacgagctgctagaggcgaactgcgcgcggtaagcgaaaaagagcgccaaaaggtgaacattcccatgcaaacactcgcacctaagcagaaacaacagtacaaaacccatgcaactaccctcgctgaaggacaagctcatgcccagcggcagcgtgcagcaagcgaaagcgaatttctcctggcaatcgctaacgcaactcttgagcggcctgtggcagcgcctctatttgccgcgttcgccgtttttggctctgccagcgccgcccctcgccacgcccccagctaatactacgcagcgccgcgcgaagaaagaggtaagacggctgaaaagccccaaacaagatatgaaaatgctcggcaaaacagatatctcgaaaatacggaaaacaagatatccaacaaaactgctacccgtctatgggatttgtggcacccatacagacgcagactcgagcgtgcgggtgcacagctgactacgcagcacg

SEQ ID NO: 35249 - DNA, 1212 bp, DROSOPHILA
ttatcgtgtgcccacgctcagtcaaatactgacgtgcctatcccaacggtcgtgtacgcggattcatttccccgaactctgcttcccgcgttttgtcgctctgggaaagagtccatctagctgggatatactttattttatccgacagaagcccacggaagccgatggaatggcttgaataccgataaactatatagtatgccccgcccacgtaacatctgcaagccgagtggagaaacctgctcatcgtagcatcggtccaggattgtagtccccgaaaaaacgtaatccctctacttttgcgaggaggattctgtaccaaaaacgtgtgcgtgttccatggcagaactggccagctagggaaccggaaacggaaacggccacgcaaccggaaccggaactggaacagtgattagaactgaaagtgagcccgagaccgtaaccgttaccgatttcgaaaacgatcaaagggattagcacggcatggacaccgctgccgccgccgccgctgcagtcgccgttgacctgaaacccgatcagcagctgctgggcagctccacaaagaccaggattggaggaggaagcactggatgcgactgcctgggcagcaccgtggagaccatgtcgctgactccgccacccacgccgcctacacgcgccattgatggccaagtggaagcgtgtggagctccaggcatcccaagtgctcccgctgagacccattccctgaacggaatgaaaggcaaggaggcgccggaaacagcaaccgcaatagcatccactgaacccactcagccggatactcccgccacatcatccacgtcttccgccaaagcttccaccacgccaacgtctgccttgctgggatcgggatcagcaacaggctcggtagtccctgcagcggagcatccaccagctgcagctgcatcggtgcctagtagcagtgccagcaactccagcagcagcagcagcagttccggatccgacgggaatgtggtccaactgctgccctggcaggacatgcccacgtatcttcagttcaacccctacgtactccggggttacagaccgcttcagaccttcaaaggatgcctcctcagcctgttctactggcacaacgagtccatcaacatactgacacatggtgagttccgtttgccctcaaccttccacatccgaccctttcccacccacctgtcaccactggcttaa

SEQ ID NO: 35250 - protein, 242 aa, DROSOPHILA
MDTAAAAAAAVAVDLKPDQQLLGSSTKTRIGGGSTGCDCLGSTVETMSLTPPPTPPTRAIDGQVEACGAPGIPSAPAETHSLNGMKGKEAPETATAIASTEPTQPDTPATSSTSSAKASTTPTSALLGSGSATGSVVPAAEHPPAAAASVPSSSASNSSSSSSSSGSDGNVVQLLPWQDMPTYLQFNPYVLRGYRPLQTFKGCLLSLFYWHNESINILTHGEFRLPSTFHIRPFPTHLSPLA

SEQ ID NO: 35251 - DNA, 4161 bp, DROSOPHILA
aggagaacaacatcacgatcccggtggccctgctgcagccacgctatttctggggtgaccagtatccggaggcgttgaagtacgccactctaggctatctcctcgcccacgagatgctacacggcttcgacgatgatggaaggcagtacgatgcgtccggtaacctggcgccttggtgggacttgaaatcccgctacgagtttgaggaacggcgcaagtgcttccaagcccagtatcacgagtaccaatacggtggatcaaagctgccggagagcaaggatcagtcagagaacatagcggatagtggaggccttaaattggcctacgccgcctacgaattgtggctgggtcagcaatccgaggaggtgcttcaacgtgaaaccatggagggtctgcccttcaacagtcgccagcttttcttcttgggatacgcacaattgttgtgcgacgacgttcagtttctcttccagccctgggtgagtcaatcggacaggcatgcacccagcaagtaccgggtgattggaccgctgtccaattttcaggagttcccttgggtcttcaactgctcgcaatcggcgcccatggatccggagtacaagtgcgccatctactgataaagccctatatagttcattcgttttttaattaactaattttgctttgatgttgcctaacttggtaagctcaaatgaatgaatgaaaaataaacaaacaaatataatagcatctttcaattggcataaatgtagttctggcatttatatataataaatgcttaatgtgtatagaaatgtaaacaaagtagctttatcaatgagagtgcgtagaaacatatagacacggtcatggctatatatgcgctctgataattgctgttgacaatatatatgtgtatattaaattgtcgagaagtaaccattcaatgacccaacatttcagtgttagtttttattatgggtagaatttattgtagttcagagtactttaaatgatgtcctaactaatccaggttaacggcgaagagctgacacttctggggagaggtcatcctgctagcggtcccgcagttaaagtcccgtccaaaggctctaaagttcgatagtgctcccagcacgcggagggcattgggagtgcccaaaaacagggattgcttgtcccggaactgttcattggcatcattgcaccataactgggcaaagctgaggaagaacagtcttcgggagccaaggttgagttgtggcaaggactcggagcccaagaaggatgggtccagttccgccagaagccttcggtaggcatggtaggccacctgaatggccagattgtcggctatgttctccgcctgcagatcgctctccggcaagtaatgtccattgagccgcagtctaccgtactgctccttgaagcaggacttccttttggagtactcagcaaaggacttggcatcccacttggatgcatcttccaagctgtgtgccaactgctgggccagcaaggtgcccagactgccataccgcactgcttttggatagtagcgggaccacaggaagttcggttggagcagagcaactggtagcaggactctctttcccacaggatcataggtgaccgatgtctgagtcttcaccttgaccctcaaactctgatggttaagtatggtcctcagattgtgaagataatctctaggtttcaggtgcagctcctcatatcgctgcgtgaaattgacttcggcatatccattgatcaccagactggttgtattcaactgctctagtagttgttccctcgtctccggaaccaaccaatttgctgaagagttttgtaacacacctctaaagctgcgctgtaactgctgccagactacatatatatccttcagggtaccttcatcttcatactgctcgaacaacatgtggtcaaggagctcgccaaagagatccctgacccgactgacgcactgctccacaacggattccgctcgctcgtagtagaagtgctttaaaagctcattgaagacatagttagccagtacgtgtggtggtgtctccgtcaccagctcatctattttcataagataatcaggaacatgctgatatagggactcgttggccaacaactcccggtcaaggacagtttccacgaactgggtgagttttgagacatcaacgtagtccgcgtcacttggagtgtacaatttggacatcactccaactcgacgatccaccataatggcggcaatcttttgctcaaactctgtaatttcccttgccgttgttacggccactttgggatccacacccaagtgacgttccaaatgattggctatatcttctgccacggcctttctgttggcctccggaagaatctgcttcggctgtcccacgtatatgcgatccgccgactgctgaaagagcaaaaggatgtcaaagccgtactgccgctttattcgcgccactgtgtccagccaatcgaactcctcggctggccactcctgacccgggagacttaggacgggcatgcgtccgaaatcagccacaatttcctgcaactgacgtctgtagagatcctccggtacctgtcgaaagagcaggcaactggcatagaactccttcagtcggagcacggccacctcatccgtttccacgttcgccggctgctccattagacgctgctgcttgtggctataggccttgagcagcagctgcacgaagttcgtctcccggggataggcatcgttggccggattgatctggggccaatttccgcagctgtagtcgtagaagttttcgcaggcatccgcgtcctgctgcatatagctgcgcatttcggcggacttggacagacgcatcagtcgctggacataggcgctgtcattggactgcgagatcagctgctcccgtgcctggatgcgcaggtcaatggccggttgaccagttagcaggtgacctcgaccacttcccaccagatggagcagcagtagctggagcagggcatgtgcgataccaaagttctccatggcgaacactccgagagcgactgaacgggcagctcgacaagacgcacttccgcacccactctctgcgactgagattgagattaagctgcgctgagaaaaatctgaacgcagtagatgatccgacttaaaattgttatatccatctttcaatttcaatttgttaatatgatatattgtatatattttccggttgagaaatcttgccaattggtttatatgccatatattattgtatgcatgggtttgaaatttctttcagtgcagcacggggtggaagcgctgcccaagatcttccttatcacccgctcggtcgtgggtcccatatttctatcccaagttagaggggagtgcgtgattggaatacagatcacgttatagtgtaataactgggtggaatacctatgggcacttaatgccgtcagtaactagtattggcggttaattgctttgctttgcattttattatagtcgatagcattacgattatatactagagaagagagtacattgaatttaaacgggtttcccttctttgcatgaacttcgacgattctcatttttaaatctatgcaaaaccacggagatttggttaccacctctaagttataagaagaaagaaagcgataagcctaagcgctcaattccattttcggcagcttagctaataagcttggttcattaaaatatttcattttaaaagagacacatgacgatgaaattgttctgcatttggattgctagtcacgttctcagtgttctggttttagcggcccccacaagcgaggatgtactcaaccaggacacgccttacatgaaggaactaatgcgtcaagccaaagctgctgagatcgagagctttatgaaccagaaggtggatccgtgcaaggatttctacgcattctcctgtggcaactataaacgcatcaactcggctttgaacatgcgggtattgactactggagtgttcgagactttgacaaaagggctcaaccgaaagatcctgaagatgctcaacacaccccatgatagccacgacactccggaggacattcaggtgaagcacttctacgagtcctgtctccagatcaaggagctcaactcgacgtacagcgaaaagctgaagcggctcattgcagaatttggaa

SEQ ID NO: 35252 - DNA, 2161 bp, DROSOPHILA
agatggatataacaattttaagtcggatcatctactgcgttcagatttttctcagcgcagcttaatctcaatctcagtcgcagagagtgggtgcggaagtgcgtcttgtcgagctgcccgttcagtcgctctcggagtgttcgccatggagaactttggtatcgcacatgccctgctccagctactgctgctccatctggtgggaagtggtcgaggtcacctgctaactggtcaaccggccattgacctgcgcatccaggcacgggagcagctgatctcgcagtccaatgacagcgcctatgtccagcgactgatgcgtctgtccaagtccgccgaaatgcgcagctatatgcagcaggacgcggatgcctgcgaaaacttctacgactacagctgcggaaattggccccagatcaatccggccaacgatgcctatccccgggagacgaacttcgtgcagctgctgctcaaggcctatagccacaagcagcagcgtctaatggagcagccggcgaacgtggaaacggatgaggtggccgtgctccgactgaaggagttctatgccagttgcctgctctttcgacaggtaccggaggatctctacagacgtcagttgcaggaaattgtggctgatttcggacgcatgcccgtcctaagtctcccgggtcaggagtggccagccgaggagttcgattggctggacacagtggcgcgaataaagcggcagtacggctttgacatccttttgctctttcagcagtcggcggatcgcatatacgtgggacagccgaagcagattcttccggaggccaacagaaaggccgtggcagaagatatagccaatcatttggaacgtcacttgggtgtggatcccaaagtggccgtaacaacggcaagggaaattacagagtttgagcaaaagattgccgccattatggtggatcgtcgagttggagtgatgtccaaattgtacactccaagtgacgcggactacgttgatgtctcaaaactcacccagttcgtggaaactgtccttgaccgggagttgttggccaacgagtccctatatcagcatgttcctgattatcttatgaaaatagatgagctggtgacggagacaccaccacacgtactggctaactatgtcttcaatgagcttttaaagcacttctactacgagcgagcggaatccgttgtggagcagtgcgtcagtcgggtcagggatctctttggcgagctccttgaccacatgttgttcgagcagtatgaagatgaaggtaccctgaaggatatatatgtagtctggcagcagttacagcgcagctttagaggtgtgttacaaaactcttcagcaaattggttggttccggagacgagggaacaactactagagcagttgaatacaaccagtctggtgatcaatggatatgccgaagtcaatttcacgcagcgatatgaggagctgcacctgaaacctagagattatcttcacaatctgaggaccatacttaaccatcagagtttgagggtcaaggtgaagactcagacatcggtcacctatgatcctgtgggaaagagagtcctgctaccagttgctctgctccaaccgaacttcctgtggtcccgctactatccaaaagcagtgcggtatggcagtctgggcaccttgctggcccagcagttggcacacagcttggaagatgcatccaagtgggatgccaagtcctttgctgagtactccaaaaggaagtcctgcttcaaggagcagtacggtagactgcggctcaatggacattacttgccggagagcgatctgcaggcggagaacatagccgacaatctggccattcaggtggcctaccatgcctaccgaaggcttctggcggaactggacccatccttcttgggctccgagtccttgccacaactcaaccttggctcccgaagactgttcttcctcagctttgcccagttatggtgcaatgatgccaatgaacagttccgggacaagcaatccctgtttttgggcactcccaatgccctccgcgtgctgggagcactatcgaactttagagcctttggacgggactttaactgcgggaccgctagcaggatgacctctccccagaagtgtcagctcttcgccgttaacctggattag

SEQ ID NO: 35253 - protein, 671 aa, DROSOPHILA
MENFGIAHALLQLLLLHLVGSGRGHLLTGQPAIDLRIQAREQLISQSNDSAYVQRLMRLSKSAEMRSYMQQDADACENFYDYSCGNWPQINPANDAYPRETNFVQLLLKAYSHKQQRLMEQPANVETDEVAVLRLKEFYASCLLFRQVPEDLYRRQLQEIVADFGRMPVLSLPGQEWPAEEFDWLDTVARIKRQYGFDILLLFQQSADRIYVGQPKQILPEANRKAVAEDIANHLERHLGVDPKVAVTTAREITEFEQKIAAIMVDRRVGVMSKLYTPSDADYVDVSKLTQFVETVLDRELLANESLYQHVPDYLMKIDELVTETPPHVLANYVFNELLKHFYYERAESVVEQCVSRVRDLFGELLDHMLFEQYEDEGTLKDIYVVWQQLQRSFRGVLQNSSANWLVPETREQLLEQLNTTSLVINGYAEVNFTQRYEELHLKPRDYLHNLRTILNHQSLRVKVKTQTSVTYDPVGKRVLLPVALLQPNFLWSRYYPKAVRYGSLGTLLAQQLAHSLEDASKWDAKSFAEYSKRKSCFKEQYGRLRLNGHYLPESDLQAENIADNLAIQVAYHAYRRLLAELDPSFLGSESLPQLNLGSRRLFFLSFAQLWCNDANEQFRDKQSLFLGTPNALRVLGALSNFRAFGRDFNCGTASRMTSPQKCQLFAVNLD

SEQ ID NO: 35254 - DNA, 2413 bp, DROSOPHILA
gatgtggtggaccatatggtgtaccactcattagagcagcaaaatccctacatagccaacgagatgaggagtctgtgggtggagctgaagtcctccttccgcgaaatgctcagttccccggacatcgaatggctggagaagcagacacgtgaggagttactggaaaaactcaatggtatgtccttcgagatagccggcggtcaggcggtcaacttcgaggagcagttcggcgatctggtggtcagctccgccgattattatggcaatatccaacgcctgctggaggtaaaggccagaattctccgcacggatcttttgcgggagtccagcagcgtatactactaccacggtgtaaccgcgactcctatctatgagacggaaacaaatctggtggtgctaccggtcagctatatgcagcatcgctatctttgggacgatatttatccggcagctcttaagtacggcactctgggtttcaccatggctcacgagatggcccacggattcgatgatctgaaccggctctacgacagcaggggaaacctcaacgacaactggagcacccagaccaaggtgggttttgagctggtcaaaaattgcctggcggaccagttcagtgggatgctgtacggcaacttgcgattgcgaagattgaagtcgcaagctgagagtatagcggacaatgtgggtattcgcattgcgcagtcggcgtactggaaatggttggatcaagtagagatggaggaaacggaaagcctgccgcacatgacgcagtcgccggaacagcttttcttcctcagcgcggctcagttcatgtgctcggatatctatccagaaagacgagcgaacttcgtccgaaacaatttccatccgccatatgaggccagggtattcgccatgatgatcaacagcccagccttcgccgaggcattccagtgcagcaactcgtccaagatgaatcccccaaacaagtgtctgatgtattgatgatttcccctgtctagctgattacgcgtttgtgtatgtactgaataaaatagttccgcttcccaagcattatcatcgcgctcgtactcaccaaagctctggctcacccagatcccgaccatgtccaacttgagcagcgtgtagtagacgttctcgcccttctcgatgttcatgaacaggtggtagacgaagctgccgcaccagggagccaccgatccgaagacgtggcagaaggacaggaacttgtagccactgtcccagggcatcagtccgggcacgatggccaggatgtagaagatgggtatggctaaaatggtaagattaacggaggggaacttttagaaccatttaatgtatgggcttggtgcctatccaactctaagatagatatgatgtcacctatttatatttacataaaatacgcatagtcggaggtagtagagcgtaatatttagatagattattttagattggtcagtactccaacataagcttgactagtttgaagcgaatttttttttgagcacgaattatataagagtgcagttcatattgtataagagctcggagataacatgttgacctaccccagcaccctggacattgtataaacaaatcccgctgataaggtggccgccaccgatcgggagcaattgaaaattagttgagtttaattaggcgcgtgatgatgacgagccgggtgttgtggctctgccttttggtggccatagttccagctatggccaagccatcggatgctggtgatccctttgccgacgacttgacttcggattatgcgaagaaaatcattgtgcaagcgaaagtggccgaaatgaagacaatgatgaagccggaggtatcgccctgcgacgacttctacactcatgcctgtggaaactggcatcgccacaatcctgcccagctattgggcgacgttatgaccgacaacttcaaattaatatccaagggattcgatcgacggctccagcggttgctgcgcgccaatgacctgcaatccgagctggaaaagaagatgcagcgtttctacatgtcctgcaatctggtccatcgcgatgatgtgcactacaagctggccctagagaacgtcatccgggagtacggaacactcccggccttggttggggcccagtggaactcctccgacttcagttggtggcgaacagtggcccagatacagcacaaatacggaaaacagatcattataggcctggagataatgcacgatatccggaacacatcggtgaaccgcgtgtacataagtcagccagattttaagacaattaacactcgcctaacaaatctcatggaggaggtccgcacatccatggatctgcagcaatatttcggtctgagttccagcgttgcaaaacacacagccgagcagctcactgagttggagagaact

SEQ ID NO: 35255 - DNA, 240 bp, DROSOPHILA
atgcgtattttatccatacccatcttctacatcctggccatcgtgcccggactgatgccctgggacagtggctacaagttcctgtccttctgccacgtcttcggatcggtggctccctggtgcggcagcttcgtctaccacctgttcatgaacatcgagaagggcgagaacgtctactacacgctgctcaagttggacatggtcgggatctggtacatacacaaacgcgtaatcagctag

SEQ ID NO: 35256 - protein, 79 aa, DROSOPHILA
MRILSIPIFYILAIVPGLMPWDSGYKFLSFCHVFGSVAPWCGSFVYHLFMNIEKGENVYYTLLKLDMVGIWYIHKRVIS

SEQ ID NO: 35257 - DNA, 2601 bp, DROSOPHILA
ctgggagctcaataaatacttgaggttaatattgcgcactcaattgacataaatgatataaacccaaaccatttcgaattcctactactacgctttctctgtacgcgattcgttgcagtagcgatttgccaggagactgactgtattggttttcacacttgtccaacttgaattcgggtttctaactactgggcactcatcagcaagaaaatgagcggttgagtttcgttcacaactatgcacagattggagctttaactaggcttacactaccactagctcgctagcttgccaaaattaacaaattgcatatctaaaaagttcaactaggaagagattagcttataggtgttcttattgtagatttttcgacgaggtacaaagttgtacgtacgagtatttgaaaataagatgtgttgtcgtaagcacaatgaggtacatgtgtatcaacatcattcaaatcatcgttacaattactcattaatcattattcatgtatcattatggattactcgctatccattgcgcagccgtatttgcaactgaatacccaagagattaccgtgaaaatccgaagacttggttccgaactatcctgccatcctgtcatcctctcatccggccatcatgtcgttcgtctcgtctcgtcccagtaataatataaccttaatgcttaataccacagtcgaagtaagtactatatgtaaatacacacatacagttcatatatgtatggcctatacctacacctagatatacatatgtatattgttactacatcatcttcgctttcttatacacggtatattcaagtagcgttcgtcctcgccccactgcatcgatggatctccgtctggtctcatccggggacttgggctcgccgcctccgccaggcgatgggcgcgatcagggcacggatcaagtgagtccgggcccgccgcctggccaggattatccaaggcaagggaagcagaaccagcggcagcagccaataagcgggtcatagctccacgtgacctagagcctgctcggtggcgttggcggcggtgtggcaagtctgcgtcgacatccactcgaagtccttgatggtggccttaggatatatataaatatgaataccaggagcctttatccctggagtatataacccaccttgtgcatggagtaaacggccacgacgaccagcacatgcattatattgtgggagttcaaatagaagtccaccactccgggaaaccacttctccgggattcgcatcgctcctatggcaccgcccagtatggagacgccgtcctggaacagagggttaatgaccatattagcgagcggtattcgagagcggattggtgtcttgtgtccgctaggaaaagtgctaagcggctctgtccatttactcgaatgtacatatgtatgaaaatgtgacttacaacttcaacctatgcgcaccgagagaggccagccaaaaacgtacagttatagaaaatagcagttagtcaattggaaagcctggacatacgcacctgcaggtagacatgggaaagggccatgtgactgccgcccaccattccacggatgcgcaggaaggtcagaatcgagcgcatggcgaagggcagggcgaagcacaagcgacgctgccagggtgagctggcagttagagcctgtcggggataagggatcgattagagaggattccgcatcaacagccggtgacactcaccttgtagaggccccacagcgagagcacgcagtaggaaacaataatgagccacttgagcacgggggggaagcacagagtggtggctgtgaccaggggcagggcacctgcaaatagaaaccggagagcggaagagattgttagcacacacagtctgtccgccgataaggcggtccagtcggaaaacaaagctcgatcgcgatggaacgcctcccagcttccgcctgcctaatctttgtcaccttggccgtcggttcattggccatccagggtggagtcttcaaggagctaaccacgcctctgggtcagcagatcatgcgtatagccaagtcggcggagatgtgctcctttatggacacctctgtgagtccctgcgacgatttctatggctatgcctgcgggaattatgcgacaataaatgcggcaacctcgcagaaagacaccaatatccggcagcttatgtttgccaactatctgcgtcgggtgaggcaggtgcttaacgagccccggataagtacagatcggccgatggaggtgcgcgtgaagtatttctacgaatcctgcctggacacagcggctttaaggactaaacagcgatcccatctgctcagtgttctaagggagtttggtggaatgccggcggtggagggcaagtcctgggactacgtcggtttcgacgccattgaaatgatggctcagttgctccgccgctacggaaagttgactctactgggtgtctatgtggttccggatcacttcaactcccagattaaacgcctacagttgggccaaaggctcgatctcgctgagagcgatgagtttgccagtctgtggaagaagtatgcgctgaagatgcgtctgcggaacctcctgggtctgtcggagga

SEQ ID NO: 35258 - DNA, 315 bp, DROSOPHILA
atgcgctcgattctgaccttcctgcgcatccgtggaatggtgggcggcagtcacatggccctttcccatgtctacctgcaggacggcgtctccatactgggcggtgccataggagcgatgcgaatcccggagaagtggtttcccggagtggtggacttctatttgaactcccacaatataatgcatgtgctggtcgtcgtggccgtttactccatgcacaaggccaccatcaaggacttcgagtggatgtcgacgcagacttgccacaccgccgccaacgccaccgagcaggctctaggtcacgtggagctatga

SEQ ID NO: 35259 - protein, 104 aa, DROSOPHILA
MRSILTFLRIRGMVGGSHMALSHVYLQDGVSILGGAIGAMRIPEKWFPGVVDFYLNSHNIMHVLVVVAVYSMHKATIKDFEWMSTQTCHTAANATEQALGHVEL

SEQ ID NO: 35260 - DNA, 4317 bp, DROSOPHILA
aactattcttcattagctttgctcagagctggtgcaacgatgtacatcccaaggtgaaggcccttcaggtgtcaaccgacgaccacatgccaggaaagttccgcgttattggaactttatctaactttgaggagttttcaaaggagttcaactgtcacgccggatccgccatgaatcccatcgaaaaatgcatactttactagagtatataataaaaaaaaaactaagcagttgttaactattcactttgtgatttttaagttttggaagggatgagcacttcagtaatggttaatatcggacttaattccatattttcttatcccatacctcaaccttaattcataaagtgatgttgaacaaataaaatataaattcgcctttttacaatgtaggacgtgtcaatgtttttagcgaaatgtggagattctgctagcgtcacaattcggaaacgtgctggttggggcttatattgtttgaggtttacaatagacacacattaactagacgtcatggcagagtaatcaactaccttgacatcaattctatcattcacgtgagtagaacaatatagagagtctttgctgaaattgactttatcagcttaatttaattctattctatttcaaaaatcactgacggaaaagtataacatatccgaatgtaattttataaaatgaaaggttttcgctagtgttatataaccaaagcatatctacagaaaaagattgtagacgagttaagttcagctgtaatataacagctatagtgattgataatgcttccgcgaaaaaatgatttgataaaaattagcaagctgtttgcaatcagcagtgagcaattggaactcagtgtttgagctgagcactgtgtcagagagcacccgataaccccagggtcgccttttgtttaccgagaaccgaggagcggcttgggtttaatggggatggcgatgaactcatcagatcaactgaggcacgacagtcgatcatgggaattaaagcgaagcacaacgcgaagcagttgctctgcatttgcattgctggccacgtcctaagtgcgatggtcgcggctgctcctaccagcgaggaagatctcaaacaggacacgccctacatgaaggaactattgcgtcaggcgaagactgctgagatagagagctttatggaccagaaggcggatccgtgcaacgatttctacgcattctcctgtggcaattataagcgcatcaactcggctttgagcatgcaggtggtcaccactggagtattcgagactctgaccaaaggacttaaccgaaagatcctgaagatgctcaacacaccccacgattcccacgacactccggaagacattaaggtgaagcatttctacgagtcctgtctccagatcaaggagctcaactcgacgtacagcgaaaagctgaagcggctcattgcagaatttggaacgatgccgctgctcgaaggatcctcctggcaggaggacgacttcgactggctgaatactactgctcgcatggcctaccgatacggtataactcccattttcggcattgaggtgaacaaagacttggccagcaatacccggaatcggatatacttgggtcagcaggacttcccgctggaggcgcggtccatgtacgtcgatgatgcaacagcagtatatcgtcagaaatatcgtaataatatccagcgcatcttgcagcgttacctgggcgtgaagatggatttggccaaaaaaacggccaaggaactgattgactttgaggtggacttggctcaaggactggtggacgagagtgaaggactagatgtgggtgaattgacccagttactcacagtggacgaaatccagagaaggtactcccccaccttggatatcgaccgattgctatttgtgagcatgggagagcgcatttcagaccagatctacgaatataacaatcgttatcagcaaaacttggtcgaagtcatcaagcgtacgccgaagcgcactgtagccaactatatatttttccggctgatctgggagtttgtggagacgccttcagattcgccggagaagcagatgaaggcatgcgtggaccttaccaaaaagtactttgccaagaatcttgacaacatgttctatcgtcgctacaacaacgagaaatcctctagagaaatcgacaacatgtggcgtcaattgaagtctacctttaacgagaccctccgttccagtcccgccttgaattggattgagcgacccacccggaatcttgctatggcgaagctacaggcaatgacgctggaggtcaacaactacgcagacgacaacttcaccgaggagtttgccgaactcaatctgcaaagtgacgactacgtggagaatgtgcgatatacaagcctacttggggccaaacagatgcgggagatgcttcacaagccggccaaaccctttgaggcgggctcccaactcagttacaccccggccaacatcctgatagagaacaccatcaaggttccggtggccctgctacaacccttctacatttggtccgatgtctaccccaatgcgattatgttcggaaccctggcctccctaattggacacgagttaatccacggattcgacgacagcgggcggaagttcgatgagaagggaaactcgaaggattggtgggatgagaagtccagcagcaacttcctgaaacgaagggactgcttcaccaagcagtatggcaggtatgtctacgatggcattcagttaaaggagtcaaccgcgcagtcggagaacattgcggacaacggcggaatgcgactggcctacaccgcctaccggaaatggtacgaaaaccagttgacacttcccaatggggctcaggatatgaccaaggagaccctgcccaacctgcgatacaccgccaaacaactattcttcattagctttgctcagagctggtgcaatgatgcacatcccagtgtgaaggcacttcaggtgtcaaccgaccagcacatgcccggaagattccgcgttattggatctttatctaacttcgaggagttctcgaaggagttcaactgcccagccggatccgccatgaatcctagtgagaaatgcatactttactagttagattgacccgaaatgtcattcctcagtttgaccatgtttaccctatttggatttgctaatattgagggtattaaaattatagtttcgagtaagcgcgaagaaattttgttgactttggtcaagaaattcaaattttaaaatctgtgaaagagataaaatgtaaaaattgtactttaaactaatagaagtgatcaacaaaatccatatttagctgagggtgaatgctatctttagttgtccactttcttatgcatgcccaagccaacctcagtcaaggttcattataaattccgacctaatctatttacgtgcctccacttggctttgaccgtgattgttacgagcagttagacgcggcggatcgataattaagccagtggtgacaggtgggtgggaaagggtcggatgtggaaggttgagggcaaacggaactcaccatgtgtcagtatgttgatggactcgttgtgccagtagaacaggctgaggaggcatcctttgaaggtctgaagcggtctgtaaccccggagtacgtaggggttgaactgaagatacgtgggcatgtcctgccagggcagcagttggaccacattcccgtcggatccggaactgctgctgctgctgctggagttgctggcactgctactaggcaccgatgcagctgcagctggtggatgctccgctgcagggactaccgagcctgttgctgatcccgatcccagcaaggcagacgttggcgtggtggaagctttggcggaagacgtggatgatgtggcgggagtatccggctgagtgggttcagtggatgctattgcggttgctgtttccggcgcctccttgcctttcattccgttcagggaatgggtctcagcgggagcacttgggatgcctggagctccacacgcttccacttggccatcaatggcgcgtgtaggcggcgtgggtggcggagtcagcgacatggtctccacggtgctgcccaggcagtcgcatccagtgcttcctcctccaatcctggtctttgtggagctgcccagcagctgctgatcgggtttcaggtcaacggcgactgcagcggcggcggcggcagcggtgtccatgccgtgctaatccctttgatcgttttcgaaatcggtaacggttacggtctcgggctcactttcagttctaatcactgttccagttccggttccggttgcgtgg

SEQ ID NO: 35261 - DNA, 2317 bp, DROSOPHILA
aagcgaagcacaacgcgaagcagttgctctgcatttgcattgctggccacgtcctaagtgcgatggtcgcggctgctcctaccagcgaggaagatctcaaacaggacacgccctacatgaaggaactattgcgtcaggcgaagactgctgagatagagagctttatggaccagaaggcggatccgtgcaacgatttctacgcattctcctgtggcaattataagcgcatcaactcggctttgagcatgcaggtggtcaccactggagtattcgagactctgaccaaaggacttaaccgaaagatcctgaagatgctcaacacaccccacgattcccacgacactccggaagacattaaggtgaagcatttctacgagtcctgtctccagatcaaggagctcaactcgacgtacagcgaaaagctgaagcggctcattgcagaatttggaacgatgccgctgctcgaaggatcctcctggcaggaggacgacttcgactggctgaatactactgctcgcatggcctaccgatacggtataactcccattttcggcattgaggtgaacaaagacttggccagcaatacccggaatcggatatacttgggtcagcaggacttcccgctggaggcgcggtccatgtacgtcgatgatgcaacagcagtatatcgtcagaaatatcgtaataatatccagcgcatcttgcagcgttacctgggcgtgaagatggatttggccaaaaaaacggccaaggaactgattgactttgaggtggacttggctcaaggactggtggacgagagtgaaggactagatgtgggtgaattgacccagttactcacagtggacgaaatccagagaaggtactcccccaccttggatatcgaccgattgctatttgtgagcatgggagagcgcatttcagaccagatctacgaatataacaatcgttatcagcaaaacttggtcgaagtcatcaagcgtacgccgaagcgcactgtagccaactatatatttttccggctgatctgggagtttgtggagacgccttcagattcgccggagaagcagatgaaggcatgcgtggaccttaccaaaaagtactttgccaagaatcttgacaacatgttctatcgtcgctacaacaacgagaaatcctctagagaaatcgacaacatgtggcgtcaattgaagtctacctttaacgagaccctccgttccagtcccgccttgaattggattgagcgacccacccggaatcttgctatggcgaagctacaggcaatgacgctggaggtcaacaactacgcagacgacaacttcaccgaggagtttgccgaactcaatctgcaaagtgacgactacgtggagaatgtgcgatatacaagcctacttggggccaaacagatgcgggagatgcttcacaagccggccaaaccctttgaggcgggctcccaactcagttacaccccggccaacatcctgatagagaacaccatcaaggttccggtggccctgctacaacccttctacatttggtccgatgtctaccccaatgcgattatgttcggaaccctggcctccctaattggacacgagttaatccacggattcgacgacagcgggcggaagttcgatgagaagggaaactcgaaggattggtgggatgagaagtccagcagcaacttcctgaaacgaagggactgcttcaccaagcagtatggcaggtatgtctacgatggcattcagttaaaggagtcaaccgcgcagtcggagaacattgcggacaacggcggaatgcgactggcctacaccgcctaccggaaatggtacgaaaaccagttgacacttcccaatggggctcaggatatgaccaaggagaccctgcccaacctgcgatacaccgccaaacaactattcttcattagctttgctcagagctggtgcaatgatgcacatcccagtgtgaaggcacttcaggtgtcaaccgaccagcacatgcccggaagattccgcgttattggatctttatctaacttcgaggagttctcgaaggagttcaactgcccagccggatccgccatgaatcctagtgagaaatgcatactttactagttagattgacccgaaatgtcattcctcagtttgaccatgtttaccctatttggatttgctaatattgagggtattaaaattatagtttcgagtaagcgcgaagaaattttgttgactttggtcaagaaattcaaattttaaaatctgtgaaagagataaaatgtaaaaattgtactttaaactaatagaagtgatcaacaaaa

SEQ ID NO: 35262 - protein, 683 aa, DROSOPHILA
MVAAAPTSEEDLKQDTPYMKELLRQAKTAEIESFMDQKADPCNDFYAFSCGNYKRINSALSMQVVTTGVFETLTKGLNRKILKMLNTPHDSHDTPEDIKVKHFYESCLQIKELNSTYSEKLKRLIAEFGTMPLLEGSSWQEDDFDWLNTTARMAYRYGITPIFGIEVNKDLASNTRNRIYLGQQDFPLEARSMYVDDATAVYRQKYRNNIQRILQRYLGVKMDLAKKTAKELIDFEVDLAQGLVDESEGLDVGELTQLLTVDEIQRRYSPTLDIDRLLFVSMGERISDQIYEYNNRYQQNLVEVIKRTPKRTVANYIFFRLIWEFVETPSDSPEKQMKACVDLTKKYFAKNLDNMFYRRYNNEKSSREIDNMWRQLKSTFNETLRSSPALNWIERPTRNLAMAKLQAMTLEVNNYADDNFTEEFAELNLQSDDYVENVRYTSLLGAKQMREMLHKPAKPFEAGSQLSYTPANILIENTIKVPVALLQPFYIWSDVYPNAIMFGTLASLIGHELIHGFDDSGRKFDEKGNSKDWWDEKSSSNFLKRRDCFTKQYGRYVYDGIQLKESTAQSENIADNGGMRLAYTAYRKWYENQLTLPNGAQDMTKETLPNLRYTAKQLFFISFAQSWCNDAHPSVKALQVSTDQHMPGRFRVIGSLSNFEEFSKEFNCPAGSAMNPSEKCILY

SEQ ID NO: 35263 - DNA, 4103 bp, DROSOPHILA
gggataggcatcgttggccggattgatctggggccaatttccgcagctgtagtcgtagaagttttcgcaggcatccgcgtcctgctgcatatagctgcgcatttcggcggacttggacagacgcatcagtcgctggacataggcgctgtcattggactgcgagatcagctgctcccgtgcctggatgcgcaggtcaatggccggttgaccagttagcaggtgacctcgaccacttcccaccagatggagcagcagtagctggagcagggcatgtgcgataccaaagttctccatggcgaacactccgagagcgactgaacgggcagctcgacaagacgcacttccgcacccactctctgcgactgagattgagattaagctgcgctgagaaaaatctgaacgcagtagatgatccgacttaaaattgttatatccatctttcaatttcaatttgttaatatgatatattgtatatattttccggttgagaaatcttgccaattggtttatatgccatatattattgtatgcatgggtttgaaatttctttcagtgcagcacggggtggaagcgctgcccaagatcttccttatcacccgctcggtcgtgggtcccatatttctatcccaagttagaggggagtgcgtgattggaatacagatcacgttatagtgtaataactgggtggaatacctatgggcacttaatgccgtcagtaactagtattggcggttaattgctttgctttgcattttattatagtcgatagcattacgattatatactagagaagagagtacattgaatttaaacgggtttcccttctttgcatgaacttcgacgattctcatttttaaatctatgcaaaaccacggagatttggttaccacctctaagttataagaagaaagaaagcgataagcctaagcgctcaattccattttcggcagcttagctaataagcttggttcattaaaatatttcattttaaaagagacacatgacgatgaaattgttctgcatttggattgctagtcacgttctcagtgttctggttttagcggcccccacaagcgaggatgtactcaaccaggacacgccttacatgaaggaactaatgcgtcaagccaaagctgctgagatcgagagctttatgaaccagaaggtggatccgtgcaaggatttctacgcattctcctgtggcaactataaacgcatcaactcggctttgaacatgcgggtattgactactggagtgttcgagactttgacaaaagggctcaaccgaaagatcctgaagatgctcaacacaccccatgatagccacgacactccggaggacattcaggtgaagcacttctacgagtcctgtctccagatcaaggagctcaactcgacgtacagcgaaaagctgaagcggctcattgcagaatttggaacgatgccgctgctggaaggatcctcctggcaggaggacgactttgactggctgaatactactgctcgcatggcccaccgatacggaataatgtccattataggcgttggagtcgccacggacttcgccaataaccaaaaaaacattatttacataaaccagcaggagttcccattaaagacacgttccatgtatatggataacgaaacggccatctaccgccaaaattatcagaataatatccagctcattttggagaaatacttaggtgttaaggacgaattggcaagaaaagcggccaaggaaatgtttgaattcgaggtggacttggcccatggactggtggacaacaacaaacacctgaacctaagggacctgatcgaacttctgactgtcgctgaattgcgcgagagatatgcccccaccttggacaccgaccaattgatattcgtgagcatgggagagaagatttccgacaaggtctacgaatacaacagacgttatcagcaaaatttggtcgaggtgatcgagcgtacgcccaagagcactgtggccaactatttattccttcgcctgatctgggagtttatacagaaaccaagtggagtggcggaaaagccgacagaggcctgtgtggacttcaccaagacgtacttcgcgaagaatctggacaacatgatctaccgccgctacaaaaacgagaaatcctccagagaaatcgacagcatgtggcatcaattgaagtccacctttaaggagaccttgctatccagtccggctctagattggatcgagccatccactcgaagtcttgccatcgctaagctggaggctatgaccctggaggtcaacaactacgttaaggagaactttaccgaggaatttgcggacctcaatttgcaaaacacggactgcgtagagaatttgcgacaggttcagatgctgcaagcaaagcaaatgcggcaattgtatcaccaaccggctaagccactggaagcgggcgaacttttgagctataccccaagcaacatcctgctggagaacagcattaaggttccggtggccctgctacaacccttctacatttggtccgatgtctaccccaatgcggttatgttcggaaccctggcctacctaattggacacgagttaatccacggattcgacgacagcggacggaagtttgacgagaaggggaactcaaaggattggtgggatgagaagtccagcagcaacttcctaaaacgacgggattgcttcaccaagcagtatggcaggtatgtctacgatggcattcagttgaaggagtcaaccgcgcagtcggagaacattgcggacaacggcggaatgcgactggcctacaccgcctaccggaaatggtacgaaaaccagttgacacttcctaatggggctcaggatatgaccaaggagaccctgcccaacctgcgatacaccgccaaacaactattcttcattagctttgctcagagctggtgcaacgatgtacatcccaaggtgaaggcccttcaggtgtcaaccgacgaccacatgccaggaaagttccgcgttattggaactttatctaactttgaggagttttcaaaggagttcaactgtcacgccggatccgccatgaatcccatcgaaaaatgcatactttactagagtatataataaaaaaaaaactaagcagttgttaactattcactttgtgatttttaagttttggaagggatgagcacttcagtaatggttaatatcggacttaattccatattttcttatcccatacctcaaccttaattcataaagtgatgttgaacaaataaaatataaattcgcctttttacaatgtaggacgtgtcaatgtttttagcgaaatgtggagattctgctagcgtcacaattcggaaacgtgctggttggggcttatattgtttgaggtttacaatagacacacattaactagacgtcatggcagagtaatcaactaccttgacatcaattctatcattcacgtgagtagaacaatatagagagtctttgctgaaattgactttatcagcttaatttaattctattctatttcaaaaatcactgacggaaaagtataacatatccgaatgtaattttataaaatgaaaggttttcgctagtgttatataaccaaagcatatctacagaaaaagattgtagacgagttaagttcagctgtaatataacagctatagtgattgataatgcttccgcgaaaaaatgatttgataaaaattagcaagctgtttgcaatcagcagtgagcaattggaactcagtgtttgagctgagcactgtgtcagagagcacccgataaccccagggtcgccttttgtttaccgagaaccgaggagcggcttgggtttaatggggatggcgatgaactcatcagatcaactgaggcacgacagtcgatcatgggaattaaagcgaagcacaacgcgaagcagttgctctgcatttgcattgctggccacgtcctaagtgcgatggtcgcggctgctcctaccagcgaggaagatctcaaacaggacacgccctacatgaaggaactattgcgtcaggcgaagactgctgagatagagagctttatggaccagaaggcggatccgtgcaacgatttctacgca

SEQ ID NO: 35264 - DNA, 2103 bp, DROSOPHILA
atgacgatgaaattgttctgcatttggattgctagtcacgttctcagtgttctggttttagcggcccccacaagcgaggatgtactcaaccaggacacgccttacatgaaggaactaatgcgtcaagccaaagctgctgagatcgagagctttatgaaccagaaggtggatccgtgcaaggatttctacgcattctcctgtggcaactataaacgcatcaactcggctttgaacatgcgggtattgactactggagtgttcgagactttgacaaaagggctcaaccgaaagatcctgaagatgctcaacacaccccatgatagccacgacactccggaggacattcaggtgaagcacttctacgagtcctgtctccagatcaaggagctcaactcgacgtacagcgaaaagctgaagcggctcattgcagaatttggaacgatgccgctgctggaaggatcctcctggcaggaggacgactttgactggctgaatactactgctcgcatggcccaccgatacggaataatgtccattataggcgttggagtcgccacggacttcgccaataaccaaaaaaacattatttacataaaccagcaggagttcccattaaagacacgttccatgtatatggataacgaaacggccatctaccgccaaaattatcagaataatatccagctcattttggagaaatacttaggtgttaaggacgaattggcaagaaaagcggccaaggaaatgtttgaattcgaggtggacttggcccatggactggtggacaacaacaaacacctgaacctaagggacctgatcgaacttctgactgtcgctgaattgcgcgagagatatgcccccaccttggacaccgaccaattgatattcgtgagcatgggagagaagatttccgacaaggtctacgaatacaacagacgttatcagcaaaatttggtcgaggtgatcgagcgtacgcccaagagcactgtggccaactatttattccttcgcctgatctgggagtttatacagaaaccaagtggagtggcggaaaagccgacagaggcctgtgtggacttcaccaagacgtacttcgcgaagaatctggacaacatgatctaccgccgctacaaaaacgagaaatcctccagagaaatcgacagcatgtggcatcaattgaagtccacctttaaggagaccttgctatccagtccggctctagattggatcgagccatccactcgaagtcttgccatcgctaagctggaggctatgaccctggaggtcaacaactacgttaaggagaactttaccgaggaatttgcggacctcaatttgcaaaacacggactgcgtagagaatttgcgacaggttcagatgctgcaagcaaagcaaatgcggcaattgtatcaccaaccggctaagccactggaagcgggcgaacttttgagctataccccaagcaacatcctgctggagaacagcattaaggttccggtggccctgctacaacccttctacatttggtccgatgtctaccccaatgcggttatgttcggaaccctggcctacctaattggacacgagttaatccacggattcgacgacagcggacggaagtttgacgagaaggggaactcaaaggattggtgggatgagaagtccagcagcaacttcctaaaacgacgggattgcttcaccaagcagtatggcaggtatgtctacgatggcattcagttgaaggagtcaaccgcgcagtcggagaacattgcggacaacggcggaatgcgactggcctacaccgcctaccggaaatggtacgaaaaccagttgacacttcctaatggggctcaggatatgaccaaggagaccctgcccaacctgcgatacaccgccaaacaactattcttcattagctttgctcagagctggtgcaacgatgtacatcccaaggtgaaggcccttcaggtgtcaaccgacgaccacatgccaggaaagttccgcgttattggaactttatctaactttgaggagttttcaaaggagttcaactgtcacgccggatccgccatgaatcccatcgaaaaatgcatactttactag

SEQ ID NO: 35265 - protein, 700 aa, DROSOPHILA
MTMKLFCIWIASHVLSVLVLAAPTSEDVLNQDTPYMKELMRQAKAAEIESFMNQKVDPCKDFYAFSCGNYKRINSALNMRVLTTGVFETLTKGLNRKILKMLNTPHDSHDTPEDIQVKHFYESCLQIKELNSTYSEKLKRLIAEFGTMPLLEGSSWQEDDFDWLNTTARMAHRYGIMSIIGVGVATDFANNQKNIIYINQQEFPLKTRSMYMDNETAIYRQNYQNNIQLILEKYLGVKDELARKAAKEMFEFEVDLAHGLVDNNKHLNLRDLIELLTVAELRERYAPTLDTDQLIFVSMGEKISDKVYEYNRRYQQNLVEVIERTPKSTVANYLFLRLIWEFIQKPSGVAEKPTEACVDFTKTYFAKNLDNMIYRRYKNEKSSREIDSMWHQLKSTFKETLLSSPALDWIEPSTRSLAIAKLEAMTLEVNNYVKENFTEEFADLNLQNTDCVENLRQVQMLQAKQMRQLYHQPAKPLEAGELLSYTPSNILLENSIKVPVALLQPFYIWSDVYPNAVMFGTLAYLIGHELIHGFDDSGRKFDEKGNSKDWWDEKSSSNFLKRRDCFTKQYGRYVYDGIQLKESTAQSENIADNGGMRLAYTAYRKWYENQLTLPNGAQDMTKETLPNLRYTAKQLFFISFAQSWCNDVHPKVKALQVSTDDHMPGKFRVIGTLSNFEEFSKEFNCHAGSAMNPIEKCILY

SEQ ID NO: 35266 - DNA, 4053 bp, DROSOPHILA
gagtatagcggacaatgtgggtattcgcattgcgcagtcggcgtactggaaatggttggatcaagtagagatggaggaaacggaaagcctgccgcacatgacgcagtcgccggaacagcttttcttcctcagcgcggctcagttcatgtgctcggatatctatccagaaagacgagcgaacttcgtccgaaacaatttccatccgccatatgaggccagggtattcgccatgatgatcaacagcccagccttcgccgaggcattccagtgcagcaactcgtccaagatgaatcccccaaacaagtgtctgatgtattgatgatttcccctgtctagctgattacgcgtttgtgtatgtactgaataaaatagttccgcttcccaagcattatcatcgcgctcgtactcaccaaagctctggctcacccagatcccgaccatgtccaacttgagcagcgtgtagtagacgttctcgcccttctcgatgttcatgaacaggtggtagacgaagctgccgcaccagggagccaccgatccgaagacgtggcagaaggacaggaacttgtagccactgtcccagggcatcagtccgggcacgatggccaggatgtagaagatgggtatggctaaaatggtaagattaacggaggggaacttttagaaccatttaatgtatgggcttggtgcctatccaactctaagatagatatgatgtcacctatttatatttacataaaatacgcatagtcggaggtagtagagcgtaatatttagatagattattttagattggtcagtactccaacataagcttgactagtttgaagcgaatttttttttgagcacgaattatataagagtgcagttcatattgtataagagctcggagataacatgttgacctaccccagcaccctggacattgtataaacaaatcccgctgataaggtggccgccaccgatcgggagcaattgaaaattagttgagtttaattaggcgcgtgatgatgacgagccgggtgttgtggctctgccttttggtggccatagttccagctatggccaagccatcggatgctggtgatccctttgccgacgacttgacttcggattatgcgaagaaaatcattgtgcaagcgaaagtggccgaaatgaagacaatgatgaagccggaggtatcgccctgcgacgacttctacactcatgcctgtggaaactggcatcgccacaatcctgcccagctattgggcgacgttatgaccgacaacttcaaattaatatccaagggattcgatcgacggctccagcggttgctgcgcgccaatgacctgcaatccgagctggaaaagaagatgcagcgtttctacatgtcctgcaatctggtccatcgcgatgatgtgcactacaagctggccctagagaacgtcatccgggagtacggaacactcccggccttggttggggcccagtggaactcctccgacttcagttggtggcgaacagtggcccagatacagcacaaatacggaaaacagatcattataggcctggagataatgcacgatatccggaacacatcggtgaaccgcgtgtacataagtcagccagattttaagacaattaacactcgcctaacaaatctcatggaggaggtccgcacatccatggatctgcagcaatatttcggtctgagttccagcgttgcaaaacacacagccgagcagctcactgagttggagagaactttctcatccggtggctctggtgcagcgactctgcaggaatcattgtccctctatacggtggccgatcttcaagagaaatacagcgaccatctgaatttcaccgaattcctgggcctgatcctcggcgaggagaacataccgaagtcgttgtacatctatgacgaggagtacctggacaaagcacttctgaccatgcgaagcacaccactggccacacaggcaaactacgttttgtggaagctgctcgaggactttctggtggacgcccagcccaaggatatggttaaatggtgcaccgaatccactaagaagtacttcggaaaactcgccgagcacgcagtttacaagcgatatcgcaacccggacgtggagtcggaagttcacaagatctgggatcagatcaaaggaatctttaggcaacgtctgttgggggacaaactggactggatatccaatgccaccaggacgttggccatcgaaaagctagaacgcatgcatctgaacatcaactcctacgacgaggagaactttgagaatgtatatggagaggtgttcatcgatcgcctcaattacgtttcaaatgttcagcagctgctcattgccaagggcatcagatttgtggcaaggattaatcagccggcagactccgtagatgccacagagctactcgggtttactcccgcctacaacattcaggagaacaacatcacgatcccggtggccctgctgcagccacgctatttctggggtgaccagtatccggaggcgttgaagtacgccactctaggctatctcctcgcccacgagatgctacacggcttcgacgatgatggaaggcagtacgatgcgtccggtaacctggcgccttggtgggacttgaaatcccgctacgagtttgaggaacggcgcaagtgcttccaagcccagtatcacgagtaccaatacggtggatcaaagctgccggagagcaaggatcagtcagagaacatagcggatagtggaggccttaaattggcctacgccgcctacgaattgtggctgggtcagcaatccgaggaggtgcttcaacgtgaaaccatggagggtctgcccttcaacagtcgccagcttttcttcttgggatacgcacaattgttgtgcgacgacgttcagtttctcttccagccctgggtgagtcaatcggacaggcatgcacccagcaagtaccgggtgattggaccgctgtccaattttcaggagttcccttgggtcttcaactgctcgcaatcggcgcccatggatccggagtacaagtgcgccatctactgataaagccctatatagttcattcgttttttaattaactaattttgctttgatgttgcctaacttggtaagctcaaatgaatgaatgaaaaataaacaaacaaatataatagcatctttcaattggcataaatgtagttctggcatttatatataataaatgcttaatgtgtatagaaatgtaaacaaagtagctttatcaatgagagtgcgtagaaacatatagacacggtcatggctatatatgcgctctgataattgctgttgacaatatatatgtgtatattaaattgtcgagaagtaaccattcaatgacccaacatttcagtgttagtttttattatgggtagaatttattgtagttcagagtactttaaatgatgtcctaactaatccaggttaacggcgaagagctgacacttctggggagaggtcatcctgctagcggtcccgcagttaaagtcccgtccaaaggctctaaagttcgatagtgctcccagcacgcggagggcattgggagtgcccaaaaacagggattgcttgtcccggaactgttcattggcatcattgcaccataactgggcaaagctgaggaagaacagtcttcgggagccaaggttgagttgtggcaaggactcggagcccaagaaggatgggtccagttccgccagaagccttcggtaggcatggtaggccacctgaatggccagattgtcggctatgttctccgcctgcagatcgctctccggcaagtaatgtccattgagccgcagtctaccgtactgctccttgaagcaggacttccttttggagtactcagcaaaggacttggcatcccacttggatgcatcttccaagctgtgtgccaactgctgggccagcaaggtgcccagactgccataccgcactgcttttggatagtagcgggaccacaggaagttcggttggagcagagcaactggtagcaggactctctttcccacaggatcataggtgaccgatg

SEQ ID NO: 35267 - DNA, 2053 bp, DROSOPHILA
cgtgatgatgacgagccgggtgttgtggctctgccttttggtggccatagttccagctatggccaagccatcggatgctggtgatccctttgccgacgacttgacttcggattatgcgaagaaaatcattgtgcaagcgaaagtggccgaaatgaagacaatgatgaagccggaggtatcgccctgcgacgacttctacactcatgcctgtggaaactggcatcgccacaatcctgcccagctattgggcgacgttatgaccgacaacttcaaattaatatccaagggattcgatcgacggctccagcggttgctgcgcgccaatgacctgcaatccgagctggaaaagaagatgcagcgtttctacatgtcctgcaatctggtccatcgcgatgatgtgcactacaagctggccctagagaacgtcatccgggagtacggaacactcccggccttggttggggcccagtggaactcctccgacttcagttggtggcgaacagtggcccagatacagcacaaatacggaaaacagatcattataggcctggagataatgcacgatatccggaacacatcggtgaaccgcgtgtacataagtcagccagattttaagacaattaacactcgcctaacaaatctcatggaggaggtccgcacatccatggatctgcagcaatatttcggtctgagttccagcgttgcaaaacacacagccgagcagctcactgagttggagagaactttctcatccggtggctctggtgcagcgactctgcaggaatcattgtccctctatacggtggccgatcttcaagagaaatacagcgaccatctgaatttcaccgaattcctgggcctgatcctcggcgaggagaacataccgaagtcgttgtacatctatgacgaggagtacctggacaaagcacttctgaccatgcgaagcacaccactggccacacaggcaaactacgttttgtggaagctgctcgaggactttctggtggacgcccagcccaaggatatggttaaatggtgcaccgaatccactaagaagtacttcggaaaactcgccgagcacgcagtttacaagcgatatcgcaacccggacgtggagtcggaagttcacaagatctgggatcagatcaaaggaatctttaggcaacgtctgttgggggacaaactggactggatatccaatgccaccaggacgttggccatcgaaaagctagaacgcatgcatctgaacatcaactcctacgacgaggagaactttgagaatgtatatggagaggtgttcatcgatcgcctcaattacgtttcaaatgttcagcagctgctcattgccaagggcatcagatttgtggcaaggattaatcagccggcagactccgtagatgccacagagctactcgggtttactcccgcctacaacattcaggagaacaacatcacgatcccggtggccctgctgcagccacgctatttctggggtgaccagtatccggaggcgttgaagtacgccactctaggctatctcctcgcccacgagatgctacacggcttcgacgatgatggaaggcagtacgatgcgtccggtaacctggcgccttggtgggacttgaaatcccgctacgagtttgaggaacggcgcaagtgcttccaagcccagtatcacgagtaccaatacggtggatcaaagctgccggagagcaaggatcagtcagagaacatagcggatagtggaggccttaaattggcctacgccgcctacgaattgtggctgggtcagcaatccgaggaggtgcttcaacgtgaaaccatggagggtctgcccttcaacagtcgccagcttttcttcttgggatacgcacaattgttgtgcgacgacgttcagtttctcttccagccctgggtgagtcaatcggacaggcatgcacccagcaagtaccgggtgattggaccgctgtccaattttcaggagttcccttgggtcttcaactgctcgcaatcggcgcccatggatccggagtacaagtgcgccatctactga

SEQ ID NO: 35268 - protein, 682 aa, DROSOPHILA
MMTSRVLWLCLLVAIVPAMAKPSDAGDPFADDLTSDYAKKIIVQAKVAEMKTMMKPEVSPCDDFYTHACGNWHRHNPAQLLGDVMTDNFKLISKGFDRRLQRLLRANDLQSELEKKMQRFYMSCNLVHRDDVHYKLALENVIREYGTLPALVGAQWNSSDFSWWRTVAQIQHKYGKQIIIGLEIMHDIRNTSVNRVYISQPDFKTINTRLTNLMEEVRTSMDLQQYFGLSSSVAKHTAEQLTELERTFSSGGSGAATLQESLSLYTVADLQEKYSDHLNFTEFLGLILGEENIPKSLYIYDEEYLDKALLTMRSTPLATQANYVLWKLLEDFLVDAQPKDMVKWCTESTKKYFGKLAEHAVYKRYRNPDVESEVHKIWDQIKGIFRQRLLGDKLDWISNATRTLAIEKLERMHLNINSYDEENFENVYGEVFIDRLNYVSNVQQLLIAKGIRFVARINQPADSVDATELLGFTPAYNIQENNITIPVALLQPRYFWGDQYPEALKYATLGYLLAHEMLHGFDDDGRQYDASGNLAPWWDLKSRYEFEERRKCFQAQYHEYQYGGSKLPESKDQSENIADSGGLKLAYAAYELWLGQQSEEVLQRETMEGLPFNSRQLFFLGYAQLLCDDVQFLFQPWVSQSDRHAPSKYRVIGPLSNFQEFPWVFNCSQSAPMDPEYKCAIY

SEQ ID NO: 35269 - DNA, 4046 bp, DROSOPHILA
ggatcaagtgagtccgggcccgccgcctggccaggattatccaaggcaagggaagcagaaccagcggcagcagccaataagcgggtcatagctccacgtgacctagagcctgctcggtggcgttggcggcggtgtggcaagtctgcgtcgacatccactcgaagtccttgatggtggccttaggatatatataaatatgaataccaggagcctttatccctggagtatataacccaccttgtgcatggagtaaacggccacgacgaccagcacatgcattatattgtgggagttcaaatagaagtccaccactccgggaaaccacttctccgggattcgcatcgctcctatggcaccgcccagtatggagacgccgtcctggaacagagggttaatgaccatattagcgagcggtattcgagagcggattggtgtcttgtgtccgctaggaaaagtgctaagcggctctgtccatttactcgaatgtacatatgtatgaaaatgtgacttacaacttcaacctatgcgcaccgagagaggccagccaaaaacgtacagttatagaaaatagcagttagtcaattggaaagcctggacatacgcacctgcaggtagacatgggaaagggccatgtgactgccgcccaccattccacggatgcgcaggaaggtcagaatcgagcgcatggcgaagggcagggcgaagcacaagcgacgctgccagggtgagctggcagttagagcctgtcggggataagggatcgattagagaggattccgcatcaacagccggtgacactcaccttgtagaggccccacagcgagagcacgcagtaggaaacaataatgagccacttgagcacgggggggaagcacagagtggtggctgtgaccaggggcagggcacctgcaaatagaaaccggagagcggaagagattgttagcacacacagtctgtccgccgataaggcggtccagtcggaaaacaaagctcgatcgcgatggaacgcctcccagcttccgcctgcctaatctttgtcaccttggccgtcggttcattggccatccagggtggagtcttcaaggagctaaccacgcctctgggtcagcagatcatgcgtatagccaagtcggcggagatgtgctcctttatggacacctctgtgagtccctgcgacgatttctatggctatgcctgcgggaattatgcgacaataaatgcggcaacctcgcagaaagacaccaatatccggcagcttatgtttgccaactatctgcgtcgggtgaggcaggtgcttaacgagccccggataagtacagatcggccgatggaggtgcgcgtgaagtatttctacgaatcctgcctggacacagcggctttaaggactaaacagcgatcccatctgctcagtgttctaagggagtttggtggaatgccggcggtggagggcaagtcctgggactacgtcggtttcgacgccattgaaatgatggctcagttgctccgccgctacggaaagttgactctactgggtgtctatgtggttccggatcacttcaactcccagattaaacgcctacagttgggccaaaggctcgatctcgctgagagcgatgagtttgccagtctgtggaagaagtatgcgctgaagatgcgtctgcggaacctcctgggtctgtcggaggagctagctagaaagactgctgaggagataatagagctggagttggaactatcgcgcagtgcttttgaccatagaatgaaccgtgatccgcgactgatgcgccatctgaccatgctgtccaacatgagcgatgcttacggaccgattcttaacgtgactcgctttgtgacctcctggttgggttccgaatacaatcttccggtttttgaatcagttcctagctaccttttccaggtaaagaagatcctgctgagcactcccaaccatgtggtggccaactatatgctgtccagtctgttgaccgactttgagatcacggcgaatgaagagcaacagaaagtgatctgtcacgagcggatcaccgagctttttcccgatgtggtggaccatatggtgtaccactcattagagcagcaaaatccctacatagccaacgagatgaggagtctgtgggtggagctgaagtcctccttccgcgaaatgctcagttccccggacatcgaatggctggagaagcagacacgtgaggagttactggaaaaactcaatggtatgtccttcgagatagccggcggtcaggcggtcaacttcgaggagcagttcggcgatctggtggtcagctccgccgattattatggcaatatccaacgcctgctggaggtaaaggccagaattctccgcacggatcttttgcgggagtccagcagcgtatactactaccacggtgtaaccgcgactcctatctatgagacggaaacaaatctggtggtgctaccggtcagctatatgcagcatcgctatctttgggacgatatttatccggcagctcttaagtacggcactctgggtttcaccatggctcacgagatggcccacggattcgatgatctgaaccggctctacgacagcaggggaaacctcaacgacaactggagcacccagaccaaggtgggttttgagctggtcaaaaattgcctggcggaccagttcagtgggatgctgtacggcaacttgcgattgcgaagattgaagtcgcaagctgagagtatagcggacaatgtgggtattcgcattgcgcagtcggcgtactggaaatggttggatcaagtagagatggaggaaacggaaagcctgccgcacatgacgcagtcgccggaacagcttttcttcctcagcgcggctcagttcatgtgctcggatatctatccagaaagacgagcgaacttcgtccgaaacaatttccatccgccatatgaggccagggtattcgccatgatgatcaacagcccagccttcgccgaggcattccagtgcagcaactcgtccaagatgaatcccccaaacaagtgtctgatgtattgatgatttcccctgtctagctgattacgcgtttgtgtatgtactgaataaaatagttccgcttcccaagcattatcatcgcgctcgtactcaccaaagctctggctcacccagatcccgaccatgtccaacttgagcagcgtgtagtagacgttctcgcccttctcgatgttcatgaacaggtggtagacgaagctgccgcaccagggagccaccgatccgaagacgtggcagaaggacaggaacttgtagccactgtcccagggcatcagtccgggcacgatggccaggatgtagaagatgggtatggctaaaatggtaagattaacggaggggaacttttagaaccatttaatgtatgggcttggtgcctatccaactctaagatagatatgatgtcacctatttatatttacataaaatacgcatagtcggaggtagtagagcgtaatatttagatagattattttagattggtcagtactccaacataagcttgactagtttgaagcgaatttttttttgagcacgaattatataagagtgcagttcatattgtataagagctcggagataacatgttgacctaccccagcaccctggacattgtataaacaaatcccgctgataaggtggccgccaccgatcgggagcaattgaaaattagttgagtttaattaggcgcgtgatgatgacgagccgggtgttgtggctctgccttttggtggccatagttccagctatggccaagccatcggatgctggtgatccctttgccgacgacttgacttcggattatgcgaagaaaatcattgtgcaagcgaaagtggccgaaatgaagacaatgatgaagccggaggtatcgccctgcgacgacttctacactcatgcctgtggaaactggcatcgccacaatcctgcccagctattgggcgacgttatgaccgacaacttcaaattaatatccaagggattcgatcgacggctccagcggttgctgcgc

SEQ ID NO: 35270 - DNA, 2046 bp, DROSOPHILA
atggaacgcctcccagcttccgcctgcctaatctttgtcaccttggccgtcggttcattggccatccagggtggagtcttcaaggagctaaccacgcctctgggtcagcagatcatgcgtatagccaagtcggcggagatgtgctcctttatggacacctctgtgagtccctgcgacgatttctatggctatgcctgcgggaattatgcgacaataaatgcggcaacctcgcagaaagacaccaatatccggcagcttatgtttgccaactatctgcgtcgggtgaggcaggtgcttaacgagccccggataagtacagatcggccgatggaggtgcgcgtgaagtatttctacgaatcctgcctggacacagcggctttaaggactaaacagcgatcccatctgctcagtgttctaagggagtttggtggaatgccggcggtggagggcaagtcctgggactacgtcggtttcgacgccattgaaatgatggctcagttgctccgccgctacggaaagttgactctactgggtgtctatgtggttccggatcacttcaactcccagattaaacgcctacagttgggccaaaggctcgatctcgctgagagcgatgagtttgccagtctgtggaagaagtatgcgctgaagatgcgtctgcggaacctcctgggtctgtcggaggagctagctagaaagactgctgaggagataatagagctggagttggaactatcgcgcagtgcttttgaccatagaatgaaccgtgatccgcgactgatgcgccatctgaccatgctgtccaacatgagcgatgcttacggaccgattcttaacgtgactcgctttgtgacctcctggttgggttccgaatacaatcttccggtttttgaatcagttcctagctaccttttccaggtaaagaagatcctgctgagcactcccaaccatgtggtggccaactatatgctgtccagtctgttgaccgactttgagatcacggcgaatgaagagcaacagaaagtgatctgtcacgagcggatcaccgagctttttcccgatgtggtggaccatatggtgtaccactcattagagcagcaaaatccctacatagccaacgagatgaggagtctgtgggtggagctgaagtcctccttccgcgaaatgctcagttccccggacatcgaatggctggagaagcagacacgtgaggagttactggaaaaactcaatggtatgtccttcgagatagccggcggtcaggcggtcaacttcgaggagcagttcggcgatctggtggtcagctccgccgattattatggcaatatccaacgcctgctggaggtaaaggccagaattctccgcacggatcttttgcgggagtccagcagcgtatactactaccacggtgtaaccgcgactcctatctatgagacggaaacaaatctggtggtgctaccggtcagctatatgcagcatcgctatctttgggacgatatttatccggcagctcttaagtacggcactctgggtttcaccatggctcacgagatggcccacggattcgatgatctgaaccggctctacgacagcaggggaaacctcaacgacaactggagcacccagaccaaggtgggttttgagctggtcaaaaattgcctggcggaccagttcagtgggatgctgtacggcaacttgcgattgcgaagattgaagtcgcaagctgagagtatagcggacaatgtgggtattcgcattgcgcagtcggcgtactggaaatggttggatcaagtagagatggaggaaacggaaagcctgccgcacatgacgcagtcgccggaacagcttttcttcctcagcgcggctcagttcatgtgctcggatatctatccagaaagacgagcgaacttcgtccgaaacaatttccatccgccatatgaggccagggtattcgccatgatgatcaacagcccagccttcgccgaggcattccagtgcagcaactcgtccaagatgaatcccccaaacaagtgtctgatgtattga

SEQ ID NO: 35271 - protein, 681 aa, DROSOPHILA
MERLPASACLIFVTLAVGSLAIQGGVFKELTTPLGQQIMRIAKSAEMCSFMDTSVSPCDDFYGYACGNYATINAATSQKDTNIRQLMFANYLRRVRQVLNEPRISTDRPMEVRVKYFYESCLDTAALRTKQRSHLLSVLREFGGMPAVEGKSWDYVGFDAIEMMAQLLRRYGKLTLLGVYVVPDHFNSQIKRLQLGQRLDLAESDEFASLWKKYALKMRLRNLLGLSEELARKTAEEIIELELELSRSAFDHRMNRDPRLMRHLTMLSNMSDAYGPILNVTRFVTSWLGSEYNLPVFESVPSYLFQVKKILLSTPNHVVANYMLSSLLTDFEITANEEQQKVICHERITELFPDVVDHMVYHSLEQQNPYIANEMRSLWVELKSSFREMLSSPDIEWLEKQTREELLEKLNGMSFEIAGGQAVNFEEQFGDLVVSSADYYGNIQRLLEVKARILRTDLLRESSSVYYYHGVTATPIYETETNLVVLPVSYMQHRYLWDDIYPAALKYGTLGFTMAHEMAHGFDDLNRLYDSRGNLNDNWSTQTKVGFELVKNCLADQFSGMLYGNLRLRRLKSQAESIADNVGIRIAQSAYWKWLDQVEMEETESLPHMTQSPEQLFFLSAAQFMCSDIYPERRANFVRNNFHPPYEARVFAMMINSPAFAEAFQCSNSSKMNPPNKCLMY

SEQ ID NO: 35272 - DNA, 2628 bp, DROSOPHILA
tttcgttgatatgctcatgccgtgctcgctcgtttgtctttcaacaagggagccccgcatccacatcaacatccacagccacatatacacccacatgcacaggaacagccacccagccccacagacaccatcaccaccaccaccagtagcaccaccctagccgaagcaaaaagcagaagcagcagaatcagaaggccggcttcctcggcttgcggcgcctcccagactacagagtgtgccttgcatttgtaattgatacacggcgaaaaatcggacatgctctgttcagaatacaaatgaagatcgagaatagttaagaaatttcaagaaattgatggttaagaaatatcttgctaatgccgcggcttacgttgtaatccaacaaatcattgaaacatgaatatttatgaaacacacaaagcatttttaaacgcctcacctgtttggaatttctttattctaaaatgtttttttttttaagattatattttaattggctgttttaacagagaacattgtacttagaatatcccaacgattccacacagcagaaagtgttgcttgtcctagtaaatttcaagaataatttcattctaaattcaacatggctcagttatttaatcgaaagggtagaaactgtttatacatttcggactaagtcgaaagttgccagtgtaatcgttgccatagccaccatatccagcattacggatatatccagcagctcacagagcccggcgatgtggctccagttagagctccgcttggcagtgggctccttggcacttgggtcttgctgaatccatccacgagccaaagtgttcgattgccggcttggccaagtgctgctcattgttccgtgttccagacaaagagagacacccccatatacacactaaggctccataaaaatacacacattcgaatgtatgtattttcctttcgtagccatttgcctatttatagttgaagtatttattgttgccgggccactcgtggcatgctcaagtggccactcgaggggggcactttaattgccacgccgtccatcctggggcaatgtcatggccgagaagtggtaacgcaactggttgtaatccagccgcttcttggactgtagcttttcctgctctcaatttcatttacacattttcccatttcttcgccaacagccatccacaactggcacggcgatgtccggttcggcctggcactggatgtcggcgattccgtggacattgtggaggagtgcaagcactggtaccgcggctcctgcccccgaaagtcgcgggcagtgggtctcttccccaagacctacatacacatcaaggacctctcgaaaatcgatcctgtggtcgccgaatgcacgcaggtcctgcgcgaatggtcggagatctggaagcgtctctatgtggtaagtggttataactcgatctacttgctttatttgataaaatattcctaatctttttcaggatcgcgaagcgtataagttccaaaccctgcgcaaagttatgttttccatattggaaagtcggagggaactccttagtgccaccatgactcaggatcaaactctggagcttcagatggttgtggtttcaaagatagattggggcaatcggtaagtgatcagatattggatattgatatagggatattggaagctaatgaaaacatccgtagcttattgaagatagactttcatggattcgcgtttcatgtaaaaaacttaaagttgttcttgaaggtttcccttgtttataagtactctcaactaatgcgtagtactctagttcaaaatcacagcttttttcataaacaatggaaaatccgaccttagcaattgagaaatccaaaaccacaatcgcttcccgcccactgataagtcctgggtttagctgaaattgtatgtagaatatttattacaactttgaacttagatagcttgggttctcttttgctttatgtaaaatgtgttcttttctagcaataatcacaataattttgttataaacaaaattgcttaaaattacgatatatctgtagactaaatgttaggacaaaaatagcgagagcattgtgtatactcgtttaaatattcataatcatattcctcgtcgtattcgtaccattcgattactacaattttatatagatcaacgtttcgtgagcgtgcgtgagcggtaagcagatatatagctgcataggtattcctcgatccgaactatccatctgtccactatcgagctaactgctaaacttatgtgtatattttaaatggcgcatcattgtcaacgacctaactacgataccaagtagcaaaatcgttatatgggatatcctcgatcgtcgttcaatcatcatcttcaacctacaaattgcacggtctgcctgtgtccctctcgttttttatgatattttttttttcacatttttatttgatttattttttatttgtatcttctcactctgtggctcacctcgtgtcaatgacgaactgcacctgtctttcgcctgcctaggaccatattcaaagattgtttccttataattttgctaaatatatttcgcacagaacattactgagttggatctccgaaagtgcaattgctgattcgttctctt

SEQ ID NO: 35273 - DNA, 456 bp, DROSOPHILA
atgctcaagtggccactcgaggggggcactttaattgccacgccgtccatcctggggcaatccatccacaactggcacggcgatgtccggttcggcctggcactggatgtcggcgattccgtggacattgtggaggagtgcaagcactggtaccgcggctcctgcccccgaaagtcgcgggcagtgggtctcttccccaagacctacatacacatcaaggacctctcgaaaatcgatcctgtggtcgccgaatgcacgcaggtcctgcgcgaatggtcggagatctggaagcgtctctatgtggatcgcgaagcgtataagttccaaaccctgcgcaaagttatgttttccatattggaaagtcggagggaactccttagtgccaccatgactcaggatcaaactctggagcttcagatggttgtggtttcaaagatagattggggcaatcggtaa

SEQ ID NO: 35274 - protein, 151 aa, DROSOPHILA
MLKWPLEGGTLIATPSILGQSIHNWHGDVRFGLALDVGDSVDIVEECKHWYRGSCPRKSRAVGLFPKTYIHIKDLSKIDPVVAECTQVLREWSEIWKRLYVDREAYKFQTLRKVMFSILESRRELLSATMTQDQTLELQMVVVSKIDWGNR

SEQ ID NO: 35275 - DNA, 2261 bp, DROSOPHILA
ggctcagtcgacattgaaagggtcttggtttcccttagtttaaagaaaccgttttatgtgtcatcatatgttgagattgaaatcaaaacgctttactactcccaaaactggtcataactggagacgaaattcaatgtgtgaacttcacttcgaataaccaaatcgatttcgaaatttgctccatttggcattccgttcaatatgcctcataatgccaacgatgcccatatatcaaatggtaatcgacgatgtcttggcaggttcgagagtgccataaatttggagtccacaagatcttgaaagcacagtgttagcagtttgggtgaaacaggatttaaaaataagttattcgttgtgcatctgtagtacacttcagcagattgggattaaaaaacgtattaaattccccaactaaaaccaagtgtctaacccataaaacaaaaacgaagacttacccctttttaggtgcagcagtggaatgaaatgcaatcccacccctaactgaagcctaaaaggcaaatcgtttaaactccctgtttgtctgctgactttgatatacagccttttgagtgtcgctcaaagtaataggaaaaaaaggaagtggagtatgtggaacaaaccctagggcaatgcaaaatgcattttattcggtctgacagtttttgctcttgcaatttcttcaggatagtagcagaatcaatttaggaaatagatttaactaaaataaagcatttggtattcttagatcctaattcattattcattagaattataacttggtaaccataaaaaattagattgttgaaataattaataatacgattttaagtagacaattaaaactaagcaccatgtgagattataagtgtacacacgataactgtgtcagctggagggtaattattattattaaaattccaatggcgtgcttttaaaaaatatatattggacataacaccagcgacctttttaaaaagttttagttgtgcacggatttataatggatgcgaaaataattattcttgcgctggtctccctattctacaaggcaaatggcgccttttacgaactctctgtggccgatgaagaaatatttagcagctgtcccaatcctgagccaggcaccctcgacatccatggactctttgatttttcagagttctccacttccttggaggcggatggactgactgtaagcgggaatcagactttggtgtgggacatccaacgcggggatcgcgtacaggtgattaagtcctaagtgcgaatccgtccataaaatcaagaacagcccaattattccgcagctgttcattaagcttttctactttgatcggggcacgtggacgtcgactgctttctctatactttcccaggatttctgtaaaaccatgtatgataaaagtaatgtactctatgagccatggacaggacatgttatgaacgatgtgaaggatcaatgtataaatgctccaggggtaggattcgctatatcgccatatacagctgatctcaaaccatttcatttcagacgaagctcattctggatacctatttcctcagtttgtccgcctcagttaccgtcccacttcgtgaaggacgctacaagaccaccattaaatttcgagcgttcgactctaagggaactgagagacccaccagcatttgttgcgaagtaataggagatgtttttaagattaggaactaacgtgtagctgatggtttcatacacatttcaacaactgatggaagtaacgttaataaattaaataaaacaacgtacaacaaggtggcttcaagtattaaagcttttggggttgccctgataggattcatttagattagaactacgatcagattgagtacgtatatatattagaaacgtggaggttaattactacaatcaaaacatacagtgctcggtacggggagttcatattcgttttaacaatacttacaatccaggctttgctcaccattttgagccacccaaaccaattcgtgattgcgattgagtaggtattcagcccttgtgagtatctcttcggaacagataacttaagtcttttatacctggcttatcccacatcttctccagctacttttaaaactcttctacttggacagtgaatgatcttcttagatagatggtaaacctaagcccatttgcatcgaattacagcgcgacctatttaaattacgccctttgcaaagaagggaacggttccaatttgcaagaaatgatgggatgtttactaaaa

SEQ ID NO: 35276 - DNA, 261 bp, DROSOPHILA
atggatgcgaaaataattattcttgcgctggtctccctattctacaaggcaaatggcgccttttacgaactctctgtggccgatgaagaaatatttagcagctgtcccaatcctgagccaggcaccctcgacatccatggactctttgatttttcagagttctccacttccttggaggcggatggactgactgtaagcgggaatcagactttggtgtgggacatccaacgcggggatcgcgtacaggtgattaagtcctaa

SEQ ID NO: 35277 - protein, 86 aa, DROSOPHILA
MDAKIIILALVSLFYKANGAFYELSVADEEIFSSCPNPEPGTLDIHGLFDFSEFSTSLEADGLTVSGNQTLVWDIQRGDRVQVIKS

SEQ ID NO: 35278 - DNA, 2897 bp, DROSOPHILA
atgtggatcgaagcgacgtttgttgctttgacaggcgcctcgaattccattcgcccataaataaaagtcatctgctggttatcagtcgattggagatgcattcgctgcttgtttgtgtttcagcgctttggttttgtcagctttgcgaagcggcgattggagctcaactctgcaaggattgtcgtgtgaatgtgatatatcctagtggcggaagaggcaaccatcagttgtcagaaaaccgtcaaatagttagaatcatcaacaaatacaagccaatcagaaggcaggaactggaatatcaaaatgagatcgggatgagccacttgcaattcagctttattgcgaagataaaggtgggaaatgcggtacgatgcagtgcggccttggtggctcccagtttggccatcacctccagtaagtgcttttcaaacgactctttcaaaccgctgcaaattatcttcaccggcggaagaactatcgctgtggataatgtagtcaaagcggatttctgtcctgagcttagcattcttcacttgaagaggccgtctgaaatcaatccaattgccctatgccaatatgacgtaccattgggcacaagagtatcaatgatgatggccacttcggatctcagatattacggccgtcgaagaactgaaataatctcaaatcgtgcctgcaagacaacattcctggaagaggattcagtttttataactcccagtatgctgtgtgcaaagaactcaatgaatccggaaatgtgtgcaacttctccaggtgatgtcctacttatagaccatcaattatgtggcttaaacgtttatggatttcgctgttttcaaaatgcactcaatggtgatctctacataagtctaggcaaactgcagcccatgatcggcgatttgatccggaaacttaatggtttaagtgaagaatttaaatcagttacggggaaagaaacctaattgttgtgatttgagactgaatcggttgaaatgtcataatgcagcttagtcagctagtcataatattagcagtctcccgaggatcagtttacggatcttctgagaccgctccgcagtttaatgtgggtgaaatacccagcaatggacagccctatcagatagttcgtgttattgagtatatagtgccctatccctaccagagatcaccgaaaatttccgctagattctcaagcggaggcaacaaagaacccaacagcctagagataattcccgctgaaatcgagactctccttaccgatggacaagccacaacagaggcaccaaaggcagtgaagcatttcgttatgcgaatcctttatgaaaacaaagtcatttgcagtggtgctctaatctccactcgtctggttttaacctccgccctctgttttcccaggactctgcgtcaacctccacctcgttcgtacaaactgcaggctagtcggagtcggatatattcggtggccaatctaattaccggcgctattgaggacatggccctattactgctccacgctccactggaggatcccttcgtccatccgattgatctctgcgagtcacctctccgaaggaatgacaatgtaaccatgtacatgtcacagcaacatctgcgtttcctgcgcaccaaactcattcccaatagcaattgcaaaaggagctatgcccaggatgagaacgccttcatcacgcagaccatgttgtgcgcccttaattcaaaccgattggtggactgccagacggcaaagggggatgtcctcctccaccaggatcggttgtgcggagtggacatttacgggcaacactgctccgatggtggtgtcaatggagagctgtatgcggacgtctttaaggcccggactgaactgatgcacttgattgagcgttattcgaattaaatgatttaacagggaaattgccgaataaaaaatacattaacttagttcctttccaatggttgttgaataaaaatttttcaataacatctgaaagttagagagtgaacatagatttactgtcgcgattcaatgttcgtgcgctgcccaaatcgaatcaatctcactaaacaaacactgaaaacaaaagggcaaaaaaaatcgcaaataaaatcaggggatgccgccttctgttggtcgcgggcaaaattgaaagtcgccaccaacaaaatcagagaaacacaaagagcacaagcgatgtttttttaacattttattttctttcaatttgcggcttaaaaagttaactgtttccatcaaaatgccctgaactgcaatgactatgatgtatgtaaatttgagcgaaaaaacaaatggcaaaaaacgaaaattgcgaaaaaaaaaacacacaataagagacacaagcgccacccaaaccctctaaaatcatcatgacaggaaaaaggtgttacacttggcttgaaatttacaccgtcgatgggcggggcagcaagggggcctctgcggcaaaaagaggaagagatggagtcctgcgaaaaaaaaacccaaagcttcaccggcggccatggatacgtagctggcttttggctttgcctttgcgctaaaatatgcaattttgtcatgaaatatgcacatgtccaccgcgcggcaaggacgaaccgtcgtgacacccaccgccacccacctacagcagcactatcagcggcggcaacaaaataaatttaaaaggcaacatacataaataaattaagcatttaaaaacccagcgggaataatgaaagctataaaaggcttaggcagtgcgagtctggaagtgccctttacaaggattaaggtaattataaaaaacttaatgggaggtaggtatgaaacgctgccaaggaaaatctttgccatataaaatgacagcgaattaaaatagctcttcaattgaggtgaagac

SEQ ID NO: 35279 - DNA, 897 bp, DROSOPHILA
atgcagcttagtcagctagtcataatattagcagtctcccgaggatcagtttacggatcttctgagaccgctccgcagtttaatgtgggtgaaatacccagcaatggacagccctatcagatagttcgtgttattgagtatatagtgccctatccctaccagagatcaccgaaaatttccgctagattctcaagcggaggcaacaaagaacccaacagcctagagataattcccgctgaaatcgagactctccttaccgatggacaagccacaacagaggcaccaaaggcagtgaagcatttcgttatgcgaatcctttatgaaaacaaagtcatttgcagtggtgctctaatctccactcgtctggttttaacctccgccctctgttttcccaggactctgcgtcaacctccacctcgttcgtacaaactgcaggctagtcggagtcggatatattcggtggccaatctaattaccggcgctattgaggacatggccctattactgctccacgctccactggaggatcccttcgtccatccgattgatctctgcgagtcacctctccgaaggaatgacaatgtaaccatgtacatgtcacagcaacatctgcgtttcctgcgcaccaaactcattcccaatagcaattgcaaaaggagctatgcccaggatgagaacgccttcatcacgcagaccatgttgtgcgcccttaattcaaaccgattggtggactgccagacggcaaagggggatgtcctcctccaccaggatcggttgtgcggagtggacatttacgggcaacactgctccgatggtggtgtcaatggagagctgtatgcggacgtctttaaggcccggactgaactgatgcacttgattgagcgttattcgaattaa

SEQ ID NO: 35280 - protein, 298 aa, DROSOPHILA
MQLSQLVIILAVSRGSVYGSSETAPQFNVGEIPSNGQPYQIVRVIEYIVPYPYQRSPKISARFSSGGNKEPNSLEIIPAEIETLLTDGQATTEAPKAVKHFVMRILYENKVICSGALISTRLVLTSALCFPRTLRQPPPRSYKLQASRSRIYSVANLITGAIEDMALLLLHAPLEDPFVHPIDLCESPLRRNDNVTMYMSQQHLRFLRTKLIPNSNCKRSYAQDENAFITQTMLCALNSNRLVDCQTAKGDVLLHQDRLCGVDIYGQHCSDGGVNGELYADVFKARTELMHLIERYSN

SEQ ID NO: 35281 - DNA, 10425 bp, DROSOPHILA
aaactgaaatgtattctaagaatgaaataaattgttaataaggaaaaggtcatgttataaaataaacctacattaattaaaaaaattaaacctacacttatacctaaaaccatggtatttcattaattcataaaataaatagctgtcatagacatatttttcacgatttctgtaaacttatatacttggcgtacgtagcatttacttcggatatcaccttaagagtaacaaatatatttaagtacattcggattttttaatgtaaaaatataaagtttttgacatctgatagtattttgtttaaaaagaatgttcgatcatcaatcatcctccgttgcaacactgctgaattttctgtagtgggcaaactacatttagttagctgtacatttgtatatgcttctgagtagtgagctgttaagaaattttattataatataataaaaaagcaattaaaggatttgttttctcttaattaaacatttaatttctgctttcgtgttaatatgtatattctacattggtttgtagtcacgtcttaatggtgggaacagtacttttagttccgtttacgctgaatttacatctgttaggtcacacagcagaagatggcacatgcctgctttcttgttttattttaatgggcaataatagcttaaattaggaatataacactaagtcaaaaggtttttatttctgcgctcccattgaaaaatgtccaaaaatatatttaacccaacatcaggttaatatgtgatgatcaatttcctcctttaataccaatttttaaataaaaaaatgtcttacgcaatgactgatcatttttaaattattatattatttaatattaattgtggaaattgtggctgccaaaagactgatgtaccttttgggatccgattataattggatcggataaacattgaccagtgtcgttatcttaacatattattaatgttttacgccgtcgattttgataaatcatatttacgcatttgtctaaagagtaaaaaaaagttgagtttatatattcatatcttaagttatagacttttggttaaattcataataaagtaaataaagattttgcacttattgctgttcacttaaataagataaagtgggacatattcagttgtaaaagtgttattacaatccacgcatacatacattgcgaattttgcagatacggtgtattttgtatcataacatctttagtagtatttcaagttttccagaagaaacgttagtcatggaggaatttaattcgagcggatcagtagttaatggtacaggatctacggaagttcctcaatctaatgctgaagttataaggggacaaatatttgaagttggtcctaggtatattaaactcgcctatataggtgaaggagcttatggcatggttgtgtaagtacctaatacctatttttatttttgaagccgtttttaatctacagtgtttgcacacctctttcttgttgttcctttgtccattattcatagttttttttttatcttgcggttctccttccgaaatgcagtaatactcagaaccgtgttctcttgattttatatcaagtaatacattttgttcaagtcctttgctgtaagttcgcatacatggtattgctgaatcaatgttatttttcgaaaatgcattaaatttattcacatcaatcatacgcagtactaagctgtgaaacacttaacaacgaaatagtttctcaaatttttgatttctttctttttctctaaacgtggcttagttttgctttttctttgacaaaatcaatctttaagggtcgacacaaccgagtttgttttcatgcaaaagcctaaattggccgatggactttataaataaaggaaagtcaatagcttctgagtcatattgcttgcttttaaacgctgcgcacaaaactttcgtttaccggtcgatcggttgttcaacgcaatacaatttctcgctaaacttggatttgcttgttaaagtactcttttactcggtgcctttatacctttttctaatgcttttggacataattagggattattcattcattcattaaaagtaaatttggaacctacattttcaaaaataaaaaatcaacacattttttaaaagttgcagttgcagttttgggcggagagtgggcatggcaacatttcatttttcagtatttaaaaataaaaaatatttagttgaattattttgttatattcttataaaatatttaaaaagcggacattttgtttttttttttagtttcttttaattttaaattatagttttatgttttttgattaggttggagttttgaggtgggtagcaaatggggttgattgactgaagagagcatattttggggaggggtcagttcatgtagtgggcattggtaaggttggtgtgtccaagcctgagcctttttattaggatttgtgttttcttattgtgttatgtagtgttgtagcttgaaggatgagctcataccagggaaaattgagaaaagtcgtcacagttgtaatttgaggagtgtacaagggcgtatctgtgggcatctttagctgttttgtcggcgtattcgttggcggatatgccgatgtgagtgggcatccatataagttaaataattgggaagtggttggtgagagggtttcttattgtggatagatattatgagatgttgattggtattggtattggtgaggaaatttagggcggacaggaattcgaagcccggcggctaaatttaattttgctggcgttgcttgttacgctatagcttattatttaattggatatcgagccatatgtgtggctgcatagttgcaaaccaatgtatggccgttacgcatcttgttattctagtgtctttgatataacattggttgctgattttagtgttcttctggaccttaaactaaagtttttcagatcatatttcgactattgtcaataaggcaggggtgtgcttggtttaataaaaaggaggtcaaaggaattaaatgatcattacagcaccaaaaccttattcatttcgctagtccgttcgattcttgagtatacgtacctcaatcggatcgcattgaatcggtccaaaaaagttcttcttttaagtttatagctatttggctgtacaaaggaatacttaaatatattccttatttgtcgctgttctgctataaaaaatcggaattcaccaccatatcctattatttgttctaatttattttaacagaatgtgcataaatccttaatgacgaacatttcttggacctaatccatcttgggactgttggagaacatctatggagtctgccttagttattaggtcttccatagcgatatcattcctaattattttacatgcgtattttactagattcgttgaaatgtatgtgacaggcagaagaaagcgtttccgaccacataaagtatatatattctttatcaggattaatatcacaccaattgttttctttgcaattttttttgcctttcttttctttcttatctttgttttccacaccagagttatttgtaatttctttaactacatagcacaaaagttattactctttgcatgccacttaaattatgagtgattttgtaaataattcctactaagccctaaaaattgtcccagggtcctgtttaacgaaattcatttctgcgacgacgttgtattattataaatgtttattttaaaataatatttcgcgaaatatgtgagtgtaatattaaacttaaatgagtttacaaaagtttgtggtggttccctgtgttgatctcaacaccgactggacacattaattgtattgatctccatgctctcttttttcacgctctcttgtggcgttattaataacatggtttactatacattcatttactatattcattaagcgtttcaaatcataatgtatttctaatgaacccgctgcttctttttttttcttgtccactttcttatagcaatccaaggctttcgcctgttgaaaatttgttccaatgcttattagttcatatatgctaaaaatcaaactactaaatcatatagcagaacataaagttattatattatagatgtttttattcaaatagtgttctaattcggtaagctacagcattttgataatatttaactttatttttgcttcgataaaaattggacggtaacatagctcaaagaagctggggtcggaaaaatcgaatttttaaaatttgaaagctggaatcgtttgcccatttttgcccatgtttgcccaccaattagtttttttgcccacgtccagtttttgagatataaattttcgaaaaagttcgaaaatgttcgaaaatcaaaaatttcgtttttttcaaattttttttttaaatcgcaataacatcgtttgaccacgtttgcccaccctttagaattttgaaaaaatgtatactttagaaaatataaggcttttaagtttacctcggtctaatcagagagtaaatcgtttgcccatctcttaaaaccaaatattatcaacaaaaaacggtttgcccaaccattattattagtttttatcgtttgcccaccctttaaaaaacctttaacaaaaatttttttcgattgcccacatttaaaatacacccaatttcgttagcccacctctttaaaataaaaatttccaataaaaaacgtttgcccaccatttaaaaataaataatttcgattgcccaccttttaaaactaaataatttcgtttgcccatcctttgaaattcatttttaacgtttgcccaccctttaaaaataaattatttcgtttgcccaccctttaaaatttgtttttttcggtttgcccactcttaaaactaaataatttcgattgcccaccttttaaaactaaataatttcgtttgcccatcctttaaaattcatttttaacgtttgcccaccctttaaaaataaattatttcgtttgcccaccctttaaaatttgtttttttcgtttgccaatcgaaattgggcaatcgaaaaaaaattttttgttaaaggttttttaaagggtgggcaaacgataaaaactaataataatggttgggcaaacgttttttgttgataatatttggttttaagagatgggcaaacgatttactctctgattagacagaggtaaacttaaaagccttatattttctaaagtataaattttttcaaaattctaaagggtgggcaaacgatgttattgcgatttaaaaaaaaaaatttgaaaaaagcgaaatttttgattttcgaaaattttcgaactttttcgaaaattcatatcccaaaaactggacgtgggcaaaaaaaactaattggtgggcaaacatgggcaaacgattccagctttcaaatttcaaaaattcgatttttccgaccccagcttctttgcgctcggtaacatccatacagccgcagtaatttaaaaaaaatcatagttttgttgtttttgatcataaaaggttcttattctattgttgcgcagaaatgttcgaataccgaatcgtgtattacatttttgtcttgaaatattttaaaatagcgaaaaaacttgtaaaaaaaattttcatttttcatttcaggtctgcggatgacacgctaacaaaccaaagagttgcaataaaaaaaatatcgccctttgaacaccaaacttattgtcaaaggactctcagagaaataaccatattgaccagatttaaacatgaaaacgtaaatacatactcaaataaaaattataagattaaaataggtttatcttaccagattaacttacaaaactgcgttaaaaatgtatctatacccgtgaaacaggcataccccatgaggtatatatatatacacatatgtgaccaattggctattgatggaaaatgactattgatcctgatcaaatgtatatatactttatatggtatatatatatggtacagttgcggtaacaataatagcaccataagaatatttcgtatatgtcccagcgtttctgcattttctgacactttttcatcatttcactcactaaacttaaatactacaataattttcaatcgaaataaaaaaattagtaacagatctaatggatattttaaaaataattggtaaaacaaaaaaaaaccttcaaatttaggcggtaacaaaaatagcactgtttctcgtagtttgccaaaactaaataaaaactaaaaaaaataattcaacaaatggattatatcataagaactatgtttaaagaatcttaatatttggttgcgtgacctttggtggcaaagacagcagcgcatcgtcttggcatggagtccaccaagccctcgcaccgtttttgaggaattttgctccatgaatccttgaccacaccccaaagtttctcgttattattgggttcggcttcagaaacctttttttcacatccgcccaaaggttttcgattggattcaagtcgggtgactgagcaggccatttcattactcggatcgatttctgctcaaaccactttcgagctttcttgctcgtgtgttttgggtcggttatcctgttgaaatgtccaagccaacggcatatcatcctcggcatatggcagcatcacattttccaggatatctgtgcaaatgtgctgatccatgatgccttgaatcccataccatgatgttggatcccccagtgctttaccgccttaaaggtgaagccgaggattatattcagttcgtggtggacgccgaacataagaccgagagcctttcccaccaaacaacacaattttgctcttatctgaccacaaaatgttgcggcacttctccacagaccagtccttgtgtatcttggcatattcgattcgctttgccacatgcttaacagtcaaaagcgggacttttctggggctgcacgcattaaggttgttttgtcttaagcgtttgcaaacagtttcagttccgtcaccggctttaacggctccttcttgctttgccgaaccaagcgcttgatcttcacgttggacattgagggctttcttccacgtgtttcgtccttttcgacaaacagcagtgctttgcggattattttgtttgaacaaccgacaatgcgaccaatttcagcgtattttttacctttagaaatcatgttttaatcaatgctttccgcgaccaaagacactagaataccaaggatgcgtaacggccatatattggtttggcactatgcagccacttttttgctgacggccaaaattactctctttccgctcactcccgctgagagcgtaagaaacctaaaaatataatttgcttgcttgtgtgagtaaaaacaagagacgagaacgcggtatatgtgtgcgtgttgtgctagaagacgattttcgggccgaaatcaattctgatcgaagaaacgaatttacattgtacatattagggtagtttttgccaattccgtagcaatatgataaaataaaataaatattttaaaaattcgagccctgactattataattttaaagctttttaattttgtttgctaaaatcgccgaattagataccgtttacacatttatatttttgtttaattctaatttgtctttcatctgacaattttttaaaagcgaaatattttttttaaacacttttaatgttaatgttacatcatattaagtcaaatgacttaataaatatactaaataattaaaggaagtacaatagaaattattataactactgtaatttcataaatttcataaaaatatgataactgtttattgcaaaagtcatatcaaagacactagaataattctagtgtctttgttttgttcatatcaccgaagtgcgggacacaagcactcaaacaatcattgccttattaatttttcacacgcccttaatatgaatactctaatgacaaaatattcttacataaagtcatttttaaaatttatttttgtgataatatgtacatagatttggctatttctaatctattttcaaacaataataacgttaaggcaatgcaaaacaagaatttttcgcatggtgccaattgatcaaaaataatatagatttaaagtctaagaacttctagggtgaagggcatattttgtcacatttacaatgcatgagcatacgtgtgcacacatacagttgttagctgtagcgctcttcgctctctcgctctctaacaaaaattcgagagagcctggagccacctatagagccacggcgaaaaaatcgtgtgccaaaaaatcgtatggcgttacgcatcttgttattctagtgtctttgccgcgacccatgactagagaatttttggtcttcgtttggaaaaaattcaataaaaacctttaatgcaactcctttttcaaaatttgtcgaaaaaaacccaaagcaatcactcctattaaatttattcagcaaaaacgtggtcagtgctatttttgttaccgcctcatttcgggcgcttttgcagcaagtgcccaaaaaccaaaagaaccgttacattgagagagtaaaaatttcttgctctgagagccaacatatatggtacttattattcatgcaatctgacttaaaaaaaaaacatttaataattttttttaggaaatcaactatccacctgcagtagtgctaatattttaaccgcagctgtatatatattaaatggaagatataaagcatgaacgcatgttcacgtgactattacgcagtggaaatgtgttccagaacgttaccacgaccttattttacttccgtaaattggcatacattttcttatttcttcttacttctgttgccccttttctatcattgttcggaaaacatgcccacaagatacaaaaaaccgtcacgctcacatttcataaaaatgtttaattttttgattttactttttttttttttaaatttcctctttgtgccgtttgctttgtctagcattgctcttatgctattgtccaatctatatgaacagcacttttttgtcttgttggcggctgtgtctcaggcgttgccatgtctttcaactcacgagcaatgggatcgcaaaagtttagtgagcgcaccgacagatcagtttagtgtcggagtcaataagttgcatcactacttatttactctttatgcagtagatataaccgttatatgcatatgtattatgtgtgatttagtcggttggcattaagcgccaagcaatttcgctccaatactgaaatcgtacaaacaacagcttgacaatattcatttcttgaaaatctagttttaaattcaatttgcttttaattagttgttccttatgtgtatttattttctttcagattattgatattcgagatattcttcgagttgatagcatagaccaaatgagagatgtttatattgtacagtgtttgatggagactgatttgtataaactacttaaaacacaggtaatggtgctccctgatatttggttaaaatttattgaaagaataactaccattgatatgtggtgtattatcttggccattactccaaataccaagactgagtacaattgtaggttgtcggacattttcaattatggaagtgattcgcgttatgctttcatgcgggctttaaaatgatctgatcaatgtttaaagaagaatgtggatattctctttttaactatttttaccagaaataactatactttaacctataatatctttataaaaaaataataaccataatcaatggtaaaagaatgttagtcacacataatttaaacagcttaagaagaaatttagcataagaaactgtaagagatctaagtgtgtgaaggtatgcatattaacatgaattgagaacgtttatttttcttcacaaaacagcaacactgtcgagccacgcagccggcatcattaaacaagaccaattgtaaaagttatggttaacgtaaatcagtcattgttttcctcttgctcatttatctaagcaaacgtttgcatacatacattcttatctttacgctgaactttatacgcagccaaagacagacaaattctctcagttttgaggtgagttgtctacatacgccgcctgaatatatacttttctctctggcttgaccctttcgttatcaaataaactaaaataaaccaagaatattatctgaacaaataagtcttatttattcaaaagctaatgaaaatgctcattggcttaacattgctgaccacgacgtgatatgtgcataagcaataatagagctgcaatgcaaatcgcgaaatacataaatatcggcaaataattatccataaatactgcttcaaattttgtgttctcaggtgcgcgagagtacagcagtcattaattgcttacatatatatacacgtacgttataaatatagttatattatatacctatatatatactgccgcttggttagctgccgttagatgttt

SEQ ID NO: 35282 - DNA, 648 bp, DROSOPHILA
taaagagtaaaaaaaagttgagtttatatattcatatcttaagttatagacttttggttaaattcataataaagtaaataaagattttgcacttattgctgttcacttaaataagataaagtgggacatattcagttgtaaaagtgttattacaatccacgcatacatacattgcgaattttgcagatacggtgtattttgtatcataacatctttagtagtatttcaagttttccagaagaaacgttagtcatggaggaatttaattcgagcggatcagtagttaatggtacaggatctacggaagttcctcaatctaatgctgaagttataaggggacaaatatttgaagttggtcctaggtatattaaactcgcctatataggtgaaggagcttatggcatggttgtgtctgcggatgacacgctaacaaaccaaagagttgcaataaaaaaaatatcgccctttgaacaccaaacttattgtcaaaggactctcagagaaataaccatattgaccagatttaaacatgaaaacattattgatattcgagatattcttcgagttgatagcatagaccaaatgagagatgtttatattgtacagtgtttgatggagactgatttgtataaactacttaaaacacag

SEQ ID NO: 35283 - protein, 132 aa, DROSOPHILA
MEEFNSSGSVVNGTGSTEVPQSNAEVIRGQIFEVGPRYIKLAYIGEGAYGMVVSADDTLTNQRVAIKKISPFEHQTYCQRTLREITILTRFKHENIIDIRDILRVDSIDQMRDVYIVQCLMETDLYKLLKTQ

SEQ ID NO: 35284 - DNA, 3018 bp, DROSOPHILA
cagttatatactaattgtaagcacatatatagttcacatacactaggtatgtgaaatataactttagatctgcatttcagcattatttggagaacaaggcctatatttatatgaataccattaagggaaccccagaagatcttggcaaattgttgaactctctaaaacttaaagtgtttcatttaatctgtggctatgaagaacgattcaaaccattagttgaggcatattggctgaatttgggtcaagatttgattaatcttgaacaccagggcgctattgtttaccacctgccaagcaccgaaattcccagttggaaaccaaggtaaagtaaaataataatattcagtaaaatcttgttacaaatttctaaccctttagtttgagtacctcttgcaaagtggcttatatcacatcaaatcatgccgaattggtcgacaaacattgggcttatcgttcagctgattctataactatgataaggggttttatggagaacaatctcgctgttggtgtttttgataaccaaggagaacccctagcgtggtgtctaaggtaagaaaagaagatgggtttgataatattcctgaaacaatctgtattttctagatctcctcatggtagtttgagtaacctacacgttttatcctcacatcgtcgaatgggattgggttctttggcagtgcgctttatggctaatgaaatcaagttaaagggctcagaagttctggccacagttgttcccgaaaacgagggttcgcaaaaaatgttcgagaaactaggattcaacaatatcaacaaactctactgggcagtgataccgtgcactttataaataaagaataaatacagattacaaacgtctacttttattatgagtttcgatttacttgtttgctctctttgtagtgcacagcttttctcttatctcattttgtttttttttttttttgtttcaagtttagtctgcgttcagcttttgttgcgaaaggttgtcgtcatgtcgacggagaattcgttggttgaaattccacgcggcgaatggactaaactgcgagatttgtatgtggccagagatacggatccccaaggctatccgtgcataaataatttcattaagtgggtggagatagacccgcaattgaaggtcaatttcctatcgttgaatggcgactggcagagcgatggaacctttgttctaacggtaagttatgcgatgtgaaatgcaaaagttcggtgattgaatgttgtctaatcatctcagctacgttcggatactcatatgaaccacatttacttcaacacactgagcgaaaatttggatcgagtgacgaaagcgttagaatgcctcaagtccattgagaatgaatacgatttctttgggttttctacgcgattgaaacctgtggtggagtatattggcaacaaatattatgccaacaagaagctgcacactgtggataccgtttggtacgcggccagcaaagaactcgtagatacatttaacattcagtgagtttgtactttatactctataactctcaatgaaacgaataatttcaatttagggttcctccgggcttaagtctacagcacttgaccatcgaagatgccgaaatcatcaatgaaaactggccacataataaacccggctctatagactttgtgagaagtttaattaaatataatattaatttgggtgcttatgacgacaagggaaagttggttgcctggtgtctgcggtaagccatcgaactgtatataaatgtatataaaaacttattaattaattaactttcctgtttagattgccgattggatccctgggtctgctgcaggttctggagtcacataaacgccttggtctcggcagcttgctggtgaagtcgatggctaagaagatttccgcagcgggagatcaagttttggcgccagtagtaacgaagaacaccccctcgaggagcatgttcgagaaactgggtttccgtgctatagacaatacatactgggctgcctagcaactgagaagaagccaaaaactaacataaatattattaaaataaatatagtgtaggaaatgattggttttttaataataaagaagagtgaatcagctcattcaattatagctgagcacccatgaatttgagcttgaattaaattgagatggattgtaatgtaaatttaatataatatattggataaaattggtgaatataaaatgatataatcttgaaatgttaatgatttcaaaggaagttatttacgcttcctttgcacgtttcatttttaatattttttataatgaaacttgtgcttaaattgtcaagttaaatttccggataatatttactttaatggtcgatggtttttattatgatcagtttaccataaactgaagctgaaactaactaacttagagttaataacttacatgatagataaaaaacttacacaactaccattaactatttttggtaactggcattacagaagcaaaaatgagtcatcgaatctaaaataactcataaagcaagtaacgcttaaatataatttacgacgggcttgtacgacggcattatctattaccaataaaacccatctcatatttgtttagttctgatggcccaacagatgagcacaaatcttatcctagcgctgggaaatcccaccacgactccatcaccgtgtcaatgtgccgcgaactttccaatgacgagaccgagaatacgcaccaaacataatgactatagtatatagctaataaatatttaaactatttactcaccggttgcgagagaatatcagtatgcacgtcacgggtttgagatacatacgtacgtacatacatgcatagatacaaatggatgggagagggctgccatggatttccgcaacaaagttcgcagaatgctgatatgaatgggcggggggcagtacatgagtacgtgagaaagtaccgatcgatgaagatcaataacaagtgcagacacgggtcagccatgtaaacaaagccgg

SEQ ID NO: 35285 - DNA, 795 bp, DROSOPHILA
atgtcgacggagaattcgttggttgaaattccacgcggcgaatggactaaactgcgagatttgtatgtggccagagatacggatccccaaggctatccgtgcataaataatttcattaagtgggtggagatagacccgcaattgaaggtcaatttcctatcgttgaatggcgactggcagagcgatggaacctttgttctaacgctacgttcggatactcatatgaaccacatttacttcaacacactgagcgaaaatttggatcgagtgacgaaagcgttagaatgcctcaagtccattgagaatgaatacgatttctttgggttttctacgcgattgaaacctgtggtggagtatattggcaacaaatattatgccaacaagaagctgcacactgtggataccgtttgggttcctccgggcttaagtctacagcacttgaccatcgaagatgccgaaatcatcaatgaaaactggccacataataaacccggctctatagactttgtgagaagtttaattaaatataatattaatttgggtgcttatgacgacaagggaaagttggttgcctggtgtctgcgattgccgattggatccctgggtctgctgcaggttctggagtcacataaacgccttggtctcggcagcttgctggtgaagtcgatggctaagaagatttccgcagcgggagatcaagttttggcgccagtagtaacgaagaacaccccctcgaggagcatgttcgagaaactgggtttccgtgctatagacaatacatactgggctgcctag

SEQ ID NO: 35286 - protein, 264 aa, DROSOPHILA
MSTENSLVEIPRGEWTKLRDLYVARDTDPQGYPCINNFIKWVEIDPQLKVNFLSLNGDWQSDGTFVLTLRSDTHMNHIYFNTLSENLDRVTKALECLKSIENEYDFFGFSTRLKPVVEYIGNKYYANKKLHTVDTVWVPPGLSLQHLTIEDAEIINENWPHNKPGSIDFVRSLIKYNINLGAYDDKGKLVAWCLRLPIGSLGLLQVLESHKRLGLGSLLVKSMAKKISAAGDQVLAPVVTKNTPSRSMFEKLGFRAIDNTYWAA

SEQ ID NO: 35287 - DNA, 2594 bp, DROSOPHILA
acagcaaaatcataaaaatcaagaaccataaagaagtcgtcgcaaaggagcgccatcttcagccccatccgcaccatcaactggcggagcagcaccaccgaaactgaaacgcagcaggagatgcccggtcgctcgaagctcgaagctcgaatcttgaagcgcggcgaccgacagtcgctttaactgtaagcagatggcagccagcgatagatgatgaggctccggagctgccaaggagctccaacgtgcacatagcgaaaaaatgtcgaactctgtggtgcatctattactgctcacccaattgatagtgtaatttcgatgtgtaactattggatttggtttgtctattggtttatggtactaaccaaaggttgagctaactgagagaattctggatcacttttggatacagtaacatcgaaagtggtctttgacactccgatttttccaagtgccttggagcagtgtggctgaggagcagtcggcagctcagtgactcgagtctctatgctggcgcacgcgtcttcgttgacggtgcaatgacaaattgcactattggcagagccgaaggagccgaaggggtggccatgggcaacgtcatcttggttgcgagtgcgggtgcaaagatggcaccgtttggtttattttcagcagacacggagcgagacgcagtatcgacgttgctggtgcttaactccaaggtcttttgccataactcagcaccatggatgatgtgcagcggtgccaagagaggtcgcaacagatcagcgtctggatgatactctactctcgcttgatagtttgaaaatgttttgaatattccattccatatgtaaaatatactaagtgttcagaaattagtaatacttccttagaattcaatgttaaatccaaagtcttaatccatttgtggttgtgggtctcttttggttagtgtatctagaaaaataattgcacccaagtgactgctgttgttgcacaggggtgtggcacgggggtttcaaaaggggggtaaccgtgggcacggcagcagagccatggcagcgacatgacttcgcttgacgataagatcatggcaaatattgacgacgaccgcgacggacatggacataagacttgggacatgggacatggagatggcggtggcgatggcgatggcgatggagttggatgtgaatgtggatgcagagatgccgatggagacggcaaacggcaatggcaaacggcgttgacaatgaagtccgaccgagtcatgtatgggtgcaacgccaacaacagcaaacatgcacagcacagcacagcacagcggcaacaacttgcgccccattgatttagactggcaattatgcagccaaagatcggagtcgtcctgctgatgctgcggctgctgcagctttcttgcatgttcctcaattgatgaggctggttttggggcttggggttcgggacactggatagtggatagtacgaaagtggatactgcatgcagtggcgtccatgtggaaatggagcagcgacccatatgcattgaacattgcaccgacatcttcgtcgtttggctgctgtcagcttcatctgcatttcttggcgtcatcttgttggcgctgcttgtgttgcaatgcacttaaaaaaaagaagcaaatcacagaatatttaaatatgaagcacagcttattattttggcgaccgaacagggacctttaaatcgctattagacatttcgaaggcaatatagttgtaagtattttattgttccctttcgatttgtctgtctaatatgtaaatatttttctctgtgtactcctggttttctgttgctgtttttgttcgcgtctggcgctgcccgtaaacttgtttaccccgccaaattcgtatcgacattacactcgcaactatcccatttctcttccctcttttttcgacggcgacattttacaattttccattcgtgttgttgtctctgccttcaagtagaaaagagagcgatggtagcgccaaaaacagcaaggaaataaaaatcagccaagtaactgaaaaaaaatgtaagttacagaaacagagtcaactattgtcgagagacccggagcatgaccatgacatacacagccagctccagagctctaaacatccatatatgattccgaaggtgttaccgcactaagtttttacctttaatcaatatcaataaaattctgtagttgtttgtatttttagacattttctttgaacctaaaccactttttattcaataacattttatatacgcaagtttccaagccaaaaactttaatctactccattccattttattactagattttccccccatcacacacaactttataacttcatgcagctcgattataataatggctaatttaattaaagatcattatattcatcagcatttcgagcgcaacgccaagaactcaaaaaactgtaaaagccgcgaaacaaatgaagaaagctcaagcgaaggaaattaaaataagtatgtatagaaataaattgcaagggggaaaaaagttgcgtttagagaaatatttaaatccatttttaatgaagtcgaaaacaaattccaactcaggttcagc

SEQ ID NO: 35288 - DNA, 594 bp, DROSOPHILA
atgacgccaagaaatgcagatgaagctgacagcagccaaacgacgaagatgtcggtgcaatgttcaatgcatatgggtcgctgctccatttccacatggacgccactgcatgcagtatccactttcgtactatccactatccagtgtcccgaaccccaagccccaaaaccagcctcatcaattgaggaacatgcaagaaagctgcagcagccgcagcatcagcaggacgactccgatctttggctgcataattgccagtctaaatcaatggggcgcaagttgttgccgctgtgctgtgctgtgctgtgcatgtttgctgttgttggcgttgcacccatacatgactcggtcggacttcattgtcaacgccgtttgccattgccgtttgccgtctccatcggcatctctgcatccacattcacatccaactccatcgccatcgccatcgccaccgccatctccatgtcccatgtcccaagtcttatgtccatgtccgtcgcggtcgtcgtcaatatttgccatgatcttatcgtcaagcgaagtcatgtcgctgccatggctctgctgccgtgcccacggttaccccccttttga

SEQ ID NO: 35289 - protein, 197 aa, DROSOPHILA
MTPRNADEADSSQTTKMSVQCSMHMGRCSISTWTPLHAVSTFVLSTIQCPEPQAPKPASSIEEHARKLQQPQHQQDDSDLWLHNCQSKSMGRKLLPLCCAVLCMFAVVGVAPIHDSVGLHCQRRLPLPFAVSIGISASTFTSNSIAIAIATAISMSHVPSLMSMSVAVVVNICHDLIVKRSHVAAMALLPCPRLPPF

SEQ ID NO: 35290 - DNA, 5875 bp, DROSOPHILA
ttgttcggcgaagttgaggagaccccgagcgatgttgtgaactaggataacaatgtaagtttaagccaagctgcgtgccgacatttgtatttatagccaaaattgcggcactggccgagatttggagatgacgccaggacgccgccgtcgccttcgaccacggcccggatattccgccctacgaatgcgctacgcccctatggggaattcgaattagcctttggtttgtcctgtctccgaagccgagctctttccccatttcacttttagtgcgcgcgcagcgtcgggaaaagccagcgaaagtaccaaacaacaacatcctatccatatcattgtcaccacacactcgtttacatgtgcctgtggctgtgcgcgaccgtgtttgtgtggcctcgcatttctattgtcctgttctcgggcgtcatcatcataatacgtatacgcccagcacgcccaaaaaaaaccccgccataccagcatcccgaacagaaagcttcatctggcgaaatggtttcgcttggccaactttcatggttaagttactgcgggttttagtgggttgttctagtcatcgtggtaatgggtcttaagtgggtatataggaggaactgaaataaatagttcgcatggtattaaattaaaatgtccacgataatatttaaattcgaaataactattgagtgcatgagtgcacaacaatttttcattgataatcatcggttttttatttacaagaaatgtgtcctgtcccttgctataatcataatacagaatctaaacataaacagtttaagatttctaatattttcatatagcagtattttgttatttgattacagggtatctcttagttcaaaaactttgttaccgcactgttgctgttagtagttgctgttgggactgccgtcgtcatggctgcaattgttgacattgcgggcgtcaataaatgccccagtccttggtgctacgactttggttaacgttaactggagcccagcactcaattgttatggtcttcctccgcgctgctgggatatgtgcggctggctatggctgtctgtgctgtggtgtcggtgaaatggaccatttgaataccacgcacgaccgatagaccgaaatttttgatatagcgcagttttgtgtagccattgctgtgattgaatacgtgacgggcatgggaagtgggccagtttcgggcagggcaagggtttttacgacgccgatgggatgaggaatactagtagcaatatgctcattcatacccaccctccgccaccactcatctgctggttaatttatggccctccgcatgtaaacgctttatgaaagcaagccaattgtgaatgcccattgcgttttgggtgtgttataaattcagaaaaaaaaaggaaaaacaattactcaaaatatgaaataatcaattcatcctatgtgggaattgaactcatgacttccggactgagagcagtgaatgaaatttactttgacttgccctaggctgaaagctcttgaaagctctacttttgtctcatcgaaatatgacgtaaatactggggctttgagtgtgtgtagacatcaagcatcggtggttcagtggtagaatgctcgcctgccacgcgggcggcccgggttcgattcccggccgatgcaaaataactatttttttaattatttttctaagttttttctattgtttgcatacactctgacttaactgaagcattccaattttagcaactctattgttgaaatttatcaaacagtcaataattgttttggggtttccccttcagtcttatggcaatataataaatcatgatttaactgaccacctgacattgtttccaccatagcaagattaaggtaattgttaccgattttattgctttacattctgccaaccgattattaccaattattaccaattattaagcaaggctataatttaagtaactttgtgttgtttctatgtcctagtagatatgttttagtagatacaattccttctctgaacagtaatcctaatggactttgccttaagcatttttaaataatttacagtcaaatagaaaccaaagatttatctttacaatttagtatatcccaaacagggctaccaaattagttatcccaagctaaaaaccttagatgcacgcgtgatattctagactatgtgctaattgaaatgctataatacagtgttcccagtcccaaatttcatatttaatatttgcatagactttattcacttgaatcgttttacaattacgtttataattaccgtacaataaaaatggaggctgagtaatatcgcatgttgatggaggggatatagagaatagtggagatatacatatggctcggataaaatcttaactatgtgtagaattgttcataattagagctaccgattagggcttacgtaaggtctacttaacaacaactaaaatacattcagtggcattctacctacaattacttgtctcaattacatttatcaattgtttatgtattaattgctcagagtcaggtaatctagggattacatctacagacacagcacgaaggaaacaggaaccaatccataaaaatgcccttgcaatcgttatcaggatcgtaggcgagtaatctatgccatttgtatttctgctcgcatccacactcgccctcacatcttggagtttgggtattgctacaaatagtaaaaaaaaaaatcatttcattattcgttttgtttactatttagttaacagtgtactaacctgcaaacctcctggtgaatcgcctgctcgaaatgctgagtatttacgatggctctgatcttacccgcggagttcgatgcccagtacggtgtgacaatttcaatcttcgactcgcaggcatcgagtcttccagtgcccgaactaccattcttatttcccggttgcctattggcattcgtgttcccattgccacttcctccggcagatccgcctctatttcgacttcctccggcggcagcttggcgctttttccggagttggccaaagtaactatctccggcttcgacggtctccccggcattggcagcaaatgctcccgggggtatgaatatatccggctcgtctatgaagcgacgctttcgcaccttgccttgttgtctgccacctcctccgccaggaccctccatgttcatctcaaagtcgccgtacatccgtcgcatcagggccttgttgtcgtctatgaaacgttcaatcttgtcactaaaaataagcaggtagtttagctttgtataaaataattgattaagtatttaaaagaacttaatgttatttatttcttccaggtgtacgccgtaaaatgacgtatttaatgaatttatttttataataacaaaggaagtgaccgtatttaaaattaaaatacaaaatactttgccaaatcaggtgattcactaaaaagattgatcataaatactcatttgagaaaaattaattgatttgagagggtccgtaaagcagatgaaatgaggtcaaaacccacggtaaatagtaattaaaatttatctttaattaagaaaatgatattattaattaaaagaaattaatatcttcttagcgcaaaatgttgggacccaatgttaatgaactttggaatgaatatcgttgaaagtcacactttttggatttgctttaagcctagtgatgaaattcatggtaattttacgtttctatgctaatgagaacagttaactatgtgattttagaacagtcatccggattaaatgtgattcagatcagtttcattgggaaaaaaaactggtagaagaaacccacagaaatgcaaacatccttgacttaatcaagagagttaaagttatacgactgttccaagggaaataccaatataccatttccactcgggatttcccgcagcccaaaaatagagaacaatggttacttacatgggataactattgccggccgtggggcaaaacagttgatgatatcgcttgatgcacggcactcccttgatgacatcgccgcgcacatccagtcccaaagccaccgacaaagccgtccaccagatctaaattaaccagagatatacgatggtcagtccgggcgataagtattaactatttagcattgaagacggcaattgagtttcggcggggtactgagcctcagattggaatggcgaccataacaaattatggccggggtgtgaaaatgactcaagtaagtcataaacataaaagttcgttttatattcgaaaataagaagatatgaagggtgtagccgtggcgggcggtgcagtttagagttggattttgggattaagcctactcgagtcgccatgcgaagattttcaatatcaatctctctcttctttcgtcgtcatcaacatcatcacacctcttaatgaaacgaactcgcacgaccttcgtgcgcaaaaaaacaaaaaaaaaaggaaaataaaaccgaaatgaaacacaaaatcgtcaaagttatttccgcaaatgaacaaactcgatcgatatcgagagtacactgtaggaaatcgggaaaactagaactcaccgaagaccaaatcaaatttttattattttcaatataaacagaaatgggaagaataggtgatgcctgcttgttacttaaaattcataaatgatttttgactcctacttttatttgcgatctatattttccgcagtgtgtcaattaaagtgcgcgcgggcttagaacctcatgccggcgaacctatcgatccgtacttaccggaatctgtaggaacgatccgttgttgagtttcggataggagaagagcggcaccactggaaccgtcccgttcttcaagtaaatcggtccctggatgggcgtcactgtgggcatctgattgttattcgacttatctgtgaacggaatgtaaatggattcgaaaatgaagtgaaaatggaaattggagtgcttttaaatggctgctgtttcggcggtgattcatggcaaggacgggggaattgctgtatccgtggccgttgtcactgcattaatcagcccggttaaacccaaaaagagctgccattgcaactgcaagtgcactcggtgtctgcatacaaatcgcactgcagttgacacttgcatgtataaatttcatgtctgcctggcatttgtaatgcccagatccggatctgggcgcagacagaaactttcccttttatagccatactgcaggatgcaaaacgggttgcagaatccaaaaaagggagcatacagtgcaaaaacttatttcctcaaaatgttacttaaactaaatgtaatggaattgaagggttctagacaagtggtttccttattattatgctatgacttttgaattatttaggtaatttatagctctcaccggaaaaatgtcttaccaaacaaatttgtcagatttaaaataatatttaagaaatatcctagttattatgttatgacgtttttcttgatttctatacttttttctcgcagtgttcagatctcatgtcactttcagctaatgagatatattctttggcaggttgtgaaatagattctttgtttctgtgcactgatctttggttcagatcgcatcttttatgatatttttctgcctgcacaaaggtgaaaacccagtgttgagtacttgagtgccgcgccaagacatcgagcgacccaaactagtatctgagttttggtcttgcgtgcgcacgtcttcatatgagagctggttcatgagctcggccccttgcccctcatttcgggagattgaaacgcgacttcttgcataatagccccgtaaccgagttgagtacttgaggtctcaagtctggcaggttgctggctggctaatgcctcgacaactcgcagattg

SEQ ID NO: 35291 - DNA, 870 bp, DROSOPHILA
atgcccacagtgacgcccatccagggaccgatttacttgaagaacgggacggttccagtggtgccgctcttctcctatccgaaactcaacaacggatcgttcctacagattccgatctggtggacggctttgtcggtggctttgggactggatgtgcgcggcgatgtcatcaagggagtgccgtgcatcaagcgatatcatcaactgttttgccccacggccggcaatagttatcccattgacaagattgaacgtttcatagacgacaacaaggccctgatgcgacggatgtacggcgactttgagatgaacatggagggtcctggcggaggaggtggcagacaacaaggcaaggtgcgaaagcgtcgcttcatagacgagccggatatattcatacccccgggagcatttgctgccaatgccggggagaccgtcgaagccggagatagttactttggccaactccggaaaaagcgccaagctgccgccggaggaagtcgaaatagaggcggatctgccggaggaagtggcaatgggaacacgaatgccaataggcaaccgggaaataagaatggtagttcgggcactggaagactcgatgcctgcgagtcgaagattgaaattgtcacaccgtactgggcatcgaactccgcgggtaagatcagagccatcgtaaatactcagcatttcgagcaggcgattcaccaggaggtttgcagcaatggctacacaaaactgcgctatatcaaaaatttcggtctatcggtcgtgcgtggtattcaaatggtccatttcaccgacaccacagcacagacagccatagccagccgcacatatcccagcagcgcggaggaagaccataacaattga

SEQ ID NO: 35292 - protein, 289 aa, DROSOPHILA
MPTVTPIQGPIYLKNGTVPVVPLFSYPKLNNGSFLQIPIWWTALSVALGLDVRGDVIKGVPCIKRYHQLFCPTAGNSYPIDKIERFIDDNKALMRRMYGDFEMNMEGPGGGGGRQQGKVRKRRFIDEPDIFIPPGAFAANAGETVEAGDSYFGQLRKKRQAAAGGSRNRGGSAGGSGNGNTNANRQPGNKNGSSGTGRLDACESKIEIVTPYWASNSAGKIRAIVNTQHFEQAIHQEVCSNGYTKLRYIKNFGLSVVRGIQMVHFTDTTAQTAIASRTYPSSAEEDHNN

SEQ ID NO: 35293 - DNA, 4020 bp, DROSOPHILA
gctttgagcgcatgtcaaaagatgggaggtaatctagcctcaattataaatgaagcagactttaatgctatcgtttcgcaactaagcaaagacaacacttatatgattggcattagtgatctggctgaaaagggcgttttcatatctgtgtcctccggaaagagagcaccttttttgaaatggaatcctggagagccactatacgaacatgtagatcagcgttgcgtttctatacataacggtggcatgtgggttgcttcttgtacttctgatttcaaatacatttgcgaggcaaatgaaaatgtatagtaaacagatatatataaatatatgtacacatatgttaagacttgcaatgtgaaacatacaaaaagaaatccatcttgtacagataattcgttaaacttttatttagccattgatgttttgtgtttttaacattatatacttgagtatcattttaatcttcatttttttttgttgcatttcgagtgcttcgcacattctatttaatgacaaatcgtgtgcgaaatgtgcaatatgaaattggaataaattgcctacttgaaaatgcgtttgtgatgaaaatcatgtaccacgtatatatcgttaatcggtatcaggatcgatatctctatcgataactaaggctagctcgcagtgagtgtttcgagtgttttgtgtgagtgtataacgcatcgttcgcttaaagacctagacttaagactaaacaaacaatttgaaacaaacagcctagatggaaaacatacttctcgtacatcaggtagaaacaacatcagagataagaattactcatctataggagtaataatcctatgagctgggtgtggagaggggatgggggagattcgttgcttggtaaactttgtcacgcgttaaggtccttgaaacagaaaataatacaatacacataagatatgcagtttgccatgagttgggttgagataagcaaatcggtattcgggttggactggatcgcctagtgggatggtgccccatacgagctgctgggagcagagggtgcgggcggggcagctggagctccgtactcgggcgctggaggcgccacactgttgggatagggtccggtctcctccttctgggtcttgtagcggatgaagtacacctccggcttgctgggttgggtgggagctggcgttgggataatgatctccggctgctcctccggcttcttgactagcacgtacaccagggtcttctcttcgttctgtgggaactgcggtattacaggggcggtcggtactggtggagatggcgccttgatgaagacgatcttgtagtgcttctgcggaggtggcacgtaaaggggtttcctgggaaaatatttaaaaatgtatttaaataaaggttctgctatatctgtatttaaggaatttcttaggaattctatgggtaaagtaagacaccacatcctcatataacgcaactttttttgcttccggcttgtaaaaatttacatactgaataaaaaaatttcaattacacacggccaggctggaatgactttccacacttcctataaccttgccttgttgaacgaacaaataccgcgatgcgggagaaaggagtttctctttgaggtgcatgcaaatggcatgcccataaatggtgacctcccgaaaatggtgacctcccgacaacgttgaacccactgcagctgcttgtcagttttactaatcagatgaagatgatgactattgtgacgatgacagcgattgtcacaacaaccgcctcgagacgagggtttacataaagctacctatggtaatcgagttcctgtccctctgcgcctgataatttgcttggaaatggtactgagatatatacgagtacaagtgctgcggcgagcttaggtaacgttttagtcacggtttggcggtctgcaaagccatatcattcccctctcgtggtaattaacatcgcttccaactccaattgaaaacagacagaagacgacagaaaacattgtatcagcgaaaagagaggaaagttggatggctttcgttttcgcgggtattaaataatgttcctcctccgtttaagcgaccctctaaataccctggaaatgtggcaacagctgtggaaaagggccctgagctggattagatgattgccggctggtctcttgcaacatttgtctagttattatctttgggagttgacggcactgcctggtttacgccgatgaattgtgagagaatctgcataagtgccttggattatatactcataacacaacaatgtgttttttccccatatttttccaatcttaagtggaacaagacaaataaagcgagatcgtttgtaaccgctcacaatcacgcaagtcgaaaaaaaagtgtgctggataaggggtgtgaataatttgaactgattacgttgtgaaatgaaaaaaaccgcaggatgtacgtttatattgtacggcttatcagaagaaattctcgattgttcactcactcactgtgttgggagtgtagtgcgatttctattttgtgaaactatgcaaaataaataattttactattacttaaactcttaaatacgtatcttttgtgattaaactgaatgtgtctaaaataacatttttaaagattttttccatttttaggtctgatataattatcatctagtatagacaaaaattttaaacgagtatgcatagatccttttccggaacttggttgaagaataggtttattgggaaccctattctactcgcgatctttggaacttatgttggcttagaggatccttgatcctgccactcacctgggtgcctggtattccggctctggtggaggtacatggacgtagacgtgcttgtgaatcaccggcgcctgctggggaggtccgtactggggcgcaggggcgccgtagcctccgctgggtccacttggctggtagctgctggaggggggcgcactgtacgagtcacgaggcggctctggacgagcggccaccagggcagccagggccatgaggaccactaactgcgaacgagatcggaggagaacacaccattaagcgatgtccatcacggccacttggtcggtttggtcacaagatcataccacacaactggaatgcattttcgggtggcttatttcgggtatatccgtttcgggttttgtcactgctccaggtggctaggtgctactggctgttactggttactggttactggcaatgtggtgctgcttcgacgcggaacctcttactgcatgccacaacgattgttgcagtttcttttatagcagcgcagcgcgtgaaataaaaattaagtaaaattcaagacgacgatcaagaccgctgctgctttagccgcctcagctgcctcagctgctgccgcagtcgaccgagcagtcggccaagttggctgagcagttggcaaagagcggcagcagcatgtagccatgaagaaattgaaatgtttaagccaagtccaaagtttggccagtcatgatctggtggggaaactgaggctgcagctcctggctgcgatgcaaacggcgaccgcaaagccaaccgaaactgcaacgtctgctgaccgtttcttggctttggctttcctccttcgattaactacttctttttcgtggtttttcgagcatgtggttggttgtttttttttttctgtttttctgcccaactaggattattttcatggggaaaataaggaacctgaaaggtgcagtgtatgtatgtaaaataaagcttgaggcagcaaggccatcaaatagttttttatggtttttatttctgaagacacttagctgctggaatgtagcttatttcaagggtccattattttcaaggcaagaaaataaaagccttttttgcggtaacctcagctttaacgatttcctgcttaatttaagaatatctgagaatatctgttctcttattattaatttatcacgccttttgttcttttatcattaaaagaaaatgcctctcttagcttagatagtttaatta

SEQ ID NO: 35294 - DNA, 564 bp, DROSOPHILA
atggccctggctgccctggtggccgctcgtccagagccgcctcgtgactcgtacagtgcgcccccctccagcagctaccagccaagtggacccagcggaggctacggcgcccctgcgccccagtacggacctccccagcaggcgccggtgattcacaagcacgtctacgtccatgtacctccaccagagccggaataccaggcacccaggaaacccctttacgtgccacctccgcagaagcactacaagatcgtcttcatcaaggcgccatctccaccagtaccgaccgcccctgtaataccgcagttcccacagaacgaagagaagaccctggtgtacgtgctagtcaagaagccggaggagcagccggagatcattatcccaacgccagctcccacccaacccagcaagccggaggtgtacttcatccgctacaagacccagaaggaggagaccggaccctatcccaacagtgtggcgcctccagcgcccgagtacggagctccagctgccccgcccgcaccctctgctcccagcagctcgtatggggcaccatcccactag

SEQ ID NO: 35295 - protein, 187 aa, DROSOPHILA
MALAALVAARPEPPRDSYSAPPSSSYQPSGPSGGYGAPAPQYGPPQQAPVIHKHVYVHVPPPEPEYQAPRKPLYVPPPQKHYKIVFIKAPSPPVPTAPVIPQFPQNEEKTLVYVLVKKPEEQPEIIIPTPAPTQPSKPEVYFIRYKTQKEETGPYPNSVAPPAPEYGAPAAPPAPSAPSSSYGAPSH

SEQ ID NO: 35296 - DNA, 8483 bp, DROSOPHILA
attcaacatttagcatacttgatcttaaatcgactgcccgaacagataacccaaactaaacaataaatagctatatgatatatgtatgtatatattgagtgtgtatataaatacgtttgcgtgtatatatagtgtatgtatatagatgtatctctgcattgtaaagtcatagtgattgtagcctgattatgttaataatatatttatgttcaatatttatagatacaatagtgacagtcgagatatatttttcacaagcttcgggtacaccatcttgggatcctttgactcaaaaggattttatatgtatatctcgactatccatcattatgctagctggcaacttaagatatttaaagccccgtttgaacttatgcgtgtatttagtgagtgagtgagtgattgattcgattgatttatagcgtattcagtggttcggatcggtgtaagacagtaaaaactcaataataaaaaattgtagaaatggtgatattttaaagatatgggctagccatatattaaatacagatgggtctaaagatatgtgtactttactttatcgcaaaaccgttgattactttttgccaacgttattcataattttatttaaaggagttttaaactgccttacaccaaacatgaagtccactattatgagttacttaggtaattgggttagttattagattactttaaaattgcatgatttcttttccaccgtttggtttcttcgcgtggtatatttgtttgggttttgtgtttggtttttgttgtggcagccgtcgcctagtaaaagttaatcagtcgctatcaaagatcctctatccttaaaactcatcctagtcgtggtttttttcctaaaactgtatgatatttttcctttttggtttgcgtttgcttgtttctgtttggccattttgaatgctggactagctcggtttttttgcgtggttcttggtgggcgttttggacatggatgccttggatgtcgtgttgctgtttaaaaatcgctgatctcaccctcagtctctggataagtgcaggaaaatggtgtcaagagccagttgcagaggcctttgttgttgccagcctgatcctgtcgatgtcgcttcttgtggcactgcctctggtaatttccaatgcccgccgatgtgactgctcctgttcctgaaacggtgatgcgatgccgttgacccttggacatgccggacgcgaagctactctcatccgaatccctaacggtggccacactgtgataaccactctccgcccgacgggatatgcccgaatgtttggaagtcctcggagtggagttggagtcatgaccactatcataggcctcggagctggtattcaggggcagcaggggaagtcgcgattgagcagccaggggtaggatgttcgtgatctcgttcagcttgtgctgtgcatcctccagagaatttcccttgcccaccgccgccgccatggatttctcatccaattcgcaaatatcatcgtgctgtggcgtgaatcttttctctcctttctgcagattgggatcggatgctccgtctggctggcggagtagagcataatcatccattcctgctatctccatgatgccattcaaactggggagtgacccttgacttggactgtgtgacggttgctttggcggactgggtgtcaatctgtaggctggttcactgcaaacgctactctggcccacgttgaagtgataaaccggctcactaaacacacttccaatatccgtccggaaaagtgcggcggagggcgtgacctctgccatggccagttgggaggtgaagatctcgtgcaggcgagccagctgatcaaattgttgtctacgaaacgatgaaatatacaaaggacacaaaaaaaaaatagtattatatattatatttttagatgcgaaaagcttagatgagcttgttataaacaaggttccaaaattttaatgcccagaaatatttgataaactcaccttgctctttcgccgcactcgctgaaagattcacaggccatgttgaagctggacacaaaggatatgttgtcgcagtgactcagagctgatagaggatgtgcactgggatcgtgatcccgatctctggacatggtcctggcgatctcttcctccgtaacttgcaggccacaatcaatactccgttgggatggatgatgcgaggatgacgctcgactggccaccagttcagcctcatgaagctgttccctggacacatgccgcgagagcatcctgtgtagattatcctgtgatatgtccctggagccgaggggatcatccagtaatggtagagcagggggtacctctgacggaccgctgtcttcgtcctcgtcgccatccggaggagctggatccagaagaggtaaactctcgaagcacggctgattcagatccaaggagggttccggattgaatgcaggtctgtctggtaaatccagtgatttctgcttcaactgcgagagtttccagtgcaaagcagtgggggaattactggcggacaccgtactttggaagacttgcgttgtctgattctcaacccactgtcgaatcatggtcttcttgtgggcatccataaaaccatagccctgtgtctgacttccgccggctgctggaagattgcaggctgtcaaggatctgcacgattgcgactttggaccatccacccatgtttcgcattgcttcacatgattcacctccctcattagatgacgagcttccgctaccttcgccctggacactcgtggtccatcgatccactgctcttccgttattttcctcattcccgcttccagctgttcgagagctgctcccggatgagctcttcgcatgggcgatcccttcggcgagggcaccatcgaccctttggacaccatgtgccggggtatcggtataggtgaacccattgcctgtatctgtggctgctcgtgtggaatcattggcgaggagcaggctcccgctcccgcctgacgtttcagactgcccgtgtggcttcccggaagctttttagctgaaattggaaagtaagcaaaaaatatgtgaattataaataagggctttgatggtagcaataggtcaaaagcaaccaacatcttggccaaataaattctattgtatgtaagctgtcagcttaacttttaaataatttaagtgttttacctttttccgctgccatggcttttttcatcatcatgggactgttggaagctgacttcgaggggggcttctccagcccactccctttgagggctttactcatcaccccgcgattatcccccgcagtcagcgatggcagatatacgggcggatgttccccatccgtggcatcgtcattgggccccatatagatgacagtgtcggctgagatttccgagctcgacggatccgcacccgatcccgccgaggagccgttgccgccgagtccttgggccaagcccacagccaagggcatgggaacacgatgtttcctgcgacgcagccgatgaattctggatgcgatttgaatggtggagagtgcgtcctgatagctctgctctggtcgcacatgggccacgatggccacatggcaggtaatgggggccaggcagtccttgagcagcggcgtcagcgggtggtccttgtgtgggggatgcctctggccggatagtatcgcgagcagtatgttaccgatccccgacagcggcagtcccccgttgcgattcgcacacccgcccaggtcgatgatatgtaaacggctccgaccgccagcaactgcacagagagaaaatattgaaaatatattaagtatatttatgaaagtagtttaacaatttcaattgttaaaattaaaaaaaaaacaaattggatttatagctcttaaaaatcagttgataaaatgcttaagcataactgatatttagttccatttctccatgtgtttgcataagaggcaagtgggtgggagtgggtttaaatgggggtggcgctgggtgttggagtggaggaaatgcgacactttaatggcgctgccgtctagtggtagtgaagcatttagcgggccacttgagtggcagcagcaacaaaagtggcagcaacaatagcaataacaaggaaaagggaacacttcgaaagtcgaagaatgaaatactctaggttattcgaaaaaggcttaaaaaggattctagacttccacgtatgaaaattaaaaaagaaatgtattgaaaaagaagagtagaaggtaatcctaaagatactggctaataattcgtttttggaatatgataatgctgttcaaaaatatttaaataaatataatatggatacaatttcttaaagatgcatattcaagttttggtagctgtactgtatctatacaatacattgtagttgccatattttatgatttttacaagctttactgctccagaacttagaccaacaccccaaattttgcagggcacgacaacaacaatgtgttggacacttaccacctcccttgcgggacaggctgtactggtagacgtgcagcgtgaagatgagggcggactccaagggggcggcacatccagaactcccagatgccgtggaaccggaactttttaagcgtccggcgagcgctgagtcgaggaaaagggccgcacgctcggcggtgggtgcacgtagttccgttggaccgcaaggaagtcgtcacgcaaataaatccccggggagtcgtcagattctgtgtagccgtagtcggagccggagttccagtattgggaccaaaaaaaaagaagcggggagtgaatgaaaagggcattaggttttatgtgggaataaacgccgtattctacggggataaggtgggggtgctgttccgttgatgataagaaggtggggttggtgtcggaactgctgcccaggttaagtttattcaaattgggccagttacgaccccgacccgccccagtcatcatcatcattgtttggcccaggggcaacattatgccacgccccctgcaaccgcacacagcggagccatttattctgccggcgattctgcccgctggcatctaacaggtggaccagttgccagttactaactacccgaaattaagggaaaaggcaagttaaacaaagatctgttaaagcgggtaactagaagcaaacacacccaaagaatattagcttttctgagtactcgctggccttggttaattaagtcaacttttaatcttgattatatatatgtatttaggtcttgattatgttttttgtacaagttaatcattttaaataataatgtaaagaagcatataaaattatatatatgaatctgatgattataaaaaatccttcttatgcttaagaattttctaaaatcattgtttattacagctgagcataaaagtatctcgaagtgagcagtatagctatatgtatttaaactcaacttaaataacaaataataaagacaactacttcttacaaagaaaggaatgccttcagcttataatgaatagtggcacatttagtagttgacctggaaacgttgagctatgtacccccgatcctggccaaagacccctcctgtctgccatatgcttaccggctgcatgcgagatgagcaaatcctgcgatagggcatccggcttggtggcactgacgcccacggcactgacccgcaccgagaagcgtgctccgctcttctgccgcctctcctggatgcccttgtacagccaggcgatggcgcagggtgctgctcccagggaacacgccacaccgctgccactggcactgccactcccactaccaccgcccagttctcccaacaccgtttgggcctggccggtggcgggatatcccatggccagcaggcagccatcggaaccttcgagcacggcgggtatcacttcgctcagcgccgatgcacacacatccgactggaatatacgatgcacagagagaaaatgttaaaaggttgggcatttttttaagaacttaactaaatggtaatatataggagtttataataatgatggtttcaatgggtatcaataagtaaatataaatgatataagatattttccaatttccttccttacaagcaccaagcatttttcttagtgtttatcgaaaacgaataggtgtggagtggaggtcagtgggtggtggctaacaaggcatactaatgggctctctttaatggctggaattgggttcgattgcggggttaattcgattgctgattagatccgatggggcaggacaatacgcgtatgtgttaattctattgggggtatttctttcgttcggtctgagggattgccttatgagtgattgcacttggagggtcataaatcttgaaaaggaactttgcttgctatgtattatgaagattgattgtggtattttgtggtgacttgttattctgtggaattactaacacctcttttgtaatctcttaacaagttaaatggcatagcttcgagacaaaaaatccagacatttatcgtttgcaccaaattattcatataatgcacagatgtgcccttctcacaaaaggattcccacggtcaatttaacttttataattgcaactcaatatttacgttagggacatttttctgcagacaaataacatcgcgagaagtctggaaagttttgttgattttgagaaaagcaaagtacactggcaaagtgttaactctcagttgccggaagttttgtagttttttgtacataatgaatggttttattgtcaatattgtattacccttattattattaggtgggccttttgtttgtttatcaagaattaatagctgttaataagggttatttgccacctaaattatactgtgtgtcaacagtaaccaatcaagtatttagtttacttggtaacggttgctcttgtttgttattatttaaacaaatttgctatttacatttaaataaattagaattaatacttttaactacatatttttcaaacgatttttagaatatttcaacttgatttaattgatgttatacttatgatgttttatacctatttcttaaacttattctggatctaaggatgctttaaataaattggttcaacatccatgtgtgaacgtgcactccattcagattttcgttaaggttgaaactcacctgcttatcctcgccagtgaagaggttatcgaatgcaaacattttgggagcggccaccatgggcgcccgttcctgggcagcctggggcggcggacacgcggttctcggatcggtgagcgtgacctgtcgcttcttcttgtccagggccataaagtccggctcggttccgccggagttcctgtcccggtccgccacccgcagcatgaccttcaccttgcccactccgtagcactcccggctactcaggcgtcggatgagggtcggcggcatcggcggcggtgcccgctgcaatgcaccacagaagccaccgttgcgggacatgtttgacgtactggtggtggccatggttccttgactattgttcgccacagttggcggtggaagtttattgctggaagcacttgcgtttccttttgtggggaggggtaacgaataaaattgggagttaataagaggcccaaatcctggcttttgttttatgtctggggatcttaaaatgcaatcgtcactccccataaactttgtttgttttttgggggttttatggttctttaaatagttgctgggcctgtcataaattgcgatttcggttcggcccgatgggcataagttatttggtcctgccgccaagaagggtccttgcccttcggtaatggccataacactttcgctttatggttatgggccatctgtttattgggcatatgcttcactgtactatcatcactatcacgctcgcactgtcactgtcactaagctcgtgttttattcacttgtagcatcttgtgcataaaatcaaatttatgttgaatttgcttgggcttttatggtgggaaattatgcgcttcgttgtctttctagtgttcttttgggactgtcgtatttcacatcagtttaattctatttgaaaagtttatgtacacgcttttaagttcctttcggtcattaaaaaaagttttaagcccagacttttaacaattttcagttctttgttggagctataaagtgttttagaggttttgcattctattaccgaaaacattaggactttagttacagtattaattaaaaaattaattaaaaacttttctatgattactgttagaattgattatatatttaaatgtggtttaatttctaataccttaaatttaaatttgttatagtcacacaatatttctggtaaaggttccgttgcttttgcaaagctttattaacttttaaatttttatttttttattcttgagtttaattaagttattatttcatttctctgaggaactgtctgaacatctttaaaatgttcctttgggatgggctttctaaggcgtgtcactcaaactta

SEQ ID NO: 35297 - DNA, 3503 bp, DROSOPHILA
atggccaccaccagtacgtcaaacatgtcccgcaacggtggcttctgtggtgcattgcagcgggcaccgccgccgatgccgccgaccctcatccgacgcctgagtagccgggagtgctacggagtgggcaaggtgaaggtcatgctgcgggtggcggaccgggacaggaactccggcggaaccgagccggactttatggccctggacaagaagaagcgacaggtcacgctcaccgatccgagaaccgcgtgtccgccgccccaggctgcccaggaacgggcgcccatggtggccgctcccaaaatgtttgcattcgataacctcttcactggcgaggataagcagtcggatgtgtgtgcatcggcgctgagcgaagtgatacccgccgtgctcgaaggttccgatggctgcctgctggccatgggatatcccgccaccggccaggcccaaacggtgttgggagaactgggcggtggtagtgggagtggcagtgccagtggcagcggtgtggcgtgttccctgggagcagcaccctgcgccatcgcctggctgtacaagggcatccaggagaggcggcagaagagcggagcacgcttctcggtgcgggtcagtgccgtgggcgtcagtgccaccaagccggatgccctatcgcaggatttgctcatctcgcatgcagccgaatacggcgtttattcccacataaaacctaatgcccttttcattcactccccgcttctttttttttggtcccaatactggaactccggctccgactacggctacacagaatctgacgactccccggggatttatttgcgtgacgacttccttgcggtccaacggaactacgtgcacccaccgccgagcgtgcggcccttttcctcgactcagcgctcgccggacgcttaaaaagttccggttccacggcatctgggagttctggatgtgccgcccccttggagtccgccctcatcttcacgctgcacgtctaccagtacagcctgtcccgcaagggaggtgttgctggcggtcggagccgtttacatatcatcgacctgggcgggtgtgcgaatcgcaacgggggactgccgctgtcggggatcggtaacatactgctcgcgatactatccggccagaggcatcccccacacaaggaccacccgctgacgccgctgctcaaggactgcctggcccccattacctgccatgtggccatcgtggcccatgtgcgaccagagcagagctatcaggacgcactctccaccattcaaatcgcatccagaattcatcggctgcgtcgcaggaaacatcgtgttcccatgcccttggctgtgggcttggcccaaggactcggcggcaacggctcctcggcgggatcgggtgcggatccgtcgagctcggaaatctcagccgacactgtcatctatatggggcccaatgacgatgccacggatggggaacatccgcccgtatatctgccatcgctgactgcgggggataatcgcggggtgatgagtaaagccctcaaagggagtgggctggagaagcccccctcgaagtcagcttccaacagtcccatgatgatgaaaaaagccatggcagcggaaaaagctaaaaagcttccgggaagccacacgggcagtctgaaacgtcaggcgggagcgggagcctgctcctcgccaatgattccacacgagcagccacagatacaggcaatgggttcacctataccgataccccggcacatggtgtccaaagggtcgatggtgccctcgccgaagggatcgcccatgcgaagagctcatccgggagcagctctcgaacagctggaagcgggaatgaggaaaataacggaagagcagtggatcgatggaccacgagtgtccagggcgaaggtagcggaagctcgtcatctaatgagggaggtgaatcatgtgaagcaatgcgaaacatgggtggatggtccaaagtcgcaatcgtgcagatccttgacagcctgcaatcttccagcagccggcggaagtcagacacagggctatggttttatggatgcccacaagaagaccatgattcgacagtgggttgagaatcagacaacgcaagtcttccaaagtacggtgtccgccagtaattcccccactgctttgcactggaaactctcgcagttgaagcagaaatcactggatttaccagacagacctgcattcaatccggaaccctccttggatctgaatcagccgtgcttcgagagtttacctcttctggatccagctcctccggatggcgacgaggacgaagacagcggtccgtcagaggtaccccctgctctaccattactggatgatcccctcggctccagggacatatcacaggataatctacacaggatgctctcgcggcatgtgtccagggaacagcttcatgaggctgaactggtggccagtcgagcgtcatcctcgcatcatccatcccaacggagtattgattgtggcctgcaagttacggaggaagagatcgccaggaccatgtccagagatcgggatcacgatcccagtgcacatcctctatcagctctgagtcactgcgacaacatatcctttgtgtccagcttcaacatggcctgtgaatctttcagcgagtgcggcgaaagagcaagacaacaatttgatcagctggctcgcctgcacgagatcttcacctcccaactggccatggcagaggtcacgccctccgccgcacttttccggacggatattggaagtgtgtttagtgagccggtttatcacttcaacgtgggccagagtagcgtttgcagtgaaccagcctacagattgacacccagtccgccaaagcaaccgtcacacagtccaagtcaagggtcactccccagtttgaatggcatcatggagatagcaggaatggatgattatgctctactccgccagccagacggagcatccgatcccaatctgcagaaaggagagaaaagattcacgccacagcacgatgatatttgcgaattggatgagaaatccatggcggcggcggtgggcaagggaaattctctggaggatgcacagcacaagctgaacgagatcacgaacatcctacccctggctgctcaatcgcgacttcccctgctgcccctgaataccagctccgaggcctatgatagtggtcatgactccaactccactccgaggacttccaaacattcgggcatatcccgtcgggcggagagtggttatcacagtgtggccaccgttagggattcggatgagagtagcttcgcgtccggcatgtccaagggtcaacggcatcgcatcaccgtttcaggaacaggagcagtcacatcggcgggcattggaaattaccagaggcagtgccacaagaagcgacatcgacaggatcaggctggcaacaacaaaggcctctgcaactggctcttgacaccattttcctgcacttatccagagactgagggtgagatcagcgatttttaa

SEQ ID NO: 35298 - protein, 302 aa, DROSOPHILA
MATTSTSNMSRNGGFCGALQRAPPPMPPTLIRRLSSRECYGVGKVKVMLRVADRDRNSGGTEPDFMALDKKKRQVTLTDPRTACPPPQAAQERAPMVAAPKMFAFDNLFTGEDKQSDVCASALSEVIPAVLEGSDGCLLAMGYPATGQAQTVLGELGGGSGSGSASGSGVACSLGAAPCAIAWLYKGIQERRQKSGARFSVRVSAVGVSATKPDALSQDLLISHAAEYGVYSHIKPNALFIHSPLLFFWSQYWNSGSDYGYTESDDSPGIYLRDDFLAVQRNYVHPPPSVRPFSSTQRSPDA

SEQ ID NO: 35299 - DNA, 4583 bp, DROSOPHILA
ccgttggctccgagctctggtactcttctaaaggcatcgatggaggcagtcagcgaaacagcctctaatcagcagttggacccagtcgtaaatccagcgataagccgtgctctccatgcatctcatcgcagctaaaagaaaccaattttgtgcgttagctgggcaaaaagagcgagctgctggtgattgtcacttacccgtgagggaatccggatctccgttcgattttcggctgaaaattttccactttgataagagaagtttctaagaattaagagaatcgtccggggaaaattcctcaagcgctgtttacacaatgcaattcttatacaaattttcgggaaaaaaccgattatttccttattgaatcattcaaaattgtttaaaataataacattttaaattttaaaaatatattttttaatagtcaatatgtgtctatgcatatgttcatatgtctatatgttattaaattaaagattcttttaagattttaaaaacaatgccaatgatgttgaaaacatttaaaaacagtatgttcttcatttaaatcgtagatatattttttatagataaaattgcaccttgtaaacaccacttttcgatttcggtttttggtgttaaagcatacgttttattttaattgcatcttggtttcataggttcgtctctagcacagattgcagtgcagattataaacattctactattcacatcaaaaacagagtacgttcttagatatctaaaattctacgagctattgaggcagcagtcaccatgttgtaacttggctaacactcggaaataaatatacatgattattacagctagtaaaacaaattgtttgtttttgctacattctcaggtatgcacaaaactcaaaaggaaaacggaataacagtttgattatgggagttttaaaagaggaaagccgtaaagctgtaaagctggtttgtggatggtcaaacacgtccctctgtataacgtacagttcgatcctctagagcgccggcgcctcgggcagcagcgaggtgaagaacgtgatgacaaaggtgcgcacaacggaaatcacagaattattggcatttggtggttccacagcttccgcggaaacgtcagtcggttctggattagcagcggatgctggagcaacgggagccccagccggaggtgcatcgattgcatcttgttcaccagcagcagcaggtccagccgctggcactgcaccaggctcattggccgcctggggatcgttgttctcccgctgcacggccgcatccatcatgcgctgaatttgctgcactgcagcaaaggcggccgcatcgccagcattattgttacgatttatgttgttattgttccgctcgcggcgacgtcgaaggacaccaatgtgatatctaacaaacaattataatttcaatatatgtgtaaacttttcaattcgaatcaaagaggaaatgtacttacagataaatcgcacccgcgatgagcaccaccagtaaacaacgcagcgctgaggagttaaagtacaggacagtcacaaaaatggccaatcgcgtaaagctaaagaaactatccagccagtcgtgcatttccggttcctcctgaatgttgggaaaatttctgttctgcggcgctccattaatctgaggatcagcaggtacctgtgccgctggggcagcagctgctcctgccacttgttgtacctccccgaagtttcgcccagcaatcagtgggactgagggcaacaggggttgagtcggtggcggcaagccagattggttcgaaccgggcaacgtagaactgtgggtataatataagattgttgtgtaagaatcatagcattcaatattatagaaaataattgttcgtttacatgcaaaacttaattgcgcacaataaattcttcgggagcgaccccaaaattatattatttaactgtaatcgtggccatacaagtatactacaattttagcacgcctgataaccaaaataataaaaagattataaataatcaagaaacaactttaaaaatgctaaaacagcattttgatctcacttgaataataaagtacctcttaagagtgactaaatacaagtgtttctccttctgagaaaaataaaatgtattcgctatcgagctctgtgtaatttgattcgctcgcttctgatatcagtgaattaattgttggatcaagtgtgttcctttagccttctggttctgttcacttaccgtagagtcaactgctgcatgtactgcgcgtaagcctgctgcatccaggcgttgtagatgagcgcctgctgctggaacaaagcatggggactggcactggcattggcagcaggtgctgctccctggctctgctgccagaagtgtgtccagggattggccaaaccgatgtcacccgtcacgtgtggtccagcgttgccctgctgtgcctgctgctgatgtggagcatgacgttgtcgcagctcatttgcattcccagtgacctcgggcccagctggaaccgcatccttctgcggaacagtgggggctttggcagccggccttatcacttgcttgctggcacacaccaagtgaaatatgtggtgctgttggtagacatccttgtagctgcgtatcacctcagatatcttttgggagtcatctaatagcttgcccgagtaaataagtttctggtcctggattaactacagaaaaaatggaaagaaatagttatagtggtcaaaacataaaacataaaatttcacattataggtattcagagggaacctagagataactcattgttgcttttacctccgcgcgaaatttatactatcaaacagtgcctaaatctatttatttgcacactccaagagataacaacttgtacttgtcagttgactttatggaaatgatacttgaaactaaataaatttttataaattctacttgatttgctctggaaataaagagtgctaatgtattttttctgcctgcaatgatctgaatctttagtatatatcagtgatattgatatgtgggatgtacatatgtacataaaaaacttggcacatgagtggagcgtgaatatgtccaaaaatcttatcactttctaaccgtaaccaaattaatcccagttcccagttccgacccatcgatttggcatagaccaagtgcatgacgcaagtgcatgacggcgactataatttagaggagcaatccactgacgtgtacttgcgactaagacgcaaatagctttgggaaccgacacacctatgaatcctaaacgaagatgataaacaataacaaacttctcgataagataatggggctcctggccagttttctacctatacgataacaagggggggaaccaactcgataacccaccggtttgccaggatagataagagataggtgcttcttcagcctctggaccgtccagcagagatcggagtccacattgagatcctcatactgctggttggacgacttgatgagcagccggacactggtttccggattcttttgacgggtggcggcatcgcagcccgcggctgttgcggctgcgggtggggcggcgttctcctccatctggctgaccccgcgaatcggagaactttctattgctaattaatgaccgcgatacgaagatcggtgatgggtttttgctgcgctagcggggacactttttacgcagccactgtttctcacttcctactccgctctgctctctgcgtattttcgagaaatagtttattctgaatttgacatttaatttggtattatgctattgtttggttttcaacagctgttcgttctgtggtgttttgctcgcagcacagagttattgattatgaaacgcagtaaacgttccgcagttgatcaaaaactactcttcatttggttctgacctgtggcaagtgatgagcgtcggtcacagggctgccgcgagtagcaggtatttttaagtcgcaggttgcacaaacagctgagaattgattttccaaagtgtgtgggatgtggcaatttaagtacacagttggaaaatattaaagtcgttgctcaaacacttggttttagtgtttttagaatttattcctttgaaaaatatacggtatctagttatttgcagttgtggattttgctcatcactgacagcaacacttgttaatgccatatactacgcaacagggttgccttgacttacggggatgccaactcgcgtcatcgtgacgtgtcgattatgtataacacttcagacgttgaactttgaatgaaaacaccgaatagcatataaaatgcatttgctccttagtaaaaaagttaagaaggtttgccgctgttttcgtattcgaattacgaattcaatactatttcgtgaaaatatttttttgacaaagcggcataaaataattcatttacagatgtcttcgtcaagatttcctattctatcgttgccgcttcgtgattcgcgtgccatctctaataacattgcagtgctttagatattttataaattatatatatggttatattctgttgaatgttagcacgtccgacgtgccttttccccttgaactcatggataaca

SEQ ID NO: 35300 - DNA, 1398 bp, DROSOPHILA
atggaggagaacgccgccccacccgcagccgcaacagccgcgggctgcgatgccgccacccgtcaaaagaatccggaaaccagtgtccggctgctcatcaagtcgtccaaccagcagtatgaggatctcaatgtggactccgatctctgctggacggtccagaggctgaagaagcacctatctcttatctatcctggcaaaccgttaatccaggaccagaaacttatttactcgggcaagctattagatgactcccaaaagatatctgaggtgatacgcagctacaaggatgtctaccaacagcaccacatatttcacttggtgtgtgccagcaagcaagtgataaggccggctgccaaagcccccactgttccgcagaaggatgcggttccagctgggcccgaggtcactgggaatgcaaatgagctgcgacaacgtcatgctccacatcagcagcaggcacagcagggcaacgctggaccacacgtgacgggtgacatcggtttggccaatccctggacacacttctggcagcagagccagggagcagcacctgctgccaatgccagtgccagtccccatgctttgttccagcagcaggcgctcatctacaacgcctggatgcagcaggcttacgcgcagtacatgcagcagttgactctacgttctacgttgcccggttcgaaccaatctggcttgccgccaccgactcaacccctgttgccctcagtcccactgattgctgggcgaaacttcggggaggtacaacaagtggcaggagcagctgctgccccagcggcacaggtacctgctgatcctcagattaatggagcgccgcagaacagaaattttcccaacattcaggaggaaccggaaatgcacgactggctggatagtttctttagctttacgcgattggccatttttgtgactgtcctgtactttaactcctcagcgctgcgttgtttactggtggtgctcatcgcgggtgcgatttatctatatcacattggtgtccttcgacgtcgccgcgagcggaacaataacaacataaatcgtaacaataatgctggcgatgcggccgcctttgctgcagtgcagcaaattcagcgcatgatggatgcggccgtgcagcgggagaacaacgatccccaggcggccaatgagcctggtgcagtgccagcggctggacctgctgctgctggtgaacaagatgcaatcgatgcacctccggctggggctcccgttgctccagcatccgctgctaatccagaaccgactgacgtttccgcggaagctgtggaaccaccaaatgccaataattctgtgatttccgttgtgcgcacctttgtcatcacgttcttcacctcgctgctgcccgaggcgccggcgctctag

SEQ ID NO: 35301 - protein, 465 aa, DROSOPHILA
MEENAAPPAAATAAGCDAATRQKNPETSVRLLIKSSNQQYEDLNVDSDLCWTVQRLKKHLSLIYPGKPLIQDQKLIYSGKLLDDSQKISEVIRSYKDVYQQHHIFHLVCASKQVIRPAAKAPTVPQKDAVPAGPEVTGNANELRQRHAPHQQQAQQGNAGPHVTGDIGLANPWTHFWQQSQGAAPAANASASPHALFQQQALIYNAWMQQAYAQYMQQLTLRSTLPGSNQSGLPPPTQPLLPSVPLIAGRNFGEVQQVAGAAAAPAAQVPADPQINGAPQNRNFPNIQEEPEMHDWLDSFFSFTRLAIFVTVLYFNSSALRCLLVVLIAGAIYLYHIGVLRRRRERNNNNINRNNNAGDAAAFAAVQQIQRMMDAAVQRENNDPQAANEPGAVPAAGPAAAGEQDAIDAPPAGAPVAPASAANPEPTDVSAEAVEPPNANNSVISVVRTFVITFFTSLLPEAPAL

SEQ ID NO: 35302 - DNA, 2612 bp, DROSOPHILA
gaatttagtgagaatgcctaatttcatacacgtaaatatttacacttgcatgtttacaatgtgcatataaaatataaaaatgagaagtacacccaatgaaagcagtctttgtaaataaccacacctaagttttttaaacttttacccgcatttaattcgtttaatgtatttacaaataaatgctttggactactttttatatatatctacatcgcttaaagtaattcgtttgtagattgaagtacttttgatttaaatgttacattttattttatattatacatataatgattgtgctcgttgttatacatcaaatcaaaacaaagaacgttcttttaaaccaacatagtagtgaagtactggattacatcatcgtagatcttggattcctgggccacaaggacgacgtcgatgacgcagtttaactcgaagcacatcagcggttctttggacttcgacttcaaggtagtgattgtgggtcttatattcaaggcgcttagtaggctcatggctttttgctgagagctgtggtactcgtcagaatggattaccttaaaagcagcttccttaaggagtggatcaaaatttttgaagtagttgtggcgatcgaaaaagctaaaaaaaaagtccatgcgcattctgctcgccgcctccaaatcctccgaagagtcgagaacttctggtagtttgaaagttgccatgaattttagaccgtctggagtactaattggctgactaatttcaatgaaggactgtgacagctcgtttatgcaaggactactttctcttctcatcgtcatcaatatacattcacaattatcggcatatacgatagttaaagcatgcatccctattaagaaatcgacttaaaaaaaatatatatctaaccaaaagcttggtattttttaacatcctaatttttgtacttcagtaagcctttccctgacactcattttcatacgaaaatttataaattggtgccaaaactcgatagttggcaatgagcgaaccgctctcgggtcggtggctgcgtttcgtttacaatggcctgttgttggcttcggctgtctgtaccggccgtaaaatgctgccggaggagcaccccttcgccatggtcgcttgtgttgtggtcggattctcggcggtatttggactgctccgggtaatcttcgccagcggacagccggaggagtgccaacaactgagggatataaccagtggagtcctggaactggcacctttgcccctggccaatatggatttctatatgcagtccaccgggttgagtcccattgccttgggacatgccttcttcgtgcttccactgttttgcgatttgggttgcagcctggcgaaagatcggcgagattgtgccttcagcgacagcttgcggaatctcacggttctgggcaatattgtgtccctcggctttctggcctatgtggagcgaaattttctctatttgcgaatggtgctggtcatgattgtggtcaagtatggtgtggttctggtggacagcatcaaggaggacgccggagaggatctgcaggtgtgcggcacagcgctttttatgcacctgctcggcaaggccgtggtgtcctccactacgtgacccgatccttgggttaaaccctaaccgcgctccgcttcgagggtttcattgtaccgcttaattttccatgaatagagttttgacccgtattaaatttcatttcacccgcttttcaattgccgtgttcatgtttgctcatgtttttgtaattgctcaagcaccttgtgctttttacacttaaaaatatcgcgaaatacaataattttgggggaaaatgtaaagagaaacaagaaaatatcaaaaaagctcaatgtaggtgcttatatttggaaaccaatcctattgcctaaaaaagtacaagcaaggccggatcatcctattactgcgatttcttcgagtgcacatggggagttgacttctatggcttccctggtgtgtcacccacacattataatgatatatcggcgattaccaatgcgcaataagtgcctccagtcagtcgctccaagcagttgctgattcatcgcccgaaatcgttcaaatgcttctcccaatggtttctgcctttcagcggggggcttatcaattgatttggtttggataacagggcaatcgtattcgtcggatacggatacagtatctttcgataagtacttgtggtgggtaccttaactcgtactttgcgccggctgaaaaggtcgaatgaagctgaatgaaggacttttgtggatgacaacaataattgcaaataatgaataaaggaagctaatttaagaatattttagacagctttacaaggggactcatctctgataaatgatttataaagtacttattgatattttgatagaatacaatcatatcgtgatttggacaatattatgaacttatttaaaatgcacaattaccaaatccctcttgtgtaattgaaaactcatcgtgctgtcatgttttctaaaatacatatcgatttaaattagcgctgaacatactgcgctgtcaatttagtttatagacacaagtgttaaatttcatataaaaacaagggtacattatgaaa

SEQ ID NO: 35303 - DNA, 612 bp, DROSOPHILA
atgagcgaaccgctctcgggtcggtggctgcgtttcgtttacaatggcctgttgttggcttcggctgtctgtaccggccgtaaaatgctgccggaggagcaccccttcgccatggtcgcttgtgttgtggtcggattctcggcggtatttggactgctccgggtaatcttcgccagcggacagccggaggagtgccaacaactgagggatataaccagtggagtcctggaactggcacctttgcccctggccaatatggatttctatatgcagtccaccgggttgagtcccattgccttgggacatgccttcttcgtgcttccactgttttgcgatttgggttgcagcctggcgaaagatcggcgagattgtgccttcagcgacagcttgcggaatctcacggttctgggcaatattgtgtccctcggctttctggcctatgtggagcgaaattttctctatttgcgaatggtgctggtcatgattgtggtcaagtatggtgtggttctggtggacagcatcaaggaggacgccggagaggatctgcaggtgtgcggcacagcgctttttatgcacctgctcggcaaggccgtggtgtcctccactacgtga

SEQ ID NO: 35304 - protein, 203 aa, DROSOPHILA
MSEPLSGRWLRFVYNGLLLASAVCTGRKMLPEEHPFAMVACVVVGFSAVFGLLRVIFASGQPEECQQLRDITSGVLELAPLPLANMDFYMQSTGLSPIALGHAFFVLPLFCDLGCSLAKDRRDCAFSDSLRNLTVLGNIVSLGFLAYVERNFLYLRMVLVMIVVKYGVVLVDSIKEDAGEDLQVCGTALFMHLLGKAVVSSTT

SEQ ID NO: 35305 - DNA, 2618 bp, DROSOPHILA
ggaaacgggaaattgacttggttattctcactgggtcgccggaaaactcacgtttcgcgggttgccttgctttatgtagcactaaagtcgggaattgtgtggcaccaaggttaagattcttgccagatatggggtaaattgaaactgaacggactgtgtccttagaaaactgcgcacttttgagcttgcataaagcaaataccgagagaaaagttaaaatataagggttcttaagtgatctattgtgaaagaacttttgcagtgcaactaaagtgctttagataattatgcaccaaagaagatgcatttataaatcaatagaagaaaaagctaatttaatgtattcaattttctattaaattgctatcttagtaaaacctcactgtatagcgaaggtaccctacgaaatggggctaatgtcaaaacagtgtgtggtggagaaatccattgggcaacccctcgctccattagcatgggtttcacttgccttttgtctgggctgcgtatccacaatgatgcgaggtgccaggaggcgagggcccacccaaaaaacaatcgcgaacggggtaatgaaaaggcatttgggtgtgggaaaaaagaaataccatataatacaccaatgcaatgccgacactttgcgtgttcaataaaaaggaaagcggcggcaggcggaaaatggtgtcagtgcgaggacaacgaagaaggaaagtacttaagcggcgcgtcactcaatcagaatgatattatttttaatggcgcaaaatggatacaataaacagcgagtacgagcgcgtggctgccacgcaacggacacgccgacggtggtggcgcctgatcccacctagaatcagagaatcaccaacagaaccagaagcacagccagaatcgtgtgcgatggtagccatataaagttcggtcgtcgcaggatgaggacgaagttttaaacggaatcggaaacttaattacatttcaatttgggcctaaacaaactgttccgcatatgtcactcacggccatgaagtctgatgccgccgggatcggagtggtgggcgtgggcggaactgttgcactatccgattcccgggaatgggcacccccgccgccgggcaaccgatgtgccacagtgactatgctcctggcccagcggattgcacgcaatgcttgctggtcagtcgacgaggagccctcgtacagtgcgaacaagatgaacgtctggcaaacgctggagtacctctcggggttgagtctgcgtaagaagtacaactacgagggcttctcggacacccagaatgtgatcagaacgctcacgccatcgtggcggcgcgatagttttgccgagaaggccaaggccgaggaactgactggcggagctgctgcctcgacggtcaagtacaccgatgagcgctcctcgagtgctcccatcattgtcatccaggatccgggcataagtaccagcttccagagcagtgataacgttgccttgggcgtccgttccagggcaaaaagtccatctggtcttcgcaggaaacatcgcagtcggaagcgtaatactccgcagctagatcctgagtacgctctctcgccggaggatctgcaggacctagtcaagtgcaagtaagactaatcctagagatttcaattcaaccaaaagttgctgtttttgcactgtgagtctactttaatttataattataattaagaatcaattcatttgatccgctttaaaagacatatcacttagaaaggctcaagtaatttttctaagtgtaacaattcataaaagctttttgcaaagcttaccaggaacaaaaaccattgtgggctataataaaatgatatccaatactcaaacccttgattagaacgcatatcaatactttcataaatatacatatttcagtgcccaaatatgtttaaaaaaaacaacaaaatttaaaaaaaatccattctatcccatattttctgtttcacaagcaatatgaagtgaataacagcaggcaaaatgggatttgaagaacaaaaacatagattatgttgcgaccttcagtcgagagaaaaatgccaccaaggaaactggcaatgcttgtaaacaaaactaactgaaattgaaaatgacgacagcgggaaagtgcatttatattccaccgaaggttacacattaagattctcagattctcaaagttatttcttggggctctttggacacgaatcgcgaagccggaagacgttgcaattaaagttggcggagcaggtgaaggagaccattgtagaagtgggcgaaccggaaatcaaatgacttgctgacgggctgcaaatgtgaatggcatttgtgctgccatttttagctaacaaatttcaattgtttttaaatcataaaattgaactatcaacttcgaaatcatttattttctaaaattatgaagtaaaacattagctcagctaaatgcagaataccttaaatgtaggtatcagacatatgaattggtcttggcatgatctctatagaggcatctctggctaacacatcatgcatgaaccaatggcatcacacaggcaatgccaaagttgaaatttcgaacctattggccaacaagaaataaatgaaaccacccaaccac

SEQ ID NO: 35306 - DNA, 618 bp, DROSOPHILA
atgtcactcacggccatgaagtctgatgccgccgggatcggagtggtgggcgtgggcggaactgttgcactatccgattcccgggaatgggcacccccgccgccgggcaaccgatgtgccacagtgactatgctcctggcccagcggattgcacgcaatgcttgctggtcagtcgacgaggagccctcgtacagtgcgaacaagatgaacgtctggcaaacgctggagtacctctcggggttgagtctgcgtaagaagtacaactacgagggcttctcggacacccagaatgtgatcagaacgctcacgccatcgtggcggcgcgatagttttgccgagaaggccaaggccgaggaactgactggcggagctgctgcctcgacggtcaagtacaccgatgagcgctcctcgagtgctcccatcattgtcatccaggatccgggcataagtaccagcttccagagcagtgataacgttgccttgggcgtccgttccagggcaaaaagtccatctggtcttcgcaggaaacatcgcagtcggaagcgtaatactccgcagctagatcctgagtacgctctctcgccggaggatctgcaggacctagtcaagtgcaagtaa

SEQ ID NO: 35307 - protein, 205 aa, DROSOPHILA
MSLTAMKSDAAGIGVVGVGGTVALSDSREWAPPPPGNRCATVTMLLAQRIARNACWSVDEEPSYSANKMNVWQTLEYLSGLSLRKKYNYEGFSDTQNVIRTLTPSWRRDSFAEKAKAEELTGGAAASTVKYTDERSSSAPIIVIQDPGISTSFQSSDNVALGVRSRAKSPSGLRRKHRSRKRNTPQLDPEYALSPEDLQDLVKCK

SEQ ID NO: 35308 - DNA, 2534 bp, DROSOPHILA
ctttttcttttttaaagttgtaaaatccattccaagggatatgcatttttatatacagcatcgcgccaggcaataaagccaccgacgcgacacgtccgcgtacaaagaaagtaatttactatctggcagatcttgggctggccagagatacacaccatcacacaccgaatggggggtgtgcacatatgtgcgcttatctatccagatccgacatgcccctggcaatttaggcgataaagctttacacaaagcctctgcccacactcttacaagatttgcgtgaattacgatcggccaatgtgacgatgatgctgacttggataagatctccggagatttctaacgcagcttgcggcggaaaattagttcagtgctcggcggtgatttggatcaaacacttgtgtgtgctctcatccaaatcgaattggaattgtcctgaatccgaaactcaaggatctcgagagcgtgtgcgttatatatcgtcttaaaagagacttgttaatatcaaactatacttttagaagtgctttgcccgacttcaatttctgattgcaattaaaacaattttgtatagcttttgataaagtacacatttacattaataagagctattgtgatagaatccgttgaccttgaatacgtctgcgacacttgcgttctaaagatttaaaaaaatttcattttattaataatttttttttatttctctgtaaagaaagcgagttttgattttatttaacattcaactattttttaattaccttgcgattgagaagctagaaactttcgagtgattatctttaaaaaaagccctttaagtcggaagtggccttctattcgtaaaaacgaaccatactaaacgcaaagtcgaatttaattcacagtgattgtgctcgtgttaaactaatgcaaaagtaatcaaagccggacacattaaagtgacgcggctggaagtccataaaaataaactacataaaagcaacttgcggtgccggaaataatgtcaaccactgccgatcccgtggcgctgggggtaaactcccccgtggaggatgtagtggccaaaaccaccacaacggtggccaatgcgattgcgaagacagtggccgtaattagcagcacggtctcaactagctccacaactggcgccacttccaccatttcaacgagtagtagcacacccactacctcgaccactttcgcctacactcccacgcccactcccactcaatcagcatccccatccctggaggatggtgaggagaaactcagcgtgaaggatttaagccaggccctgcagcatttcggtattgttgattacttggtcttcatcgccatgttggcggtctgcgccgttatcggcttctatttcggctttatcgaaaagaagcaaaagaaacagaagctggccggcaaggacggcggtggggcggcgggcgtcgaggagaggcgtggctcggaggcgctggactacctggtgggcggacggcaaatgaaagtgtttccggtcgcgctgtcacttgtggccaggtgagttacagcttcggctggggtatatatatgtatatgcaaatggtaaattggcccggagaatttaatcctggctggccaacgggatgtgcacgggaaacaatttgaatacatttggcagggtttcaaaaagaaaatacggatctaactatattttgttaatttaaatttaaaaaaatgagttcagctccaggagaaaagaagctgatcaaaataaggatacttttttgccattatttttcgctgtgcagacctgcctaattacttttgacacggccgcagagaaggttgagcatcctaaatgaaagtgtgacaggaaggaagcttgcaaatttattgagcgatcccgctttaagccggcataatccgcaaaaattgaatgctatgcattcgcttgaatgcggctaatatttgcacaaattatcgtaatgggctaagccaagcccaggcagatcaatcaaaatactttcagtcagttcgccttattccatgccattggccaaacgtgcgtatacgtaatctaggcaaaatagataatctggcccagcccagcattgtctggcgaattgtttggcaagggcaaacagtgaagcattttatttaaaagtttccgactccggacagggcattgcgtaaacaatattcattgtcagggtcaatggatgatgagtgccttggtgttatgttggttggttggatgcctttggtttgtgctgatattgaaatggcttgcggaactttgcgagtaaatatatctggcatataaatacaacttagcagctcactgtgtctaagccggattgaagttatttaaacttgtgctcggccgcaaactcaaataatttgcccaaattactttttcttttgctgttcggacggccaagtgaccttggtcctgcggagtggggtgccttgtatttgacacattttggtcaagcacctttcgaagggtgcggtccctttgtcttagccgtgtgctcgacgcattaatgaccaggccgaca

SEQ ID NO: 35309 - DNA, 534 bp, DROSOPHILA
atgtcaaccactgccgatcccgtggcgctgggggtaaactcccccgtggaggatgtagtggccaaaaccaccacaacggtggccaatgcgattgcgaagacagtggccgtaattagcagcacggtctcaactagctccacaactggcgccacttccaccatttcaacgagtagtagcacacccactacctcgaccactttcgcctacactcccacgcccactcccactcaatcagcatccccatccctggaggatggtgaggagaaactcagcgtgaaggatttaagccaggccctgcagcatttcggtattgttgattacttggtcttcatcgccatgttggcggtctgcgccgttatcggcttctatttcggctttatcgaaaagaagcaaaagaaacagaagctggccggcaaggacggcggtggggcggcgggcgtcgaggagaggcgtggctcggaggcgctggactacctggtgggcggacggcaaatgaaagtgtttccggtcgcgctgtcacttgtggccaggtga

SEQ ID NO: 35310 - protein, 177 aa, DROSOPHILA
MSTTADPVALGVNSPVEDVVAKTTTTVANAIAKTVAVISSTVSTSSTTGATSTISTSSSTPTTSTTFAYTPTPTPTQSASPSLEDGEEKLSVKDLSQALQHFGIVDYLVFIAMLAVCAVIGFYFGFIEKKQKKQKLAGKDGGGAAGVEERRGSEALDYLVGGRQMKVFPVALSLVAR

SEQ ID NO: 35311 - DNA, 3966 bp, DROSOPHILA
ttccgtttcaaggcaccgtccccacagacagatgacccaatttttaagggtccttcagcactttattgagcgcctttctaaatccctttcgctttgcattccctttatgtcttaagtgtctgtaacctgaggctaagcggtctattttcagcagtccagacatgaccttaaagctagttgcctacttaaggattcctccagcgtggccatgccacgcattcgaatcattcgccttggatacacggcagcccgaggaggttcaaaggtaaataatcggataaatatttgtaataatttcttgaacgatgaaccacttccaagcgaacagcaagtggtatccaaaaccactttcgcactcacaatcagatgcagctcattagcatttgatttggcgtcgaaccgaagaaatatttccggcaaagcgggcaaacattgaacctttgctctgtgtcattgccatttgcggttagttgagcggcaaaaggtaaacaaatttacgggaaaactccctcaccacctgtggtttgaataatgaagaggtgtttgaggtgtgaaaataaatttggtagaaacgaagcgctggagtgagtaatcaatatgaatgcgatttaggtgcagagatctatcattccgtggtaaatatgtatatattgtacaactcatactcttcgtataaggaagtgaatcaaaatttgacaaataaccataataacgattatttctgattattttgataaatgcgaaatgcgacgaaaatgtatgtcgttaatgtttcagtttattcacacgagtaatatttatccaatctatctatccagtaggctggtgttataacattcactatctttctatatccctcattcattttagctaaatcatccaaagaacataaatagatgtaaaatatatcaaatacagtttatacattattgtgcttttgcgtttattggtgcaactcgaggccaacgaaagtttgtttcggtgagtaaagagcctttggatgaagatggtgcgcccaattcgtcgcaagggaatcgaggaggtctatggttccaaaatggattccttgcatccggtaaagtcggtagcgatatcccatgcaggtgtgaccaagaaaacagcaagggctgagagatcgggtccaggcggtgcaactggcggtggaggaaccattagctcccgacaagtcgatgctcgcactcagcgcagttttgtcaccgaaaatgattactacatcaccaccaatctgccgttgacggcggccaatctgcgaaatgcccccggttcgatggcgcagccatcaatatcgcaaatgattcccggccatgtccagccatctccatataacgccatgccctcgaggcgaaaccaaatggccaataaggccagtgctcgtcaggcgccgatgaacaaggtgccgcattttagcccggccgaaggcacggtaaaccctaatggctatggcatgtccaagtcgaaggagacataccgaatgaagcaccgcgaaaagggcaatacccagaggaacgactatccaatggatgacaacgacgactactccgataaggaactaatggtgccccagcagggaaacatgggaaatatgcgccggcacaatccgcactctcatgcccatcaaatgcaaatgcagttgcaatccggagcaatgcagcatccgccgcaacaccagctgcaccagcagcagcagatgactactcacaaccacctcaagcatcagcaacagcagcgcctccagcattcgcaaccgcatcagcatcagcatcagcatccgcatccgcatcagaagcagatgcgtgggcgacagcctgttccggcgagcaaggtgcacgtgagtaccgccgatgacgatgaagataaggaggaagatcctgaggagttctttgacctgatccgccagactgtcaaaacggccgttggcgtgagtttcgcataagttccttagttgattagttaatacactatgcactttctttagaacaccatatccgatgctctggcaaagaactttcgcgatctgagccacaaaatcgaaaggttctcgggcgagttgaagcagacaaacgataacctggataagctgcaggaacaagtcattagcagtgagtttatttactttcagtgtttatttggtatttataatatgtaactattttttggcatctgcagaggtaatttacttcggtgaggaaaattcgcgacactttcggtacttgtgcatgaaatccgagtacgataaaatgttttaccagcatcaatcgctgatgaatggaaagcccactcaggaaatgctgagtctttcgaaggcgaacttagaagcagcggcctcagtcagtcagaatctgacacagaaaccgtcgcatagtttaaaacaacaaccaggaaaagtgattaggaatcaaagcaaaatgcctattagcgccaaaaaagaccataacgagtccctaatgaactccagtgcctatcgtagcatctgcaaagctcagcagccagttcttgctgcacaaaagtcgtcatcggagcaaagtttagttgtaaaatcatctgatgtgggcgtgcaagaagtcctggataatatccagcgctactgcaatcaggtgaaggatatgaatggtcagatgtcggctgaactgcccagtctcgaggacatcttgatacccaagaaaaattcaaacggtggactttgtcagccagcagccatgagctctaggaccctcgcaggtagtcagaaaaataaaaaggttgacgacacggagatcgaaacgcccaacgatagtacggatgagacctacaccgaagtggatgacttccagctctcctcggacatctcgaccggcagcgaggacgatgactgtggcctcaagtatccaagtggagcaactacgagccggcccaaccgcaaattaaatcgaaggggagccaaccaaggcgccggagatggtcagtaaagccactggagtgaagataaaggagcattcaaactgaaggggaacccattcctagaaatcgccttaatacttatttaaatattacttttggcatgacctaaattatttctgataatgtaaagccaaaaaaaattggatcaaatgtttcgacaaattaactataacttatcgtacctggcgtacatgtattcatttaattcatttttaggatcacaattaaactatgttcaaaatttaaaactggctttcatattcttatttatgttatgtgaacagcttacattgagcataaaactgacctatttggcccttggcaatcccgattctcgctgagtaatgcccattggtgtcactaataagtgcatattatattgactgcaaagcaagaatcaactgagctggccaaaacaaggcatcacccccatccggcaaccgggtaaaactgagtcgagtggaaaataaggcctaagaccacccccactagccctaacctgcagctgcatttttatgggcttacgagtgtcgcggctctgcaagttcttccgctagttcagttggccaaaacagtttaaacgtggacgtggtccgtcggtaagatattggtgcgtctattcaaagtaaaatgagtatttaaataaaaagccaaacagcttaataaggccatatagttgctttttgggcaattaaagttaaaccccctaaaggaattgagctctaaattaaacttatgcaacgtggccaaatgaaaatgcttacttttcaactgatgttgcgtttgacgtgaattaaaagtgttatgcaaagccccaaaacccggaaaagtgccatacgaatgtcaaagcccaaggcacgagtgtcggttctgttttcaaggatattccactgaacagtttgcattggatagccataaaataaaataaaacattttgataaaccaacgaggatagcaaacattgtgcaagctatccacaagtgccgaactgtaagactggccaaattg

SEQ ID NO: 35312 - DNA, 1842 bp, DROSOPHILA
atgaagatggtgcgcccaattcgtcgcaagggaatcgaggaggtctatggttccaaaatggattccttgcatccggtaaagtcggtagcgatatcccatgcaggtgtgaccaagaaaacagcaagggctgagagatcgggtccaggcggtgcaactggcggtggaggaaccattagctcccgacaagtcgatgctcgcactcagcgcagttttgtcaccgaaaatgattactacatcaccaccaatctgccgttgacggcggccaatctgcgaaatgcccccggttcgatggcgcagccatcaatatcgcaaatgattcccggccatgtccagccatctccatataacgccatgccctcgaggcgaaaccaaatggccaataaggccagtgctcgtcaggcgccgatgaacaaggtgccgcattttagcccggccgaaggcacggtaaaccctaatggctatggcatgtccaagtcgaaggagacataccgaatgaagcaccgcgaaaagggcaatacccagaggaacgactatccaatggatgacaacgacgactactccgataaggaactaatggtgccccagcagggaaacatgggaaatatgcgccggcacaatccgcactctcatgcccatcaaatgcaaatgcagttgcaatccggagcaatgcagcatccgccgcaacaccagctgcaccagcagcagcagatgactactcacaaccacctcaagcatcagcaacagcagcgcctccagcattcgcaaccgcatcagcatcagcatcagcatccgcatccgcatcagaagcagatgcgtgggcgacagcctgttccggcgagcaaggtgcacgtgagtaccgccgatgacgatgaagataaggaggaagatcctgaggagttctttgacctgatccgccagactgtcaaaacggccgttggcaacaccatatccgatgctctggcaaagaactttcgcgatctgagccacaaaatcgaaaggttctcgggcgagttgaagcagacaaacgataacctggataagctgcaggaacaagtcattagcaaggtaatttacttcggtgaggaaaattcgcgacactttcggtacttgtgcatgaaatccgagtacgataaaatgttttaccagcatcaatcgctgatgaatggaaagcccactcaggaaatgctgagtctttcgaaggcgaacttagaagcagcggcctcagtcagtcagaatctgacacagaaaccgtcgcatagtttaaaacaacaaccaggaaaagtgattaggaatcaaagcaaaatgcctattagcgccaaaaaagaccataacgagtccctaatgaactccagtgcctatcgtagcatctgcaaagctcagcagccagttcttgctgcacaaaagtcgtcatcggagcaaagtttagttgtaaaatcatctgatgtgggcgtgcaagaagtcctggataatatccagcgctactgcaatcaggtgaaggatatgaatggtcagatgtcggctgaactgcccagtctcgaggacatcttgatacccaagaaaaattcaaacggtggactttgtcagccagcagccatgagctctaggaccctcgcaggtagtcagaaaaataaaaaggttgacgacacggagatcgaaacgcccaacgatagtacggatgagacctacaccgaagtggatgacttccagctctcctcggacatctcgaccggcagcgaggacgatgactgtggcctcaagtatccaagtggagcaactacgagccggcccaaccgcaaattaaatcgaaggggagccaaccaaggcgccggagatggtcagtaa

SEQ ID NO: 35313 - protein, 613 aa, DROSOPHILA
MKMVRPIRRKGIEEVYGSKMDSLHPVKSVAISHAGVTKKTARAERSGPGGATGGGGTISSRQVDARTQRSFVTENDYYITTNLPLTAANLRNAPGSMAQPSISQMIPGHVQPSPYNAMPSRRNQMANKASARQAPMNKVPHFSPAEGTVNPNGYGMSKSKETYRMKHREKGNTQRNDYPMDDNDDYSDKELMVPQQGNMGNMRRHNPHSHAHQMQMQLQSGAMQHPPQHQLHQQQQMTTHNHLKHQQQQRLQHSQPHQHQHQHPHPHQKQMRGRQPVPASKVHVSTADDDEDKEEDPEEFFDLIRQTVKTAVGNTISDALAKNFRDLSHKIERFSGELKQTNDNLDKLQEQVISKVIYFGEENSRHFRYLCMKSEYDKMFYQHQSLMNGKPTQEMLSLSKANLEAAASVSQNLTQKPSHSLKQQPGKVIRNQSKMPISAKKDHNESLMNSSAYRSICKAQQPVLAAQKSSSEQSLVVKSSDVGVQEVLDNIQRYCNQVKDMNGQMSAELPSLEDILIPKKNSNGGLCQPAAMSSRTLAGSQKNKKVDDTEIETPNDSTDETYTEVDDFQLSSDISTGSEDDDCGLKYPSGATTSRPNRKLNRRGANQGAGDGQ

SEQ ID NO: 35314 - DNA, 3332 bp, DROSOPHILA
tctcataaattcaatcaaaatgtcataaaatacatttataactcatttacagtgcttattaacacatgcacaaaatgggcgccaactcattaacgccccctaggacatgagttgatacgtggtcccagttcccagttcctttctcactccgaatgctgcgtcattgttggcactacaactgcctttaatctgatttcaattataattccattttactgcactaatgtcgtttggcgcccactgccggctgctgtggctccctgtgaatggcctcgagtcacccactatccacattcagttgccaccacccacccacctgataaagcccatcaggagcgcgacccactcgttgtaatttcccctttgtgcaacagcattttaacgcaatttatggggtctgacaatgggcagttccttgcgccgatggcgttaaaatttccattcgtagtgccaccggaagtatggttataaaatgtcaacaacaatgctaacccaaaacagttgccacacatccggtatgcaactcgcccgtgtctgtgtgggttttgctgacgtttttgtaacgatttttacggtttgatgtcatgcaccgccgtccaccttcgtttttcgcaaaatttccagtggcatgcaacaaggagtcgggctgtaattgactttatggtctgcattcaaccaggcaattggtctaattatacaaattgtttggcggattataaattacactgcagtttgcatatcgaagttggtaaaagggacatttccgagaaaccaaatccatcgtcctgaaatagttttttaatagaatcagccagataggaactcctgaaggtgtttgcttccatttcggtacctataacctttattagtgggaaaatataaattttcataagttagtttttcctcattcctaacctattacatgctgaaacgggattgttaggcgtcatattcttgacacataaatcgtgtaaaatccagtcactaacatccgccttctatgcttacatgccttgcagatgaagtttgcccctcgacaatatatgacaagtgcaacacaacaacaggagcagcagcagcaacaatgaccaagcaattgacaacggcaactgcaacaaatgcggcatctagcataggacaaccgggtgatttggcccccacagttatatccccaaccgcgccatccacactaacgacgggcggagcaggaggagccggagcaggtggaaccatttcacctgtcagcgaggcaacaaagactgcgccaccaccacaacccgttgaggagaagccctcgagtagcgatgccagtggcagatcggcggctctggagcgtgcctatgtgcacgatgtatacgagcactgtgaggagccaacgggtcccgtccgaccacgtatggcccacttccttagcgggctcgatcccggctccgtggtctgcgacgtcggttgcggcagtggaaggtacctcacccagtgcaatccggccatctgcaccattggcgtggagcgatgctaccgcctgagcaaagtagcccacgaaaagggcggcgaggtaagttctttattatagaaatcagctcgtaattccagctaaccacctcggctaataacatttcacatacaaatatagaaaaaaatcgttgtgtttcgtgataagtaactattgtttatgaatgtttagccgtatatatacagaggacatcttggagccttaggattgcaaggccttcggggtggtttataccaatctttaatgggtccccatgaccatttgagaggcggttgaggctctgtgatcgcaaaagtcgcaagtaaaaaatatgaaattccaaaattggcattcatattaaagtaatgtaaatctttccagcaatatgcgttcttatacagctttttaatggaactaatgtcattaccgctactttaaaatccgtataattaccttcacaatatttttaaaggtataatataccggagataggagactcctactcccttttcatatttgcaaagtagcaacatttttctaaaagtttctcttaacttaattcattaatttggttttgggcagaatgaaataattcgtttcacgttttcaactcggattaagcttacccaaaaatttctaagtatgttcttgataaactgaattcgcaaaatgagcaccgcataaactcatcaagtctatgtgcaatctaattgcagcctgctgctaattgcatgtgtttgctgtggtcgtgttctccttgaagttccgttctcttggccatagaattgacccattttccatttaccccttaaccagcaaaaggtggaaaaggggaagtgagagaaccagaagtgtaaaacattcgctagattcaaatgtcggctgctccacttaacttggccattagcagaacgcataaattatgcttatcattgggtattatatgcacatgttccgctcgcctgctgcattgggagtttttagtgcctcataattgcaatggtccacaacggtgccgtaaaacgagtcatttggaggagcagttaaccaggcggatcccataaactgcacatggttggcagccaaaagggatgcataatcgccaattggatttaatgcacttccagctgcagcagcttccgttttaatttagatcctaagtgggattaggatttatatttaatgagtaaatgcattctgcatgagtgaattatttaccagtatctaatatgcacgctgaaatgacaactaatttggctaaattgtaaaagtcgttaggagaattagagacttccgtttttgggttcataaattgtggatatattttataaatatatgcttgtgctctcttttcatatttaaaaaggtttcttggaaaatctaaaagtatactgatccaatctgttagcaatgccttattccgtacatttttcttattatggagcagtttgaaaggcttttactattctttgggacaattgcgctaacaatatgtcatgtattaagctcagaaattgtaaggtttatggggtggaagagcactcctcgaacttctgggcacaattaagtgatacgctcggctatgtcataatgaacatgaagtacagcgcacttagtttttatccccctgaacaatattcgcttaacaatgacacaactctgctgcatagttttcgccattttcttttgtcccgctgttgctgcagtcgctcctggcaacccccaacatttccttttacaaggaacaacaataaattgcgatcccccttcctgcgccgcgtgaaaccgacgctatagtggtatatagccagctgcctgaggtatgcaatgctttttgcca

SEQ ID NO: 35315 - DNA, 579 bp, DROSOPHILA
atgcttacatgccttgcagatgaagtttgcccctcgacaatatatgacaagtgcaacacaacaacaggagcagcagcagcaacaatgaccaagcaattgacaacggcaactgcaacaaatgcggcatctagcataggacaaccgggtgatttggcccccacagttatatccccaaccgcgccatccacactaacgacgggcggagcaggaggagccggagcaggtggaaccatttcacctgtcagcgaggcaacaaagactgcgccaccaccacaacccgttgaggagaagccctcgagtagcgatgccagtggcagatcggcggctctggagcgtgcctatgtgcacgatgtatacgagcactgtgaggagccaacgggtcccgtccgaccacgtatggcccacttccttagcgggctcgatcccggctccgtggtctgcgacgtcggttgcggcagtggaaggtacctcacccagtgcaatccggccatctgcaccattggcgtggagcgatgctaccgcctgagcaaagtagcccacgaaaagggcggcgagcaaaaggtggaaaaggggaagtga

SEQ ID NO: 35316 - protein, 192 aa, DROSOPHILA
MLTCLADEVCPSTIYDKCNTTTGAAAATMTKQLTTATATNAASSIGQPGDLAPTVISPTAPSTLTTGGAGGAGAGGTISPVSEATKTAPPPQPVEEKPSSSDASGRSAALERAYVHDVYEHCEEPTGPVRPRMAHFLSGLDPGSVVCDVGCGSGRYLTQCNPAICTIGVERCYRLSKVAHEKGGEQKVEKGK

SEQ ID NO: 35317 - DNA, 2831 bp, DROSOPHILA
tctgcgatgcgaaaatattaacataaatgtatattgatattggggggcgtaaactacgtgatatctccttggccgtctgtataaactccatatagttctttttgcatgtttgcttgagcgttgctgccgtcgtttcgttgtaggcctcgatttccttttttcgctgctgcaaatcgctgccacccacacattctcgtgtcaggtccttggtatctgggaacgttgtacttattagtagactgattaatgctaaatagacataggaatacttacatttctcaacgctaaaattaaaatcgtcgaactccttcatgattctgattggaatgtaaactgcagctgacgcagagccattcacaacgaacgagcgtcatcatgaggtgtcgattgtaaggttgctgatgctatagaaaatgccatgttttcactgcagttttccctggtattagataaatctataaatctagaacatttttatttagttttaagtaataggagattaattaagatttaaaacctatgaaaagttttattcgaactgaacggctacgtcaaagaccttttagagatcaacaaatttattcgcatttacatttcggattttcatcttaggtatgattaggcgttgaagccctgaatactttttattcgaactgaacttttaaatataaacgactacgtcaaagatctacgttaaaaatcaagaagacatatgtctatatgtatactattcattacaatgtgtgtgtgttgtattgtaataaattaaaattattttccacctgttgctaattcactaagttgaagtgtgaacagttctttcagagtgcaccggcaaagcttcttcttcccactagcactattcgcatgtaagcgccaacacgtcttggccaccttagaatcgcgcacacccttcgcttattgttttggttgatgagtaatctttaggaaactccgtcattcttcgtaattaaatcttgcagttaagatatccttaaacatggactggctattcggcaagaagatcagccccgatgagatgctgcgtaagaatcagcgggcgctcaacaaagcgatgcgagatctggaccgcgagcggatgaaaatggagcagcaggagaagaagattatcgcggatatcaagaagatggccaaggagggtcaaatggatgccgtgaagatcatggccaaggatctggtgcgcacgcggcggtatgccaagaagttcatgctgatgaaggcaaacatccaggcggtgtccctcaaaattcagacgctcaagtcgcagaacacaatggcacaggccatgaaaggtaaacattggctatttggctgattcacccgcttatcaagcaattatgcttatcttccaggtgtcacgaaggccatgcagaacatgaaccgccagctgaatctcccgcaaatccagaagatcctgcaggacttcgagaaacagtcggaaatgatggacatgaaggaggagatgatcaacgatgccatcgatgacgccatggaggacgagggcgacgaggaggagacggatgctgttgtgtcccaggtgctggacgaactgggtctgcaattgggcgaacagctgggagaccttccttccgcctccggttccctttccatagccggcggcgctggcgctcagaaagcacaggctgtggccgctggtggcgttggcggcggtggagccgccggcggaggtggagctagtggtggcggcgctggtggtccgggagctcccggtggcagtggtgcctcatcgcccatgtccgatgccgatgcggatcttcaggcgcgcctggataagctgcgcaaggattgagccgctactaagaaccactgcctgtccactttatgtaagagccaccacccgtttgtatctcccagaagcgaatgttatattaaagagaatgcttgtgattttcgttccctgcgtgtttgaaaaatcgatgagtaattagcatttacaagctataatggaaagaactgggtagtgctgcaatcgcacagcctagctacaaacaaattcgcaatacttgttactttagagctatacaatattcggtattttaaaagatatgtacgtttcatgcctgtcttcaataaaataagaaaaaggaatttccaaatcatgaaattatatatatatgtatatacatatattcagctttaactataaatgcaaaattgtgtttatctgaataaaaagaagtactttcctaaatttgtactattgggtactatagaaatatgtaaaacacttgaaaaatgaaaatcacatagcacttgtataaataagaaaacttgttttaaatgtcataatatgaacaggggatttaatttattgtttattgctctttaacgttcctacatttaaaatagttctcaatccatttgctttagataacatataattccagaataacttttgcctagctccattttttactcgatattaaaaagtgtgtgtgtacctccgctttccttgattgggtatactaaacttcatgtgtatcttgtatcttatcggggtgaagaaaaagtaccttatgcattactattaacaagcgtatatatgtatttttttagagggtacaaatgaaaggtaaggatagcactacacacataaccggaatatgaacaggaaatctagaagccgctggccacaaatatcttttccacctccccgaacacctcttccgcatccggactggcatcgatccgtttcacctggccggcgccctcgaagaacttgatgatgggcagcgagtcgttgttgtatgtcgagatgcgcttcttcaggctgtccaggttgtcgtccg

SEQ ID NO: 35318 - DNA, 771 bp, DROSOPHILA
atggactggctattcggcaagaagatcagccccgatgagatgctgcgtaagaatcagcgggcgctcaacaaagcgatgcgagatctggaccgcgagcggatgaaaatggagcagcaggagaagaagattatcgcggatatcaagaagatggccaaggagggtcaaatggatgccgtgaagatcatggccaaggatctggtgcgcacgcggcggtatgccaagaagttcatgctgatgaaggcaaacatccaggcggtgtccctcaaaattcagacgctcaagtcgcagaacacaatggcacaggccatgaaaggtgtcacgaaggccatgcagaacatgaaccgccagctgaatctcccgcaaatccagaagatcctgcaggacttcgagaaacagtcggaaatgatggacatgaaggaggagatgatcaacgatgccatcgatgacgccatggaggacgagggcgacgaggaggagacggatgctgttgtgtcccaggtgctggacgaactgggtctgcaattgggcgaacagctgggagaccttccttccgcctccggttccctttccatagccggcggcgctggcgctcagaaagcacaggctgtggccgctggtggcgttggcggcggtggagccgccggcggaggtggagctagtggtggcggcgctggtggtccgggagctcccggtggcagtggtgcctcatcgcccatgtccgatgccgatgcggatcttcaggcgcgcctggataagctgcgcaaggattga

SEQ ID NO: 35319 - protein, 256 aa, DROSOPHILA
MDWLFGKKISPDEMLRKNQRALNKAMRDLDRERMKMEQQEKKIIADIKKMAKEGQMDAVKIMAKDLVRTRRYAKKFMLMKANIQAVSLKIQTLKSQNTMAQAMKGVTKAMQNMNRQLNLPQIQKILQDFEKQSEMMDMKEEMINDAIDDAMEDEGDEEETDAVVSQVLDELGLQLGEQLGDLPSASGSLSIAGGAGAQKAQAVAAGGVGGGGAAGGGGASGGGAGGPGAPGGSGASSPMSDADADLQARLDKLRKD

SEQ ID NO: 35320 - DNA, 2652 bp, DROSOPHILA
atcatgtatattacctgctaaataagtcttttaaattagctgcgcttggttgttttgtatcaagtcggccactagttggtagggaataatatgctgggagccggccgccatgtccacctcctcatcatcgacgcccacgatcacagcgggcactggaaagcaaaacaagagttaagcggttatcttaattagatgacaaaaggttattacctgccacatttgccttaagaaagacatggctcatcagattgggcgtcacaatcctctgctccgcctctcctctctgctggttgggcatgtactgggtggctactttgtggaagtactcatccacattactggcaaactcctgggcgaacttagtctcctcgggagacagacgtttgtcatccggctcacggctctcctcctggttgaggatgtgctgcgtgaaggtttcgatcttctgcaggcggcaacgcagataactggccattatgtagcgcaccctctccagttccatggagtgcaccaccgctcggaaatcgttcttgtccagatcgcgcatctgctcctccatgtgggccacctgggagaccatcagctccagcatgtccgtctggctgggcaggatctccggcgcacacatttcatttatccacgcggtttctatgatttccagaacctagggatatcagaatgtgattacttgcgtattaaaaagctgtgttacgatttaccttaccttctgagctgtaatctgttccatatcgtcatcatcctcatcctccagtccggcgccatcgctgacatcgatttctaactgggtttcgggcacgtcttctacatccgacatggttttatttatttgtttattattttgcagattttggcgcaaattttgggaatcgttgggaatgtcactccagtaatacagttgacgtttttcatcactgtttcatttgtttttactccgtgtgaatggcacgtctaaccgttatcgatatcacaaaagcatgcgatggcagccgcacaacaaactgaattccaaaagaattttagagtgattgtagagaagatcttcaatcactggcaggatctccggctggcggtggagcatggcatgggcggacgcaatggccaacaggttgttgctcgtataccctgaaaccgtcttcttttctaacctaatcggagtgtccgttttgtaggtggccatagaaatcatggactacacctaccagtactgcgtgtccaacgaaaatatcacgcaaggcgaactggtggaggtcctggaggagctgatggaccaggagtttaacaccctctgcgacgacgactccattccggagatctgccggaatctgctgcgctacaaattgatggcccagcagaaccagtttccgcaaatagaggctgaattgagtaaacttcctgctggcaaggagtggctgcgtccggatgttaagatcacctacacacccatcgatggggactcctcatccgatgaggacatggacgacagcgacgaggaggacgataatgaaatgggccagggcgacgaggaaactcccagcggcagtggtcggatgacgcgatcgcaggcacgaaagcagcaggctgaggagtttgtggaaccggaagacggctggaccaccgtgcgaagaaaatgaatttcgtcgggatgattaaaaagaaacctgctagttttttagttataatacgctgtatttacttcctggaggtccagaaaacgcagtggtggaataggtgcacgtgtcacaggttggtggaaagtcctgcacaggttgcagttcactggagaggccttctttgatgcggaatcctggctgaccttgcctttttgcaactgcgaccaggaggtgaactctgtccccttgggcagtgccagctttggatccaccaccgaggcaatggaatcaacatccactgtcatcgatagatttatggcaggatagatgaggaaggcaaagaaccaggcgaagaccagcaccagaaaaggcacaaatacggcaaaatacttgtccggcagatacgagtgcagaccaaactccactggcagcagcgcccaagtcacgtatacgaggaagaggaccgtgaacagcatatagaaggcgaaaccatagaccgccctatggggagtcggagctggagtgtgttccggcattgtcgttgctctcggggattagtttctctttcttggagtctccgaactggttgatggtgtcctggcacaggagcaggcactcaaagaaggaggtgatggcagtgcgcaggctcttcacttgatccgactgaaagtgcacaaccagaacatcgttctccaggctcaaagtttttttcacgaaattccggcgcggctcctggtcgacaccgaggactttgtaggcgatctcggccaatcgtggcgtctcaaacggcactcttattatgctaatgaggcgaatatttattactaaatttatgtttatttctttgttaaatggttaaacttacgattcatttggtttatttgcaatttgtggcatcataaaagttttaaccaatctgaaatgctcacatgtcaacggagaaagttaatgacaatttatgaagaagaagcattcaccggctgtttatctcgtgaacagctgattgaagaattcaaatgtt

SEQ ID NO: 35321 - DNA, 588 bp, DROSOPHILA
atggcagccgcacaacaaactgaattccaaaagaattttagagtgattgtagagaagatcttcaatcactggcaggatctccggctggcggtggagcatggcatgggcggacgcaatggccaacaggtggccatagaaatcatggactacacctaccagtactgcgtgtccaacgaaaatatcacgcaaggcgaactggtggaggtcctggaggagctgatggaccaggagtttaacaccctctgcgacgacgactccattccggagatctgccggaatctgctgcgctacaaattgatggcccagcagaaccagtttccgcaaatagaggctgaattgagtaaacttcctgctggcaaggagtggctgcgtccggatgttaagatcacctacacacccatcgatggggactcctcatccgatgaggacatggacgacagcgacgaggaggacgataatgaaatgggccagggcgacgaggaaactcccagcggcagtggtcggatgacgcgatcgcaggcacgaaagcagcaggctgaggagtttgtggaaccggaagacggctggaccaccgtgcgaagaaaatga

SEQ ID NO: 35322 - protein, 195 aa, DROSOPHILA
MAAAQQTEFQKNFRVIVEKIFNHWQDLRLAVEHGMGGRNGQQVAIEIMDYTYQYCVSNENITQGELVEVLEELMDQEFNTLCDDDSIPEICRNLLRYKLMAQQNQFPQIEAELSKLPAGKEWLRPDVKITYTPIDGDSSSDEDMDDSDEEDDNEMGQGDEETPSGSGRMTRSQARKQQAEEFVEPEDGWTTVRRK

SEQ ID NO: 35323 - DNA, 3741 bp, DROSOPHILA
ggagcgcccttgggagcgggcttcttgccggcgactttggcacctggctttccggctgcctttcccgcgggcttcttggcggcagccttcaccggcttcttctccacaaccttcttgacgggcttgaccaaagcctcgcgctggctcttcagagccttgacgatcttctgctcttcgatgaggaaagcgcggacgattctctctcgcaggcagctgtggcacaggacacctccgtaggtcctggagacggtcttcaaacgcttggacatcctgggacgctcgctgggccgggagggggtgatcccgtggagtttctccttgcactgaccacagcgtggcacagtggggttcttcttcacgtactggtacaccagacggcctccgggagtgcgcacactgtaaacaaatggaaaatccttagttatcgtgggatatacagcatatctcctgctactcacatgcgcctcttgttggagcgggtgttgtacgacagacgtcgtctcagagtcaagcgttggaccattttaaagcttctgaatccaattgaccacccggaataaacaccatttccaaggaattcatggaaaaaaacagaacaaagacgaaacatcagaagtgcgttgccactacatggtagtctagttttgcatcgcaattaacgtcactaaagcgctttttgcaatcaaaataatcattacaattaaaacacaaacctctccggaaatcaaaagaaggaagaagagaagctagagctggaagaaaaattgatgatattaattgctatcgataatttcaaaacatttatctcgaacacatttaactgacacaatatatattatttagtaccaaaaccagttgtttattcgttctactaaactttttagtatgtaaacttccaaaaagtacaaatatgcattattggactttgtgtagccctgacccgccactttacttaaacttatcgatagcctgttgattaccaaacttccatctctattgcttaaacacgcggctattttgtaaataaaaaaatcttcttacggtttttaactaaaaacatgagttttctgaaacccaagacccacatagaaaagggcgatgtggtcatcctttatttgagtgtcagttccatgcatgccatcgaagcggtgcccgaaatagtgaacaaaaagggcgaaacaataccgcatatttttcagaccaattatggatcgctaaaagttgaaagtaagttaaagttatagatttaacggattctcctaatcccaattcctattccagatatcatcggcgtggagtatggtagtaaagtggagctctccaagggctgggcccatgtccttcagccgacgccggaactctggacacaaacactgccccaccgcacacagattatttacacgccggatattagtatgattatccaccagctggaggtccgacccggtgccgtggtggttgagtcgggcacgggatcggggtctctatcgcattactttctaagagcactgaaacccactggccacctgcacaccttcgatttccacgaagctcgagcggatcaggcacgcgacgagttccggcgacatggtatcgctgacttcgtcaccgtctatcaccgggacgtttgcaatctgggctttggtgcggaactggacggaaaggccgatgcggtcttcttggatctgcccgcgcccgatctcgctgtgccgcacgccttcaaggcgttgaagctgtccggtgagtggccaacatcgcgttgacaactagttgtcagcgcccttttgcgggcaatccggcaatcaggcggatatgttgggttaactgggatgaccaggtacattcacatacatgcaataaatcgtcgaaattggtacactaagttgtacctaggagacaactttgtttagacagcttaaattttagttatagtaaaataacttaacaaaaacttacttccattttaaaaagaaaaaagggcttaagtgtacctaattggataaaaggtacctcaatgctttctatattgcaacactgtcggtaggtcagtcagttatccatccaaagagccaaagatccagtcagctagtcagtccggctgccatttcactgtgtttgacattgaatgagcccgcttttgacacttgatgcggccaaggcaggctgaccgggcgagtttgtcattaggcggatgggagcttccaatgtacagcaggtttgcaccaaacctagggtgctactgtattggaggcacaaataaattgtcaggcatatccaataccaaaagagttagggaaagcttgcccaccaatatatttaaattttaagaagctataatgtagtaattacaattgaggtcgagcagaaaaggcaccaaaaatgtataaccggatttcccattctctttctttccaggaggtcgtttctgttcgttttcgccctgcattgagcagtcgcagcgctgcatccaagagctaaccaagctgggcttcaacgagattgtttccttggaggtgctgcagcaggagaacgtggtgaagacgcgcacgctgcccgtcatcgatcttgagttccttaaattgcccaaaaccgatgagacgacggcggcaacaaatgccttggagagcaaggcgccaaaggaggtgaagaagtacctgacctccagtaatccccaaaccctgcccggtcacacgggcttcctcaccttcgccactttgccaccaaatatacccaaggcctgatgaataaacttgaatttacttttatttgacccacgaaccacgatctacatcattcgtcgtaggagtaagagtaggagaattcctcgaagtacttgcgttcgctggtctttacagatccgcagtggtagcatcgatgcggctttacttgctcctgggtcttccggttccaggactttctctcgggcgcccaaggagttcgctgctcgggtatggccacctcggtgcgctccggattgccgctgcaggtgggacaccgacccacaaccgccggtttgggcagcatgccatagataagtggtcccggcggttgttttccgtaaatggtgaccacttccgggaggctggagtacggacgggtggcaaaaagcttctcgcggttaagaaaactaaaataatcaggtgagaagatgttacatggggaattacaaaaaaaaaaaacaaatgcatattactttgatcaataggttattaaatctgttgctaatttgaactataattatgttgctagggtgaaaaataaaggagaaatgagaatagcttcgtgtattggagactaccgaccgattaatctgtaataagtacttcgaccttttatcaaattggctaaaattttaattcattatcaaaactattcccgtatttaaacaaaaccaaataacaatcatttggatttaggctgattagagaagactactcacttgggccgcggctccagccagagattgttgatgcgcttggtgcgcatgatgtcgcccagtttctggaggagtcttaggttctcccgctcgatctgctgctggcgctcccgctccacttgctgcttcttccacttgcgctgcacgtgttcgtgggcgcgcggcgagtgggtgtcaatggctgggcgggcggacatgaccttctcgcggtgctgggcgtaccgcagttgctcccacggctgctgcagcaatttgtcgcgtcgtgagatcatcttcggtggttttcggttctcggagggcaaatg

SEQ ID NO: 35324 - DNA, 1012 bp, DROSOPHILA
ttaaacacgcggctattttgtaaataaaaaaatcttcttacggtttttaactaaaaacatgagttttctgaaacccaagacccacatagaaaagggcgatgtggtcatcctttatttgagtgtcagttccatgcatgccatcgaagcggtgcccgaaatagtgaacaaaaagggcgaaacaataccgcatatttttcagaccaattatggatcgctaaaagttgaaaatatcatcggcgtggagtatggtagtaaagtggagctctccaagggctgggcccatgtccttcagccgacgccggaactctggacacaaacactgccccaccgcacacagattatttacacgccggatattagtatgattatccaccagctggaggtccgacccggtgccgtggtggttgagtcgggcacgggatcggggtctctatcgcattactttctaagagcactgaaacccactggccacctgcacaccttcgatttccacgaagctcgagcggatcaggcacgcgacgagttccggcgacatggtatcgctgacttcgtcaccgtctatcaccgggacgtttgcaatctgggctttggtgcggaactggacggaaaggccgatgcggtcttcttggatctgcccgcgcccgatctcgctgtgccgcacgccttcaaggcgttgaagctgtccggaggtcgtttctgttcgttttcgccctgcattgagcagtcgcagcgctgcatccaagagctaaccaagctgggcttcaacgagattgtttccttggaggtgctgcagcaggagaacgtggtgaagacgcgcacgctgcccgtcatcgatcttgagttccttaaattgcccaaaaccgatgagacgacggcggcaacaaatgccttggagagcaaggcgccaaaggaggtgaagaagtacctgacctccagtaatccccaaaccctgcccggtcacacgggcttcctcaccttcgccactttgccaccaaatatacccaaggcctga

SEQ ID NO: 35325 - protein, 317 aa, DROSOPHILA
MSFLKPKTHIEKGDVVILYLSVSSMHAIEAVPEIVNKKGETIPHIFQTNYGSLKVENIIGVEYGSKVELSKGWAHVLQPTPELWTQTLPHRTQIIYTPDISMIIHQLEVRPGAVVVESGTGSGSLSHYFLRALKPTGHLHTFDFHEARADQARDEFRRHGIADFVTVYHRDVCNLGFGAELDGKADAVFLDLPAPDLAVPHAFKALKLSGGRFCSFSPCIEQSQRCIQELTKLGFNEIVSLEVLQQENVVKTRTLPVIDLEFLKLPKTDETTAATNALESKAPKEVKKYLTSSNPQTLPGHTGFLTFATLPPNIPKA

SEQ ID NO: 35326 - DNA, 2270 bp, DROSOPHILA
tacatgatgtatgtatgtatgatttaagtttccatggaaatttaaactgtattacttaaagtattatttacatttatgttatacttttgcaaaagaattgttttaaaggaatacgagaatattcaactaggcaaaagcgccaaacttaaataattaaacactaacgtgcgtcaactaatttattttatattacatcgcgttatttgaaatgcatttgagcacaaatccaaatatgtattaattcactgcattttactaaaggcccgacctaattagcagcttttcgcaagccaataattatgaacaaactaatcccctgaaccttaaattaaattgcaacctttattttataatctatgacgtcagtcgcaaattaaatttccccgttttgctgccaaacagcagctacacacctcaccatgttgaacttaattgaaatgttgttttatttggccctagatattgccggcaaaccatgtagcatatattagttattgatttcccacaggttgagaggtttaatggcactcaactcgaaatgggtcaaaacaggagccttgttttaatcaactgtgcacatggggagatgataaagaagatcaacctcatcgaactgattcaattttaacaagttcttttaaaaatttaaattatacttgataataataagataataaggtattcgatagttatgtgtttgtattataagacatcatttgtttagttttaagagaaatccattgagtatttttaatatgaaaaggaacaaaacattttccatacatcatgctggtcaacaatttttaatggataagtatggcatgtacacaatacaatgttatacgttcacttgataaaaagtcgaggttacatctcacattgcgtcgaataaacaaaatgtaatagaaatatgcatccaaaactcacatgcagttgccaaagatatgtatccagtacataataaaggctcaacgacaaatgtgattcgatactgtgcgatctatggatttgaaggatttgaatccttgagcgatgacatcggtgtacatagcccaagctccggtttcgtggagtccatcgtagtctcaatgctctccaccatggaatcttcgctcgatgatgagacggcttcctccacattgcccacatactcctccacttcgttttcgccatcgtaaagctgatccaaggcatccaaatcgatgatcaaacggcgcaaatggcgcagctcatcatgggcacgcgacactttccgctccagggccttcatttgggcctgcacatacaaaatggatgcaagcatatacgattttatttaaaatattgttaaaatttcaactctaacctgcggaattagcggacagcccagaaaatgcaaaatgtgcatcagagggtccgatggcaacggatcgatatccaccatttgctttaaaatctccagaagtcgagggaaaatgccattttccatcaagtatgcaatcgattcttcttctctttccgacatgttacgtgtttaaaacgaccaatttggtaataaatttggcaaattgtgaaatttccaattgatcttgtggtggcgggaataactgtaaagcgagggctgcacttgcaatccgcaatttgcagcacctggcggtagatttcggtaccctgaaacatggtgctgttaactcataacagtgggctgttgcacgcaagactataattcaaatgtttttcggcgccaacaagcatgtgtaaaaccatttttttggtttgacacactatcaaatatttttggactcctataagtttttgccactttaaaaggttttgtggaaaaagaagccggctgacgctccggcagcatcgtaaattcagtgtgaccagttggatgcgaaataaaaacgtaacattacttctcaccgcttttcagtgtatttgccggaaaacgaaactgtctcactgttttataaatataagcaaagcaacaacaacaaatatagtcaaaattcgaaagaggaatagaatacaagttaaatatagcaccgatttttgaatagaccatggagaagctaagcaaggcgaaaaaagtggcgcgcgaggagaagcagcgcgaccagaagttggaggagttggtaagagcgcgtgatggccaaaagccagaaccaaaccctatttccatagactgccagaatccatggaaacgggaataaatagacaaaatttaaggcggaattatatctattttaggtcatgaaatcccttgacgaatgcccctccgccgagga

SEQ ID NO: 35327 - DNA, 270 bp, DROSOPHILA
atgaaggccctggagcggaaagtgtcgcgtgcccatgatgagctgcgccatttgcgccgtttgatcatcgatttggatgccttggatcagctttacgatggcgaaaacgaagtggaggagtatgtgggcaatgtggaggaagccgtctcatcatcgagcgaagattccatggtggagagcattgagactacgatggactccacgaaaccggagcttgggctatgtacaccgatgtcatcgctcaaggattcaaatccttcaaatccatag

SEQ ID NO: 35328 - protein, 89 aa, DROSOPHILA
MKALERKVSRAHDELRHLRRLIIDLDALDQLYDGENEVEEYVGNVEEAVSSSSEDSMVESIETTMDSTKPELGLCTPMSSLKDSNPSNP

SEQ ID NO: 35329 - DNA, 2989 bp, DROSOPHILA
cggcgacacttcagtcaagtttatatggaccgatgttgggcattttcacggtgggaatgctaatgccatgggtgggcgaaaaggtaagaatacacctttaaatattatgatatttaacataacatttttttatttgcagtgcgttttcataggcagcgttgcctcctttttgaccatggcctggatagcggttaatgctcaaattgccaacataacaggttccttccgacacaccaagctgccagtttccgtggacaattgtgactatgatttcgatatgaatcgttacttaaactccactttagaatagtaagtacatttcgtgtttccggtaaaaacttttatatttattaaacatcttttttaatagcgaacctcacagtggatcatctatatatcacatgtcattcctgttatacgctatgttgggagccctacttacaattataacttcaaacttggctactttcgtctacggacgtcaggatatcaagaacgttgatgagaatcttctggcaccagttgttcaacgctacttgcgaaaaaacaattactatcagagcgtggagctcaagaaagttgaggtaccaaaactcagtgaaagttccgattaagcgatttgttgagcaatgcagttgctgttaccattgcttaacagttttgttcctattgataagtatgaattagttcatacatcaacatatttcctaataattcgatagagattttgtttgttcctaaaaggtaaataaaagcttaagaggcttaaaaaagtgtaaataaatacagcagtagcttgcattcattttagattaattaaaactgtttgtttttattaaaatttttactataaaattgatgtctcaatttgctttggctgctaagactaccaattgcaaaacacgaaaagggttcccaattcatttgattcctatatacgtgcaatgcaattgggagtcttaacagatttttgtttcaggggctgcataaaagactacttctatttgcctttattctgaccagttttgcgaattaacttttgccggggaattggacaattgcggacgtaaggtggataggtcatggccggaaggcagacaatattatcctgtctgtggttagaagatctagatgagctgcttctagagacttttgaagcatgttggttctgattaaaccgcgtaggattgggggaagtacggccggaaaggtctggcatgctgtaagaagtggattgtcttgggagatcaggagcagttgcatgccttgaagacgaccgggacacctgattgctcctggcggtagactcctgatccgtactggaattgtacaaatgataaaccaatggcacctgctgttggcacaattgatgttgcggggctttcggcactcgttcctttgcctcgccaccagtgcttcttttcgagaggtccacactggaacttctacttttacgaacccgtgcatttcgcacctccttgcaagtgcacatccgcttccgttctcgttccaacttccggtccctttccagatcttgctcttccttgcgccgctgtttgttcgccttcgcttgattgagcgctctgtagtgcacggtttggttgtcgatgagcatttgggtaacgaatttgaattggttcaagctcgcttcactctgagcggcaatttctaaaggacatcggtgaagttgtgatataacagtttactacgcttcttacattataataattgatttttatttaataaaaatttttaaccgaacttactgttggtgacatcgtgatagattttattgagcatcgcctcctgattctgtaggtccttcgacagtcgttccattttggccacggattgctcaaagctcttggacaccattcgccgcacagcatcctgtaccgattccaggacattatcgtgaatgatgctaaagaagtcggcaaaggattcctgcagatcgcgattgggatcgttgctgggactggaggtcattttatccgtttttctatcgtcgccaccagaattgcgagtgtctttttcactcgaacaaatcacgggtgtttcccggaatcctacgcttttggaggacgaatccttgtcccgcaaagagctcgacttggatatattccgttggcgctccgttcgatggcgagtccttctcctgccggctgacgtcactgagggagaggaatgccgtactacctttcttttcaaaacatcatagcccgactgtctggccgatttcgtaaagcagtaatttggaaacatgacttttttgacgaatttttaggatgtagatcgatttaaaattggcggctcatgttattgtaatgaaatctttgccttcgcatcatgtggatgtaagctcttttgaaattaaatagcttgttttttttcagatatttattttgaaagataaatccaaaatgggattgctataaaacaattgttatatcttcctatttgcataatttattgttcaactatatttatttatcttcgttttgtacttgtttcacaaaatcaacattttttattataaaatccatggtaaataagaatgaataccaattaagtaaataattttccataaattttttttcgcaagacttcggcattgtttactaactcgctaatagcaattcaattaaaagttaataattaaattgcaaaatcataattgcaaaaattttgcaactgtccgccatccgaagtaagcttcttaatggatttttcctcctccgtcgagtccaatgaggcggatggccgacagggaaaagtatttgtgcgaaaggacctgaaatgaatttatttgccaaccatcccattaagtaaccatagtttccatctgctcgcccaaccgattaaatgtcagtcaggaagtggagcaagtgaattcgcaagggttgatgcgtatcatgaatttaaccagcctcaaaacaaacataaacagtatgaatatccagagttggcatgttaaaattgccatttg

SEQ ID NO: 35330 - DNA, 891 bp, DROSOPHILA
atgacctccagtcccagcaacgatcccaatcgcgatctgcaggaatcctttgccgacttctttagcatcattcacgataatgtcctggaatcggtacaggatgctgtgcggcgaatggtgtccaagagctttgagcaatccgtggccaaaatggaacgactgtcgaaggacctacagaatcaggaggcgatgctcaataaaatctatcacgatgtcaccaacaaaattgccgctcagagtgaagcgagcttgaaccaattcaaattcgttacccaaatgctcatcgacaaccaaaccgtgcactacagagcgctcaatcaagcgaaggcgaacaaacagcggcgcaaggaagagcaagatctggaaagggaccggaagttggaacgagaacggaagcggatgtgcacttgcaaggaggtgcgaaatgcacgggttcgtaaaagtagaagttccagtgtggacctctcgaaaagaagcactggtggcgaggcaaaggaacgagtgccgaaagccccgcaacatcaattgtgccaacagcaggtgccattggtttatcatttgtacaattccagtacggatcaggagtctaccgccaggagcaatcaggtgtcccggtcgtcttcaaggcatgcaactgctcctgatctcccaagacaatccacttcttacagcatgccagacctttccggccgtacttcccccaatcctacgcggtttaatcagaaccaacatgcttcaaaagtctctagaagcagctcatctagatcttctaaccacagacaggataatattgtctgccttccggccatgacctatccaccttacgtccgcaattgtccaattccccggcaaaagttaattcgcaaaactggtcagaataaaggcaaatag

SEQ ID NO: 35331 - protein, 296 aa, DROSOPHILA
MTSSPSNDPNRDLQESFADFFSIIHDNVLESVQDAVRRMVSKSFEQSVAKMERLSKDLQNQEAMLNKIYHDVTNKIAAQSEASLNQFKFVTQMLIDNQTVHYRALNQAKANKQRRKEEQDLERDRKLERERKRMCTCKEVRNARVRKSRSSSVDLSKRSTGGEAKERVPKAPQHQLCQQQVPLVYHLYNSSTDQESTARSNQVSRSSSRHATAPDLPRQSTSYSMPDLSGRTSPNPTRFNQNQHASKVSRSSSSRSSNHRQDNIVCLPAMTYPPYVRNCPIPRQKLIRKTGQNKGK

SEQ ID NO: 35332 - DNA, 2396 bp, DROSOPHILA
tggcgttttattgttttttctgcgacttggctggttgacttgtcagcctgaaatgaagtttgcccagttcgttgcttttccattgcgaaaagggaaaattgtagcaaattgaaaattgtaccgtcaagcaacaagcagcgtcggcagctgtgactttgtgaccctttccacgcagttatcctttgtttgaattcggctaggaactacagagaaaaatgctgcagcttctgggaaaaataagtattttattttttttgctctccaaagatcctttctgcttttgcattatatagaaaacattttttgccagcatttaatggtttttatattgtacatataacactaaaatataaggagtaatgtagatacattttgtttgcagtgagtcgattaagatggaaatcaaatcgcacagctgcgcctttcatacacaataaataaatcgcataaatggccaatactctttctattttttcgcacccacctcataaaagtgaatcgaattgaaattgtttatttttaaattgataggaagtaaacttgtccgaagtgtgaaaatcggtatttcttagtaaatgtgcagcacttattacaacgcaaggcatttggcagcgatcaacaaagtttggatttaagtgccatttttcaaaggccaattgcattttggaagaaaaatctcaaattcttttggctccatcattaatattcaaccaccataaaactcattccgcaacgtaaatcattttaattcgtatttaaaaaggtatcccctgccacctaatacccacgaaagaataaaacctctttccccaaacgtgaaatgaatttaaatttttaaatcgcattttgcggaataaaacatgtattacaaattgccacttattgtactactgttcaaaagttaaaattcaaaattgcatgcgagtagtacagctgtggcttcaaattcaataaataaattagtttgtgtgcgaatattttcgtacttttttccgtttcttcatttttttatttggttcacacccacctcataaaagtagaacgaatttaaattgtcaaattcgccggggtcgctggatgtggagttgccgcccgtctccaagtcgtgacttggcgccgctgtcgtctggatctggaccattgtggccgaggctgtcgtggttgctatcgttgttggcgccagcatcacgtgtgatatcgcaggtgtgaaatatgtcagattaactgcagccacgtcggttggcgttagggactcgccgccagcggccacgccccccgccccctgggtgccattgaacgacctttccgtggaggtggaggacgccagccccgaggattcggaggcggaggccagggtgtagtagagtgagctatcgaatagccttaagtgcagcatgattgcgcctcagtctggcatcgcctgaaatagggggaaattaacagcgaaaattaaaagtgtgcttaaaagtgtatatatcttaaaatatatggcctcagccagcgggtgctgcttaaaaacccataaatccgaaatgaaaagctgcgtaataaatgctttaagtactttcccagcaaaatacgaaaatatttgcctcagttaacatggcttctgtgtgtaaatttcggtacccagcaggtgccggattttcggcctgttattaatatcgcgcatacgccaggggtgactggtgcttgggtatggtatctcggtcgtcctgattccttggaaattagtaatggcttgtaagataataccaccgggctgatactgtagggcaataagcctaacatattttattacttcccagttggataagtactcaaagggacgccattagaagccgttttagcttttgaaagcaactagtgctcttaccaatacgaattttatactaatttaaaaaataaatttctatttttttgttctataaataaaccatttaattgggatatttaggcgtgacccattttggcttaacccctcaactaagttcagtgatttgggttgatttatgacaccaagcgtgtgcgaagtcatgccaagaacgtgttcctaattgaatagatgagactggcacacgatttgaaccctagggacaggaactcgagcaattagcaggcaacaatagacatttaaaccaaaaatggcattgtcacgtcgccggtggcaaacaaaggagctgctcaactttgatgcggcctctcgaaaatttatgcatgcatatgtgcctgagtctgggatccatctgtccatgttcgttgctctttggctgcaactttaaattgattagccgcaactttgagggcagccctcgaacgacgtgcccgaaattcgcaaataagttctcctttaaaatgtgcaaaaacttttgttcgccgcagccaggtatttggcc

SEQ ID NO: 35333 - DNA, 396 bp, DROSOPHILA
atgctgcacttaaggctattcgatagctcactctactacaccctggcctccgcctccgaatcctcggggctggcgtcctccacctccacggaaaggtcgttcaatggcacccagggggcggggggcgtggccgctggcggcgagtccctaacgccaaccgacgtggctgcagttaatctgacatatttcacacctgcgatatcacacgtgatgctggcgccaacaacgatagcaaccacgacagcctcggccacaatggtccagatccagacgacagcggcgccaagtcacgacttggagacgggcggcaactccacatccagcgaccccggcgaatttgacaatttaaattcgttctacttttatgaggtgggtgtgaaccaaataaaaaaatga

SEQ ID NO: 35334 - protein, 131 aa, DROSOPHILA
MLHLRLFDSSLYYTLASASESSGLASSTSTERSFNGTQGAGGVAAGGESLTPTDVAAVNLTYFTPAISHVMLAPTTIATTTASATMVQIQTTAAPSHDLETGGNSTSSDPGEFDNLNSFYFYEVGVNQIKK

SEQ ID NO: 35335 - DNA, 3098 bp, DROSOPHILA
tgacgcacgtttcggcaataaatgaaaaccaaagccgacaagctgaatgggaacccctctagatcagtttcgccaacgaagccatccaattagcccccggcaatggccaacattgcggcacttagtcaatcttggagtgaactgatcgcctttcaactggtccatcgcaaaatagatcacccattttcagcagactaccgttgagccctataaatagccgttttgtagtccacaacaaaaaaaagcacaaaataagcggagaagcgctaacttggccgtctcgatgccaatgttacgtgactaataacattttctgaagattaacagcaatcagcgacggcttgaacggtcccagactcgagacgacctggtaagtagtcatcatcatagttgtccgccagacaaaggcgctgaatccgaggttccgtaatcgaaccgcactccgatacacataccccatacccctaccccaatcccagcccctatccatacccatacagtattggagttttaagacttaagtgccgagacggtcgcggtcgcgggcttaatttgcaatgtctgaccgccggtccgtccgcgcatgtgccaagcggtcaagcgcagttaaagctgtcaaagcctgaacaaaaaaaaactaaaaaagagcaaaatcttaaaaaaaaagcgaaacacaatgaccacaatgctgagccattgacagcggagccgcggttctcacactcggcgggcctcataataaatgccgtttcctagaactgactttttgctttattttattatttaattgcgacagcgccggcgcaaaacttcccgcagatatacgtatgtatgttgtatgccccctgaaagccccgcataccctcgcaatccgaattctcggggcataatgaggccaagccggagagaccagacgatagtccgagtgtgggaaaatattcagcgacttccggctgtgggctctgcgattcggttcaccacggagtttatctccaattcgtttcttgttttaaggggtttcttttttttagttgctttagtttgcggttggacgcccactaaatgtctgggaagtctgagtaatcagctctatgggaaataagtaaatgcagagattcttgagttggaatttcatttattttcatttctttatgactttaagaagtgagcagcagccatctctatagccgaaatttgaggctctgctagagatgatcggtggctctgctgggctgctgggaaagctattcctgggcagcaattgatgatctccaaggagttcggtgcggtttcaagtccagcacctctttggggcaacaaatttgtagaagccttccgcttgaaggcgattcaggtgaatatcatccggagtccagttgatcaccagggacgccacatggggccagaggtggagctggcctcgctgggcgccgggctgcaggctccgctctccaagctgtcgcattccgagggaggtggagtgaccatagcttgatcctctactggagcttgaagaggcactccaatgggcagcgagggaaccaccacttgcaggtagttgagacgatggccaaggtgactcatcagctgggtgccgagatccacactcactccgggtacagcggccaaggttttggacacttcattggcagcatgaacgtagccagcacggaaactctcagcgatgctaagcttgggatcggcactcggagacactccaccggtgacgctggacagacgcagctgcttctgggcacgcagcttcttcatgtgctccacggtcagctccaggatgtcggccttctccagccgggtgatgtgctcgccctcctgggtcaggcactccaccatgatgtccttgagctcgtccaggcacttgttaatcctggcacggcgcttacgctccagcatgggcttcatcaccttgcggtactgataggtcttggacatctccatttccagaaccattttgttgtagtttggttttgttttttttttattgggggtaaagtaaactcgcgtaatccacagtcgcaacgttccactagattcggactcggagactctgtgtgcacgcaacgaagtcggagctttgaatgagtcggctggctctgggatcggctttatatagcctctgccgccctgggaactggacagtgagtgcgagcgggacactcattttgcctcgtgcgcggcctgctgctgttgccagcggtggtttcagatggcttggtggtgcttggttgtggtagtggtggtggtggcttctgtttttttgtatacttttgcctgtatatgtgagggcaataaaatgacttgagcgggctgcgccttctcgctctctctccctccctccttatgtatgtgctgtgattgttataccgtgggaaactgtttcgcagccgatttccacgacgacgacgatgacgacggctggcctgacttcttctgattgtgcatgcttggggtcttgtacgatccctcgtccctcgtctttccgtccaccgtctttcttgagcggacggacggatggacgggccgcctttaagaggtctgtgcgacttgggatcccagatacgatgcgaggcgagcacatgccttccatccataacaagatgtttgcatttcaattcatttgtatggtcgactatggtcggggtccggtcttttgggcttcaattcggtgcggttgggttcggttcggttcggtctcaagtcttgccatgtgccttcacccttttgcagtagcttatggcacgctgataattgtggaatcgtcatcgggccaacccgagacgggccagtgtttctgtttcttgcttttttgttagcgctttatggatcattgattggatcgtggtagtcgtgggtttcgtgggacgagcattacgcttttcgtttacatgattattcttgattgtcggttggggatcgtttggggatcagctgcagttcggttgggggttttgggttcgcttggggatcttgggtcgtcgctcgcttctatttgtagacaattaccatagcgacttcgggctgggaaccgatcgaagtcgacgtgtgcgcgaaagtcggttacaatcgtaatggctgttgcc

SEQ ID NO: 35336 - DNA, 1098 bp, DROSOPHILA
attcaaagctccgacttcgttgcgtgcacacagagtctccgagtccgaatctagtggaacgttgcgactgtggattacgcgagtttactttacccccaataaaaaaaaaacaaaaccaaactacaacaaaatggttctggaaatggagatgtccaagacctatcagtaccgcaaggtgatgaagcccatgctggagcgtaagcgccgtgccaggattaacaagtgcctggacgagctcaaggacatcatggtggagtgcctgacccaggagggcgagcacatcacccggctggagaaggccgacatcctggagctgaccgtggagcacatgaagaagctgcgtgcccagaagcagctgcgtctgtccagcgtcaccggtggagtgtctccgagtgccgatcccaagcttagcatcgctgagagtttccgtgctggctacgttcatgctgccaatgaagtgtccaaaaccttggccgctgtacccggagtgagtgtggatctcggcacccagctgatgagtcaccttggccatcgtctcaactacctgcaagtggtggttccctcgctgcccattggagtgcctcttcaagctccagtagaggatcaagctatggtcactccacctccctcggaatgcgacagcttggagagcggagcctgcagcccggcgcccagcgaggccagctccacctctggccccatgtggcgtccctggtgatcaactggactccggatgatattcacctgaatcgccttcaagcggaaggcttctacaaatttgttgccccaaagaggtgctggacttgaaaccgcaccgaactccttggagatcatcaattgctgcccaggaatagctttcccagcagcccagcagagccaccgatcatctctagcagagcctcaaatttcggctatagagatggctgctgctcacttcttaaagtcataaagaaatgaaaataaatgaaattccaactcaagaatctctgcatttacttatttcccatagagctgattactcagacttcccagacatttagtgggcgtccaaccgcaaactaaagcaactaaaaaaaagaaaccccttaaaacaagaaa

SEQ ID NO: 35337 - protein, 195 aa, DROSOPHILA
MVLEMEMSKTYQYRKVMKPMLERKRRARINKCLDELKDIMVECLTQEGEHITRLEKADILELTVEHMKKLRAQKQLRLSSVTGGVSPSADPKLSIAESFRAGYVHAANEVSKTLAAVPGVSVDLGTQLMSHLGHRLNYLQVVVPSLPIGVPLQAPVEDQAMVTPPPSECDSLESGACSPAPSEASSTSGPMWRPW

SEQ ID NO: 35338 - DNA, 2805 bp, DROSOPHILA
ggcagcgagtcgttgttgtatgtcgagatgcgcttcttcaggctgtccaggttgtcgtccgtccggccagagccgctctggccgcggcccagacaccgtttgacgcacacatcctcgccgcagtcgaagaagaggacaaactggaagtccaccttctcggacatctggcggttccaaccgtccagattatcctgattgcgtgggaagccgtcgatgaggaaccgcgactttcccgacgccttcatggcgttctccagcagcgaacacgtgacctcgacgggcacaattttgccattgcgaatgtagtcctcgatgaggttaccgaattcggagccctcccgcgaccgctcctcgcgcaggagatcgccggccgagagatgggtgaattggaagcgatccacgatcctggagcattgggtgcccttgccggccccgggaccgcccaaaacaaagacaatctttggcttctctacgctcatgattccgatattgtgtggtggggctgtggaggtggtggtgatgaacctattgctggccttggaatgtcgcaattggtgctgcgtcagcgctgatggtgcgagaccgactcctggtgaaccgcaatcgttggctactgctctcaacgtcgttcgtgccaaagcccgccacattgacgactgaaccaaactgaaggcaaattgaatgcgtggtttatgtgtatgccgcctgcagtacacctcaccactgttttccactggaaacgtaacaccctgtgacgtcacgcacaagcgcagctgttcgcgggcgtccgttcggcaacactggcgccggctttagcgggaagcgaaccaatttgaatggcattttatgcagtttacttccggttcgatattaaataaattaaatttaatttaaatattcttctacaacatttttaaatgtacccttaaacatgcagctttgcagagtttgatttttaattttttttattatcatgtatattacctgctaaataagtcttttaaattagctgcgcttggttgttttgtatcaagtcggccactagttggtagggaataatatgctgggagccggccgccatgtccacctcctcatcatcgacgcccacgatcacagcgggcactggaaagcaaaacaagagttaagcggttatcttaattagatgacaaaaggttattacctgccacatttgccttaagaaagacatggctcatcagattgggcgtcacaatcctctgctccgcctctcctctctgctggttgggcatgtactgggtggctactttgtggaagtactcatccacattactggcaaactcctgggcgaacttagtctcctcgggagacagacgtttgtcatccggctcacggctctcctcctggttgaggatgtgctgcgtgaaggtttcgatcttctgcaggcggcaacgcagataactggccattatgtagcgcaccctctccagttccatggagtgcaccaccgctcggaaatcgttcttgtccagatcgcgcatctgctcctccatgtgggccacctgggagaccatcagctccagcatgtccgtctggctgggcaggatctccggcgcacacatttcatttatccacgcggtttctatgatttccagaacctagggatatcagaatgtgattacttgcgtattaaaaagctgtgttacgatttaccttaccttctgagctgtaatctgttccatatcgtcatcatcctcatcctccagtccggcgccatcgctgacatcgatttctaactgggtttcgggcacgtcttctacatccgacatggttttatttatttgtttattattttgcagattttggcgcaaattttgggaatcgttgggaatgtcactccagtaatacagttgacgtttttcatcactgtttcatttgtttttactccgtgtgaatggcacgtctaaccgttatcgatatcacaaaagcatgcgatggcagccgcacaacaaactgaattccaaaagaattttagagtgattgtagagaagatcttcaatcactggcaggatctccggctggcggtggagcatggcatgggcggacgcaatggccaacaggttgttgctcgtataccctgaaaccgtcttcttttctaacctaatcggagtgtccgttttgtaggtggccatagaaatcatggactacacctaccagtactgcgtgtccaacgaaaatatcacgcaaggcgaactggtggaggtcctggaggagctgatggaccaggagtttaacaccctctgcgacgacgactccattccggagatctgccggaatctgctgcgctacaaattgatggcccagcagaaccagtttccgcaaatagaggctgaattgagtaaacttcctgctggcaaggagtggctgcgtccggatgttaagatcacctacacacccatcgatggggactcctcatccgatgaggacatggacgacagcgacgaggaggacgataatgaaatgggccagggcgacgaggaaactcccagcggcagtggtcggatgacgcgatcgcaggcacgaaagcagcaggctgaggagtttgtggaaccggaagacggctggaccaccgtgcgaagaaaatgaatttcgtcgggatgattaaaaagaaacctgctagttttttagttataatacgctgtatttacttcctggaggtccagaaaacgcagtggtggaataggtgcacgtgtcacaggttggtggaaagtcctgcacaggttgcagttcactggagaggccttctttgatgcggaatcctggctgacc

SEQ ID NO: 35339 - DNA, 687 bp, DROSOPHILA
atgtcggatgtagaagacgtgcccgaaacccagttagaaatcgatgtcagcgatggcgccggactggaggatgaggatgatgacgatatggaacagattacagctcagaaggttctggaaatcatagaaaccgcgtggataaatgaaatgtgtgcgccggagatcctgcccagccagacggacatgctggagctgatggtctcccaggtggcccacatggaggagcagatgcgcgatctggacaagaacgatttccgagcggtggtgcactccatggaactggagagggtgcgctacataatggccagttatctgcgttgccgcctgcagaagatcgaaaccttcacgcagcacatcctcaaccaggaggagagccgtgagccggatgacaaacgtctgtctcccgaggagactaagttcgcccaggagtttgccagtaatgtggatgagtacttccacaaagtagccacccagtacatgcccaaccagcagagaggagaggcggagcagaggattgtgacgcccaatctgatgagccatgtctttcttaaggcaaatgtggcagtgcccgctgtgatcgtgggcgtcgatgatgaggaggtggacatggcggccggctcccagcatattattccctaccaactagtggccgacttgatacaaaacaaccaagcgcagctaatttaa

SEQ ID NO: 35340 - protein, 228 aa, DROSOPHILA
MSDVEDVPETQLEIDVSDGAGLEDEDDDDMEQITAQKVLEIIETAWINEMCAPEILPSQTDMLELMVSQVAHMEEQMRDLDKNDFRAVVHSMELERVRYIMASYLRCRLQKIETFTQHILNQEESREPDDKRLSPEETKFAQEFASNVDEYFHKVATQYMPNQQRGEAEQRIVTPNLMSHVFLKANVAVPAVIVGVDDEEVDMAAGSQHIIPYQLVADLIQNNQAQLI

SEQ ID NO: 35341 - DNA, 2417 bp, DROSOPHILA
gcgtattaaaaagctgtgttacgatttaccttaccttctgagctgtaatctgttccatatcgtcatcatcctcatcctccagtccggcgccatcgctgacatcgatttctaactgggtttcgggcacgtcttctacatccgacatggttttatttatttgtttattattttgcagattttggcgcaaattttgggaatcgttgggaatgtcactccagtaatacagttgacgtttttcatcactgtttcatttgtttttactccgtgtgaatggcacgtctaaccgttatcgatatcacaaaagcatgcgatggcagccgcacaacaaactgaattccaaaagaattttagagtgattgtagagaagatcttcaatcactggcaggatctccggctggcggtggagcatggcatgggcggacgcaatggccaacaggttgttgctcgtataccctgaaaccgtcttcttttctaacctaatcggagtgtccgttttgtaggtggccatagaaatcatggactacacctaccagtactgcgtgtccaacgaaaatatcacgcaaggcgaactggtggaggtcctggaggagctgatggaccaggagtttaacaccctctgcgacgacgactccattccggagatctgccggaatctgctgcgctacaaattgatggcccagcagaaccagtttccgcaaatagaggctgaattgagtaaacttcctgctggcaaggagtggctgcgtccggatgttaagatcacctacacacccatcgatggggactcctcatccgatgaggacatggacgacagcgacgaggaggacgataatgaaatgggccagggcgacgaggaaactcccagcggcagtggtcggatgacgcgatcgcaggcacgaaagcagcaggctgaggagtttgtggaaccggaagacggctggaccaccgtgcgaagaaaatgaatttcgtcgggatgattaaaaagaaacctgctagttttttagttataatacgctgtatttacttcctggaggtccagaaaacgcagtggtggaataggtgcacgtgtcacaggttggtggaaagtcctgcacaggttgcagttcactggagaggccttctttgatgcggaatcctggctgaccttgcctttttgcaactgcgaccaggaggtgaactctgtccccttgggcagtgccagctttggatccaccaccgaggcaatggaatcaacatccactgtcatcgatagatttatggcaggatagatgaggaaggcaaagaaccaggcgaagaccagcaccagaaaaggcacaaatacggcaaaatacttgtccggcagatacgagtgcagaccaaactccactggcagcagcgcccaagtcacgtatacgaggaagaggaccgtgaacagcatatagaaggcgaaaccatagaccgccctatggggagtcggagctggagtgtgttccggcattgtcgttgctctcggggattagtttctctttcttggagtctccgaactggttgatggtgtcctggcacaggagcaggcactcaaagaaggaggtgatggcagtgcgcaggctcttcacttgatccgactgaaagtgcacaaccagaacatcgttctccaggctcaaagtttttttcacgaaattccggcgcggctcctggtcgacaccgaggactttgtaggcgatctcggccaatcgtggcgtctcaaacggcactcttattatgctaatgaggcgaatatttattactaaatttatgtttatttctttgttaaatggttaaacttacgattcatttggtttatttgcaatttgtggcatcataaaagttttaaccaatctgaaatgctcacatgtcaacggagaaagttaatgacaatttatgaagaagaagcattcaccggctgtttatctcgtgaacagctgattgaagaattcaaatgtttaaaaatgagcattcttcataatcacatttatgttttaaattaagcgcttgttaagtttttgaagttaataacaatgggaaataagctgtcaattaaaacgttaatttcttcaatttgtggtttctttattacaaaaaaaaggtgttcaatatcattgctccaaacaaatccttctggtaaatggttacttcttggacttgacgactcctttaggagcgcccttgggagcgggcttcttgccggcgactttggcacctggctttccggctgcctttcccgcgggcttcttggcggcagccttcaccggcttcttctccacaaccttcttgacgggcttgaccaaagcctcgcgctggctcttcagagccttgacgatcttctgctcttcgatgaggaaagcgcggacgattctctctcgcaggcagctgtggcacaggacacctccgtaggtcct

SEQ ID NO: 35342 - DNA, 417 bp, DROSOPHILA
atgctgttcacggtcctcttcctcgtatacgtgacttgggcgctgctgccagtggagtttggtctgcactcgtatctgccggacaagtattttgccgtatttgtgccttttctggtgctggtcttcgcctggttctttgccttcctcatctatcctgccataaatctatcgatgacagtggatgttgattccattgcctcggtggtggatccaaagctggcactgcccaaggggacagagttcacctcctggtcgcagttgcaaaaaggcaaggtcagccaggattccgcatcaaagaaggcctctccagtgaactgcaacctgtgcaggactttccaccaacctgtgacacgtgcacctattccaccactgcgttttctggacctccaggaagtaaatacagcgtattataactaa

SEQ ID NO: 35343 - protein, 138 aa, DROSOPHILA
MLFTVLFLVYVTWALLPVEFGLHSYLPDKYFAVFVPFLVLVFAWFFAFLIYPAINLSMTVDVDSIASVVDPKLALPKGTEFTSWSQLQKGKVSQDSASKKASPVNCNLCRTFHQPVTRAPIPPLRFLDLQEVNTAYYN

SEQ ID NO: 35344 - DNA, 2918 bp, DROSOPHILA
gcaatccggcaatcaggcggatatgttgggttaactgggatgaccaggtacattcacatacatgcaataaatcgtcgaaattggtacactaagttgtacctaggagacaactttgtttagacagcttaaattttagttatagtaaaataacttaacaaaaacttacttccattttaaaaagaaaaaagggcttaagtgtacctaattggataaaaggtacctcaatgctttctatattgcaacactgtcggtaggtcagtcagttatccatccaaagagccaaagatccagtcagctagtcagtccggctgccatttcactgtgtttgacattgaatgagcccgcttttgacacttgatgcggccaaggcaggctgaccgggcgagtttgtcattaggcggatgggagcttccaatgtacagcaggtttgcaccaaacctagggtgctactgtattggaggcacaaataaattgtcaggcatatccaataccaaaagagttagggaaagcttgcccaccaatatatttaaattttaagaagctataatgtagtaattacaattgaggtcgagcagaaaaggcaccaaaaatgtataaccggatttcccattctctttctttccaggaggtcgtttctgttcgttttcgccctgcattgagcagtcgcagcgctgcatccaagagctaaccaagctgggcttcaacgagattgtttccttggaggtgctgcagcaggagaacgtggtgaagacgcgcacgctgcccgtcatcgatcttgagttccttaaattgcccaaaaccgatgagacgacggcggcaacaaatgccttggagagcaaggcgccaaaggaggtgaagaagtacctgacctccagtaatccccaaaccctgcccggtcacacgggcttcctcaccttcgccactttgccaccaaatatacccaaggcctgatgaataaacttgaatttacttttatttgacccacgaaccacgatctacatcattcgtcgtaggagtaagagtaggagaattcctcgaagtacttgcgttcgctggtctttacagatccgcagtggtagcatcgatgcggctttacttgctcctgggtcttccggttccaggactttctctcgggcgcccaaggagttcgctgctcgggtatggccacctcggtgcgctccggattgccgctgcaggtgggacaccgacccacaaccgccggtttgggcagcatgccatagataagtggtcccggcggttgttttccgtaaatggtgaccacttccgggaggctggagtacggacgggtggcaaaaagcttctcgcggttaagaaaactaaaataatcaggtgagaagatgttacatggggaattacaaaaaaaaaaaacaaatgcatattactttgatcaataggttattaaatctgttgctaatttgaactataattatgttgctagggtgaaaaataaaggagaaatgagaatagcttcgtgtattggagactaccgaccgattaatctgtaataagtacttcgaccttttatcaaattggctaaaattttaattcattatcaaaactattcccgtatttaaacaaaaccaaataacaatcatttggatttaggctgattagagaagactactcacttgggccgcggctccagccagagattgttgatgcgcttggtgcgcatgatgtcgcccagtttctggaggagtcttaggttctcccgctcgatctgctgctggcgctcccgctccacttgctgcttcttccacttgcgctgcacgtgttcgtgggcgcgcggcgagtgggtgtcaatggctgggcgggcggacatgaccttctcgcggtgctgggcgtaccgcagttgctcccacggctgctgcagcaatttgtcgcgtcgtgagatcatcttcggtggttttcggttctcggagggcaaatgttgatggtctagcgcttttgcttgcttactgtttaatccggttgagatccgctgtgtttgccacaacaaacaaacaagtgacgatgtgcgtccataacaaccttgccaggacaacggaccctcgctgaatgttgcaccatcatgctgggattaagttcaacaaccaaacgggcgaacggacgctgaaaacgatgaaccaagaagtccaggcgacggcggtcgctttgctcagctgtcgccgagttgtccatccgcgcagagtgacatctccagtgactcttgacttgcaaatttgcgggccactgccagtgcggttgttacataattctgggccgcttctgcagcttgttaggtctctgcccagttgcccaggatttctgtgtagtagccgctctcatcgaaaaacaccggactttggtgtggcggcaaaagttcctttcttctttgttgctgctgccgctgttgctgctgcaactgatgttgctgctgctcatatgtcaaccggcaacaacatgcaaccggcaacaactggttgccgctgctgccgccgttctaaatactcctcgtttagtgttttgatggatgttaagtgccagccccatattgaattcaatcattttgcatcgatggcagtcagtgggttctcggtagtcattcagtttttcctatcttcaaagttctcgcagctcgctttgatctgaaagccctgaatttcattgctcctctctgattagctaacgatattatattaattgaaaaacatatactccacccatttgctaagcgttagcctattagtttgtaataaataaatattcattttttattatcaaagtcttgccttatgaccttttacgttcaatcgaatttacatttttgagattttcgattaaatgtgttgtgatacgcaatttaaaaccagatttgaaaataactttaactgaatgttattaaattaacttgctct

SEQ ID NO: 35345 - DNA, 606 bp, DROSOPHILA
atgatctcacgacgcgacaaattgctgcagcagccgtgggagcaactgcggtacgcccagcaccgcgagaaggtcatgtccgcccgcccagccattgacacccactcgccgcgcgcccacgaacacgtgcagcgcaagtggaagaagcagcaagtggagcgggagcgccagcagcagatcgagcgggagaacctaagactcctccagaaactgggcgacatcatgcgcaccaagcgcatcaacaatctctggctggagccgcggcccaattttcttaaccgcgagaagctttttgccacccgtccgtactccagcctcccggaagtggtcaccatttacggaaaacaaccgccgggaccacttatctatggcatgctgcccaaaccggcggttgtgggtcggtgtcccacctgcagcggcaatccggagcgcaccgaggtggccatacccgagcagcgaactccttgggcgcccgagagaaagtcctggaaccggaagacccaggagcaagtaaagccgcatcgatgctaccactgcggatctgtaaagaccagcgaacgcaagtacttcgaggaattctcctactcttactcctacgacgaatga

SEQ ID NO: 35346 - protein, 201 aa, DROSOPHILA
MISRRDKLLQQPWEQLRYAQHREKVMSARPAIDTHSPRAHEHVQRKWKKQQVERERQQQIERENLRLLQKLGDIMRTKRINNLWLEPRPNFLNREKLFATRPYSSLPEVVTIYGKQPPGPLIYGMLPKPAVVGRCPTCSGNPERTEVAIPEQRTPWAPERKSWNRKTQEQVKPHRCYHCGSVKTSERKYFEEFSYSYSYDE

SEQ ID NO: 35347 - DNA, 4390 bp, DROSOPHILA
tttattggcaatagaaattatataattgcccattaagcaaacaatcattgtgtgcaggttttacagtccccctttcgatgacataatttattcttcccactaaaaagaaacaacttctggaatttccttcaaacgaatatactttacaagtttgtttattcaataggcaaaatacgaaagcacagtaataaatatgtgtataaataagtgtttaataaataaaataaagtaatataattaacctagatttaaatgtagatgcacatatatctgcggagttacgagaacgcgagatacaaaaatacgaatgatcgtaaaaaactttaagcacgcgccataaaaatgtcgctaatgaaaacgctacaactaatagagctctcttggcatggcctatgttttttttttcgcttctgtttctgtattttgcgggccaatcgcaaaactaatttccaagcgctattttcatagactcatacttatttttaagtgtttgtttttttcaagattgcacatacagaatgggaattggaaaacaaaagggctatacgggaatcgcttaaattagctgttgtatcgaggaaacgaatgtgttttgcgtttccttcgttagataaaaataatttaaacgctaagatgacaagtggcaattaatttaagtgtgattatcacctggccgccatggcagatatcccatctcccatctcctatccccgatctctgatcgctgggtatttccaagctttgctggtcggtcactaatttttgggatctgcaagatacatgtacatatgtatgtatgtatgtgatgaagggcggaggaggcattagcataagcgtggcatgtgcttggcggaagcctatagcttatcaataattaagatgccttttactagttctcggctttgttttggcggccttaattacttagcgatcgagtgccaattggccgcagttttttggaaatcgtgccagaaacttaaaaaacaatacacacttaatactaacctctatcctcaaccggttcgccggcatccccatggcccgtggccgttggtatcggtatcgaaatgggtatcggtggcactaccaccaccccctgactttccccctccagggagtgctccccacgtccatgatgaagtgctaagtgctggtgctgctggtggagatgcggctgttgtccaagtagaagctgctcgttctgctgctgctggaggggattttggtggttttgactctggcttaagtgctgcgaaagatgctgatgatggtcaccagttggtggccactgctggtacgtgaccggtaccaaaggatctgacatccattcaaaactgaaagcaggtcctatggtctgggtggtgcccaagccactttgatgcggtgtagcacttgtgggcgtggggggcgtggtcgtgatgcagggactcagctcgtgggaggatccaaaactatccaacgaagccttttgcgccgattccgaccagggtggactggggttccattgctctataaaatccgcaggatccggaggcagtgatttattgggtaacctcggtctcgtcggcactattgtggcatatataactgaagcatcactactgaccaccgatgaggtggcataggcagcagccggatgagtatggatggcatagcaatccggttccggagttatcgccgccgccggagagcgttcggcgtgtaagtagagtggttccagttttcgagcccgcttcttgggcggtgggggcgtggacgatttggagataggcggattgggagtacttgttgcattcggaggattaacgtggctatttacttggctatagtccacgggctcttgaaagcaaaacagcggttgatcctccttaagctcgattgctgccttcgcatgatagactccaccataggttcccatatgcggatggtgatggtaagcagtcgccggatggtgatggtgatgatggtggtgcgggtggtgcgagtggtgtggatgatggtgcgggccaaagctactggctatgcccaaattgggtgttgcaccacctggagtggccggtggatgggatgaatggggactgtagtagccgctggagggagttcccggtgggacacggataccactgtccagcggcatgccgaactggatcttcgactggacggtatagtagtgatacagccaggagttggccagcataattgaggcctctcgatcgctgcaaaaatataataaagtgttttcatgttttcatctaataagttcaattttatgttttagctgatctgtatattatcaaaggtgtagattggcttaatgtgtattaaagatacgtatacttacttgagtacttggtttgtgcacacgataacaggttgttgcgtggagtcgggactatctcgcacttgtaaaaccacgtgtacccacgtgtattccccactagatctctgcattcgtactagaaggatacaactgcgatcttgttccgattggataactgaaaaagttaacaaatacatatatcgttcagaattgatgtataataaatagaaatcgacttaaaagagttttttgtcttggggcttttgtggtttaactggtttaaagtaagcttaatttaaatatatttattagaatttcataggaaaaatccattcgataggaaggtttttatcaaagcctatgccttatgaattgttttgaataaattaagctgtattatagattaattatatatgtattttatattaatagcaaccatattgcttttacaagttttttttatggattataggcagttttattcaccatttgcaataaattatttcgagtaaaataaaaagcattaaagccttatcaaattaaataacgagttattttgttaataagccaagccacttacttaaactgtgttttttttgcgcctccgtcagattatcgctgtggatcagattgtaccaggatgtgccttgcagagtcgacttatcatagcccaaatgaaattcgccactgaaagttataaaacaacgataaacataatttaactttaatactagctatcaatttacatttatcgccgctactcactttttatcgatatgggctattttcatgtccattgaatggatggtggtgaagacgttggtggcaccttgtacaacacactccctggtttcgggcatggcaatcggagtgcaggtggccaaaaagacgggctcgttgcgactgcaaagcggcaggaatgacaaatagtgaccctggaccaagacaacctgcaaatacagagattcagcgcgtttagctttgttctgagattgccccttgtttcgacatcggctcccacgaaaattggcgcccaacgtggggcagctgggagtacctactttggccatttttggaccggcatgccggcgactctttcatagacattttactctgattccataatttaaaaaaggcaatcacagaaatgtttgtatgccaactcctccacagaaaaacccaccaggcagtctcaggctcgtcgactcggagccattgtctcccaattaaaacgtgcctgcatttatttcgacccaactgcaattgcattttcgaggcttatgggccgccgccgtcgcagcttcttctgcttaaatgcaaatgcagtcagcccaacgatcctgataccaaaaaaaaacaaaaaaaacaaaaaaactaaacctccccatcccccaaaaaacccgtcggatgacgcagacgccacagtcgtttgtggggtttgtttttcttcatttttttttctttttttggtttttggtaaatgagacgaccttagactgggaccaggcgccactgccgacgttgtcgccgtctcttctcttttccctggcttttgttttttttttttataattcgaagtttttgtttttgggccttttgtctatggggtatggccgtctggcacactggttactagctctgaactatgcctgacctcattcataattatttattggtccatttttattgcatattaacgagtgccggcctgggagtgaatgtgcttgcattttccgcagctctgggcttgactttgcgggttatcgccagttcagttcatgtgggtcttaagcgtcgagtgtgcttaggattagattaggttctgtgcaaggctggaaatggattggacattcaaaacactctggtctccttaaatattctggtctttgatatttttaaatggttttcagtcatagtgattggtgtcttttccctccattagttttatttttctacattagttcccagctgtttgatataccatttaacagggtgaaatatgggatacagtagtagcgtaacagtattccccactttttatataatattgtaacatctaaaccttcttcc

SEQ ID NO: 35348 - DNA, 1743 bp, DROSOPHILA
atggccaaagtaggtactcccagctgccccacgttgggcgccaattttcgtgggagccgatgtcgaaacaaggggcaatctcagaacaaagctaaacgcgctgaatctctgtatttgcaggttgtcttggtccagggtcactatttgtcattcctgccgctttgcagtcgcaacgagcccgtctttttggccacctgcactccgattgccatgcccgaaaccagggagtgtgttgtacaaggtgccaccaacgtcttcaccaccatccattcaatggacatgaaaatagcccatatcgataaaaatggcgaatttcatttgggctatgataagtcgactctgcaaggcacatcctggtacaatctgatccacagcgataatctgacggaggcgcaaaaaaaacacagtttaatacgaatgcagagatctagtggggaatacacgtgggtacacgtggttttacaagtgcgagatagtcccgactccacgcaacaacctgttatcgtgtgcacaaaccaagtactcaacgatcgagaggcctcaattatgctggccaactcctggctgtatcactactataccgtccagtcgaagatccagttcggcatgccgctggacagtggtatccgtgtcccaccgggaactccctccagcggctactacagtccccattcatcccatccaccggccactccaggtggtgcaacacccaatttgggcatagccagtagctttggcccgcaccatcatccacaccactcgcaccacccgcaccaccatcatcaccatcaccatccggcgactgcttaccatcaccatccgcatatgggaacctatggtggagtctatcatgcgaaggcagcaatcgagcttaaggaggatcaaccgctgttttgctttcaagagcccgtggactatagccaagtaaatagccacgttaatcctccgaatgcaacaagtactcccaatccgcctatctccaaatcgtccacgcccccaccgcccaagaagcgggctcgaaaactggaaccactctacttacacgccgaacgctctccggcggcggcgataactccggaaccggattgctatgccatccatactcatccggctgctgcctatgccacctcatcggtggtcagtagtgatgcttcagttatatatgccacaatagtgccgacgagaccgaggttacccaataaatcactgcctccggatcctgcggattttatagagcaatggaaccccagtccaccctggtcggaatcggcgcaaaaggcttcgttggatagttttggatcctcccacgagctgagtccctgcatcacgaccacgccccccacgcccacaagtgctacaccgcatcaaagtggcttgggcaccacccagaccataggacctgctttcagttttgaatggatgtcagatcctttggtaccggtcacgtaccagcagtggccaccaactggtgaccatcatcagcatctttcgcagcacttaagccagagtcaaaaccaccaaaatcccctccagcagcagcagaacgagcagcttctacttggacaacagccgcatctccaccagcagcaccagcacttagcacttcatcatggacgtggggagcactccctggagggggaaagtcagggggtggtggtagtgccaccgatacccatttcgataccgataccaacggccacgggccatggggatgccggcgaaccggttgaggatagaggttag

SEQ ID NO: 35349 - protein, 580 aa, DROSOPHILA
MAKVGTPSCPTLGANFRGSRCRNKGQSQNKAKRAESLYLQVVLVQGHYLSFLPLCSRNEPVFLATCTPIAMPETRECVVQGATNVFTTIHSMDMKIAHIDKNGEFHLGYDKSTLQGTSWYNLIHSDNLTEAQKKHSLIRMQRSSGEYTWVHVVLQVRDSPDSTQQPVIVCTNQVLNDREASIMLANSWLYHYYTVQSKIQFGMPLDSGIRVPPGTPSSGYYSPHSSHPPATPGGATPNLGIASSFGPHHHPHHSHHPHHHHHHHHPATAYHHHPHMGTYGGVYHAKAAIELKEDQPLFCFQEPVDYSQVNSHVNPPNATSTPNPPISKSSTPPPPKKRARKLEPLYLHAERSPAAAITPEPDCYAIHTHPAAAYATSSVVSSDASVIYATIVPTRPRLPNKSLPPDPADFIEQWNPSPPWSESAQKASLDSFGSSHELSPCITTTPPTPTSATPHQSGLGTTQTIGPAFSFEWMSDPLVPVTYQQWPPTGDHHQHLSQHLSQSQNHQNPLQQQQNEQLLLGQQPHLHQQHQHLALHHGRGEHSLEGESQGVVVVPPIPISIPIPTATGHGDAGEPVEDRG

SEQ ID NO: 35350 - DNA, 3235 bp, DROSOPHILA
tatcgccagttcagttcatgtgggtcttaagcgtcgagtgtgcttaggattagattaggttctgtgcaaggctggaaatggattggacattcaaaacactctggtctccttaaatattctggtctttgatatttttaaatggttttcagtcatagtgattggtgtcttttccctccattagttttatttttctacattagttcccagctgtttgatataccatttaacagggtgaaatatgggatacagtagtagcgtaacagtattccccactttttatataatattgtaacatctaaaccttcttccttattgtggattgccttttctaagccaacgaataacacatttattcagaaaagggtcatgcgaaatctcacagccagcacttcctgcacctcattaaactgccaacactcaacttaattaaaaacgttttcagccaactgtcaacgcctgggcttatctccataattttgctcactgcacatctgcgaaaagcgaggaaaaaaaatggacgcggcccggatcggcgaagatatgaataaaagtgaagcgaccgcccaccaccacatggtgcacggtagcagatccaacagaggcaacatccatgaccaaaacgggtaagagttgctgccacagccaacgcttcgctcaacacgttgacagatttggtcttgtcttgttcaacctgcggctgagatggctgggaagacaacttcatatggccgcctcgttttattcacatcatcatcattgcgcagggaggcggccaatcagagcagctaagaaaccaggtgggatggggtctgtagcaccagtgccagcaatgccaccagcacccacccgtttcccatcaactgtcatcgtttgtcagcttatagaaaacccggctcgttggcaagatgtatgaccagttggccgacggctcaaacgcatggtacgagttctactccaaactcgcaactccaactccatcttcatctccatttccctgccctcatgcataattcatgccagagcaagatgtcgatgttgagcggtggattgaagcggagcggagcggaggagcctgcagtgtggtaaagtgttacacgcaacacgcttcccaggtgattcattcatcaatttctgtcagagacttacacgcgcttactcatccacgcaagaatgcacggagaaaaaatatgcgagcaattaattagtttgtaattcataattaaaagaaaggttattaaataaagaagaaatggtgcaaagaactcattttcttatataatatattaaatgtcgacttttcggtagcaataaaattaaatgtttttcagtgtattgaacactcaccttctgatcgccgaaacgcatttgccgtcgcgcattgcggctaacattcatgcgacagaggaacatgcgatgctcgccctcgagactggaggcgccaccagcaccaccggcaccagcggcacttccattgctggacgttgagtcgccggcaccgccagcaccaccggcaccaccgctgctcgcctgactcgagccacccggctgcggtggcacgttcctattcagctcggcctggatgtttgcgtgatcctgtttgtcaatgatatcgtaaacggagtcaccgtgtatcagcagatcctcctgtaacgagaacggcaaaggaacatggttaacatgggtttacactggtctgaaaataacagcgactggtattcgactactacttaacaactgtcgatataatggcaaagggaaataattttattaatttaacacaattcttaaatcaattagaaatggaatacttttaaatataatccgtatctttccattcgatctaaatttcaattagtcagcctattgtggtaatttgttaatgatatgtcagacggaattcgcatgctcatcgccgttttgtggagcttcgatgtttgtggccagttgcctgctggccgtttatgtcatgagcttttattattgttgacaattatggccacagcgaaggagagagcgatcgagcgatcgaccaatttataatggcaagccgatgtggttgtaatttatttatggccactgtcactacatgacacatgacaatggcaacttgttatgggaatatgcaaaaatcgaattcaaattatgatgcccaacaacagcagatacatcggcaatggtaaaagcaactgcagcagcaccaacaacatccacaatgttgccaagatctattgacatttttggcagtttgttaattaacttggctgttggtagttgttgctgccgctgctgctgttactgctgccgtttttcagcttttgccgccgctaactaactccgagccttgccacaaattaaaaggttgggcaagccacttttgggcctgtccatgtgcacaccaattccgtttttattgtgcccgtaattatgccaacacatggcatacgagtgaatttatgaacttcactgaccatttagttgctgccggtgggtgtctcccagttctccactccctcaactcctccgaactcctgataaggctcggcacaaaggccaaaaggctgtcaaatgtcatggttgccaattggcttagttgtgtttttttcctgcatattttttttttggttctgctgtcttgccgttggcttgttcttgtctaacttttgacttgcggagtgggggaagtgcaacatttagttgatatgaaaggttgtctggccgcgaaaaaacaagtggagtgtttccttttgatatgaagcagctgatcaagtttttttttcggccacgaacatatcccattcctgggatcacaggccaggctctgatttatggcataattttggtggggcacagacattgcacatacgccccgttgcactggcactcgaagacttcgacatcgaagagccgacaatcacctggtcgcctaatctgtggtacctttgtcaatgtcggttatgttatgtgtagaacggagatatgtcacatgtgctccggtcggctagatttatttaaaccgtcggttcaaatgcaaagtgaaaggccaagtaaatagagtcgcatatatatatatatatatatatccacatgtataaccttgctatttaagcggtataagcgtgcaataaacaaagcttgaaacacgggcaacacggcaaacatcgagctgtggtttttaaggaaccaacagacttacataagctcaatgaatcgggtctctttaggtctttagacagtt

SEQ ID NO: 35351 - DNA, 405 bp, DROSOPHILA
atgtcaatagatcttggcaacattgtggatgttgaggatctgctgatacacggtgactccgtttacgatatcattgacaaacaggatcacgcaaacatccaggccgagctgaataggaacgtgccaccgcagccgggtggctcgagtcaggcgagcagcggtggtgccggtggtgctggcggtgccggcgactcaacgtccagcaatggaagtgccgctggtgccggtggtgctggtggcgcctccagtctcgagggcgagcatcgcatgttcctctgtcgcatgaatgttagccgcaatgcgcgacggcaaatgcgtttcggcgatcagaaggctcctccgctccgctccgcttcaatccaccgctcaacatcgacatcttgctctggcatgaattatgcatga

SEQ ID NO: 35352 - protein, 134 aa, DROSOPHILA
MSIDLGNIVDVEDLLIHGDSVYDIIDKQDHANIQAELNRNVPPQPGGSSQASSGGAGGAGGAGDSTSSNGSAAGAGGAGGASSLEGEHRMFLCRMNVSRNARRQMRFGDQKAPPLRSASIHRSTSTSCSGMNYA

SEQ ID NO: 35353 - DNA, 2674 bp, DROSOPHILA
atatttatagcaatgccaggcagacgctcgttgttaccattgcaattgtgaaattgcctggcccgacttgcagttttgcagtttgcagttggaggagttcgtcgatgagatagtatagtgtagcttagtatggtacaggatgctgctatgccacggatctgcaacagtttcacatgggtttcctccaacttttcgttccgtttcgtttctgtctgcgcactgagatgcgagccgagagttaagagttccccagtctggtgtgttatctatgggcctatgtaccgcacaacgctaatttgaaaaacaattttcgtaattatccacaaaaaaaaaaaaaaaaaaaataataaaacacaaaaacaaaaccaaaatgaaaaaaatagcagcgcaaataggtaagtaaagagcgaacgatcttgttcggttgcgcttgcgttgacctgcgcgcatgcgcattaaaggaggatgggacctctggggaccgatcggaatgggtccgtaggcttcggtgtttggaggatccgaggatcggcggatccaaggggcccccagcaattttggcccgcctggaactgggtgcgtgcctagacggtgcggcaattacttggccaaaaacaatttcagccgggcatttgggggcatgatagagggacactcgacatatgaatgatgttggtttaaaccgaagcgcaaccatgcgcctagcggtttttcattccggcttaaatgaaagtcggcggtgcactgcccaaaaaattggtgagtttggataaggagtcatagaaggaaaaacctatcatgacatctcaagtgatctctacgtggtacacataccaaacctttgtttaatatcttaagtttagcaatctaaacagtttttaaataacgttcacatttcatttgtgcaaattaaaatcatatgaaagagtgtaagagatacgtgctaatgtgctaatcaattgcttactccccgactaagaactttcagctagttactttgttaacacggactttgtggaagctctagacatattttccccaagtgcatggcattttggcaattgcagttttgaagtgcaacggcggtgggtcctgcactcggcagtctcaatcttcgcggctgcacagagtcacaatcacagccgcaatctccatctgctcatgactcatgcatattcaatcagcgtgcagccaattatcagcatgcatatatgcatttttcgttgggtattgggatccggggaggctttggctgcaacttaccttgctggaagtagttggctttccgcacatagacacaaacgagggccatcagttgcagttgcgagaggcgctggcgcgtcgattggggcagcggcaggagatccctcagattggctatctccgcatttatgagatcgcgtcgcatcttcgaggcgcccttcgtcgatttgtttgcatcgaatctgcaatggagaaatggaaatggatatggttaaacaattagaatatatgggctcgttcacagctacggcttaataagtgcgcagagtggacagaccgagtgcaacaccagactatgcaccactccgggcatgtgttttcacagcccaacagtcgggcgtgtttccacaccaagtgtgtctccgtttcgctcttgggcttattaacccattgctcagtggttatggccatttgggaattccatttattgccaccaacattattcgcatttaattgccttgcacaaagtggcaggtaactcttactgacaacataaatgagcaagctaacattttatacttttttttttattatacagaacttgagtgtatgtgtcttagaaaacgtggataataaaaatttagtttatagaagaataaatattaataaataaattggttatttacttaatgggatagttttaaggattataattatataaagttagcctttcttatatttaaagataaccaaattaatcattgtaagaccacaacatttcacgcaattttaatcccaaatcccaatcagtacttattcagtcaagaccactttatttgcctttcgatccgctgaccacaatgggttaaggatggctcgcacatacctcgcataaataactcatcgcgcatttaaaaatcatacgagcagcggtatgtggctgtggttcgatgcagcgatggtggtgcagtggttggctgaacggccggtggttgatgtggggcacacttgccacatgcgccttgtgcggaaaaattgtgcaagtaggttggtcagcgcaattgttgttgctgcttttgggcacaagcggcaaaagcgtttagcggagacttcgaaacagaaactgtccgtgtgtcattttgtgagcatattatttacaaggttgaaatcataaatcataaatttgtctttttatgcagtcggcgtcggcggccgcggcgcatgcggcgtatgcggcgtatgagtattttttatttatgctgacgttttcttgccgggccattgttgctgttgttgtcggcgattattttgcaagccttttttatgataaatattggtaatattgttgtaataacagcaagtgcccgcgcctttttggctttcctcgttcgactgtctgccattttgccgctgttattgcctctaaatggccatgttaacatttaaaacaatctcactgcgtccgtgtgac

SEQ ID NO: 35354 - DNA, 417 bp, DROSOPHILA
atggccataaccactgagcaatgggttaataagcccaagagcgaaacggagacacacttggtgtggaaacacgcccgactattcgatgcaaacaaatcgacgaagggcgcctcgaagatgcgacgcgatctcataaatgcggagatagccaatctgagggatctcctgccgctgccccaatcgacgcgccagcgcctctcgcaactgcaactgatggccctcgtttgtgtctatgtgcggaaagccaactacttccagcaagatggagattgcggctgtgattgtgactctgtgcagccgcgaagattgagactgccgagtgcaggacccaccgccgttgcacttcaaaactgcaattgccaaaatgccatgcacttggggaaaatatgtctagagcttccacaaagtccgtgttaa

SEQ ID NO: 35355 - protein, 138 aa, DROSOPHILA
MAITTEQWVNKPKSETETHLVWKHARLFDANKSTKGASKMRRDLINAEIANLRDLLPLPQSTRQRLSQLQLMALVCVYVRKANYFQQDGDCGCDCDSVQPRRLRLPSAGPTAVALQNCNCQNAMHLGKICLELPQSPC

SEQ ID NO: 35356 - DNA, 2345 bp, DROSOPHILA
tcaacagacaaagaacgagccatcaacaacatcacacgtgagttttacacatttcagaagcaacggcagccaggagatgtggctaactttactggcatcttcccgactttgtcgtcgattccatgggattctgtgcctggtgttctcctggtgtggagacgccttttttggtgccccatcgtcgtcgtcttcgtggacgtccgattgccaacgtggtaatgtcaatcgcactgtgcgggtttaacttatggcaaaacatttgaagcactaattaattggagctaaataaaatggcacagcgtctcagctcagtttagctggcagtgaattttgcgcgtttttcgactcttcgcgaattggcgctgtgggtacgggtacgcagaccgaccggagagattacgaggaccagataactgcgaactacaagttgccaatacaagaggccattaaaaccggcagcaggagcagcagcatcagtacacagagaaaagaggattcttttcgaaatggttgccaattaagactatatcttatatgaatacctcttaataatttagccttctataatctatagattttaagtactttaagtaaaatatttcaaaataaacacgtttgatagataaacctctctatgaatattcaaagatttatagaaggttataaaatattgtggcaacctagtaaaaatcgactagttgcctattttcttgctgtgcattagcagaggaagaactaaccagtaacaaaagcagtgaaaatccaggaggaaaacagtgacgaagaaatggaaaggagtctggatcttggcccaggcagcgaatgggccgaaaggagtttcgctgtcgccaaatgcgaacttggccccgtatttcaaattcgaattgacaaatatcgaagcgtgcgaaacaaattgaaattaaaagtttgcatgtttgcgctgtctgcgatgcgtggctgtgtgaaaatggagataagactgaatgttggcgctaagaacttaccttgtaaacatgccggctgtctgttgctgttgctgctgctgttgctgtgttgcatgttgctgttgtgtcgtctgcggctgctgctgttgcatgtgctgctgctgcgacactgttggcgacgtttcatgctgctggaagttatgatgcgtatgcatctggtgctgcaagtgatgttgctgctgctgaaggtgttgctgctgttgctgctgcagttgcaggacatgctgcagatgctgctgctgctggtggggatgttgctgctgctgctgctgctggagggcgtgggtgggcggggttgctgccgtcaccttgtctaggccacgtttattatccgcatacatatcgtcgatcgcacgtttgcaaatatttgttaccaattctaaaagcagaaatgacaaggcgttttcagcactgagtctcggattgtcacggttatttggccaaaatcttaggcgaatcacaatgcgaaataatgataatatcaatcaatatgtagatcttaatgaaagtctgcagactctagcttttcgatttgctaatgaaatgaaacaacaattgttgattaggtttgtttttttcatacgttggaaatagtccaagatattgtttgaattgtctgcggcacaaaaagcatattttgaaggaactgatttgtattgttattgcctatttgaacaattgctcgctgtgctcggagtatccccaatgccctccaatgagttggcgcttttgacgtgttttttatttgggcacttcgattgcataaggagttgaaaatgatttatagcatttgctcggcgtttcgctctgcgatggcggataagtaactaggggttaatgaaatgtcttacaacacaaatactaaacactcgttgggctacgatctgtgttgatcacatttgaaactcgttaagtcttaaataatgatcaatcaatttatgatttggctttctaagaagcgaccgaagcttgtaagtgttttcttgaaaagggaaatctgaatgtctttgtgtaaacaaatttgtgtcaatctgaatttactgtaatactttattacttgattactattatcaaggtaagctttataaaacttaaaaaaaaaatagctatcgaataaaagctatttaatattaaatttgtaatgctttaaatgtaagtccaatactagcatttcacctaagttagttggtcttataataattcttcagagctgtgacctacatttttgtacaactttttgttttcccaactggctcccaacttttcctggccaaatttgttttggctaaaacagaaaaaggtcactatcacttttcttataactgaaagcacactcggacc

SEQ ID NO: 35357 - DNA, 345 bp, DROSOPHILA
atgtatgcggataataaacgtggcctagacaaggtgacggcagcaaccccgcccacccacgccctccagcagcagcagcagcagcaacatccccaccagcagcagcagcatctgcagcatgtcctgcaactgcagcagcaacagcagcaacaccttcagcagcagcaacatcacttgcagcaccagatgcatacgcatcataacttccagcagcatgaaacgtcgccaacagtgtcgcagcagcagcacatgcaacagcagcagccgcagacgacacaacagcaacatgcaacacagcaacagcagcagcaacagcaacagacagccggcatgtttacaaggtaa

SEQ ID NO: 35358 - protein, 114 aa, DROSOPHILA
MYADNKRGLDKVTAATPPTHALQQQQQQQHPHQQQQHLQHVLQLQQQQQQHLQQQQHHLQHQMHTHHNFQQHETSPTVSQQQHMQQQQPQTTQQQHATQQQQQQQQQTAGMFTR

SEQ ID NO: 35359 - DNA, 2192 bp, DROSOPHILA
ccatcaagggccacaaacatttcatcatcgtcgcgagcgcttttaccaaatgtaattacactcaagagatacacgtgccgccaacagccgctcgtttttggggcgtttttcaatttgaatttgactgccgacaggcggggctcatctccactcatctcccggcacttgagcaaatttgcctgcccgccgaaatgcccgtccatcaatattccgacccgtccttccctgcaaatccacttcaagtgagtttgtttacctttgccgatggctggtctttagttaggattttgagcccacctaatgagctttagctggcgggtgcttcgtctgaaattccgcttcgatatccagactgcttcaaaatgtcaacttgagaaagggaaacgacgttgacttgagctttgaacctttgtttggctcgaatgatttatgtagttttaatgtattagtgaatctgatctggctgaaaacaatgaactggatttagcgaggattaaataaacaattcatggtgattaacagaaacgcaaggaagatgtacaatttaaaagattcatatatcttcagcggattctcagtaagacggtgccttttccttatcatttggaattccctacgcactcattgttaaaatttaatcataatggtgccaggcagttttcggttccagtacttatcgaccccgaagtataaacgaatttatgacgacgtcatatcctgcctttgctcaataaacacaagatcttttaagtatcgcactgcactgcagcagataattttcagattgctcaaagttaaacgaacccaaaggaattcgtttctctgcattcgaatactcaattttaatttgtttactggtcggcgcgtgcagatcggcagcttaattacgcactaaaacgttttatcaattaatcaacgcggcggctaattaatttgtgcttctactttcatttgctttcagtgtgaatacacgctgccaaataaaagaagactcaagaagatggcgcccaccatatgctcggagaaaaagcagctgcgcgaaacgcggcgacatcatggcgtggccacagccgccatttcatcagcatccgcaaccgcatccaccgcatcatcgtcctcgtccttgtccgtgggatccacatctgcagctgccgccacacaagctagttcggtgctcaaccatggtgagtaaacactgagattactcagtaaaatgtagtagcgaaaatacaatagttcgcgttaggtttaatattcttattttattagtttcacacgactgtattacattcaaattttaattaatttaagcgcaattaaatctatctctcatttataatttatcatatatagaagcttaagtcaattttgttcagtgccaatagcttgcggtgggcgcacgcggcgtatacgtaacatagccttacatattcattgcaatatccgccttgtctcttatctgttttactttattttttttttttggtataccctttatattcagaatcccctgctgatttgctgatgtcgttggtgttgtgactgttacaagtccatttcccagttgccagttgccgagctgctcacgttactcggtcatgtttaattaatttatgtaaactcggccacccacctccgttctcggaggtctgtcctcgtttcccacttcctcattgccatataaccatgcatatgtgtggctcgactagagaactggaatgctcaaatgcacgtgccatgggcgatgggcgatgggcgttttgcgatgggttcacaattgggttcgcatcgggttcttcacgtgttggtctccggtgtttcattgatgctaatactgccaatgttgctccatggaaggcacgcgagtttggtgttatgccacaacaatttgcgtcagcaattggctccagctgctcttccgccggcattggctgttgggtaagacagactcggctcgcaaatctggctgacacatttatataagcgatctaatgccgcatgactgccaccgaaatggatatgggctcagtgggatgcaatgggtatcgagtagcaggcgagaaggcaagacagtttatcaagtatctaaaaatagaaattttcagatcaagtcgatttaaaatatatggattattattaagattaattcgagattaaacagacaacaaaccgcgttctggagatcattgctc

SEQ ID NO: 35360 - DNA, 192 bp, DROSOPHILA
atggcgcccaccatatgctcggagaaaaagcagctgcgcgaaacgcggcgacatcatggcgtggccacagccgccatttcatcagcatccgcaaccgcatccaccgcatcatcgtcctcgtccttgtccgtgggatccacatctgcagctgccgccacacaagctagttcggtgctcaaccatggtgagtaa

SEQ ID NO: 35361 - protein, 63 aa, DROSOPHILA
MAPTICSEKKQLRETRRHHGVATAAISSASATASTASSSSSLSVGSTSAAAATQASSVLNHGE

SEQ ID NO: 35362 - DNA, 2939 bp, DROSOPHILA
cttagatattttccaagaaatatttcacaagcacacgtagccaggggcgtcggcctgcggggcttccacataagtgtgtgtcataacctccagtgttgttattgctgctgtgccacttttgccggagctttatttacatgttttgcacatttacttcgcttgcttttagccaagtttgctattttttttctctttgctgctggtgccatttccaaagtgaattcattgaaagcaccactgttgttgctgcctttttatttgtgctcgttgctgcctgctaatttgcagcaacacataaaaataaactgaaagaaatacaccgacacaagccttaaataaaaatgggtgtgacgaggccacgtgcaagcctcatgacgctacaaattcaaaaccccccaaactcgtcagccttccctggggaggcggcgttcgaaaggggcgtggcagccggagggttggaatgttggccaatgccctcgccctctgccatcactgaaggtatttaacattttatttccattttagcatcaccggtgactaattcacagagaacgaagcgaggcacgtgcaatggcgcggcgatgacgaggcaagagaactccagtacttttaaagtgtgtgaatagaagttagatacagcccaatgttagatacacactatcagtgtggttttaaaatgggttaagtaaatagtttgttcttaatattgaagtatcttttagataacttaaatttctgttgagcaactgcaattttttattccaagcccaaggcgcaagcgaaaaactcgattagtttcattagttagttttttacgagaaacccattttaattcaaatgaagttactaactgtcaaccatagtagtaggagatttttgatttcactcgcatgaaaattaaagtacaaaacaggaacagagttctttcttagtcatggaacttgaaaacgttaaaagtttgggggaaattgctaaatgtgcaaagatgccattaaacgaaatggatctcatatcccgaacttcgaaatgtggaaaaagtgttttagaaatcttcgacgtcgatgagaaggtcagtttctcatatgatggaggtgaggaggaagaaatggatattctcgatcgttcagagcagtctgatgatcgaccagtgaaaatggcacacgatattgactgcctgattcgacagattgagcttatgcaaatagcgattaggaagcgtcaagttaagaagtgcagcgaagaaattagcgaagaaactgctgaaatagaaatagaagccggtgctcaagtaaagtgcaaacagcggaaaaaccaaggaatcgacattaagattaaggaaaagtctgtagccatttgtccgaataaccaacctttgtgcggcaatgaattgctggaagccaggagtcttcgtcaggcccacaatcgcattcaattgcaaatagacgaactgatctgcaggtataggaaactccgcgaaatcatccaccaaatgcgcgaaaggattcgctgcatggaaggcaatcttatagatttaaattctgaagccgttaagtatgtagcttggtccagcgaagtttccaaggaactgaagttgtgccaggagcgatacaattaccttgtcaatgccaagatgtccaaagcggatgcaaaaaaactagaccacgctcacaccacacgattccttaaacaaaatgcagcttgcctttccaaaagtcgtctaaagcgcgaaatcgctgatttcaatggcgaggtcaaggatcttgtgaatctaatgagtgaattgcacaaggaactggatcggaatatggctgttttcgaatcacggcattcgaattttcttgatgatccagaagagtttctatcatccttgactgtgacggttagactatccgatgagttccggaagtcacaaatgaaacttgaagacagcgccaattagaatttgatcattaaaatagctttatttattgttaagggaaatatttcatattagcaccattatttcgaccaaaaattactaataataaaaatatataaatcggtcttcgtattaaaaacaataaaaataaattacgtaaaatggacgtaaaatgtttctggcgcaggaagtccctgatgatgtgttagcccgcttcgcacaatacgtcatcgactttctctcatttcctttcacctttcacgagggcgtcattagttggctgctaccttcacggagccaatctcacgtttcgctgcactggggcaaggtgtcgttatcacgtaagctctatttggccaacctgacaacgacttcgttccaattttagcgattcctcgggtgcagtgccatgtgcagcgtaaacttctaggagatgcgtcatgaccctgaccatagacacagtctatttccaatcgttgtgtgcaggaattatgcgcttacatacagatatgaggtatacatattcattagagaattgtaactttatgtgtacatgcttattccaaatgaattgtgtagagccagctaatgaaaattataatatattctttgttcattacattttttaattgcagaaatatttttgtttgtatgacctacatttcattttctatatgtaaggcacatttagctttatatatttttggttgtgtttcatttttcgtgactttcaacagctgatgtttgcaatgagcgttgcgactgctaattggtgcaaaaagcgttgtcgtcgccggaacgcttaaccctggtgctggtcacgttttttgcccacacgcgatgaccacatttacataccagatacccacacagagacacatgcacacagacaatgttgtagacatcgactgattagctaagcacttgaccacacaactgcaccgtgggctcggaaaatcgctgtgcttttagtttttttttttctaaatcaggaaacgagtttaattttaaacttcattaa

SEQ ID NO: 35363 - DNA, 939 bp, DROSOPHILA
atggatctcatatcccgaacttcgaaatgtggaaaaagtgttttagaaatcttcgacgtcgatgagaaggtcagtttctcatatgatggaggtgaggaggaagaaatggatattctcgatcgttcagagcagtctgatgatcgaccagtgaaaatggcacacgatattgactgcctgattcgacagattgagcttatgcaaatagcgattaggaagcgtcaagttaagaagtgcagcgaagaaattagcgaagaaactgctgaaatagaaatagaagccggtgctcaagtaaagtgcaaacagcggaaaaaccaaggaatcgacattaagattaaggaaaagtctgtagccatttgtccgaataaccaacctttgtgcggcaatgaattgctggaagccaggagtcttcgtcaggcccacaatcgcattcaattgcaaatagacgaactgatctgcaggtataggaaactccgcgaaatcatccaccaaatgcgcgaaaggattcgctgcatggaaggcaatcttatagatttaaattctgaagccgttaagtatgtagcttggtccagcgaagtttccaaggaactgaagttgtgccaggagcgatacaattaccttgtcaatgccaagatgtccaaagcggatgcaaaaaaactagaccacgctcacaccacacgattccttaaacaaaatgcagcttgcctttccaaaagtcgtctaaagcgcgaaatcgctgatttcaatggcgaggtcaaggatcttgtgaatctaatgagtgaattgcacaaggaactggatcggaatatggctgttttcgaatcacggcattcgaattttcttgatgatccagaagagtttctatcatccttgactgtgacggttagactatccgatgagttccggaagtcacaaatgaaacttgaagacagcgccaattag

SEQ ID NO: 35364 - protein, 312 aa, DROSOPHILA
MDLISRTSKCGKSVLEIFDVDEKVSFSYDGGEEEEMDILDRSEQSDDRPVKMAHDIDCLIRQIELMQIAIRKRQVKKCSEEISEETAEIEIEAGAQVKCKQRKNQGIDIKIKEKSVAICPNNQPLCGNELLEARSLRQAHNRIQLQIDELICRYRKLREIIHQMRERIRCMEGNLIDLNSEAVKYVAWSSEVSKELKLCQERYNYLVNAKMSKADAKKLDHAHTTRFLKQNAACLSKSRLKREIADFNGEVKDLVNLMSELHKELDRNMAVFESRHSNFLDDPEEFLSSLTVTVRLSDEFRKSQMKLEDSAN

SEQ ID NO: 35365 - DNA, 2597 bp, DROSOPHILA
gtttcgctgcactggggcaaggtgtcgttatcacgtaagctctatttggccaacctgacaacgacttcgttccaattttagcgattcctcgggtgcagtgccatgtgcagcgtaaacttctaggagatgcgtcatgaccctgaccatagacacagtctatttccaatcgttgtgtgcaggaattatgcgcttacatacagatatgaggtatacatattcattagagaattgtaactttatgtgtacatgcttattccaaatgaattgtgtagagccagctaatgaaaattataatatattctttgttcattacattttttaattgcagaaatatttttgtttgtatgacctacatttcattttctatatgtaaggcacatttagctttatatatttttggttgtgtttcatttttcgtgactttcaacagctgatgtttgcaatgagcgttgcgactgctaattggtgcaaaaagcgttgtcgtcgccggaacgcttaaccctggtgctggtcacgttttttgcccacacgcgatgaccacatttacataccagatacccacacagagacacatgcacacagacaatgttgtagacatcgactgattagctaagcacttgaccacacaactgcaccgtgggctcggaaaatcgctgtgcttttagtttttttttttctaaatcaggaaacgagtttaattttaaacttcattaaatgggttaaaatcattgtatttcgcttacgtgcaacaatttgtagacaatgtataaaaacgaggtcatgttattaaattgcctgagttcgctcacgagctttgagctgcgaattacacactcaaatgattaattaattaaagttaattattagctatattattaattgttttacaaaaattagacatgattttcattcactgtacagctttcaagctttttctttgttcactacttaactaagtttctttgttcctctttttgtgtttgcagtggccaaaggttcgatgaactcgatgagccgccgtcgaccggcgcgattacagcgcaggatgcctcacatccttgcccgcgtgtcctccttctccacggacacgagcagcggcgtggaaacggaggtggagatggactccgagcagaggatgcagctggacgacgaccgctactcggatgccaggatccagggactgcagcaacagccacattccagcagcgacaacatcaagacagtattacagccgacgacggctagcggatatagtagcaagcagaaccgatcggccagggccaaaaactgtgatcgagaggtgccgctccagatagaggacgaccacgatggcgacagtgggtacgagtacagccaggatcccataaaggagcagcacatgtaccaccagaatagcgaaggcctgttgtccattgccatcaagactatcaagctggtgcagcgcaacaagctgctgcaaaagcgattggcccaactgcagctggagacctcggagttcattgcctcggtgctggccaacccggaaaatcgccaattccgtgacaaaatgtcgccaaaggcagaggccaaggtcagcaacatgctgctgcgccactaaattgatctggaaaagtcaaaacaggccccatttctggacgtgataagagttttatttgaaaacaaattttaagtcatagcgaattgtatttgattttttatgtattcgcccagagcatttgtattctgtcgcttaaagatttgacgtatttattcgcattgctcggcatgttgcggcaacattttaggcaacatccaagaaatattgccagcttctgggctgagcgtgtaaattacatggaaaatatatgtaaaatccgaatatcatgaatacacgtaatgtattaagttgtaaatgcttcgctgcctatatttttgaaattccttgttacaatttttggcttttatatgcgatatgcataaaaaatttttattaatttaatacctttaatttattattaccataatcgaatagattccttttttaaacgtattttcaaatttgtccacaatacatacattatacacgtccagaaatccaaatttcaatgggcttcgttttgaaaaattcgtactgattaaatatacaaacatattcatcaaggtttaatgaagaaatcgctatgctaacatttacaaaaaaaaagaaaatatttatacgaatccaaaaagtccaaaagtgtatctgtagtcgttaagaaattttatgttttacagtctctacactcaagaattaatttataataaatctatctaatacatatatctagataaccccagcataatcaatggaaccctactacgcttttcgctttatacaacaaatagatatagtgagaattaattgatatgcaaagcaattggtttaaagaaaaatacgtaaatttttttcggtattattaaactaactgatatatttcaatgaatatgcctaagtatatcgaaactatcaaaacgctacaaagcaacacaaatcaaagcaaaaccaaaataccaactaaaagcaaatctttccaattctaaatcttttaataaacctctctggcatattcctcctacct

SEQ ID NO: 35366 - DNA, 597 bp, DROSOPHILA
atgaactcgatgagccgccgtcgaccggcgcgattacagcgcaggatgcctcacatccttgcccgcgtgtcctccttctccacggacacgagcagcggcgtggaaacggaggtggagatggactccgagcagaggatgcagctggacgacgaccgctactcggatgccaggatccagggactgcagcaacagccacattccagcagcgacaacatcaagacagtattacagccgacgacggctagcggatatagtagcaagcagaaccgatcggccagggccaaaaactgtgatcgagaggtgccgctccagatagaggacgaccacgatggcgacagtgggtacgagtacagccaggatcccataaaggagcagcacatgtaccaccagaatagcgaaggcctgttgtccattgccatcaagactatcaagctggtgcagcgcaacaagctgctgcaaaagcgattggcccaactgcagctggagacctcggagttcattgcctcggtgctggccaacccggaaaatcgccaattccgtgacaaaatgtcgccaaaggcagaggccaaggtcagcaacatgctgctgcgccactaa

SEQ ID NO: 35367 - protein, 198 aa, DROSOPHILA
MNSMSRRRPARLQRRMPHILARVSSFSTDTSSGVETEVEMDSEQRMQLDDDRYSDARIQGLQQQPHSSSDNIKTVLQPTTASGYSSKQNRSARAKNCDREVPLQIEDDHDGDSGYEYSQDPIKEQHMYHQNSEGLLSIAIKTIKLVQRNKLLQKRLAQLQLETSEFIASVLANPENRQFRDKMSPKAEAKVSNMLLRH

SEQ ID NO: 35368 - DNA, 4286 bp, DROSOPHILA
atttgcaataaatattgatccacagacatgacctctgtacccaaagtgccagtggatagatggctatatctgtttggtttggccaacagccacgagccatgcaatgataatatttatctgtcacgatgacagattcggttaaattgattgccggccagtgaaagagcgaaatatagaaatatatggggtggctagagctgtcagaaatattcagggatctgacttgtccactttgtatactttaaagccgcaatgggtcacgcccaaaatcactttaagccgcacgcttttggcatttgggccgtcataaattgtgtttctcgagcttagctacactttcagcccgaaagtcaggatcatttgtcataattcgagagaccccaaggatgggacccgaaataaaacaaaaacccaagaaaaacactggccgaaagttgacccaacaacaccttgggccatcgaagtgtggccattaaaagtggcaacaacaaacaggcaacaaaatgtgggggagtcaaaaacaacattcggggaccacatggccggcactcgacacgaaaatcgactgaaaagcaattatttacactttggcaataaaaatatggagcagaaaacaaaaaaaaagaaaaaagaacagacaggaaacgggggcggtattgtgtcaaaaatgcgttctgcaatttattacctttaatttttcttgcccgccagtcgttgcctcaaaagaaattgcatttctgcggattgtggataatcatttttatgaccattgccttcgttttgtttccactttttatgagttctcgagcgctcaggcagagatttcagcggaaaatcgaaaaagtttttaagagccttcaattcgcttgttaattttaatccctttgaatgttttcccccttttgcagatggcgaagtgaaatgaattccgaggaatgtccgcaattggtcaacctgtgagtccagcgaatcccgtgtgagtgctgtgcgtgcccagacgatggcggtgggcagttcaattatggagaccgtcgctattttggccctgctgcttggcctgttcattcgaagtggtaagtgattttcgcggaaatcaattaaaataccaatctcaatgcttaaatatatctttccttttaatattcccttttaggctactgcatagactgtttcaaatgcgtgtcatacaatggtgctaacaaggcctgcgacgatccctttcacaacaactactcaacggccattttggagtcgccctgcatgggcggccggaaggggcgtgacggcctgtttccggccaccgcttgcatcaagatcgccggctattacggtaagtgaatgccgtcgtcgcttggcgtccaatagatgacccactgaatctctgctggccaatttcagatggaactggcgagacgataacggtgagaggttgcgccctggacagcggcaccctgaccaccgacacagagattataagaatgtcgcattgcggaaagttctactacgatgacaagtaaggacgaaatagtcgaagtgataaccatattaaatgtatcttcctttgatggctgcccaggtacgtgcacgggtgcttgcagagctgcagcgatgcggatgcctgcaactcggccaggaggcagggcgcaagtcccgcagacctggagtcactgatgaggcacctgctcagtctggtcgtgttcctattggctgccagcaggtagcatagtggatatctgtaggtaccgcatccggagcagaagaggcaggcggaaatatggctgcaagggaagtaaggcagccgggaaggcattcaagtcgtcttggatgcacgtggaaatccttttcttttccttcgaatctctctgtgtctaggatcgcaatcgcacccaaatgtaaacgcactcgagctgctgcagcaaggacacgctcggaaacacactctctcttacacacaataacattatggaattcatcaagcaattatgtgatttttaagcgaatacttaacaactatcaaacaataattgatgagcgcgaaaggaaactatttagatgctaagcattcgagtggcgaaaatcaaagaaaaacactgcaaaccaaattcaaattctaattgcaattatttttagctcctaagaaggaatctagactttaaacgctgtcgcttagtgaaaggcaggaatggtttacgatttatatacgatgtgttttaccttggcataagtaagcatttttcacctctctagatgagtattgtacatatacaaaaacaatttatctatttgttaaacgagtgctgaattttgggcagattataaatagttgtgtaaatggattagtgagtaaaattagcaacgaaaactgcgagctacaaagagggaggaaaattacttttttttgggagattgatgtaataacgtcatctttatttaaacagttttgttttacattatcaaaccactattagattacttggtttactcggaactgtgtgaactatttactatcaaatattacttctattaagtcctaaatcaagccataaatgccggtcataaatgacacaattcgttgctatatagacttctgaatttagacagccaactactaacacttaccgccttaccagtctggtgcggttgattcaccggaagattggttatcatgtccggataacctgatagggtatcggttacctaggtgttgcctagccgccgccaaaaataactatcgcaattgcttagtacattcaagcagctcaatcgaaatggacggtaagcactggcgcattccccttttccgttcggatcctccaatttagcgggataatttcgctgacttgcaggtcacagctggcttcacttcagcaacggagcaatcccccaggcagccgttgtggctggtcacgattccgatggcgacaccatcttcattggccgcgccttctactgcaacgacatgctgccggccaagattatccccaacaagggcaaggcctacgtggcgtatgccaaccaggaggtggagctggagaactacgaggtactcagcggcttcaactacgagtggctgccggccgagaacggagaggtgcctcccggcgccgtcaaggtcggccagaatgtcgacggagagaccttgtacgccggaaggggctaccatgccggcagtttgaccgtgggcaaggtgcatccgtcccacggctgcctgtacattccctacgattccgaggaggttaagatattcgcctacgaggttctgtcccgtcgcttggaggcgagataggtgatccattttcagttattgcctgttaatcacaaataaattcgacactttttgtagacgctcgtgtgttgttatctccatttggtgatcataaaacttccttatcgtgcaaagattaatttcaaacataactaaaaataatagagttgatagcttgagaaatacgtggttattataatgtattgtagatggtattggtttttcagacttcaacttgtgctcgcagttttcgtccataccccttttatgcaggaaaaagttataagttaacaaaaccaaatataaccacagtgaagccactaattaacgtctaagttgaaaactctcttaattacgcgatgcctaaatacttgattgtaaaatcgagctaaattttcatatggatatggcgaaccaataggaccaaactaaataaaacgaatactataacgaatgggtcggagtccacggcaatgacattcgatatgcatcgaattctagtttaaattgtttatggttcgcatgtcggtacttcatttttcggactaagcgagcttgcaatggtttccgcaaataaaaatcaacaacaactatgtataaacaagtgaagaagttttgatagaacgcaacggtttttgatcggtagcagacaggcaacacatcaaaatcaggcaattcgcattttctctctgctgaaatcgcttgcttgccacgcaactaaacgcaaactaatcgaaagcaaacacaatacgcacttattggctataacggctccccggctaagggccattgaattcttcaactctctaacacacaatgaacgaccaagcaaagtttgtaaaaataacacaagagtacattaaacgtttcatggcaaggcgaatgccaaacatttttgaatgcaaatgtatctagaatttaaggagatctttatacatatacaattgaggcggcagagcgatggattaacgataattagataaactagataacgacgctacttgaactaatcaaattgaat

SEQ ID NO: 35369 - DNA, 924 bp, DROSOPHILA
atggcggtgggcagttcaattatggagaccgtcgctattttggccctgctgcttggcctgttcattcgaagtggctactgcatagactgtttcaaatgcgtgtcatacaatggtgctaacaaggcctgcgacgatccctttcacaacaactactcaacggccattttggagtcgccctgcatgggcggccggaaggggcgtgacggcctgtttccggccaccgcttgcatcaagatcgccggctattacgatggaactggcgagacgataacggtgagaggttgcgccctggacagcggcaccctgaccaccgacacagagattataagaatgtcgcattgcggaaagttctactacgatgacaagtacgtgcacgggtgcttgcagagctgcagcgatgcggatgcctgcaactcggccaggaggcagggcgcaagtcccgcagacctggagtcactgatgaggcacctgctcagtctggtcgtgttcctattggctgccagcagcaacggagcaatcccccaggcagccgttgtggctggtcacgattccgatggcgacaccatcttcattggccgcgccttctactgcaacgacatgctgccggccaagattatccccaacaagggcaaggcctacgtggcgtatgccaaccaggaggtggagctggagaactacgaggtactcagcggcttcaactacgagtggctgccggccgagaacggagaggtgcctcccggcgccgtcaaggtcggccagaatgtcgacggagagaccttgtacgccggaaggggctaccatgccggcagtttgaccgtgggcaaggtgcatccgtcccacggctgcctgtacattccctacgattccgaggaggttaagatattcgcctacgaggttctgtcccgtcgcttggaggcgagatag

SEQ ID NO: 35370 - protein, 307 aa, DROSOPHILA
MAVGSSIMETVAILALLLGLFIRSGYCIDCFKCVSYNGANKACDDPFHNNYSTAILESPCMGGRKGRDGLFPATACIKIAGYYDGTGETITVRGCALDSGTLTTDTEIIRMSHCGKFYYDDKYVHGCLQSCSDADACNSARRQGASPADLESLMRHLLSLVVFLLAASSNGAIPQAAVVAGHDSDGDTIFIGRAFYCNDMLPAKIIPNKGKAYVAYANQEVELENYEVLSGFNYEWLPAENGEVPPGAVKVGQNVDGETLYAGRGYHAGSLTVGKVHPSHGCLYIPYDSEEVKIFAYEVLSRRLEAR

SEQ ID NO: 35371 - DNA, 2267 bp, DROSOPHILA
ctgtgcaaaataattgcaaaagttttgcccaagctggcaaattgtttgctgcattttcgattagcaaaatgtcaatttcgaatgaaaatgaaaataaaaagcaactaccaaagcacttggccaaattgtcgttaactggcaaatgccactacacaagcgaatcgctggcagttgggtttggatggcaaatagtagatcctggacgcaggacactggttatccggacatcgggctctctggcgacgaggggagccattttcaaaatttgatttcgttcgacccaaaaatgggcagtggccaaacgccatccgcagcaccatccgcacgaaaaatggtgcaaggatccggggtcgcatctacatgacagcaatatccatcacgaggctaaaccttccactatgctccgttctggcttgacgatatacaaaaattggtttaatcaactgtgaaacaactgcagcagcgacaccagctaaaatagccagcaacaacaaaggcagcagcagcagcgacaaatgttgcaacttggctgggttatagtgacaggaatgggcaaaagcaatggctgcatctaaatgaagagattggataaagtaggactctaaatgtcctttttaaagatgtccaaagatggaaaaggggtacgaattcggatattcaaaaataatgaatgcaagtttttgtcatttaaactattataaaatagtttatttatattcaatggtgttaactcgctgccagatccaaaaggcttttcaaaatgtagatcctcggccatttgcagcgtgtgcagatgttgttgcgtgggtcatgtcgggctatcactatcgatattcactttccttgtcaatgcacaacagcatcaccagtagtagcagcagcagaagcagtagcaacgggagcaatggcaactgcagtggcgaagagctgtgccaattttagttttacttatttcaacttctgtctatatccaagcaaggaccaacactaatatcgatttatgggctatttgcagaactgccgcgaaatggacgccgctgccgacggagtaccgccaacggcgccagctgcgacggcgacgacggccaacagtgatctggacttggcggcacgtcggcgtctcttcatctcacagccctcgacgctggcgacgcgccgccagcaggcggtttgtgtgcggcgggcccacaaaatgtatggcagcagcaagaaccccaacgttgtcctcgacggcctgaacatgacagtgcccaagggttccatgtgagtacccatccgaatagattaagatatacgtacggtctagttttcagttgcattcatactgtgtggcttagatggttgcatacatgctgaaagtatctctggctgtacttgcagccttgcatgtgcaacaagagaaattatactcaagtgttaaagtgcctttaaattagtaaggtaataattgctctcaaacttaaccttacaaacagctggcatacgtggatgcctgacagcttatcggaaagtccaactatttccagttttccaagccaaatgttttcattttctaattaagcgcggggaatatgatttgtataatgccagcatatgcaaatttggtgtttttctatcccaaactaagctcattagatgccagccaatgattaaaagcaatgtgtgggtacaaaacaaaaaaagcggaaatcatatgcagctccccacacgccgccaaccgcacagaaccgtgatgaccaaaatccgaaatcgaatatgcaaattttggactgtgggcattgggatattggaattacgattgggatttcggggtgaagttcccgctaacgaaatgcaaatgcagtttccgcgagatgtattgagcagttgcgtttgccattgtttgagtttgagtgttgtgtgaatggccgcgaaatgttactgaccgcaattagcactcaacaaccgacgaacgaatacactcgcacactcaaatgaggcagcaaagtggccaagacgatgagccgcagtcgacagactgaaagtgggtcaatgtcagctcggcgcttgaaaaactgtcaaattaacagcggcaacaacaagagttggctattgtggagcctcagcatccattgagataaaaaaccagtttttaagccaagaccaaaacccgtctaagcgatcatcagagttgccacatcgcacagatactgtacctaggaaatttatgactgttttaagtaccgtagattatttaagatgtattcattactttaaaaacaaaatta

SEQ ID NO: 35372 - DNA, 267 bp, DROSOPHILA
atgggctatttgcagaactgccgcgaaatggacgccgctgccgacggagtaccgccaacggcgccagctgcgacggcgacgacggccaacagtgatctggacttggcggcacgtcggcgtctcttcatctcacagccctcgacgctggcgacgcgccgccagcaggcggtttgtgtgcggcgggcccacaaaatgtatggcagcagcaagaaccccaacgttgtcctcgacggcctgaacatgacagtgcccaagggttccatgtga

SEQ ID NO: 35373 - protein, 88 aa, DROSOPHILA
MGYLQNCREMDAAADGVPPTAPAATATTANSDLDLAARRRLFISQPSTLATRRQQAVCVRRAHKMYGSSKNPNVVLDGLNMTVPKGSM

SEQ ID NO: 35374 - DNA, 2496 bp, DROSOPHILA
gcttagaactgctgccgccccatagataaactcgtatataaatgtcttttccagctgaactcggtcgaattcgcggctcgcggagaaggaagatgatccggagccaggtgaccgacgcatagagcgcagtcgaggcacatctgcactctaatagccataatcataggccataatgactactcctcgttccgggcctgggccgaaaaactcgatctgtagcaggtggaactttgtgaatgacatcgagccgaggtgtgtgtgtgagtgtgtcatttgcataagagtaaagttcacccactcggatggttggaaatgcaacctggcaaaagtttttgccaaatctaaattataaataagctcagggcgggtcgaagggccaaccaaccaacgagaccaggagtaggagcaggagcagcagcacttgccttccgaaacaaaacctcatatgcatcgaaacgtaatggcaaaaaggattttaagtgaagttgaagttgactacacgaccgcattgagggagtgccccgccccctcttctcctccgccccaaatattcgcatcccccgagactacttacactattgcagttgcgtggaaagtttgccgggtgtagcgggatggtcgatggaaagtgggaggggcggggtcccaaaaataagctcaaagtgagaactgaacgcggcatattccgccccagtagataaagtgcaaagcccttccccacacccctctatacagtgtgtatatctttcatgtgtgcggtgtatctttcgggttggagcaaccaccagacaaccacaggcaacagggaacgcaagcttaaatgtcatgtaaaatgtttccacttacacaaattactgtgtataatttaattgtgccacagaccggctggaagccgaatctgtcccacgagcgagatcatcgccagacatacgatttgcattggttccacctattggctccaccggatcagtgagagctataaagggccccaccgctttcgccctggccttcataccatactcgccatgaacttcatacagatcgccgtgctgttcgtcctggtcgcagtggccttggccagaccacaggaagatccggcaaatctgccagctccagaggcagcagcagcaccaccagcagcagcagcagcaccaccagcagcagcagcagcaccaccagcaccaccagcaccaccagctgcagcacctcaagccgctccagcgggtggttccggtagaaagaaaaatgtcaatcacaacgtcataaccattggataaaattcttcgaaaggaaggaggccacaatcttgatttaagaacccattggtacacccatattacacgcactgcgttaataaattattttcatttgcgtcgcaatgtgaggtatttatttcacttcaatatacacaagcagtttactgcttgttgtagaactcgcagaacatcatctctctgacacggattttaaagggtatctgatagtcgcggcactccagcgctttgtattgattttcagttttacttcgctttaggtttttaaactaagtcttttatacttaaaacggcaaaactgtgcattattattaaaattatttaaataacaagctgggtatttctcccaatttaatccaccaagcagtgtagtgcttgtaatgctgactctgcatgtagctgagtaaagggcatctgatagtcgcgttactagactctatcgctctgtcttgtatttcacttctacttcgttttagattttttaactaaggtttacttaaaaggcctgaaagctggaacttatttttgtgaaaccatccacttaaacaatggattaactactttagggtcaacaaaaattcatgtcatatttactacagttattatagcgataatagcgaccatgggacctataaagaactctttagattcgaaagaaaatcaatttactagttcaccgttttgtcaaatgcataattggcactggaactaaagtattcaataaattgtgattttagtgcattgggctagggttggtaattactcctttaattcgattgattccgcttggcggtcaatcaagtagagtaacgaaacatctgttttccgaattaacaataaaatagtaacccctatatgaagcgttacacttctgcctactcaactctgcgttactgcctggtcccagaggtctagttcttctaacgcaatctatccattaaagcgcatccgaattctctccagatattcatcacttaagacagcagtaaccagtatgatgttgcctgcaccacccctcccgcggcccatgtgctgttaaccctttcgaagctctggcatttttgggccaaatgaaggattccgctttgggttcgggacgacgaggggtctcatgtgtgatacggttgacagacttttagcttcattgcttgatttgtttaaatgtctttactgtgtttggtttatggtttcggtggcgtggtggaggcttcaaggctcggat

SEQ ID NO: 35375 - DNA, 496 bp, DROSOPHILA
ccctggccttcataccatactcgccatgaacttcatacagatcgccgtgctgttcgtcctggtcgcagtggccttggccagaccacaggaagatccggcaaatctgccagctccagaggcagcagcagcaccaccagcagcagcagcagcaccaccagcagcagcagcagcaccaccagcaccaccagcaccaccagctgcagcacctcaagccgctccagcgggtggttccggtagaaagaaaaatgtcaatcacaacgtcataaccattggataaaattcttcgaaaggaaggaggccacaatcttgatttaagaacccattggtacacccatattacacgcactgcgttaataaattattttcatttgcgtcgcaatgtgaggtatttatttcacttcaatatacacaagcagtttactgcttgttgtagaactcgcagaacatcatctctctgacacggattttaaagggtatctgatagtcgcggcactcc

SEQ ID NO: 35376 - protein, 83 aa, DROSOPHILA
MNFIQIAVLFVLVAVALARPQEDPANLPAPEAAAAPPAAAAAPPAAAAAPPAPPAPPAAAPQAAPAGGSGRKKNVNHNVITIG

SEQ ID NO: 35377 - DNA, 2585 bp, DROSOPHILA
caagtacatgctatatcgtaaatgtatatcacaatttatgtcttttaacgacgatgtacgatagtttcactaattatattgtttaacgagaaagagcgagcaaagcgtaaatgaaacaaataaaagacacattcgaattaaagttataagaaaaagcgtttgaatttatctagattggtctaccttcttaagggtaagttaattaggtttcaaaacgaaagactttttccctcttaaaagatctagctgaaaaaatgattacctagcaagacccgtagttttagcgacaccttctgataacttacattatatatccttcgttacaatgtatttcttgtgcttataatttttaactaaataattttcaaaacttccttcctctaaacggtttcgagctattggacattctcattgctgccagtacagaaaataattaaattcgtttgattattttagcagaatagtttccctttggcccaaatgaaaacaaacagaaaacgaataagttggtttttaaattttattgacacggttggaagaacctgtaatacataaaatgaatcagtgcatcagtgcactttaaagtacaataatttttcatatttacattatctcttcgcctgactgcaaagtacgcggcatggcatatcgttacaacaaagacactagaataacactagaattattctaaggggtctttggttacaagctgtttacccgcaactatcggctgcgttcgatagccattcgcagggaacgccggtttgtttcaggtagctcaattgtctcaccactagcaaagtgacggcttgtaaattgttgggatttaaaatttaaaattgtctgctgcacagggcaagatcctaaacattggttacctgagagcgcggatttccgcgaagcgagacgcgttcacagacaagcagaccgcatcccttcgcagagcgcatccctgtaatgaatataagccagcgacgcacttgaaagaccagccagaccaatggagacctcggaagcggtgaatacgtgtgaggagggagaccagctgaacggctccttccgcctgcagtgctcgatgtcctccgtggatatggagagcgagagtgacctctcgctggcattcgagcgcgaggagcaaataccggatggcggctgcgacgagctgccggccttcgagatccgcgccttctcgccgcatggacgcaccccgtcgcccatcgacgatctcgatctgtcggacatcgagacgcccaagcagccgcagaggcagcatctccttccggaagaggaaccccagaacgatcctcagtacgttgccctacacgagataaacgcccagatcagcccgcccaatgacgccgacgactccaacagcttggagacgatcttcgagggcgttttcctgagcaccccgccccgcgataaagcttccagctcgggcaattcccgatttacgcccaagcgcggacgtgcaaatctcatcgagctgatggccaaccggctgcacggcggcaaggagaaccagtcgccgggagcgcgagtctctgacccgcatttaccctcgccactcaaggaccccacctagtgaccgcagtccagccttcccaaccaaagccatggagccctcgctcagactgccatcgatgttctagaataagttaccatttacctgaatgtattgttcacacccagcggtcagcaggtgtacacccagatgtgtatcctcggctgatccttcagtttacctaagcttcgtgtcacgcgttttccgatgtcaggctaaaagattttgtagtggtaaataaagattgtcgtctttccatgtttcaaacattaaaccaaggttatgctcttccctgccgggcagatggtccaggtaggcagaaggaaggtttatattgctcatagaacagactgatcagcggtacctagaactaaaccaaccactattgtaaacactggaaagttcgatggctaattgacggatctaggcatacattgctactacgtaatttgtagtacaaattgattttcgaagccagtatgtttacaacatattgtagaatgttcgatgtaacagtttgaaaaataaaatatcgtactacgatgttcgtttaaaaacttgtctgaataatatccttctcacgtttcgatttatttataaagaaaatgtcaatatttgcttattaatctgaaatgtaatggtaatttttggacctcgtgtaccttaggactactatttttacactaatcctattgtacctaggtagtacattgagtaaactagtataaaaataagtaattctgtgattaggtatattattggaagatactaaatcactactttcctgagtcgcattgcgaattcgcgtcgtacacaaactctacgctggaagcattattcaaacttaaaaataattgggacgagcattgaaagtaatatagagtaataaaatcgggaatgtttcataggttatagaacacattcgaaagtaaaacagcgaccaggacaggggaaaatgattacttaactttacaattttgtaggcaattacaaaagttaaataacacttgctttttttcta

SEQ ID NO: 35378 - DNA, 585 bp, DROSOPHILA
atggagacctcggaagcggtgaatacgtgtgaggagggagaccagctgaacggctccttccgcctgcagtgctcgatgtcctccgtggatatggagagcgagagtgacctctcgctggcattcgagcgcgaggagcaaataccggatggcggctgcgacgagctgccggccttcgagatccgcgccttctcgccgcatggacgcaccccgtcgcccatcgacgatctcgatctgtcggacatcgagacgcccaagcagccgcagaggcagcatctccttccggaagaggaaccccagaacgatcctcagtacgttgccctacacgagataaacgcccagatcagcccgcccaatgacgccgacgactccaacagcttggagacgatcttcgagggcgttttcctgagcaccccgccccgcgataaagcttccagctcgggcaattcccgatttacgcccaagcgcggacgtgcaaatctcatcgagctgatggccaaccggctgcacggcggcaaggagaaccagtcgccgggagcgcgagtctctgacccgcatttaccctcgccactcaaggaccccacctag

SEQ ID NO: 35379 - protein, 194 aa, DROSOPHILA
METSEAVNTCEEGDQLNGSFRLQCSMSSVDMESESDLSLAFEREEQIPDGGCDELPAFEIRAFSPHGRTPSPIDDLDLSDIETPKQPQRQHLLPEEEPQNDPQYVALHEINAQISPPNDADDSNSLETIFEGVFLSTPPRDKASSSGNSRFTPKRGRANLIELMANRLHGGKENQSPGARVSDPHLPSPLKDPT

SEQ ID NO: 35380 - DNA, 7597 bp, DROSOPHILA
tccgcctcctggccggctgttttgattgatgcgccgagtggtatgtccagcgaatgtccaatggcttaattgggctaactcacgtatagctactcggaatcggggttgggataccgggcccactttaatcgcctcatagaatgccggtggtggtgggcggcggaaatcaggaagggcgtgtttttgtatactatcgtgacctaatttcctgtctgtttactctatggtcaaagcgtacaatacaacaacgcaggacttccacctgaagtaaaggtgcagcactgacctattggaatacttgatgccgcacgacgttgggacgggttcttgttttaccaaatgtaccactctctcttttaaaaaaggtgttcaaaagttcgattgcatatctatgattctgaaagacggatggtgaatgaaaaaggtgtactgcgagtgatatttttggattttcaatttaaaatgtatttatcacagttttatttgcttccctactttttgtgactccagatagtatacatacatatatcgtagattaacaaaatttttaccgattaaagatttaattttgatcgcgactttatctacaatcccgaaatattctgcggctaactcttattaaatttaagtgcttcactttttaactgccctatcctagcctagcttgcccatatgcgctagccttaggcctcatcggcacatccactcttccgatccctaaccccagtataagcgcacaattatgctaatggttcacatgcccaaataagaaccacttgagccccgctaagcggtccgccaatccactgtcactcggacttctccctttctctgtcccacgctcagtcagagaactccctgctctagtggctgattcacggtgaggccatcagtctgtgtacgtccggcgatgaagtcactccactaagctgagggcttagtttgtaattctagagtgccgtaaaaaaagaattcatcgtcttttttgtagagagccaccatggtgaagatcctgcaggcctacaactttgccaggcagcagacgtatgccctcaacggtgacatcctggcggccagccttatcgggaacaaccgcatagccatcagcagtgctgaacagttcatcgagatctacgacataggtgccaagcaggctcaatctgaggaccacacaagaacggcaccagaggacgttggacaatccaatgagacggcaggagaatccaccaccaccgctggtgatgagaggacgccgagcaggagcacgctggccacggtgggagaagtggtgcaacttatttactgtgaagctggtgagtatatattatgtatatgtatctgaaaacgctactaaagatgaatcttcctcaggcaaatacctacttactcttgaaaaggaacaggcgggcagtccggtgcactcctcctccaccattagctgcacatcaagcagcaacagcaatacagtctgctctgaggacgacacgaagatgttcgtacgcatctacgccaacttctggaagttcccggacagccggctaaacgagctgcccattaccattcgaatagcttcgatgaccacgcccaagacaccgttggtggagagcatcgatgtgattgagctgccgttgcgcagtccgccggagctggtgcaatgctgccagacatccggaaacatcattgtgagcagtcgtgacaggatttacctctacgaatacacccagtgcgttcatgagaacacgcagcctaggttcgctttcatcgactttctgccctttaagttcttcgtgcaactaaacttcgtccctgtgcgtctgtgtctagccgagaacgtaatcgcctgtctcagcaatcgctactgcgtggcctttaaggttgtggatgcacttactagcagagccagtggagggcaggatgtaagctgtctggataacgactacgttggcggagacgagccgctttcggaatccctaagcttgggcagtaaggccagtgccagcggcgcaggtgggggcgtggtcagttccagtcacagccagcagagctgcgacagcgattccctacaatcgacgagcagtgcaaaaccacaggttgtcatgaatggtgccttgcctggacggtcaccgttagactttaacgtggccaagctggtgaacaatgcgtacggcagggaatttgagccggaactgcgatctcagtgggacgagactacggactacggagcaggaaagggtcaggatgacaacctagatatcaccatcagccctcaacgtgcctcagacattaaaatcaagctcgtgaacgaggccaaggcaatgaatgtgaggggcatatccgggagcagtcatctggatgatgcgtcggtgcaatatgatgtgcgcaagctgttgcagatctgcatgaagacctcggagaatcaaccgcgcgttctggacatctttcgttgcatggacctcaaggccatttaccaaaggaacagccaggaagtagaccaggaggacgatgagtatgacatgggcaaccaacaggtgcccagtgctgtgaccacgtttaagcacgtaaaccgccggacgcttaagtcttctcagcaccagaggtgcataggacacgccctcctcgtggccagcagtgtggacggctttctgtaccagttctctgcgcaaggaaagtggtacagtgagaacgaaaagccagtggccagctacagcttcacggcacctgttatccaggtccatatcaacgactatgtcgtgtatgcagtgacctccgagtccgtcgaaacgcacacctcacgaattggtcacaagctctttcacaatcgcttcgagtacccttctattggcggtttgttcccagaggagtccgctccggatgtgagttcccccatcgccgtcgtgggtctggcagcgtttatgcatgttcagttcgtttgcgttaaccgagagcagctagtgcttattacgaatgcagctctagagcagcacaagcggcggagcatgagcgaagtgcctggcactcaagtcgtagctgtcaagagaaacattgctgcacgcctattggccgaagcgaaggcgaaacacaatagtctgctaaggagcagcagtgcagtccaatcctcgacggtggccaacgagtggacgctgtacaacctagaggtacctcgggtggagtgcgtcatagaggatcttgaggggattgcggaatcctatcgcagtgccagcagctctaacttttttgatctcatggaggaggcgcatgtcatgttgcgaataagtctcacactgcaaggtgagcgcttgggagcggagcgagagcagctgcttcgaaaaatgttcatggcaaactgcagaaaactagcggatttctcaatacggtacgaaaacttaaacttcttaaaaatattgttgatcagcatcagcacgcaaccttatcacctggttttaactgcacttggacttgccgaacatagctttcttaggcttaatacatcttactcgtagagcaaaacgcttactagattcgtagaaaagtatgtaacaggtggtatgtaaaacgtttcagaccggataatgtatgtatattcttgattaggattactagccgagtcgatctgagcatgtccgtctgtctgtctagaaaccgtcccaaactgtcacgcccacacttattaaaaaagatttttttattataaaaatattgatttcagtcagaagtttgcaacgcagtaaaggagaaatttgcaaccatataaggaatgtatgtatattctttattagtatcagagtcgatacatccatgtccgtctcttcatatgtttcaaaactgttttaattatttctaaaattttattttgttcccattattattgatacaccgaaaacacctggcttggatttaaattctttcgacttttatatattgtaaatgaaatttaagattataaatgaactgcctgttctgactgtaacctttgattattagaaataagagctttgtctgtttataatattgtatatttatattgtttatcctccaactttcgaacagttcaagcaaaaaggaagtatatctccaggctacagggttctacagaatgtgtcagtttcatcttgtagatattttcaataactacgtacagaattttatggacaccgaagaaagcgtgatcccacttgagctatcgggtctgatctacacagttaagctgtttctgctttgcctgggaactgatcgtttgaagtcggcatttttgaaccagacagttcttccgtattttacaccagctagggtgatacagcaaggttacaagcaggttccgatttcgctggagttccttaacatgttcatcaaacatgcacccttggaaatcgcgcagataatgctagtctcacctgttgtagcggactcaataagcggggagttgataaactacctgaaatacttggacaaactgtaagtagacttatttctgtaaaaatgtgttaaatatgtttaccatttagctctcccgatgaaaatcttctgctggccgtgactgcgtgccgtatgtccaactatttgctggctcaggaggtagtttcaaagtccacgagacgcaacctagccacagctttaatacggcacaaaaacgttctgttcgacgacagtactgtgatctatcagcgacgcaatcaacagcaagctgactcccaggcattaagtttgcgagctagaaaaagtcgacggatggcggcaaagagcaaaccagctccagtcggaacgccagctccgagtaccatagtatccttctcagacttctgtgagacgattctgttggccaacgagcagccagcactgctcgaagctatcagtgatgccttcatccatgcgctttgcatcgagcacagcatgacgctggacgtgattctgcagctctttcttaactacatcgcctcgcacattggacagaagggataccagacctctcagaaggtgttcgtaaacattctgcaggtgtacttttatgatctctacgatgttagctcgtctttgcaaccccaagagattcgctcgcaaacaccgccacaactggatgacgattacgacgaggagtgcagcagttcgcgggctccctcgctgcacagcgaggcggatgcccagtcattatccagctcttgcgccagttcagcgcacgaagatcgatcggcaagcctgtcaatcagtggcaggcagcagagaatcgtctacgaccagctgcaggaacaacagtcctcgccttttcagaagcgcaattcaaatgcctcgctctcacagcctcaggctaatgatgatgtgactgcaactaatctcaagggtctcaagatcctgtttcgaatgtacatgggacggctaaaggctctaagtgatctaatcacagatctgcaatcagccgacgttgagcaacaaacaagccgcgaggaatttataaacctgcgaatggaatgcatttcgtacatggtgggaatggcacctaactacagcccaaaaccgattataaggaatccaaacgatccgttggccggcaagcttatttatgtgccctttattccggactataagctacctgacggagaggagtatgatcgccacatcaagggctacattcgcccaattccctgcttgttggagcgaccgcagtatcttaaccgccttccgccttttgagcgtagcgattttagctatccgaacaaggacgacggagagtttgaggtgcgcttccttagctggcataacgagttgcttaccctcagccttaagatacagagtctgttagcttctactaaggtggatcgtgaaatcgtctcggagtttctcgccttcatacagaagacgcccaatttaatcggcattgacagttttctggtgatcgtgttgcccaagaacttggccataaactacctgcttagtttctgtcccgcctttttgtggcagtatggaaaggtaaggcttacattctaaaactttttgtattcttttattcatataatgaaactgtttataacgtgcattgaaaaatagcgaatagagtatatatgtagagtgccgtttcgatatcaaagacttttaaatatttctttacttgcagtcttgcgggtttacgccaaagcattgggagagcctcttgcggaaaatactaagcaagcaggaggcgctgcccaattggaaggcacacattacgggtttgtagcttctactatattaaaatacttacgtaattcaatggttaacactttcgcagagattttaaacaatctggtggctgagctgagctttgaggaactgttgcaatgctttcccagcgaagcgattcaaaatcgcaacaccgcacaatatttcgccacggaatttgccgagacatgtatcttgtatgaaaacgaggagcttgtctttaagaatcctgatctaaaggagggtcacagggatcacatgccgatggataacatagacgaggacaatgtgtttgagttaacactacgcaaggcggtggccaagcagcggagtattgccctgcggtccatgatcgagtccacaggaactcagctgttcgacgcaactagtaatcccatgtataacctgtaggcgatctacattcctcgttaaaatagtttaaaccaaaattatcatattgaaaattgataagattgatattaacgtagcaaagaaagcttttccacttttaccacagaccgatcgaaatgtactttgtaattttaggttacacccaaacagggcgttaattattgacaattatgtgtgacacaaaacacaacattcgaatactctagccttcggtgatttatgaaactgagctgacgaggaaaactcccaagctgtaggttgtaaaattaactagctcgtcgcgcacttatgctttagttgccatatatgtataaccagatgtgcgaccgatacttcaatttaattcatttatacctgcatttgtaactgtactaaatcttcaaccaaccgagtttcctttaaactttgctttaaaacctaagcagtatttgtaacctagttatacgttggtttcatctacccttttatttgcccacttccagcacacttttatgacaaaaacaacaaaatctagtgatatttttacttctttcattgaatctgaacaataaagcataaatacattataatggccctactatttcccgatgagctgaaaatttattcacctgacagcattaaaatacggttgcattgaagccgctaatagtcactacttattctggcaattaaattctggcttctgtggccgtcctaaggtaatttaacgtgcgaaaacttgcggacagatttctccgccgtgaatagcttagccaattaagggagctagacatcgcgcgagtgccattctaagcaggattggctgcaattggcgatatcgacagcagcatgttaaagctggaccaatcgaagttggtttcgggggagcctaaatccggatcgggtgacatagacataccgaagacgtcagaggagaaccagctggacgcgatcatcgttgagattggccagttcggacattttcaagtcttcaactacttgctgctttgcctgcccatca

SEQ ID NO: 35381 - DNA, 4458 bp, DROSOPHILA
atggtgaagatcctgcaggcctacaactttgccaggcagcagacgtatgccctcaacggtgacatcctggcggccagccttatcgggaacaaccgcatagccatcagcagtgctgaacagttcatcgagatctacgacataggtgccaagcaggctcaatctgaggaccacacaagaacggcaccagaggacgttggacaatccaatgagacggcaggagaatccaccaccaccgctggtgatgagaggacgccgagcaggagcacgctggccacggtgggagaagtggtgcaacttatttactgtgaagctggcaaatacctacttactcttgaaaaggaacaggcgggcagtccggtgcactcctcctccaccattagctgcacatcaagcagcaacagcaatacagtctgctctgaggacgacacgaagatgttcgtacgcatctacgccaacttctggaagttcccggacagccggctaaacgagctgcccattaccattcgaatagcttcgatgaccacgcccaagacaccgttggtggagagcatcgatgtgattgagctgccgttgcgcagtccgccggagctggtgcaatgctgccagacatccggaaacatcattgtgagcagtcgtgacaggatttacctctacgaatacacccagtgcgttcatgagaacacgcagcctaggttcgctttcatcgactttctgccctttaagttcttcgtgcaactaaacttcgtccctgtgcgtctgtgtctagccgagaacgtaatcgcctgtctcagcaatcgctactgcgtggcctttaaggttgtggatgcacttactagcagagccagtggagggcaggatgtaagctgtctggataacgactacgttggcggagacgagccgctttcggaatccctaagcttgggcagtaaggccagtgccagcggcgcaggtgggggcgtggtcagttccagtcacagccagcagagctgcgacagcgattccctacaatcgacgagcagtgcaaaaccacaggttgtcatgaatggtgccttgcctggacggtcaccgttagactttaacgtggccaagctggtgaacaatgcgtacggcagggaatttgagccggaactgcgatctcagtgggacgagactacggactacggagcaggaaagggtcaggatgacaacctagatatcaccatcagccctcaacgtgcctcagacattaaaatcaagctcgtgaacgaggccaaggcaatgaatgtgaggggcatatccgggagcagtcatctggatgatgcgtcggtgcaatatgatgtgcgcaagctgttgcagatctgcatgaagacctcggagaatcaaccgcgcgttctggacatctttcgttgcatggacctcaaggccatttaccaaaggaacagccaggaagtagaccaggaggacgatgagtatgacatgggcaaccaacaggtgcccagtgctgtgaccacgtttaagcacgtaaaccgccggacgcttaagtcttctcagcaccagaggtgcataggacacgccctcctcgtggccagcagtgtggacggctttctgtaccagttctctgcgcaaggaaagtggtacagtgagaacgaaaagccagtggccagctacagcttcacggcacctgttatccaggtccatatcaacgactatgtcgtgtatgcagtgacctccgagtccgtcgaaacgcacacctcacgaattggtcacaagctctttcacaatcgcttcgagtacccttctattggcggtttgttcccagaggagtccgctccggatgtgagttcccccatcgccgtcgtgggtctggcagcgtttatgcatgttcagttcgtttgcgttaaccgagagcagctagtgcttattacgaatgcagctctagagcagcacaagcggcggagcatgagcgaagtgcctggcactcaagtcgtagctgtcaagagaaacattgctgcacgcctattggccgaagcgaaggcgaaacacaatagtctgctaaggagcagcagtgcagtccaatcctcgacggtggccaacgagtggacgctgtacaacctagaggtacctcgggtggagtgcgtcatagaggatcttgaggggattgcggaatcctatcgcagtgccagcagctctaacttttttgatctcatggaggaggcgcatgtcatgttgcgaataagtctcacactgcaagatattttcaataactacgtacagaattttatggacaccgaagaaagcgtgatcccacttgagctatcgggtctgatctacacagttaagctgtttctgctttgcctgggaactgatcgtttgaagtcggcatttttgaaccagacagttcttccgtattttacaccagctagggtgatacagcaaggttacaagcaggttccgatttcgctggagttccttaacatgttcatcaaacatgcacccttggaaatcgcgcagataatgctagtctcacctgttgtagcggactcaataagcggggagttgataaactacctgaaatacttggacaaactctctcccgatgaaaatcttctgctggccgtgactgcgtgccgtatgtccaactatttgctggctcaggaggtagtttcaaagtccacgagacgcaacctagccacagctttaatacggcacaaaaacgttctgttcgacgacagtactgtgatctatcagcgacgcaatcaacagcaagctgactcccaggcattaagtttgcgagctagaaaaagtcgacggatggcggcaaagagcaaaccagctccagtcggaacgccagctccgagtaccatagtatccttctcagacttctgtgagacgattctgttggccaacgagcagccagcactgctcgaagctatcagtgatgccttcatccatgcgctttgcatcgagcacagcatgacgctggacgtgattctgcagctctttcttaactacatcgcctcgcacattggacagaagggataccagacctctcagaaggtgttcgtaaacattctgcaggtgtacttttatgatctctacgatgttagctcgtctttgcaaccccaagagattcgctcgcaaacaccgccacaactggatgacgattacgacgaggagtgcagcagttcgcgggctccctcgctgcacagcgaggcggatgcccagtcattatccagctcttgcgccagttcagcgcacgaagatcgatcggcaagcctgtcaatcagtggcaggcagcagagaatcgtctacgaccagctgcaggaacaacagtcctcgccttttcagaagcgcaattcaaatgcctcgctctcacagcctcaggctaatgatgatgtgactgcaactaatctcaagggtctcaagatcctgtttcgaatgtacatgggacggctaaaggctctaagtgatctaatcacagatctgcaatcagccgacgttgagcaacaaacaagccgcgaggaatttataaacctgcgaatggaatgcatttcgtacatggtgggaatggcacctaactacagcccaaaaccgattataaggaatccaaacgatccgttggccggcaagcttatttatgtgccctttattccggactataagctacctgacggagaggagtatgatcgccacatcaagggctacattcgcccaattccctgcttgttggagcgaccgcagtatcttaaccgccttccgccttttgagcgtagcgattttagctatccgaacaaggacgacggagagtttgaggtgcgcttccttagctggcataacgagttgcttaccctcagccttaagatacagagtctgttagcttctactaaggtggatcgtgaaatcgtctcggagtttctcgccttcatacagaagacgcccaatttaatcggcattgacagttttctggtgatcgtgttgcccaagaacttggccataaactacctgcttagtttctgtcccgcctttttgtggcagtatggaaagtcttgcgggtttacgccaaagcattgggagagcctcttgcggaaaatactaagcaagcaggaggcgctgcccaattggaaggcacacattacggagattttaaacaatctggtggctgagctgagctttgaggaactgttgcaatgctttcccagcgaagcgattcaaaatcgcaacaccgcacaatatttcgccacggaatttgccgagacatgtatcttgtatgaaaacgaggagcttgtctttaagaatcctgatctaaaggagggtcacagggatcacatgccgatggataacatagacgaggacaatgtgtttgagttaacactacgcaaggcggtggccaagcagcggagtattgccctgcggtccatgatcgagtccacaggaactcagctgttcgacgcaactagtaatcccatgtataacctgtag

SEQ ID NO: 35382 - protein, 1485 aa, DROSOPHILA
MVKILQAYNFARQQTYALNGDILAASLIGNNRIAISSAEQFIEIYDIGAKQAQSEDHTRTAPEDVGQSNETAGESTTTAGDERTPSRSTLATVGEVVQLIYCEAGKYLLTLEKEQAGSPVHSSSTISCTSSSNSNTVCSEDDTKMFVRIYANFWKFPDSRLNELPITIRIASMTTPKTPLVESIDVIELPLRSPPELVQCCQTSGNIIVSSRDRIYLYEYTQCVHENTQPRFAFIDFLPFKFFVQLNFVPVRLCLAENVIACLSNRYCVAFKVVDALTSRASGGQDVSCLDNDYVGGDEPLSESLSLGSKASASGAGGGVVSSSHSQQSCDSDSLQSTSSAKPQVVMNGALPGRSPLDFNVAKLVNNAYGREFEPELRSQWDETTDYGAGKGQDDNLDITISPQRASDIKIKLVNEAKAMNVRGISGSSHLDDASVQYDVRKLLQICMKTSENQPRVLDIFRCMDLKAIYQRNSQEVDQEDDEYDMGNQQVPSAVTTFKHVNRRTLKSSQHQRCIGHALLVASSVDGFLYQFSAQGKWYSENEKPVASYSFTAPVIQVHINDYVVYAVTSESVETHTSRIGHKLFHNRFEYPSIGGLFPEESAPDVSSPIAVVGLAAFMHVQFVCVNREQLVLITNAALEQHKRRSMSEVPGTQVVAVKRNIAARLLAEAKAKHNSLLRSSSAVQSSTVANEWTLYNLEVPRVECVIEDLEGIAESYRSASSSNFFDLMEEAHVMLRISLTLQDIFNNYVQNFMDTEESVIPLELSGLIYTVKLFLLCLGTDRLKSAFLNQTVLPYFTPARVIQQGYKQVPISLEFLNMFIKHAPLEIAQIMLVSPVVADSISGELINYLKYLDKLSPDENLLLAVTACRMSNYLLAQEVVSKSTRRNLATALIRHKNVLFDDSTVIYQRRNQQQADSQALSLRARKSRRMAAKSKPAPVGTPAPSTIVSFSDFCETILLANEQPALLEAISDAFIHALCIEHSMTLDVILQLFLNYIASHIGQKGYQTSQKVFVNILQVYFYDLYDVSSSLQPQEIRSQTPPQLDDDYDEECSSSRAPSLHSEADAQSLSSSCASSAHEDRSASLSISGRQQRIVYDQLQEQQSSPFQKRNSNASLSQPQANDDVTATNLKGLKILFRMYMGRLKALSDLITDLQSADVEQQTSREEFINLRMECISYMVGMAPNYSPKPIIRNPNDPLAGKLIYVPFIPDYKLPDGEEYDRHIKGYIRPIPCLLERPQYLNRLPPFERSDFSYPNKDDGEFEVRFLSWHNELLTLSLKIQSLLASTKVDREIVSEFLAFIQKTPNLIGIDSFLVIVLPKNLAINYLLSFCPAFLWQYGKSCGFTPKHWESLLRKILSKQEALPNWKAHITEILNNLVAELSFEELLQCFPSEAIQNRNTAQYFATEFAETCILYENEELVFKNPDLKEGHRDHMPMDNIDEDNVFELTLRKAVAKQRSIALRSMIESTGTQLFDATSNPMYNL

SEQ ID NO: 35383 - DNA, 2449 bp, DROSOPHILA
taaatatttatgaatggcatgttgtatacttttcgggcacatatgcaagagctacaaagtgtattgagaacaattccttgcaattgcccacgacttgcgtttttcacatttttaaaagcttatttactatgcgagatgtgtaaacccaccgtatctaacatcactaaattactaagttgtaagcctactttcatagccaagaagaataaattaatctataagtacattgaactttccattatgcagttctcaagtatcactttccaaaccgacagattcgcattgtggaatagtttcagcgtcgatgcatgaccaccaaggccaaaattctgtagccaaaagtccctcaaactgaactctcggccaacgaccaagctgatcgcagtggaaaatccgaaaaccaatacgattccaattatcagaatcggagttattacggttgacctcatccgaagggcgtgaatgagcattgaccacggtccaggtcggcaatgaacctcaaagaagtggaaagcaccactggcatcgcacatgactaggcggaccatcaaccaattttaaggttaatgactgtgtttacgcagaataaatgtgaacccctggcaaaaaaagcggctgactgactaatttaaattgatagcaaaacggcaatcacaaatcagacgagatgtgggatgagtaatcgcggcgataggcaaaaaagagccaaatagttttgttttgttttgttctcttgttgttaacttgcactaaatacatacgtttgcagagcgtttatattgggatttaaaaatattgcgtatacgccggctgggttacgcacgaacgagcaaaccgagcagccgctgatgggcgcccgattaagctccattaaaaaagcgttttatgctttaaaattgcaaacattcggcggcaaactctataaaatcagttaatgccggggtttttgcattcagtcaacgttcgaggattacacacgataaacatggccagaaaaatcatgtcagtgaaacagtcgagccgctctccatgttgttggttcggtttgctcctggtcgccattttcctgcagccatccgcgagccaatactacggttatccctattacggcggcgctaatgcgggagcgggatcgggatacgggaacatatacggcagcggcatgtacggatacccctacagctacggcggatatccgtactactcgtatcccggctacaacccgtactcgatgtacggtggatacgggcagtacggatacccctatggaggatatccctacggcggcaatggcatgagtgagtttcccgactgatagcacctcggtgcctagcacacaagtaatctacaagtgttttggacctgtttcttcctctagacgtggcctacgccagcagcagtggaggattcgcaacagccagtgcgggtggaagcggatactacggctaggaagcgcgaaacctgatatagtttagtgataggtatacggttaagtcatcctaccccataagtgtgttagtgctaataaatatgatatttatgttctataagtcaagacttattcttatgacgtgtccaaaactagtgtacctggtaaaaaattgtacacctaactagtgccttcatgtataccaccataattttattagctcccggaactgatgtgataatttgtatgtcttttagcacatttgaccctatgtatgttccgccaagtttatgctgccatgactctttgtgggatcattagatccttttctcagcttttagctttgagtcaataactacgtacgcatatctggtcgttttaatagttataaaaaagccttgaggctgtgatcccatatataaccatataccgaaaaatattttttgcttcgtgataacaaatcgacaaagtttgatccatgtgcattcttggcgccttatcgatagctatggacagtgttgtaaggtgcacgatagtaaggggggcaaaattgtatcggtctgccgatagttcccggccgttagccaagtccaaattcgaccgaccgaccaatagtctcgcaaaacacaaaacaaaggcacaccacacttcgtgctctcgccgaattccgccgccgtcgcctgaaactcacacaaagtaagcccgaaatcagtggaaaagcgccgaatagtcgaattgcaggttcaaatgggatggacggcgacttaaaaggcggaggccaataggcggcataaaaacattgtattgcgtaattggggccaataagaaaagcaaaaaaacaaagccaaccgactgcattctattgcgcctgtgtgtgtgcttgtgtatctacagctgagcagtaaataaatttgttttacatttggcctccaaaggcaatttctcggtgttcccgctccctgcgtttccataaacttcctctcctttcgcattaatatcaatgtctttagttcatcgtta

SEQ ID NO: 35384 - DNA, 369 bp, DROSOPHILA
atgtcagtgaaacagtcgagccgctctccatgttgttggttcggtttgctcctggtcgccattttcctgcagccatccgcgagccaatactacggttatccctattacggcggcgctaatgcgggagcgggatcgggatacgggaacatatacggcagcggcatgtacggatacccctacagctacggcggatatccgtactactcgtatcccggctacaacccgtactcgatgtacggtggatacgggcagtacggatacccctatggaggatatccctacggcggcaatggcatgaacgtggcctacgccagcagcagtggaggattcgcaacagccagtgcgggtggaagcggatactacggctag

SEQ ID NO: 35385 - protein, 122 aa, DROSOPHILA
MSVKQSSRSPCCWFGLLLVAIFLQPSASQYYGYPYYGGANAGAGSGYGNIYGSGMYGYPYSYGGYPYYSYPGYNPYSMYGGYGQYGYPYGGYPYGGNGMNVAYASSSGGFATASAGGSGYYG

SEQ ID NO: 35386 - DNA, 2825 bp, DROSOPHILA
ctttaatttaatgagcactccactccgtcgaaattatgaaaacgaccgcaaaccgaaagccgaaaatcaaaatgcgcactcaatagcaaaacgagtggcgaaggcaaatttctgggcacagaaatggagcggggtaaattggctaattgattggattggtttatcgaggggatgtgggtctacaaacaagtgattatgtaaatgcaaatcagcttaaaaaaaaggtacccattgttgtttactgtctgtaagtgagctttaaaattgattaagaaacaattgtttctagataatagtacaaaataaatacatttataacaaatgtgacgtgtacattttcggaaatatattgtttattttggtcagaaaaaatttaattcattttaattaccgcataatttaaaatttaaaattaaatcaaattaaatttccacagtacaagagctttgaagattttccgaattttagcgagaatagttttgccgctgaaattggctggctgtaatatactttgggcgcgaagaggcggcgaaatggatcaccagcagctcagcatggacatgtgctggccaaaattaaatgcgagtcagactctgggacagatacatacatacttgagctctgggctgcgcggcatgcgaggcacgttggagacgatgacgtgagtcttggagggctcagcccgagatggaactgaagttacgcgggatggggcaggtcggctgttgatattaaagcgacattaacattgagcttgatggctgctttgatgggccacgatacgtttttaaatgcgcgaatatcgccagtttgtcagttgttccacaaattcgcattcgtactatgcatctgggagcgagtgagttatcataacccccggcgatggcgaccttgcgaccgttactgaattctgatgggagcatcggtggcactccccgcataaataggaggcacccacagcagccgggcacaaacagttagcactcgtccaccaatcaacatgaagagccaacccatcctgattctggccgtgtgcctcttggccctctccgccgtttccgccatgccacagcgtcgggcgaagagtcaacgccaggtggagtactcatccacaccctatccggctgctggcttccgccccagggttccctttaatctgcccggtgaagttcaacccaagatcgagacggaaccactgaccaccaccagtaccacgtctgccagcgaagtggaaaccctggagaataccgagccacttagcaccaccgagcagcagcagccggaagcgggaacggtagcggatttggaattgtccatccgcacgcctgccaatacctacggagcccctgaagagcaggatcccctcgtgccggacaccgtagtggtggtggcccaggagccagcccgcgactttcagcccccctccctggatgccgtcgaggactttgccgccgatgtcactgttgctgctgatggcgagcagcctgttgctgatgtccctgccctgggccaagcggagtcggaggacgatgagcccgaggcggcggtcaaggctgtcaccccggctggagcctatggaccacccgccgccacctacggtgtgcctgagctgagcgagaccgagaacgagttggatctggaggagtcgcaagttgagctggttgaagaggaggcggcggcggaggaggcgctgaccaacgagctctctagtggtcgcctgatcctcctgcccttgggcgccaggggaacacagtttggtcgcctcatccttgccgtggagcaaccacgccagcgcctgaggagcgaacgactcaggcggatttagggctttacttgcttgtccacgtgtgtggaatatttgaacgaaaatatacgtacttgtttctacggaatatttctgcagttattttttacttattttaccagtcgttacctaagaaattatgaaatatcttacttaaaagttttaaatatcaaaatagatccttaagtttcccatggaaatttcatggaaattctatagattttttaaaggatttctcgtataaactaattaaagcgactgtttaactgtggcatctgcccaggaaatgtgtatgccaagaaatagaattggctgagtcaaaggtcttccgcagtacaactcctactggaactccaactcctgcaccgactacatccttttccccatcatttcgaagaggaagttgtttcagcacaattctggtgcacggctcattgcgttgtttatgccaaatggtttggcatgtgattgggtcacgcccacgggatgcacaagtgggtgtgtctgggattgccgctttgcggtgcactgcgtgtgtatgtgtgtgcgcaaggacatcccacccatgcatcgcctaattgatgcttactattgtttattgtgttatgaaccaggagtcgagcggatcgcagcaaaacacaattcaatggagatgaacaggaaacgatgctccaacttcgcctgaccattttcatgattacgatgatgatgctggtgtgattgtgtacttggcttgttattagatcaggcctgggactcgtgtatcgctttttagagtgtcaagtggatgtgttcttgcagttaacagggagaggagagccaattaccgactagtttgtaattcctattgaaacgttaatttttaattgtatctttgcatttaatcgttaaaaagggctttcaataaccacctaaaggattttgtaaattaaacgagcgtcaaagttggtttttcccataaacccttgctatatttatgtctgctagctcctgcgtgtcagctactgagacagttgagaat

SEQ ID NO: 35387 - DNA, 825 bp, DROSOPHILA
atgaagagccaacccatcctgattctggccgtgtgcctcttggccctctccgccgtttccgccatgccacagcgtcgggcgaagagtcaacgccaggtggagtactcatccacaccctatccggctgctggcttccgccccagggttccctttaatctgcccggtgaagttcaacccaagatcgagacggaaccactgaccaccaccagtaccacgtctgccagcgaagtggaaaccctggagaataccgagccacttagcaccaccgagcagcagcagccggaagcgggaacggtagcggatttggaattgtccatccgcacgcctgccaatacctacggagcccctgaagagcaggatcccctcgtgccggacaccgtagtggtggtggcccaggagccagcccgcgactttcagcccccctccctggatgccgtcgaggactttgccgccgatgtcactgttgctgctgatggcgagcagcctgttgctgatgtccctgccctgggccaagcggagtcggaggacgatgagcccgaggcggcggtcaaggctgtcaccccggctggagcctatggaccacccgccgccacctacggtgtgcctgagctgagcgagaccgagaacgagttggatctggaggagtcgcaagttgagctggttgaagaggaggcggcggcggaggaggcgctgaccaacgagctctctagtggtcgcctgatcctcctgcccttgggcgccaggggaacacagtttggtcgcctcatccttgccgtggagcaaccacgccagcgcctgaggagcgaacgactcaggcggatttag

SEQ ID NO: 35388 - protein, 274 aa, DROSOPHILA
MKSQPILILAVCLLALSAVSAMPQRRAKSQRQVEYSSTPYPAAGFRPRVPFNLPGEVQPKIETEPLTTTSTTSASEVETLENTEPLSTTEQQQPEAGTVADLELSIRTPANTYGAPEEQDPLVPDTVVVVAQEPARDFQPPSLDAVEDFAADVTVAADGEQPVADVPALGQAESEDDEPEAAVKAVTPAGAYGPPAATYGVPELSETENELDLEESQVELVEEEAAAEEALTNELSSGRLILLPLGARGTQFGRLILAVEQPRQRLRSERLRRI

SEQ ID NO: 35389 - DNA, 2810 bp, DROSOPHILA
gctttcttttgttatttacctttaagcctcttggtatttactcatgcagtaattggctgaaaatcaattttatttgtaaacaactatttgctcgttcaagcaccacgagctgttttgcttaacttgacagcaaagattctggaagtttttataggaatacaaattataacgtcatcactcttttcgttttcatcggccggaagttgtggaacgttcaaaactttgttttgccaacttcactgaatgttttgttaaaaattgttttcgtttccaatcgaaggaagagtgttctatcaaatggtgacacattatatctgcagtctgccggagagttcttctccccggcaacccgacatctcggcatcccgacatccgtattaaatttgacgtgcggatgtgcaaagttttaaccgtggaacgtgcgtggcatccggaaaggcgttcggcgactttggaggacgaggtggagcttataacccccataccccccattgccgtattcatggagtattcaaattgaataacgagtatgcgagtgctccctgtaccacgtgacgggaggagtgaatcctccgagaccattgaacctactttatactggtggggacttgttgagcggttggagttctcgtggcagacatttatggcaatatttttgaatattttatgtgagattttcgtggatttagcacggcattctattaaagagacagcgacaataaatttggatacaaagtaccatatttatgaacagatttgtttttgtcaattcgggcagcaccaatttaaccaatttgacctatatcaaaaactaaaaatgtgtaaagaatctgatgcccttaatatatgggcctatttatttcgttaaatgccagtcatcaagccattcgataagcatattgaagaggtaacaaaaggagttaagaagaaactttaacagagtccccgtggccatcgcgccgggttaattgattcgtcctggcacgcctccttgggaaagtcagcgcaaattgtgcacgtaattgacaatcaaaggatcatcgaagctggtgggcacgatttcgacggagtgcacaacaggctgcaagtgggcatcgctgccgatgtgagtgaagctggccagctggacgtccaggtcatcgtggccgccatctactagcacgtactcggcctccggctctacgatggccagctccacggcggcactattgtcgccgggcacctgctgctgctcggcaatcgatagcgttgcattctcattgtcctgggagagggagatggccacgttcggtggtggggactccactccggccgaactggcgtcgatggcaaacagtttggtagtggccgcagttgtgctgctctctgtggttgaactttcaggggtgacgccctcctcctcgtccacctttagctcctcggcttcctttggctgctcagttgtggttacctccacttcggccttgttgtcctccccctcgtcgtcctgctcctcgagatggcgctcaatttcatggagtcgcttgggtgttgtactcagcagcaggagcttcccggacttctctggcgctacggcgctatcctcatgtaaagtgcccggggcaggatcaatcagtatgctggcctcctcgtcgcgactcaaagcaggacccgccaaagttgtggcctccgcggtggtgacattcccctcttgatcccggataaccgcactagttgtggtttccggaacctccggatcccctccggggcggataacagccgcctggaccacagccaggcagagtagagcgcaaccgagtcctttccacatgttcgctggtcaatttgctgacgatttgatggcagtctattccagacgggcgtatttatacaaatggttcccacccattcgggagctgtcataatttcagccctgagcatttaatttaacgcgaaacttccgcaagtggctcaaaccggaaatgtaattccgcccgtcggtgggcgtgagtttctgtctgccagagggtgttgtgttgtgcgagtctgtggcggcattgaaggaggccagaaaggcctgggtcgttacaccttaatccccgcacagccccattgaccgcaacgatggccagagtggcagccccaaaaagtcactttacattcttgcctttaactccgatacgcatactagcatactacgcatacggcagatgttgaaatagtggaaattaatgttgaaattaatttatgcaatatataaaaaatcacaatcaaagaaatcggtatctatgtatatatatataataaaatataggatgacatgattaaaagaaagttatgttatatgtcaggtttgtttcaaaatattatgcacacaaaacaagtcgttgctctattaagttggccccaactgtagggaaggcctatgccttggaaagtatctgtgtgtgagcgtgtgtagttttgtcggtttaactttgtgatgagcaaagttagtggcttgaccgtgccagctgttggccatgctggtcacgttcttcgggtgactttgttttcgtctaaatgggaaatgataaaattgaaaataaaagcatataaacacacatgctcacaggaggaaataaatgtgtcttgagacaacaacaatggcaacaggctacaagttcattgattgcctgctgacccagagaaatatttgccggcatagaatgcacaacattcattgaagggttaacttcgagtaattgcatttggcatattttaattggattcctgtggttggttcttgtcaaagtgaggtcaatctaaccgaatcgttttcttgtgaatct

SEQ ID NO: 35390 - DNA, 810 bp, DROSOPHILA
atgtggaaaggactcggttgcgctctactctgcctggctgtggtccaggcggctgttatccgccccggaggggatccggaggttccggaaaccacaactagtgcggttatccgggatcaagaggggaatgtcaccaccgcggaggccacaactttggcgggtcctgctttgagtcgcgacgaggaggccagcatactgattgatcctgccccgggcactttacatgaggatagcgccgtagcgccagagaagtccgggaagctcctgctgctgagtacaacacccaagcgactccatgaaattgagcgccatctcgaggagcaggacgacgagggggaggacaacaaggccgaagtggaggtaaccacaactgagcagccaaaggaagccgaggagctaaaggtggacgaggaggagggcgtcacccctgaaagttcaaccacagagagcagcacaactgcggccactaccaaactgtttgccatcgacgccagttcggccggagtggagtccccaccaccgaacgtggccatctccctctcccaggacaatgagaatgcaacgctatcgattgccgagcagcagcaggtgcccggcgacaatagtgccgccgtggagctggccatcgtagagccggaggccgagtacgtgctagtagatggcggccacgatgacctggacgtccagctggccagcttcactcacatcggcagcgatgcccacttgcagcctgttgtgcactccgtcgaaatcgtgcccaccagcttcgatgatcctttgattgtcaattacgtgcacaatttgcgctga

SEQ ID NO: 35391 - protein, 269 aa, DROSOPHILA
MWKGLGCALLCLAVVQAAVIRPGGDPEVPETTTSAVIRDQEGNVTTAEATTLAGPALSRDEEASILIDPAPGTLHEDSAVAPEKSGKLLLLSTTPKRLHEIERHLEEQDDEGEDNKAEVEVTTTEQPKEAEELKVDEEEGVTPESSTTESSTTAATTKLFAIDASSAGVESPPPNVAISLSQDNENATLSIAEQQQVPGDNSAAVELAIVEPEAEYVLVDGGHDDLDVQLASFTHIGSDAHLQPVVHSVEIVPTSFDDPLIVNYVHNLR

SEQ ID NO: 35392 - DNA, 2501 bp, DROSOPHILA
gtcgaagggaataattccttaacttccttactttgtgatgtgtaatgtgcttatcttaatggcgaaaaatactcttgcttcgacccttgacaattcgcgaacatttcaaatttgaaaatgcaattaaatgaatcattgaatttggtgattatgtgtgctggaatatagttattcttccggataattcctagagaacttttcctcataacttttgttttgaactttttgtcatatttatgattccataagtgcagttaatgttcttaatgttgtaattattctttttaccgtgctggaaaccattttaacgtgcagtttttatttgaatttcttgttatcatgtttctataagaaaaaataatttgtttttcattatctctcttttgaaacctctgaattttttcccacactgattacccagactgccctggatcgagttcaagattagagtatttatttttcactcggagctcagactgccgtatttcttgttttttttttttgcggtcggggcaatcccaaattcgtcaccagtttgcgaagcgtgcgttcccaaaccggttccaggtcttcccctttacccactctctcggtgaccaatagcttcttgatcaagttggctgaaaattggcttttggacgcgtctaggaaagtttctttcccgtctgtaccgaagtgattcactggtatgactgccaaaagaagttcgttttatctcgaaaccagatttatttgcattatattataatcggatgtgtgatttttttatgtgtagagtgtgggatcaggtgaaaaagaatttctgtgtgtgtttttgtcgtcatcgtggctggttggatcgtcatgggtttttgttttgagttggctgctggaattgcaagcaaaatagaaagaaatatttaaaggatcttctatatggttaatcatttcattgtttattgtttttttggtgttcaaaagttattcttgatgagttctcaaagccttacctgattttcacttagaagcgtcgcacggtggagcgggcagcactcaatttggccggacgagctgcggcggaaagtggacggcgataggccacgggcttagctactctccggtagttggcggccctcctggcagctaccaaacgggcctgctgctccgccggaatgtcggcggcagcgggcagatcgtttccggtcacgtccggtgggccgtagacctcgtcgggaacgctgttaggagcagcatcgggcggtccatagacggcatccggtgtgggcccggcggccgagggagcagcagcctcgtcgaagggcacttccggcttcagctcatctgccgagggatagggtgtgacggcatccggatcagctgcgtcagcgggagccagctcctgccgagcggagtacctcgaacgtccgcggcttaggcgctgcgaatagcgctgttgctgggcttgggaaacggccaacaggctgagggctgcagcaataaggataacctggagctttgccatggtggagattgatggattcaagtgtatctgtgggaaggctgaaccaacgactgatgactggaagagcctccatgggcgcttttataggtaggacttggatgggcacctgtttagtgtgcggcgcgtggacccagcgtgggcatccttttttggacctacggtctgacgtcggcactccactatggtcttggttacccacgatcggcggtgtctgcggcgtctttatgcgcccacgacgtgaccagaaataggaagcagatgtagatgtccgaggtttcgccagaaatcagtccaaaatctgagagtgtctccacctcgattaaaccaatcggtcaacattaaaacgctcttaatgtgatggacggtgaaattaatggctagtcgtaaattttggagcgaagttaaaggatattggttaaatggaagcggacaaaaatctattttagtccaatgcccgaagccttgaaatatttaaaacttatgttgtactgaatttaattatggcacctaaaagccatttattatataaataatatattttatagttagaatcaccctcatactcaacttagataacttattggtttaaaaaaatcaaacgatttaagacttgctgacaatattgacaaatttgtataaagtaaaacaaatttgtagttgaagtaatttcttaaatgcaatttaaaactaatttgtatatatttttgcttgcacctattatttacatttaaccatcctcactttatttcatgtaatgatagttcaggacgtgacataaaacaatcgtttggggaacgggcttggtgaccttggcggtcacctcaacgccaaatcgttgatcgcataaatattgattataagtgtttaatcaaaaattctaacgctcaagctgacaatttcagcataatgcaattgacaacagttcactccgttttcgctttcaactggctggggattggattgcgtgtcacgtacgaaacgcatttaattttcaaagaac

SEQ ID NO: 35393 - DNA, 501 bp, DROSOPHILA
atggcaaagctccaggttatccttattgctgcagccctcagcctgttggccgtttcccaagcccagcaacagcgctattcgcagcgcctaagccgcggacgttcgaggtactccgctcggcaggagctggctcccgctgacgcagctgatccggatgccgtcacaccctatccctcggcagatgagctgaagccggaagtgcccttcgacgaggctgctgctccctcggccgccgggcccacaccggatgccgtctatggaccgcccgatgctgctcctaacagcgttcccgacgaggtctacggcccaccggacgtgaccggaaacgatctgcccgctgccgccgacattccggcggagcagcaggcccgtttggtagctgccaggagggccgccaactaccggagagtagctaagcccgtggcctatcgccgtccactttccgccgcagctcgtccggccaaattgagtgctgcccgctccaccgtgcgacgcttctaa

SEQ ID NO: 35394 - protein, 166 aa, DROSOPHILA
MAKLQVILIAAALSLLAVSQAQQQRYSQRLSRGRSRYSARQELAPADAADPDAVTPYPSADELKPEVPFDEAAAPSAAGPTPDAVYGPPDAAPNSVPDEVYGPPDVTGNDLPAAADIPAEQQARLVAARRAANYRRVAKPVAYRRPLSAAARPAKLSAARSTVRRF

SEQ ID NO: 35395 - DNA, 2573 bp, DROSOPHILA
catccaaatagggaattaatttacattctattgtggacgtagtggttgtgggggtgaccatgggcgaatcccagaaataacacatttctgaaatttgattttgcaattcttttatcacacaggtttatattttataaccttactttgtaaacgaaaatcatttcgatgtatataagtacaatatgaaaaaacgctatagtcaagttgcccgaatgtcagatacccattactcagcttgtcgacgagcgaacgagaaatttcaacatttttctggcatcaatattggaaaatattaaaaaaaaaaataatacaatttcaacatttttcacaagtgtgggtataacagtttgaagcgttttgtgggggaatagacacgcccctttgtctattatgatgtggtataccgatataaaatacaataaaatagaaaaatcaaaaccctttttaaaagcgtttaactttcatacgaacgaacagactgacgtggccagatcgacttggttagtgattctgttcaagaatatatatacatcatatggtcggaaatacttcgttttacctgatacatactctcttcgagtctagtacacccgtagagtaactaagagctttctagcttaaattgtttctgagatcacatcactgcggctgctgtatatacacgaagaaattaaaatctgatttgattgttcgatctgaacgagggaaaaaatatatggattgagagtacttgacttttttaaaaagtcgaacgactatgtttctgtttggtaatatgtaatgtttagcttgtagattatttcttttaaggtgatcaaagcctactgttgttaactaattttcaagccatcaatcttatcaactttgagttgtttcccttatcgtcacctataaacacaaatcttgcttttcattatataaaataaataggtaattctatatttaaattcgcacatatttgagtaagtaaaaatctcattgttgttattaatttcaatagttaaccgcggaagaaagatgcccgcgtctccaggccacccacattcggtctcgagctattccgatgggcctcaatggcctggtaattaatgaaccagaagggctgctgctccacgggcagctgactcaagtggttgacccactcgcggtcaccatgggcatcgatgggcagctggttgaaaacgggggccactgatgttgcgggtcttccggctgtggaactggtgggctgcgttgtgaactgtggactgtcctctgctccaaatcggttggccactgtgggagccgcctccgcagcagacccacttattggcagtactaggggaactccaatcggcggcttctgggaggctccaaacggtagattgactagagctggcctctgcgaactggatggctctccaaatctcgtagctatgtccactccggtgatattctcgacggctgtgttttgagttgcgtggtacttgtccttctgacttagtccacctggtggcctcaatcccgcaaaggagggccgttgggctcgaatattttccaacaaagtcatggcaatgatggccacggcaaacattcgtctcaacattgttgcaatgaaaatttcactttctgcacgcgtttctccggcagctttactcgaagtaatccggtctgatcttctacgacaactgagtacaggcggctgggaagatcatttaaataagctttggctctctgctccacagcagcttttcttcaaatcaaacgagttgcacagaaagaaaaatttattattataaattgcgtttttaaagtatccaagctaaatatgaatttcacttcgtatatcaagggaaggcaaataaaaagtgaaggcatttttaatagtggttaaaaagacgtatatatgtgaaactgcatagtttcttttcggtgtatactatagtaatgacttttaatgcgactaattaaatgttcaatcttgtagtagttgtattgtgaagatataggtataggtgctttattgtcgaagggaataattccttaacttccttactttgtgatgtgtaatgtgcttatcttaatggcgaaaaatactcttgcttcgacccttgacaattcgcgaacatttcaaatttgaaaatgcaattaaatgaatcattgaatttggtgattatgtgtgctggaatatagttattcttccggataattcctagagaacttttcctcataacttttgttttgaactttttgtcatatttatgattccataagtgcagttaatgttcttaatgttgtaattattctttttaccgtgctggaaaccattttaacgtgcagtttttatttgaatttcttgttatcatgtttctataagaaaaaataatttgtttttcattatctctcttttgaaacctctgaattttttcccacactgattacccagactgccctggatcgagttcaagattagagtatttatttttcactcggagctcagactgccgtatttcttgttttttttttttgcggtcggggcaatcccaaattcgtcaccagtttgcgaagcgtgcgttcccaaaccggttccaggt

SEQ ID NO: 35396 - DNA, 573 bp, DROSOPHILA
atgtttgccgtggccatcattgccatgactttgttggaaaatattcgagcccaacggccctcctttgcgggattgaggccaccaggtggactaagtcagaaggacaagtaccacgcaactcaaaacacagccgtcgagaatatcaccggagtggacatagctacgagatttggagagccatccagttcgcagaggccagctctagtcaatctaccgtttggagcctcccagaagccgccgattggagttcccctagtactgccaataagtgggtctgctgcggaggcggctcccacagtggccaaccgatttggagcagaggacagtccacagttcacaacgcagcccaccagttccacagccggaagacccgcaacatcagtggcccccgttttcaaccagctgcccatcgatgcccatggtgaccgcgagtgggtcaaccacttgagtcagctgcccgtggagcagcagcccttctggttcattaattaccaggccattgaggcccatcggaatagctcgagaccgaatgtgggtggcctggagacgcgggcatctttcttccgcggttaa

SEQ ID NO: 35397 - protein, 190 aa, DROSOPHILA
MFAVAIIAMTLLENIRAQRPSFAGLRPPGGLSQKDKYHATQNTAVENITGVDIATRFGEPSSSQRPALVNLPFGASQKPPIGVPLVLPISGSAAEAAPTVANRFGAEDSPQFTTQPTSSTAGRPATSVAPVFNQLPIDAHGDREWVNHLSQLPVEQQPFWFINYQAIEAHRNSSRPNVGGLETRASFFRG

SEQ ID NO: 35398 - DNA, 2516 bp, DROSOPHILA
ccacccatttgcaacatttggacagtttcaatcagggtcgatcgaattcaaaaacaatgttatttactattagcttggcttttggaacactcatttgccttaccaaaaattattatattctgagctttgagtttttatcatggtaagtgaaaatcgggttaaaaaatatagtattcatactccttactcgtagagtaagatgtgttgaaaattatgtaacaggaaacttttccgaccatataaagtatatacatatatgatcaggatcaatagccgagtcgatctggccatgcccgtctgtccgtatgaacgtctcgatctcgggaactataaaagctagagggttgagattaagcttacagcttacagctcacagcttctagagaaacgcccactctaacgcccacgaaccacacaaaactgcaacgcccacacgtttgcaaattgttttgacattttgcatatttttattagtcttgtaaatttctgttgattgacaaaaaagtttatgcaacgcattttattcaccaatatctatcgatattccaggaaaagtatgcaagttcgcgttcgcatttccactagctgagtagttggtatctgataagcagggaagccgaatataggatttcttgtttgatactgcttggacaagatttttaatagataatagagcacagggtaacttgtagttgagactcccgaatcacttttgtgatttgatcctgattaagaaaataagatcttaatagaaaagcaaatgcgttcatatatctgttagctccaacaacaaattaaatatgttttgcttcactaacaacaagacagacatattttgcaattttcaatttatgacaaaagggtggcttgaatattaacgcaattattttattatttaaattaaaatattcaacaacaatttatttagcgacaaagtaataaatgcatatcctaatgagtcgattccatttgatttctagcaaattagggttgacccatttcagatggtgtacaccagaactgatccagagcggataatctgagcggatcgaagcttctctggggtcggacgacgactgaggaggcgttcgttacgaggctggatcaagccggcgggcacgggatcggcagcaggggcctggtccactgggccatcagccggcggtccataggtgttttccggctcagcaggtggtccgtaagtgttatcgggagggccgtaggtgttgtcgggctcatctgggggtccgtaggtaagatcaggttgcgcttcagtctccgtgggcaggtcgaagggcacctccggtgtcactcctgctggcggataaggggctgaggccggcgtaggtgcaatatccacggcggggtcggccggaactgcctgatcccctggagcctgctcctgacgggcaaactgcaggcgggaaaatcgtccccggaatctggtaggctctgcaacagaaacggcagccatggctgcgatcaggagcagggagcagatgaacttgtgggccatgttgagctgctgctgagttgtcttagaatgttgtcagtggctgccagtttcgcgccttttataccaactgaagttttcggccactcgggtatatttggctcaccgagggacaccctttcgttggcctacggacgtgacaatatttagtcaagggcccatgtctaagccataaccattggccgttaattataacccgcgggcacttaactttgacactttacgtggaaccactgcggatgaggaatgggttgcaaccaaagaagtcgaactagtaacgaatgtcattcgttgacttgtatgttttctaacgtaattctataattttataaatatgtcattactttaactgagctaatgaatttctttctaacctacttccctttttatatactaagcatgtggccaatggtccacatgggcatgggcaactagggctatagatctgctagcactttaaattccactccactgtgcggcgcctgcttgacatacaatgcatacgcattgatggatttcaaatcgcggcgctctgcttaaaattcacggcgttgttggctgggctagaatcgctgaccagtgaccaccgatgagcagggccaccgctgcggcacttggaagtataaaagttaaagctccatatacgacagcaaacacagctcaactgctagtcccacgatcatggcacgttaccagtttttcagttcgctcctcctcctgctggcggccatcagcgcggtgaattgtgcggcacaggcaccacttcggcggactctgcgcctgcgtccggtggcgttcgcccggcaggagctggctcccaccccctacccctcggctgctgagcttaaacccgccgccgaacagcccgcgctgacctacggacctcccgaggatgtggatacagatgccttgccttcggaacaggatccaccagtggacaccttcgagcctagcccagagaacgaggaggtggacaccgaggagagctcacttgaggccacca

SEQ ID NO: 35399 - DNA, 453 bp, DROSOPHILA
atggcccacaagttcatctgctccctgctcctgatcgcagccatggctgccgagcaggctccaggggatcaggcagttccggccgaccccgccgtggatattgcacctacgccggcctcagccccttatccgccagcaggagtgacaccggaggtgcccttcgacctgcccacggagactgaagcgcaacctgatcttacctacggacccccagatgagcccgacaacacctacggccctcccgataacacttacggaccacctgctgagccggaaaacacctatggaccgccggctgatggcccagtggaccaggcccctgctgccgatcccgtgcccgccggcttgatccagcctcgtaacgaacgcctcctcagtcgtcgtccgaccccagagaagcttcgatccgctcagattatccgctctggatcagttctggtgtacaccatctga

SEQ ID NO: 35400 - protein, 150 aa, DROSOPHILA
MAHKFICSLLLIAAMAAEQAPGDQAVPADPAVDIAPTPASAPYPPAGVTPEVPFDLPTETEAQPDLTYGPPDEPDNTYGPPDNTYGPPAEPENTYGPPADGPVDQAPAADPVPAGLIQPRNERLLSRRPTPEKLRSAQIIRSGSVLVYTI

SEQ ID NO: 35401 - DNA, 2588 bp, DROSOPHILA
cggagtccgcagaaccggacgctgcgggcggaaggcagaaagtcggttcagaagcggcagaacatactgagcctggggtggtagcggcagacttgccaaattaattatagctgcgctttgtggcaatgtgttggagctgtcatcattggctggctggtctggaggtccgtaggtctgatcgggaggtccataaatttggtccggtgggccgtagacctcagctggcgcttccaccaaagacggtggtccgtatgtttcaggtggagggccatatgtatcctccggttgaggaaattcaaccgcctcctccgttggcaggtcgaatggcggatcggggaccaggcctgctggtggatatggggcttgttcctgtctttgcagaaaccttcccgccgcgggtcctgggaacctcagatgactgccttcaattccattcaggcaaagaatggaacaaagcgcaaaggtgaccagagaagcacttggataaccggacattgtggtgtgctgacatgaactgctgcatgggcggctaagtggcgcctataaataccccctaggaatgcccttgggaactgcccaattcaaacgcccgaagaaacctcgaggccgatgacttataagccaggtccaacgatacgtgcccatggaggtggtgactaaggcgcgtgtaagtactggctgttatgaaaatgtgtggttagatttctttaaaagggagtgcttatacaaaataattgtatattatttttacacaggaataaaaaaaataataaatataacgctttcctattagtttcagtatggatttcattttaaattgaattttgtaagtaatattttgtaaatatattttctgtgtacggtgagtgcatgatatcgttagaatagattccagccctgtatcaaagacactagaataattattctagagtctttgcctgtatgatatttccttaagtctgacgcagtgacgtatttgcttacgctaaagttttaaagtctaccaactgcgacgcaggattagacgctgaggaacgggcctctgggaacgccgtccttgcggaaatcgctggtagagtcgggcggactggacggactgtggctggtcaagactgctagctacaacgatcacagtgccatcctcagcaacatccagctgcggttcatcctcctcggcgtcctcatcagcgggctgcagcttggcaccgtcaaccgatgcttcctcagtctctggaatatcatcagtctcgatgggattctctggtagcggctcagcctcgggagcaatagccggcacggagtcggtctctggaggtccataagtgttatctggtggcccgtatgtgttgtccggaggtccataggtgttatcaggcggcagataagtgttctccggcttgacagtcgaactgggtaaatcgaagggaacactcggggtgatgcccgcctccggatatccggtgggcgaaggactgggtatagcctccacttggcgcgccaagaacctccggcggatcggctccgcggagctcagcgccaacaggctcaggacaagaatagcaattggtgcgccagtcggtttaaacattttcgcggttgaagggcttctgttctgatttctcgatccgacacgacgtatttatagccccaagctaccagatcgaattctgctataatttatgctcgtcactttcagtttcaggctcttattcccggtaaaactttgattatgttgcgctgatcggcggcaatgtagcttcagcttaatacccgatacgtgaccctttttcgaaattgattttccaatgctatgatttggaataggccaccctttccctccttcgcaaatcattcattaacacttggagtgagctgtgaacactcgagtttgtttggttttgggttcttggcagttcataattttatttgatgaactttgtattcatgcaaaacagaataggctgtgaaaaaatccatcaagcacgcacttttaaaagcacgtcccacccatttgcaacatttggacagtttcaatcagggtcgatcgaattcaaaaacaatgttatttactattagcttggcttttggaacactcatttgccttaccaaaaattattatattctgagctttgagtttttatcatggtaagtgaaaatcgggttaaaaaatatagtattcatactccttactcgtagagtaagatgtgttgaaaattatgtaacaggaaacttttccgaccatataaagtatatacatatatgatcaggatcaatagccgagtcgatctggccatgcccgtctgtccgtatgaacgtctcgatctcgggaactataaaagctagagggttgagattaagcttacagcttacagctcacagcttctagagaaacgcccactctaacgcccacgaaccacacaaaactgcaacgcccacacgtttgcaaattgttttgacattttgcatatttttattagtcttgtaaatttctgttgattgacaaaaaagtttatgcaacgcattttattcaccaatatctatcgatattccaggaaaagtatgcaagttcgcgttcgcatttccactag

SEQ ID NO: 35402 - DNA, 588 bp, DROSOPHILA
atgtttaaaccgactggcgcaccaattgctattcttgtcctgagcctgttggcgctgagctccgcggagccgatccgccggaggttcttggcgcgccaagtggaggctatacccagtccttcgcccaccggatatccggaggcgggcatcaccccgagtgttcccttcgatttacccagttcgactgtcaagccggagaacacttatctgccgcctgataacacctatggacctccggacaacacatacgggccaccagataacacttatggacctccagagaccgactccgtgccggctattgctcccgaggctgagccgctaccagagaatcccatcgagactgatgatattccagagactgaggaagcatcggttgacggtgccaagctgcagcccgctgatgaggacgccgaggaggatgaaccgcagctggatgttgctgaggatggcactgtgatcgttgtagctagcagtcttgaccagccacagtccgtccagtccgcccgactctaccagcgatttccgcaaggacggcgttcccagaggcccgttcctcagcgtctaatcctgcgtcgcagttggtag

SEQ ID NO: 35403 - protein, 195 aa, DROSOPHILA
MFKPTGAPIAILVLSLLALSSAEPIRRRFLARQVEAIPSPSPTGYPEAGITPSVPFDLPSSTVKPENTYLPPDNTYGPPDNTYGPPDNTYGPPETDSVPAIAPEAEPLPENPIETDDIPETEEASVDGAKLQPADEDAEEDEPQLDVAEDGTVIVVASSLDQPQSVQSARLYQRFPQGRRSQRPVPQRLILRRSW

SEQ ID NO: 35404 - DNA, 2687 bp, DROSOPHILA
ggcgcaataagttataaataagttaaaaatcacattgcgcagtatcactgcaatatttattgaaatttcagtaagaacaaagtgaggcacactttgttgaacgtgacttcttttacacactgaaatcacagcctgctgaacgtgaccactttgctcactgaaatcgcagacgtgtggcaacactcaagccgccagaaagatctggcatctctcatacttaacacgcgcatgcaaaatatttaagaaataaatattagtcgctaacagtttaaatataataaaattctgctgatataaacccagttcataaaagaacacgcatttacctccgcatataagatcaaatacgtataaaatctaattagccgactcaaggtaaggcgtgcgtttttggagctccactaaactgacttcaaagcaataactcatcaaatactacatttcagttaaaatggctggagtactctttgaggacatcttcaacgtaaaggacatggatccggagggcaaaaagttcgaccgtgtatcccgcctgcactgcgagtccgagtcgtttaagatggacctcatcctggacatcaactcgtggctataccccatggagctgggcgacaagttccgcctggttttggccaccaccctgcgcgaggatggttgcccggacagcggggagtacaatccaatggagcacgagggaacgcgggcggacagctttgagtacgtgatgtacggcaagatctacaggatcgagggcgacgaagcacacaatgaggcctcccggctctccgcctacgtgtcattcggcggcttgctgatgcgacttcagggtgacgccaacaatcttcatggcttcgaggtggaccagcacatgtacctgctgatgaagcggctggccttctgaattttctacctaattattttcgatcgcaaattagacatagacaacaaactttatttacagtgtattcatgacattgcttggagtgctgaaagaagtagtctattgcctggatgggcgtctgaaaggcgcattgactatcaggcgagatggccgtgggcgaaaaggaatgtggcgatccacgaagggcaaagcctgcggagtcgatgggaacactggagtaggcctaatagcattcacaatcttgaccgcatctggccgacgacgaaccgtaagcttagccggccgtcgctgcggagtccgcagaaccggacgctgcgggcggaaggcagaaagtcggttcagaagcggcagaacatactgagcctggggtggtagcggcagacttgccaaattaattatagctgcgctttgtggcaatgtgttggagctgtcatcattggctggctggtctggaggtccgtaggtctgatcgggaggtccataaatttggtccggtgggccgtagacctcagctggcgcttccaccaaagacggtggtccgtatgtttcaggtggagggccatatgtatcctccggttgaggaaattcaaccgcctcctccgttggcaggtcgaatggcggatcggggaccaggcctgctggtggatatggggcttgttcctgtctttgcagaaaccttcccgccgcgggtcctgggaacctcagatgactgccttcaattccattcaggcaaagaatggaacaaagcgcaaaggtgaccagagaagcacttggataaccggacattgtggtgtgctgacatgaactgctgcatgggcggctaagtggcgcctataaataccccctaggaatgcccttgggaactgcccaattcaaacgcccgaagaaacctcgaggccgatgacttataagccaggtccaacgatacgtgcccatggaggtggtgactaaggcgcgtgtaagtactggctgttatgaaaatgtgtggttagatttctttaaaagggagtgcttatacaaaataattgtatattatttttacacaggaataaaaaaaataataaatataacgctttcctattagtttcagtatggatttcattttaaattgaattttgtaagtaatattttgtaaatatattttctgtgtacggtgagtgcatgatatcgttagaatagattccagccctgtatcaaagacactagaataattattctagagtctttgcctgtatgatatttccttaagtctgacgcagtgacgtatttgcttacgctaaagttttaaagtctaccaactgcgacgcaggattagacgctgaggaacgggcctctgggaacgccgtccttgcggaaatcgctggtagagtcgggcggactggacggactgtggctggtcaagactgctagctacaacgatcacagtgccatcctcagcaacatccagctgcggttcatcctcctcggcgtcctcatcagcgggctgcagcttggcaccgtcaaccgatgcttcctcagtctctggaatatcatcagtctcgatgggattctctggtagcggctcagcctcgggagcaatagccggcacggagtcggtctctggaggtccataagtgttatctggtggcccgtatgtgttgtccggaggtccataggtgttatcaggcggcagataagtgttctccggcttgacagtcgaactgggtaaatcgaagggaacactcggggtgatgcccgcctccggatatccggtgggcgaaggactgggtatagcctccacttggcg

SEQ ID NO: 35405 - DNA, 687 bp, DROSOPHILA
atgtccggttatccaagtgcttctctggtcacctttgcgctttgttccattctttgcctgaatggaattgaaggcagtcatctgaggttcccaggacccgcggcgggaaggtttctgcaaagacaggaacaagccccatatccaccagcaggcctggtccccgatccgccattcgacctgccaacggaggaggcggttgaatttcctcaaccggaggatacatatggccctccacctgaaacatacggaccaccgtctttggtggaagcgccagctgaggtctacggcccaccggaccaaatttatggacctcccgatcagacctacggacctccagaccagccagccaatgatgacagctccaacacattgccacaaagcgcagctataattaatttggcaagtctgccgctaccaccccaggctcagtatgttctgccgcttctgaaccgactttctgccttccgcccgcagcgtccggttctgcggactccgcagcgacggccggctaagcttacggttcgtcgtcggccagatgcggtcaagattgtgaatgctattaggcctactccagtgttcccatcgactccgcaggctttgcccttcgtggatcgccacattccttttcgcccacggccatctcgcctgatagtcaatgcgcctttcagacgcccatccaggcaatag

SEQ ID NO: 35406 - protein, 228 aa, DROSOPHILA
MSGYPSASLVTFALCSILCLNGIEGSHLRFPGPAAGRFLQRQEQAPYPPAGLVPDPPFDLPTEEAVEFPQPEDTYGPPPETYGPPSLVEAPAEVYGPPDQIYGPPDQTYGPPDQPANDDSSNTLPQSAAIINLASLPLPPQAQYVLPLLNRLSAFRPQRPVLRTPQRRPAKLTVRRRPDAVKIVNAIRPTPVFPSTPQALPFVDRHIPFRPRPSRLIVNAPFRRPSRQ

SEQ ID NO: 35407 - DNA, 2921 bp, DROSOPHILA
caataatcctccccgcacttggatcccatcccatcccatcctattccttaccatcccatcctatcgagtcctcctcctgaagagacccctctgtgggacaagcaggcgttaataggcattgttatgcgaataatttgcaattatagttaattgtaatcatcattgctgatgttcctgtgcggcaatcgagagttgttattcggcttcttttcttttattgagattggcttgctcaccgagtgtgtgtgtgtgtggctcggggccattgcagtatgtacaacatttcgtgtttgcttaggcgatcgctttacttggctagtcaaatgggtattaagcctattactattacttactggagtatgtgtgttcacaggggcaaaacatctgtacaaatatactcgacgagcgtcaggtggattccagggacttctcactgcctttacaattgagctgaaagctcttaacgcaaattcgagccaagttatttcatccacatggtttgcccctgcgttcttgagttatttcagagcagtagagctgtttgaatgctatcaaaacttttgagggacaatttactttaataaatcacaagccagaaataactcggtataattatttaagaatcgcaaggccttcaaggacttatttgatagaatcgttgctacagcgagtgtgtaaaatgtaaccagtgtagatggtcgatattgctaaactatatgtaggtcttgctttctgcagatccacgaacttccacgaaccctctgaccgaccgataggaatatatcaaaattcccagggtcaggtggggccatccttagtctactaaacttagatgcaaagatcttagcagttatgacaaaaatattacactatgtgaaatgatcgtggaatatcattttcttattgctgctccttgggagccgtaccttaaagttaagaaaaaatactcagttccagtgttctcgatgctcggcactccttgggatctcctcgggattactcagtacaggatgccgggatggacggccccgctgcgctggaagtacacattcggattgctgctcaacgtgggctccagcgtggtgtaaagattcgtttcgtctggtcgtataaacatgcctgaaaatagccataattacaatccattcggagttcgggaacagcctaagtcctcattggtaatactgtttgtgtgcaggaatgcataatctcgagtggggttacaaattatggtagtacacactgttttaaaaaccattttttaaatcattagctgactaatggagaagtcagctatgtatataatacaaagattaacataaatcagttcatagaacaacttgtagcaatgctatttacatatgtcattgattgaatatatctcgtgtattttatagttttccctccacttaaaaagctttttcgaataattatatttgcttttccaaaaaaattgtatgtttgtgaattaaataaacattgatttggtaaagtgtgcataaatttaacaaataaatattttagcccatgggtcgttagcaaataaatctataaatatttattgactctacctttagagtacagaaacccaaaactgctagtggatgctatccacccaattgcacaatatttgtacaccattttcggatgacgccctccctgcagacaaacggcaatatccctaggggatggccagcaaccggcgagtattacctggcgcatagcgcagcgttttggccaactgcgccgcttgtgtcatggagcttagcgagttgcccaactgcttgagggtcaacggcgtgagcgtgggcggtgcggcttgctgtggtggcggtggttgcggtggcagtggtggtggtggtgcgggaggataatagcagaacgggtgcggactcaggtgtgctggaaaatagtgatacatacgcgtatagctcggcggtgcggcagtgaccagagcaacccgatctgtcggcggattgcgttgtgcgaggtgcggtagagcggtggtgcggtggtggaggagtgggtgcgtgtgtggtttggagtcccagtgcccagatcccagagtaaccaaaccattaacaaaaccagtcgtgacccacacacgcgcatatgtagtattacgtataggataaacatatatgtacagtaattattggtttttgacaataaatgtaaattcgattaagtttcgaaagggtagaaataccggaaacaaaaccaaaagagtcaaccagcaatgaaagaggttccgaatgattgatgaacatgaaggtaatgaaaaaattacagataccacacgaatggattatgaaatgacatatgcaagtgtgcgggtcgtgagcgtgtcgagaattttttgattacgtttgacaaggtttgaatgtgatgatgatgatgatgatggaggtgaagtatgttttaacgatacggggagatatgtatatagagtcgatgcagtggtgatgatgatgatgaggatgttttcgttttcgttgttgatgttgtagatgggtgtcgtgttggttggcggtggtttttgatgacatttgtatgcatgacaagacaaataagaagtaaacaaaataaaataataaataggtgtgtttatgtatatatgtgttttgttttcatgtgcttagattgcaaccttagccaaatgctcgcagataaatcagtaaatatgtcacaatcctgcccacggtcagccttaattggtgtgacccagagcccgaacccagacgcagatgttcccaattcgaggaaattacccatattgccatattacccatatttcacacttttgccggccaatttatggcggccctaatgatgtcaaacgatttcatgtcaatgggctaactctgcaccctcgagctatggagaaagttagtcccacttgtgtgtatttattgttgttt

SEQ ID NO: 35408 - DNA, 327 bp, DROSOPHILA
atgtatcactattttccagcacacctgagtccgcacccgttctgctattatcctcccgcaccaccaccaccactgccaccgcaaccaccgccaccacagcaagccgcaccgcccacgctcacgccgttgaccctcaagcagttgggcaactcgctaagctccatgacacaagcggcgcagttggccaaaacgctgcgctatgcgccaggcatgtttatacgaccagacgaaacgaatctttacaccacgctggagcccacgttgagcagcaatccgaatgtgtacttccagcgcagcggggccgtccatcccggcatcctgtactga

SEQ ID NO: 35409 - protein, 108 aa, DROSOPHILA
MYHYFPAHLSPHPFCYYPPAPPPPLPPQPPPPQQAAPPTLTPLTLKQLGNSLSSMTQAAQLAKTLRYAPGMFIRPDETNLYTTLEPTLSSNPNVYFQRSGAVHPGILY

SEQ ID NO: 35410 - DNA, 2774 bp, DROSOPHILA
ccacctcgattaaaccaatcggtcaacattaaaacgctcttaatgtgatggacggtgaaattaatggctagtcgtaaattttggagcgaagttaaaggatattggttaaatggaagcggacaaaaatctattttagtccaatgcccgaagccttgaaatatttaaaacttatgttgtactgaatttaattatggcacctaaaagccatttattatataaataatatattttatagttagaatcaccctcatactcaacttagataacttattggtttaaaaaaatcaaacgatttaagacttgctgacaatattgacaaatttgtataaagtaaaacaaatttgtagttgaagtaatttcttaaatgcaatttaaaactaatttgtatatatttttgcttgcacctattatttacatttaaccatcctcactttatttcatgtaatgatagttcaggacgtgacataaaacaatcgtttggggaacgggcttggtgaccttggcggtcacctcaacgccaaatcgttgatcgcataaatattgattataagtgtttaatcaaaaattctaacgctcaagctgacaatttcagcataatgcaattgacaacagttcactccgttttcgctttcaactggctggggattggattgcgtgtcacgtacgaaacgcatttaattttcaaagaacatggcgaatcggacgtggacatcggacaccagttggcatttggagaccggtgataatgtggacgatgtgggcgatatgggcgctatggtggagatatgagctggcagcggacgtggttttgtcggcggagaccagaaacaaacaaaaggctatgcaaataaatcattaagtgtgcgcctaatcgatgtcgtgtcgatatagaagcttcatgtcattattcccctggatcgagaactctgtataaaagtatcgctcacaatcgtacgtagatcagttgggtctaaattcgggccgagatcgaaagtccaacatgcagtccattctacccgttatcctttgcctttgggcccttagtcccgtccagatcgaagcgcgtcaggtcaggatcaaccggtatgcggtcactgtgcaggaggatcagccggccgaggatgctccctatccggcggcgggctatagaccacaaggtcgctccttctggctgccaagcgaagtggaagtagaggtcattgaagggcctggtgctgttgaagctgaggttcaggaaggctcaggtttgggaacgaatcagctgaccaccacaaccgagctgcctctggaggatttgtcgaccagcactacagatccaaccgacgactggagcacgaccaccaactggggctccgtggacacgtccacagctctcccagctaccctcgctgtggaatcccgtacgggtcgggcttttgtaaaagctccttatccaccagccggctacagaccaagtcgcgccttccgcctgcccaccgagcagagcagggaggaggagcagaaaacctcctccagcaactccaccgacagcaatgccgatcacccggtctgcggggtcagcactgaccccctgaaacccactccggaacctggatccaaggatgagccggattcggagagtgtggtctttactgcaaatgtgggacctgctgtagtggtggctagagttccctcctccattccggtggctattcccctgcgatcgcagcctctgatccaggctcccaggtcccggggatttgtctacaccacgcatgtggagcagcggtggtgatgggacggaaggtactcattatcattgttaacagttcagtatttaaagttacttttgtttatgaagaaataaatgctttcttttgttatttacctttaagcctcttggtatttactcatgcagtaattggctgaaaatcaattttatttgtaaacaactatttgctcgttcaagcaccacgagctgttttgcttaacttgacagcaaagattctggaagtttttataggaatacaaattataacgtcatcactcttttcgttttcatcggccggaagttgtggaacgttcaaaactttgttttgccaacttcactgaatgttttgttaaaaattgttttcgtttccaatcgaaggaagagtgttctatcaaatggtgacacattatatctgcagtctgccggagagttcttctccccggcaacccgacatctcggcatcccgacatccgtattaaatttgacgtgcggatgtgcaaagttttaaccgtggaacgtgcgtggcatccggaaaggcgttcggcgactttggaggacgaggtggagcttataacccccataccccccattgccgtattcatggagtattcaaattgaataacgagtatgcgagtgctccctgtaccacgtgacgggaggagtgaatcctccgagaccattgaacctactttatactggtggggacttgttgagcggttggagttctcgtggcagacatttatggcaatatttttgaatattttatgtgagattttcgtggatttagcacggcattctattaaagagacagcgacaataaatttggatacaaagtaccatatttatgaacagatttgtttttgtcaattcgggcagcaccaatttaaccaatttgacctatatcaaaaactaaaaatgtgtaaagaatctgatgcccttaatatatgggcctatttatttcgttaaatgccagtcatcaagccattcgataagcatattgaagaggtaacaaaaggagttaaga

SEQ ID NO: 35411 - DNA, 774 bp, DROSOPHILA
atgcagtccattctacccgttatcctttgcctttgggcccttagtcccgtccagatcgaagcgcgtcaggtcaggatcaaccggtatgcggtcactgtgcaggaggatcagccggccgaggatgctccctatccggcggcgggctatagaccacaaggtcgctccttctggctgccaagcgaagtggaagtagaggtcattgaagggcctggtgctgttgaagctgaggttcaggaaggctcaggtttgggaacgaatcagctgaccaccacaaccgagctgcctctggaggatttgtcgaccagcactacagatccaaccgacgactggagcacgaccaccaactggggctccgtggacacgtccacagctctcccagctaccctcgctgtggaatcccgtacgggtcgggcttttgtaaaagctccttatccaccagccggctacagaccaagtcgcgccttccgcctgcccaccgagcagagcagggaggaggagcagaaaacctcctccagcaactccaccgacagcaatgccgatcacccggtctgcggggtcagcactgaccccctgaaacccactccggaacctggatccaaggatgagccggattcggagagtgtggtctttactgcaaatgtgggacctgctgtagtggtggctagagttccctcctccattccggtggctattcccctgcgatcgcagcctctgatccaggctcccaggtcccggggatttgtctacaccacgcatgtggagcagcggtggtga

SEQ ID NO: 35412 - protein, 257 aa, DROSOPHILA
MQSILPVILCLWALSPVQIEARQVRINRYAVTVQEDQPAEDAPYPAAGYRPQGRSFWLPSEVEVEVIEGPGAVEAEVQEGSGLGTNQLTTTTELPLEDLSTSTTDPTDDWSTTTNWGSVDTSTALPATLAVESRTGRAFVKAPYPPAGYRPSRAFRLPTEQSREEEQKTSSSNSTDSNADHPVCGVSTDPLKPTPEPGSKDEPDSESVVFTANVGPAVVVARVPSSIPVAIPLRSQPLIQAPRSRGFVYTTHVEQRW

SEQ ID NO: 35413 - DNA, 2579 bp, DROSOPHILA
gtccgtaagtgttatcgggagggccgtaggtgttgtcgggctcatctgggggtccgtaggtaagatcaggttgcgcttcagtctccgtgggcaggtcgaagggcacctccggtgtcactcctgctggcggataaggggctgaggccggcgtaggtgcaatatccacggcggggtcggccggaactgcctgatcccctggagcctgctcctgacgggcaaactgcaggcgggaaaatcgtccccggaatctggtaggctctgcaacagaaacggcagccatggctgcgatcaggagcagggagcagatgaacttgtgggccatgttgagctgctgctgagttgtcttagaatgttgtcagtggctgccagtttcgcgccttttataccaactgaagttttcggccactcgggtatatttggctcaccgagggacaccctttcgttggcctacggacgtgacaatatttagtcaagggcccatgtctaagccataaccattggccgttaattataacccgcgggcacttaactttgacactttacgtggaaccactgcggatgaggaatgggttgcaaccaaagaagtcgaactagtaacgaatgtcattcgttgacttgtatgttttctaacgtaattctataattttataaatatgtcattactttaactgagctaatgaatttctttctaacctacttccctttttatatactaagcatgtggccaatggtccacatgggcatgggcaactagggctatagatctgctagcactttaaattccactccactgtgcggcgcctgcttgacatacaatgcatacgcattgatggatttcaaatcgcggcgctctgcttaaaattcacggcgttgttggctgggctagaatcgctgaccagtgaccaccgatgagcagggccaccgctgcggcacttggaagtataaaagttaaagctccatatacgacagcaaacacagctcaactgctagtcccacgatcatggcacgttaccagtttttcagttcgctcctcctcctgctggcggccatcagcgcggtgaattgtgcggcacaggcaccacttcggcggactctgcgcctgcgtccggtggcgttcgcccggcaggagctggctcccaccccctacccctcggctgctgagcttaaacccgccgccgaacagcccgcgctgacctacggacctcccgaggatgtggatacagatgccttgccttcggaacaggatccaccagtggacaccttcgagcctagcccagagaacgaggaggtggacaccgaggagagctcacttgaggccaccacaccatcctctgctccggcccgcctgcgcagccgccatagattgggcaagttgcagctggctaagccaaagctgctccgccaacgcacagctcgcctggaggagctgcccgtggatgcggctgtggctccagtggcttcgctggttccagtagctcaggctccagcactggccacgccccagttttactatgtgggtgcccagcagccgtattacctggcagcctacagcgctgctccccagcaactaggctggtagtaacgctagttgccttctcttaatttgttctgtttggattgcaatttgttgttaaaaatatatttctgctaatatgtttaaaaatggttcgtctgcttgttttccttacattttaagtaaactcagtccaaaaagtctaaatagaaaccagtgatatgataagcgaaactaattaataaattaaatatcccgactccaatatcaaacaaataagttatcatttacgtaaataatttagtatttcgtatttaatcaaaacgtattatgtgaaagtaagtggagaagggaggataatcagcagtgtgctcatctatacgtgtcagtccatctgactgtgttattttgaattattaataatttatattattattcaacatctaccgattgtcgagaaataataattgcatgagaaataattgcttttaatggttaatattaaattgtcgaaatggatgcaaatttgtttacacacagctcaaagatttcagttctctaaaattcagtgcaagccatttgcctttaagaaaaacttatatcagacctattctggacgaactcctgttcggaattctttgcatatccttgacatgtgaattgcctcggaagcgtttaaagggttccttgttcccatcgcatacttttagcggatttgtatggtcttttgtgaaaggcttcccatttccaatgcatttttaatgctttgttttattctagttatagtggctgggtcaccagtgtaatggcttgctaagatattttttagtctgcgcaatatgattggtgaatggtggcctttcaacttgatgacggagcagtgtaaaggatcatacttacggacatttggttttaatatttaagttattctaaatattaaaaatatttcggtacgcggacggaccgacacggtaagataacctcagctagtgattctggtcaagaaaccttatactttatagcttgttcctatcggttacctacttttcaatgagtctaacacacc

SEQ ID NO: 35414 - DNA, 579 bp, DROSOPHILA
atggcacgttaccagtttttcagttcgctcctcctcctgctggcggccatcagcgcggtgaattgtgcggcacaggcaccacttcggcggactctgcgcctgcgtccggtggcgttcgcccggcaggagctggctcccaccccctacccctcggctgctgagcttaaacccgccgccgaacagcccgcgctgacctacggacctcccgaggatgtggatacagatgccttgccttcggaacaggatccaccagtggacaccttcgagcctagcccagagaacgaggaggtggacaccgaggagagctcacttgaggccaccacaccatcctctgctccggcccgcctgcgcagccgccatagattgggcaagttgcagctggctaagccaaagctgctccgccaacgcacagctcgcctggaggagctgcccgtggatgcggctgtggctccagtggcttcgctggttccagtagctcaggctccagcactggccacgccccagttttactatgtgggtgcccagcagccgtattacctggcagcctacagcgctgctccccagcaactaggctggtag

SEQ ID NO: 35415 - protein, 192 aa, DROSOPHILA
MARYQFFSSLLLLLAAISAVNCAAQAPLRRTLRLRPVAFARQELAPTPYPSAAELKPAAEQPALTYGPPEDVDTDALPSEQDPPVDTFEPSPENEEVDTEESSLEATTPSSAPARLRSRHRLGKLQLAKPKLLRQRTARLEELPVDAAVAPVASLVPVAQAPALATPQFYYVGAQQPYYLAAYSAAPQQLGW

SEQ ID NO: 35416 - DNA, 7460 bp, DROSOPHILA
cctaacatagaaactcatgaaataattgatttttttatagtttcctacttacctgtctgtacacccgaaacaacacggaacactttatcccaaactttatatccctggtggtcgtcacgcttcccaagctgccgcagttccacggcgtgcggctgttcaacattaacaagtactagctcctgtgagaacgggccgcatttattttgtttaatgaaaatgtacatacaaacttatattgatggcacagctcttgctcaaaaatgtaaatattgctaaataaaatatttatcaaattaaataattctaaaaatcgcgtttcgatttttattgcataaataattattgatcatggaaactacaaatcatctaaaagatgtatttgggggccagcacatgagatattttataacccattatgtcagacgattaagtagaaccatgatgtagttctttagcccaaaggattaaacttgatcaatcgctgtacacagaagtcttcgtagtgacgaaaagcacagtgagtggggtgcgtaagtatagtacatatataagccgaaagattgaaaacatgaaagaaaaacccgttaactgattttttctgttaaatattcttaaatataatcatacaacatacaaaagtactgctatcaacttaagtggcgaaaaatgattatagacatactatacagatacaatgcaaacactcgccgcaaacaagcaaacaacaacaaacaaaaagctttttctgttttatgagctctcgagaaagtcgcgcccctgaaaaactattctaaattccagtcaagtggcgattacaggacagcttatctctcattattgtgggcggtaaaatgcgggggatgggcaatcgacttctgacaagctgattgcccggtttgactttgagggagaagctcgcgacccgaacgactttggcaattcataataacagaggtgtgccggatcggagtatgcctgatacccaggcagttgctgtcagccgtttcaaggggaaggaacgacaccgagacgcgccgagatgtcgattaccctagaggaggaaatcttcggcttggccgtgaatccgttcaccaagtcgcccgaaatggtgcgccggtacacgcttaagaactccaagggcatgaccgtgtcagtgatccaactgggggccatcatccagagcgtctgcttgccggacgcctacaagaaggtggatgatgtgtgcctcggcttcgacgacatcgccagttacttggccaacaagggagcctacatcggtgggaccctcggacgagtggccaaccgggtggccaatggcgagtatacgtttaacgacacgaaagtctcggtgacaaaaaatatccaggtaaatatttcacaagtgaccgatttttgaatactatttgagatgaggatttttgacacttgttttggcaagagaacttagtgttagaagttttttgattggtatacttgttgtacttgtacttgttgtaaagtatcaggtagaggaaagcgattccgaccctataagtggatttgcaatcaaggtcacttgccaagtcgacctggtttattagttgagataaggcatgcatattatagtgacgaatacaaatacatatattcaagtttgtctcagatgaaaaaagacccgatatcggctgtgctcagcgtactcggcgacacaatcattcttattttttttttttttttttactttgcttttatttattgaatcttcttgtataagaactaacaataagtttaaaaatcttaactataacaagtattttttgaacagttgtattatttttccaactgttctatgtttaaacggccctaataatttattcgctgggttggtaggtcctttcgccggagacgggaacggctgctgagctggattagacctcgcgctaggtggttggggtgcgtgtgaagcttgctatggtatttttccttaagtaatccttaagttaatcattcttatgagaagaatactttttgatttcgacacgaaaaagaggctgaaaaagattcgattttagctagattttgagatcaaaattctcaaatcgagacctttgagaacgggggtttctttaagtgattgatatttatagtatttatacaaatgtatagtatttctagtttaagcaaatatagaatatgaaatatagcaatcgatcaatttcaggacaaattccagctgcacggtggcttcattggattcgatagcgtcatatgggaggtggtacagaagtcggccgagggagtgatatttcggcacgtatcgccacacggacacgagggctatccgggcaaactgacgtgcctcatcacctaccagctggacaacgagaatcggttgtgggtcaggtacgaggccaccacagatcgctccaccatggtcaacctctcgagccatgcctacttcaacttggcggggcacggatccggagcgaagggtctttcagagcacacggtggagattgcgtccgatcagatcgtggacacggacgagctgcagattcccacggggaagctagtcgacgtcaaggacaccgtctttgatctcaggctgccggttctgatgcgcgaccgactcatgcagttcgaaaatcgtcagatcaagggctacgacaactgcttcgtggtcaacggagggcgtgtgcaaaaaagtgtagccaaggtggccaagatcgtgcatccgccatcctgccgggtactggaggtttggaccgaccagcccggtatgcagttctacaccgcgaacaatcttacctcgatagtgggcaaaaattgcactaaatatgagaagcacggctccttttgcgtggagacggagaagttccccgatgcaatgaaccacccggagttcccttcgatcagcctcgagccgaacgagaagtatcggcacgatgtcctctactggtttaaggtcgaggagtcctggaagtgctgttgcaacaacgatccataagtgtcgtcgtgatctctcgtcaataaagtccaacccccaagtacttgatgttttgtttagctactcgtatttaaaataagtaggaaatcattatattaaaacagcagaataaactggataatagtgataatagacatatgtgtaactcaagactccttccctgcgtttcaagtgctaactttgtggacagaagagggcgtggcttccaagatctggaatccctaatctgttcagatctctatggttatatcaaatcgttttttagtcctgcgttaagaacatgctaaattctaaattcttctgagtactcggttattcttactaacaaacgaaactacgaatattttttagcttgactagcaggcataactacgatttacaaaatgtaacggcttacgttttgaaacccccatcacagtgggctttgatctgaacataaagcgttcgagccctttgaaattctcaagcccgtcgccacagtaaggcaatacaaaattttagtaatcctcctctaggtatttggcaaaaatcaggagatccaagatggtgcgagtgatcgaagacatgttcggcatcgccgtcaacccgatgacgcagaagactgaccgtgtccggcgcttcacgctggtcacagagcgcggcatgtcggtgtcgatcctgacgatgggtgccataatccagtccttgaaggttcccgacttcaacggaaagctggaggacgtgtgcctgggctacgacgacgtggcaggctactaccgtaaccagcaatacttctttggagccaccattggccgggtggccaatcgtacagcacacgggcgcttcaagctctgcggcaaggaggtcagtgtgagtcgaaacttgcgggataggcatcaccagaacggcgggttcgtgggcttcgacagcgtcatctgggacgtggtaggggtgcacaaggacggtgtcaccctgcagcacatctcgccagatgggcacgagggctatccgggcgagctgaccaccaacatcaacttctcgctcaacgagacgggctgctttgggatgcggatcgaggcgcggacgaaggccaccacggcggtgaacatctcgaaccacagcttcttcaatttggccggacacggcgcgggccgggatacgctctatcagcacatgctgatgatcaaggcccagaagatagtggacgtggaccaggagctcctgcccaccgggaagctgatgcgcgtgcgcaccaccccgtacgacttctccagcctggtcagtctgggcaagcggctcaaccaggtgtccacatgtccgctgggcggcttcgacaaccatttctgcgtggacattcctccaaaccgggtgcaattggtcgcccgagtggttcacccatgcagtggccggttcatggaggtgcacaccaaccagccgggcctccagttcagcacggcgaaccatttgccgagcgaggacggctcggacatccccatcgcgggcaaggatggggtcaactatgtccgccagggagccttcaccctggagacgcagaagtacccggacgccatgaaccactgcgactttccctcagtcgtgctcaatcccggccagctttacgatcaccaggtggtctaccgctttggctcttgtcccaagcgagtgtagcaacttagttgatgctcccaaaattaggccgctaaaattcaattggcagtgcaatcaatagggttagtactggctaaagtgcatttatattatctttctatttcttgacaataaatttgcaacttacaaggagggcgaacgtttaaaagtaatgcaatctttttaaaacactgtgagattagggaacaattgagtatgtttcgcttcttaattataattctacagaaattcggggtcgtacttgatgctggtgctcacctacgtccctggagtcttgaataaaggcgccaactgggcagcactggtagcgccatttggtttgggtctcagctagatccgttatcaaagtgctgcaccacactgctataaacatttgctttatttacgcgtagtatggacttgatatatttaaagggcagatccctcggtcactctgaacagcccaatataaaaaaaaccaaagaaattcgctgaaaaaacgaagggagtttctgagtgccacgtttggaactgagagtagccgaggaaagccgtcaagctgttcaacctaccgcaagtctacaagcagacgacggactccagaagtcacagcagcagcagcagcagcaggatgacagtgggtttcgctggctgagtccagtctaaaatcgattggaagagcctttaaaattcccattctctaccaacccatttcccgctctccccaggtgcacgaattcaaggtggagatgacctgcggcggatgtgccagtgccgtggagcgagtcctgggcaaactgggcggtacgtagaactagtgccaagtactaagttagttagtgtcttatcggtcggaacttacgtttacgtatatgtatgtatgaacctatgtgtgtgctaatgggtgaacttatttaatgccattgattcccgacacatgatacatacatatatgtatgtaagcaccaacttgttacatttttaattagtacatcctggataataggatagtgactaattaacaatgagctccctgaaatgggatatctaatccctcgaaactatttgaagtgtctgtaaagtcggttaatgtgcataaatagtaatagttgtaattcattaacgaaaacatgtttcccctttctttctaaccaagctctaattaatttgtgctcttttaaaaatgttattggtacctaaaaaacttgattaaacttaacaacaagttcagttaatttgtttgaagatcacagaacaagccttaaacataaaaaatcatataatgataaggggcttaaccacaatttgcattgttcgttcaagtggtgggaacaacttagcctagcccttatcagtagcgatttgccttactttcggcgctcgtcgactaaaccatgtgttttgcctttccgcagataaggtcgagaaagtcaacattaacctggaggatcggacggtgagcgtgacgtcgaacctgtcgtccgacgagttgatggagcagctgcgcaagaccggcaagagcaccacctacgtcggggtgaagaaatgagacgagttcctcagcaagtttcagaagtacggcaggctgaaacttgaggtatagggtgtggaccccagaggattgaaatatcttccacgttgccgctccgaaagcattcgatttgggtcgctgttcagtgatattcatgggatacatacaaattttactcttaaccaaatcaaatataggaatcatatacaaattttaccttagtatttgctcttgcccaaattgtatgtagctcgtagttaaccaattgaggtgttattatattatgcattacttatgcttagatgaagaattttaaattcaaatttaactaatcaaatcgtacagccaactttttgcctaagtatgcaggtgccgtatttaggggtactcaagtaaatccaacgtagttgccaataaatgatatacgccagttgccctcttatgactaatcgtaatattacaaattttaccattttaaatatcaaatatatacaaatacattttaaccttaaatgctggcatccttattttttttgggaatgtgttggctacttttacaattttcaggtcgactttggagcatcatgtagtaaatcccgttagggaaatggttttcatttccaaattgtcttattgtcgttcctaatccgaaaatcagatgcgggcactaagcatcttgtggtgtttggcgttccagcgaatcggcgacaaagagctgattattgccttataacgatcggaggggcagcatgaacttgtcataaatctcggctctctggaacccacacttataaaattcaatatatttttattttcggttttccaagttccgcgtgtgtcttgctttccttggttttttgtgggccatgttcgaggcgtaacgaaattatcaatcaaatgccacctcggcattcaaagaatgcaacagcacacaaagagcccaggcgactgcactaattgagctcaaagctggacgttcgaagtctcatctcgttccggctacctgggactgcggctcagttgcgtttcgagttgcgagccgggtctccgttgatttattccccgacaacaaagagcctagcgagggacgcttcgctgtcacaacagcagtcacctccacatcccatcccatctccttccattccatttggagacacgtccttgcctctgaccgactataatccctcaagtgtggcccgctgatcagttccagatagcaaaccgaaaatgttcttacggagcccatgatggcagcacattatctttccgaataccgttcaaatgggtatggtaaagcaaacagttaggaacccattc

SEQ ID NO: 35417 - DNA, 2957 bp, DROSOPHILA
ccgtttcaaggggaaggaacgacaccgagacgcgccgagatgtcgattaccctagaggaggaaatcttcggcttggccgtgaatccgttcaccaagtcgcccgaaatggtgcgccggtacacgcttaagaactccaagggcatgaccgtgtcagtgatccaactgggggccatcatccagagcgtctgcttgccggacgcctacaagaaggtggatgatgtgtgcctcggcttcgacgacatcgccagttacttggccaacaagggagcctacatcggtgggaccctcggacgagtggccaaccgggtggccaatggcgagtatacgtttaacgacacgaaagtctcggtgacaaaaaatatccaggacaaattccagctgcacggtggcttcattggattcgatagcgtcatatgggaggtggtacagaagtcggccgagggagtgatatttcggcacgtatcgccacacggacacgagggctatccgggcaaactgacgtgcctcatcacctaccagctggacaacgagaatcggttgtgggtcaggtacgaggccaccacagatcgctccaccatggtcaacctctcgagccatgcctacttcaacttggcggggcacggatccggagcgaagggtctttcagagcacacggtggagattgcgtccgatcagatcgtggacacggacgagctgcagattcccacggggaagctagtcgacgtcaaggacaccgtctttgatctcaggctgccggttctgatgcgcgaccgactcatgcagttcgaaaatcgtcagatcaagggctacgacaactgcttcgtggtcaacggagggcgtgtgcaaaaaagtgtagccaaggtggccaagatcgtgcatccgccatcctgccgggtactggaggtttggaccgaccagcccggtatgcagttctacaccgcgaacaatcttacctcgatagtgggcaaaaattgcactaaatatgagaagcacggctccttttgcgtggagacggagaagttccccgatgcaatgaaccacccggagttcccttcgatcagcctcgagccgaacgagaagtatcggcacgatgtcctctactggtttaaggtcgaggagtcctggaagtatttggcaaaaatcaggagatccaagatggtgcgagtgatcgaagacatgttcggcatcgccgtcaacccgatgacgcagaagactgaccgtgtccggcgcttcacgctggtcacagagcgcggcatgtcggtgtcgatcctgacgatgggtgccataatccagtccttgaaggttcccgacttcaacggaaagctggaggacgtgtgcctgggctacgacgacgtggcaggctactaccgtaaccagcaatacttctttggagccaccattggccgggtggccaatcgtacagcacacgggcgcttcaagctctgcggcaaggaggtcagtgtgagtcgaaacttgcgggataggcatcaccagaacggcgggttcgtgggcttcgacagcgtcatctgggacgtggtaggggtgcacaaggacggtgtcaccctgcagcacatctcgccagatgggcacgagggctatccgggcgagctgaccaccaacatcaacttctcgctcaacgagacgggctgctttgggatgcggatcgaggcgcggacgaaggccaccacggcggtgaacatctcgaaccacagcttcttcaatttggccggacacggcgcgggccgggatacgctctatcagcacatgctgatgatcaaggcccagaagatagtggacgtggaccaggagctcctgcccaccgggaagctgatgcgcgtgcgcaccaccccgtacgacttctccagcctggtcagtctgggcaagcggctcaaccaggtgtccacatgtccgctgggcggcttcgacaaccatttctgcgtggacattcctccaaaccgggtgcaattggtcgcccgagtggttcacccatgcagtggccggttcatggaggtgcacaccaaccagccgggcctccagttcagcacggcgaaccatttgccgagcgaggacggctcggacatccccatcgcgggcaaggatggggtcaactatgtccgccagggagccttcaccctggagacgcagaagtacccggacgccatgaaccactgcgactttccctcagtcgtgctcaatcccggccagctttacgatcaccaggtggtctaccgctttggctcttgtcccaagcgagttatgtttcgcttcttaattataattctacagaaattcgggaaattcgctgaaaaaacgaagggagtttctgagtgccacgtttggaactgagagtagccgaggaaagccgtcaagctgttcaacctaccgcaagtctacaagcagacgacggactccagaagtcacagcagcagcagcagcagcaggatgacagtgcacgaattcaaggtggagatgacctgcggcggatgtgccagtgccgtggagcgagtcctgggcaaactgggcgataaggtcgagaaagtcaacattaacctggaggatcggacggtgagcgtgacgtcgaacctgtcgtccgacgagttgatggagcagctgcgcaagaccggcaagagcaccacctacgtcggggtgaagaaatgagacgagttcctcagcaagtttcagaagtacggcaggctgaaacttgaggtatagggtgtggaccccagaggattgaaatatcttccacgttgccgctccgaaagcattcgatttgggtcgctgttcagtgatattcatgggatacatacaaattttactcttaaccaaatcaaatataggaatcatatacaaattttaccttagtatttgctcttgcccaaattgtatgtagctcgtagttaaccaattgaggtgttattatattatgcattacttatgcttagatgaagaattttaaa

SEQ ID NO: 35418 - protein, 768 aa, DROSOPHILA
MSITLEEEIFGLAVNPFTKSPEMVRRYTLKNSKGMTVSVIQLGAIIQSVCLPDAYKKVDDVCLGFDDIASYLANKGAYIGGTLGRVANRVANGEYTFNDTKVSVTKNIQDKFQLHGGFIGFDSVIWEVVQKSAEGVIFRHVSPHGHEGYPGKLTCLITYQLDNENRLWVRYEATTDRSTMVNLSSHAYFNLAGHGSGAKGLSEHTVEIASDQIVDTDELQIPTGKLVDVKDTVFDLRLPVLMRDRLMQFENRQIKGYDNCFVVNGGRVQKSVAKVAKIVHPPSCRVLEVWTDQPGMQFYTANNLTSIVGKNCTKYEKHGSFCVETEKFPDAMNHPEFPSISLEPNEKYRHDVLYWFKVEESWKYLAKIRRSKMVRVIEDMFGIAVNPMTQKTDRVRRFTLVTERGMSVSILTMGAIIQSLKVPDFNGKLEDVCLGYDDVAGYYRNQQYFFGATIGRVANRTAHGRFKLCGKEVSVSRNLRDRHHQNGGFVGFDSVIWDVVGVHKDGVTLQHISPDGHEGYPGELTTNINFSLNETGCFGMRIEARTKATTAVNISNHSFFNLAGHGAGRDTLYQHMLMIKAQKIVDVDQELLPTGKLMRVRTTPYDFSSLVSLGKRLNQVSTCPLGGFDNHFCVDIPPNRVQLVARVVHPCSGRFMEVHTNQPGLQFSTANHLPSEDGSDIPIAGKDGVNYVRQGAFTLETQKYPDAMNHCDFPSVVLNPGQLYDHQVVYRFGSCPKRVMFRFLIIILQKFGKFAEKTKGVSECHVWN

SEQ ID NO: 35419 - DNA, 2516 bp, DROSOPHILA
cttacgcgtcgggcaaatacgctctggtttgcattggtcatgggaaagccaattgcggactcattccgggtgctctgttgggtgtgcggttcattatcatcgagataatcccattagaaaacgctgcggcaagtgctggtttgatattcgggcgaatccttcggggccggataataaatacatgtgcatttgcacatgacgaaatatcctggcaggctttaattagcacttctctatatgctctatacatcacttctttaggttttatgcaaaatcgaaatatatcttcatacatgcgtaagaattacaaaaatctaagaaatctccgattttgcgggttttcagattctgcaaatcctttgaaggataaacgcagtttcaatgagattgccgagctgggcagtgaaaatattgattgaatacgcaacgaagtcaaagttcaaaggatgtgccttgcagctaaacgtctatatttatgattattttcttaaagcattttaaataaataaagtccatcaggagattaaacgctgcttgagtgaatgcgattaaaataaattaacttaaagtgccctcaatgggcagatgtttcgttcttttccagccttttgccgctgtaacatgagtacggaccacaagttggccgtggctcaaatatgaaattgccaaaaatcaaaattcccaaatgcgcgcacataaatctgtaaaatttccaatgcccatacaaaattccaaatcactttaactgctggtaatcggcgcataatcttcgaaaatttgcatgcactccccacgaaagaaggcatttgagatccttatcgtgcgcattattcacgtcacgtctgaagtattcaaagcatagtaaaactgcccatcaatttccttccccgtccccttccgttccacccggcgcggccccgccccctttttccacccgcccttcgccccttcgcctcatcaaccgaagaaatattagaatactcggcgtcctgctactaaattacctcgccttttgtgatggcgatgacggcttgttgtgggtgctgtgtcccgattgtcctgttcctggacctggtgccttgtccaggtccctcggatcgttggggcaattatggccggttgggagccccgatatgtcgcactgcggacatgcccgttcggtgcttgttcccccgccccgctgtcttttgtctttgccatttgagccatcgaggcggccgcaactccagtctctccaggtcgtacatgatcgccctgggccatcaccctggccctctcctctcacgaggagtaacagaagatggggttggagatgggcaggaggtgggccgcggcacaggcgttgcgtctggcacgggctagtggccataattctcggtacacgactgcaggaaagggctgctgcagcggcaccaccgccggcatcatccgtcccgccgttgagatcgacaaaaacgttaggaatctctgacgcataccaagaacccagaatgctgcactccaatgtcggttgcatcactccacttttcttggatttgtaatattacagcacgatgatgatcatctcggccgaaggagtggccaattcgaagctgtgacttggttctcatttgtgtgttcattacatactaaactaggtactctgtctctgtaaaagtaagttacatataaaagctcgcgtatatttgtgaagttcaaataccgaatagattttagaatcttgccaaagtattgataggttctgatacctgatcttgcacttgtacaataatcgaaaatatattataatatacatattaaagccaaaattttgcaactaaaaaacaattgtcgttaaactacattcatcatagctttcagcgatttcttactattgcaaaattcgctgcagaaagctgcaaaggcacgataataagctgatcatcgactgttgtgatgtgataagtacgacttctatcggaggcggcggactgatactgattcttgccgagcagcgcccataacgacgcagttcgtcaaaagctggcgcggtgggtggaggggaggcacgcggcacggcggagatcggaggcgatgccgtctccaaagcctgagcactggagcgattgcagattttgttacgaaggttaatgcgaagcgcagaacaaggagagcaacccgtgtcaaaactgaaagaacaaagacatcgtcgctcaaagccgatttcctcatacccttacaaaaactcaccaatattaacaaatcgaataacttgacttgagagtccactgtcacatataataatcagttcgattattcaaaaccaattggcacagagctaagaccattatgaactcatgaactacaaatctaaaatttaaatttattatttctatataatagaatttattccaagggtactgcattttcgaaattagtataaactgaaccctaaatgtaagattgactatcgcaactggtaaaaaatccatattaggaagaattatttttaagagggcatgtggcttgccgtatac

SEQ ID NO: 35420 - DNA, 516 bp, DROSOPHILA
atgcaaccgacattggagtgcagcattctgggttcttggtatgcgtcagagattcctaacgtttttgtcgatctcaacggcgggacggatgatgccggcggtggtgccgctgcagcagccctttcctgcagtcgtgtaccgagaattatggccactagcccgtgccagacgcaacgcctgtgccgcggcccacctcctgcccatctccaaccccatcttctgttactcctcgtgagaggagagggccagggtgatggcccagggcgatcatgtacgacctggagagactggagttgcggccgcctcgatggctcaaatggcaaagacaaaagacagcggggcgggggaacaagcaccgaacgggcatgtccgcagtgcgacatatcggggctcccaaccggccataattgccccaacgatccgagggacctggacaaggcaccaggtccaggaacaggacaatcgggacacagcacccacaacaagccgtcatcgccatcacaaaaggcgaggtaa

SEQ ID NO: 35421 - protein, 171 aa, DROSOPHILA
MQPTLECSILGSWYASEIPNVFVDLNGGTDDAGGGAAAAALSCSRVPRIMATSPCQTQRLCRGPPPAHLQPHLLLLLVRGEGQGDGPGRSCTTWRDWSCGRLDGSNGKDKRQRGGGTSTERACPQCDISGLPTGHNCPNDPRDLDKAPGPGTGQSGHSTHNKPSSPSQKAR

SEQ ID NO: 35422 - DNA, 4223 bp, DROSOPHILA
gtgtccttcatgatcacattgccattgaagcgcggcgaggacttgaagttctgaatgtactgctcggagacatactggagtgggaactggtttttgcccacatctagcaccggagtgtcctttacgtgggcgaatctgccctgctgactctggtcgaactggtacctcctgagctggtcgttcgcaggaaagttcccgaactgctcgcgacgcatgatgtgctgcgcagtggcaggttgcggcgaccgcaagaacttgttggagccaccagaaagcatggccaggttatccgatcgcgatcttatccggggcagttgtccgggacccggcggccgattgtgcttgatatggtgctgggccaggggctggttctcactcagaaactgccttatgcgcgcttgtctcatatcattctcaccgcactgcacttggttgattaggaccactatcagaactagggcctccaaaatgggggccaacttaagcggactctgagtcatttttaaagctcgtcttcgttccacgacggtctattggtatttgacatttgtcagttccgcggccaaaagcaaaaaagtttctttcgaattaaccacgcacacatgcgaagcttcttttccattcgacgatccacgatcgcgcagacttgatctcactttctttgttatccggccagtcgtttaaataaaaatggaacgcctcgcggcactgcagccaaatacaatgtggtggcctcgtctctgggcccagatgcagctatctatgtatatctatttaaaaccgacttggttcgccatatcagcttaagatgggcactttttctagagcctgtggttccaacgccgcagcaccgttaatcaatggagggtctcgagcatccacatccatccgattactttcttcttgaatttcggcggtgccgtcggttggaaagcaactgagtggcaaatggaacgtttctgaactagctgtgctggaattcggagtgtcggaatggccactaaaccagttttgagatgctgcctctgctgccatagaggagctgctgtggatgtggatgtggatgtcgatgtcgatgtcgatgtttttggatttggatgtgcatgtggtgtccaccgagagatccccgagagatcatatcgcgacacgaagatggagcactcgagcctcggggcaccgtgacatcgctccagatgcgacagaaccattggccaggtatgctcattaatctggctatcttgagtgctggtgaaagtaaatcggagataagatcttttggagacctatgcgtaattggttcggagttcctcaaacatcagagattaatttgcttatacagaatgccagatggctggatgtctgagacttgtgaatgcagggttatttacctcatgtaaaagtgaaaatgtttttaattatagatactgggataatgggtacaactttcgcttttgtcgtcaatttggcactgctttttcgagagaacaagccatgaaaacgataatttggatcattgttatgcaaatcgctcgaaactgtaatcgttcgttaatgtattcattcataaaagccctgttattccataaagtttcaaatatctcagattcttttgtggccagtaagtttgtgaaaatggaactgattacctttttatgtataaataaatatttataaggacctaacacaattaaaaaaaaacaactcggtagcaataaaactcagttggtttatttagtaatattatgagatgttgtagaaataaataaatctcctttgtgcgggggcacatttgaatttagacagactcccagtcatatcactaaattcccaatacgcaattcttagctcttaaattagttctacaaaaggttgttctcgacgtccttggcttaaactacaaatgttgaaatggcctcgtgcttaaatacaagtctcctcgttctcgatccaaatatcgttctcaactttgggctcctcgcaaactgtgtggctgttttccagcacgatgacaatgtccgtggtgctcaggaccgtggagtccgcattctggaagtgcaaggtccaaagttaatatacacacgtggaatacaagcaggtgaaaagtaatgtagtatttattcgccctgtattttactatttcacaaactcaaacaatcacatacgagcactttaattcgctcaacaggcaatgtaaggaaaagttatgttcccatgggtatttgtgtaaacaaagcgaaatcaagttaagcggggatggagccggaatactaagcaacttcagcattgggaattacaaggatacacaaattgacgcagagtgaaataactttttaatttgatttattcgcccaggtatctttgagttccgagagtccggcgacacagaaaagtttggaaataactctgggatttccagttcaaaagaatctgcgcatctgtaataactaaatttatgctaatttactactatatcatactctaggacactatgctatacttcaatgagtatttatgattttggtctgtttaattacttttggtagcgggaggctgtaggttttctttatcagcaccctatttgcagatgaggagtccgtttcgaacttatttggatgctggctggctctgacgtgaacctatggggtaatttgagatagaataaccaaattaggttaggttggattaaaatgtgctttcaataacttaataacttacagaatgaacgcggtcgtaggcggagctttcccggaaactggagtgatccctcgcaaatccgctgttgtaataggcgcccacggcttttccgcagaggagttccctgaacgcaaccctgtagcgacgtgacatcacactgtacactattggatttacggtgctgtcaagccagttgaatcagataaataagttaatagaatttgggttcatttaccatgaaacgtagtacgcaaatcccgcaatcgagaagagtgcctcgtttatgtccaaatagttatccatgttcttggcatacaggaatatgagtctttgcaggtggaacgggaaccagcacacgaaaaacgtaatcaccacagcagctatactgattaaacggggactttattgatggattctgttgggattgattgggaaaagctcacccaacatgcgaataaccgtcttctttctcatttgggagtttctcgtttccctgttgttggtgccttgttgaacacctggaatacatccctgaagtcggatcttttggggtcaataaaagccaggtacttgcccaatttttggttcgttcgagatcgaatcttggctcccattcgtccgtagagcaaaatgatgagtatcatcggaatgacaaagaaaatgcaaaaggatacttcgaacacgggaatttcgttaacaatcttgggcgacatggaacagaatgccgactcctcaatgcgggaatgatctgaaaagcgcaacgaatgccatttatacctgttcatgttatttggatattattcaaagaatatacttcaaccattcatggctgttggatggtgaagttcaggtcgctcgcaaaattaaagtccatttcaattgatttataaggtttcagcaatttacttcatttgagcaactactgactcgagcaccaagcaccatttttgtactgctagggaacttatgatgtaaatagtttcatacctaatgggtagttgaggtattgaatatccgagagcagtccaaatggaatggcgcttataaaactaacaatccaaagagctgttattatccgaatcgcgcgcttgaagccaaccatagcatacaggtgcaatggatggcaaatggccaggaatctctccatggaaaatgcgacgatggtaaagacggagacataggtgcatctgaaacacagctgggtttataaatggctaaacgtgtagtcaaaagtagttatactaacgcctctgaaataaatgcgcgtattttgcagaatggcatgccgaagagatccggatactgatgccagtacagaaacacttccgttggtaatcctagttttgtttaaaacagcatattcagttaactatattttcctattttatttagttaacctaccaaatagtaggtacagcagatctgaaacagctaggctgaacagatagtaattggtcgccgtgtgcattgccgagtggcgaataatcacaatgcacactaagagattaccaacgaccccggttataaat

SEQ ID NO: 35423 - DNA, 861 bp, DROSOPHILA
atgtattccaggtgttcaacaaggcaccaacaacagggaaacgagaaactcccaaatgagaaagaagacggttattcgcatgttggtatagctgctgtggtgattacgtttttcgtgtgctggttcccgttccacctgcaaagactcatattcctgtatgccaagaacatggataactatttggacataaacgaggcactcttctcgattgcgggatttgcgtactacgtttcatgcaccgtaaatccaatagtgtacagtgtgatgtcacgtcgctacagggttgcgttcagggaactcctctgcggaaaagccgtgggcgcctattacaacagcggatttgcgagggatcactccagtttccgggaaagctccgcctacgaccgcgttcattctgttcacgtcagagccagccagcatccaaataagttcgaaacggactcctcatctgcaaatagggtgctgataaagaaaacctacagcctcccgctaccaaaaaatgcggactccacggtcctgagcaccacggacattgtcatcgtgctggaaaacagccacacagtttgcgaggagcccaaagttgagaacgatatttggatcgagaacgaggagacttcactcaagatagccagattaatgagcatacctggccaatggttctgtcgcatctggagcgatgtcacggtgccccgaggctcgagtgctccatcttcgtgtcgcgatatgatctctcggggatctctcggtggacaccacatgcacatccaaatccaaaaacatcgacatcgacatcgacatccacatccacatccacagcagctcctctatggcagcagaggcagcatctcaaaactggtttag

SEQ ID NO: 35424 - protein, 286 aa, DROSOPHILA
MYSRCSTRHQQQGNEKLPNEKEDGYSHVGIAAVVITFFVCWFPFHLQRLIFLYAKNMDNYLDINEALFSIAGFAYYVSCTVNPIVYSVMSRRYRVAFRELLCGKAVGAYYNSGFARDHSSFRESSAYDRVHSVHVRASQHPNKFETDSSSANRVLIKKTYSLPLPKNADSTVLSTTDIVIVLENSHTVCEEPKVENDIWIENEETSLKIARLMSIPGQWFCRIWSDVTVPRGSSAPSSCRDMISRGSLGGHHMHIQIQKHRHRHRHPHPHPQQLLYGSRGSISKLV

SEQ ID NO: 35425 - DNA, 2738 bp, DROSOPHILA
taaatagctcagaaccttttttctatgccttcatcatggcaaaaaaatttcaacgccaaaacaacaaaatggctgatccttcacagtggctggtcacgctataataaaatactggaatataaaacggaactatgatatttccactgcgtcatttgatattcgatgtattctgattcaaagcttgtatcaattgcctgttcaattatgtatgttatattttttagtatgaggggtaaatataatgaagcaattaacatctatattctatacatccttctggtacttttacattctattttttatgatgtaattgtgcctcatttcctactcgaattttctcttaagctacaagggtattgtaatgaacagaaaagctcaaacattctttcgttaaaaaataaattacaggcctcataatttaataccgatgatttaatatttatttaaaatttccaatgatttctaaatgtcttattggcataaagtttaatttggggtttctgttccaagaaaccgaaaatgattatttaaagtttcttgagatttgaaagaaactataatcctataaaaataaatatcagctaaaaaaaactttaaggactaatcaaataagtaaacaaatacagcttacgacttaaacaaattttatttcgctaaattcatgataagtcttaagcgttcctctcttcctcgtacttacctaaactacgacagatatacggattatattgaatataggtttggtccgacaaatcaaaagtagtcataacctttactaaaggtagatgttatatttcatagaaaattgcaaaagcttaaattcaaattttattaaacatttaaagtatttcaaatttctgttttctctaaattattttggtatatttattatcatcaaagtgcagagcgatatttgtatgcatgcgcggtcacattgagcgtaaatgataaatatttgttattaaagtgtttcggaaccaaaggttaacaattcagccacatgacgtccattgcgggaggccacggcgaggcgaatccaaacagctcctggctgagtgcccggggattttggctagcatacctcctgggcctgctgtcggtgcacctgctcttcttatcagtgcccttcgttagcattccatgggcctggacggctaccaacctgcttcacaatgcagtgagtgctcatggcgccgttgaggagtcagtccttatcctaatccctcttgccaggcccacctgtactttctgcacgtcatcaagggcgctccctggctgagcacggagaacgatcccagccggcgttggacgcactgggaacagatcgatgacggggtacagatgaccacaacgcgcaagttcctcacagctgttcccattgttctgtaagtgaatacgtactgaaagtcggccaatataggtgggtttttatttaaaaaaattaaaactaaatgaagacttaaattctaaacttgttttaatgttgatcaaagtatttcaataaatactttttatgtactgcagtttaattgaactagtaatgtaattgctaccatataatgcctaacatagaaactcatgaaataattgatttttttatagtttcctacttacctgtctgtacacccgaaacaacacggaacactttatcccaaactttatatccctggtggtcgtcacgcttcccaagctgccgcagttccacggcgtgcggctgttcaacattaacaagtactagctcctgtgagaacgggccgcatttattttgtttaatgaaaatgtacatacaaacttatattgatggcacagctcttgctcaaaaatgtaaatattgctaaataaaatatttatcaaattaaataattctaaaaatcgcgtttcgatttttattgcataaataattattgatcatggaaactacaaatcatctaaaagatgtatttgggggccagcacatgagatattttataacccattatgtcagacgattaagtagaaccatgatgtagttctttagcccaaaggattaaacttgatcaatcgctgtacacagaagtcttcgtagtgacgaaaagcacagtgagtggggtgcgtaagtatagtacatatataagccgaaagattgaaaacatgaaagaaaaacccgttaactgattttttctgttaaatattcttaaatataatcatacaacatacaaaagtactgctatcaacttaagtggcgaaaaatgattatagacatactatacagatacaatgcaaacactcgccgcaaacaagcaaacaacaacaaacaaaaagctttttctgttttatgagctctcgagaaagtcgcgcccctgaaaaactattctaaattccagtcaagtggcgattacaggacagcttatctctcattattgtgggcggtaaaatgcgggggatgggcaatcgacttctgacaagctgattgcccggtttgactttgagggagaagctcgcgacccgaacgactttggcaattcataataacagaggtgtgccggatcggagtatgcctgatacccaggcagttgctgtcagccgtttcaaggggaaggaacgacaccgagacgcgccgagatgtcgattaccctagaggaggaaatcttcggcttggccgtgaatccgttcaccaagtcgcccgaaatggtgcgccggtacacgcttaagaactccaagggcatgaccgtgtcagtgatccaactgggggccatcat

SEQ ID NO: 35426 - DNA, 465 bp, DROSOPHILA
atgacgtccattgcgggaggccacggcgaggcgaatccaaacagctcctggctgagtgcccggggattttggctagcatacctcctgggcctgctgtcggtgcacctgctcttcttatcagtgcccttcgttagcattccatgggcctggacggctaccaacctgcttcacaatgcagcccacctgtactttctgcacgtcatcaagggcgctccctggctgagcacggagaacgatcccagccggcgttggacgcactgggaacagatcgatgacggggtacagatgaccacaacgcgcaagttcctcacagctgttcccattgttcttttcctacttacctgtctgtacacccgaaacaacacggaacactttatcccaaactttatatccctggtggtcgtcacgcttcccaagctgccgcagttccacggcgtgcggctgttcaacattaacaagtactag

SEQ ID NO: 35427 - protein, 154 aa, DROSOPHILA
MTSIAGGHGEANPNSSWLSARGFWLAYLLGLLSVHLLFLSVPFVSIPWAWTATNLLHNAAHLYFLHVIKGAPWLSTENDPSRRWTHWEQIDDGVQMTTTRKFLTAVPIVLFLLTCLYTRNNTEHFIPNFISLVVVTLPKLPQFHGVRLFNINKY

SEQ ID NO: 35428 - DNA, 2312 bp, DROSOPHILA
ttccgtatgaacgtcgatatctcaggaactataaaacctagaaggttgagagtcagcatacaaattctacaagtctgttgatccatgttgctacgcccaccttaccgcccacaagccgcacataactgccacgtttctttaaaattgttggatattttttcataattttgttagtcttgtacatttccattgacttgccaacaaactttttgacacgtccactctaaccccctaaagccgccgaaatggccaagccgcactttggaaatttttttataactttattccccaatatctatggatatcccagaaaatgatgaaattgagcattcgcattcacactagctgagtaacgggtatctgatagtcggggaactcgactatagcatttctcttgttttacgttctgatcaagtcccagcagtctaaagtaatgacatacatctcgagtgacgggtgtagaagaaagtctaaagtaatgacatacatctcgagtggctggggtttagaagaatacaccatgcacaaggtaagtcccaaggtggtcctgttggaaatataagattgcatatcatctgtttggcaactttattactctctcagagagcaagcttctcttgctctcatttgccactcaaagtagtgaagcatgtatacgaagttatgtacacagttcagttctattaaagcattcaccctaatcacatctcattgtctcaatcattttaccgcggcggcactcttatgcaaacatttggttatgggcccaggccctacgcgtaaagaaatgtattgattcgtttacaaagtattcgtgaagtgatcaaagtgaagtaaccaaaaataaaacaaagttaagagaaaagaactcgcgtctatctttgtttaagccaatgcgggataaagagacagttaagtgtctcgtatacccctcagcaacacggaattgctgaacgtgcaaaccgcacaattgtggaaatggccaaaagtcttttaatacatgctggtttggatgaatttttatgggctgaaacgtcacttgctagctgaagccagcagtactgacgatgaagaagccgtttacgacagcgatgagggcaggacgtttgtcagtgccaatgacgactctgatgaccaatctgcagatgacaccctaatggcacaacagcgaaggccaggccgaccaaagttcatacgaactggccaaccaggaaggccgaaaaaggtgtatcaaactcttcaatatttgaattacgaggaagatgaagaaacaccgcagtcgttggagcaagcactcaagggccaattgtaaattggcaggattcaatgcgagcgaagtatgaagcgttaatagccaacaatacatggtcactggtagacctgcccaaaagcaattggatcaaaatgggtatttcgcatcaagaaagacaaggatggcgaaatagagagattcaaatcacgacttgttgccaaaggttgtggacaacaatttggagtgaactactgggaaacatattccccggtaatcaggtacgagaccatcaggatgctgcttgcagttgctgcagaaaaagaccttcacatgcatcaaattgatatatcaaacgcatacctaaacagcgaccttgaggaggatgtttatttgaaacaaccaaaaaattacgttgacaaggaaaatcctggaaaagtccttaagttgcaaaaagcaatctatgggcttaagcagtctgaacgactgtggaacgatgccttaaatgaagttcttcaaaatatgggctttaaaagaagcaagaacgaggcatgtttatactacaagaagcaacaaaacggttttagctatatagctgtctacgttgacgatttgatcatcatatctcccaaagaaagcgacatagaagacatcaaagggagcatagcaacaaagtttgatatgaaggatggcggccaactgagatatttccttgggatggaaataagccgagagggacaaacaggtcctataaagctatgtcaaaagcgctacattgaaaatctactaagacggtatggcatgcaaagctgtcgactagtgggaaccccatttgaccctggttatgaatctggttgcacaaatgagaaatgtgcaaaggtaaatttaacccattttcaatcactaattggttcgcttatgtatttagcagtagtaagtcgaccagacatattgcactctgtcagcaagttatcacagagaaatacagatcctcaccacgaagacgaagcagcagcaaagcatgtgctacgatatttgtgtgggacaatcaacctgagcatta

SEQ ID NO: 35429 - DNA, 312 bp, DROSOPHILA
atgctggtttggatgaatttttatgggctgaaacgtcacttgctagctgaagccagcagtactgacgatgaagaagccgtttacgacagcgatgagggcaggacgtttgtcagtgccaatgacgactctgatgaccaatctgcagatgacaccctaatggcacaacagcgaaggccaggccgaccaaagttcatacgaactggccaaccaggaaggccgaaaaaggtgtatcaaactcttcaatatttgaattacgaggaagatgaagaaacaccgcagtcgttggagcaagcactcaagggccaattgtaa

SEQ ID NO: 35430 - protein, 103 aa, DROSOPHILA
MLVWMNFYGLKRHLLAEASSTDDEEAVYDSDEGRTFVSANDDSDDQSADDTLMAQQRRPGRPKFIRTGQPGRPKKVYQTLQYLNYEEDEETPQSLEQALKGQL

SEQ ID NO: 35431 - DNA, 3646 bp, DROSOPHILA
taaaaagtcctccttatctaggcgatctaatcgaaaaaaaaaaaaaactattttttctatataatcctggactgagtttttaattggttctggtttcatttcaatatacaaatttcggatcctggttctgaagtaattaacttgaatgttctgtcaaaaagggtaactgtgttatttttttaatgtatatattattgggtaattattagaaaaactcgtcgtccatttggacgggttgtacctgttgtttataataactgggtggaaattcttcgcaatcgtgtgcgtcttgaaatctcaattcgtcaatagagattttggtttgtccactgtccaacggtcttagtcgttttctaatcgagaagttagtattcttagatgtggatcggaagtcccaaggatagtgttacgtatccggacaagttgcttttgataatactctgttgtcgcaaatcgttagtttggtagagtaaaatcacgtagtccactctgcttatgaagatctagagggtttccagagcacccttaaattacattatgtcttttagctgctgatggcttcgttcagcgccacgatttggagcgcggcaataattggttgtgccattgttattgtagatttttattgtcttagaaattatatatttttttaatgttataattttattttcacctttttatatacgtttatactacgtttgtttaacttaacttttgcagaattttatatgttggttttaaatgctagttgcctttggacttaatgttttgtatttgtatttagttttctagttcctcgttttgagtttgacagaattttgagggaattggagttataatccaagtcaaagggctttcgcgatgtttttttttttttttgatacttttttatttactttacttttttatttacattcttgagtaaaatcacaacttttaggctgttcataagaatagtagtgtctggttttgaccaacgtacatttcattttatttcatttcattttaattttttttgcttttgctggaagtcaaagtgatggtattgctgctgctgagcctgctgttgctgctgctgcatctggtgcggcacctggttgccctggtggtgcagttgctgctggtgatgatggacctgctgctgctggaagaactggccgccattgacattggtcgacccaggtcctgggccccctccggaaggatactgcatgtgcatgtgacgattggcctgggcgtgattgtggcctccattgtagttgtagtaggcgttgaatgactcgctgtagtgctccgtcatgtgtgcagtgggcgttgagggcgtgggtgacggagtcaaagcgttgggcgtggctcctccacccaagctaagagtctgcaagctggggggatcgccatcgctctgtttcatacccggcgagagaggcatcccctcgtaggactggtccttgtgctgatccgattggatcttgtgacgacgccgacggttcttaaaccatatcttcacctgggctgtgcccagggctagtttcgctgacagatccgcaagtcggggggctatgaggtatcgtccctgcagaaagtgctgctccagctctgctatttgagagctggtaaaagtggtgcgggtgcgacgtggtcgccgcatcaccagagagtcgggcagctcctctgagggaaagacatctgataaggcgatggctgactttgttcgctttgagctcacctggcttgggcatctggttgggcagatacggacgtatgtagttgtagtttatcgctcccgttcgctcatcgaaaagcttcaaagaatcaaggggtacactgtctttatataaaaacgtgaaaggacgattcgcttcggggaccgaatcttgcaatattactttcactaatcatcatgcaggacaacaatgcttgttttagaaaatatgttgtatgaagtgtataaagtcaataatgtatacccagtggccatagatgtggcttttgaaaaatagacattactgattgtcggtgtgagtgcaacaggtttaacattcgtccatttcaatgaaacaccttttagaacatttcggcaaatcactaataacatgatgccccacaattcatatacaattatatactatactaactgtaacgattaataatatcaattggtttttagattctgctacgatactttaaaagtcacaaacaagataatagaagatttcgccctatgttctagaaacacatttgctgcggctcaataaatgtttatggtcatcagtgatcgcactggttgtttgttcaccatagggaatctgtactgtagctttcctgggacaagagcccttctctgctgcgatgggaactcaccaaatcgaagggatttcggaattgtggcggcaactgaagctgcggatgttggtgatgtgggtgcggatgcgagtgcggatgcggatgggagtgcggatgcggatgtgtgtgcgtgtggggcagcggatgatggtaaaagttttgatccagcggcggttgcgccattttccccaaacactccgccgcgttatctttacgaatttccaagcgccgcgcggaaaaatggcaaaggagtgtggaaactttcaagtattttcagtaaccggttactttcgagcggtttcgtggtaaagtgaattcgtatatttaaaagggcaataaattaaaaaaaagttaaaaaaactcatattttagtgggtagaggacagcactgctccgaggagaacagaatgttaattcgtatgctaagaaacgaaggaaaaacatataaggacattaaaaaacccttaaatgttctgccatggtatccaatgccattaaatataaatggaaacccgaaaaccgtggtaccaaacgtaaaaccacagatatagaggatcgacgcatagttcgttacagcaaagtctatccttttgcatcttctagggacataaagtctgagctaaacttgggaatcagtgacgttacaattcggagacgactacttaatcaaaatttaagtgcgaggagtccacgaaaggtggccctaattagcccaaggcgtcgcaactggccagtctccaaatgccgtaatatcctttggactgatgggtcaaaaatagtgctatttggtggaactagttcactgcagtatatctgccgacttccaaacacggagtaccacccaaaacacccactgatgacctttgatttatggtattatagagcaaaacgcatatgtaaatattcttagtgatgccttactgtcacattttgaatataataataataagggcataaaatagacattccaacaggataatgatccgaaacgcagaatagccaatcggctaagaataggttcacccaaaatagaatagatgcaatacagtggccagcaccatcttccgatttaagaattccccgacgtccaaggttcagctttggcaagttgtgcaggatgcatgggcgaaaattcccccaaacgttgccaggaccttgtggacttcatgctgcgtaggtgtaaggttgtgctggctttgtttttgttgttttaatctatattttcaaaactattgaagaaataaaattgaaacattttatgaaatgtttgaaattaaatacctaatgatataaaaaaacttaa

SEQ ID NO: 35432 - DNA, 1032 bp, DROSOPHILA
cgaaaccgctcgaaagtaaccggttactgaaaatacttgaaagtttccacactcctttgccatttttccgcgcggcgcttggaaattcgtaaagataacgcggcggagtgtttggggaaaatggcgcaaccgccgctggatcaaaacttttaccatcatccgctgccccacacgcacacacatccgcatccgcactcccatccgcatccgcactcgcatccgcacccacatcaccaacatccgcagcttcagttgccgccacaattccgaaatcccttcgatttgcttttcgatgagcgaacgggagcgataaactacaactacatacgtccgtatctgcccaaccagatgcccaagccagaggagctgcccgactctctggtgatgcggcgaccacgtcgcacccgcaccacttttaccagctctcaaatagcagagctggagcagcactttctgcagggacgatacctcatagccccccgacttgcggatctgtcagcgaaactagccctgggcacagcccaggtgaagatatggtttaagaaccgtcggcgtcgtcacaagatccaatcggatcagcacaaggaccagtcctacgaggggatgcctctctcgccgggtatgaaacagagcgatggcgatccccccagcttgcagactcttagcttgggtggaggagccacgcccaacgctttgactccgtcacccacgccctcaacgcccactgcacacatgacggagcactacagcgagtcattcaacgcctactacaactacaatggaggccacaatcacgcccaggccaatcgtcacatgcacatgcagtatccttccggagggggcccaggacctgggtcgaccaatgtcaatggcggccagttcttccagcagcagcaggtccatcatcaccagcagcaactgcaccaccagggcaaccaggtgccgcaccagatgcagcagcagcaacagcaggctcagcagcagcaataccatcactttgacttccagcaaaagcaaaaaaaattaaaatga

SEQ ID NO: 35433 - protein, 303 aa, DROSOPHILA
MAQPPLDQNFYHHPLPHTHTHPHPHSHPHPHSHPHPHHQHPQLQLPPQFRNPFDLLFDERTGAINYNYIRPYLPNQMPKPEELPDSLVMRRPRRTRTTFTSSQIAELEQHFLQGRYLIAPRLADLSAKLALGTAQVKIWFKNRRRRHKIQSDQHKDQSYEGMPLSPGMKQSDGDPPSLQTLSLGGGATPNALTPSPTPSTPTAHMTEHYSESFNAYYNYNGGHNHAQANRHMHMQYPSGGGPGPGSTNVNGGQFFQQQQVHHHQQQLHHQGNQVPHQMQQQQQQAQQQQYHHFDFQQKQKKLK

SEQ ID NO: 35434 - DNA, 2905 bp, DROSOPHILA
aaacaaatttctgcgcgttttgctccgctcagcacgtaggcaggggcgttgcaggggctcggcagagaaggggaggtcgatggcttttcacgtggcagccacgtagcaaatggcagcggcggacggaaattgcaattgagtgcaaattgcaagaagaaaagggtcccgtcccgtaccctacgacccacccacatcacttccactccgctcctactgcccaattttcacccacttcctgtcgccctcttcctttgaccccgccatcgccgcccaccttctccttcgattttcgtatacttcctgccgagagcccactacattcttaatgcccccactggcccgcagtgatttccgagccgcacacactccgctaatgaataaatctggccatcttgagccgttgggccgtggaggcggttttaatgattaaccatcgacaaggctgcgttgcattcaccgcccagtttctgccactgtagcacccctccgcccctcgcctccatccatattcaactttagcaacttcggtgggtcgcatgtttgcttgctctcggcgcctttaactttatcgtcctttgtcacgttctgggtgcgatttttatcgcccgaaagttgcgcggaataacaggaggctttaattaatttccacaccgaaaatcaatcagatttgaccacttcacaacccggttatttccctcaatataagcctggtactcaatgggctttcctttaacctttaaattaaatgaaacaggagacagtttttcagtgtgcagtgtacataatttaatttaaatgaaataaagcaaggacaaatttaaagtgtaaggtgtaatttgatgtttttgataggtagattgtgcgaatttggcattgtagttgtatggagtgtatggaaacaattaagaagttaaatacaaaagttatccataactgccataatgggctattatcctcggcgaagccatatattttactagatctcgatatcatcatgaaactactcttggtttggccagtcctcaatctcgtaatacaactccctcatggcatccacttcctgcttccagcgctcaatgatgcctagatgcacctccacgcctatctcctcaagcttgtcaacgatctgcagcacacatatctgataataggctctgctcgacgcattatcaatatcattatcgaaaagccttggaaaaaacaacgtcacacataagactgcaagagagattgcatttcttaatatatattaaaagtaatactaaaaacaataaaagcttgattggaataatttgcgtgtgttcatttgaggtcgcatatggaaaacttaccgatcctaattagcaagaagatgttagtataccagatgatgttacgcactgcctccagggcaagcatcatcaaaaagagctcgaagatttcagtttgaaagaggatgcaatgcagcgtgaccaagcagcgatttacacagttgaccacgcgcacaaccatttcctgggtgatgtgcacattgaaatcggcgcggatcagacgctcgtaaagatggaatcgcacatacggccggatggccttgtagatcattatgttgctcaggatcatcatgccgactacagccagctgttgcaacagattgaagctttgaaggacctcgaaggcattgaggataagaaagcctaggctcaaaaagatggagttccactcgtggcgcacgagcaaatcaaacagaattcggggccaggtgagggctgtaatcatctgatagatctcatggaacgtgtatttttgtgggcgggaagccgactccaccacatccgggatgttaccaatggcattgggtgcttcttgccttaccgccacctgctgttcattttcaaatgtgtcgtttgatatagccattatggtcatttttcgtctttcttgcttagaaaacggatgcacttctttttatggaaaaacttgtaaaaaaatataaattttgattttgttgttcagccaacggagctctggctgagactgaatggtacggcaaatctgtcatagagcctaaatgacattgtactgagtactttcaccaggcctattcaaaaaggtttcaatgtactaccaatactttacacaacattttagaatcttaaataggtaagcggaaaagaaagatacaccgctttgattataaatagtaaaatcctatgttcgctattgtgctcgcgactttcgataactaaaactatgatgttttcgtgaccaagcttaaatacttgtgggctggtcaattaatttattcatggccctggggagacgagtccgattttcgacgcccaaatatttctaaatatttgctcagttcgtctgaaaggacaaaggacccacgaggacaaaggaatgcgctgtgtttggacttgctgcgtgtgcgtaataaataaataaaatcccattcgaagccggattgccagaggaggaaacaattggctggtgggggcgtttaagtgcaaaattgtaaaatgccagtcccagactaaatggaaatagtaaattggaaattggaatcgctgttgccgctaatgaaattcgataaaatgaaccgaaatctaaccgaaatgatgccgacattcaaaggcaaaggggtgatggccagcgatctattgcaaacattttgtgcggaaattggtaaaactctttgatgtcaaaatgcggagagggatttcagggcgcggcgattgccttttcctggctaatctccagtgtcagcccgaaacgtaaatcaaaactgcagcttcaagtggctcactaattagattaacttggagcagcggcgaaaaaccgacgcacacacagtgagtcgcaaaaagctgttgactatttcgcaatttgtttttgcagccggatggtaaaatccgtacacttg

SEQ ID NO: 35435 - DNA, 792 bp, DROSOPHILA
atgaccataatggctatatcaaacgacacatttgaaaatgaacagcaggtggcggtaaggcaagaagcacccaatgccattggtaacatcccggatgtggtggagtcggcttcccgcccacaaaaatacacgttccatgagatctatcagatgattacagccctcacctggccccgaattctgtttgatttgctcgtgcgccacgagtggaactccatctttttgagcctaggctttcttatcctcaatgccttcgaggtccttcaaagcttcaatctgttgcaacagctggctgtagtcggcatgatgatcctgagcaacataatgatctacaaggccatccggccgtatgtgcgattccatctttacgagcgtctgatccgcgccgatttcaatgtgcacatcacccaggaaatggttgtgcgcgtggtcaactgtgtaaatcgctgcttggtcacgctgcattgcatcctctttcaaactgaaatcttcgagctctttttgatgatgcttgccctggaggcagtgcgtaacatcatctggtatactaacatcttcttgctaattaggatcgtcttatgtgtgacgttgttttttccaaggcttttcgataatgatattgataatgcgtcgagcagagcctattatcagatatgtgtgctgcagatcgttgacaagcttgaggagataggcgtggaggtgcatctaggcatcattgagcgctggaagcaggaagtggatgccatgagggagttgtattacgagattgaggactggccaaaccaagagtag

SEQ ID NO: 35436 - protein, 263 aa, DROSOPHILA
MTIMAISNDTFENEQQVAVRQEAPNAIGNIPDVVESASRPQKYTFHEIYQMITALTWPRILFDLLVRHEWNSIFLSLGFLILNAFEVLQSFNLLQQLAVVGMMILSNIMIYKAIRPYVRFHLYERLIRADFNVHITQEMVVRVVNCVNRCLVTLHCILFQTEIFELFLMMLALEAVRNIIWYTNIFLLIRIVLCVTLFFPRLFDNDIDNASSRAYYQICVLQIVDKLEEIGVEVHLGIIERWKQEVDAMRELYYEIEDWPNQE

SEQ ID NO: 35437 - DNA, 2183 bp, DROSOPHILA
tttcgcattttattttccaaaagtaatcgcaattgcaaggggatcggtggtggctcttcagatttttatggactaaatgtaaattgaatcaagttattagtgagtttccaagtgaattagccatggcaaaggattggcgagcaaatccagccaggaagctgttagccagggcgaaattatgctatttaataaggtattttcaacaagcattaagtctacgaaattccggttgctaagtaatatggttatcctttattattataatcaataatatgtattagaattatgcattagaattccttttctgttttttcgctcagcttggaccaccatttcgcaggcttgtggtttattttgaatttttacataaataatagaaaattctttatttttgctcatgcgttggactttccgtttcctttcatttccgtttccttccattttccacttgtttcggccgcctgagatattaataaataaatttattctatttaaatatttaagcgcccggtcagtcataaatgtaatttattgccgcctgtgccacaccccttttttaagagtatttataccgctcgcctgcctttgttgtcctgtcaatgttgttgtcctcgtattgttgccgcctagacgagggtccgaaaatgctggaaaactgaaactttttgttgcccccaccgaagccgctgtgttgtgtggtcatttatgtcatttcatatttattcggtggccttctgcataattggcaatcctctcggttcgcaaaaaaaaaaaataaataaataaaataaaatacgcagcccgaaagctttcaaaaaccaccaaaataaaaatcaagaaaggaccgggagctaaccgatgtcctgtgggaccgagggtaacgaaaagagagaggagtggcgggagcagatggcagaaaatttacaaaaacatcacaatttaagcaggcctttaaaggccactgtcctgcgtcagtcctgttgtctgcttaaaaataaatctatgtaaatgcatttaacgtggtcggaatgggcggattaattgagttgccactcggtggcagttggttgctgaatattgcagtgctcctctgatcctccactttcttctgctgctcctgctccgtctgctccttctgctccttgtgctccttctgctcctcccaggaattcacatcacgcatacgccatgtggcacatacactgactgctacttccccctgcacaacttcgctctgttggctcggctattgacttggtccaaaaagtagccgagaaacttaaaactggcaaagagttgagtaaagttgatctagtgctagtgaatccccgggcattttgtggcttttgcggccttccttggcctaagtattccagcccttctgcatattttattgtattttaattaactaaatctccacctccggttccggactggaaactctgtcaacttgcggttaggaaaaagtgcggaatttccagggcaagcgaaacgcttttccaagactttgcttgtttcgcttgaactaacccaacattgtcctgcaaatgcttcaaaatgtacacattaaagatgatttgtgcagagcatactccacttccatcaaatcagttgcgcaatttcggaacaattcttatcatgttttcttatgtactacgactacaaagcttattttatacatttttgaaaactattcaaattcagacgggatcgttatcaaatcgtagctagaccaacccattacgaagtcttgaaattattcacttcacttacagaacgaaagcgtgtgtagtgatttaacttttctgtggagggaattatcctcaaacttgttgacattatcaacaagacaaaaaagccagcacaacaccgcttggcccaaaagtgtttgtcatccatccgcctttgtcttcggtgaccgggtgataaatctgcattaaaacttcattctatggacggcagacggcatgtttgtgtgtccaaaaaattaaatgtcacgtgctaaggtcggatatggaaagccggccaagaggaaagcaactttttaagccactctcccttcgtcggtgagattgacttcggcgttgactctgactctggatccggctccagctccagctccagctcgggctaatttatcaacaaattgttaagtgctagcgactgcaactggatgcaggacc

SEQ ID NO: 35438 - DNA, 183 bp, DROSOPHILA
atgcgtgatgtgaattcctgggaggagcagaaggagcacaaggagcagaaggagcagacggagcaggagcagcagaagaaagtggaggatcagaggagcactgcaatattcagcaaccaactgccaccgagtggcaactcaattaatccgcccattccgaccacgttaaatgcatttacatag

SEQ ID NO: 35439 - protein, 60 aa, DROSOPHILA
MRDVNSWEEQKEHKEQKEQTEQEQQKKVEDQRSTAIFSNQLPPSGNSINPPIPTTLNAFT

SEQ ID NO: 35440 - DNA, 2297 bp, DROSOPHILA
acgagatggatagctggatagctggatagccagacgacacatttggcacatcagcaaatgatgtgaaaatgtcatttccaggcgcaactgccaaaggtaatggccaaaaatggaacaagggctcctacatccagagtcctgaatcacaggatcccagtgcccacacacacacatcacatggcactaaatttgtggcaagcgagcgcaaaaaggtccacaaactgcgaacttaatgatgggtaaagaggattcaaaggcggggcttatcaaattgcgcatacatggatgtcgcacagcttcattagggcgctgcgatgatatgcccatacccgtgccacccagtttaccatttcattcccctgaatgaatggcagcaaatcaaattaaattgaggcactaaaatctgttgcctacttttgtgggaaatggaacaattgcgtgacttcctgtccgcccggctctttgctttcgtttttgtaccccgccatagaacctttgcccttttgaccacttttaaccactggcaattggcagaaacgctactaatttggttgaatgtttgattgaagtttggccaacagctctgaccgataggtttaattatatcttgttacgaatacaagaccttggaacatcaaatttttgggtgtgattacctctgttgactctacttacaatggccattcgaaagtggagtggtatgtttgtttccgttggtatcaccactcaataactattgtatttaaaaaactatatttgaatttttgaacaatatactaatttgagatataaacacaatatgacatataaaagccaagcacttaagaaagaggcccaagcatcttcagatcttcaaaataagtctgatgtaaacaggaccactagaaaaatgattaccgcagggccgctttggccctttgacagtgttcgtggaacatacgcatattcttctggtttgatggatttatcctatccggttgagttggatgcaaatgcgaaattaactgctgacctcttccaccgcattttcgatgatgttgtcctgcgcctggagagtcggtcccattctggttatcaccatttcctccaacttcagttgattaagccgtgcgatcgtttgaatatcggtttcgattgaaggcaggctgcgctgcctcccagagttcagatcgatcaggagttccaatatcctgcgcagaatggtctcctggatgggtgcaaacttgtgctcggagcggctgacaatatccatcaattgagaagcctttttgaacttgccactgcacatgtggaccattacactatggggcatttggcctgtttttttttacaaaaatgtgtttttcacaagtatgcaaatttgctgtattttagtattagtatattggaaatactttaaactgttatgttacagcccgaaaaagttaatttaacagcgcatcattataataacagctgttaaagtcagctgttgcgagcacataccacgtggctgcattgcgcgcaaaatttagcttccaccagaagtcattgaaatttaagcttgcgaatttgaacctgataaaaattcttcagactctactgattgtgaagaggaagacggttatgaattatacaatattaaaattaaaaataaactttaaaaatatattattaaaaaaaaaccaaaaaaaaaaaaaaaaattggggcggagttggggcacgcccacttttccaaaatattcctggaggcatgtgtaacgcataaaaaaaattcatccaaatatctccaatagtttaggaggtattaatttttgtaaaaaaaaacaggccaaatgccccatagtgcattattaggtccatatttttgagctgctgacttgtcagcctgattctccgagaagacattttgaaatgtggaagctttagttttgggatctgaaactgggttctgcagtatgtttttgtatcggactttgttggctggcgctactttgataaggcgcaacggtattcattgccatgctttagttttgagaatcaacaaatttgttgcaggcgaaagagtaatcaatatacatagttcgttaaattcaaatctgccaggacttgttcttttcgtttacatgatacaaggtctggtagctgcacataatatatgtatataatatatatatagaacgagctgaataaatggagtaccccattggcatccaacggcacccttatattttcctcttctgtgtattttcagctcgcctattcagtttttgagctttcgtttgctttattccacccaaaaaaaaaaaaaaactctt

SEQ ID NO: 35441 - DNA, 297 bp, DROSOPHILA
atggtccacatgtgcagtggcaagttcaaaaaggcttctcaattgatggatattgtcagccgctccgagcacaagtttgcacccatccaggagaccattctgcgcaggatattggaactcctgatcgatctgaactctgggaggcagcgcagcctgccttcaatcgaaaccgatattcaaacgatcgcacggcttaatcaactgaagttggaggaaatggtgataaccagaatgggaccgactctccaggcgcaggacaacatcatcgaaaatgcggtggaagaggtcagcagttaa

SEQ ID NO: 35442 - protein, 98 aa, DROSOPHILA
MVHMCSGKFKKASQLMDIVSRSEHKFAPIQETILRRILELLIDLNSGRQRSLPSIETDIQTIARLNQLKLEEMVITRMGPTLQAQDNIIENAVEEVSS

SEQ ID NO: 35443 - DNA, 2198 bp, DROSOPHILA
ccaaaattggaggggcggttgagaaaggggcctggtgcatcggtggccggtggtgagggaaggggaaagggggagagggggaaggggggatcggggaccgggctggcaagcctttgcaacatgttgcctttgccctcttgtctcgctatattgtttcgacggcatgcgcatcaatttctagacaaattcagcacacaccaacttcaaaaggaccgacagaaagtattatgtaggtaggtacgtacgtacgagttgctacgagagaaggagcccccaaaaaagcagcgaatccagccggtggttcagtaggttgctctggctgcgcttcatgtgtgcaatatcaaatttgaaaacacaaacacaacacggatggccgcagacacagacggaaaccagaaggaggtgtggaggtaatggggggggcggacgccaaggattcccccggtgcaggcgcttaagaagtttcagacatgaaatcaatttgtcttccaactcccacgaaaacgaaaacgagccaagaacggcaaatgcaacagcgaggggaatccccgatccacggccccaaaaaacggaatgaaaagagccagaaaactgctgcgggaaaacagaggcggttcccagataccatcaacacgaatcgggaatacgcttatccaatcgattcgagtatacctgccattcggttgtatgttaaataaaggggaaaataaggaagagctcgaagtgtgctcaatacaggtaatcttcagtcgttactatcatcttgactgtaaaccactaatagctgctttcgttacgtttttactacaatagtttgagatctgcttggcattcaaggcagaatggataaaatatttctgcatttaaatatacatatatataaatatatatatatatatccctaaattgttaatctgtaatcatatagcacatgataagacacacagttggaacggtatcatactagtttcttggttattaaataggaactactattgtattacttgaccgaatactgtggatgccctgccatcgatggtctttcaatggcatgaaatgagcaggcagcacggaacagatccgcattcgcattcgcatccgcatccgcttttacatccggactcacatcctcaagaccatctgcatccgtaggactcgagtcgaagtcgtagtcgtagtcagagtcgaatgcagtcatgaggcaactcgcatgctgggatccacacatgtgaaacggtttgtggtgttgcaataacttgtattttaagtttactcactgctgggattcaaaatttaatttcatagtgcgatgcgttgttattattttgcataataacatttctggccccagttcactcaaccgagctcactgatggtttgaggttggaaatgggcgtttgggagcttttgtagtttcgccagattcaccagtttcgggagtggaaactcgaaattggagcttggcctgcggactgaccgattgtgcaatcgaatcaggcctattagaccccgtttggcgcattagcagtacgttccggatggatatggatgcggatgcgaacgaacgaggatgcggatgatgcgaatgaagatgcggaggtggggcaggcgatcccatgaccatgcgaaccggacttcgacaccagacactaaatgcctcatcagcattccggtgagtgtttatctgagggtgtgagtggatttgcgttcgggttaatcaaaatgtgaccgatggcaacgacagctgaccgcaaatcaagggaacgtccgggcggccaattaccccaataatcagaacccgttgggaaatctttctaatcgtccttggcagcagtcctgtggactgctacttggtatagataactactagctaatagctggcatgtgaaaaatcagctaatatctatatccgtatcctttaagctctcattaaattttttagcacacgaataagaaattaagtttagatgaactgatggtacagaaaatgtaatttatatctgaagagccatatatcaatcaagccataattgaagcgaccgccaattcttgaggttataacgattatcctgttccctccgattgaactcagaaatgaatccagacatctagagctttgtatcgcatcctgcgagtccctgtcgtacacccatgctctccataaagctaccacataacggcagccacataggaaaagt

SEQ ID NO: 35444 - DNA, 198 bp, DROSOPHILA
atgactgcattcgactctgactacgactacgacttcgactcgagtcctacggatgcagatggtcttgaggatgtgagtccggatgtaaaagcggatgcggatgcgaatgcgaatgcggatctgttccgtgctgcctgctcatttcatgccattgaaagaccatcgatggcagggcatccacagtattcggtcaagtaa

SEQ ID NO: 35445 - protein, 65 aa, DROSOPHILA
MTAFDSDYDYDFDSSPTDADGLEDVSPDVKADADANANADLFRAACSFHAIERPSMAGHPQYSVK

SEQ ID NO: 35446 - DNA, 1713 bp, DROSOPHILA
tatatatatatatatatatataccttgctgtatggctgtatggttcactgggcgtatgcgtaatatatataacaggtcgagtaagcgaaccttatggcgaatttaatgtgtatccgaaatgttttcgcttgcagacggccaccttggaagtggtcatcccaccggacattataaacgaagagacctccggggacatgatggtcccagagggcggatccgccaagctcgtttgccgagcacgtggtcatccgaagccgaagatcacgtggcgacgcgaagatggcagggagattattgcccgcaacggctcacaccagaaaacaaaaggtaagtgcaatgcatcctactcacggacttgcaaaactgaattattgcatttaaaaataaaaaatttgtatgcttcctgcctgattaacaatacaaatatttaaagccaactgcagacgaaccgaactacacatttacacaataatttaaacatatggagcccattttaaagcaaccaccacatattgttatgtactcacccctataccacaatactcatttcctcacccacagcacaatcggtggagggcgaaatgctgacgctgtcgaagatcacgcgatcggaaatgggcgcctacatgtgcattgcctccaacggagtgccaccgacggtgagcaagcggatgaagctacaggtgcactgtgagtaccactacagtatataactatccatatatgatacatgataaatgggtagcgccacctgcagccgttggccaagaaaatggactgatttatggcagtcgaaggcagctaatgccgcataataatcataatggtaacatatagccccgttcggatgtgctgtgctgtgcttgttccagaagggggctgttccgtatcggagtcgtatgtatgtggcagaactataaccggaagcggaagaggaacaggaacaggaacagaaccgcagcaataacgcagcggcggcaactgcaagtgtttccgtttcgatatccggcagcttccttcacgtggccgacaaactttccaaatgcattagggcgccaaacttgtggatgttgggtcaaagggcatttttccctacgaatatggggaaaggggaacgggaaatatggaaaacgggtgggggggtggcgggtgtgaagtgtttcttggggtaacgcaacgtcacgtttctgcagtaaaactttaaagttgtgtgagttggcgagtttgtgtgtcatgtgaagtggtaattgttaaggttctgcagttctgcactatccctctgtctgcccacataaaaaaaccccctttaagacctcttaaaaaaccccccctgtaactgttttaccttcccgcatcaaagttaatgaaatttccaaaaggggcaaaagttcaaacgacgacaattgggcaagcgcaaaagcaagaggaattgggagaacgcagaaaaaaaggcggaaaaaggggaaaagtacgggaaaatgaaggaaagccgtaggggaaagcagaagagggacagcgaagaatacctagaaccaccagcttctctgaaaacccaaaagattgtatccgaaaattatattgacacggtcgtgaatatgtggcgtcagtttcttcagccacacacacacatatgtacttacttttgacgcaaaaattaattttcatttatattttttttttttttatctaagccgcaaatttctttttcttttt

SEQ ID NO: 35447 - DNA, 285 bp, DROSOPHILA
atgatggtcccagagggcggatccgccaagctcgtttgccgagcacgtggtcatccgaagccgaagatcacgtggcgacgcgaagatggcagggagattattgcccgcaacggctcacaccagaaaacaaaagcacaatcggtggagggcgaaatgctgacgctgtcgaagatcacgcgatcggaaatgggcgcctacatgtgcattgcctccaacggagtgccaccgacggtgagcaagcggatgaagctacaggtgcactgtgagtaccactacagtatataa

SEQ ID NO: 35448 - protein, 93 aa, DROSOPHILA
MVPEGGSAKLVCRARGHPKPKITWRREDGREIIARNGSHQKTKAQSVEGEMLTLSKITRSEMGAYMCIASNGVPPTVSKRMKLQVHCEYHYSI

SEQ ID NO: 35449 - DNA, 2314 bp, DROSOPHILA
cagtggtcctggatctgtatgctgaatctcaaaccttctagcttttatagtccctgagaactcgatgttcacacggacagacggacatttggacagatactgatcgtctattgaacctgatcaacaatatatacactttatatagtcggaaacgcttccttctgcctgttatatacttttcaccgaatctcgtatacccttttatcaaaggcactagaatattcaacgtctaggtttttcaacaatacaatgctcctattcataattctcgagtattagtcttttatttccagttaaaacgttaatattatgacctggtcaccgtattctcttaaaaatgtttggggctggctaacatggaaggtatacgaaggaggaaagcaatacgaatataaggaaatattagcagagctatttaagagatttttttttattggagcgagatttccttgagctacgtagattccttgtaccagtctatacaggaacgtatttatgaagttattgctaacgaaataaatgacatttttattttttatttcaaattaatcaaatagtaatgccaactcgtaatttaaataaaaattcaaatacttttcttatataaatgaactagtcaaagtgcgcccattttaatgaccgaaaaaattcgccttatttttttttagtggttttaagaaaatgtttgaaaaacacaattttgttaaaattgtataatcattacagtattatattttaaatataattaaatatgaaatgattttggctttttaacttcttttctatcgtcatttaattaatatatatgaagcaaagttgtatgaaacctaagaccagcagtttatattcttgtccctttttaattagtataatttattacagattgcttgggctctcaaagaatgttaccatctaccatcttgcatacgaaaaatattaaaaatgcaccttatattgtggctagcgagtcaaggggggggggggggtttgtggcaagcccttatggccttttcaactttgcagagtaaccggtggcagcgacatttattataatctggacagaaaacaaatgattcgtttttccgggcaagacagttggagagtcggaacccgctgtgaactcgccgcactcacctgcatcttcatgggatccgtgttgacctgacacatgtatttgccggcgtcctccattttgacgccgcgtatgttgagcgtccatgtgttgtagtcgttgtgctgcaccgataatcgatcattgttggttatcacgtgctcgtgaatggccagaattgccttggcatcggccttaatccaggcgacctgatggtgccagtttgccaaatggaaacgggggtgacatttgggcacaatgagcacaatggggggaaatccagggaaatcgagggaaatcgaggaaaatcgtggtaagtcggggtaaatcgggggaaatcggggaaatggaagtggggataaagggatgaccattgttgttgttgagttgatgacagcgccggtttggatgtccatgcgtgtgtttttgtgtgtgtgtgtgtgtccgagtgcgttgatgaagacagcggttggccgttgttgcatgtcaaagtgttgtttgtgtttgtgtttcaggatatatatgaacgtgtggatgtgagcggacgccagatgttcggaaattgcagtttgatatccacccacaggaaaagtttcgaggacattatatttagttaatgccattgtgggcaacattcgcgcgttgtcgcgttgttgggttgtttggttacccgagcgttaagattgtccaatgttggtgtcgatttcaacgaacgcaggttcaccggatcatatggttattgaattaacaccaggttgagttgggcatcgaacattcgtcggttaagttaagtacggttgttgaagaaacaccaaatgtgttgttgaatattgtgaaatgttagcattgttgttttttcaatattatttattgtttggggtacacggtttattggagtgttgagcaggggtgggatttaaattgtgtgacggatttcccaaggttggccatttgcaccagtgtcgttgcaatggattcaaaggaaccggcagtagtgttgatagtcagtttcgtttcagatttgaggtcgttgttgtattgtgttgttggagtagcattgttattggtatttttgttgttgtcatcgtcagatgtcagcgcaatttgacgccatttccatttcgcacaggagcagtggaggagttttttgcaagtttttggttttggggtgggatgggtgggttttttttgggttggggggtt

SEQ ID NO: 35450 - DNA, 447 bp, DROSOPHILA
atggacatccaaaccggcgctgtcatcaactcaacaacaacaatggtcatccctttatccccacttccatttccccgatttcccccgatttaccccgacttaccacgattttcctcgatttccctcgatttccctggatttccccccattgtgctcattgtgcccaaatgtcacccccgtttccatttggcaaactggcaccatcaggtcgcctggattaaggccgatgccaaggcaattctggccattcacgagcacgtgataaccaacaatgatcgattatcggtgcagcacaacgactacaacacatggacgctcaacatacgcggcgtcaaaatggaggacgccggcaaatacatgtgtcaggtcaacacggatcccatgaagatgcagattataataaatgtcgctgccaccggttactctgcaaagttgaaaaggccataa

SEQ ID NO: 35451 - protein, 148 aa, DROSOPHILA
MDIQTGAVINSTTTMVIPLSPLPFPRFPPIYPDLPRFSSISLDFPGFPPIVLIVPKCHPRFHLANWHHQVAWIKADAKAILAIHEHVITNNDRLSVQHNDYNTWTLNIRGVKMEDAGKYMCQVNTDPMKMQIIINVAATGYSAKLKRP

SEQ ID NO: 35452 - DNA, 3373 bp, DROSOPHILA
tatttaggcacatctttctatccgttactcgcagagcaataggcatacttacataattccatattcgtagccctttacattcaccgccaaatgttactgacctacaatgtacaatatgtacacctgataatatgggttacgacgattcattctgcttgctaagaaattttaaacgaacctggtgtaataataaactcttcgagtggagggtgtaaaacgctttaccctatccacatgaaaagacgttttccctctgtactcaaaaggttgtcgctctttgttgcctttaaaaatcctaccgccgatccttcgttcgctcctccgttctggcaataaaaaagttggcgtcgccaaacaaaggcgaggcagctcgtcgtctgaagtccctggagccaggtccccggagtcctggtgctctgtcgactagttgccacactgggcatgcaactctctgtcaatagataatacagccacaagatacaagatgcaatatacaagctaccagaaaccagataccatggcaaatagtgcaatatgtacgtacgtttatttagattctttattttgacaatttgacaatgcagaaaatgtgaacggaaatggagacaaacaagcattagaaaggcaaagaaaggagtgcttaaagtgaaagacctttattaagctaattagagttaatcggtgttccttttgtggataactgagtggcactctattgcttactatttggatggggggaaaagggaaattaaatcgatcggtgtacttttcgttcgatatatgtacatatatactcttacctattatttgtatttaattactgtgaatcaaatatattgaattatacaatcattcgatataagtatagtgaaaataaaagaaattttccgtgaagcatatatgtactactaaattcctaattttgacttataacttatttcagcatccccatcaaagtaaacacatgagaagtcatgctaatggaagctaggacagtattatgatgaacttgctggtggtgaaggagagcggcgagcggatcgccgacatcagctgtagccaggagcatactaccaaattttcaccaaaattgtcccaagtagccaaacatcgcaagctggcgcagctcgagattgcatcaggttcgggattggtgggattaggaacgggaactggtaccggaagtgggtgtggtccagctattcggtggcagctattgctactgctcttgctcggtaactgcattggtaagtgatgacagatcctgaaatcaacgagctctggcgctgggcaaatgccgattaatgttttcgctttgcttccgttattacgataatcctgcactatcgaatggctagaatatggtaatcgaccacttgactttaatcgatttacctgtattccagctttaactacgttatgcctgcttgattttcccgtttaggtcgattgcagttatcgacctaattggtttgtttagcttaaccatattgatttgcctatcgttaacagaccgctcgctattgacactaatccactggcacagaagcatatacacggagaaaaatgaaacaacacttttttaagacacggctatactatgtaaatagaatacccgaatagccgtacaaaaattctatggatttctttatgattctatggcattaacattgcgttgacgaaacatttcaagtcattttaaaaagacaaaaagaaagcgggatttccctttttgtgatgtttgttaaattggacatacatttttctcctctgtgcactattgctcacacgcacacataaacatccttacaacttacacgcacgcacaacacatagcatatgtaaatttgatcgaaattgtgttaattgttcaatcaatgtcttctcttcatggaaatgtcaattgaaatgaagatcttaccgtttcgaacaaaatctcctcagtgggcgccttcgagccggactttgtgattccgctggagaacgtgaccatcgcccaaggtcgggacgcgaccttcacgtgcgtggtgaacaacctcggtggtcatcgggtgagtggtgacggttcgtcagccccagccaaggtatgtatcggtttcaagcgcagcgttgaattctcaacttccgttccgtttcgattagttccggttcgtttcgtttcgtttcaactcctttcgttttgtccccgatctctttcgttctgtttgatttgtcatttcaagtgcacaatatgcatataactaatacagttttaacgattttccaatctaaaaggcaccaataacaataacgagttcccaactgcaccacaattatcgcaattatgtaaccgttaagcgcacctattcctattatacgcatatctatagttaactaccagtataacaatcatagcaccatacaatatttactatatatatagtacccacaaaaaatatgtatatagagcactctgcatattaaacgcctcgatgcacagcaacagcaacagcaacagcaacgactgaggcaaaaggaccaaacaataacagtagcgaaaatttcaacaatcgcattgaatcgatttcgaatcgatttgaatcgcatcgacgaatcgaacagcggcatcaaaataaatttaaataaacatgacacaatttgtgcgatgcgaaaccgaaaacgaaatatgcataccttattgtttttatcatcgtattatattattattagcactcacatttaatttataacactcacaaagcggggagtccggggacccggggatccggggatccgggttcccgactccggcattgtgccaaagaatttaagcgataaaagagcagcgcacaaaaactaccagctgaaagcgattgttgttaacaacaataaacaatcgtgaatcgttaaaacacaaaaaaaattaatattacaataataaatgcgaaatagcttttattcagcgcatcccagggggctgtacttacatacatacatgtacatgtatatgaggtcgcatcgcactgcgtaaacaatgaaaacaaattaagtcgttgtatcagcgaggatttaatctctttaaagcctggttatcccttaatcgcaaaagtcattcgttctaagcgtacaacatgagattttatatgattgttaaattccatgagtaggcatacgaagctcgattggtaattgataatttttacttacaaatgcatacaaaaattaaaaggagtttcaaattatctaagcatttcatgtccattttcatgaacaaagttcatgaattcttttgtaatattcattaaatacctattacctagagtaatcgtatcgaaatcatcgaagagaaaatattcccgtgaaaccaaacaacaactttgaatatgaccctgtc

SEQ ID NO: 35453 - DNA, 423 bp, DROSOPHILA
atgatgaacttgctggtggtgaaggagagcggcgagcggatcgccgacatcagctgtagccaggagcatactaccaaattttcaccaaaattgtcccaagtagccaaacatcgcaagctggcgcagctcgagattgcatcaggttcgggattggtgggattaggaacgggaactggtaccggaagtgggtgtggtccagctattcggtggcagctattgctactgctcttgctcggtaactgcattgtgggcgccttcgagccggactttgtgattccgctggagaacgtgaccatcgcccaaggtcgggacgcgaccttcacgtgcgtggtgaacaacctcggtggtcatcgggtgagtggtgacggttcgtcagccccagccaagcgcacctattcctattatacgcatatctatagttaa

SEQ ID NO: 35454 - protein, 140 aa, DROSOPHILA
MMNLLVVKESGERIADISCSQEHTTKFSPKLSQVAKHRKLAQLEIASGSGLVGLGTGTGTGSGCGPAIRWQLLLLLLLGNCIVGAFEPDFVIPLENVTIAQGRDATFTCVVNNLGGHRVSGDGSSAPAKRTYSYYTHIYS

SEQ ID NO: 35455 - DNA, 2535 bp, DROSOPHILA
atatttgttcccattttgcaattccgtttgccgccgccgtcgccgcttgccgcgttccccctgaaatgccatttttcttggtccactattttctttttattgttatttgcatttgctgtcggcttttgtgcactttcttacttttcttttcctttttttgcagactgcactccaggtcgaaggggcggataagcgcaagtcggcccagtttttatcagttttttctgtttccgcattcggtgagcctaaatatgttttgtgtcctcgtttgaatgcccagctctgcagtggaaataaagccgcacagtaactatgcgactgcgtcaagatcgtagatcgcaagtccagaaaaagattgccaaatatagattataaggccaacccctttaaataattatggtcaactataaagtataaggtaacagatttcagcagcctagttttaagacttttctcatcttgcaacagaatctttatcatcttatcatccttttacttcaacaaaaaaatggaaataagatttgatttttaacacggtgttagacggactttactaattgatagatactctgacccttacttactaaagtacggcgacaatctacttacccaatttaggggatacaaaagatccactttgataagggctgatgagagcttaatgggggaacagagccaagccacagtgattactcgcatccacgacccgccgccacgctgcaacaaaaaccagacagaccgagaatggggaatgcaacaatttttatttgttctcgcttggccatgtcgctcaaacgttttggttgacatcccatcaacgtggctgtctggatttgggtgtttggtatttggaatttggcccctggctgacttctattggcggcacacacacatatgtgctgctccagtgtgtgagtgttcgggcattcattattgctccctccatttcccactgtatctgtatctgtatttgtatctgtatctgtatctgtatctgtatatgtatctgtatctgtatctgtatctatatctgtatctgtatctgtatctgtatctgtatctgtatctgtatctgtatctgtatctgtatctgtatctgtatctgtatctgtatctgtatctgtatctgtatctgtatctgtatatgtatctgtatccgtatgtgtaaaagtatctgtatctgtatctgtatctgtatctgtatctgtaaaagtatctgtatctgtatctgtatatgtatctgtatctggatctggatctggatctgtatctgtatctgtatctgtatctgtatctgtatctgtatctgtatctgtatctgtatctggatctgtatctgtatctgtatctgtatctgtatttgcgcctgtatcttcctgctgtttcctccgtctcggttttatttctgctgctgcattgtggcacttattaaaaattttctggtattttttctgggtttttgttacagcaggaaccttggagcctttgtctgtccaccaaaatcacccacagtatgggtgatgggcggtgggtagtgggtggtaagcggtagttggtaggtggtgagcggttgttgctttgcgagggagtggggttgtggtggcacggctagaaaagagaaggaatcttcttttgtttatttatcttttcgctcggtttcgaataacaaatccttttggctttacacatattatgtggtggcagccgagcaacacagccgcagcccccggcaagcccactgtcattgtgcaacgtgcaggctgcagccgttgcagttgactccacttttgtcaaacgtattgttttaagctgaaccgagcccctcattcgcggtgaggggtggagagcccaagccgatcccaattcgttctgctgccggttttttcttcttttcactcggcgctttccccgtggtttccactgcgtgtttctttcctgtcagtccttcccttttttattgttgccgcagattgtcatagatacagatgctaacggtctgctcttccccctcttccatcatttaaccctttttttctgcgcctctgcccgccttagatacattttattgtttttgctgtggcgcttcttcatcaatcttggttcttttttatgctttctctcgagggacgttggatgaggggggcggaagaggggataggcagatttctattgtcattgtcgcgtttgcctcgcatctaacaacaatttcgcattcattgttgttgtctaactgcataaatgtcagcatcaggccattgtctcagctcgcaagggctgcgctggttcccaaactcattacaacatcatcgtcatcatcgttactaccattatcatcggcgaggtgcgcgcttagcaaccacaatatatcttaaagacttcgaccttttagctttatatcaaacattgttaacaagtcgcgcaaagtcttaagttacagatacttttgggaaaatatattaagaactttaacttttacatatttaaaaatgatatagaatactcgttctttctatcttatatttttcctattacctt

SEQ ID NO: 35456 - DNA, 225 bp, DROSOPHILA
atgtatctgtatctgtatctgtatctatatctgtatctgtatctgtatctgtatctgtatctgtatctgtatctgtatctgtatctgtatctgtatctgtatctgtatctgtatctgtatctgtatctgtatctgtatctgtatatgtatctgtatcccaggaaccttggagcctttgtctgtccaccaaaatcacccacagtatgggtgatgggcggtgggtag

SEQ ID NO: 35457 - protein, 74 aa, DROSOPHILA
MYLYLYLYLYLYLYLYLYLYLYLYLYLYLYLYLYLYLYLYLYLYLYLYMYLYPRNLGAFVCPPKSPTVWVMGGG

SEQ ID NO: 35458 - DNA, 3692 bp, DROSOPHILA
gaatgaatgccaatggcagctgaagctttaacgttgttgaatgtgagaggggtgtatgaggcggaggaagtgcacaaaacaactcggcaaaatcaacatgcaacacacggatacagatacgcgcccagatacacccgcagccgcacctgctcacactcacacacacacacacagcgacacaccgagcacattgcactgacagttggagctgtcaaatgtcgcaagtgtatttgaaaaacgcggcggcgaaatgcgcaaaacatttcgcctggaaatacttgcgtgtgcacccgccgcatactctccgttctttgcgaccgtttttggtgtcctttccaggggattttcgcgcaaaaggtgggctccccaaaaaggtgacacagatgagtggtccacttcgaccaaagtaaccgagttaggcgcaccgaaacaactagttctaaatgcgctgatttcttgttttgttgccggacttttctggttttgagtcggctttcattgcttgagttagaaggaattcgattatcggttattttaatttcgttgatgaatgtgggtggcattgggaatttcgaaagttttttaaacttaaaagtcggcatttattttttagcatgcactagtcgccataagtgttttcacaaaataaacgctgcatgtatttacaacacaaaaaatatttgtcaaaatgatacaaagatcggaatactccggatccaaaaatcttattcatagcaagccatgtgtttttaaacgatttggaccatagaattcactctttgtagattgattccaacctcatgtccccaaggcaaatacttgggagttgcaaagccagagccatcgcgttgtgcaaacaatgcgattgtcgctatgcaatcgtcctcggtcaattataccggatggctcacgataaggagtggcgtacactgcgtggtgcagaccacgtttcagaccaaagttgtgaagcccgtcagtcgattccttcgatgccggcgacatgttggcaagcttgaaccgtagcactggcctttccgccgaactgctggatctctacggcctggtggttcactttctgctgagtggagagcacaccacactggtatacttcaatcccgcaggactcgactgcagttggggggtcctgtggcagcggaacctaactgctcatccgcagatcgtgtggcagcgcaactattcatacccggacctttactatcagtttaatgcgaaactcttggtgctggcttgcttgccgatggactccagagctgcaattcaactagagatcctagccaatagcctaagccacctgcggacggtggttcgattgcttatcgaagtggcaggtcctgatcaagtaacgctggccaggcagtatctctcgttttgtctgcgccggagcatgctgcatgtggagctgtatttccgtgactaccaccactccctgatcctctactccttccgagcgtttcccagtttcgagctggtaatgcgttggatttcagtcgggcaaggcgtgaaattgtttctccataaattggatgatctgaggggacatcgtctgcgtgtaattccggatctctcgccgcccaacaccttcttctatcgcgatgccaggggcgacaaccaggtgaccggttacctgtgggacttcttggccacttttgccggtcggcttaatgctggtctggaggtagttcgtcccagttggcgggcaggttcggcctctgatagttcctacatgttggagtactccgcgaagggcctcatagacgtgggcctgaccaccacactgatcacgaagtggaatctctgggccatccatcagtatacctatccgctattggtctccagctggtgcactatgttgccggtggaaaaaccgttggcaacaccagatctgttcggccgaatcgtgtgtccaacgttggcgatgaccctgctactcatcatcctcgtaacctggctggtgttcaggcaactgcgttgcctgacacgtttgaagaactcaagaccggcacggatcgtgccccatctgctgaccctgctactgctaaccacctgcagtgcccaactgctatcgctcctgatatttccgccctaccacgtgagaatagccagcttcgaggatctccttcgcggtgaccagaagatcctgggcatgcgaaacgaattctacaactttgatggagctttccgggcgcggtatgcaggtgtattttacctgattgacgatcccaacgagctgtacgatctgcgcaaccacttcaacacaacgtgggcctacaccatgccctacataaagtggctggtgattaaaacccagcagcgacacttttccaaaccgcttttccgttggtctaaggatctctgcttcttcgacttcatgcccaccagcgttattgtggcccccgattcgatttactgggagtccataaaggactttacctttcgtatccaccaagcaggtctaatgaagcactggatccgaaagagcttctacgatatgatcaaggccggcaagatgagcattaaggactatagcgatctggagactcttaagcccctgaatatcggggacttggagatcgtctggcgggtctgtggagcagccatcgcagtagcgtctgcgattttcataatggagctgttgtacttttacattaacgtatttttcaatagcttgtaaggtatttcttgaaataaatgttagcaaatgtttagccagaaaggctttaggtcccttcatttaattatatattcgaagagtgtagctattaatgcaaattgtctttactataataataaataataaatattttctttataatataaaacaatatgtaattttcttactaatgaacacttcaatatatgtatgtacaatatataagtttcattgctgtcgtaaaatgctattaatatataaaacttaaatgcgcagtgtaattgccgctacaaattgtatttttgtcttacaataaatattattcattgcaaaaacttttgcattcagaatccttggaaatctgttgggttaagcctgggaaactacaatagttaaagttcatggggtaaattggcttaggcaaataatatatgggactgtggaacaagaaaacggaaagaaaacttgacgtcgagatacagtaaaattagctctgtttgttttccttcaaacgcaacgaaaagcgattaagtgaaaagttcagtacgcttcggaaaagcggcgtttggcggtgaatgtcttctgctcgatttgctggcagcggcagcattcaaattgtgtttgcattcgtctggaacagagggaaaacttttattctgttttctattttactttactgctggtgcacgctcaaggtcgtcggggaaaaggcggcgcgtcaattggaaaatggccagccaaaaggtcccttaatgccgtactttaaattggcgctttcttgcggccacatgccgtacatatgtatggttcatacatacgagtacagcagccagctctgtacattaactgccgatattcaatgtcgaccgccgtccaagttctcgtccttgtcgtccttgtcgtacttgtcgccttcgtcgagcttctcctcccccgtgctgccggaagtggcgatgataacaccccagaaaggaaatgaacactttttgggcaatggggcgcgatggagttactgcaaaca

SEQ ID NO: 35459 - DNA, 1692 bp, DROSOPHILA
atgttggcaagcttgaaccgtagcactggcctttccgccgaactgctggatctctacggcctggtggttcactttctgctgagtggagagcacaccacactggtatacttcaatcccgcaggactcgactgcagttggggggtcctgtggcagcggaacctaactgctcatccgcagatcgtgtggcagcgcaactattcatacccggacctttactatcagtttaatgcgaaactcttggtgctggcttgcttgccgatggactccagagctgcaattcaactagagatcctagccaatagcctaagccacctgcggacggtggttcgattgcttatcgaagtggcaggtcctgatcaagtaacgctggccaggcagtatctctcgttttgtctgcgccggagcatgctgcatgtggagctgtatttccgtgactaccaccactccctgatcctctactccttccgagcgtttcccagtttcgagctggtaatgcgttggatttcagtcgggcaaggcgtgaaattgtttctccataaattggatgatctgaggggacatcgtctgcgtgtaattccggatctctcgccgcccaacaccttcttctatcgcgatgccaggggcgacaaccaggtgaccggttacctgtgggacttcttggccacttttgccggtcggcttaatgctggtctggaggtagttcgtcccagttggcgggcaggttcggcctctgatagttcctacatgttggagtactccgcgaagggcctcatagacgtgggcctgaccaccacactgatcacgaagtggaatctctgggccatccatcagtatacctatccgctattggtctccagctggtgcactatgttgccggtggaaaaaccgttggcaacaccagatctgttcggccgaatcgtgtgtccaacgttggcgatgaccctgctactcatcatcctcgtaacctggctggtgttcaggcaactgcgttgcctgacacgtttgaagaactcaagaccggcacggatcgtgccccatctgctgaccctgctactgctaaccacctgcagtgcccaactgctatcgctcctgatatttccgccctaccacgtgagaatagccagcttcgaggatctccttcgcggtgaccagaagatcctgggcatgcgaaacgaattctacaactttgatggagctttccgggcgcggtatgcaggtgtattttacctgattgacgatcccaacgagctgtacgatctgcgcaaccacttcaacacaacgtgggcctacaccatgccctacataaagtggctggtgattaaaacccagcagcgacacttttccaaaccgcttttccgttggtctaaggatctctgcttcttcgacttcatgcccaccagcgttattgtggcccccgattcgatttactgggagtccataaaggactttacctttcgtatccaccaagcaggtctaatgaagcactggatccgaaagagcttctacgatatgatcaaggccggcaagatgagcattaaggactatagcgatctggagactcttaagcccctgaatatcggggacttggagatcgtctggcgggtctgtggagcagccatcgcagtagcgtctgcgattttcataatggagctgttgtacttttacattaacgtatttttcaatagcttgtaa

SEQ ID NO: 35460 - protein, 563 aa, DROSOPHILA
MLASLNRSTGLSAELLDLYGLVVHFLLSGEHTTLVYFNPAGLDCSWGVLWQRNLTAHPQIVWQRNYSYPDLYYQFNAKLLVLACLPMDSRAAIQLEILANSLSHLRTVVRLLIEVAGPDQVTLARQYLSFCLRRSMLHVELYFRDYHHSLILYSFRAFPSFELVMRWISVGQGVKLFLHKLDDLRGHRLRVIPDLSPPNTFFYRDARGDNQVTGYLWDFLATFAGRLNAGLEVVRPSWRAGSASDSSYMLEYSAKGLIDVGLTTTLITKWNLWAIHQYTYPLLVSSWCTMLPVEKPLATPDLFGRIVCPTLAMTLLLIILVTWLVFRQLRCLTRLKNSRPARIVPHLLTLLLLTTCSAQLLSLLIFPPYHVRIASFEDLLRGDQKILGMRNEFYNFDGAFRARYAGVFYLIDDPNELYDLRNHFNTTWAYTMPYIKWLVIKTQQRHFSKPLFRWSKDLCFFDFMPTSVIVAPDSIYWESIKDFTFRIHQAGLMKHWIRKSFYDMIKAGKMSIKDYSDLETLKPLNIGDLEIVWRVCGAAIAVASAIFIMELLYFYINVFFNSL

SEQ ID NO: 35461 - DNA, 3112 bp, DROSOPHILA
caagaaccgaacggttttatttaaaacaaaaaaaaacaataactttacgcatacaaatataaaataatatgcactaagccggcataaaggacaacagagattcctctgccattcaaatacctataagagaatagatttttttagacaaaaaccattagttttttcggctttttatatatttactttattaaatattgtattaggttacaaaaatgtacataagtaacattatcctacctataatgtatctcttaattttgagcactttggttactacatatattaaaagatgtaatataatatattaatatacatacactatagttaattcacactgctataatattgcagtttaagtaaatttagtattttgaaaaaaaacgagttctgggatttttctccatgtttgacaagtataagggaggttatataataacaattaatatttaaaaatatagttaaaatttgattgtttataccaacgaaaacaacaaataaagcccaaaccaacgcatatccttaaacaagaaaacattatgcttaatctaccttaacatcataataacctcctaatattttttagcagaattttagaatttgtcattattttgttcattattcaaatacaaaccagctcaacactacttttaaaattctaagtgcattacaaactcttcacagctgttagtagactacacaatgaagtgatatttgataatttgtaataattttacttcttaatgctgaccgatattgtgaaataaaaaaagcttaaaacaaaatcgtattttttatgaactttgctgacacgaaacttcattttataatcagacttctagggaagggcaatacgtccattaatgtttacctcttggagactagcctgggcttcagaaagttcacttcaattacaatcacttttattttgttttgagcttgcattaatatttctttgtagccatgcctcattattttttttatgactatacagcatttcaaattaattcgccttcttgtgcccattctccattgatattttctgaaatattgcacagttacagtttttggaatcacctggcaagaattgaggttgttttatggattgctcaaagcgtgtcttgtacgtatatatggactgtaagggcacgtgcaagagctcaacgatttgtgtgaagtcgacaactgtgaaaacaagatttttactaattaaatatctaagtattatatgacagttgtgacaataaatgtgtttaccatcatctgctgttatgtgaccgtgtcggataagaaaatcaatcaccacaggcgctgaagttgtcttgaaatctgaagtaaaaacgcgctccacacagtccttggctgttagcagctcaaaggcctggacctccccgtcagcgttttgaggcacaaagtcaagtggtagctctaagtcgaaaacatattcggtattgggaaaaagtccttgtcggctttcaaagtaaaatgagacacatcctgcggacaccaaattcttgactaggtcagaaggaattgatgcctcctctgcagcctccttaatggctgtttccttaataccaaagccgactgaaagtccaccgcctaccatattgtcccactttccaggccaggtctcttttgtgtttgaccgctgctgcagccaaatgcatagtccaagcgtcggatgtcttacgtaaccgtttatatcgacgccgtacttgcgcactccaaagagcggagtagcagctcgttccattttaagtagagctctgcagtctgcttttacctcgaaatactcatctctccatccctgtaatgcaggaaaaagtccctcggagcgcaagttacgcaaaaccttttccagttgctcagtgcgctcgttatagtcacgaaaagcaggatttagctctaccaaaccctgtggttgtttaagtatttttaccagtattctatatatagatttgactcacctgtttagtttgctcacaagcacgaatgcaaaatacttcaggatacttttcgagatgttttaaaacatctgacttaataagaccaacttgtttcccctctaccacaaatggacgaatgtcacacttatgaatacctttaataaaaagaaatttataaattacatttttgtctttaaaggctagtatactctgtatttaactctgttgtctttatatcatctttaaaggctagttttagtctgtctcacaggagaatcagaggcttaagaacatgtaaatgaacaattaacaagagtatgctatacacgagtacctttataacaggcagccgtcacttgtgggagaaagagaaagttcaatattatttttggaatatcgatcgataaatacaaattttcgaaaatgtgggctgggagtttcaggcgtggccaaaaatttgtatcataccgatagaaattggaaagacatataataaaatgaaaaaatctcaatatatttttcaaaaatgtgtgagtggccgtttttggtcgttagagtgggagtggccaatttttttttggcagaaatagatagaaatttacaagactaaaaaaaaatatgaaaaaatatcatatcaaaccattttcaaaagtgtgggcgtggttttggtataccgttagaaattggtaagacaaacaatataacgaagaaaaatcaaaacatttttcaaaattgagcgtgactggtttgtgggcgtggcaaaaagcgttttggcaaagcgttagaagagaagtggtcaaatgtgatatttttaatttctttgtcttgtaaatatctattgatttgacaaaaaataccaagggcctcgtccctcgaaaaacggaaaaaatgttcccattctgtttcccaatatcgattcttttaggttttatttctttattttaacaaagggtaaatgaatgctactgtggtaatgtttattgtctaattttagcttcctctttttttatgataacaaattttggcaagaatatatttgttaagatcatttactctagacagacggaccaaagacaagaataacaagatgcgtaacggccacaaattggttttgcgttttgactataactaaacataaacactgacgacatacttcaacgggagac

SEQ ID NO: 35462 - DNA, 799 bp, DROSOPHILA
ttttattaaaggtattcataagtgtgacattcgtccatttgtggtagaggggaaacaagttggtcttattaagtcagatgttttaaaacatctcgaaaagtatcctgaagtattttgcattcgtgcttgtgagcaaactaaacagggtttggtagagctaaatcctgcttttcgtgactataacgagcgcactgagcaactggaaaaggttttgcgtaacttgcgctccgagggactttttcctgcattacagggatggagagatgagtatttcgaggtaaaagcagactgcagagctctacttaaaatggaacgagctgctactccgctctttggagtgcgcaagtacggcgtcgatataaacggttacgtaagacatccgacgcttggactatgcatttggctgcagcagcggtcaaacacaaaagagacctggcctggaaagtgggacaatatggtaggcggtggactttcagtcggctttggtattaaggaaacagccattaaggaggctgcagaggaggcatcaattccttctgacctagtcaagaatttggtgtccgcaggatgtgtctcattttactttgaaagccgacaaggactttttcccaataccgaatatgttttcgacttagagctaccacttgactttgtgcctcaaaacgctgacggggaggtccaggcctttgagctgctaacagccaaggactgtgtggagcgcgtttttacttcagatttcaagacaacttcagcgcctgtgaaaatatcaatggagaatgggcacaagaaggcgaattaa

SEQ ID NO: 35463 - protein, 163 aa, DROSOPHILA
MERAATPLFGVRKYGVDINGYVRHPTLGLCIWLQQRSNTKETWPGKWDNMVGGGLSVGFGIKETAIKEAAEEASIPSDLVKNLVSAGCVSFYFESRQGLFPNTEYVFDLELPLDFVPQNADGEVQAFELLTAKDCVERVFTSDFKTTSAPVKISMENGHKKAN

SEQ ID NO: 35464 - DNA, 4260 bp, DROSOPHILA
ggagcgccgtaagcagtggaagccatcgctactcaccagctgccttctttccttcggagctggttgcattcaaggggcgtggcttacgccaagatcaatgggtgggagaatggccttctttgccctaatggtgacctcatatttgatgtacaactactacacatccattgtggtgtccaagctactgggccagccgattaagtccaacatacgtacactgcaacaactggcagatagcaatttggatgtgggcatagagccaactgtttatacccgcatctatgtggaaacctccgaggagccggatgtgcgtgacctctaccgcaaaaaagtgcttggcagcaagcgatccccggataaaatatggattcccacagaggctggggttctctctgtaagggaccaggaaggcttcgtctacataactggcgtggcaacgggctacgagttcgtgaggaagcacttcctggcccaccagatctgcgagctcaacgagattcctctacgcgatgcctcccacacccacacagtcctcgcgaagaggtcaccctatgccgaactcatcaaactaaggtgggcttaattaattaattaacttgagcagatcgttactgatacattttgcaacccaatttcagtgagctgcgtatgctggagacaggagttcatttcaagcacgagcggtcttggatggagacaaaactccactgctaccagcataatcacacggtggccgtgggtctggagtacgctgctccgctgttcatcatcctattgggagcgataattctctgcatgggcatattgggactggaggtcatctggcaccgccactgcactctgcattgaggtgagcagtccaaggtcattggtaaatgacaagcaatttcggccaatttaaaaacaaataacgcacactgatgacagccaaattgggggactttttcgctatataaaaagggtagtgcaagtgtggaaaaccaaagcgcaatagtcaacaatgcagctggtccagttggccaactttgttctggacaatctcgtgcagtcgcggattggattcattgttttatttcactgctggcagagtgatgaaagtgggaaagaaagttttacccgcttctggtgattgtaaacccaattttcttttgttcaaggtcttaaatttgctcagcagttcatgaagcccatacatcccattctcgtctatcatcagtttgttcaaatgagaggagtgcttaattggtcacatttagaactcagttacatgggtcatacacaaccaactctagcgatttacgtagatataaagtgcgatcagactcaggatttattggaggaggtttgtttaaatacgacgggataaatgcattatttccagatattatttactttcaggctagtcgggagcagatctataatcagcattaccattggctcttggttggcaaccagtctaaattggagttttatgatttatttggattatttaacatatccattgatgcggatgtaagttatgtgaaggagcagatccaggataacaacgactcggttgcctatgcagtccatgatgtctacaataatggaaaaattattgggggtcaattgaatgtaactggatcccacgaaatgtcttgtgatccattcgtatgtcgcaggactcgacatttaagttccttgcagaagcgatctaaatacggaaatagagaacaacttacggatgttgtcctgagaggtaagacattattgcatacataaaacatttaagttctagctatttcttagtggcaacggttgtcacccaacgtccactcaccttgtcggatgacgaacttattcgctttttaagccaggagaacgatacccacattgactcactagctagattcgggttccacctgaccctcatcctgagagatcttttacactgcaagtaagttttatgtaaagtgggaattgtagagttcatattttttccttcagaatgaagttcatcttctcggatagctggagtaaatcggatgtggtaggtggttctgtgggtgctgtagtggaccagactgctgatcttacggccacgccctctttggccactgaaggcaggcttaagtatttgtctgccattattgagacgggattttttcgttccgtttgcattttccggacaccccacaatgcgggactccggggagatgttttcctgcagcccttcagtccgttggtttggtatctcttcggcggagtactttcgttgattggtgtcctcctgtggatcaccttttatatggagtgcaagcgaatgcaaaaacgatggcgcttggactacctaccctctttgctgagcactttcctgatcagttttggagcagcctgcatccaaagttcgtccttgattccacgatccgctggaggcagactaatttacttcgccctgttcctgatcagctttattatgtacaactactacacttccgtagtcgtttcatctctactaagctcgcccgtcaagtccaagataaaaacgatgcggcagctggcggagagttccctaaccgtgggcttggagccacttcccttcaccaagagctacctaaatgttggtttcattccattcctaaccattcttaactgcaaagagcttttttaatttcagtactcaagactaccggaaatacacttgttcataaaacgcaaaatcgaatcgcagacccagaatcctgaactctggttgcccgctgagcagggtgttttaagggtcagggataatcctggctatgtctacgtgttcgaaacctcttccggatatgcatatgtggagcggtactttacggctcaagagatttgcgatttgaacgaagttctatttcgacccgagcagctattctacacgcacttacatcgcaactccacgtacaaggagctcttcagacttcggtaagcccttatgctactcttccaaaagcaagtataactaaattttatgctattcaaaaacatcttaaatgtattaaaatcgtatgtattattttagattccttaggatcctggaaactggtgtctaccggaagcagcgcagctactgggtgcacatgaagctgcactgcgtggcccagaacttcgtcatcaccgtgggaatggagtacgtggctcctctgctcctcatgctgatctgcgccgacatcctggtcgtggtaatcctgctggtggaactggcctggaagcgctttttcacgcgtcatctcacctttcacccgtagtgctttaaaatcgctttaagctgctgtaacaactatattctatttgcacccaggagaaaataaaaacactttgcgttaacttttcgcatcgcaaaattatgcagggcgacgctttcctcacttcctgttttcgcgccggaaaattgcagcacggctcgttaaacggagggatggataaaggggtttgcaaaggacgtggtggccatgtttccatgcgattttcgtatttgcattaaaaacttttcgtgtttggcggttactttttatactccattttcccttttggcaatgattttattcattctcttggagccattttatttgcattttcgtgcacggccacattcgaattgaaactttgttccccaatgccacgtgcgaatgttagataactgattgtgagcctaatacggcctattagaaacagttaacagttgtgtttttcgcatttccccgaatttcaccggaatcagtagtttccctaccgcagacatcgcatgttgccccgagatgatttatggtattttaatgatggcgcatcgccagaggcgacaaatatgggaagggacgtgtcaaagctttatcgaaattgattgtacaataaataagagtgagttgagttcgcacaaatattattaaattgggtgtaggagcaaataaatggtattatatggctgctaatcaaatacgcagtaaattatatattttttcaagattttacatttgcctaagtcaagcaaatagtattaagaacttcgttcttaaatgactcccagtcgaccattaaaatgcaactgacacaactgcttgccaaacagcactcactggcattccggaattcccaaagtattactataacaaattgccttaacaatttgtcaactcaatctggctgtcaacagggcatcgctttggccatagtttatgccatgaaaggactactttcccttcgcagggaggacaactttggagtgactcgaaattgacaagcaattgtgaa

SEQ ID NO: 35465 - DNA, 1836 bp, DROSOPHILA
atgcagctggtccagttggccaactttgttctggacaatctcgtgcagtcgcggattggattcattgttttatttcactgctggcagagtgatgaaagtcttaaatttgctcagcagttcatgaagcccatacatcccattctcgtctatcatcagtttgttcaaatgagaggagtgcttaattggtcacatttagaactcagttacatgggtcatacacaaccaactctagcgatttacgtagatataaagtgcgatcagactcaggatttattggaggaggctagtcgggagcagatctataatcagcattaccattggctcttggttggcaaccagtctaaattggagttttatgatttatttggattatttaacatatccattgatgcggatgtaagttatgtgaaggagcagatccaggataacaacgactcggttgcctatgcagtccatgatgtctacaataatggaaaaattattgggggtcaattgaatgtaactggatcccacgaaatgtcttgtgatccattcgtatgtcgcaggactcgacatttaagttccttgcagaagcgatctaaatacggaaatagagaacaacttacggatgttgtcctgagagtggcaacggttgtcacccaacgtccactcaccttgtcggatgacgaacttattcgctttttaagccaggagaacgatacccacattgactcactagctagattcgggttccacctgaccctcatcctgagagatcttttacactgcaaaatgaagttcatcttctcggatagctggagtaaatcggatgtggtaggtggttctgtgggtgctgtagtggaccagactgctgatcttacggccacgccctctttggccactgaaggcaggcttaagtatttgtctgccattattgagacgggattttttcgttccgtttgcattttccggacaccccacaatgcgggactccggggagatgttttcctgcagcccttcagtccgttggtttggtatctcttcggcggagtactttcgttgattggtgtcctcctgtggatcaccttttatatggagtgcaagcgaatgcaaaaacgatggcgcttggactacctaccctctttgctgagcactttcctgatcagttttggagcagcctgcatccaaagttcgtccttgattccacgatccgctggaggcagactaatttacttcgccctgttcctgatcagctttattatgtacaactactacacttccgtagtcgtttcatctctactaagctcgcccgtcaagtccaagataaaaacgatgcggcagctggcggagagttccctaaccgtgggcttggagccacttcccttcaccaagagctacctaaatacccagaatcctgaactctggttgcccgctgagcagggtgttttaagggtcagggataatcctggctatgtctacgtgttcgaaacctcttccggatatgcatatgtggagcggtactttacggctcaagagatttgcgatttgaacgaagttctatttcgacccgagcagctattctacacgcacttacatcgcaactccacgtacaaggagctcttcagacttcgattccttaggatcctggaaactggtgtctaccggaagcagcgcagctactgggtgcacatgaagctgcactgcgtggcccagaacttcgtcatcaccgtgggaatggagtacgtggctcctctgctcctcatgctgatctgcgccgacatcctggtcgtggtaatcctgctggtggaactggcctggaagcgctttttcacgcgtcatctcacctttcacccgtag

SEQ ID NO: 35466 - protein, 611 aa, DROSOPHILA
MQLVQLANFVLDNLVQSRIGFIVLFHCWQSDESLKFAQQFMKPIHPILVYHQFVQMRGVLNWSHLELSYMGHTQPTLAIYVDIKCDQTQDLLEEASREQIYNQHYHWLLVGNQSKLEFYDLFGLFNISIDADVSYVKEQIQDNNDSVAYAVHDVYNNGKIIGGQLNVTGSHEMSCDPFVCRRTRHLSSLQKRSKYGNREQLTDVVLRVATVVTQRPLTLSDDELIRFLSQENDTHIDSLARFGFHLTLILRDLLHCKMKFIFSDSWSKSDVVGGSVGAVVDQTADLTATPSLATEGRLKYLSAIIETGFFRSVCIFRTPHNAGLRGDVFLQPFSPLVWYLFGGVLSLIGVLLWITFYMECKRMQKRWRLDYLPSLLSTFLISFGAACIQSSSLIPRSAGGRLIYFALFLISFIMYNYYTSVVVSSLLSSPVKSKIKTMRQLAESSLTVGLEPLPFTKSYLNTQNPELWLPAEQGVLRVRDNPGYVYVFETSSGYAYVERYFTAQEICDLNEVLFRPEQLFYTHLHRNSTYKELFRLRFLRILETGVYRKQRSYWVHMKLHCVAQNFVITVGMEYVAPLLLMLICADILVVVILLVELAWKRFFTRHLTFHP

SEQ ID NO: 35467 - DNA, 6597 bp, DROSOPHILA
gttcattgttttacattatttgatcgatgctttgcttagttttctgttttatttcgatttattttatatgccattattttcggtgatttaaattttccataattacatcaacgcgcactttgcgaaaaatgtatagccaactgtgtttttgcaaccgcacttatcataccaaaacgcactgaaatctccagagccaagcaacaataacggcgacaacgagcagcgaaagtaaataaactaacaaaccaaccgaggcgaaaaccaaatcaaatcgaactgaaaacggggaccgggcaatttccagagaaagatgcggagattcggaaatacgtcaaaacgcgccaagcgcgcaacgcagactgagtcgaaatgatattgagaccaggccagaagattgaattgtgcagcattcgctcggtggcaggatgtgatgggggcagtggctggggcaggggcaccatgcaaaaggcgcaaaatcactaaagcctgcggcgctgccctcctgacccacaatcccacccacaatcaagcgggctcagaaatccattaacacccacccaccgcccgcttttcattcataaatccctcctgcacctttgtttacgatatcgagtcctgcgcaggcgccttggccaaaacacttgttgctccaccagtaggatatctgcgggctaaaatagctcccaaaatttcgaccaagctgtccatcaaagttctcaattggacggctgccccaaaaatttggctataataacttaattggcctcgttcgacatctcagcttggggatataaaagagccagccgtctggtcaaaatcgaagaaagccgtcaagatgactagttggccattgtatcggttgattgttttcaatctgctggaaatcaatttgagcaatctcatggtatttcactgctggtccataaagggtaagatgtgctgcactttgtttaaatgttactcataattacatattctagaggcttttcctttggttgagatgctgaatcagaacggcattttttcgcagtacattgacgtgcaaaaccctgataacttggccaacgtgcacaaggaatacctggatagcgatttagtcaggttgggagtctttttggatttgggttgcgacaaagccgaattagtaacaaaccaggtgggcattttcaattaattttttcttatcaatttattgaatatgtcaatagcaggtacattacctcagacactattaactattaattgtttctgtaaatttaaattttcttgtgttatatatgtttttttttaaatgcagtccagtcgtgctcgcctttataatcaaaatttgcactggcttctttacgatgaggcaggtaactttaccaaattaacccaactatttgagggagccaatttaagcctcaatgcggacgtgacttatgtcagtcgtgaggatgaggaacgatttatcctgcatgatgtctataataagggaagtcatttgggaggtaagctcaatatcaccgtggaccagactctgcagtgcaatcgaagtcactgccaggtaaaggagtatctcagtgaactgcatttgagacctagactgcagcaccgaatggatttatctagcgttacttttcgattggccgcattggtgcgttttctaaacgtaaattgaaagtcactttattgaacacttcccctcaggtttctgtactgccaattaattccagcgaggaggaactcctcgagttccttaatagcgaccgcgattcgcacatggactcgatttctcgcattggcaatcgacttatcatgcacactcaggaaattctaggttttaagtaagagatggtttttattaatattattttaataacttcaagcttttattgttgttcttatgaagacttcattacatttggtgtggaacttggagcgttcaggatgcttttggaggagctattggaatgttgaccaacgaatcggctgagctctgtactaccccgtttgttccctcctggaatcgcctccattacttacatcccatgacggagcaggcccaattccgggctgtctgcatgtttcgtactccacacaatgctggaattaaggcggccgtatttctggaacccttcatgccgagcgtttggttcgccttcgccggactcctgatcttcgcaggagtgttgctatggatgatctttcacttggagcggcattggatgcagcgttgtttggacttcatcccgtctctgctcagtagttgcttgattagctttggagcagcttgtattcagggatcctatttgatgcccaaatcggcaggaggaagattggcctttatcgccgtgatgctgacctcgttcctcatgtataactactatacatccatagtggtgtccactctgctgggatctccagttcgctccaatatcaggactattcagcagttggccgacagttccttggatgtgggattcgatacggttccgtttaccaagacatatcttgtggtgtgtataaccgactcttaaacttctcatagagcattaattccatcggggcggaaaatttctctctaacatattaaagggataaaacaaccttataccgtatcaatattaagatacccatctatacccatcaacctttatatatccgtttaaattgcagtcttctccgcgccctgatattcgcagtctttacaaacaaaaggtggaaagcaagcgggatcccaacagcgtgtggctttctccggaggagggagtgatccgggtgagggatcagccgggattcgtgtacacatcggaggcctcgttcatgtatcactttgtggagaagcactatcttccgcgcgagatatccgatctgaacgagattatcctgcggcccgagagtgccgtgtacggaatggttcacctgaactccacctaccgacagctactcacccaactacaggtgcgaatgctggagaccggaatcacatcgaagcagagccggttctttagcaagaccaagttgcacacgttctcgaacagttttgtgatccaagtgggtatggaatatgcagctcccttgtttatatccctcctggtggcctatttcctggctcttctgatcctgatcctggaaatctgctgggcccgttatgcaaagaagaaatttagcactattatcccccaaaatcagtaaatggaaaacttttaatagacttggtgagtgacaaaatgttttcccaatcatacagctctttaaccatttaaattgcccttcaattgtcccaattttcttcccacattgactgagcttgacagtactgtctatacctcttattgcatacctattaagttgtcacaagtcaagttcagtcatcaatagacgtctatgttgattatttccacctctgatggcattatgtgtgccctataaaaagccctgttgcctcataatcagtatcaataattgccaagttctttgttcgagcttttgctatgctccaattgcacaatttaattttacacaaccttattcacatggctaaattgagtcatgtattaattttgcactgctgttcaatggactgtaagtggctgtggtgtagcaattctttgatatttgattaaattttcctgtttcagcactttcgcacctggcactgttggcacagtctaaaaatatcttcactcaattccaaccactacactcggatattcagctgaacgatgactttcttaatcacaatattcttaagctaggcgttttcttggatatcaattgcgacaaaagtggtacagttttggatatggcaagtagaatattgcacttaatgacttcaaaatgtctcagataatctagttctaacaggccagtgctaaacgattttttagtcatcgatatcattggttaatctatgataggtcaatgaacttttccgtactagaatcccacttcaaagaggctcagattttcgttgatgccgatgttacctatgttactcatgatcctttctctaaaaactttttactctacgatgtatacaacaaggggcgacaattagggggagaattaaatataactgccgatcgggaaattttctgcaataaaacgaactgtcgagttgaacgatatctgagtgaactttacacacggagtgctttgcagcatagaaagtcatttactggattaaccatgagagcaacagctgtggtatgtgaaggcttaaagattttacacgctattgatttattgattttttaaacaggtgaccgctttaccacttaatgtctccataaaggaaatctttgactttatgaactccaaatatcggattcaattagatacctacgctagattgggttaccaggcgcgtcagccactgagggatatgttggactgcaagtgagtttgcttaaatgaaaattaatgagtcataaattaataaaaaaaaaccgtaggtttaagtacatatttagagatcggtggtcggatggcaatgcaacaggcggcatgattggagatctcatcctggataaagctgacctggcgatagctcctttcatttattccttcgatcgcgctttgtttctgcaacccatcacgaaatttagtgttttccgtgaaatctgcatgttccgtaatccccgatccgtttcagcgggtctcagtgccacggagttcctgcagcccttcagcggaggagtttggttgacatttgcacttttactcctcctggcaggctgtctcctttgggtcaccttcatcttggagcgccgtaagcagtggaagccatcgctactcaccagctgccttctttccttcggagctggttgcattcaaggggcgtggcttacgccaagatcaatgggtgggagaatggccttctttgccctaatggtgacctcatatttgatgtacaactactacacatccattgtggtgtccaagctactgggccagccgattaagtccaacatacgtacactgcaacaactggcagatagcaatttggatgtgggcatagagccaactgtttatacccgcatctatgtggaaacctccgaggagccggatgtgcgtgacctctaccgcaaaaaagtgcttggcagcaagcgatccccggataaaatatggattcccacagaggctggggttctctctgtaagggaccaggaaggcttcgtctacataactggcgtggcaacgggctacgagttcgtgaggaagcacttcctggcccaccagatctgcgagctcaacgagattcctctacgcgatgcctcccacacccacacagtcctcgcgaagaggtcaccctatgccgaactcatcaaactaaggtgggcttaattaattaattaacttgagcagatcgttactgatacattttgcaacccaatttcagtgagctgcgtatgctggagacaggagttcatttcaagcacgagcggtcttggatggagacaaaactccactgctaccagcataatcacacggtggccgtgggtctggagtacgctgctccgctgttcatcatcctattgggagcgataattctctgcatgggcatattgggactggaggtcatctggcaccgccactgcactctgcattgaggtgagcagtccaaggtcattggtaaatgacaagcaatttcggccaatttaaaaacaaataacgcacactgatgacagccaaattgggggactttttcgctatataaaaagggtagtgcaagtgtggaaaaccaaagcgcaatagtcaacaatgcagctggtccagttggccaactttgttctggacaatctcgtgcagtcgcggattggattcattgttttatttcactgctggcagagtgatgaaagtgggaaagaaagttttacccgcttctggtgattgtaaacccaattttcttttgttcaaggtcttaaatttgctcagcagttcatgaagcccatacatcccattctcgtctatcatcagtttgttcaaatgagaggagtgcttaattggtcacatttagaactcagttacatgggtcatacacaaccaactctagcgatttacgtagatataaagtgcgatcagactcaggatttattggaggaggtttgtttaaatacgacgggataaatgcattatttccagatattatttactttcaggctagtcgggagcagatctataatcagcattaccattggctcttggttggcaaccagtctaaattggagttttatgatttatttggattatttaacatatccattgatgcggatgtaagttatgtgaaggagcagatccaggataacaacgactcggttgcctatgcagtccatgatgtctacaataatggaaaaattattgggggtcaattgaatgtaactggatcccacgaaatgtcttgtgatccattcgtatgtcgcaggactcgacatttaagttccttgcagaagcgatctaaatacggaaatagagaacaacttacggatgttgtcctgagaggtaagacattattgcatacataaaacatttaagttctagctatttcttagtggcaacggttgtcacccaacgtccactcaccttgtcggatgacgaacttattcgcttttt

SEQ ID NO: 35468 - DNA, 2658 bp, DROSOPHILA
atgctgaatcagaacggcattttttcgcagtacattgacgtgcaaaaccctgataacttggccaacgtgcacaaggaatacctggatagcgatttagtcagcctcaatgcggacgtgacttatgtcagtcgtgaggatgaggaacgatttatcctgcatgatgtctataataagggaagtcatttgggaggtaagctcaatatcaccgtggaccagactctgcagtgcaatcgaagtcactgccaggtaaaggagtatctcagtgaactgcatttgagacctagactgcagcaccgaatggatttatctagcgttacttttcgattggccgcattggtttctgtactgccaattaattccagcgaggaggaactcctcgagttccttaatagcgaccgcgattcgcacatggactcgatttctcgcattggcaatcgacttatcatgcacactcaggaaattctaggttttaacgttcaggatgcttttggaggagctattggaatgttgaccaacgaatcggctgagctctgtactaccccgtttgttccctcctggaatcgcctccattacttacatcccatgacggagcaggcccaattccgggctgtctgcatgtttcgtactccacacaatgctggaattaaggcggccgtatttctggaacccttcatgccgagcgtttggttcgccttcgccggactcctgatcttcgcaggagtgttgctatggatgatctttcacttggagcggcattggatgcagcgttgtttggacttcatcccgtctctgctcagtagttgcttgattagctttggagcagcttgtattcagggatcctatttgatgcccaaatcggcaggaggaagattggcctttatcgccgtgatgctgacctcgttcctcatgtataactactatacatccatagtggtgtccactctgctgggatctccagttcgctccaatatcaggactattcagcagttggccgacagttccttggatgtgggattcgatacggttccgtttaccaagacatatcttgtgtcttctccgcgccctgatattcgcagtctttacaaacaaaaggtggaaagcaagcgggatcccaacagcgtgtggctttctccggaggagggagtgatccgggtgagggatcagccgggattcgtgtacacatcggaggcctcgttcatgtatcactttgtggagaagcactatcttccgcgcgagatatccgatctgaacgagattatcctgcggcccgagagtgccgtgtacggaatggttcacctgaactccacctaccgacagctactcacccaactacaggtgcgaatgctggagaccggaatcacatcgaagcagagccggttctttagcaagaccaagttgcacacgttctcgaacagttttgtgatccaagtgaccgctttaccacttaatgtctccataaaggaaatctttgactttatgaactccaaatatcggattcaattagatacctacgctagattgggttaccaggcgcgtcagccactgagggatatgttggactgcaagtttaagtacatatttagagatcggtggtcggatggcaatgcaacaggcggcatgattggagatctcatcctggataaagctgacctggcgatagctcctttcatttattccttcgatcgcgctttgtttctgcaacccatcacgaaatttagtgttttccgtgaaatctgcatgttccgtaatccccgatccgtttcagcgggtctcagtgccacggagttcctgcagcccttcagcggaggagtttggttgacatttgcacttttactcctcctggcaggctgtctcctttgggtcaccttcatcttggagcgccgtaagcagtggaagccatcgctactcaccagctgccttctttccttcggagctggttgcattcaaggggcgtggcttacgccaagatcaatgggtgggagaatggccttctttgccctaatggtgacctcatatttgatgtacaactactacacatccattgtggtgtccaagctactgggccagccgattaagtccaacatacgtacactgcaacaactggcagatagcaatttggatgtgggcatagagccaactgtttatacccgcatctatgtggaaacctccgaggagccggatgtgcgtgacctctaccgcaaaaaagtgcttggcagcaagcgatccccggataaaatatggattcccacagaggctggggttctctctgtaagggaccaggaaggcttcgtctacataactggcgtggcaacgggctacgagttcgtgaggaagcacttcctggcccaccagatctgcgagctcaacgagattcctctacgcgatgcctcccacacccacacagtcctcgcgaagaggtcaccctatgccgaactcatcaaactaagtgagctgcgtatgctggagacaggagttcatttcaagcacgagcggtcttggatggagacaaaactccactgctaccagcataatcacacggtggccgtgggtctggagtacgctgctccgctgttcatcatcctattgggagcgataattctctgcatgggcatattgggactggaggtcatctggcaccgccactgcactctgcattga

SEQ ID NO: 35469 - protein, 885 aa, DROSOPHILA
MLNQNGIFSQYIDVQNPDNLANVHKEYLDSDLVSLNADVTYVSREDEERFILHDVYNKGSHLGGKLNITVDQTLQCNRSHCQVKEYLSELHLRPRLQHRMDLSSVTFRLAALVSVLPINSSEEELLEFLNSDRDSHMDSISRIGNRLIMHTQEILGFNVQDAFGGAIGMLTNESAELCTTPFVPSWNRLHYLHPMTEQAQFRAVCMFRTPHNAGIKAAVFLEPFMPSVWFAFAGLLIFAGVLLWMIFHLERHWMQRCLDFIPSLLSSCLISFGAACIQGSYLMPKSAGGRLAFIAVMLTSFLMYNYYTSIVVSTLLGSPVRSNIRTIQQLADSSLDVGFDTVPFTKTYLVSSPRPDIRSLYKQKVESKRDPNSVWLSPEEGVIRVRDQPGFVYTSEASFMYHFVEKHYLPREISDLNEIILRPESAVYGMVHLNSTYRQLLTQLQVRMLETGITSKQSRFFSKTKLHTFSNSFVIQVTALPLNVSIKEIFDFMNSKYRIQLDTYARLGYQARQPLRDMLDCKFKYIFRDRWSDGNATGGMIGDLILDKADLAIAPFIYSFDRALFLQPITKFSVFREICMFRNPRSVSAGLSATEFLQPFSGGVWLTFALLLLLAGCLLWVTFILERRKQWKPSLLTSCLLSFGAGCIQGAWLTPRSMGGRMAFFALMVTSYLMYNYYTSIVVSKLLGQPIKSNIRTLQQLADSNLDVGIEPTVYTRIYVETSEEPDVRDLYRKKVLGSKRSPDKIWIPTEAGVLSVRDQEGFVYITGVATGYEFVRKHFLAHQICELNEIPLRDASHTHTVLAKRSPYAELIKLSELRMLETGVHFKHERSWMETKLHCYQHNHTVAVGLEYAAPLFIILLGAIILCMGILGLEVIWHRHCTLH

SEQ ID NO: 35470 - DNA, 2252 bp, DROSOPHILA
aaacaaacaatgttagccgaattatttaaccacaaagctgcattccggttttgggcgttatagtgggggtggcaacaagttttttggcaaatctatagaaatttgcaagactaataaaaataattcaatagtgtgggggtggaagttttgtacggtttttgggcgttatagtgggcgtggcaacatgggtcaacaaacttgcgctgcgtttttgtctctagaatctgtatgctgaatcttaaccttatagcttttatagttcctgagatctcaaagttcatacggttagacagacagacggacatggctagatcgactcggcttttgatcctgatgaagaatacagcacagattttaatatccggatctaacaacacatccttggtgtgtgtgtttttttttattataactcgacttacggtaggaaagctaaaatcttctaaagataccacctaccgtccgtaggtggcatgcacaattcataatgcccattggaattatgcctacgtaataaaacaaaaacctccgcgtgctcttcagtccttgcacgcttaccggaactgccagtcaaggtatgacttcgatgagcaggatgtgaggccaggtcacactcccttccttcagtgtaggccatgagggctcctccttccaccctttagtcgccttttacgacaagcccagagcgctgatgtagtatttttggtccgccaccacaggacacatgtttaggcttagccacccactctgttggccatcttgtctgatcggactcgcttcatcaaattaatgattaggctgtatcccagctcccatgcctcactgttcgccaacatagccatagccatagcttgttggacaagctactaaggctgaacgcggtaagaccacttcccctgtcgcaacgtttgccatctgttctgccactcacccagcagacagagcctggatcttcagatcaattggcggccagcctgccagagctagtgccgcgacttcggatatggtcctgaatcatgtaatgagcccgagggtcatgaaccgtagcaccgagctcgttcctttcaggtatgaacccctgctagtggcattgctccagactggagcagctacctccaccagcagtttcctggctggatatcttgagccaccgacgttgggcacgagtcatactactattctggatcgagggcacatgctagaccagatgatgcacaagatcttttggatcacgttcttactgaacgccaactaactctcgaaaaaagatggtgtgaaaacacctcttttcgccatccaaacagaaaatatatggtccgcttgccgttcaaaaccttatagttcaagttctcggacgatctcgacagatcgccttttcaccttggaacgactatttcaacttcaaacagaatttcatcagcactatgtatgtgcaatggatcagtattttgtactacatctgatacaggaaaacgcttccagtgaagacaactacgcgcactgtagcactattccgcacaatgctgttctaaagaaggataatctcactaatacgacgcctcctgtaaaagttcgattgcaagatctttaaacgacattttgtgcctggcattacgtaatgatctggacggagtcattctaaatggccgattttatcggtatgtttttgttgcggggttccaaagaatgtacctatgtatcgtcatcgtcatgcacccgaacgactcaatatcagtggatctagtggtgtgatcaaactggtaacttaaaaaagatttgtcttagtacaaatactaccatccgcttcaacgcatcaattatcctcttgcagaacacgccttacgcatatgatgtgttaagtggaaatgaaaccattacggggcgcttcaagtacgacaagatgtcaaaggcgccgttaaatcagctggcatggatgtccggaaagccatccagcgcttttaagtcacattcttgcacctgatctctgcaaaacttcgatattctaaatggacaacagggatccaagttcaagatcaatcccattctaaacgatcactctcttattcaccgtggcacgtttttttgacccattggggtttttagcacatgtcaaagatcctcctgaaagacgtatggaccttccgcgtttagcaaaccgatggcttactaccaccgaacactgtatttggacgaacacacagaaccaagaaaaacagttcgttacatctggcgctcgaacccacgaccctaatatt

SEQ ID NO: 35471 - DNA, 252 bp, DROSOPHILA
atggtcctgaatcatgtaatgagcccgagggtcatgaaccgtagcaccgagctcgttcctttcaggtatgaacccctgctagtggcattgctccagactggagcagctacctccaccagcagtttcctggctggatatcttgagccaccgacgttgggcacgagtcatactactattctggatcgagggcacatgctagaccagatgatgcacaagatcttttggatcacgttcttactgaacgccaactaa

SEQ ID NO: 35472 - protein, 83 aa, DROSOPHILA
MVLNHVMSPRVMNRSTELVPFRYEPLLVALLQTGAATSTSSFLAGYLEPPTLGTSHTTILDRGHMLDQMMHKIFWITFLLNAN

SEQ ID NO: 35473 - DNA, 2415 bp, DROSOPHILA
gccttcagttgcctcatcagcaccgctgccgtcagcttggctccttgtctgctcgccgtgggtaggaactgctctcggaatacctgcgtgtccagagtgtccgtcttgtattttaacctggctttggctgatatctgggcttgggacgagggatggcataccaggtcgcaaatgatggccaagtgttcactgccagtgtaatcctcgctgagtctccacctcgttagcctgaacgacgagccgctattgttggtaaggtccaccacagagcccagtccggcgcgcctgaagcatctttggcgtggctctagctccttgatctggaattgggaccatcctaccctcaacttgccacgcttgataaacgggtccgccaggttggctgggactgcaattacagcagtcttgcctccatactgcgtttgccggaggctcttgatagccaccactgctgcagtgatctctgcctgggcctccagggccctcttcaactcgtcttccgtagtgagctcgtcgaggtcgcgaatcaaaggctggcgcggtctcccagcaccgctcccatgtccatcttgggcttctgcgtcaagtcttgggcagaggcacgtagctcgaggaggagttcgcctttgatggccctgagcctgtcgtcctgccgtcttgtgaccagctacagcacttcgctgtacggtaagccagctgatggggtgaccagcgcatctggcctctccctcggcggtctcttcctgtgcggtccggacggatgctacaatctgggttgtggcttgctacccgctgcagtggcttggacggagccctgggcgctggggtcccgctgccttctggtggtcggatcgctgggctttcttcgaggacagcgtcgtgcgatcctttggtttggggctattaagggtaagggtaagcccttactcggttcgtcgtggctggttgggcgcttaggggtggtctgttggctagcatccgctcatgccgtgcgaccgacctgcgaattctccgcctccggcagccttgtgcgcagctttagttggagctccttcaatctggcgaatgagtttgtcattgcctgattaatgctcctcaccccgttatggttgaccttcgtcagaaggtcgtccaggattaatcccatctcctcgatttctagctggggggtctttgcccgctttgctagttgagctctggtagggggggatgtcgcttccaatggtctcttggggggggccatcgcttgggttctggggtggggtcctaactacctttgaccttttcccaaacaccaagctttcttcgtcgttgttgggtgcacttgttgcattgcttagtccgacggccaagtgtgccgccgtcggcgcgggtgtgggggtattgttggttagggcctccagaaccggtgccattcgggattagccgagggtggatttccacatgtgtggctgccacctggagtaataaattatgtagtaatgtatgtgtgtgtgtgtgtgtgtatgtagtcaagtgttatactatggcacatatgctactatatatacctgtcggagcgtaataatattgcggtaaaaatcagtcgagcgcagcggcagaggcacggacagcctctgcagctgtcaggttcgatcgggttgtcataaatagtgtgttagagagagatgacaatgttgtgaacgccagtgtgtgtaggacattagagaatttgatgaaaaagggaaatgtaagaagatcccttcagtgatgtttgactggtagagttgatcggagcttcctgcgctgccgcaccaaattacaaagtgaataaacgaaattaatgagactcctttattgccgacatacccatatttagaaaaagcattttttaagttcttaaaaagtttaagttaattttaagttaccgtttattttatttcagagtaaagaagatgaacaaagtataatgatgcttccaatggaagtaactgagccctctgaaacaattgatgggactgaggaaataagaagacgaaaacgatcattgaataaaaataaaacatttaaagaggttagtatatatatataacaaatgtctgcgggtctaacctagtaaagcaaattcattacatctcaaactcagaaaggaatcagacaatacttttctgttcacttcggcttcactgaaacttttcagacgagttccaagcacataaataaagaaacaacttacaaaacaagagagaatgctatagtcgagtacaacgactatcagatacccgttactcagctagacggacatggctagatcgactctgctattgattctgatcaagaatatgtataccctatatggtcggacacgcttccttttggctgttatatacttttcaacgaggggtataataatttcatattcactgaaaaattaac

SEQ ID NO: 35474 - DNA, 330 bp, DROSOPHILA
atggcaccggttctggaggccctaaccaacaatacccccacacccgcgccgacggcggcacacttggccgtcggactaagcaatgcaacaagtgcacccaacaacgacgaagaaagcttggtgtttgggaaaagagctcaactagcaaagcgggcaaagaccccccagctagaaatcgaggagatgggattaatcctggacgaccttctgacgaaggtcaaccataacggggtgaggagcattaatcaggcaatgacaaactcattcgccagattgaaggagctccaactaaagctgcgcacaaggctgccggaggcggagaattcgcag

SEQ ID NO: 35475 - protein, 110 aa, DROSOPHILA
MAPVLEALTNNTPTPAPTAAHLAVGLSNATSAPNNDEESLVFGKRAQLAKRAKTPQLEIEEMGLILDDLLTKVNHNGVRSINQAMTNSFARLKELQLKLRTRLPEAENSQ

SEQ ID NO: 35476 - DNA, 2939 bp, DROSOPHILA
taaatggcaataaatctaactcaaccaagtgacaatcgcaaatgaacaacgaaataaatccgattccagttccactgcaaatttgtatgtacatatgtatgtacagactacatgagccagacaggcaaatgacccagtaagtagtcgcaaaacaacatcgagagcgccggttctcgatcaaatgtaaatcaaatatggcgaatctgcgtccaaatatgaccaaatgaatgccgaaaccggaaatgacacacggggaatgaaaaaatgcaagggtatgaggccgactaggacctgcacccacagacttcgcccatagtgccggcgagcatttaaccttgagccggcaactgattacaaaattgcaacgataactgccagtgaccccatggcaaagaaaataaaatggagagttctggcacagtgggggaacgaagaagaaagctaaagaaccaatcgctaaattctgccttgataagtcatcgtcttagcagtcgcagttggaacaaacagacgaccgactggtagacagctatattttgcattttgttttcgtttcgtttccgccagatgttgtcgcgaaggccatcgaagggaggagagggcggtgcgtttaggaaattgggaggcggtaggtggtaggtagttaggcaaataaaaccgattatctgtggtccaaagcactgagctaaaattgaatttggaatatgaatcgaattgaaataaataacattactaagctaatttttatttccagcttaaaggctacaaacagtaatcattctacagattctacgtttcaaatcgaaaaacaaacatgtgagaataacataattatcttaactgcaaggatagtgacaaatgttttgaccgaggtttgcgctatttccgtttaaaaacaatggaaaagtagagcaattaatttaaatatatttgtttgagcttttttctttgcgatcaatacaacaatcgagatttatgtttgcatataacttaaaactaactagatcatgcctaagaaaaagacaacgattattaacatctcacaaattgttactttactcaccttgcaattcggccaactgctcggtgctcataacaattgggagaatctgcttggtggtgctgctgggatctatcgaattcggatcggcaatcgggctcatatagcacttgcgcatccttagatactgcagccagacatttttgccctccccggaagctcctttctcgccatggtcatggacgttcagattgatttgactatcgttcagaaacatctggcgagtgagatggaagtggctgttggtgatgtagatgttcggctcggccggccttggtttctgagcaaagaacaatgaattgttaatacactttacatgtctcgaggtcaattagatctttacataacatggctagcagtgtaacagtgtctttgaatggaaaataatattgcgcgcgattttaagatcaatagattctcaaatatgttggttgttttgtgtttgttttgttaacctgttcgtgcatcacggacagcatatagttttcgctgatcaagtggatgttgtagtctcgcaggtccaccatcaagcgctccatactcaggttcttttctcgcaactcgcgcacctgtgcgtccagctggcttttatcgtcctcataaagctggagggtctgctcccactcgtttttgatcgtgcggacgtcgtaccattgcttctggccaagtagccgctggcacagaaagagctccacgagttgggttagcttggacaggacgtagatgcacagaaatatccacaagaaggtcacgcacaagttgaacacgttcttgccgcggaggtccgcgtttactccttgctcatgctctagcccttccaggatcgaggatacgttccacattggtccttctaatgtgttgctttccgtacttgaaattctcgtgtttttgttgtgtttgcttgagattacggtggtggaaatacatttaaggataaacaaactaaactctacccatgaaagggctctcgaagcctactactaaacgtttaaaagttaataaccgacagtaattaatgttctcatgaacaacgtaactttgctgagttcggaattgaatagttcaaagagcgtattcatttaataaaatttaattcacttaggatactttttgaacgtggtatgtatactttgaaaatttaatttgattttattcgattttagtagcggctaactatttggactgtttacaatatgactagtgttagtagaggtgtttctaatatctaatactttttttaaattaatttttcgttgattttgtgtttgtttgtgtgcgtgtctggggtttcccattttatgacttaattagccaaaacaccaatataataatgaaccgcagcaactgcgtcaagattcgtgcattgaactttggtgggtttttcacagggattttatttacagaatctcctacaaaattttccttgagtaactgcacacttggtttactgtcgcttagtatatatacagaaggtagcgatccttaactttatcctttgtacatacattcttgatcaaagcagattaccagccgagttgattaccactcccaaaatctgcaaaaaattgttacgctcagaaagttgaatacttcgatttaatttgaatttattatttgccaatttctattggaatttcaaaaaatatttaaatattcattcttaaagtatcgtttatattatttaaaatttgatttgccttaaactcgaaaccattgtttctgttgaattaagaattccttaaaggaaagaaatgggctctaattagttgtttgacatgcatacatagtgctactgcatagcagcccaatccacacttgattaaatatgtgcactttaaaaataattataacaaatgtgccttagtgttcgttggaaggc

SEQ ID NO: 35477 - DNA, 712 bp, DROSOPHILA
aatttcaagtacggaaagcaacacattagaaggaccaatgtggaacgtatcctcgatcctggaagggctagagcatgagcaaggagtaaacgcggacctccgcggcaagaacgtgttcaacttgtgcgtgaccttcttgtggatatttctgtgcatctacgtcctgtccaagctaacccaactcgtggagctctttctgtgccagcggctacttggccagaagcaatggtacgacgtccgcacgatcaaaaacgagtgggagcagaccctccagctttatgaggacgataaaagccagctggacgcacaggtgcgcgagttgcgagaaaagaacctgagtatggagcgcttgatggtggacctgcgagactacaacatccacttgatcagcgaaaactatatgctgtccgtgatgcacgaacagaaaccaaggccggccgagccgaacatctacatcaccaacagccacttccatctcactcgccagatgtttctgaacgatagtcaaatcaatctgaacgtccatgaccatggcgagaaaggagcttccggggagggcaaaaatgtctggctgcagtatctaaggatgcgcaagtgctatatgagcccgattgccgatccgaattcgatagatcccagcagcaccaccaagcagattctcccaattgttatgagcaccgagcagttggccgaattgcaaggcatgatctag

SEQ ID NO: 35478 - protein, 224 aa, DROSOPHILA
MWNVSSILEGLEHEQGVNADLRGKNVFNLCVTFLWIFLCIYVLSKLTQLVELFLCQRLLGQKQWYDVRTIKNEWEQTLQLYEDDKSQLDAQVRELREKNLSMERLMVDLRDYNIHLISENYMLSVMHEQKPRPAEPNIYITNSHFHLTRQMFLNDSQINLNVHDHGEKGASGEGKNVWLQYLRMRKCYMSPIADPNSIDPSSTTKQILPIVMSTEQLAELQGMI

SEQ ID NO: 35479 - DNA, 3651 bp, DROSOPHILA
atcttgcccttttttttactttttctcttttgttggcctaaattgaaatttgtcacaactttcttgtgtcgcaaattttttgcagagaattgcctttggaacaccagcgccggcttatcggttaccatgatttggatgcgcctgccaattctgatatgtttgactaattgattagcacaatacaaataaaaacaggccatattgatgcagcttatatcggttggcgagctcaagttttaaatgcaattcaagcaatgctaggaaaagtatctactgcatataaagatggtttatatacgactaatgatatctgttttcctgtacaatgctagaacctacctttattgcccaaaataaatgaaaatccatagcctaaaagaaaacattgtaatattttgtatctctgccctatccatagtcttgcgtgaataattccaatatctatattcattctcgttgcttgcagacccggtggttttgattatcgacccagatcacactaccgggacttggacgcgccgcaagaaccatactagaactagctgtgcggagaacacaagctagataaattgtatcaaattaactgataaacactcaaacactctcttaattttcgcctgttttgtacggtcaacttttgtattccacaaggaaataaagtgcgaaaaaaagctttttgctgagtttttattgggttctattgtttttccctttgtaaacagagagcgcgtagtataacgtacggcaatgtctaaacgagatacacttaaacacataagttctcttggctagccccgaaagactggcatttggagaaacgagctaaaaataagaacgcaatcgccggcgtgctgagatcagaacgtcaaaaagaaaatatcccttgccaacgtaacattgtggtgcagttggtcccagtggaccaggagaataaatggtgtcaagcacggaatgtcctgtttgcggagttgctgcctcacaagcgtgcactaggtgcaaaatggtgcgatactgcgaccgagagcaccagaagcagcactggccgcagcacaagcgcagatgtaggccattcagcgaggagcaggatgccgagctgggcagatatttgaaggttacccagaacatagcagccgggcaaatagtcttcattgaggagcccctagtggtgggtcccaagtggtatctctccgacgcagacaaggaggcctctaacgttccgtgtgtaggctgttacactccgtgccgtctggggaagcaccagtgtcgaaggtgaaatatactaataaacatagtctatcatccatttgaacaatgtgatttccagatgccgttggccagtctgcagcgcaggctgcaagcacgagtcaatggaatgcagcgtgcttagcctcggatcgggttcaccaactcgggcagatgcccgctcattgaacgactacttcaggggcgatgctcttttggtgctcaaatgccttctgttgcagcgacagagtcccacgaaatggtccgcgttgttagagatgcagtctcatgaggaggagcgtaagggcaccgatctgtacgaggaagcagagaagcgagtagtgacctaccttcaaaagcggtttttatgtagacttaagcaaactaatccaaaccttctgaccgattgtggaccagagatgctgcatcggctttgcggcatcatcgaaacaaactttatggttatcgaactcccgagtggcgtggaactcagcgggttgttccggcaggcctgcatgatggagcatgcttgtcagcccaactgcgactttcagtttgataacaagactcagcaagttgctgtgcgtgctggctgtgacttgcgaaaaggcgaccacctacggattacatacacaaatatcctatggggcacgcaacttcgccagcaccatcttcgactaacgaagcatttcagctgccgctgcagccgctgtctcgatccaacggaatatggcacctatataagtgcgctgacttgtctgggggatgtaaatcagacctgtggaggaacccacttgcccgtggatccactggacgagaacacacagtggaagtgcgacacttgcccaatgatagtggatggagcttacgtggctgaactgcagtcccacatgaccgagcaggtggagggcttattagccggatgcccctccgcgaatcaggtggaacttctgttggcccgcctgacccatatgttgcatccaaatcattttcacacgttcaacctaaagcacacattaatccagctgtatggtaacgaagctggcttggagttgggcgtgctgagcaacacgcagctggagcgcaaactgaggctctgcggtgagctctacaacgtatgccggcgactggatccatatagcattaagctggctatctatgtcacggtcatcctgatcgaggtcgcccacacgctgcaggagcaggcacgaagggcaccagcagaaggaacttccctcttgggtcttgcgcaaagccgtcttagggaagcgcatatggttttggagaaagagcaagaatcagttgccggcaaaaagctaaacgaaaaattgcagatggaaatcttcgagtgcgaaaaactaattttagctcttgcctataatcaagatcacgaagccaatacaaaataattttctagatcggcgaaagtggtacaagtgaacattttgaacaccggatgctgttaggtgctgttaaaacaaatcacactttgttaaaatccaatgaagcgccgttcaaaagaaattgtaaaacgagactaggaatcttttcaaaatacacatttttgttgggttgcttataaaaactataagatatatataaaataagattttaaaataaaaacatgtgcgctatttttgattctttggaaaaatccgctagataaccgggaaaacagctataaatatctatttcctactgaacctaaatgtctttgtagagctataattatatagcttattttcaaattttacctatttctctttaaattaccaactgcgtgaccattgaaattcacaaggtttggtatatgacacatttcctgaaaaaaatcacttcttaatgatattgagcaccgaagaaattagtttacataatttggaacaactgacccttcgatgggtcgaggttatcaactatagcaatctcccttgtttttagaattaattcaaaaaaaatttgtgaaatgtatggtttttggctaccgcttctaataagatcacgttttaaacatcttacttttactaaactagagtcttacgttttttttttataaatgacctattttgaactgtaaccgtcaataaactatgctgacttaaataagcagatattctgcatattcttatcaaaaattattaccagaattattgacctgattgactgctttatagtttatctgcctatatttatttgactatattcaattacaatgaattcctaaattaatctgtagctcgcagttccactcgctgttgtcgcagaagctgtggatgcgccctcaggatgtcacgttgttgacggaggttcttgataattcctggcaagtgccaggcgtgtctgagcagactatctgtcacatcaaaatgggcatgccgcacgcagcgtagttgggagcagtgcgccacg

SEQ ID NO: 35480 - DNA, 1596 bp, DROSOPHILA
atggtgcgatactgcgaccgagagcaccagaagcagcactggccgcagcacaagcgcagatgtaggccattcagcgaggagcaggatgccgagctgggcagatatttgaaggttacccagaacatagcagccgggcaaatagtcttcattgaggagcccctagtggtgggtcccaagtggtatctctccgacgcagacaaggaggcctctaacgttccgtgtgtaggctgttacactccgtgccgtctggggaagcaccagtgtcgaagatgccgttggccagtctgcagcgcaggctgcaagcacgagtcaatggaatgcagcgtgcttagcctcggatcgggttcaccaactcgggcagatgcccgctcattgaacgactacttcaggggcgatgctcttttggtgctcaaatgccttctgttgcagcgacagagtcccacgaaatggtccgcgttgttagagatgcagtctcatgaggaggagcgtaagggcaccgatctgtacgaggaagcagagaagcgagtagtgacctaccttcaaaagcggtttttatgtagacttaagcaaactaatccaaaccttctgaccgattgtggaccagagatgctgcatcggctttgcggcatcatcgaaacaaactttatggttatcgaactcccgagtggcgtggaactcagcgggttgttccggcaggcctgcatgatggagcatgcttgtcagcccaactgcgactttcagtttgataacaagactcagcaagttgctgtgcgtgctggctgtgacttgcgaaaaggcgaccacctacggattacatacacaaatatcctatggggcacgcaacttcgccagcaccatcttcgactaacgaagcatttcagctgccgctgcagccgctgtctcgatccaacggaatatggcacctatataagtgcgctgacttgtctgggggatgtaaatcagacctgtggaggaacccacttgcccgtggatccactggacgagaacacacagtggaagtgcgacacttgcccaatgatagtggatggagcttacgtggctgaactgcagtcccacatgaccgagcaggtggagggcttattagccggatgcccctccgcgaatcaggtggaacttctgttggcccgcctgacccatatgttgcatccaaatcattttcacacgttcaacctaaagcacacattaatccagctgtatggtaacgaagctggcttggagttgggcgtgctgagcaacacgcagctggagcgcaaactgaggctctgcggtgagctctacaacgtatgccggcgactggatccatatagcattaagctggctatctatgtcacggtcatcctgatcgaggtcgcccacacgctgcaggagcaggcacgaagggcaccagcagaaggaacttccctcttgggtcttgcgcaaagccgtcttagggaagcgcatatggttttggagaaagagcaagaatcagttgccggcaaaaagctaaacgaaaaattgcagatggaaatcttcgagtgcgaaaaactaattttagctcttgcctataatcaagatcacgaagccaatacaaaataa

SEQ ID NO: 35481 - protein, 531 aa, DROSOPHILA
MVRYCDREHQKQHWPQHKRRCRPFSEEQDAELGRYLKVTQNIAAGQIVFIEEPLVVGPKWYLSDADKEASNVPCVGCYTPCRLGKHQCRRCRWPVCSAGCKHESMECSVLSLGSGSPTRADARSLNDYFRGDALLVLKCLLLQRQSPTKWSALLEMQSHEEERKGTDLYEEAEKRVVTYLQKRFLCRLKQTNPNLLTDCGPEMLHRLCGIIETNFMVIELPSGVELSGLFRQACMMEHACQPNCDFQFDNKTQQVAVRAGCDLRKGDHLRITYTNILWGTQLRQHHLRLTKHFSCRCSRCLDPTEYGTYISALTCLGDVNQTCGGTHLPVDPLDENTQWKCDTCPMIVDGAYVAELQSHMTEQVEGLLAGCPSANQVELLLARLTHMLHPNHFHTFNLKHTLIQLYGNEAGLELGVLSNTQLERKLRLCGELYNVCRRLDPYSIKLAIYVTVILIEVAHTLQEQARRAPAEGTSLLGLAQSRLREAHMVLEKEQESVAGKKLNEKLQMEIFECEKLILALAYNQDHEANTK

SEQ ID NO: 35482 - DNA, 3371 bp, DROSOPHILA
caatagacagctgcgacaaatgtcaacgctgacataaattcatattctttgagatctatgcctgcaggccgtgcttgttagcttagcacctgatattgcacacgctgcaatgcggcaatctcctagtaaccactgttttgaaaacatccctggcattgtactaggcgtagagtctacttcgaaaaccgcccacccaccatctagtaactcgtatcactcgtatcgtgatcactagcattgctctagccatgcccatcccatttgtccgtataaacgtcaagaaactagaaactgcctagtagaaagttaagattacgcaagcagactagcaacagataagaagattgtcacgccccctaaaggccaccatttgcataaactgtcactcccacacttttcggaaatgttaattatttttcgtttattatttttcttgttaacttttattgatatagcaaaaactcaaccgcgcaattctgatcgatgttttcattttaccatttttctttcacaatttatataaatgtgccaaaacaatgttgaagtttctttctctttcactctcgcatctgagtaacgattgttttttagtttaattttttagtactccactataaacgaatataaaacaaaaaaacatttatagaaaataacaaattcattaaaaataatgttcaaggccttacaaaatatgagtcacattaatcagagctagttaattcaaagtatttacatccataaagaaatcagaagtttcctacagtatatggtttagtattacagcgtccgatctaactaagtttgtaatagttgtgtgtaacttattttccgaaataagagttatttatttgtaagtccggtaaatgtttaatgaaaacctcaaaacaggggtcgtaagttactaccttaccaaacaaggcacggctgaaaatagtaacaattgtgtttttttagaagtggttatcgtactaccctagacgcttcacttcacagccttaaaatgggatgggactgggcggtcggaggtatatccgatgagattccgaggacaacgggaccagaatgcatcaactacatgacagatcgacgtcgctggttggagacgatactactgtccgccctcttcatctttataatgcaccgctcctggcaacgcctagcgccgattaaacttccgccgccgcacgagatacagaagccacacagtcctacaagactgtttctgctaatagccttgtcaatgatttttggcattgagatgggcttcaaactctccggacagtcaatgattttcgccttgaatccatgtcatgtccagtcatgcctgcaggttaacaatttgtcatgtggattgtcgtagaacaattaaaaatacatgggatatttacagatttatcttttggccgccaagccgacgaagacgacaacagcgctctttcgtatacagatgagcaatctcaacggcccatttctggcgtttcttttccccgaggtggagggccgcacatatcccttcgagcaggccacctattggatccagcatgcactgctctatataataccgatttacattatccgaagcggtaactaggagacgccatctatttggtcggaaaagtaatcttgttttctctttcaggagcgtacactgtcgaggacctcagcgagttccactggtcacatataggtaccgccttcatgctgttttatcacttcatccttctctctccgctctcaattgtaagtggcgttaaacttaaaattactctctacattcgtttcgagcaaaagtgttttacatctatgcttaagggtagggtgtataggaaaacgccagtaaataaattctagcattatttggtcagatttttcgaggcctaaacaattgaaacgatggcattttctggtatacttaaattcattatttacaatatttagcacattatgtatttcatccaaaacgtctcctgccactaataccttcccttctttgcagtttactggtatcaatctggaccacatgctctgtgcggctatgtcagatccgttccagggctcgaattaccggatatttgcgtgctgccaccaagcactgctctgtccgctgctgagtaagggcacagtggtgctgttcggacgccggaatcggagcagcagcggcctgaccggatcgggaagtatgccggagccgaggggcgaggctgcccagtatcaccaattaacccaaggtgactatgccatgcaggaggaggcgatattgcgacaccgatttagcaaccaggaagcggtggacgatggacatccgcatgacgcaggggaaatggcgtcccttacagcagagtacaccatgccaacaaccaagatcgactagtacttactgcgtctaatatgcatgtcaattcacgagcccctacggctacggtccacgttttgcagatagccgcattgcccgatcatactaaaatatgaaggatttgtgtgagatctaagagaggtgaatgtatttaacaaagacgtgtagataataacaaataaggctaattttcatgctcatcgaggttatacttctaaacaaaaccaacaccactcaagagttatcgagttatttcttacttcgaaaaaaatcaaaagttacaccacttcaatggttaataatagagtacgtgtcttaaattgtaagcctgtagcgatcaacagataaattcaaaattcaaatcgagcgccaagggacgggcaactctaaaggtctatgttcggtctggcagcactgtccgagtgaactgtgacccgtttatctgcagctgttggtgaatcttgaaataaataataaatagtcgaaacggttgagacctgactttggttggtcatgggaattggggcagtttcctgtcccacgccgaatccgaacaggtaggtgctcattccgtgcgaactgtccgctgcgctgactcagctgttcaatgttttggttcggccgcgaactagttcctcgctgactcacggcgagccagcattttgttctaacgtgtgtggtggcgcagggcgcatccaattttgcggttcggtaaaacgtgcttaacgaaaagctgcatattaaactgcttgccggactcgtctgatcgccgttaccttgtacctgtgctgcggctgagctatcggcaacacttgctctgcctttagcttggttatgcccggcagttaggcacgccacatccgcccagaaaagtcaaatataccttcctaatttgataacaataagccgcggcgctgctttaatttcaattaagtaaaaaaaaaacacggtgggagcgaggtttacgtcgcagattcctataagaacaacccgtatgtttgtgcgcgtgtgtgtgtga

SEQ ID NO: 35483 - DNA, 999 bp, DROSOPHILA
atgggatgggactgggcggtcggaggtatatccgatgagattccgaggacaacgggaccagaatgcatcaactacatgacagatcgacgtcgctggttggagacgatactactgtccgccctcttcatctttataatgcaccgctcctggcaacgcctagcgccgattaaacttccgccgccgcacgagatacagaagccacacagtcctacaagactgtttctgctaatagccttgtcaatgatttttggcattgagatgggcttcaaactctccggacagtcaatgattttcgccttgaatccatgtcatgtccagtcatgcctgcagatttatcttttggccgccaagccgacgaagacgacaacagcgctctttcgtatacagatgagcaatctcaacggcccatttctggcgtttcttttccccgaggtggagggccgcacatatcccttcgagcaggccacctattggatccagcatgcactgctctatataataccgatttacattatccgaagcggagcgtacactgtcgaggacctcagcgagttccactggtcacatataggtaccgccttcatgctgttttatcacttcatccttctctctccgctctcaatttttactggtatcaatctggaccacatgctctgtgcggctatgtcagatccgttccagggctcgaattaccggatatttgcgtgctgccaccaagcactgctctgtccgctgctgagtaagggcacagtggtgctgttcggacgccggaatcggagcagcagcggcctgaccggatcgggaagtatgccggagccgaggggcgaggctgcccagtatcaccaattaacccaaggtgactatgccatgcaggaggaggcgatattgcgacaccgatttagcaaccaggaagcggtggacgatggacatccgcatgacgcaggggaaatggcgtcccttacagcagagtacaccatgccaacaaccaagatcgactag

SEQ ID NO: 35484 - protein, 332 aa, DROSOPHILA
MGWDWAVGGISDEIPRTTGPECINYMTDRRRWLETILLSALFIFIMHRSWQRLAPIKLPPPHEIQKPHSPTRLFLLIALSMIFGIEMGFKLSGQSMIFALNPCHVQSCLQIYLLAAKPTKTTTALFRIQMSNLNGPFLAFLFPEVEGRTYPFEQATYWIQHALLYIIPIYIIRSGAYTVEDLSEFHWSHIGTAFMLFYHFILLSPLSIFTGINLDHMLCAAMSDPFQGSNYRIFACCHQALLCPLLSKGTVVLFGRRNRSSSGLTGSGSMPEPRGEAAQYHQLTQGDYAMQEEAILRHRFSNQEAVDDGHPHDAGEMASLTAEYTMPTTKID

SEQ ID NO: 35485 - DNA, 2568 bp, DROSOPHILA
cgccgaatccgaacaggtaggtgctcattccgtgcgaactgtccgctgcgctgactcagctgttcaatgttttggttcggccgcgaactagttcctcgctgactcacggcgagccagcattttgttctaacgtgtgtggtggcgcagggcgcatccaattttgcggttcggtaaaacgtgcttaacgaaaagctgcatattaaactgcttgccggactcgtctgatcgccgttaccttgtacctgtgctgcggctgagctatcggcaacacttgctctgcctttagcttggttatgcccggcagttaggcacgccacatccgcccagaaaagtcaaatataccttcctaatttgataacaataagccgcggcgctgctttaatttcaattaagtaaaaaaaaaacacggtgggagcgaggtttacgtcgcagattcctataagaacaacccgtatgtttgtgcgcgtgtgtgtgtgaaagagcgccgaagatgcgcaaaaacgtcaattaattgcagcggaagcaacaacaacagcacggcgcaaataacgtggggccaaaaggtgcgaatgaagcgcaagaaaaagaaaaatcaatagaaatagaatgcaaatcgccggtgaacatgtatcgatatacggcccatgcccaagcccaagcccagatccaagctaagtccacagccagaaggagccagagaggcgccgctattaataaacaataataatatcgcaatatcgaggcggaccggaccctgcgtcgcctacgcagatgatgcgttgcaaacgtcgggttgcgtaattgccgcagtcgagtgtgcaaatccgaatccgcgcaaaaaccgcgaataccgaactcgtactttgctgctaaagtgttagaacaaagttcgtggtcagattctcctctctagagtgtgagtgtgtgtgtgtgcaagtcttggccgtgcgcctgtgtgtgttcacctcggtgtaagtgtaagttctgtgccaacaacaacatggccgccgcaacagatgtttctgccagggcagccgcggcagcatcgtcgacgtcgccgcgcacagcagcatccaacagcagcggcttggccggcaagccccccggccccgccccatcgtccgcaggagtggcgggcgctgcgggagcctcctccaccggtctgcccgcctccgtctcgcacttctactacaagcacggcctcttcctgtccagctacccgacgtgtgcctccagcatcgccttcatggcgattctgctttcgtggtcagtgccaaaactttgcagcacagcaaacttaacaatatatgaacattatatatttatatatatgtaaatatatatacacaaatatatgcatacatatattttatattatattaatattatgttaatattatattataaaattgcttggaatgaccgcattggacttgacattgacttcaattttatgaacttttttcaacacccttttatatgttggaaagcgaaaataatatcaattgcagattttaattatcttaactagcttaaggaagctgggattggtcgaaaccgaattttaaaaataggaaaactagaatcgtttgtccaccaattagttttttttgccacctcgagttttaaagatatacgatttcgaaaatcaaaaacaattttaatcgcaattacatcgtttgcccactcttcagaattaaaaaaagttatactttaattttagtcttttcagagaataaagcgttttcccatctcttcaaactattatcaataaaaaacgttagccagcgacgctgggatgggcaaacgaccatccttaaaaacgatacgaattattgttaaggttgggcaacgacaataacaactaatttaaatgggtaggccaacattatttattgataatattcaattttaggacatttaggattacgataatttgctgataaggccgagattttctttaataggttatattttctaaattaaaccttttctcaaacctttgtcaaaataatgttatgcgattacaaaaaattttttttattttttgattttcaaaatgtttgatcttcaaaactggacgtgggcaaaaaaactgattcgtgggcaaacatttctgtatttcaaattccaacaagagagaattactcaactagaggaaatgcgaactcgatatttcataatttttttgggatatcgatagatattagggaacaaaatgagaaataatttaaaaattcttcaaaagtgtgtgcgtgactgttttgtaggtgtaaggaggggcgtggccaaatagtttttggtatacggatagaaattggatgaaaaataaaacgaaatcaaaacatttttcaaaagcgtggaagttttggccggcttgtgggcatggcaaaacgttttttgggtaaataatgttaataatattaaggctatttgcaaacatatcggaaaagtgttcaacaattgacaatgcattttcaaaaaaaaaaaaaaactttcatatttatttcattatctgctcgatcattgagttgagcaaaaacgatttcatagtctgtttcgtgatac

SEQ ID NO: 35486 - DNA, 303 bp, DROSOPHILA
atggccgccgcaacagatgtttctgccagggcagccgcggcagcatcgtcgacgtcgccgcgcacagcagcatccaacagcagcggcttggccggcaagccccccggccccgccccatcgtccgcaggagtggcgggcgctgcgggagcctcctccaccggtctgcccgcctccgtctcgcacttctactacaagcacggcctcttcctgtccagctacccgacgtgtgcctccagcatcgccttcatggcgattctgctttcgtgcttaaggaagctgggattggtcgaaaccgaattttaa

SEQ ID NO: 35487 - protein, 100 aa, DROSOPHILA
MAAATDVSARAAAAASSTSPRTAASNSSGLAGKPPGPAPSSAGVAGAAGASSTGLPASVSHFYYKHGLFLSSYPTCASSIAFMAILLSCLRKLGLVETEF

SEQ ID NO: 35488 - DNA, 4988 bp, DROSOPHILA
cctcaaaggtaatgaacaaagatagataagtcttcaatacataaaatgttgatttatttataaattcaatttacacttttaatatcaatattgaatcgaactcatccgtaggctttgtacgatttgttatgggttaccgttttctggtgtttcggtacctccatttatttagtagcgcattacgccactttcgtaacgatttataaagctgaaaaaacaaaagaaatttataatttccaaaatattgtttaaaaaataactaagcagatggtacattaattgctgtatgtacataggtacatgaccatacctttttccgtacgctccacaaaccaaaaagtcttcggctataaaaacgcagaatatccagcaaaatttacaagctttttacatttatggaatccatttatttacattaatcttattctgaaatccgcttagactattgatatatgcaatttatatttggaaaatgagctaggcatgtgctttctatatgggtttctagctctgtagcctttataatattattttattgcaccgaggcaggtaataacgagttacatttaatgagcttggggacttacgtaattaacacataatatacaacacgataacattacattgaatgtgtatttatgtgcaaaagttgcttggtacatacatatatatatacagcgaaatggagttttgtgatgtgctatcgtttgccctttataacctttatctagttacaacagcagtaggagcaaattcttagtgatgtaggtaaatcgttgtttaacctattgaacctgtcgcggatgcgatttccaaatagtccagccatgctggaaagtaccagggggattgtgtggagtgcagagtgagagattcgaaatgcgagtggtgcaagcacacagtgagatcacaggccaattgtttccgctcagagctgctcgtcggcctgcaaggataccaccacctcctcctcccctagcagctccacaataagcgtgcctcacctcttttcgctcactgccgccgtccgcccgccggctccaagtccggaggatcccccgcccgcaccacctccgtgggcatttccgtgctgcaggggcatcgagtcctgccgatgaaagctgcccacacgacctgaccctactcctcctcctactccacctccagctccaccaactccgtgattgctgttccggtgcagcgaggcccgcagattgccagcggttccacccacgtacgtggagcggcgcatggacatcacactggtattgtccatcattccagtggccgttgagtgctgccgcaggtgcggctgccgcttgacgcagatgcagcagaggtagcgattaaagtgctgccgaaacaccccggacacgcagtagagggccacggggttgacgcacgagtttaggaagctgcaaattgaaaacaatcgggcaggttagtgccaatgaacgattctagttttggcactgaaaaggagctaacacattttttttataccctgccagagggtatgtgacttcagttagatgtatatagagtatatatgttttgatcaacatcacaaccgaatctatatagtctgtaaggttggaaacgagttgttctaccaatctacgattaaactccaatcttcgtttgtttcataattcaaaaactattaaaactatttgaaatttatagtataagtttcagtagtgcacaatatacccatataggatcgagaatatcttttgtactttgctgcataaattcaacccaacttatagaaatagatacatggacattattcccacagcaacttgcatttaaggagtctaagtcattcctttagaatgcgagtggtggtagcgaatgtgtggttagaccattcctcagatggtctgtctattttgtgaccctatactggatttaacgtccacccatttggccagaatgcaaatggctttgacgacgagcggcagtgaattaagccaccaaattgctgacacattatttttgagttttactgcgctaagtgacgcccaaattggttcccagagtaaaaaggggaaggacacaaaattgtgggacgcggactgtcaacaaaaataaatgtactggtaaaagttaagagagtggggcacccatgcataatctgttttattttaaaattaagtcaaaagccaggggcactgccactaaagtgcgcttataaaactttaaacttaaaaacttgaaaagcatatgcatgcaccaaatcgtctccaattacttttacgaattggtgtgactcagagcggtggcgaccataaattttgagccctcaagggatgcttgcatggcaaatgcaagcgtcgactcaagaaaaatgtccctctgatggccgaaaactgctgaaaacgcgctgctactcgtactgcactccctccactcacctcgtgcaaaatccaacgatgcgcagcacgttccagaactcatcgaagtcctcctcagccgttgggtagaagtggtaccacagctcaaacacgtggtacgggaagaagcagatgaagaacactgcaaagacagtgtcagccaattagagtgtccatggagccgattaagatgcgggaagcgaaaagtagcacagcggagtgcagaatgcggaatgcgatgacttacccaccacgaatgctaccaccatgcgcgccacatggagtcgggccctagcctgggtgcggctctgcatgctctgctgttcgccgggcatgttgcgggcgctcatatggagccgcttggccatcatgatgtatagcgccccaatgatggacagcggcaacaggtagtacaccagtgccttgcccgccaccatgaacctggaagagagttacccggaaccattgcagattatcagtaagcctggccgactttcaggcttcaagaagaataaaacagttgccatggagactgaaggtcgaattttcaatttcccctcccaataatgaacttggcgaattcactcgaatattcgagcgacatgacagagtgttaagaatgcccgaatggacgacattaaattccgcctctgctggggagagccatataatcaagcggaggggcccgggccctacaaactccgaatgccatttcctcgctattttgcggctcttagtgtggtcgaaacacatgccaccaagtggcataaaaataaagcatgtcggcatgccgtaaatgaaaaattagcgaccagttgaggggcgactacagctgctcagctgctcagtagcgtccattgccccctgtttcattcaggatctgtgtaaattacatcacaagcagattatgtggcaacagctgacgccagccgcacgaaaggatttccagagtgcgccacggcagctacattgatgggaaaaggaattaagttcaacttgccggggcttgcgagcttaagcacgtcaataaggaggcacggcatcgtgcggaggtgttcttaagaacaggtaatagcgttgcatcggctggcggatcagacagcttgtgggtgtgctgtgattaatgattaatgctctctgatgggaacggaggctccagcaagttaatggccaggccctaacatttgacatatggatctattgtagtacaagtgagggccgggaaaggcagtggtatcaacatactttgcatactccgggtcgcgaaatggggagcacacttcaatggtcatgttaccggtggctgtgaacacagggtaggacttgatgtcggagaaaagaaccgaaggcatgcccagtaggatggccaggatccagatcatcaccgcagtaaagacagtgagcggcttggtctattggggaagaaaaatatgtgtaagcccattccgaactgtcgttcgacagtgactcacctgaagcttgcgtaggggatttacaatggcgcagtaccgctcgccggaaagggcggtcagtgtaaacacggacaccccgatggatatgtccttaaagaactcgctgatgcggcacatgttccgctcaaagggccagctttcctgcgtgtagacaatcgtggccacaggtacacacaccaatataaccaacagatcagccagggccagtgaaagaatgtatctggaagtacatatatgaaatcgacaaagggttactatagataactcgaatttaatcaagtctgtttcgttgccatttcacccggaattaggttcctttgggctggaatgcctttgtttttttcaagggcaagtcaaaatcctttggaaaggtcctgacacctacacatgccatgctacatgcgccccaacccgtttttagacgaatgctgttcagagcaaagtaaaataacgattgagagcaaaacagcttgacattgacaccaacgacctcctgtgaaccagccagaacgagtgttgagtcctcggacgggggaatcattagaactgctggatttggctgattgcatgtgacatgaattccaacctgacacgttcccagtcatcgtgtctagacaaacagtcgcgacaaagccgtcgagcaaactgctaactttccaccaggaccattacgctggccaccacaataactgccccaactagtggctcactgcaatcagggaccattttggagtgtagtagaggcagttttcgggcaatcaatgtatacttatgaccacttacacttacagattaagttgctccaaagcgaagggagggagacagtggcttccaaactctggcaatggcttccttagcgactgctgtcaagccaacatcgtggcccagaaacttttgattcaatgtacatttgaatttctgttacaagcctgcacaagtttcaaaagttaataaacatttgcatagcagacggcctccttccaaagccccaccgccagctgtcgggttgcctctgtttcgtagttttcttgtcaaaaatagaaaacaataaaagtgggacagaatacagcttgtaaatggtcaaagatgaatctggaatccggcttgtaagaccaca

SEQ ID NO: 35489 - DNA, 1014 bp, DROSOPHILA
atgtgccgcatcagcgagttctttaaggacatatccatcggggtgtccgtgtttacactgaccgccctttccggcgagcggtactgcgccattgtaaatcccctacgcaagcttcagaccaagccgctcactgtctttactgcggtgatgatctggatcctggccatcctactgggcatgccttcggttcttttctccgacatcaagtcctaccctgtgttcacagccaccggtaacatgaccattgaagtgtgctccccatttcgcgacccggagtatgcaaagttcatggtggcgggcaaggcactggtgtactacctgttgccgctgtccatcattggggcgctatacatcatgatggccaagcggctccatatgagcgcccgcaacatgcccggcgaacagcagagcatgcagagccgcacccaggctagggcccgactccatgtggcgcgcatggtggtagcattcgtggtggtgttcttcatctgcttcttcccgtaccacgtgtttgagctgtggtaccacttctacccaacggctgaggaggacttcgatgagttctggaacgtgctgcgcatcgttggattttgcacgagcttcctaaactcgtgcgtcaaccccgtggccctctactgcgtgtccggggtgtttcggcagcactttaatcgctacctctgctgcatctgcgtcaagcggcagccgcacctgcggcagcactcaacggccactggaatgatggacaataccagtgtgatgtccatgcgccgctccacgtacgtgggtggaaccgctggcaatctgcgggcctcgctgcaccggaacagcaatcacggagttggtggagctggaggtggagtaggaggaggagtagggtcaggtcgtgtgggcagctttcatcggcaggactcgatgcccctgcagcacggaaatgcccacggaggtggtgcgggcgggggatcctccggacttggagccggcgggcggacggcggcagtgagcgaaaagaggtga

SEQ ID NO: 35490 - protein, 337 aa, DROSOPHILA
MCRISEFFKDISIGVSVFTLTALSGERYCAIVNPLRKLQTKPLTVFTAVMIWILAILLGMPSVLFSDIKSYPVFTATGNMTIEVCSPFRDPEYAKFMVAGKALVYYLLPLSIIGALYIMMAKRLHMSARNMPGEQQSMQSRTQARARLHVARMVVAFVVVFFICFFPYHVFELWYHFYPTAEEDFDEFWNVLRIVGFCTSFLNSCVNPVALYCVSGVFRQHFNRYLCCICVKRQPHLRQHSTATGMMDNTSVMSMRRSTYVGGTAGNLRASLHRNSNHGVGGAGGGVGGGVGSGRVGSFHRQDSMPLQHGNAHGGGAGGGSSGLGAGGRTAAVSEKR

SEQ ID NO: 35491 - DNA, 2321 bp, DROSOPHILA
aaactgctaactttccaccaggaccattacgctggccaccacaataactgccccaactagtggctcactgcaatcagggaccattttggagtgtagtagaggcagttttcgggcaatcaatgtatacttatgaccacttacacttacagattaagttgctccaaagcgaagggagggagacagtggcttccaaactctggcaatggcttccttagcgactgctgtcaagccaacatcgtggcccagaaacttttgattcaatgtacatttgaatttctgttacaagcctgcacaagtttcaaaagttaataaacatttgcatagcagacggcctccttccaaagccccaccgccagctgtcgggttgcctctgtttcgtagttttcttgtcaaaaatagaaaacaataaaagtgggacagaatacagcttgtaaatggtcaaagatgaatctggaatccggcttgtaagaccacattgcgtaggggcagaactttttctaagttttcgaatgtttacgaacacgaggactttcaacatgttaatcgagatgagctagctgactatcttcggatccaaaggaaaaaccagataatgtttttatttttcgcaggaaatgttagtttattgtcggaaatcgcagacaacagatggcttgtcatcatattcgctgtttgcttcgaggagttaaaaaccttttattaattcactcttcgggctacgatgttatttgtactgaaacaataaaatcaaatgtggcctataaggctgtccatgaattttgagtagcaactcccactctctttcgcgaagtgacgagctcattttaggtccaaatgtgcgaccgtataatataaagacattattatttatggcccggagagggcggtccccaagaaactgcctgtatcaaagcggaagaccttcaatagatgttattccagggccccctgcctacttccccaccttctgcgggacccccacagtgcgtgatatatccacttacgtgttgggtatgttgcgcatggagcggtggcgaaagaagatgatgaccagcgtgccgttgcccaaaactcccacaatgaagatgagcgtgtacagcacggtgacaatgtacgtctccgggcggtccagcacgggcacatacggtactattccgccgtcggcgctggcattgtggcccatatccagtgccagaccctcctgctcctgctccagaccttgtccggttgccaggagtccgctgtcattggccccgttgccgtcgctatccgccagcctggctgccaacgtctggccaacgtccatcaaggaggcgtacatgtggggaggagggagctgctcctgggcaagatgtctcaatggtgtttctatgcgtggcgttttatggcctcgctttgcccacttccgtttccgtgggtctgctgccgtccgtccgtcgaaagccgagagccgaaagctgccggttctgcctggtcctccgtgcttatgtcgatgatgttgctactggtgttcccacgggctcttgttttattttgcacattgtgtttggccgtgaccactgagctcgctggggcggttgcccgtcagcttctgcatgactttcgacagttggcgccggaagctgttaggggagaaagtgagataggaagagaaaagagagagagagagagtggttccgtcagttcagactaattcagttaaactgtaatcggtgtgcatttgcctgttcgtaaagcacacgctgcgctgcggcttatctacgcaggcaaatgcattacctatgaagcgcataaataacacgcatacgcagcgtgtgtaacggggtgggtaaaaagaatttatgactcggcatctgaggctgaaccgtgtcgtgtacatcgtgtaaagcctaagtgcgtatcggcataataaagaatctccttaacatgcaatcgctgaccatgtgtgcatttaacacgaatttacaacgccaataatcataaatttcgaaatattcccccggccactatctgctgtgcggcaatcagagtctttcaaacatccaattatttgtggccctccctcctacccttcgacagtgattatctttcacgctcagttgccgtttctagacccgcaatcccactaatacgaaaacattcgtgcggaagccaatactttcaagtcgcaatcaaatgcgtttatcccctaaaaagaaagcagcgctgagcctgacgcccgactaagacagactctaaggcgggtttatctgggctgctgtcagcttgcgagggtgttgtcccgatgctgtttcaatttcgcttcgattcgatactagcta

SEQ ID NO: 35492 - DNA, 321 bp, DROSOPHILA
atgtacgcctccttgatggacgttggccagacgttggcagccaggctggcggatagcgacggcaacggggccaatgacagcggactcctggcaaccggacaaggtctggagcaggagcaggagggtctggcactggatatgggccacaatgccagcgccgacggcggaatagtaccgtatgtgcccgtgctggaccgcccggagacgtacattgtcaccgtgctgtacacgctcatcttcattgtgggagttttgggcaacggcacgctggtcatcatcttctttcgccaccgctccatgcgcaacatacccaacacgtaa

SEQ ID NO: 35493 - protein, 106 aa, DROSOPHILA
MYASLMDVGQTLAARLADSDGNGANDSGLLATGQGLEQEQEGLALDMGHNASADGGIVPYVPVLDRPETYIVTVLYTLIFIVGVLGNGTLVIIFFRHRSMRNIPNT

SEQ ID NO: 35494 - DNA, 2183 bp, DROSOPHILA
tcccgaaagaattcgccgacacgccgttcgatgaccagttctctgcagtgcgctccatcgtgcactctgtgtgcgatcaagtgctgggacgcagacgacccaagaccgcaaggaagacagtttggtgggctgccgtactttcttctaaactccaagaggtcaggagactaaggctgcggcttcagactgcacgttcgcgcgcaagcgacgatgctgagcaacttgtctctcattctcattctaaagtacaaagaggataactggaggcgcttagtgggagagaataaggacgatccatgggggcaagtctttagaattttccgtggccgcaaaaggacaaccgaactcggtacttttttccagtctcggatttttcgacaccctcgaaaatgacagttctctactctgaggtagatgcttgtgtcgcaaggttgaagagcagacgcactcccggcatggacggcatcaccgcggtgatggcggtgtggcgtgcattcacaagcacatcacagcgttgtactgccgctgtatcagaagtggatacttttcctctaagtggaagcgcacaattgtagtggcactactctaagggtcggataaggacaggagtgatcctgcttcttaccgcggtatctgtccgttgttgtttgttttcggcaaagtgctagaggggatcatggtgaaccgattgaaggacgttttacccaggacgcttgaagatgcttggagacacgtcgtgagcactgttgttgccagtcaggcaaaatatatgctcggaatcttcgtggacttcaaaggagcgttcgaccacgtggagtgggatgtcgtgatgaaacgactcatcgactccggctgccgagaagccagcttgtggagaagcttcttctctggcaggagtgcatgattagtcagaaggtatagttaagtgattgttccggtaacaagaggttgccctcagggatccatcagcggtccatttatttggaaccttatgatggactcacttctccagcgtctggatccactgcgtggtttcagcgcgcttgcagacgacttgttgcttttcgttgagggtacccgaatcgaactggagtagaaaggcgaacagctcatgtccgttgttggtgcatgggaagtcggcgttgccgtcctcaccagcaagacggcgatgctgctgctgcattttgcccagagtaggcacactacagtacggtttgcaggagcaagcctgccgtatgttaataaatactggtaccttggcgttacagttgtcgagcggtaaaatgtttttccgcatatcaagtcgctacgagatcgtctaactggagttgtgtaggcgttggcacgcgttctttgtgtggactggggcctctgtccacgcgccaggcggacagatatgtcgaactcatggtgccatgtgccttgtttggtacatcggtctgatggaccgatggggcatctggtctacatcctgcttggatgcctaccggtataccgtacagtgtccactgtggcaatgcaggtgctcggtaacgctcacccactcgacttagcctccaagtgcgcggcggtcagagtaaagctccgacggaactacccattgaagacgtcagactggctgtatggcgaggacctgtcaggtctgagctgaactcataagatggcgagactggaagaatgcttactaagcgcatggcagcgcagatgggacaaccctgagtaagattgagattgagtaagataacccaaaattaagattcgttttcagcgagcgagacttcgggttttcactacgcgccggattcctgttgacgggggcacgtatcgttgaacgcattcctgcataatagaggtctgagcaacacgcccgcgtgtctcagacgcaagaatggcgtttgggatgtctctggagtaacacggacaatgagactgtatatgcggtacgctggcaatctcttccaaatgcggcaggaaagtatacatcaaggagcggcgagtgggttgccagtcccgggctaaaaagccgaaactggtaacaacatcaggtgcccccaaatccgggcttgtcggtgccgaaagagggggccaaccgagcactaaccggtaccatgggatgagcatcgacgccacatcatgttatgactgaagcacgcttaaccaagccccgctcatgagaggtaagc

SEQ ID NO: 35495 - DNA, 183 bp, DROSOPHILA
atgcagcagcagcatcgccgtcttgctggtgaggacggcaacgccgacttcccatgcaccaacaacggacatgagctgttcgcctttctactccagttcgattcgggtaccctcaacgaaaagcaacaagtcgtctgcaagcgcgctgaaaccacgcagtggatccagacgctggagaagtga

SEQ ID NO: 35496 - protein, 60 aa, DROSOPHILA
MQQQHRRLAGEDGNADFPCTNNGHELFAFLLQFDSGTLNEKQQVVCKRAETTQWIQTLEK

SEQ ID NO: 35497 - DNA, 2074 bp, DROSOPHILA
ctttcctccctcgggctcgcctccttcgggttctcctcctccgggttcttaccttttgctcgggcgcgtagccgcgaatcgcgtgactcatggcccgccggcctccagccgatcgcattcgcttcttcccaaacacgggcttccggcgcgtcgtcggtgtccatcggtgcgagccacatccacgtcaccgactgttggtgccaaaggcgccctcccacctcgatcgtgcgcaccgccgacgtgtgcttgcggaatctcacatgcctgttgtctatctcaccgtggccactccccttcctggggtggtgggcgtgcgcctgcaccggcgtcggccgctgtggtgtcggtggcggtaactgcgatccggtgttgttgcccacagtgcttcctcttcctcctgcagctgagcggctgctcgtgccatgataccactatctgcgggaaccgccgcagggtggagactcgcgcctccatgaaactcctcatatccaccgggttctcggttggcggggcgactccgaggcctatccgcccgtgaccctgcgtagcccgccttcgggtacgccatccgcaccttggccatccgcacggtctcgtcctcgtccgatgacaccacctcgcccccgtcgtcgtcctcctcactctctgaagagagggttatgacctcgaccgcgccctccgtgtccactaccggatgctcgtcctccagttcgacatccggaatctcctccgggtcctccacactccccggggatggagatcgcgaccccctgggtgccgccaggagctggagctaggaatcggaatccctactccatatatcgccccgggctgttccccgacgccggtctctcgtacccccgggcgtgaacaatgtgtgctgccatgatgatctccatattgagaagacggactcaagcgcaccttccttctgctccttgtgccgttatatcgtgggcccgtaccggtaacggatctcttcccttacgcatattcgcagctgtgtgtgtttcaaccgttaactccctgtcccgctctcgcgctccaacgggccttttttattattcgacttacggttataatcttctaaagataccacctacaagccgtaggtggcatgcacgattcataaactgcgtactaaaacaaaaacctccgcgtgctcttcagtccttgctgtctcaccgggactgccagtcaaggtatgacttcggtgcgcaggatgtgaggacaaatcgcactccaatccttcattggagtccatgagggctcctgcttcctcttcgcccgccaccacacgggacgactgtttgagcttagccacccactctgttggccatctcgtctgatcggacttaatgataaggctgtgacccagctccgatgcctcactgttcgccaccagccgcgaacaggccactagggctatacggggtacttgccagcgactttagctgctccctctcctcctggagcagtgcattagctcatgttcagctttttcttcatgatcgacgtagaacaagcattgggctgactctacgtggcggaacctgagtagataggcccgaaagcagccatggtccgtgaggaactgggttaggttgtagtccaggcatatgtgttgacactctgccaagaccgtcaactcagggatgagctggtgtgaccaccttccccgccgcgacgtttgccatctgttctgccactcacccagcatccacacgtgtgcctctagccaggaggcgccaccccgctttaggctgaatgccttgatctccagatcaattggtggaaggcctgacagtgctagcgccgcgtcttcggatatggtcctgaaacctctgatgagcctgagggccatggaccgtagccccgagcgcgctcttttcaggtacgaacccctgttagtagcctttgctaccgccaccagcagtttcctggccggagatcttgggccaccgaagttgggcatgagtatagccagcgaggagtctgtgactgctgtcttcttgctggtatactctgtggtctatcattacacccagatactttagggactcttgggaggtca

SEQ ID NO: 35498 - DNA, 1001 bp, DROSOPHILA
atgcccaacttcggtggcccaagatctccggccaggaaactgctggtggcggtagcaaaggctactaacaggggttcgtacctgaaaagagcgcgctcggggctacggtccatggccctcaggctcatcagaggtttcaggaccatatccgaagacgcggcgctagcactgtcaggccttccaccaattgatctggagatcaaggcattcagcctaaagcggggtggcgcctcctggctagaggcacacgtgtggatgctggccctagtggcctgttcgcggctggtggcgaacagtgaggcatcggagctgggtcacagccttatcattaagtccgatcagacgagatggccaacagagtgggtggctaagctcaaacagtcgtcccgtgtggtggcgggcgaagaggaagcaggagccctcatggactccaatgaaggattggagtgcgatttgtcctcacatcctgcgcaccgaagtcataccttgactggcagtcccgggggtcgcgatctccatccccggggagtgtggaggacccggaggagattccggatgtcgaactggaggacgagcatccggtagtggacacggagggcgcggtcgaggtcataaccctctcttcagagagtgaggaggacgacgacgggggcgaggtggtgtcatcggacgaggacgagaccgtgcggatggccaaggtgcggatggcgtacccgaaggcgggctacgcagggtcacgggcggataggcctcggagtcgccccgccaaccgagaacccggtggatatgaggagtttcatggaggcgcgagtctccaccctgcggcggttcccgcagatagtggtatcatggcacgagcagccgctcagctgcaggaggaagaggaagcactgtgggcaacaacaccggatcgcagttaccgccaccgacaccacagcggccgacgccggtgcaggcgcacgcccaccaccccaggaaggggagtggccacggtgagatag

SEQ ID NO: 35499 - protein, 194 aa, DROSOPHILA
MPNFGGPRSPARKLLVAVAKATNRGSYLKRARSGLRSMALRLIRGFRTISEDAALALSGLPPIDLEIKAFSLKRGGASWLEAHVWMLALVACSRLVANSEASELGHSLIIKSDQTRWPTEWVAKLKQSSRVVAGEEEAGALMDSNEGLECDLSSHPAHRSHTLTGSPGGRDLHPRGVWRTRRRFRMSNWRTSIR

SEQ ID NO: 35500 - DNA, 2225 bp, DROSOPHILA
ttttggtgataagactaatcgaatcgcaaatcattgcaggctccgactttcccgggcggagcgcaagtacggcgtgcagggcgaccgcgccaaccaggagctgacaccactgcccatggccatcgaggacgtgaatagtgacgaagaggaccacaccctgttcgaggtcaatcgccagaacatacgcatattatgaaatagcagacacatgcacacgccaaagatccgtttggtcgcaccgccatttccgacacttctcatcagaacttgccttgtttcgtagctatttaatgctttgtagatttgagctgtagctgccagccaatagccgactaagcccactaataactaagttctctgcatttctcctactcgcagttggttcaggtttaacgaatcaaaaaggaaaacaaaaccacttgtgataacgattacgatgatatgtatgcaaggcattaaaaatctcataaataccaatgctttcaaatcgcctctgcgtcgatgttccatataaataaatgttatattacatgtactcgcttctctctttattcttcacactttcacaggacgaatctagctataattggttacaaacgtagacttaatacaggttaatgggcttatggatagctgtgacaaaggatatacataggctggatacaggcagtatacgcgtacgcacggaaacaaatgcactaacttgtacttattaactaggatcacataaataatttattaacaatactgcgactgcggctgtggctgtggcggccctgccctgccaagaaataccacaggagcttacgactaccgctaacactaaacttgagcttcgctaacgttttacatttgtagttggcactgtagtttgtaatattccgccgagccattttccattctcccgacctaccagagtcggatctaggagctaactggtgtggctacatagccaacggcgtgggtcggcgatcggcatccccgatgggaattcccgaaatcaaatcatgctgccaaacatccgtttgccgcgcgtcagaaccaggctgaccaccatcacagtcagcaggaaaaagaccaggctgaggaacgtggtgatgaagcgacatctttggcggaacttcttctccttctccattttcagacgcagctgttccgcccgcggcaggtcgagcgtgaagtccgattcgggtcgcgaggatggctgcgaatagtaagatgtcatcttaagttgtttttcaatatccaggtaaaatttcaattcactcattttgtagggtagcttaagaatagattggaagcatttataaaatttcggatatggacgtagctagcttagttagtgattgttaatatcagtaaacttcggtatttcaaaaaaatatatacatttaaagaaaatatatatatattgcgattttattatttaacaattaaagagaaaatcaccacattttactgcacatatctgcaccctgccaccaaaataggcaccgaggggcagttcgatgtggagagttaccactgtaaatgccacttgggcccgcaattaagttaattaatatttgatgatataagcgcttcgcttttatgtaaatcgctgaccatcaacgaccgctgacgatcttctcttgacattgattatgaccactttaatcgcgcataaatgcaccgatcctatttgagccaagatatgtaaagctagtcgcgtccaagcgtttcaggtcacaaaatgtttggccataaatcacagcccaaacagcgtctcgtgcctgccaatatttgcaggttgagcagggcgtggtggttgtgtgctaaaaactcgaaaaataaacgaaaaagggctccaacgcacaacaatttgacccactgagctttgttttcttcgcttttgtcgctccgcctgtgctcatcttaattttttcccgctcgccttacttttagcgacacaaccttgaaatcttttcagtaacagcgaaaaaaaggtaagatagagacttgaaacaaaacgttaaccgtttttgctgatgctttttattcgttaccttttttttttgtccgattctcggtgaacaccttcaaagttatgaaactcttcggaaatttcacccagcaggtgcacaagatgaattagttgtactaacttctatatcccaatgacatttagccaccacttccggcggaagtgaggaaatctgcccgttgaaaaaccactttgaaatggc

SEQ ID NO: 35501 - DNA, 225 bp, DROSOPHILA
atgacatcttactattcgcagccatcctcgcgacccgaatcggacttcacgctcgacctgccgcgggcggaacagctgcgtctgaaaatggagaaggagaagaagttccgccaaagatgtcgcttcatcaccacgttcctcagcctggtctttttcctgctgactgtgatggtggtcagcctggttctgacgcgcggcaaacggatgtttggcagcatgatttga

SEQ ID NO: 35502 - protein, 74 aa, DROSOPHILA
MTSYYSQPSSRPESDFTLDLPRAEQLRLKMEKEKKFRQRCRFITTFLSLVFFLLTVMVVSLVLTRGKRMFGSMI

SEQ ID NO: 35503 - DNA, 2006 bp, DROSOPHILA
acgttgggcatgagtctagctagcgaagaggctatgactgctgccttcttgctagcgtaactcgcgtgatcattaaacgatagtctgtggtctatcattacacccatatactttagagactcttgggaggttacctgtgtgccattggcggagactagcaaatttaccaccttcttactgctgcttagcaggactggctcggtcttgtgggccgctattgctagctcggctttctcgagccagtggatggcagcaccaatcgtagtgttacatttatcttgcaaccctgcgattgttttgacgactgctgtaactgccacatcgtcagcaaaacagtgcagatctactcccataatgaccaagatcatcatcgtacatgatgttccataggattggtccaagtaccgatccttggggaacacctgccgaaacacggtatctttttgggccggcttccgctttgtagccgccaacggctatcctcagatactccgggatccccatacggttcatgactcccgagattacgggccatctggcggtgttgaaggcgttcattacgtccagctaccgcccccaaatatgtccaataggcatagggggcggtagctgtttgcagcgtgtgccctccagggagagaatgaaggaaatcaaagcgtggtcgctcatcgttacgatgtcttgaccacccagttgttgttatcaacaagccctctactgaaaaaaggtaacgtcaataattgatgtacccctatcgttgttaaacgtcggcttccgaccgtggttcagcagtactaggtccagcattcccatggcgtctatcactgctcggcctctgaggttcgatactctgctgtcccattccactgctcaggcattgaaatcacctgcaatgatcttcgggcttcgtcctctcgcatggaccacaagcgcctccaggaactcctcgaactggttgggagtgtcgctaggcggagcatagcggctgtacatatgcacgtgttttatctttgcataggcgatttcccgcatcggtgatgcagccagttcctggacttggagagagctgcaacacttgatacctgactcgtctaggatcatggaggattgtcccgttccagtgacgtaaggttcgcttaggagcatgatgtctacattgcgctccgccccagtctgagccagaaagctctgagctgctgcgcaataattaacattgagctgtattacgctaatatgggcgtgcattatggtggttcttggcttcttctaagcttgctccgtaggtcgggcacgcaaaagctacccgtcgggtgctttctgtccacgtcgctgctgcaaatcaggcaatttggtgctgaaacacaccccttgcctagtgaccacgttcacctcacctaagacaacattctccttgcagattgctgctcggtgaccgtagtcaagacacctgtagcatctcgtgggccggtcggtagcgttcaatagcactgaggctatctgggtcccgtctcgcattctgcgaaggcccttgacatcccctggatctgggcgaccatgcagctgtggagctcctctgctgtcgaagcctggtcctgtccgctgcaggatagcgcttttctttgagctcccgtgcgcacagaggccaaatctttgagcgccgcttcaagatcgctctcttccctctacttcgagcaacggctcaccttgctgtgttctccggattttgcgtacgttgctgcccagttcgctaagggtcgggtccgatctaaacttcctaagcatccctgcgtacgtaagcttcacccgtcttcttaacgatcagtgaatccggttttctgcgcaggcgcataagcttgaccttggtccagtctgcacccgtgctagcattcttgccgacaaatgcgtagctgcctcgcttggactcatttggtctgggtgtcgcctttccttctccgatgccacccatagtgtgggtgctcggcttgggcacctgaactttgggtttt

SEQ ID NO: 35504 - DNA, 375 bp, DROSOPHILA
atgcacgcccatattagcgtaatacagctcaatgttaattattgcgcagcagctcagagctttctggctcagactggggcggagcgcaatgtagacatcatgctcctaagcgaaccttacgtcactggaacgggacaatcctccatgatcctagacgagtcaggtatcaagtgttgcagctctctccaagtccaggaactggctgcatcaccgatgcgggaaatcgcctatgcaaagataaaacacgtgcatatgtacagccgctatgctccgcctagcgacactcccaaccagttcgaggagttcctggaggcgcttgtggtccatgcgagaggacgaagcccgaagatcattgcaggtgatttcaatgcctga

SEQ ID NO: 35505 - protein, 124 aa, DROSOPHILA
MHAHISVIQLNVNYCAAAQSFLAQTGAERNVDIMLLSEPYVTGTGQSSMILDESGIKCCSSLQVQELAASPMREIAYAKIKHVHMYSRYAPPSDTPNQFEEFLEALVVHARGRSPKIIAGDFNA

SEQ ID NO: 35506 - DNA, 4994 bp, DROSOPHILA
cctaacggggatatgatcgtatgcttcttcgtatgcttcgtgggccttatgagtgttcatcctaccacacaatgaaaatctttatcttataatacttgatattctgggcattcattaaacaatatttgagtcccttgttcttcagcttaaataatgggaatattttaccttaattttccttaacatattttgttatattatagttgttaaaaaagtatattaaatactgtggctaatttcgattaatcgactactagagaagcttacagttaagcccattacacttgcgctcagtaatattttaaaatattttagctatttgctctttcatcatcccttgtttttgtatacgcttgttatgattttgttaaaaaaaaatgaatacataattacaaatcgacttttgttctatatacaaactatcaagctaatcgcactccatttatatgatacaaacatacaactttttcaagctatgcaatgaaatatggcatttaatctattaccattcctagtactcgtattttagttggtaaaatttcagaaaagtgaaactatgtaatgtttcttgtaatcaatttcaaataacttgctgaagcgacttagctgtgcaatattctctaggaaattagtttcccttacgggaatcgctgcttatatcgatacggcgaaccttcgctgcaatctccagggaaacctccactgcaattttcttaactaatttacgccggcagaaactttgctcacacaaagccagaaggccagcagtcgagctctaaccacttggctatgccgccaagtcaaagataaactttacaccaaaatgtattattaaatttacgcagaccccgtaaaatttcagaccagaggaaaccggagagttgggatccggacaaatactggaggggactaggcaggcagctgtctgtcgccgcattgcgggcacggcgggaagtcctgaaagtcctgaaggattcttggcagccgctccctggagtttctatatattggttgtaatacttctgccgggagctggctggaattgctgcagctcggtgcgtacggttccagtggatgaggaggaggaggagtccgtggtcgaggcataggatgccgacgagcccgatgatattgtggaatcggttcgcggttggcatcccaaaggatttgcggtgttgtcagttgccgttcttgcttgcaaatccttgccggaagcctggcgttgcaattgaggaatgcgacttgctgttgccattcccgttgatccaagagattccccagctggtccggctggcgtggcttgggattgagactccgccggctttgtgggcctgggaatgagcgagttcctcgaagacgatttcatgggctgcgcgtacaaatcgccattgggcgccgcccagctgcaacttccgggactgggcctaattgcgtaaatgcactcggtccgctcgccaccctgagggggcgtggtttcgtgggccgggggtacggcctcgaaggattgaaaggatccactgagagccgtcattgccgaagactctggcattctcttcactcgcttgagactggaggcgggtgatttgggcacaatgggtccaacaatgagagtgttctgtgtgatttggggctccttaaggtcctcgtcctcgcctccacaatctctggccacttggagtggcgaagtggttatgttgctgctgtccctccgcctcctgcccagagtgttgctaatggttcgcggcggcggcagaggagcgttgaaattttgtggcggcagggaatttctcttatagctgctgttaattaaatcctgttctgtgggcaggactttgggataattacgctgacgcaaaagctctagttgctgagcagacgtcaaaggtataacctccagaccatcggagtcatctctgcttgtcacgttgatgtccacatcgtcggcatgcacaaagctggtgacctgctcatcagcagctaggatcatgtccacaggatccgaatgggaatgggagtggttcctcaagggatattgctgctggaggatttcatcactcggttcggttagggccgaatgttgtctctgcaggagcatctcgtagtgctgcggctcgtgcatgtgttgggggatgagtagagctgcgtcggccacctctatatcctggcatatgatcagcctgccatcggataaaatcggttgtggaggcggagtggccgtgttgaagctacccgatttcggggcttcctgactcgacatccactcacagaccttagtgtgggtgtccactgtagagcaactcagcgatctctgacctgtcttgatggcctcataggtatttgatttccttgtcatctccaggacgaaactatcatctccgtcgcgggacttgctgcacctcttcagctcctcatcattggctccatcgtagctgaggatggtgccgcccaatttaggagccggaaaaggtagagccttggcccttcgacggcgctgtcgcaacaaaaaggttccataaatcaggagattgagaactattataatggtaattaaggcgatcagtagttgcatcgtggcctcggatttggccacggtttcaggaggagcctgaggatgatcctccccactctccagtgagttggtggaggtcaccaagtcctcgaaatcactaccaccctgcatcttgtgcacatgaccaaaggtgggtggagcattgtacatattttccgccgctgtttctgtcgattcgccactctgtgttggtccagctagactgggttcctggaggagcagctttaatgtcctcacagggtcctcggctccgtggtccctcggcccgtacttgctcatgtgacctgtaatcacctcttgcccgggcttctggagctgctcctgaatggccgctatctggttgagttcgtccgggagctctttgttccaaaaattcatataaatctggcggtacttgtagcccactgttggcggaatgcctgaataaaatagggggaaaaataaaatggtttgacttaatggctatttttccgaaaacgtatctaatgacatgacacctaccaatattgagatatgcctgagcccgcctattgaattccggccaatccaggtcgtagcgatcccactccaaggcatgtgaattgatgaagattcccttccatggggccttgggattgctggaaaaacattatagcaaccaatgagaatttttgcgaacggatatgttatcgtctgcttcacattttagctttcccttttcgagaaaagaatcccattttatagacataatccgggcattcatttgctcatttaaatgatatggttatggccaataaccacactcgccggcagccgaatgccaaaacgccctgctaacgatctctgatttcagctctgattgccgcacccatttccattttttttcccggcctttatttttatccctgagcggtggccactccaactaataatatttgcatgtgctgccacccaatccggctgctgtagaataataataaaagcggcagtaaaaattctattcatttcgctgtccgagcgttgcagattgcaaaacgtgccgtattcgaaggcaaagccaatgccaaaccagtgccactagtcgttgccattccagaactcatgaatatcccacactacatccgcacccgcatccgcatccgcatttgcatgcagatctgtgactcttcgtgttgatgttgatggccctccctgcctttatagtccacagccttggctgtacgagtaccacaaactccccagctaactttctccaaatgcactttgcacatccgctctgtggaccgaaagtccagcaggcagtactcacccggtctttacgaaattcgtccaatatgccattaccgcctcggaaagcagcttttcctgcaccgtgtagttgccactgggaaagggacctgcggcggccaagggagccccgaagataaacgccaattcctcgcccataatgctatgcggtagctgtaagtgaaaatgtatatatatccagttcaaaagtgtcagtaaatcaaaccggcaatggaatactctaaaacgcaggccattaaagcgggttgtgggcctttagctataaatattaaagtatcaaggtagggggaggaaagtggatgatttggtttcaaaactaacgaaactctctgaatatgccattcttccgaaatgaaatgaactttaacccttactataaaagtggaagactgaaataatatacaagtgtcttagaagtaactgctcatgtttctttaaatacagagaggtaaacgcacactttgaagcgtccgcttcgcaaggactctgatttacggaaggaaaaataatgtgttcgaccttcatcactgagtgtatattacccggcaaaatgtaatgcggttagaaagtcggtgggtgactaggagatcggtgtgaaatgttttcagcagtattttaacggctctttttttggccattgtgaccaaccggcatcaatcttcttagacggcctgcataaatatttagctagccgaagacaggagcaaaaaacaggacgaggacgacagcgaggacgggaatgcgaatggggacaggacgagaccgccggagggagtcgctgaatgtaagtaggtaataaagccaagtttttattgttgccatgaaaaatgtaacaaagtcacaaagcattgctgtctgagcacatcaaaatgccactgtcccgtagctgctgactgttcttttcggttttggccatcggacgatgtcctctgcgccgctgaaatcttttatggcatttatgaatgatgaatttcgcttttgattttgattttcattttgcaattgtgtgagaatttgatgaaacgggcaaacgaaattcaatattgctgctccgttgcaaggcttagtctaagctttttgttgagagttctgtgatgaatgtacacggttcaatggtcctataaagaaatcaaagcta

SEQ ID NO: 35507 - DNA, 2241 bp, DROSOPHILA
atgggcgaggaattggcgtttatcttcggggctcccttggccgccgcaggtccctttcccagtggcaactacacggtgcaggaaaagctgctttccgaggcggtaatggcatattggacgaatttcgtaaagaccggcaatcccaaggccccatggaagggaatcttcatcaattcacatgccttggagtgggatcgctacgacctggattggccggaattcaataggcgggctcaggcatatctcaatattggcattccgccaacagtgggctacaagtaccgccagatttatatgaatttttggaacaaagagctcccggacgaactcaaccagatagcggccattcaggagcagctccagaagcccgggcaagaggtgattacaggtcacatgagcaagtacgggccgagggaccacggagccgaggaccctgtgaggacattaaagctgctcctccaggaacccagtctagctggaccaacacagagtggcgaatcgacagaaacagcggcggaaaatatgtacaatgctccacccacctttggtcatgtgcacaagatgcagggtggtagtgatttcgaggacttggtgacctccaccaactcactggagagtggggaggatcatcctcaggctcctcctgaaaccgtggccaaatccgaggccacgatgcaactactgatcgccttaattaccattataatagttctcaatctcctgatttatggaacctttttgttgcgacagcgccgtcgaagggccaaggctctaccttttccggctcctaaattgggcggcaccatcctcagctacgatggagccaatgatgaggagctgaagaggtgcagcaagtcccgcgacggagatgatagtttcgtcctggagatgacaaggaaatcaaatacctatgaggccatcaagacaggtcagagatcgctgagttgctctacagtggacacccacactaaggtctgtgagtggatgtcgagtcaggaagccccgaaatcgggtagcttcaacacggccactccgcctccacaaccgattttatccgatggcaggctgatcatatgccaggatatagaggtggccgacgcagctctactcatcccccaacacatgcacgagccgcagcactacgagatgctcctgcagagacaacattcggccctaaccgaaccgagtgatgaaatcctccagcagcaatatcccttgaggaaccactcccattcccattcggatcctgtggacatgatcctagctgctgatgagcaggtcaccagctttgtgcatgccgacgatgtggacatcaacgtgacaagcagagatgactccgatggtctggaggttatacctttgacgtctgctcagcaactagagcttttgcgtcagcgtaattatcccaaagtcctgcccacagaacaggatttaattaacagcagctataagagaaattccctgccgccacaaaatttcaacgctcctctgccgccgccgcgaaccattagcaacactctgggcaggaggcggagggacagcagcaacataaccacttcgccactccaagtggccagagattgtggaggcgaggacgaggaccttaaggagccccaaatcacacagaacactctcattgttggacccattgtgcccaaatcacccgcctccagtctcaagcgagtgaagagaatgccagagtcttcggcaatgacggctctcagtggatcctttcaatccttcgaggccgtacccccggcccacgaaaccacgccccctcagggtggcgagcggaccgagtgcatttacgcaattaggcccagtcccggaagttgcagctgggcggcgcccaatggcgatttgtacgcgcagcccatgaaatcgtcttcgaggaactcgctcattcccaggcccacaaagccggcggagtctcaatcccaagccacgccagccggaccagctggggaatctcttggatcaacgggaatggcaacagcaagtcgcattcctcaattgcaacgccaggcttccggcaaggatttgcaagcaagaacggcaactgacaacaccgcaaatcctttgggatgccaaccgcgaaccgattccacaatatcatcgggctcgtcggcatcctatgcctcgaccacggactcctcctcctcctcatccactggaaccgtacgcaccgagctgcagcaattccagccagctcccggcagaagtattacaaccaatatatag

SEQ ID NO: 35508 - protein, 746 aa, DROSOPHILA
MGEELAFIFGAPLAAAGPFPSGNYTVQEKLLSEAVMAYWTNFVKTGNPKAPWKGIFINSHALEWDRYDLDWPEFNRRAQAYLNIGIPPTVGYKYRQIYMNFWNKELPDELNQIAAIQEQLQKPGQEVITGHMSKYGPRDHGAEDPVRTLKLLLQEPSLAGPTQSGESTETAAENMYNAPPTFGHVHKMQGGSDFEDLVTSTNSLESGEDHPQAPPETVAKSEATMQLLIALITIIIVLNLLIYGTFLLRQRRRRAKALPFPAPKLGGTILSYDGANDEELKRCSKSRDGDDSFVLEMTRKSNTYEAIKTGQRSLSCSTVDTHTKVCEWMSSQEAPKSGSFNTATPPPQPILSDGRLIICQDIEVADAALLIPQHMHEPQHYEMLLQRQHSALTEPSDEILQQQYPLRNHSHSHSDPVDMILAADEQVTSFVHADDVDINVTSRDDSDGLEVIPLTSAQQLELLRQRNYPKVLPTEQDLINSSYKRNSLPPQNFNAPLPPPRTISNTLGRRRRDSSNITTSPLQVARDCGGEDEDLKEPQITQNTLIVGPIVPKSPASSLKRVKRMPESSAMTALSGSFQSFEAVPPAHETTPPQGGERTECIYAIRPSPGSCSWAAPNGDLYAQPMKSSSRNSLIPRPTKPAESQSQATPAGPAGESLGSTGMATASRIPQLQRQASGKDLQARTATDNTANPLGCQPRTDSTISSGSSASYASTTDSSSSSSTGTVRTELQQFQPAPGRSITTNI

SEQ ID NO: 35509 - DNA, 2642 bp, DROSOPHILA
gactgcccacatccttcgtttaagttcttgaattgttgatccaatgaccaaatgtcagtcaggcaatgagaaggctacagctttgttccctgcaccaataacctccaccaccaccaacttcctagtcattccacgtaggcattctcctcgtgttgtcaggagtctcggttctgcctgcctgcctgcgaaactgacatgtctggcatatgcaaaatgccaactgtcctggccacccagcccagaccacttccctgccacgccacacacaaaaccccttcgtttggctgttgtttttgtcaactacaacaagggcaaggacactacaccaagtgcaaacaaggtgatgctccagctggcaaacataccaaaaaacaagacgaatacgcagtgggcgggggattcttacccaccacaaaaaaagggcagagtgtaaagaaagaaatggttcaaggaacacacttcactgaattgccttgaagataccacaagagcggaagagaagaaccgagaatatagggctaacgaatagttaaatccgatgtagctatcggatgtgaacttataaatagatatttatacatatatattaagtcccatttaaatagcacatctcttcatttattctagaatgaatgaattggtgctcgtgactttgtgaatcaataaacattttctgaaaggcagtaaattccatctaatatttgtaatatccccaagcgtataaaattaaaccaataactttttttttcattccagttctctgaaactgccatatattactttgcacaaacccgaaagagaaaattaaaaacgggaagcaaaaagtgcgaatacttgctgaaacaagcagagcgataaccaggccacgccacaaacagctacttgtggtcaattatacaggagggcaaaaagggataacacagcaatccggacatcaagttatcgaaaaaacaacgacaacattgcgacgtggccattttgaccaataataataatggttatgctgctctcgaagcgacaactcccgccatcagcagcaacgagaacgcggcggaaagtaccgcccacgaggaggaggtcgacgtgggcgttgtcatctctgctggctctggtcgtcctggatatatgtattgcccgatgcctggctgcgggcattagttatagcagcaacagcggcaacctgagcacttcgcaaaagagtccctcgtcggcgaataatggcgggctcgtgctgatcggttccagcagcgccacttccagttccgtgccctcattatccctcacttcatcatcgtcggcgggcttgtcgtcccccggcagcagctcatcctcctcctcatcttccacgagcaccagcggatccaatagcaaccgcagtagtagacccactagcaataacagcaactcgaactcgaactacagcccgaaccatgatcaattacccgcccagctctcgtcgcggattatcaacacacgcaatggcgccatctcaggcgtaattgtccaattagatggaaggcacttggatccggtggaggcgtaccggggaataccctacgcctcgccgccggtcggcaatttgagattcatgccgcccgtctccgcggccatgtggtcaggtgtcaaaaaggcggacaggtgagtcggctctatgcattttagcgcggggtaacaggagccattaaactggattagcccaaattatttccgtagaccgcagaaactgttttaaaatatttattcaaaggacttagagaagcgcaatcatattgtatttacatattgtataatagttccttatagcaatttgtaatttggccactataaaacgaaatctatctttattatgcaactacctatattgtatagctttttgagaaatttttacatttgatttggttaaattggtcaatatcatgacaactttatacagtaattaatcaaggaagaagacatttcaagcaagcttcaaaattggtccatcaaatcctattagggaaagcccgattcctcctcgtccaagtaatttaataaatttcccgagaagtctgccgacttccatcgtctgacaagaagctttgtccgtcttaaagcactaaatcatctccccaaagggttgagtttgatttgcctttcgagtgcataaaatgatcaaaatgccataagtcaagtgcggaaatcgccaagtctctcaagagggcccaacaattgtcacctcaattaactgactcattattgagtcaagtgcgcaggcggcggtccgaaaatactgaaagccaagtgtaactgaaagtactgaatataatggaaaatgctacaacccgtgcaacccgggccggcgacaacaatggacataacgataatggcttctgaaagtaaggaatgaaaaaatggggaaaacacaagtcaaaggtcaacttagtcggccgacttcctcgcggaatatctcgcaaattaaatatttacgccgtccccggcagcaaacagcgctacgggaaagcagcagctacacagcggcatctaatttacaaatgctcccaagtggcaaatcattattcacaaagatgcccagagatattccctgctcccttacttcccattgttgtaataaaaaaaaaagggaagcgaactggggccgccca

SEQ ID NO: 35510 - DNA, 642 bp, DROSOPHILA
atgctgctctcgaagcgacaactcccgccatcagcagcaacgagaacgcggcggaaagtaccgcccacgaggaggaggtcgacgtgggcgttgtcatctctgctggctctggtcgtcctggatatatgtattgcccgatgcctggctgcgggcattagttatagcagcaacagcggcaacctgagcacttcgcaaaagagtccctcgtcggcgaataatggcgggctcgtgctgatcggttccagcagcgccacttccagttccgtgccctcattatccctcacttcatcatcgtcggcgggcttgtcgtcccccggcagcagctcatcctcctcctcatcttccacgagcaccagcggatccaatagcaaccgcagtagtagacccactagcaataacagcaactcgaactcgaactacagcccgaaccatgatcaattacccgcccagctctcgtcgcggattatcaacacacgcaatggcgccatctcaggcgtaattgtccaattagatggaaggcacttggatccggtggaggcgtaccggggaataccctacgcctcgccgccggtcggcaatttgagattcatgccgcccgtctccgcggccatgtggtcaggtgtcaaaaaggcggacaggtga

SEQ ID NO: 35511 - protein, 213 aa, DROSOPHILA
MLLSKRQLPPSAATRTRRKVPPTRRRSTWALSSLLALVVLDICIARCLAAGISYSSNSGNLSTSQKSPSSANNGGLVLIGSSSATSSSVPSLSLTSSSSAGLSSPGSSSSSSSSSTSTSGSNSNRSSRPTSNNSNSNSNYSPNHDQLPAQLSSRIINTRNGAISGVIVQLDGRHLDPVEAYRGIPYASPPVGNLRFMPPVSAAMWSGVKKADR

SEQ ID NO: 35512 - DNA, 3677 bp, DROSOPHILA
tgttacgaatttctgacagcccgaatgtcggcgacatcatcaacgccaagtaattagcatttagcatgttgagcaaatgtcaagcgatgggtttgggtttacgcttgaaatttggagctgagttcggtttgagcctggttttgggcttggatttgtgtgccgggtgccgtgttatgtatatgaatgtatttgtgtgctagccgggggctaaaccgtttgtagctatttggcagctgacagcggctttcagtgtcagtttctgttccgacggcgccaagcaattaattaaatgctgttaatgaatccgaattccgcttttgcggtagatacttgaatgtgtttgcttttggggaagggaaaggtgtttaagaagtttgataagtaaatttggttgattgcgcgcattggagtcaactagcataatatatcactgtcatcattttttttggcaacttttaattattgtatcttcaaaaagaaaaatcttatcatacagaccgagagttaatagaaatatttcggaaattagttttggttttttttttttacattgcattagcagtttattttaaatatatgtactacaattaaaaacatgccgatgaagctctggaaaaggtaaaacgctatccattggtcgctaagaagggtgtatgaatttcctttacgataaatattattttaggaattaattttgcgcttcttccacttttcccttgacaaaggtgttaatttaaaacagataacctcacataacgaagtagcaacagatggcgttgcctctatgattcgaaatggtcacttttgtgcattcataaattatttaatccatcaacatttgaaatcttcgaatactttgttgtgaattcatgcttcaacagtcgcttttaaataataccgcatagtttccactcattatctcagttgtgtcgtatctaatttattttatattttaagtcggcctttgaatggtgcttatctaatctaattaaatggattcctacagtctgacgaagcgtggaaaaggggtgatagtgggcaggggaccgcgtctgggtcgaggggtactggtgaggaagtagtttgagaaacgggactggaatccacttccgaaaccagaagcacgggtgggctgagggtgtatcgcttgaggagcaggatgaacggagtattgtgggcgggatgctagggctggttgaacagagtactgcggacgtggagcaggcggcggggtgaccttgggaacagcctttggagtgaccttgagcacagacggctgagagatcctaaccacgggttttggcgtagtattaaccactggccgcagcttgtcctccgccggcttgacctcgtcttcgaaaggtggcagtagatccaaagggagctgtgaaacatcctgcttgatgacaatggtcttcaacttatcctcctttgccagctgagctggcttctggtagtacgatttcttggttggctttgtggccagcgttgtggctggcttctccgttgtggtcgtcgttgtggttgtcgttgtcgtcgtcgttgtcgtcgtggtgctcacttcatccagcagcggtggtagcaagtcattgaaaggcagatccactttaaccgcctttatttctgacacatcagctccacacaatccgatcagcactgcacaagcaatgagtaactgcaatgaaacggtacaggtaataacaagttaattatagtttttagtaactactaatagtaatctttatatgcattcggcgcataggtgaacactactgcgttgggctaacaaaattaataaagatatttatttaaacattttttattttgaaagttagtttcctaaaggccctgctaaaaggtgcagtttttatcgtaagtatttgttgctaagttgaacccaatgttttcgaaaagagactggtcagcttaatgatatgtatttgtctgccaattacgggtgcgtattaaagttatggctctattgtttaatatggtcacaaccattccaatgtattccaatttcaaacactttgttagtatagctctaaaagtgtgggagcttcaagattattaaaatctgatttgacttgaccttggagtgtgcaaaagccttgcattgttaggcacatgccaaaactggattagtttatagtcagttctattcgcatttagattctaaatcacatttttctttccctagtgggaaaggtcattagaccctctccacttgtgattaacatagcgacgataaagatactaatcgagcttgagatctatgcaaatttttagtttgaaaagaaagaaagtatatggtaacttgtagttatgacttgcaagttcacacctcagacaataaactgttgcgtctaaaaaaatgtcagtctccttttatctcttttatcataaatttaatgagtgatataaaaaaatttaaatttgttggtacaaaattatttaattatgttaatttcatttcaggaccaatttcataatttaatttatgcattaaactggaattccgctaatgatgcttacgcagatggctaattagaacaatttgttgcattttttagagtctatttcaggaaagaccagcttagaacagtaacaacattagcaacaattttatattcacaattatgcacacgagttgtccacttacgtatttcagtgacatatttgctaggaatcctatttgtttatttaaggcggaaaacttgtgtcccgtaccgaacactttgaaatttttgaacgaactaaaagcgccgctgagcatgcgcagcatatttatagtcggtcaaagcgatccattttgaaattgaaacggcccagaagttacacgatcttgttgctcagtgtaaagtttaacaaccggattaaaaccgggggttttaatttatttttatttttcttgggatggcagacgagcgcgagagcgaagcttgctcttggccaattaagtggcttcttcttcggattttttcaatctagaattcggcagaatgcagcagcgcagcataagatgccgaaacagctgattaagctgtgaactctttcgggttcacggtcgcatcttgtagatacatgatatcgtatctcatgttctgtatatctggttgtcacacatctgagagctcttaacttgattttggggggagagaatgtaattattagcatttttgtcagcggtttgcataaattgtgataaaagctagcgtcacttcctcatccaagggggtgtatgcccgtgcttgaagattgattttatttccattccttaattgatttgaacagtattcgcagaggaaacctgttatttcgctaccgagtggtacgccctcatttgcatttaaatcgtggggggattctttaatggagtgaaagcaaattagtgccaattacaagtggcccgatagcagatcagcatctccgtcatcaaagcccagaatttgatagggccctccgtcggctgttggctttattacctcaatttcggttgatacatctccaatttatgcaaattatgtgagcgttgattcctaacgtcgagactttttgtgtgcgtgcgaaggctcataaattatgagccgcattagaggcaaccggatttctcggttttggttttgttttgttcggttcggtttggttttggatcgctgtgttccacgagattaatt

SEQ ID NO: 35513 - DNA, 690 bp, DROSOPHILA
atgtcactgaaatacttactcattgcttgtgcagtgctgatcggattgtgtggagctgatgtgtcagaaataaaggcggttaaagtggatctgcctttcaatgacttgctaccaccgctgctggatgaagtgagcaccacgacgacaacgacgacgacaacgacaaccacaacgacgaccacaacggagaagccagccacaacgctggccacaaagccaaccaagaaatcgtactaccagaagccagctcagctggcaaaggaggataagttgaagaccattgtcatcaagcaggatgtttcacagctccctttggatctactgccacctttcgaagacgaggtcaagccggcggaggacaagctgcggccagtggttaatactacgccaaaacccgtggttaggatctctcagccgtctgtgctcaaggtcactccaaaggctgttcccaaggtcaccccgccgcctgctccacgtccgcagtactctgttcaaccagccctagcatcccgcccacaatactccgttcatcctgctcctcaagcgatacaccctcagcccacccgtgcttctggtttcggaagtggattccagtcccgtttctcaaactacttcctcaccagtacccctcgacccagacgcggtcccctgcccactatcaccccttttccacgcttcgtcagactgtag

SEQ ID NO: 35514 - protein, 229 aa, DROSOPHILA
MSLKYLLIACAVLIGLCGADVSEIKAVKVDLPFNDLLPPLLDEVSTTTTTTTTTTTTTTTTTEKPATTLATKPTKKSYYQKPAQLAKEDKLKTIVIKQDVSQLPLDLLPPFEDEVKPAEDKLRPVVNTTPKPVVRISQPSVLKVTPKAVPKVTPPPAPRPQYSVQPALASRPQYSVHPAPQAIHPQPTRASGFGSGFQSRFSNYFLTSTPRPRRGPLPTITPFPRFVRL

SEQ ID NO: 35515 - DNA, 2213 bp, DROSOPHILA
gttccgactggccctccacgccacctcacgcgatcggtgcaagcgtctgatagtggtgctctatccaaacgtgaagaacttcgacagtctggatagcgagctaaggacctacatggcatttaacacctatctggagagaagccatccgaacttttggaacaagctgatttactcgatgccgctactaccaagctacgttgactaggacattacattattaatttcaataagaaacaaaaatatataatttgttgtctcccacacagtttattttttgagatttacatagttcccggaagtattccgacaggtttccgggtcaactggtttagcagcaaggaccgcaaccgcaaaaactgctggtgccgccgcagcaaggtccacatcctccgcaaggaccacagcaggggccacacccaccacagcaggggccacatccaccacagggtccgcatccgccgcaggggccacagcaggggccctgataaatcatattaaaagtattcactcgacttacgagaccgataaatacataccccaaccaaaacgtaattcgggttgacgtacatgtacatgattttgtttcttaaaagatatttcccaaccggaatcgaaaggaaccgaaaatttaggtgttaactattgaaggtggaacggagaactgactgaatgtgatccaaattagccgaagcttcatttgacagcagtcatgagaatttcaaggctaatatgatccgacaaattatattcattattattattatattctggtatcccaaaacccataatctagttagctatggatattttcgacagttgtcaaattcatataccaacttgtgagtcaggtttccatcattcttattttggttctcggcctgtaatcatcgaaatattttttcgtcctaagttatttctttgttaggttcaaagtgagtatttctcaaagtgtaagcatgcgaagttttaacaaaatttttcttagaactttacggaaccatcatgtgttgcggaccccttggattctgcggaccctgtagcccgtgcggcggtccttgcggaccttgcggaccctgtggtccttgcggttcctgctgtagtccttgtggatcttgctgtgcgccttgcggcccttgcggtccttgcggtccttgctgcgggggctgtggtccatgcgggccttgtggaccttgctgtggaccttgtaggccatattgcgggtgctgaacaacaaccacaacatgtaaaatatctttttcctgtgaaccacaaagtggaacttaggactgaatgcggataaactcttcttagctcgcgggcctagtcaataaaataagaatttcaaaataccttttccgatggtttttctcttctaaatggtgcaacctttgtcttagctatggataccaaatgcgtgacaataataatttatgtaatataattgcgaaaattaaaattgtcaattcttggtggattgcgatcgttagagggggcggaggaacatcctacgttcatatcgactaggcttgtgatccagctcaagaataaataaccttttcttctattcactatagcatagctattactctacgagtggcgggtataaaacctgcaaccgtgaatttaaacctcattcaataatagtatttgtctgcaaacggacaaatgtccgataacaataattctataacaataataactatttttaaccatcaaccgctgtacataaacataattcgaattcatagtaggctatggaaatcgttcttgacctgtcagacccacctaaccttgtaagttcggaaaatatatcattctcatctcgacccttgtgctgctcgcatcaaaattttgttgttttgtcccaaatacttgttttttttttttggcttctaaagaccgttggtaaaaatgtttattgtaaagttaaaatagtatacatatttatttcgtttattttagacttctcgaattaatcatgtgctgtggaccttgtggatcgtgctgcggatattactgctgtggtccctgctgtggaccttgtggaccccgatgtgggccgtgcggatcctgctgtggaccctgtggaccctgtggaccttgttgcggaccatttggcagttgttgcggtggctgttggtgctaaatgctcgcaattggcagccgaatcgatttgtgaaaccataccacaatcccaccatggttaaactaac

SEQ ID NO: 35516 - DNA, 213 bp, DROSOPHILA
atggcctacaaggtccacagcaaggtccacaaggcccgcatggaccacagcccccgcagcaaggaccgcaaggaccgcaagggccgcaaggcgcacagcaagatccacaaggactacagcaggaaccgcaaggaccacagggtccgcaaggtccgcaaggaccgccgcacgggctacagggtccgcagaatccaaggggtccgcaacacatga

SEQ ID NO: 35517 - protein, 70 aa, DROSOPHILA
MAYKVHSKVHKARMDHSPRSKDRKDRKGRKAHSKIHKDYSRNRKDHRVRKVRKDRRTGYRVRRIQGVRNT

SEQ ID NO: 35518 - DNA, 2736 bp, DROSOPHILA
taaaaatcgagccgagtgaactcgcaaattgttatcaccacacgtcgtcgtcgtctgagtcggtaaaaaacaagccaggccctcgaaagggtcgaaattggtcaagtgtcaatgcgatcgaggccgtaataaacgtgtttcagtgctcccctgaatagttattgtgatccgctgatcagctgagtgaatgcaagtgaacgaatatattgaggagtatccacttactacacgcgataattgcgagaatttccacgagccactctgaggagtagatatcgaatggggttagaaagtaatgaagtcattctataagtcccagcagcagcagcaagaaaagactagcctaataaaatatttattttaggccattttgcggaattaagttttaagatacttgttaacaataatttgataaactagttacaaaattatacaaacacaagttaaactgttccaaaaagtatatatattaaatatatttaaagcttccgcctaaatcgataatatattatatatttccatatgtccctatagtaaaattatagttcggtgatgattaataacaaaatttacttcaaatggaaatataccgtttttattttgtaaactgaaaccataaatttttcgtttattatgtaaacattccataattaaaaattttttaaaattatttatgaaatcaaatcggttgcaactcattgctcacatcacgattctgcttaaatattatttacctaggtaatcccagctttcttttctattgggttcagtacactcccgattcagggatagacgaaagtagttgctttctaaccacatgactctttccctactattcgcatctagctcgatttcccaaaaagtgaacaaaacaacaaaactaaactaaatagcgcgttatttaattgaaacgtaaaatagatattccgagcgaacccccaagtggaactaattagaataacgccctgaacaaccgccaatcgaaggtgcttaaatgattatgcatggtacctggtacaagggacctcagttggcgcaccatcctcactcgaatccgcataacagttcgcacggccacagtgactaccaccagttccgctcgtacccctcgttcgttgtaacgccctaccacgatggccatgtccagggcccggccacgcccactccatgcacggccccgccaacgccctgcaacggtccagttccagtttcagttccagtttcgattcccgtctgccacaccggcggccaaggttcgccagtaattgtcgagagctcatttgcaatcgccgccgccgccgctgcagcggctgctgccgtcgccgtcggaggatccagtgccacgcccctgctgcccagtccgcccatcaagatcgagcaggtctttggcgagccctcttcgcttggagccgtcgttgaggattacgcgctgggactagattgccccgtggaacacacgtttcgagtaagcgcactaaaaagtttacaatattatgaaaatatattatatgaatacgacctggtattattttatttaataaacactattaagtactttaatttgaatgcaacggaaacttttatctagctgataaaataaaacatttacgttgtttttattgtataggcattaatgatactgatacaaccgtttctttaattatcatttgttagtatgagagcttgtattcttgggcaaacgttaaatctgcttgccaaattaggaaatcttctagcttttgagatctcagaccgtttacataatcgaaaacacagatagataataatgatcctaatgatacatcttcgattgaataataaatcgtttttttaagtagaagtaagctctaattctactgaagaagtgcaaaatttgtgtaaggtcattactcctgaacatggataaatttacctacccaaaactaacttctttgaatttagtgacatgaatatcgaataataattttttttaagttttactcattttgtatccacttttaagatattggtagccatttgataaatgttttcttttattaaataaatgaacactttaggcgttatttaataaaaaaaaaatagttaaaagaaatcaaagctcatatttttaatcctcaccgttggttgccatgctttagccatccgactgccgtttcctagccaattttatagcagtgtatggataatgttattatgtcaaattactggttagcatccccattggagcagctgctgcacttgtttggctcgactctcaccaccgaaagtgggcgtgctccaaatcaatttccataaaatcatccaataacacttaaaagccaggcagggcaaaaagccgacaaacacaagtggcaggcgagtaaaaaacaggaaaacaaacacgcccccaactcgaagagcgtcagtgaaagagctctctctttctctcttcggggaaagcaagagcaccgcaaaacggagagatctcttgtttcgagtgggttttaatggtaaaacgctcaagcttttgcgtcgctttttcagacggtccaaaggacactttttgtcggcttggttcgtgcacaggatatcccataattgcctggcttacaaagcttttcgcagtctaatgcagattgactgatggcttcaagtggatgaaaggaaattaatgcaaatcaacaggtggtcctgtgaagtttaaggacatatgtcagcctgtggaataaaatatgtaattcgaggaattcaaaatat

SEQ ID NO: 35519 - DNA, 477 bp, DROSOPHILA
atgcatggtacctggtacaagggacctcagttggcgcaccatcctcactcgaatccgcataacagttcgcacggccacagtgactaccaccagttccgctcgtacccctcgttcgttgtaacgccctaccacgatggccatgtccagggcccggccacgcccactccatgcacggccccgccaacgccctgcaacggtccagttccagtttcagttccagtttcgattcccgtctgccacaccggcggccaaggttcgccagtaattgtcgagagctcatttgcaatcgccgccgccgccgctgcagcggctgctgccgtcgccgtcggaggatccagtgccacgcccctgctgcccagtccgcccatcaagatcgagcaggtctttggcgagccctcttcgcttggagccgtcgttgaggattacgcgctgggactagattgccccgtggaacacacgtttcgagaaatcttctag

SEQ ID NO: 35520 - protein, 158 aa, DROSOPHILA
MHGTWYKGPQLAHHPHSNPHNSSHGHSDYHQFRSYPSFVVTPYHDGHVQGPATPTPCTAPPTPCNGPVPVSVPVSIPVCHTGGQGSPVIVESSFAIAAAAAAAAAAVAVGGSSATPLLPSPPIKIEQVFGEPSSLGAVVEDYALGLDCPVEHTFREIF

SEQ ID NO: 35521 - DNA, 3596 bp, DROSOPHILA
agccatgttaacgcgaagctaaataaaggattttacgaataaagatcctcaacgaaagtgcaaaaataaggataaatcatgtaaactccgaaaattgtaaaattcaactgcaacgcaaagttcctatcacccagtgcaaactacatttagtatacaagtgaattatattcacatttcgcttttaacaaataaaataatctacttagtatttcaaataaataaataaaatatttatcaatcgaaaaataatctcttaaataattgatgagaaattaaattcacaataaatatgctggaaaacgcgaataaaaactcaccactagacgactaacttaacccacctagtggaaaacgcaacaaacaaaacaaaacctaaactccagccacagaatgaaacaatcatagatgaaaagtaaacaaaactccacagctgagcaaataaatcaaaacgcagagacaatgagaaccgacaaagtgtttactaaacaataaacaaaacatcaaactgaaaaaaaacaaattggtcagcatatgcaaaaaaaaaaagaattgctacagatgtccatcacgagcagcacaaccataaaatcaaaaaaaaaaatgttccaaaaatagcaaactggcagccagcaaaacttttcaaggtcgtcgctggcaagtttctggtggcaaatcatttctatttgtttcaatttagtgcgcatctaaaaaagagcggggaaaagtttctaaagtgcactccgccccagccatctaaaatgaaataaaagttaagccaaaataaaaagacatcagatttggttgcaaaatttttgtttgctgttgttccgcccccttttttcagcgtgaaatgattgtgtgtgtggaaaatcaagcaaactgtgcctcagttagatacattactgtaagcgggggctttcccgtttgaaagtgaaattgtcgagctggaggagtaaaaaaaagggctgcctacatctgggctccaccgaagttggttgtcatgcacgaactcattggcaaatacagccattcggacatggacatgctgaaggatcagctgaagcgtgggggctacatgggcgcccttggtccgcccacgcccggcacatccgccccctcgcccttcctgatgcccgccgaattctacaaaagcctgctcgccagcgccgttctgcaacagcaacagcagcacaagttctacgccggcacgccctcacccagtcccgcccccagtttgtcacccacctcaggtcgccacttgctgttttccacggcagctgcggcaaccgcttgtgctccggagaatggtcacgtgaagacggagctcgaagagcaggaccagcagaacgggatgccggaaaccgtcggacatgaggagcagaaacccatcatcgaagagaacccaacgccgaatgttagtatgggaatatgtgtggaagtaaatgaggggtcataaatgggatttcaagggttttaattttgattattttgggatgcagataagtacaaataaaacaaggctttcctgtgtcggcccttccttcatgtgcacacgaagtaacccttaaataaaagtccttgccccacaattagaacttaattgtcgcatgagactaaatgtttctatcagtactagttaaacgacatgatacggtcacttgagaagtaattaagagctcaaaagtattatcattattttatatggaaaatacttttccctattgattacgaatgatcgatcattggatctttggataaggaattgttatcatcttaatatgtttaaaaccctttgatttgtattgatcgattcctatctcataactgaatggcggaatgcttagaaaatagaaacatatgacgactcttacgatacggtatgaattccattaaaaactcgtttcttttttcatgctcaatgccttgccaactcaatatttttaaatgtttgacgaaaccctttttcacacagacaacaaaccatttttcattgcagaagccgcacaacaacaacggttactcgtggtccaccggcaacaacaacgaggttgtcagtcatagcagcaacggccacaccaacaaccacccaacaacaccacccactccgcccaacgaggccagcgccacccaagcgacttcagtgtccgcaattaatttgaatcaagcccaacccgcatcacagacgcgttcaaactttggcagctccataaagtcaccaccatcagaaccggacgcggtcactgctgccacgtgcaaaagtcaggagaataactccggccagaaccccacccccaactccctctccgatcacaacccggctcacaaccttaactcgaattcaacggccgctgccgtggccgccgctgccgccgccgccgccgctgccaacatgccgatcggcggcgtccagggtcagaatcccacccagggcctggtccactggatgagtgccgtgatggccgagcacatgaccggccagacgcaccacgatcctggcgccgtaggcatgcactacatgtggaacgggaacgttgacgtgagtatcaactggataactggattcacgggggcgggcaaaattcgtggggcttgttaattttagccacactttgaaaaatccaaagagacagcctataccgaattattaccacaggacttaacttactccgtctaagtaaatttgccatgctctttatttgacagtctacaaattaatctgatagtagtttaataaggtattggttagatcaaatatggctttcacttcttatcaacaattatggatttcattatatttaattcaatgtagcaaaacattagtatgatatttcatataaaagatcaggatgtttcgagcaagattactatgaaaagcgaaaggacccttatccatttcctaataagttaatattgcacaacattgtgtcagacaatttgtactaatccagaaaaaaattattttaaaaattggaattaaatccttttggtaattaaatatatttaagccaaagtattgctttgtggcagtgtacaaactttggacttgtcattgaagtttgtcttgcagtcttcctcgtcatggagcaacttttccgagataaagcaaatgggacgcagctgggagaaggggaaaagtagagcacggaaaacttttctacttaacactgcagtcgtggttccaagagaccaatgaagttgcgccataattaatatgcaagcaaacttgtccggctaagtgaattaaatgagtgatagctgcctgtaaaaattaaacgggagtctaagctgcattctaattctatcaatattcgtcggcactttaagtttatttgtctttgatttcgatgttacagttaaagttttccaagtatttactgctttctaaaaatatgggataaatacctggccaaagacaacgaccttagccctggagctcagcttcaggtcaggccatttccagtgatttgccagtcaccccttcacttccagcagctcatctgctgctcttcttctgggcagcagtggagcccacacctatatcgcagccctcaacacccaacaccccgctttcgccagcactttcactgggcaaaact

SEQ ID NO: 35522 - DNA, 1014 bp, DROSOPHILA
atgcacgaactcattggcaaatacagccattcggacatggacatgctgaaggatcagctgaagcgtgggggctacatgggcgcccttggtccgcccacgcccggcacatccgccccctcgcccttcctgatgcccgccgaattctacaaaagcctgctcgccagcgccgttctgcaacagcaacagcagcacaagttctacgccggcacgccctcacccagtcccgcccccagtttgtcacccacctcaggtcgccacttgctgttttccacggcagctgcggcaaccgcttgtgctccggagaatggtcacgtgaagacggagctcgaagagcaggaccagcagaacgggatgccggaaaccgtcggacatgaggagcagaaacccatcatcgaagagaacccaacgccgaataagccgcacaacaacaacggttactcgtggtccaccggcaacaacaacgaggttgtcagtcatagcagcaacggccacaccaacaaccacccaacaacaccacccactccgcccaacgaggccagcgccacccaagcgacttcagtgtccgcaattaatttgaatcaagcccaacccgcatcacagacgcgttcaaactttggcagctccataaagtcaccaccatcagaaccggacgcggtcactgctgccacgtgcaaaagtcaggagaataactccggccagaaccccacccccaactccctctccgatcacaacccggctcacaaccttaactcgaattcaacggccgctgccgtggccgccgctgccgccgccgccgccgctgccaacatgccgatcggcggcgtccagggtcagaatcccacccagggcctggtccactggatgagtgccgtgatggccgagcacatgaccggccagacgcaccacgatcctggcgccgtaggcatgcactacatgtggaacgggaacgttgacgtgagtatcaactggataactggattcacgggggcgggcaaaattcgtggggcttgttaa

SEQ ID NO: 35523 - protein, 337 aa, DROSOPHILA
MHELIGKYSHSDMDMLKDQLKRGGYMGALGPPTPGTSAPSPFLMPAEFYKSLLASAVLQQQQQHKFYAGTPSPSPAPSLSPTSGRHLLFSTAAAATACAPENGHVKTELEEQDQQNGMPETVGHEEQKPIIEENPTPNKPHNNNGYSWSTGNNNEVVSHSSNGHTNNHPTTPPTPPNEASATQATSVSAINLNQAQPASQTRSNFGSSIKSPPSEPDAVTAATCKSQENNSGQNPTPNSLSDHNPAHNLNSNSTAAAVAAAAAAAAAANMPIGGVQGQNPTQGLVHWMSAVMAEHMTGQTHHDPGAVGMHYMWNGNVDVSINWITGFTGAGKIRGAC

SEQ ID NO: 35524 - DNA, 4344 bp, DROSOPHILA
ccgcacttttgtcgctctcgtcgacattcaccatcgccgtcgctttgacacctcgattgtgtgcagcgcggttttctatttcaattggcactcacatttatttgcattagtatttcgagccgttggccacctctgtttttgttcgactttcttggcggtttccaattcatgcaggcccttttttcacaatttttttgctgagcccatcgcaagcggagatcttgttacaatggatcaagagtgcaaactatatttaggcacgctctgaatgtttattttgtagcaagtgtttttgaaaaaatgatgcagtaaagtggatttgaatttcaggtcacataaactgttatccgattgattaattttgaggcatttatctcttgttcttaaaccaattatataagcgttaaagcaaaaatattctgcctatgtcaagtgccagtttttttttacgcaacaggatcacaacaatttattgtcaatatatttctgaaaacgattggctattgttgtaaatgtttgttaatagttagttagtgagttagttacatgaaatgcaaaagtgagctaagaaactcaatattatttggctaactattgtcttgtgcaatttgattaccaatgccagagaaatcaacataaacacatacaaagtcatagtaattgcgatattgtacttgtccaaattaatatatatttatggcacattaaaaaataattattgtgttcactaataaaatctgtaatggccgtctcgtaatattccgagtcacctttgaaagtgaaatgattggctttgaaatcccactaaaatttgatctacattttttattccatgtgcaatatgggtaatcgaccaacaaaacgccggccataaacacacgcccacgaatccaaaccgcttaacaaccgacaacaaccacagcatgccaaagacataagcgattacaatctttggccgccaacgccgcgcagtcatcagcatgccagcgagcatcacccgatgtccctgaagcaggagtacgaggtaagtgggccgctaaatggtaacgctcctcgctgtggcaatagcatgtttatctatagatccgtatccgaacggtggtaaaacaaactggcataactttatggcccgcccattggtaggggctaaacaaaaacaaattctaagctcgcgtgccgccaacgttttgcatttgttttgctcaccgcttcctgcaccacccatcgaggcagccatccatccacacagccacccatcccgccacccaaccacccatctaaccacccatcatgcttatttactttcattgcccactgtgtctggctaaagccagactagattttgcttttgtttcgccgctgcaatatttgtatttatattttcttgttgcatttggggcttccccggccccgcccgacctaagcatatggaaatagtttagaaaaaagccggctggcatttattttttgacacagccggcggcggaccatgtttattttattcgatttccatttttctggcatcgcgcatcgatgacgacggaggccgggtcgtcggacgtcggtcgtcctaggtcatgtctggctggaggattttaacccacatttggaatttacattcaatcgaaagcggtggcattttttagaaaactcttttccttattttccgcattccacattttttccattgccattgccattctatctatctatctatcactctcgctggccggtggttagaatttttatttatatttgacgtcagcggagctgatgtatttggtactgttggttttgtcacgcattcgatttgcttttcaattcatttatcgcttgtttagctctgaatcgccctgacagctggcgaaaacatttgttatttgtgattttcactgtgaaaactgcattcgctttttcgctggacattgtaatgcgatttgccgggctgagagtcattaggaaatttgtgtaatgaataaatatttttgacagcgctccaaattgttttatggccatttgatgcggggtcactcctgcaaatttgcgaatgaatatttgataataatgttgggttgatggggttaattaaatgcgcgtggaataattatgaattgacattagaaaacaagcaattaccgtggattggccagattagaagcggcaattgcaaatcgaattaactgaattgcttttggctcttccacgccgctgaacttctgcgaccgcctagtgacgcattaactaaatgccaatccgtgttctcctttccctttcaggccaaaatgaacgaccaccatcacaacaatctgcagaaaggtgagtcaccgtaaccagcggacctatcccaagcagccaccagatcacttgatctacccagaaccgaacctgactgacaacaatgctcttgttaattaattgctcacaaaaacagcccgaccgataatcacgaatttccaagattcagatcgcggcgcgcgaaccgcagatctcccagataccgatctaaactcactcggcgaagaatgcaaaagctaaattggaaaacgcgtgcgggcgccggaacaaaagccgctaagacaatgcgctccggtcccatactcccacggagtgtcacactggaaacaaattcatttcccaattaaaattttatgccaggtccttataaactaataagcaaacaattaaatctaagatgttcaaaccgagggtgttttatatcagtagatgcatctcgcttatagaaggtgtttgtaaatacttttagaaaaagaccaccacagcgaattttactttctatgactacatataaatgtctatgattagcaatataagcaattaatatatcttagtgaatccatctgaagtccagtaattaaggaattcaataagggtcctagtttcccggggttacacattttaacattacttattttataagttttatatttaattatcgacgtattagcttgctgtaatttttctcagtgcagcgaaataagcccaaaattgacctttaacagccgcaacagcaacaacagtcacagaatgcttacaagatgtttacataaattcctaaaatgcaaacaacattttagcctggctggctcgctggtagcgcaattgttgctgctgcaacagccaacttgcaactaccaaccgccaagcggcaacaagcaacattgacagcaacacgctcctgtttgcaggcgcagttgcagcagcaacttccatccggatggctggccggccaggtaaaggaaaaggaaaaggtaagcctgcatctggacctggacccccagagcttgttggcgttgacgttggcggcaatgatcgccgagcgataatgtcaacgctaggcaattggccaataaggtcgttgttgctgctacggttgctgttgctgttgccgttgccgttgccgttgcctttgttgcgatagcgatcggccacattgttagcttcgatgtagatgtactcggatcggctactctgcttgtacaaattaacaataaggcaacttttactggtgcgcccggctcatattgccggtcgtccatttgaaatgccgctgaaaagcttcagctttcaggccactgttcattagctgaactttccggctggcgccactggccagctctcgtgtaattaacacagaagtggcggaggacggtccccagcaattatctgcaaatgctttattagagaaatgtttttgacatagcagcggggcgcccagaaaccgagctattcggcttggttttggtttgcttgggttcggttcagttcgtttgtctaagccggattacagaggaatttctccagcgcttattgtgcttattgttcataattagatgattaccccgaaatcctgggcaacccttgacgccccccaagccgtcgagccgggcagacaaactcattaacggattcacacaatttttgcacgcaaatgggccggggaaaaaattctaaagcccgggcaaatgcgaaactattttcacataactcttcgggcgatttcccagtggcaatcagcgcggccaactaatgtctcagtttaattagaaaaaagagcaggcagccaggagctgggttgctcaggtggtcaggtggcgacatggccaacgtgagtgaacgtcagcggcggcaacttcaacggacgccaaacgaccgtcgaccgaaccagaacttgatggacaaccgtggggcagcactaatgctgccccaagccgtggcgccactccgctgacacacaacaactaaatgcaacaactcaattgcctttgcaggtcactttctggatgacaatcgtctggagcatcacgcggttaccggacaaggtga

SEQ ID NO: 35525 - DNA, 273 bp, DROSOPHILA
atgtccctgaagcaggagtacgagcctggctggctcgctggtagcgcaattgttgctgctgcaacagccaacttgcaactaccaaccgccaagcggcaacaagcaacattgacagcaacacgctcctgtttgcaggcgcagttgcagcagcaacttccatccggatggctggccggccaggtaaaggaaaaggaaaaggtaagcctgcatctggacctggacccccagagcttgttggcgttgacgttggcggcaatgatcgccgagcgataa

SEQ ID NO: 35526 - protein, 90 aa, DROSOPHILA
MSLKQEYEPGWLAGSAIVAAATANLQLPTAKRQQATLTATRSCLQAQLQQQLPSGWLAGQVKEKEKVSLHLDLDPQSLLALTLAAMIAER

SEQ ID NO: 35527 - DNA, 2789 bp, DROSOPHILA
caattgttgctgctgcaacagccaacttgcaactaccaaccgccaagcggcaacaagcaacattgacagcaacacgctcctgtttgcaggcgcagttgcagcagcaacttccatccggatggctggccggccaggtaaaggaaaaggaaaaggtaagcctgcatctggacctggacccccagagcttgttggcgttgacgttggcggcaatgatcgccgagcgataatgtcaacgctaggcaattggccaataaggtcgttgttgctgctacggttgctgttgctgttgccgttgccgttgccgttgcctttgttgcgatagcgatcggccacattgttagcttcgatgtagatgtactcggatcggctactctgcttgtacaaattaacaataaggcaacttttactggtgcgcccggctcatattgccggtcgtccatttgaaatgccgctgaaaagcttcagctttcaggccactgttcattagctgaactttccggctggcgccactggccagctctcgtgtaattaacacagaagtggcggaggacggtccccagcaattatctgcaaatgctttattagagaaatgtttttgacatagcagcggggcgcccagaaaccgagctattcggcttggttttggtttgcttgggttcggttcagttcgtttgtctaagccggattacagaggaatttctccagcgcttattgtgcttattgttcataattagatgattaccccgaaatcctgggcaacccttgacgccccccaagccgtcgagccgggcagacaaactcattaacggattcacacaatttttgcacgcaaatgggccggggaaaaaattctaaagcccgggcaaatgcgaaactattttcacataactcttcgggcgatttcccagtggcaatcagcgcggccaactaatgtctcagtttaattagaaaaaagagcaggcagccaggagctgggttgctcaggtggtcaggtggcgacatggccaacgtgagtgaacgtcagcggcggcaacttcaacggacgccaaacgaccgtcgaccgaaccagaacttgatggacaaccgtggggcagcactaatgctgccccaagccgtggcgccactccgctgacacacaacaactaaatgcaacaactcaattgcctttgcaggtcactttctggatgacaatcgtctggagcatcacgcggttaccggacaaggtgagttgatggttgaggggatgactcacctgctctgggaaaattattgtattatagcaaacaaacattgattcccttcagttttgtgatagtttcatagatcattaaatatataaatagatttcaaatgttttcagtttctgcattcccattcaaatgtgcaattaacaatacttttgttttggtcctgcttagtgcacgtgcatcctatacctgaccgacttccatatgtttctgttgcaggtggcctgggtctgggcgcatccaacggagttggcggaggaggcggtggcgcctccgtggttggaaattccagtctgggcgccagctcccaccacgccgtcgccgccgcccaccatcacaaccaggcggtggcagctgcttcggcggccgctttactggtggtgccccagccgatcaatgccagcaaaatgggcggacccggcggagtctcctcggtggcgggtggacatgccaccggcggagggagtggacgcaagtatcagtgcaaaatgtgcccccaggtgagtgcatccgcgcccgtttcaattttcatacctcgataaatgcctgctgctggcaatggaactcaaggctaagggtggccactgttaaattgtgccggagccgacggcgctgcaggaaccagttgaccgtaagattgggtgaccgagggggatcgtgtccaatcggattcgaagctctggcagagcccggcaaggcatcggcttttgtttacaattttccacttgattaagctcgacaaaagattcgaatttcaatggcactgaggaaaatcctttcattactcacatgcagatttattaagatcgtttataaaaaagattaacattcttaaaggccatcaagaataacttgattacatttaaaatgaacaagttttatatgttctatgtaagaccaattatatctgtcgctgaaagcaaacttggatttgaaaaagagctggctgcttccagataaatagatcaaaagttttggcaactgcaaacaattttatagtagtggtgatctctggcacccacaagtaaatactttttttaggcaacagtaatagaagatatttgaatgaattcttacaatattttgcattatttttgtttgcttgtccaaacttttgatatgtttttcagtgcagttagccagggctcgttcgtatcatgttgcctcgttttctcacattttttcgcggctacccatgcacttgcattgacactcaagccgtggctgaaagccaggccaaaacccctgaaccaacagctgcagttgctcgtaaaatgtcaattgtgcagcgtccacggcctgcgttgattgttgctaattgagcttattgttttttaacggtcatttgtggcctgaaccggggcaggtgccagctgtcagaggagagctgttgtccaagaatccttgtgggttaacgatatgcgtgagactccataccggtgggccgatcttcaacagagttatcttgtctgggctcactttcaattcacttcgatttggtgaatattacaggaaacttagttcaaccatagccaaaaggac

SEQ ID NO: 35528 - DNA, 459 bp, DROSOPHILA
atggccaacgtgagtgaacgtcagcggcggcaacttcaacggacgccaaacgaccgtcgaccgaaccagaacttgatggacaaccgtcactttctggatgacaatcgtctggagcatcacgcggttaccggacaaggtggcctgggtctgggcgcatccaacggagttggcggaggaggcggtggcgcctccgtggttggaaattccagtctgggcgccagctcccaccacgccgtcgccgccgcccaccatcacaaccaggcggtggcagctgcttcggcggccgctttactggtggtgccccagccgatcaatgccagcaaaatgggcggacccggcggagtctcctcggtggcgggtggacatgccaccggcggagggagtggacgcaagtatcagtgcaaaatgtgcccccaggtgagtgcatccgcgcccgtttcaattttcatacctcgataa

SEQ ID NO: 35529 - protein, 152 aa, DROSOPHILA
MANVSERQRRQLQRTPNDRRPNQNLMDNRHFLDDNRLEHHAVTGQGGLGLGASNGVGGGGGGASVVGNSSLGASSHHAVAAAHHHNQAVAAASAAALLVVPQPINASKMGGPGGVSSVAGGHATGGGSGRKYQCKMCPQVSASAPVSIFIPR

SEQ ID NO: 35530 - DNA, 4526 bp, DROSOPHILA
ggccaaaccgcaagttgaagtaatttctacttagccccaactaactacaggcagcatgagagtgttggaaaaaacgcggagaggaaacttcggaacgcctcagaaattaaaataaagtgccaagaaagtgaaaagcgagtggcccatgccctgggagcagcatcttgaagttggccaaagccaaagcccggccatcagcgccaacttccgtttgggccaacaccgcaccgctgcaaccacttcttgtttccattactttttccattctcattctcgctcttagccttgcacataaagaaattattattgtagtaattaaattgatcaatttctgacccacgtataaacaccttgccattttccggtgaacacctttttataactcttatggaagtgttaaaaagttgtaaatagaagaatttagaatttgaattttatttgatttctttttttacagtgcattttcggtctgcggtcggcgtgggaaattgctgccagtgcgtaggcgttgtgtccacgtctcttttaataatttgtaactcattttgcactcgggaaacaaaataacgacaacaactgcagtggcagcggtcgtggcaagcgtttcaccttttgagcttttcgcttcggccatggataaaacacaaagtgaaaagtaccaagtacaaagttctatgccaaaaagtcgccgaaaaaggaaacttttcttggttttgagtaaggacattacatttgggttaacaggcaaattacgtaattgaagtggcctaagaaactgacgctcaagtgtgtgaaaatgcgaaaaccccgaaaggactaccataatacttttacgcgcctcatccatcaaaggttttttgtaatagtccctacatgtcagtaggaaatactacgggtagtttagcgaatttgtaaataattatatttaagaatttatattaggataacatatgaactcacaacacataaaaatctcaaacgaatacagagatcattgaacttaaaagaaacgaaagaactctcttttggtgcccgtatgttgcaacactctttcaactaattgcatcattgccgggtcgggagtcacttgaattttgttgagcacctgcagacttggccaaatatctagcacttccttttcgtaaccggcgggcaaaggattgtccaggaggttcagttcggctaggggaagaaactgtaagttccgcaatgaatagatattctcgatatcgttgtgtttcaaggatatgctatgaagtcgtggaaagcgccgctccacttttctgaagacccacagatttgtcagatgattcccatccaaaattagacgttccagctccggcatttccctgtccacaataccgagcaccgtgctcatacagttggattccgcgagggcgaagaattcaccacacaaggccttatctttgtaaaatagcgtaagatcgaggctgcgttctactggatcatatctatccaatagcaccattgtcaaatgcaaccttaagattgagttgatccagatcttaggcattcggtcactgacctttaaccagatttgattatccacccatccgcggcggaacaaagcactcgcaacgtcgtaactgtccacgaagaacgtgaagagggcccaggagtcctcagccgtatcctgttccccgcctgtgtgcttataacggggatttatcttcaacggggtcagaatgcagcgaatacgccgcagcactcgattgaatgttaaccgacgatctgtgctatatatgaggacccgataccatccatagatactcctgggcagcctcgctccattcttggactcgaatttgaagtcgcctttcacggatcttggtgtggagtggcacaaaggaccttcactggagttatttctaggtgtagcaaacattttcggtcgaaaagatacacaaatgtctgaaaattcaaatggttactttgacatgattctgtgaggaagaaaattacttttattttacattgtttttacaaatgaatctatttcgaaaggcgactgataacgccacctactactcgaattttcactatcgctgaaaatatacatagatggcgccaaaaagtgtagagttttgtaataagttatgctaccaaccggtagatggcgaacgatgtagatcaagtgaaaaaccgtttttagttttacaaatgaagtattttattgcaatagttcctgtaacttccataaaatccgagcgacttaaatattctagaatagcgctttagtattgccctcatatcgtataatttataatttataataataacaatcaacaaatgccaacgtaagtatttaattttcaaaacgggccttaacagatatgatctagagccctaaatgccttccttatcatttttaaagttttattaggtgcaaaaaacaagaccgccaataaaagagttttggatcttaaattaattaatttcttaaagtgtaaaagccttgattgagtagaaaatcactagcatggctagcactccctgcggagtattcagtgtgggtgcagatgatcgctttttgggataataaacggttttctttgagagtaggataacctgtggctgaccaggattttgctgaactgcgggagcaatcggggccggagctggagctgccactggaactggagcaggatggacgagtatgggggcagcaggatgaaccactacaggggcgacaggagcgacaggaacaacagaaggggcagctggagcgacaggcaccacaggggcagctggggcagccggagcaacaggagcagcaggagctggagcaacattggccggagcagcagctggagataccgcagggaaaactggtgagggctgcggcatcacaggaacctgggcaatacttggagcgattgctggtgcaggctggttggcctgctgcagcgtgggacagatcaggtgctgtgtctccgtataggactttggattgctgggattgggttcccgaatagtttgcgtgtagcatccgttggcatcgggtgtgccagtttcgatgacagtcatctttttgggatctggctgggatgccggagcaggtgctgcaggagcacctggcggatagtggtgatgcactacggctaccggagcagcaggagcggcagcgggagcctgttgagacttggccacaacgttgccaatgacagcgccagctaaagctccacccaaaagacccacacctgcgaattgataaagagtagagagatgtggcgaaattaaaaatctgttgtaactatttccacaaaaatcgattgatggaatttgtagtgttagtcaaaattttaagaggtaaaatgttttactttttttgtgatatccttgtgaaaatttgatatccttgacagagtccaattatggcaacttaaaacatttctagacaatttacatttactgattggccaatttcaatgttgtaagttctacctaatcacttaccaaaggcacgcttacgaccgcgttttggatgtgcctggcaaaatggcataagacttaggccgagtaatgttaccaacagaaatactttaaccagattgcaattagccatggttagagaaccgaatactggaatcgtcaagtatatttggataaatcggcgttcagacgttaactgatcgcaataatgtctcggttgactcacttggtcgctagcaaagaatgttgtttcgactttgcaaatatttgtacagttgcttttgggaaagttaacgaaatttgtcgaatggcgtatgttcattactcgctttaatttatatttctgcggcacatgaaacgctcattaacacgctcggcgtcttataaattgctgtatgcatgtgagaacccagaaagtatatatatataagagattcatttccttgacaatgttaagtttggtaaacatataacgaaaacgtcagcatcgtaacaaaatcatcatcaatacttgaaatagttgtgaaataattgttcagcatagtgaagaaagcatttgtgaatcatttatcaacaccggtatcttactatatatatgtatatttccgaatataattttgtatttttttgctgaagtgactttcactcggtttagctcgcattttcgtccgcctgtcaaacaagtcgtaacaacaccaataaggcagagaatacataatggccaatccaaagtgttcttattatcccgtcttaaagtggtgtgatttaagaccgcaacttggcaaacaaagaccaaaaaataaaatggaacatgtaaagaggagcaaactgtaattgtttaatgagtggcagtgtttcggccgcccttttgacttccatttctgcaatatgttggccaaaatttgaagcgacaggaccagctggcatctcgggggaaaagtctggcatgtggcacgtgaggctctatttaattttcataatttttcgaccagccctgcaggacacgcaattcagtttgtgttaacactcgagccagtagagctatttcccttttcggctggcaattgctattg

SEQ ID NO: 35531 - DNA, 1464 bp, DROSOPHILA
atgccattttgccaggcacatccaaaacgcggtcgtaagcgtgcctttggtgtgggtcttttgggtggagctttagctggcgctgtcattggcaacgttgtggccaagtctcaacaggctcccgctgccgctcctgctgctccggtagccgtagtgcatcaccactatccgccaggtgctcctgcagcacctgctccggcatcccagccagatcccaaaaagatgactgtcatcgaaactggcacacccgatgccaacggatgctacacgcaaactattcgggaacccaatcccagcaatccaaagtcctatacggagacacagcacctgatctgtcccacgctgcagcaggccaaccagcctgcaccagcaatcgctccaagtattgcccaggttcctgtgatgccgcagccctcaccagttttccctgcggtatctccagctgctgctccggccaatgttgctccagctcctgctgctcctgttgctccggctgccccagctgcccctgtggtgcctgtcgctccagctgccccttctgttgttcctgtcgctcctgtcgcccctgtagtggttcatcctgctgcccccatactcgtccatcctgctccagttccagtggcagctccagctccggccccgattgctcccgcagttcagcaaaatcctggtcagccacaggttatcctactctcaaagaaaaccgtttattatcccaaaaagcgatcatctgcacccacactgaatactccgcagggagtgctagccatgctaataaatccccgttataagcacacaggcggggaacaggatacggctgaggactcctgggccctcttcacgttcttcgtggacagttacgacgttgcgagtgctttgttccgccgcggatgggtggataatcaaatctggttaaaggtcagtgaccgaatgcctaagatctggatcaactcaatcttaaggttgcatttgacaatggtgctattggatagatatgatccagtagaacgcagcctcgatcttacgctattttacaaagataaggccttgtgtggtgaattcttcgccctcgcggaatccaactgtatgagcacggtgctcggtattgtggacagggaaatgccggagctggaacgtctaattttggatgggaatcatctgacaaatctgtgggtcttcagaaaagtggagcggcgctttccacgacttcatagcatatccttgaaacacaacgatatcgagaatatctattcattgcggaacttacagtttcttcccctagccgaactgaacctcctggacaatcctttgcccgccggttacgaaaaggaagtgctagatatttggccaagtctgcaggtgctcaacaaaattcaagtgactcccgacccggcaatgatgcaattagttgaaagagtgttgcaacatacgggcaccaaaagagagttctttcgtttcttttaa

SEQ ID NO: 35532 - protein, 487 aa, DROSOPHILA
MPFCQAHPKRGRKRAFGVGLLGGALAGAVIGNVVAKSQQAPAAAPAAPVAVVHHHYPPGAPAAPAPASQPDPKKMTVIETGTPDANGCYTQTIREPNPSNPKSYTETQHLICPTLQQANQPAPAIAPSIAQVPVMPQPSPVFPAVSPAAAPANVAPAPAAPVAPAAPAAPVVPVAPAAPSVVPVAPVAPVVVHPAAPILVHPAPVPVAAPAPAPIAPAVQQNPGQPQVILLSKKTVYYPKKRSSAPTLNTPQGVLAMLINPRYKHTGGEQDTAEDSWALFTFFVDSYDVASALFRRGWVDNQIWLKVSDRMPKIWINSILRLHLTMVLLDRYDPVERSLDLTLFYKDKALCGEFFALAESNCMSTVLGIVDREMPELERLILDGNHLTNLWVFRKVERRFPRLHSISLKHNDIENIYSLRNLQFLPLAELNLLDNPLPAGYEKEVLDIWPSLQVLNKIQVTPDPAMMQLVERVLQHTGTKREFFRFF

SEQ ID NO: 35533 - DNA, 3739 bp, DROSOPHILA
tgacctccgaccgtgcagagccccagccacgaaacccgacgacgacggagtcttccaaaaggaatcacgatgggcccaatcgtttttgtgcattaaattgcaaccgagatttatgtaagccgcgtccaaagttgcccagctggtagcgcaggaacccctcattatcgatcgatataggcgcccagacgagacagtcgatgagagactgactgcctcactgagtggggccagtggaaccgcatataataacttgatcataggaaaatcatttattgtgacacgatcgccaattggaagccgataaactttgtcttgcaaggagattctcccccactcgccattagcttgttgtcatgctgtttgattgcccagcttgtttgccttttccctccgctgattaatatctctgtggggcctaattgtgccgagataaaataaacacagttccgcgaatttcatgattttattatttgtttgctcgactacttcggtatcataatctctatgggtagagcatttcctcatccactttgctgccatttgggctatgaagtaaacataagataaaagcgaatttcatgcgtttgcgtttttttttttgcctctattaaggggtttcaccactctaatgatccaaaaagtgaccggaatctataaactactataaagatctaaaaacctattgcccagtcattccaaacatgagtcatatttacattgtcataacactcaaactgaattatttgttttggttattcataggtcagctagtaaattgtgcggttctttcttaacataggagtaaagctgtcaaatcgagggagtccattctttataatatgaagaatataatgctttctagtgttaggcaacgatagaatatgaaaatctgtagcagacgcaaccgctggcagttgctttccaccatgatacgtgggtaagaatccggtggtctgtttgatcaatcgctgatacctgatgatttttcccagtgtgcattatgtcgttgactcatggaatatccctaggatggttctcgcccactctgcccactctcatctccgacaacagtccaattggccatccaattgacatcagcgaggtgaagtggtatgtcagcaatggaaatagtgaatttaggtgtaaatttaactggcaccattgagatttccaggatcggtgcttctttcggaattgggtgtcttatttgtaatatggtaatttgcgttccagtctcgtatttcggaattaagaagtgcatgtactttgtgcccctaccaaatatcgtaaatataactttgccttggcttaacgagcttccaaaatagcactgcaattctttacagcttaattgggtcttgatctacttcgcaagcaaatcactgtatttttatgtgtgtcgcgtccttttgggaatttctggtggcactttggtagtttgctttcctgtatttatcgcggaagtatctgataataggtaagtcattccaaagccaaactacttgccaagtcggataatattcagactagtttaaccacaattttcatcaagcgttcgtggaactctgggctctttttttatgatgacactctgtagtggcataacagtgggatttgtgttagtatattgcctatcctaccatgtgcttccgtgcgtcgtcattttcctgcccattctatatttgtgcctcatcattccccttcctgagccaccacaggacctactgaaacggggtcatgaagaaaaggccgaaaagtccttttgcttttacaagaacttatcgaaggacccagcgcaacaggacgataataaagctgaatttgacaaattgcggaataaagttctcgccagcggcatagctgaaaagattactcctgctgatttctgtaagtttcaaattgataatacatataatgaccaatttttggaaattttcgatttgatactatcttgtattcaatatgtatttgaaatataatacatttattttagtattatcattatcatcattattatagaaacaaatgttcaccttacaatgacaaatttgtatcttcaattcaattcagttaacaaggtctcgggaaaagcatttggactgatcgccgttttactgctctccaatcagatgtcgggatcctttgccatcttcaactattcgtcgaccatcttcgaacagctcggtagcaggatggagcccaatctatgtggcatatttctgggtgttgtgcaaatttttggtttgattagcgccgttttgctggtggaccgcgtgggtcgtcgcctccttttgatcccatcgctggccggaatgggtttggctgagctgggagtgggtctgctaaagtcctttgcttcgcaggactttttacacaacaatggttggattgcacttaccctaatgggcattgtgtccttcacggcgtcagcgggcatagtggctcttacctttgtcattatagttgagcttctgccctttaaggtaagctcggcttcgtttatttgttaaaggatttcacttaaaactcatggccttgcagattcgcgcccctggcatctccatcagtatgtgcggactcagtttatccgtattcattgccctcatcacttatcccgtcctgatcaacgattatggagtgcatgtcacaatgtttgtgtcggcgagtttctgtctactaggtttggtagttctgggaatatttttgcctgagaccaggggcaagagcattacccaatgatgggctaatttctgataagtgttaagtagaaccagtacttataaaaattcacgtagtctagataagttataaacagccataacaaataaaagaaagtgtatgtctagatttggaataagatattaattaagttgaattcatattccaaaacaccatggaatctcttggagttatttcctaataaatgtcttagttttataatcttcctttagaataaaaaaaagagaaaatgtataaaaattcataataaatgtgtaaatgcaaataaaatccaaatactgtttacaatgacttcgccaatcttaagcaaatattgtcaccttactcatacaaagttatgcaaatttacatagacttattgctgctatccaacagttcaacggtaagattagcctgactgccaagtgtttttatttttttttttaatttacagacttccccagacctctttaaatgggagcgctttgcattaatcagcggtactacgctgcgactacttaaaacttatctaatctgcaacaattttacagtcgtcattattgtttacgattgtcagaagattggaaagttggcttatctggcgtgatttccactacataaactcttgtcactcaaaataaaaatcctcagttggcacacgagccgccaagtggttgattcggaatccaaaagcgaaacattttcaggagtcctaaattaaattaggcaatatgacttatgatccatcgcagaagttaagtgtttttagtgtgcggtaccgatggcaatttattgccaccatgactggtgggtgaaaatagaaggaaggagccacagtagagcatttaataaaagttgactaatcccagtacatattatgacactgacccatggaattgccgtgggatggctgtctccctctcttcgactgctcgcatccgacgaaagccctttgggggatcccctgaccattacccaggcatcctggtaagcttgataccctttcagtggaaatcccttt

SEQ ID NO: 35534 - DNA, 1056 bp, DROSOPHILA
atgtcgttgactcatggaatatccctaggatggttctcgcccactctgcccactctcatctccgacaacagtccaattggccatccaattgacatcagcgaggtgaagtgcgttcgtggaactctgggctctttttttatgatgacactctgtagtggcataacagtgggatttgtgttagtatattgcctatcctaccatgtgcttccgtgcgtcgtcattttcctgcccattctatatttgtgcctcatcattccccttcctgagccaccacaggacctactgaaacggggtcatgaagaaaaggccgaaaagtccttttgcttttacaagaacttatcgaaggacccagcgcaacaggacgataataaagctgaatttgacaaattgcggaataaagttctcgccagcggcatagctgaaaagattactcctgctgatttctttaacaaggtctcgggaaaagcatttggactgatcgccgttttactgctctccaatcagatgtcgggatcctttgccatcttcaactattcgtcgaccatcttcgaacagctcggtagcaggatggagcccaatctatgtggcatatttctgggtgttgtgcaaatttttggtttgattagcgccgttttgctggtggaccgcgtgggtcgtcgcctccttttgatcccatcgctggccggaatgggtttggctgagctgggagtgggtctgctaaagtcctttgcttcgcaggactttttacacaacaatggttggattgcacttaccctaatgggcattgtgtccttcacggcgtcagcgggcatagtggctcttacctttgtcattatagttgagcttctgccctttaagattcgcgcccctggcatctccatcagtatgtgcggactcagtttatccgtattcattgccctcatcacttatcccgtcctgatcaacgattatggagtgcatgtcacaatgtttgtgtcggcgagtttctgtctactaggtttggtagttctgggaatatttttgcctgagaccaggggcaagagcattacccaatga

SEQ ID NO: 35535 - protein, 351 aa, DROSOPHILA
MSLTHGISLGWFSPTLPTLISDNSPIGHPIDISEVKCVRGTLGSFFMMTLCSGITVGFVLVYCLSYHVLPCVVIFLPILYLCLIIPLPEPPQDLLKRGHEEKAEKSFCFYKNLSKDPAQQDDNKAEFDKLRNKVLASGIAEKITPADFFNKVSGKAFGLIAVLLLSNQMSGSFAIFNYSSTIFEQLGSRMEPNLCGIFLGVVQIFGLISAVLLVDRVGRRLLLIPSLAGMGLAELGVGLLKSFASQDFLHNNGWIALTLMGIVSFTASAGIVALTFVIIVELLPFKIRAPGISISMCGLSLSVFIALITYPVLINDYGVHVTMFVSASFCLLGLVVLGIFLPETRGKSITQ

SEQ ID NO: 35536 - DNA, 4137 bp, DROSOPHILA
attgccctcatcacttatcccgtcctgatcaacgattatggagtgcatgtcacaatgtttgtgtcggcgagtttctgtctactaggtttggtagttctgggaatatttttgcctgagaccaggggcaagagcattacccaatgatgggctaatttctgataagtgttaagtagaaccagtacttataaaaattcacgtagtctagataagttataaacagccataacaaataaaagaaagtgtatgtctagatttggaataagatattaattaagttgaattcatattccaaaacaccatggaatctcttggagttatttcctaataaatgtcttagttttataatcttcctttagaataaaaaaaagagaaaatgtataaaaattcataataaatgtgtaaatgcaaataaaatccaaatactgtttacaatgacttcgccaatcttaagcaaatattgtcaccttactcatacaaagttatgcaaatttacatagacttattgctgctatccaacagttcaacggtaagattagcctgactgccaagtgtttttatttttttttttaatttacagacttccccagacctctttaaatgggagcgctttgcattaatcagcggtactacgctgcgactacttaaaacttatctaatctgcaacaattttacagtcgtcattattgtttacgattgtcagaagattggaaagttggcttatctggcgtgatttccactacataaactcttgtcactcaaaataaaaatcctcagttggcacacgagccgccaagtggttgattcggaatccaaaagcgaaacattttcaggagtcctaaattaaattaggcaatatgacttatgatccatcgcagaagttaagtgtttttagtgtgcggtaccgatggcaatttattgccaccatgactggtgggtgaaaatagaaggaaggagccacagtagagcatttaataaaagttgactaatcccagtacatattatgacactgacccatggaattgccgtgggatggctgtctccctctcttcgactgctcgcatccgacgaaagccctttgggggatcccctgaccattacccaggcatcctggtaagcttgataccctttcagtggaaatccctttggttgatgttttttgatgttctcagggttggatcacttatcggcctaggctcgctgaccggcaatataatctttggactgctactcgatcgattgggccgtaaagtgtgcatgtatttcctggccatacccaatatggtagataaagttcacatgttctttaaggggtttcccaagagcttgagtcacttcaaggctttcttttaaattcgctagatctactggatccttatctactccgcccaagacgttacgtatctgtatgctggtcgattcctggcgggaatgtccggaggtggctgttacgtcgtcttgcccatattcatagctgaaatagccgacaataggtaagtcgcgtcatttttctagtgactgacaacatttcggattaagggtaatctattaattatagattatttcaagttttacgtgcaatgataagctcagactacgttcatatattcaattatatcggcgcacgtttgtctacgtaataacgattagatataggtctgggaattattgaatgattggagtgaattacttggaacttagcaagtggggaaagaaatctatctaagccatttctttttatattaacatttaacttgagtgtggttgcgaaaggtcatttgcagattttaataaatttgtgcagaaaaaatatattaactgaatgtttatgttcaattttagttttattcaatttttcaaatcattttggcatcatttttgtcgattgtcaatatttagtagatatttatccattcattggtttcaggtcgtaataagtagtttgaatgtaggatgatttaagtccaaaacatttattattttaatatagacttaaatacaatgcatactaatttaagcgttcggggagcgttatcgtccatggccatgatgtacgttagcatcggcatgatggttggctttacattagcctcgtatctcccgtactatctgatgccgtgcattatcgttgctctgccggtggtgtttatgttgtcagttattggcttatcggagacaccgcaatatttgttgagacgagggcgcgatgaccaggccgagaagtctttctacttctacaagaacctgacaccacccacttcctccgacaaggaagcttctcagcatgacgcagctaaaattgagtttgacacatttcggcttcaggtgctcagtggcggcgtcaccgagagcatttcttggcgggatttcagtgagtaaaatacaagttatttttacctacggtctgattaaataattgtctctactcctgcagttaacgtgcctacactaaagatattcggcctcatctttgtactgatcatctgcaatcagctgtcagggagcttcgccatcttcaactacacatcgcacatttttgctgagctaggcaacaatctggatccaaacaccagcaccattgtggtcggagctgcacagctggtgggaatcttcagtgctgtcgtcctagtggacagactgggtcgtcgtgttctgctcctcacctcaatgggtggaatgggtttgggtgagctggcaattgctctgctcaagtgcttcgcatcggatgagtttctgaaccagaatggatggcttcctttggtgatcatgtgccttgtggcctgcattgcttcactaggagttatagccctgatcttcatcatcattattgagctgctcccagctaaggtgagtgatatgaaaatgaaaataaagttaattggaaacaggaattctcaagctgtagcttcatcaatctatcttcttttccttaccaattgcagatccgctccattggcacctccttgagcatggccacatttagcggatttatcttcgtggctctaaagatctaccccacaatgatctacgatcagggcctggctgccaccatgttcatgtcggcgggcatgtgcctattcggattcattgtcttgggactgtttctgccagagaccaaaggaaagctgatgacgcactgatgacatcaacttcgggcccagcggacacgccacttggttgcttttgttggcggtgtggcccattgcataagctgcgggattcaaaatgctcccatgtcaagagtactcactcaataatttgtggcacaatggcggcatcggctcattctgaaatcttgaacttaattcaatttgtgagcattgcggttttctttcggatttctgtacatagaaatttaatttaacaatttgattgggagaaagtctcgggtctgtgatcttgtgtttgataagcgcgaaaattgtaaatgaataggcttaagtcacccatagcttttacttaaataaatttgtattagatttaaaaacaattagtattagaatttaaaaacaattaatagttgtttaaggaaactagatttgatgtatttgccttttcttcgtttcagtggttttgccaaatccattcctgctatcatacagttttgttcgccaactaagtgggctatattacgcagtgataagcctgcgcgatgtaacaagaaaactctttttcttagcctctttcctacgataactccgcagtgcaaaattaatgaactcgcaaaagcctagaagataaagccagctggggcaaaaagccaggcagccgagagatccaaagagccaaacaatgactcataaattcaacacaataaaaattatttattttgcttctacgacgggcacttttcgacgggcactgcaaatgcagtttcagtgcaaattaagcgctgcaaagtgagcgaggagaaaagaaaatttgatctctatgacaggacacacaaatctcgctcagatctccagagacgatgccagctcaaacaaagcccagttggaaatggagttgctgctggagctggagatggagctgaagtcgaaaaacctacagagccacaaatctaatgctcacatttttagtggggggagtttcttatttcgggagtccatccacaaccgcatccacttacccaccgacgtt

SEQ ID NO: 35537 - DNA, 1317 bp, DROSOPHILA
atgacactgacccatggaattgccgtgggatggctgtctccctctcttcgactgctcgcatccgacgaaagccctttgggggatcccctgaccattacccaggcatcctgggttggatcacttatcggcctaggctcgctgaccggcaatataatctttggactgctactcgatcgattgggccgtaaagtgtgcatgtatttcctggccatacccaatatgatctactggatccttatctactccgcccaagacgttacgtatctgtatgctggtcgattcctggcgggaatgtccggaggtggctgttacgtcgtcttgcccatattcatagctgaaatagccgacaatagcgttcggggagcgttatcgtccatggccatgatgtacgttagcatcggcatgatggttggctttacattagcctcgtatctcccgtactatctgatgccgtgcattatcgttgctctgccggtggtgtttatgttgtcagttattggcttatcggagacaccgcaatatttgttgagacgagggcgcgatgaccaggccgagaagtctttctacttctacaagaacctgacaccacccacttcctccgacaaggaagcttctcagcatgacgcagctaaaattgagtttgacacatttcggcttcaggtgctcagtggcggcgtcaccgagagcatttcttggcgggatttcattaacgtgcctacactaaagatattcggcctcatctttgtactgatcatctgcaatcagctgtcagggagcttcgccatcttcaactacacatcgcacatttttgctgagctaggcaacaatctggatccaaacaccagcaccattgtggtcggagctgcacagctggtgggaatcttcagtgctgtcgtcctagtggacagactgggtcgtcgtgttctgctcctcacctcaatgggtggaatgggtttgggtgagctggcaattgctctgctcaagtgcttcgcatcggatgagtttctgaaccagaatggatggcttcctttggtgatcatgtgccttgtggcctgcattgcttcactaggagttatagccctgatcttcatcatcattattgagctgctcccagctaagatccgctccattggcacctccttgagcatggccacatttagcggatttatcttcgtggctctaaagatctaccccacaatgatctacgatcagggcctggctgccaccatgttcatgtcggcgggcatgtgcctattcggattcattgtcttgggactgtttctgccagagaccaaaggaaagctgatgacgcactga

SEQ ID NO: 35538 - protein, 438 aa, DROSOPHILA
MTLTHGIAVGWLSPSLRLLASDESPLGDPLTITQASWVGSLIGLGSLTGNIIFGLLLDRLGRKVCMYFLAIPNMIYWILIYSAQDVTYLYAGRFLAGMSGGGCYVVLPIFIAEIADNSVRGALSSMAMMYVSIGMMVGFTLASYLPYYLMPCIIVALPVVFMLSVIGLSETPQYLLRRGRDDQAEKSFYFYKNLTPPTSSDKEASQHDAAKIEFDTFRLQVLSGGVTESISWRDFINVPTLKIFGLIFVLIICNQLSGSFAIFNYTSHIFAELGNNLDPNTSTIVVGAAQLVGIFSAVVLVDRLGRRVLLLTSMGGMGLGELAIALLKCFASDEFLNQNGWLPLVIMCLVACIASLGVIALIFIIIIELLPAKIRSIGTSLSMATFSGFIFVALKIYPTMIYDQGLAATMFMSAGMCLFGFIVLGLFLPETKGKLMTH

SEQ ID NO: 35539 - DNA, 3239 bp, DROSOPHILA
atgaaacgcttgcttactggaagtctgcatctgctccataatggcaccctggccacgcttggcacaataaaacaaaccttccagctcacttctgtgcttgacaacctattggatacagacactacgataggctctggtcgttacgatcccgaactggacgatcctgagtactgtaacgcagcaagcacagcgctgtatgagcttgcgcttctggcacgtcactatcatcccacggtgcgacggatggccgttcacattgctcatggagtgccagcaacgggcgagggagctttgcccacggaaattggcaaactgtatgtaataagacggcaactacatatgtgactctaacaattattactttccttagtacctcccacgagctgtttacgcaattcgacagcactcagatggctttcaatccgacaataccgctgccaaaagcgggtcaaccaaaactaaaaaggggcaaacacttatatattcgctcggacttcaaacaggagtacggaaaactgctgcagcaaggaaaagtttcacagacgaaggataaacaaaccttacaaattgattttttcagtgcacttcaataaagaaaaatttgaagattgaagtagagttataatgactgcggaatagtgtggaaagaaatgcaatttttaaacaatacccaacttgtttcccaatattaaacattcttccaaatacgttctcagttaaaggaagagaataccaagtgtgataccaggatttgattagccagataataatcgaacaaatttgttgttaaatcagaaaggtgcgagttggttttaaaacatgaaaccattcatttgcttagaacttctctgtaatatatttcaattaatgggatttttacaagttattatgtttggagctcctaacattctatatagaggctaagtctagagtcactaagagtagtgtcatataaccgggtacaagtcccaggggttcgccagaatttttcattcgctacctatgcattggtgcctcctcgttgtcgctgttgtccaacgctagctggtggcagatactctctattcccgcccgactgctgttgcccgaatccagccactgaactctcgggaagagctccggcggcagtggccagaagcccgacagcagctcccgatggcggtaatcgattggctccagtgctcgggacaatggcgggacgaaggacagccccagcgccatacgggctttggggctgagcggttggggtgggcgtggctgaaggataggacccccggccggagttatatccagcaacctgagacactccggtggctcgaagtgttccagtcgtggccagaggtgccccgaaggcagccgaggaagaagcggccggacggtagacgttgttggtattcgatgttctcagattggagccacttctctcggagtaatcatagatataggcattgttcgcatataagctgggcgccgaaacgcagtcgtactggttccaccacacacagactaatgtctcctggctgaagactgtgccattgggacacaggaaggagtaggtccggttgagggcacagatatggaacacctggcattgggcctctatgtccgcataatagccgggtaggggctgttgcgcacagtcaaagttggtgcgcggcacctgggcataaataggataatccactccaggaacacccggaatggccgagtagtctccatcggaatcgttgtagtccccgctgtctcccgttccactagcaactcggattggagatccaccgggagtacctccatactgcgaagcctgcggtccatagggtccactgcgagatgatggggtagataatccgccagatgaagttcttctcggtgggttaacggggtttgtggctcctacaatggcgggtgctccaaaagcagtggtagcctgtccacttggcgtaaatccaacagcgggtgagggaaacaagcctgctccatatgcagtaggagccggagcgggagtaagtggcagggctggtgctgttggatatggtgcaggtgtcaagcgaccaccagctgtggctcctcctacattggctacctcgggacgcccatagttgtatccactttgagcctataaaagcgcggattacagttaagaaaagagaatctccttatagcttacctggacttgcaactgggctaatccgccactccagagcaacaccaaaactggaataaagagacgggccaacattaacgctttctaaccgtccgtggaatctggcgaagatctgctccgagctgtggaactggcgacgcaccaaatcgaaatgaacgccctggcagccatcgatggcgatggcagcgaagagtttcgcagcccctattaaggccaagtacgttgtgattctgggagctgatagcgcggcttagatggttctgcaccgcgatctttatttttcagcttcctactcctacatcgggggcacagtggtcaaaagcttcactattgcatttacagacaatcggggcatttatcaaattaactatactttaagcatacaaactagaaacaatttttttcgaaaatgtttagtgcacaattgtaaatgctgttgcttgattcatttagaagattcaatatgtttcttaattttatattttggttaatctcttcattgtgaattgagttgcatacactgtgccagttgctgaaataacgcactgcaacatcaattggcttgcaagaattgcggcagccggtgggccaaaggcaagacgcatgcctcgtaaatatgcaaggcagcaaaaacttagacagacagacgcccctacaaaggaagtgctaatagtgatcggaatgatgggccgtacagccgatcgctcgtcactgttgagttacgcgccgcagtgggttgggtctgggtcagcgccgactggttggccaactcacctgccaagacgcacgaacagcgttgcaggggcacttgcatcatgcagcaggagattccgagcggacgagcttatccgagtctaatattcggcttatccttttcgaccggcgacctgtgaactgtccaaaacttgggaagttactgcgggcaagctcagaacgatcttagaaatatatacgaatttgaaagcgcgacttggatgcggcatctttaccatatttatgtggcagctgccccaaagaccaacgacagttcgtcagttagtgtgtgctgcttgcgctttggcagatttacgacgct

SEQ ID NO: 35540 - DNA, 1188 bp, DROSOPHILA
atgttggcccgtctctttattccagttttggtgttgctctggagtggcggattagcccagttgcaagtccaggctcaaagtggatacaactatgggcgtcccgaggtagccaatgtaggaggagccacagctggtggtcgcttgacacctgcaccatatccaacagcaccagccctgccacttactcccgctccggctcctactgcatatggagcaggcttgtttccctcacccgctgttggatttacgccaagtggacaggctaccactgcttttggagcacccgccattgtaggagccacaaaccccgttaacccaccgagaagaacttcatctggcggattatctaccccatcatctcgcagtggaccctatggaccgcaggcttcgcagtatggaggtactcccggtggatctccaatccgagttgctagtggaacgggagacagcggggactacaacgattccgatggagactactcggccattccgggtgttcctggagtggattatcctatttatgcccaggtgccgcgcaccaactttgactgtgcgcaacagcccctacccggctattatgcggacatagaggcccaatgccaggtgttccatatctgtgccctcaaccggacctactccttcctgtgtcccaatggcacagtcttcagccaggagacattagtctgtgtgtggtggaaccagtacgactgcgtttcggcgcccagcttatatgcgaacaatgcctatatctatgattactccgagagaagtggctccaatctgagaacatcgaataccaacaacgtctaccgtccggccgcttcttcctcggctgccttcggggcacctctggccacgactggaacacttcgagccaccggagtgtctcaggttgctggatataactccggccgggggtcctatccttcagccacgcccaccccaaccgctcagccccaaagcccgtatggcgctggggctgtccttcgtcccgccattgtcccgagcactggagccaatcgattaccgccatcgggagctgctgtcgggcttctggccactgccgccggagctcttcccgagagttcagtggctggattcgggcaacagcagtcgggcgggaatagagagtatctgccaccagctagcgttggacaacagcgacaacgaggaggcaccaatgcatag

SEQ ID NO: 35541 - protein, 395 aa, DROSOPHILA
MLARLFIPVLVLLWSGGLAQLQVQAQSGYNYGRPEVANVGGATAGGRLTPAPYPTAPALPLTPAPAPTAYGAGLFPSPAVGFTPSGQATTAFGAPAIVGATNPVNPPRRTSSGGLSTPSSRSGPYGPQASQYGGTPGGSPIRVASGTGDSGDYNDSDGDYSAIPGVPGVDYPIYAQVPRTNFDCAQQPLPGYYADIEAQCQVFHICALNRTYSFLCPNGTVFSQETLVCVWWNQYDCVSAPSLYANNAYIYDYSERSGSNLRTSNTNNVYRPAASSSAAFGAPLATTGTLRATGVSQVAGYNSGRGSYPSATPTPTAQPQSPYGAGAVLRPAIVPSTGANRLPPSGAAVGLLATAAGALPESSVAGFGQQQSGGNREYLPPASVGQQRQRGGTNA

SEQ ID NO: 35542 - DNA, 5715 bp, DROSOPHILA
atatttatgtggcagctgccccaaagaccaacgacagttcgtcagttagtgtgtgctgcttgcgctttggcagatttacgacgctggattatccattgttcggggactgcggccagttatcagaattcatatatcagcgagaccctacatgacgtatacgtaatataagttacgtatacgttgatcaattcaatataatagccatttcaagtgcaatgtaattgcaatctgattctacttgtccttgcgagtgggaaattcgattttcttgcaaatgcattcaacagctatggtaaaaatatttaaatttcgactgattacatgatcggcctgaccttaccaaagatttatattagagctggaaaacgcaaaagccaatggatttatgtcaaggcgatcgcagagtctctgttgggctgttgggattaaccaagcagacttattgagaggccagctaagtggcagtagtaatagtttaatcagttagctggccaataaccattcatcacccatctccaaagtattacgcttatcttttcatttatttttatatgtactttattaagtttaaataaatatttacaaacagacatcaagacgtacagatggttcaaatagatcgctcctactggatactctggttggaaagtgttctcgttcgttaagactaagcagtaagaaactaatttaatacaactctcgattaaacttaaacggaaactgcttggctgggcatcaggaacaaccaagtctatgcctgttttgggcgtgggagtatttcagggctctcatcgtcgagtatttcgattacatatttacaaactaattgcgcaattgcattggctaaacgaagtcgattaacaagtaactggttcagaatccaaatagttataggatgttttagattaaagaaattcaaactgaattgaagagggggaagtggagttgactaaagttaggcattaactcgcaaggtctaggaaccgccaccgtcctcgctctatcgcctgctgctgaacttggacgccagcgaatataatgacttgagcagctccagggccctgcggtccgagttgacctccagtagaggggccgtcgtcgtcgtggcctcctccagatcctcgacgcgtatctcgaacttggtggtctcctcgtagctgcctgcccccaaccctgtcgtggtgggcagatccgtggttgtcgtatagccaggcgtggtactggtgaagtattcggctgcggcggcgccaccacgtcggaatgtggtcactgggatgcggttggtggtggtggtcaatctctgcctggaggtcttgcctccagcatgtgttttgctatcaatatcgattagtgcgtttagcaggtgcttacggctcctttccagcgccttgccattgtggtcatcgcaggtctggatgagcagcagcagcagacttagtacctggcgatcgtgctccgcttttgccatgacgttgcgcaggtgcagtgcctcctgttcgttgaggccaccgaacaacttattggcaatcctctgcagcccactactggaaggcagtgcgtccctgggaatgtcgtagctacggaagatgtcctcccactcgtagcgagatggcgtgggtgtggtcaccctgtaggcaaatggtgatgctgttgtagaggtggaggttgtggaactgctagtggaagttctttgctccttcatcagaccatcgttgatggttaggggatcgaggaagtccgtttgcgacttgagtgcccacggatgctcagtgggcttgtgggtcgtaactagcttttgaggtctagcatccttgagcagatcgttgcgagactttacaaacgattgcgtttgctgttgctgcagaaactcctctccggaatcctgacttggcggcgaaagctccccagagaactcaaggccgcgattcgtgctaccttcgtacagctcagtggtggtggagaactctggggccagagtagaatcgaatttatggtttatttccgctgcaatgctgttcggtgtgggggtggtcgcgtccggcaatcccttggtgggcagataatacttggcagttccatcactgaagagcgacggatccgttgtggtcacgggcttaaagttgggagtacttggtggctccgtagggcgagctcgggcagccagttccgcacggaaagtagctgggttatcaagatagctggacaaagcgttggagaagatttgagcgatctttcgagtttcgggtttctccgccagtgcgccaatggtggatccagtgctgcctatctgcgggtactgctggtatttcgatcccgcttctgattgggttccgttggtctgattagagagtaagcccgaactaatatccgactcgccagcaccacgaccttgggccgacttcagtccaaacagattgctgtacttcttcacggtagtatcactcagaagactcttcttgatatcgtccgcattgtcactaatggctggaggattctccgaggtggttagtagagcagtggtgtccgatggcttgatagttggaagtggtggcttcacggatagcttggtttgaacaccagttttgtctaccttctccgacttatccttcttactcagggaattaatagtttcattgtgctcttgtgcaaagtatttggcaaatgaaaccagggcatctggaccggaggaaggtggaatctctaggccaactctagcgggagctgccgccgcagcatttagctccacgtcctcgaactgatccttcaagagattcattgttttcagcatatcctgaacattgcggaaaacagactcttcttttacaggattgggggcgaacaacaagacatcctctccagctgcaccgccggtattcactcttggcgactttccactcatgggcaaataagttggaccgctactagcggccgatggtgaaggtgtagttggcagataatcccgactctcggtggacttcgacgggggtcggaactcgccggaactggccacatcatagtgatggcgcatgccaatgatgaccggcttgaaggtgctgtctagttcgatgctggcgctagcggtgggcttgacctttggagccacagaggattcaataaaaatacctgagctggcacttccgaatctgtgaggattgggtgttgtggccacatgaccacccttgatgtagtttaatttgccctcggtgctcttcgactttaccaaactgggcacagtgggagtgtagaatggcgtggatttgctgggctcaagacgacgtacggtggaatggctcccggtggaatagtgagctgtggtttgtggcactgatcgggtagaatgagcttcaaagaactcgggcttttccttggattggccgggggtgggcctttccctctccttgctgtgttcctcacttccactgtaacgatgctgtcctcgctgtccatttcgtgctctttcagtggagactcccctttcctgggtggcaaccggtgtcctgagacgtgcaggttttaggaccgtgatgtcatcgttacgattcgggttgctctccttattggttctccgcttgccggaaccgctaacaaatgacgagctttccgcagtaatctgactctcttgatcgttactattgttatcgatgctgggtagaaccttgcgctgcttctcaccagacacatcatcaaagtccacactctccactgaggcgggcacatcttccgtggaatcgatacgtctgtccggattggctcgcggtgcagcagaccttccctgtccagcaactggggtgactttgggtttaatgttaagcccaccgcccacgatattaaatccctgcacgggaacagaaggacgcacgcgatgcactcgctgcttgttgaggatctctgcactctctgcgtaatagcccgaggatcccagacagttgaccttaaaccaccagtcgcaggtgagctcgctctgctgaaagatcgtgccattagggcagagaaacgagatcttacggccctcctcacagatatgaaagacctatggagatatgaagagttagttaagtttacacattattttggcatacttattattttacctgacaatcggtttccatgtcggcaaagtagccgttgccatatgaacggcaactgaacgaggtcttcggaattcgtgggtagatgggaaagtcgatgcccggtcgcccaacaactccttggtacacctcgtaatcaacatcctcatcagaagcacgcttctttaagtggtgcttgtgttcattgcagttcgtatgggcctcatagcgttcctcctcgaattgagtagctcccgtttgcttagctaaaatccgggctggagttcgatactatcaatcaaaagtgatgttagacttatgctcaactggaagttcaattccacatacctttgattctgcgcttgtatagccaaggattaccagtacaattaaagctgcaatgatttataaatagtagttttattaaaacaatgttgattacttgaatgctttttatgtaaaaatatatacatatttaaaataacatttcacaaaaatacccaatctttttcagccccaactacacttctatacaatgatactatgctcaatttaaagctggaacgcacgatcttataacaaaaaggaattcttttaatgcagcttttcgtgcaattattttctttatgaatacattcggttggccattttaccgtgaattctctagccgtgtttggccaaaccgctcttcaggtttcgattcttctgtgcaattagaatgccttgttgctggtgagtccacagaccttgacttttccacttaacttggatggcagacattgccaaattatgcaagagttggctactgggactgggactagctggaagtgactgacctcaggccccctcgaaatgcaataattaaattttaaagcataaaaacaattaaagaaagacacagaaataaaaaagtcatgatgaactacgtcttaagtggcggccggcagaggaagatgtcagccgcagagggttattgaataaccaaaatagccacaagattcaaggcccacttgctgcataatcacagcgattaagtgaatcatcggagaagacccactgaaaatttggtcgcgggtgtcggtgttgctattgctattgctatagctatcgctgccttattcaaattaaacaattgcccataatttgtgcccgctgattggcaagcgagctcaaattcgaacggccgcctcatcaaccatacgccacgttgtacgcgcatcaatttcggaactgtccgatcaattcgattgggttcgtgcccctcgcagcgggatggtctgccaacttaattgagaggtgctgtcgatggacgcgtaattactcaaagaccgaaaggcccaaagaagattgccggccattgttggttttattcggccgcgagatgagctgtcacttatgcccacttgccatctgggtctcggccaacacgcccgtcctaatgagccgttataaattgcatttcccaggccctctgccgacttggccgatccattaattcaaatcaaagtcacatttaatctaaatccgaatctgaactgtgtgttggaacttttttttgtcgcacgtcaagtcagcaaatgaagatggctcacgcaacctggccaagacaaaggggcattaacgcaatctcggccgctttgccgcccac

SEQ ID NO: 35543 - DNA, 3345 bp, DROSOPHILA
atggccaaccgaatctttaattgtactggtaatccttggctatacaagcgcagaatcaaagcccggattttagctaagcaaacgggagctactcaattcgaggaggaacgctatgaggcccatacgaactgcaatgaacacaagcaccacttaaagaagcgtgcttctgatgaggatgttgattacgaggtgtaccaaggagttgttgggcgaccgggcatcgactttcccatctacccacgaattccgaagacctcgttcagttgccgttcatatggcaacggctactttgccgacatggaaaccgattgtcaggtctttcatatctgtgaggagggccgtaagatctcgtttctctgccctaatggcacgatctttcagcagagcgagctcacctgcgactggtggtttaaggtcaactgtctgggatcctcgggctattacgcagagagtgcagagatcctcaacaagcagcgagtgcatcgcgtgcgtccttctgttcccgtgcagggatttaatatcgtgggcggtgggcttaacattaaacccaaagtcaccccagttgctggacagggaaggtctgctgcaccgcgagccaatccggacagacgtatcgattccacggaagatgtgcccgcctcagtggagagtgtggactttgatgatgtgtctggtgagaagcagcgcaaggttctacccagcatcgataacaatagtaacgatcaagagagtcagattactgcggaaagctcgtcatttgttagcggttccggcaagcggagaaccaataaggagagcaacccgaatcgtaacgatgacatcacggtcctaaaacctgcacgtctcaggacaccggttgccacccaggaaaggggagtctccactgaaagagcacgaaatggacagcgaggacagcatcgttacagtggaagtgaggaacacagcaaggagagggaaaggcccacccccggccaatccaaggaaaagcccgagttctttgaagctcattctacccgatcagtgccacaaaccacagctcactattccaccgggagccattccaccgtacgtcgtcttgagcccagcaaatccacgccattctacactcccactgtgcccagtttggtaaagtcgaagagcaccgagggcaaattaaactacatcaagggtggtcatgtggccacaacacccaatcctcacagattcggaagtgccagctcaggtatttttattgaatcctctgtggctccaaaggtcaagcccaccgctagcgccagcatcgaactagacagcaccttcaagccggtcatcattggcatgcgccatcactatgatgtggccagttccggcgagttccgacccccgtcgaagtccaccgagagtcgggattatctgccaactacaccttcaccatcggccgctagtagcggtccaacttatttgcccatgagtggaaagtcgccaagagtgaataccggcggtgcagctggagaggatgtcttgttgttcgcccccaatcctgtaaaagaagagtctgttttccgcaatgttcaggatatgctgaaaacaatgaatctcttgaaggatcagttcgaggacgtggagctaaatgctgcggcggcagctcccgctagagttggcctagagattccaccttcctccggtccagatgccctggtttcatttgccaaatactttgcacaagagcacaatgaaactattaattccctgagtaagaaggataagtcggagaaggtagacaaaactggtgttcaaaccaagctatccgtgaagccaccacttccaactatcaagccatcggacaccactgctctactaaccacctcggagaatcctccagccattagtgacaatgcggacgatatcaagaagagtcttctgagtgatactaccgtgaagaagtacagcaatctgtttggactgaagtcggcccaaggtcgtggtgctggcgagtcggatattagttcgggcttactctctaatcagaccaacggaacccaatcagaagcgggatcgaaataccagcagtacccgcagataggcagcactggatccaccattggcgcactggcggagaaacccgaaactcgaaagatcgctcaaatcttctccaacgctttgtccagctatcttgataacccagctactttccgtgcggaactggctgcccgagctcgccctacggagccaccaagtactcccaactttaagcccgtgaccacaacggatccgtcgctcttcagtgatggaactgccaagtattatctgcccaccaagggattgccggacgcgaccacccccacaccgaacagcattgcagcggaaataaaccataaattcgattctactctggccccagagttctccaccaccactgagctgtacgaaggtagcacgaatcgcggccttgagttctctggggagctttcgccgccaagtcaggattccggagaggagtttctgcagcaacagcaaacgcaatcgtttgtaaagtctcgcaacgatctgctcaaggatgctagacctcaaaagctagttacgacccacaagcccactgagcatccgtgggcactcaagtcgcaaacggacttcctcgatcccctaaccatcaacgatggtctgatgaaggagcaaagaacttccactagcagttccacaacctccacctctacaacagcatcaccatttgcctacagggtgaccacacccacgccatctcgctacgagtgggaggacatcttccgtagctacgacattcccagggacgcactgccttccagtagtgggctgcagaggattgccaataagttgttcggtggcctcaacgaacaggaggcactgcacctgcgcaacgtcatggcaaaagcggagcacgatcgccaggtactaagtctgctgctgctgctcatccagacctgcgatgaccacaatggcaaggcgctggaaaggagccgtaagcacctgctaaacgcactaatcgatattgatagcaaaacacatgctggaggcaagacctccaggcagagattgaccaccaccaccaaccgcatcccagtgaccacattccgacgtggtggcgccgccgcagccgaatacttcaccagtaccacgcctggctatacgacaaccacggatctgcccaccacgacagggttgggggcaggcagctacgaggagaccaccaagttcgagatacgcgtcgaggatctggaggaggccacgacgacgacggcccctctactggaggtcaactcggaccgcagggccctggagctgctcaagtcattatattcgctggcgtccaagttcagcagcaggcgatag

SEQ ID NO: 35544 - protein, 1114 aa, DROSOPHILA
MANRIFNCTGNPWLYKRRIKARILAKQTGATQFEEERYEAHTNCNEHKHHLKKRASDEDVDYEVYQGVVGRPGIDFPIYPRIPKTSFSCRSYGNGYFADMETDCQVFHICEEGRKISFLCPNGTIFQQSELTCDWWFKVNCLGSSGYYAESAEILNKQRVHRVRPSVPVQGFNIVGGGLNIKPKVTPVAGQGRSAAPRANPDRRIDSTEDVPASVESVDFDDVSGEKQRKVLPSIDNNSNDQESQITAESSSFVSGSGKRRTNKESNPNRNDDITVLKPARLRTPVATQERGVSTERARNGQRGQHRYSGSEEHSKERERPTPGQSKEKPEFFEAHSTRSVPQTTAHYSTGSHSTVRRLEPSKSTPFYTPTVPSLVKSKSTEGKLNYIKGGHVATTPNPHRFGSASSGIFIESSVAPKVKPTASASIELDSTFKPVIIGMRHHYDVASSGEFRPPSKSTESRDYLPTTPSPSAASSGPTYLPMSGKSPRVNTGGAAGEDVLLFAPNPVKEESVFRNVQDMLKTMNLLKDQFEDVELNAAAAAPARVGLEIPPSSGPDALVSFAKYFAQEHNETINSLSKKDKSEKVDKTGVQTKLSVKPPLPTIKPSDTTALLTTSENPPAISDNADDIKKSLLSDTTVKKYSNLFGLKSAQGRGAGESDISSGLLSNQTNGTQSEAGSKYQQYPQIGSTGSTIGALAEKPETRKIAQIFSNALSSYLDNPATFRAELAARARPTEPPSTPNFKPVTTTDPSLFSDGTAKYYLPTKGLPDATTPTPNSIAAEINHKFDSTLAPEFSTTTELYEGSTNRGLEFSGELSPPSQDSGEEFLQQQQTQSFVKSRNDLLKDARPQKLVTTHKPTEHPWALKSQTDFLDPLTINDGLMKEQRTSTSSSTTSTSTTASPFAYRVTTPTPSRYEWEDIFRSYDIPRDALPSSSGLQRIANKLFGGLNEQEALHLRNVMAKAEHDRQVLSLLLLLIQTCDDHNGKALERSRKHLLNALIDIDSKTHAGGKTSRQRLTTTTNRIPVTTFRRGGAAAAEYFTSTTPGYTTTTDLPTTTGLGAGSYEETTKFEIRVEDLEEATTTTAPLLEVNSDRRALELLKSLYSLASKFSSRR

SEQ ID NO: 35545 - DNA, 4164 bp, DROSOPHILA
cccaagcgcttccaacacccaatttgtctggcttttcggggggaaacaatgacaataaccgcatcgtgaatatgttcgagtgtgtggatatgaataaacatggtggcccgcgagtaatgtgagacttgcataacctcatttggcggcttatgggctcgcgtgctcccgtgcgcctggcttatatatttttttttgaagtcggcgtgatatcgtgtacgcagatataacagtgaagatagataggaaggtagtccgcaagtgtaccacggattggaatggaagcgtgcgcgctcctctaagacagaaaaatgtcgggccataaccgatccatccagcccatccatccatccagtcaacatcatttcggccgaatgcttttatccattgactgctgagcgagtaaacttttatgacaaccactgacctttttgggaaaaagacttgacaggaaatcgctgtggagtggccaggaaatgattaatggctctattgatgcattcagagaccgtccgaaatatgcccaacgaatgcggattaatctatagaaggctgtttgcatcgtattcaaagctgaaggtttatccacagtattcacaccttgcacaacccacaaatcaaactgggaaaactcccaaattataagatgaggcaatggaactataattcttcccccgaattattaccactgccactgaaaatgcagggcgtcgacaaaagccaaaagttgaagcaatccagcttggttcaatccaagatctcagcaaagtaagcaacgtttgctgcaattatggatcaattatatgaagttgattactgggaagcagcgccttcagttttggaatttcgccaatgcaaggctcacgattttttattttttggcagccgccaatcgttggcaattcgaattgcttttttttttttttttgtttttagcatgcaaaatttaagttacttaaaattttatctgcaacagctgcaaatcgaatacctaacaaaacatttacatttcatcccgcttggccagctcctccacaagcttggcactttgggccttgatttgtttgcggttgggtacattggccatggtcttgttctcctgcaggatgtcatcctcgggagctgttggagcctgctcttcattatccactggctcgtacatatctaggctggccaggaagtcggcatggtattcctcgacatttcgcttgatggtcgccggtttgagctcaactgcataagccttcatcagcttgtagatcttacgcttcaccatatgcattatgttatcaactgtgggcagagtgggttagattaatggctactttttaattgtagacgtcgctcaactattctcctcgaaaatctctggggcagcagccctcatgttcagcatttcgaattttagcaacgggagcttcaagtacgagttgggatactgcgcacgtagtaatttgggctggcgatcaatgtgacgaaggatctccaaaagattccaaatgctaactctgaaaccaacatgataatactttgagcactcgttttaaataactagagcaaaggccctagtttataagaactaaaaaaaatacttacctcaacaatacatatgcatcagctctgttcttaagatgttgcaaagtatcttgttcaaattggatgtcattttgaagcgttttctttaggtccttaatgcgctccaagcgactaaaaaccaggttagaatggttagataaatgttaatgaaggagttttttacctacttaatctcttcctctgacagattgttgatcagcacccctttcaagacactggcgcacttcatcttggtttccagcatttcatgagccaacatgtcattgacaatcatacgatgcagtttatcattgttgtccacctggctcttcattctggaatatatatggttatacatggcattctcataaaaatacaaaacactataattacacaccgtggataaatttccttggcctgcgaacagagtgtcacaaacttaacctccttgattgtcttttccacagcctttagctccagttttagaatcatcatgctctgagtttcccgaacatatcgcttcagattcgtcgttggagccgcctccttgggcttattgaaattagcaatcgatgtacctgccggtttctttagagcggacagcatttgcaatttatgctgcaggtttttccgggatttctcctccatgtttcggaactcatcgttcaactccttgaacttcgcaatcgccggcatgcccaggaagagaatatgtttgatgaagtttgattgatcgtccatgtcgctgctaagggagcgcaagatgggttcatagaagatctcgtcatgaacgagcacctgtatcatctttttgtaggtgttgttgatcgtcttgatcgcctttaggcgcacattcgaattttcaatcttcttaagaaaaactcgtgacttcaactcctcgtcgagaataaattcgttctggtacttaatgcgattctgcaaaagtgctctacgcagctatgagaacaaaatttaaggtaacatttaaagagaaattagcaagtaatacaaattatattataattataccaaccagctgttccttgtaatgctgcttcaactgatccaagcgaaactccaaacgatcccgctcctttctcatcacaaaagttcgctgattgatgttgtccacgaccaagtgaattggcatcttctggtacagtctctgcagcggcttatggttgatgagaaagttgcggatcttatgggtattgtcattgatcagaatattctgtaattttgcgcgaccatcgcggcattgcaacttcaggcgcttgttctctcgaaaataccgctggcgattcgccttcgactcatggttcttgaacaccaaacgacgcgctgttcaatatgtgtgtttatctttaaagagctagatctacgccagaaatatatatcttactcaacaagtcggtcattcccttgaactgctcggttagggaattgggggtccatcgctcatcaaccatcacatgctgatgcacgtacgacatgccaaagaatccatgaaatctcaaggagcgcggatgcacaggcttgggggccaaaacatccttctctcggttcttgtcccgacgtggtatataggccatgcctctctggcgcaaagtacacggcggcatgttgaatggttaagtgactttgggggctcttcgctaaattgtgatttaatagagcttattgcaccttcgattctcgtgtggatgtgatcaatagaagaaaaatatatgtttgacactatcatagacgccgactccaaagaataatacaaaatgaacgaattatgtttttattttacacatttattttgcactaacatttcatttctgttttgctttagagttgggtttgtttcaacataatttgtaataatacacaatatatttaactcctatttaatgagaatgtgtgcacattacatactcgagtagtttgcatttccatgagattggatcgaattgtaagaattcattgcgacaaaaatgtcttttattttctatgcgttcttattcaattgtaataggggttctgttgagagagagtacacaaactaatagaaacgtagtaacactttgattcaaacataaatagttcttagttgtagatattctgcattgcacgatcgatggttatctacaagatacattcgatttggtaagccaaccctctaagcaagcttctctgcaaattgtcggccaaatatatctcactgtctattgaccctttacttagattcattcaagtggtcgcaattttctaataattttagttctgcaagttctaaacgcatgcgtcgtgtagacagtaagtgcagttttaagttagttagtcctaagtatgagtatagtttagctcaaacaccagcgtatatatattgtcataaaacatttttttgtcattttcgagtgtataattttgctaagtgtacattgattcgagttcggggctttaggtttacattaactttagccttaatgaaaattccatacatgattgtttgcttctaacgattattgcatttgcgttgttgtttgcctacgagagttgacccacctattccaaaagtaggacatgctaaagtcctggtcaacc

SEQ ID NO: 35546 - DNA, 1764 bp, DROSOPHILA
atggcctatataccacgtcgggacaagaaccgagagaaggatgttttggcccccaagcctgtgcatccgcgctccttgagatttcatggattctttggcatgtcgtacgtgcatcagcatgtgatggttgatgagcgatggacccccaattccctaaccgagcagttcaagggaatgaccgacttgttgacgcgtcgtttggtgttcaagaaccatgagtcgaaggcgaatcgccagcggtattttcgagagaacaagcgcctgaagttgcaatgccgcgatggtcgcgcaaaattacagaatattctgatcaatgacaatacccataagatccgcaactttctcatcaaccataagccgctgcagagactgtaccagaagatgccaattcacttggtcgtggacaacatcaatcagcgaacttttgtgatgagaaaggagcgggatcgtttggagtttcgcttggatcagttgaagcagcattacaaggaacagctgctgcgtagagcacttttgcagaatcgcattaagtaccagaacgaatttattctcgacgaggagttgaagtcacgagtttttcttaagaagattgaaaattcgaatgtgcgcctaaaggcgatcaagacgatcaacaacacctacaaaaagatgatacaggtgctcgttcatgacgagatcttctatgaacccatcttgcgctcccttagcagcgacatggacgatcaatcaaacttcatcaaacatattctcttcctgggcatgccggcgattgcgaagttcaaggagttgaacgatgagttccgaaacatggaggagaaatcccggaaaaacctgcagcataaattgcaaatgctgtccgctctaaagaaaccggcaggtacatcgattgctaatttcaataagcccaaggaggcggctccaacgacgaatctgaagcgatatgttcgggaaactcagagcatgatgattctaaaactggagctaaaggctgtggaaaagacaatcaaggaggttaagtttgtgacactctgttcgcaggccaaggaaatttatccacgaatgaagagccaggtggacaacaatgataaactgcatcgtatgattgtcaatgacatgttggctcatgaaatgctggaaaccaagatgaagtgcgccagtgtcttgaaaggggtgctgatcaacaatctgtcagaggaagagattaatcgcttggagcgcattaaggacctaaagaaaacgcttcaaaatgacatccaatttgaacaagatactttgcaacatcttaagaacagagctgatgcatatgtattgttgagagttagcatttggaatcttttggagatccttcgtcacattgatcgccagcccaaattactacgtgcgcagtatcccaactcgtacttgaagctcccgttgctaaaattcgaaatgctgaacatgagggctgctgccccagagattttcgaggagaatattgataacataatgcatatggtgaagcgtaagatctacaagctgatgaaggcttatgcagttgagctcaaaccggcgaccatcaagcgaaatgtcgaggaataccatgccgacttcctggccagcctagatatgtacgagccagtggataatgaagagcaggctccaacagctcccgaggatgacatcctgcaggagaacaagaccatggccaatgtacccaaccgcaaacaaatcaaggcccaaagtgccaagcttgtggaggagctggccaagcgggatgaaatgtaa

SEQ ID NO: 35547 - protein, 587 aa, DROSOPHILA
MAYIPRRDKNREKDVLAPKPVHPRSLRFHGFFGMSYVHQHVMVDERWTPNSLTEQFKGMTDLLTRRLVFKNHESKANRQRYFRENKRLKLQCRDGRAKLQNILINDNTHKIRNFLINHKPLQRLYQKMPIHLVVDNINQRTFVMRKERDRLEFRLDQLKQHYKEQLLRRALLQNRIKYQNEFILDEELKSRVFLKKIENSNVRLKAIKTINNTYKKMIQVLVHDEIFYEPILRSLSSDMDDQSNFIKHILFLGMPAIAKFKELNDEFRNMEEKSRKNLQHKLQMLSALKKPAGTSIANFNKPKEAAPTTNLKRYVRETQSMMILKLELKAVEKTIKEVKFVTLCSQAKEIYPRMKSQVDNNDKLHRMIVNDMLAHEMLETKMKCASVLKGVLINNLSEEEINRLERIKDLKKTLQNDIQFEQDTLQHLKNRADAYVLLRVSIWNLLEILRHIDRQPKLLRAQYPNSYLKLPLLKFEMLNMRAAAPEIFEENIDNIMHMVKRKIYKLMKAYAVELKPATIKRNVEEYHADFLASLDMYEPVDNEEQAPTAPEDDILQENKTMANVPNRKQIKAQSAKLVEELAKRDEM

SEQ ID NO: 35548 - DNA, 2405 bp, DROSOPHILA
cgcagagctgttccttcagccattcctggttctcgatcaagaactccaggcagaagatgaggccgccgttcggtccgtagtgcagctcttcgtcctccatggcatcgtccaggtggattagatcgcgaatgtccgtcagcgggttgtaggtgaagtgctctgccgccggatcgaggttcaccacctgaacatttctcttgcagtccatcgcatattgctgcattaagctgcagtacgtcgactggggagaatattgtgtgttagattaatggcgcgcatcggctgccgtttttgtggacataccttgccactgcctgccgggcccacaattatttgggcaaaccgcatgataatgagtcgtaagttattttcagtacctaaattccgcaacaaaacaaattctaatgtgaggcatagcgtgcgccagctgtagtgctgcacaacgtacaaactctgcacgattaatattcgcctcgaataggttggcagcactacatgtggcccgccaagaatctaaaattcaaacagcattaggtacgcgaaaacgttatacagtaaatggaaggaacaataaggaagcagcttcccttaagtttatttgaaagctcttatttatttcgatttattttcctttaaatatgcctgaaacaagtatttctatattatattaagttaatacttagattaacttctttaaaaacaataatcacacatttttgtaattctaaaatagatgattatgagactatgatttgatgattcaatgcgcaaagtttatggctccgaaaaaattatgagttataaaagataaaggtccgaaaatttagtaagctgagcagcccacgagactataaaaggggcagcctatacacttcaactgtttttattttgaaattattactcaagcatggcacccagttcggaaaaggttcgctaatgaattactaaaaatgaaataaataaaacttttacaaaactgcagcaaagttatgaagaactaatggagaacatgaaactttgcgaggcggaaaggatatacgcgctctcgaacagtgtcggaagaatcctggatgacgcggaggcccgaaagatcctaaggcacttcatgaagagcgaaaataagtccatgcagtgcgtggacatctatgagaagtgcgcagagtttcttgtggagcacccgaagtacgagtcctgccactttgaagtcctggtccgactcggattgccctcccatctgaagcagcgtctattttatcgattaaacaatgctgatcccatttccatctgcctctgccttaaacacatccaggaggaatgtctcagtgaggtggccgagtcattcagcgccttcaaggaatctatcacagagacccgaatgaatcttaaacttaagcaactaggataagtaaaggagaaaaataatattatatgatataaaacacaaatatttttaaacaattggctttgacttttcaacatactttattaaaagaaatgtcgatagaaacgcgcataaatttagttcatattattaatcaacattttacttaccaaatatatttaaaaacacttgttcatagaaaaagttgatatggtcacaatatattagagcaaataaatattagataataataaacaagttccagaatctggaatccagatacgggagtaggaatgacggtcgactgacgactgtttccgaggttgctcacttccgtcacgactttctgatatttttaaatcgcaatttattatagaaaaccaaaaagttctattattcagaatattcacatatttattgcaaaaccgaattctctggtggcttctttaatttacggggacggagttggcgtggtcgaaattattaaaaaaaaatgttttttagtttttgaatggaagcttcgatcggttttgtggtcgctacaacgggggtggttagtaaaatcagcatatccaagtatcagacttttagagctaaaaacttcaagttcacgcctgttacatacttttcaagtactactaaagaagaaaaaatttcccaatgagctaattttaattttttcgagtacatgacttaaacggataattctaggaattttcacctcaaactaaaaactttaaagccttcatgtttttgaacggtcgttttctcattgtttacgttttatattgcttactataaagtcataacgaaattgcttatcttttaaacccgattcagcatcatggtggcatttgttctggccactcaccccttgtcagcaacttatcagattttgataacgccccacagctgtcgccgccgacggttaattaaatctttgaccacaacaacccaaacggagggcatatgtacatttacatacgatcgaattgatatatcaactcggatcggcttccaatcg

SEQ ID NO: 35549 - DNA, 405 bp, DROSOPHILA
atggagaacatgaaactttgcgaggcggaaaggatatacgcgctctcgaacagtgtcggaagaatcctggatgacgcggaggcccgaaagatcctaaggcacttcatgaagagcgaaaataagtccatgcagtgcgtggacatctatgagaagtgcgcagagtttcttgtggagcacccgaagtacgagtcctgccactttgaagtcctggtccgactcggattgccctcccatctgaagcagcgtctattttatcgattaaacaatgctgatcccatttccatctgcctctgccttaaacacatccaggaggaatgtctcagtgaggtggccgagtcattcagcgccttcaaggaatctatcacagagacccgaatgaatcttaaacttaagcaactaggataa

SEQ ID NO: 35550 - protein, 134 aa, DROSOPHILA
MENMKLCEAERIYALSNSVGRILDDAEARKILRHFMKSENKSMQCVDIYEKCAEFLVEHPKYESCHFEVLVRLGLPSHLKQRLFYRLNNADPISICLCLKHIQEECLSEVAESFSAFKESITETRMNLKLKQLG

SEQ ID NO: 35551 - DNA, 4112 bp, DROSOPHILA
catcgctgaaacacccctgccacgagctaatcctaattgcggataaacatctcgattgctcgaccaaacggacaacatctgcccgtcgcgaacatttgacagtcgtaatgatgttttaaatggcactctcgcaccgccaagtaaacgcttaaaaataataattttccattttttaacgaaattccgttcggcgtgtgggcatgcgtgtcaaaagaccggaaataattttctagtcgcagtgccctgtaaactgcatggtatacttaacaaaattattaaacattcaatggaaaatatgctagaatatttgaaataatagggtacgaataaaaaaagtaaataaaatagaaataggaatccgttgtaggcctcttatgtatgtgtgcaaaatgttaataacatattttttagtaattttaatcgaaaaatacatttttatctttatagatatatttttaaggaacttgaaattggtaaaggcgatttttttgctgaagtaataaagttctttttctgagtgtaatgcctttacccacccccatgggcgagaataaactgcacttgtactttgtgatatttgtctgttcggcggttgtccctcttttttaatgatatcgggaatcgcggggtgcagaggccacgaggacaaccaggaccaggtgttcgatgcacactcgtgctgataactatataatttatcatcaaattgctccttttgccctcggcgcttgaactgcaattagatttagtttgagtagattgggttgatttgtgtgaaatgtttattcgatttaaactaaaccactatgtataacatttagatattagcgaacttagagcaattaaataccacagaacatgttttcttcatataattattaagttggttaatatgtgttagatgccaggactagcaaggcttgactagtaggatttccaatgaatctcattctcagtgactcgtttcaggactttgccacgccagcgagtcctgcgagactcacatgccactgccgctgctgaaaatactggccgcagctccaggatccgacatatccgcaccacttccgctgaaatcgtcgctgctctggttgctgttttgattctgattcgagttgctgttgttgtacagcggcaggggctgcgagtggggtccccgtggatcctccggtgtccaggtcctggcgtagagcttactgcccggatatcggtcacccttgcggtaccaggacaacgagtgcgccacgccgccagctgcaattgggaggtaaatcgtggttagcaaacattgcgctctatcgaatacgaataaaaataagcagaaccccaactattgtatctttaaaatgtatgaagttccacagttggttttttcttattctttatgagaatctcgatctcaaaatctagccaagatcgaatcatgctcagcttactcagatcgagatcgaattattctcagattgctctctcattttttcagccttcctctcacgtctgaaattataaacattgagatcgttttcgtctcgaaatcaagaaggttcttctcattctcatgagaataacttattccactgaatatggtgatcacaaacgatttcgttttttttcgttctcaatttttctagatgtgaagtacgcctacgaaggataaagaataaaaggtggtatactcgaagtacagctgtgttcttaaaaatagcagtgcttcgaacctgagagtttaagataaatataataataattcctatgatttacagttttaatggaacattttttttataacagcgttaggtatttaatttcaaacaattcaacaaatgtttcacttttatttcttcaatagtttcgaaaatatagattaaaacaacataataggcagaaattctggtgttctggtgttctggtgaaaaaatagtaacaaaattcaacttgacttagaacgaacttagtttttctttttaaaatgttaattagatcctaatacttggctggatagccttcgttagccagcacagccttacacccacgcggcatggagtccaccaggtcctggcaacgtttgggaggaattttttaccatgcatcgtgcacaaatcttgccaaatctgacccttagacgtcggggacttcttggacacatattgtttaatgtccccctacaggttttcaatcggatttaaatcggaagctgatgcttgccacggcattgcatctattctattttgggtgaacctattcttagccgatttgcatctgcgtttcgaatcattatcctgttggaatgtccattttaagggcatattatattcagaatatgacagtaaggcatcaataagtatattttcatatgcgttttgatctataagaccataaatcatatgttatggactcataccattgtaaaaaaaacatgcccataccaggattttaggtccatcgtgatttaaagtcttcaatgggtgttttgggtggtactccgtgtttggaggtcgtcagatatactgtagtgaaccagttccaccaaatagcactgtttttgatccatcagtccaaacgatattaggccatttggagacgggccagtttcggtaaatcaactcttatgattaatttgcttcaatattgtttttggtgctgctatttccgttttcaacttattgctattatcactgttatcagtggtcctcatactccaagcactgtcctgtaaaagtcaagcgccgcccaaacaattaaaactgttgccaaaaactgagcaaatgccattagcgaccacattacgggtccatcatcgaggcagggcaagcaaataaacggaaaagggttgcttgtcgggtttgcccggcttgttgttgcagctgccaccccgctgcgccacgccatttgccttggacaaataaactcacagcgaagacctagccggaatccatatccctcctccttctcctgctcctgcgaccatatccaatcagagccaacataccacccagtcgggcaatttgtagatctcgcagttttcaaatgccgcatgcgggtgttgctcaaatatgcatgctccgaccacttccggcgcagtttccgcatctttgcaagttggtgtgaacatatgccaggcgcgtggcgaaaatccccagctcctcggccattcttcctgccagccatttaagtgggcgtattgtggagatggcgaggtggtgcctccacccccccgcccgcaaaactttcgttggatttctttctgtctctctgtgtttttctgcaacatttttaatgcccgttaagcatgaaaacgctttcgccatcagcatggccatctccccgctccccccctcctgacctgcttgcccaccatttggcctttgagggggacgcccgacagcgccatctgctggagtgtaacgaatttcccacgctatgattatgtcgattgggcattgttgttactcttattgttactatttggttcgactgggtcccgcccacccccggattcgactccccttgtcgggggttgaggaactggaatcgggcaaggtgtatggtatatgaatgtatatggtgtggaatggtgtgcatgcggcactttatcaggtagacacaaattacacatcagagcttgcatgttcattttgtcaggatcgaatcgaaaagactgataaattctggtaagaggaggccaaaagtagctgtaataataaatataactataagacctatttaatatgtaaccatttttaagaaacttgaaccaactatgtaacttggggaaataccttggtagaaacttttagaagttattttcacttcagtacctgtggcgtttatagacccaatgaaatgttttctctgttgtataattcttgggaaatagttttgtatcatctttttagataccataatttagaaaacagataccacttcgcaccatttaaattattccatgagtatgagtattcccgtagctgtaaattgtaatacaaatcaccttactgatggggttctctacattctaaaaccagttcgaattcaactttaaccagttcaaattcatgttgtgacatggatgaataaaaaaaaaattgtttaaaaaaaagtgacatttttta

SEQ ID NO: 35552 - DNA, 454 bp, DROSOPHILA
atgttcacaccaacttgcaaagatgcggaaactgcgccggaagtggtcggagcatgcatatttgagcaacacccgcatgcggcatttgaaaactgcgagatctacaaattgcccgactgggtggtatgttggctctgattggatatggtcgcaggagcaggagaaggaggagggatatggattccggctaggtcttcgctctggcggcgtggcgcactcgttgtcctggtaccgcaagggtgaccgatatccgggcagtaagctctacgccaggacctggacaccggaggatccacggggaccccactcgcagcccctgccgctgtacaacaacagcaactcgaatcagaatcaaaacagcaaccagagcagcgacgatttcagcggaagtggtgcggatatgtcggatcctggagctgcggccagtattttcagcagcggcagtggcatgtga

SEQ ID NO: 35553 - protein, 143 aa, DROSOPHILA
MRKLRRKWSEHAYLSNTRMRHLKTARSTNCPTGWYVGSDWIWSQEQEKEEGYGFRLGLRSGGVAHSLSWYRKGDRYPGSKLYARTWTPEDPRGPHSQPLPLYNNSNSNQNQNSNQSSDDFSGSGADMSDPGAAASIFSSGSGM

SEQ ID NO: 35554 - DNA, 2419 bp, DROSOPHILA
gatactaaggcagttctgtcattacagctcagcagcaatagcagctcttcgaccttttcatcctcctcccagcagcagtcgtcggtggactacgaggcggaggacgagaacgaagacaagcagcgcaggccgttgcataagaacgacaacgacagtttgctgcacgttcaaaatttcctcaagtgcttcggaccgaatgcttatgcatcgaccaaaccatcaacacccactccagcaatcgcatcaaaacctctagccatcgttaagtcctctgccggagggcaactgcgtgcctggcgccagaattatagctctccaattaatggagttcaggccgccacctcaatagcaacattacaggcggcccagtcgacgacagccgtagcggaaaacacaagcaccagcactgccatgtttcaagcccaggccagtgcgaaccaaaagccaaccaagtttcaaataaacacaaagtttttgcgcaaaccacgcaacaaactactgaaaatgctgccgacagcggcagctctagctccaggtgcagcgaccactgaattcaagcaacaggaggagcaactgcagcagccgcagatgttcaacgatgattccaacgccaaattcaaagacttttcaatcgactcgttattgaataagtaaacgtaaaacattaacggtttagccttattatttgtagcataatagaagaaatacatacaaacagagcccgaccgcgttcctagtttcctccaacagaaccaccacaaattttgtttagccaatcgagtagccacaccatgaacatagcgacaacctattctaactaattgtagttgtttattgtttatttattatatgcgtattgtataactaatgccgcaattcatagctagcataagtatgtaaatatctacttaaattcgataataaaccacaaacacgtgctagaatttagaacacgtgattttttaaggttaaggttaaggatggaaccgatgggcagtcactacttatcgagggcggcgtgcacgcgcagcatcatctcatttttgacgacttcaggcaccaaagcgcgagcctgttaagatttcaattgattgatagagtgcgccaaaaacaaaaaaaaaaatagtggacatgaacctacttgcgggactatttgggcagccagttggtcgcggtttatattgtccactccgcgctccatgatgatgtttcgtatcatttccttaatgtccttgtgccatccgcactccacaagacgcgtgtgcagcagttccttcaggctgttgagttaacgagaacgtccaggagtaatggcaatcgaatcctcatgagaaatacttacgcggccttatcttgactgcgtaacgtaggcttatatccaggatcgggatcggttcccgtttccttgtttattgtcatggttcgagttttaattcgattatctcgtgtattttgaaaagtacttaagcccgagtcggtaaaattcgtttggaaatcaaatgcagtgttttgacgatgaactgattccaggaaactttacagtttcggaactcgtttcaaatccagcaacgggcatgatttttctcacgatagcattgtcaagaactaaaaatgaaattaacaacataaactaatcagtgaatttgtataaaatttattaagcgtaaagtattagttaatttgattatatactttttttattaatgcgaaatttacccagtaacctttgtcccgtgacagaaattcaaaatatctctcagtgactgagaactattcgtgaatactgtaatcacatactgaataatgtaatcgcaataatcccatctctaaaaataaatgtttttgttttgatttaaaaacaagtcctcgatggatttgcttctagaagttgaaatatggcatgaacttagctttgaagtccttgaacccgaacccgaggtatatgtataatgaattgctggccacagaaatcctgctcgtgcccttctcaggccgttaacttcttcgtaagaagttgcatcttcaccagtctgcttattgactttaatgacttatccttgcagcacacatcgaccgtccgctcgctgtgcgacacaccatatagtgcttatccgtgtcacctgttatcaattcctggaaaaccacttcgttctcaccgtgcactatattcaagaatctgcagctattaaccgctttctcagcgtttcaactattcgcagaggtgcgtcagaaaggttccctttttatttggctaaaatcctcagatagagccaaacggaacatagtagcccaaactcttgaaagtttcaacttaaacggggatgctccagtgattgttacggaatatgacgagagcttcaaaactgcgtttgaaaaccaggttcactgtgctacggtacacagttgatcagggctgcaa

SEQ ID NO: 35555 - DNA, 288 bp, DROSOPHILA
atgacaataaacaaggaaacgggaaccgatcccgatcctggatataagcctacgttacgcagtcaagataaggccgccctgaaggaactgctgcacacgcgtcttgtggagtgcggatggcacaaggacattaaggaaatgatacgaaacatcatcatggagcgcggagtggacaatataaaccgcgaccaactggctgcccaaatagtcccgcaagctcgcgctttggtgcctgaagtcgtcaaaaatgagatgatgctgcgcgtgcacgccgccctcgataagtag

SEQ ID NO: 35556 - protein, 95 aa, DROSOPHILA
MTINKETGTDPDPGYKPTLRSQDKAALKELLHTRLVECGWHKDIKEMIRNIIMERGVDNINRDQLAAQIVPQARALVPEVVKNEMMLRVHAALDK

SEQ ID NO: 35557 - DNA, 2584 bp, DROSOPHILA
atattcacgggggagaatcttagactgccttagtcctggtaggtgtttccagaaggatgtccgtgccacgatagttcctttgcagattaaactccgcacagtgtccaatagcacagacttcagcttgaaaaatgctggtgtatctgcccattgattcgtggtactttaacctggggcctacaacccccggcccacttccctggtcggtgaggtatccgtctgtataccacattgttgtttgtggtttaatagtgtgtactttccccagggatgtccaactgttcttattactgagataagtgctgaagttctcagcgaacctatgctcagctggcatctcatcccttggttgcattagcaaagggatatctctttttaggctttcagcatccttactgtcatgcatacgcaggccattctctgcagcttatggagtttcgtcttagtggtgctaatgcgtgcactatcacccccggctattgccccataggttagtatgggtctgactaccatgaggtacagcaatcttattatgggtggtgaggttccccacgacttaccagcaatgtttctacacctgaacagtgctcatatcacgtgatgtgcatttgcataacatccaatgatgatgggtaagcgcatcttcttacagtgttcaaccagtgcagaaatttcgggcggtgggcacgcctcgtcaccggcaaagtatgccgatgccatcacagtcttcttggcggcttccacatcgtctaccacagtcccgcttgagaaattctgtaagtatataataattaatacttctacatgccaggatacaggctcgagggctagaagcccgttgttcccaaatgactttggcgttcttcacgtacagtccttttattcccctggttataccagggttcttgtaccagggctagcccaagatgttgtttcatgaacatccttgccagcacggccgaggcagtggagcgatggatgttcacctgagctatcatcattaattgatcggctccatcatcggcgttactggtctggagatgcccagatcagcatccgccggtacagcttcttcctcactcaacaggtctagttccatgcctagttcctgagaggatatcggggtctggtcccccaactcgatgacggtcgcatcgagatcttcatcctccgccagatcctcgttgaattcggagagcttattgggcttctccttctccgcagagactggtggctttcgaggagtcttatcccgtattgtgccgtctttgatcgccttggccttctttattccacaaactgagatgtcttcaaaccttaagctcagcttgtggtcgctggcaataatcttggcacataagttgtcatgaatgccaaggttgaggagtcaccgccctcattcttccttgacataaggctccagttctcagtgtccatgtcattttggggcagaagatggtgatgttgtgtaacgatggcaagttgtcgcccataattacctccagggagataccgctccacttactgaggctggggactgctattggttgcgttgcggcaatccactatcaggtgacccaccatgaagtggattcctccaaacttaattggagaatcccatccagaaaggactatctcctccagtagtgcgtcctggagctgtgagaggtcctcactactgaggacgaccccagagggtacccctctggtacgaccgcaactttaatggtcccagttacagccgcctttgatagcatgcgtacctcagttgcctttgcagccctttaggtacttggaccatcgaaaggagcagtcggtggcctgctcttttccaccttctgcctcttagacgttttcatcggaggcgtcaagctggagtttccccgctgcgaagcagagttgggcctttccactagcggctgcggtgtcttggccagctcagcccattacggttagggtcatcccgggccccaggctgaccaagttgcggtaatgggtttttagcccgtcccgcttggccggcttggaccacagtcgaatgactcggtgtggctgctcgattcttcaagttgacacattttttggtgccgctaaccgtcaaggagacggtcctcgtactgtcttccgacatttcccgcagtcaaggcctgcggttttttaacatttttgggcctatttttcatggttcccacgagttgcagagaaataagaggtccacctgggcagagatccgcagtacgcgggtaaggctaaccagaccagacagaccaggttagcgactgggctagttgtttcccggaccccagcgtggcatgctctcggcacgggtcgaatggacacatctccggcccggagatgtggaaatttaaagagatccagatccagctacgattagccagctacgacgattagcagatacatgaccttactaagatcctgtttccagccgccctcgcgtggagagtgtagttgcacttccagtagtgtttcacaattacaacgcgtaccaccaggtggttgatccccttgtgatacctactggcatggcggccttaattataattattataattaataacataat

SEQ ID NO: 35558 - DNA, 396 bp, DROSOPHILA
atggtgggtcacctgatagtggattgccgcaacgcaaccaatagcagtccccagcctcacgaccacaagctgagcttaaggtttgaagacatctcagtttgtggaataaagaaggccaaggcgatcaaagacggcacaatacgggataagactcctcgaaagccaccagtctctgcggagaaggagaagcccaataagctctccgaattcaacgaggatctggcggaggatgaagatctcgatgcgaccgtcatcgagttgggggaccagaccccgatatcctctcaggaactaggcatggaactagacctgttgagtgaggaagaagctgtaccggcggatgctgatctgggcatctccagaccagtaacgccgatgatggagccgatcaattaa

SEQ ID NO: 35559 - protein, 131 aa, DROSOPHILA
MVGHLIVDCRNATNSSPQPHDHKLSLRFEDISVCGIKKAKAIKDGTIRDKTPRKPPVSAEKEKPNKLSEFNEDLAEDEDLDATVIELGDQTPISSQELGMELDLLSEEEAVPADADLGISRPVTPMMEPIN

SEQ ID NO: 35560 - DNA, 3774 bp, DROSOPHILA
tggttttcatatccattaattgtataaaaactaaaaaattagaaaatataaattcttgatgaggatcacaagcggaatcttccatctgtcgatcaatattaactataagctatatatgtacatatgtatatatgtatatacactgtaaaagctaatgtgacacacacacagctctagtgtgtttcagaacgtcgtcttgcccactataacgcccgcaaacttcccaaaatatcacaccatcgataacccaacagagtgttgaatctgtgcaatgataagtaaattacaagaacaataaaggatatatagaaaaactgaaatttatgtgcccaacaggtcaatttcagttgagatagtggcgccctctgtcgggtatgcttaatttgtaaaaatcccaattatcgtatttcaataattcgttcttagcaactcctacatttttaatggaatggaaaccgcgcaaccgtttcccaggtgaaccccgtgcgaccgtccacagcaatcgaatgaatattagccaaggatagcagggggacactgcgagaaatttcatatggcaagtgatagtaacctgtatttgtttaagtattaaaataaaaaaactaaaacctatttaagttaaaattaattttatttcgcttttattttcagtttcatgtattgctgtttttgagaaatttagtacatatatcttaattcctattttatgtaatattttcttattaaaattccgtttaaaattaccaacattgttgttgacaataatcttagtttaatattaataatatattttagaaatggatcaatgtttagagttcgttatcatattttctcgctatgcattttccgttacctagcaaccatcaatttgggattcggtggcccaaacaaaagctccaacgaccacaacaaatgacggtgttgaaaatgcaattgccagcgcagccgcagcgattgcaagcagccaaagaaaaacaggtgaactcgttggaagccaggaatgtccttcaaggatgtgcgaggtgcgtactgacttcctcctcttacttcctccacctaacacgaccagactgatactccacttccagatctgggggaacatcttaagctgttggggttcccgcgcgtgtttcccctccaatccctggccaatcagcatggcagcctggccagtttccacattgttgccgagctccttcaatggctagcaggactaatagagccaggagccactttgcccggcggcgttgaatcggaggagcagcgggttcttctcgtccgttcggcgaccgagttttttgtgaccaaggcagccattcgtattaatccccgaaaactgtatgcagccgctgcggttacggcggcagagctacagaaggttacccgactcttgacatccccaggacaaaacgaagcggacaacgacgaagaggaccaaagggaccagtaccggagcctaaatcccgtggatattggcgataaaatagaggagttgcgtaaggctcgagaactggccacagacctaacccagcgtggcacaaccatatgcgagatgctttcgaaggaactgctccacaaggaatcgctaatgtcccaggcccaacgacccctggagctgctcagcgtggagcggaccctgaagagcgccatccaagctaaccaagttcgcctccaatcgagtagagcccaactggaagcagccaaggtggagctcaatgctctgggatcaaagctgcagcgccgtcgggcggagctcgagcgaacccgccaaagactggaggcactgcatcgcattcgaccagcgcacatggccgaattcgaggactgtgagaaggagttgcaggagctattccagcgctactttctcaggctgcatgtgcgcgatgctctaaagtcccagctggacctgcgtactaaacgtgccacacctatctcctcacccattctgcaaaagcccgccgagaactcaatgcccttcatcccggagggactcatcgaggacgacgatgacgacgacgacgaggacgatctggatgacgaggatgagggcgatgatggcggcaaagcactttcccgtctcgaaatggtggtcaatggcaggagtgtcttcggcctggactcagagatacccgacatacgggacgaggacaaactaatgcaacaaaacaacatggtttccgcccagggaaaacgtcctggtaccgccacctccaggattagacccacaacgggtagaagcaggaaggcagtaggaggtaaggaagttctaatttcacaaacttatttccctgctcaaataacgaaaatcccaggaagaggcacagccggcccggatggtggtaatgatgccagggcagcccgcggcaccaggagaggtgttgcgactggaggagacgccgatggcacccagctaaacggccgcaacggacccggcagcagtatgctcaactcccgggacgaagacagcagcttcgggagctccgaaagcgaactggatgtgggtaaaatcatgggcatgagcggaatgagcggaatgagtggcatgagcgctatcagcgggataagtgggatgagcaatattgccttgggagccggcgatgatgattgtaagtcgtgtagttacgccttgaacttataacaaaactttacctcattcacccctagttgatctgaactcgatcgatgacataagcatttcaaagttaactggcgaactgccacttagaccgaagaccgccaataaagcggagcatcacagcgatgaggatttctagggataactacaatatttatatttatttgctaattttataaactcagccagagggcagacaggttgtaaaaagtaaataaaatattcccatcaagcaattaaaagatttctttccacgtcacaatcaaatacgtcaccgtctcgcaaatagacggccttagggttccggttcctgcagtaacacgaattgtctggcgatatggtgactagtatgatgagcaatcaaagtgtagtcaaagatggatttctgcatgtacataggtaagtgggactgtgcaagtcaaagcatagccaggatccctaactaagtacatcgttatctgtatgactttagctaatctattcctccaagaagcgagatataaattaaatttgcttttgtagatacgttataatcagttaattcaatgctcgaataattgaaatagtttgcttaatatatctttattcgattaattttaatgtgtcttaagagctatacgcatatgtaagtacattgatagagtaatggatataaaaggggtaatttatcagacaaagccccacatagatgggatttcgttgtggctccgtaaaaaaaatatatacaaaagtctgggaaactgggaactagagagcggatgcttttcccgtcacatcaccacatcccggcaaacgatcttcgttttgaaggatgccctctgaccgccgtacaagtccgaggaggcagacgacgaatagtcgacgtgactgcccgcctgtgactgttcttgcctggccaaaaagctatcagctatggctcgatctagacccgtatactggaaattgggagcaccgtccaggacatccgcttccgattttcggcgctgccggcgattggcatcagactttcccgcccgccgccgtcttcgctgcccattgatctccgctgactttgtgctcttgtgagtccggtatgtcccgcttaggctagccgggtgggcgtaggtcacggatccgggcccaggtcgcatgtagggaag

SEQ ID NO: 35561 - DNA, 1593 bp, DROSOPHILA
atgtccttcaaggatgtgcgagatctgggggaacatcttaagctgttggggttcccgcgcgtgtttcccctccaatccctggccaatcagcatggcagcctggccagtttccacattgttgccgagctccttcaatggctagcaggactaatagagccaggagccactttgcccggcggcgttgaatcggaggagcagcgggttcttctcgtccgttcggcgaccgagttttttgtgaccaaggcagccattcgtattaatccccgaaaactgtatgcagccgctgcggttacggcggcagagctacagaaggttacccgactcttgacatccccaggacaaaacgaagcggacaacgacgaagaggaccaaagggaccagtaccggagcctaaatcccgtggatattggcgataaaatagaggagttgcgtaaggctcgagaactggccacagacctaacccagcgtggcacaaccatatgcgagatgctttcgaaggaactgctccacaaggaatcgctaatgtcccaggcccaacgacccctggagctgctcagcgtggagcggaccctgaagagcgccatccaagctaaccaagttcgcctccaatcgagtagagcccaactggaagcagccaaggtggagctcaatgctctgggatcaaagctgcagcgccgtcgggcggagctcgagcgaacccgccaaagactggaggcactgcatcgcattcgaccagcgcacatggccgaattcgaggactgtgagaaggagttgcaggagctattccagcgctactttctcaggctgcatgtgcgcgatgctctaaagtcccagctggacctgcgtactaaacgtgccacacctatctcctcacccattctgcaaaagcccgccgagaactcaatgcccttcatcccggagggactcatcgaggacgacgatgacgacgacgacgaggacgatctggatgacgaggatgagggcgatgatggcggcaaagcactttcccgtctcgaaatggtggtcaatggcaggagtgtcttcggcctggactcagagatacccgacatacgggacgaggacaaactaatgcaacaaaacaacatggtttccgcccagggaaaacgtcctggtaccgccacctccaggattagacccacaacgggtagaagcaggaaggcagtaggaggaagaggcacagccggcccggatggtggtaatgatgccagggcagcccgcggcaccaggagaggtgttgcgactggaggagacgccgatggcacccagctaaacggccgcaacggacccggcagcagtatgctcaactcccgggacgaagacagcagcttcgggagctccgaaagcgaactggatgtgggtaaaatcatgggcatgagcggaatgagcggaatgagtggcatgagcgctatcagcgggataagtgggatgagcaatattgccttgggagccggcgatgatgattttgatctgaactcgatcgatgacataagcatttcaaagttaactggcgaactgccacttagaccgaagaccgccaataaagcggagcatcacagcgatgaggatttctag

SEQ ID NO: 35562 - protein, 530 aa, DROSOPHILA
MSFKDVRDLGEHLKLLGFPRVFPLQSLANQHGSLASFHIVAELLQWLAGLIEPGATLPGGVESEEQRVLLVRSATEFFVTKAAIRINPRKLYAAAAVTAAELQKVTRLLTSPGQNEADNDEEDQRDQYRSLNPVDIGDKIEELRKARELATDLTQRGTTICEMLSKELLHKESLMSQAQRPLELLSVERTLKSAIQANQVRLQSSRAQLEAAKVELNALGSKLQRRRAELERTRQRLEALHRIRPAHMAEFEDCEKELQELFQRYFLRLHVRDALKSQLDLRTKRATPISSPILQKPAENSMPFIPEGLIEDDDDDDDEDDLDDEDEGDDGGKALSRLEMVVNGRSVFGLDSEIPDIRDEDKLMQQNNMVSAQGKRPGTATSRIRPTTGRSRKAVGGRGTAGPDGGNDARAARGTRRGVATGGDADGTQLNGRNGPGSSMLNSRDEDSSFGSSESELDVGKIMGMSGMSGMSGMSAISGISGMSNIALGAGDDDFDLNSIDDISISKLTGELPLRPKTANKAEHHSDEDF

SEQ ID NO: 35563 - DNA, 5107 bp, DROSOPHILA
tatagttattagaacaaaaattgtatttaaaatttcagcaaaatttatttgttaaaaattcaatatttcaaagtaaacttatcttttctttctatgtaggaaacgaataagaaacttaaataaaaacttcaaattgggtttaaacgcacccgaaatattcggtttcaacagccggagcttggttcatatttatattaaaaatacatattactagctcatcacaaactagagtactaactcactggatttggtatcttaggattcagcttaccccattgccagcggtggagggaatgagcatgatctgccgcgatggaggcgtcagtttgcggactgttggcggcaggcttcccatctgggtggcatacatccacatagccgctagcttctcggtgttcacctgcacgaaatgaagctggattaggataggtcccacacttaatctaacagcaccttgacaaccttttcactgccattcagagacatcgccttgatgtactggtccaccttctgttggtccagagcgattcccgaagcattcgacttgataatcacgtcgcgaagctcactatgttccgacctgcaatgaagtaaataaattaggtgatccttagttataagagttaattgaggtacatatttagcaataaaaccatagattagagttcgtaattcaaaatgtgagaaatcatgctaaaattgcacaaactgatttcttttatctaaggatttctaagttataaggatcgttctaccgaaacgataaatatcctttgcgtctaaatcaaactcccatttatagattttttttattatattaaaatgggtataaaaatgcaaacaacatttaccatttttacaatattactgtatttttgtaaatggcatagccatttttggtatttttactctacaaccttagtattttaagatctcgcgtgcacggccacactgcgcgctaatcgatttattttgtaaaaaaaaaaacaccataagtccggaaagttgtcgccgatcaaaactcgcttatttccacagcccagtgcacttgatcggagaccgcacgtcgccgttaacataaaccatcaacccatatagcgtatatagcgtatttcgaaaatcgaagggaatcaggtggaagaaggagaaatacaacaacaaagcaagctcgccacgtcagtgggagtgagcgagagcgcaaacgagtagcgtacgggagtgagcgagagacaagaaagcaaaatgtttagcaactttaaggagcgtattatttcggccatagcgcccgacttgccacctctgccgggcaacagcgagcgggctattggctctggaagcggtcaccatcacagctcgacgcaccagcgactccggttcggcgcttccggcggacagccaatgccggacaagttcccctatgcccggccgccctttctgcagcttctcacgccggacgagctgcgcgcctcggcggaccacaatgtgcggcccatcatcgtgccgcgggacatcaacctactgccctggggcaccggatacgccgaatgcgtcaactccggaaaatccgagtggaacgaggaccagggtgccttctgccggtgagtggggcagcctttggttctattgattaccacattgttctattgatctcactagggttttgtatctgcaccaccataatgcccaccacacatacatagtatatcatttgctatcgttgtgtacaatgtatattgctttgttttttctatttcatctatgaggcaaaatcatttccaattcgctcttatgtatgcatatattaagaaatgtattaaacctaaggagatttcataatcaagtaaagagcagaacacccaaatatgtaatcgtagaattcgtaggcctttttttctgcttctacgcttttgtgtttaatttttcgcatctgttaaacaaacagcaaacactagcctcaccttctgggcaaaatattatatataattttaaagaaatacaattacattttaaggcttacatatgcaaacaatgcaatttttttgcaaaaagaggatggaggcagtgaaagtgataaaacaaaattattattattattatgtatgtacttgcattcaaattatctgtcagtatgagcgtattagtcttaatctgccgtctatttattcgattatgtaccgtcctttttctacagacttaaaagttacttttgaatttggtcgcaggtgaaatatatgttctttctataaaaaacataaaaagccttgttttgtgcatggtatatgtacatactatgtacatatatacaatgtacgttgtggatatatgtacatatgtcaagggttgtgccactaaaactattcttcaagatagatatatttgtttttaatgttttcgtagaagcgagtggcacatgtcgcctagatccaaataggatatttgttgtagaatcaataaggtccctcatatataaagttgatatggtacattttgtagcacagtcaataatgtacagaacttcgttaaatcacattccataccacatggcataatcttaaatttccacgaatgttaaataaatggccaagtaattaagctcttgtgttttttcccacacccaggcaagttctttcggatccggagcataaacacccagatctcccgtacacatacttcggcattttcgacggacacgccggttatggggccgcactggccgcctcgcatcagtttcatcacatcctgcacgagaagctagtggactgcctggagctcctcctgccacgggatgcggatgccacgaatggcggcggggaaggcaacaagctgaatcccactttcccgcaccccatttacttccagcgccgggtgactaaggacgaactaatcatcggggcgctggagagtgccttcttcaacatggactcgttgatagcgcaggactgtgatcgttatcgagatgctgggggttgcaccgcctgcgtttcattgtttatcgatggcaagatgtatgtggccaatgccggcgactccagagctgtgctctgccagcggcgtgccacccccgagaggccacaaacaaatactgactccgggattgagccggatcccttagaagctagctgttatccagtgccattctcggcggatcacacgcctgaaactgagcgcgaacgcctgctgaatgtggccagattgaagcctcacctcatggggaagcattatgtggccatggagtacgcaaagcggccgcatatcaaggacatgggccagcgcattctctgccgacagggcaccatgcgtggctggacatacaaaactttgaccatggaagacctctgcatgccggtggtcaatggcgagggaaaaagaagtcgcttgctgggtacgttgggggtcacgcgcggctttggcgatcacgagctgctagccatcaacacaggtattcagataaaaccatttctcacgcctcaccccgatgtcaggcagcgggatctgacacaggtggtttcaattccggatgaggacaaccgggatggcgactacggagtgctcgtcatggccaccgatggcctgtgggatgtgtccgaaaatgacgccgtttcacgcaccgtcttccagacgctctccaaatattcaacggagaaacatcgttacacgatggtcgcccaggagctggtggcccgtgctcgtggcaaaatcaacgactccgggcattggcgactcgcagatagcaaggctgcagccactgttgatgacatctcggtgattgttatcccggtttgccagtattacaaagagcacgtggagtggacgcaaaactacaaacgagatctcgaacatcgtcgccgccaggcccaggcccatatggcgcaggaagcggtcaacgtgctcaatggcgtgattgccgaggaagctcacgtggttgaagaggaagaggaaggcgaagtggttgttcatgaggccaggacttctcacaatcaaacgaaagttccaaggcggctggacgggacactcgacgaaaccctggtggtagagctgaccccttcactggagcaagttcacattcagaacgcggattcagcgggtgagcaaaaacttccaagctaacccataaacaatagttcttcttcttcctcacatatactcgctattataatgtgttttcttttacgaaaataaaatctaaagaaaaagttttgtttatgaagaaccaacgttaactaaatatttctatattaaaacatcaactaagctatatagaactatgattttgtagttatcataattttttatagaaaatttccccctaaatgaaatcaatgcctaacccaattttactttttagaaggcgaatccagcaaggagaacgttaatgataaggacaaagaggcgtccacgacgagacagcagtcacagcagcagcagcaacaacaacaacaacaacaacagaagggtcgcaagggcaaaggcaagcactaggacgaaggtaatgccacccaggccgatacattagtcgtaattagactaagcaatattcgaacggatatggatgcggctgaaatgggcacatctatatttgtttttacactccacacgaaaggacaaattcaaaacattcaaagtttacataatttgcttatgtacgcccccaaacaaacaaaacagaaacgcatgtcaacttaatgaaactgtacaataatttgcggcaatgaagtgtatttattttatcctaaaagattgaatgacgaacaaagcccaatagtaacggaggcgatattttcaataacgcaaataaaaaccttatgattccaaatgaaagcataaaaagtaatttaagctgcgtataacataagccaactattaatataaaatataattacaaatattgttaactaaactaacagaccagagaattattggggcaactgataagaaacacaagcgataagaaaggcttgaataacttttaaatgtcgcttaacactctgctgtatgccaatacagattacttttggattccttcgttttgttatcagtagcgcccagaaaatgtttaaatcctgatcagttctgttaacgttctattctgtagaagcgaaatttcagt

SEQ ID NO: 35564 - DNA, 2087 bp, DROSOPHILA
gaaagttgtcgccgatcaaaactcgcttatttccacagcccagtgcacttgatcggagaccgcacgtcgccgttaacataaaccatcaacccatatagcgtatatagcgtatttcgaaaatcgaagggaatcaggtggaagaaggagaaatacaacaacaaagcaagctcgccacgtcagtgggagtgagcgagagcgcaaacgagtagcgtacgggagtgagcgagagacaagaaagcaaaatgtttagcaactttaaggagcgtattatttcggccatagcgcccgacttgccacctctgccgggcaacagcgagcgggctattggctctggaagcggtcaccatcacagctcgacgcaccagcgactccggttcggcgcttccggcggacagccaatgccggacaagttcccctatgcccggccgccctttctgcagcttctcacgccggacgagctgcgcgcctcggcggaccacaatgtgcggcccatcatcgtgccgcgggacatcaacctactgccctggggcaccggatacgccgaatgcgtcaactccggaaaatccgagtggaacgaggaccagggtgccttctgccggcaagttctttcggatccggagcataaacacccagatctcccgtacacatacttcggcattttcgacggacacgccggttatggggccgcactggccgcctcgcatcagtttcatcacatcctgcacgagaagctagtggactgcctggagctcctcctgccacgggatgcggatgccacgaatggcggcggggaaggcaacaagctgaatcccactttcccgcaccccatttacttccagcgccgggtgactaaggacgaactaatcatcggggcgctggagagtgccttcttcaacatggactcgttgatagcgcaggactgtgatcgttatcgagatgctgggggttgcaccgcctgcgtttcattgtttatcgatggcaagatgtatgtggccaatgccggcgactccagagctgtgctctgccagcggcgtgccacccccgagaggccacaaacaaatactgactccgggattgagccggatcccttagaagctagctgttatccagtgccattctcggcggatcacacgcctgaaactgagcgcgaacgcctgctgaatgtggccagattgaagcctcacctcatggggaagcattatgtggccatggagtacgcaaagcggccgcatatcaaggacatgggccagcgcattctctgccgacagggcaccatgcgtggctggacatacaaaactttgaccatggaagacctctgcatgccggtggtcaatggcgagggaaaaagaagtcgcttgctgggtacgttgggggtcacgcgcggctttggcgatcacgagctgctagccatcaacacaggtattcagataaaaccatttctcacgcctcaccccgatgtcaggcagcgggatctgacacaggtggtttcaattccggatgaggacaaccgggatggcgactacggagtgctcgtcatggccaccgatggcctgtgggatgtgtccgaaaatgacgccgtttcacgcaccgtcttccagacgctctccaaatattcaacggagaaacatcgttacacgatggtcgcccaggagctggtggcccgtgctcgtggcaaaatcaacgactccgggcattggcgactcgcagatagcaaggctgcagccactgttgatgacatctcggtgattgttatcccggtttgccagtattacaaagagcacgtggagtggacgcaaaactacaaacgagatctcgaacatcgtcgccgccaggcccaggcccatatggcgcaggaagcggtcaacgtgctcaatggcgtgattgccgaggaagctcacgtggttgaagaggaagaggaaggcgaagtggttgttcatgaggccaggacttctcacaatcaaacgaaagttccaaggcggctggacgggacactcgacgaaaccctggtggtagagctgaccccttcactggagcaagttcacattcagaacgcggattcagcgggtgagcaaaaacttccaagctaa

SEQ ID NO: 35565 - protein, 614 aa, DROSOPHILA
MFSNFKERIISAIAPDLPPLPGNSERAIGSGSGHHHSSTHQRLRFGASGGQPMPDKFPYARPPFLQLLTPDELRASADHNVRPIIVPRDINLLPWGTGYAECVNSGKSEWNEDQGAFCRQVLSDPEHKHPDLPYTYFGIFDGHAGYGAALAASHQFHHILHEKLVDCLELLLPRDADATNGGGEGNKLNPTFPHPIYFQRRVTKDELIIGALESAFFNMDSLIAQDCDRYRDAGGCTACVSLFIDGKMYVANAGDSRAVLCQRRATPERPQTNTDSGIEPDPLEASCYPVPFSADHTPETERERLLNVARLKPHLMGKHYVAMEYAKRPHIKDMGQRILCRQGTMRGWTYKTLTMEDLCMPVVNGEGKRSRLLGTLGVTRGFGDHELLAINTGIQIKPFLTPHPDVRQRDLTQVVSIPDEDNRDGDYGVLVMATDGLWDVSENDAVSRTVFQTLSKYSTEKHRYTMVAQELVARARGKINDSGHWRLADSKAAATVDDISVIVIPVCQYYKEHVEWTQNYKRDLEHRRRQAQAHMAQEAVNVLNGVIAEEAHVVEEEEEGEVVVHEARTSHNQTKVPRRLDGTLDETLVVELTPSLEQVHIQNADSAGEQKLPS

SEQ ID NO: 35566 - DNA, 2663 bp, DROSOPHILA
ggactacagttgcatatgagtccctacttaagatttcatgatatattaaaaaaaaaaaaaaaaaaaaccaatttagatactctgcgcgccgtataaacatccggaaaatcagacaaaactggcggttgtgacgtgcaggaagcctttgagcgtgacgcgtgaaaattcgtcaaatgcaggccaagtgacatggggagcgactgcatccttggcatccttcgcaacctaaatatgcacaaagactcaagcatggccaaaagcccaagcccaaacctaagcccaacaagatgtgccatgggtgtgagtatcagtgcgctagttttgtgtactagtttggtgtgatggtgcgttggtgtgtgtgggtacgagtgggctgagacctggggcgtggctaggtttgctgtcaactgaggagaaggccaaggaccaaggagacggcacacaggaccaaggacccatgtgagtggctgtcatcgccgcgactcggggcattcatatggtaacaagcgatccacaccacttgttttgcaattaaaaatcacagactgaaccgtatgactgcccggaatgaagcctaacgtgggacggctgctttaaaaaaggtctggcataccgggctattctaccaaaaagcacttacagcgaatgtggaaggccgctagaaatgtgttgtttaaaaaaaattatcattatcaatggttacaacaagcgtccttaaaataataaatctatttttacggtaattcataaatccacatatttttgctgatttatttgctttaagattaccattttccacggcaatgattgcaaatcaatatttcatcatattgatcatatcatattcatattcagttgtcataattaaaaaatgaatcgtctaagtatttaaacgaatccattttttgtgtgtacaaatgaatgcaatgtgtataaatccaagtcgagttcgactttatagaccaccattattagccattgaatattaaatatgaaaaggctacgttgccttcaaagtcttcaaagtctgctggtccttttcatctgacggccccttatcctgcccaccgtctagcttcctgtccaaattgcgattcttggcattctgcagttcttcttggtcgtaggcctctatgcgcttctccagcatgtcaacctctagccacaattgggtggccgagttccagcgcggcggcgggtcaccattgatctgggccagcagaatttcaagacggttacgatcccactggttggcctcttcgcggcggttgctcaccacagacttcaggtggtttatttgccgttctccggagctagcggtgatgacccgatcgcttgcgtcagcgattcggtcggccacagcctggcaagacttctcatttggaccggggagaaaatatgagaatgtatccggacgccgatttattgtttcagttgccagtggattgattgccggcatcagatggatggccaagtactgggacgacagtggctgcgaatccagcagcttgaccttgttctcgacctttttgcgcttcgccggacccttagccaggatatcggtttgggtgccaaccgagcggcagttgatgcgcttagtgaactgctccacagtcgccacactgcgtgatgcaatcctcgagatccgtttccttggggccatagctgtggttatgactatatgcaaacgtctctgagaaaataaggttaaaagtaaggtcacaacctgatagggtttgcttttaatatttttaatctgtcagtggaaaagaaaggtggaaaccctactaaggccaatcggataggaactttttcaatacatcactcgttaattatatcaatattttatatatatttttcttaacgcctaacctttcaacgcaatgaaaacggaagtttgaaaaaatatatgtactcaacttcctattggctgggaagccctcttaactgtccaacgctaaattgtagagcttcaatcagcagatacatacatacatacatatatgtatgtacaacacttgcaccgatgaaaatcaaatagaaagcctttttaaaaattcgttttggtatccttaagtacatttaaacatgttggtaaatgtaaacctcttattttacttacatactctgtacatacctgtgatgttaagatacaatattatgatgtacggattcttcacttaataaataataatttaaaaaaaaaccttacatactcttttcccatcacctttttgccgtgcattgtattccagtagttgctgaggagatctccagatttatttatttgaactcctaatttgaggaattttatttgggttgatcattgattaataagtctatcataagcatgatctgaaaatatatttacattcatatattttctgatcatgcttatgaacgagaaaacttgtaaatctaacaaattaagctgtctgccaatttcacagataaataacacctgttgagagctcttagacttcacactattacaatcaatcattgatttttttagtttcttatacaaataaatgttattgcacacaccatagatacatatgtatgtgtaacgagcgggtttttgtccagaaataatttaaccataacgagatagtcaataactaaacggtatgatatcgatgcgaatagaagagaaaaaaagt

SEQ ID NO: 35567 - DNA, 663 bp, DROSOPHILA
atggccccaaggaaacggatctcgaggattgcatcacgcagtgtggcgactgtggagcagttcactaagcgcatcaactgccgctcggttggcacccaaaccgatatcctggctaagggtccggcgaagcgcaaaaaggtcgagaacaaggtcaagctgctggattcgcagccactgtcgtcccagtacttggccatccatctgatgccggcaatcaatccactggcaactgaaacaataaatcggcgtccggatacattctcatattttctccccggtccaaatgagaagtcttgccaggctgtggccgaccgaatcgctgacgcaagcgatcgggtcatcaccgctagctccggagaacggcaaataaaccacctgaagtctgtggtgagcaaccgccgcgaagaggccaaccagtgggatcgtaaccgtcttgaaattctgctggcccagatcaatggtgacccgccgccgcgctggaactcggccacccaattgtggctagaggttgacatgctggagaagcgcatagaggcctacgaccaagaagaactgcagaatgccaagaatcgcaatttggacaggaagctagacggtgggcaggataaggggccgtcagatgaaaaggaccagcagactttgaagactttgaaggcaacgtag

SEQ ID NO: 35568 - protein, 220 aa, DROSOPHILA
MAPRKRISRIASRSVATVEQFTKRINCRSVGTQTDILAKGPAKRKKVENKVKLLDSQPLSSQYLAIHLMPAINPLATETINRRPDTFSYFLPGPNEKSCQAVADRIADASDRVITASSGERQINHLKSVVSNRREEANQWDRNRLEILLAQINGDPPPRWNSATQLWLEVDMLEKRIEAYDQEELQNAKNRNLDRKLDGGQDKGPSDEKDQQTLKTLKAT

SEQ ID NO: 35569 - DNA, 3331 bp, DROSOPHILA
ggcaccaggagaggtgttgcgactggaggagacgccgatggcacccagctaaacggccgcaacggacccggcagcagtatgctcaactcccgggacgaagacagcagcttcgggagctccgaaagcgaactggatgtgggtaaaatcatgggcatgagcggaatgagcggaatgagtggcatgagcgctatcagcgggataagtgggatgagcaatattgccttgggagccggcgatgatgattgtaagtcgtgtagttacgccttgaacttataacaaaactttacctcattcacccctagttgatctgaactcgatcgatgacataagcatttcaaagttaactggcgaactgccacttagaccgaagaccgccaataaagcggagcatcacagcgatgaggatttctagggataactacaatatttatatttatttgctaattttataaactcagccagagggcagacaggttgtaaaaagtaaataaaatattcccatcaagcaattaaaagatttctttccacgtcacaatcaaatacgtcaccgtctcgcaaatagacggccttagggttccggttcctgcagtaacacgaattgtctggcgatatggtgactagtatgatgagcaatcaaagtgtagtcaaagatggatttctgcatgtacataggtaagtgggactgtgcaagtcaaagcatagccaggatccctaactaagtacatcgttatctgtatgactttagctaatctattcctccaagaagcgagatataaattaaatttgcttttgtagatacgttataatcagttaattcaatgctcgaataattgaaatagtttgcttaatatatctttattcgattaattttaatgtgtcttaagagctatacgcatatgtaagtacattgatagagtaatggatataaaaggggtaatttatcagacaaagccccacatagatgggatttcgttgtggctccgtaaaaaaaatatatacaaaagtctgggaaactgggaactagagagcggatgcttttcccgtcacatcaccacatcccggcaaacgatcttcgttttgaaggatgccctctgaccgccgtacaagtccgaggaggcagacgacgaatagtcgacgtgactgcccgcctgtgactgttcttgcctggccaaaaagctatcagctatggctcgatctagacccgtatactggaaattgggagcaccgtccaggacatccgcttccgattttcggcgctgccggcgattggcatcagactttcccgcccgccgccgtcttcgctgcccattgatctccgctgactttgtgctcttgtgagtccggtatgtcccgcttaggctagccgggtgggcgtaggtcacggatccgggcccaggtcgcatgtagggaagggtcattccacggtactgcgccggcagcgggggcacgggaagcagaagtccagctctggcgcccggaggcggaggtggcaagcgtgtgggcggtggtggtgccatctgaatatagttattagaacaaaaattgtatttaaaatttcagcaaaatttatttgttaaaaattcaatatttcaaagtaaacttatcttttctttctatgtaggaaacgaataagaaacttaaataaaaacttcaaattgggtttaaacgcacccgaaatattcggtttcaacagccggagcttggttcatatttatattaaaaatacatattactagctcatcacaaactagagtactaactcactggatttggtatcttaggattcagcttaccccattgccagcggtggagggaatgagcatgatctgccgcgatggaggcgtcagtttgcggactgttggcggcaggcttcccatctgggtggcatacatccacatagccgctagcttctcggtgttcacctgcacgaaatgaagctggattaggataggtcccacacttaatctaacagcaccttgacaaccttttcactgccattcagagacatcgccttgatgtactggtccaccttctgttggtccagagcgattcccgaagcattcgacttgataatcacgtcgcgaagctcactatgttccgacctgcaatgaagtaaataaattaggtgatccttagttataagagttaattgaggtacatatttagcaataaaaccatagattagagttcgtaattcaaaatgtgagaaatcatgctaaaattgcacaaactgatttcttttatctaaggatttctaagttataaggatcgttctaccgaaacgataaatatcctttgcgtctaaatcaaactcccatttatagattttttttattatattaaaatgggtataaaaatgcaaacaacatttaccatttttacaatattactgtatttttgtaaatggcatagccatttttggtatttttactctacaaccttagtattttaagatctcgcgtgcacggccacactgcgcgctaatcgatttattttgtaaaaaaaaaaacaccataagtccggaaagttgtcgccgatcaaaactcgcttatttccacagcccagtgcacttgatcggagaccgcacgtcgccgttaacataaaccatcaacccatatagcgtatatagcgtatttcgaaaatcgaagggaatcaggtggaagaaggagaaatacaacaacaaagcaagctcgccacgtcagtgggagtgagcgagagcgcaaacgagtagcgtacgggagtgagcgagagacaagaaagcaaaatgtttagcaactttaaggagcgtattatttcggccatagcgcccgacttgccacctctgccgggcaacagcgagcgggctattggctctggaagcggtcaccatcacagctcgacgcaccagcgactccggttcggcgcttccggcggacagccaatgccggacaagttcccctatgcccggccgccctttctgcagcttctcacgccggacgagctgcgcgcctcggcggaccacaatgtgcggcccatcatcgtgccgcgggacatcaacctactgccctggggcaccggatacgccgaatgcgtcaactccggaaaatccgagtggaacgaggaccagggtgccttctgccggtgagtggggcagcctttggttctattgattaccacattgttctattgatctcactagggttttgtatctgcaccaccataatgcccaccacacatacatagtatatcatttgctatcgttgtgtacaatgtatattgctttgttttttctatttcatctatgaggcaaaatcatttccaattcgctcttatgtatgcatatattaagaaa

SEQ ID NO: 35570 - DNA, 818 bp, DROSOPHILA
aaaaaatctataaatgggagtttgatttagacgcaaaggatatttatcgtttcggtcggaacatagtgagcttcgcgacgtgattatcaagtcgaatgcttcgggaatcgctctggaccaacagaaggtggaccagtacatcaaggcgatgtctctgaatggcagtgaaaaggtgaacaccgagaagctagcggctatgtggatgtatgccacccagatgggaagcctgccgccaacagtccgcaaactgacgcctccatcgcggcagatcatgctcattccctccaccgctggcaatgggatggcaccaccaccgcccacacgcttgccacctccgcctccgggcgccagagctggacttctgcttcccgtgcccccgctgccggcgcagtaccgtggaatgacccttccctacatgcgacctgggcccggatccgtgacctacgcccacccggctagcctaagcgggacataccggactcacaagagcacaaagtcagcggagatcaatgggcagcgaagacggcggcgggcgggaaagtctgatgccaatcgccggcagcgccgaaaatcggaagcggatgtcctggacggtgctcccaatttccagtatacgggtctagatcgagccatagctgatagctttttggccaggcaagaacagtcacaggcgggcagtcacgtcgactattcgtcgtctgcctcctcggacttgtacggcggtcagagggcatccttcaaaacgaagatcgtttgccgggatgtggtgatgtgacgggaaaagcatccgctctctagttcccagtttcccagacttt

SEQ ID NO: 35571 - protein, 208 aa, DROSOPHILA
MSLNGSEKVNTEKLAAMWMYATQMGSLPPTVRKLTPPSRQIMLIPSTAGNGMAPPPPTRLPPPPPGARAGLLLPVPPLPAQYRGMTLPYMRPGPGSVTYAHPASLSGTYRTHKSTKSAEINGQRRRRRAGKSDANRRQRRKSEADVLDGAPNFQYTGLDRAIADSFLARQEQSQAGSHVDYSSSASSDLYGGQRASFKTKIVCRDVVM

SEQ ID NO: 35572 - DNA, 5656 bp, DROSOPHILA
ctatttgtattcagtacgagtatgatggaatatatcgcggtttcggttctaaatcatccaatggtaagtcggaactttctatatctggttacagcgcaaaaaggtatattgtttgatataatttctgttggaagacgttagcaaacaaaatggaaacccaatttgatgttgtcacaactgtttccccggcgttattacaactaaactgtgcgtttcgcgactgtaagacaagttagcaggatttacgtttcttaattacaattaaataacaatatgcacccttgtgcagtgttggaaagaacgtcggtttttattgtttagggaattattaataaaatactcttttctaatatcctttgccttataaacccgaaaagcacagtttccgctttatgtacacattctgtataatatggtagttatgtttatcttttgcttagtttcatatttcattgtgcaaattgacattccaagtaagaattgtggaaactcttgtggtttgattttcttatctttctacacagttttttttgggttctttgttcttcctttatagtttggcgaaaaaagttattattatataaaaggattgcggcttttattcttaatttttgtttgttttgctaatacttttttccattttttttttcattttaattaatttaattaagcaacaataacacggtgatgttgaaaaatttagctacgattaatttaattaaaaatatgtaaacttgggcgagaggcttttttttaatttccagtttgggataaataatgtggtttcaggaatcatctgggatgatcctggcgccacattcacacgcgctctctaggcccttgctttaggattcgttatataaatagctatatatagatgtatatcagtatttgtatagttatatatatgtgtatatagatgccccgcacagtgcgttatggccttggcatattggcatgctttcatataaaataaataattaacacttgtcaaatactttaggttaggccgattcccccaaaacctaaaccacacgcagcttggcgctgcggcagcgttggcgaggattgcccagcgtttgtggatgtgaaccaagcttctgcgcattgtccttgacaagacgacgcggattggcacagcagcattggattagaatactatagattcggaaaagtagtcggactatctgccgcttggcctggcgccgcggacaccatgcagccgcccaggattaggagtgcaggttggctcgatctttggcccgcctcttggcgagcatggaaagttctacgggtcccacattcgccgcctggggtatggcaatagcccggaaagtggcatcaacagcgcctcttaaggccatggagatgtgattctgctgctgctgctgggcgcccagcgaaagttgggatccgggcgccaccgcatactctgtaagctgtacgccgccggcgaattgctcccgcagccagtcgtgctcaagtattcgcgccgccgtcggccgattctccggtactatgtgtagcatctgacgcaaaagttctttggccggcacactgatcagtgcccagcgactgcttgtgaagtcaatttgtcctgatccgatgcgcttcagtattacgtccggtgaatcatttggagtgctggcgaaaggcgtccggccggataacatgatgtaaagcagcacaccgagcgaccagatgtcgcaagccaggtcatagccctgtctctttagaacctcgggagccacaaaattggctgtgtagcatggcgtcatcaggaggccgttgtccgcgcgcagctgcttcgcgaaacctaagcggaaatcggaaggttactcctgctctaccaacaagaaatactcgcacagaaaaatatatagccttgcagaaataaatgctttctgaatttaaatattatcaaatgatttcaattgcaataggatggaactttggctaaataagatcttaaaatgaaaaaccttctgtttggagaaaagaaacctttaaaattgcaaataacaaagtaacttagaaaacaaataatagttaaaggaattaaaaattacgaaagtttagcttttaaagtgaatcatgtttgtcagcaattggaaaatttactgcaaggctataataaaatatatttaactagttccgctccgcactcacccaaatcgcagagctttagggtctcgggagtttgccgcatactggcatatatcatatttgaaggcttaagatctcgatggaccacgccatgttcatggagatatgctaccgcagatgcaattgtccttaacaccgcgctggcctcactctcgcacatctggcccacggcaagtatccgatcgagaagctcgccacccttaagcagctccatcacaagatatgcggaccccgcatcctcgtaaacagagtacagagtgacgatatttgggtggttgccgtacctcagcataatctccacctcctcccaacaatcggcagaagtggatgtggatgctgcggccacagctgccttttcgattacttttactgcgtaatgtttcttggaggctcgatgctcgcacaaccgacaaactgaaaaggttccacgtcccagttcttgcagtagattatattccgcatggaagtttccgggaagaacaccaggtaatgttcgaggggctcccactggagcagcaggaataggagctatactatgcagaggactggcgctggtggagcacatattcgagccagcacactgaccttccagaaggacaggagccacaaagctgaacccgcggaagatctcatgggcagatgcggagatcgggccacccggagaatccctgggggactttgaggtgtactccacatcaaagtaaaaggcatcgtcacggctaaccgccggtatgaaaggcggacgcacctgctttcgttctaatctcacccagtcgatggtggcaaaaaagcagtgcgccttgatgtccagaattccttgggcacccgcacccaaacgattctgggggtttcttttgaagagagcacgtagcagggattgcgcctctggcgacaaattctccggcatgcccagcttacttctaaggatctgattcatagtctcttggcgggtttggccatgaaagggtaaattccccgttaacatttcgtacatgagcaccccgaaactccaccaatcagcggcaaaatcgtgtccctttcggttcacgatctccggcgccatgtattctacggttccacaaaagctatatgtttttgagccatccaaaggctgcttggatagaccaaagtccgtcaaggctatatggccatgctcgtccagtagaatattttccggtttcagatccctgtagataatgcccaatgtgtgtaggtgattcatagctagcgccagttccgctaaatagaacttgacatcttcttccgtaaacattacttctttggatagacgggtaaacagatcaccgccacgaagaaaatccagtatcaagtagagttttccgggagtttggaaggcatagtgaagacgtacgatgaaagcatgacccacgtccgctagtatttttcgttcatttgtgctccttacgcgatcttttacttttagggtggcctttttgagcaccttcatggcatagagtgttcctgcatctttgcctatgatctttcgcactagaaacacctttccaaagctaccttcgcccagaacccgtaggagctcgaactgggaaggatcggccttgtcgtgaccctccttgatgacttccttaagctcgaattcgttttctgtttcatataggggctcggtgtcttctaaatcaggtgcacttcgcccagtagccccttctctcctaccgccagtttccacgcctccctgggactcggaatcactcagctccataagttctggcggcgggcacaaggttcgatgcgtcggccttttcctagcggaatccaagtctgctgttggtgagatgtgatgctgctcgagggccgcttgcagagcagattgctgttgcacctgttgcagctgctggcggcgttgcgatgatgtcacagtggtcaccgaggaagtgacaccgctgttgcctccgccactctcatcgtcctcggtgggcgtgtgctccatgggcgtgaccgccaggctgctgcagccggacgaggtaatttgcatgcgctggcgcagctgcagacccaatccgctgctgctgcattgctgctccgcattgttgctgctgctggtggaggacacatgctgctgctgctgctgctgctgaggctgctggcggagatccttttgcgaatcggccagcggcatgacttcggtggctgctagcgttgtgaggcaactgctcctagcggttcctttgtttccagatcctgatgcacaatgctagagcccgagttccccctgcgtttccaactcctcctgctgctcctcctccaccgaactctccctacttccgatttcacttttcttttttattacttccgctgcgtgggcgtcgcagtcgactgcgctgttgcctctccggatttctctggtttccctgctgctcctacggccaacaagcagcgctttcctaatgcgcccacgtttcgtacgccgtctgctttactatccgcttcgcaatccgcacagctgtgttgcttcttatcactattatttacacattcacaataaagtttttttagagctgcaaaaaaatcgatgttaccatcgattacatcgatagtttcagttttccgaaaacatcgatttactttttgcagccgatgtttttactgtgcgtattcagcaaatttttgtttacacttttaatacattctttcggttttaaaagtctatataactcaattaaaaaaaaaaaaacatataaatatagttttatttgagaatgatttggcccgtgtgaccgtgtctagcaatataccaaacgcgaaaaataccaattcattacgaaaacgtcgtcacgaaacaagttatcttgtgtaaaccgtctaaaaaccgttattataaatttctatatcccttttatattgatttccggaaactttgctaaataaatacaacggttttgcagacttacttacttatattagccgcaacattccaaattcaattggtaaaaaactaatggatatcgtacaagcgcttttaaaaacaataaaaaaaaaaacattgtgcttatagattcagtattattattgcttcaaaagtggacaacaaccacttttcatatataaaagtaggagtagtaggagtagcttacttacttagtgcaaatctgaagggcgcaacgatagacggatacaatactgaccacaaaatgaagaaacagggcaaaaattaggccgcaggcagcggaaacctcgctgttggtatcgatcaagtcgaactagaatggatgaaaccattaaaaaaacatgcctcaatgcgaagagcccggctttacctgttcacccttttgctccgccatcctgttgaggtcccttgacaatcccacgccggaaatagccagagccagggtgctgctggcgatgcagaccaaactgagggccaaaaacgctgtctgggttttgcgcatgctcaccactccaagggagcccgtaacggctgctatcaatcccgtccagatgccgcatcccgcca

SEQ ID NO: 35573 - DNA, 3303 bp, DROSOPHILA
aagcaacacagctgtgcggattgcgaagcggatagtaaagcagacggcgtacgaaacgtgggcgcattaggaaagcgctgcttgttggccgtaggagcagcagggaaaccagagaaatccggagaggcaacagcgcagtcgactgcgacgcccacgcagcggaagtaataaaaaagaaaagtgaaatcggaagtagggagagttcggtggaggaggagcagcaggaggagttggaaacgcagggggaactcgggctctagcattgtgcatcaggatctggaaacaaaggaaccgctaggagcagttgcctcacaacgctagcagccaccgaagtcatgccgctggccgattcgcaaaaggatctccgccagcagcctcagcagcagcagcagcagcagcatgtgtcctccaccagcagcagcaacaatgcggagcagcaatgcagcagcagcggattgggtctgcagctgcgccagcgcatgcaaattacctcgtccggctgcagcagcctggcggtcacgcccatggagcacacgcccaccgaggacgatgagagtggcggaggcaacagcggtgtcacttcctcggtgaccactgtgacatcatcgcaacgccgccagcagctgcaacaggtgcaacagcaatctgctctgcaagcggccctcgagcagcatcacatctcaccaacagcagacttggattccgctaggaaaaggccgacgcatcgaaccttgtgcccgccgccagaacttatggagctgagtgattccgagtcccagggaggcgtggaaactggcggtaggagagaaggggctactgggcgaagtgcacctgatttagaagacaccgagcccctatatgaaacagaaaacgaattcgagcttaaggaagtcatcaaggagggtcacgacaaggccgatccttcccagttcgagctcctacgggttctgggcgaaggtagctttggaaaggtgtttctagtgcgaaagatcataggcaaagatgcaggaacactctatgccatgaaggtgctcaaaaaggccaccctaaaagtaaaagatcgcgtaaggagcacaaatgaacgaaaaatactagcggacgtgggtcatgctttcatcgtacgtcttcactatgccttccaaactcccggaaaactctacttgatactggattttcttcgtggcggtgatctgtttacccgtctatccaaagaagtaatgtttacggaagaagatgtcaagttctatttagcggaactggcgctagctatgaatcacctacacacattgggcattatctacagggatctgaaaccggaaaatattctactggacgagcatggccatatagccttgacggactttggtctatccaagcagcctttggatggctcaaaaacatatagcttttgtggaaccgtagaatacatggcgccggagatcgtgaaccgaaagggacacgattttgccgctgattggtggagtttcggggtgctcatgtacgaaatgttaacggggaatttaccctttcatggccaaacccgccaagagactatgaatcagatccttagaagtaagctgggcatgccggagaatttgtcgccagaggcgcaatccctgctacgtgctctcttcaaaagaaacccccagaatcgtttgggtgcgggtgcccaaggaattctggacatcaaggcgcactgcttttttgccaccatcgactgggtgagattagaacgaaagcaggtgcgtccgcctttcataccggcggttagccgtgacgatgccttttactttgatgtggagtacacctcaaagtcccccagggattctccgggtggcccgatctccgcatctgcccatgagatcttccgcgggttcagctttgtggctcctgtccttctggaaggtcagtgtgctggctcgaatatgtgctccaccagcgccagtcctctgcatagtatagctcctattcctgctgctccagtgggagcccctcgaacattacctggtgttcttcccggaaacttccatgcggaatataatctactgcaagaactgggacgtggaaccttttcagtttgtcggttgtgcgagcatcgagcctccaagaaacattacgcagtaaaagtaatcgaaaaggcagctgtggccgcagcatccacatccacttctgccgattgttgggaggaggtggagattatgctgaggtacggcaaccacccaaatatcgtcactctgtactctgtttacgaggatgcggggtccgcatatcttgtgatggagctgcttaagggtggcgagcttctcgatcggatacttgccgtgggccagatgtgcgagagtgaggccagcgcggtgttaaggacaattgcatctgcggtagcatatctccatgaacatggcgtggtccatcgagatcttaagccttcaaatatgatatatgccagtatgcggcaaactcccgagaccctaaagctctgcgatttgggtttcgcgaagcagctgcgcgcggacaacggcctcctgatgacgccatgctacacagccaattttgtggctcccgaggttctaaagagacagggctatgacctggcttgcgacatctggtcgctcggtgtgctgctttacatcatgttatccggccggacgcctttcgccagcactccaaatgattcaccggacgtaatactgaagcgcatcggatcaggacaaattgacttcacaagcagtcgctgggcactgatcagtgtgccggccaaagaacttttgcgtcagatgctacacatagtaccggagaatcggccgacggcggcgcgaatacttgagcacgactggctgcgggagcaattcgccggcggcgtacagcttacagagtatgcggtggcgcccggatcccaactttcgctgggcgcccagcagcagcagcagaatcacatctccatggccttaagaggcgctgttgatgccactttccgggctattgccataccccaggcggcgaatgtgggacccgtagaactttccatgctcgccaagaggcgggccaaagatcgagccaacctgcactcctaatcctgggcggctgcatggtgtccgcggcgccaggccaagcggcagatagtccgactacttttccgaatctatagtattctaatccaatgctgctgtgccaatccgcgtcgtcttgtcaaggacaatgcgcagaagcttggttcacatccacaaacgctgggcaatcctcgccaacgctgccgcagcgccaagctgcgtgtggtttaggttttgggggaatcggcctaaccta

SEQ ID NO: 35574 - protein, 911 aa, DROSOPHILA
MPLADSQKDLRQQPQQQQQQQHVSSTSSSNNAEQQCSSSGLGLQLRQRMQITSSGCSSLAVTPMEHTPTEDDESGGGNSGVTSSVTTVTSSQRRQQLQQVQQQSALQAALEQHHISPTADLDSARKRPTHRTLCPPPELMELSDSESQGGVETGGRREGATGRSAPDLEDTEPLYETENEFELKEVIKEGHDKADPSQFELLRVLGEGSFGKVFLVRKIIGKDAGTLYAMKVLKKATLKVKDRVRSTNERKILADVGHAFIVRLHYAFQTPGKLYLILDFLRGGDLFTRLSKEVMFTEEDVKFYLAELALAMNHLHTLGIIYRDLKPENILLDEHGHIALTDFGLSKQPLDGSKTYSFCGTVEYMAPEIVNRKGHDFAADWWSFGVLMYEMLTGNLPFHGQTRQETMNQILRSKLGMPENLSPEAQSLLRALFKRNPQNRLGAGAQGILDIKAHCFFATIDWVRLERKQVRPPFIPAVSRDDAFYFDVEYTSKSPRDSPGGPISASAHEIFRGFSFVAPVLLEGQCAGSNMCSTSASPLHSIAPIPAAPVGAPRTLPGVLPGNFHAEYNLLQELGRGTFSVCRLCEHRASKKHYAVKVIEKAAVAAASTSTSADCWEEVEIMLRYGNHPNIVTLYSVYEDAGSAYLVMELLKGGELLDRILAVGQMCESEASAVLRTIASAVAYLHEHGVVHRDLKPSNMIYASMRQTPETLKLCDLGFAKQLRADNGLLMTPCYTANFVAPEVLKRQGYDLACDIWSLGVLLYIMLSGRTPFASTPNDSPDVILKRIGSGQIDFTSSRWALISVPAKELLRQMLHIVPENRPTAARILEHDWLREQFAGGVQLTEYAVAPGSQLSLGAQQQQQNHISMALRGAVDATFRAIAIPQAANVGPVELSMLAKRRAKDRANLHS

SEQ ID NO: 35575 - DNA, 16449 bp, DROSOPHILA
ctgaggctgctggcggagatccttttgcgaatcggccagcggcatgacttcggtggctgctagcgttgtgaggcaactgctcctagcggttcctttgtttccagatcctgatgcacaatgctagagcccgagttccccctgcgtttccaactcctcctgctgctcctcctccaccgaactctccctacttccgatttcacttttcttttttattacttccgctgcgtgggcgtcgcagtcgactgcgctgttgcctctccggatttctctggtttccctgctgctcctacggccaacaagcagcgctttcctaatgcgcccacgtttcgtacgccgtctgctttactatccgcttcgcaatccgcacagctgtgttgcttcttatcactattatttacacattcacaataaagtttttttagagctgcaaaaaaatcgatgttaccatcgattacatcgatagtttcagttttccgaaaacatcgatttactttttgcagccgatgtttttactgtgcgtattcagcaaatttttgtttacacttttaatacattctttcggttttaaaagtctatataactcaattaaaaaaaaaaaaacatataaatatagttttatttgagaatgatttggcccgtgtgaccgtgtctagcaatataccaaacgcgaaaaataccaattcattacgaaaacgtcgtcacgaaacaagttatcttgtgtaaaccgtctaaaaaccgttattataaatttctatatcccttttatattgatttccggaaactttgctaaataaatacaacggttttgcagacttacttacttatattagccgcaacattccaaattcaattggtaaaaaactaatggatatcgtacaagcgcttttaaaaacaataaaaaaaaaaacattgtgcttatagattcagtattattattgcttcaaaagtggacaacaaccacttttcatatataaaagtaggagtagtaggagtagcttacttacttagtgcaaatctgaagggcgcaacgatagacggatacaatactgaccacaaaatgaagaaacagggcaaaaattaggccgcaggcagcggaaacctcgctgttggtatcgatcaagtcgaactagaatggatgaaaccattaaaaaaacatgcctcaatgcgaagagcccggctttacctgttcacccttttgctccgccatcctgttgaggtcccttgacaatcccacgccggaaatagccagagccagggtgctgctggcgatgcagaccaaactgagggccaaaaacgctgtctgggttttgcgcatgctcaccactccaagggagcccgtaacggctgctatcaatcccgtccagatgccgcatcccgccagtgagagcgctgcctctcggacgatcagaagtgatcccagggccaccagcgatatggccaggagcaactggagagtgcccaacactatttgcagtggaaatgccgagcagcattcattgctcgccttgcgcttgcgccgatctttcgaggaaagcgatgagccactgcctccaccctcgctgccctccttgtacttaataaattccggtggacagcgctgtttacgactgatcctggagtccaaagtggtggccccactcttagtgccattcacctgcacagaagaaaaaatgtgtttggtacaatattcgattgtctgaggattaatgagagcaaggcagtacagaaatggacaattaaagattctctagccctattaggtgattcaactgatacaaattgattaattttggttgactttttgtaggacctacctggtttggttgccgcgaagcaatagcttcctgcagctgttgtttgaactcttggtgcgaaataagattgggcttattatcgtcatcattgtttgcctgggatttttgggcatccaagtctagggcggcggataggagtttcaccgccggcggcttctcatcgtagacaggactcgaatagatgtgactttgggcatcctggcgcgcctgctcctggtcctcctgctgttttcgattctcatcccgttgaagcatgccgatttgcgagttggtcagactaccgcccgatcccgccaagttcgtggtattcgtgctatgttcgatggtggtcaccacctgatggagttcctcaggattcaggctgcgatccacaatggtatccatgctgccggtggtggaatcatgcgaatcaatggtgcgggccggcgatgccgagtggcggccattgaaatcttcgccgccaggctgctgattactggtctctgtcatttctgctgattggctgagatgattgggttatgatgatcggtgatgtcactgattcattgacaagctgcaggcaaatgaggagaacagttaaatattaaaaataacgtgaagattatggctttggtatcgtttggtatcttcatattcgaaagtaatagtaataaagcttattttcatagtctctcaaatagacactattccagcttttataaccctttaatttttattgcgttttttacattctgtcgagtgtagcaagttgaatactcgccatggcctatggattggcggctcgacagcgaacaccccgcagaatagcaggttcgttgccagagtcttttgtttggcgcgcacactttcggaaggcttgcttgcttatcgcttgcttatccaccgatcgattggcttttgccattcatcaattatttgatctgatcaatcattcgcactttggacgcataatttctgcaataatcgcctgttctccgtcaacattaatccacttatggagcctgctcagaatccgatccggtccacacttatcatgtgtcaaccggctgacaatgccagtattctgccttggaacaccttgacatttgcctgcgctcgtcggttgtcattttgcttggcttctgcgaaccggttatcattttgttggcaattaaacaaagccaaaactgaaactgaaaccgaacgcaaactgaaatcgaaagccgaaacaaaatgtaaataaagtggaaacagacgtaaaaggcacaaacagtacattccttaagtaataaaaactataccacttttttttaagcatttccccttaaaaaaaaagtatgtctatattgttctttagctataatataatacaatatcgtggagatttgaataactaaaacctttaaataactttactttaatatgttttatctttaaatatgaatttgaattaattatggtacactatttgttttcatgttggtgttttctaaataaattttgatttaagggcttgaattattatacaaataaaatgtatgagttaaatataggtaatccgttcaagttccattttcaaatcgctaagaacattctccgtccattccaagcagccattaagcgtggcattgttttgttgcgggggcatgggtcgcattgttttggcggtgccatgcggcgtttggaggcaaaccacttaaatggcatccgatatggcaaattgtttggtgcaactggcaaatcgattgcttactaggggagtggagcaagtacagccctcaaaatagtcatcggtaattttacgaaaattcccagagataaagagagtaaagtaaaatacatttttaaattaaacataaatgctttctcttagcgtctaaataaattacatagatatcgcgcttagtacgcccctaaaatcaaaaatgattcagttcgaacatttgaaatataattatatttaaatgctgtgtactaaataaaagacacgctggagccagaactgaattcttattgattccaccttcgctttaacaggcttaaggcaaatacaaaacataccggagtgcaatgaaaaagcacaaagatgtgctgttatgccagtaaagttgatatttatttggtatttctctgtttgctattgacattttgccactttcagtgagtaagcagactttttcccccgtttttcaccgattttccctccctggcaccgtcgacgacaaagctttccactgtcccaagtccggctggtcatttgtggcacttttcattttcactgttgtcgcattggcagcaattaggcgtaattggccagacacacaccgccatacgtgtatggctcacacttcagttagcactggaacatttacccgactgccttcgatttggtttcgagtagcccgtcattcccctcctgccttttaattcggtgggctgttttccattttccaagcgcaaatacaccaaaagcctttcccacactcgcaagtgctgccaacattttaaagccaattgttgcactgaaaaggtcgtattggggaacattttttagtagaatcaaaacgggttgttcttctgttgataaaatacaaatgtggcaaagtatattttgaaagcataaaatggataaaaatagctgggatgaataattaggagaaagtatagcgaaatacgatcgtaaaaacaaaaaaaattgtttactgctcttaatgcttcaatatttagtggccaactttgttgccaaacagcagctgttgttgcactcgaaaatcgcccaagcgctaaaccaagaaaaccgcgacagcaacaccagaatataatgcaagaaatccaaatttgccgataaatcagtaaagcaaataacaaaaataacaaagagatgaagataaacagtgggactttaacaagctgaagtgtgataacagtttctctaattgataaggggttgcagatgttctacatttgaacatagttagtcaagaaactcggaattgcacaaaatcaagtatatataatatatgtaaatctaaagaaaattaaatgaaagctgtttcagcttcaagcaccacttgtatagagaactaatgacacagttaagaactttatccagaataaaatacgtttttaaacattaatcaattttttcgtggtgtaagcgagagctcaaagaagctggggtcggaaaaatcgaatttttgaaatttgaaagctggaatcgtttgcccattttttgcccatgtttgcccaccaattagttttttttgcccacgtccagtttttgagatatgaattttcgaaaaagttcgaaaattttcgaaaatcaaaaatttcgcttttttcaaaatttttttttttaaatcgcaataacatcgtttgcccacgtttgcccaccctttagaattttgaaaaaatttatactttagaaaatataaggcttttaagtttacctcggtctaatcagagagtaaatcgtttgcccatctcttaaaaccaaatattatcaacaaaaaaggtttgcccaaccattattattagtttttatcgtttgcccaccctttaaaaaacctttaacaaaaattttttttcgattgcccacatttaaaatacacccaatttcgttagcccacctctttaaaataaaaatttccaaaaaaaacgtttgcccaccatttaaaactaaataatttcgtttgcccatccttcaaaattcatttttaacgtttgcccatcctttaaaaataaattatttcggtttgcccaccctttaaaatttgtttttttcgtttgcccactcttaaaactaaataatttcgattgcccaccttttaaaactaaataatttcgtttgcccatcctttaaaaataaattatttcgtttgcccaccctttaaaatttgtttttttcgtttgcccactcttaaaactaaataatttcgattgcccaccttttaaaagtaaataatttggtttgcccatcctttaaaattcatttttaacgtttgcccaccctttaaaaataaattatttcgtttgcccaccctttaaaatttgtttttttcgtttgcccactcttaaaactaaataatttcggattgcccaccttttaaaacttaataatttcgtttgcccatcctttaaaattcatttttaacgtttgcccaccctttaaaaataaattatttcggtttgcccaccctttaaaatttgtttttttcgtttgcccactcttaaaactaaataatttcgattgcccaccttttaaaactaaataatttcgtttgcccatcctttaaaaataaattatttcgtttgcccaccctttaaaatttgtttttttcgtttgcccactcttaaaactaaataatttcgattgcccaccttttaaaagtaaataatttcgtttgcccatcctttaaaattcatttttaacgtttgcccaccctttaaaaataaattatttcgtttgcccaccctttaaaatttgtttttttcgtttgcccactcttaaaactaaataatttcgtttgcccatcctttaaaattcaatttttaacgtttgcccaccctttaaaaataaattatttcgtttgcccaccctttaaaatttgtttttttcgtttgcccactcttaaaactaaataatttcgattgcccaccttttaaaactaaataatttcgtttgcccatcctttaaaattcatttttaacagtttgcccaccctttaaaaataaattatttcgtttgcccaccctttaaaatttgtttttttcgtttgcccactcttaaaactaaataatttcgattgcccaccttttaaaactaaataatttggtttgcccatcctttaaaattcatttttaacgtttgcccaccctttaaaaataaattatttcgtttgcccaccctttaaaatttgtttttttcgtttgcccactcttaaaactaaataatttcgattgcccaccttttaaaactaaataatttcgtttgcccatcctttaaaattcatttttaacgtttgcccaccctttaaaaataaattatttcgtttgcccaccctttaaaatttgtttttttcggtttgcccactcttaaaactaaataatttcgattgcccaccttttaaaactaaataatttcggtttgcccatcctttaaaattcatttttaacggtttgcccaccctttaaaaataaattatttcggtttgcccaccctttaaaatttgtttttttcgtttgcccactcttaaaactaaataatttcgattgcccaccttttaaaaccttaaataatttcgtttgcccatcctttaaaattcatttttaacgtttgcccaccctttaaaaataaattatttcgtttgcccaccctttaaaatttgtttttttcgtttgcccactcttaaaactaaataatttcgattgcccaccttttaaaactaaattatttcttttgcccatcctaaaatcttaagaataaataaattctattgcccaccatataaacacgtgccactttcctagttttaggatctgcctacataacacgtgcagacgcacaggtgtttctgggtttatatagaccaaaaattggttccgattgccaatcttgtaatttacagtttacaaagggtggttaaaataaataatttatttttaaagggtgggcaaacgttaaaaatgaattttaaaggatgggcaaacgaaattatttagttttaaaaggtgggcaatcgaaattatttagttttaagagtgggcaaacgaaaaaaacaaattttaaagggtgggcaaacgaaataatttatttttaaagggtgggcaaacgttaaaaatgaattttgaaggatgggcaaacgaaattatttagttttaaatggtgggcaaacgttttttttggaaatttttattttaaagaggtgggctaacgaaattgggtgtattttaaatgtgggcaatcgaaaaaaaatttttgttaaaggttttttaaagggtgggcaaacgataaaaactaataataatggttgggcaaaccttttttgttgataatatttggttttaagagatgggcaaacgatttactctctgattagaccgaggtaaacttaaaagccttatattttctaaagtataaattttttcaaaattctaaagggtgggcaaacgtgggcaaacgatgttattgcgatttaaaaaaaaaaattttgaaaaaagcgaaatttttgattttcgaaaattttcgaactttttcgaaaattcatatctcaaaaactggacgtgggcaaaaaaaactaattggtgggcaaacatgggcaaaaaatgggcaaacgattccagctttcaaatttcaaaaattcgatttttccgaccccagcttctttgagctgtaagcgagcaggtttgcacaatgtgcaagtaatttgttttgtctctaaacgtaaatttctcagctttttttttggccaaaaaagggcaagtgcaacagagttttgaaaataaaagaaagaaaggagctggtggcttgttgttgaccatgatggcgtgaggggaagtgagatgtcgataggttttcctgaaagcaaaattgcaccggtttggcagcagaaaaacttactgctgcggtcagctacgccgtctgcggatgtatgtatgtgtatgtatacacatatttacctgtattcacgtgtatatatatcaacactttcactggccggcttcccatgttagccataattttggtggccaattgattgacatacaccatacaattttcggccaactattttttaatgggagtcagatggatggaggatttcctaacattatcggcgttgcctttaccaggggtatcaaatagaaaaaacttttcgaaacaattgattgcatgccagcaaatgaggcaatcaattgggtttcacatatcgaatcgtacacgaaattgaaacattgcaaatttcattaaagttatgacagctgtagccaaatatggaatatttgcgcagcactcctcgttgctatatccgttactcgtagagttagaggaagaaggaaacctttccgaccatataaagtatatatatttttgatcaggtccaattgccaagtcgatttggccctgtccgtctgtccgtattaccgtcgaggtctcaggaactataaaaaagctggaatggaattaagcatacagattctagagaatctgtgtctatgcaagtttgttgacccacgcccattcaaacgcccacctgagtcttggaacttggagaaccttgtggacgattctccctgttcaaatagctccaatcgcacggttcgttataacacaaaacatgataaagactttagttacattgtataattaatgtttaagcttaaagattaaatactatggttgtttatttacttaggtataattaactaactaaatgaatatttaattttagccatttgtagcaagcaactttggtattcaacaattaatcatagttttaatttagaatatcaaacgttacttaagtcccaagcataccaccttttccactgtagacacttcaagcagctgtgaatatatcagctgcggttgctcacagttagttttaagggcagctgaatgctgaatgtgtttagattttggaagcgaacgtggattgcacaagcaactttgaaactgtgtttgtagcctagcaacagattgccttgattttatgtacatacgtacattgtatttggtgggaaatatgatggaagataactaagcacaggaaatttcttagttcatttcgcaatcaaaggttcctttgcaaaactcctttcaggcaagccagcatcaatgggctagacgaagaaaataattaatacaaaagacccatattaaaatgaaatgaaaaaacaagcggttcgcatatgtgaaaattcacacaacattgactgactgactgactgattgactgcctgactcatcccaaatatagacaaagtcaagacacgagatgcagttgcagatgacggagcttcctgttacccacgcaatcgtgactcgttgctgatatgtggctgatattagatgtaatgcatgtttacgtcgccgttgccttaggtaattaaaacgccgcctcccgtgacagacgatgcgacactgcagcatcaacttgcaacacctgagttgctgtgtgttgcatcaccaacatcattgtaattatcatcgtcatcaaaagacaacaatcaaggaaaacaatcttaagaacaatccgttggcaaatggagcaactgttttaaaacgaaggagtgggagacaacaatcaaatcgcttgacaactgcatgactaaattgcgctcaatttgctaataagatcaagaacaacagcgtcgggagtaatacggctctaacaagttcgttgcctaagtcattcgtttgctgggggtaatttatatgtccacaatctgtggtatcgctagaaacatgaaaatggaaccagcacgttctgctcataacttcatacaaaattaagggaacttaacgatttaaacattttggtttcataagaaaaaatgtgttccttaatttgcactttaaaaggatgcaatttgattacaatatctttatctttatatctagtgcctttcagtttatcgcagctggcatttggcccactgtttggcctggaatgcaagtatctcttttgcatgcagctcaaactctccgcttgaggtctccgaacaaacaaccacaccacactctgtggtatttttctggcctgacatgagcgggagttaattttatgcaggaattcggacagacaaatgaattggaatgagaataattatgatcatgctgatgatggttgcaacttcgaggaaaatctgattgctagtcaatgggctgcatttgcagacaaaggttcaaatgtcaaagtatttaagtcacacgatcggaaagttgacaatcgctggccaaatgacaattttgcattgttaacctattcggctttgttttctttacattaagattcggatgttggccaacaatgggttaagagcagccttcaaaattgtggtcagcctgcaatgtttcgtttcttttcgtttttgtttgtttctcgatggaatgtagtaactgactgttaattgtggccaatgtcagctttgcgtatacttaatattttatgtttgatgtttttaggcgtatttgttaggggagttcatttccaatgacaaagaagtgtgtgtacatatttgttttgtagatgatttaaagctaaataaaaaataatccgttcgaaatcattaacttgtcttctaattggagaggaatattaatctagaatcagcttcgcgcaattcacaattttttaaggtattcataattggtttgcgtttccttaaacgctctgaaaactggatataacatcataagcgacaacagcggtgtttcactgttttaagatttcgggctttggtcgtttgattggatcttttacacatgtttgcccttaagctttaattaagtttttgtggacaattaatttccaatttgcgtaatgatgaaagctcgtcatgttacataagtaaagaagatatctatttaattgcatggatcagtcttaccgactatagtcttacctactataaacgtaggcattggctttattcatgttaatttaaacaattgcgaagagaaagttacactcatcaataacactgacgataaacgagaattctttttgaaaaaatgtttcattgagaataggaattaaattggaagatatattgaccattgttgataatcgcctgcatgattccacgatttaaaaaataaattggatttactggccgatttttgaattaatacaattcgtaaatactagattcgttctaaagtatgcaacaggcagaaggaagcgtttccgaccagaaaaatgatgaaatttcgcaaatgatgaaattcgcattaacactaaccgagtaaggggtatctgatagtcggggaactatatagcattctatagtcattcgactatagcattctctcttgtttttatttggtctcttcgtgagatcgacatttttttacacttaaaaaaatgtagctgttaggatgattttggtttgatgtttgataccatattgaggatttggcgatgttgtatgttaattatttcttgaagtgttctcttttatatatttaaggttttcaatagttgaattaataaataccttcatgaaaaatgtggaaataatataagactccgactttgggtgcaacttggcaaggcgtagcgcaatgtattgcatatatcgcatttggttagctcgcgacgtgcctgcctaatctggtttaaaaaacaaacgttgcacgcaatcgaattcgcattcacagtctcacaacccgatccccccggggacacagcccccatgatctacggtctccgctccccaatctgcggacaattaaggcggcaaggtcgtcgccgtttgccgccgctggaattaacatttgaaatgacttcatacgaaaataattgcacgaacggaaagagatcaagcggcgtgtctgcggaaagtggctgctggctgcaaagtgacttacgcacttgccacgaacactcgaaaacgagtgcaacgcacgcggctaatagcggatggccaacaggccaactggttaactggataacaggccaatttatggccgagcttatgaaattcaaaaaaggggccacaaaacaccagacatacatatcgcggcggcaatcaaaatgaatcgaaacgaaaccaaacacttgcccgatcgcgaggaaatgaagtggtgggccgggcatatcattagatggaactgtcgattttccaaggttggaggtttcaaagaaatagtgcaaaaattttgaactgctatttagctttatgaaaagtacaacaatatattgtatatcatattatagtaataactctaataacgataactctataataatttcagagcacgaactcataatatctttttgtttttgctaaataaaaagttaggatgtcccagttcaataatcagtagttgacatacatataagacgctctacacattttctgcctgtgcactgtgcgtctggttccccctttcactttcaattagccagtgggcagcgcggcttttttggtctctttgcaattttttcgtttcgtttcgcatttattattatttataatatgcgcatttcaaggaaaaactttcgctgcatgcaacatttggtgtgtggtgtgcgctgcatttcctgcaattatcgcataagtacgcgtgctgagggcggagaatggagtggagtggtgagtgtaaccgtcccgactatgattatgaaactaagagtacaactccatatgagtgtccataaatgtatcaagccattatgcagcgtgtaacgtatttgcaaatgcgagtttcaagaccctttatcgaaacctaccgctgctcaatcgggttcgaagatacgatacgatcactggcattacagtcgattgataatgcaattattgaaattctcatcaatcagctagtggaaatgcgaatgcaaaatttcataatttttctgggatatatcggcagatatgcgttggaatagtgaggagcgtgcctttgccgttgaggtctacttttcaagtggatgttcggttattaaaacacagcgtgcatttcggaatagctttaatttagccccgttggctaacgtcccagaccgcaaatcaattgtcacatgggtcactacattcaggcaaagtgcaagtgcgacgagacgcagaactggagtccctcgacccgttagatcacctgagaacattgggatcgccacggcgttctgtgagaagaattgttcatgatgatcttcaattttatccgtataagatggcgatagtgcaggaactttcagaacgtgacttcaattctcggatgaacgattcttcttgatgtcattcccgaggatgctattgtttatattttagtgatgaagccgatctgtacccttgtgatttttttctatggggtttcttgaaatcccgtgtttatgtgaaccgtccaagaaccctacaagatttaaaaaccaacatccaagaagaaattgacaacttaacacctgctatgctaacaaacaagagtcacgacaaaacgccagaaatcggtttacgcaatatatggagaatggggaatgtcacctatcagatttcatttaaaaaaaaataaataaataaaaactttagacatgtacctacattataaaaataaacaaatatctttcgatgcctacaaaagttttcattgagttcgtaaaaaaggtaattatgctgccgcatcctgtagttcctgcgatttcgacgttcatacggaaagacggacaaagccaaatcgactcggctattgatcctgatcaagaatatatataatttatatggtcggaaacgcttcattctacctgttacatacctgttacgtacctgttacatacttttcaacaaatctacaatagtataccgtcttactctacgagtaacaggtataatttttggaaagaaattacgttattgcccccataaaaaaatttatattttatataaaaaaaaaaaataaaaaaaattatttttaaaatttatatttccgactcatcattgatttgaaataaaataaaaacaatacagactaacttttgattgagactcaagtacaaattcagttcccatcgaatttgggctgcaatccacgacaaattttttaaaacgagtgcagtttccttgataaagtcttgtcaactgccttcgctcttttatacatattaattttatttttattattttttttttgcttgctggtcagcccgaatgaaacaattgctaagaggatttattccgcggaatataaagtatttatgaggcgtttttgctggattgctgggtacaggggcaacaatttgacaaccttaggacggaagcttgttaggtctttcttttaatgactttgcctcgagacttcgaagcacttaatgtacgctggtcagctattcgttttagagccattagaatgcgaaaacatctcgaaaatgtagaaaaggttgcgcttagcagatatgtattcaaaggcaacatttaaattcctagaattactgtagaactgcagaactgaaagcttacgtaagccttgcttatcacccttacgtaagttacgcaatttgtcaaaataactttgacgaagattagcatttcaaacaactgttgttattgttaacacaaattagacatcttccacttaaaccatctgtagatttcagagaacatgtttatctgaataagttactctgggcaattagttgattttgtgtgatttctcaagtgctctagagactctttctgtgccaagttgtctgcgtatgtttttaaaacggttttctgtttttcaagcattcgtcagtcttttatttttagtttatctgtgcaaacttactctaattaaagcggcgtccctggcctttgtgtgtaatatttatttattattgtctatttatcagctattttctcctgctgcgcctttgcgatgtgttgtgcgctattattgttgctttatctcaggttgaatgaaatcagcccgctaattttgctgttgttttcgccggcagcgtgctgcgtgcaattaaaattcaacaaattccatttcacttcaacacacaactgcaaaaaaaatacatgcggcgataaaatatcgaagtaggcaataaagcgatcggttaattggcgattcacacacggtaccgttactcgaagacagacgaaagcagaaggagagcgcaagacagcgagcatgcgcttgcgagtttctcggcggcgcgttcgtttctaactgaaaccaagttgatcgcttcgcgcgctttcaaccgccgcatttctcagtcgacgtcgctggccgaaaagctggcaaagcggagctttaacttttggtatgccaccatactgttgttgcagtcgatgtcggtgatggaggccccaaaagaagtagctacacttgttgtacatatgtatgtatgtacatatgtgtgtatgtatatttgtacgtaccgtatgcaccttccaccgaagacctccgcgtaacattagagttgaatttcttgcatagcccgatttggctggaaaactcaaaaaataccaccggggcatcactgttcggacagttttacaacctgttagcgtaaatctgcgcttaaagaagtgccgacaatcaacaacaaacggtaatgagtgtgcgcaggcgcagcaacaacaacgaactttcgaatattgaactttctgccagcatattcaacctggtgaccgccgttaaattataatcaatttcaatttcaatctgctcttcacctgcagctgcagacaaaaggaacaatttgctgacgtcacgccggaatgctgcgacaggcgaacaaaattgagagtgatttcagggcgaaaaatcaggtggaaaatcggggaagaaaatgattaaagaaataacgagaacgtggggaaaatacatagttagcccgccaagaaatctacatacgtatatagttctgtttatttcatcattgtgaatatagtacatatgtatgtacgtatttcattacatctaagacattgagatgtgataaag

SEQ ID NO: 35576 - DNA, 1326 bp, DROSOPHILA
cacgctgccggcgaaaacaacagcaaaattagcgggctgatttcattcaacctgagataaagcaacaataatagcgcacaacacatcgcaaaggcgcagcaggagaaaatagctgataaatagacaataataaataaatattacacacaaaggccagggacgccgctttaattagacttgtcaatgaatcagtgacatcaccgatcatcataacccaatcatctcagccaatcagcagaaatgacagagaccagtaatcagcagcctggcggcgaagatttcaatggccgccactcggcatcgccggcccgcaccattgattcgcatgattccaccaccggcagcatggataccattgtggatcgcagcctgaatcctgaggaactccatcaggtggtgaccaccatcgaacatagcacgaataccacgaacttggcgggatcgggcggtagtctgaccaactcgcaaatcggcatgcttcaacgggatgagaatcgaaaacagcaggaggaccaggagcaggcgcgccaggatgcccaaagtcacatctattcgagtcctgtctacgatgagaagccgccggcggtgaaactcctatccgccgccctagacttggatgcccaaaaatcccaggcaaacaatgatgacgataataagcccaatcttatttcgcaccaagagttcaaacaacagctgcaggaagctattgcttcgcggcaaccaaaccaggtgaatggcactaagagtggggccaccactttggactccaggatcagtcgtaaacagcgctgtccaccggaatttattaagtacaaggagggcagcgagggtggaggcagtggctcatcgctttcctcgaaagatcggcgcaagcgcaaggcgagcaatgaatgctgctcggcatttccactgcaaatagtgttgggcactctccagttgctcctggccatatcgctggtggccctgggatcacttctgatcgtccgagaggcagcgctctcactggcgggatgcggcatctggacgggattgatagcagccgttacgggctcccttggagtggtgagcatgcgcaaaacccagacagcgtttttggccctcagtttggtctgcatcgccagcagcaccctggctctggctatttccggcgtgggattgtcaagggacctcaacaggatggcggagcaaaagggtgaacagttcgacttgatcgataccaacagcgaggtttccgctgcctgcggcctaatttttgccctgtttcttcattttgtggtcagtattgtatccgtctatcgttgcgcccttcagatttgcactaagtaa

SEQ ID NO: 35577 - protein, 361 aa, DROSOPHILA
MTETSNQQPGGEDFNGRHSASPARTIDSHDSTTGSMDTIVDRSLNPEELHQVVTTIEHSTNTTNLAGSGGSLTNSQIGMLQRDENRKQQEDQEQARQDAQSHIYSSPVYDEKPPAVKLLSAALDLDAQKSQANNDDDNKPNLISHQEFKQQLQEAIASRQPNQVNGTKSGATTLDSRISRKQRCPPEFIKYKEGSEGGGSGSSLSSKDRRKRKASNECCSAFPLQIVLGTLQLLLAISLVALGSLLIVREAALSLAGCGIWTGLIAAVTGSLGVVSMRKTQTAFLALSLVCIASSTLALAISGVGLSRDLNRMAEQKGEQFDLIDTNSEVSAACGLIFALFLHFVVSIVSVYRCALQICTK

SEQ ID NO: 35578 - DNA, 8262 bp, DROSOPHILA
gtggaaccgaaaggagacagggtccatggaactagagccactgccctcggagggggcgctccagatcgatatggtggtcgtggccgttggtgtggtggcctcgctgtggctacctcccatctcaactgcagacagcagctgctccattgccctgcttaattggagaagcattagattgagcaaaatcagtaattagaagcccgtaagcaaccgggattcataaaatcccaagacccactcaccacgtcgcatccattggtgttttgctactgggaatttttgttgggacgtcgaaatgtcaggaagccttctcagaggtcagctgaatctaggtgttttgtgaaagttcattaaatgtctgctatgttttagttgccattagagatgacgatggcactagggagccctcgacttcccgccaaaaattaggaaacctctgaagagttcattacatcaatcaaatgatatcccgaatcgttgagagttttgtattcaatgtttctaccgtggatcgcagctaccatcaagagccaatgagaaatgctgctttaatgctggggaaaacatttattttcaaacggcaattcaaaactcacacgaagtccatgcagccctgacgtcagatatcgataaccggacttttggaagtagcgtttttagagaaaatttgaggactccacagattagcagaggaacaagttttcagtccttccagaattatagtaaagaaaacggtggattaaattagtgttcaggaacttatattgtatatttcgtatgcttcaaaatcttgtcaaaattaaagaaacattgtctgcgaaaacttaacttttattggttcttaacaaactaatttgaaacagctggccgaattcaacagtttactaggtggttatcgaaactggtgtggtacattttggtatttgatttgcgccggatggtattttccttcgccgtgcgcgcggtcacattcactggatgtgtttttttgcgctgattgttgctctggcgcgatcgaatttgcctggaattcgggagtcaacataatattttcgaaagtcaccagctatagcgaaaagtatgcgagttctattacagcttgtcgatatgttgtgttcgtaacttctgtttgcatatgttatgtgtgtgtgttatctagttacaaaacgatctaaaaccgtttttgcaaagaacgtccgcaaaactgagtttgtacttcaaatatgaactatttgcggtttatattgctccagatttctctctttaaagttgcattgtagatgcagtcgtgtgtgtgtgcgtgagatgggagtgcaattttttttcaacagtatcagctttgttttttaagtagaatacaagtaatttttacccctaactttattcctagcccctttcctttataaaaatacggtaaaagtgtaaggaaaacaaaaacaaaaagcgcaaagtttcgcacatatatgtgtacatatgcatacacacgctgagtgtggtgtttctgtattgtttttttttttgtgtttcattctgcgacgcaattgaaaaagacatcgaaggccaaacaacttggtgttttttacgttttgtatggctgtagttgctgttgttgctgctcagttgggcgttagtgtttggctccgttcttattattattattacaacttttccacgcgcttcgctctctgtttctcttccacatgcttgctttcgtcctctcccacgctgcattgctgtctcactcgcacacagccggtaagccaagcagcaaacagcaacaacaacagcaacggcggcgacaataaattatgaaaaacaagggaataagttgatgaaataagtatttcgaattaaatggttaatcactggtggaaaagtcgcagttccaatgacaccttttccatgctgaactacggagtttttttttgttcttaatcggtatacgtttgtgaaaacaagtgcgcttgtgtgagtgagacagggcctcaaaagccagaaaaacatgacaaaaacattttggtaaattgccatgtatccgaaataatgctcatgcaacagttacatataaatattgttattttattttctacgcagtagtcgcggattttcaacaaagagcaatcatagtgatggtataaaagaggggaaggacgaaagcaaagagagcaaaccgaaaacagttactctgcccatgcgcacagctgacccagaacctggcataacggtaaagtaattgtgtcgtacaacaagcgaaacttgacagcgaaagggaaccggaagtcgcctaaaatcgcggagcggaaaggaaatcagtccgccaaccgcgggagctgaaaatcgaaatcacaacccacaaaagcgattccaaagtgctatcttggtgctactcccatacaaaatgttccaagtcctgccccgtccgtcaagatccacgttccactgcatagcggcagccgttgtcacagtcgtcctaatgtcatggtaagtcgaagtaacaatccatccagaattttgccattaattgatccagctttcctagaaaactgacctcgtatcaaaaaaaaaaggggaatcttaagacccttctaagcccatatttaaaactatagttttcaattcagtagataggcacaatcagagtttattggcaagatagttcttagtacttaattactggtaaaagtggcaattttcgttgatcgataagtttgaaacgtgcggcgtttaaatttgaggaataagacaacaaataaaaaacaataaaatttgtaggcattacggggagtccgtccgtttttggaaaatgtgaaacaggtacattggatgaatgtccatagttgtaatctgatttctgttaaaagttaacaattgtcggcgggttttaattagggcagtaatctcaataaatagcgacacgtagtgcgtatatttacgcactaaatgatgtacattttaattgggtcgagcgggtccgaatttcttcccagccaattcagtctcgttcccattgaaagaaagctgcgcagcaaagtgaatatgtaaaatatactgtgtaaaatcgtatggtcggtcacacaagacaaattgtggagctgtaggtaggaaagaaagaaagaacctctttgcgtggccaatttcgaactgaaagttgcaatgttttattttcggaatatatgtgtgtgcacacaaagattgttccacatatgtatgtatgtaaaagcgcaccgaaatgaagctcatgtgcatgcacatggccatccaaatacagctatggccaagaccgtgaagcacacatttaaaaagcgcccgaaattagcattttgtggtttgtggtcctttctttagttcctatttatttattcttttattaaaactacaaaaatgcattttttttttttgtaatatccacaacttgtgaaactaaacgtgattactgtttatttatcagactgggcaatttttaaaagtagtattataacttgtttgcgcacttgttaaactgataaaaagtgtatcaatttccgttcaattccgctgattataaatcagttctattgacttaggctccgctgttggttgctgtgtgtatgccggcgatcttttgtacgtgcttgcaccttcgttttagctgactgaaaggccccacccttcgccccgttgcgccgtccttgctttatataaatactcacttgtacataaaaatgtcactccatgcccatgcacaccgaccactcctccgcccatttaaagcgttctgtgtggcgcaattaaccaaaacagaataaaattaaatacacatcatgaatgcacgcagccgtttcgcagatacaactctatacggcgaataatttcggctaacgtatttgcaggatggatttgtccttgtgaaattcagtccaatcgattcacactgtgattcgaaaggatagagcactccgaatgaaatgatacttgtctgtgcaaataatgttattatcttgagctgctattgagctgagttctttgcaaccatttgttactatttccggtcactgtttaggaaacgggctatgcacattgtatagcccaagcatttcatataataaaatatttctaccaatctgcccaacctattaaccgtgatacattaaatgctctccgtgtccgtatctaaacccgacaattgctctatatttgctttctgctttttagccgcttcacttgtgccccaatagctctcagccacagttactaaacaaaagtacaggaaggtaaaaacgattggaaggcaacaatagcagcagtgtcatgagtgtccactgcgacacatgcgctggctgtgccgaaaaaccactgaccaccactcgaaaaacttgccgcctaagttccaatgcaccgccccctcccatcaacatcaatccaaagtgcgaattagcagagaaacagcgagataattaattagacgcttttcaagagcaaaacaagtcgtcagcgattcgcagggcgaggaaaaggaaaaaaaaaaacaaacaaacaaacactagggcacagcaaagtcaaatgaaaacaaaaaacaaaaatttcaagttcctgttatttaaaaccgagcgctgcttgaataatttatcagtcagctgatattgtctgcccaactactgctacagtgagccctctttttttttttttttttttttttttggtgttggtggtggcgcgtagctcgatactttcgataagaggcagaaactgaatatccgcagatgggaaccccgatcgacggggcgatcattgccttcgtcagctatctggaatttgctaaacgtttacttattattacttatttttcattttgcacaacttgttggcggcagcagattcagtagtataagcgagaaaccaaataaatcatgccctcgccattaatttggtattttaataaaaacgcaacaaacgttattgtaaatacattttggggttcgtaaataataaggtcttataaactccgctgattacaattgcaagaaattctagaattgactttacagatgagttcaaattaatttcccatccgttggtgtaaaatagactatatatagacacatattctcaataattattcttaacgatcgaaggcaaaagagctgtgaactgactttgctttttgccgtgcgttggccttacagtccagatacgcactgtagaaacgttttgacgtgaaatggaaacaaaatgtccgaaaaaacgttgctcggtcgaccaaccaggtctgaccagctttttgcttcatctttgggagttaaactgggtacgcttatgcttcctgctagaacatgtttcgccagtagctagcggtcattaattattgccctaaacatttccaaacgcaatagacatcatcgagttttcgggctatctccggcagtagttgttgagcctttgtctcttgtagttcggccatatctgtcatcggctataaatacatatatccgctaaaagtctaccacctcggcgtgcgctgtgatctttccagggcccgaccgctgggcgtgctattcctgggactacttggctactggatctactggacgcgctgcagcttccgcgttgtgcctacggacgagctgcgcggcaagatcaacacctggctgcagaggatcgacgactggcgccaccgcagtcccagcatgttctgcttggccagcagcggttgcttgggcaccctcgcagtgctcggtcaccttatatccggatcaacgctggtactgaccatcctggtcgtctccgcactagtctccaccaagtacaccttcaagctgctgaagatcgagcacaggggtgagtcgtgaagaagtgtttctgacgatataaagtatatatattcttcttgatcaggatcaatagtcgagtcgatgtagccatgtccgtctgtccgtacgaacgtttcgattttaggaactataaaagttagaatgttgagatttagcatgcaccttcctgttgccacgccctctctaacgcccacaaaccgaccaatactgccacacccacccttttgaaaaatgctttgatatttttcgtttttttttattagtcttgaaaaaatattgccacgtccactataaagcccacttgcctcccgaaactgccacgcccacacttttgaagaatgtttggatttgtcttggttttattgttcgtcctgacaatttctatctgtataccaaaaagtgtttggtcacgcctctacttacaccaacaaaaacagtcacgcccacatttttgaacaatttttaaattttctatctttttattcgaccaatatctatcgatatcccataaaaattaggaaatttcgcgttcgcattctctttatattttttatttgaattaaaaatctatctattagtacttactaaaaccaaacaaaaacgacaaccttattgcggcatgtttacaaatataaacaaatggaacaaaagttattattatttttagagttttttattattttttactgttataatagtttaaaatcaaatgtttttttttttgtttctccagactttcagtggtcggagaagctgaactacaacaacttggaagccgaggcagaggatgagttcctgccggacgtgaacgagtcgaatctgtttgtgttggagcgggccagcgatgtggccaccataagttcgcccaccgatgcgaatgatgaggacgatgacgatcgcagcgacgacgtaccgtcggagctcctcattccggatgcgatacccgagattgacgagcaatccaccgacgaggacgatgaactagccccgctggcgcccaagaggcaggagaagctgcagccacaggagcagccggccaaggagagcgaggatatgaacttccgaaagagtcacttcaagcgtgactcgtcgctgtccacatcctcctcgtcggaggaaagcctgtcaaaggggctgcagttccccgatcacaccaccgtagatgccactggcaaccctcagttgcgtcagataaccgctggcccggatcccgccggcgagcttgtagccctggccgtgaaaacgcaggctcaggcgctcctggcaaacagcgggaagctcctgcccagccttgttaccggcctggtgcaatggggagcaggtggtgctgctgcagccggtgccagcgattgcacggattcaaatcgagatcgtgaccagcagcgcattgtcaccgccctggattcgtcggacgagagcgattttgagatactcgaatcggatgactttaagtaaagattggatcaatcggcgatcggaccgatttgtcgtattataaagctattgtcttaacatacatatgcatacacaaatagaactcaaaaaatcgacagacaaacagacggcgccaacgattggagtggttccaatttccctggtggagatcagttatatattttgctacacactagtgctatgtatacttatatactaaactaatcatcctacagttaagccaaaagttttccccagttttgtttttcttcctcttgctttgtacattttgttttttttttccccatttaaccctatggttatgactattttactttatgactttagtttgtatttgtcctgtgtgtttatctactgaccgcaaacaaaagaaacaacgagcgacggcacgcaacttgtacatataccacagatacacttacacttacgtatatgtatggtttattttgatgtcgctgtgagtgagggcgttagctacttaatctgaatccaaatcaaaatattgatgcagcaattaaaaaaccaaaaaaagtggcaaataagaaacgcagaaaaaaccatgaagagatttggttcggtgctgtctgaaaacgtattagccatataaagtgcacaaatcatttcagcgttatataaaattagaagacgctattatttttctgccgactttgcgctggccatcatcgtgcgttgtataacataaatttcacgttaaatgcagtaacacactttctttgtattcttattattatttgcgcttaaaatacataagttatcatttaaattgcgaaacaaaacgaaatgtgattttgtaaaaacaaaaactgaaataaaaatcaaaaagacctcgagatccgatgtcgactgccgtcaactgtctaaagaatgggattcgatttcagactcgacggcggttaaggtgggcttatctgactcagcttcctgtttctgtttttcatcctgctgctccaagcaatgattcggctcctttttgtctgtg

SEQ ID NO: 35579 - DNA, 1492 bp, DROSOPHILA
ttgctctggcgcgatcgaatttgcctggaattcgggagtcaacataatattttcgaaagtcaccagctatagcgaaaatagtcgcggattttcaacaaagagcaatcatagtgatggtataaaagaggggaaggacgaaagcaaagagagcaaaccgaaaacagttactctgcccatgcgcacagctgacccagaacctggcataacggtaaagtaattgtgtcgtacaacaagcgaaacttgacagcgaaagggaaccggaagtcgcctaaaatcgcggagcggaaaggaaatcagtccgccaaccgcgggagctgaaaatcgaaatcacaacccacaaaagcgattccaaagtgctatcttggtgctactcccatacaaaatgttccaagtcctgccccgtccgtcaagatccacgttccactgcatagcggcagccgttgtcacagtcgtcctaatgtcatgggcccgaccgctgggcgtgctattcctgggactacttggctactggatctactggacgcgctgcagcttccgcgttgtgcctacggacgagctgcgcggcaagatcaacacctggctgcagaggatcgacgactggcgccaccgcagtcccagcatgttctgcttggccagcagcggttgcttgggcaccctcgcagtgctcggtcaccttatatccggatcaacgctggtactgaccatcctggtcgtctccgcactagtctccaccaagtacaccttcaagctgctgaagatcgagcacagggactttcagtggtcggagaagctgaactacaacaacttggaagccgaggcagaggatgagttcctgccggacgtgaacgagtcgaatctgtttgtgttggagcgggccagcgatgtggccaccataagttcgcccaccgatgcgaatgatgaggacgatgacgatcgcagcgacgacgtaccgtcggagctcctcattccggatgcgatacccgagattgacgagcaatccaccgacgaggacgatgaactagccccgctggcgcccaagaggcaggagaagctgcagccacaggagcagccggccaaggagagcgaggatatgaacttccgaaagagtcacttcaagcgtgactcgtcgctgtccacatcctcctcgtcggaggaaagcctgtcaaaggggctgcagttccccgatcacaccaccgtagatgccactggcaaccctcagttgcgtcagataaccgctggcccggatcccgccggcgagcttgtagccctggccgtgaaaacgcaggctcaggcgctcctggcaaacagcgggaagctcctgcccagccttgttaccggcctggtgcaatggggagcaggtggtgctgctgcagccggtgccagcgattgcacggattcaaatcgagatcgtgaccagcagcgcattgtcaccgccctggattcgtcggacgagagcgattttgagatactcgaatcggatgactttaagtaa

SEQ ID NO: 35580 - protein, 369 aa, DROSOPHILA
MFQVLPRPSRSTFHCIAAAVVTVVLMSWARPLGVLFLGLLGYWIYWTRCSFRVVPTDELRGKINTWLQRIDDWRHRSPSMFCLASSGCLGTLAVLGHLISGSTLVLTILVVSALVSTKYTFKLLKIEHRDFQWSEKLNYNNLEAEAEDEFLPDVNESNLFVLERASDVATISSPTDANDEDDDDRSDDVPSELLIPDAIPEIDEQSTDEDDELAPLAPKRQEKLQPQEQPAKESEDMNFRKSHFKRDSSLSTSSSSEESLSKGLQFPDHTTVDATGNPQLRQITAGPDPAGELVALAVKTQAQALLANSGKLLPSLVTGLVQWGAGGAAAAGASDCTDSNRDRDQQRIVTALDSSDESDFEILESDDFK

SEQ ID NO: 35581 - DNA, 3210 bp, DROSOPHILA
tttagttgtttttctcgttcattgttaatagttttgttattattttttacatattgataaaaaacatataaaaaaataaatggaaataaaaaaaatccataaaggtaaacaaaaagcccttaatattgcattgaaaggcagaaaatacaatttattttcattgtgcaaacaatttcttgactatctgtatgtagtgtgcaattcataatgcgctcacgaaaaatatgcatagagtggatgggcgattagatcccgttactttcggtagaagacattcgcattgtacaggaacaattttttttcaacagtgtagaattgtatctatgtatttgttgaattgtacaatagttttttgtgtacctatacatgtacttatttgttatttgcattggcttatccgttaaattggccactaaaattatgtactgaaattatatccaaaagaaatccaaatgtttttttaaaacgtggtcgtggcgattttccggcttttatattcgaagcaaacaacatatgtacatatcttaatgttgagatcgcttagtaaggatttttatttttcaacaaattaggtttacccttcttatcaatgggtataaatacatacatatgtcgcagatcatttaaatataacgacatttctagtaattgcgcgtttctgcttggcacgcgccttttctattcttttgatgcgcggcagagactcttcgacaaatatgtacatatctcacgcatcctaagccctttggttaatgcaattaaatatcaagggcgtaaaagtttaagaagattcatttctccttataagatctaaatcgttgaggcccagatatgtaatcttggttaagactggtgctatctttaaacaatagctatttgagagaccttaaggataattcgattttaaactactcagcaatttgttagttgagaaatacaaatgcgtagaattgaaaatagaaaagctttttatgcctactatcgccagccctgttacttaacatctagtgctttttctcagttatcgaaaaccgatagcccgatgactgcagcaggccaggtgaaatcagaagatatttaataaactgaattgagccggctctgcgtgggaacgtgcgtgtggaatagtccccaggagaatcgggaagtggtaaatcttgagccgctgctgccaatagaagagcaccctctgcgaggaccagcccggcacgttgcatattggttaattcctgtagagtattggccaatacaggttcaattatggcaacagtggtctttctgtcgcgccagcgattgcttgcctgctccttgcggctgttcggtggcgcccactcaaggtgcctgtcgacgatgtccgagactagtccaacaagtctggctagtgattcctggcctctcgcgaatcgccgtaacctgctcctgcccaccgtcaacatccgcttcaaccacaagtcggcgaacccggcggcggctgcaccagcgcccgccattaacaactcgtcagccggcggcaaggatttgaaggccaccaacagcaccacctccagcgaactctttggcgaggcggcaaacatgggtttgttcgccaagttcaagcacatgtacaaacagtactggtacgtgctcatcccggtgcacgtgctcacgtcagtgggctggtttggaggcttctactacctgtcaaagaggtgcgtaccataccccagaaaccgttccgttcaaaccctatatgaatccctcccattgcagtggcgtcgatgtgcccgctttgctgcagtacatccacttgagcgagaacatcattgagaaggtgcagggctcggatatggggcactacgccatcgcctatctgtgctataaagtggccacgcccctgcgctacgcccttactttgggtaagcttcagctttgactaacatcagatgccttttttcaaaaaactttattgtggccttttgatgcgaacttctttggaacagattatgctaaaatttcacgcataacttaaatttttgtaataagaatcatttaagcttatccgctttaaccgttttgcagggtgtacaaccgtatccattaagtacctggtgcaacacggctacattaagcccatgcccacaaaaagcgagctaataaagatgtacgaggacaagaaggccacccgggcaagcgctaaggcggacaaggcagagaaggacgagagagaatgatccacggccacgggcaaacacattccgacttcagtggtgtcgttgcctttgccacagtcactagatcctaaaccgccgccgccgctgctgccactgtcaatgccccaagggatcggcgaccagcagcgaccggacgccggcgagcggcgagcagttgacctgttgtcttttttgttaaactgccgccgttcttgctggcactggtgctcaaacgaacataactcttgtccggaatcacagtcgatcgcagaagccgcagccaccgcactgagttgccgatgcacacacgcccactaaccacagttaaatagccgtaatcccttcaatcccatcccatatattcagatacacactcaatatgtactttgcctatagtttctgctgcagttacgaaacggcgggacgtccccaatgggaaaccaaatcttatttcacaaagaaacccaaaacagagccgctgaacgtggagttcagtagtcgttatttatagatatattttgtaaatgtgagaatgttgtcgcaaacaaaaacctaacttttaaattaaagtataaataaaaagaagcagagcctctagttctgggtgtgaccctaatcgcacgaaatgaagtttaaattgttgacatatactctgtataatgaaatgttagttttattaatttagttttgttaggatgcccaattctatttccgaaggatggaatcatatgaatgatgttactacgacacacaatatatgcctgataagtaaaatcatttaaaaaaatatttggaaatgtacaaaaacagaaatattaaaatactttagttgttattaagttgtgttattgcacttgactgcagccctggtcgataatgaaatcgatgagatgaataaaacagatttcaaaatgtttatttttaaattttgcttttgcgtttatttttccgtcttctcttagtgttttaatgattttttgctttcctttttagtttttctgtaacgttagtaaaatatcca

SEQ ID NO: 35582 - DNA, 986 bp, DROSOPHILA
acatctagtgctttttctcagttatcgaaaaccgatagcccgatgactgcagcaggccaggtgaaatcagaagatatttaataaactgaattgagccggctctgcgtgggaacgtgcgtgtggaatagtccccaggagaatcgggaagtggtaaatcttgagccgctgctgccaatagaagagcaccctctgcgaggaccagcccggcacgttgcatattggttaattcctgtagagtattggccaatacaggttcaattatggcaacagtggtctttctgtcgcgccagcgattgcttgcctgctccttgcggctgttcggtggcgcccactcaaggtgcctgtcgacgatgtccgagactagtccaacaagtctggctagtgattcctggcctctcgcgaatcgccgtaacctgctcctgcccaccgtcaacatccgcttcaaccacaagtcggcgaacccggcggcggctgcaccagcgcccgccattaacaactcgtcagccggcggcaaggatttgaaggccaccaacagcaccacctccagcgaactctttggcgaggcggcaaacatgggtttgttcgccaagttcaagcacatgtacaaacagtactggtacgtgctcatcccggtgcacgtgctcacgtcagtgggctggtttggaggcttctactacctgtcaaagagtggcgtcgatgtgcccgctttgctgcagtacatccacttgagcgagaacatcattgagaaggtgcagggctcggatatggggcactacgccatcgcctatctgtgctataaagtggccacgcccctgcgctacgcccttactttggggtgtacaaccgtatccattaagtacctggtgcaacacggctacattaagcccatgcccacaaaaagcgagctaataaagatgtacgaggacaagaaggccacccgggcaagcgctaaggcggacaaggcagagaaggacgagagagaatga

SEQ ID NO: 35583 - protein, 241 aa, DROSOPHILA
MATVVFLSRQRLLACSLRLFGGAHSRCLSTMSETSPTSLASDSWPLANRRNLLLPTVNIRFNHKSANPAAAAPAPAINNSSAGGKDLKATNSTTSSELFGEAANMGLFAKFKHMYKQYWYVLIPVHVLTSVGWFGGFYYLSKSGVDVPALLQYIHLSENIIEKVQGSDMGHYAIAYLCYKVATPLRYALTLGCTTVSIKYLVQHGYIKPMPTKSELIKMYEDKKATRASAKADKAEKDERE

SEQ ID NO: 35584 - DNA, 4179 bp, DROSOPHILA
gaaatgagattctatttttaaaaggtgcactcacacacgcgcgtacgtttggcagtgaaatgtgtgagggagagggggcgagccagggtagtagtaaaacagtgccgagattgtgcgcgcgagcgatgtagcactattggctacacggtcacacacacacacacaggcgccaggcagcgtacgaattacgcaaagtgaaatatctttctcaaaatggaaagtggaaaagtgacgacgacggctattaggaatttttcatacatccacggaacacaaaaaatgtacaaaggcaaatgcgtatataaagtgtataaattcatactaagatagaaaacaaatgggcgaggggatgggtggcgaaggtgaaaatttgaccgcaaaacgaacatcacgaggcgaacgaggtcgcgctgccgaaagtcccgtctcttaatgatatcccacaaattttaacgccagccaagcgacatcatcgttttgcaccgcaaaagggcctttttccggtcgaattaaagcaatttttttttgcacaacacagaactcactttttaatcctattttttttgctagtgtggccgcacgccgaaacgaagtcaccgtcactagattttgaagataggttaactgttcttcgataactatcgaagaactatgcctgatgcatgtatggttggtgtacttgctaacagatgagcagaggccttcttaatgttccatttacacagaattccatcatatgggatttgaaaaatatgcttcaaacttaatagtttttgcacaaaacgccaatcgaattatatttccagttccagggaaaagatttctgggtggaaataaacacacaactttcaattcttaattagactaaagtcaagcctagaatattatatattacagttcaatataatttaatacagaattttgttttaaataaatagtattttgtttatctggtatataacaatgattttgcacaaggtatttcttatagctatctgcgcggtcacactgtttttgtgtgaaaattctgtcgaaaagaatgtattaaaagttctttgaatactaattccgtgtaattccgaccgtgctgtttcagaaaactgtggttggattggaaacttaaccaaattataaggtaaaaccggggcagcttgcccatcgaaggaccgccacaaacgaattttcgcgtcgcattacgttttagtgttgccaccttatacggagtgccgggcacaattccacttgctggccaaacggatgcgttgcggtcgcgatgtgcacgccgttgaattaattccttcgccctgttgattgagtacagttcgacttctccgatcggtgtcctccagacctaaatttcgccggaataacgacggcaaacggacggacggactctagtcggaaaacgggcgagctggcaatactgccagtgcacaaaatgatgtgaatctcggaaaagaggaaagctacaggaaaagccaaggaaaagcaagccggtaaagtgtgcaaatgcgagtggcaagcaaagacctttgtttcccattccatgaagttttcttgagttgtccgctgctgtgagtggtcattatcagccatcatcatcattgtcgtcatcatcaccaaaggagctcgtcgtcattaggccggccaccagctaaacggcattgagaaaactcagcagcaccttgtcatccaagtcttgatcttcgtcttggtctggatatccgtatccaatcacacagttcaggtgggttcttgatccagactccgaattcgaatacgagtcctagattctcatgctgatccttttccatatctacagttatgtcctcgaccgccggaaagcgcaaggagatctacaaatatctcgcgccatggccactgtactccatgaactggagtgtaaggccggacaagcgattccggctcgcactgggcagcttcatcgaggagtacaacaacaaggtacagatcatcagcctggacgaggacaccagcgaatttagtgctaagaggtataccgaatatttgtttagctgatcccttctactttctgttttcattttatatttcgtatattatctttaaaaaataatataaaatgataagcagttttgatattattgtaatcattttaaatatgaatagttatttggttatacgaaccatttttccgaaatccccttcctcactgacagattatttcttcttcaaatagcacctttgatcatccatatccgacaaccaagatcatgtggatcccggactccaagggtgtctatccggatctgttggccaccagtggcgactacttgcgggtgtggcgtgccggggaaccggacacgcggctcgagtgcgtactgaataacaacaagaacagcgacttttgcgctcccctcacttcgtttgattggaacgaggtggatcccaatctggtgggaacctcatcgatagacacaacctgcactatctggggactggagaccggacagccgcacgctcgcgtctatgtggcaggacacgtgaagacgcaattgattgcccatgacaaggaagtatacgacattgctttttcgcgggccggcggcggtcgggacatgtttgcctcggtgggagcggacgggtcggtgcgcatgtttgatctgcggcacttggagcactcgaccattatatatgaggtaagtagaacgcgcgaaaacacaaaaacggatgactacataacgataaatccaataggatcctgctcatacggcgctgctgcgcttggcctggaacaaacaggacccgaactacttagccaccgttgccatggactcgtgcgaagtaataattttagatgttcgtgttccttgtacacccgttgcaagactgagcaatcacagagcgtgcgtcaacggtattgcgtgggcgccgcataggtgagactataagattccttaaacctaaaatgtgcctaaacaatttgtattttggtttgcagttcctgtcacatctgcactgccggtgatgatcaccaagcactgatctgggatatacaacaaatgccacgtgcaatcgaggatccaattttagcctatacagctgccgagggcgaagtcaatcagattcagtggggtgccacacagcccgactggatagccatttgctataacaaagcgtgcgagatcctgcgggtctaagtaattttttttggtctggtccttgctgaagcacctgactgcaattgctgaacaacgcacagtcaacaaagaagcaagtcagaaaaacacacaacacccacaaataaacatacatttgctgttggtaacttggaagcggaaagcagtgagcttaagttggattagttctgtcaacacgcgtccgcagtttgtttaattttactgtctgtcgagagagagaaaatgtgaaagtgacggatatagaggcagagaaatggaaagagaaagggcttaaaagaaagatatgagtttgagggaaagagaagaggacgaagcacttattctagaattcttagctgagttgatctaacaagtatgtaattatataaggtataaccaaaatatgttttataattgtagtttatttcacacttgacaaatcccgacactcacacccccgaaaactccaatcaattagagccgcttaatcttttttatttcgtttttatacgaacccaaatggaatgcagaagaaaaagaaatcatatttattataacacaatgtcctacctcgttttttcaaacatgaatgctgttaatcgagttttcgagtctggtcaaaacagcaacaaccacaaaaatacacagagaacaaaaaatgagaggtaaaaaagtagccggcaacaacgctttttcgaaatatttttactttgttcgatttttgtaacagatccaaaaaacggaaaaacgacaaaaacaagagataaagaaaaacaaaagcaaaaccatggacttaagcaattgcaaaacaaacataatatgaaatgaattaaagaaataagcgaaatacttacatagattaaagattaaaaaccaaaccaggaaactgatgacgaactgcacacaacacagctagaatacaatactatttaaagatacaaactaaaagataaaacaaataccgaaatatatgagcgagagagaatacaagattgttgctatatccatttaacaaacgagc

SEQ ID NO: 35585 - DNA, 1781 bp, DROSOPHILA
cggtcacactgtttttgtgtgaaaattctgtcgaaaagaatgtattaaaagttctttgaatactaattccgtgtaattccgaccgtgctgtttcagaaaactgtggttggattggaaacttaaccaaattataaggtaaaaccggggcagcttgcccatcgaaggaccgccacaaacgaattttcgcgtcgcattacgttttagtgttgccaccttatacggagtgccgggcacaattccacttgctggccaaacggatgcgttgcggtcgcgatgtgcacgccgttgaattaattccttcgccctgttgattgagtacagttcgacttctccgatcggtgtcctccagacctaaatttcgccggaataacgacggcaaacggacggacggactctagtcggaaaacgggcgagctggcaatactgccagtgcacaaaatgatgtgaatctcggaaaagaggaaagctacaggaaaagccaaggaaaagcaagccggtaaagtgtgcaaatgcgagtggcaagcaaagacctttgtttcccattccatgaagttttcttgagttgtccgctgctgtgagtggtcattatcagccatcatcatcattgtcgtcatcatcaccaaaggagctcgtcgtcattaggccggccaccagctaaacggcattgagaaaactcagcagcaccttgtcatccaagtcttgatcttcgtcttggtctggatatccgtatccaatcacacagttcagttatgtcctcgaccgccggaaagcgcaaggagatctacaaatatctcgcgccatggccactgtactccatgaactggagtgtaaggccggacaagcgattccggctcgcactgggcagcttcatcgaggagtacaacaacaaggtacagatcatcagcctggacgaggacaccagcgaatttagtgctaagagcacctttgatcatccatatccgacaaccaagatcatgtggatcccggactccaagggtgtctatccggatctgttggccaccagtggcgactacttgcgggtgtggcgtgccggggaaccggacacgcggctcgagtgcgtactgaataacaacaagaacagcgacttttgcgctcccctcacttcgtttgattggaacgaggtggatcccaatctggtgggaacctcatcgatagacacaacctgcactatctggggactggagaccggacagccgcacgctcgcgtctatgtggcaggacacgtgaagacgcaattgattgcccatgacaaggaagtatacgacattgctttttcgcgggccggcggcggtcgggacatgtttgcctcggtgggagcggacgggtcggtgcgcatgtttgatctgcggcacttggagcactcgaccattatatatgaggatcctgctcatacggcgctgctgcgcttggcctggaacaaacaggacccgaactacttagccaccgttgccatggactcgtgcgaagtaataattttagatgttcgtgttccttgtacacccgttgcaagactgagcaatcacagagcgtgcgtcaacggtattgcgtgggcgccgcatagttcctgtcacatctgcactgccggtgatgatcaccaagcactgatctgggatatacaacaaatgccacgtgcaatcgaggatccaattttagcctatacagctgccgagggcgaagtcaatcagattcagtggggtgccacacagcccgactggatagccatttgctataacaaagcgtgcgagatcctgcgggtctaa

SEQ ID NO: 35586 - protein, 343 aa, DROSOPHILA
MSSTAGKRKEIYKYLAPWPLYSMNWSVRPDKRFRLALGSFIEEYNNKVQIISLDEDTSEFSAKSTFDHPYPTTKIMWIPDSKGVYPDLLATSGDYLRVWRAGEPDTRLECVLNNNKNSDFCAPLTSFDWNEVDPNLVGTSSIDTTCTIWGLETGQPHARVYVAGHVKTQLIAHDKEVYDIAFSRAGGGRDMFASVGADGSVRMFDLRHLEHSTIIYEDPAHTALLRLAWNKQDPNYLATVAMDSCEVIILDVRVPCTPVARLSNHRACVNGIAWAPHSSCHICTAGDDHQALIWDIQQMPRAIEDPILAYTAAEGEVNQIQWGATQPDWIAICYNKACEILRV

SEQ ID NO: 35587 - DNA, 3534 bp, DROSOPHILA
agtgatctccacgcaatccaaactgttcagctgtggcaaggtggccaccacgtagtccctgtagtgcggataatccacgcaaggattaccaatgagtaccaactcgcggagattgtaattgccacatagcgactcaacactggttagctctcttataaagtttaaagtaagatccagtttactaagcgactcacagccctccagattctccactcgttctatgttgttgatggccacattgaggtactccaggcgcttcagcttgtgcaagttctccaggcgcgcaatcaggttggattggaggagtaggatcttgaggtcgcgacaccagttctggatgtgttcaattacctcgatgtcctcctggtgcaaggagatctcttccagcgtgctgattagacgttcattgtgctctgatttcttgcggaccagctcttcggtgactgcggattagtcagtttaattggtacgttaacattactattctacaatttcaattactcactaagcaccatactgccgaatgtgtgctgtaatgaaagttaataaacttccacaagccgaaaagggccaggccaactccgttgctaggcaattttatattccacattcctcgttattattattggagaataaaataataaatactatactattcaaaactcgttactcagcaatgtacatacttcaaaagcgggcgagaaattttgaaattttgacatttttctcgatatcgatatcgaaaacaaataaaaatgatttttcactagcgggcgtgacagtttggattggtttgtggacgttggagaggtgtggccaaaatgtgtttcgtataccgatagaaattcgccagataataaaaaataaaaataaaaacgaaaaaatataacaaaattctacattttacatattttttatacgagccttgcaatgggcatagttaaccaatcccagataatatgtaattagtttctaatcccagataataattacatatatttcatagcgcccccactatgctgcccgctctgaatgaatttcgcccctggacaaacgagagaaatctaatcagctgaattacaattaagtagtttaactagcgaattaacagcgacgcatttactgcggccagctctctagtcttttagcagcgggcaggcggaaggttcacaaaaactaaattcaaatcgaatcggctgacagacagatacatatagaccggcaatgagttcagataagaacggtgatatcttgcggccacttagcgatagcgaagtggacgaactgcttgatctatacaaagttaaattcggtataaggaacttccactacctattactgtacaaccagcgaaaatgggaccgccagctgagcgaggctcaaataccgcgcaatgatctgaaccacatttctctgagaaagcagttctacacccatcgaaggggaaacttccggacgtggggcacctatgtgagccttcatcgggacatcgtgcagagcgtctccttcttcagctggcagccagatggagccgcggagctgtgggaatgcctggagcaaacgcagctcatcgagtggacacagggagccctgctgaccaacgttgatctgggattttgtaatcgagtcaaagagttggccgtcagccgcggggtcaccgccattcaaccacgccagtgtttcgggatggttttgtcgcacgaggatgccttttgtgcaaaagttccagatctgccctctgagttcgagattcggcgattgagggctgaggatgcagccatggtgcacgattcctggcctaacaagggtgaaggctcactcacttatctccaggcgctcgtccgtttcaacaaatccttgggcatctgccgaagcgacactggggaactgattgcctggatctttcagaacgacttttccggactggggtgcgtatatctgaaatatatcatgcacgcgataacagcaatgcatttcaacttaagtatggtgcttttgttcacaaaagggatgtagtttagcaacagttaagaaaccaaaaggtcaaataaaaatgctgaaacaatgtgatctggcttttccaaacatatatgatctcactaataatgttcttcttttatattcatgccgatgcgattgctagcacatatgtatgtaacttaattaacaaagtaactcttatggtttttaagaactcaattcataatccctgtgaacagcatcactgtcggcatagtaacgatgataatatatgtattccaaatgataagcatctctgtacagagctagtccacgataaacttttctctttatttctctttagcatgctgcaagtgctgcccaaggcggagcgtagaggactaggtggcctcctagccgctgcgatgagccgagaaattgctcggggcgaggagatcaccctaacggcctggattgtcgctactaactggcggtcggaggcgctgctcaagcggatcgggtaccagaaagatctggtcaatgagtggattaagctggtaccgaattcttcatagacgctccggtcgccaaagaactggcgacggtgctggatagttagacaactggtaaataggtgaggtcaagaagaagacgaggcgatttgcatttgctttgcctatgtacatgtacatacatcaacaattttattttggcatttaacatgcgtacacgctttctgaatacactttacggcttaatgaaattcgaaaacaaattcgaaactagcgggcgggaggggatatggaaatcggggactcgaactacttatttacacatacggctcgcctccaaaacaatatcaaaaatacattttatttacagcattgcattgcattctaggtatatatacatatattacgcacttttgactgaatcaaatttgacattttcgagttaattagctaaagtatgtcatagggttacgcattttatacaccttgcgtaagagtgtgtcgttttctctcaacgggatttaaattgaaaattttgcgaaacattaagagcgataatatcttagaattaagacactccttcagtccctttactttaactactattcattagccgtattgattacgcaccttttacgtcttattttcatgttttaattcaatcatattaaagaagcaaacttaaatgtttcaaaagtcggttgtgacattgttttgtggggttgaagccacttcctttaaattcgattgaaaataaaaatgttgcttcttcaattaaattattaattttagagttgcgcctctttagtcaaacatatttaatatatacactatatatatatatatataaatatataaatataaatataatataataatataaatacatatatatatttatatatataaaagaggggagagtcggaatttggatggtggtcgtcacaggttaatactatttagctaacccgcttattggatacattcactaactacacactaaacaaatagtagccgcgttgccgtcccgctcggcattccgctgccattcgccagcagactg

SEQ ID NO: 35588 - DNA, 1139 bp, DROSOPHILA
tcatagcgcccccactatgctgcccgctctgaatgaatttcgcccctggacaaacgagagaaatctaatcagctgaattacaattaagtagtttaactagcgaattaacagcgacgcatttactgcggccagctctctagtcttttagcagcgggcaggcggaaggttcacaaaaactaaattcaaatcgaatcggctgacagacagatacatatagaccggcaatgagttcagataagaacggtgatatcttgcggccacttagcgatagcgaagtggacgaactgcttgatctatacaaagttaaattcggtataaggaacttccactacctattactgtacaaccagcgaaaatgggaccgccagctgagcgaggctcaaataccgcgcaatgatctgaaccacatttctctgagaaagcagttctacacccatcgaaggggaaacttccggacgtggggcacctatgtgagccttcatcgggacatcgtgcagagcgtctccttcttcagctggcagccagatggagccgcggagctgtgggaatgcctggagcaaacgcagctcatcgagtggacacagggagccctgctgaccaacgttgatctgggattttgtaatcgagtcaaagagttggccgtcagccgcggggtcaccgccattcaaccacgccagtgtttcgggatggttttgtcgcacgaggatgccttttgtgcaaaagttccagatctgccctctgagttcgagattcggcgattgagggctgaggatgcagccatggtgcacgattcctggcctaacaagggtgaaggctcactcacttatctccaggcgctcgtccgtttcaacaaatccttgggcatctgccgaagcgacactggggaactgattgcctggatctttcagaacgacttttccggactgggcatgctgcaagtgctgcccaaggcggagcgtagaggactaggtggcctcctagccgctgcgatgagccgagaaattgctcggggcgaggagatcaccctaacggcctggattgtcgctactaactggcggtcggaggcgctgctcaagcggatcgggtaccagaaagatctggtcaatgagtggattaagctggtaccgaattcttcatag

SEQ ID NO: 35589 - protein, 304 aa, DROSOPHILA
MSSDKNGDILRPLSDSEVDELLDLYKVKFGIRNFHYLLLYNQRKWDRQLSEAQIPRNDLNHISLRKQFYTHRRGNFRTWGTYVSLHRDIVQSVSFFSWQPDGAAELWECLEQTQLIEWTQGALLTNVDLGFCNRVKELAVSRGVTAIQPRQCFGMVLSHEDAFCAKVPDLPSEFEIRRLRAEDAAMVHDSWPNKGEGSLTYLQALVRFNKSLGICRSDTGELIAWIFQNDFSGLGMLQVLPKAERRGLGGLLAAAMSREIARGEEITLTAWIVATNWRSEALLKRIGYQKDLVNEWIKLVPNSS

SEQ ID NO: 35590 - DNA, 22275 bp, DROSOPHILA
cagaccgcccaaaactggcccacacttttgaaaaatgttttgtttattttttttattagtcttgcaaatttctatagatttctgaatgtttccaaaagactccctaaaaccgacacgcccacactaatgaacaatgctttgatatattttaattttttgtattagttttgtacatttttatcgatttgcaaaaaaaaaaatattacaacttctcgttcacacatacaaatcctccaccctacttatttattttattttttttttttttggctattatataagctcctaagaatccagcgctgactatccgatgaagatgcgaattactcaacgagcggcaacagtcgcccgcctgcgggacggtaacaatgatcatggtaatgaagtcgatgaagccgggtgatggagatggcctgcagcgatgatgccatgctaatgctcggaccagccaagtgaaagtacgattggcggctgtcaacgacctacctgttctacggatatggcgacgcggtttcacttgtcaacctcgatccacattcggtgtgtcattgcgaattctaaattgcgtatggcaagcacgtttgcataagatatgcatttggcttttatgtggcacccactgatagttttgggcctttggatgagggcgttttcggggcatgcgtctgagttatggtccgcatcgcttcgcatgcctgatgttgcagggagtgaaaaataataactggaaaacttcaacagacttcaacttttggagtgacagcatttggcaaaacaatcttattatggacaaaaatagagataagccttttatttgtattttcttggcccaacaacaacaacaaacagtttgattaattaattaaaaagtgcgtaagcgagtgaatctatgcgataactcgaatttccaatggcaaccgctgtggcgatagcttgtgttagttacattggcgcggcttagggatgcgagtgctttaaggatctggagttcgattgatatttaagcgtgcctttgtttcgagctgctcggggagtcgtcatcgctggcctggtctatatcggaactatcaaaggatatcttggcgggcgccatggccggcagcagtagaaactcgttgaacaggaagtcggcgtccatggactgcgttttgccatggtatccgcgcacgacaccgcgcttgggcggttcgatgaaccgctccttgacaatcagcgcccccggggagggggacggcgatgccgaggcagagcagcatgtactgttcatccgtccataatgcacccgcgtcggctcccggctctctgccgggactccacttgcacctacgcctcctccatcggatcctacagagaaggaagtcaagttgaacaaactttaacgttttggcaaaatacatgcatatcctagttcctaattgtcttatagtaatcaaatgattcccgattcgtatcttcttaagagacgggtctggcgtgttggggcattaaagtaaacaagagagatcgctatagtcgagttcatcgactattaaataccttttactcagctagtccaagtggggccgaaaatatcaggaaaatcggtagaaattgggaaagaagaaattaattttaatgttctcaggtgtgggcgggatagatttgggcggtttttaagggtctgagtgagcggggacaaatcgttttcgacatatcgatagaaattggcaaaacaattgatttaatccaaaagaaaacagtcttgggcggtttgtaggctgtaagagtgggtgtggctacatgtcaaaaaacttctgcggcgtctatgtctccagaatctgtattctgaatctcaaccttctagcttttatagttcctgagatctcgacgtttatacggacagacggacatgaccagttggactcgcgctttatcctgatcaataatatatatactttttatggtactttttacgcttccttctgccagttaaatacttttcaacgaatctagaatacccttttactctacgagcaacggatataaaaatttatgtaacgtatgacgacttgcaaaatcactatgtatttgacaagattcattattctgtctcgtttatacactcagagaaaaacttgttctcagcgatctcgtttgaagaatttcgatcataaaatctagccaagatcaaattatgttcaacatactaagatcgagatctaatcattcttaaattgcaaatgactttgctgtcgtttgcctctctcaaaagtttatttttattggcccaacctctctgacgctgcggcgatcccccgaggactccactgctgccacttttgagatttatgcagctctgtgtgtggctcacgttgtcgtagtctttggtggtctgcatgggcacccgcttcagcgtgttgctttcgaagggaaagttcgagtttgatgtggactgcgtgaggttctcaaacttgcgcaggcgagcatcttggcgcaaatgatgcggtcccgccgccggcaggttaatggaggcgtgcagaattgcaccgcccccaaccgacccgctggactcagtcttttcctgacccgttgccatagccgcgtttccctcgaacaagctgatctgtttctggatccttggcgagacgggatcatgagcacggcgcacaggtcgcgcatgctccggtgaagcttgtgtgactcgaacgggcagcgcaaagccaaaccgtggatcatcgctgggaacctcaggcggggcctctgcatggctggggcaacaatagcaactctccaggcgcggctcacagtccgccaaaagggaaggtgttgtggccgccgacaaagtggcatcttcatcatcatcgaaccccttggagaaaacacgagagcagagttttttttttttaaatatataataagcagaaattggatagtcacctcaccacaggcaacgtaatttaagagtacaaattttaactgataagaaatacgctagattttgcatgctttcaaattaaaaaatcaaaagcaataaattaaattataaattatagttgaaatatgtagctatgaaataatcggtaatatctccactcacttccattgacagcgtaatggagcccttgttagccaccatgctcaggtcgagatccatcccaaaactaactggtgtaaggcaggtgcttccgctgccctgttcctcacaaacactcagaaagactccaccgcccatcgtttcatcgctgtcccgattcattggctggatggaggcgatacccgcgaccccgcgctccataatctccatggtaaggtccaagctggtaaaatgtttaataaatacacacatatttaacaaattaattgtcaccttggttttgtttccaattctgacaggtttaattcctcatcctcggctgccttcacaatgtcctgtggccaaacttttggtttacgaatgtgtttgtgatcaaggggttgagatgttagttaaataattacatattaaaaggagtaaggggaaatagcgaacatataacacatcgttattgttcaatacatacaaaacatacttgaaaatcacaatatttaaaatcaatatagtaattagttgattgttatatgtacatttcttattggtattgactaatatttataaaatgttggacttttcgcaggattctgataaagtttaacattaacattaagaaatgaacattaacatttttgtagaatttcgggatatataaaatacattctaccggtggaagtggaggttgaggtttagaaacaacgaaacattataaaaaaaaacctacactattattttcccattaattgttcattccgaacacttttaaagcagtatgatacaaaacaagatccgatttgatctccatacaatatttacaaatcaatcagtaatatttgaaaaacagaaaaaaaagggcaaaataaatagatgtatgcataaagaaaacataccattaacgcgtaaaaagtaaaagtaagtctataaaagaaattgttaaagtatactcatgttggagtacttctagcaatatttattccaattctgaacgaaaggcttaaaaactagaggaatttaatacacaattttcattcatatccatacatacatacatatatatgcataaatatcaaattatattggttatatttatacagaaactggtaaaagaaagtgattgctgcatttgttttaaatgctgggctctgttggatattctgaaaaaacgaaaataaaaactaagtgaataatttgtaagtaaataaaagtaaataaatttcatttgattaattttcataactttgttttcaaacaacaacgtttttgttttgtggcttctgtaaaagtaaaaacaaattgatcacataataaataatgtcatttgtcattccttaaaaagtagattaacacatttgttcctaagccaaatacaataattaccataaaaaagtgcctaaaacggacattttattgacaacaattcagcggagagacagtgagcaagataattttgaatgttcataacaacagtgcaacaattttattttatacaaattgtaaactcttctaattttgaataaaaaacgaatcacacaatataaaatttcaaattttgagtgcttttgaagcgtataagaatgagaaaaacacagatctgagaccgttcagcactgccactcgaccactgacttttttcggcacttacgctccatttttccagccagcgattctcgcagctcggtgttgctatcgtccagattagggcactggctctccgaaagaagacgcagatgggcatccgctgtggatccggactcgctgccacgccggtcaaaggtgggcgttacggtcgttgatatcggctcatgttcgacaacctctgtctgatttgaggcggttagagtcatcgaggaaaccgctggcaaggtattcttagagaagccccgcggcggggaccctgtcggcgtcttaaagatctgcgccaggatcatgtcctgcaagaaactgtccagcttgcgcagcgaaagggcgttgtgcagtgtctccagcgggcggattggtggtacatcgccaaatcctgcagagaaaatagtgttataatcacccacaaaaagtaagacctttatatttaagcacacaatctatgttacaatctgtacacaatatttaattaaattaaattcaaattcgtttagtatatttccacttttcaagaagttctttgcttacaactaaagatctattttgaaactattttgaaatacaaaacatttttggctctcgtgtactcatttacaattacggttctccattaattttgacattttacggcgtcgatgtagctcatttgactgaattagtttttttttttaggggaaataattccttttagataatgttttttttaggaagtaataacatttaattttcgatgctcatctaaccagcgcattgtttcaaatcagtgcgaggctcagatcatattccttcacttattaaccgacaaatagtttatttgtatcgatatataagatatcatatatcttttcaaataaataataatagtgcgtactcaccggaagaggagaccgttatcatgtcgcgaagatttggagcggacgagctgccgctgatgacggcggtgctgaaaaggctatttgcgctggtggccatctttttgctaaaaccaccgaaacccaacattttcatataggacatctggccggcaatactgtgtctttggcgacgcgacgacgtggatgcgttggccgatgacaccgatgccgagaccgacaccgagacttggctatctgtggcgatggttttggtacaacaagacggggtcgtggtagtgttgtttgttattgtggcggtggtgtggttttcgttcagagtgttattgatgatggtcgttgttgtttttcggtgatgttggtattggtgttgatgtacatgatgttggtgtggtgcgtcgtttgaagtgggatcaatcgattggaattggttagtaaatggtcgattagaagacattgttgctgtattatcaaacaaagctgctgctgctccagttgtagtagtggttgatggtgtaaatgttggtggggatgtttgggtggctgtaggagcgatgtctcgtataccttttaaaatatcggtagtagtaactgttggtgtaagcagcccaggtgcacattttccaatacatatctttggctgtatatccattgatgtatcttctgctgtctctgttgctgtaaccgtttgtggatcagttgttatagctatttttgtatctggtcgagtaactgttgccttattgcagggtgtatgtgtgtttgtaattcttattgtccctattcctacttccttcgatatacctatttcgtcatttatttcggtatctattgcagaaaaagcgtttgtaacagtcggtagtatattgctatttagtttggtcgacaattctgagctacttgctgttcccgtaatgagcacagtgggcagattatatactacttgaggctctggctgcaggggctttgaatctacctccacaatggacgtgatctgctcttcaatgggctcgaagcttcctacaaaacaggcggtattggtagctgcagagcccaatgacgaaacggtgaatcgaaatgggttttctgtcaccacaggagcagaacctgccatggagagctgaccacaggagttactagtggctttgctgtgtgcagaggatgtgccagaagccagggccttgtccttgtcccgacagagctgtagagtagaggcagagggcgaggtagtgacatggaccattgacgatagagacgccaccacaggcctattgccgaagtgtgcgctcatcaggatggccggtgctgagctagacaactgaaagtcatcatcgaaactactaacactcacatcagccgccgttgttgggtcacaaccttgctccgaattcggtccagtttcttgcggtgaagtcataaccaccgcttgtgccaagtccatcagactttttgagtgcgaatgcgcttgggccgctgagctactgcaattgcaggaacttaagggtcgctcattggtggccatcggcgagatctgtggcaaatgacgaacctgttcgagttctgcaccatcgtcgcaactctccatccgccgcatagtcaagatgtggaagcgcttgtgcgacaagggaccgcattgcggagtgggtgggtgcagcgaaaaatcaatgtccgacaaaggcagctcgtttgtcgaagagtcaattttaaagaaggacaaactatttgtaacacgaatctgaaaggcagtgcgatgatccgctctcggatgagacccgcccccatctgagttactagcagtgcccactcgagcatgacaagtctccccgaattcagaagaacgagtccgagaattatccccgaaatcaggagaagaaactactaaatataaaagtaaaattcagtccgagagcaaaatcgatgaagggtaattagtttgacatgattatgggttcacgtttcaggtccaaagtcagccaagttttcagtgatatattcgagatttggagtgtcggtgcgttggtgtatgtaatgttgtgtacaaatagaaaactcattagccgagataatcaaaacgtcgaagatcgcgcacagttcgtacaaaaaaaaaaaggtttgtaaaaacacggggaaagaataaaccaaagaaaatcaatttttaaaccaaaaggaaaagaaatgaaaaggcaaacaaatcggcaagccgaatgggaaatactcttggaagaaccttaggatttaagaactggcaacttaaataaacaaaggtaatttaaaattatcaaaaaatgaaagtgtctaaaatcgtttcacataaaaaaagaccgaatctttcacttgtaatcttaattacatttatactttcctatcctagcaacacattttcctttactaaagttaaagttagctagttagttttagcctttgatatacattaaaacaacgataattcttcgaaccttgtgttctatattattttctaattattattatttcaaaatcttaaagaccccacaagagcatttaaagaatttggaagctggcaaacttggaagctgcagaggcctttagtaaaagctattagtagtgtatacaaatttaaaagcttcggaagagtaagtcccttttttgagttcggttaggtcctgttgcgaagtttgtggtgttttcatgtgtgcgtttccatgtggttgtgggagtggtcgtggatgggtgggaagggtctgggtctgcaaacaacgacaacgagcaacgtacagacacagacaagaaatctccgcaaaaccaagcacaattttttctgtattttttccgtatttttaacttcttgtttatcatgcacggagataaaaacaaaaaaagatagacaggacagatggaggcagacataacaggcagatatatagagaaactacggggagccaaaaatcaaataaagtattgtgtgaccgtcgtagggagttggacaccagcaaagatttgtaaaattctctcgaaaacttctttggaggcgtaaatctttacgggtgttcagctgcaccatgttaggggcgtggcaggtgtgcggcgcgtggctagagtggctgtgtgtgcgttttgttgtgactgagacagtgtgaccagcattgccaagtacacgggattccgcgaccagatgcttatagattttcattttttctacacatttccttgtttccttttttatttgaaaaatatatattgaaatatatatacgtataaaaaacgaaaaaaatgtgtgcttgatgtgtcctatgtgtgtgcgttatttcgattccaatacaaaagaaaaaatgaaaaccgaaaaatgttgggcacagctcaaaagaggtagaaatgaaaaaaattcgtttaaatttgttcttcactattgtgaatattatgtaaaattacaactgaatattattcgattaccattcgaaatagagacatctagctaaaggatatatttatatatatatatataaattaaaaagggatcaaaactcgtttaaatattgcggtggtgagatatgaaacaaaatataggcgatttcttgacatttgggagggcgggggtatttcctttcttcagtgttttcttggggatttcccagtggtgtttgctggctgtgcggacgggagacgtaaatacagaaaacaaaggaacggcatgcaaaaccccacaaaaaatatcttagaagccttagaaaagaggacacgaagctaagcacacattttacagaagaggtggtacttcgaaacagccaaaagctgaaaaatctgacaaacggattcgtctaatacttttaaagcttttactttcagtattcaacaacttgccttaactactaaagccagtcttttaaccacaatatagagagtatagtagtgtgcaaataagcacactttttactcagatttcttgcgtaactttagcagccttcttggcccttttagtggatagaatatccgattaatatccaatgtcattattacattgtcgaattgtgatagaaaacaaacaatgtttaattaggaaaaaccaaaccgaatcagagcggattagtctaaaactgggaatagccaatcgtgtggttgtgagatgtgtaagacaaaagaggaacgcgcaattattcaggaaagctggaataagatgggttgtgaatttcccaccctgaagtaaaggcggctgcgaaggcggcggcggcggcaagctttgctcgatcgaccgtcaggccctgcccaaacatacatacccggttctttggcacatacgccggacgttggacgctgctcaaaactccgggagcgtggttcgcagtcaggagttactgcccttatatccggactgatgggtcgaagctgctggttttgctgctgttggtgcgatgccagctcctcgtttagccgcttggctagatccattgcttcatggccactgaccgtgtgatgggctccgatggggataggtttcgatttgaactgcttggatctgagctctaatcgattgaatccgaaagcaggggagatgcgttccgcactgcgatccgtactcctttggcctgaggtctaatgaaaatggtatagaaacaaaggtttgaatacatggtacaaatgtataaactcacccctcgctttttgccctcccgttcttctcctgaattcgagtcattctcctcctcgattctggcaggatttgactcgtccgaggattgcaaacttacattgcaagcattatcgccgtgcgaatgcgggcgaaatcccggacctggtggtagattcttttgcacacagcaattaacacccggactaaagtgcagttcgacatggaagcgttcctcagaagttggatctttggtcggatcctcgtagagcatgataacgatctgggacatatagttgagctccgataccatcgaaatatagtccatagcccgacgccactgctcatctgtgaccacattgagcaatcctccataacgcaaaacggtgagcagcgagtgaacatgcgattcgctggtaaaatagagccttgtacgaacatgcctctgagggctagcaacaccatggctataatgtggattcaaacggttcataaactcgtcttccacttcgtcgatgtttcgctgcagatcgcccttgatctttctcagtaatggggagcagataccttgaccaattgccagtttctcctgtggcgtcagtccatactcctgtggtatgactatatcagccagattcttcgcatagatgtatagctcctccgcctgatcgtattgcaacgtgtgctgattatgttgcagatcgtatttgatgcaatcatatatatctggtatctttgagatgtcaaacagcttcgatttggtgctaaaatccttctcaattttttcccagcgacaacgcatcaggtcccacgtctcgccgtgatataagatggcgtccttggtctttggatcatcctttttgatgctgataatgtgaagaagctcgcgaataagcaggtgtacgtggtgacagcagtcaacaggattttttacaaaatccagagcctgggtaatcgatttgctattgcaaggattaatcagctcacgatcctccttagagaactctcgatcgttttgcataagctcgtgtaggcgacctttagccctattgagatgaaacatatatggcaaaataagtaaaagaaaacaagagagaatgctatagtcgagttccccgactatcatagacgggtaacgagtaacgggtataataacaacaaacaattgagaaattgtctcaaacatttcccattgcgatcactacgacaaaatcgagaaaatattattgttgagaaatcaataagcgattgcaaagcaattaaccttttagaaaagttaaacaattcaatataagaattctagatcacttaaatatgtcataatcgaacataatttgtttgataaaacaatgatttaaagatacctaacgataacccgtttaaatcggtttttttttttaaacaaacttacaagttttggtacttgctggagtcgcaatcattgtccagcagtccatttgtattggcactctttaccatctggaccaaaatgggagtaagttctccttccagggccagcaaaccctttgcaaaagcggcagccgtcatctggacacgaccctcatctgaggcgtagatcttcaagtcatgccggaacgtcgagtgcaatctgaaatgttttatgttcccaaatgttcaatttgctcaggttttattcatgttttaatgtcctttatccttatatggatagaataataatctttagaaactaaagatcgtctcaccttagcaaacctagtccttgggtgcccgagtaatccgatcttccttggccacctggatacatgcaccgaaatatgcgacccaactcctccgcctggatgcggcctgctggagtcagttcgccgccccacttgaggatgaggaccagggaaggttccactggttgatccgctgctagattggcttcactttggttaatcgaagcacttggattcggggaaattcgactggacttactatcatcggagctggagccacgtggacgtccctttggttggtatttcatttgaaccttccggtttatgcccgaaaagtgaccgtacatctccagaacgttcttaagctgctcaagcttgctttccttttcctcaatctcggcatgagctttggtgtggatctcgcttagcaggaagcgggcgatgtccaaaatctcttgaagctgtttgggtcgctttagcttaacgtggcccagcttgtagccgtcgtacttctcgaagatctcgaaaaatctggttaaaagagattcggtttcatttcggtttccttaagaacttaacaaaaaaaattactcacttgggatgccgcacctcaaccttcattttttgtttgggcgtgcgatcgccatgtctaattacggccaccacgcagcgcagctccatcattttgccgaaagtagtgggcacaatggggggatcgtctaattgaaagggcactgaccagggtatgtgcagggtaggtgttagctccctgagaatcatgttgcccagtattttggcacaatcatcatagtacttgttcgagttcttcacgaagctaaagccgttaacatcgcaaacatagctctttccgttggctcgcaacaaatcaaatccacagacggtttgcttaaaggccaggcacaccttccgtgagattagcttctcggaatgattgaggatcactggatagcgaatctcttttccttcgctgtcgcgctctactttgccatccaacgcgggacttttacgtgcttcggcatgggcgtagtctggtcccacggtgtacaccttgacatccgtgcctgaaaagtacactaagttgtaaaggtgatgctggattcagtgcgttcgactggcggccactggtgtgattcggtgttttttttttttttatttactagatttctgtgagtttggcgatgagccgcgcgtgcggggcaaaacacaggtcaaggcacaatgagcgatgcatcgttggaggattagattaagtgggtctacaagaatggagcagccaaagccataataagagcaaacagccaaagcgcaaagtgaattaggatagcgatgaaagaagtgcacacgtttgagaatatatttgttttttatttcaaattctggaaattgaatagaaacttagcaattatacatataaattaagaaatgattttaaattgagtactcaaggttaaaatttaaaatatagacgtacgcgaaaacaacagaaataaactatatgattttacgatgacaatttcaaaccatattctatgaaccaatgtataaaataaacaagacagaatgctataatcgagttccccgactatcagatacccgttactcagctaaattaattgtttaaaagtgtgggcgtgaaaaagtaattttgcaactcgatagaaatttacaaaactaataaaactatgaggaaatatatacaaaattttcaaaaatgtgggcgtggcagttttgggcggttttagggcgttagagttggcgtggcaaacaatttttttgcaaatcgacagaaatgtataagactaatataaacatgaataaatatcaacacatttttcaaaagtgtgggcgtggtaatttttgggcgttacagtgggcgtggaaacatgggccaacgaacttgcgctgcgtctttgtttctagaatctgtatgcaggatctcagccttttagcttttatagttcctgagatctcgaagttcatacggacagatggacagtcggacagacagacatggctagatcgattcggctattaatcctgatcaagaatataatatatactttatatagtcgaaaacgcttccttttgcgtgttacatacttttcaaagaatctagtatacccttttactctacgagtaacgggtataaaaattaatatttgtgtggcaatctagatagtatccatttcatgtgcaaaatgggcgggaaatggtggggttttaggaagtacctacagttgcatttaaaatgggagcaaagtgagcaaattgcataccatcggtgggcataaagtcctcgtagataaatgatcctgtctttcgcacccttgattccggagaatacacgctgctccggctgccgatctttcggaaaagtcgctgacttcctccccccgccgacgtcgggtaatatatgtatatgttgtggtcctccgccgacacaggcttctcaacaaacggcttgttaaaggtaataccattgacctccacatggtcctcggactcaataagctcatggtctgttggttagaagttaaagttaagccacaatcaattttgagtataccgggttactaactccaaagattggcgtattaccaaaaattaataacgatttgtataaatgtttagtactcacgtttagggtccggcgaatcacgatcgaggacggcatagcgcggaatctcaataccctccttctccagaatggcgtacactcttctcctgtcctgaatatcgtactgcatatgcagattattcagcacaaatggattcctaagctgggcatactcgatggctttctctaggggaaagcctttcgagtgaaacgataccaggcagtcgcaggtgggccaattttggaccggttctcgcaggataacgttctcctcgaacgtcaccagtttgatgaactcgaattctccaagacgtgtcaggatctccttcattggctttgactgtgtcttcttggccatcgcgcagatgccgacaaccacctgcttgctgttgctggaagaggtgctcgtgtcggagtccatcccgtcattgctgtctccgaagtccgtgtcgccctttgaaaacagaataatgcgggcattaatgaggttttctcaatgatttgtgtagacaggcagcaggcaacgggaatatcaggattctcgcttctcagatctattgggtattattttgtatacttattaacgtgtcacatttttccactcctactacaaagctatgagtaagttctttgaaaaggaaacccatatagagtcaaattatgttgtattcacggaaaaaccaagacacaaacaagtaaatcgtatgtaaatcatgagctatcattcaaatctttcagaaatgagttatggcacttattcaaccattttttcagttcattattataccttttattcgttactctactctacgaaagatttatagggtgtactatattggtactatattgttgaccccatgaagtagatttattctagaattacttttcaaaaactaccacatttggaattttttttttaatttttttcccgttacttgtagattcgttgaaaagtatctaacagatagaaggaagcgtttccgaccatataatgtatattattgaagaggaacaattgtcgagtcggtctggacctgtctgtctgtttgtccgtccgtatgaacgtcaagatctgtagcctattctcttgttttcctcttcaattcctcccgagatgacaaaaccattttacacattaatgaaataggtttaatttcatagagtatattttgataaataataataattcgggacgtaataaagtcgtaaccaataaatttaacaaccgctaggaggcggatggtgactttaataggtatctgacagtcatcaactacttatagcttttaagctttttctgactttgtgtttgtgttggttaacgccacacatttaagaatccttcaaattaaaatcccagacatttgggagaacaactgaagcctaatatatatggttcagatgccacccgatccacaaattaattagcattcaattcgaccccgacttcgaaaattcttaacgactcagggtccaatcaatcaatttctttggtctaaccaatgagacctacattcatgcagacttcacagtagcagaaatcatcactctcctcgtcgctgccatgatttggcccgtaatcctcgtaatcactgacgttgaagggtccgtactccccatcgtcgtcgtcgtcgtggcttctatgactgcgaactgcggcactttgactccgtcgctggcgctgcagcaagcgattccggcgtagactatcacgactaccatggcgtcttctggctaaagttccatcagatggcactgcgtccaagctgtggagacgattggtttgaggatcctgggaaccaccactttccgcgcacccagagccggccaaaaatgcgcttgctgtcaccgcagcttcagcggacgccgcggttgcttggagttttttcttatgtcgctggtgacgagatcggagcttcttgagacgccaccagtctttgaaccaagtccactccattgtggtggtagctcagtttctttttggccaaatctgactgtttacccaggacggtaacttagaaacttgttttatattccgttattttaacatttgggcttctcgtttgagggtactttatttataaacaatcaaattgtttattagggcttgtcaaatattttttacgcatcgtccgaaatattagccggatttagctgcaatttagcaatccgtcgtcgaataaaatggatagatagtgcggaaactaaaccgttcgtgcttatcggtcggattctacaaaaccagatgacctaacccgaacaaatactgaaaacgcaaaccgacggggtcggcgtataacgcccgttccgtgcaacgcggccaactgactaacggaactgaaaaaacggtttgttgctttggatcgctggggatcgctggggatcgtatcggtatcggattgtttccgagcgtacggccccattcgtctgtgcgcccactcactcaggggagaatccgatcagccagagacgacgtaaaacagaaagagaagtgatcgcacaaagagccagatggataatacactgtgaagaaatgctttcgttttggatctggatttgattgcgattttcagcacgatttcgaacataaatacgaactgtaaatatatcgacctgtctttataaaaaaacattctttcctagaaaggttttgtacgaataaatttggatatttttcttaaagcttttgagtttttcttactcttttatatactatattgtatatatattgtatatacaataaaaaacatattaggctattatgttaaatacagtcacacagttaaattgcagtcacacatattacaaatgtgaattatacatgctaaagttcgcattgcaacagatgcagttatttaattagaagttttacaaagccccaaaggtaattattaatttaaaattttcagtgcatgaagatacctagagcgggagaacgacgaaaaggcgttctctgtgtataattgcttcgacatgttatcatcgtcgctctcatttgttaaacttaacttcaacttatatagcgtatacgtccggccgatcggccagtgttaatgaaagcgacaacaaagacaacgagagctacacaaagagcagcgacgaaaatcggtaatcggtaaccggtaactgcggtcggtggagcagataagacttccagtgataagggcgctacggctcgtaaaacacacatctgccttagaaatccaagctccaaagtaaatattttctctatgtatagaacccgtcgctggcgaccactagcaggcgccattcaagcgatgttccccatcaattatgaccttcacgtatctttcctctgagatctctgtttccccgaacttaaagatgaaaattagatgatatacatacaaagatataaagatcagacaaaaaaagaaagggaggtctataagacgggttcactattaagccctcaattaataaaattggtatatcttttacgattttattcggttttacctacacttgtagactagcaagccccgaacactttatattgtttgtaatgaaactctaaaactcgtttttattatttaaaaaagtctatattagtagcttaaaaaagaaatgagtttggggaaaaaaaaatttgaaatttgaaagctggaatcgtttgcccatgtttgcccaccgataagtttttttttgccttcgtttagttttcgagatctgaaatttcgaaaaagttcgaaaaatttcgaaaatcaaaaagtgtcttttttcaaaaattttttttaaattgtaataacatcctttgcttacgtttgcccatccctttgaattaaaaaaaagttattatttagaaaatataagacattaaaggcaatatcgagcaatatttcttcctaataaataaataacattcaattaaatacaaaattttagtgttttcaaacacccgatataagacagctactatttacatatcggtttttctgattaattgaactttcagcgtttccccgattgccagacgtactgagcatcgatttaaacattgacgaacatccaattttaagagttctagggcataattcttaactcttaaaattggatgtacaattcactttttgatatatcactattccagtactatttcactacgtttttatatttctcatatagccacccaaaaatatgaaatggataaattaagtttcgcccaagaacagtcccaaagattctctttaaatctccaactttgacgaaaactttactttatacaagcaaacgagcacttacatatacatatgtatgtataatacatacagtttatctaaacaaaatggttcgataccatcgaaaccatcgaaaactaaccgttctaaaaccactccgcttgaaagtcgaacctggtctacgaatctgagaatgcaagtggtccctcgtcggagctactcgagattccagacgtagtcggaagccaaaagcaaacaaattaagcaaacaaatggcataaccgggtaattaattaatgcagccaagaaaccgaaaacgtaattagaacacagcgcgcccaccaattgcttaaacaatcaaagcgtaacggtaaccaaaaaatgtagattgtttaaaaccagttacctagcgagcaaaatagcgcaacattaaagaaatgaaaacaagtgcaaaaccgacgaatcaccggatgggaaaacgatgaggagcgcggctccaactcgctgacgtctgtctctggattttcgcgggcggtaagaagagcagcggatgggcgggagaaaagggataacagatagtaaatgtgggatctacgcacaaaaataaacagtgcactgagagaaaattacactacattccgatttatgtttgtaaatctaattctgctctttaggatttgagctcaaagaagctggcgtcgaaaaaatcgaatttttgaaacttgaaagctggaatcgtttgtccatgtttgcccagtccagttttcgacatctgaatttgtagtaaaagttcgacaattttcgaaaatcaaaaagtttacttttttcataattttttttaattgcaataacccgtttgcccatcctttagaattttgaaaaatgtatacgttagaaaatataagacattcaggttaatctcggtctactcagaaaataaagcgtttgcccatctcttataactaaatattataaaaaaaaatgtttacttttttcatcgttgtggtggctattcacaacgccaactatctaattgcgacttaaaaaaattttcattttcaattttcgaactttttgaaaattcagatctcgaaaactggacgtgggcaaaaaaaactttatcggtgggcagaccaactctccagctttcaaatttcaaaaattcgatttttattattattattcattattttatcaaattcataatattctaagacatttgttattttatttcccagttgcttgtttttaaatttcctctctcaaagattttgtaatattcctagttatttttaaacagtttgggggcagttttgtttatattattttttcgagtgtagaccgcaacgcaccgcccacatttggagtgaagcttacgtgcgtcagccagcgacgtccgccaaaacgccactctccctgccacgaatttatcgatgctgttgctcattactctttggactgttgtttggttatctcttcgctggaagggtgctcaagggatgtaaattatgtttattccaaaaccacacacacaaacacacattagaaaacgagtaaaagagccgagagcaaaagcttttggcattgacattgaacagtcagctgttgggaagaagcaaaggaatgagaagaatttagtaggaggcggaggaagagaaaaagctccactgcaaaaagccgcaaaaagtcagggtcagctctccgcatgtaaaaatctacagtcgaagtcagctagattataacaccaggtttaaatactttttcaatgctcataattttatatttcacattcttataaaacactatttaaaattaaataaaaatcgatttgacttgttttaaaaataaatacgtgcatgtatagcacatatagtatgcaaataaaaaaaattatgtgttttagtgggttacgctagattttagtggtaaaacggtggagcgcatacgttgccatcctgtaatcccaagtagaaaccgacccgctgctgcggctgactttgatgcggattttgctgctgatgctgctgggatatatcctggtaccctgattccaactcggtgtaggacatggtaatcctttgtgttggtgttagtgcgagttatccaaacaaaacaaggagcaaacaacaacactgggaaacgtttttcgtattctgtttttacatttttcactctcacccccacgcacgcaactttgccgcgtgttaaaaatataagtgtgcgcttatatttttgttaacgattttttctctcactgtccttcgatttacgagttacgaaatctgttattggtgtggttttattatttgtattattattttttcaatttggtgtgtcgttctaaattcgccgccggcggaattatggaattgggtgggcaaggcacgcgggcagctgggtgaataacaggatgagcgggaggtcggccaattgctgtgggttacgtgctcactaataattaattgttattaaactagttttctctcgcttttgattatttgtctgcctttgctgttttcttttaaggccatcacacgcacacacgactactcgctttaaaagttccgtttgttttggcaatccgccgcagctttcagggcgaatttgtctagaaagctccgcaatgtcttgaaagcttggctgcaaaaaatcacgcgggcttttgccaaacagctgttctgtaaatcaagaaagaaaaggtattaaaaggtattaaaaagataatagagagatataaccaaaaataagtatataaatgtatttcagttcaatattgcgactagtatgtatatttgtttgttagaattgcttattaatcgtaagaattaatttgtgtatgtagttaaggatactaccgaatctacccattaaattttatattattttaatatttttttaatatttaatatttaaaaatatacttaatatttaagtattaacatatacatattttcttccatttcagctcaaatatatatattccataatacaaattaaataataacaagagagattgctatagtcggctatcagatacccgttactcagctaatgaatatgccaacgcaaagttgggaaataaaatgagaaaaaatatatatgtaaatggttcgagttgtgggcgctgtgggccaaacgccgttttgggagtttttttttattatatatcgatagaaatgggcaaaacaagcaaaaaaacgtagaaaaaacaaaacatttttcaaaagtgtgggcttgacagcttttggctgtttttaggcgttagagtgggcgtggcagagttttttggcaaatcgcgtctatgtctctggaagctgcatgataaatctgaacattctagcctgtatagtttctgagatcctgacgttcatacggacgtaatgacagacggacgtggccagatcgactcgtctagcgatcctgatcaagaatatatatactttttataatgggaaacgctttcttctatctgttacatacttttcaacgaatatagtatacccatttactcgtagagtacaaaaagggtacaaaaatgtaaaaatgtatagagagaaa

SEQ ID NO: 35591 - DNA, 5745 bp, DROSOPHILA
taaagcgagtagtcgtgtgtgcgtgtgatggccttaaaagaaaacagcaaaggcagacaaataatcaaaagcgagagaaaactagtttaataacaattaattattagtgagcacgtaacccacagcaattggccgacctcccgctcatcctgttattcacccagctgcccgcgtgccttgcccacccaattccataattccgccggcggcgaatttagaacgacacaccaaattgaaaaaataataatacaaataataaaaccacaccaataacagatttcgtaactcgtaaatcgaaggacagtgagagaaaaaatcgttaacaaaaatataagcgcacacttatatttttaacacgcggcaaagttgcgtgcgtgggggtgagagtgaaaaatgtaaaaacagaatacgaaaaacgtttcccagtgttgttgtttgctccttgttttgtttggataactcgcactaacaccaacacaaaggattaccatgtcctacaccgagttggaatcagggtaccaggatatatcccagcagcatcagcagcaaaatccgcatcaaagtcagccgcagcagcgggtcggtttctacttgggattacaggatggcaacggcgacacggacttcggagacagcaatgacgggatggactccgacacgagcacctcttccagcaacagcaagcaggtggttgtcggcatctgcgcgatggccaagaagacacagtcaaagccaatgaaggagatcctgacacgtcttggagaattcgagttcatcaaactggtgacgttcgaggagaacgttatcctgcgagaaccggtccaaaattggcccacctgcgactgcctggtatcgtttcactcgaaaggctttcccctagagaaagccatcgagtatgcccagcttaggaatccatttgtgctgaataatctgcatatgcagtacgatattcaggacaggagaagagtgtacgccattctggagaaggagggtattgagattccgcgctatgccgtcctcgatcgtgattcgccggaccctaaacaccatgagcttattgagtccgaggaccatgtggaggtcaatggtattacctttaacaagccgtttgttgagaagcctgtgtcggcggaggaccacaacatatacatatattacccgacgtcggcggggggaggaagtcagcgacttttccgaaagatcggcagccggagcagcgtgtattctccggaatcaagggtgcgaaagacaggatcatttatctacgaggactttatgcccaccgatggcacggatgtcaaggtgtacaccgtgggaccagactacgcccatgccgaagcacgtaaaagtcccgcgttggatggcaaagtagagcgcgacagcgaaggaaaagagattcgctatccagtgatcctcaatcattccgagaagctaatctcacggaaggtgtgcctggcctttaagcaaaccgtctgtggatttgatttgttgcgagccaacggaaagagctatgtttgcgatgttaacggctttagcttcgtgaagaactcgaacaagtactatgatgattgtgccaaaatactgggcaacatgattctcagggagctaacacctaccctgcacataccctggtcagtgccctttcaattagacgatccccccattgtgcccactactttcggcaaaatgatggagctgcgctgcgtggtggccgtaattagacatggcgatcgcacgcccaaacaaaaaatgaaggttgaggtgcggcatcccaaatttttcgagatcttcgagaagtacgacggctacaagctgggccacgttaagctaaagcgacccaaacagcttcaagagattttggacatcgcccgcttcctgctaagcgagatccacaccaaagctcatgccgagattgaggaaaaggaaagcaagcttgagcagcttaagaacgttctggagatgtacggtcacttttcgggcataaaccggaaggttcaaatgaaataccaaccaaagggacgtccacgtggctccagctccgatgatagtaagtccagtcgaatttccccgaatccaagtgcttcgattaaccaaagtgaagccaatctagcagcggatcaaccagtggaaccttccctggtcctcatcctcaagtggggcggcgaactgactccagcaggccgcatccaggcggaggagttgggtcgcatatttcggtgcatgtatccaggtggccaaggaagatcggattactcgggcacccaaggactaggtttgctaagattgcactcgacgttccggcatgacttgaagatctacgcctcagatgagggtcgtgtccagatgacggctgccgcttttgcaaagggtttgctggccctggaaggagaacttactcccattttggtccagatggtaaagagtgccaatacaaatggactgctggacaatgattgcgactccagcaagtaccaaaacttggctaaaggtcgcctacacgagcttatgcaaaacgatcgagagttctctaaggaggatcgtgagctgattaatccttgcaatagcaaatcgattacccaggctctggattttgtaaaaaatcctgttgactgctgtcaccacgtacacctgcttattcgcgagcttcttcacattatcagcatcaaaaaggatgatccaaagaccaaggacgccatcttatatcacggcgagacgtgggacctgatgcgttgtcgctgggaaaaaattgagaaggattttagcaccaaatcgaagctgtttgacatctcaaagataccagatatatatgattgcatcaaatacgatctgcaacataatcagcacacgttgcaatacgatcaggcggaggagctatacatctatgcgaagaatctggctgatatagtcataccacaggagtatggactgacgccacaggagaaactggcaattggtcaaggtatctgctccccattactgagaaagatcaagggcgatctgcagcgaaacatcgacgaagtggaagacgagtttatgaaccgtttgaatccacattatagccatggtgttgctagccctcagaggcatgttcgtacaaggctctattttaccagcgaatcgcatgttcactcgctgctcaccgttttgcgttatggaggattgctcaatgtggtcacagatgagcagtggcgtcgggctatggactatatttcgatggtatcggagctcaactatatgtcccagatcgttatcatgctctacgaggatccgaccaaagatccaacttctgaggaacgcttccatgtcgaactgcactttagtccgggtgttaattgctgtgtgcaaaagaatctaccaccaggtccgggatttcgcccgcattcgcacggcgataatgcttgcaatgtaagtttgcaatcctcggacgagtcaaatcctgccagaatcgaggaggagaatgactcgaattcaggagaagaacgggagggcaaaaagcgagggacctcaggccaaaggagtacggatcgcagtgcggaacgcatctcccctgctttcggattcaatcgattagagctcagatccaagcagttcaaatcgaaacctatccccatcggagcccatcacacggtcagtggccatgaagcaatggatctagccaagcggctaaacgaggagctggcatcgcaccaacagcagcaaaaccagcagcttcgacccatcagtccggatataagggcagtaactcctgactgcgaaccacgctcccggagttttgagcagcgtccaacgtccggcgtatgtgccaaagaaccggcaacagagacagcagaagatacatcaatggatatacagccaaagatatgtattggaaaatgtgcacctgggctgcttacaccaacagttactactaccgatattttaaaagatagccaagtctcggtgtcggtctcggcatcggtgtcatcggccaacgcatccacgtcgtcgcgtcgccaaagacacagtattgccggccagatgtcctatatgaaaatgttgggtttcggtggttttagcaaaaagatggccaccagcgcaaatagccttttcagcaccgccgtcatcagcggcagctcgtccgctccaaatcttcgcgacatgataacggtctcctcttccggatttggcgatgtaccaccaatccgcccgctggagacactgcacaacgccctttcgctgcgcaagctggacagtttcttgcaggacatgatcctggcgcagatctttaagacgccgacagggtccccgccgcggggcttctctaagaataccttgccagcggtttcctcgatgactctaaccgcctcaaatcagacagaggttgtcgaacatgagccgatatcaacgaccgtaacgcccacctttgaccggcgtggcagcgagtccggatccacagcggatgcccatctgcgtcttctttcggagagccagtgccctaatctggacgatagcaacaccgagctgcgagaatcgctggctggaaaaatggagctttggccacaggacattgtgaaggcagccgaggatgaggaattaaacctgtcagaattggaaacaaaaccaagcttggaccttaccatggagattatggagcgcggggtcgcgggtatcgcctccatccagccaatgaatcgggacagcgatgaaacgatgggcggtggagtctttctgagtgtttgtgaggaacagggcagcggaagcacctgccttacaccagttagttttgggatggatctcgacctgagcatggtggctaacaagggctccattacgctgtcaatggaagggttcgatgatgatgaagatgccactttgtcggcggccacaacaccttcccttttggcggactgtgagccgcgcctggagagttgctattgttgccccagccatgcagaggccccgcctgaggttcccagcgatgatccacggtttggctttgcgctgcccgttcgagtcacacaagcttcaccggagcatgcgcgacctgtgcgccgtgctcatgatcccgtctcgccaaggatccagaaacagatcagcttgttcgagggaaacgcggctatggcaacgggtcaggaaaagactgagtccagcgggtcggttgggggcggtgcaattctgcacgcctccattaacctgccggcggcgggaccgcatcatttgcgccaagatgctcgcctgcgcaagtttgagaacctcacgcagtccacatcaaactcgaactttcccttcgaaagcaacacgctgaagcgggtgcccatgcagaccaccaaagactacgacaacgtgagccacacacagagctgcataaatctcaaaagtggcagcagtggagtcctcgggggatcgccgcagcgtcagagaggatccgatggaggaggcgtaggtgcaagtggagtcccggcagagagccgggagccgacgcgggtgcattatggacggatgaacagtacatgctgctctgcctcggcatcgccgtccccctccccgggggcgctgattgtcaaggagcggttcatcgaaccgcccaagcgcggtgtcgtgcgcggataccatggcaaaacgcagtccatggacgccgacttcctgttcaacgagtttctactgctgccggccatggcgcccgccaagatatcctttgatagttccgatatagaccaggccagcgatgacgactccccgagcagctcgaaacaaaggcacgcttaa

SEQ ID NO: 35592 - protein, 1751 aa, DROSOPHILA
MSYTELESGYQDISQQHQQQNPHQSQPQQRVGFYLGLQDGNGDTDFGDSNDGMDSDTSTSSSNSKQVVVGICAMAKKTQSKPMKEILTRLGEFEFIKLVTFEENVILREPVQNWPTCDCLVSFHSKGFPLEKAIEYAQLRNPFVLNNLHMQYDIQDRRRVYAILEKEGIEIPRYAVLDRDSPDPKHHELIESEDHVEVNGITFNKPFVEKPVSAEDHNIYIYYPTSAGGGSQRLFRKIGSRSSVYSPESRVRKTGSFIYEDFMPTDGTDVKVYTVGPDYAHAEARKSPALDGKVERDSEGKEIRYPVILNHSEKLISRKVCLAFKQTVCGFDLLRANGKSYVCDVNGFSFVKNSNKYYDDCAKILGNMILRELTPTLHIPWSVPFQLDDPPIVPTTFGKMMELRCVVAVIRHGDRTPKQKMKVEVRHPKFFEIFEKYDGYKLGHVKLKRPKQLQEILDIARFLLSEIHTKAHAEIEEKESKLEQLKNVLEMYGHFSGINRKVQMKYQPKGRPRGSSSDDSKSSRISPNPSASINQSEANLAADQPVEPSLVLILKWGGELTPAGRIQAEELGRIFRCMYPGGQGRSDYSGTQGLGLLRLHSTFRHDLKIYASDEGRVQMTAAAFAKGLLALEGELTPILVQMVKSANTNGLLDNDCDSSKYQNLAKGRLHELMQNDREFSKEDRELINPCNSKSITQALDFVKNPVDCCHHVHLLIRELLHIISIKKDDPKTKDAILYHGETWDLMRCRWEKIEKDFSTKSKLFDISKIPDIYDCIKYDLQHNQHTLQYDQAEELYIYAKNLADIVIPQEYGLTPQEKLAIGQGICSPLLRKIKGDLQRNIDEVEDEFMNRLNPHYSHGVASPQRHVRTRLYFTSESHVHSLLTVLRYGGLLNVVTDEQWRRAMDYISMVSELNYMSQIVIMLYEDPTKDPTSEERFHVELHFSPGVNCCVQKNLPPGPGFRPHSHGDNACNVSLQSSDESNPARIEEENDSNSGEEREGKKRGTSGQRSTDRSAERISPAFGFNRLELRSKQFKSKPIPIGAHHTVSGHEAMDLAKRLNEELASHQQQQNQQLRPISPDIRAVTPDCEPRSRSFEQRPTSGVCAKEPATETAEDTSMDIQPKICIGKCAPGLLTPTVTTTDILKDSQVSVSVSASVSSANASTSSRRQRHSIAGQMSYMKMLGFGGFSKKMATSANSLFSTAVISGSSSAPNLRDMITVSSSGFGDVPPIRPLETLHNALSLRKLDSFLQDMILAQIFKTPTGSPPRGFSKNTLPAVSSMTLTASNQTEVVEHEPISTTVTPTFDRRGSESGSTADAHLRLLSESQCPNLDDSNTELRESLAGKMELWPQDIVKAAEDEELNLSELETKPSLDLTMEIMERGVAGIASIQPMNRDSDETMGGGVFLSVCEEQGSGSTCLTPVSFGMDLDLSMVANKGSITLSMEGFDDDEDATLSAATTPSLLADCEPRLESCYCCPSHAEAPPEVPSDDPRFGFALPVRVTQASPEHARPVRRAHDPVSPRIQKQISLFEGNAAMATGQEKTESSGSVGGGAILHASINLPAAGPHHLRQDARLRKFENLTQSTSNSNFPFESNTLKRVPMQTTKDYDNVSHTQSCINLKSGSSGVLGGSPQRQRGSDGGGVGASGVPAESREPTRVHYGRMNSTCCSASASPSPSPGALIVKERFIEPPKRGVVRGYHGKTQSMDADFLFNEFLLLPAMAPAKISFDSSDIDQASDDDSPSSSKQRHA

SEQ ID NO: 35593 - DNA, 5663 bp, DROSOPHILA
tttgccaaacagctgttctgtaaatcaagaaagaaaaggtattaaaaggtattaaaaagataatagagagatataaccaaaaataagtatataaatgtatttcagttcaatattgcgactagtatgtatatttgtttgttagaattgcttattaatcgtaagaattaatttgtgtatgtagttaaggatactaccgaatctacccattaaattttatattattttaatatttttttaatatttaatatttaaaaatatacttaatatttaagtattaacatatacatattttcttccatttcagctcaaatatatatattccataatacaaattaaataataacaagagagattgctatagtcggctatcagatacccgttactcagctaatgaatatgccaacgcaaagttgggaaataaaatgagaaaaaatatatatgtaaatggttcgagttgtgggcgctgtgggccaaacgccgttttgggagtttttttttattatatatcgatagaaatgggcaaaacaagcaaaaaaacgtagaaaaaacaaaacatttttcaaaagtgtgggcttgacagcttttggctgtttttaggcgttagagtgggcgtggcagagttttttggcaaatcgcgtctatgtctctggaagctgcatgataaatctgaacattctagcctgtatagtttctgagatcctgacgttcatacggacgtaatgacagacggacgtggccagatcgactcgtctagcgatcctgatcaagaatatatatactttttataatgggaaacgctttcttctatctgttacatacttttcaacgaatatagtatacccatttactcgtagagtacaaaaagggtacaaaaatgtaaaaatgtatagagagaaagtggaaccagaaaacttaaacttaataaaaatgtgtttagttaaaacaagaatgcttcgtttatcgtttcctcctttattcgagcaatctaacctatgaaatcctaatccaatcggcgatgtttgaggagtagtttggtcttgatcctctggcgatcccgagcgatgatctccatgcggtcctttatgttggtctggaagaagatcaggtgcagggtacgactggcggagcagagctatgagttaattcaatgaatataaaggaaaaagtagtcagcttgtattaagtttgcaaacaaggcaatttcaaatcaaatatttatataaaatcgcattaattattctaaaataccagtagttttggttttgcttactcaaagttaaaccaaagtcaatgtaagcacagtaggtaacactgcagtcgagttttttgactatcgcatacccttcactcagataataattaatttctagttttatcatccaagcctaatgtacacatttggcaccttttacacctagacaagtaaccaagtaacccacctgttgaagcaatcgcgccttgaggcgcaagtttgcaggctcctctgcatccaggccatgtccacaagtttccaggtgcaggttcaacacgaagatcagggtgtctctgatggtttggacaatgcgctgcacttgctcggttgcaaaaagccggcggaccaaaaatcctcgcacaccggcattaatacgtgtggccgcccactggcgctcttcctgtttcagctcgacatatttctggcagggattagaggcgaaattaaacagggaacgaaggcacttgctagttgggttagtaattaggttagctactggtgctagaggcttggtccctcgatttcctcgcagtctttgttaaggcacttgcataactgactacccgaattgctagggcttcttgcgctgtttgtgttggggaagaggaaataatagaatgggagtacaggaaatagatattacagattatatcgccaaggttttcacttttttagggataaaatacctaattattatattaagtgattatgctaagaatatcaatatcaatatcaatataaagcaaaaaagaatgctatcagatacccgttactcagctagtggatatgcaaactagaaatttcatcataatttttctgggatatcgatacaaaattgggaataaaatgagaaaaaatttaaaaattaattaaaaatgtcaatagaaatgtacatgtctaataaaattgtgaaaaatatccaacatatattcaagcttttatagttcctgagattttgacgttcatacgaacagacggatatggccggaccgactcggctatagatcctgatcaagaatatatatactttatatggtcggaaacgattcattctgcctgtagcatactattcaacgaatctagtatacccttttactctaagagtaacgggtataaaaatagaggaccataaataaaaaatcgttaatgctttagttaaataaaaggaaaggtcaaatagcagagatttaaagtaagagtccaaccaaattagctgctaacttaggttggcacaaatgaaaacctttgtgacttaaagcaaataaaatatcgctcagattcgcttgaaaaacttacattgcccagccgcttggtcggtgaggcgctttttggtggggcgcttccccttttcgctataatggagctattttttcccggggaacttttcggtcgtcctgctccacctccaggcttcgctggcgatttcttcacctcgcggtctgctgcggtgattgtttttactagactaccgcccacagattgcgatcggcgccggacaacttggacacttcgtctgctattggttaagctgctgttccggaggggcaacgatcgcggtgtgctgggggcactgagcagctgcggttccgagtcctttgatggttttggactaaacagcctcttgcgagcggaagaaggccccgcaatttggcacttgtcttccatcgtcggaaagtcttctatgtcctctgaaaaggagggtaacgtaggcgagggggaaaaacgctgcaggtctcccgtactggtgctttgcgatatcagactgtcaggattttcggtggccgaggaaacatcaatttcggcacacagttcctctatgagctgacgctgctgatgatcaaactcggcctgcatgcgacgacgttccttctcctggtgaatgaccaattgattcattcgctcccgatggccacgcagatagttgcgcactcctgccttgcggctggcttccaaagcgccatgctcgtccagcgcccgttctattatacgctccacctcgcgatcccgcctagaacagctgctgccggcggttgtggttttagtggcgatggtgctcttggttgcggcgctactgttgctattgtagctgttgtggctaattttgctgctaatactccttgcactacggttcacccgcttggcctgagactcgatggtctgcttctcgaagttggccaaactctggctgggtttcacagccagggcctccctctccatgtgctccacgagaacctgggagggctcctctagtgtgaaacttctcgaacgctgaaaattagctggttctgccagtggactgccgagctcccttgccgttgtgtcctttgtatcctgatcctgctggtcttcggctaccgcaggacttgtgcgcaggatacacttatctggaactttgggcagcagcttacccagtcccgactgctcgaactgcaggatacgatcggtaatgcgattatgccgccttggggaagtgttttctattgatttcacaaatggttgaggcgtgggaggatccacctgtatggtgggcaactgtttgccaaagaccagagtctgaggacgagcctggccccgtgtgctgtcatagattaacgtttctgtctgctgcagctgtgacacacttctcctactggccatgtcggatcccgccgagtgtctggccaggcggtaccgcttctccagcgcttctgccatctggcgggccagctgcacctcgcgcttcttggcgctcgtcatctggaacaaagtaaaatggttacgcctcagtaaatgccactccctgaccaagaatttaaatcaccagcggtggcagtataggctgcccgtccaagtggaaccgaaaggagacagggtccatggaactagagccactgccctcggagggggcgctccagatcgatatggtggtcgtggccgttggtgtggtggcctcgctgtggctacctcccatctcaactgcagacagcagctgctccattgccctgcttaattggagaagcattagattgagcaaaatcagtaattagaagcccgtaagcaaccgggattcataaaatcccaagacccactcaccacgtcgcatccattggtgttttgctactgggaatttttgttgggacgtcgaaatgtcaggaagccttctcagaggtcagctgaatctaggtgttttgtgaaagttcattaaatgtctgctatgttttagttgccattagagatgacgatggcactagggagccctcgacttcccgccaaaaattaggaaacctctgaagagttcattacatcaatcaaatgatatcccgaatcgttgagagttttgtattcaatgtttctaccgtggatcgcagctaccatcaagagccaatgagaaatgctgctttaatgctggggaaaacatttattttcaaacggcaattcaaaactcacacgaagtccatgcagccctgacgtcagatatcgataaccggacttttggaagtagcgtttttagagaaaatttgaggactccacagattagcagaggaacaagttttcagtccttccagaattatagtaaagaaaacggtggattaaattagtgttcaggaacttatattgtatatttcgtatgcttcaaaatcttgtcaaaattaaagaaacattgtctgcgaaaacttaacttttattggttcttaacaaactaatttgaaacagctggccgaattcaacagtttactaggtggttatcgaaactggtgtggtacattttggtatttgatttgcgccggatggtattttccttcgccgtgcgcgcggtcacattcactggatgtgtttttttgcgctgattgttgctctggcgcgatcgaatttgcctggaattcgggagtcaacataatattttcgaaagtcaccagctatagcgaaaagtatgcgagttctattacagcttgtcgatatgttgtgttcgtaacttctgtttgcatatgttatgtgtgtgtgttatctagttacaaaacgatctaaaaccgtttttgcaaagaacgtccgcaaaactgagtttgtacttcaaatatgaactatttgcggtttatattgctccagatttctctctttaaagttgcattgtagatgcagtcgtgtgtgtgtgcgtgagatgggagtgcaattttttttcaacagtatcagctttgttttttaagtagaatacaagtaatttttacccctaactttattcctagcccctttcctttataaaaatacggtaaaagtgtaaggaaaacaaaaacaaaaagcgcaaagtttcgcacatatatgtgtacatatgcatacacacgctgagtgtggtgtttctgtattgtttttttttttgtgtttcattctgcgacgcaattgaaaaagacatcgaaggccaaacaacttggtgtttttt

SEQ ID NO: 35594 - DNA, 2326 bp, DROSOPHILA
ccgtttgaaaataaatgttttccccagcattaaagcagcatttctcattggctcttgatggtagctgcgatccacggtagaaacattgaatacaaaactctcaacgattcgggatatcatttgattgatgtaatgaactcttcagaggtttcctaatttttggcgggaagtcgagggctccctagtgccatcgtcatctctaatggcaactaaaacatagcagacatttaatgaactttcacaaaacacctagattcagctgacctctgagaaggcttcctgacatttcgacgtcccaacaaaaattcccagtagcaaaacaccaatggatgcgacgtgggcaatggagcagctgctgtctgcagttgagatgggaggtagccacagcgaggccaccacaccaacggccacgaccaccatatcgatctggagcgccccctccgagggcagtggctctagttccatggaccctgtctcctttcggttccacttggacgggcagcctatactgccaccgctgatgacgagcgccaagaagcgcgaggtgcagctggcccgccagatggcagaagcgctggagaagcggtaccgcctggccagacactcggcgggatccgacatggccagtaggagaagtgtgtcacagctgcagcagacagaaacgttaatctatgacagcacacggggccaggctcgtcctcagactctggtctttggcaaacagttgcccaccatacaggtggatcctcccacgcctcaaccatttgtgaaatcaatagaaaacacttccccaaggcggcataatcgcattaccgatcgtatcctgcagttcgagcagtcgggactgggtaagctgctgcccaaagttccagataagtgtatcctgcgcacaagtcctgcggtagccgaagaccagcaggatcaggatacaaaggacacaacggcaagggagctcggcagtccactggcagaaccagctaattttcagcgttcgagaagtttcacactagaggagccctcccaggttctcgtggagcacatggagagggaggccctggctgtgaaacccagccagagtttggccaacttcgagaagcagaccatcgagtctcaggccaagcgggtgaaccgtagtgcaaggagtattagcagcaaaattagccacaacagctacaatagcaacagtagcgccgcaaccaagagcaccatcgccactaaaaccacaaccgccggcagcagctgttctaggcgggatcgcgaggtggagcgtataatagaacgggcgctggacgagcatggcgctttggaagccagccgcaaggcaggagtgcgcaactatctgcgtggccatcgggagcgaatgaatcaattggtcattcaccaggagaaggaacgtcgtcgcatgcaggccgagtttgatcatcagcagcgtcagctcatagaggaactgtgtgccgaaattgatgtttcctcggccaccgaaaatcctgacagtctgatatcgcaaagcaccagtacgggagacctgcagcgtttttccccctcgcctacgttaccctccttttcagaggacatagaagactttccgacgatggaagacaagtgccaaattgcggggccttcttccgctcgcaagaggctgtttagtccaaaaccatcaaaggactcggaaccgcagctgctcagtgcccccagcacaccgcgatcgttgcccctccggaacagcagcttaaccaatagcagacgaagtgtccaagttgtccggcgccgatcgcaatctgtgggcggtagtctagtaaaaacaatcaccgcagcagaccgcgaggtgaagaaatcgccagcgaagcctggaggtggagcaggacgaccgaaaagttccccgggaaaaaatagctccattatagcgaaaaggggaagcgccccaccaaaaagcgcctcaccgaccaagcggctgggcaataaatatgtcgagctgaaacaggaagagcgccagtgggcggccacacgtattaatgccggtgtgcgaggatttttggtccgccggctttttgcaaccgagcaagtgcagcgcattgtccaaaccatcagagacaccctgatcttcgtgttgaacctgcacctggaaacttgtggacatggcctggatgcagaggagcctgcaaacttgcgcctcaaggcgcgattgcttcaacagctctgctccgccagtcgtaccctgcacctgatcttcttccagaccaacataaaggaccgcatggagatcatcgctcgggatcgccagaggatcaagaccaaactactcctcaaacatcgccgattggattag

SEQ ID NO: 35595 - protein, 660 aa, DROSOPHILA
MEQLLSAVEMGGSHSEATTPTATTTISIWSAPSEGSGSSSMDPVSFRFHLDGQPILPPLMTSAKKREVQLARQMAEALEKRYRLARHSAGSDMASRRSVSQLQQTETLIYDSTRGQARPQTLVFGKQLPTIQVDPPTPQPFVKSIENTSPRRHNRITDRILQFEQSGLGKLLPKVPDKCILRTSPAVAEDQQDQDTKDTTARELGSPLAEPANFQRSRSFTLEEPSQVLVEHMEREALAVKPSQSLANFEKQTIESQAKRVNRSARSISSKISHNSYNSNSSAATKSTIATKTTTAGSSCSRRDREVERIIERALDEHGALEASRKAGVRNYLRGHRERMNQLVIHQEKERRRMQAEFDHQQRQLIEELCAEIDVSSATENPDSLISQSTSTGDLQRFSPSPTLPSFSEDIEDFPTMEDKCQIAGPSSARKRLFSPKPSKDSEPQLLSAPSTPRSLPLRNSSLTNSRRSVQVVRRRSQSVGGSLVKTITAADREVKKSPAKPGGGAGRPKSSPGKNSSIIAKRGSAPPKSASPTKRLGNKYVELKQEERQWAATRINAGVRGFLVRRLFATEQVQRIVQTIRDTLIFVLNLHLETCGHGLDAEEPANLRLKARLLQQLCSASRTLHLIFFQTNIKDRMEIIARDRQRIKTKLLLKHRRLD

SEQ ID NO: 35596 - DNA, 3051 bp, DROSOPHILA
tgctgctgcagccggtgccagcgattgcacggattcaaatcgagatcgtgaccagcagcgcattgtcaccgccctggattcgtcggacgagagcgattttgagatactcgaatcggatgactttaagtaaagattggatcaatcggcgatcggaccgatttgtcgtattataaagctattgtcttaacatacatatgcatacacaaatagaactcaaaaaatcgacagacaaacagacggcgccaacgattggagtggttccaatttccctggtggagatcagttatatattttgctacacactagtgctatgtatacttatatactaaactaatcatcctacagttaagccaaaagttttccccagttttgtttttcttcctcttgctttgtacattttgttttttttttccccatttaaccctatggttatgactattttactttatgactttagtttgtatttgtcctgtgtgtttatctactgaccgcaaacaaaagaaacaacgagcgacggcacgcaacttgtacatataccacagatacacttacacttacgtatatgtatggtttattttgatgtcgctgtgagtgagggcgttagctacttaatctgaatccaaatcaaaatattgatgcagcaattaaaaaaccaaaaaaagtggcaaataagaaacgcagaaaaaaccatgaagagatttggttcggtgctgtctgaaaacgtattagccatataaagtgcacaaatcatttcagcgttatataaaattagaagacgctattatttttctgccgactttgcgctggccatcatcgtgcgttgtataacataaatttcacgttaaatgcagtaacacactttctttgtattcttattattatttgcgcttaaaatacataagttatcatttaaattgcgaaacaaaacgaaatgtgattttgtaaaaacaaaaactgaaataaaaatcaaaaagacctcgagatccgatgtcgactgccgtcaactgtctaaagaatgggattcgatttcagactcgacggcggttaaggtgggcttatctgactcagcttcctgtttctgtttttcatcctgctgctccaagcaatgattcggctcctttttgtctgtgattttcgccttggctcccttgcgcatgggaatagtttccagaatggccgtagtccagtcctgaccggcagcaactttggtcagcagctcaaacactggataaatatggaagtattagcaatcaacattgaattcaacgtttcttgaatgaggttctgactacattatgcaaattgtaccactcaccatggtaggtgctcagcacggccctcgtcttcatgtctacatgctcgctaagcgggaggcgagcggtagtcagccccgccgacgtggccctcgagtggcacaggcccttgaagtgattgtggtccaccaggccaccgatgacgtaggtgcagccgggctgcagcttgtccaacacccgatccgactcgcaggtgaggtagaccagttggctatgctcgaaaatatcggtgtgcccgcgatcgaagtagtactgcacgtgccagttctcccagccttcgttcttcttgaatgactcgtggatgtgaccgttgcgccggatgcctgtgaagtgcagattgcccggctgtgggctgcgccgattaatggtgtagatgcgaaggcactgcttcacgcacttgacgatgtcccgttcctgcatcagatcgtcgtagtccagatctatagcgaccgagaggccagactttccgccgtctgccaactggcgtttcttcagctccttgcgggagggtcccgtccggacgggcagacccagctccttggcctcccgccgcttctgctttttcttctcacgctcccgttcgcgtcgcagcttccggagttcggcaaactccgccagctttcgctgcttcttaagctgatttttgctcatcggcgtgccgggcgttgtgcccgggcaattgttcaggctaagcatcgccggggtcacctccttgagagccttttctgtcgtatccattgatcttgttactagattttttgttgtgttttacgttaccgctaccctcgtgtatttaaaagtagttcaattggctaagaaaattgaatattgccagcagctgatttaacagcgttttcagcgtgctgcgcctaacagcactctgttacgtggggaacacgcttgaaagcccaagctagctgaaatccccttattccattgtcatattttgacaatttttctaaattctacatttacatagtttatataagaatttttaaattcttagtatttatgcggatatgagtttatttgtgactgactcaatgatcatgcatagttgcggatatttgcggattttcataaatttttcgcataataagtcggtctgaacggttgaaaattttatttttacgtccttctccacattttgaatccaatctgccctcgttttttgcgcgattaataacattttaaattgttctccgcgatgcagaaaacatttctgacaattctttaacaaattttcccaaatggtgattataaaaaatcagttaaactacttcaaaactcaatcgtttgccaggcatttttaaattttacaaaactaacttgaacaatgctcaatttggcaaatttcaaaaccaaatctgccacccacacaacgcataaagcgtaaatgacgattatgtatcgtttgattatcgaaattcctcggaataggagcaaaatagaaaacaaaagaaaagtgtgcaaacaatttctttacagtgtgaaatctgtgcaagcttagatttagttgtttttctcgttcattgttaatagttttgttattattttttacatattgataaaaaacatataaaaaaataaatggaaataaaaaaaatccataaaggtaaacaaaaagcccttaatattgcattgaaaggcagaaaatacaatttattttcattgtgcaaacaatttcttgactatctgtatgtagtgtgcaattcataatgcgctcacgaaaaatatg

SEQ ID NO: 35597 - DNA, 960 bp, DROSOPHILA
atggatacgacagaaaaggctctcaaggaggtgaccccggcgatgcttagcctgaacaattgcccgggcacaacgcccggcacgccgatgagcaaaaatcagcttaagaagcagcgaaagctggcggagtttgccgaactccggaagctgcgacgcgaacgggagcgtgagaagaaaaagcagaagcggcgggaggccaaggagctgggtctgcccgtccggacgggaccctcccgcaaggagctgaagaaacgccagttggcagacggcggaaagtctggcctctcggtcgctatagatctggactacgacgatctgatgcaggaacgggacatcgtcaagtgcgtgaagcagtgccttcgcatctacaccattaatcggcgcagcccacagccgggcaatctgcacttcacaggcatccggcgcaacggtcacatccacgagtcattcaagaagaacgaaggctgggagaactggcacgtgcagtactacttcgatcgcgggcacaccgatattttcgagcatagccaactggtctacctcacctgcgagtcggatcgggtgttggacaagctgcagcccggctgcacctacgtcatcggtggcctggtggaccacaatcacttcaagggcctgtgccactcgagggccacgtcggcggggctgactaccgctcgcctcccgcttagcgagcatgtagacatgaagacgagggccgtgctgagcacctaccatgtgtttgagctgctgaccaaagttgctgccggtcaggactggactacggccattctggaaactattcccatgcgcaagggagccaaggcgaaaatcacagacaaaaaggagccgaatcattgcttggagcagcaggatgaaaaacagaaacaggaagctgagtcagataagcccaccttaaccgccgtcgagtctgaaatcgaatcccattctttagacagttga

SEQ ID NO: 35598 - protein, 319 aa, DROSOPHILA
MDTTEKALKEVTPAMLSLNNCPGTTPGTPMSKNQLKKQRKLAEFAELRKLRREREREKKKQKRREAKELGLPVRTGPSRKELKKRQLADGGKSGLSVAIDLDYDDLMQERDIVKCVKQCLRIYTINRRSPQPGNLHFTGIRRNGHIHESFKKNEGWENWHVQYYFDRGHTDIFEHSQLVYLTCESDRVLDKLQPGCTYVIGGLVDHNHFKGLCHSRATSAGLTTARLPLSEHVDMKTRAVLSTYHVFELLTKVAAGQDWTTAILETIPMRKGAKAKITDKKEPNHCLEQQDEKQKQEAESDKPTLTAVESEIESHSLDS

SEQ ID NO: 35599 - DNA, 13491 bp, DROSOPHILA
ctagttttggtagctttttcgcaagccaatcaaaataaaaacacaagaaattgtataacattaaaacgaacttcgaaacggtcttttgtagcctgggaaaattccctgttaccgggtgctgtctcgttgcggaaatcaccccttattacatgggctgaatcttggttggtaggtgtcttggccaggggataacaatggatttttggtgttgttgctgttaacctttttttttttttttaaattgtactactagcaattatcataagtacgttttcacaattcagatttcagcttcacttcgcggcccctttcattcaatttgttgctcatttatcaattaattaatattactttttattttagttgctaaaaagctttttcccttagctatggagatatttgtggcgcgattgcgttttgttttcttttattttttggcttgaaccgtctttagcttgcagtgcttattacagttattttttttttttttttgtattattatgaaatatattgcacaagacgaattgaaaatttatattcagtttcttttcccacgctctattttacttctttatttttacacacaaccacagggcactttccttcggcaaaccaatggattcaattaaatagagagagatatagagtgacgagcgaaaaaagagacagggagagtacgtcgatgcaaattgcaaatttagttttaattaaataacacttagaaagggagaaatattgaaacatatatcgctgatagctttcagtatccttacaaaagaattcctgttactagttagcattagtttctctttcgtttatcctggggcttgaggttgcttggtttgccgaaagttgttattgcacagattcattgtttttcgtcggagttttattcttgttccttttgttgtatagtttagccatcgaagttcgtttttgtttatgtacatttgttctggtttttttatgcacttttcttcagcttttccgtttttgttttggtttctgctttaagttaggagttagtttgttttgcttttaagttgagttaaattaagtaaattgtttgtatgcaattctacgaagcgtttctaaaagttcgtttgattcatttccttctgctttcatcctaccccatggtcatcttgatttccatcgctatatgcagagtgctgcacgtagagcaccgattgggccttacgtacgctcgtagaaaagaatataggcactggatgaaacgagatggttttcggacaaggcatcgctgactctgcaaaatgaaggagaaaactcggttaacaactttaaagaaaatcaaattcgtaggtgcggtgcaataggtttagttggcgggtattaatacaaaggaaatcatacttacatattatcattaaattcgtgccacttgcgggaaactggatgcttgcaaagggcaacataatgaccaccagccgttgaccctgttggatatgtattgataagtgcactgaaatccacaagtatacgtggaactcacccatatgattggatatcgcatagagcgagtaatgcacattcgagttggagttggcgccataggagcccatgttcagctcgctgtctgatgtgggaaattcaacgatgttggacagcttgctccagcgtgtctccgaaaagcgttttaggtctgtaaatatgcaaatagattgtattttccttgtattataaccttgcttgaattataaattatatattgaattacaaacgggaatgtgaaaacttacgtataacaagatatttggggaaacgttgaatggtgaagctcttggtgcattttcgccgtgtcttgcacttggcgcacgtgggcatttcgtcgccgtcaaggacctcttcgcggataaagaggtcgaggcaagcttctagcttgcagcgggacgaagacggcaacggtacactcagatcccagaacggatcaaaggtgacgctggtgttaccgcaggtggtgcacttcagtgtgcttttgagctgacccacaaacaggtcgcgcaccagagagttctcgtgccgcgtataccactcccaggtcaagtccgccttcttattgtcactacaggttaatcataaacggcattagtgggcagattatacaaaccaatcaataaagacccacctgagattatcgtcaatgttgagcgtctcacccttgacgcccgaattgagggccgaatgcagcgagtcaaggaaaaaacgcaggaactcctgcgcatcctgttggttgtagtcgctgtacatgcgatgtttggtcgagaacgccctctttagctccatgggcgtcaccgtgtgcacgttagcggtccacatctcctgaatgagtttggcaaattctgcaaacgcaaggggggtaaaaaaaaaagaataatgtgccaatctatcaacaaactaaccgtggagtatctgctgatccttggtggataacgaacgagagccgtggtgcgaccgcaagaagcgggtcagctcttgagtgtgactcaggcactggatgaccgagttcataaagcaagtgttcccaatgtttcgcagaccgcacagacctgtttgcagaaaagggatagaaattattctcaatggtcagggggccggcatagccgaggtttttactccccaatcgggatgcatggggttgcattcgtcaatggaagacaataccatcctcccccgtcctttggcctttttcttacacctctgcaacgttactatttctcgaggaaatgtttttgttccaagtttatactattagattttacattgaatttcactagaattttttgtttacagatatagttattttcggattgacgtgttaaagcaaataaaaacgaacctaacgttttcacgtttagttactacgattggcaggaaacggaacggaacaactctattttctatgccaacctggacgttctaagattattattgacaacaaatgcggcaaataaaagcgaatcatatccataatactctacccaccttcggacttctcatcccgcgaagaggaggcggtcttgtagccatcatccgagttatgtttcagggatgacgagttcagtgcggaggaggtgcctatgctgctgcggctggtgccgctgtcccgatcccagtaccgacttgacgtaggcgtcatgggcggcaggacgctccgggcagtgctgctactcccagtgccacttctcgccaacgtctgtgcaacagagaaactatcttatgtgaatatcaattgagttttcattcaagtgcccgaacgcaatagtaacctagcgaatgatttccagtgatggggacattcgattcttccattagtttttgtatatttcaaaatcctataaagtaattcccaatttccgacttgctaacaacattcccatcactgataatctataactgtctaaaggctcgggcgaaagtttgagtattaagggtaaggttaagttagttaattaaagcaactagcaggtaaacagtcagagattaaagaaaaacaactataagtcgaagttagtacaggtgttttctgtgtttcataatgcacatgaagagtgagtacagagagcgatagtagaccagcatgcaaaggataacacaaacgcaacaaattgatagcgagaaaaggcagacgttaacaaaggaaaatagtgtgtgatgaatccaaaagagggatgaagtaaatacatgttctagctacagattcttttcgtaatttcagttgctttctcttgacaagtgcaagaatttcaaatatcttaatacttataagaaaacggaattgagacagtaaataatactaaactgaactgatcggtgacctggccaaggaccgacttacactatcgctggcggagtttggagctgcggcggtgactgtgactgtggatacggaagacgtggctggtgtatgtgttgctgtggcagtggcaacagtaggtgttgccgctgtcgttgcatccttgcttgccttgttggtcaagaccacgctatcgcattcgattggctgccggttgctgtgagcacccctcaccgttaccttgcttgtgggctgacccattgccgtggcggtttctcctccatcgccactaataggaccgcctagttcagaggttaccgctaccggtgtgctaacactattcattgtggctgtagtccgataggctgctctggtcagggaactactatacccagccgccacgcgtatgttgtccagatcgctgctgtagcgctgctgcagattgctgctgctaccgcctgcctgcgatccgtgattgctacggctagccacagacagccgtcctcctcctaaaccggacgctgtagcactgccaggtcctatacctgatccagagcccggattttgtctcttctggccactgaggttgttgaacttctctatcgaggccttaatactcaatgaatcaatgccgtatcttctggcattgctactggtcttgctctcaatgttcgtctcgccattggtctgcctatagaggccaccactaaacttctcaaagctggccgcaaaattcgagtgggccgatgctataatagtggacttgggtcgtggatagcgatggctggcagacttggagctgctgggctgcggctgttcttcctgttgctgaacttgattttgctcgtgccgcagctgcagcggcggggtgatgggcttgaagtaacaaatgctcgtcttggttgtcgatattccggcttcagggccaccagttgccggcggatcatcgctgtctatgaagcttatgtcatcgtgctgctgttgttggcgttgcatgttgttattgccaccgttgttgatgttgctgctgtttctggtgttgttgttattattattggtgtgtccattcatcatagctactccagcggtcgtttggttgttattgagcggtttcagcttgccgtagttcctggtagacgttgaagttgcagttgccgtcgtggagcgcacgctgtacttgagcaccccgttgctggtgttactggtggtgttcctgctggtggtgttgttgatggtggtgctgttggtggtggttggttgctgattgccattgaacagagacgggcgtcgcatattaatcagcgttggtgcccggctagtgttgtagttgttgttccttgaatcctcaccagcacgactccgccggtgcggttgcaacgtggttttcactttgctggttgtcacatgggcatgggccaggtcgcattcggccttcagaaatgtggggtccttgtagctggacactaggaagaagcgctggttggccgctcgcactggattggtagctccaacttttgatccagccgatcctcctggtgatggcacttcgttttgacttgatgctgatgtggctactactgatgatgttttcgttgttgactgtaatttggatgcctgtggaatcttgtggaatcctctggtcttcttaatgtctaacatcattcgacgggatggtcaccgcactctctttttctctccctctctctatgctgcagcagctcctcttgtggctatagtgttgtagcgtaaatttatgtggccggcctatggttgaccggatacgagattttgtgtagtgtttgtttgtttcctcgccgcctgccacgtataaactactctcgactaacaggaagatcctgtcctgctccgcactctatcctaatcaaatggtatttggatgatcttatgacggttttatagggggcttgattttagttagaagtattattagttagcctggcgtttagttgggcttgatttttgagtttagtttaagttagaagggtcgcaatctgcaagagttaagctaaaaatacataaaaatgtagacttgattaaatgatcggcttttgctgggctgactgatgaacacacagaaggtggaatttgaatttgaataaaatgaagtaaggtggtcaatggttaatgctgggttaggggttaaatggtttcttatttgatcgcaaacgccatagttgttcaggttgtgttggcacatgcaattagtttggttttcgtttttttggggcagcacttctagtctccgttttacttgtggacaaaagcttttaccttgctgctgtcgtttagcttaaatgtggccgaggtgctcacatcggcattgtccgcagtatcctggctaacacctgcatcatcggcggtctcctgatttcgttcgtaaatggcatttcttttgggtgaagttgagagcagagatagaccgtttaatttggcttccagtccgccattcgattcagccggcttgtggccatttgtgggtggtggaggtggtggcggtggtggtggcgtcggtggtggagctgctgggcctgcctgctctactcccgtgctcgtgggtacctcctccgcttgattgcgccgcgtgcgtttgcttcggagtgtaaaggtggccgtgggcacatcgccactgctactgctgctgctaatcgagtacttgccggagcccaattttttcgcggaagccgaggagtcccctcctgcatcgctgctgttcctgtacaggcggctgtatcgactggtgctgctccatggcctatccagggtcaccgtacaggtgggcgtcgtctccttgttgcttccgttttctagatccgtctcagaatgccccgacctggaacgtgacagttcacagttgggtttatagttggccggactgtacttttcataaatgtccagtccggaggtggccaccaaacgggccagcgatggagatgaggatgaactggacagccgtttgttgccatcgacggctttggtgtctctactcgcagtgctgctgctgcagttgtggccaacactccctccgctgatcggtggtttcttgacggtatcatgaccacgccgtagaccgtagtcctccctcttggccgatccgctcaagctgtccccgttggtggtaattctggacgccgctttgcgcggtaactttagtttcggttcggtttttttttttgtttttttttttgttggattttcaattttgaatattttgacgagtggttttgcgaaacatttacaggtgtcaatgaatttgtggtggtggtttttgtttttcgaattggagtatcggtaggcggtaacgttgtaacagtaaacggcaacgataaaacatgtgttatgtttatgttttcaatggcaaaaagtatacgacaaaaacaaaatgtaaagaaaagaaacatcaatgatatgatcaatggctggatttatacacaaatgaaacgaaaatgatacagtctaaagaaatatgggatcaggtcctgatgataacacgattttagagtaccagtatttccgatgtgcacttcccaatgatgattatgcttgatgaaaaccattcaagttttaaacgcagtagtaatgacctcactaatagaacttgccacgtgtgctggttcttgttaacacaaactttagaaactttaccaagaggtaaccgaaagttatgactacaagtgtgaaatgacagggggcgcaccttgcgattgcttttgttttctttacccttgcatcccaaaaatcgcgaagcatagtaaaccccacatgtggtgtgctctgcggcacgcacgcacacacactcgaccacccatccacccacacatgcacgggcaggcagagacagagacagagatagcgctagccccattgcattaaccttgttacaaattcgcaaggcggttagagggggatgggggatgggacacaattgttggtgctgcaaccttttgccgttatattcccggtatttcggtgttgtcattcggctgttgctttttttttttttttttttgtgccattggatctgtgccaacaagtggttcgcagctctgttctgttcagctcagttcacacacacacacacacgcactcttcgtctgatgccaatggaatgtggctgtcactgtgaacgtgacttgaacagtgactgcgactgtgattgtgctcagtgcatgaagaatgacgcacttggtcatatttgcagagagctagccaactggacaagtggcgccctggagctggatgggttgctttgacatctggctatagtagtcgctccattatagggatcatgtttagctgaaagttaagattcaacttctgtgcaacgtttctatttggcatcaacctattacatatttgttcacgctatctcatctgcatgtattgaagcaaactaatcatacttaaacaggaaatctgtttaaaagttaaaaatatgtgtaccattattggtcatttgtattattcttggtttattttatccattgatttatctgtacgacgaagaactttctacacaattagtttctaaaaaaaagtaaagagataccgaataactttacatgaggttttcttatcattttaaaggtcaaaagacatgtatgttcgtgggctccacgagcgtatggagcgcgtaatttccaaactgtcattgctaaggagcgactactgtaccgaggtccgttatcgtaggtataaaacctggcatttgtcccacggctagacaaaatacatacactatttcccagtgcgtgagtgcttgtcgactatgtcgattatgtgggcgtgcatgggtgaatttgaatgggtgtaaggtgtttcgttgttgcaatcacaaagtacaacacaaacaaaacgatataatcagcaaacgataatgccaaaatgaaatattctaaaggccaccaaagaagaaactatcaggtctaagggataaagtaacaccaaaataggcgggtaatccggctggattaatggacgggtttcgtaaatgcgcccgtggggtttggggacgggaataggatcaccacaaatagggccgtcgtggtcgcatgaactatgagctatgagtgagtgtagtctgttgtggaggtttattctcgggatcgaatgcatataaccgaaagcggattaccaacaaatgtaatatttgcgcggatataactgatagaacagatacaggcataatacatgatgcaaatgtcaatgggattttaaaatgggtgaaggccgaaggctttgcaaatcgagttgttactctgaaatgtatgccttatacatcctgacctatatgctagaacttttattaatattgtaattttcaaatcattacttagctataaatctaattcattgaagccaaactcgaattcacttaatatatgtatgtatgtacagctgtgttcataaaattagcagtgcttgggcaattttttttataatctcattaggtatttaattttaaacaattcaaaaaatgtttcacttttatttcttcaatagtaaaagaaatatagattttagacaacataataggcagaccttttgatgttcactgaaatagcagtgctataaaaaattgtaacaaaattcaacttagacatagaactaacttagtttttctttttaatgtgtctaattagggtctaatacttggttggcatggagtccaccaggtcctggcaacgtttgaggggaagttttgacaatgcatcctgctctacttgttaaaactgagccttagacgtcggagagttcttcgacacttatatttaaatgccccccagaggttttcaatcgggtttaaatcgggagattgtgctggccacggcattacctctattttattttgggtgaaccaagtatcagccgattatcctgttggcctgtccattttaagggcatatgagagtaagaaatcactatgtatatttacatatgcgttttggtctataataccatatcatataatcgcataatcatatgttatggactcatacctttgtaaaaaaaaaacaaacccataccaggatacaggatacaggattgagtgagtgttttgggtggtactccgtgtttggaggtcgtcagatatactgtagttaaccaattcctccaaatagcactatttttgaaccatcagtccaaaggatattacgccatttggagactggccagtttaggtaggttttagcgaagcctaaccttgccttaatatgccttggactaagtagggaaacctttcgtgaactattgattttcttttgattttgattcaatagtcgtcttcgaattgtaacgtcaatgattcagctcagactttatgtccctagatgatgcaaaaggattcactttgctgcaacgaactacgcgtcgatcctcatcgatatctgtggatttacgatggaaccacggttttcgcagaacattcaatggttttttgaatgtccttatatgtttttccttcctttcttagcttaagaattaacattcttttcttctgggagtagtgctgtcctctacccactaaaatatatattttttatttattttaattttttgatcttttaaatatacgaattaacttaaccaaacacactttttagaaaatattgataatttcgggactttacgtttgagaaaaccagacactgctattttaatgaacagcctaaaagttgtgaatttgctcaagaatgtaaataaaataaggagaacacgaaaaactaacgggactttttttttctatctaaacattccattttacaaaaaaaggtggaataaaaggtcgatcccgaaaagggacatggaaaaataccgttgtatttcttagtttctcttgcactgctatttctttgaatgtacaagtacttaaagcaaccatcaaatcgattcaaatcaagacattatgttgacctttaatgacatatttctaaatcgcattgcaaattatcttttaagtgaataggatttgatgtttttgactatattcgaattaaacaacataacattaaacttcatgctactgattaactgccttcacaccaatttatcgagctttcatattgaataaaatgcgtattcaccaaatatgcagatacataacacatgatgatttcggggataaggcagtgagtagagttataccaggggcccagcatacaggattcgcatagagatattactgaaaaccaagagatcagccaccaaacttaagagtaatcgaccaggagtgggtgtatcgtaaatcaaggtacatcttatgaggtaagcaaggtgttactcactccgtatcggctgtacgtaggtgaatcatagctggacccgctcagatacgaggaggtgcggtaggcggacgagctgctgccggatccgccgctcatatacgacgttgacgacgtggtaccaacgctgctcctctgcacactggagcgcggcgcatacgaggcgcttgaggagccgctgttggcggagaacgttgagtaagaggtgggatagtagctgctgccgtagcccgacgagttggagccgccggacgaggtgggcagccacttggacagactgctgccgcggtcgtagctgctcgatatgcgggagtaaccgttcgtggcggcgcctccgctggtccgatccaccgcaccgcttccggtgatgctgatgtggtgactgccgctggtggagttgctgctggtggtgctgccgctggaggtgccgaccgccgatgtaccgtagagactgccgctgcccgccgctgacgttgacgatctacgcggcgcaattacacgcatattaatggcagcagcggcagtgatcaagccccgggttccggatgaagtcgagagtgtccttggtctgctggcagcacgtggtattgctgagcggatgattcctgttttgtttccggtcttgcttcgctttctctgtttttcgtgggctatacggcggaattcagtttcattaatggaaatcacagcgtcaacgtgtccatgtacccacctgcgtcacgttatttacattatcatcgcattatatccctaggattaggttagttttaaacttaatggctgcatatgtgctacatctaagacccgttcttgttgctgctaaagttgtaggcgaaactgaaaagaatggaattttagaaggccctatttatcaaattaattcgaattcaaaacctcatactaatcggaccataatattctaacttctttatcaaaaatatacccaaaagattggaaaatgcccagtgtaaatgatctaatgagggaacatcttttaatcaaaaccacatttttatgacggtacttttagtagtgcaaacaattctaaattgtcaagaccttgtccgtttacatttgattcacttattggagaaatgaaggcttgcaggcgcaaggttatcttgaattctgcataagataatgcgaaacccttcaagcggaactcctcgtctttcttccccttcccacgattgatttttcacaagcgcaaaaaacacccacgcacatctcgggaatttgtggccttcgatttgtccctgatgaacagttaggcggagagtggaaaaccgatcgacacttgtttacaatcgcaaaatagtaataaatagagaaaagccgttttcaagtttgccataacaacaacttcagtgtgacgctggctggctgaactgggtaggggcggtgtgggacgcggacggctgtccttatgcggtaacacttaaaatgaagttacgttcgtgtgtgtgccgccaggctgtctacgctcccattcgagaaaaccgttgcttttacatacatacatgcacaagtgtaaggctctgcgggtggtgtagtgcagggggatgggagaagcgggtggtaggccttaactaacataagatggccacactttcacgaatcgatctttcgttcataaaatgctacaactacactacagcccattcacacacattcacttaaaaaaattgaattatccaagctcacacaatcgcacgcgagtacccacaggtgtagctgaactttttcaacggttaccacgattagccgctttctttagacacaaaactcatacattctttgcacgtcaaaatcgaaataattgtgataaaagcaaaaacaatatataaaacgaaacgaaatgagattctatttttaaaaggtgcactcacacacgcgcgtacgtttggcagtgaaatgtgtgagggagagggggcgagccagggtagtagtaaaacagtgccgagattgtgcgcgcgagcgatgtagcactattggctacacggtcacacacacacacacaggcgccaggcagcgtacgaattacgcaaagtgaaatatctttctcaaaatggaaagtggaaaagtgacgacgacggctattaggaatttttcatacatccacggaacacaaaaaatgtacaaaggcaaatgcgtatataaagtgtataaattcatactaagatagaaaacaaatgggcgaggggatgggtggcgaaggtgaaaatttgaccgcaaaacgaacatcacgaggcgaacgaggtcgcgctgccgaaagtcccgtctcttaatgatatcccacaaattttaacgccagccaagcgacatcatcgttttgcaccgcaaaagggcctttttccggtcgaattaaagcaa

SEQ ID NO: 35600 - DNA, 3343 bp, DROSOPHILA
tcacactgaagttgttgttatggcaaacttgaaaacggcttttctctatttattactattttgcgattgtaaacaagtgtcgatcggttttccactctccgcctaactgttcatcagggacaaatcgaaggccacaaattcccgagatgtgcgtgggtgttttttgcgcttgtgaaaaatcaatcgtgggaaggggaagaaagacgaggagttccgcttgaagggtttcgcattatcttatgcagaattcaagataaccttgcgcctgcaagccttcatttctccaataagtgaatcaaattttcgcctacaactttagcagcaacaagaacgggtcttagatgtagcacatatgcagccattaagtttaaaactaacctaatcctagggatataatgcgatgataatgtaaataacgtgacgcagcccacgaaaaacagagaaagcgaagcaagaccggaaacaaaacaggaatcatccgctcagcaataccacgtgctgccagcagaccaaggacactctcgacttcatccggaacccggggcttgatcactgccgctgctgccattaatatgcgtgtaattgcgccgcgtagatcgtcaacgtcagcggcgggcagcggcagtctctacggtacatcggcggtcggcacctccagcggcagcaccaccagcagcaactccaccagcggcagtcaccacatcagcatcaccggaagcggtgcggtggatcggaccagcggaggcgccgccacgaacggttactcccgcatatcgagcagctacgaccgcggcagcagtctgtccaagtggctgcccacctcgtccggcggctccaactcgtcgggctacggcagcagctactatcccacctcttactcaacgttctccgccaacagcggctcctcaagcgcctcgtatgcgccgcgctccagtgtgcagaggagcagcgttggtaccacgtcgtcaacgtcgtatatgagcggcggatccggcagcagctcgtccgcctaccgcacctcctcgtatctgagcgggtccagctatgattcacctacgtacagccgatacggagacctggtggactccatgccaaccaaaattaccaccaacggggacagcttgagcggatcggccaagagggaggactacggtctacggcgtggtcatgataccgtcaagaaaccaccgatcagcggagggagtgttggccacaactgcagcagcagcactgcgagtagagacaccaaagccgtcgatggcaacaaacggctgtccagttcatcctcatctccatcgctggcccgtttggtggccacctccggactggacatttatgaaaagtacagtccggccaactataaacccaactgtgaactgtcacgttccaggtcggggcattctgagacggatctagaaaacggaagcaacaaggagacgacgcccacctgtacggtgaccctggataggccatggagcagcaccagtcgatacagccgcctgtacaggaacagcagcgatgcaggaggggactcctcggcttccgcgaaaaaattgggctccggcaagtactcgattagcagcagcagtagcagtggcgatgtgcccacggccacctttacactccgaagcaaacgcacgcggcgcaatcaagcggaggaggtacccacgagcacgggagtagagcaggcaggcccagcagctccaccaccgacgccaccaccaccgccaccacctccaccacccacaaatggccacaagccggctgaatcgaatggcggactggaagccaaattaaacggtctatctctgctctcaacttcacccaaaagaaatgccatttacgaacgaaatcaggagaccgccgatgatgcaggtgttagccaggatactgcggacaatgccgatgtgagcacctcggccacatttaagctaaacgacagcagcaagacgttggcgagaagtggcactgggagtagcagcactgcccggagcgtcctgccgcccatgacgcctacgtcaagtcggtactgggatcgggacagcggcaccagccgcagcagcataggcacctcctccgcactgaactcgtcatccctgaaacataactcggatgatggctacaagaccgcctcctcttcgcgggatgagaagtccgaaggtctgtgcggtctgcgaaacattgggaacacttgctttatgaactcggtcatccagtgcctgagtcacactcaagagctgacccgcttcttgcggtcgcaccacggctctcgttcgttatccaccaaggatcagcagatactccacgaatttgccaaactcattcaggagatgtggaccgctaacgtgcacacggtgacgcccatggagctaaagagggcgttctcgaccaaacatcgcatgtacagcgactacaaccaacaggatgcgcaggagttcctgcgttttttccttgactcgctgcattcggccctcaattcgggcgtcaagggtgagacgctcaacattgacgataatctcagtgacaataagaaggcggacttgacctgggagtggtatacgcggcacgagaactctctggtgcgcgacctgtttgtgggtcagctcaaaagcacactgaagtgcaccacctgcggtaacaccagcgtcacctttgatccgttctgggatctgagtgtaccgttgccgtcttcgtcccgctgcaagctagaagcttgcctcgacctctttatccgcgaagaggtccttgacggcgacgaaatgcccacgtgcgccaagtgcaagacacggcgaaaatgcaccaagagcttcaccattcaacgtttccccaaatatcttgttatacacctaaaacgcttttcggagacacgctggagcaagctgtccaacatcgttgaatttcccacatcagacagcgagctgaacatgggctcctatggcgccaactccaactcgaatgtgcattactcgctctatgcgatatccaatcatatggggtcaacggctggtggtcattatgttgccctttgcaagcatccagtttcccgcaagtggcacgaatttaatgataatatagtcagcgatgccttgtccgaaaaccatctcgtttcatccagtgcctatattcttttctacgagcgtacgtaaggcccaatcggtgctctacgtgcagcactctgcatatagcgatggaaatcaagatgaccatggggtaggatgaaagcagaaggaaatgaatcaaacgaacttttagaaacgcttcgtagaattgcatacaaacaatttacttaatttaactcaacttaaaagcaaaacaaactaactcctaacttaaagcagaaacc

SEQ ID NO: 35601 - protein, 857 aa, DROSOPHILA
MRVIAPRRSSTSAAGSGSLYGTSAVGTSSGSTTSSNSTSGSHHISITGSGAVDRTSGGAATNGYSRISSSYDRGSSLSKWLPTSSGGSNSSGYGSSYYPTSYSTFSANSGSSSASYAPRSSVQRSSVGTTSSTSYMSGGSGSSSSAYRTSSYLSGSSYDSPTYSRYGDLVDSMPTKITTNGDSLSGSAKREDYGLRRGHDTVKKPPISGGSVGHNCSSSTASRDTKAVDGNKRLSSSSSSPSLARLVATSGLDIYEKYSPANYKPNCELSRSRSGHSETDLENGSNKETTPTCTVTLDRPWSSTSRYSRLYRNSSDAGGDSSASAKKLGSGKYSISSSSSSGDVPTATFTLRSKRTRRNQAEEVPTSTGVEQAGPAAPPPTPPPPPPPPPPTNGHKPAESNGGLEAKLNGLSLLSTSPKRNAIYERNQETADDAGVSQDTADNADVSTSATFKLNDSSKTLARSGTGSSSTARSVLPPMTPTSSRYWDRDSGTSRSSIGTSSALNSSSLKHNSDDGYKTASSSRDEKSEGLCGLRNIGNTCFMNSVIQCLSHTQELTRFLRSHHGSRSLSTKDQQILHEFAKLIQEMWTANVHTVTPMELKRAFSTKHRMYSDYNQQDAQEFLRFFLDSLHSALNSGVKGETLNIDDNLSDNKKADLTWEWYTRHENSLVRDLFVGQLKSTLKCTTCGNTSVTFDPFWDLSVPLPSSSRCKLEACLDLFIREEVLDGDEMPTCAKCKTRRKCTKSFTIQRFPKYLVIHLKRFSETRWSKLSNIVEFPTSDSELNMGSYGANSNSNVHYSLYAISNHMGSTAGGHYVALCKHPVSRKWHEFNDNIVSDALSENHLVSSSAYILFYERT

SEQ ID NO: 35602 - DNA, 3483 bp, DROSOPHILA
aatgaattaaagaaataagcgaaatacttacatagattaaagattaaaaaccaaaccaggaaactgatgacgaactgcacacaacacagctagaatacaatactatttaaagatacaaactaaaagataaaacaaataccgaaatatatgagcgagagagaatacaagattgttgctatatccatttaacaaacgagcgaaaataagcaaacaaactatgatcatttcagataagacacgaccctccatcaataatctcaaatcttaaccacatcccatactttccacaggacaaagcgactttttcagataaaatcgaatacattttttttatgtatcttgtaatttatagcaatttcacaacttatatataaatatgtatacagaaagcgatagcagtaataataatcccgatgatcgtgtattgtaaatacagcatgaaaggcatattttaaacgaaaaccaacttaggccctgattttgtatagccatttaagaggccacttcacgggaatttatatcctcatatccgaatactttttcgtttgctgcagaagagtaagaaactgaaatcaagtctatggaatttggaattggatatattttatacgctcgtagccactaggcgaagacattttcattaatttggcaaaccacggtttccgtaaaaaaaataatcgaaaaaaaaccaagttagaatataatttttaatttaatctttattttcgtgtgccctgttttgcattatccgacttacgttacatttatatatgaaatgtatatgtacacaaacacacacacacacacacacacacactcaagcgcatatatatatgagcatccgatcgggctaaagtatttactagaaagctaatgattgatcgatggaatggatggatcacaaaaaccaaacaaaacaaaagatcactgaggagtttgagaaaacaaaccaaatcagacaaatatttaaataaaccatttttaaataatgaacacagtctcaaattaaatcgggaagatcttcgggtgcacaaatgttgctgatgtccactactcctccgtgaaacgcttcctccggtttcccatctttttttcctgcatcaaaaggggcggcagggctacatgaaaaggtagctaggatttgtggttcatgatatacaatgaactggatgaacttaccttttagtcgggcttttcttggctatcagcagctcgttaacttttagcttcttaagattgaccacaaggtgacctgtaatctgggaacgctgcacagtggactcatccggcttgacctcctcgctgtacgcgatctggaagatcttttttttgacggtgactctagtgtatgtggtctgcacatcgacgtcaattagagaggtatccaggtgtctgggcgaaggaatatacatatgcaatattaattaagaattttgaagtgtatgtatatgattggggcgtagaaacgatcaagcaataccaatatcgatatacatatgtaatatgttggtgataacttgtaagatatgtataagtttggttaagacatcttagcctagcttacctgtacacctccagttggagcaagtaatggtcggcctcatcccgaaacttaaagggcagtttggcctggttcagattgtagggtctgccacaaggagcgaagaggttgcgctgtggcttcagagggtccagtggggacttggtttcgtgccgctcccgtcccaatcggtgttgccgagcgatctctgtgcgaatctccgggcagtgctcgctcttcgcctgccaaaaggcctttatgcgctcttcttcgtcctctatgccggcacaatgttcagccagagcggactgctgcttcgccacccggatacgctgctcatcacgttcgatgtcctgttctacctgcttctgaacaatgatggaccggttcttggacagttcccgcaacgctcgcagacgttccgagggagtgatctccacgcaatccaaactgttcagctgtggcaaggtggccaccacgtagtccctgtagtgcggataatccacgcaaggattaccaatgagtaccaactcgcggagattgtaattgccacatagcgactcaacactggttagctctcttataaagtttaaagtaagatccagtttactaagcgactcacagccctccagattctccactcgttctatgttgttgatggccacattgaggtactccaggcgcttcagcttgtgcaagttctccaggcgcgcaatcaggttggattggaggagtaggatcttgaggtcgcgacaccagttctggatgtgttcaattacctcgatgtcctcctggtgcaaggagatctcttccagcgtgctgattagacgttcattgtgctctgatttcttgcggaccagctcttcggtgactgcggattagtcagtttaattggtacgttaacattactattctacaatttcaattactcactaagcaccatactgccgaatgtgtgctgtaatgaaagttaataaacttccacaagccgaaaagggccaggccaactccgttgctaggcaattttatattccacattcctcgttattattattggagaataaaataataaatactatactattcaaaactcgttactcagcaatgtacatacttcaaaagcgggcgagaaattttgaaattttgacatttttctcgatatcgatatcgaaaacaaataaaaatgatttttcactagcgggcgtgacagtttggattggtttgtggacgttggagaggtgtggccaaaatgtgtttcgtataccgatagaaattcgccagataataaaaaataaaaataaaaacgaaaaaatataacaaaattctacattttacatattttttatacgagccttgcaatgggcatagttaaccaatcccagataatatgtaattagtttctaatcccagataataattacatatatttcatagcgcccccactatgctgcccgctctgaatgaatttcgcccctggacaaacgagagaaatctaatcagctgaattacaattaagtagtttaactagcgaattaacagcgacgcatttactgcggccagctctctagtcttttagcagcgggcaggcggaaggttcacaaaaactaaattcaaatcgaatcggctgacagacagatacatatagaccggcaatgagttcagataagaacggtgatatcttgcggccacttagcgatagcgaagtggacgaactgcttgatctatacaaagttaaattcggtataaggaacttccactacctattactgtacaaccagcgaaaatgggaccgccagctgagcgaggctcaaataccgcgcaatgatctgaaccacatttctctgagaaagcagttctacacccatcgaaggggaaacttccggacgtggggcacctatgtgagccttcatcgggacatcgtgcagagcgtctccttcttcagc

SEQ ID NO: 35603 - DNA, 1188 bp, DROSOPHILA
atggtgcttatcaccgaagagctggtccgcaagaaatcagagcacaatgaacgtctaatcagcacgctggaagagatctccttgcaccaggaggacatcgaggtaattgaacacatccagaactggtgtcgcgacctcaagatcctactcctccaatccaacctgattgcgcgcctggagaacttgcacaagctgaagcgcctggagtacctcaatgtggccatcaacaacatagaacgagtggagaatctggagggctgtgagtcgcttagtaaactggatcttactttaaactttataagagagctaaccagtgttgagtcgctatgtggcaattacaatctccgcgagttggtactcattggtaatccttgcgtggattatccgcactacagggactacgtggtggccaccttgccacagctgaacagtttggattgcgtggagatcactccctcggaacgtctgcgagcgttgcgggaactgtccaagaaccggtccatcattgttcagaagcaggtagaacaggacatcgaacgtgatgagcagcgtatccgggtggcgaagcagcagtccgctctggctgaacattgtgccggcatagaggacgaagaagagcgcataaaggccttttggcaggcgaagagcgagcactgcccggagattcgcacagagatcgctcggcaacaccgattgggacgggagcggcacgaaaccaagtccccactggaccctctgaagccacagcgcaacctcttcgctccttgtggcagaccctacaatctgaaccaggccaaactgccctttaagtttcgggatgaggccgaccattacttgctccaactggaggtgtacagacacctggatacctctctaattgacgtcgatgtgcagaccacatacactagagtcaccgtcaaaaaaaagatcttccagatcgcgtacagcgaggaggtcaagccggatgagtccactgtgcagcgttcccagattacaggtcaccttgtggtcaatcttaagaagctaaaagttaacgagctgctgatagccaagaaaagcccgactaaaagccctgccgccccttttgatgcaggaaaaaaagatgggaaaccggaggaagcgtttcacggaggagtagtggacatcagcaacatttgtgcacccgaagatcttcccgatttaatttga

SEQ ID NO: 35604 - protein, 395 aa, DROSOPHILA
MVLITEELVRKKSEHNERLISTLEEISLHQEDIEVIEHIQNWCRDLKILLLQSNLIARLENLHKLKRLEYLNVAINNIERVENLEGCESLSKLDLTLNFIRELTSVESLCGNYNLRELVLIGNPCVDYPHYRDYVVATLPQLNSLDCVEITPSERLRALRELSKNRSIIVQKQVEQDIERDEQRIRVAKQQSALAEHCAGIEDEEERIKAFWQAKSEHCPEIRTEIARQHRLGRERHETKSPLDPLKPQRNLFAPCGRPYNLNQAKLPFKFRDEADHYLLQLEVYRHLDTSLIDVDVQTTYTRVTVKKKIFQIAYSEEVKPDESTVQRSQITGHLVVNLKKLKVNELLIAKKSPTKSPAAPFDAGKKDGKPEEAFHGGVVDISNICAPEDLPDLI

SEQ ID NO: 35605 - DNA, 4038 bp, DROSOPHILA
actaactggcggtcggaggcgctgctcaagcggatcgggtaccagaaagatctggtcaatgagtggattaagctggtaccgaattcttcatagacgctccggtcgccaaagaactggcgacggtgctggatagttagacaactggtaaataggtgaggtcaagaagaagacgaggcgatttgcatttgctttgcctatgtacatgtacatacatcaacaattttattttggcatttaacatgcgtacacgctttctgaatacactttacggcttaatgaaattcgaaaacaaattcgaaactagcgggcgggaggggatatggaaatcggggactcgaactacttatttacacatacggctcgcctccaaaacaatatcaaaaatacattttatttacagcattgcattgcattctaggtatatatacatatattacgcacttttgactgaatcaaatttgacattttcgagttaattagctaaagtatgtcatagggttacgcattttatacaccttgcgtaagagtgtgtcgttttctctcaacgggatttaaattgaaaattttgcgaaacattaagagcgataatatcttagaattaagacactccttcagtccctttactttaactactattcattagccgtattgattacgcaccttttacgtcttattttcatgttttaattcaatcatattaaagaagcaaacttaaatgtttcaaaagtcggttgtgacattgttttgtggggttgaagccacttcctttaaattcgattgaaaataaaaatgttgcttcttcaattaaattattaattttagagttgcgcctctttagtcaaacatatttaatatatacactatatatatatatatataaatatataaatataaatataatataataatataaatacatatatatatttatatatataaaagaggggagagtcggaatttggatggtggtcgtcacaggttaatactatttagctaacccgcttattggatacattcactaactacacactaaacaaatagtagccgcgttgccgtcccgctcggcattccgctgccattcgccagcagactgtttccgggcgttctgtgcaagccattggatagcttcccgttgaccgatccccggtagtacggatctgcctgttgctccagcggcgagtacttgacatagctagtctgcgacagcggcagtgtcggttgctcgcgaccccgcgtaagctgtttggcgcgattgtagcagagcacacccacaatggccagcgtcatgcctacgcaattgacccacgtcactgggttgcccaggattaggagcgatactgcgatcacaaatattcgcttcgatgcgctggccaccgcataggtgagcggagtcaccagagacaagacgctgaaggcgatgatgttctgcagccagtttaggacaccgtcggcgaaaagcagggcaataactcgatagtctaggtttttctgtaaaagcgcaaatttgggttagttaaaaactttaagcacaaattcctctccataactttggttttggtcattagttttcttccaaagtatttagtgttgaatacacttttaatcttgtattgctcgtgtgtatttacttaatttgcttggaaaggacttgttttcttaaataatattaacaatgacatccaagacaaatgcaagggaaatgtcatttggcataataaggaacacataaagaagtagacgatagaaaggtaagacgaaaggtaaccctaactagcgccctatcaaaaatactattcagaagatcagatgttgctcatttgtgcagaataaggtaccctactcacaatggccgtgtggcggaatactgcaaagctgtccatgtaaagccatagggggaggaagatgaacagcgacagcttgccaagcaaatgcagcagccgtaaatggtggatgttggtgtccttgagaacctgtcgacgataaaggtaatttacaaatgtaatggaatcaataacagactctgcgggggcgttaccttttttgagaaaatgttttgcatggagaagcccattgtggagatgagggcgctgataaggcccatcatatcaaaggagatctccgtaactgtggctattcccacgccggtgataatgggcagcaggctcaggtacacgagtgtcggttgtttctcaccaaaaaaaacgcgtgtcaggacgacggtgaatagtggcattgtggctttgactgttaaagaataaaaacgtattaaagttaagacctattcctttaccggcaaaataagaacctactttaaacttaaattcgttgatcaatggtttggcggtaatcataaatattaactaaattgtacttaagcattactttttataattgtttcgaaatcggatttagttgttggattaagcattgacacaacaactttttatatcactttacagcgtttacattgatcattaaaatgcttgaacaccttggaaatgtacaactaccttaaatataattttttgaatagctcttcaagataattggtactgtaataaggaacataaatataatgtcaatatgccaagtacatatcagcgacacgatcgttatcacatcttgccgcttggaaatttcctcccaagcacatcacacagattctgctgacgtgttgggataccactagattggcgggcacttgacttacccgtgtgcgcgtaggaaactggcaccttccatagagagatgtgcgaggtgacggaggccaggagcttgccaagcgctagcggcacaataaggcggtaatagtagggacgaggtatgtcctggtacttccggatccgccacaggttgaagaagggtccgctgtacagcgtgatgctgcacagctgcaccagagtcacggtcatcggaaaagggaactcgttcaggaccatcttgccgatcacgttgttgctggaggagatcacgtaccagaagaggcacatcagcagcacgaccgctatgtgccgcgacccagtccgcttgcctagcatttttcgtctgggattggcccgtgctctcgtggcttaggtgcggtgccgattctaccgcgaatcgttggcgacgggcgaggggcaagtggcaagacctggtcctggagctgctgatggtgctgacaatccgacacgcggggcttattgcattgcgcctgttgttcttttaaaatttaaatcgtctattaaaacgtcgtctgttttttgttttctgtcagtgttaccagactgttaaaagcccttttaccccaaacgctctcgataaaccgcaattttgtactccagtatgcaacagttccgtcaaaattaaaacaaaagtatatacatatataagttatttccaaataaaaataagctaatgcattattttaagaactgtagacggttgatagtgtttatttccctgccaaattatcattcgaaaacgtatttgataacatggctaatcaaatttcgtccttccttctgggttttgataaccgagggttttgtatttgtatttgatgcatatccaagtatagctataaaataaatcgtgtatgagaatcgtttatgggaatctgattgtgttttcagatggcgatgaatgatgggaatgtaatcgatatgctttaagtcatacgattttatattgtgagaaatgagcagtgtggaattagaagtgtgaagttttatatattaatattagtagctttgatttgacattaattattgaagtaaactttttaactggatcatgtccaaataaagaatagatgtcattaatatcaagcggtgttagataatgcacatcatatatgtgtgtcaaattagcatcaataatttagcagcgaatatggagcggtggagtttggaacacgagggctgttaggaatttcatattatctagctatctattacaaagacagaaacatctaacgatctaagcagcttttggctaactttgaagtctaaaagagaatttgaaaagcgttcgaaaaatccgaactattttgcggat

SEQ ID NO: 35606 - DNA, 1151 bp, DROSOPHILA
atgctaggcaagcggactgggtcgcggcacatagcggtcgtgctgctgatgtgcctcttctggtacgtgatctcctccagcaacaacgtgatcggcaagatggtcctgaacgagttcccttttccgatgaccgtgactctggtgcagctgtgcagcatcacgctgtacagcggacccttcttcaacctgtggcggatccggaagtaccaggacatacctcgtccctactattaccgccttattgtgccgctagcgcttggcaagctcctggcctccgtcacctcgcacatctctctatggaaggtgccagtttcctacgcgcacacggtcaaagccacaatgccactattcaccgtcgtcctgacacgcgttttttttggtgagaaacaaccgacactcgtgtacctgagcctgctgcccattatcaccggcgtgggaatagccacagttacggagatctcctttgatatgatgggccttatcagcgccctcatctccacaatgggcttctccatgcaaaacattttctcaaaaaaggttctcaaggacaccaacatccaccatttacggctgctgcatttgcttggcaagctgtcgctgttcatcttcctccccctatggctttacatggacagctttgcagtattccgccacacggccattaaaaacctagactatcgagttattgccctgcttttcgccgacggtgtcctaaactggctgcagaacatcatcgccttcagcgtcttgtctctggtgactccgctcacctatgcggtggccagcgcatcgaagcgaatatttgtgatcgcagtatcgctcctaatcctgggcaacccagtgacgtgggtcaattgcgtaggcatgacgctggccattgtgggtgtgctctgctacaatcgcgccaaacagcttacgcggggtcgcgagcaaccgacactgccgctgtcgcagactagctatgtcaagtactcgccgctggagcaacaggcagatccgtactaccggggatcggtcaacgggaagctatccaatggcttgcacagaacgcccggaaacagtctgctggcgaatggcagcggaatgccgagcgggacggcaacgcggctactatttgtttagtgtgtagttagtgaatgtatccaataagc

SEQ ID NO: 35607 - protein, 373 aa, DROSOPHILA
MLGKRTGSRHIAVVLLMCLFWYVISSSNNVIGKMVLNEFPFPMTVTLVQLCSITLYSGPFFNLWRIRKYQDIPRPYYYRLIVPLALGKLLASVTSHISLWKVPVSYAHTVKATMPLFTVVLTRVFFGEKQPTLVYLSLLPIITGVGIATVTEISFDMMGLISALISTMGFSMQNIFSKKVLKDTNIHHLRLLHLLGKLSLFIFLPLWLYMDSFAVFRHTAIKNLDYRVIALLFADGVLNWLQNIIAFSVLSLVTPLTYAVASASKRIFVIAVSLLILGNPVTWVNCVGMTLAIVGVLCYNRAKQLTRGREQPTLPLSQTSYVKYSPLEQQADPYYRGSVNGKLSNGLHRTPGNSLLANGSGMPSGTATRLLFV

SEQ ID NO: 35608 - DNA, 7934 bp, DROSOPHILA
caagctgcagctggtagctcgaattaaagtgaaacaactgatcgtcctctaagattgctgctctttctatatttccataaccgttacttctgaactgagtgcagaccagtgataggcaaccgcgttgtttttaatatccacgtcacgatagtcacgaaaatgtcttgttttacttgggtgcgtggcgaatccttctgagcggaaatcctttggcacgatttggcgacggtgagatatcaattaaaaaaacaagacggaaactagcttcgttaattttcttcacaataaatgtttattataatttgttaatagttagggtgtaatttgcaatagatagctttctccgcaaatggggcgtggtctgtgcaaactcctaaagcgccttaaaatatatgtaagttcaatacgggttcgactctggatctcgtgctaaaaaaaaaatgaagaaacaaacaatatatgtaccttaattttgaacatgactgtatggcaggccggcgagctcttcttcgagcccttcggcgattccatgtgcggtgattatgctgctgtgtttgctcgattgcgctaagataaggatgcgtgagcaccgtgaaatcggcttgatatatgtatgtgtagatatagaagcatttatgccatatggttggttggccaaaaacaattttcaaggtacgctacacatgacgatccgtgttcgcttcgctgcgattcgatttcgattcgttcataacatttttagactttaaattacaattacatttcgattttgtaaataatttggtttcacgcttgcattagccgagctttacgtttagactatgtgctatatatgtatgtgtaggtatacataaatcgtagtgtacgcgtacgggtagtatataaataattacaaaagaaggtagtgtctttactatgtaagaaaaaaaaatactttcacgccatctggaaacatatacaccggggccaggtccagttgatcggtatctccaccccgtttttactggcgcctcacggtccgctcgcgctcacgcccactctcctccctttggaggctgccgtggcggggcggcgaggtgtgcccagtggaggatccgccgccgttaagcacgcgcgccttgcgcgaccgcttgaacttggccatgtcctcgccaaacacgtcgccggtcctcagggccgagatgagatcgtcaaactcgcccttgttgtcgccgccctttgccggggagtcaggatccccgttggaagagcctgacttgaggcccagattgcgagccacgctggtcattaggccggtcttgttcttgcgctctattgtgcgctttttgagctccgcctcctgcttggcacgcttctcctcttcctcctgtcgccgacggaagctctcgttgtcatgccgcgcctccgcgaaggcggcgaggaaggagtcaaagatgccaaagaactcgtccggctgcaaaaccgaaccatcctcgccgaagaggcgtacagcacggtcaaagcgcgtcttcatgtcctggaacttgtcctccagctcagcgaagcgcactgacgcctgggcgtggaactcgcgcattacgggcagaaagcggtcaccctgttgggccgggcccgaactgcggtggaactcgatttcgcgcgctacgtctgccagaccagtgcgcagcatctgaatgtccttgtccatctcgcccagcgacaccttggaggcttcgcgcacatgcgggatatcgtcctccaacttaagaaggtccttgaatttgcgttcaatcacctgcacgaggtagtgtagcagggtggtgcccttggcggcactggacttggtgtccgccagccggttgagtgacgccagtcggaatcccgatgcgttgccacgtgccccgcggttcatgtagttgcctggtgggatagaggtagtctgggttattgagtgcttagcaaacggacagtggatcatacctagggcgaggaccaactccagaagcttacgcaggcgacgggaacgagccacctcacgagaggcctccatcacactggttatgcgggggaccaggtcgttgatggtcagcatgaaacgcttcttgtagtgcagactcttcagtcgctgctcgtagtgcggaatcctgaaaatgaaaatacttagaacaagaacccctttcagggaattgctggaaactcacttggatatctcatagaggaatcgatcggcccgagcgagagactcaatgtcctcgctgtgctcgtccagcaaagctcgctcctccgccgagggcgtaaacttgagcagctgctcgaccatgtccagctgcagctgctcgttgctgtccatggaaagaatggccctgaaagcggcattggttagtatttacgggtcgtggcaagtgaaagtaagacctactttgatatctccatgtcgctcatcttcagtttgctcagcagaatggtgcagttctgcgcccgacgtccgtcgatcaccgacagcactttctgcttggcagccttgccagttacccgtaagtcctcataggatccatcagtggcctgtgaaacaaaaaggaccttagtagggaagggaaactctatgaaggtcccacattataactcaccgataccccgttcttttggtaagccgagaaaagtttatcaattgactccagctccatgttgttgtacagcttgctttcgtcgagctcgctccaaacggtaccctgcagcttggcgtccggcagtttcgaccagttgaagctcttcaggggatttgtcggctgtggcacattcttctttggcagatccacttttggtggcgctggagctgttgtgagaagacgcattagttgataagatcgattgctttgttaatttaaaagctatttacccatcgtttgtgccatgcttggcggaggtggaggagctcccgggcaaggaggtggtggtgggggcatcatggacggcgccatgggtggcggaggcggcgggatggccttaagcatgggaggtgccggtggaggcgagacggcaccattgcatcccgtgagtccggccaccttctggtcgtctgggatgctgccctcggtaaccagtctctccaagcgagcccgttcctgctgctcgctgatcaatcggtgctgcaggtcttctgctcgcatctctgcagtctgcgcccgctgcaccgcctgtgagtgctgcgcggactccttctccaaacgctcacgcatgcgcgctagtcccgtctccaagtcctctttctcttgcatgcggagatcgagttcctgctccttcttggccagccgcgactgcacgtcaaagttctcgcgctccagctcgtcagcccgctttcgcgcttgcgtcagctgttcctccttgaccagcagacgcacaagcttagccacgtcgatctgcaagggcgccacgtcgggatcatggactggcgactcggcggctagcttcagctgcttctcagggtcatcggggtcgacgataagatcactgtttggccgctgttccacctgcagcactatctgctgtaccacgcgatcaatcagcaaccagtgctccgtgcagtggcccgtatctgttggatttcgattgggattagttacagttacagttaacaactccagagaatatcacttacagggcagcagaagcatgtgctgcagaagggagagcatgtggggatacgcgggcgaatgactgagcttgcggcgcagcagctcaaacattgagccggcgctcttggtgtccacgtgctcctccttaaaacggcgggcaaactccttctcatcctcagcacgaaccatctcaaagaagtcctgttgattaaaaaaaaccattcagagaatgtcttggcactataacctttgagtactaaccaaatgcctgtccagcgtttcgttctcgtgcgtgcgcagcttgtcgatcacaggctgtataccgagcatgagaaactcgtacctcaagtgcagtcggaactcgaggttctcctgtccaggtccgtaattaagcaccgcatttacgaatgacataagggcggtctttagattgacattgtccctgtacgcataggtcgagcggtccaggtcgttgacaatgctctggaaacgggtgcgttccgtagcgaagacctggaagtggagcatggcctgcagcaccttgcgatgaccgccgggcaccagacacacggcacccagaatctccagggcggcgattttcgtgcgaatgttgtccgccgctagggatctggctatggtgtcaatggccgttggatgggctagcacatgcgcccgacccatcgagttgttcatcagggccttgatgcaaccaatgagactggtgtgcagcgggctgttagccactcgaatgtccagctgcagcaggaggtcgagcagagcaggaagcccgtccagctccacgaatcggagaacaaaactgtgggtggatgtgcgtagcgccgtcttcaaagcgtccacaaaggcggcatggccatccaatcgattgcccagctcatggctgggcgagtcttccggcgagagcgatatgtgcaccaccagctccttcagtcgctcaatgtagtgctctgcggtgggtggctgggtgacggccgctgcatctgggccatcggccgcatccaagggcagctttctcgagcagtagatttgccatttcttctgcgcgggcaggctgagcatcgcctccttgttgggggccgtcagatcgagctcctccaccagctccgcgaacttggtgtccagctcatccactgacggcatgggttgggtgggcgtgagcgtctgcagggtaaacgcgccttccaccacacaaatctcgggtggctcatcgtcctgtaacggataagtcagaaaaatcgattagtggcatgttgctcaagcggacacgttctccgccagccaacagtgcgtgtccaattagacagacggcttgcttagcctcgagacaaggcccaataccacgaaggcaaaccgccgatccaatcaaccagttgaggaagcggctctcctcgctgcgcttttggcagctgtttgcctgcccagtcagtgactcagtcttggttctttagcctcgacttggaaaggaattcttgcaaattactctatttaccgattgaattcttgtaacagctatgtttggatcgttcccagggcaatgggaattatcgcctcttttgcacaattcgtgcacaatttgacgaattcgctgacacagaatcggaatcgacgagggttgcaaattcggttgggcagttggggcagtgctcaagtggcgactccgatttcgattggtaattgggtctgtctgttgtccacagctcgcacgtgactttgactgtttttgtgtttaagatattccgcctcggaccgagttcttttttgtgcaaactacacccacactttggacattccgagcgggagactttggactcgcagtgaagattatgtcttgttatgtatgtcatggtaagtggagtcttggttcaaggatcataatacttgaaccaagtgcgttactccaaaatatgcaaatgccaacgatcaactatcacctaccttgaagcaaccgcaccacacccttctgcccctgaagccgggcatcttcttcttctgctggtgtctgtagtgcttctgtagcggcgtctcgttgctgctggtattgcctgaaagccacttcctgaggccaagaccgttggtgttgctgctgccgttgcagttgctgttgcaattgccgctgccgtcgagatcctcctttaggccaaacggatagccgaaggtgtagcctagtatattgtgggtgtagaaggaaccggcttcgctgcccaggccgttctcatggttggactgcgactgctgctgatcactgccaccgccgttgtcgttggcgctgctgctgcgtccactgcactgagtccagtagcgatacagcccgtggaagcagttgtagtcgctgagtaagcccttccagtgttcaaagtcgaatcgctcctggaagttgttggacgaggtgtcgctgccgctgttgttgttgctgaggggatgcctgctgacgttgttgccgctgcagctgttgctgctgatgggcagggtggcggtgctgccctggcttaggtcgctgcagctgttcaggctggtgatggacaccaaactgctgttcttgtagccgtcgatggaactgcctgtggttggtgctttggtgctggtgctggcgttgccgttgccgttgtcactggttatcgttatcttagtcactccagccgcagtgctggtagctgccgatgcagttgcagtggctccttctcctattcctccattgatggcaatgcagctgccgttcaagctagtcacactcgtgctggctccaccggatggcgccgccttgggcttctctagcgtgctctccggacttgtctgcaatatctctgtgtttgcactgtgtgtgtccggctcattgatgcacacgatgggacacgactgtagagtctgcaatggagaaagagagggaatgtagaacgtcagtcaaatgctagtactcccgagtaattgacctgcccacaacattgtgacagcccgctaatgccggccgacaggccgaggtgtcacgccagacaaatgcccgtcaacagccgcctcatgccaagacagccaagtcaggcaagctcggccaagtcagtcaaggcaacccaacgaacagccaggccgcccagttaagccaagaaaccaaaccatccagccaaacctaaccgagtcatggcaagaccagaccagacgggccaagaagacaaatgcaatcgcagttgcagttgcacatacacacgcggaaacttgggggctctggtgagtggtcttcactcaaccaaatcggttgcaactgcggttctaattctaatgtgggcaccgacacaatcgcagcatgcccaactcatatatggcgtactaactatgtacacgcaaaacctttccccatgttaagaggtcgcccgtcagatgtcagcgtatacgcaaaatttgtccacttccaattcattttcactggcaacaatgcatactcgtgggtttctagcttttctggccgtgcgtggggtacaatacagcggataccttcatgcatttgtactcgcagggcgaaccaaccaaactgttccaaagaaccgaatcaagccggcaagaaaaacattaatacaattgttgccaagctgctggatctgtcgcaagtctgcctgcgatccgtgtggcaactgccgcagaacccaaaattgaattcatgtgggagaggagtttggcttagctttggctttgctttccccttctccctctccttatgttgttattcaaattgtgagttgtgagttgtgaactgcaatcgcattgcatactgcatactgcacactgcactgaacagcacaatccacaatccgcagcgccacttcagacgtaatcgaggagcggacgggggtaccagtaccaaccacattatgctgatgatggcttattaatttgctttcattgcgcctctggcccgttcggagtaagtggaatccgatttggagtatgagctggagctggaattgctatttttatttgtatttgaatgggaatagcttggagtacgcgcgcgtggttcgtctctcttgcccaatggattgggtaatctgctgatttttttttgtttggcgtagcgtgtgctcaatcaacggccatcaatcaaccagctaacaggtttgatcgatcgggattctcgcatcaatctcgagcaccaaacgacaacaattaatagtgagtgcgtaaaaacgatctcagaactgacattgtaaatctttttttttttttgctaattttgcttgccaattcgcatactttacgaacagactaaatgcatttaagcgaaggcagagttagtttttaatagaaaagaaacagacatat

SEQ ID NO: 35609 - DNA, 4290 bp, DROSOPHILA
atgagttgggcatgctgcgattgtactctacagtcgtgtcccatcgtgtgcatcaatgagccggacacacacagtgcaaacacagagatattgcagacaagtccggagagcacgctagagaagcccaaggcggcgccatccggtggagccagcacgagtgtgactagcttgaacggcagctgcattgccatcaatggaggaataggagaaggagccactgcaactgcatcggcagctaccagcactgcggctggagtgactaagataacgataaccagtgacaacggcaacggcaacgccagcaccagcaccaaagcaccaaccacaggcagttccatcgacggctacaagaacagcagtttggtgtccatcaccagcctgaacagctgcagcgacctaagccagggcagcaccgccaccctgcccatcagcagcaacagctgcagcggcaacaacgtcagcaggcatcccctcagcaacaacaacagcggcagcgacacctcgtccaacaacttccaggagcgattcgactttgaacactggaagggcttactcagcgactacaactgcttccacgggctgtatcgctactggactcagtgcagtggacgcagcagcagcgccaacgacaacggcggtggcagctacaccttcggctatccgtttggcctaaaggaggatctcgacggcagcggcaattgcaacagcaactgcaacggcagcagcaacaccaacggtcttggcctcaggaagtggctttcaggcaataccagcagcaacgagacgccgctacagaagcactacagacaccagcagaagaagaagatgcccggcttcaggggcagaagggtgtggtgcggttgcttcaaggacgatgagccacccgagatttgtgtggtggaaggcgcgtttaccctgcagacgctcacgcccacccaacccatgccgtcagtggatgagctggacaccaagttcgcggagctggtggaggagctcgatctgacggcccccaacaaggaggcgatgctcagcctgcccgcgcagaagaaatggcaaatctactgctcgagaaagctgcccttggatgcggccgatggcccagatgcagcggccgtcacccagccacccaccgcagagcactacattgagcgactgaaggagctggtggtgcacatatcgctctcgccggaagactcgcccagccatgagctgggcaatcgattggatggccatgccgcctttgtggacgctttgaagacggcgctacgcacatccacccacagttttctggacattcgagtggctaacagcccgctgcacaccagtctcattggttgcatcaaggccctgatgaacaactcgatgggtcgggcgcatgtgctagcccatccaacggccattgacaccatagccagatccctagcggcggacaacattcgcacgaaaatcgccgccctggagattctgggtgccgtgtgtctggtgcccggcggtcatcgcaaggtgctgcaggccatgctccacttccaggtcttcgctacggaacgcacccgtttccagagcattgtcaacgacctggaccgctcgacctatgcgtacagggacaatgtcaatctaaagaccgcccttatgtcattcgtaaatgcggtgcttaattacggacctggacaggagaacctcgagttccgactgcacttgaggtacgagtttctcatgctcggtatacagcctgtgatcgacaagctgcgcacgcacgagaacgaaacgctggacaggcatttggacttctttgagatggttcgtgctgaggatgagaaggagtttgcccgccgttttaaggaggagcacgtggacaccaagagcgccggctcaatgtttgagctgctgcgccgcaagctcagtcattcgcccgcgtatccccacatgctctcccttctgcagcacatgcttctgctgccctatacgggccactgcacggagcactggttgctgattgatcgcgtggtacagcagatagtgctgcaggtggaacagcggccaaacagtgatcttatcgtcgaccccgatgaccctgagaagcagctgaagctagccgccgagtcgccagtccatgatcccgacgtggcgcccttgcagatcgacgtggctaagcttgtgcgtctgctggtcaaggaggaacagctgacgcaagcgcgaaagcgggctgacgagctggagcgcgagaactttgacgtgcagtcgcggctggccaagaaggagcaggaactcgatctccgcatgcaagagaaagaggacttggagacgggactagcgcgcatgcgtgagcgtttggagaaggagtccgcgcagcactcacaggcggtgcagcgggcgcagactgcagagatgcgagcagaagacctgcagcaccgattgatcagcgagcagcaggaacgggctcgcttggagagactggttaccgagggcagcatcccagacgaccagaaggtggccggactcacgggatgcaatggtgccgtctcgcctccaccggcacctcccatgcttaaggccatcccgccgcctccgccacccatggcgccgtccatgatgcccccaccaccacctccttgcccgggagctcctccacctccgccaagcatggcacaaacgatggctccagcgccaccaaaagtggatctgccaaagaagaatgtgccacagccgacaaatcccctgaagagcttcaactggtcgaaactgccggacgccaagctgcagggtaccgtttggagcgagctcgacgaaagcaagctgtacaacaacatggagctggagtcaattgataaacttttctcggcttaccaaaagaacggggtatcggccactgatggatcctatgaggacttacgggtaactggcaaggctgccaagcagaaagtgctgtcggtgatcgacggacgtcgggcgcagaactgcaccattctgctgagcaaactgaagatgagcgacatggagatatcaaaggccattctttccatggacagcaacgagcagctgcagctggacatggtcgagcagctgctcaagtttacgccctcggcggaggagcgagctttgctggacgagcacagcgaggacattgagtctctcgctcgggccgatcgattcctctatgagatatccaagattccgcactacgagcagcgactgaagagtctgcactacaagaagcgtttcatgctgaccatcaacgacctggtcccccgcataaccagtgtgatggaggcctctcgtgaggtggctcgttcccgtcgcctgcgtaagcttctggagttggtcctcgccctaggtatgatccactgtccgtttgctaagcactcaataacccagactacctctatcccaccaggcaactacatgaaccgcggggcacgtggcaacgcatcgggattccgactggcgtcactcaaccggctggcggacaccaagtccagtgccgccaagggcaccaccctgctacactacctcgtgcaggtgattgaacgcaaattcaaggaccttcttaagttggaggacgatatcccgcatgtgcgcgaagcctccaaggtgtcgctgggcgagatggacaaggacattcagatgctgcgcactggtctggcagacgtagcgcgcgaaatcgagttccaccgcagttcgggcccggcccaacagggtgaccgctttctgcccgtaatgcgcgagttccacgcccaggcgtcagtgcgcttcgctgagctggaggacaagttccaggacatgaagacgcgctttgaccgtgctgtacgcctcttcggcgaggatggttcggttttgcagccggacgagttctttggcatctttgactccttcctcgccgccttcgcggaggcgcggcatgacaacgagagcttccgtcggcgacaggaggaagaggagaagcgtgccaagcaggaggcggagctcaaaaagcgcacaatagagcgcaagaacaagaccggcctaatgaccagcgtggctcgcaatctgggcctcaagtcaggctcttccaacggggatcctgactccccggcaaagggcggcgacaacaagggcgagtttgacgatctcatctcggccctgaggaccggcgacgtgtttggcgaggacatggccaagttcaagcggtcgcgcaaggcgcgcgtgcttaacggcggcggatcctccactgggcacacctcgccgccccgccacggcagcctccaaagggaggagagtgggcgtgagcgcgagcggaccgtgaggcgccagtaa

SEQ ID NO: 35610 - protein, 1429 aa, DROSOPHILA
MSWACCDCTLQSCPIVCINEPDTHSANTEILQTSPESTLEKPKAAPSGGASTSVTSLNGSCIAINGGIGEGATATASAATSTAAGVTKITITSDNGNGNASTSTKAPTTGSSIDGYKNSSLVSITSLNSCSDLSQGSTATLPISSNSCSGNNVSRHPLSNNNSGSDTSSNNFQERFDFEHWKGLLSDYNCFHGLYRYWTQCSGRSSSANDNGGGSYTFGYPFGLKEDLDGSGNCNSNCNGSSNTNGLGLRKWLSGNTSSNETPLQKHYRHQQKKKMPGFRGRRVWCGCFKDDEPPEICVVEGAFTLQTLTPTQPMPSVDELDTKFAELVEELDLTAPNKEAMLSLPAQKKWQIYCSRKLPLDAADGPDAAAVTQPPTAEHYIERLKELVVHISLSPEDSPSHELGNRLDGHAAFVDALKTALRTSTHSFLDIRVANSPLHTSLIGCIKALMNNSMGRAHVLAHPTAIDTIARSLAADNIRTKIAALEILGAVCLVPGGHRKVLQAMLHFQVFATERTRFQSIVNDLDRSTYAYRDNVNLKTALMSFVNAVLNYGPGQENLEFRLHLRYEFLMLGIQPVIDKLRTHENETLDRHLDFFEMVRAEDEKEFARRFKEEHVDTKSAGSMFELLRRKLSHSPAYPHMLSLLQHMLLLPYTGHCTEHWLLIDRVVQQIVLQVEQRPNSDLIVDPDDPEKQLKLAAESPVHDPDVAPLQIDVAKLVRLLVKEEQLTQARKRADELERENFDVQSRLAKKEQELDLRMQEKEDLETGLARMRERLEKESAQHSQAVQRAQTAEMRAEDLQHRLISEQQERARLERLVTEGSIPDDQKVAGLTGCNGAVSPPPAPPMLKAIPPPPPPMAPSMMPPPPPPCPGAPPPPPSMAQTMAPAPPKVDLPKKNVPQPTNPLKSFNWSKLPDAKLQGTVWSELDESKLYNNMELESIDKLFSAYQKNGVSATDGSYEDLRVTGKAAKQKVLSVIDGRRAQNCTILLSKLKMSDMEISKAILSMDSNEQLQLDMVEQLLKFTPSAEERALLDEHSEDIESLARADRFLYEISKIPHYEQRLKSLHYKKRFMLTINDLVPRITSVMEASREVARSRRLRKLLELVLALGMIHCPFAKHSITQTTSIPPGNYMNRGARGNASGFRLASLNRLADTKSSAAKGTTLLHYLVQVIERKFKDLLKLEDDIPHVREASKVSLGEMDKDIQMLRTGLADVAREIEFHRSSGPAQQGDRFLPVMREFHAQASVRFAELEDKFQDMKTRFDRAVRLFGEDGSVLQPDEFFGIFDSFLAAFAEARHDNESFRRRQEEEEKRAKQEAELKKRTIERKNKTGLMTSVARNLGLKSGSSNGDPDSPAKGGDNKGEFDDLISALRTGDVFGEDMAKFKRSRKARVLNGGGSSTGHTSPPRHGSLQREESGRERERTVRRQ

SEQ ID NO: 35611 - DNA, 2693 bp, DROSOPHILA
tcaaaaacacccacacgcctgcgccttttgcagaaatgaaatgatgcagaagcaccgcaactttcattgcagcaggaagccagcagctatcggtaaatattgcattcatcagtgctctgcttttggcacactatttgttatgttcatgactcggtttccatcaagtcgagtcatcgaaattgaaatgttggcgtcgtgcgaaggcgatcgatgaacagaaactgcccattgctgagggcaaactggtgtgtgcgattgtggcacggcgtcactttcattttcagtctgcaaattgttgtacggaagtcgaaagaaacgtattggaaacccgaaggcagacctttatgcagaatgctgtaaggcattcagatagattactaacgcaatattacaatcatttaaaatccaagccaccaataaacttcactattaaatcttaggccacacgtcaagtgtcgcacattcctcacggggaaaacgtctacacagaaaaaaacattacgatctcttgtggctactgaacgcaagaaattcatgttgattatgaccatgttatagcaattttttctgtgcagcacggcagctaatctggcaagttcctgaagtggaaaattttgcattcgaagggcgacgaagaccaaaagtccccggctcagttacacgggttgttgatcccacaaaagacggcgaaagcaattttcgaacttgcaacattgcaaaatggtttcgtaagcgccaaaagccaaaaagttcatttaatcagaattaggtttaataacaacaagagttttaatcaatttgggcgtttcgatatcggacaattggataattgcttcggcagcagataccaggttacgcaactaggaggaagagttgcaagtggaaggtatcgctttcagcggaaccacaggtatcgaatgacatcggggtggcttcttatatatgcccaaagcgtcagggccactgcaagcatttgcaacagacaaccatattgagcagcatgttcaggttttttcacctcgacatcctggtcagcctgatcagcctaatcagctgttttgcattgatgaacgcccagcagcagcagcaattccaccagcaggaggtatcggggatacaactccacccaccatggctgtactcgatgccctggcgtcctttgatcctgccaacagccagtccttcactaccttctctgacggcgctggctcaactgagtcctggctacacgggcccgcagacctttcctccagttccacaggatcaacgccagcagacgcagcaatatcagcaacatcagcaacagcaattccagcaggcatatccgcagcaataccagcaacagcgataccagcaggaatatccgcagcaataccagcaaccctccgtcctggtgggcttatttactcctcaactgcaggcccagccactgtcagctcctcctccgcaggctggacattttagcctgcccttcaggccctcgcccttcgccggatacacggatgacggagatgaacatatagcccaagggcagggcaacggcatgccagagcaaacgtcgcagcggacactggaggagccgaccttccatgagcatgtctataataataagccagtggcggagggatcgcagcacccaaggggctacgtctatctatcgcctagtaatgcctataatctagtaagaacttaggttacagagtgaacataaatgtctcgttctttgtgttagttcctaagctattgaataccaaatatcaatcagtacaatcagaaactataacgtgaagaaaagtcaggctcttcatatgtgagtttgtggagttgtatgtggatacccagcccaagtcaaaatccgagtcaaacccacaggttcatttcccatggcaaatttaagcgcagctttgtctctgggtaatgaaatgctggggatgactcccccactccgggagaccgctgtctttgaaggcggccgacttttgccatgggcgggctgtgctgttgtatgtctggcaatttgttgccactttcaaatgcctcaattacaatcgtctcgcacaagtcgcaaatcggtgaaattataactcgatcgacgtggcaggtgtgaccttggcaagcggattgcgcaactgtctgaagggcggagtcttagcggctggcgggcaattacatcaactaaaatctcagccgtggcacacgactgttgaccaaagaagcgggcctagaggagtaccggcagcaactaaccacgcctaccagaccagtcgaaagcccggaaggataccttgtatacaatgtgttcactaccattaccattacattcaaatgagtcctctaataggaggattctctcaattttttcatggtaatatttgtatgtacaccaattccgaaattggaatcagcttgttctgtcatagatttgcatgtccaaatgccaagttcttagttactaatctcgacatgtatgggcttaaattccactgtgatgaagaactgcccttgaaggccgtctgacgacaacacaagcaagaccggcaaggtgcacatcatttatcttccatggtcgtgggctgcatgcagatatatcgcaaaggtttcgggccaagtccattagtagccatgggttaccggtgccgtagagaggggtcggggtcaaaggggcactaacatacctcaaactattgccaaat

SEQ ID NO: 35612 - DNA, 693 bp, DROSOPHILA
atgttcaggttttttcacctcgacatcctggtcagcctgatcagcctaatcagctgttttgcattgatgaacgcccagcagcagcagcaattccaccagcaggaggtatcggggatacaactccacccaccatggctgtactcgatgccctggcgtcctttgatcctgccaacagccagtccttcactaccttctctgacggcgctggctcaactgagtcctggctacacgggcccgcagacctttcctccagttccacaggatcaacgccagcagacgcagcaatatcagcaacatcagcaacagcaattccagcaggcatatccgcagcaataccagcaacagcgataccagcaggaatatccgcagcaataccagcaaccctccgtcctggtgggcttatttactcctcaactgcaggcccagccactgtcagctcctcctccgcaggctggacattttagcctgcccttcaggccctcgcccttcgccggatacacggatgacggagatgaacatatagcccaagggcagggcaacggcatgccagagcaaacgtcgcagcggacactggaggagccgaccttccatgagcatgtctataataataagccagtggcggagggatcgcagcacccaaggggctacgtctatctatcgcctagtaatgcctataatctagtaagaacttag

SEQ ID NO: 35613 - protein, 230 aa, DROSOPHILA
MFRFFHLDILVSLISLISCFALMNAQQQQQFHQQEVSGIQLHPPWLYSMPWRPLILPTASPSLPSLTALAQLSPGYTGPQTFPPVPQDQRQQTQQYQQHQQQQFQQAYPQQYQQQRYQQEYPQQYQQPSVLVGLFTPQLQAQPLSAPPPQAGHFSLPFRPSPFAGYTDDGDEHIAQGQGNGMPEQTSQRTLEEPTFHEHVYNNKPVAEGSQHPRGYVYLSPSNAYNLVRT

SEQ ID NO: 35614 - DNA, 4297 bp, DROSOPHILA
caaacattctcagccggcggcaatggtgcctgtgtctgctgatcatcgtaagtagtgcgctcacgtccaaggattcggataattcgattcacgaggagtacctttttttttggtggccagtgatccaaagtgtagtgatgtatttgaaaattcataaatgttggactcgagagaatctccagaagtaaaaaaacagcccatttgaaaatgagattttttttatttaataattcagtgaagaagagtgataaatttgtaaaaaatataaataaatatgtaaaaaaatatatataaatgtatcttacgataaaaaacgaaaataagtgaaaaaaatatgtaaaaatactcaattaaaactttttaaaaacattaatatttgaatcttcagtaatgaactgctgaagcttatcccgctaaaattacatttcggaacataacaccaaatttttaaacaaagaccaaaaagattagcctttttgggaaaatatgtcccgaatgactgagaattacgtttttgatacataatcgccaaattcttttcccatttcgatcgaaaaggatccatttggcgattcgcaattgcgtgctgcgggtttttcatgccggtgtgtcattgccctctcctctggaaaacggtccattgaacttggccaactgagcgccgccaactcaatcatacagaaattgactatcaaccgcctcctccttctccttttctttctcttctcctccttgaaagcgaaagcgaattggcggagtttaattagtttaattgcgaagtaggcacaagccaatgagtctgaaacgaagaggccaatttaaggcagttcgcctaactagcacccgttgaaatggcacactcatcagttggccaaggttccttgtttgtcctatcgttttactcattttattttaatgtacggtttttattgtaagccatgcgaatctccgattatgtaattttcaaatagctgtgattctttctaatttctctgaacagatgtcgacgctttgcagtgccgtgactgtgacctcaggcacgtctgggaacagtcgccgtcgatcgggaggttcaggagcggtgtcctctttggaggtgactggggagaaggcctttcccgatcaactggctatggcagctagccgtaggggctccgacgatcgtggttactccaggcggggatcggttacacaaagcagattaaaggaggcgcccagcaaaggtaataaaccgtcccattttgtttggcaagcctaaaagtatgcactaatccgcaatcgacatgcattgtatacttcccagattacagctttggccaggtggaattaaatctcgttcgcccagagcacgaatcgcatccaaagcagaccgcagaatccggatccggagcgtatgtcaacctagaagactctaaatcggcagccgagtatgtggccaatgccatcaagttggcctacaaacagccaccgactcaactgcgaggtcaaagccaagttcagaaccctagcaacaaccacatccaggcgcaaaaggaacagcaacctaccacccagagaagttaccaggaacagagaagggatagggagatcctggagatgcaattgcagaaggaactgcatcagcaggccctgctcctgtcctcaggaccctcgtcgccatcctcgtctggatcgtcgtcctcctcttctccgccgtcgcccgccctagcgcctgcgccagtctacgaaaaggaacccgtgacccggagctatgaactctacgaacacgcaaccgaggacgagtcccatgtccaggcccaagagcaagacatcgaacgccactatcgtcccaagtacagcaataactacaacaacatctacgccccctatcaaccgccgcaaatttacagaaatctcgaggccgaggccgaggaaaaagtcagggtctctgcctccacggaaattcccaaatcggagataatgaaacagattgaaaagtccgtgatcaagtacatgaaggaactagaggccgaaggtaaaatcataagtacgccccaagagacggccacgcctcctccaccaccaccgcctccgccgattaccaagacctactacaagtcgcagacgctctcatctggtctccattccggttccattccctcgtcgcactcgcattcacactcggaggaaaagcgttacagcagcagtacagtgaggcccaagtatacggtcccaccaacgacaaaacaacaacagttgcatcaccaccagcagcaggtgctccacccacagcaccacagccaccaaatagccggaaaactgaggggctcttcattggcaataacgaattcaaagcccattcagcactttcagtccgaaacggaaacggcatatcaggcccccgatttgcccgtcgacgaactgagtccgaatgtggagtttatttacaaaatcaagacccgagctcccctgcaaacggccacagtgaagacggtttcgaagccctacactttgcctctgaaaagtgccgagcactttgaccacagtgcggccctcaagaacatcgaagaattcgatctatcccacgtagttcccactccagatcgagtggaacgggagcgggaaagggaaagggaaagggagcgtgattctcgggaagatcaggagaggcttacaaactctggcaagcagcacaagttgtatttcaattcggaaatctatcatgacatcaatgccttgccctacaaaagtaaagaggcagctctgcaggaatatcgccacaagctcaaggcttccgggtcatccggggaactgcatccggactacaaaggctactcctcatccggttactttgccgagccggaagcagagactgagaatgaatcaaaactaatccttaacgaagaaggctatccctatcattatgtgctgaagaaggaaaccctactagatgatcatgagccctggttgtcccacgcgcacggccacgcccaccagcacacccatggccacgcccactcgcacagcaacagcaacaagcacccgagtcttgaatacgacagctacagtccgaagttcaacaacaatcccgagggctacggctatcagcacacgtacaaggtcagaggtcaaccagcaggcggtgccgggtcggggggcgtggctggcataggcagtaacacggggaccggagctggaaagcgcggcaagcgggggggaggcggtcatcccagacaagaggcgattaagaagcaactgcgctcatcggaggtcaaggacttggaagccagtttggctctgaggccaccgcccaaatagtaaaccccatccctcgattaatcaatcgaataagccgcaaaactccaccaccaccctcatagcttattttatgccagaatttcgagcatgcttcattgtatatgctattgtcttttttttgtagaatctaagtgtaagtacgattatttattgtatggccaccaactgctgaagtggtagccaactaaaacagacgataacaaattacgccaataaacaaattaatgaaataacttaaaataaaaactatcgcttatccattgacatttttaaatagctcaagacttcattccattatcatgatagccccatgaactagattttctatatctatccaaaaattcgaactgcttggaaaagtgcgaatgccgcctctgttgatcagttttttttttttagtttcgatttttattcgtctcatttcttcgctctatgtgtgggtgtgagtgtttgagtgtgtgtgtgtgtgatgtaattaataattttagcgcacaattataaggcagccgcccacatccacccaatgaacgaactgattgaaacatccagagattcagcctcggattgggtaagtcacagtaaaagtgcctcctcttttgcaatttaactctttctcttggtggaagtacatccaccgcatttgcattctggttttatataggaacacaagttgtacgggtaagaatctgttgtaaatggcagaaaagagtgtcaaatgtgttgttacgtgagatttggacgattaatcgccagcccagcggccacattgtctctatttttttgtggctcaaattcggcacccgctcacgcacagattttattcaagatcatatagtggctcagtgccggccgatgatggtgggtataaaacgtattttcactggccatagctagtcattgctcactcagcattcaagcccccaaatcagccgcatagacgatgctcaaagccgcaaaggtgagcccggcgaatttcattcgaaggtcctgtattaatagg

SEQ ID NO: 35615 - DNA, 2217 bp, DROSOPHILA
atgtcgacgctttgcagtgccgtgactgtgacctcaggcacgtctgggaacagtcgccgtcgatcgggaggttcaggagcggtgtcctctttggaggtgactggggagaaggcctttcccgatcaactggctatggcagctagccgtaggggctccgacgatcgtggttactccaggcggggatcggttacacaaagcagattaaaggaggcgcccagcaaagattacagctttggccaggtggaattaaatctcgttcgcccagagcacgaatcgcatccaaagcagaccgcagaatccggatccggagcgtatgtcaacctagaagactctaaatcggcagccgagtatgtggccaatgccatcaagttggcctacaaacagccaccgactcaactgcgaggtcaaagccaagttcagaaccctagcaacaaccacatccaggcgcaaaaggaacagcaacctaccacccagagaagttaccaggaacagagaagggatagggagatcctggagatgcaattgcagaaggaactgcatcagcaggccctgctcctgtcctcaggaccctcgtcgccatcctcgtctggatcgtcgtcctcctcttctccgccgtcgcccgccctagcgcctgcgccagtctacgaaaaggaacccgtgacccggagctatgaactctacgaacacgcaaccgaggacgagtcccatgtccaggcccaagagcaagacatcgaacgccactatcgtcccaagtacagcaataactacaacaacatctacgccccctatcaaccgccgcaaatttacagaaatctcgaggccgaggccgaggaaaaagtcagggtctctgcctccacggaaattcccaaatcggagataatgaaacagattgaaaagtccgtgatcaagtacatgaaggaactagaggccgaaggtaaaatcataagtacgccccaagagacggccacgcctcctccaccaccaccgcctccgccgattaccaagacctactacaagtcgcagacgctctcatctggtctccattccggttccattccctcgtcgcactcgcattcacactcggaggaaaagcgttacagcagcagtacagtgaggcccaagtatacggtcccaccaacgacaaaacaacaacagttgcatcaccaccagcagcaggtgctccacccacagcaccacagccaccaaatagccggaaaactgaggggctcttcattggcaataacgaattcaaagcccattcagcactttcagtccgaaacggaaacggcatatcaggcccccgatttgcccgtcgacgaactgagtccgaatgtggagtttatttacaaaatcaagacccgagctcccctgcaaacggccacagtgaagacggtttcgaagccctacactttgcctctgaaaagtgccgagcactttgaccacagtgcggccctcaagaacatcgaagaattcgatctatcccacgtagttcccactccagatcgagtggaacgggagcgggaaagggaaagggaaagggagcgtgattctcgggaagatcaggagaggcttacaaactctggcaagcagcacaagttgtatttcaattcggaaatctatcatgacatcaatgccttgccctacaaaagtaaagaggcagctctgcaggaatatcgccacaagctcaaggcttccgggtcatccggggaactgcatccggactacaaaggctactcctcatccggttactttgccgagccggaagcagagactgagaatgaatcaaaactaatccttaacgaagaaggctatccctatcattatgtgctgaagaaggaaaccctactagatgatcatgagccctggttgtcccacgcgcacggccacgcccaccagcacacccatggccacgcccactcgcacagcaacagcaacaagcacccgagtcttgaatacgacagctacagtccgaagttcaacaacaatcccgagggctacggctatcagcacacgtacaaggtcagaggtcaaccagcaggcggtgccgggtcggggggcgtggctggcataggcagtaacacggggaccggagctggaaagcgcggcaagcgggggggaggcggtcatcccagacaagaggcgattaagaagcaactgcgctcatcggaggtcaaggacttggaagccagtttggctctgaggccaccgcccaaatag

SEQ ID NO: 35616 - protein, 738 aa, DROSOPHILA
MSTLCSAVTVTSGTSGNSRRRSGGSGAVSSLEVTGEKAFPDQLAMAASRRGSDDRGYSRRGSVTQSRLKEAPSKDYSFGQVELNLVRPEHESHPKQTAESGSGAYVNLEDSKSAAEYVANAIKLAYKQPPTQLRGQSQVQNPSNNHIQAQKEQQPTTQRSYQEQRRDREILEMQLQKELHQQALLLSSGPSSPSSSGSSSSSSPPSPALAPAPVYEKEPVTRSYELYEHATEDESHVQAQEQDIERHYRPKYSNNYNNIYAPYQPPQIYRNLEAEAEEKVRVSASTEIPKSEIMKQIEKSVIKYMKELEAEGKIISTPQETATPPPPPPPPPITKTYYKSQTLSSGLHSGSIPSSHSHSHSEEKRYSSSTVRPKYTVPPTTKQQQLHHHQQQVLHPQHHSHQIAGKLRGSSLAITNSKPIQHFQSETETAYQAPDLPVDELSPNVEFIYKIKTRAPLQTATVKTVSKPYTLPLKSAEHFDHSAALKNIEEFDLSHVVPTPDRVERERERERERERDSREDQERLTNSGKQHKLYFNSEIYHDINALPYKSKEAALQEYRHKLKASGSSGELHPDYKGYSSSGYFAEPEAETENESKLILNEEGYPYHYVLKKETLLDDHEPWLSHAHGHAHQHTHGHAHSHSNSNKHPSLEYDSYSPKFNNNPEGYGYQHTYKVRGQPAGGAGSGGVAGIGSNTGTGAGKRGKRGGGGHPRQEAIKKQLRSSEVKDLEASLALRPPPK

SEQ ID NO: 35617 - DNA, 4351 bp, DROSOPHILA
ttcatagtacggtctgaaccaatagtactttaacataaagaagataggaacatttatattgtgcgaattgtataaagaatataatttaaagggagctagcaaatatcaaatattagatgcagagaaagttaactacttggaaaacaaaccacatagggctagaaaaatagattagcagtggtaagaaggaaacgccaaattgtatataagtccacttttactcgagttcatatttagacagcgaaaaaaggttgattgagttgttcgaaaacaaaatatctctaatgagcccagctgagacaatttcatggtccgcgaattgattaatggtatgatatgtcaccagggtattattattgggtcggacaaaagagtggaaagttgggtgaggtagtcggccggataaagagctacatattaatacatacataggggagagtcaagttcatttgtattgagaaaacttgagttgaaagggcattgaagcaggatttgaagcgaacaaaagtctaaacttcttttatttatatgacatatgacattgcccttccccccgatagacttgaactgcaagcaacaatcagccgacctaatcgaagtttattcattggctggccctgtgcctagtttgtgtcttaagtttttcgtatgctcgcaagctcggttttttcattttatttttcctttgattttttctactcccctgttgacactatgtgtggtcgctttttgtccatgtttccatggaagatgggcgcaaattacgcgtgttaacgatgcgcacttcattagcttctttaggccatcaatcaagctgcatttgcatctcgcgtcttatgtcatctgacctggttgggatcattagccgacccggggccgccaaaatacccaaaataatttcaaagaccgctaaaactgggccacgcatgtgacttagtgactacgactagttttgcagagtgcgcagcatttagcggcaagtatttccacatcaactggaatgcttcttcatcgcgtgacaaatggtcgtaagttgcttggccagagcttgcaatttcaatttacagattccgttttagaaaggccgctctgcaagtggcttatcagtggagcggccttcgccagcaggtgcaaatcgaagtagagaagtggctacagtggctacgttggctataggggatgttacacccaccgctggggcttggcctgcccagatttcacacagcgatttgtctcggaccacattccgatgatcggtcgaccgaccgttcctcttgaatgcgaacaaggctgcgagaaacaaagaaaagcactgggaaatcccctacccgcccttttgcaatttcgagctaaattaaaagtggtcgaacgcaattaaacgcatcaataggcgctggtgggcgtgcccgtccgttcgcagtttagagaaaggcgccaaaactaaacctttcaccgaagtcaaaattgcaaaagacacacttctcattcaaagagccaagccaagttgcgaatacacttgctgataattgattgtgatataatgttgttgatatgggcccttctaatgtttgccccttttgtacttctcccactttcaacaggtgttgccccaactgattcttctattcgtcgttttgatcaacgatgtccacggcatcctgccaccttctggctacgacgacgatacatcgccactgccactccgccttgacgacttggaacgggaccacctgcagcagttggacctcaatcggccgccacttctgcccaatcactacgaatggcacccggatgtggccgccagtctgccgcccagctacattcaggaggccgcccaacgggatcgggagcgcgagcgtgatctcgagcgtaatcggcgactggaggagctgcgtcagctgcagcagcagcatcagcagctgagttcgggctacgcctttcctgcccacctgccaggtgtgctctatgtgtgagtattggctacaagcgagctttactagtttctttaaacttttctgggcataaaactgggtaaggaaaagcccaagttttagctgagaccaaaacgagttccccaaacgaaaagctctgagctttgaagtttaaattagagactggaaattgttacaaaaaaaaaaaatcataagacagaatcagataaattgaaaacaattattacaaaagaaaaaacataaagctgaattttccaatggcaatgaatagttcgaagatttgaattataccatattttatttcacatcgagaatctacgctcgagaattgagcagtgtcttcaaagtagtattcataaataaaagccgtagcagtcaataccaatgttcacttaacacccgaccgaggatcataatggttgcccctttaatggccaactgattgaggcaactagccctcaatcaggctcttgattgacacgtaaattaccgcttgagaagattgcaaattggcaatggaaatgctaatcgtaatggcgacggaaaggagccgttattttgggcccaatgatcgctttcagccaacttcggatggccaaattagttagttagtggctaaaagtgttgaaaaggcagcatttcacttacagccgcattagcttccgacaaatgaagcaaatgattgctgtaatttaaaggacttaatccgttcgctaatcagcttctcttcgttttttccagtggtcccacagctgccacgcccactcccacgccctcggcagcgacgacgaaagtggcctcttctgcaactccatttgccaatcccatagttccctacgacttggaactggggctgcgccccattccatatgtaaccagtaatgccctgccccttccagtgccacgcccccttccgccaccccatgcccgagcgccgttcatctacggatttaccgcccagggcaaccgagcaaccagccacaagctgccgggtcagcccctgctggtccagcagtccaaacagttcgcctacgctcccgctcagcccccccagcggcactacgcgaatgggccacgggttccgataccgtatcccccaagctttgtgagcttcaccactcggagaccgggttcggagcgtatcaggccattccggccatcgcaaccggatcccacgcccgatttgtttgctggacgctcctcgaaatcattgatcgactcgtacattcccagctgggaggtactgcgcctgatcagacagcaccagccgcagcaaggattcacgcccatcgcacgccaaacactcgcgtatcccgctccggcgcacttgaggctctacaagcgagattcccaggaggaccggtcgagaatcgtcaaggaaaccttacccgaaccttagagttcgagttcgggcttagcgtacgatttaattttttgtttcttaatttacctacaaatacgaatatttattgccgcaaaaatgagattgtattttgttaaaccttataatggggtcttttggtgtcattacgggttcgaatgtttatgaatatagaaccgattgccatcagtctcgtgatgaaattagttttctcctaaagtcataaagttgatcggtgatcacataacagcatacacatggccaacaagccgcatccccagctctgcaactcttcagctcgccatttaagccaggccagtccaggccatcgcgggccaaaagcgaagccaatcgcatcaaatgtgcaatatgtgactttgtcaatgagccagttgagccccaaagccaccgattcgattccttggactctcccccagaggttttactcacgtaatcgcggccataaaccaaacagccagcaataacaaacaattacggtgcgatgccactcggagtggccacaaaattatgatttgtgtggcagtgtgcggagatgcggagatgcggagatgcagagatgcggcttcgaaatccacgagacagaagacacgagactgaaagacggacaggtggagatttatgcaagtaggaagcgaagatgctgcagttgcaacttgcgaatttcgagttgtggcagttgtttgtgttgccgtttttttttttttttttcgtttcgtttcgctgagctgcgcttcttttggccatctcatggctgttaatgaagcacaaaattgctgcattgtttgtcacccattaaatatgcagacgacagacggaaaataaggatgataatgatgatgatgacgggcagccctgccctgctttaaagggtatttcctggctgccgttcattccggtgatggcgaagaccacactgagagaaatagcatataaaatctcgatgtttctgtcgcattatagagaactgtattgagccaaagccagtgaccttctcgtg

SEQ ID NO: 35618 - DNA, 1041 bp, DROSOPHILA
atgcttcttcatcgcgtgttgccccaactgattcttctattcgtcgttttgatcaacgatgtccacggcatcctgccaccttctggctacgacgacgatacatcgccactgccactccgccttgacgacttggaacgggaccacctgcagcagttggacctcaatcggccgccacttctgcccaatcactacgaatggcacccggatgtggccgccagtctgccgcccagctacattcaggaggccgcccaacgggatcgggagcgcgagcgtgatctcgagcgtaatcggcgactggaggagctgcgtcagctgcagcagcagcatcagcagctgagttcgggctacgcctttcctgcccacctgccaggtgtgctctatgttggtcccacagctgccacgcccactcccacgccctcggcagcgacgacgaaagtggcctcttctgcaactccatttgccaatcccatagttccctacgacttggaactggggctgcgccccattccatatgtaaccagtaatgccctgccccttccagtgccacgcccccttccgccaccccatgcccgagcgccgttcatctacggatttaccgcccagggcaaccgagcaaccagccacaagctgccgggtcagcccctgctggtccagcagtccaaacagttcgcctacgctcccgctcagcccccccagcggcactacgcgaatgggccacgggttccgataccgtatcccccaagctttgtgagcttcaccactcggagaccgggttcggagcgtatcaggccattccggccatcgcaaccggatcccacgcccgatttgtttgctggacgctcctcgaaatcattgatcgactcgtacattcccagctgggaggtactgcgcctgatcagacagcaccagccgcagcaaggattcacgcccatcgcacgccaaacactcgcgtatcccgctccggcgcacttgaggctctacaagcgagattcccaggaggaccggtcgagaatcgtcaaggaaaccttacccgaaccttag

SEQ ID NO: 35619 - protein, 346 aa, DROSOPHILA
MLLHRVLPQLILLFVVLINDVHGILPPSGYDDDTSPLPLRLDDLERDHLQQLDLNRPPLLPNHYEWHPDVAASLPPSYIQEAAQRDRERERDLERNRRLEELRQLQQQHQQLSSGYAFPAHLPGVLYVGPTAATPTPTPSAATTKVASSATPFANPIVPYDLELGLRPIPYVTSNALPLPVPRPLPPPHARAPFIYGFTAQGNRATSHKLPGQPLLVQQSKQFAYAPAQPPQRHYANGPRVPIPYPPSFVSFTTRRPGSERIRPFRPSQPDPTPDLFAGRSSKSLIDSYIPSWEVLRLIRQHQPQQGFTPIARQTLAYPAPAHLRLYKRDSQEDRSRIVKETLPEP

SEQ ID NO: 35620 - DNA, 2813 bp, DROSOPHILA
gcaagaccactttctgaccgaatccatgaagccaatttgaagcggacaactaccggccaaactgccaaccactgggggctgtcatccccccgaaaaagacttgtaaactcgttagccgtagccgtacccatatgcaatgcggaagaggaccgatccgagatccaaaagcgacacgcccccaaacaaccgattcggtttcggtttcggattcggaagacggaacccagcggctcaaagtaaagcaaagcaagtcgatcgaaagcgaaaacgaaaccattactctgatgcgcgatcgatggctgtaaacttgaacttgaagcgtagccaaaagcgatggacaccacgacggcaaacagcaactggcaactagcaaatagcaactggcaactagcaacttgcaacttgcaactagcgacatgcaagagcctggcacacgcaacaatgccgctgaaatgcttccaaggcagtgccagccaaatgctgttgcttgctggcgcgctgtcgtgtttcgcactggttaaaactgcagccgcagcctgttgccaattgcgggaaattggtcgggtcgtcgagcgatataaaagcctggctggcaatgcagccgtgttaatcaaagcgcgtcgctcgccaggaaaagtgcaagtgttttccacgctcccaggcagcattcaaactcaaatcgcagagaaaattcagcgaggtgaaatacgcatactttttttttctgtgcttataataaaatcgaaaggtgttccaaaatatctgaccttcgtgttgcagaattaactaagctgctatagcagatatagttcagttacaagtgcagcttacgatacaatttttccatttcggatgcacttcgcgtcctgaaaatcagcttcgggtataagcagcaaaatgttattttataatatcctttgggttaacaagtaaaatatattatcgcaaatatttttcatgaacacgatcccttaacttttctcttattcgctacgtgtagatgctgtgccaccgacacattcacatccattgccagctgttcctgctgcagctcctggtgatgcccctacttcagggttcccccgtttcgagtccggagatagctagtaagggttccaagtccccgaatggcctgccacaggtgcaacagcagcagcaacagcaacaggaggcccacctgaactcgctgagtgcctatgccagtggctatgacatggcccagaaccaggctcaagtccaaaatcagcttcagggccagattccatcacaaacggatccggcattcaagccctcgtacaagatgcccgagatggagaccaacttcacgcccatgcaaacggcgggaacaccaagtgtgtccagtttaccgtctactcccatgctcatgcagtatcttccggcccaggcaatccaggatggatccggaaactcggttcagtaccttcagctgatacccacccgcccgatcatagtgcccatttcgccgtacctctcggctgccgcagcagccagcggatctcaacctgcaatctccgccggcgcacagccagacttcggaggacgaacggccactgttttgagtgctctgccgcccaactacgcagctctgcagggttacgccagtgggtccatcaatccagccgccgccttccgcaatacctatcggatcaatcgcgaggccaaggacaaacacttcccgccctcgttctcgcttaatctcaacgagtacttgccagccgcctcgttgggactgaccggaggccatgacgcctccgtcaatagtccacatgtgtatctgcggaccaggtcataggatgtcagctaccgccaaagtctcgcaacgttcgagcctctttttctcttccggaataaagccttatatgtatatatgtaaagtgagcctgtgattattttatgcaagtctatatcccactcaattcaatctaagcctttccaccttgaaatgttacacaatacgatacgagtacaacctacccgaccatcttgtgattttagaaattggttttcccataattcaagagccgcgattaatataatggaaaaagcagcagtataatggacagtatatagcacatatggcaaaacagtttgcttcccattcaatttacataactcccttttatctgagtcactggtgtcgttcttcagcggccttccacctttcgtttcgttttcacaccaacccaaacaccgccgtgctaagaagacccaacaaaccaacctaacgaaacccaaataaacacaaatgaaatccagacgttatcgtatctagactgtttatttgcacagcgccaaataggggacagtgagcaaacaaacacaccttttaggctggaacccccagccgaaggtcgtcttggtcttgtgcagaatgcaggccattgtttttgtttctctttcatttgcgtgaaagtgaccaaaacacactatttcgcgcccgaccggaacagagacggttaagtatggttcagttggagagtgtgtgctgcgccacaaaaccttggagttgcgtcagtgctgccagccatttggtctgtctactcctaattgtcacaatttgacaaatttatttggaatttactggctcaaatcgaaatagggccatcattgcctctattccgagtcgcggagtaagtaaaggggcgctcagcccaaagcatctttcacttgccgcattaagtggagcaaatgactaaaggcctgaccccggtgaaacatcgacaaaggcatacacttctggtttgcgagatttctatgtaacgcttgtacgataacaaattatatagaaatta

SEQ ID NO: 35621 - DNA, 813 bp, DROSOPHILA
atgctgtgccaccgacacattcacatccattgccagctgttcctgctgcagctcctggtgatgcccctacttcagggttcccccgtttcgagtccggagatagctagtaagggttccaagtccccgaatggcctgccacaggtgcaacagcagcagcaacagcaacaggaggcccacctgaactcgctgagtgcctatgccagtggctatgacatggcccagaaccaggctcaagtccaaaatcagcttcagggccagattccatcacaaacggatccggcattcaagccctcgtacaagatgcccgagatggagaccaacttcacgcccatgcaaacggcgggaacaccaagtgtgtccagtttaccgtctactcccatgctcatgcagtatcttccggcccaggcaatccaggatggatccggaaactcggttcagtaccttcagctgatacccacccgcccgatcatagtgcccatttcgccgtacctctcggctgccgcagcagccagcggatctcaacctgcaatctccgccggcgcacagccagacttcggaggacgaacggccactgttttgagtgctctgccgcccaactacgcagctctgcagggttacgccagtgggtccatcaatccagccgccgccttccgcaatacctatcggatcaatcgcgaggccaaggacaaacacttcccgccctcgttctcgcttaatctcaacgagtacttgccagccgcctcgttgggactgaccggaggccatgacgcctccgtcaatagtccacatgtgtatctgcggaccaggtcatag

SEQ ID NO: 35622 - protein, 270 aa, DROSOPHILA
MLCHRHIHIHCQLFLLQLLVMPLLQGSPVSSPEIASKGSKSPNGLPQVQQQQQQQQEAHLNSLSAYASGYDMAQNQAQVQNQLQGQIPSQTDPAFKPSYKMPEMETNFTPMQTAGTPSVSSLPSTPMLMQYLPAQAIQDGSGNSVQYLQLIPTRPIIVPISPYLSAAAAASGSQPAISAGAQPDFGGRTATVLSALPPNYAALQGYASGSINPAAAFRNTYRINREAKDKHFPPSFSLNLNEYLPAASLGLTGGHDASVNSPHVYLRTRS

SEQ ID NO: 35623 - DNA, 2426 bp, DROSOPHILA
gtaaaacggcaccagaaaagcgcggactgccaaaccaacttcaaactcgcaatataaacacataaatcctggccactgatacacacagattctgttgcaagaggtgaccctcctatattcacggggaaggggtgttttgccagcgagaggtttgtctgtccaacttttgcgtaccggccaggccaacaaacaacaacgacaactgggttagacgcctctgccctgcgatattccatgcacacagtggcggcaacgaaaatagcattgcagttatgagttcaaaatcgaggtaacaaacacgtttcatatatataccccttactcgcattgtaagagggtatactaggttcgttgaaaacgatgtaacaggcagaaggaagcctttccgactatgtaaaatatatatattcttgttgatgatcaatagccgagtcgatctagccatgtccgtctgtccgtatgaacgtcgagatcttaggaattctaaaagctaaaatgttgagactaagcattcagcttccagaaacacagacgcaatttgtaaatttctatcgtttaaaaaaaaaagccagaaaaaaaagcccattcttactcattaaattccccaatatttatcgatatgttgaataaattatgaactttcgcgttctcacatccactagctaagtaaagagtacggggaactcgacgaaggctttttctgccttgcttcaaaagcatactttttagcgtgggatcattgaagtaaggcaatttgacctttaaaccggatctagagcaagattgagaatataatttaaaactggctagggacgataccaattcctaggccctgtaacaattggataccagccatagactaccccactattctagtaattttcagatttgttctatctggtaacacttgcaaacgtcaaattttggacaatcatccaaaaggaacactgaaaattttagacaatcattcaacagagtaaaaataaaatagaaatatataatgtctgcaagtgatatcgcgggaattgaactcaccagtggaccgactggtctgaagagcaggatccttgtgagaaaccttccggtatgcacccgccaggagctggcttacctctgcttgcccttcggcgaaatccttggctcgctggtcaccaataaccaggggtttatccagttcgctagggagagcgaggccaagctcgccatagagacgctcgaccatactaccttcaaatctaaggttatccttgtttcgaacgcaagcttccgttcgctcaacgccagttgcttgggctatgctcccccggggcagatgatgatcgagtggtctgatgaggatgacgtcgatgaatacgatgattactccgaaagtgatgacgaagatggcccgggagacatgcaactgtataatgctaattttatataaacacttatcaataaagtgtattacagtttaatatagccacttcttttttattattatactcgttactcgtaaagctaaggggtatactagattcgtagaaaagtatgtaacaggcagaagaaggcgtttccgacaatataaagtatatatattcttgatcaggatcaatcgccgaatcgatctcgccctgtccgtccgtctgtccatatgaacgccgagatttcaggaactaaaaaaaactcgaagtttgagattaagcaggcagattctagagacatagaagcagcgcaagtttgttgacccatgttgtcacgcccacaaactgcccaaaactgcaacgcccacacttttgaaaaattgtttgatattttttcatatttttactatataacatggtagatttcatttttgaaggtatttaaagaagcttttcgttaaacaaacgaaaccttctggtttcccaccatctgtacaccctacccatcgaatttcacgaaagcggtcgttcaacaaaaatattattggggcgtcttccgcccagcaaaaaagttacaccgtttgccttcaactttagagggcggaaatgcgatgctgggccaaagttgaattattgcaagcatgaaagggtttgagttggggggcaaagcagtagaagggctgctgcacgtggattacggactgcctaaaatggccgcgatgaactgacaacaagctgtttgcacttggacggcttgagttcgccgtcggggccaaggattctagaggagtttcagctaacatggggatggccgtggcacggcgggttcacctagtcccatgagggaatgctactaaatccagctgataatgctgaatgatgtcacgtcggagtgggtggtatgcagaatatcctgtgccaaaatatccaagtatagtgatcaagtgattagaaaacaatgtagttcgagataaatcattcaactcagttggcacaaagcaaactatttctctttaaaatccc

SEQ ID NO: 35624 - DNA, 426 bp, DROSOPHILA
atgtctgcaagtgatatcgcgggaattgaactcaccagtggaccgactggtctgaagagcaggatccttgtgagaaaccttccggtatgcacccgccaggagctggcttacctctgcttgcccttcggcgaaatccttggctcgctggtcaccaataaccaggggtttatccagttcgctagggagagcgaggccaagctcgccatagagacgctcgaccatactaccttcaaatctaaggttatccttgtttcgaacgcaagcttccgttcgctcaacgccagttgcttgggctatgctcccccggggcagatgatgatcgagtggtctgatgaggatgacgtcgatgaatacgatgattactccgaaagtgatgacgaagatggcccgggagacatgcaactgtataatgctaattttatataa

SEQ ID NO: 35625 - protein, 141 aa, DROSOPHILA
MSASDIAGIELTSGPTGLKSRILVRNLPVCTRQELAYLCLPFGEILGSLVTNNQGFIQFARESEAKLAIETLDHTTFKSKVILVSNASFRSLNASCLGYAPPGQMMIEWSDEDDVDEYDDYSESDDEDGPGDMQLYNANFI

SEQ ID NO: 35626 - DNA, 2405 bp, DROSOPHILA
cctttgcgatttaaagtgacgaaatgcatgggtcgacttcaggctcataaaatactgggatgtttaataaaacagtttacaagcgcaaaagtttcctttcagttaatagagctttcaaagctgcttaagaaccaaatctatacaaaggcgctgaaactgttaaaaagtataattgtgatatgtaaatgaattgctgattttcctaaagaacttgcggtaatggcacgccgttcagcataatacctaatgaacaaccttccaaaatgagagataatgtctgtatcgacaaatgtcgacaaaacagaggcatatgcgcccacttgatgattaccagtgcactgtgggtaaaaagccggaaattttgatattaattacaattttaaagatagcgtcttgattttgtatatttatatattttgtagatttataatacttgagataaataaataaaaattacattaataccaaaatttccggctttttacccatagtgcagtggtagcagtgccccagaaccagaagcccagttttagaggcaacctccccacccttcccattcaataggaaaacggagaagaccttcactgcgtgaactgtagttccgacttggtgggggtcctggtctcgtctctgtctgaaaatttgagtcagtcagatgccgagagcaaggatatttgcctgcttcctgaccaccaccctgcccttattgttccatcggcacggaaaaggatgcggaagcaatacgcccacactgtgaatgccagatgccattgaatttaagctggcaagagttcatcaagatttcgtatgccattaactgggtcatgggtcaccgcatttgcggtcgcgtctccgcatctgaaaagccgggatatttaagtgcgaaggtggtctgcggcatggcaacttttttaattaccagctttttccccacataagaccaaagaaattaaagacaaggcttcggttagttgctagcaactttcagtgcgagtgcgcattattcatttccattgtcagttccaagacaggccacaattttgaccacatcgaccttcaaggaatgctgatcctcgcggaactccgcgtcctttaggatcagagtccacacattgtcgcagcatctaaaggtttccagtctttcggccgtaaaggacatattgctcgtgccatgatccttgagagctgttgaaatgctcttgtcatatcttagtaaaaccaaattagcaatcttcttggttatatcgcccctctgcaacatacacgtgtgaactgataagtgcgaagggcctacatatatgtacatatgtacacgtgacgtgtaccaactcacctccatcatctcatccaaagtgtcctggagcgttctgcccagcgttgtggccctgtaatgttgatagttcatatcggctgaagatttgagctagaagcttagtacacacgcgctgtagaatttttatgaagaatgactttagcgcatggcattgacagtgacacactgacacactgacatcgattgcgaaatattatcgattacagggattaccactaacaatcagattcaaatgttcaagaaaaagttattaaaccaaagcatatcgcaagtgttgcccaaaagcatatgtaatgatccggggtattcaaaatggccacctaaaccgcataaaaaaaaacagattacgatgatttacttaattctaattgctactataattgctaatgtgatggccctaattgcttcttcttgccattaggttagatggtgcggtggcaatttacttgaagcactttctacacatttccagatttcatcacattgaatgttcgtttagttaaatgtcttatgtggggtaaatgaagatttggaaataaagaaggcatttctctttcgaacattcagaataaactttgctactagctccccaaaatacttgtgaattagaaactttgaaaaattacataaaactcgaacatggatgatttggctaacgagtacaccggcagtgaagagaggagtggagaagcctccaagctcggactcctggccagggtggaccgtctgctccggcgctggctgcctggatacagcttcattcgcggcaagcgtctctcgacatcggaaacctcgatcgtgcacggctgctcccacggcacacaggcggtgcgtggacgtggtgaccggatgaataataaggaggaggtgtacctggacaccggcatcgccaagtcggagttctgcgtccacctggagaccttgctgcgcaacaagctgctcaagaagcagcaggaattggccctggaacatcaggagagaagccgcgagatggagctggagcaggaacggcagctcaatcaacaagttcagcagtaggaaagtctacctattgtgttatttttcacttcaa

SEQ ID NO: 35627 - DNA, 324 bp, DROSOPHILA
atgaactatcaacattacagggccacaacgctgggcagaacgctccaggacactttggatgagatgatggagaggggcgatataaccaagaagattgctaatttggttttactaagatatgacaagagcatttcaacagctctcaaggatcatggcacgagcaatatgtcctttacggccgaaagactggaaacctttagatgctgcgacaatgtgtggactctgatcctaaaggacgcggagttccgcgaggatcagcattccttgaaggtcgatgtggtcaaaattgtggcctgtcttggaactgacaatggaaatgaataa

SEQ ID NO: 35628 - protein, 107 aa, DROSOPHILA
MNYQHYRATTLGRTLQDTLDEMMERGDITKKIANLVLLRYDKSISTALKDHGTSNMSFTAERLETFRCCDNVWTLILKDAEFREDQHSLKVDVVKIVACLGTDNGNE

SEQ ID NO: 35629 - DNA, 3062 bp, DROSOPHILA
gatggtcgtgctgctgcaagtgttgttatatttctaccccgcatagtgggtggcatggtggctgcagaggaagacttttgaatgaagcttgatccgtgtagaaaatgtattaatgagcattttcgagtgattttagtagcaatagatagccaagatattcgctagcagctgctaaatgttaagattctatatatataatcatctaattaggcttactgaacatgattcaacgataatcccatgcgatcaagataagaaagacgatacggcttatcgcgcaccaacgacttttaaattgctatcagctcgaatgcctcgattacttactcgatctcacgctctttcgaagcgggaaagtcttaatgtatagtgcccgaaattaatcccttgataacagcgaaaccaattacgatttgccttagtttcaacttattatcaatggccctatttgaactgcagacaggtttatcatcttaggggcgcacatcaaacgtaatcaataaaatcgagctataatcgcaacttaagccgttttgggccagacagcgccgagacttttattgggtgattggtccattgcaacttaactgtgtttggtccattgcaacttaagtgtgtaatgttacacattggactaaatcaaaagaactttatttcgttcgtttgggtagcaccctactaaaatgtgtgcttgctgtgatgctctagtttgtgtatagttccgataccgatacagatttcacattctcagtttcctgccacattggtttttcatacggacggcatactcgtactgtgtcgatggttatgagtaaacacccgactgattaccgatacacgaataaggcgggcgattggctttgtggggcgccctaatctcagacattgacccctccgtcgccccagcggcgcagcacactacaccaccccacatcgtggagataagaaaccgcggctgcgagctccgactctcagcactttgcagccagttagtgcgagaatgtcgagctggtcgctttgtccgcttttactggccttcgcggttcacgccgtgcttggatctgtggatttggctggttccctggatccgtcgctgctggagaacgtggatgtggaccagctaaggtcaaactatctgccccaaggcctgcaaaacaccaatgtgaccttggccgacttccaaaagtggctgcagtcgaagtgcgagaaggccaatgaccatttgccgaaaggatctgttaacgcctctgccctgagcaagtccatcgaggatgcgggcattcacctcgcagaatgcctctccggattggccaatatgacggagatccaggcggagatcgaggaggcgagtcccaagggcgacctggacgtggtcttcgagaagtattgcctccgattgccgcaggccaagacctgtctgaagaacttcaacgacgcgatcctgccctgcctgaccaccgatgagaagacccacaacgcggtgctgcagaggattgcggacaagctgctggagttcatatgctacaagaacggagaccagattgcgctctttatcgccgaagagggcccggagtgcctgcagcagagtcgcgaaggcatcgccaattgcctgaactcttccttcgccggatatctgcccaagtcgattagcccggagtgggatctgccccagctggtcttgggtccgaagcagtgcgtcgacctctacgcattcgagacgtgcaccgtcagtctgctggagaagtgcgatacgatcactcccagcaatatcgtggagtccatgtttcgatacgtgaggaaggagtcctcctgccagccccacatcgacagggtcaagctgcagcaccgcagagccctgcccttgaccagtggatcccagtccggctcatccgtatcccttcatctcacctggacctctgcgagcctgctaatggccactttcctcgcccgactggcctaacattccccgctctctctctctcttttttttttggttgatattttataattatgtttaataaactttgcaaagtcgggaacggagtctgtgcaccggacggacggacggactgctgcccggcgtaagccggcttaacggattcccttttcaactccgggcatctggaaaggcaggcggctgtggaatgagggttaaggaagcggggcccaaagtgttaagctgcataaacacaagcctgaaatatgaacggcaactggggtcatcccaggtccactgtcaataatttgattgactttagtagcagaatttgaatttgaatttgaatttacggccaggcaacgtcataataagaacctttaaagccgtgtcactgatcgttatcatcacattttcgcacacattccaaattccatattcagcgtctggcaggcattcatttctctcagtgcagtcgcaccatattgcgcttatcggacggcagcagctacagaagctatagctgtagcaaccgaaacagtggaatatacttgtagagagcaacacaatccgaatccgaatccggagcagaagctaaagctgcgctggttgaagaagggtcactcgaacgcgtctcttatcgccagagacaaagacaaagacaaagggattgctggctggatggccggaggggaagggaagatattgggagaaagtaggagaaatggggcttagctggcaatggctggctggactcagtttcgagcgtggcagcgcgataagcaaattgatttgcgacgaattccgtcttatttcataagtttcttcacttgctgcagcctttggaaaccctggtcatcatcggatgccatgaaaaccaatacaaaacctacatacttagctttttgattgagcagcttgagtttctcaactgagcaaaatcttattgcttcttcaattgtagataaagataaacgttgacctcaagatgggtgacaaaataatgaatccgtccagcaagttgctgagtttcggaggaaaattaagtttacttagctgcatgcataccctgccatccgtgaatggggcatttctctgctattgcgatttccggcagtcttagtcg

SEQ ID NO: 35630 - DNA, 1062 bp, DROSOPHILA
atgtcgagctggtcgctttgtccgcttttactggccttcgcggttcacgccgtgcttggatctgtggatttggctggttccctggatccgtcgctgctggagaacgtggatgtggaccagctaaggtcaaactatctgccccaaggcctgcaaaacaccaatgtgaccttggccgacttccaaaagtggctgcagtcgaagtgcgagaaggccaatgaccatttgccgaaaggatctgttaacgcctctgccctgagcaagtccatcgaggatgcgggcattcacctcgcagaatgcctctccggattggccaatatgacggagatccaggcggagatcgaggaggcgagtcccaagggcgacctggacgtggtcttcgagaagtattgcctccgattgccgcaggccaagacctgtctgaagaacttcaacgacgcgatcctgccctgcctgaccaccgatgagaagacccacaacgcggtgctgcagaggattgcggacaagctgctggagttcatatgctacaagaacggagaccagattgcgctctttatcgccgaagagggcccggagtgcctgcagcagagtcgcgaaggcatcgccaattgcctgaactcttccttcgccggatatctgcccaagtcgattagcccggagtgggatctgccccagctggtcttgggtccgaagcagtgcgtcgacctctacgcattcgagacgtgcaccgtcagtctgctggagaagtgcgatacgatcactcccagcaatatcgtggagtccatgtttcgatacgtgaggaaggagtcctcctgccagccccacatcgacagggtcaagctgcagcaccgcagagccctgcccttgaccagtggatcccagtccggctcatccgtatcccttcatctcacctggacctctgcgagcctgctaatggccactttcctcgcccgactggcctaacattccccgctctctctctctcttttttttttggttgatattttataattatgtttaataaactttgcaaagtcgggaacggagtctgtgcaccggacggac

SEQ ID NO: 35631 - protein, 319 aa, DROSOPHILA
MSSWSLCPLLLAFAVHAVLGSVDLAGSLDPSLLENVDVDQLRSNYLPQGLQNTNVTLADFQKWLQSKCEKANDHLPKGSVNASALSKSIEDAGIHLAECLSGLANMTEIQAEIEEASPKGDLDVVFEKYCLRLPQAKTCLKNFNDAILPCLTTDEKTHNAVLQRIADKLLEFICYKNGDQIALFIAEEGPECLQQSREGIANCLNSSFAGYLPKSISPEWDLPQLVLGPKQCVDLYAFETCTVSLLEKCDTITPSNIVESMFRYVRKESSCQPHIDRVKLQHRRALPLTSGSQSGSSVSLHLTWTSASLLMATFLARLA

SEQ ID NO: 35632 - DNA, 4214 bp, DROSOPHILA
gattccccggcaccactgtcgtcgtgctgctgttccgtgtcagaggactcgtcctcatcctcgtcttcaccttcagagtcatagaaaattgtctcgaacgctggaatattctcctccaaggaggcatcccccaagatgcacacctgccgatcgctgtagatgttacacacatccaacgggcgatgtgaatcgcatatgaagaaggtcacgtcgtccgacggctgcaggagctccacaatatctacacagccgccgcagttcaccaacaccacgtacttaacgtcgccctggtgctctccataggcccgcttcagacccgtaacgcccattatgggcaccacggtgtacagcatgtgatcgtacttgaacaaggcctgcaggatgcgactggcgcagatggcatcgatgtcgtagttgaccacgatcaagatgcgcttgccaaccagctggcggtaaaagtcgttgcgcagatcctggacaaacatggtgaacacttctggcgggaatcccaatcgtctgcctaatctgtctacgtctagacacaacggtctctttccaatcgcttacgatgcaaagtagaattctacatgagtgcagtgcgttgcattttgagggtttccctgcggcttgcgctattttccagcttcccactgccgctccacttttgcttttctggcaatcgcaattggcgaatcaaaaacgcgggaaacagctggcttagccagtgtgaccagtgtgaaataatggaatggcgcggaaatacaatcgttgctgggaaaagaatattctgcgaatttccagaaattttgagctgccaaaaaccgaaattataatcacataatgttgaattttgagagctctttgcagttgctgctattgcagtaggagcaatatcttggcgctccagatacggtcacaccgcgacgcccatgtgttttgaattgccacaaaaacgaaagtctaccagtcgaccagctttgtgcgacaaaagcctcagaatatgagcagggacaacaagatgaagcacctgacccagcgggccatctcctcacgcatgaactacctgttccaggcctcgaatttaatggcagtaggcaatcaaccaaaattggccgcctattatggcaaactctgccgcaatgtgggcaccaaggctatcatgcacatgtaagtggcttctccagtggagtatgggcaaataattcatggcgtcaactggtttcaagggccccggccgtgaagcgttccctgtgcaggcgctgtttccttcccctgattcccggagtgaatacggagctgcatgtggaggaaggagcacaggaggccaagactgatgcacaagctcaatcgaacggagcagtcaaaacgaagaaaaagcgccatcgcaggcagcgcaagaagcccagaagccggaaaacagggaacaccaaccaggaggaatccgaggagcaaatccaagaaagtactgaacaggtctcttttttcttagagtgctcactctgctgcggccggcgaagctttgcggcgaacagtcaaagagactgctggttggagcagccgcaatccatagtgcaagtggtctcgctccccaaagagaaagacgagcgataagctgaagctttgcttatcagccagcctgcctgttgtgccatcacctgattgctcggcagttgagcctggaatgcttagctgtaggcaacttatttctcggctgagccttcttcggcaggcgagcacatttgcttgtgtgcgactatgccccgactatgtagaagtccaggaggagcagggcaatctcctgaagtacccccaagtttggcttagggacaactgtcagtgtgccgagtgcttccacgccgccacaagagcaagaaaaagtcactgggatcgtggcccgctgaatataccagtgtcccaagtggcctacaacaaggagaggaaacagttggagatcatctggcaggacaagcacaggagcaccttcgatctaggctggctgagggaaagggactttggagagactggcagaaagcattacttggaggaggtctacaagccacccgctcaactctggggaaaaacggagttcgaggatgtgaaaagagaattccaatacgaggatgtgctggagcaagatgcagccctgagagtttggcttgaggcactggcagtccaaggattcgccattctgaaaggggcacccaacgacataaatgtggctaagaaattggccgaacgaattggctacataaaacgcaccacctacgggtaaatattaaccaatagatgacatacttcatcgtacagtaccagggtcataaaactcacatttgccgagagctgtattatctatcagtccactaaatattatcactatcggttgattgttacagccagaatcaggcaaatattttcaaccaggtgtccatttgtactcatgataaagatttgattaccacttactcacgctagatactactacagaatatgctagccacatttcataaattaaaagggaaaacaccttagttgcattactcaagttcagctataaattatctactatcccgcctcccctagcgacgttttcgaggttaaatccaaaccaaatgcgcgcaactacgcctatctaatgactcccctgccgcttcataccgacatgccctactacgagtacaaggcgggcatcaacatcctgcacaccctcgtccagtcggagtcaaagggtggagcaaatacgctgacagatggcttcaacgtggcctcgcagttgcaaaaactgcatccggaggacttcgaggtgctcaagtcggtgcccgttaactggtttgacatcggacacgacggcgatgactccaagcccttccacagtctctggagagcgccagtaatttgtttggatgtggatggccggttcgcgaggatcaaccagaacaccactaagcgggacagccggttctccgtttccctggcgcaggccgtgtcctggtacaaagcctacgataagttccttgagatcgcccagtccgaggcggtggagttcaagacccaagccggcgatgtgttcgtcttcaacaacctgcgaatgttgcacggaagaacggcttacgaggatgcgccgggcaacaagcgtcatttggtgggcgcctacgtcgactgggacattatttactccaagctgcgaaccctgaagttcccaaatgccaaggattgactgagggaatgttgtgagatttagttgaaatgtaactgtgaattaaatggtttttttttacacatggcacagcgaataaattttgggaggtgtataaatattgtgtctcaacttgcaaatgaatttcacttgaaacgtgtttgaatcctacgatgaacggcgccgatactatcgatacaagcccagtggtcgagcacttctcgatactgccgtggttgagtaactccgctctggcatcgcgataacatcgatataactgccacctctagcataatatatgtactacatttatacaaatataaatataatggaaatatgagaatttaaccaaacaccgcccgaaatatgagatcctccgagcacagatcctagcaatcgatctcctcataaagtgagtgagtcgcaagagacgaagggagcgagagagagaaaggagcacttaaattgcacattcgctgctgtttgtccgccgcgatgctgccctacaatgtgcgaaacgccggtggcggaagcgttggcggaatcctgcggcgcacgggccaaggttcgggcaccggaagcacgattcttggcaatggaaacagtccgggagcactaggagccggaaaagtgtcctccagcctggaaaaccacagacaaccgccgttggaactcctcgtgtttggctacgcctgcaagattttccgcgatgacgagaaggcgcgggaaatggaccacggcaagcagttgattccctggatgggcgatgtaaatctcaagattgacaggttaataattgggactaacccgagcaataattatacgattaatcagtacgcacaccactgccacaaacacacacacacagccacatacccaccaatgtcgtgtcccgttaggaccacactcccacacacagcagcggtcaaattgttagcagagtcagatacatacatatatgtaggtattgtgatcgatggtattgtgattatggcgttagaagaccgagcttgtcgctatt

SEQ ID NO: 35633 - DNA, 1533 bp, DROSOPHILA
atgagcagggacaacaagatgaagcacctgacccagcgggccatctcctcacgcatgaactacctgttccaggcctcgaatttaatggcagtaggcaatcaaccaaaattggccgcctattatggcaaactctgccgcaatgtgggcaccaaggctatcatgcacatggccccggccgtgaagcgttccctgtgcaggcgctgtttccttcccctgattcccggagtgaatacggagctgcatgtggaggaaggagcacaggaggccaagactgatgcacaagctcaatcgaacggagcagtcaaaacgaagaaaaagcgccatcgcaggcagcgcaagaagcccagaagccggaaaacagggaacaccaaccaggaggaatccgaggagcaaatccaagaaaaagtccaggaggagcagggcaatctcctgaagtacccccaagtttggcttagggacaactgtcagtgtgccgagtgcttccacgccgccacaagagcaagaaaaagtcactgggatcgtggcccgctgaatataccagtgtcccaagtggcctacaacaaggagaggaaacagttggagatcatctggcaggacaagcacaggagcaccttcgatctaggctggctgagggaaagggactttggagagactggcagaaagcattacttggaggaggtctacaagccacccgctcaactctggggaaaaacggagttcgaggatgtgaaaagagaattccaatacgaggatgtgctggagcaagatgcagccctgagagtttggcttgaggcactggcagtccaaggattcgccattctgaaaggggcacccaacgacataaatgtggctaagaaattggccgaacgaattggctacataaaacgcaccacctacggcgacgttttcgaggttaaatccaaaccaaatgcgcgcaactacgcctatctaatgactcccctgccgcttcataccgacatgccctactacgagtacaaggcgggcatcaacatcctgcacaccctcgtccagtcggagtcaaagggtggagcaaatacgctgacagatggcttcaacgtggcctcgcagttgcaaaaactgcatccggaggacttcgaggtgctcaagtcggtgcccgttaactggtttgacatcggacacgacggcgatgactccaagcccttccacagtctctggagagcgccagtaatttgtttggatgtggatggccggttcgcgaggatcaaccagaacaccactaagcgggacagccggttctccgtttccctggcgcaggccgtgtcctggtacaaagcctacgataagttccttgagatcgcccagtccgaggcggtggagttcaagacccaagccggcgatgtgttcgtcttcaacaacctgcgaatgttgcacggaagaacggcttacgaggatgcgccgggcaacaagcgtcatttggtgggcgcctacgtcgactgggacattatttactccaagctgcgaaccctgaagttcccaaatgccaaggattga

SEQ ID NO: 35634 - protein, 510 aa, DROSOPHILA
MSRDNKMKHLTQRAISSRMNYLFQASNLMAVGNQPKLAAYYGKLCRNVGTKAIMHMAPAVKRSLCRRCFLPLIPGVNTELHVEEGAQEAKTDAQAQSNGAVKTKKKRHRRQRKKPRSRKTGNTNQEESEEQIQEKVQEEQGNLLKYPQVWLRDNCQCAECFHAATRARKSHWDRGPLNIPVSQVAYNKERKQLEIIWQDKHRSTFDLGWLRERDFGETGRKHYLEEVYKPPAQLWGKTEFEDVKREFQYEDVLEQDAALRVWLEALAVQGFAILKGAPNDINVAKKLAERIGYIKRTTYGDVFEVKSKPNARNYAYLMTPLPLHTDMPYYEYKAGINILHTLVQSESKGGANTLTDGFNVASQLQKLHPEDFEVLKSVPVNWFDIGHDGDDSKPFHSLWRAPVICLDVDGRFARINQNTTKRDSRFSVSLAQAVSWYKAYDKFLEIAQSEAVEFKTQAGDVFVFNNLRMLHGRTAYEDAPGNKRHLVGAYVDWDIIYSKLRTLKFPNAKD

SEQ ID NO: 35635 - DNA, 2399 bp, DROSOPHILA
tgctagcaactttcagtgcgagtgcgcattattcatttccattgtcagttccaagacaggccacaattttgaccacatcgaccttcaaggaatgctgatcctcgcggaactccgcgtcctttaggatcagagtccacacattgtcgcagcatctaaaggtttccagtctttcggccgtaaaggacatattgctcgtgccatgatccttgagagctgttgaaatgctcttgtcatatcttagtaaaaccaaattagcaatcttcttggttatatcgcccctctgcaacatacacgtgtgaactgataagtgcgaagggcctacatatatgtacatatgtacacgtgacgtgtaccaactcacctccatcatctcatccaaagtgtcctggagcgttctgcccagcgttgtggccctgtaatgttgatagttcatatcggctgaagatttgagctagaagcttagtacacacgcgctgtagaatttttatgaagaatgactttagcgcatggcattgacagtgacacactgacacactgacatcgattgcgaaatattatcgattacagggattaccactaacaatcagattcaaatgttcaagaaaaagttattaaaccaaagcatatcgcaagtgttgcccaaaagcatatgtaatgatccggggtattcaaaatggccacctaaaccgcataaaaaaaaacagattacgatgatttacttaattctaattgctactataattgctaatgtgatggccctaattgcttcttcttgccattaggttagatggtgcggtggcaatttacttgaagcactttctacacatttccagatttcatcacattgaatgttcgtttagttaaatgtcttatgtggggtaaatgaagatttggaaataaagaaggcatttctctttcgaacattcagaataaactttgctactagctccccaaaatacttgtgaattagaaactttgaaaaattacataaaactcgaacatggatgatttggctaacgagtacaccggcagtgaagagaggagtggagaagcctccaagctcggactcctggccagggtggaccgtctgctccggcgctggctgcctggatacagcttcattcgcggcaagcgtctctcgacatcggaaacctcgatcgtgcacggctgctcccacggcacacaggcggtgcgtggacgtggtgaccggatgaataataaggaggaggtgtacctggacaccggcatcgccaagtcggagttctgcgtccacctggagaccttgctgcgcaacaagctgctcaagaagcagcaggaattggccctggaacatcaggagagaagccgcgagatggagctggagcaggaacggcagctcaatcaacaagttcagcagtaggaaagtctacctattgtgttatttttcacttcaattgtgtatatatatttttaataccatcaatcagtcgtggcgaggcgaggcgaggcgcctcattaaaattaattaaaaataatcaccggcaatcatgaaaacaaaggaaatcaggacgcatgtggcatcagagaatattttcccctttaattttccaatgtctaatgcttatcagtagtcaacaattgattagcttataattgccaaattgatgaccattgatcatttaatatttcagtttgctttcatacggcttggctggcggacgtctttttcatcgtcttttttcatgtcattaagcgtgaaattaattaattgaactgaatttattattaaaatgccgtatagaaaagtacagcttgtcgattgttcatagaacagcgagccagttgagtcggcaatgttagtgtgcaattgaaaatgggaaatggaaaaaggaaaattgcgaaatgacaaccacttgtgatctcgatgtcaattgcgatgtcattaggctgaacgaacaacaattgtgtgtgtatgccaaaaacccttctaatgttctaatgtccgcagcattagcatagggtcctttaaacaacaaccccccagcaccaccactacggacgctgccaccaaccacaggactcctaaccactcatcatggctattccagtccatttgaggccgtgacaaagcccaaatcaaaacattgcttatacggatacggacagcaaacctgtatgtgcgaagtggatgttaatatgtgtgggccagttgggggtgggttgagggagagtcctcagggttggcattataattttgctggccaggcacttgagcacttgatgaccattaacgtaacttttgcgtacgttgctattccaaatacacagcgaaaaaacccagatatgttacgcatacaaaactaagtaagaaaaatacatagaaaatgagcaaatatgatgcccgtttctttgttaattag

SEQ ID NO: 35636 - DNA, 399 bp, DROSOPHILA
atggatgatttggctaacgagtacaccggcagtgaagagaggagtggagaagcctccaagctcggactcctggccagggtggaccgtctgctccggcgctggctgcctggatacagcttcattcgcggcaagcgtctctcgacatcggaaacctcgatcgtgcacggctgctcccacggcacacaggcggtgcgtggacgtggtgaccggatgaataataaggaggaggtgtacctggacaccggcatcgccaagtcggagttctgcgtccacctggagaccttgctgcgcaacaagctgctcaagaagcagcaggaattggccctggaacatcaggagagaagccgcgagatggagctggagcaggaacggcagctcaatcaacaagttcagcagtag

SEQ ID NO: 35637 - protein, 132 aa, DROSOPHILA
MDDLANEYTGSEERSGEASKLGLLARVDRLLRRWLPGYSFIRGKRLSTSETSIVHGCSHGTQAVRGRGDRMNNKEEVYLDTGIAKSEFCVHLETLLRNKLLKKQQELALEHQERSREMELEQERQLNQQVQQ

SEQ ID NO: 35638 - DNA, 3676 bp, DROSOPHILA
ttctttccgcatcctggatcctgtagaaggagccgtctttgagctttatattacccagtcaacaagatgccaaaagaacaagaagccaaatcttcatctttgccgctccgaaaatttgcatttcacaagctcgcacagtaaacattttaatgaccttttccaaatgattgttatctatatactatatatctatactaagtatatttgttggttaaatcgtctttattctccgcctgaggctgagaagtgggccaactatttgggaacacatatgtacaccagattttttcgagaagcgaagatcttagaaatacttccgctcttcagacccaaaaaaggtcaacttgcaattggaagatggagcgaaagagcataacttatcatttcatatttaaaggcgcttgctttggctcgcggaagtcgagaaaggagtcgaaaggcaggagagttgtgtccagaccattgcaagtttagtgcaacttatttaaaatttatgatgcacttgaattgcagctggcaaaaagttgaaaagtcaaccaaaaagggaggaggacaaaaaaagaagccgaagctcgggcgacaaaggcaaaatttcaaatgggaaatgggaaatggcaactggcaaatggcaaatgcataaaacaggaataaaatattcatagcacactttttgccatactttgccatatttggtaaaatttttttgttgacctttagctgccgtttcgaatgctcggagtctggcaattaaatattgaagagccaaacagaattattttaataataacaatcgagtatactttttggctcccaaatggtgcatagcccatgctcgaattgtgtgtgttttgaattggaagtttattgatcgctgttaagctattggatacaacttaattttttgctaaacttgagtgttttgtgtcaatggagaagaaatctaatgccacagacaaaacaccctgatttaaccctatgatgccaccgcaagatgcggaggtcacgagaatagcgtttcctgcattattcatggaccaaaaatcattcaagcaaacggttatgtcgggctgaaagaaaagcaatacttcaccccaactgcgcatttccaggggagttagttcacatttgactaatacataattcatatagttttcacatcagacgggcagacggctcttggccaaatgcctaatgacttaattaggctaataatgagcaaggaccatgagctgctgggtttccctctcgttttccgcatcaacatgtgccgggaaaacagctgcactatctctaggaaagcgggtggaaaatgttctggccactcgatgaaagctccgatgtgtgtgtgtgtgcggatggtaattgcgagggtcgtcgtaaaaatgttttagccgtagctctctcataaatcataattaagcagaagatgtgagagtgtcacctccccagcccctcggtaattaatgttcgcgtgtgtctgtgtttttacttattaactcgtttgggctaatcattagacatccccggcgacccactttgggggctgtctggccctcgacatcttgacattccgaaaaggcgctatcctatttctgtttactcaccttttctcgcagcatatcgcgtatacgacccgcctgattcttggacctgtgcagctccagttgcagctccagacaccgctcctgccaattgatctgttgagaaggaaaggaagcgatgtcatttaggccacaacagagggcttagctaaaacaatgggtgtccacattgacgagcacatgctaaaatgtgcaaacttgagcactttacgcattcgaaatcagcaaaattggttatacaaaacccacctgcggcaacgcctggccatagttgttcacctgatgaacgtccagatgttcggtgagcgtggaaaagtgcggccatggggcatccggcgcatcgagagcagccagcacgggattcacggtggcctgaaccgtcgtggtagtcgagttccgggcctgcgcatccttcgactgctggtccgccttcacctgattcggcttggccggaatgggcggtgggcgtggagctcgacggggcaaaagcctgggactattcggtgtggatgcaggaagtccaatggctccacttgctgctgtagttccgctggcagtgaaacgtccctgagccaaaggtatttggccactgaaggaggtggctctctttgccaaaagcggagatccctgcagcgattgtgatccacgagccgcgcccaattgggtcggcagcgagggcggctggctgtgctgttgaaggtggtggacttggtggtggtaaaagtgcgaggggaaggtgtgcaggtaaccgctgccggcgacttcctgcggccgcagaaaatagttgtgggcgtggctgtagtattgcaatgagttaaggggggctggccacacccagagaaggcgtggcccgccctgatgtcgaggcagaggcactggccgaaggcgatggcgatgacgaggctgatctccttcggatctccgcagacgactgctgcggctccggctgtagctgcgagtgaggatgctgctgtgaatgcagctgctcctgggaacgcaagtgctgctgctgctgaaggttggttagcgtatcaaagatgtgcgataggcgacccaaaggcacttcgtcagacattgacgcggtgtggctggaagtgcagatggtaaattatggtttcattagtggtgttgcattcgattcagcatagataacgtatagcactagcttccatcccctgccgaatgcttttgaaatttttcagatcaagtatgcctggagtcggaatgtcatatccctagctagacccatttgttcagttgtgccagagacacctacccacacaaacctttggaatcctacgttagtttccgaatttttctcaaatttcttcatttttattttgtaagttcaattgtgatatctaaaaaaaagtactatcccctagactatggcaaatcccaaatcgagcggtggcaataagtccaagggcaaaggacaccaacaccggcagtcgcagcaaaattcgcatcagcagcagcagcagcagcagcagcagcagtcgcagcagtcgcagcagccgcagatgcaaacccagataacacccgcaccggtggcatctaccaatttgaacacgcccaccgccacgccgctggcctcgcatccttcggaggacaccctggccttggccgcagccgtcgccgcctcgattccagctgccccccttgctcgacccctgcccgatcgccgcaccaccacaccggcagtggtgacaacgaccagtaacagttcgtcggagacccgaaatgcctccgaaaatctggccacctcgagaaccgcatcggcggcagtcgccgcctctgagaacaggcgcggcatcttacagcggctcttcggatggagctcgtgatgggttccccttctcgccaacaacaaatcctccagcaaaccgtgcactttatcgaagttttatccattagattcttgaaccgataatgcaatcgaaaattcttaattcaaataaaaattgatataaattttaaattattacaataccaagaattaaatatacagattacggctcttgtggggccaaacctcctacaatatttaattacacagagttcccattttgatc

SEQ ID NO: 35639 - DNA, 870 bp, DROSOPHILA
atgtctgacgaagtgcctttgggtcgcctatcgcacatctttgatacgctaaccaaccttcagcagcagcagcacttgcgttcccaggagcagctgcattcacagcagcatcctcactcgcagctacagccggagccgcagcagtcgtctgcggagatccgaaggagatcagcctcgtcatcgccatcgccttcggccagtgcctctgcctcgacatcagggcgggccacgccttctctgggtgaagtcgccggcagcggttacctgcacaccttcccctcgcacttttaccaccaccaagtccaccaccttcaacagcacagccagccgccctcgctgccgacccaattgggcgcggctcgtggatcacaatcgctgcagggatctccgcttttggcaaagagagccacctccttcagtggccaaatacctttggctcagggacgtttcactgccagcggaactacagcagcaagtggagccattggacttcctgcatccacaccgaatagtcccaggcttttgccccgtcgagctccacgcccaccgcccattccggccaagccgaatcaggtgaaggcggaccagcagtcgaaggatgcgcaggcccggaactcgactaccacgacggttcaggccaccgtgaatcccgtgctggctgctctcgatgcgccggatgccccatggccgcacttttccacgctcaccgaacatctggacgttcatcaggtgaacaactatggccaggcgttgccgcagatcaattggcaggagcggtgtctggagctgcaactggagctgcacaggtccaagaatcaggcgggtcgtatacgcgatatgctgcgagaaaaggaaacgctattctcgtga

SEQ ID NO: 35640 - protein, 289 aa, DROSOPHILA
MSDEVPLGRLSHIFDTLTNLQQQQHLRSQEQLHSQQHPHSQLQPEPQQSSAEIRRRSASSSPSPSASASASTSGRATPSLGEVAGSGYLHTFPSHFYHHQVHHLQQHSQPPSLPTQLGAARGSQSLQGSPLLAKRATSFSGQIPLAQGRFTASGTTAASGAIGLPASTPNSPRLLPRRAPRPPPIPAKPNQVKADQQSKDAQARNSTTTTVQATVNPVLAALDAPDAPWPHFSTLTEHLDVHQVNNYGQALPQINWQERCLELQLELHRSKNQAGRIRDMLREKETLFS

SEQ ID NO: 35641 - DNA, 2573 bp, DROSOPHILA
ttcacctgatgaacgtccagatgttcggtgagcgtggaaaagtgcggccatggggcatccggcgcatcgagagcagccagcacgggattcacggtggcctgaaccgtcgtggtagtcgagttccgggcctgcgcatccttcgactgctggtccgccttcacctgattcggcttggccggaatgggcggtgggcgtggagctcgacggggcaaaagcctgggactattcggtgtggatgcaggaagtccaatggctccacttgctgctgtagttccgctggcagtgaaacgtccctgagccaaaggtatttggccactgaaggaggtggctctctttgccaaaagcggagatccctgcagcgattgtgatccacgagccgcgcccaattgggtcggcagcgagggcggctggctgtgctgttgaaggtggtggacttggtggtggtaaaagtgcgaggggaaggtgtgcaggtaaccgctgccggcgacttcctgcggccgcagaaaatagttgtgggcgtggctgtagtattgcaatgagttaaggggggctggccacacccagagaaggcgtggcccgccctgatgtcgaggcagaggcactggccgaaggcgatggcgatgacgaggctgatctccttcggatctccgcagacgactgctgcggctccggctgtagctgcgagtgaggatgctgctgtgaatgcagctgctcctgggaacgcaagtgctgctgctgctgaaggttggttagcgtatcaaagatgtgcgataggcgacccaaaggcacttcgtcagacattgacgcggtgtggctggaagtgcagatggtaaattatggtttcattagtggtgttgcattcgattcagcatagataacgtatagcactagcttccatcccctgccgaatgcttttgaaatttttcagatcaagtatgcctggagtcggaatgtcatatccctagctagacccatttgttcagttgtgccagagacacctacccacacaaacctttggaatcctacgttagtttccgaatttttctcaaatttcttcatttttattttgtaagttcaattgtgatatctaaaaaaaagtactatcccctagactatggcaaatcccaaatcgagcggtggcaataagtccaagggcaaaggacaccaacaccggcagtcgcagcaaaattcgcatcagcagcagcagcagcagcagcagcagcagtcgcagcagtcgcagcagccgcagatgcaaacccagataacacccgcaccggtggcatctaccaatttgaacacgcccaccgccacgccgctggcctcgcatccttcggaggacaccctggccttggccgcagccgtcgccgcctcgattccagctgccccccttgctcgacccctgcccgatcgccgcaccaccacaccggcagtggtgacaacgaccagtaacagttcgtcggagacccgaaatgcctccgaaaatctggccacctcgagaaccgcatcggcggcagtcgccgcctctgagaacaggcgcggcatcttacagcggctcttcggatggagctcgtgatgggttccccttctcgccaacaacaaatcctccagcaaaccgtgcactttatcgaagttttatccattagattcttgaaccgataatgcaatcgaaaattcttaattcaaataaaaattgatataaattttaaattattacaataccaagaattaaatatacagattacggctcttgtggggccaaacctcctacaatatttaattacacagagttcccattttgatcgctacaaaattgataaccgaatacttgtgcccgttccaaacattgcacaaacaatggcgagctatccatcaacccgccaatctggcaatcggtttgggcattaccagatcccagtcaacatttacacctatctacgtgcccaagcaaggaaatcaatgcgagcagatgaaaaagtgagggaaaaccgatggagcagaatgagaacgagtgacaccggcagacgaaaaagtggaaagtgctcactggacactggacagtggacggttgatggtggagagcatgaaactggagaaaactggccaacaggtgcgcgaatctggggcatcaatcgccactacgtgtgcgcaatgtctaatcaacgggacaaaagtccatggaaaagggcagttggaaattgaatatgccactaaattatagacagcaggagagtgccgtccctttcatctttttgtggtccgtggaatgctggctgatggcttttccagcttttcctttccctctgccttcccctctgctcctttgcagcattcggccactttctttgctgtgaatttttgtggctaaaagcctttggttgcaagctctccggtccgaagtccatttccattgctgcaactcctttgccaaatctctggagctgtggctgtggtcgaagggacgcacgcaggacgccggaagcaggacgcagaacccacgacccaaaccagacacattcataagaattatattccaatttcgagcagggcaccgtactttcttctgcatgaaggag

SEQ ID NO: 35642 - DNA, 488 bp, DROSOPHILA
acccacacaaacctttggaatcctacactatggcaaatcccaaatcgagcggtggcaataagtccaagggcaaaggacaccaacaccggcagtcgcagcaaaattcgcatcagcagcagcagcagcagcagcagcagcagtcgcagcagtcgcagcagccgcagatgcaaacccagataacacccgcaccggtggcatctaccaatttgaacacgcccaccgccacgccgctggcctcgcatccttcggaggacaccctggccttggccgcagccgtcgccgcctcgattccagctgccccccttgctcgacccctgcccgatcgccgcaccaccacaccggcagtggtgacaacgaccagtaacagttcgtcggagacccgaaatgcctccgaaaatctggccacctcgagaaccgcatcggcggcagtcgccgcctctgagaacaggcgcggcatcttacagcggctcttcggatggagctcgtga

SEQ ID NO: 35643 - protein, 152 aa, DROSOPHILA
MANPKSSGGNKSKGKGHQHRQSQQNSHQQQQQQQQQQSQQSQQPQMQTQITPAPVASTNLNTPTATPLASHPSEDTLALAAAVAASIPAAPLARPLPDRRTTTPAVVTTTSNSSSETRNASENLATSRTASAAVAASENRRGILQRLFGWSS

SEQ ID NO: 35644 - DNA, 2831 bp, DROSOPHILA
ccacaaatgcgatgcagcggagttttcccccacagtttttcaaacggcaatgcgacaatagcaggtgagacagagacagcgagtgagcgagaggaaaagagagacggagagagacgggggagcgagagggagcgagagggagggagcgcaaagaggtaaccgcaaccgcatcgagcactgcatttttccgcttttcccctttggcacgtgtgtcgagttcattatcgcctctacaaaacacacacgccattcggaaccgtgtggaactatgtatatggagcagcatttgcattggcattttctattgccattttctttctcggttttgggggcacattacaatttaaattgttcgcatgcggccggccaaacttgtcgcatattatttattttatttatgggggaagccccataaagcaaaaaagctttgcatacatttcggggcaggagcaggggagcagaatacaggatccgaaaaggaagaccgcacgctgtgtttgcggactaggctcaagatttatggctttgcgacaggcggagcagacagaccaacaaacgaacaaacgaaccggagggacagtagacagtcggacggacagccgaagcagacacaagggcaaacaaaaagccaaagaaaacgaagacagacagccggaaaaaagcggagtaaggaagttggaaaaggggcgggaaacccttgaagaactgcccggaacaatgaaacttcaagaaaaccacaaagttaagcgacggggaactaggagcctaaacactctctccacccaaaagaagcggagcgttgattttccggctgtggaaggagttcatggtccgagcctatttacccaatgtctaagcctgtccattcttaatgcaactaaaacaacgcccaacttaaagtcgacacagaagtagtgtatgttaaaacccctatattaatcttttaatcattcatctttttcatttcgacatcttaaaggagtatgcagatttaaaatcctcagctcacctttctcaacatgtcgtccagagaatccacgtccaggccggcgtagttgttgttgaattgactggagcagttggaggagttgctggtgtacctcttccgtctgcccagggcgggcgagttgaccaacgaactgggtccgctggagccggcatagcccaactgggcggcggccattagcgggtagagcgatggatggggcaactggtggggcaactgatggggcagcgggtggccagtggccaagtgtcccacgtggcccagatgatgatgtgaactgccgggggagcaacaaactgccagacaggcggccgccggacccgctccgttggccaccgacgagcccatttgtgcactgcgtaccgctgccaagggcgaaggtggcgcggtgtggtggtgcacctgcaggtggtgcagcggtgatccatggtgctgcaggtggtgctgcaagtaggccggcgataaggatccgctgcccgacgaacatgagccgcctgctggactgggggagttcttctcgagggtggtgtttgtcgaactggaggattcgataatggtggtggtggtagtggtgctaacggtgacctccatgctggtggtgacagcacctgacaaagtcaatgacgatgatccaccgcccgatcccgaaacgggacgatctgcctctcgttgcttgggcaagtgtggatgtttggtggacccagtggcatccatcgggtccacttcgcaattattagccggagttcgttgttctatagagttcctattcaccgctggcgggtcatgctggtcatgctggtcacacgaggcagccgtccattgcatagtttgtgccacacattaaacactcgataatcgcactttaaactgctgctgcaagtggcaaaagaattgctgcagttgcactctctctcgtcgcgtctggcatgcaaatttatgttgccattggcaattgtttgttttttaattgcaggctgcatactcgtaggcgtccccacatgattaatggcccccaggggttaagagttggtcagtggcgggcgggaaagggttaaggcgcgggcggacattaaccgcagaaacagattgttgtcatttgccatttgatgggactaaatcgaaatccgaatcgaacggaaatcgccatcaaaagtataaataaattaaatctgattcccggcaccagacaccaccagacaaataaaagagagccagagttggtactttgtccgggcaaatcgatttcgcaattggatccctggtgagtttcaaatgaaagtatcgcccaagcagtagcttccttgcatttattctcaaattaaatgaaaacataaacattggaataagataacaaaaggtaagacacgaaagcaacgataacagcagaaacaaaatatcagaaccccaactgttattaaaaccagctcatctgcacaagtacttatgtatgtttgcgctgataaataaatgatggggcatttagaaattcctcaaaacaaaatcggtggacgggaagggtaagcaactggactcggaagcggagcaggacttcacacacgcttgacttgagccagacgttggacgcgttggcaatttacaacaagcagcaatcaattccagagcataaataactcaatttccaacgcccccaaccccatcgatggggctaatgctgtccggccatcgataaattttccgtgaaggggaagcgatggagatggatgggggctctcccccattgggaaaggggcagatggagcagagacagattgtgaagttcgaattaagaggggtgcggcggtgggaagttgatatggtgggtgga

SEQ ID NO: 35645 - DNA, 831 bp, DROSOPHILA
atgcaatggacggctgcctcgtgtgaccagcatgaccagcatgacccgccagcggtgaataggaactctatagaacaacgaactccggctaataattgcgaagtggacccgatggatgccactgggtccaccaaacatccacacttgcccaagcaacgagaggcagatcgtcccgtttcgggatcgggcggtggatcatcgtcattgactttgtcaggtgctgtcaccaccagcatggaggtcaccgttagcaccactaccaccaccaccattatcgaatcctccagttcgacaaacaccaccctcgagaagaactcccccagtccagcaggcggctcatgttcgtcgggcagcggatccttatcgccggcctacttgcagcaccacctgcagcaccatggatcaccgctgcaccacctgcaggtgcaccaccacaccgcgccaccttcgcccttggcagcggtacgcagtgcacaaatgggctcgtcggtggccaacggagcgggtccggcggccgcctgtctggcagtttgttgctcccccggcagttcacatcatcatctgggccacgtgggacacttggccactggccacccgctgccccatcagttgccccaccagttgccccatccatcgctctacccgctaatggccgccgcccagttgggctatgccggctccagcggacccagttcgttggtcaactcgcccgccctgggcagacggaagaggtacaccagcaactcctccaactgctccagtcaattcaacaacaactacgccggcctggacgtggattctctggacgacatgttgagaaaggtgagctga

SEQ ID NO: 35646 - protein, 276 aa, DROSOPHILA
MQWTAASCDQHDQHDPPAVNRNSIEQRTPANNCEVDPMDATGSTKHPHLPKQREADRPVSGSGGGSSSLTLSGAVTTSMEVTVSTTTTTTIIESSSSTNTTLEKNSPSPAGGSCSSGSGSLSPAYLQHHLQHHGSPLHHLQVHHHTAPPSPLAAVRSAQMGSSVANGAGPAAACLAVCCSPGSSHHHLGHVGHLATGHPLPHQLPHQLPHPSLYPLMAAAQLGYAGSSGPSSLVNSPALGRRKRYTSNSSNCSSQFNNNYAGLDVDSLDDMLRKVS

SEQ ID NO: 35647 - DNA, 2765 bp, DROSOPHILA
acagtgaagcaagttcttaaagtgatgaaatcaatgataaagcatttctaggaatgctttagatcgaacttgaatcaggtttaatatgaattcaaaccattcttgacattgacatattcgttaagttcgctaagaaaatgcgggtaaatcagtgaagttcctgccccacatcaagcagctgtgtcaaaatgcaggatgcaggattgcaaaggaagttaaggaggcacgacgagtatacacccatcgatgtctgctttgcctcactgtgcgccttcggtggggttcaaatgaaaagaaatgaaattaagtggcatgttgttgctcatgaggatgtgggaatgtggccacgcatgaccaacttgcaaccaccccaccacccaaggcacccaccaaaacagaaccaccgcactcaaacagacgtcgtctgcctgccacttgagcccttcactgtaagcctgttaaacattttgagtgttaattgtgtgagaacaacaataacagagggcatgggcagtgctgtggcactggaattgcgattgaaaggaggtgaggtggtggtgggcgaggcgtgattcaaggctgaatggcagagcctgttggctggaagctggaagctggagaggactgacaggacgtcgtgattggagcatggcatgcttaaggttgctcctgcgatattaacttgtgtttttcatgcctaacaagatctgtggttcaagaggcacgtcaggattatattatatcgttgaagggcccttgccaccgagtactaatactccgcactaggatttcggcagactatggtggcagttctgcccaagcacgttgtatcgagtcataccacccagtcaaaactcttcccgtattatatgcatagcattagccactttgttgaatcatctcgaacattgaactttagcagccgtatcgaatggaaatcgctacgcttctacaccatatccgatcgcatccgctcagcttttaggccagtgcatgtacgatgacagctgtagtggagtcgctgcagcttatcctccttgccatcgcggtcagatggggtgatgcccttcatcggggaatcccggtgcagcagcaaaactatggctatgtgatgcagatctacggtcctcaattcctggcggccggatcgctgttcagtgcccgttacgtcttaacggtggctcactgttttaagaagaataccaagccggaggagctgtcagtgcgcgcggggtacaggtggatagcctgggagttcaggggcaaacaagtggcgggactcctgcgccatccgaagttttcacctctaaccctgcgaaacgacatcgctgtgctgagggtcaaggcggccatatcgcattcccacatgatcaactacatcggcctctgctcgcggcccttgacccctcttaacatgttcgcaccgccgcaggagcttgcaggctggaatttgatgcatatcgctcagcccctgaaatctatgagtgttcaagtggaacccgagaaaaactgtcgtcaatggtttccccagatctcgggcggcgtgatctgcgcctcagccacgatgggagaggggctgtgctatggggactccggggatcctttgatcagcggaggagaagtatgcggcctggcaatagcctttcgaaaatgcggagataagcgatatcccgccctctttacggacgtccactaccatcgcgcctttattgcccaagccgtactaaccttggacagggaaatgctgagcaagtcacggggctgagttgggtgaactaatattatacttgtacttaaaactacgccaaaaagatcacgtaaaacatacccaattgcagctgaacaaagtgtgtttgtggttaaaagactcacctgcaagagaacagaggaaaaattcaattatgaccgaataaaagaaaaagggaacaagagcacaaaaaattttcattttggtgcactatcgcatgagagctcttacaatatatatacaatacgcatctgaatattattttgccatttaaggcaccctttgtttgtgcaaaaagtaaattgaagtcttcatcgaacttacagagtacagcggctcacacttattgatagattccatcgactgtcgtatttttcttggcccaaaccactgtttgccgcttccattttccatttccgggtcaaatcaatttgcgctctacataaaaaaagcaacaaaaggtcccaagtctgagttggtttggctgaggaattggaagacgagttggctgcttttggtcgctccaaaatcacggcacataacccattaacccgccgcttcaacaatgcaggtgaggcaaacgaggaggttggcgatgacgatttccatacaattttcacggcgtttttccctggcttttttttgtaagcctgccctgcccaggaacatttaatgaattcatatgtttaataaaatctacacgtgaacatgaatatacagtgtggcggcgtgaagggaatggtgtcgcacaaaaggacaacctgaatcctggcagttccgcagcacaaaagtgtgcaacgcaaatgggaaagaacgtgggcgatgccgaatggtgggtggtcggtgaggggagccatcgcagcggatggaatagcagtttctttttgaatagtttgacgatgacaatgacgaagacgatggcgatggcgatggtgatgacgacatgttgacgtcctgtcgcctgggttctcgagtctcgagaatcaagggagagcaggactctgagcttctcgtccaa

SEQ ID NO: 35648 - DNA, 765 bp, DROSOPHILA
atgacagctgtagtggagtcgctgcagcttatcctccttgccatcgcggtcagatggggtgatgcccttcatcggggaatcccggtgcagcagcaaaactatggctatgtgatgcagatctacggtcctcaattcctggcggccggatcgctgttcagtgcccgttacgtcttaacggtggctcactgttttaagaagaataccaagccggaggagctgtcagtgcgcgcggggtacaggtggatagcctgggagttcaggggcaaacaagtggcgggactcctgcgccatccgaagttttcacctctaaccctgcgaaacgacatcgctgtgctgagggtcaaggcggccatatcgcattcccacatgatcaactacatcggcctctgctcgcggcccttgacccctcttaacatgttcgcaccgccgcaggagcttgcaggctggaatttgatgcatatcgctcagcccctgaaatctatgagtgttcaagtggaacccgagaaaaactgtcgtcaatggtttccccagatctcgggcggcgtgatctgcgcctcagccacgatgggagaggggctgtgctatggggactccggggatcctttgatcagcggaggagaagtatgcggcctggcaatagcctttcgaaaatgcggagataagcgatatcccgccctctttacggacgtccactaccatcgcgcctttattgcccaagccgtactaaccttggacagggaaatgctgagcaagtcacggggctga

SEQ ID NO: 35649 - protein, 254 aa, DROSOPHILA
MTAVVESLQLILLAIAVRWGDALHRGIPVQQQNYGYVMQIYGPQFLAAGSLFSARYVLTVAHCFKKNTKPEELSVRAGYRWIAWEFRGKQVAGLLRHPKFSPLTLRNDIAVLRVKAAISHSHMINYIGLCSRPLTPLNMFAPPQELAGWNLMHIAQPLKSMSVQVEPEKNCRQWFPQISGGVICASATMGEGLCYGDSGDPLISGGEVCGLAIAFRKCGDKRYPALFTDVHYHRAFIAQAVLTLDREMLSKSRG

SEQ ID NO: 35650 - DNA, 2282 bp, DROSOPHILA
aactttttggtcgtcgacccttggaaagtatgcactgctaattgaaattgaagttgttagagacggaggacgctggtcgcagcatttttgccaagtcggataagcaaacagaccccagcagaccatagaaaactcaccctctcatctgaggagctggccatatagaaggttctctggacttctggagaccgtagaacatgctgttggtcttttagcccaagcgcagtgccttgaggatcagcgaattttttttctaaatgcagaccgtggagtgtcccattgcggggtctccgcttgccacctcccttcgcagaagttcagcatccgttcaaatgaacaccttcagccgaagcaggtgctggatggcttatggcattgcgctggcattggcatcgaagatctcctcgctacacgtccatctcgtctttcacagccaccatcatcggctttgatgtgagtgtcgcatggctcactctttaaattcaatacgaaactggtgtgaaacccgcgctctgcgcctgatttgcattcgcaaattggtaatacaataggtagtcgtcggctgccgtttttccctcccctccaaccgccgaaacccgatagtcctgatagcgtgcactatatactgattggagtgcggggcatttgtgaaattaacataagtgacaccattttgcataatgggagtctccgaaaacaattgttggggggcaccagtctagtccgattccggggaacacaactgtacccacaacaaacccgccggctataaaagcagacagctctgggttgcactgcctcagtgggaagctctcctttcagctaaaagctgcgggcggcacaacataaataaaagggccctaacaggtgggaactaaaccatcaggtgatgggtaacttgactttggcctggaaattcttttattgactgctgacgaaatcagcctggcacattcccccatcttcggcacttctacttattatttctagccacagaaatatgtgctttctcttcccacttggctgctgcggctgctcctcatcgaagccttgccaaaagaatggaaagcagcggcaagtgcagcaccagccggacgtcctggggaacgtgatatccacggagccaggctacttcaaccaggtgaccatcagccagccatcgctacccagcatgagccccagttcagtgtcactgccccaccgaatagtcacgtctagcaccttgagctcctgggacggcgaagtctggtggcccaaaagggactccatcgaggattactaatccatagtatcttagcagaattgattagcgtatcgctgcactacataaatgtacgacttacaaagatgtttgtcaaaaactcttatatttaatgaaactaccgactctgtttttagttctcacaaagagtgtacctattatttcttttctctggccacaaaaaccaaaagcacaagaagacaattctttttcgcctccgcgagtcgcacgtagcccctgttggagtatgcatttttaaaatgaaattactccacgttttgcgggagacagaggtaaaggattcttgtggttaagactgtgtaataaaaatttgattagctgcttgtttaactttaattaagttgatttcgcacacacactgaacataggaaagttaatcaaatatttagcaggacctctttgccgttttcccgtacgagtgccgcagggttaaattctgtttgggctgggcgtatattaacattttggctaagcaaactggcgcaagcaaacaaacaaatgccagaatattcatgatgatcattaacacacaggacgcacaggacacacagcagaagagagctagcttccaggatatgcagtccaggagcagcctgtgacgcctgcgaacaaatttgcacagccttcgggcgggagtttaaggacccgaatacgtctgcaggctccacattatgtccttggcaaagtgcttcaacctaagccattaggggtaactttgccaagatgtcattaaaataaaaatcgagagcgtgttaaatgatttacaaaaagggcggtggagcgaatggggaaaaacaatttcgtggctcttccagttcatgtcggtggtttagactcttggctgctccacaccacaagccatttttgtattttatgctttttatgacttttcaataagttttcccccaagacgagcgggaaaacttttcttctcgacccattaaagaaggcatgtttagtatcgataagttgcagtgtgaaggagagcatgtgctagagc

SEQ ID NO: 35651 - DNA, 282 bp, DROSOPHILA
atgtgctttctcttcccacttggctgctgcggctgctcctcatcgaagccttgccaaaagaatggaaagcagcggcaagtgcagcaccagccggacgtcctggggaacgtgatatccacggagccaggctacttcaaccaggtgaccatcagccagccatcgctacccagcatgagccccagttcagtgtcactgccccaccgaatagtcacgtctagcaccttgagctcctgggacggcgaagtctggtggcccaaaagggactccatcgaggattactaa

SEQ ID NO: 35652 - protein, 93 aa, DROSOPHILA
MCFLFPLGCCGCSSSKPCQKNGKQRQVQHQPDVLGNVISTEPGYFNQVTISQPSLPSMSPSSVSLPHRIVTSSTLSSWDGEVWWPKRDSIEDY

SEQ ID NO: 35653 - DNA, 2360 bp, DROSOPHILA
cagtattttccggtgtggtgaattccgtttgagctcttaaaaaatggttattttgcggtccttatgcttttggggtttttcagcatgggaggtttttcattgggaatcatctacccagccacccaaaggatggtctatccatcaatgaatcaatcatgggaaatgacacacaatttgcagctaatagtaataatgctctctagctaatacaattcatgtcgctgggatctgcttctttgcacctggtattacgataattttggaaaacggggctaatttcgcccttggtcgcttgcttcgcgcgttctgaactcaatggattgccatttaagaaaggtgaaaagccggccgcggaaatagccctcgaggaattcccgtccaattaatcaccaaagtggcctacggaacccaagagtccaaagggaggaagggcgtagaggaagatggttaaacgtcgctaaggggtccacttgaagcgcgcaagagatcgactgccgtctattttgaatgtcttaagtgcattaatttccgctttttatgccattcaagtggccactcagttaagggggcggacgggggtgtggagcccattgattgatggacgtcaaattgctgtgcgaaatatgaagaagcctcctctaccgatgatgaatggcggagcggaagtggcaggaaacgtcagcttgacttgatggtaagctttcatacatctcttcagtctgagttaacctttgctaagctgtttgaggagtatactcgtactcctctactcaaaggagaatctaactgcatatccaatcaaatgtgaagtacaagtaccgtctaaaatttccaacattgttaggaagtgtttttatttgttcgcttggtcgcttggtaatgactaagtctacttagtgtactaattggctgagccattccctttgccaaaaacagctgcatagctgcacgattataaatagggtggaaccaccgacaaactcgcccagaagcaacaaatatgtgctctagtttaagcgacttgtttgcctgtatcagggcccagggaaattccgacacggattccaccagcaccacccatcggcggaatatcgctgacctggacgatgaggcgcccgatctgcagctccaacaggagcagacccgcaagtggaacgatctttctatgccacagcgacacgattcgtttccagttcctcctccttcagctggatctccatcaacgggctaccttcgtccctcattgcggtcagcacgggtctcctacgaagccttggagcgctacgatcgaatttttggcagatctttccaagacgccgggtcatctggttcagttcgaaatattcccgaccagttctaggcggaaattgtttgggatttcggcattgacattaaacatgtgatcccgcatattccgctaaaagtcgaacacaataaatacattttacacattttcctgacttgactatatggacaatttacttgcatgcgatggctggctggtgttcggcgctgcgacgaaacttggccaaaccattggattaaacataaagctgaaaaggcagaaagttcggttcgacttgcgtgcgtgaaagattgcgaaggttttaccggatttggccgtcctcatccgtacacctgtttaatcaggggcgttctggcctgccaattggcgacttaattggaaggaaatgaagcggcggcctaaagcagaaaacatttggcattaattgctggtggtgtgccaaggggggttggggagggggtccactttccttcagacacttcagacttaaacacacaagttttacaaatgtggcacgcagtcgcaacaagaacggaaacggaaaatgttatttcgcagccacgaatgcaattccagcaaacaaatggctcacaatgggtgaagtaaacccccgaagccactactgccaaaggaggtgactttgcccattagtcggtttaggtgtcgtttgccgctctgctgaaagtttccagcgaatgtcgcactaaaagttgtctttctcgcgattgcgatacagatgtgaatatataggaggtcttaaagggtgggtggacaatgctgcaaggagcatggaagcagatcttgatgggctgcagtagctgtgtcttatccgactcggaattgctttggaagaaacgagttcacactgactgtatgctacgaccggaagaagagcccaattgataggtcaacaatgaaacagtgcaactgcaaacttgctttagaaacgtattactctgtggtctgcgcgtcgtatacgtaatgcgacctaccgccccacaaaacgaaataaaacattttaacagtttacaaacaatattttcatatttatact

SEQ ID NO: 35654 - DNA, 360 bp, DROSOPHILA
atgtgctctagtttaagcgacttgtttgcctgtatcagggcccagggaaattccgacacggattccaccagcaccacccatcggcggaatatcgctgacctggacgatgaggcgcccgatctgcagctccaacaggagcagacccgcaagtggaacgatctttctatgccacagcgacacgattcgtttccagttcctcctccttcagctggatctccatcaacgggctaccttcgtccctcattgcggtcagcacgggtctcctacgaagccttggagcgctacgatcgaatttttggcagatctttccaagacgccgggtcatctggttcagttcgaaatattcccgaccagttctag

SEQ ID NO: 35655 - protein, 119 aa, DROSOPHILA
MCSSLSDLFACIRAQGNSDTDSTSTTHRRNIADLDDEAPDLQLQQEQTRKWNDLSMPQRHDSFPVPPPSAGSPSTGYLRPSLRSARVSYEALERYDRIFGRSFQDAGSSGSVRNIPDQF

SEQ ID NO: 35656 - DNA, 2893 bp, DROSOPHILA
aaccataatgggtaggcacaatactatttttgtcgtgttcctcttcatcccagttgtcaatctcttctggtggcggcgggggtggttgtactggatgaaagtcaggctgaaacgcagtccaagctcttcgatcagaccatgtcttaatattttcaattgaaggaaaagaacagctattgaagccatggcttgcaataggaagactggaagcggaatagtaactacttattgtattcgaagaacgtctaacatcagtttctatatattcatgcaatgaatagcggctacaatacttaagacttccgcgatccctttgatcgatttcagcagatcggtcgcgatctctcccgcggtactctcgatctttagatgagttataataatgttctcttttttctctgggctggtctcggcctttttcatgagatcttttacggtctcgaaacgactctcgctccctagaacgacaataatcacgaggacgtgaatctgaatctctagatctttctcttgtcatgatcaatatatcccgagaatcttccggcgatatatcactagaacggcgtcgataaaaagtacggcgacgccttattgaagttccaacgttttctcgcattccacgatcacggtcataacttcgctctgacgagtgtcgactgcgctccttaaaatggcgatctctttctctttccttgtcgcgattccagtttcgatccctactgcggtttggaatttcatgattggtttgtgtggtgtagatatcctttatgtgttcgccgttcttttcaggatatccgtggatgaattcggtgtcctccaaagccgcctgctgaaatgtccattgcggtgttacttttggacctattaattgttttccagcgactgaatttgtaaggctctcaagagatttttttaatgtggcaccaaaaggatcgcaaaacacatctaagatctacaatacatagatacattagaacaagacaaaagctgaaaaacttcatcatacctttcccattacagacttttgattgtatttttcaacgaattgtctcgctccctttgtactatcaaacactatacgtgcaatgcccaagtgtttgtttgtgatgggatgatggtaaatatttatttcatcagatgttccacatttgtccagcatgctagcaagaaattgcttgtcgatgttatcatttaggttcactattgtaacttcgactgcaggtggctggcccacgtagtcgctatcgatgacaaacctatgggtacggaccaggtgtttagctgaaatattttaatttaagcaatggttacctcggaataagaagcataagtggttcaacagccctggcgcgtatgcgaataagtggattccgaggatctctaggtgttattgttggataggacgggtctcctggcattaaaccatcgtaacgatagagtctggtaccacatttaaccaactgtggatcagatagcagtttaaagttgcgcggcattttggagtttgccagagacgaatcatggctgttgctggaattgttgaccaggttgatattccgaacgtcctgcatctgtgtcaattatgaacaaacctaaaactcaggaactgtaaaagctatatataacacaacaattttaaagaaatttattgcttcttgaatataaaatcttacatacctattttacttattaacaaaataatagaatataaaaatatttagaaatatcacaaaaaattttctgcgatgtttttatttgaaagggatcaacagcgaatatataatatataattatattaaaatcgttcacgctgcttttttaattaaaaaacaaataattaaattacttttttaatcattatattggttggatgataaaattaactctcaaatatatgaaatattgaatcacaatgcaaataatacacaaaaacgaggctttcgatttctaggggcgataattatgaaatcgatttcgtaaataataactagttcagactatggctaatttggggagttgggtaaatgttgtttctatatttcataataccgtaaagaaaattctaggccaagaaaagttaataatccgaatcatatattacatttaaaaaaaaatacgtattactttcatgtagttgcgttgcctttagttgcatttaagcgttcttaatctataaccctataatataatatatattatatataatataatatattcttaactctataatataatgggcgaaactgaacggtaattaaatacataccccaccaatttttattaagaatcaaataaaaagtttggttgaagtcaaatctatttttgttttaacttttgtgagttctgtggacttccgaaatacttccataaacatataagttttgttttcgcttcgaaaataaaattaacaagcaagattttaataatttcagtaagaatttcaatctgaaactgattttacaaagtgcattattcttataataacggtttttatcagtgacaaggacacgggcagcgaaaatggactttggtcagaagatttcgattccttaaaactgttacctgatgaatacgtaaacgggatggatattttctttaaaaaagttttaatgctgactaattggttcgaacgctctttgtttaaaagtttgaaaagtgcttatgtctgctgtcgacggtaaaggcgtgtgaaatgtttgaacctaggttgctgtcgatcgtgaataagatttatttcgcctaaggagttcaaacgtttaagtggtattgatttaaataactttcacagtaggctctgggcttatgttgataacagggtttggtgtctaggttatttgcatcacttatacattatataagattgaaataaaaaaattacgttttaatacacagc

SEQ ID NO: 35657 - DNA, 767 bp, DROSOPHILA
tatttgagagttaattttatcatccaaccaatataatgattaaaaaagtaatttaattatttgttttttaattaaaaaagcagcgtgaacgattttaatataattatatattatatattcgctgttgatccctttcaaataaaaacatcgcagaaaattttttgtgatatttctaaatatttttatattctattattttgttaataagtaaaatagttcctgagttttaggtttgttcataattgacacagatgcaggacgttcggaatatcaacctggtcaacaattccagcaacagccatgattcgtctctggcaaactccaaaatgccgcgcaactttaaactgctatctgatccacagttggttaaatgtggtaccagactctatcgttacgatggtttaatgccaggagacccgtcctatccaacaataacacctagagatcctcggaatccacttattcgcatacgcgccagggctgttgaaccacttatgcttcttattccgaggtttgtcatcgatagcgactacgtgggccagccacctgcagtcgaagttacaatagtgaacctaaatgataacatcgacaagcaatttcttgctagcatgctggacaaatgtggaacatctgatgaaataaatatttaccatcatcccatcacaaacaaacacttgggcattgcacgtatagtgtttgatagtacaaagggagcgagacaattcgttgaaaaatacaatcaaaagtctgtaatgggaaaggtatga

SEQ ID NO: 35658 - protein, 171 aa, DROSOPHILA
MQDVRNINLVNNSSNSHDSSLANSKMPRNFKLLSDPQLVKCGTRLYRYDGLMPGDPSYPTITPRDPRNPLIRIRARAVEPLMLLIPRFVIDSDYVGQPPAVEVTIVNLNDNIDKQFLASMLDKCGTSDEINIYHHPITNKHLGIARIVFDSTKGARQFVEKYNQKSVMGKV

SEQ ID NO: 35659 - DNA, 2554 bp, DROSOPHILA
tttcatccacgatgatggttgtcgtggcccaaaacagtcgtggcttcagactgtctaatgggacgacctcgactctcttacagtgatgctggatcacggctcaaaagaaaacaagcaacggatctggctaatattgaagaaaataatacaagtcttcctgtacaggaagcatcaatttcaaccaaaaaggcaaaaatgggcgatactgcttttgtattaaagcaaaacatttcaacttcaactgcatccactgaaattagaaagaaattgatattctcagagccagtaccgctcacaccaattcacgctcttgcatttttgattgacaggtctctatccaaagcaaaatacaacgacataatagctttgaacaaaacacaattaagcaacatttatccatcgtataataaagtcaaagaagctaaattagcgtgtagacctgcgggagttcatgtgacagagacctttgccaaagtatctttacacaatttgctgaatcagtcgaattattcttatgcattattcttatccatggattcatcggatcctttactttgaagcctatatatgaacaaaaaatcgtctcaaaataaaaaagtcgctttgccgaaagaagtcatcaatcttttaaatgcaccaaatgtagaacatattaatattgaaaattattgggaagcgatgatagcgactcggattcggatcacgatgatccattttctatccatttggacgtagaaaattttgattaatatattgtaatagtagaattatatgtatattataagaaataaaagaatgtatattataatataatatatagaaatatcgatgactcccttcactggaattgagttcttctggaaatcggttaactctgaatcgcatctattaagatctgctctaccaagaaagactggatggcagttgtacgcttttccataaatatacatttccatctaaagattaacttggttccttagatcgagtcgttcatactctgatggcgcgacagcagcgcgagtaccttgagcgccagcagtgcctcgaagaagtccaaacgaggcgtagaagccacctggcccctaagagctcgtcgccaacgcaggcatacgcgttggaggaagtagatgctaagaggcttaccctgtcggccaccgactccccacatgatgcccccgtatccgctggccccgctgcccccgccgttcctgaagaggccctggaagccaggcctgctgatcccgcccctgccgcggcccccaccgcaaggagatgttcatcatggggcattgctgctggcggcacgcccacgatactggccgagatttcgagcatacagctcagagtcaaagcctctgtggtgcgtggagggatggatcccgaggcggcaaacgctgttttcgctgcgttgcagagatatgaacatcatgtctcttactgtgcgtaacgcgttgcttgagtgcggtggatctttcggaggacccaaagcgggcgctggagctggaggatccggacgaggatcacgagaaggaggaggacgggtatctggattgatgccgctgccaaacgctgctgtctaaggagccgctcccgcttttgctcctaccgcccccgtgccaggaagaccgttgagacctgctcggcggtagtgatgagcaacgacccgagatatctgggaagcagattgatgagcgggtccgcaaggatgtcgcccctgctccggtatccgtgtacacgaggtgaccgagttgaagagctgtgaagccgtcatccgcacaccatcggtaagaaggtcgtcgcgaacaagaagtttgccgaggttggtctaaaagttcagccaaacaagagccaacgacccaaagtccaggtgttcgacgtcgatactgaaatacagcctgatggaggaattgtacgtcaacaatttcaaggaagagttctccccagccgctttcatgaaagaaatgcacctgcacgaaaccgtggtcagtcaccgatggcgaaagagctaacctgacgcttgaggttgacgaaaaggcgctgaacgtccttgagcagaccggacgggtctatatcaagtggttcagttaccgttgccggtcgctcgtccacacctatgcttgccataggtgccttggatttgaccacaaagtttcccagtgcagggtcaaggaaaccatttgccgccagtgtggacaagctggccacacggcacccagatgcacaaatctggtggactgccggaattgtcgttttaagggcttcccttcgaggtgaacgctagacattaatgtttagcttccttcaggcaaattgtggccgagaccgagctgctaccatagagcacccagtccgcttgcgcgactctggccacttgctcgcattagtgcaggagctttatgtagacctcgctggacgaataacgggaataacgggttgcctatgttttcggaccggcgtggaaaggctgccatccttgtggacagcacggattccatctgtatgccgatgcagtcgctttttaccgtgtttggagtatacgtgagcgttactggaa

SEQ ID NO: 35660 - DNA, 501 bp, DROSOPHILA
atggcgcgacagcagcgcgagtaccttgagcgccagcagtgcctcgaagaagtccaaacgaggcgtagaagccacctggcccctaagagctcgtcgccaacgcaggcatacgcgttggaggaagtagatgctaagaggcttaccctgtcggccaccgactccccacatgatgcccccgtatccgctggccccgctgcccccgccgttcctgaagaggccctggaagccaggcctgctgatcccgcccctgccgcggcccccaccgcaaggagatgttcatcatggggcattgctgctggcggcacgcccacgatactggccgagatttcgagcatacagctcagagtcaaagcctctgtggtgcgtggagggatggatcccgaggcggcaaacgctgttttcgctgctgcggtggatctttcggaggacccaaagcgggcgctggagctggaggatccggacgaggatcacgagaaggaggaggacgggtatctggattga

SEQ ID NO: 35661 - protein, 166 aa, DROSOPHILA
MARQQREYLERQQCLEEVQTRRRSHLAPKSSSPTQAYALEEVDAKRLTLSATDSPHDAPVSAGPAAPAVPEEALEARPADPAPAAAPTARRCSSWGIAAGGTPTILAEISSIQLRVKASVVRGGMDPEAANAVFAAAVDLSEDPKRALELEDPDEDHEKEEDGYLD

SEQ ID NO: 35662 - DNA, 2583 bp, DROSOPHILA
atagatcccagcagtagtggtggcaatcaaggtctccgacaaacgcagtattgagggaagactgctgtaatagcagttccagccaatctggcggatccggtgatcaagcgtggcaagctgagggtaggatggtcccaatgtctgatcaaggaactggagccccgccaaagatgcttcaaatgtctggaggaaggccacttaggggccctctgtagaatcgccatagacagaagccagtggtgcttcagatgcgagtccgcggtacataaggccgctgagtgctttctgtgcgcaagcagaggaagccaagcgaccaaccaccaagcaggcacccggacgtgtccattggcgggcaaaggagcaccaatggcaccacaatgatgcgtttgattcagcttaacctgaatccctgcacggcagcccaagacctgctagtgcagacggtgcgtgaacgcagagtggagcttgcgttacttagcaagccctaccggacggctttcgaccgcgccaagaaagcagcgatctggaggtgcagcagcgaagccttacaattaagcaataatttttcggacaactggtttgttagggaaaggtgggcagatggtgtgtgtggagcaccatgctagaggccgcacctaggtactcatagctggcgacttcaacgcatggttagagagctggggcagttcaaccaccaacgcgcagggtggtgcttgaggcattcgcgacgctggacctagctctactaaaccaagaaatccggttcacgttcaggcgtgtcggactgggctctgtggtggacctcaccacggctcgtctttaaggcgaggtggagactcagcgaagaatacactgacagtgaccacttggtacttcatttgtgacctgggatgcccttccgcgacccaagcccagcagcccaagccaaaataaaatacaaaacggacaccctggacacgcagttattccgagagcagttcctattacggcagtggagccgatgagtcagctgaaggccgcgtgcaacgtcagcattcaaacacgcagaacttatagccaacaaaggaccccagtctactggtcgaaccaggagcgggagacggctcgtcgagattgcctctccgccagacgtcgctatcaacgccctagaggtgcggagttctttgccgatcgccaatccgattatagaccccacaggaaagcactcaagctagccatgcgggaggctaagcggaaatgcttcctcgacctatgcgattccgttgacagcgacccatggggaagtgcctacaaggtggtggtcaagaagacatatacgaggactcccaagctcttcgacccagagatgctccgcagtgtagcggaccatctatttcctttgatggatgggttacgtcccgccgacatcattccgatcagggcgcttcggctctctctacctccagccagactcgtttgcgaaggctttcaccaagtgcctgacggaaggcgtcttcatatgttgctcctcccaacaccaggaaagccacccgttccggccgatatgcctcatcgatggaactggcaagctcctggaaaaactggtgtgcatagggctagagagggctatcgctgacgcggatgacctctcacggtcccaattttttttcaggtcgaagtagcggcccaggtaatcgagggcaccagatggaagaactttaacgccaaaacggtgatcaacattctcaacaggaacaaagagccgcagccacttttttaagtcgaactggagccatcgagtcagaaaaacaacaaaaattaagtacatcctatataggctacagtatttactgcactgaaggataaccgtagaagagccacacaagtgcaggcaacctgtgcagtgcaccaactgccaagaatatggacacaccaaaacttcctgcaacctaaaatccatctgcagagatgcccacagtactgtaaactgtcctaagaataaaaacgacagttcaattaactgtggcgaaaaacacacagccaactggcgagaatgcattgtctacaaagaactcaaaagttgtctaaaagtcaaaaattgggtctgccagccaccgaacaatgccaaattcttcattagcaagtgtactaaaatcagggatccaagcaccaacagcagtcacctctaacgtccagcataaaactcaccaaataaacacaaataaacacacagaacatgcaacagcagccaattagagttgaagcgattatgctctcgatgcagcaaaccatgaaagacttcatgaccttcatgcaagaaactgtgcaagagcttatgacgaaccaaaacatacttattcaaattcttagcccgacagaaacatttgacgttatgctactctcggagactcaccttaccgaaaagtacaacttccaaataccaggatataaattttactttatgaaccagccggattgcaaggcccattgcgaattaagcaccactttcttggtaattggcaagaagattgcttacactgtacctctataggcttacaagcaataggaccaactgggcgatgtacaaaaaatatgtttgttccc

SEQ ID NO: 35663 - DNA, 519 bp, DROSOPHILA
atgagtcagctgaaggccgcgtgcaacgtcagcattcaaacacgcagaacttatagccaacaaaggaccccagtctactggtcgaaccaggagcgggagacggctcgtcgagattgcctctccgccagacgtcgctatcaacgccctagaggtgcggagttctttgccgatcgccaatccgattatagaccccacaggaaagcactcaagctagccatgcgggaggctaagcggaaatgcttcctcgacctatgcgattccgttgacagcgacccatggggaagtgcctacaaggtggtggtcaagaagacatatacgaggactcccaagctcttcgacccagagatgctccgcaggcgcttcggctctctctacctccagccagactcgtttgcgaaggctttcaccaagtgcctgacggaaggcgtcttcatatgttgctcctcccaacaccaggaaagccacccgttccggccgatatgcctcatcgatggaactggcaagctcctggaaaaactg

SEQ ID NO: 35664 - protein, 173 aa, DROSOPHILA
MSQLKAACNVSIQTRRTYSQQRTPVYWSNQERETARRDCLSARRRYQRPRGAEFFADRQSDYRPHRKALKLAMREAKRKCFLDLCDSVDSDPWGSAYKVVVKKTYTRTPKLFDPEMLRRRFGSLYLQPDSFAKAFTKCLTEGVFICCSSQHQESHPFRPICLIDGTGKLLEKL

SEQ ID NO: 35665 - DNA, 2489 bp, DROSOPHILA
gggtataaaagtagattttttataagtttaatcttcaatataaaaaaagagataaactaacataaactaaaacgcacaaaaaaaagtcgaaagccaagtacaggtaaacgtaaattaatgtaataattcgccatacaacatttctacctgggtagtcctgatgcttctggaaaaattaagtatagagtagtaattgattatgggaaactcaaagaaataactatccctgacagataaccaatattaaacatgggcatccttggtaagttaggaaaatatcaatattttacaactatttttctggcgaaaggatttcatcaaatagaaatggacccagaatcaaccttttaaagatgcattaataatatccttcgacagttgcttaacaaatactgtttagtgtatttggatgattttggccacatccctttctgaacatttaaattcattacagatagtcttttcaaaactcgcagaagcaaattagaattgcagctagataaatgtgaattcttaaaaagggaagctagtttttttggtcacatcgtatcccctattgttatgaaaccaaacccgttaccaagcccaggtaaaagagatcagagctttccgtgcattaaccggttattatcgtaaatttataccaaattacacacacataggaaaaccaatgaataaattaaaaaaaggaggaaagatagataaaacaaatattgataataacagaaccaattctccaattacccggttccgaaaataaatgtaccttaaccacatcatcggttccgaccatcacaaaaatcgttggcgatgacaaagatttatcatacaaggccagcaaagacaaccaagtaagggtaatgatatctgataagacgagctatgaggcgctgaaagatcgactggacacagctggcaaaagattttatacttgcttatacttatactcgacgaaagagcctaccgaatcgttgtcaagggtcttcaccacaccattcacatggattacattaaagaggaacttagtgcccagggccacactgtcagggacgcccataacgccatcggacacaggagtaagagctcgatttcattattctttatcaacctggagccagcaccgaacaataaggaagcttttaagatgaagaggctatgcaagtctgtggtcacagttgagccgccccttaagttcaatgatattcctcaatgctaccgatgtcacggctatggacataggcgaaggtacaagctgcaagtgagatgtgtcaagtgcggaaaagatcacgccacaagcgagtgccaaaaaaagagagaagatgcagctaaatgcgaccactgtggcggcgcccaccccgcttcttataaaggatgccccacctacaaggaagccaagacagtgctgtcccctaaagagccccgtctggcgcagcctaaggatgtacgctacatccatggaagcagtggttccgtcagagatcaaatataaaaaaagtttgcattccaaaagcaaacttcatactttcagtgaggagcttttattttaataatttaaaatgggatttaaagtaaatgtatttactttgtataccaaaattaataaataactaatcagataactaagttaagtagaattattatcttcaaatggcgtttatattgactttttttacttaatttttttcatgtttacttaaactttaagttatgcagagctagactccttatatattaaattaagcatagttttaagataataaaagtgttgagttgagctgcggaaacttgtggatgtgcttgtaatattgaatttactaaacgcccatatttgttatggcttaagctaagtttgcccagtgaattccctttgtgtctttgtttttgtgtgaaagcaaaaaatacagaaagaatttcgcgaaaaaatgggaatcatagtagataagcctagagatggtgataaaggttcttccaacgacggaaatgtggtagaaaatttttttctaatccaaaattggcttcaaaaattaccggaataaatgaaaatttgatatatcgttgtgccacaatactacaaaatattgcatcggggtataaaattaatattaacaaattttgcatttgcaatacatggtcactcaaaacctgacacaatcaagggagcaacctctgcccggcatccatcctgtcaaagatctgcaaataggcctgcacatagccttctgggttagcgttccagaaggctatgtgcaggcccaggcttgtccacacaactgcatcgacatccaactcatctccgaaacccacttcccaagcagatcatactgccaactacatggatacaatatcatccacgcagatcatcctagtagcagcgcccgcggcggagcgccaatcattattaaatcaggcattaaatttaatgaactctggaatcggactgggttcagtgcgccaaggtaaacgtctccagcgtttttggaaacaccaca

SEQ ID NO: 35666 - DNA, 489 bp, DROSOPHILA
atggattacattaaagaggaacttagtgcccagggccacactgtcagggacgcccataacgccatcggacacaggagtaagagctcgatttcattattctttatcaacctggagccagcaccgaacaataaggaagcttttaagatgaagaggctatgcaagtctgtggtcacagttgagccgccccttaagttcaatgatattcctcaatgctaccgatgtcacggctatggacataggcgaaggtacaagctgcaagtgagatgtgtcaagtgcggaaaagatcacgccacaagcgagtgccaaaaaaagagagaagatgcagctaaatgcgaccactgtggcggcgcccaccccgcttcttataaaggatgccccacctacaaggaagccaagacagtgctgtcccctaaagagccccgtctggcgcagcctaaggatgtacgctacatccatggaagcagtggttccgtcagagatcaaatataa

SEQ ID NO: 35667 - protein, 162 aa, DROSOPHILA
MDYIKEELSAQGHTVRDAHNAIGHRSKSSISLFFINLEPAPNNKEAFKMKRLCKSVVTVEPPLKFNDIPQCYRCHGYGHRRRYKLQVRCVKCGKDHATSECQKKREDAAKCDHCGGAHPASYKGCPTYKEAKTVLSPKEPRLAQPKDVRYIHGSSGSVRDQI

SEQ ID NO: 35668 - DNA, 10658 bp, DROSOPHILA
ttattcaccaatatctactgatatcgcagaaaaaggattaaatttcgcgttgcgttttttcgccttgcatttagtgagatcattgggaattttctcagtggcactgacgcttgacatatttatcgccagccctatgctataagactaatgggcgacgcaaacaacatatgtatatatctacactattcccaccagtacaaatgttttgttaaacattatgaagcttgattcggtgtttttcataattaagctaggttaaaagatgtgctggcttacgttcgaagtaccactggcaaacctgcgacaagcatactcctcaaatagttagtttgaactcactgcttattcgtatgcaaatcagatagatcgattgcattttctcttcactctaagctttccccgtctgcaaaaatgtagcgttggcaaagctttgtcatggtgtaggtattttccatgggttggtaagtggcgagtggggatagctgaaccgactagttatcggagctggcatgctaataggtatgagaagctatttttagagcgaggaaaaattagcttttgattagccaagatcgtacatttaacattttattgtaggtatttatagtacatattcgaaagcatacaggtaattataggatttgggataaatttcctactcgtccaggaatgcatttccatagccgaaagaactttgtgaccgttacatagtcagatatcattatattctacacactaaatggtttatgtatggtatttcatggattcatgattactagagagcgcacacactttattcataaacctaataaggcacaaatattcatttatgttgagttggtttccgtgtgggattacactcccagagctccgttaaaatattcagcccctgtcttctcaatctggtgtacatcaagaatgtttagatgatatttagatcgctaaacgttgtgtaatcattttgtataaatcataaggcccagatcaacccaatgaactcctatcttcgcggcattccgaagctgctggcaggccctaatgggccgtagatggcatgtggatgcggaggatgggcgtgaggatgctgactgggtcctgggccatgcaatccgccatttgacattgtcatggcatgcttccgctgtagtgtgttcggacccataggccgctccccttcattgaggtcaagacctgccaccatttgggcgatctcacgctccttctttatatctggtggattgaactgcaagctggctagcgatccgtggcttcggctgcgatgctcttgacgtatggagtagctaaaagctcgctcgtttaaatgtcctttgcgctgcaaaaattaataaatgtattataattatagtttaatcaagagtgttatgctaatacaatagatacatatatgaaaaactatccaaatatttttcaaaggtgtgggcgtgacaggtttgggtggcttgtgctgcgtcgatgtctttagaatctgtatgcttaatctcaatcttcttgcttttacagttattgagttatatcgacgttattacggacgtacagggccagatcgactcggttattgatccttatcaagaatatatagaatatatataaatatattcaagaatatatatatatatacggtcgggaacgttttcatttacctgataagcacttttcaacgaagcgtttactctagattaacatacatacaacgcgtacatattctagagacataggcgcagtgaaattttgttgacccatgttgctatgcccacctttacgcccacaaaccgcctagaactgccacgcccacacttttgaaaattattgtgatattttttatatttatatatgtcttgtaaatttttagagatttactaaaaaactgtttgcacgcccacaatcggaccaaaagtgccacgcccacacactttttaaattttttctaatttgattcaccaatatctatcggtatcccgaaaaactataaaatttcgcgttcgcatttcgactagcttagtaacgggtatctgatagtcggggaattcttgattgaatacaaatatagtgtttcctaatagacattaatgttaataagggcaggctctattgtactacacaccttgtagatgccagtgccacctggtgatggcgattcggcaccagaattaccggagtcgtctaggccgttccccattgatgccgccagcttccggctggaatgacccagaggtcgcgtctctccgattagggactgtgctaattggggagctggaacacccacgacctgttgctgaaaggcgtatatgggaggtactatgggcatgcccacgggaacgcctccgcccgcgccactctttttatcctttttcttcttcttgccagttgagcgcgacggctgaagagtcgcgtactgctgcggcatcatcacgggaatctgcatgggcggtagtcccccaatgtgggggtggtgcatcatatggacctgattctgtgaagggtggggcggtgggtggtgggtgagggtggctgtgtgaacccgggggaatgccgcgatgactaattgtatggtaacgggcggcgtgaaggccatgtccagaaacgtgcccataggtcacgctcccaggtcccgacggcccttggaatcctgagcgatgctgcggcgcagggtgtacgggctttggccggataagggtgccggaaaggctttggctgccactagacttggttaactttttgtcccgcttcgtctttcgctcatccttcactggtggcggtggcacgtcgatgggcgtgctgatttgacgcgcccgtagaggccttcccaaggtggaggtgtttcccgcaaacaactcatagggactctctaatggcccgatgctgtccaactggtcctgcgaaccgttccacaccttatgattctcgtctccgttaaacgacgcgtctccgtcatcgacggccacgttgaggtcagcgctgctaccgtagactttaagagaaaatgaaaaatgtattaacattcagttaagaatttaatttcatattcatattcacgatattcactaaatattgcaatgggatcataaagaatcataaaaaataaagggcactttgatactttcttagcttcttaatgtgccgtaagattacctgtatccaaaaatctatatttaacgacaactatctatgaacgttggccagagttgttaatatctatttagaaaaaatcatttaaaatagacacgaatgaaaaagccccattcgcactgaagcagatgaaagggagtcgtcttattaagattaaccttcagggctgtgtaatgttgcccgctgtcgattgatattcgatgtcaatttatattacatttcgggatagcgaaaaaggctaactactgagtcggcgcactcgaatacaaactagccaaaacgctgaccatcgtttgagcggggctaatccgcttctatgtgaaaagtgggccaagatcacagcacaggtcaactggcctctcccgggtcgcttgaccgctttgtcagccgacacatatccagacctacaaacaggtactcacaatgaagctcatttgggccatgtaagcaacggttttgtaataaacaatggataatgtatagtcgagttccccgactatcgggtacccgttatgatttaattatatgagaatgaaaaaaatgaaactgagaaaaaatgttgataaatgttcaaaagtgtgggcgtggccgtttttgtatgtgttaggaggggcgtggcataccgatagaaattggcaatacaaacaataaaacgaagaaaaattaaaacagttttcaaaagtgtgtgcgtggcagttttgggcggtttgtgggcgtaagagtgggtgtgcaaaaattttttggccaatcgatagaaatttacaagactaataaaaatatgaaaaaatatcaaaatatttagcaaaagagttaccgtggcagttttgggaggtttgtgggcgtctatgtctctataatctgtataatctcaactttctagtttttatagttcctaagatcttgacgctcatacggacgcacagatcaagaacttgttatggtcggaaacgcttccttctgcctgttacgtaattttcaacgaatctagtgtactcttttactctacgagtaacgggtataataacaggaatttaataaccttagcgtggctacacctgcaagattccggtctcagcgtagccggcaccagcccaaacctgaatcgaacacgatcaccccatcccctttctctactaaccatgttgatggccaactcaagttgggtcagttcggccagcgacattgccgagagccactttaaaagtgtcttctgtgaccgctttgtgtctggccattccacaacgcaattctgcggtttattcctttaggtctaatgggttttgttctatccaggggcatacactgagcgaggttctctcatcagatagcaagtgaaacctgctcggcttggaactatgacccccgactccgtggctctaaaaatgtgggcccttgtttgggaagcgatcggttgcgcaacaaaattagtgaattaacaagaaatcctttttgcgcaagggttatgtcaagggaattctcctcctcgtctatgatcattaatctatgatcaattagccgatttgttgctcttgaaactttattttctgtctcataagagttgacgctcgaaggtgaaactatatgggtaaattcaagattttgtgagtttatagatttatggaccggtgaaacataattaactcggcaggaatcttgccttaccgtttagggaataggcagctacattatccgcgggcgaaaactaatttgcgtaaatagctgcggaaatccgatggattcctgattatttaattgaccaatggctctaatttcataagtcaagcatgcttgttgaaagtaaattacttttccactgctttttccaattaaactttgaaggcatattgtgtttattgcatcactctttccccgctgctttttctctactttcgtggctgacaggtatttggacttacgtcgtaatcggtggaaacagacccaaagtaaattttatactctcactagctttccgaggaactgcgatatgcgcatgcgtgcgtgaaaatatttgtagaaggggacaggataggatcacttgttgattggcgtctcaacttgtggtttgattcaaattttgatttaaggcttgccaaatttcggtatcatacaaattcctaacagtctgtaggaagcggaattgcagaaaacgagctggcaacaagaatttggaccacacttttaaatgtttttctcttttgacttttctcactgttgtaatgcatccaacaaaaacaaaaaccagcccagtgccatgcagttttctggccgttttgcgtccctgccttctcaaagttgctacgatagagggacgcatgtgcagctgctagttgccatctaggccgcatctaggtcaacaagccagatcggaatgtcggaagagtaaccaatacggcagcaacgaccaatacactgaccaaatgatttggcttggcttccaaaaacggtgtagtgaaagttgtagttttttgagacagtgtattggcttattttcgaggctatattgttgcgatccgtaaattcattatctcaaactatttttatttttttttaaatacaaatctttcattattgcgcattgcccaattaagtaagaaatccgatttaactactttactttaacggataaaattttaaaatgtcctcaattaaagtaattctgacacatgacacgtgtaattaaaataaccgcaatttaatcttattccacataatttttgcaagtcctttagattttgcgttgcctttttgttagtatataacaaacacatcagattttcagctctttatgtatatgtagaagtctcattcgcatgctctcttagtgcgcttcgtcactatgtgaactgtcaaagtggtgttgctctgtgggtccgtaaaaacaggccttgaaggtggttggaacagaaaagtaggtcacaaatgaaatagcacggcagctgagtctgaaatcttatttacatatgcgccggcagctcgaacttttttaagagctttgcgatcgggtctagcgttacttacaatcactcccatcgtgatgtggtttctaactcgcaaaataggtatcatgcggtttccgtataaaacggagtcattcaactacgactggattttggttaatgtgtcccgtctttgtttctacaccctgctatttcgtgcaccaaatgctgtcagctaatttacatattatgcactttaatttgcggctacattaacaaaaggcagtctaaagaagagccctctagtacaaaattgctgtcgcgatggggcacactgacggccctttaccagattaggacagatcttgaatttttcgccaaactacgggtttaaaaaatcgtaaaataatttcatacattatttgtttactcagctggaagtgtaaacgtgtaaaaaatcaaattttaaattgttcaaaagtgtgggcgtgacagttttgggtggtttgggggcgttaaagtgggcgtggttttttggcgacactatagaaatttacaatactgatacaaatataaaaaactatcaaaacatttttcaaaatgtaggcgttatagtgggcgaaagaaatttaaaagactaattaaaatatgaaaaaacagcagaacctttttcaaaagtgtgggtgtagaagttttgggcggtgtgtgtgcgttagagtgggcgtggcaagaagttttttttggcgtatcgatagaaatttacaaaactaaattggcgtggcagttttgggcggtttgttggcgttgcaacatgggttaaccaacttgcgctgcgtctatgcctctggaatcttcatgtctaatctctaatctctttatgtaattctctagcttgcatagttcctaagatcgaggcgtttataaggacatacgacatgatcagtaatatatatactttaaatggtcagatacgcatccatctacctgttacatacttttcaacgaatcttgtatacccttttactctacgagtaacgggtatagaaataacctggtgccatttagaaaggctattaaaatataaagcagcattccttcaagattcaaggcaagcctcctaaaatttgatttttaaagaattttaaattataattgttaaaagtgttaaaaatggctatccctatttcaacaaaagcccgaaactcggcattgtctctagcctgcaatattcttaaaatgttaaagatagaaagttcgcacagccacgctatcagcggaagataagcatgttcaacaacatattttaaagcaatcacagcagcactctcacactggattcatcctctctgctactctaaatttttgagcctcatacttccatatcgacttaccgactttccagcagctcggttgtggaacacgaaagtctaaatattgtaaataagcagtcaaaggtagaattttctcacgcgttcatctcgattcactcactctctgaagtaacttgcatgtgtataatgaatgtacggccccgtcccagcccagtccgttcgacctacactgtcttaagtttggctgaacagaatagtgggaaaaaatcaaagtcgactgacacaacaggggagatgctggggtccaaagaccagaaataagcaagtagtgatagtccacattcaagaagtctattcattagcagacgtctagctacaagtcacttgattcttggttttgattaagtagctgctttgtcaattaccatatacacagacaagctatagcagaacattctgtattcgataggtattttatcattataaatctaagtggtaatttagtaaatggtggggacttacattttttatttgcgttttctaaataaagcttttaagaaaaattcaattcgagttcaaggtgaaagtgaaatttccatgctgcgttagagatcgcacaatttagaatactccgaagcaaagtagtgccgctttccttatattcagcaatttacatggtaattaccacaaccttcgtctacaatcggtagacgaagaaacagcaatgtcgtgcgacggctaagccttaccgtcgtcttctgtcatgtcagtcaccatagacaaaatttaaatgagtggaaagtctttggtagacagcggaacagtgaaattgatttattttcactatagataagtcgagagctctgtttcaacgtcgtttttttttatcccaatttaatattcaaaggtgtgggcggcttaggcgtggccaacatgggcatgggcaaacgagcaaaataaatgatcaaatggtaacgttctgaaacgagatttcgacgtttttccgacgaacatgccaaacaaaaatatatactctgctactactgcaggtttttacgattttatctttctctacgattaataggtataaaaggtctcttaacaagacaacgaaacaatttttattagattttactatttttcttgccaaattctatcgatgtgtcaaaaatattttgccacgctatagtcgagttccccgactataagatacccgctactcagctagtgtgaatgcgaacgcgaaatttcatgacttgggatattgatagatatcggggaataaaatgagaaaaaatttttaaattgttcaaaagtgtgggcgttaccggtttggcgccttgagggcgtaagagtgggcgtgtcaaacattttttggctaattgacttgattcgggtaacgggtataagaaatatcagaataaaatatgaagcaaagtacttacagttcttgacggatgtatagccctctgctgcactgacggcactactcccgttcatgcctatcgctgatccattggcgtggccgttcgaagcacggcccaagctatttagcgtcgtagtgctgcccgtccgcgatctccatcctccttgggcggaaagggacagatggtggttgccgcctccgctcccgttcccgactccgttagccaggccgacgccggtaaggtcagaactagacttgctaatggcaccgctctttaaggtgccgtagacgctactgccgccgcccgtctccaactggcgggcgtatgagttgtcggcgtaggcgtggaagcagcacctgactagcgcgtttgcggccgcctcgcgcttgcagatgaagacgtggcactccagcaccttgatgccggtagtacgtcgcagaatagcagcgaaaatgggtgggtgctgagcgcgcggcattcgcgcaaaaggcgagtccagagggaggaactttggttccgggtgggtgtttccgcgctctgggatgagcacttggcgaacggcggcgcagtagtgtagcgactcgatcgggaaaaagcgcgtgatctgtttgaggttttcgtccacgttctccagcaggatgccgttggaccagacgcttagccagctgtcgatgcccttggcgcccaccgccccttccgaaggatacaggcttcgcagcggctcctggatgccctgcagcccatccttgctctgtcggggcacggcactgcccagataaagtactcggcatcggcaaatgggcgtggagtcgcccattgcaactacgtaatctaccttcaaacacctaaagctgtagctgttgattgtggtcttggtattgcgttccagtcgagagcgtaatgaaaagagatgagagacgcgggacagagagcaggtctaaaaaatgtggattttccggtttcgcttgtgtgctggccacgttcgtttcgtatgtagtggtatttctgcaaatgtggctgtgtgtgtgcctgggtgccgtgcgtcggccgacgctagagaacttttcgtttaggtaagcggatatttctcgccgcgcagacagagccactggctcacaacagtgttcgcgattgggttcacagaaacacgagcgcacacacactcgaacatagtgtggtgacagcatacgcacacacaaagtcgctgtaaaactgcatcaatcaagaatactgttgttcgaatttgcgaagacgaagcccgaatacaagggacagttaaggcattatcacctggcaaagccctgccctcacactcgcacaccggagttgaaacacacgcacacacaagcaagccctggaaaacaaatatggcgtcgtgaggttctgatcgcgaatctccttgcatactttcactctacgcacgcgctgtcgtcaagctctttacccctcccgagcaatgtaactgggctgctacgtttcccctggttcaactgacgatatccactgggtcgtcctactggcgcccgctacgaatttaagcttgtcaacgcgacgacgtctttctggaaaatgaatctggccgacagtgtctgagcgacgtctacttgttgtttgctcgcgacgaaagagtcgtcgaaagacgctctctgcgctcactcacctgcttaccatttctcgctctctgcccgatcgactcgaggcaggtactagtaggattctgtctcgacctcatcattggtgacgcaggtaggcgctgaagggaaatggataatctactaacagatcagcggcatgtgccagtactaagtactggccta

SEQ ID NO: 35669 - DNA, 2004 bp, DROSOPHILA
atgggcgactccacgcccatttgccgatgccgagtactttatctgggcagtgccgtgccccgacagagcaaggatgggctgcagggcatccaggagccgctgcgaagcctgtatccttcggaaggggcggtgggcgccaagggcatcgacagctggctaagcgtctggtccaacggcatcctgctggagaacgtggacgaaaacctcaaacagatcacgcgctttttcccgatcgagtcgctacactactgcgccgccgttcgccaagtgctcatcccagagcgcggaaacacccacccggaaccaaagttcctccctctggactcgccttttgcgcgaatgccgcgcgctcagcacccacccattttcgctgctattctgcgacgtactaccggcatcaaggtgctggagtgccacgtcttcatctgcaagcgcgaggcggccgcaaacgcgctagtcaggtgctgcttccacgcctacgccgacaactcatacgcccgccagttggagacgggcggcggcagtagcgtctacggcaccttaaagagcggtgccattagcaagtctagttctgaccttaccggcgtcggcctggctaacggagtcgggaacgggagcggaggcggcaaccaccatctgtccctttccgcccaaggaggatggagatcgcggacgggcagcactacgacgctaaatagcttgggccgtgcttcgaacggccacgccaatggatcagcgataggcatgaacgggagtagtgccgtcagtgcagcagagggctatacatccgtcaagaactacgaaggttgtggtaattaccatactttcgtgttccacaaccgagctgctggaaagtcgtttggcgaaaaattcaagatctgtcctaatctgttttcgcccgcggataatgtagctgcctattccctaaacgtctacggtagcagcgctgacctcaacgtggccgtcgatgacggagacgcgtcgtttaacggagacgagaatcataaggtgtggaacggttcgcaggaccagttggacagcatcgggccattagagagtccctatgagttgtttgcgggaaacacctccaccttgggaaggcctctacgggcgcgtcaaatcagcacgcccatcgacgtgccaccgccaccagtgaaggatgagcgaaagacgaagcgggacaaaaagttaaccaagtctagtggcagccaaagcctttccggcacccttatccggccaaagcccgtacaccctgcgccgcagcatcgctcaggattccaagggccgtcgggacctgggagcaatcaggtccatatgatgcaccacccccacattgggggactaccgcccatgcagattcccgtgatgatgccgcagcagtacgcgactcttcagccgtcgcgctcaactggcaagaagaagaaaaaggataaaaagagtggcgcgggcggaggcgttcccgtgggcatgcccatagtacctcccatatacgcctttcagcaacaggtcgtgggtgttccagctccccaattagcacagtccctaatcggagagacgcgacctctgggtcattccagccggaagctggcggcatcaatggggaacggcctagacgactccggtaattctggtgccgaatcgccatcaccaggtggcactggcatctacaagcgcaaaggacatttaaacgagcgagcttttagctactccatacgtcaagagcatcgcagccgaagccacggatcgctagccagcttgcagttcaatccaccagatataaagaaggagcgtgagatcgcccaaatggtggcaggtcttgacctcaatgaaggggagcggcctatgggtccgaacacactacagcggaagcatgccatgacaatgtcaaatggcggattgcatggcccaggacccagtcagcatcctcacgcccatcctccgcatccacatgccatctacggcccattagggcctgccagcagcttcggaatgccgcgaagatag

SEQ ID NO: 35670 - protein, 667 aa, DROSOPHILA
MGDSTPICRCRVLYLGSAVPRQSKDGLQGIQEPLRSLYPSEGAVGAKGIDSWLSVWSNGILLENVDENLKQITRFFPIESLHYCAAVRQVLIPERGNTHPEPKFLPLDSPFARMPRAQHPPIFAAILRRTTGIKVLECHVFICKREAAANALVRCCFHAYADNSYARQLETGGGSSVYGTLKSGAISKSSSDLTGVGLANGVGNGSGGGNHHLSLSAQGGWRSRTGSTTTLNSLGRASNGHANGSAIGMNGSSAVSAAEGYTSVKNYEGCGNYHTFVFHNRAAGKSFGEKFKICPNLFSPADNVAAYSLNVYGSSADLNVAVDDGDASFNGDENHKVWNGSQDQLDSIGPLESPYELFAGNTSTLGRPLRARQISTPIDVPPPPVKDERKTKRDKKLTKSSGSQSLSGTLIRPKPVHPAPQHRSGFQGPSGPGSNQVHMMHHPHIGGLPPMQIPVMMPQQYATLQPSRSTGKKKKKDKKSGAGGGVPVGMPIVPPIYAFQQQVVGVPAPQLAQSLIGETRPLGHSSRKLAASMGNGLDDSGNSGAESPSPGGTGIYKRKGHLNERAFSYSIRQEHRSRSHGSLASLQFNPPDIKKEREIAQMVAGLDLNEGERPMGPNTLQRKHAMTMSNGGLHGPGPSQHPHAHPPHPHAIYGPLGPASSFGMPRR

SEQ ID NO: 35671 - DNA, 4215 bp, DROSOPHILA
ctgatagttgtgtgactcgattaagtctcgattattcctaaggcaagggagggatataatatttctatatcgatccgattcgacttttatactacctacattagaaagaacacttcttgagggactagttcgtgactcggttgttgacatatacatacatatacatatgtacttaatttgatcgcgaattacttcgttactacattctgtatgtgattaaaaaccatttatgttggcattaataaagtttcaattaaaggatgtacttaaaaaatgtatgtaaaatgtgcatatattatatttggatgagtattaaaataattttcgtatgcgattgaccactattattagattagtttggcagatcgcgcaacattatttatcagaaactaaattattgttcgtcttgcctccttcacctacaaaacgactaaaacggtcacgtccagacttttgcacaattttgaaatttatcctcattttattccgtaactaaaaaatctatcgatatcgctttcgcattcccactccctgagtaacgggtatctgatagtcggggaactcgactatagcgttctcttttgttttatatcaaatcagatcttatttactaagggggaaacaagatcattctgccacttagttattttataataaattatttctgatcccacctccgatttgacaaccaaaatttggctgtcggcaacaaaaaggggcaaggggtggttgataagtacgtcgcgaaggctgacatgctgttggtcaaacggaaaatgcaggtaaaaatacttttaaaatatgaaagaaatcattaattaatttaaagaagggccaaaaaattttgggaagaccagagcacctaaaaacgaaatcaaacgattttgcccaaatcgaaatcaaaaaaacaaaattacgattaccagagcatgccttaatacaaatacaattattaattatatagttattatatcactcaaatctattgattataagcatattataaattgaaaacctgaaaaatatataattttaagataatagatttatttgtgagggcttgggcagttccgtatcagattcatcaatcacattatttgttgtttcccatcttaaagttaagttacctatgatttttttgagcatgtacttctaagtcataacaaaagtaatctacaattatggtgtgcacttactctgttcatttgtttgcatttcgggtaataagtgggatggtatgtagttactgcctttcataaacatttctacaccattaactcgaaacaggaaggtgtttccaacgccgtcaggggcgggatcctctactagatcaagcgtacgaaaacccactcggagcgacttgtgcgacttggtcttagagcgaacctcgggtccatcaggtcccagccaggtcttcagagtgaagtggagcggatacagtttctgctcgccgtagccattgggccaccaggttacgactttcccctgcgaagtgataacggcacatgacaaagatatagacagtgcaaaatcgtgtcgatgtaattggcaggcgttacttacatttggcacggcctgatcgaattcaattactggcgccaagtgactgatgttttttattgcgtatctgtctactactaccggacggtccaatagctcgctgcaacccataatgtccgtaaatatgacgagttttgaccgcagcttgtttacttacacagcatataggacgagtcttccattgaagttttgccagcctcccgcgtccaggaagcagcgaatatgcatgttccagtacgaaccattgacgcggctaacgtccacatccacctcacgaataaccgccacctcgtagatttccagctccacgtttttccagattccagcagagggagctgcaggaccccagtcccaggaaaagctagcctgcatcttccgcagcatgttcatgtggcactcaccatggtagcgctcgttggggcattcgggaggcacgctctttttagcttcttttaaagcattggctcttgccaaagcagccacaactggagattggatctcaacttccagaaagttttccgcttggagcagggaactcacttcgtaagagtagcggacaaacatgttgtccgtgcgtcccagcagttgatggttcagccggatttccgacaccgtgtcaatgccgtgaaacgtcaggttgatgtggccgcgattgaagtgatgaacgtcgacttagtcagtcattatcagaaaaggaaagaagtaatacctaaataaatgcctttatatcaattggggaattaaattaagtgagttttaaattccttaaaaatgtaacaagatgttattgatcaggatcaattttttccgacgcaaaaatttttgatagcaccacaaacccgttaaggaaaatagatatttggaaagctatggttaaaatacgtataaaaggatactctttttttggggatttaaattagaccagaaacttcaatagcagatgcctagtctttaaaactcatatatcataacagtcaggtaaactaatatatatatatgattgttttttttcaatcgaactctaaaagcgaagtaaagggaatcttgctaaaacttacactgaaagaaattggagaaggtaaagttgtcgtaggccaagtaacgcagaccgacgtcgttgtaggagtccagcacttggggtgcgaaggcactgtatatgcccaagggcaacgtttggttggcaatagtcagggctgtggggaaaggaacacttatattaagtagcaagacagttgccaatgggaaaacgcgctcctccagggcacatttagttgatggacttcccttttcaactttttcaacttgaaatatcgttttagattattttgcaaagggcttttgtgcagctctgaatttatggtactcacagccattctgattagttatcgtccaattgctcagctctattacttccaccttatcacattggccgctgcaaacataaaggccacaaactaatccgaccataacagcgcccgtggtgccattcctgagtaatccgcatccgtacttcatctggaaagaagtggtcgtttcaattcagaggagctactttaaagacgactcctctgttcgacaaaaagcactctgagcgttcagcaaaacgtggagttcttccactgactcacgaacaacgaatgtatcgctttgcccgacgattcagatccgatcgttggagcagcaagtgagagtacgtctcttttgaaagcagagagctaaggaacgcatacatatcgataatgaaagtattttcaacgtaacgaacctctgcgcgcatcagctgttactcagaatttcgtgttcaagtgagccagatcaaatatacatacgccttgtcggaacttataaagcgcacctaaacacgaaatcgagaaaaaatactattacctactagctattatagatcctgagattttgacgttcatacggacggacggatatacgaacatggccagatcgactcggctattattcctgatctaaaatatatatactttatatggttggatctgcctgttacatacttttcaacgaatctagtataccctttaactctacgagtaatatataaataataaatataaatataatttaatatggtcggaaacgcttctttctgcatgaatacaatgtatataggtattatatgtatgtatgtatatgtatgtatgtataatacatattttagggacgtaggcgatacaccgcccagaactgtcacggccacacttttgagaaatgttttgatatttttcatatttttattagtcttgtaaatttttatctatttgccaaagaatatttttgcaacacccacaaaccgctcaaaacttctacgcccatacttttgaaaaatgttttgaaatttttcatattttcattattcttatacacttttattgatttgccaaaaaactttttgccacgcgcccaaaactgcaaaatgtttatgtatttaaaattaaatttaaatattaattaacttgtgaacaaataatataaatataatttagtcatcgagagaccccttcttaagagttttgtttaatttttgcgaaaaatatgatggtcttataatcataatgattttggaaatattaagaaaaaaacaatgttcgattttcatcaaatcaaatttttaatatgtatgtatat

SEQ ID NO: 35672 - DNA, 1184 bp, DROSOPHILA
tcgggcaaagcgatacattcgttgttcgtgagtcagtggaagaactccacgttttgctgaacgctcagagtgctttttgtcgaacagaggagtcgtctttaaagtagctcctctgaattgaaacgaccacttctttccagatgaagtacggatgcggattactcaggaatggcaccacgggcgctgttatggtcggattagtttgtggcctttatgtttgcagcggccaatgtgataaggtggaagtaatagagctgagcaattggacgataactaatcagaatggctccctgactattgccaaccaaacgttgcccttgggcatatacagtgccttcgcaccccaagtgctggactcctacaacgacgtcggtctgcgttacttggcctacgacaactttaccttctccaatttctttcagttcgacgttcatcacttcaatcgcggccacatcaacctgacgtttcacggcattgacacggtgtcggaaatccggctgaaccatcaactgctgggacgcacggacaacatgtttgtccgctactcttacgaagtgagttccctgctccaagcggaaaactttctggaagttgagatccaatctccagttgtggctgctttggcaagagccaatgctttaaaagaagctaaaaagagcgtgcctcccgaatgccccaacgagcgctaccatggtgagtgccacatgaacatgctgcggaagatgcaggctagcttttcctgggactggggtcctgcagctccctctgctggaatctggaaaaacgtggagctggaaatctacgaggtggcggttattcgtgaggtggatgtggacgttagccgcgtcaatggttcgtactggaacatgcatattcgctgcttcctggacgcgggaggctggcaaaacttcaatggaagactcgtcctatatgctgtcgagctattggaccgtccggtagtagtagacagatacgcaataaaaaacatcagtcacttggcgccagtaattgaattcgatcaggccgtgccaaatgggaaagtcgtaacctggtggcccaatggctacggcgagcagaaactgtatccgctccacttcactctgaagacctggctgggacctgatggacccgaggttcgctctaagaccaagtcgcacaagtcgctccgagttttcaatttataa

SEQ ID NO: 35673 - protein, 347 aa, DROSOPHILA
MKYGCGLLRNGTTGAVMVGLVCGLYVCSGQCDKVEVIELSNWTITNQNGSLTIANQTLPLGIYSAFAPQVLDSYNDVGLRYLAYDNFTFSNFFQFDVHHFNRGHINLTFHGIDTVSEIRLNHQLLGRTDNMFVRYSYEVSSLLQAENFLEVEIQSPVVAALARANALKEAKKSVPPECPNERYHGECHMNMLRKMQASFSWDWGPAAPSAGIWKNVELEIYEVAVIREVDVDVSRVNGSYWNMHIRCFLDAGGWQNFNGRLVLYAVELLDRPVVVDRYAIKNISHLAPVIEFDQAVPNGKVVTWWPNGYGEQKLYPLHFTLKTWLGPDGPEVRSKTKSHKSLRVFNL

SEQ ID NO: 35674 - DNA, 4596 bp, DROSOPHILA
ggcgcctcgtaccgcccacaggcagggtaaacgctagtggtcgccagatcacctttcagcacagccctgcattactaaagcagagtgaactggctcaggagatgggcgcttatcaccagcgcaaggcagaggcggagcagcgccaagctaaacttatccagctgcagctgtccaaggcgcagaacaagatgatagagcaccaggcagtgcagggggacttccgccgtggtcgccagatcgctgttgacgtgtcctgggaaaactaccgccctcagcttccaacccagacaccaaaaattttccgcaagaacatttcgttggcagcagatcgccattggccaccattcgacatggacgattcggtggagatcctgccacgattgcagcgattgtcgcatcgacctgtgctctcctcttccagggacacggagttcgccgcttccgacatacaggagtacttagcgggcgaaagggatactagggcctatatcagcagtgtgtccaatcagggacaccgtccccacaacctcataaccaagcacaactacaactcgctaccgcaaaagtctaaatacgtgacctacttgccacactctgtagtagtgacggccagtgcgggcgttgccacgtccacgaccgcaatcccgcgccgtcaaactggcggccacgggagtccacaccacaaccctatcggccacggcatccaaagtgttgtagaaggccccgctgtaacgctaatcgagggtgtacgagttccggacagcgcggaggacaaggtgaagacctggcgcaatgctcgcgtcctgaacaatcagttggtgccatatccagagggttacacgccgccaagggcacagatgcccagtttcgaccgataggtgtggagttgatcagaaccactggtgtttggtgctcaacactaattgctatttattgaattgtatattgttaagctatttataaaacgttgatttaaagttgtcaatgaagacgttccgtactatctcataaagtcgttgacggtcagcacacggaggtccgacttgcgcaaaaggcgggcgcacaagggtgcgtcgaacgttaggtagacgacatgcattggctcagtctgcataaatccgttctcggacagggtgtagcggtatggcttgagcagctctaggtatacaaatacggcggggcgcttcacctgtatgctaatgctgacgctgttgcggacgacgtttgtggtgttaagacaggtacgggaggcaatctcgaactgcacagttagatattaggctggaggcattccaaaactgggttactcacctcaagcccggggtcctctattccgactgctccggcaatgctactgggaaagaagtgggtcctagagatcacatcctgcccgcggcgcaactgcagctccaaaaacgcgttagttctggtgaactctccttgcagcagatcggagatggcaatgaccttgtcgtactgcacgccattggggcgcagggtaacatcccaggaggtggactgccgaggcagaagctgggaccacaggtgaacgttagctacgacattcagttcccttgggtccacctccaattggtcacaaataagggagatgtttaacgaatccgtggacttttcgtaaagagcaacgattgaaataggcgctagaaaatcacgtgcccagtaatggagcagctaaaggaaggaatggctgtttataatatacaaataaaagtagtattttaatgtttttagggcctatagcttcattcatacgagacagatataactgttcctcggactccgtacaagcttcctatttgtggttgtatatccacccagtggcggttgcatagttcccctcgataagcataataaattcacgctaacggtctttaaatatattttatcaaatcggcatagggtaaatttgtgtccgggggtggtcaatacccccgttacgctccgttacggcaggtacgaaaaatatatgaccttatcaaaattacacatttttaacaaatgtggccgcggcaggttctttgccttatgtgtgttagagctgacagggtaatcttttaacccaaatttgaactgcttaagcgtcactaaaatcaattttgcagtcaaattttaaactacgcgggcaggcagacggactggcagagaaaaacggctaaagcgattctttgtatctttcaacggatgtagtgtatttttacccttgccgagcgtttactgatttcagaattttgccccgcgatgaaagaatagtagagtagaagaatagtagatgaaagatagtagaggcaatcatcgcagcgatatagacaacatggctatacatttggaaacaaacatcatctatactttgtagtctggggtcaaagacgtttccctctacctggcatatctagcatacccctctactctacgagtaacaggtattccaattctacgctttttgtttttctccatgatgtgttctaattcggtgtatacaagctttttttgccacatataattttgcctatattgcgtattgttactgcatgggtatatgagtttcagcgttagcttagcttttagctttttttcttgttttacactatgtatgaaaatggtatgaataccagcagtcatgctgcggtggactagtgatatgaaattacggctcaccttccagttgccgtagaaatcaatgctggaccaggatggcgccacccatacatcattcagctgccagtaaagggcccccatcgttctgtggggagtgtcccgaaggctacggtataattcggtttccacctttgtggccatggcttgagcaatctggctgaagtaaatcagtgctgtcgcgtagttctcattctctggaaagggcagcggtaggtgtctctccactagtgcgataacaggaacatttcccagtgggtggtgttgtcggtgtgtgatcaggccgaggaggtcatcgtcctcgcccttgctgcgctgccatgcgtatgcgcctggaaagctctgaaagccgaactcactgacgaatcgaggacgtgggaaaattcctggatcccagccgtccttagtgtagtcgtagaaatgtactgagagagagagatatcatattatatgctgtatgaatggaggctttgcttaccatcgccattttggttatcctgagggttgctcgaaatatagttgtccggttcactagctttgccatttgaaggtgaggagaccagtggctgaggtcgagagctatgcgaaacaagcttcaactcgtggatgacattagcaaggtagagctcccggtactcgctctcaaatcgatctctttcgaaaagcgtgccgtaccagttctgtaccaaagcagcttcgttttcgttattggtcacaaaaatggctacgcttggatggtgtgatagtcgcatggcattctggcgaacctcctcacgcactgacgataggaattcgtcgttaaccgggtacatggcacaagcaaacatcatatcttgccaaattagaagacccaagctgtcggcgagctggtaaaagtagtccgattcgtaaactccgcctccccagactcgaagcatgttcatatgggcttccttggcggaccttaataaatgtgaaactttggatgaccaataaaaattgaaaatagagaaaatgatatagttgagttctttgattatcagatacttgttacccagttaaaaagcgactgcggcagatacatagatgtatttgggaaagtaacttaaaaatattaggtaccacaaaaaagaaatgagatagatatgagttaatgatatgagttagatatattgcaaggcaactagtgcaattaaaaatgttgagacaagcatgcagatttttgaccatacgagctttattcttgataaggatctcaagaactaaaactgctagttgagattaggaatgaagatttcagtgacatatacgcagggcaaatttgttaactaaaaatatattgataatttttctaaatttctaacgattagccaagaaagtttttgacacgcccactctaacgccgtaaccagatacgactaacatacagctcaaagaagctgggaaaaaggtaatagaaaagagtcggctctactgattgcacatctggcgcacttcagttatttgagtaagcggtatctaatagtcgccggcactctacggaagtacatacatatatatacactagtgggcataagtatttggacaagaaatattttcaatatatttggttggaacttattggttacttaaagcaaaattggttaataattttagtaaataggtaggctatcgtagttaaatgtagaggtaacataaacatatggataacttcattgttgatttaacaaaaatcactttcttacaaattagcaatggcataagtatttgggcaaattatttaaattttataaattgaaaaaaaattatgacaaattaataaaaaaatataccctcccttagcgtcaccttttgcagacgttttggtacagactgtaccaagctgtggatataatctattgaaatataagggttgaatttccaaaatcgtttcttcgcgacttc

SEQ ID NO: 35675 - DNA, 1401 bp, DROSOPHILA
atgaacatgcttcgagtctggggaggcggagtttacgaatcggactacttttaccagctcgccgacagcttgggtcttctaatttggcaagatatgatgtttgcttgtgccatgtacccggttaacgacgaattcctatcgtcagtgcgtgaggaggttcgccagaatgccatgcgactatcacaccatccaagcgtagccatttttgtgaccaataacgaaaacgaagctgctttggtacagaactggtacggcacgcttttcgaaagagatcgatttgagagcgagtaccgggagctctaccttgctaatgtcatccacgagttgaagcttgtttcgcatagctctcgacctcagccactggtctcctcaccttcaaatggcaaagctagtgaaccggacaactatatttcgagcaaccctcaggataaccaaaatggcgatgtacatttctacgactacactaaggacggctgggatccaggaattttcccacgtcctcgattcgtcagtgagttcggctttcagagctttccaggcgcatacgcatggcagcgcagcaagggcgaggacgatgacctcctcggcctgatcacacaccgacaacaccacccactgggaaatgttcctgttatcgcactagtggagagacacctaccgctgccctttccagagaatgagaactacgcgacagcactgatttacttcagccagattgctcaagccatggccacaaaggtggaaaccgaattataccgtagccttcgggacactccccacagaacgatgggggccctttactggcagctgaatgatgtatgggtggcgccatcctggtccagcattgatttctacggcaactggaaggtggacccaagggaactgaatgtcgtagctaacgttcacctgtggtcccagcttctgcctcggcagtccacctcctgggatgttaccctgcgccccaatggcgtgcagtacgacaaggtcattgccatctccgatctgctgcaaggagagttcaccagaactaacgcgtttttggagctgcagttgcgccgcgggcaggatgtgatctctaggacccacttctttcccagtagcattgccggagcagtcggaatagaggaccccgggcttgagttcgagattgcctcccgtacctgtcttaacaccacaaacgtcgtccgcaacagcgtcagcattagcatacaggtgaagcgccccgccgtatttgtatacctagagctgctcaagccataccgctacaccctgtccgagaacggatttatgcagactgagccaatgcatgtcgtctacctaacgttcgacgcacccttgtgcgcccgccttttgcgcaagtcggacctccgtgtgctgaccgtcaacgactttatgagatag

SEQ ID NO: 35676 - protein, 466 aa, DROSOPHILA
MNMLRVWGGGVYESDYFYQLADSLGLLIWQDMMFACAMYPVNDEFLSSVREEVRQNAMRLSHHPSVAIFVTNNENEAALVQNWYGTLFERDRFESEYRELYLANVIHELKLVSHSSRPQPLVSSPSNGKASEPDNYISSNPQDNQNGDVHFYDYTKDGWDPGIFPRPRFVSEFGFQSFPGAYAWQRSKGEDDDLLGLITHRQHHPLGNVPVIALVERHLPLPFPENENYATALIYFSQIAQAMATKVETELYRSLRDTPHRTMGALYWQLNDVWVAPSWSSIDFYGNWKVDPRELNVVANVHLWSQLLPRQSTSWDVTLRPNGVQYDKVIAISDLLQGEFTRTNAFLELQLRRGQDVISRTHFFPSSIAGAVGIEDPGLEFEIASRTCLNTTNVVRNSVSISIQVKRPAVFVYLELLKPYRYTLSENGFMQTEPMHVVYLTFDAPLCARLLRKSDLRVLTVNDFMR

SEQ ID NO: 35677 - DNA, 3125 bp, DROSOPHILA
acatgtttgtctccctctcactgccagtttcggttgattcttttctgttcatcgcattcacacttacgtgatcggtgttaatttcacaattctgaaaatccagtgaagaaaaaatgtcgtttcctggtggagcgtttttctgggggtgctccggtggacaatcgccccgaactgccgttgggatgtcttgcagcctcgcgattaattcggtttttgtgccctccgtattttggcccagaatacgtagccaatcttttagggttgtcagcgaaaagtcgttcaggatgattttatcgtccattttggattattaatcccacttctgagattttagccgccgtttacagaagttaatattctaatacaatttcacgtgtctcttttattttgatctgtcctttagcttggttcaacagcgactgactgccgcgctctctgcagagtggcgagtcgattagtcgataagtttctcgataatatttgtatgttaaggatgggtgtatgagtgtataagcttatgactagattggctatgtataattaggtatgtatgactaagagtaaaggaagagggtagaaggagcagcctactacacaatagtgcaatcatattggaccgttctcttcagcggctaaatagttcaattttcaaaatgttaatttttccaatttcccctgagtttatgacaacaatttgatgctaatgttacggctatatgtttatatcagggggttattgcctcgcacaccacaccctgcatgctcatcgttactatatggaatgcaaccctcagagattttggcaaaataagaaattcgattttaatgtccatcatacgtatctttcaaacacccaacaagttatacaatttttttgcatacataatcatcaagccaaatttttaaccaaatcactaatcgcgctatctttgcagcgtccgccactatattgaggatggcaaagccacgctgctcgggatggcaatcctttattgttcttatggtctgcttgccaagctgtatatccttatcgcgcatagacgaaggcccgagcgtaaccggaaagccagccctagttcggacggaattgcgctttggacggaaccttgacccctctaaggtgcgagtgataaacttcaagtccagcacgggcgatgatgtagaaatcctggtcgggaaaaacagtcgcaaggcccgcgccgaggatgcggcagggtcctttttcgtgcgaagcgcggatgtcaagcggcgcctcgtaccgcccacaggcagggtaaacgctagtggtcgccagatcacctttcagcacagccctgcattactaaagcagagtgaactggctcaggagatgggcgcttatcaccagcgcaaggcagaggcggagcagcgccaagctaaacttatccagctgcagctgtccaaggcgcagaacaagatgatagagcaccaggcagtgcagggggacttccgccgtggtcgccagatcgctgttgacgtgtcctgggaaaactaccgccctcagcttccaacccagacaccaaaaattttccgcaagaacatttcgttggcagcagatcgccattggccaccattcgacatggacgattcggtggagatcctgccacgattgcagcgattgtcgcatcgacctgtgctctcctcttccagggacacggagttcgccgcttccgacatacaggagtacttagcgggcgaaagggatactagggcctatatcagcagtgtgtccaatcagggacaccgtccccacaacctcataaccaagcacaactacaactcgctaccgcaaaagtctaaatacgtgacctacttgccacactctgtagtagtgacggccagtgcgggcgttgccacgtccacgaccgcaatcccgcgccgtcaaactggcggccacgggagtccacaccacaaccctatcggccacggcatccaaagtgttgtagaaggccccgctgtaacgctaatcgagggtgtacgagttccggacagcgcggaggacaaggtgaagacctggcgcaatgctcgcgtcctgaacaatcagttggtgccatatccagagggttacacgccgccaagggcacagatgcccagtttcgaccgataggtgtggagttgatcagaaccactggtgtttggtgctcaacactaattgctatttattgaattgtatattgttaagctatttataaaacgttgatttaaagttgtcaatgaagacgttccgtactatctcataaagtcgttgacggtcagcacacggaggtccgacttgcgcaaaaggcgggcgcacaagggtgcgtcgaacgttaggtagacgacatgcattggctcagtctgcataaatccgttctcggacagggtgtagcggtatggcttgagcagctctaggtatacaaatacggcggggcgcttcacctgtatgctaatgctgacgctgttgcggacgacgtttgtggtgttaagacaggtacgggaggcaatctcgaactgcacagttagatattaggctggaggcattccaaaactgggttactcacctcaagcccggggtcctctattccgactgctccggcaatgctactgggaaagaagtgggtcctagagatcacatcctgcccgcggcgcaactgcagctccaaaaacgcgttagttctggtgaactctccttgcagcagatcggagatggcaatgaccttgtcgtactgcacgccattggggcgcagggtaacatcccaggaggtggactgccgaggcagaagctgggaccacaggtgaacgttagctacgacattcagttcccttgggtccacctccaattggtcacaaataagggagatgtttaacgaatccgtggacttttcgtaaagagcaacgattgaaataggcgctagaaaatcacgtgcccagtaatggagcagctaaaggaaggaatggctgtttataatatacaaataaaagtagtattttaatgtttttagggcctatagcttcattcatacgagacagatataactgttcctcggactccgtacaagcttcctatttgtggttgtatatccacccagtggcggttgcatagttcccctcgataagcataataaatt

SEQ ID NO: 35678 - DNA, 1125 bp, DROSOPHILA
atggtctgcttgccaagctgtatatccttatcgcgcatagacgaaggcccgagcgtaaccggaaagccagccctagttcggacggaattgcgctttggacggaaccttgacccctctaaggtgcgagtgataaacttcaagtccagcacgggcgatgatgtagaaatcctggtcgggaaaaacagtcgcaaggcccgcgccgaggatgcggcagggtcctttttcgtgcgaagcgcggatgtcaagcggcgcctcgtaccgcccacaggcagggtaaacgctagtggtcgccagatcacctttcagcacagccctgcattactaaagcagagtgaactggctcaggagatgggcgcttatcaccagcgcaaggcagaggcggagcagcgccaagctaaacttatccagctgcagctgtccaaggcgcagaacaagatgatagagcaccaggcagtgcagggggacttccgccgtggtcgccagatcgctgttgacgtgtcctgggaaaactaccgccctcagcttccaacccagacaccaaaaattttccgcaagaacatttcgttggcagcagatcgccattggccaccattcgacatggacgattcggtggagatcctgccacgattgcagcgattgtcgcatcgacctgtgctctcctcttccagggacacggagttcgccgcttccgacatacaggagtacttagcgggcgaaagggatactagggcctatatcagcagtgtgtccaatcagggacaccgtccccacaacctcataaccaagcacaactacaactcgctaccgcaaaagtctaaatacgtgacctacttgccacactctgtagtagtgacggccagtgcgggcgttgccacgtccacgaccgcaatcccgcgccgtcaaactggcggccacgggagtccacaccacaaccctatcggccacggcatccaaagtgttgtagaaggccccgctgtaacgctaatcgagggtgtacgagttccggacagcgcggaggacaaggtgaagacctggcgcaatgctcgcgtcctgaacaatcagttggtgccatatccagagggttacacgccgccaagggcacagatgcccagtttcgaccgatag

SEQ ID NO: 35679 - protein, 374 aa, DROSOPHILA
MVCLPSCISLSRIDEGPSVTGKPALVRTELRFGRNLDPSKVRVINFKSSTGDDVEILVGKNSRKARAEDAAGSFFVRSADVKRRLVPPTGRVNASGRQITFQHSPALLKQSELAQEMGAYHQRKAEAEQRQAKLIQLQLSKAQNKMIEHQAVQGDFRRGRQIAVDVSWENYRPQLPTQTPKIFRKNISLAADRHWPPFDMDDSVEILPRLQRLSHRPVLSSSRDTEFAASDIQEYLAGERDTRAYISSVSNQGHRPHNLITKHNYNSLPQKSKYVTYLPHSVVVTASAGVATSTTAIPRRQTGGHGSPHHNPIGHGIQSVVEGPAVTLIEGVRVPDSAEDKVKTWRNARVLNNQLVPYPEGYTPPRAQMPSFDR

SEQ ID NO: 35680 - DNA, 4000 bp, DROSOPHILA
cagtatgggatggaatcatataagatttttaaattatgtcggcaagcacattagttccaatttgtaaaggcttgggagccagtcaggagtacgtcatacgtacttcgaaatgatacctatttgaaatgaaagtgatgggccacagcatgttcggaataatattccgaagccggccataagttggaccagcttgaattggttggataaaggcagttacccattttccagtgccaaaatcatacaaacggattcttggacaaaccgcgcgcatgggtaacatttaaacattcaaatgtgtatccaattattcaaatccaatccaaatgccaatgaagttggggataatttaacggagataaattaaccaaattttgtaggtaccatcaatttaatttgatcatattatacagtgttatgaatttattttttcaagaacacacagcttggtaaaaagctagtggcttatctaatataaaaccgacctcagttccgatgattgttttcaaagcagtagataagacaaatcaacgaccaatttaacgaaatgaactcagcaaaataatagctttgaaagttgttaatgtctatataatcagccttcaattgaaatcatttaggctagtctgaattttactttatactagagtaacctactattctgggcgatgttattacatattgctgataaaacatcatttaatttttggggcacacttacttgtaagtcaatacgatctgcgcaatttctcacgatcccagtgcgatgattgaataaaagcgcttcgaacgacaagcatgcagagctctgcctcagacactaaacgaaagccaaagctcgtcttcgcttttataatatttttcttaagcccgaaacgcgcgcgcgtccggccgagatcgctctctggggttgctgggacgattgataagcaaagcttcgtgcgataagcagcaaactgaacttaaaacagagtgaaaataaatttaaaagttcccagaaaagtatgtatgtatactaatctatttattactattttaatttggtggtggtagtggtttagtaatccgcagcggtgttagataggtagtcgcgacgtcctatgtttgaagcttgcttgttctgaacagcctcaagttttgggcactccgtgatgcgatggcccagaccaccacagtaggtgcagccatgcgagtcacccaggtccaggtgctggtgttcggtctcaggtgccagttcgtccaagaagtccgggacctcttgcttgccctcgattagcaggtgcttcaggtcgagcagaaccgactgctcggtagtcttgtttatcagcgtcgtagccaatcccttagtgttggaacgacctgtgcggccaatacgatgcacatagttttcaatatcgtccggcatgtcgtagttaataacgtgttgcacgttagggaagtccaggcccttcgatgccacgtcggtggccaccagcacatcttttttgcccacgcggtaagcatcgactgcccgcgatcgttcttcctgatcctttccgccgtgaatagccaccgcctccacgcctttcaacagcagatactcatgtatgcagtctacatcctgcttcttctcagcaaaaatgagcacgggcggcgcggtcttctgtaggcagtccagcaaatataccacctttgcctcttgcttaacgtactcaacctgttgggtgacgttcattgacgcagcacctgcgcgacccacatttattgtgacaggcttcacgagagctgatcgagcaaagttctggatcttttttggcatggtggcagagaataaaagtgtctgtcgctggcctttgaagaaagagaatatcgtacgaacgtcctcttcaaatcccatgtcaatcatgcggtcagcctcgtccatgcacaagtaccggcacatgtccagcgtaaggatcttcttgtccagcatatccattagacgaccaggggtcgccaccacaatatgtacgccgcgtgagatgacgtcaagggcctcgctgaccggcaaaccacccatggccaggcaggaacgaatctcaggcattccgcatgcctggaggtgcttgctgtagtgttgaattatctcgtgtgtttgcttggccagttcgcgggacgggcaaatgatcaggccgtaggggccctcgttacgctcaaaaggcagactatactcctgttccagggcaaacatgatgactggcagcacgaagacaagcgtttttccagacccagtgaaggctattccaattaggtcgcggccggctagtacagtgggcaggccttgcacttggattggggtcgggttcttaatgcctttggccgctaagccgttaagtatacctttagggaacttcatttcccggaagctgcgaattggcgggctgggggtttctccctccactaggatcctcaactcgtggcgaacggcctcgcgctcttcctccgacatttcccgaatgtaacgcggcggtttccaagctgttttaataggctgctcgtactgaatccccttcgccaactctgccacacccataagggccttctgctgagcaatgctctccataatcttttcctcctctcgcagctgcttttcgacggcactcaactttttggcctcggcaattttcttcagttctgtgtgctggtccagcagactaatgttgtacttgcgtccccaggtctcgacatcgtgcgcaccctgcgagtcgtcttcattctcattctcgcttgacgacttgggctgggccgtttccgaaaccagttgcacgatcctgcccagctttatcatgtgctgcttcttccgctccttcaccggtacgtatggcacgtagtcctcgttgtccaggtcgccttcctccgaggacttagacgacctccgataccgctttacgtgcgccatagcattcgatctatatttctgatttttgtttgtttcgttttcgcctaatttgactacaacaaaggccaccgtacgacgttttaaattaggcgagcccgaaaaatactatattctaatgggtatcgattacagttattaaacagtgattccactgacagcttcttgcttatgatatattcatggcatgcagaccggataatagtttttttttcaatttgggcaaaatctttcgatttcgtttttaggtgctctggttttctgagtttgagattgagtctttctttttttgtgaaaaccaagcaacgtgaaaaatgcaacttttagcgcgaaggttgccatactgttggtgaaatataacaggcaggtaaaaatacttagtaaatatatttaaagcagggccaaaagtgctgttcgtaaataatgataattaattgaataacataagtggtcagagcgcagtgaatacgtaactgcgaacatcggaattaaaagtgccaaaaactctgtgtaaatcgcccagaaacattttatatgaacttatgcgtgctatcaaaagtgtttcaggaacatttctgttaaacggttagcgaacatgaatagtacagaatagtagaatatcgtattgatcggtttcggatcagtcgaatgcaatatatttttgtgtgcatttgggtatagatatatattctaagcagtgtgaatatgctattaaattcaataaattatatcgattgctgactttgaactaactgtctgcttctggctcaacttatcgatattggtatatcactcgcgacacaccaccattttcgacaagtagaaagcgaatgagcattgtctaaatttagctcggattttaagtgcaaggtacataagtgccgctgctatgtctatgtcaaaaacgactaacacctataaccggcagaactgggaagatgctgaattcccaattctgtgccaaacttgccttggcgacaatccgtacgtgcggatgattaaagagcggttcggcaaggaatgcaagatatgcacgcgtccattcacaatatttcgatggtgtcctggtgctcgtatgcgcttcaaaaa

SEQ ID NO: 35681 - DNA, 2000 bp, DROSOPHILA
atttaaaacgtcgtacggtggcctttgttgtagtcaaattaggcgaaaacgaaacaaacaaaaatcagaaatatagatcgaatgctatggcgcacgtaaagcggtatcggaggtcgtctaagtcctcggaggaaggcgacctggacaacgaggactacgtgccatacgtaccggtgaaggagcggaagaagcagcacatgataaagctgggcaggatcgtgcaactggtttcggaaacggcccagcccaagtcgtcaagcgagaatgagaatgaagacgactcgcagggtgcgcacgatgtcgagacctggggacgcaagtacaacattagtctgctggaccagcacacagaactgaagaaaattgccgaggccaaaaagttgagtgccgtcgaaaagcagctgcgagaggaggaaaagattatggagagcattgctcagcagaaggcccttatgggtgtggcagagttggcgaaggggattcagtacgagcagcctattaaaacagcttggaaaccgccgcgttacattcgggaaatgtcggaggaagagcgcgaggccgttcgccacgagttgaggatcctagtggagggagaaacccccagcccgccaattcgcagcttccgggaaatgaagttccctaaaggtatacttaacggcttagcggccaaaggcattaagaacccgaccccaatccaagtgcaaggcctgcccactgtactagccggccgcgacctaattggaatagccttcactgggtctggaaaaacgcttgtcttcgtgctgccagtcatcatgtttgccctggaacaggagtatagtctgccttttgagcgtaacgagggcccctacggcctgatcatttgcccgtcccgcgaactggccaagcaaacacacgagataattcaacactacagcaagcacctccaggcatgcggaatgcctgagattcgttcctgcctggccatgggtggtttgccggtcagcgaggcccttgacgtcatctcacgcggcgtacatattgtggtggcgacccctggtcgtctaatggatatgctggacaagaagatccttacgctggacatgtgccggtacttgtgcatggacgaggctgaccgcatgattgacatgggatttgaagaggacgttcgtacgatattctctttcttcaaaggccagcgacagacacttttattctctgccaccatgccaaaaaagatccagaactttgctcgatcagctctcgtgaagcctgtcacaataaatgtgggtcgcgcaggtgctgcgtcaatgaacgtcacccaacaggttgagtacgttaagcaagaggcaaaggtggtatatttgctggactgcctacagaagaccgcgccgcccgtgctcatttttgctgagaagaagcaggatgtagactgcatacatgagtatctgctgttgaaaggcgtggaggcggtggctattcacggcggaaaggatcaggaagaacgatcgcgggcagtcgatgcttaccgcgtgggcaaaaaagatgtgctggtggccaccgacgtggcatcgaagggcctggacttccctaacgtgcaacacgttattaactacgacatgccggacgatattgaaaactatgtgcatcgtattggccgcacaggtcgttccaacactaagggattggctacgacgctgataaacaagactaccgagcagtcggttctgctcgacctgaagcacctgctaatcgagggcaagcaagaggtcccggacttcttggacgaactggcacctgagaccgaacaccagcacctggacctgggtgactcgcatggctgcacctactgtggtggtctgggccatcgcatcacggagtgcccaaaacttgaggctgttcagaacaagcaagcttcaaacataggacgtcgcgactacctatctaacaccgctgcggattactaaaccactaccaccaccaaattaaaatagtaataaatagattagtatacatacata

SEQ ID NO: 35682 - protein, 619 aa, DROSOPHILA
MAHVKRYRRSSKSSEEGDLDNEDYVPYVPVKERKKQHMIKLGRIVQLVSETAQPKSSSENENEDDSQGAHDVETWGRKYNISLLDQHTELKKIAEAKKLSAVEKQLREEEKIMESIAQQKALMGVAELAKGIQYEQPIKTAWKPPRYIREMSEEEREAVRHELRILVEGETPSPPIRSFREMKFPKGILNGLAAKGIKNPTPIQVQGLPTVLAGRDLIGIAFTGSGKTLVFVLPVIMFALEQEYSLPFERNEGPYGLIICPSRELAKQTHEIIQHYSKHLQACGMPEIRSCLAMGGLPVSEALDVISRGVHIVVATPGRLMDMLDKKILTLDMCRYLCMDEADRMIDMGFEEDVRTIFSFFKGQRQTLLFSATMPKKIQNFARSALVKPVTINVGRAGAASMNVTQQVEYVKQEAKVVYLLDCLQKTAPPVLIFAEKKQDVDCIHEYLLLKGVEAVAIHGGKDQEERSRAVDAYRVGKKDVLVATDVASKGLDFPNVQHVINYDMPDDIENYVHRIGRTGRSNTKGLATTLINKTTEQSVLLDLKHLLIEGKQEVPDFLDELAPETEHQHLDLGDSHGCTYCGGLGHRITECPKLEAVQNKQASNIGRRDYLSNTAADY

SEQ ID NO: 35683 - DNA, 2488 bp, DROSOPHILA
gagggagtgcgaacgagtaatcgcaacattttttgggcggtttgttagcgttaaagtggaggcaaaacaacatgccaaaaacccatcgaaattggcaggaaaaaattaaaaatatgttatttacaattttgaacagtgtggcagcttttggcgatttgtgggtgtttgatctaatccatccagcttttatagaacagacagacatggccagatcgactcggccatatgaacgtcgagatctcaggaactatagaggctagagagttgagatcatgtacatagacgcagctttttgccttgttaaatttattaaatttttcctcagtttattctccaatatctatcgaaataccagaaaagtggtgaattgatctgagtaacgggtatctgatagtcggggaactcgactacagcattcttttttgttttttgtttttacgactattaaataccataagtaaggggaattttatggcctgtacagttttgtcggtacaaaaaacgttatctaagcatgcatagaattaaaaatgccgttatgttttttaaataaagttgtttagcacaaattattattatagaaaaaacagattatcattgattcctatacatattgtggtccccgtggcacattctttttcactacgtggactacgtccgtaatgattgcatatagtcacggctaatctcctttcccggtaacacgacattgaaacatagtgttataccaaaggcactaatgtcttcggttatatcttatactgattattttgcgtttaaactaatacttttcatgagaaggtggcaagtacgggcttgtcgacggtgcgtttaccttgcgaacgaacgcattcccgtcgtcagttccacttgaaatgaccttagacgcaaagtccaagacggagaccgaggctccaccgttgtagttggttgaaactcccggtagcaagtcatactgggcttggatagtgcgctgggcgttcttcgcgtcgctctgcgttcaatacttcacaaagtgaacctcgggcttgcggtttttgttgttgttacggatagtattcaggttggtgatccacttgccaatgttctcctgcttgttgagcacgtaaatggcgatgcggtcggcggacgcggaggtggccagctggagcgccgcctgctccagtcccttgttatcgggatccttgataaacaacacaagcacgttcttctttatcaagtgagcgatctgctcgttggggtggtcatcaaattcgtgctctggagcactgtaggtgaagaactccttggtgaactcgctggcgggtgctatagccttagaaagctgggcgcgccaatcagtcctccgtgaccattaccggcatacgatactggagtgtagtcgtacttccctcgcgccataggaaagaggcttagaatctgaaattgtttgatggttacacaaagtgcggaataaatgctttgtgttcttactagaaagatgcgcatcgtgaatacttgtatctacttgtgggtggctaaatacattttttgtgcgggcagttcggcagatgggtttcctttgccgaagattacatttggtcgacgcttttatacgttactgttccagtggcttttctgatgcaagcaatcatttgtaagatggagaatatgcaaatctattgaaattagggagacgtaggcctatttgataattcagcccattttcattgcatattatagagcaaataaggaagaagtaacattataaattataacaaaaagctttgagagtttgtgcggacatgccatataaaatgttctcctagtgttctttgtaatgataatttaaacacattttaaatattttatattctttattcgaatgttactttaaaaatgctctgatacttaattgtagtatttgtcattttatgcatttaggcgaacttcttcctcaacaaaaatgtgcacttcacgacatatactttcaattcatatttcttcaagtaaagtttccgactattttgttatcgtttttccattttttaaccttttgttcattagttgattaactaatgtactgcagaaacaacattcgcgtatttgaaccacctatttgctaaacaacttttaagtcattataagtaagccactaatattcacaaaggtgtcatataaaagcagtccggcggccatataactgaaaagcgagtttttttttttttttttggtaagtgtcatcagatgcttgctgtttttgataaaataactgaaaaacttgttttgcgtccaacagagcacacagtaaactctaaggggaagagcaaatcgatttttaacaaaaagaaaacattcacagaactacccattttatagttcatgttaagaatatttctcttgagaattgaaaaattcgctacatagaataatcactgtatatatatatatatgtacataatatacaatatatacatgtttcaagttcatcaaagcaagttatcacagg

SEQ ID NO: 35684 - DNA, 339 bp, DROSOPHILA
atgcgcatctttctactttctaaggctatagcacccgccagcgagttcaccaaggagttcttcacctacagtgctccagagcacgaatttgatgaccaccccaacgagcagatcgctcacttgataaagaagaacgtgcttgtgttgtttatcaaggatcccgataacaagggactggagcaggcggcgctccagctggccacctccgcgtccgccgaccgcatcgccatttacgtgctcaacaagcaggagaacattggcaagtggatcaccaacctgaatactatccgtaacaacaacaaaaaccgcaagcccgaggttcactttgtgaagtattga

SEQ ID NO: 35685 - protein, 112 aa, DROSOPHILA
MRIFLLSKAIAPASEFTKEFFTYSAPEHEFDDHPNEQIAHLIKKNVLVLFIKDPDNKGLEQAALQLATSASADRIAIYVLNKQENIGKWITNLNTIRNNNKNRKPEVHFVKY

SEQ ID NO: 35686 - DNA, 3148 bp, DROSOPHILA
aacacccgcatcgagcagatgctatgagacacacttgaagacctcatcagtatgcaacagacctcaaatgtttcgatttgcaagcttcatagaaatgtctatcgaccaattaatctggcttgtccaaatttttattacccgatttttaaccgatttacttcttttagctcaatatgaccagcttggcggaacatcacaggtttctgacgagggagttgcacccgttacatccgtgattggcgtactggacaaccagcgcaacaacggaatttcatccggacagttttctggctccttgccaaacagctacttgccaactaatctgcgtgcttaggtacaactccaaggccactgtcgtaattttaagacttgaactcttgtaatttacacatttagttaaataaagttcatattttgagctccgccttatgatagaaagcgactctgcagccatattcaaatatgaaatcgagtttcaatacttcaaagtaacaaaatagttttctatggaccatgttaccacatccattagtccaatgacagccatccaagccgaaaaccggtcgcataaattagcatgtgatttgacttacataacaacgattaagccacacgaaaacttgattattatggctgttggcttaatgccaaaagagatggtccaaactttcttgcgagaaagaagtcattgtcatagtctcttagcccattgaaacatttttgtgataaaaataaacagcgttttcataagaaacattaaactcaagctatgccttaaatgaaagattaattccaaatcctaaaacaaaacctatctaaaatattaaaaggattaaacttaaaaacgagtactagaaacagaaggctttttgggtttcgatttaaatttttttatatttctttcgactttcgacttttgcattaaaaataaattaaaatttactacagtatgatggttgatataaaacaatgaaagcgataggattcttactacaactttttaaaaagtctttgccggcacatacttccttgatggcgccgagggagcgaatgaggaggtggacttctgcacaaaggagctctgctgctggaccccctggaccccctggttaatagactgcagctgaacaatgggctgaccctgtggctggataatggttggcgcctgagagtggatgatggtttggccagcttgggagtgctggggcacaaagctgcccaggttaagggagccactcgaaacgctggcgatgggagccactccctcgtccgaaatgtgggttgcacctcccaaggcgtcgtactgggcctggatttcctgctgggcgcgctgggcctcttcctgggtcttgtacttaatgaagtagacctccggcttttgaaccttggcctcagactgggtaacctgcagctgctgctggatctcagtgagatcgggctttttagagagcacgtagatgacggtcttttcctcgttgcttgactgggcccgcttcagggccgcggcggtatatttcagattctgggaaggcgctttaatgaagacgatccggtagttcttgcggatgggcacattctccagaagtggctcgtcctgccgcagttcctcattctcctcgggggcggagtggatgtaaatgtccttggtaacgatagcggggcgctggacgaactgggtctgaagggcttgctgcggttgctgctggtacacgatttgctgaggctgctgctgcacagtgctgatcaggttttgctggggcgaagcagtaaggaaagtctcctttgggagtgagatcgacaaaggagcgggagcgggggcgggagcaggagcggcaacgatggtctgcacggcttgaatggctggctggacaccgatcgcgggctgagcaccggcctgtgggaaagatgggacggcgccacttgcgtatattccacttgacgaaatgggtgtcagaggacgaagattgccaatgggaagggctggcagctgaggttggtacttgtatccctgaggagctgttgctgtgagggccaccaggcactgcaagagcacattaagtgttagttgttgcggggatcgctcatgtgccagttgcttaccattagaacaacgaactgcttcattttcactttgaactgtctgagctgctagggtcgaatgatgccctgccttcccattgctatgtttttatatctgtccaggctggcatcgttttcccaataaatgaaaaaattattaggcactaccataaatcgtatgaatctattatagacttcacaacttcgaatatgtaacgtttcacattggcggttgccaaatcacagatccgtgtgcgcagatgcactgcttgaacagtccgggatcttatctaacttggcgaccaacgctgcgttcaaatttaaataatcgcttgagatccccattgtcaacgctgaatatatttatatgcaaaatattaataggtaaagcggttcgattgacaaaactgggataatatgaagaaagtaagttttatggacggaaacccaatttatacacattcatgaccaaaattgtgggaagcgatctatctgcatataaaattcgctttgtcgcagatgttgtataaatgaatttgttattaaacaagtcttttcaaaaatgcagaaaaaccaataagctcaaagatatttgtgaaaatatgctcagttcttcagaaatatagcacttcatggcttgaatccaacctggaatcatgctaacaatactattgttatgggtaatgcttttacttgctagttcaattgttttctacttgcacaacggtaattggaaataatgggcaataacggtaatggaaataacggacagacgttcatggccagatcgactcggctattgatcctcatcgagaatatatatactttatatggttggatctgcctgttacataattttcaacgaatctagtataccctttaactctacgagtaatataaatattcttataaagtgtggtaaagcgaattttggtcggcagttgagcgttaattaggcgagtcgatgtttttaagtttcaatcgaaaacattccaaaaatcaagttttcatttgacgaaatgaaataaattgcccgttactcagctagagggagtgcgaacgagtaatc

SEQ ID NO: 35687 - DNA, 1089 bp, DROSOPHILA
cagctcagacagttcaaagtgaaaatgaagcagttcgttgttctaatgtgcctggtggccctcacagcaacagctcctcagggatacaagtaccaacctcagctgccagcccttcccattggcaatcttcgtcctctgacacccatttcgtcaagtggaatatacgcaagtggcgccgtcccatctttcccacaggccggtgctcagcccgcgatcggtgtccagccagccattcaagccgtgcagaccatcgttgccgctcctgctcccgcccccgctcccgctcctttgtcgatctcactcccaaaggagactttccttactgcttcgccccagcaaaacctgatcagcactgtgcagcagcagcctcagcaaatcgtgtaccagcagcaaccgcagcaagcccttcagacccagttcgtccagcgccccgctatcgttaccaaggacatttacatccactccgcccccgaggagaatgaggaactgcggcaggacgagccacttctggagaatgtgcccatccgcaagaactaccggatcgtcttcattaaagcgccttcccagaatctgaaatataccgccgcggccctgaagcgggcccagtcaagcaacgaggaaaagaccgtcatctacgtgctctctaaaaagcccgatctcactgagatccagcagcagctgcaggttacccagtctgaggccaaggttcaaaagccggaggtctacttcattaagtacaagacccaggaagaggcccagcgcgcccagcaggaaatccaggcccagtacgacgccttgggaggtgcaacccacatttcggacgagggagtggctcccatcgccagcgtttcgagtggctcccttaacctgggcagctttgtgccccagcactcccaagctggccaaaccatcatccactctcaggcgccaaccattatccagccacagggtcagcccattgttcagctgcagtctattaaccagggggtccagggggtccagcagcagagctcctttgtgcagaagtccacctcctcattcgctccctcggcgccatcaaggaagtatgtgccggcaaagactttttaa
